United States Patent Application Publication US 2018/0236103 A1 - sequence listing, part 4

SEQ ID NO: 85850 - RNA, 20 nt, Artificial Sequence
  Synthetic
auaccacaucauccauauaa

SEQ ID NO: 85851 - RNA, 21 nt, Artificial Sequence
  Synthetic
aauaccacaucauccauauaa

SEQ ID NO: 85852 - RNA, 22 nt, Artificial Sequence
  Synthetic
caauaccacaucauccauauaa

SEQ ID NO: 85853 - RNA, 23 nt, Artificial Sequence
  Synthetic
ccaauaccacaucauccauauaa

SEQ ID NO: 85854 - RNA, 24 nt, Artificial Sequence
  Synthetic
cccaauaccacaucauccauauaa

SEQ ID NO: 85855 - RNA, 18 nt, Artificial Sequence
  Synthetic
  misc_feature (6)..(6): n is a, c, g, or u
gcauungguggucuauaa

SEQ ID NO: 85856 - RNA, 19 nt, Artificial Sequence
  Synthetic
  misc_feature (7)..(7): n is a, c, g, or u
ggcauungguggucuauaa

SEQ ID NO: 85857 - RNA, 20 nt, Artificial Sequence
  Synthetic
  misc_feature (8)..(8): n is a, c, g, or u
gggcauungguggucuauaa

SEQ ID NO: 85858 - RNA, 21 nt, Artificial Sequence
  Synthetic
  misc_feature (9)..(9): n is a, c, g, or u
ggggcauungguggucuauaa

SEQ ID NO: 85859 - RNA, 22 nt, Artificial Sequence
  Synthetic
  misc_feature (10)..(10): n is a, c, g, or u
aggggcauungguggucuauaa

SEQ ID NO: 85860 - RNA, 23 nt, Artificial Sequence
  Synthetic
  misc_feature (11)..(11): n is a, c, g, or u
uaggggcauungguggucuauaa

SEQ ID NO: 85861 - RNA, 24 nt, Artificial Sequence
  Synthetic
  misc_feature (12)..(12): n is a, c, g, or u
auaggggcauungguggucuauaa

SEQ ID NO: 85862 - RNA, 18 nt, Artificial Sequence
  Synthetic
aacaaauggcacuaguaa

SEQ ID NO: 85863 - RNA, 19 nt, Artificial Sequence
  Synthetic
gaacaaauggcacuaguaa

SEQ ID NO: 85864 - RNA, 20 nt, Artificial Sequence
  Synthetic
ugaacaaauggcacuaguaa

SEQ ID NO: 85865 - RNA, 21 nt, Artificial Sequence
  Synthetic
cugaacaaauggcacuaguaa

SEQ ID NO: 85866 - RNA, 22 nt, Artificial Sequence
  Synthetic
acugaacaaauggcacuaguaa

SEQ ID NO: 85867 - RNA, 23 nt, Artificial Sequence
  Synthetic
cacugaacaaauggcacuaguaa

SEQ ID NO: 85868 - RNA, 24 nt, Artificial Sequence
  Synthetic
ccacugaacaaauggcacuaguaa

SEQ ID NO: 85869 - RNA, 18 nt, Artificial Sequence
  Synthetic
agcgccgacgggacguaa

SEQ ID NO: 85870 - RNA, 19 nt, Artificial Sequence
  Synthetic
cagcgccgacgggacguaa

SEQ ID NO: 85871 - RNA, 20 nt, Artificial Sequence
  Synthetic
ucagcgccgacgggacguaa

SEQ ID NO: 85872 - RNA, 18 nt, Artificial Sequence
  Synthetic
gacggggaguccgcguaa

SEQ ID NO: 85873 - RNA, 19 nt, Artificial Sequence
  Synthetic
agacggggaguccgcguaa

SEQ ID NO: 85874 - RNA, 20 nt, Artificial Sequence
  Synthetic
cagacggggaguccgcguaa

SEQ ID NO: 85875 - RNA, 18 nt, Artificial Sequence
  Synthetic
aauugguaacagcgguaa

SEQ ID NO: 85876 - RNA, 19 nt, Artificial Sequence
  Synthetic
aaauugguaacagcgguaa

SEQ ID NO: 85877 - RNA, 20 nt, Artificial Sequence
  Synthetic
aaaauugguaacagcgguaa

SEQ ID NO: 85878 - RNA, 21 nt, Artificial Sequence
  Synthetic
gaaaauugguaacagcgguaa

SEQ ID NO: 85879 - RNA, 22 nt, Artificial Sequence
  Synthetic
agaaaauugguaacagcgguaa

SEQ ID NO: 85880 - RNA, 23 nt, Artificial Sequence
  Synthetic
aagaaaauugguaacagcgguaa

SEQ ID NO: 85881 - RNA, 24 nt, Artificial Sequence
  Synthetic
aaagaaaauugguaacagcgguaa

SEQ ID NO: 85882 - RNA, 18 nt, Artificial Sequence
  Synthetic
gaaaaaccccgccuguaa

SEQ ID NO: 85883 - RNA, 19 nt, Artificial Sequence
  Synthetic
agaaaaaccccgccuguaa

SEQ ID NO: 85884 - RNA, 20 nt, Artificial Sequence
  Synthetic
aagaaaaaccccgccuguaa

SEQ ID NO: 85885 - RNA, 21 nt, Artificial Sequence
  Synthetic
caagaaaaaccccgccuguaa

SEQ ID NO: 85886 - RNA, 22 nt, Artificial Sequence
  Synthetic
acaagaaaaaccccgccuguaa

SEQ ID NO: 85887 - RNA, 23 nt, Artificial Sequence
  Synthetic
aacaagaaaaaccccgccuguaa

SEQ ID NO: 85888 - RNA, 24 nt, Artificial Sequence
  Synthetic
caacaagaaaaaccccgccuguaa

SEQ ID NO: 85889 - RNA, 18 nt, Artificial Sequence
  Synthetic
gauaaccacauuguguaa

SEQ ID NO: 85890 - RNA, 19 nt, Artificial Sequence
  Synthetic
ggauaaccacauuguguaa

SEQ ID NO: 85891 - RNA, 20 nt, Artificial Sequence
  Synthetic
aggauaaccacauuguguaa

SEQ ID NO: 85892 - RNA, 21 nt, Artificial Sequence
  Synthetic
caggauaaccacauuguguaa

SEQ ID NO: 85893 - RNA, 22 nt, Artificial Sequence
  Synthetic
gcaggauaaccacauuguguaa

SEQ ID NO: 85894 - RNA, 23 nt, Artificial Sequence
  Synthetic
agcaggauaaccacauuguguaa

SEQ ID NO: 85895 - RNA, 24 nt, Artificial Sequence
  Synthetic
aagcaggauaaccacauuguguaa

SEQ ID NO: 85896 - RNA, 18 nt, Artificial Sequence
  Synthetic
cacagaaaggccuuguaa

SEQ ID NO: 85897 - RNA, 19 nt, Artificial Sequence
  Synthetic
acacagaaaggccuuguaa

SEQ ID NO: 85898 - RNA, 20 nt, Artificial Sequence
  Synthetic
uacacagaaaggccuuguaa

SEQ ID NO: 85899 - RNA, 21 nt, Artificial Sequence
  Synthetic
uuacacagaaaggccuuguaa

SEQ ID NO: 85900 - RNA, 22 nt, Artificial Sequence
  Synthetic
uuuacacagaaaggccuuguaa

SEQ ID NO: 85901 - RNA, 23 nt, Artificial Sequence
  Synthetic
guuuacacagaaaggccuuguaa

SEQ ID NO: 85902 - RNA, 24 nt, Artificial Sequence
  Synthetic
uguuuacacagaaaggccuuguaa

SEQ ID NO: 85903 - RNA, 18 nt, Artificial Sequence
  Synthetic
  misc_feature (1)..(1): n is a, c, g, or u
  misc_feature (10)..(10): n is a, c, g, or u
ngcauacaanggcauuaa

SEQ ID NO: 85904 - RNA, 19 nt, Artificial Sequence
  Synthetic
  misc_feature (2)..(2): n is a, c, g, or u
  misc_feature (11)..(11): n is a, c, g, or u
angcauacaanggcauuaa

SEQ ID NO: 85905 - RNA, 20 nt, Artificial Sequence
  Synthetic
  misc_feature (3)..(3): n is a, c, g, or u
  misc_feature (12)..(12): n is a, c, g, or u
cangcauacaanggcauuaa

SEQ ID NO: 85906 - RNA, 21 nt, Artificial Sequence
  Synthetic
  misc_feature (4)..(4): n is a, c, g, or u
  misc_feature (13)..(13): n is a, c, g, or u
acangcauacaanggcauuaa

SEQ ID NO: 85907 - RNA, 22 nt, Artificial Sequence
  Synthetic
  misc_feature (5)..(5): n is a, c, g, or u
  misc_feature (14)..(14): n is a, c, g, or u
uacangcauacaanggcauuaa

SEQ ID NO: 85908 - RNA, 23 nt, Artificial Sequence
  Synthetic
  misc_feature (6)..(6): n is a, c, g, or u
  misc_feature (15)..(15): n is a, c, g, or u
auacangcauacaanggcauuaa

SEQ ID NO: 85909 - RNA, 24 nt, Artificial Sequence
  Synthetic
  misc_feature (7)..(7): n is a, c, g, or u
  misc_feature (16)..(16): n is a, c, g, or u
aauacangcauacaanggcauuaa

SEQ ID NO: 85910 - RNA, 18 nt, Artificial Sequence
  Synthetic
aaucaauaggccuguuaa

SEQ ID NO: 85911 - RNA, 19 nt, Artificial Sequence
  Synthetic
caaucaauaggccuguuaa

SEQ ID NO: 85912 - RNA, 20 nt, Artificial Sequence
  Synthetic
ccaaucaauaggccuguuaa

SEQ ID NO: 85913 - RNA, 21 nt, Artificial Sequence
  Synthetic
uccaaucaauaggccuguuaa

SEQ ID NO: 85914 - RNA, 22 nt, Artificial Sequence
  Synthetic
uuccaaucaauaggccuguuaa

SEQ ID NO: 85915 - RNA, 23 nt, Artificial Sequence
  Synthetic
uuuccaaucaauaggccuguuaa

SEQ ID NO: 85916 - RNA, 24 nt, Artificial Sequence
  Synthetic
cuuuccaaucaauaggccuguuaa

SEQ ID NO: 85917 - RNA, 18 nt, Artificial Sequence
  Synthetic
  misc_feature (14)..(14): n is a, c, g, or u
acuccucccagucnuuaa

SEQ ID NO: 85918 - RNA, 19 nt, Artificial Sequence
  Synthetic
  misc_feature (15)..(15): n is a, c, g, or u
aacuccucccagucnuuaa

SEQ ID NO: 85919 - RNA, 20 nt, Artificial Sequence
  Synthetic
  misc_feature (16)..(16): n is a, c, g, or u
caacuccucccagucnuuaa

SEQ ID NO: 85920 - RNA, 21 nt, Artificial Sequence
  Synthetic
  misc_feature (17)..(17): n is a, c, g, or u
ccaacuccucccagucnuuaa

SEQ ID NO: 85921 - RNA, 22 nt, Artificial Sequence
  Synthetic
  misc_feature (18)..(18): n is a, c, g, or u
cccaacuccucccagucnuuaa

SEQ ID NO: 85922 - RNA, 23 nt, Artificial Sequence
  Synthetic
  misc_feature (19)..(19): n is a, c, g, or u
ccccaacuccucccagucnuuaa

SEQ ID NO: 85923 - RNA, 24 nt, Artificial Sequence
  Synthetic
  misc_feature (20)..(20): n is a, c, g, or u
cccccaacuccucccagucnuuaa

SEQ ID NO: 85924 - RNA, 18 nt, Artificial Sequence
  Synthetic
ccugcugcgagcaaaaca

SEQ ID NO: 85925 - RNA, 19 nt, Artificial Sequence
  Synthetic
accugcugcgagcaaaaca

SEQ ID NO: 85926 - RNA, 20 nt, Artificial Sequence
  Synthetic
gaccugcugcgagcaaaaca

SEQ ID NO: 85927 - RNA, 21 nt, Artificial Sequence
  Synthetic
agaccugcugcgagcaaaaca

SEQ ID NO: 85928 - RNA, 22 nt, Artificial Sequence
  Synthetic
cagaccugcugcgagcaaaaca

SEQ ID NO: 85929 - RNA, 23 nt, Artificial Sequence
  Synthetic
ccagaccugcugcgagcaaaaca

SEQ ID NO: 85930 - RNA, 24 nt, Artificial Sequence
  Synthetic
uccagaccugcugcgagcaaaaca

SEQ ID NO: 85931 - RNA, 18 nt, Artificial Sequence
  Synthetic
auaacugaaagccaaaca

SEQ ID NO: 85932 - RNA, 19 nt, Artificial Sequence
  Synthetic
uauaacugaaagccaaaca

SEQ ID NO: 85933 - RNA, 20 nt, Artificial Sequence
  Synthetic
auauaacugaaagccaaaca

SEQ ID NO: 85934 - RNA, 21 nt, Artificial Sequence
  Synthetic
cauauaacugaaagccaaaca

SEQ ID NO: 85935 - RNA, 22 nt, Artificial Sequence
  Synthetic
ccauauaacugaaagccaaaca

SEQ ID NO: 85936 - RNA, 23 nt, Artificial Sequence
  Synthetic
uccauauaacugaaagccaaaca

SEQ ID NO: 85937 - RNA, 24 nt, Artificial Sequence
  Synthetic
auccauauaacugaaagccaaaca

SEQ ID NO: 85938 - RNA, 18 nt, Artificial Sequence
  Synthetic
ggguugcgucagcaaaca

SEQ ID NO: 85939 - RNA, 19 nt, Artificial Sequence
  Synthetic
gggguugcgucagcaaaca

SEQ ID NO: 85940 - RNA, 20 nt, Artificial Sequence
  Synthetic
ggggguugcgucagcaaaca

SEQ ID NO: 85941 - RNA, 21 nt, Artificial Sequence
  Synthetic
uggggguugcgucagcaaaca

SEQ ID NO: 85942 - RNA, 22 nt, Artificial Sequence
  Synthetic
guggggguugcgucagcaaaca

SEQ ID NO: 85943 - RNA, 23 nt, Artificial Sequence
  Synthetic
aguggggguugcgucagcaaaca

SEQ ID NO: 85944 - RNA, 24 nt, Artificial Sequence
  Synthetic
caguggggguugcgucagcaaaca

SEQ ID NO: 85945 - RNA, 18 nt, Artificial Sequence
  Synthetic
gccgacgggacguaaaca

SEQ ID NO: 85946 - RNA, 19 nt, Artificial Sequence
  Synthetic
cgccgacgggacguaaaca

SEQ ID NO: 85947 - RNA, 20 nt, Artificial Sequence
  Synthetic
gcgccgacgggacguaaaca

SEQ ID NO: 85948 - RNA, 18 nt, Artificial Sequence
  Synthetic
aguccagaagaaccaaca

SEQ ID NO: 85949 - RNA, 19 nt, Artificial Sequence
  Synthetic
uaguccagaagaaccaaca

SEQ ID NO: 85950 - RNA, 20 nt, Artificial Sequence
  Synthetic
auaguccagaagaaccaaca

SEQ ID NO: 85951 - RNA, 21 nt, Artificial Sequence
  Synthetic
gauaguccagaagaaccaaca

SEQ ID NO: 85952 - RNA, 22 nt, Artificial Sequence
  Synthetic
ugauaguccagaagaaccaaca

SEQ ID NO: 85953 - RNA, 23 nt, Artificial Sequence
  Synthetic
uugauaguccagaagaaccaaca

SEQ ID NO: 85954 - RNA, 24 nt, Artificial Sequence
  Synthetic
cuugauaguccagaagaaccaaca

SEQ ID NO: 85955 - RNA, 18 nt, Artificial Sequence
  Synthetic
agguuugguacagcaaca

SEQ ID NO: 85956 - RNA, 19 nt, Artificial Sequence
  Synthetic
aagguuugguacagcaaca

SEQ ID NO: 85957 - RNA, 20 nt, Artificial Sequence
  Synthetic
gaagguuugguacagcaaca

SEQ ID NO: 85958 - RNA, 21 nt, Artificial Sequence
  Synthetic
cgaagguuugguacagcaaca

SEQ ID NO: 85959 - RNA, 22 nt, Artificial Sequence
  Synthetic
ccgaagguuugguacagcaaca

SEQ ID NO: 85960 - RNA, 23 nt, Artificial Sequence
  Synthetic
uccgaagguuugguacagcaaca

SEQ ID NO: 85961 - RNA, 24 nt, Artificial Sequence
  Synthetic
guccgaagguuugguacagcaaca

SEQ ID NO: 85962 - RNA, 18 nt, Artificial Sequence
  Synthetic
ugaggauucuugucaaca

SEQ ID NO: 85963 - RNA, 19 nt, Artificial Sequence
  Synthetic
gugaggauucuugucaaca

SEQ ID NO: 85964 - RNA, 20 nt, Artificial Sequence
  Synthetic
ugugaggauucuugucaaca

SEQ ID NO: 85965 - RNA, 21 nt, Artificial Sequence
  Synthetic
uugugaggauucuugucaaca

SEQ ID NO: 85966 - RNA, 22 nt, Artificial Sequence
  Synthetic
auugugaggauucuugucaaca

SEQ ID NO: 85967 - RNA, 23 nt, Artificial Sequence
  Synthetic
uauugugaggauucuugucaaca

SEQ ID NO: 85968 - RNA, 24 nt, Artificial Sequence
  Synthetic
guauugugaggauucuugucaaca

SEQ ID NO: 85969 - RNA, 18 nt, Artificial Sequence
  Synthetic
ccuacgaaccacugaaca

SEQ ID NO: 85970 - RNA, 19 nt, Artificial Sequence
  Synthetic
cccuacgaaccacugaaca

SEQ ID NO: 85971 - RNA, 20 nt, Artificial Sequence
  Synthetic
gcccuacgaaccacugaaca

SEQ ID NO: 85972 - RNA, 18 nt, Artificial Sequence
  Synthetic
agcuuggaggcuugaaca

SEQ ID NO: 85973 - RNA, 19 nt, Artificial Sequence
  Synthetic
cagcuuggaggcuugaaca

SEQ ID NO: 85974 - RNA, 20 nt, Artificial Sequence
  Synthetic
acagcuuggaggcuugaaca

SEQ ID NO: 85975 - RNA, 21 nt, Artificial Sequence
  Synthetic
cacagcuuggaggcuugaaca

SEQ ID NO: 85976 - RNA, 22 nt, Artificial Sequence
  Synthetic
gcacagcuuggaggcuugaaca

SEQ ID NO: 85977 - RNA, 23 nt, Artificial Sequence
  Synthetic
ggcacagcuuggaggcuugaaca

SEQ ID NO: 85978 - RNA, 24 nt, Artificial Sequence
  Synthetic
aggcacagcuuggaggcuugaaca

SEQ ID NO: 85979 - RNA, 18 nt, Artificial Sequence
  Synthetic
guccaaggaauacuaaca

SEQ ID NO: 85980 - RNA, 19 nt, Artificial Sequence
  Synthetic
aguccaaggaauacuaaca

SEQ ID NO: 85981 - RNA, 20 nt, Artificial Sequence
  Synthetic
gaguccaaggaauacuaaca

SEQ ID NO: 85982 - RNA, 21 nt, Artificial Sequence
  Synthetic
ugaguccaaggaauacuaaca

SEQ ID NO: 85983 - RNA, 22 nt, Artificial Sequence
  Synthetic
augaguccaaggaauacuaaca

SEQ ID NO: 85984 - RNA, 23 nt, Artificial Sequence
  Synthetic
uaugaguccaaggaauacuaaca

SEQ ID NO: 85985 - RNA, 24 nt, Artificial Sequence
  Synthetic
uuaugaguccaaggaauacuaaca

SEQ ID NO: 85986 - RNA, 18 nt, Artificial Sequence
  Synthetic
uaaaacgccgcagacaca

SEQ ID NO: 85987 - RNA, 19 nt, Artificial Sequence
  Synthetic
auaaaacgccgcagacaca

SEQ ID NO: 85988 - RNA, 20 nt, Artificial Sequence
  Synthetic
gauaaaacgccgcagacaca

SEQ ID NO: 85989 - RNA, 21 nt, Artificial Sequence
  Synthetic
ugauaaaacgccgcagacaca

SEQ ID NO: 85990 - RNA, 22 nt, Artificial Sequence
  Synthetic
augauaaaacgccgcagacaca

SEQ ID NO: 85991 - RNA, 23 nt, Artificial Sequence
  Synthetic
gaugauaaaacgccgcagacaca

SEQ ID NO: 85992 - RNA, 24 nt, Artificial Sequence
  Synthetic
agaugauaaaacgccgcagacaca

SEQ ID NO: 85993 - RNA, 18 nt, Artificial Sequence
  Synthetic
ucagguauuguuuacaca

SEQ ID NO: 85994 - RNA, 19 nt, Artificial Sequence
  Synthetic
uucagguauuguuuacaca

SEQ ID NO: 85995 - RNA, 20 nt, Artificial Sequence
  Synthetic
guucagguauuguuuacaca

SEQ ID NO: 85996 - RNA, 21 nt, Artificial Sequence
  Synthetic
gguucagguauuguuuacaca

SEQ ID NO: 85997 - RNA, 22 nt, Artificial Sequence
  Synthetic
agguucagguauuguuuacaca

SEQ ID NO: 85998 - RNA, 23 nt, Artificial Sequence
  Synthetic
aagguucagguauuguuuacaca

SEQ ID NO: 85999 - RNA, 24 nt, Artificial Sequence
  Synthetic
aaagguucagguauuguuuacaca

SEQ ID NO: 86000 - RNA, 18 nt, Artificial Sequence
  Synthetic
ggcagaugagaaggcaca

SEQ ID NO: 86001 - RNA, 19 nt, Artificial Sequence
  Synthetic
cggcagaugagaaggcaca

SEQ ID NO: 86002 - RNA, 20 nt, Artificial Sequence
  Synthetic
ccggcagaugagaaggcaca

SEQ ID NO: 86003 - RNA, 21 nt, Artificial Sequence
  Synthetic
uccggcagaugagaaggcaca

SEQ ID NO: 86004 - RNA, 22 nt, Artificial Sequence
  Synthetic
guccggcagaugagaaggcaca

SEQ ID NO: 86005 - RNA, 23 nt, Artificial Sequence
  Synthetic
gguccggcagaugagaaggcaca

SEQ ID NO: 86006 - RNA, 24 nt, Artificial Sequence
  Synthetic
cgguccggcagaugagaaggcaca

SEQ ID NO: 86007 - RNA, 18 nt, Artificial Sequence
  Synthetic
aauguauacccaaagaca

SEQ ID NO: 86008 - RNA, 19 nt, Artificial Sequence
  Synthetic
aaauguauacccaaagaca

SEQ ID NO: 86009 - RNA, 20 nt, Artificial Sequence
  Synthetic
uaaauguauacccaaagaca

SEQ ID NO: 86010 - RNA, 21 nt, Artificial Sequence
  Synthetic
uuaaauguauacccaaagaca

SEQ ID NO: 86011 - RNA, 22 nt, Artificial Sequence
  Synthetic
uuuaaauguauacccaaagaca

SEQ ID NO: 86012 - RNA, 23 nt, Artificial Sequence
  Synthetic
guuuaaauguauacccaaagaca

SEQ ID NO: 86013 - RNA, 24 nt, Artificial Sequence
  Synthetic
gguuuaaauguauacccaaagaca

SEQ ID NO: 86014 - RNA, 18 nt, Artificial Sequence
  Synthetic
uucucaaagguggagaca

SEQ ID NO: 86015 - RNA, 19 nt, Artificial Sequence
  Synthetic
uuucucaaagguggagaca

SEQ ID NO: 86016 - RNA, 20 nt, Artificial Sequence
  Synthetic
guuucucaaagguggagaca

SEQ ID NO: 86017 - RNA, 21 nt, Artificial Sequence
  Synthetic
uguuucucaaagguggagaca

SEQ ID NO: 86018 - RNA, 22 nt, Artificial Sequence
  Synthetic
guguuucucaaagguggagaca

SEQ ID NO: 86019 - RNA, 23 nt, Artificial Sequence
  Synthetic
aguguuucucaaagguggagaca

SEQ ID NO: 86020 - RNA, 24 nt, Artificial Sequence
  Synthetic
gaguguuucucaaagguggagaca

SEQ ID NO: 86021 - RNA, 18 nt, Artificial Sequence
  Synthetic
uccuggaauuagaggaca

SEQ ID NO: 86022 - RNA, 19 nt, Artificial Sequence
  Synthetic
auccuggaauuagaggaca

SEQ ID NO: 86023 - RNA, 20 nt, Artificial Sequence
  Synthetic
gauccuggaauuagaggaca

SEQ ID NO: 86024 - RNA, 21 nt, Artificial Sequence
  Synthetic
  misc_feature (1)..(1): n is a, c, g, or u
ngauccuggaauuagaggaca

SEQ ID NO: 86025 - RNA, 22 nt, Artificial Sequence
  Synthetic
  misc_feature (2)..(2): n is a, c, g, or u
angauccuggaauuagaggaca

SEQ ID NO: 86026 - RNA, 23 nt, Artificial Sequence
  Synthetic
  misc_feature (3)..(3): n is a, c, g, or u
gangauccuggaauuagaggaca

SEQ ID NO: 86027 - RNA, 24 nt, Artificial Sequence
  Synthetic
  misc_feature (4)..(4): n is a, c, g, or u
ugangauccuggaauuagaggaca

SEQ ID NO: 86028 - RNA, 18 nt, Artificial Sequence
  Synthetic
  misc_feature (15)..(15): n is a, c, g, or u
uauuugcgggagagnaca

SEQ ID NO: 86029 - RNA, 19 nt, Artificial Sequence
  Synthetic
  misc_feature (16)..(16): n is a, c, g, or u
auauuugcgggagagnaca

SEQ ID NO: 86030 - RNA, 20 nt, Artificial Sequence
  Synthetic
  misc_feature (17)..(17): n is a, c, g, or u
uauauuugcgggagagnaca

SEQ ID NO: 86031 - RNA, 21 nt, Artificial Sequence
  Synthetic
  misc_feature (18)..(18): n is a, c, g, or u
guauauuugcgggagagnaca

SEQ ID NO: 86032 - RNA, 22 nt, Artificial Sequence
  Synthetic
  misc_feature (19)..(19): n is a, c, g, or u
uguauauuugcgggagagnaca

SEQ ID NO: 86033 - RNA, 23 nt, Artificial Sequence
  Synthetic
  misc_feature (20)..(20): n is a, c, g, or u
auguauauuugcgggagagnaca

SEQ ID NO: 86034 - RNA, 24 nt, Artificial Sequence
  Synthetic
  misc_feature (21)..(21): n is a, c, g, or u
gauguauauuugcgggagagnaca

SEQ ID NO: 86035 - RNA, 18 nt, Artificial Sequence
  Synthetic
  misc_feature (3)..(3): n is a, c, g, or u
  misc_feature (15)..(15): n is a, c, g, or u
ggnuuaaagacaggnaca

SEQ ID NO: 86036 - RNA, 19 nt, Artificial Sequence
  Synthetic
  misc_feature (4)..(4): n is a, c, g, or u
  misc_feature (16)..(16): n is a, c, g, or u
aggnuuaaagacaggnaca

SEQ ID NO: 86037 - RNA, 20 nt, Artificial Sequence
  Synthetic
  misc_feature (5)..(5): n is a, c, g, or u
  misc_feature (17)..(17): n is a, c, g, or u
gaggnuuaaagacaggnaca

SEQ ID NO: 86038 - RNA, 21 nt, Artificial Sequence
  Synthetic
  misc_feature (6)..(6): n is a, c, g, or u
  misc_feature (18)..(18): n is a, c, g, or u
ugaggnuuaaagacaggnaca

SEQ ID NO: 86039 - RNA, 22 nt, Artificial Sequence
  Synthetic
  misc_feature (7)..(7): n is a, c, g, or u
  misc_feature (19)..(19): n is a, c, g, or u
augaggnuuaaagacaggnaca

SEQ ID NO: 86040 - RNA, 23 nt, Artificial Sequence
  Synthetic
  misc_feature (8)..(8): n is a, c, g, or u
  misc_feature (20)..(20): n is a, c, g, or u
aaugaggnuuaaagacaggnaca

SEQ ID NO: 86041 - RNA, 24 nt, Artificial Sequence
  Synthetic
  misc_feature (9)..(9): n is a, c, g, or u
  misc_feature (21)..(21): n is a, c, g, or u
caaugaggnuuaaagacaggnaca

SEQ ID NO: 86042 - RNA, 18 nt, Artificial Sequence
  Synthetic
agcaacaggagggauaca

SEQ ID NO: 86043 - RNA, 19 nt, Artificial Sequence
  Synthetic
cagcaacaggagggauaca

SEQ ID NO: 86044 - RNA, 20 nt, Artificial Sequence
  Synthetic
acagcaacaggagggauaca

SEQ ID NO: 86045 - RNA, 21 nt, Artificial Sequence
  Synthetic
uacagcaacaggagggauaca

SEQ ID NO: 86046 - RNA, 22 nt, Artificial Sequence
  Synthetic
guacagcaacaggagggauaca

SEQ ID NO: 86047 - RNA, 23 nt, Artificial Sequence
  Synthetic
gguacagcaacaggagggauaca

SEQ ID NO: 86048 - RNA, 24 nt, Artificial Sequence
  Synthetic
ugguacagcaacaggagggauaca

SEQ ID NO: 86049 - RNA, 18 nt, Artificial Sequence
  Synthetic
guucagguauuguuuaca

SEQ ID NO: 86050 - RNA, 19 nt, Artificial Sequence
  Synthetic
gguucagguauuguuuaca

SEQ ID NO: 86051 - RNA, 20 nt, Artificial Sequence
  Synthetic
agguucagguauuguuuaca

SEQ ID NO: 86052 - RNA, 21 nt, Artificial Sequence
  Synthetic
aagguucagguauuguuuaca

SEQ ID NO: 86053 - RNA, 22 nt, Artificial Sequence
  Synthetic
aaagguucagguauuguuuaca

SEQ ID NO: 86054 - RNA, 23 nt, Artificial Sequence
  Synthetic
uaaagguucagguauuguuuaca

SEQ ID NO: 86055 - RNA, 24 nt, Artificial Sequence
  Synthetic
guaaagguucagguauuguuuaca

SEQ ID NO: 86056 - RNA, 18 nt, Artificial Sequence
  Synthetic
gauaguccagaagaacca

SEQ ID NO: 86057 - RNA, 19 nt, Artificial Sequence
  Synthetic
ugauaguccagaagaacca

SEQ ID NO: 86058 - RNA, 20 nt, Artificial Sequence
  Synthetic
uugauaguccagaagaacca

SEQ ID NO: 86059 - RNA, 21 nt, Artificial Sequence
  Synthetic
cuugauaguccagaagaacca

SEQ ID NO: 86060 - RNA, 22 nt, Artificial Sequence
  Synthetic
ccuugauaguccagaagaacca

SEQ ID NO: 86061 - RNA, 23 nt, Artificial Sequence
  Synthetic
accuugauaguccagaagaacca

SEQ ID NO: 86062 - RNA, 24 nt, Artificial Sequence
  Synthetic
uaccuugauaguccagaagaacca

SEQ ID NO: 86063 - RNA, 18 nt, Artificial Sequence
  Synthetic
ggaaagcccuacgaacca

SEQ ID NO: 86064 - RNA, 19 nt, Artificial Sequence
  Synthetic
gggaaagcccuacgaacca

SEQ ID NO: 86065 - RNA, 20 nt, Artificial Sequence
  Synthetic
ggggaaagcccuacgaacca

SEQ ID NO: 86066 - RNA, 21 nt, Artificial Sequence
  Synthetic
gggggaaagcccuacgaacca

SEQ ID NO: 86067 - RNA, 22 nt, Artificial Sequence
  Synthetic
ugggggaaagcccuacgaacca

SEQ ID NO: 86068 - RNA, 23 nt, Artificial Sequence
  Synthetic
gugggggaaagcccuacgaacca

SEQ ID NO: 86069 - RNA, 24 nt, Artificial Sequence
  Synthetic
agugggggaaagcccuacgaacca

SEQ ID NO: 86070 - RNA, 18 nt, Artificial Sequence
  Synthetic
ccugaacuggagccacca

SEQ ID NO: 86071 - RNA, 19 nt, Artificial Sequence
  Synthetic
uccugaacuggagccacca

SEQ ID NO: 86072 - RNA, 20 nt, Artificial Sequence
  Synthetic
uuccugaacuggagccacca

SEQ ID NO: 86073 - RNA, 21 nt, Artificial Sequence
  Synthetic
guuccugaacuggagccacca

SEQ ID NO: 86074 - RNA, 22 nt, Artificial Sequence
  Synthetic
uguuccugaacuggagccacca

SEQ ID NO: 86075 - RNA, 23 nt, Artificial Sequence
  Synthetic
cuguuccugaacuggagccacca

SEQ ID NO: 86076 - RNA, 24 nt, Artificial Sequence
  Synthetic
acuguuccugaacuggagccacca

SEQ ID NO: 86077 - RNA, 18 nt, Artificial Sequence
  Synthetic
aaggggcagcaaaaccca

SEQ ID NO: 86078 - RNA, 19 nt, Artificial Sequence
  Synthetic
aaaggggcagcaaaaccca

SEQ ID NO: 86079 - RNA, 20 nt, Artificial Sequence
  Synthetic
aaaaggggcagcaaaaccca

SEQ ID NO: 86080 - RNA, 21 nt, Artificial Sequence
  Synthetic
uaaaaggggcagcaaaaccca

SEQ ID NO: 86081 - RNA, 22 nt, Artificial Sequence
  Synthetic
guaaaaggggcagcaaaaccca

SEQ ID NO: 86082 - RNA, 23 nt, Artificial Sequence
  Synthetic
uguaaaaggggcagcaaaaccca

SEQ ID NO: 86083 - RNA, 24 nt, Artificial Sequence
  Synthetic
guguaaaaggggcagcaaaaccca

SEQ ID NO: 86084 - RNA, 18 nt, Artificial Sequence
  Synthetic
  misc_feature (12)..(12): n is a, c, g, or u
cuuccaaauuancaccca

SEQ ID NO: 86085 - RNA, 19 nt, Artificial Sequence
  Synthetic
  misc_feature (13)..(13): n is a, c, g, or u
ucuuccaaauuancaccca

SEQ ID NO: 86086 - RNA, 20 nt, Artificial Sequence
  Synthetic
  misc_feature (14)..(14): n is a, c, g, or u
aucuuccaaauuancaccca

SEQ ID NO: 86087 - RNA, 21 nt, Artificial Sequence
  Synthetic
  misc_feature (15)..(15): n is a, c, g, or u
gaucuuccaaauuancaccca

SEQ ID NO: 86088 - RNA, 22 nt, Artificial Sequence
  Synthetic
  misc_feature (16)..(16): n is a, c, g, or u
ggaucuuccaaauuancaccca

SEQ ID NO: 86089 - RNA, 23 nt, Artificial Sequence
  Synthetic
  misc_feature (17)..(17): n is a, c, g, or u
uggaucuuccaaauuancaccca

SEQ ID NO: 86090 - RNA, 24 nt, Artificial Sequence
  Synthetic
  misc_feature (1)..(1): n is a, c, g, or u
  misc_feature (18)..(18): n is a, c, g, or u
nuggaucuuccaaauuancaccca

SEQ ID NO: 86091 - RNA, 18 nt, Artificial Sequence
  Synthetic
ccugagggcuccacccca

SEQ ID NO: 86092 - RNA, 19 nt, Artificial Sequence
  Synthetic
gccugagggcuccacccca

SEQ ID NO: 86093 - RNA, 20 nt, Artificial Sequence
  Synthetic
agccugagggcuccacccca

SEQ ID NO: 86094 - RNA, 21 nt, Artificial Sequence
  Synthetic
gagccugagggcuccacccca

SEQ ID NO: 86095 - RNA, 22 nt, Artificial Sequence
  Synthetic
ugagccugagggcuccacccca

SEQ ID NO: 86096 - RNA, 23 nt, Artificial Sequence
  Synthetic
cugagccugagggcuccacccca

SEQ ID NO: 86097 - RNA, 24 nt, Artificial Sequence
  Synthetic
ccugagccugagggcuccacccca

SEQ ID NO: 86098 - RNA, 18 nt, Artificial Sequence
  Synthetic
ggcugaggcccacuccca

SEQ ID NO: 86099 - RNA, 19 nt, Artificial Sequence
  Synthetic
gggcugaggcccacuccca

SEQ ID NO: 86100 - RNA, 20 nt, Artificial Sequence
  Synthetic
cgggcugaggcccacuccca

SEQ ID NO: 86101 - RNA, 21 nt, Artificial Sequence
  Synthetic
acgggcugaggcccacuccca

SEQ ID NO: 86102 - RNA, 22 nt, Artificial Sequence
  Synthetic
aacgggcugaggcccacuccca

SEQ ID NO: 86103 - RNA, 23 nt, Artificial Sequence
  Synthetic
aaacgggcugaggcccacuccca

SEQ ID NO: 86104 - RNA, 24 nt, Artificial Sequence
  Synthetic
gaaacgggcugaggcccacuccca

SEQ ID NO: 86105 - RNA, 18 nt, Artificial Sequence
  Synthetic
  misc_feature (8)..(8): n is a, c, g, or u
  misc_feature (11)..(11): n is a, c, g, or u
guccaugnccnaaagcca

SEQ ID NO: 86106 - RNA, 19 nt, Artificial Sequence
  Synthetic
  misc_feature (9)..(9): n is a, c, g, or u
  misc_feature (12)..(12): n is a, c, g, or u
uguccaugnccnaaagcca

SEQ ID NO: 86107 - RNA, 20 nt, Artificial Sequence
  Synthetic
  misc_feature (10)..(10): n is a, c, g, or u
  misc_feature (13)..(13): n is a, c, g, or u
auguccaugnccnaaagcca

SEQ ID NO: 86108 - RNA, 21 nt, Artificial Sequence
  Synthetic
  misc_feature (11)..(11): n is a, c, g, or u
  misc_feature (14)..(14): n is a, c, g, or u
aauguccaugnccnaaagcca

SEQ ID NO: 86109 - RNA, 22 nt, Artificial Sequence
  Synthetic
  misc_feature (12)..(12): n is a, c, g, or u
  misc_feature (15)..(15): n is a, c, g, or u
caauguccaugnccnaaagcca

SEQ ID NO: 86110 - RNA, 23 nt, Artificial Sequence
  Synthetic
  misc_feature (13)..(13): n is a, c, g, or u
  misc_feature (16)..(16): n is a, c, g, or u
ucaauguccaugnccnaaagcca

SEQ ID NO: 86111 - RNA, 24 nt, Artificial Sequence
  Synthetic
  misc_feature (1)..(1): n is a, c, g, or u
  misc_feature (14)..(14): n is a, c, g, or u
  misc_feature (17)..(17): n is a, c, g, or u
nucaauguccaugnccnaaagcca

SEQ ID NO: 86112 - RNA, 18 nt, Artificial Sequence
  Synthetic
augaccaagccccagcca

SEQ ID NO: 86113 - RNA, 19 nt, Artificial Sequence
  Synthetic
caugaccaagccccagcca

SEQ ID NO: 86114 - RNA, 20 nt, Artificial Sequence
  Synthetic
ccaugaccaagccccagcca

SEQ ID NO: 86115 - RNA, 21 nt, Artificial Sequence
  Synthetic
cccaugaccaagccccagcca

SEQ ID NO: 86116 - RNA, 22 nt, Artificial Sequence
  Synthetic
gcccaugaccaagccccagcca

SEQ ID NO: 86117 - RNA, 23 nt, Artificial Sequence
  Synthetic
ggcccaugaccaagccccagcca

SEQ ID NO: 86118 - RNA, 24 nt, Artificial Sequence
  Synthetic
uggcccaugaccaagccccagcca

SEQ ID NO: 86119 - RNA, 18 nt, Artificial Sequence
  Synthetic
agcacagccuagcagcca

SEQ ID NO: 86120 - RNA, 19 nt, Artificial Sequence
  Synthetic
cagcacagccuagcagcca

SEQ ID NO: 86121 - RNA, 20 nt, Artificial Sequence
  Synthetic
gcagcacagccuagcagcca

SEQ ID NO: 86122 - RNA, 21 nt, Artificial Sequence
  Synthetic
ggcagcacagccuagcagcca

SEQ ID NO: 86123 - RNA, 22 nt, Artificial Sequence
  Synthetic
uggcagcacagccuagcagcca

SEQ ID NO: 86124 - RNA, 23 nt, Artificial Sequence
  Synthetic
uuggcagcacagccuagcagcca

SEQ ID NO: 86125 - RNA, 24 nt, Artificial Sequence
  Synthetic
guuggcagcacagccuagcagcca

SEQ ID NO: 86126 - RNA, 18 nt, Artificial Sequence
  Synthetic
cacuaguaaacugagcca

SEQ ID NO: 86127 - RNA, 19 nt, Artificial Sequence
  Synthetic
gcacuaguaaacugagcca

SEQ ID NO: 86128 - RNA, 20 nt, Artificial Sequence
  Synthetic
ggcacuaguaaacugagcca

SEQ ID NO: 86129 - RNA, 21 nt, Artificial Sequence
  Synthetic
uggcacuaguaaacugagcca

SEQ ID NO: 86130 - RNA, 22 nt, Artificial Sequence
  Synthetic
auggcacuaguaaacugagcca

SEQ ID NO: 86131 - RNA, 23 nt, Artificial Sequence
  Synthetic
aauggcacuaguaaacugagcca

SEQ ID NO: 86132 - RNA, 24 nt, Artificial Sequence
  Synthetic
aaauggcacuaguaaacugagcca

SEQ ID NO: 86133 - RNA, 18 nt, Artificial Sequence
  Synthetic
ccaauaccacaucaucca

SEQ ID NO: 86134 - RNA, 19 nt, Artificial Sequence
  Synthetic
cccaauaccacaucaucca

SEQ ID NO: 86135 - RNA, 20 nt, Artificial Sequence
  Synthetic
ccccaauaccacaucaucca

SEQ ID NO: 86136 - RNA, 21 nt, Artificial Sequence
  Synthetic
cccccaauaccacaucaucca

SEQ ID NO: 86137 - RNA, 22 nt, Artificial Sequence
  Synthetic
gcccccaauaccacaucaucca

SEQ ID NO: 86138 - RNA, 23 nt, Artificial Sequence
  Synthetic
ggcccccaauaccacaucaucca

SEQ ID NO: 86139 - RNA, 24 nt, Artificial Sequence
  Synthetic
uggcccccaauaccacaucaucca

SEQ ID NO: 86140 - RNA, 18 nt, Artificial Sequence
  Synthetic
cgucccgcgcaggaucca

SEQ ID NO: 86141 - RNA, 19 nt, Artificial Sequence
  Synthetic
acgucccgcgcaggaucca

SEQ ID NO: 86142 - RNA, 20 nt, Artificial Sequence
  Synthetic
gacgucccgcgcaggaucca

SEQ ID NO: 86143 - RNA, 18 nt, Artificial Sequence
  Synthetic
cguucacgguggucucca

SEQ ID NO: 86144 - RNA, 19 nt, Artificial Sequence
  Synthetic
gcguucacgguggucucca

SEQ ID NO: 86145 - RNA, 20 nt, Artificial Sequence
  Synthetic
ggcguucacgguggucucca

SEQ ID NO: 86146 - RNA, 18 nt, Artificial Sequence
  Synthetic
acauaccuugauagucca

SEQ ID NO: 86147 - RNA, 19 nt, Artificial Sequence
  Synthetic
aacauaccuugauagucca

SEQ ID NO: 86148 - RNA, 20 nt, Artificial Sequence
  Synthetic
caacauaccuugauagucca

SEQ ID NO: 86149 - RNA, 21 nt, Artificial Sequence
  Synthetic
gcaacauaccuugauagucca

SEQ ID NO: 86150 - RNA, 22 nt, Artificial Sequence
  Synthetic
ggcaacauaccuugauagucca

SEQ ID NO: 86151 - RNA, 23 nt, Artificial Sequence
  Synthetic
gggcaacauaccuugauagucca

SEQ ID NO: 86152 - RNA, 24 nt, Artificial Sequence
  Synthetic
cgggcaacauaccuugauagucca

SEQ ID NO: 86153 - RNA, 18 nt, Artificial Sequence
  Synthetic
  misc_feature (7)..(7): n is a, c, g, or u
aaaagangguguuuucca

SEQ ID NO: 86154 - RNA, 19 nt, Artificial Sequence
  Synthetic
  misc_feature (8)..(8): n is a, c, g, or u
gaaaagangguguuuucca

SEQ ID NO: 86155 - RNA, 20 nt, Artificial Sequence
  Synthetic
  misc_feature (9)..(9): n is a, c, g, or u
ggaaaagangguguuuucca

SEQ ID NO: 86156 - RNA, 21 nt, Artificial Sequence
  Synthetic
  misc_feature (10)..(10): n is a, c, g, or u
aggaaaagangguguuuucca

SEQ ID NO: 86157 - RNA, 22 nt, Artificial Sequence
  Synthetic
  misc_feature (11)..(11): n is a, c, g, or u
uaggaaaagangguguuuucca

SEQ ID NO: 86158 - RNA, 23 nt, Artificial Sequence
  Synthetic
  misc_feature (12)..(12): n is a, c, g, or u
uuaggaaaagangguguuuucca

SEQ ID NO: 86159 - RNA, 24 nt, Artificial Sequence
  Synthetic
  misc_feature (13)..(13): n is a, c, g, or u
auuaggaaaagangguguuuucca

SEQ ID NO: 86160 - RNA, 18 nt, Artificial Sequence
  Synthetic
cgaagguuugguacagca

SEQ ID NO: 86161 - RNA, 19 nt, Artificial Sequence
  Synthetic
ccgaagguuugguacagca

SEQ ID NO: 86162 - RNA, 20 nt, Artificial Sequence
  Synthetic
uccgaagguuugguacagca

SEQ ID NO: 86163 - RNA, 21 nt, Artificial Sequence
  Synthetic
guccgaagguuugguacagca

SEQ ID NO: 86164 - RNA, 22 nt, Artificial Sequence
  Synthetic
cguccgaagguuugguacagca

SEQ ID NO: 86165 - RNA, 23 nt, Artificial Sequence
  Synthetic
ccguccgaagguuugguacagca

SEQ ID NO: 86166 - RNA, 24 nt, Artificial Sequence
  Synthetic
uccguccgaagguuugguacagca

SEQ ID NO: 86167 - RNA, 18 nt, Artificial Sequence
  Synthetic
gaacuggagccaccagca

SEQ ID NO: 86168 - RNA, 19 nt, Artificial Sequence
  Synthetic
ugaacuggagccaccagca

SEQ ID NO: 86169 - RNA, 20 nt, Artificial Sequence
  Synthetic
cugaacuggagccaccagca

SEQ ID NO: 86170 - RNA, 21 nt, Artificial Sequence
  Synthetic
ccugaacuggagccaccagca

SEQ ID NO: 86171 - RNA, 22 nt, Artificial Sequence
  Synthetic
uccugaacuggagccaccagca

SEQ ID NO: 86172 - RNA, 23 nt, Artificial Sequence
  Synthetic
uuccugaacuggagccaccagca

SEQ ID NO: 86173 - RNA, 24 nt, Artificial Sequence
  Synthetic
guuccugaacuggagccaccagca

SEQ ID NO: 86174 - RNA, 18 nt, Artificial Sequence
  Synthetic
agaagaugaggcauagca

SEQ ID NO: 86175 - RNA, 19 nt, Artificial Sequence
  Synthetic
aagaagaugaggcauagca

SEQ ID NO: 86176 - RNA, 20 nt, Artificial Sequence
  Synthetic
caagaagaugaggcauagca

SEQ ID NO: 86177 - RNA, 21 nt, Artificial Sequence
  Synthetic
acaagaagaugaggcauagca

SEQ ID NO: 86178 - RNA, 22 nt, Artificial Sequence
  Synthetic
aacaagaagaugaggcauagca

SEQ ID NO: 86179 - RNA, 23 nt, Artificial Sequence
  Synthetic
caacaagaagaugaggcauagca

SEQ ID NO: 86180 - RNA, 24 nt, Artificial Sequence
  Synthetic
ccaacaagaagaugaggcauagca

SEQ ID NO: 86181 - RNA, 18 nt, Artificial Sequence
  Synthetic
  misc_feature (8)..(8): n is a, c, g, or u
  misc_feature (11)..(11): n is a, c, g, or u
uggucggncgnaacggca

SEQ ID NO: 86182 - RNA, 19 nt, Artificial Sequence
  Synthetic
  misc_feature (9)..(9): n is a, c, g, or u
  misc_feature (12)..(12): n is a, c, g, or u
guggucggncgnaacggca

SEQ ID NO: 86183 - RNA, 20 nt, Artificial Sequence
  Synthetic
  misc_feature (10)..(10): n is a, c, g, or u
  misc_feature (13)..(13): n is a, c, g, or u
cguggucggncgnaacggca

SEQ ID NO: 86184 - RNA, 21 nt, Artificial Sequence
  Synthetic
  misc_feature (11)..(11): n is a, c, g, or u
  misc_feature (14)..(14): n is a, c, g, or u
ccguggucggncgnaacggca

SEQ ID NO: 86185 - RNA, 22 nt, Artificial Sequence
  Synthetic
  misc_feature (12)..(12): n is a, c, g, or u
  misc_feature (15)..(15): n is a, c, g, or u
cccguggucggncgnaacggca

SEQ ID NO: 86186 - RNA, 23 nt, Artificial Sequence
  Synthetic
  misc_feature (13)..(13): n is a, c, g, or u
  misc_feature (16)..(16): n is a, c, g, or u
ccccguggucggncgnaacggca

SEQ ID NO: 86187 - RNA, 24 nt, Artificial Sequence
  Synthetic
  misc_feature (14)..(14): n is a, c, g, or u
  misc_feature (17)..(17): n is a, c, g, or u
gccccguggucggncgnaacggca

SEQ ID NO: 86188 - RNA, 18 nt, Artificial Sequence
  Synthetic
agugcacacgguccggca

SEQ ID NO: 86189 - RNA, 19 nt, Artificial Sequence
  Synthetic
aagugcacacgguccggca

SEQ ID NO: 86190 - RNA, 20 nt, Artificial Sequence
  Synthetic
gaagugcacacgguccggca

SEQ ID NO: 86191 - RNA, 18 nt, Artificial Sequence
  Synthetic
ccgcaguauggaucggca

SEQ ID NO: 86192 - RNA, 19 nt, Artificial Sequence
  Synthetic
uccgcaguauggaucggca

SEQ ID NO: 86193 - RNA, 20 nt, Artificial Sequence
  Synthetic
uuccgcaguauggaucggca

SEQ ID NO: 86194 - RNA, 21 nt, Artificial Sequence
  Synthetic
guuccgcaguauggaucggca

SEQ ID NO: 86195 - RNA, 22 nt, Artificial Sequence
  Synthetic
aguuccgcaguauggaucggca

SEQ ID NO: 86196 - RNA, 23 nt, Artificial Sequence
  Synthetic
gaguuccgcaguauggaucggca

SEQ ID NO: 86197 - RNA, 24 nt, Artificial Sequence
  Synthetic
ggaguuccgcaguauggaucggca

SEQ ID NO: 86198 - RNA, 18 nt, Artificial Sequence
  Synthetic
ccuggccguugccgggca

SEQ ID NO: 86199 - RNA, 19 nt, Artificial Sequence
  Synthetic
accuggccguugccgggca

SEQ ID NO: 86200 - RNA, 20 nt, Artificial Sequence
  Synthetic
gaccuggccguugccgggca

SEQ ID NO: 86201 - RNA, 21 nt, Artificial Sequence
  Synthetic
agaccuggccguugccgggca

SEQ ID NO: 86202 - RNA, 22 nt, Artificial Sequence
  Synthetic
cagaccuggccguugccgggca

SEQ ID NO: 86203 - RNA, 23 nt, Artificial Sequence
  Synthetic
acagaccuggccguugccgggca

SEQ ID NO: 86204 - RNA, 24 nt, Artificial Sequence
  Synthetic
cacagaccuggccguugccgggca

SEQ ID NO: 86205 - RNA, 18 nt, Artificial Sequence
  Synthetic
cauuguguaaaaggggca

SEQ ID NO: 86206 - RNA, 19 nt, Artificial Sequence
  Synthetic
acauuguguaaaaggggca

SEQ ID NO: 86207 - RNA, 20 nt, Artificial Sequence
  Synthetic
cacauuguguaaaaggggca

SEQ ID NO: 86208 - RNA, 21 nt, Artificial Sequence
  Synthetic
ccacauuguguaaaaggggca

SEQ ID NO: 86209 - RNA, 22 nt, Artificial Sequence
  Synthetic
accacauuguguaaaaggggca

SEQ ID NO: 86210 - RNA, 23 nt, Artificial Sequence
  Synthetic
aaccacauuguguaaaaggggca

SEQ ID NO: 86211 - RNA, 24 nt, Artificial Sequence
  Synthetic
uaaccacauuguguaaaaggggca

SEQ ID NO: 86212 - RNA, 18 nt, Artificial Sequence
  Synthetic
  misc_feature (5)..(5): n is a, c, g, or u
  misc_feature (14)..(14): n is a, c, g, or u
uacangcauacaanggca

SEQ ID NO: 86213 - RNA, 19 nt, Artificial Sequence
  Synthetic
  misc_feature (6)..(6): n is a, c, g, or u
  misc_feature (15)..(15): n is a, c, g, or u
auacangcauacaanggca

SEQ ID NO: 86214 - RNA, 20 nt, Artificial Sequence
  Synthetic
  misc_feature (7)..(7): n is a, c, g, or u
  misc_feature (16)..(16): n is a, c, g, or u
aauacangcauacaanggca

SEQ ID NO: 86215 - RNA, 21 nt, Artificial Sequence
  Synthetic
  misc_feature (8)..(8): n is a, c, g, or u
  misc_feature (17)..(17): n is a, c, g, or u
gaauacangcauacaanggca

SEQ ID NO: 86216 - RNA, 22 nt, Artificial Sequence
  Synthetic
  misc_feature (9)..(9): n is a, c, g, or u
  misc_feature (18)..(18): n is a, c, g, or u
ugaauacangcauacaanggca

SEQ ID NO: 86217 - RNA, 23 nt, Artificial Sequence
  Synthetic
  misc_feature (1)..(1): n is a, c, g, or u
  misc_feature (10)..(10): n is a, c, g, or u
  misc_feature (19)..(19): n is a, c, g, or u
nugaauacangcauacaanggca

SEQ ID NO: 86218 - RNA, 24 nt, Artificial Sequence
  Synthetic
  misc_feature (2)..(2): n is a, c, g, or u
  misc_feature (11)..(11): n is a, c, g, or u
  misc_feature (20)..(20): n is a, c, g, or u
anugaauacangcauacaanggca

SEQ ID NO: 86219 - RNA, 18 nt, Artificial Sequence
  Synthetic
  misc_feature (6)..(6): n is a, c, g, or u
  misc_feature (15)..(15): n is a, c, g, or u
uuaganugaauacangca

SEQ ID NO: 86220 - RNA, 19 nt, Artificial Sequence
  Synthetic
  misc_feature (7)..(7): n is a, c, g, or u
  misc_feature (16)..(16): n is a, c, g, or u
cuuaganugaauacangca

SEQ ID NO: 86221 - RNA, 20 nt, Artificial Sequence
  Synthetic
  misc_feature (8)..(8): n is a, c, g, or u
  misc_feature (17)..(17): n is a, c, g, or u
gcuuaganugaauacangca

SEQ ID NO: 86222 - RNA, 21 nt, Artificial Sequence
  Synthetic
  misc_feature (9)..(9): n is a, c, g, or u
  misc_feature (18)..(18): n is a, c, g, or u
ugcuuaganugaauacangca

SEQ ID NO: 86223 - RNA, 22 nt, Artificial Sequence
  Synthetic
  misc_feature (10)..(10): n is a, c, g, or u
  misc_feature (19)..(19): n is a, c, g, or u
cugcuuaganugaauacangca

SEQ ID NO: 86224 - RNA, 23 nt, Artificial Sequence
  Synthetic
  misc_feature (11)..(11): n is a, c, g, or u
  misc_feature (20)..(20): n is a, c, g, or u
ccugcuuaganugaauacangca

SEQ ID NO: 86225 - RNA, 24 nt, Artificial Sequence
  Synthetic
  misc_feature (12)..(12): n is a, c, g, or u
  misc_feature (21)..(21): n is a, c, g, or u
gccugcuuaganugaauacangca

SEQ ID NO: 86226 - RNA, 18 nt, Artificial Sequence
  Synthetic
  misc_feature (12)..(12): n is a, c, g, or u
  misc_feature (15)..(15): n is a, c, g, or u
uggcgauuggungangca

SEQ ID NO: 86227 - RNA, 19 nt, Artificial Sequence
  Synthetic
  misc_feature (13)..(13): n is a, c, g, or u
  misc_feature (16)..(16): n is a, c, g, or u
cuggcgauuggungangca

SEQ ID NO: 86228 - RNA, 20 nt, Artificial Sequence
  Synthetic
  misc_feature (14)..(14): n is a, c, g, or u
  misc_feature (17)..(17): n is a, c, g, or u
acuggcgauuggungangca

SEQ ID NO: 86229 - RNA, 21 nt, Artificial Sequence
  Synthetic
  misc_feature (15)..(15): n is a, c, g, or u
  misc_feature (18)..(18): n is a, c, g, or u
gacuggcgauuggungangca

SEQ ID NO: 86230 - RNA, 22 nt, Artificial Sequence
  Synthetic
  misc_feature (16)..(16): n is a, c, g, or u
  misc_feature (19)..(19): n is a, c, g, or u
ugacuggcgauuggungangca

SEQ ID NO: 86231 - RNA, 23 nt, Artificial Sequence
  Synthetic
  misc_feature (17)..(17): n is a, c, g, or u
  misc_feature (20)..(20): n is a, c, g, or u
cugacuggcgauuggungangca

SEQ ID NO: 86232 - RNA, 24 nt, Artificial Sequence
  Synthetic
  misc_feature (18)..(18): n is a, c, g, or u
  misc_feature (21)..(21): n is a, c, g, or u
ccugacuggcgauuggungangca

SEQ ID NO: 86233 - RNA, 18 nt, Artificial Sequence
  Synthetic
  misc_feature (6)..(6): n is a, c, g, or u
ugacanacuuuccaauca

SEQ ID NO: 86234 - RNA, 19 nt, Artificial Sequence
  Synthetic
  misc_feature (7)..(7): n is a, c, g, or u
uugacanacuuuccaauca

SEQ ID NO: 86235 - RNA, 20 nt, Artificial Sequence
  Synthetic
  misc_feature (8)..(8): n is a, c, g, or u
guugacanacuuuccaauca

SEQ ID NO: 86236 - RNA, 21 nt, Artificial Sequence
  Synthetic
  misc_feature (9)..(9): n is a, c, g, or u
cguugacanacuuuccaauca

SEQ ID NO: 86237 - RNA, 22 nt, Artificial Sequence
  Synthetic
  misc_feature (1)..(1): n is a, c, g, or u
  misc_feature (10)..(10): n is a, c, g, or u
ncguugacanacuuuccaauca

SEQ ID NO: 86238 - RNA, 23 nt, Artificial Sequence
  Synthetic
  misc_feature (2)..(2): n is a, c, g, or u
  misc_feature (11)..(11): n is a, c, g, or u
uncguugacanacuuuccaauca

SEQ ID NO: 86239 - RNA, 24 nt, Artificial Sequence
  Synthetic
  misc_feature (3)..(3): n is a, c, g, or u
  misc_feature (12)..(12): n is a, c, g, or u
auncguugacanacuuuccaauca

SEQ ID NO: 86240 - RNA, 18 nt, Artificial Sequence
  Synthetic
  misc_feature (9)..(9): n is a, c, g, or u
ugaggugancaaugcuca

SEQ ID NO: 86241 - RNA, 19 nt, Artificial Sequence
  Synthetic
  misc_feature (1)..(1): n is a, c, g, or u
  misc_feature (10)..(10): n is a, c, g, or u
nugaggugancaaugcuca

SEQ ID NO: 86242 - RNA, 20 nt, Artificial Sequence
  Synthetic
  misc_feature (2)..(2): n is a, c, g, or u
  misc_feature (11)..(11): n is a, c, g, or u
gnugaggugancaaugcuca

SEQ ID NO: 86243 - RNA, 21 nt, Artificial Sequence
  Synthetic
  misc_feature (3)..(3): n is a, c, g, or u
  misc_feature (12)..(12): n is a, c, g, or u
ugnugaggugancaaugcuca

SEQ ID NO: 86244 - RNA, 22 nt, Artificial Sequence
  Synthetic
  misc_feature (4)..(4): n is a, c, g, or u
  misc_feature (13)..(13): n is a, c, g, or u
augnugaggugancaaugcuca

SEQ ID NO: 86245 - RNA, 23 nt, Artificial Sequence
  Synthetic
  misc_feature (5)..(5): n is a, c, g, or u
  misc_feature (14)..(14): n is a, c, g, or u
uaugnugaggugancaaugcuca

SEQ ID NO: 86246 - RNA, 24 nt, Artificial Sequence
  Synthetic
  misc_feature (6)..(6): n is a, c, g, or u
  misc_feature (15)..(15): n is a, c, g, or u
guaugnugaggugancaaugcuca

SEQ ID NO: 86247 - RNA, 18 nt, Artificial Sequence
  Synthetic
  misc_feature (3)..(3): n is a, c, g, or u
acngaaggaaagaaguca

SEQ ID NO: 86248 - RNA, 19 nt, Artificial Sequence
  Synthetic
  misc_feature (4)..(4): n is a, c, g, or u
uacngaaggaaagaaguca

SEQ ID NO: 86249 - RNA, 20 nt, Artificial Sequence
  Synthetic
  misc_feature (5)..(5): n is a, c, g, or u
guacngaaggaaagaaguca

SEQ ID NO: 86250 - RNA, 21 nt, Artificial Sequence
  Synthetic
  misc_feature (6)..(6): n is a, c, g, or u
cguacngaaggaaagaaguca

SEQ ID NO: 86251 - RNA, 22 nt, Artificial Sequence
  Synthetic
  misc_feature (7)..(7): n is a, c, g, or u
ucguacngaaggaaagaaguca

SEQ ID NO: 86252 - RNA, 23 nt, Artificial Sequence
  Synthetic
  misc_feature (8)..(8): n is a, c, g, or u
cucguacngaaggaaagaaguca

SEQ ID NO: 86253 - RNA, 24 nt, Artificial Sequence
  Synthetic
  misc_feature (9)..(9): n is a, c, g, or u
ucucguacngaaggaaagaaguca

SEQ ID NO: 86254 - RNA, 18 nt, Artificial Sequence
  Synthetic
ccaguggggguugcguca

SEQ ID NO: 86255 - RNA, 19 nt, Artificial Sequence
  Synthetic
gccaguggggguugcguca

SEQ ID NO: 86256 - RNA, 20 nt, Artificial Sequence
  Synthetic
agccaguggggguugcguca

SEQ ID NO: 86257 - RNA, 21 nt, Artificial Sequence
  Synthetic
cagccaguggggguugcguca

SEQ ID NO: 86258 - RNA, 22 nt, Artificial Sequence
  Synthetic
ccagccaguggggguugcguca

SEQ ID NO: 86259 - RNA, 23 nt, Artificial Sequence
  Synthetic
cccagccaguggggguugcguca

SEQ ID NO: 86260 - RNA, 24 nt, Artificial Sequence
  Synthetic
ccccagccaguggggguugcguca

SEQ ID NO: 86261 - RNA, 18 nt, Artificial Sequence
  Synthetic
uugugaggauucuuguca

SEQ ID NO: 86262 - RNA, 19 nt, Artificial Sequence
  Synthetic
auugugaggauucuuguca

SEQ ID NO: 86263 - RNA, 20 nt, Artificial Sequence
  Synthetic
uauugugaggauucuuguca

SEQ ID NO: 86264 - RNA, 21 nt, Artificial Sequence
  Synthetic
guauugugaggauucuuguca

SEQ ID NO: 86265 - RNA, 22 nt, Artificial Sequence
  Synthetic
gguauugugaggauucuuguca

SEQ ID NO: 86266 - RNA, 23 nt, Artificial Sequence
  Synthetic
cgguauugugaggauucuuguca

SEQ ID NO: 86267 - RNA, 24 nt, Artificial Sequence
  Synthetic
gcgguauugugaggauucuuguca

SEQ ID NO: 86268 - RNA, 18 nt, Artificial Sequence
  Synthetic
uaaauguauacccaaaga

SEQ ID NO: 86269 - RNA, 19 nt, Artificial Sequence
  Synthetic
uuaaauguauacccaaaga

SEQ ID NO: 86270 - RNA, 20 nt, Artificial Sequence
  Synthetic
uuuaaauguauacccaaaga

SEQ ID NO: 86271 - RNA, 21 nt, Artificial Sequence
  Synthetic
guuuaaauguauacccaaaga

SEQ ID NO: 86272 - RNA, 22 nt, Artificial Sequence
  Synthetic
gguuuaaauguauacccaaaga

SEQ ID NO: 86273 - RNA, 23 nt, Artificial Sequence
  Synthetic
ggguuuaaauguauacccaaaga

SEQ ID NO: 86274 - RNA, 24 nt, Artificial Sequence
  Synthetic
aggguuuaaauguauacccaaaga

SEQ ID NO: 86275 - RNA, 18 nt, Artificial Sequence
  Synthetic
gaagaaccaacaagaaga

SEQ ID NO: 86276 - RNA, 19 nt, Artificial Sequence
  Synthetic
agaagaaccaacaagaaga

SEQ ID NO: 86277 - RNA, 20 nt, Artificial Sequence
  Synthetic
cagaagaaccaacaagaaga

SEQ ID NO: 86278 - RNA, 21 nt, Artificial Sequence
  Synthetic
ccagaagaaccaacaagaaga

SEQ ID NO: 86279 - RNA, 22 nt, Artificial Sequence
  Synthetic
uccagaagaaccaacaagaaga

SEQ ID NO: 86280 - RNA, 23 nt, Artificial Sequence
  Synthetic
guccagaagaaccaacaagaaga

SEQ ID NO: 86281 - RNA, 24 nt, Artificial Sequence
  Synthetic
aguccagaagaaccaacaagaaga

SEQ ID NO: 86282 - RNA, 18 nt, Artificial Sequence
  Synthetic
ccuugauaguccagaaga

SEQ ID NO: 86283 - RNA, 19 nt, Artificial Sequence
  Synthetic
accuugauaguccagaaga

SEQ ID NO: 86284 - RNA, 20 nt, Artificial Sequence
  Synthetic
uaccuugauaguccagaaga

SEQ ID NO: 86285 - RNA, 21 nt, Artificial Sequence
  Synthetic
auaccuugauaguccagaaga

SEQ ID NO: 86286 - RNA, 22 nt, Artificial Sequence
  Synthetic
cauaccuugauaguccagaaga

SEQ ID NO: 86287 - RNA, 23 nt, Artificial Sequence
  Synthetic
acauaccuugauaguccagaaga

SEQ ID NO: 86288 - RNA, 24 nt, Artificial Sequence
  Synthetic
aacauaccuugauaguccagaaga

SEQ ID NO: 86289 - RNA, 18 nt, Artificial Sequence
  Synthetic
  misc_feature (7)..(7): n is a, c, g, or u
gacaggnacaguagaaga

SEQ ID NO: 86290 - RNA, 19 nt, Artificial Sequence
  Synthetic
  misc_feature (8)..(8): n is a, c, g, or u
agacaggnacaguagaaga

SEQ ID NO: 86291 - RNA, 20 nt, Artificial Sequence
  Synthetic
  misc_feature (9)..(9): n is a, c, g, or u
aagacaggnacaguagaaga

SEQ ID NO: 86292 - RNA, 21 nt, Artificial Sequence
  Synthetic
  misc_feature (10)..(10): n is a, c, g, or u
aaagacaggnacaguagaaga

SEQ ID NO: 86293 - RNA, 22 nt, Artificial Sequence
  Synthetic
  misc_feature (11)..(11): n is a, c, g, or u
uaaagacaggnacaguagaaga

SEQ ID NO: 86294 - RNA, 23 nt, Artificial Sequence
  Synthetic
  misc_feature (12)..(12): n is a, c, g, or u
uuaaagacaggnacaguagaaga

SEQ ID NO: 86295 - RNA, 24 nt, Artificial Sequence
  Synthetic
  misc_feature (1)..(1): n is a, c, g, or u
  misc_feature (13)..(13): n is a, c, g, or u
nuuaaagacaggnacaguagaaga

SEQ ID NO: 86296 - RNA, 18 nt, Artificial Sequence
  Synthetic
auagcagcaggaugaaga

SEQ ID NO: 86297 - RNA, 19 nt, Artificial Sequence
  Synthetic
cauagcagcaggaugaaga

SEQ ID NO: 86298 - RNA, 20 nt, Artificial Sequence
  Synthetic
gcauagcagcaggaugaaga

SEQ ID NO: 86299 - RNA, 21 nt, Artificial Sequence
  Synthetic
ggcauagcagcaggaugaaga

SEQ ID NO: 86300 - RNA, 22 nt, Artificial Sequence
  Synthetic
aggcauagcagcaggaugaaga

SEQ ID NO: 86301 - RNA, 23 nt, Artificial Sequence
  Synthetic
gaggcauagcagcaggaugaaga

SEQ ID NO: 86302 - RNA, 24 nt, Artificial Sequence
  Synthetic
ugaggcauagcagcaggaugaaga

SEQ ID NO: 86303 - RNA, 18 nt, Artificial Sequence
  Synthetic
ccggaaguguugauaaga

SEQ ID NO: 86304 - RNA, 19 nt, Artificial Sequence
  Synthetic
uccggaaguguugauaaga

SEQ ID NO: 86305 - RNA, 20 nt, Artificial Sequence
  Synthetic
cuccggaaguguugauaaga

SEQ ID NO: 86306 - RNA, 21 nt, Artificial Sequence
  Synthetic
ucuccggaaguguugauaaga

SEQ ID NO: 86307 - RNA, 22 nt, Artificial Sequence
  Synthetic
gucuccggaaguguugauaaga

SEQ ID NO: 86308 - RNA, 23 nt, Artificial Sequence
  Synthetic
agucuccggaaguguugauaaga

SEQ ID NO: 86309 - RNA, 24 nt, Artificial Sequence
  Synthetic
uagucuccggaaguguugauaaga

SEQ ID NO: 86310 - RNA, 18 nt, Artificial Sequence
  Synthetic
cagaugagaaggcacaga

SEQ ID NO: 86311 - RNA, 19 nt, Artificial Sequence
  Synthetic
gcagaugagaaggcacaga

SEQ ID NO: 86312 - RNA, 20 nt, Artificial Sequence
  Synthetic
ggcagaugagaaggcacaga

SEQ ID NO: 86313 - RNA, 21 nt, Artificial Sequence
  Synthetic
cggcagaugagaaggcacaga

SEQ ID NO: 86314 - RNA, 22 nt, Artificial Sequence
  Synthetic
ccggcagaugagaaggcacaga

SEQ ID NO: 86315 - RNA, 23 nt, Artificial Sequence
  Synthetic
uccggcagaugagaaggcacaga

SEQ ID NO: 86316 - RNA, 24 nt, Artificial Sequence
  Synthetic
guccggcagaugagaaggcacaga

SEQ ID NO: 86317 - RNA, 18 nt, Artificial Sequence
  Synthetic
gcaaacacuuggcacaga

SEQ ID NO: 86318 - RNA, 19 nt, Artificial Sequence
  Synthetic
agcaaacacuuggcacaga

SEQ ID NO: 86319 - RNA, 20 nt, Artificial Sequence
  Synthetic
cagcaaacacuuggcacaga

SEQ ID NO: 86320 - RNA, 21 nt, Artificial Sequence
  Synthetic
ucagcaaacacuuggcacaga

SEQ ID NO: 86321 - RNA, 22 nt, Artificial Sequence
  Synthetic
gucagcaaacacuuggcacaga

SEQ ID NO: 86322 - RNA, 23 nt, Artificial Sequence
  Synthetic
cgucagcaaacacuuggcacaga

SEQ ID NO: 86323 - RNA, 24 nt, Artificial Sequence
  Synthetic
gcgucagcaaacacuuggcacaga

SEQ ID NO: 86324 - RNA, 18 nt, Artificial Sequence
  Synthetic
cucaagaugcuguacaga

SEQ ID NO: 86325 - RNA, 19 nt, Artificial Sequence
  Synthetic
acucaagaugcuguacaga

SEQ ID NO: 86326 - RNA, 20 nt, Artificial Sequence
  Synthetic
gacucaagaugcuguacaga

SEQ ID NO: 86327 - RNA, 21 nt, Artificial Sequence
  Synthetic
ggacucaagaugcuguacaga

SEQ ID NO: 86328 - RNA, 22 nt, Artificial Sequence
  Synthetic
gggacucaagaugcuguacaga

SEQ ID NO: 86329 - RNA, 23 nt, Artificial Sequence
  Synthetic
agggacucaagaugcuguacaga

SEQ ID NO: 86330 - RNA, 24 nt, Artificial Sequence
  Synthetic
aagggacucaagaugcuguacaga

SEQ ID NO: 86331 - RNA, 18 nt, Artificial Sequence
  Synthetic
aagagaugauuaggcaga

SEQ ID NO: 86332 - RNA, 19 nt, Artificial Sequence
  Synthetic
caagagaugauuaggcaga

SEQ ID NO: 86333 - RNA, 20 nt, Artificial Sequence
  Synthetic
acaagagaugauuaggcaga

SEQ ID NO: 86334 - RNA, 21 nt, Artificial Sequence
  Synthetic
aacaagagaugauuaggcaga

SEQ ID NO: 86335 - RNA, 22 nt, Artificial Sequence
  Synthetic
gaacaagagaugauuaggcaga

SEQ ID NO: 86336 - RNA, 23 nt, Artificial Sequence
  Synthetic
ugaacaagagaugauuaggcaga

SEQ ID NO: 86337 - RNA, 24 nt, Artificial Sequence
  Synthetic
augaacaagagaugauuaggcaga

SEQ ID NO: 86338 - RNA, 18 nt, Artificial Sequence
  Synthetic
  misc_feature (6)..(6): n is a, c, g, or u
  misc_feature (9)..(9): n is a, c, g, or u
gucggncgnaacggcaga

SEQ ID NO: 86339 - RNA, 19 nt, Artificial Sequence
  Synthetic
  misc_feature (7)..(7): n is a, c, g, or u
  misc_feature (10)..(10): n is a, c, g, or u
ggucggncgnaacggcaga

SEQ ID NO: 86340 - RNA, 20 nt, Artificial Sequence
  Synthetic
  misc_feature (8)..(8): n is a, c, g, or u
  misc_feature (11)..(11): n is a, c, g, or u
uggucggncgnaacggcaga

SEQ ID NO: 86341 - RNA, 21 nt, Artificial Sequence
  Synthetic
  misc_feature (9)..(9): n is a, c, g, or u
  misc_feature (12)..(12): n is a, c, g, or u
guggucggncgnaacggcaga

SEQ ID NO: 86342 - RNA, 22 nt, Artificial Sequence
  Synthetic
  misc_feature (10)..(10): n is a, c, g, or u
  misc_feature (13)..(13): n is a, c, g, or u
cguggucggncgnaacggcaga

SEQ ID NO: 86343 - RNA, 23 nt, Artificial Sequence
  Synthetic
  misc_feature (11)..(11): n is a, c, g, or u
  misc_feature (14)..(14): n is a, c, g, or u
ccguggucggncgnaacggcaga

SEQ ID NO: 86344 - RNA, 24 nt, Artificial Sequence
  Synthetic
  misc_feature (12)..(12): n is a, c, g, or u
  misc_feature (15)..(15): n is a, c, g, or u
cccguggucggncgnaacggcaga

SEQ ID NO: 86345 - RNA, 18 nt, Artificial Sequence
  Synthetic
ugcacacgguccggcaga

SEQ ID NO: 86346 - RNA, 19 nt, Artificial Sequence
  Synthetic
gugcacacgguccggcaga

SEQ ID NO: 86347 - RNA, 20 nt, Artificial Sequence
  Synthetic
agugcacacgguccggcaga

SEQ ID NO: 86348 - RNA, 18 nt, Artificial Sequence
  Synthetic
cuccaugcgacgugcaga

SEQ ID NO: 86349 - RNA, 19 nt, Artificial Sequence
  Synthetic
ucuccaugcgacgugcaga

SEQ ID NO: 86350 - RNA, 20 nt, Artificial Sequence
  Synthetic
gucuccaugcgacgugcaga

SEQ ID NO: 86351 - RNA, 21 nt, Artificial Sequence
  Synthetic
ggucuccaugcgacgugcaga

SEQ ID NO: 86352 - RNA, 22 nt, Artificial Sequence
  Synthetic
uggucuccaugcgacgugcaga

SEQ ID NO: 86353 - RNA, 23 nt, Artificial Sequence
  Synthetic
guggucuccaugcgacgugcaga

SEQ ID NO: 86354 - RNA, 24 nt, Artificial Sequence
  Synthetic
gguggucuccaugcgacgugcaga

SEQ ID NO: 86355 - RNA, 18 nt, Artificial Sequence
  Synthetic
acauugagauucccgaga

SEQ ID NO: 86356 - RNA, 19 nt, Artificial Sequence
  Synthetic
aacauugagauucccgaga

SEQ ID NO: 86357 - RNA, 20 nt, Artificial Sequence
  Synthetic
uaacauugagauucccgaga

SEQ ID NO: 86358 - RNA, 21 nt, Artificial Sequence
  Synthetic
cuaacauugagauucccgaga

SEQ ID NO: 86359 - RNA, 22 nt, Artificial Sequence
  Synthetic
acuaacauugagauucccgaga

SEQ ID NO: 86360 - RNA, 23 nt, Artificial Sequence
  Synthetic
uacuaacauugagauucccgaga

SEQ ID NO: 86361 - RNA, 24 nt, Artificial Sequence
  Synthetic
auacuaacauugagauucccgaga

SEQ ID NO: 86362 - RNA, 18 nt, Artificial Sequence
  Synthetic
guaaacugagccaggaga

SEQ ID NO: 86363 - RNA, 19 nt, Artificial Sequence
  Synthetic
aguaaacugagccaggaga

SEQ ID NO: 86364 - RNA, 20 nt, Artificial Sequence
  Synthetic
uaguaaacugagccaggaga

SEQ ID NO: 86365 - RNA, 21 nt, Artificial Sequence
  Synthetic
cuaguaaacugagccaggaga

SEQ ID NO: 86366 - RNA, 22 nt, Artificial Sequence
  Synthetic
acuaguaaacugagccaggaga

SEQ ID NO: 86367 - RNA, 23 nt, Artificial Sequence
  Synthetic
cacuaguaaacugagccaggaga

SEQ ID NO: 86368 - RNA, 24 nt, Artificial Sequence
  Synthetic
gcacuaguaaacugagccaggaga

SEQ ID NO: 86369 - RNA, 18 nt, Artificial Sequence
  Synthetic
  misc_feature (3)..(3): n is a, c, g, or u
cgnaacggcagacggaga

SEQ ID NO: 86370 - RNA, 19 nt, Artificial Sequence
  Synthetic
  misc_feature (1)..(1): n is a, c, g, or u
  misc_feature (4)..(4): n is a, c, g, or u
ncgnaacggcagacggaga

SEQ ID NO: 86371 - RNA, 20 nt, Artificial Sequence
  Synthetic
  misc_feature (2)..(2): n is a, c, g, or u
  misc_feature (5)..(5): n is a, c, g, or u
gncgnaacggcagacggaga

SEQ ID NO: 86372 - RNA, 21 nt, Artificial Sequence
  Synthetic
  misc_feature (3)..(3): n is a, c, g, or u
  misc_feature (6)..(6): n is a, c, g, or u
ggncgnaacggcagacggaga

SEQ ID NO: 86373 - RNA, 22 nt, Artificial Sequence
  Synthetic
  misc_feature (4)..(4): n is a, c, g, or u
  misc_feature (7)..(7): n is a, c, g, or u
cggncgnaacggcagacggaga

SEQ ID NO: 86374 - RNA, 23 nt, Artificial Sequence
  Synthetic
  misc_feature (5)..(5): n is a, c, g, or u
  misc_feature (8)..(8): n is a, c, g, or u
ucggncgnaacggcagacggaga

SEQ ID NO: 86375 - RNA, 24 nt, Artificial Sequence
  Synthetic
  misc_feature (6)..(6): n is a, c, g, or u
  misc_feature (9)..(9): n is a, c, g, or u
gucggncgnaacggcagacggaga

SEQ ID NO: 86376 - RNA, 18 nt, Artificial Sequence
  Synthetic
ucucuuccaaaagugaga

SEQ ID NO: 86377 - RNA, 19 nt, Artificial Sequence
  Synthetic
uucucuuccaaaagugaga

SEQ ID NO: 86378 - RNA, 20 nt, Artificial Sequence
  Synthetic
uuucucuuccaaaagugaga

SEQ ID NO: 86379 - RNA, 21 nt, Artificial Sequence
  Synthetic
guuucucuuccaaaagugaga

SEQ ID NO: 86380 - RNA, 22 nt, Artificial Sequence
  Synthetic
  misc_feature (1)..(1): n is a, c, g, or u
nguuucucuuccaaaagugaga

SEQ ID NO: 86381 - RNA, 23 nt, Artificial Sequence
  Synthetic
  misc_feature (2)..(2): n is a, c, g, or u
cnguuucucuuccaaaagugaga

SEQ ID NO: 86382 - RNA, 24 nt, Artificial Sequence
  Synthetic
  misc_feature (3)..(3): n is a, c, g, or u
acnguuucucuuccaaaagugaga

SEQ ID NO: 86383 - RNA, 18 nt, Artificial Sequence
  Synthetic
  misc_feature (6)..(6): n is a, c, g, or u
  misc_feature (15)..(15): n is a, c, g, or u
aaggcnucccgauanaga

SEQ ID NO: 86384 - RNA, 19 nt, Artificial Sequence
  Synthetic
  misc_feature (7)..(7): n is a, c, g, or u
  misc_feature (16)..(16): n is a, c, g, or u
uaaggcnucccgauanaga

SEQ ID NO: 86385 - RNA, 20 nt, Artificial Sequence
  Synthetic
  misc_feature (8)..(8): n is a, c, g, or u
  misc_feature (17)..(17): n is a, c, g, or u
cuaaggcnucccgauanaga

SEQ ID NO: 86386 - RNA, 21 nt, Artificial Sequence
  Synthetic
  misc_feature (9)..(9): n is a, c, g, or u
  misc_feature (18)..(18): n is a, c, g, or u
ucuaaggcnucccgauanaga

SEQ ID NO: 86387 - RNA, 22 nt, Artificial Sequence
  Synthetic
  misc_feature (10)..(10): n is a, c, g, or u
  misc_feature (19)..(19): n is a, c, g, or u
cucuaaggcnucccgauanaga

SEQ ID NO: 86388 - RNA, 23 nt, Artificial Sequence
  Synthetic
  misc_feature (11)..(11): n is a, c, g, or u
  misc_feature (20)..(20): n is a, c, g, or u
acucuaaggcnucccgauanaga

SEQ ID NO: 86389 - RNA, 24 nt, Artificial Sequence
  Synthetic
  misc_feature (12)..(12): n is a, c, g, or u
  misc_feature (21)..(21): n is a, c, g, or u
gacucuaaggcnucccgauanaga

SEQ ID NO: 86390 - RNA, 18 nt, Artificial Sequence
  Synthetic
accccgccuguaacacga

SEQ ID NO: 86391 - RNA, 19 nt, Artificial Sequence
  Synthetic
aaccccgccuguaacacga

SEQ ID NO: 86392 - RNA, 20 nt, Artificial Sequence
  Synthetic
aaaccccgccuguaacacga

SEQ ID NO: 86393 - RNA, 21 nt, Artificial Sequence
  Synthetic
aaaaccccgccuguaacacga

SEQ ID NO: 86394 - RNA, 22 nt, Artificial Sequence
  Synthetic
aaaaaccccgccuguaacacga

SEQ ID NO: 86395 - RNA, 23 nt, Artificial Sequence
  Synthetic
gaaaaaccccgccuguaacacga

SEQ ID NO: 86396 - RNA, 24 nt, Artificial Sequence
  Synthetic
agaaaaaccccgccuguaacacga

SEQ ID NO: 86397 - RNA, 18 nt, Artificial Sequence
  Synthetic
  misc_feature (12)..(12): n is a, c, g, or u
agucccaagcgnccccga

SEQ ID NO: 86398 - RNA, 19 nt, Artificial Sequence
  Synthetic
  misc_feature (13)..(13): n is a, c, g, or u
gagucccaagcgnccccga

SEQ ID NO: 86399 - RNA, 20 nt, Artificial Sequence
  Synthetic
  misc_feature (14)..(14): n is a, c, g, or u
agagucccaagcgnccccga

SEQ ID NO: 86400 - RNA, 21 nt, Artificial Sequence
  Synthetic
  misc_feature (1)..(1): n is a, c, g, or u
  misc_feature (15)..(15): n is a, c, g, or u
nagagucccaagcgnccccga

SEQ ID NO: 86401 - RNA, 22 nt, Artificial Sequence
  Synthetic
  misc_feature (2)..(2): n is a, c, g, or u
  misc_feature (16)..(16): n is a, c, g, or u
anagagucccaagcgnccccga

SEQ ID NO: 86402 - RNA, 23 nt, Artificial Sequence
  Synthetic
  misc_feature (3)..(3): n is a, c, g, or u
  misc_feature (17)..(17): n is a, c, g, or u
ganagagucccaagcgnccccga

SEQ ID NO: 86403 - RNA, 24 nt, Artificial Sequence
  Synthetic
  misc_feature (4)..(4): n is a, c, g, or u
  misc_feature (18)..(18): n is a, c, g, or u
cganagagucccaagcgnccccga

SEQ ID NO: 86404 - RNA, 18 nt, Artificial Sequence
  Synthetic
  misc_feature (12)..(12): n is a, c, g, or u
gacucuaaggcnucccga

SEQ ID NO: 86405 - RNA, 19 nt, Artificial Sequence
  Synthetic
  misc_feature (13)..(13): n is a, c, g, or u
agacucuaaggcnucccga

SEQ ID NO: 86406 - RNA, 20 nt, Artificial Sequence
  Synthetic
  misc_feature (14)..(14): n is a, c, g, or u
gagacucuaaggcnucccga

SEQ ID NO: 86407 - RNA, 21 nt, Artificial Sequence
  Synthetic
  misc_feature (15)..(15): n is a, c, g, or u
ggagacucuaaggcnucccga

SEQ ID NO: 86408 - RNA, 22 nt, Artificial Sequence
  Synthetic
  misc_feature (16)..(16): n is a, c, g, or u
aggagacucuaaggcnucccga

SEQ ID NO: 86409 - RNA, 23 nt, Artificial Sequence
  Synthetic
  misc_feature (17)..(17): n is a, c, g, or u
caggagacucuaaggcnucccga

SEQ ID NO: 86410 - RNA, 24 nt, Artificial Sequence
  Synthetic
  misc_feature (18)..(18): n is a, c, g, or u
ucaggagacucuaaggcnucccga

SEQ ID NO: 86411 - RNA, 18 nt, Artificial Sequence
  Synthetic
cgcgggauucagcgccga

SEQ ID NO: 86412 - RNA, 19 nt, Artificial Sequence
  Synthetic
ccgcgggauucagcgccga

SEQ ID NO: 86413 - RNA, 20 nt, Artificial Sequence
  Synthetic
uccgcgggauucagcgccga

SEQ ID NO: 86414 - RNA, 18 nt, Artificial Sequence
  Synthetic
ucuucugcgacgcggcga

SEQ ID NO: 86415 - RNA, 19 nt, Artificial Sequence
  Synthetic
aucuucugcgacgcggcga

SEQ ID NO: 86416 - RNA, 20 nt, Artificial Sequence
  Synthetic
gaucuucugcgacgcggcga

SEQ ID NO: 86417 - RNA, 18 nt, Artificial Sequence
  Synthetic
gcuccagaccugcugcga

SEQ ID NO: 86418 - RNA, 19 nt, Artificial Sequence
  Synthetic
ugcuccagaccugcugcga

SEQ ID NO: 86419 - RNA, 20 nt, Artificial Sequence
  Synthetic
uugcuccagaccugcugcga

SEQ ID NO: 86420 - RNA, 21 nt, Artificial Sequence
  Synthetic
uuugcuccagaccugcugcga

SEQ ID NO: 86421 - RNA, 22 nt, Artificial Sequence
  Synthetic
guuugcuccagaccugcugcga

SEQ ID NO: 86422 - RNA, 23 nt, Artificial Sequence
  Synthetic
uguuugcuccagaccugcugcga

SEQ ID NO: 86423 - RNA, 24 nt, Artificial Sequence
  Synthetic
auguuugcuccagaccugcugcga

SEQ ID NO: 86424 - RNA, 18 nt, Artificial Sequence
  Synthetic
ugagaccuucgucugcga

SEQ ID NO: 86425 - RNA, 19 nt, Artificial Sequence
  Synthetic
uugagaccuucgucugcga

SEQ ID NO: 86426 - RNA, 20 nt, Artificial Sequence
  Synthetic
auugagaccuucgucugcga

SEQ ID NO: 86427 - RNA, 18 nt, Artificial Sequence
  Synthetic
gauugagaucuucugcga

SEQ ID NO: 86428 - RNA, 19 nt, Artificial Sequence
  Synthetic
agauugagaucuucugcga

SEQ ID NO: 86429 - RNA, 20 nt, Artificial Sequence
  Synthetic
gagauugagaucuucugcga

SEQ ID NO: 86430 - RNA, 21 nt, Artificial Sequence
  Synthetic
cgagauugagaucuucugcga

SEQ ID NO: 86431 - RNA, 22 nt, Artificial Sequence
  Synthetic
ccgagauugagaucuucugcga

SEQ ID NO: 86432 - RNA, 23 nt, Artificial Sequence
  Synthetic
cccgagauugagaucuucugcga

SEQ ID NO: 86433 - RNA, 24 nt, Artificial Sequence
  Synthetic
ucccgagauugagaucuucugcga

SEQ ID NO: 86434 - RNA, 18 nt, Artificial Sequence
  Synthetic
  misc_feature (12)..(12): n is a, c, g, or u
agaucucguacngaagga

SEQ ID NO: 86435 - RNA, 19 nt, Artificial Sequence
  Synthetic
  misc_feature (13)..(13): n is a, c, g, or u
aagaucucguacngaagga

SEQ ID NO: 86436 - RNA, 20 nt, Artificial Sequence
  Synthetic
  misc_feature (14)..(14): n is a, c, g, or u
gaagaucucguacngaagga

SEQ ID NO: 86437 - RNA, 21 nt, Artificial Sequence
  Synthetic
  misc_feature (15)..(15): n is a, c, g, or u
agaagaucucguacngaagga

SEQ ID NO: 86438 - RNA, 22 nt, Artificial Sequence
  Synthetic
  misc_feature (1)..(1): n is a, c, g, or u
  misc_feature (16)..(16): n is a, c, g, or u
nagaagaucucguacngaagga

SEQ ID NO: 86439 - RNA, 23 nt, Artificial Sequence
  Synthetic
  misc_feature (2)..(2): n is a, c, g, or u
  misc_feature (17)..(17): n is a, c, g, or u
cnagaagaucucguacngaagga

SEQ ID NO: 86440 - RNA, 24 nt, Artificial Sequence
  Synthetic
  misc_feature (3)..(3): n is a, c, g, or u
  misc_feature (18)..(18): n is a, c, g, or u
ucnagaagaucucguacngaagga

SEQ ID NO: 86441 - RNA, 18 nt, Artificial Sequence
  Synthetic
ugaggcauagcagcagga

SEQ ID NO: 86442 - RNA, 19 nt, Artificial Sequence
  Synthetic
augaggcauagcagcagga

SEQ ID NO: 86443 - RNA, 20 nt, Artificial Sequence
  Synthetic
gaugaggcauagcagcagga

SEQ ID NO: 86444 - RNA, 21 nt, Artificial Sequence
  Synthetic
agaugaggcauagcagcagga

SEQ ID NO: 86445 - RNA, 22 nt, Artificial Sequence
  Synthetic
aagaugaggcauagcagcagga

SEQ ID NO: 86446 - RNA, 23 nt, Artificial Sequence
  Synthetic
gaagaugaggcauagcagcagga

SEQ ID NO: 86447 - RNA, 24 nt, Artificial Sequence
  Synthetic
agaagaugaggcauagcagcagga

SEQ ID NO: 86448 - RNA, 18 nt, Artificial Sequence
  Synthetic
  misc_feature (9)..(9): n is a, c, g, or u
  misc_feature (12)..(12): n is a, c, g, or u
cgauuggungangcagga

SEQ ID NO: 86449 - RNA, 19 nt, Artificial Sequence
  Synthetic
  misc_feature (10)..(10): n is a, c, g, or u
  misc_feature (13)..(13): n is a, c, g, or u
gcgauuggungangcagga

SEQ ID NO: 86450 - RNA, 20 nt, Artificial Sequence
  Synthetic
  misc_feature (11)..(11): n is a, c, g, or u
  misc_feature (14)..(14): n is a, c, g, or u
ggcgauuggungangcagga

SEQ ID NO: 86451 - RNA, 21 nt, Artificial Sequence
  Synthetic
  misc_feature (12)..(12): n is a, c, g, or u
  misc_feature (15)..(15): n is a, c, g, or u
uggcgauuggungangcagga

SEQ ID NO: 86452 - RNA, 22 nt, Artificial Sequence
  Synthetic
  misc_feature (13)..(13): n is a, c, g, or u
  misc_feature (16)..(16): n is a, c, g, or u
cuggcgauuggungangcagga

SEQ ID NO: 86453 - RNA, 23 nt, Artificial Sequence
  Synthetic
  misc_feature (14)..(14): n is a, c, g, or u
  misc_feature (17)..(17): n is a, c, g, or u
acuggcgauuggungangcagga

SEQ ID NO: 86454 - RNA, 24 nt, Artificial Sequence
  Synthetic
  misc_feature (15)..(15): n is a, c, g, or u
  misc_feature (18)..(18): n is a, c, g, or u
gacuggcgauuggungangcagga

SEQ ID NO: 86455 - RNA, 18 nt, Artificial Sequence
  Synthetic
ccaggacaaguuggagga

SEQ ID NO: 86456 - RNA, 19 nt, Artificial Sequence
  Synthetic
accaggacaaguuggagga

SEQ ID NO: 86457 - RNA, 20 nt, Artificial Sequence
  Synthetic
aaccaggacaaguuggagga

SEQ ID NO: 86458 - RNA, 21 nt, Artificial Sequence
  Synthetic
uaaccaggacaaguuggagga

SEQ ID NO: 86459 - RNA, 22 nt, Artificial Sequence
  Synthetic
auaaccaggacaaguuggagga

SEQ ID NO: 86460 - RNA, 23 nt, Artificial Sequence
  Synthetic
gauaaccaggacaaguuggagga

SEQ ID NO: 86461 - RNA, 24 nt, Artificial Sequence
  Synthetic
cgauaaccaggacaaguuggagga

SEQ ID NO: 86462 - RNA, 18 nt, Artificial Sequence
  Synthetic
gaggcuugaacaguagga

SEQ ID NO: 86463 - RNA, 19 nt, Artificial Sequence
  Synthetic
ggaggcuugaacaguagga

SEQ ID NO: 86464 - RNA, 20 nt, Artificial Sequence
  Synthetic
uggaggcuugaacaguagga

SEQ ID NO: 86465 - RNA, 21 nt, Artificial Sequence
  Synthetic
uuggaggcuugaacaguagga

SEQ ID NO: 86466 - RNA, 22 nt, Artificial Sequence
  Synthetic
cuuggaggcuugaacaguagga

SEQ ID NO: 86467 - RNA, 23 nt, Artificial Sequence
  Synthetic
gcuuggaggcuugaacaguagga

SEQ ID NO: 86468 - RNA, 24 nt, Artificial Sequence
  Synthetic
agcuuggaggcuugaacaguagga

SEQ ID NO: 86469 - RNA, 18 nt, Artificial Sequence
  Synthetic
uguaaauguauauuagga

SEQ ID NO: 86470 - RNA, 19 nt, Artificial Sequence
  Synthetic
guguaaauguauauuagga

SEQ ID NO: 86471 - RNA, 20 nt, Artificial Sequence
  Synthetic
gguguaaauguauauuagga

SEQ ID NO: 86472 - RNA, 21 nt, Artificial Sequence
  Synthetic
ugguguaaauguauauuagga

SEQ ID NO: 86473 - RNA, 22 nt, Artificial Sequence
  Synthetic
uugguguaaauguauauuagga

SEQ ID NO: 86474 - RNA, 23 nt, Artificial Sequence
  Synthetic
cuugguguaaauguauauuagga

SEQ ID NO: 86475 - RNA, 24 nt, Artificial Sequence
  Synthetic
ucuugguguaaauguauauuagga

SEQ ID NO: 86476 - RNA, 18 nt, Artificial Sequence
  Synthetic
  misc_feature (2)..(2): n is a, c, g, or u
  misc_feature (5)..(5): n is a, c, g, or u
gncgnaacggcagacgga

SEQ ID NO: 86477 - RNA, 19 nt, Artificial Sequence
  Synthetic
  misc_feature (3)..(3): n is a, c, g, or u
  misc_feature (6)..(6): n is a, c, g, or u
ggncgnaacggcagacgga

SEQ ID NO: 86478 - RNA, 20 nt, Artificial Sequence
  Synthetic
  misc_feature (4)..(4): n is a, c, g, or u
  misc_feature (7)..(7): n is a, c, g, or u
cggncgnaacggcagacgga

SEQ ID NO: 86479 - RNA, 21 nt, Artificial Sequence
  Synthetic
  misc_feature (5)..(5): n is a, c, g, or u
  misc_feature (8)..(8): n is a, c, g, or u
ucggncgnaacggcagacgga

SEQ ID NO: 86480 - RNA, 22 nt, Artificial Sequence
  Synthetic
  misc_feature (6)..(6): n is a, c, g, or u
  misc_feature (9)..(9): n is a, c, g, or u
gucggncgnaacggcagacgga

SEQ ID NO: 86481 - RNA, 23 nt, Artificial Sequence
  Synthetic
  misc_feature (7)..(7): n is a, c, g, or u
  misc_feature (10)..(10): n is a, c, g, or u
ggucggncgnaacggcagacgga

SEQ ID NO: 86482 - RNA, 24 nt, Artificial Sequence
  Synthetic
  misc_feature (8)..(8): n is a, c, g, or u
  misc_feature (11)..(11): n is a, c, g, or u
uggucggncgnaacggcagacgga

SEQ ID NO: 86483 - RNA, 18 nt, Artificial Sequence
  Synthetic
  misc_feature (1)..(1): n is a, c, g, or u
  misc_feature (7)..(7): n is a, c, g, or u
ngagagncaguagucgga

SEQ ID NO: 86484 - RNA, 19 nt, Artificial Sequence
  Synthetic
  misc_feature (2)..(2): n is a, c, g, or u
  misc_feature (8)..(8): n is a, c, g, or u
gngagagncaguagucgga

SEQ ID NO: 86485 - RNA, 20 nt, Artificial Sequence
  Synthetic
  misc_feature (1)..(1): n is a, c, g, or u
  misc_feature (3)..(3): n is a, c, g, or u
  misc_feature (9)..(9): n is a, c, g, or u
ngngagagncaguagucgga

SEQ ID NO: 86486 - RNA, 21 nt, Artificial Sequence
  Synthetic
  misc_feature (2)..(2): n is a, c, g, or u
  misc_feature (4)..(4): n is a, c, g, or u
  misc_feature (10)..(10): n is a, c, g, or u
angngagagncaguagucgga

SEQ ID NO: 86487 - RNA, 22 nt, Artificial Sequence
  Synthetic
  misc_feature (3)..(3): n is a, c, g, or u
  misc_feature (5)..(5): n is a, c, g, or u
  misc_feature (11)..(11): n is a, c, g, or u
uangngagagncaguagucgga

SEQ ID NO: 86488 - RNA, 23 nt, Artificial Sequence
  Synthetic
  misc_feature (4)..(4): n is a, c, g, or u
  misc_feature (6)..(6): n is a, c, g, or u
  misc_feature (12)..(12): n is a, c, g, or u
auangngagagncaguagucgga

SEQ ID NO: 86489 - RNA, 24 nt, Artificial Sequence
  Synthetic
  misc_feature (5)..(5): n is a, c, g, or u
  misc_feature (7)..(7): n is a, c, g, or u
  misc_feature (13)..(13): n is a, c, g, or u
gauangngagagncaguagucgga

SEQ ID NO: 86490 - RNA, 18 nt, Artificial Sequence
  Synthetic
aacagcgguaaaaaggga

SEQ ID NO: 86491 - RNA, 19 nt, Artificial Sequence
  Synthetic
uaacagcgguaaaaaggga

SEQ ID NO: 86492 - RNA, 20 nt, Artificial Sequence
  Synthetic
guaacagcgguaaaaaggga

SEQ ID NO: 86493 - RNA, 21 nt, Artificial Sequence
  Synthetic
gguaacagcgguaaaaaggga

SEQ ID NO: 86494 - RNA, 22 nt, Artificial Sequence
  Synthetic
ugguaacagcgguaaaaaggga

SEQ ID NO: 86495 - RNA, 23 nt, Artificial Sequence
  Synthetic
uugguaacagcgguaaaaaggga

SEQ ID NO: 86496 - RNA, 24 nt, Artificial Sequence
  Synthetic
auugguaacagcgguaaaaaggga

SEQ ID NO: 86497 - RNA, 18 nt, Artificial Sequence
  Synthetic
gauucagcgccgacggga

SEQ ID NO: 86498 - RNA, 19 nt, Artificial Sequence
  Synthetic
ggauucagcgccgacggga

SEQ ID NO: 86499 - RNA, 20 nt, Artificial Sequence
  Synthetic
gggauucagcgccgacggga

SEQ ID NO: 86500 - RNA, 18 nt, Artificial Sequence
  Synthetic
gaagggucguccgcggga

SEQ ID NO: 86501 - RNA, 19 nt, Artificial Sequence
  Synthetic
agaagggucguccgcggga

SEQ ID NO: 86502 - RNA, 20 nt, Artificial Sequence
  Synthetic
gagaagggucguccgcggga

SEQ ID NO: 86503 - RNA, 21 nt, Artificial Sequence
  Synthetic
cgagaagggucguccgcggga

SEQ ID NO: 86504 - RNA, 22 nt, Artificial Sequence
  Synthetic
ccgagaagggucguccgcggga

SEQ ID NO: 86505 - RNA, 23 nt, Artificial Sequence
  Synthetic
cccgagaagggucguccgcggga

SEQ ID NO: 86506 - RNA, 24 nt, Artificial Sequence
  Synthetic
ccccgagaagggucguccgcggga

SEQ ID NO: 86507 - RNA, 18 nt, Artificial Sequence
  Synthetic
  misc_feature (8)..(8): n is a, c, g, or u
aagcccangaugauggga

SEQ ID NO: 86508 - RNA, 19 nt, Artificial Sequence
  Synthetic
  misc_feature (9)..(9): n is a, c, g, or u
aaagcccangaugauggga

SEQ ID NO: 86509 - RNA, 20 nt, Artificial Sequence
  Synthetic
  misc_feature (10)..(10): n is a, c, g, or u
gaaagcccangaugauggga

SEQ ID NO: 86510 - RNA, 21 nt, Artificial Sequence
  Synthetic
  misc_feature (11)..(11): n is a, c, g, or u
cgaaagcccangaugauggga

SEQ ID NO: 86511 - RNA, 22 nt, Artificial Sequence
  Synthetic
  misc_feature (12)..(12): n is a, c, g, or u
ccgaaagcccangaugauggga

SEQ ID NO: 86512 - RNA, 23 nt, Artificial Sequence
  Synthetic
  misc_feature (13)..(13): n is a, c, g, or u
uccgaaagcccangaugauggga

SEQ ID NO: 86513 - RNA, 24 nt, Artificial Sequence
  Synthetic
  misc_feature (14)..(14): n is a, c, g, or u
uuccgaaagcccangaugauggga

SEQ ID NO: 86514 - RNA, 18 nt, Artificial Sequence
  Synthetic
cagguguccuuguuggga

SEQ ID NO: 86515 - RNA, 19 nt, Artificial Sequence
  Synthetic
ccagguguccuuguuggga

SEQ ID NO: 86516 - RNA, 20 nt, Artificial Sequence
  Synthetic
gccagguguccuuguuggga

SEQ ID NO: 86517 - RNA, 21 nt, Artificial Sequence
  Synthetic
ggccagguguccuuguuggga

SEQ ID NO: 86518 - RNA, 22 nt, Artificial Sequence
  Synthetic
uggccagguguccuuguuggga

SEQ ID NO: 86519 - RNA, 23 nt, Artificial Sequence
  Synthetic
cuggccagguguccuuguuggga

SEQ ID NO: 86520 - RNA, 24 nt, Artificial Sequence
  Synthetic
ucuggccagguguccuuguuggga

SEQ ID NO: 86521 - RNA, 18 nt, Artificial Sequence
  Synthetic
  misc_feature (3)..(3): n is a, c, g, or u
  misc_feature (9)..(9): n is a, c, g, or u
gunguugangauccugga

SEQ ID NO: 86522 - RNA, 19 nt, Artificial Sequence
  Synthetic
  misc_feature (4)..(4): n is a, c, g, or u
  misc_feature (10)..(10): n is a, c, g, or u
ggunguugangauccugga

SEQ ID NO: 86523 - RNA, 20 nt, Artificial Sequence
  Synthetic
  misc_feature (5)..(5): n is a, c, g, or u
  misc_feature (11)..(11): n is a, c, g, or u
uggunguugangauccugga

SEQ ID NO: 86524 - RNA, 21 nt, Artificial Sequence
  Synthetic
  misc_feature (6)..(6): n is a, c, g, or u
  misc_feature (12)..(12): n is a, c, g, or u
cuggunguugangauccugga

SEQ ID NO: 86525 - RNA, 22 nt, Artificial Sequence
  Synthetic
  misc_feature (7)..(7): n is a, c, g, or u
  misc_feature (13)..(13): n is a, c, g, or u
gcuggunguugangauccugga

SEQ ID NO: 86526 - RNA, 23 nt, Artificial Sequence
  Synthetic
  misc_feature (1)..(1): n is a, c, g, or u
  misc_feature (8)..(8): n is a, c, g, or u
  misc_feature (14)..(14): n is a, c, g, or u
ngcuggunguugangauccugga

SEQ ID NO: 86527 - RNA, 24 nt, Artificial Sequence
  Synthetic
  misc_feature (1)..(2): n is a, c, g, or u
  misc_feature (9)..(9): n is a, c, g, or u
  misc_feature (15)..(15): n is a, c, g, or u
nngcuggunguugangauccugga

SEQ ID NO: 86528 - RNA, 18 nt, Artificial Sequence
  Synthetic
uuugcucugaaggcugga

SEQ ID NO: 86529 - RNA, 19 nt, Artificial Sequence
  Synthetic
guuugcucugaaggcugga

SEQ ID NO: 86530 - RNA, 20 nt, Artificial Sequence
  Synthetic
uguuugcucugaaggcugga

SEQ ID NO: 86531 - RNA, 21 nt, Artificial Sequence
  Synthetic
guguuugcucugaaggcugga

SEQ ID NO: 86532 - RNA, 22 nt, Artificial Sequence
  Synthetic
gguguuugcucugaaggcugga

SEQ ID NO: 86533 - RNA, 23 nt, Artificial Sequence
  Synthetic
cgguguuugcucugaaggcugga

SEQ ID NO: 86534 - RNA, 24 nt, Artificial Sequence
  Synthetic
gcgguguuugcucugaaggcugga

SEQ ID NO: 86535 - RNA, 18 nt, Artificial Sequence
  Synthetic
guguuucucaaaggugga

SEQ ID NO: 86536 - RNA, 19 nt, Artificial Sequence
  Synthetic
aguguuucucaaaggugga

SEQ ID NO: 86537 - RNA, 20 nt, Artificial Sequence
  Synthetic
gaguguuucucaaaggugga

SEQ ID NO: 86538 - RNA, 21 nt, Artificial Sequence
  Synthetic
ugaguguuucucaaaggugga

SEQ ID NO: 86539 - RNA, 22 nt, Artificial Sequence
  Synthetic
augaguguuucucaaaggugga

SEQ ID NO: 86540 - RNA, 23 nt, Artificial Sequence
  Synthetic
gaugaguguuucucaaaggugga

SEQ ID NO: 86541 - RNA, 24 nt, Artificial Sequence
  Synthetic
ggaugaguguuucucaaaggugga

SEQ ID NO: 86542 - RNA, 18 nt, Artificial Sequence
  Synthetic
  misc_feature (12)..(12): n is a, c, g, or u
uauuugguaacnuuugga

SEQ ID NO: 86543 - RNA, 19 nt, Artificial Sequence
  Synthetic
  misc_feature (13)..(13): n is a, c, g, or u
auauuugguaacnuuugga

SEQ ID NO: 86544 - RNA, 20 nt, Artificial Sequence
  Synthetic
  misc_feature (14)..(14): n is a, c, g, or u
aauauuugguaacnuuugga

SEQ ID NO: 86545 - RNA, 21 nt, Artificial Sequence
  Synthetic
  misc_feature (15)..(15): n is a, c, g, or u
aaauauuugguaacnuuugga

SEQ ID NO: 86546 - RNA, 22 nt, Artificial Sequence
  Synthetic
  misc_feature (1)..(1): n is a, c, g, or u
  misc_feature (16)..(16): n is a, c, g, or u
naaauauuugguaacnuuugga

SEQ ID NO: 86547 - RNA, 23 nt, Artificial Sequence
  Synthetic
  misc_feature (2)..(2): n is a, c, g, or u
  misc_feature (17)..(17): n is a, c, g, or u
gnaaauauuugguaacnuuugga

SEQ ID NO: 86548 - RNA, 24 nt, Artificial Sequence
  Synthetic
  misc_feature (3)..(3): n is a, c, g, or u
  misc_feature (18)..(18): n is a, c, g, or u
ggnaaauauuugguaacnuuugga

SEQ ID NO: 86549 - RNA, 18 nt, Artificial Sequence
  Synthetic
  misc_feature (1)..(1): n is a, c, g, or u
  misc_feature (16)..(16): n is a, c, g, or u
nagaagaucucguacnga

SEQ ID NO: 86550 - RNA, 19 nt, Artificial Sequence
  Synthetic
  misc_feature (2)..(2): n is a, c, g, or u
  misc_feature (17)..(17): n is a, c, g, or u
cnagaagaucucguacnga

SEQ ID NO: 86551 - RNA, 20 nt, Artificial Sequence
  Synthetic
  misc_feature (3)..(3): n is a, c, g, or u
  misc_feature (18)..(18): n is a, c, g, or u
ucnagaagaucucguacnga

SEQ ID NO: 86552 - RNA, 21 nt, Artificial Sequence
  Synthetic
  misc_feature (4)..(4): n is a, c, g, or u
  misc_feature (19)..(19): n is a, c, g, or u
aucnagaagaucucguacnga

SEQ ID NO: 86553 - RNA, 22 nt, Artificial Sequence
  Synthetic
  misc_feature (5)..(5): n is a, c, g, or u
  misc_feature (20)..(20): n is a, c, g, or u
uaucnagaagaucucguacnga

SEQ ID NO: 86554 - RNA, 23 nt, Artificial Sequence
  Synthetic
  misc_feature (6)..(6): n is a, c, g, or u
  misc_feature (21)..(21): n is a, c, g, or u
guaucnagaagaucucguacnga

SEQ ID NO: 86555 - RNA, 24 nt, Artificial Sequence
  Synthetic
  misc_feature (7)..(7): n is a, c, g, or u
  misc_feature (22)..(22): n is a, c, g, or u
gguaucnagaagaucucguacnga

SEQ ID NO: 86556 - RNA, 18 nt, Artificial Sequence
  Synthetic
  misc_feature (16)..(16): n is a, c, g, or u
ugacuggcgauuggunga

SEQ ID NO: 86557 - RNA, 19 nt, Artificial Sequence
  Synthetic
  misc_feature (17)..(17): n is a, c, g, or u
cugacuggcgauuggunga

SEQ ID NO: 86558 - RNA, 20 nt, Artificial Sequence
  Synthetic
  misc_feature (18)..(18): n is a, c, g, or u
ccugacuggcgauuggunga

SEQ ID NO: 86559 - RNA, 21 nt, Artificial Sequence
  Synthetic
  misc_feature (19)..(19): n is a, c, g, or u
uccugacuggcgauuggunga

SEQ ID NO: 86560 - RNA, 22 nt, Artificial Sequence
  Synthetic
  misc_feature (20)..(20): n is a, c, g, or u
uuccugacuggcgauuggunga

SEQ ID NO: 86561 - RNA, 23 nt, Artificial Sequence
  Synthetic
  misc_feature (21)..(21): n is a, c, g, or u
cuuccugacuggcgauuggunga

SEQ ID NO: 86562 - RNA, 24 nt, Artificial Sequence
  Synthetic
  misc_feature (22)..(22): n is a, c, g, or u
ccuuccugacuggcgauuggunga

SEQ ID NO: 86563 - RNA, 18 nt, Artificial Sequence
  Synthetic
uugaacaguaggacauga

SEQ ID NO: 86564 - RNA, 19 nt, Artificial Sequence
  Synthetic
cuugaacaguaggacauga

SEQ ID NO: 86565 - RNA, 20 nt, Artificial Sequence
  Synthetic
gcuugaacaguaggacauga

SEQ ID NO: 86566 - RNA, 21 nt, Artificial Sequence
  Synthetic
ggcuugaacaguaggacauga

SEQ ID NO: 86567 - RNA, 22 nt, Artificial Sequence
  Synthetic
aggcuugaacaguaggacauga

SEQ ID NO: 86568 - RNA, 23 nt, Artificial Sequence
  Synthetic
gaggcuugaacaguaggacauga

SEQ ID NO: 86569 - RNA, 24 nt, Artificial Sequence
  Synthetic
ggaggcuugaacaguaggacauga

SEQ ID NO: 86570 - RNA, 18 nt, Artificial Sequence
  Synthetic
ugcgcugauggcccauga

SEQ ID NO: 86571 - RNA, 19 nt, Artificial Sequence
  Synthetic
augcgcugauggcccauga

SEQ ID NO: 86572 - RNA, 20 nt, Artificial Sequence
  Synthetic
caugcgcugauggcccauga

SEQ ID NO: 86573 - RNA, 21 nt, Artificial Sequence
  Synthetic
gcaugcgcugauggcccauga

SEQ ID NO: 86574 - RNA, 22 nt, Artificial Sequence
  Synthetic
cgcaugcgcugauggcccauga

SEQ ID NO: 86575 - RNA, 23 nt, Artificial Sequence
  Synthetic
acgcaugcgcugauggcccauga

SEQ ID NO: 86576 - RNA, 24 nt, Artificial Sequence
  Synthetic
cacgcaugcgcugauggcccauga

SEQ ID NO: 86577 - RNA, 18 nt, Artificial Sequence
  Synthetic
ggaugaagaggaagauga

SEQ ID NO: 86578 - RNA, 19 nt, Artificial Sequence
  Synthetic
aggaugaagaggaagauga

SEQ ID NO: 86579 - RNA, 20 nt, Artificial Sequence
  Synthetic
caggaugaagaggaagauga

SEQ ID NO: 86580 - RNA, 21 nt, Artificial Sequence
  Synthetic
gcaggaugaagaggaagauga

SEQ ID NO: 86581 - RNA, 22 nt, Artificial Sequence
  Synthetic
agcaggaugaagaggaagauga

SEQ ID NO: 86582 - RNA, 23 nt, Artificial Sequence
  Synthetic
cagcaggaugaagaggaagauga

SEQ ID NO: 86583 - RNA, 24 nt, Artificial Sequence
  Synthetic
gcagcaggaugaagaggaagauga

SEQ ID NO: 86584 - RNA, 18 nt, Artificial Sequence
  Synthetic
acacgguccggcagauga

SEQ ID NO: 86585 - RNA, 19 nt, Artificial Sequence
  Synthetic
cacacgguccggcagauga

SEQ ID NO: 86586 - RNA, 20 nt, Artificial Sequence
  Synthetic
gcacacgguccggcagauga

SEQ ID NO: 86587 - RNA, 18 nt, Artificial Sequence
  Synthetic
gacaugaacaagagauga

SEQ ID NO: 86588 - RNA, 19 nt, Artificial Sequence
  Synthetic
ggacaugaacaagagauga

SEQ ID NO: 86589 - RNA, 20 nt, Artificial Sequence
  Synthetic
aggacaugaacaagagauga

SEQ ID NO: 86590 - RNA, 21 nt, Artificial Sequence
  Synthetic
uaggacaugaacaagagauga

SEQ ID NO: 86591 - RNA, 22 nt, Artificial Sequence
  Synthetic
guaggacaugaacaagagauga

SEQ ID NO: 86592 - RNA, 23 nt, Artificial Sequence
  Synthetic
aguaggacaugaacaagagauga

SEQ ID NO: 86593 - RNA, 24 nt, Artificial Sequence
  Synthetic
caguaggacaugaacaagagauga

SEQ ID NO: 86594 - RNA, 18 nt, Artificial Sequence
  Synthetic
ggcauagcagcaggauga

SEQ ID NO: 86595 - RNA, 19 nt, Artificial Sequence
  Synthetic
aggcauagcagcaggauga

SEQ ID NO: 86596 - RNA, 20 nt, Artificial Sequence
  Synthetic
gaggcauagcagcaggauga

SEQ ID NO: 86597 - RNA, 21 nt, Artificial Sequence
  Synthetic
ugaggcauagcagcaggauga

SEQ ID NO: 86598 - RNA, 22 nt, Artificial Sequence
  Synthetic
augaggcauagcagcaggauga

SEQ ID NO: 86599 - RNA, 23 nt, Artificial Sequence
  Synthetic
gaugaggcauagcagcaggauga

SEQ ID NO: 86600 - RNA, 24 nt, Artificial Sequence
  Synthetic
agaugaggcauagcagcaggauga

SEQ ID NO: 86601 - RNA, 18 nt, Artificial Sequence
  Synthetic
auggcacuaguaaacuga

SEQ ID NO: 86602 - RNA, 19 nt, Artificial Sequence
  Synthetic
aauggcacuaguaaacuga

SEQ ID NO: 86603 - RNA, 20 nt, Artificial Sequence
  Synthetic
aaauggcacuaguaaacuga

SEQ ID NO: 86604 - RNA, 21 nt, Artificial Sequence
  Synthetic
caaauggcacuaguaaacuga

SEQ ID NO: 86605 - RNA, 22 nt, Artificial Sequence
  Synthetic
acaaauggcacuaguaaacuga

SEQ ID NO: 86606 - RNA, 23 nt, Artificial Sequence
  Synthetic
aacaaauggcacuaguaaacuga

SEQ ID NO: 86607 - RNA, 24 nt, Artificial Sequence
  Synthetic
gaacaaauggcacuaguaaacuga

SEQ ID NO: 86608 - RNA, 18 nt, Artificial Sequence
  Synthetic
aggguuuacuguuccuga

SEQ ID NO: 86609 - RNA, 19 nt, Artificial Sequence
  Synthetic
caggguuuacuguuccuga

SEQ ID NO: 86610 - RNA, 20 nt, Artificial Sequence
  Synthetic
acaggguuuacuguuccuga

SEQ ID NO: 86611 - RNA, 21 nt, Artificial Sequence
  Synthetic
aacaggguuuacuguuccuga

SEQ ID NO: 86612 - RNA, 22 nt, Artificial Sequence
  Synthetic
gaacaggguuuacuguuccuga

SEQ ID NO: 86613 - RNA, 23 nt, Artificial Sequence
  Synthetic
ggaacaggguuuacuguuccuga

SEQ ID NO: 86614 - RNA, 24 nt, Artificial Sequence
  Synthetic
cggaacaggguuuacuguuccuga

SEQ ID NO: 86615 - RNA, 18 nt, Artificial Sequence
  Synthetic
uuucucuuccaaaaguga

SEQ ID NO: 86616 - RNA, 19 nt, Artificial Sequence
  Synthetic
guuucucuuccaaaaguga

SEQ ID NO: 86617 - RNA, 20 nt, Artificial Sequence
  Synthetic
  misc_feature (1)..(1): n is a, c, g, or u
nguuucucuuccaaaaguga

SEQ ID NO: 86618 - RNA, 21 nt, Artificial Sequence
  Synthetic
  misc_feature (2)..(2): n is a, c, g, or u
cnguuucucuuccaaaaguga

SEQ ID NO: 86619 - RNA, 22 nt, Artificial Sequence
  Synthetic
  misc_feature (3)..(3): n is a, c, g, or u
acnguuucucuuccaaaaguga

SEQ ID NO: 86620 - RNA, 23 nt, Artificial Sequence
  Synthetic
  misc_feature (1)..(1): n is a, c, g, or u
  misc_feature (4)..(4): n is a, c, g, or u
nacnguuucucuuccaaaaguga

SEQ ID NO: 86621 - RNA, 24 nt, Artificial Sequence
  Synthetic
  misc_feature (1)..(2): n is a, c, g, or u
  misc_feature (5)..(5): n is a, c, g, or u
nnacnguuucucuuccaaaaguga

SEQ ID NO: 86622 - RNA, 18 nt, Artificial Sequence
  Synthetic
caggagguuggugaguga

SEQ ID NO: 86623 - RNA, 19 nt, Artificial Sequence
  Synthetic
acaggagguuggugaguga

SEQ ID NO: 86624 - RNA, 20 nt, Artificial Sequence
  Synthetic
gacaggagguuggugaguga

SEQ ID NO: 86625 - RNA, 21 nt, Artificial Sequence
  Synthetic
ggacaggagguuggugaguga

SEQ ID NO: 86626 - RNA, 22 nt, Artificial Sequence
  Synthetic
aggacaggagguuggugaguga

SEQ ID NO: 86627 - RNA, 23 nt, Artificial Sequence
  Synthetic
gaggacaggagguuggugaguga

SEQ ID NO: 86628 - RNA, 24 nt, Artificial Sequence
  Synthetic
ggaggacaggagguuggugaguga

SEQ ID NO: 86629 - RNA, 18 nt, Artificial Sequence
  Synthetic
ugcgacgugcagagguga

SEQ ID NO: 86630 - RNA, 19 nt, Artificial Sequence
  Synthetic
augcgacgugcagagguga

SEQ ID NO: 86631 - RNA, 20 nt, Artificial Sequence
  Synthetic
caugcgacgugcagagguga

SEQ ID NO: 86632 - RNA, 21 nt, Artificial Sequence
  Synthetic
ccaugcgacgugcagagguga

SEQ ID NO: 86633 - RNA, 22 nt, Artificial Sequence
  Synthetic
uccaugcgacgugcagagguga

SEQ ID NO: 86634 - RNA, 23 nt, Artificial Sequence
  Synthetic
cuccaugcgacgugcagagguga

SEQ ID NO: 86635 - RNA, 24 nt, Artificial Sequence
  Synthetic
ucuccaugcgacgugcagagguga

SEQ ID NO: 86636 - RNA, 18 nt, Artificial Sequence
  Synthetic
  misc_feature (15)..(15): n is a, c, g, or u
cugagugcaguaugnuga

SEQ ID NO: 86637 - RNA, 19 nt, Artificial Sequence
  Synthetic
  misc_feature (16)..(16): n is a, c, g, or u
ccugagugcaguaugnuga

SEQ ID NO: 86638 - RNA, 20 nt, Artificial Sequence
  Synthetic
  misc_feature (17)..(17): n is a, c, g, or u
gccugagugcaguaugnuga

SEQ ID NO: 86639 - RNA, 21 nt, Artificial Sequence
  Synthetic
  misc_feature (18)..(18): n is a, c, g, or u
ugccugagugcaguaugnuga

SEQ ID NO: 86640 - RNA, 22 nt, Artificial Sequence
  Synthetic
  misc_feature (19)..(19): n is a, c, g, or u
uugccugagugcaguaugnuga

SEQ ID NO: 86641 - RNA, 23 nt, Artificial Sequence
  Synthetic
  misc_feature (20)..(20): n is a, c, g, or u
cuugccugagugcaguaugnuga

SEQ ID NO: 86642 - RNA, 24 nt, Artificial Sequence
  Synthetic
  misc_feature (21)..(21): n is a, c, g, or u
gcuugccugagugcaguaugnuga

SEQ ID NO: 86643 - RNA, 18 nt, Artificial Sequence
  Synthetic
  misc_feature (2)..(2): n is a, c, g, or u
uncccccuagaaaauuga

SEQ ID NO: 86644 - RNA, 19 nt, Artificial Sequence
  Synthetic
  misc_feature (3)..(3): n is a, c, g, or u
guncccccuagaaaauuga

SEQ ID NO: 86645 - RNA, 20 nt, Artificial Sequence
  Synthetic
  misc_feature (1)..(1): n is a, c, g, or u
  misc_feature (4)..(4): n is a, c, g, or u
nguncccccuagaaaauuga

SEQ ID NO: 86646 - RNA, 21 nt, Artificial Sequence
  Synthetic
  misc_feature (2)..(2): n is a, c, g, or u
  misc_feature (5)..(5): n is a, c, g, or u
unguncccccuagaaaauuga

SEQ ID NO: 86647 - RNA, 22 nt, Artificial Sequence
  Synthetic
  misc_feature (3)..(3): n is a, c, g, or u
  misc_feature (6)..(6): n is a, c, g, or u
gunguncccccuagaaaauuga

SEQ ID NO: 86648 - RNA, 23 nt, Artificial Sequence
  Synthetic
  misc_feature (4)..(4): n is a, c, g, or u
  misc_feature (7)..(7): n is a, c, g, or u
ggunguncccccuagaaaauuga

SEQ ID NO: 86649 - RNA, 24 nt, Artificial Sequence
  Synthetic
  misc_feature (5)..(5): n is a, c, g, or u
  misc_feature (8)..(8): n is a, c, g, or u
cggunguncccccuagaaaauuga

SEQ ID NO: 86650 - RNA, 18 nt, Artificial Sequence
  Synthetic
  misc_feature (17)..(17): n is a, c, g, or u
ggcccauauuaguguuna

SEQ ID NO: 86651 - RNA, 19 nt, Artificial Sequence
  Synthetic
  misc_feature (18)..(18): n is a, c, g, or u
aggcccauauuaguguuna

SEQ ID NO: 86652 - RNA, 20 nt, Artificial Sequence
  Synthetic
  misc_feature (19)..(19): n is a, c, g, or u
uaggcccauauuaguguuna

SEQ ID NO: 86653 - RNA, 21 nt, Artificial Sequence
  Synthetic
  misc_feature (20)..(20): n is a, c, g, or u
uuaggcccauauuaguguuna

SEQ ID NO: 86654 - RNA, 22 nt, Artificial Sequence
  Synthetic
  misc_feature (21)..(21): n is a, c, g, or u
uuuaggcccauauuaguguuna

SEQ ID NO: 86655 - RNA, 23 nt, Artificial Sequence
  Synthetic
  misc_feature (22)..(22): n is a, c, g, or u
cuuuaggcccauauuaguguuna

SEQ ID NO: 86656 - RNA, 24 nt, Artificial Sequence
  Synthetic
  misc_feature (23)..(23): n is a, c, g, or u
acuuuaggcccauauuaguguuna

SEQ ID NO: 86657 - RNA, 18 nt, Artificial Sequence
  Synthetic
  misc_feature (13)..(13): n is a, c, g, or u
cauauuaguguunacaua

SEQ ID NO: 86658 - RNA, 19 nt, Artificial Sequence
  Synthetic
  misc_feature (14)..(14): n is a, c, g, or u
ccauauuaguguunacaua

SEQ ID NO: 86659 - RNA, 20 nt, Artificial Sequence
  Synthetic
  misc_feature (15)..(15): n is a, c, g, or u
cccauauuaguguunacaua

SEQ ID NO: 86660 - RNA, 21 nt, Artificial Sequence
  Synthetic
  misc_feature (16)..(16): n is a, c, g, or u
gcccauauuaguguunacaua

SEQ ID NO: 86661 - RNA, 22 nt, Artificial Sequence
  Synthetic
  misc_feature (17)..(17): n is a, c, g, or u
ggcccauauuaguguunacaua

SEQ ID NO: 86662 - RNA, 23 nt, Artificial Sequence
  Synthetic
  misc_feature (18)..(18): n is a, c, g, or u
aggcccauauuaguguunacaua

SEQ ID NO: 86663 - RNA, 24 nt, Artificial Sequence
  Synthetic
  misc_feature (19)..(19): n is a, c, g, or u
uaggcccauauuaguguunacaua

SEQ ID NO: 86664 - RNA, 18 nt, Artificial Sequence
  Synthetic
ucgagaagauugacgaua

SEQ ID NO: 86665 - RNA, 19 nt, Artificial Sequence
  Synthetic
cucgagaagauugacgaua

SEQ ID NO: 86666 - RNA, 20 nt, Artificial Sequence
  Synthetic
ccucgagaagauugacgaua

SEQ ID NO: 86667 - RNA, 21 nt, Artificial Sequence
  Synthetic
uccucgagaagauugacgaua

SEQ ID NO: 86668 - RNA, 22 nt, Artificial Sequence
  Synthetic
auccucgagaagauugacgaua

SEQ ID NO: 86669 - RNA, 23 nt, Artificial Sequence
  Synthetic
aauccucgagaagauugacgaua

SEQ ID NO: 86670 - RNA, 24 nt, Artificial Sequence
  Synthetic
caauccucgagaagauugacgaua

SEQ ID NO: 86671 - RNA, 18 nt, Artificial Sequence
  Synthetic
  misc_feature (10)..(10): n is a, c, g, or u
cucuaaggcnucccgaua

SEQ ID NO: 86672 - RNA, 19 nt, Artificial Sequence
  Synthetic
  misc_feature (11)..(11): n is a, c, g, or u
acucuaaggcnucccgaua

SEQ ID NO: 86673 - RNA, 20 nt, Artificial Sequence
  Synthetic
  misc_feature (12)..(12): n is a, c, g, or u
gacucuaaggcnucccgaua

SEQ ID NO: 86674 - RNA, 21 nt, Artificial Sequence
  Synthetic
  misc_feature (13)..(13): n is a, c, g, or u
agacucuaaggcnucccgaua

SEQ ID NO: 86675 - RNA, 22 nt, Artificial Sequence
  Synthetic
  misc_feature (14)..(14): n is a, c, g, or u
gagacucuaaggcnucccgaua

SEQ ID NO: 86676 - RNA, 23 nt, Artificial Sequence
  Synthetic
  misc_feature (15)..(15): n is a, c, g, or u
ggagacucuaaggcnucccgaua

SEQ ID NO: 86677 - RNA, 24 nt, Artificial Sequence
  Synthetic
  misc_feature (16)..(16): n is a, c, g, or u
aggagacucuaaggcnucccgaua

SEQ ID NO: 86678 - RNA, 18 nt, Artificial Sequence
  Synthetic
cagacacauccagcgaua

SEQ ID NO: 86679 - RNA, 19 nt, Artificial Sequence
  Synthetic
gcagacacauccagcgaua

SEQ ID NO: 86680 - RNA, 20 nt, Artificial Sequence
  Synthetic
cgcagacacauccagcgaua

SEQ ID NO: 86681 - RNA, 21 nt, Artificial Sequence
  Synthetic
ccgcagacacauccagcgaua

SEQ ID NO: 86682 - RNA, 22 nt, Artificial Sequence
  Synthetic
gccgcagacacauccagcgaua

SEQ ID NO: 86683 - RNA, 23 nt, Artificial Sequence
  Synthetic
cgccgcagacacauccagcgaua

SEQ ID NO: 86684 - RNA, 24 nt, Artificial Sequence
  Synthetic
acgccgcagacacauccagcgaua

SEQ ID NO: 86685 - RNA, 18 nt, Artificial Sequence
  Synthetic
acagcaacaggagggaua

SEQ ID NO: 86686 - RNA, 19 nt, Artificial Sequence
  Synthetic
uacagcaacaggagggaua

SEQ ID NO: 86687 - RNA, 20 nt, Artificial Sequence
  Synthetic
guacagcaacaggagggaua

SEQ ID NO: 86688 - RNA, 21 nt, Artificial Sequence
  Synthetic
gguacagcaacaggagggaua

SEQ ID NO: 86689 - RNA, 22 nt, Artificial Sequence
  Synthetic
ugguacagcaacaggagggaua

SEQ ID NO: 86690 - RNA, 23 nt, Artificial Sequence
  Synthetic
uugguacagcaacaggagggaua

SEQ ID NO: 86691 - RNA, 24 nt, Artificial Sequence
  Synthetic
uuugguacagcaacaggagggaua

SEQ ID NO: 86692 - RNA, 18 nt, Artificial Sequence
  Synthetic
aacuagauguucuggaua

SEQ ID NO: 86693 - RNA, 19 nt, Artificial Sequence
  Synthetic
uaacuagauguucuggaua

SEQ ID NO: 86694 - RNA, 20 nt, Artificial Sequence
  Synthetic
uuaacuagauguucuggaua

SEQ ID NO: 86695 - RNA, 21 nt, Artificial Sequence
  Synthetic
auuaacuagauguucuggaua

SEQ ID NO: 86696 - RNA, 22 nt, Artificial Sequence
  Synthetic
gauuaacuagauguucuggaua

SEQ ID NO: 86697 - RNA, 23 nt, Artificial Sequence
  Synthetic
ugauuaacuagauguucuggaua

SEQ ID NO: 86698 - RNA, 24 nt, Artificial Sequence
  Synthetic
augauuaacuagauguucuggaua

SEQ ID NO: 86699 - RNA, 18 nt, Artificial Sequence
  Synthetic
uaccacaucauccauaua

SEQ ID NO: 86700 - RNA, 19 nt, Artificial Sequence
  Synthetic
auaccacaucauccauaua

SEQ ID NO: 86701 - RNA, 20 nt, Artificial Sequence
  Synthetic
aauaccacaucauccauaua

SEQ ID NO: 86702 - RNA, 21 nt, Artificial Sequence
  Synthetic
caauaccacaucauccauaua

SEQ ID NO: 86703 - RNA, 22 nt, Artificial Sequence
  Synthetic
ccaauaccacaucauccauaua

SEQ ID NO: 86704 - RNA, 23 nt, Artificial Sequence
  Synthetic
cccaauaccacaucauccauaua

SEQ ID NO: 86705 - RNA, 24 nt, Artificial Sequence
  Synthetic
ccccaauaccacaucauccauaua

SEQ ID NO: 86706 - RNA, 18 nt, Artificial Sequence
  Synthetic
ucuugguguaaauguaua

SEQ ID NO: 86707 - RNA, 19 nt, Artificial Sequence
  Synthetic
gucuugguguaaauguaua

SEQ ID NO: 86708 - RNA, 20 nt, Artificial Sequence
  Synthetic
ugucuugguguaaauguaua

SEQ ID NO: 86709 - RNA, 21 nt, Artificial Sequence
  Synthetic
augucuugguguaaauguaua

SEQ ID NO: 86710 - RNA, 22 nt, Artificial Sequence
  Synthetic
  misc_feature (1)..(1): n is a, c, g, or u
naugucuugguguaaauguaua

SEQ ID NO: 86711 - RNA, 23 nt, Artificial Sequence
  Synthetic
  misc_feature (2)..(2): n is a, c, g, or u
unaugucuugguguaaauguaua

SEQ ID NO: 86712 - RNA, 24 nt, Artificial Sequence
  Synthetic
  misc_feature (3)..(3): n is a, c, g, or u
aunaugucuugguguaaauguaua

SEQ ID NO: 86713 - RNA, 18 nt, Artificial Sequence
  Synthetic
uuaggguuuaaauguaua

SEQ ID NO: 86714 - RNA, 19 nt, Artificial Sequence
  Synthetic
guuaggguuuaaauguaua

SEQ ID NO: 86715 - RNA, 20 nt, Artificial Sequence
  Synthetic
uguuaggguuuaaauguaua

SEQ ID NO: 86716 - RNA, 21 nt, Artificial Sequence
  Synthetic
uuguuaggguuuaaauguaua

SEQ ID NO: 86717 - RNA, 22 nt, Artificial Sequence
  Synthetic
uuuguuaggguuuaaauguaua

SEQ ID NO: 86718 - RNA, 23 nt, Artificial Sequence
  Synthetic
uuuuguuaggguuuaaauguaua

SEQ ID NO: 86719 - RNA, 24 nt, Artificial Sequence
  Synthetic
guuuuguuaggguuuaaauguaua

SEQ ID NO: 86720 - RNA, 18 nt, Artificial Sequence
  Synthetic
acugaacaaauggcacua

SEQ ID NO: 86721 - RNA, 19 nt, Artificial Sequence
  Synthetic
cacugaacaaauggcacua

SEQ ID NO: 86722 - RNA, 20 nt, Artificial Sequence
  Synthetic
ccacugaacaaauggcacua

SEQ ID NO: 86723 - RNA, 21 nt, Artificial Sequence
  Synthetic
accacugaacaaauggcacua

SEQ ID NO: 86724 - RNA, 22 nt, Artificial Sequence
  Synthetic
aaccacugaacaaauggcacua

SEQ ID NO: 86725 - RNA, 23 nt, Artificial Sequence
  Synthetic
gaaccacugaacaaauggcacua

SEQ ID NO: 86726 - RNA, 24 nt, Artificial Sequence
  Synthetic
cgaaccacugaacaaauggcacua

SEQ ID NO: 86727 - RNA, 18 nt, Artificial Sequence
  Synthetic
  misc_feature (3)..(3): n is a, c, g, or u
acnuuuggauaaaaccua

SEQ ID NO: 86728 - RNA, 19 nt, Artificial Sequence
  Synthetic
  misc_feature (4)..(4): n is a, c, g, or u
aacnuuuggauaaaaccua

SEQ ID NO: 86729 - RNA, 20 nt, Artificial Sequence
  Synthetic
  misc_feature (5)..(5): n is a, c, g, or u
uaacnuuuggauaaaaccua

SEQ ID NO: 86730 - RNA, 21 nt, Artificial Sequence
  Synthetic
  misc_feature (6)..(6): n is a, c, g, or u
guaacnuuuggauaaaaccua

SEQ ID NO: 86731 - RNA, 22 nt, Artificial Sequence
  Synthetic
  misc_feature (7)..(7): n is a, c, g, or u
gguaacnuuuggauaaaaccua

SEQ ID NO: 86732 - RNA, 23 nt, Artificial Sequence
  Synthetic
  misc_feature (8)..(8): n is a, c, g, or u
ugguaacnuuuggauaaaaccua

SEQ ID NO: 86733 - RNA, 24 nt, Artificial Sequence
  Synthetic
  misc_feature (9)..(9): n is a, c, g, or u
uugguaacnuuuggauaaaaccua

SEQ ID NO: 86734 - RNA, 18 nt, Artificial Sequence
  Synthetic
gagggaguucuucuucua

SEQ ID NO: 86735 - RNA, 19 nt, Artificial Sequence
  Synthetic
cgagggaguucuucuucua

SEQ ID NO: 86736 - RNA, 20 nt, Artificial Sequence
  Synthetic
gcgagggaguucuucuucua

SEQ ID NO: 86737 - RNA, 18 nt, Artificial Sequence
  Synthetic
  misc_feature (12)..(12): n is a, c, g, or u
uuaaagacaggnacagua

SEQ ID NO: 86738 - RNA, 19 nt, Artificial Sequence
  Synthetic
  misc_feature (1)..(1): n is a, c, g, or u
  misc_feature (13)..(13): n is a, c, g, or u
nuuaaagacaggnacagua

SEQ ID NO: 86739 - RNA, 20 nt, Artificial Sequence
  Synthetic
  misc_feature (2)..(2): n is a, c, g, or u
  misc_feature (14)..(14): n is a, c, g, or u
gnuuaaagacaggnacagua

SEQ ID NO: 86740 - RNA, 21 nt, Artificial Sequence
  Synthetic
  misc_feature (3)..(3): n is a, c, g, or u
  misc_feature (15)..(15): n is a, c, g, or u
ggnuuaaagacaggnacagua

SEQ ID NO: 86741 - RNA, 22 nt, Artificial Sequence
  Synthetic
  misc_feature (4)..(4): n is a, c, g, or u
  misc_feature (16)..(16): n is a, c, g, or u
aggnuuaaagacaggnacagua

SEQ ID NO: 86742 - RNA, 23 nt, Artificial Sequence
  Synthetic
  misc_feature (5)..(5): n is a, c, g, or u
  misc_feature (17)..(17): n is a, c, g, or u
gaggnuuaaagacaggnacagua

SEQ ID NO: 86743 - RNA, 24 nt, Artificial Sequence
  Synthetic
  misc_feature (6)..(6): n is a, c, g, or u
  misc_feature (18)..(18): n is a, c, g, or u
ugaggnuuaaagacaggnacagua

SEQ ID NO: 86744 - RNA, 18 nt, Artificial Sequence
  Synthetic
  misc_feature (5)..(5): n is a, c, g, or u
  misc_feature (7)..(7): n is a, c, g, or u
  misc_feature (13)..(13): n is a, c, g, or u
gauangngagagncagua

SEQ ID NO: 86745 - RNA, 19 nt, Artificial Sequence
  Synthetic
  misc_feature (6)..(6): n is a, c, g, or u
  misc_feature (8)..(8): n is a, c, g, or u
  misc_feature (14)..(14): n is a, c, g, or u
cgauangngagagncagua

SEQ ID NO: 86746 - RNA, 20 nt, Artificial Sequence
  Synthetic
  misc_feature (7)..(7): n is a, c, g, or u
  misc_feature (9)..(9): n is a, c, g, or u
  misc_feature (15)..(15): n is a, c, g, or u
acgauangngagagncagua

SEQ ID NO: 86747 - RNA, 21 nt, Artificial Sequence
  Synthetic
  misc_feature (8)..(8): n is a, c, g, or u
  misc_feature (10)..(10): n is a, c, g, or u
  misc_feature (16)..(16): n is a, c, g, or u
gacgauangngagagncagua

SEQ ID NO: 86748 - RNA, 22 nt, Artificial Sequence
  Synthetic
  misc_feature (9)..(9): n is a, c, g, or u
  misc_feature (11)..(11): n is a, c, g, or u
  misc_feature (17)..(17): n is a, c, g, or u
ugacgauangngagagncagua

SEQ ID NO: 86749 - RNA, 23 nt, Artificial Sequence
  Synthetic
  misc_feature (10)..(10): n is a, c, g, or u
  misc_feature (12)..(12): n is a, c, g, or u
  misc_feature (18)..(18): n is a, c, g, or u
uugacgauangngagagncagua

SEQ ID NO: 86750 - RNA, 24 nt, Artificial Sequence
  Synthetic
  misc_feature (11)..(11): n is a, c, g, or u
  misc_feature (13)..(13): n is a, c, g, or u
  misc_feature (19)..(19): n is a, c, g, or u
auugacgauangngagagncagua

SEQ ID NO: 86751 - RNA, 18 nt, Artificial Sequence
  Synthetic
cagcgccgacgggacgua

SEQ ID NO: 86752 - RNA, 19 nt, Artificial Sequence
  Synthetic
ucagcgccgacgggacgua

SEQ ID NO: 86753 - RNA, 20 nt, Artificial Sequence
  Synthetic
uucagcgccgacgggacgua

SEQ ID NO: 86754 - RNA, 18 nt, Artificial Sequence
  Synthetic
agacggggaguccgcgua

SEQ ID NO: 86755 - RNA, 19 nt, Artificial Sequence
  Synthetic
cagacggggaguccgcgua

SEQ ID NO: 86756 - RNA, 20 nt, Artificial Sequence
  Synthetic
acagacggggaguccgcgua

SEQ ID NO: 86757 - RNA, 18 nt, Artificial Sequence
  Synthetic
  misc_feature (5)..(5): n is a, c, g, or u
uaucnagaagaucucgua

SEQ ID NO: 86758 - RNA, 19 nt, Artificial Sequence
  Synthetic
  misc_feature (6)..(6): n is a, c, g, or u
guaucnagaagaucucgua

SEQ ID NO: 86759 - RNA, 20 nt, Artificial Sequence
  Synthetic
  misc_feature (7)..(7): n is a, c, g, or u
gguaucnagaagaucucgua

SEQ ID NO: 86760 - RNA, 18 nt, Artificial Sequence
  Synthetic
aaauugguaacagcggua

SEQ ID NO: 86761 - RNA, 19 nt, Artificial Sequence
  Synthetic
aaaauugguaacagcggua

SEQ ID NO: 86762 - RNA, 20 nt, Artificial Sequence
  Synthetic
gaaaauugguaacagcggua

SEQ ID NO: 86763 - RNA, 21 nt, Artificial Sequence
  Synthetic
agaaaauugguaacagcggua

SEQ ID NO: 86764 - RNA, 22 nt, Artificial Sequence
  Synthetic
aagaaaauugguaacagcggua

SEQ ID NO: 86765 - RNA, 23 nt, Artificial Sequence
  Synthetic
aaagaaaauugguaacagcggua

SEQ ID NO: 86766 - RNA, 24 nt, Artificial Sequence
  Synthetic
aaaagaaaauugguaacagcggua

SEQ ID NO: 86767 - RNA, 18 nt, Artificial Sequence
  Synthetic
  misc_feature (3)..(3): n is a, c, g, or u
uanagagcugaggcggua

SEQ ID NO: 86768 - RNA, 19 nt, Artificial Sequence
  Synthetic
  misc_feature (4)..(4): n is a, c, g, or u
auanagagcugaggcggua

SEQ ID NO: 86769 - RNA, 20 nt, Artificial Sequence
  Synthetic
  misc_feature (5)..(5): n is a, c, g, or u
gauanagagcugaggcggua

SEQ ID NO: 86770 - RNA, 21 nt, Artificial Sequence
  Synthetic
  misc_feature (6)..(6): n is a, c, g, or u
cgauanagagcugaggcggua

SEQ ID NO: 86771 - RNA, 22 nt, Artificial Sequence
  Synthetic
  misc_feature (7)..(7): n is a, c, g, or u
ccgauanagagcugaggcggua

SEQ ID NO: 86772 - RNA, 23 nt, Artificial Sequence
  Synthetic
  misc_feature (8)..(8): n is a, c, g, or u
cccgauanagagcugaggcggua

SEQ ID NO: 86773 - RNA, 24 nt, Artificial Sequence
  Synthetic
  misc_feature (9)..(9): n is a, c, g, or u
ucccgauanagagcugaggcggua

SEQ ID NO: 86774 - RNA, 18 nt, Artificial Sequence
  Synthetic
ggauaaccacauugugua

SEQ ID NO: 86775 - RNA, 19 nt, Artificial Sequence
  Synthetic
aggauaaccacauugugua

SEQ ID NO: 86776 - RNA, 20 nt, Artificial Sequence
  Synthetic
caggauaaccacauugugua

SEQ ID NO: 86777 - RNA, 21 nt, Artificial Sequence
  Synthetic
gcaggauaaccacauugugua

SEQ ID NO: 86778 - RNA, 22 nt, Artificial Sequence
  Synthetic
agcaggauaaccacauugugua

SEQ ID NO: 86779 - RNA, 23 nt, Artificial Sequence
  Synthetic
aagcaggauaaccacauugugua

SEQ ID NO: 86780 - RNA, 24 nt, Artificial Sequence
  Synthetic
aaagcaggauaaccacauugugua

SEQ ID NO: 86781 - RNA, 18 nt, Artificial Sequence
  Synthetic
  misc_feature (5)..(5): n is a, c, g, or u
uugangauccuggaauua

SEQ ID NO: 86782 - RNA, 19 nt, Artificial Sequence
  Synthetic
  misc_feature (6)..(6): n is a, c, g, or u
guugangauccuggaauua

SEQ ID NO: 86783 - RNA, 20 nt, Artificial Sequence
  Synthetic
  misc_feature (1)..(1): n is a, c, g, or u
  misc_feature (7)..(7): n is a, c, g, or u
nguugangauccuggaauua

SEQ ID NO: 86784 - RNA, 21 nt, Artificial Sequence
  Synthetic
  misc_feature (2)..(2): n is a, c, g, or u
  misc_feature (8)..(8): n is a, c, g, or u
unguugangauccuggaauua

SEQ ID NO: 86785 - RNA, 22 nt, Artificial Sequence
  Synthetic
  misc_feature (3)..(3): n is a, c, g, or u
  misc_feature (9)..(9): n is a, c, g, or u
gunguugangauccuggaauua

SEQ ID NO: 86786 - RNA, 23 nt, Artificial Sequence
  Synthetic
  misc_feature (4)..(4): n is a, c, g, or u
  misc_feature (10)..(10): n is a, c, g, or u
ggunguugangauccuggaauua

SEQ ID NO: 86787 - RNA, 24 nt, Artificial Sequence
  Synthetic
  misc_feature (5)..(5): n is a, c, g, or u
  misc_feature (11)..(11): n is a, c, g, or u
uggunguugangauccuggaauua

SEQ ID NO: 86788 - RNA, 18 nt, Artificial Sequence
  Synthetic
guuuggaaguaaugauua

SEQ ID NO: 86789 - RNA, 19 nt, Artificial Sequence
  Synthetic
  misc_feature (1)..(1): n is a, c, g, or u
nguuuggaaguaaugauua

SEQ ID NO: 86790 - RNA, 20 nt, Artificial Sequence
  Synthetic
  misc_feature (2)..(2): n is a, c, g, or u
unguuuggaaguaaugauua

SEQ ID NO: 86791 - RNA, 21 nt, Artificial Sequence
  Synthetic
  misc_feature (3)..(3): n is a, c, g, or u
cunguuuggaaguaaugauua

SEQ ID NO: 86792 - RNA, 22 nt, Artificial Sequence
  Synthetic
  misc_feature (4)..(4): n is a, c, g, or u
ucunguuuggaaguaaugauua

SEQ ID NO: 86793 - RNA, 23 nt, Artificial Sequence
  Synthetic
  misc_feature (5)..(5): n is a, c, g, or u
gucunguuuggaaguaaugauua

SEQ ID NO: 86794 - RNA, 24 nt, Artificial Sequence
  Synthetic
  misc_feature (6)..(6): n is a, c, g, or u
ugucunguuuggaaguaaugauua

SEQ ID NO: 86795 - RNA, 18 nt, Artificial Sequence
  Synthetic
augaacaagagaugauua

SEQ ID NO: 86796 - RNA, 19 nt, Artificial Sequence
  Synthetic
caugaacaagagaugauua

SEQ ID NO: 86797 - RNA, 20 nt, Artificial Sequence
  Synthetic
acaugaacaagagaugauua

SEQ ID NO: 86798 - RNA, 21 nt, Artificial Sequence
  Synthetic
gacaugaacaagagaugauua

SEQ ID NO: 86799 - RNA, 22 nt, Artificial Sequence
  Synthetic
ggacaugaacaagagaugauua

SEQ ID NO: 86800 - RNA, 23 nt, Artificial Sequence
  Synthetic
aggacaugaacaagagaugauua

SEQ ID NO: 86801 - RNA, 24 nt, Artificial Sequence
  Synthetic
uaggacaugaacaagagaugauua

SEQ ID NO: 86802 - RNA, 18 nt, Artificial Sequence
  Synthetic
ugguguaaauguauauua

SEQ ID NO: 86803 - RNA, 19 nt, Artificial Sequence
  Synthetic
uugguguaaauguauauua

SEQ ID NO: 86804 - RNA, 20 nt, Artificial Sequence
  Synthetic
cuugguguaaauguauauua

SEQ ID NO: 86805 - RNA, 21 nt, Artificial Sequence
  Synthetic
ucuugguguaaauguauauua

SEQ ID NO: 86806 - RNA, 22 nt, Artificial Sequence
  Synthetic
gucuugguguaaauguauauua

SEQ ID NO: 86807 - RNA, 23 nt, Artificial Sequence
  Synthetic
ugucuugguguaaauguauauua

SEQ ID NO: 86808 - RNA, 24 nt, Artificial Sequence
  Synthetic
augucuugguguaaauguauauua

SEQ ID NO: 86809 - RNA, 18 nt, Artificial Sequence
  Synthetic
aguccaagaguccucuua

SEQ ID NO: 86810 - RNA, 19 nt, Artificial Sequence
  Synthetic
gaguccaagaguccucuua

SEQ ID NO: 86811 - RNA, 20 nt, Artificial Sequence
  Synthetic
agaguccaagaguccucuua

SEQ ID NO: 86812 - RNA, 21 nt, Artificial Sequence
  Synthetic
gagaguccaagaguccucuua

SEQ ID NO: 86813 - RNA, 22 nt, Artificial Sequence
  Synthetic
agagaguccaagaguccucuua

SEQ ID NO: 86814 - RNA, 23 nt, Artificial Sequence
  Synthetic
cagagaguccaagaguccucuua

SEQ ID NO: 86815 - RNA, 24 nt, Artificial Sequence
  Synthetic
  misc_feature (1)..(1): n is a, c, g, or u
ncagagaguccaagaguccucuua

SEQ ID NO: 86816 - RNA, 18 nt, Artificial Sequence
  Synthetic
caaucaauaggccuguua

SEQ ID NO: 86817 - RNA, 19 nt, Artificial Sequence
  Synthetic
ccaaucaauaggccuguua

SEQ ID NO: 86818 - RNA, 20 nt, Artificial Sequence
  Synthetic
uccaaucaauaggccuguua

SEQ ID NO: 86819 - RNA, 21 nt, Artificial Sequence
  Synthetic
uuccaaucaauaggccuguua

SEQ ID NO: 86820 - RNA, 22 nt, Artificial Sequence
  Synthetic
uuuccaaucaauaggccuguua

SEQ ID NO: 86821 - RNA, 23 nt, Artificial Sequence
  Synthetic
cuuuccaaucaauaggccuguua

SEQ ID NO: 86822 - RNA, 24 nt, Artificial Sequence
  Synthetic
acuuuccaaucaauaggccuguua

SEQ ID NO: 86823 - RNA, 18 nt, Artificial Sequence
  Synthetic
  misc_feature (15)..(15): n is a, c, g, or u
aacuccucccagucnuua

SEQ ID NO: 86824 - RNA, 19 nt, Artificial Sequence
  Synthetic
  misc_feature (16)..(16): n is a, c, g, or u
caacuccucccagucnuua

SEQ ID NO: 86825 - RNA, 20 nt, Artificial Sequence
  Synthetic
  misc_feature (17)..(17): n is a, c, g, or u
ccaacuccucccagucnuua

SEQ ID NO: 86826 - RNA, 21 nt, Artificial Sequence
  Synthetic
  misc_feature (18)..(18): n is a, c, g, or u
cccaacuccucccagucnuua

SEQ ID NO: 86827 - RNA, 22 nt, Artificial Sequence
  Synthetic
  misc_feature (19)..(19): n is a, c, g, or u
ccccaacuccucccagucnuua

SEQ ID NO: 86828 - RNA, 23 nt, Artificial Sequence
  Synthetic
  misc_feature (20)..(20): n is a, c, g, or u
cccccaacuccucccagucnuua

SEQ ID NO: 86829 - RNA, 24 nt, Artificial Sequence
  Synthetic
  misc_feature (21)..(21): n is a, c, g, or u
ucccccaacuccucccagucnuua

SEQ ID NO: 86830 - RNA, 18 nt, Artificial Sequence
  Synthetic
  misc_feature (2)..(2): n is a, c, g, or u
gnagcuccaaauucuuua

SEQ ID NO: 86831 - RNA, 19 nt, Artificial Sequence
  Synthetic
  misc_feature (3)..(3): n is a, c, g, or u
agnagcuccaaauucuuua

SEQ ID NO: 86832 - RNA, 20 nt, Artificial Sequence
  Synthetic
  misc_feature (4)..(4): n is a, c, g, or u
cagnagcuccaaauucuuua

SEQ ID NO: 86833 - RNA, 21 nt, Artificial Sequence
  Synthetic
  misc_feature (5)..(5): n is a, c, g, or u
acagnagcuccaaauucuuua

SEQ ID NO: 86834 - RNA, 22 nt, Artificial Sequence
  Synthetic
  misc_feature (6)..(6): n is a, c, g, or u
cacagnagcuccaaauucuuua

SEQ ID NO: 86835 - RNA, 23 nt, Artificial Sequence
  Synthetic
  misc_feature (7)..(7): n is a, c, g, or u
ccacagnagcuccaaauucuuua

SEQ ID NO: 86836 - RNA, 24 nt, Artificial Sequence
  Synthetic
  misc_feature (8)..(8): n is a, c, g, or u
uccacagnagcuccaaauucuuua

SEQ ID NO: 86837 - RNA, 18 nt, Artificial Sequence
  Synthetic
agguucagguauuguuua

SEQ ID NO: 86838 - RNA, 19 nt, Artificial Sequence
  Synthetic
aagguucagguauuguuua

SEQ ID NO: 86839 - RNA, 20 nt, Artificial Sequence
  Synthetic
aaagguucagguauuguuua

SEQ ID NO: 86840 - RNA, 21 nt, Artificial Sequence
  Synthetic
uaaagguucagguauuguuua

SEQ ID NO: 86841 - RNA, 22 nt, Artificial Sequence
  Synthetic
guaaagguucagguauuguuua

SEQ ID NO: 86842 - RNA, 23 nt, Artificial Sequence
  Synthetic
gguaaagguucagguauuguuua

SEQ ID NO: 86843 - RNA, 24 nt, Artificial Sequence
  Synthetic
ggguaaagguucagguauuguuua

SEQ ID NO: 86844 - RNA, 18 nt, Artificial Sequence
  Synthetic
uaaaaggggcagcaaaac

SEQ ID NO: 86845 - RNA, 19 nt, Artificial Sequence
  Synthetic
guaaaaggggcagcaaaac

SEQ ID NO: 86846 - RNA, 20 nt, Artificial Sequence
  Synthetic
uguaaaaggggcagcaaaac

SEQ ID NO: 86847 - RNA, 21 nt, Artificial Sequence
  Synthetic
guguaaaaggggcagcaaaac

SEQ ID NO: 86848 - RNA, 22 nt, Artificial Sequence
  Synthetic
uguguaaaaggggcagcaaaac

SEQ ID NO: 86849 - RNA, 23 nt, Artificial Sequence
  Synthetic
uuguguaaaaggggcagcaaaac

SEQ ID NO: 86850 - RNA, 24 nt, Artificial Sequence
  Synthetic
auuguguaaaaggggcagcaaaac

SEQ ID NO: 86851 - RNA, 18 nt, Artificial Sequence
  Synthetic
uauaacugaaagccaaac

SEQ ID NO: 86852 - RNA, 19 nt, Artificial Sequence
  Synthetic
auauaacugaaagccaaac

SEQ ID NO: 86853 - RNA, 20 nt, Artificial Sequence
  Synthetic
cauauaacugaaagccaaac

SEQ ID NO: 86854 - RNA, 21 nt, Artificial Sequence
  Synthetic
ccauauaacugaaagccaaac

SEQ ID NO: 86855 - RNA, 22 nt, Artificial Sequence
  Synthetic
uccauauaacugaaagccaaac

SEQ ID NO: 86856 - RNA, 23 nt, Artificial Sequence
  Synthetic
auccauauaacugaaagccaaac

SEQ ID NO: 86857 - RNA, 24 nt, Artificial Sequence
  Synthetic
cauccauauaacugaaagccaaac

SEQ ID NO: 86858 - RNA, 18 nt, Artificial Sequence
  Synthetic
agacaagaaaugugaaac

SEQ ID NO: 86859 - RNA, 19 nt, Artificial Sequence
  Synthetic
gagacaagaaaugugaaac

SEQ ID NO: 86860 - RNA, 20 nt, Artificial Sequence
  Synthetic
ugagacaagaaaugugaaac

SEQ ID NO: 86861 - RNA, 21 nt, Artificial Sequence
  Synthetic
gugagacaagaaaugugaaac

SEQ ID NO: 86862 - RNA, 22 nt, Artificial Sequence
  Synthetic
agugagacaagaaaugugaaac

SEQ ID NO: 86863 - RNA, 23 nt, Artificial Sequence
  Synthetic
aagugagacaagaaaugugaaac

SEQ ID NO: 86864 - RNA, 24 nt, Artificial Sequence
  Synthetic
aaagugagacaagaaaugugaaac

SEQ ID NO: 86865 - RNA, 18 nt, Artificial Sequence
  Synthetic
cgccgacgggacguaaac

SEQ ID NO: 86866 - RNA, 19 nt, Artificial Sequence
  Synthetic
gcgccgacgggacguaaac

SEQ ID NO: 86867 - RNA, 20 nt, Artificial Sequence
  Synthetic
agcgccgacgggacguaaac

SEQ ID NO: 86868 - RNA, 18 nt, Artificial Sequence
  Synthetic
uaguccagaagaaccaac

SEQ ID NO: 86869 - RNA, 19 nt, Artificial Sequence
  Synthetic
auaguccagaagaaccaac

SEQ ID NO: 86870 - RNA, 20 nt, Artificial Sequence
  Synthetic
gauaguccagaagaaccaac

SEQ ID NO: 86871 - RNA, 21 nt, Artificial Sequence
  Synthetic
ugauaguccagaagaaccaac

SEQ ID NO: 86872 - RNA, 22 nt, Artificial Sequence
  Synthetic
uugauaguccagaagaaccaac

SEQ ID NO: 86873 - RNA, 23 nt, Artificial Sequence
  Synthetic
cuugauaguccagaagaaccaac

SEQ ID NO: 86874 - RNA, 24 nt, Artificial Sequence
  Synthetic
ccuugauaguccagaagaaccaac

SEQ ID NO: 86875 - RNA, 18 nt, Artificial Sequence
  Synthetic
aagguuugguacagcaac

SEQ ID NO: 86876 - RNA, 19 nt, Artificial Sequence
  Synthetic
gaagguuugguacagcaac

SEQ ID NO: 86877 - RNA, 20 nt, Artificial Sequence
  Synthetic
cgaagguuugguacagcaac

SEQ ID NO: 86878 - RNA, 18 nt, Artificial Sequence
  Synthetic
gugaggauucuugucaac

SEQ ID NO: 86879 - RNA, 19 nt, Artificial Sequence
  Synthetic
ugugaggauucuugucaac

SEQ ID NO: 86880 - RNA, 20 nt, Artificial Sequence
  Synthetic
uugugaggauucuugucaac

SEQ ID NO: 86881 - RNA, 21 nt, Artificial Sequence
  Synthetic
auugugaggauucuugucaac

SEQ ID NO: 86882 - RNA, 22 nt, Artificial Sequence
  Synthetic
uauugugaggauucuugucaac

SEQ ID NO: 86883 - RNA, 23 nt, Artificial Sequence
  Synthetic
guauugugaggauucuugucaac

SEQ ID NO: 86884 - RNA, 24 nt, Artificial Sequence
  Synthetic
gguauugugaggauucuugucaac

SEQ ID NO: 86885 - RNA, 18 nt, Artificial Sequence
  Synthetic
gaacaguaggacaugaac

SEQ ID NO: 86886 - RNA, 19 nt, Artificial Sequence
  Synthetic
ugaacaguaggacaugaac

SEQ ID NO: 86887 - RNA, 20 nt, Artificial Sequence
  Synthetic
uugaacaguaggacaugaac

SEQ ID NO: 86888 - RNA, 21 nt, Artificial Sequence
  Synthetic
cuugaacaguaggacaugaac

SEQ ID NO: 86889 - RNA, 22 nt, Artificial Sequence
  Synthetic
gcuugaacaguaggacaugaac

SEQ ID NO: 86890 - RNA, 23 nt, Artificial Sequence
  Synthetic
ggcuugaacaguaggacaugaac

SEQ ID NO: 86891 - RNA, 24 nt, Artificial Sequence
  Synthetic
aggcuugaacaguaggacaugaac

SEQ ID NO: 86892 - RNA, 18 nt, Artificial Sequence
  Synthetic
  misc_feature (6)..(6): n is a, c, g, or u
cacaanaguugccugaac

SEQ ID NO: 86893 - RNA, 19 nt, Artificial Sequence
  Synthetic
  misc_feature (7)..(7): n is a, c, g, or u
ccacaanaguugccugaac

SEQ ID NO: 86894 - RNA, 20 nt, Artificial Sequence
  Synthetic
  misc_feature (8)..(8): n is a, c, g, or u
accacaanaguugccugaac

SEQ ID NO: 86895 - RNA, 21 nt, Artificial Sequence
  Synthetic
  misc_feature (9)..(9): n is a, c, g, or u
aaccacaanaguugccugaac

SEQ ID NO: 86896 - RNA, 22 nt, Artificial Sequence
  Synthetic
  misc_feature (10)..(10): n is a, c, g, or u
aaaccacaanaguugccugaac

SEQ ID NO: 86897 - RNA, 23 nt, Artificial Sequence
  Synthetic
  misc_feature (11)..(11): n is a, c, g, or u
gaaaccacaanaguugccugaac

SEQ ID NO: 86898 - RNA, 24 nt, Artificial Sequence
  Synthetic
  misc_feature (12)..(12): n is a, c, g, or u
ugaaaccacaanaguugccugaac

SEQ ID NO: 86899 - RNA, 18 nt, Artificial Sequence
  Synthetic
gguuuacuguuccugaac

SEQ ID NO: 86900 - RNA, 19 nt, Artificial Sequence
  Synthetic
ggguuuacuguuccugaac

SEQ ID NO: 86901 - RNA, 20 nt, Artificial Sequence
  Synthetic
aggguuuacuguuccugaac

SEQ ID NO: 86902 - RNA, 21 nt, Artificial Sequence
  Synthetic
caggguuuacuguuccugaac

SEQ ID NO: 86903 - RNA, 22 nt, Artificial Sequence
  Synthetic
acaggguuuacuguuccugaac

SEQ ID NO: 86904 - RNA, 23 nt, Artificial Sequence
  Synthetic
aacaggguuuacuguuccugaac

SEQ ID NO: 86905 - RNA, 24 nt, Artificial Sequence
  Synthetic
gaacaggguuuacuguuccugaac

SEQ ID NO: 86906 - RNA, 18 nt, Artificial Sequence
  Synthetic
cagcuuggaggcuugaac

SEQ ID NO: 86907 - RNA, 19 nt, Artificial Sequence
  Synthetic
acagcuuggaggcuugaac

SEQ ID NO: 86908 - RNA, 20 nt, Artificial Sequence
  Synthetic
cacagcuuggaggcuugaac

SEQ ID NO: 86909 - RNA, 21 nt, Artificial Sequence
  Synthetic
gcacagcuuggaggcuugaac

SEQ ID NO: 86910 - RNA, 22 nt, Artificial Sequence
  Synthetic
ggcacagcuuggaggcuugaac

SEQ ID NO: 86911 - RNA, 23 nt, Artificial Sequence
  Synthetic
aggcacagcuuggaggcuugaac

SEQ ID NO: 86912 - RNA, 24 nt, Artificial Sequence
  Synthetic
aaggcacagcuuggaggcuugaac

SEQ ID NO: 86913 - RNA, 18 nt, Artificial Sequence
  Synthetic
  misc_feature (12)..(12): n is a, c, g, or u
  misc_feature (15)..(15): n is a, c, g, or u
cccguggucggncgnaac

SEQ ID NO: 86914 - RNA, 19 nt, Artificial Sequence
  Synthetic
  misc_feature (13)..(13): n is a, c, g, or u
  misc_feature (16)..(16): n is a, c, g, or u
ccccguggucggncgnaac

SEQ ID NO: 86915 - RNA, 20 nt, Artificial Sequence
  Synthetic
  misc_feature (14)..(14): n is a, c, g, or u
  misc_feature (17)..(17): n is a, c, g, or u
gccccguggucggncgnaac

SEQ ID NO: 86916 - RNA, 21 nt, Artificial Sequence
  Synthetic
  misc_feature (15)..(15): n is a, c, g, or u
  misc_feature (18)..(18): n is a, c, g, or u
cgccccguggucggncgnaac

SEQ ID NO: 86917 - RNA, 22 nt, Artificial Sequence
  Synthetic
  misc_feature (16)..(16): n is a, c, g, or u
  misc_feature (19)..(19): n is a, c, g, or u
gcgccccguggucggncgnaac

SEQ ID NO: 86918 - RNA, 23 nt, Artificial Sequence
  Synthetic
  misc_feature (17)..(17): n is a, c, g, or u
  misc_feature (20)..(20): n is a, c, g, or u
ugcgccccguggucggncgnaac

SEQ ID NO: 86919 - RNA, 24 nt, Artificial Sequence
  Synthetic
  misc_feature (18)..(18): n is a, c, g, or u
  misc_feature (21)..(21): n is a, c, g, or u
gugcgccccguggucggncgnaac

SEQ ID NO: 86920 - RNA, 18 nt, Artificial Sequence
  Synthetic
gacacauccagcgauaac

SEQ ID NO: 86921 - RNA, 19 nt, Artificial Sequence
  Synthetic
agacacauccagcgauaac

SEQ ID NO: 86922 - RNA, 20 nt, Artificial Sequence
  Synthetic
cagacacauccagcgauaac

SEQ ID NO: 86923 - RNA, 21 nt, Artificial Sequence
  Synthetic
gcagacacauccagcgauaac

SEQ ID NO: 86924 - RNA, 22 nt, Artificial Sequence
  Synthetic
cgcagacacauccagcgauaac

SEQ ID NO: 86925 - RNA, 23 nt, Artificial Sequence
  Synthetic
ccgcagacacauccagcgauaac

SEQ ID NO: 86926 - RNA, 24 nt, Artificial Sequence
  Synthetic
gccgcagacacauccagcgauaac

SEQ ID NO: 86927 - RNA, 18 nt, Artificial Sequence
  Synthetic
ccacaucauccauauaac

SEQ ID NO: 86928 - RNA, 19 nt, Artificial Sequence
  Synthetic
accacaucauccauauaac

SEQ ID NO: 86929 - RNA, 20 nt, Artificial Sequence
  Synthetic
uaccacaucauccauauaac

SEQ ID NO: 86930 - RNA, 21 nt, Artificial Sequence
  Synthetic
auaccacaucauccauauaac

SEQ ID NO: 86931 - RNA, 22 nt, Artificial Sequence
  Synthetic
aauaccacaucauccauauaac

SEQ ID NO: 86932 - RNA, 23 nt, Artificial Sequence
  Synthetic
caauaccacaucauccauauaac

SEQ ID NO: 86933 - RNA, 24 nt, Artificial Sequence
  Synthetic
ccaauaccacaucauccauauaac

SEQ ID NO: 86934 - RNA, 18 nt, Artificial Sequence
  Synthetic
aguccaaggaauacuaac

SEQ ID NO: 86935 - RNA, 19 nt, Artificial Sequence
  Synthetic
gaguccaaggaauacuaac

SEQ ID NO: 86936 - RNA, 20 nt, Artificial Sequence
  Synthetic
ugaguccaaggaauacuaac

SEQ ID NO: 86937 - RNA, 21 nt, Artificial Sequence
  Synthetic
augaguccaaggaauacuaac

SEQ ID NO: 86938 - RNA, 22 nt, Artificial Sequence
  Synthetic
uaugaguccaaggaauacuaac

SEQ ID NO: 86939 - RNA, 23 nt, Artificial Sequence
  Synthetic
uuaugaguccaaggaauacuaac

SEQ ID NO: 86940 - RNA, 24 nt, Artificial Sequence
  Synthetic
cuuaugaguccaaggaauacuaac

SEQ ID NO: 86941 - RNA, 18 nt, Artificial Sequence
  Synthetic
aaaaaccccgccuguaac

SEQ ID NO: 86942 - RNA, 19 nt, Artificial Sequence
  Synthetic
gaaaaaccccgccuguaac

SEQ ID NO: 86943 - RNA, 20 nt, Artificial Sequence
  Synthetic
agaaaaaccccgccuguaac

SEQ ID NO: 86944 - RNA, 21 nt, Artificial Sequence
  Synthetic
aagaaaaaccccgccuguaac

SEQ ID NO: 86945 - RNA, 22 nt, Artificial Sequence
  Synthetic
caagaaaaaccccgccuguaac

SEQ ID NO: 86946 - RNA, 23 nt, Artificial Sequence
  Synthetic
acaagaaaaaccccgccuguaac

SEQ ID NO: 86947 - RNA, 24 nt, Artificial Sequence
  Synthetic
aacaagaaaaaccccgccuguaac

SEQ ID NO: 86948 - RNA, 18 nt, Artificial Sequence
  Synthetic
aucaauaggccuguuaac

SEQ ID NO: 86949 - RNA, 19 nt, Artificial Sequence
  Synthetic
aaucaauaggccuguuaac

SEQ ID NO: 86950 - RNA, 20 nt, Artificial Sequence
  Synthetic
caaucaauaggccuguuaac

SEQ ID NO: 86951 - RNA, 21 nt, Artificial Sequence
  Synthetic
ccaaucaauaggccuguuaac

SEQ ID NO: 86952 - RNA, 22 nt, Artificial Sequence
  Synthetic
uccaaucaauaggccuguuaac

SEQ ID NO: 86953 - RNA, 23 nt, Artificial Sequence
  Synthetic
uuccaaucaauaggccuguuaac

SEQ ID NO: 86954 - RNA, 24 nt, Artificial Sequence
  Synthetic
uuuccaaucaauaggccuguuaac

SEQ ID NO: 86955 - RNA, 18 nt, Artificial Sequence
  Synthetic
aggagugcgaauccacac

SEQ ID NO: 86956 - RNA, 19 nt, Artificial Sequence
  Synthetic
gaggagugcgaauccacac

SEQ ID NO: 86957 - RNA, 20 nt, Artificial Sequence
  Synthetic
ggaggagugcgaauccacac

SEQ ID NO: 86958 - RNA, 21 nt, Artificial Sequence
  Synthetic
uggaggagugcgaauccacac

SEQ ID NO: 86959 - RNA, 22 nt, Artificial Sequence
  Synthetic
cuggaggagugcgaauccacac

SEQ ID NO: 86960 - RNA, 23 nt, Artificial Sequence
  Synthetic
gcuggaggagugcgaauccacac

SEQ ID NO: 86961 - RNA, 24 nt, Artificial Sequence
  Synthetic
agcuggaggagugcgaauccacac

SEQ ID NO: 86962 - RNA, 18 nt, Artificial Sequence
  Synthetic
uucagguauuguuuacac

SEQ ID NO: 86963 - RNA, 19 nt, Artificial Sequence
  Synthetic
guucagguauuguuuacac

SEQ ID NO: 86964 - RNA, 20 nt, Artificial Sequence
  Synthetic
gguucagguauuguuuacac

SEQ ID NO: 86965 - RNA, 21 nt, Artificial Sequence
  Synthetic
agguucagguauuguuuacac

SEQ ID NO: 86966 - RNA, 22 nt, Artificial Sequence
  Synthetic
aagguucagguauuguuuacac

SEQ ID NO: 86967 - RNA, 23 nt, Artificial Sequence
  Synthetic
aaagguucagguauuguuuacac

SEQ ID NO: 86968 - RNA, 24 nt, Artificial Sequence
  Synthetic
uaaagguucagguauuguuuacac

SEQ ID NO: 86969 - RNA, 18 nt, Artificial Sequence
  Synthetic
  misc_feature (7)..(7): n is a, c, g, or u
  misc_feature (10)..(10): n is a, c, g, or u
uccaugnccnaaagccac

SEQ ID NO: 86970 - RNA, 19 nt, Artificial Sequence
  Synthetic
  misc_feature (8)..(8): n is a, c, g, or u
  misc_feature (11)..(11): n is a, c, g, or u
guccaugnccnaaagccac

SEQ ID NO: 86971 - RNA, 20 nt, Artificial Sequence
  Synthetic
  misc_feature (9)..(9): n is a, c, g, or u
  misc_feature (12)..(12): n is a, c, g, or u
uguccaugnccnaaagccac

SEQ ID NO: 86972 - RNA, 21 nt, Artificial Sequence
  Synthetic
  misc_feature (10)..(10): n is a, c, g, or u
  misc_feature (13)..(13): n is a, c, g, or u
auguccaugnccnaaagccac

SEQ ID NO: 86973 - RNA, 22 nt, Artificial Sequence
  Synthetic
  misc_feature (11)..(11): n is a, c, g, or u
  misc_feature (14)..(14): n is a, c, g, or u
aauguccaugnccnaaagccac

SEQ ID NO: 86974 - RNA, 23 nt, Artificial Sequence
  Synthetic
  misc_feature (12)..(12): n is a, c, g, or u
  misc_feature (15)..(15): n is a, c, g, or u
caauguccaugnccnaaagccac

SEQ ID NO: 86975 - RNA, 24 nt, Artificial Sequence
  Synthetic
  misc_feature (13)..(13): n is a, c, g, or u
  misc_feature (16)..(16): n is a, c, g, or u
ucaauguccaugnccnaaagccac

SEQ ID NO: 86976 - RNA, 18 nt, Artificial Sequence
  Synthetic
aaacgagaguaacuccac

SEQ ID NO: 86977 - RNA, 19 nt, Artificial Sequence
  Synthetic
aaaacgagaguaacuccac

SEQ ID NO: 86978 - RNA, 20 nt, Artificial Sequence
  Synthetic
aaaaacgagaguaacuccac

SEQ ID NO: 86979 - RNA, 21 nt, Artificial Sequence
  Synthetic
caaaaacgagaguaacuccac

SEQ ID NO: 86980 - RNA, 22 nt, Artificial Sequence
  Synthetic
gcaaaaacgagaguaacuccac

SEQ ID NO: 86981 - RNA, 23 nt, Artificial Sequence
  Synthetic
ggcaaaaacgagaguaacuccac

SEQ ID NO: 86982 - RNA, 24 nt, Artificial Sequence
  Synthetic
aggcaaaaacgagaguaacuccac

SEQ ID NO: 86983 - RNA, 18 nt, Artificial Sequence
  Synthetic
ugagccugagggcuccac

SEQ ID NO: 86984 - RNA, 19 nt, Artificial Sequence
  Synthetic
cugagccugagggcuccac

SEQ ID NO: 86985 - RNA, 20 nt, Artificial Sequence
  Synthetic
ccugagccugagggcuccac

SEQ ID NO: 86986 - RNA, 21 nt, Artificial Sequence
  Synthetic
cccugagccugagggcuccac

SEQ ID NO: 86987 - RNA, 22 nt, Artificial Sequence
  Synthetic
gcccugagccugagggcuccac

SEQ ID NO: 86988 - RNA, 23 nt, Artificial Sequence
  Synthetic
ugcccugagccugagggcuccac

SEQ ID NO: 86989 - RNA, 24 nt, Artificial Sequence
  Synthetic
augcccugagccugagggcuccac

SEQ ID NO: 86990 - RNA, 18 nt, Artificial Sequence
  Synthetic
aaauugagagaaguccac

SEQ ID NO: 86991 - RNA, 19 nt, Artificial Sequence
  Synthetic
aaaauugagagaaguccac

SEQ ID NO: 86992 - RNA, 20 nt, Artificial Sequence
  Synthetic
gaaaauugagagaaguccac

SEQ ID NO: 86993 - RNA, 21 nt, Artificial Sequence
  Synthetic
agaaaauugagagaaguccac

SEQ ID NO: 86994 - RNA, 22 nt, Artificial Sequence
  Synthetic
uagaaaauugagagaaguccac

SEQ ID NO: 86995 - RNA, 23 nt, Artificial Sequence
  Synthetic
cuagaaaauugagagaaguccac

SEQ ID NO: 86996 - RNA, 24 nt, Artificial Sequence
  Synthetic
ccuagaaaauugagagaaguccac

SEQ ID NO: 86997 - RNA, 18 nt, Artificial Sequence
  Synthetic
gaaauacaggccucucac

SEQ ID NO: 86998 - RNA, 19 nt, Artificial Sequence
  Synthetic
ggaaauacaggccucucac

SEQ ID NO: 86999 - RNA, 20 nt, Artificial Sequence
  Synthetic
gggaaauacaggccucucac

SEQ ID NO: 87000 - RNA, 21 nt, Artificial Sequence
  Synthetic
agggaaauacaggccucucac

SEQ ID NO: 87001 - RNA, 22 nt, Artificial Sequence
  Synthetic
cagggaaauacaggccucucac

SEQ ID NO: 87002 - RNA, 23 nt, Artificial Sequence
  Synthetic
gcagggaaauacaggccucucac

SEQ ID NO: 87003 - RNA, 24 nt, Artificial Sequence
  Synthetic
agcagggaaauacaggccucucac

SEQ ID NO: 87004 - RNA, 18 nt, Artificial Sequence
  Synthetic
aaauguauacccaaagac

SEQ ID NO: 87005 - RNA, 19 nt, Artificial Sequence
  Synthetic
uaaauguauacccaaagac

SEQ ID NO: 87006 - RNA, 20 nt, Artificial Sequence
  Synthetic
uuaaauguauacccaaagac

SEQ ID NO: 87007 - RNA, 21 nt, Artificial Sequence
  Synthetic
uuuaaauguauacccaaagac

SEQ ID NO: 87008 - RNA, 22 nt, Artificial Sequence
  Synthetic
guuuaaauguauacccaaagac

SEQ ID NO: 87009 - RNA, 23 nt, Artificial Sequence
  Synthetic
gguuuaaauguauacccaaagac

SEQ ID NO: 87010 - RNA, 24 nt, Artificial Sequence
  Synthetic
ggguuuaaauguauacccaaagac

SEQ ID NO: 87011 - RNA, 18 nt, Artificial Sequence
  Synthetic
auccacacuccgaaagac

SEQ ID NO: 87012 - RNA, 19 nt, Artificial Sequence
  Synthetic
aauccacacuccgaaagac

SEQ ID NO: 87013 - RNA, 20 nt, Artificial Sequence
  Synthetic
gaauccacacuccgaaagac

SEQ ID NO: 87014 - RNA, 18 nt, Artificial Sequence
  Synthetic
aguccucuuauguaagac

SEQ ID NO: 87015 - RNA, 19 nt, Artificial Sequence
  Synthetic
gaguccucuuauguaagac

SEQ ID NO: 87016 - RNA, 20 nt, Artificial Sequence
  Synthetic
agaguccucuuauguaagac

SEQ ID NO: 87017 - RNA, 21 nt, Artificial Sequence
  Synthetic
aagaguccucuuauguaagac

SEQ ID NO: 87018 - RNA, 22 nt, Artificial Sequence
  Synthetic
caagaguccucuuauguaagac

SEQ ID NO: 87019 - RNA, 23 nt, Artificial Sequence
  Synthetic
ccaagaguccucuuauguaagac

SEQ ID NO: 87020 - RNA, 24 nt, Artificial Sequence
  Synthetic
uccaagaguccucuuauguaagac

SEQ ID NO: 87021 - RNA, 18 nt, Artificial Sequence
  Synthetic
agaugagaaggcacagac

SEQ ID NO: 87022 - RNA, 19 nt, Artificial Sequence
  Synthetic
cagaugagaaggcacagac

SEQ ID NO: 87023 - RNA, 20 nt, Artificial Sequence
  Synthetic
gcagaugagaaggcacagac

SEQ ID NO: 87024 - RNA, 21 nt, Artificial Sequence
  Synthetic
ggcagaugagaaggcacagac

SEQ ID NO: 87025 - RNA, 22 nt, Artificial Sequence
  Synthetic
cggcagaugagaaggcacagac

SEQ ID NO: 87026 - RNA, 23 nt, Artificial Sequence
  Synthetic
ccggcagaugagaaggcacagac

SEQ ID NO: 87027 - RNA, 24 nt, Artificial Sequence
  Synthetic
uccggcagaugagaaggcacagac

SEQ ID NO: 87028 - RNA, 18 nt, Artificial Sequence
  Synthetic
  misc_feature (5)..(5): n is a, c, g, or u
  misc_feature (8)..(8): n is a, c, g, or u
ucggncgnaacggcagac

SEQ ID NO: 87029 - RNA, 19 nt, Artificial Sequence
  Synthetic
  misc_feature (6)..(6): n is a, c, g, or u
  misc_feature (9)..(9): n is a, c, g, or u
gucggncgnaacggcagac

SEQ ID NO: 87030 - RNA, 20 nt, Artificial Sequence
  Synthetic
  misc_feature (7)..(7): n is a, c, g, or u
  misc_feature (10)..(10): n is a, c, g, or u
ggucggncgnaacggcagac

SEQ ID NO: 87031 - RNA, 21 nt, Artificial Sequence
  Synthetic
  misc_feature (8)..(8): n is a, c, g, or u
  misc_feature (11)..(11): n is a, c, g, or u
uggucggncgnaacggcagac

SEQ ID NO: 87032 - RNA, 22 nt, Artificial Sequence
  Synthetic
  misc_feature (9)..(9): n is a, c, g, or u
  misc_feature (12)..(12): n is a, c, g, or u
guggucggncgnaacggcagac

SEQ ID NO: 87033 - RNA, 23 nt, Artificial Sequence
  Synthetic
  misc_feature (10)..(10): n is a, c, g, or u
  misc_feature (13)..(13): n is a, c, g, or u
cguggucggncgnaacggcagac

SEQ ID NO: 87034 - RNA, 24 nt, Artificial Sequence
  Synthetic
  misc_feature (11)..(11): n is a, c, g, or u
  misc_feature (14)..(14): n is a, c, g, or u
ccguggucggncgnaacggcagac

SEQ ID NO: 87035 - RNA, 18 nt, Artificial Sequence
  Synthetic
  misc_feature (3)..(3): n is a, c, g, or u
gancaaugcucaggagac

SEQ ID NO: 87036 - RNA, 19 nt, Artificial Sequence
  Synthetic
  misc_feature (4)..(4): n is a, c, g, or u
ugancaaugcucaggagac

SEQ ID NO: 87037 - RNA, 20 nt, Artificial Sequence
  Synthetic
  misc_feature (5)..(5): n is a, c, g, or u
gugancaaugcucaggagac

SEQ ID NO: 87038 - RNA, 21 nt, Artificial Sequence
  Synthetic
  misc_feature (6)..(6): n is a, c, g, or u
ggugancaaugcucaggagac

SEQ ID NO: 87039 - RNA, 22 nt, Artificial Sequence
  Synthetic
  misc_feature (7)..(7): n is a, c, g, or u
aggugancaaugcucaggagac

SEQ ID NO: 87040 - RNA, 23 nt, Artificial Sequence
  Synthetic
  misc_feature (8)..(8): n is a, c, g, or u
gaggugancaaugcucaggagac

SEQ ID NO: 87041 - RNA, 24 nt, Artificial Sequence
  Synthetic
  misc_feature (9)..(9): n is a, c, g, or u
ugaggugancaaugcucaggagac

SEQ ID NO: 87042 - RNA, 18 nt, Artificial Sequence
  Synthetic
uuucucaaagguggagac

SEQ ID NO: 87043 - RNA, 19 nt, Artificial Sequence
  Synthetic
guuucucaaagguggagac

SEQ ID NO: 87044 - RNA, 20 nt, Artificial Sequence
  Synthetic
uguuucucaaagguggagac

SEQ ID NO: 87045 - RNA, 21 nt, Artificial Sequence
  Synthetic
guguuucucaaagguggagac

SEQ ID NO: 87046 - RNA, 22 nt, Artificial Sequence
  Synthetic
aguguuucucaaagguggagac

SEQ ID NO: 87047 - RNA, 23 nt, Artificial Sequence
  Synthetic
gaguguuucucaaagguggagac

SEQ ID NO: 87048 - RNA, 24 nt, Artificial Sequence
  Synthetic
ugaguguuucucaaagguggagac

SEQ ID NO: 87049 - RNA, 18 nt, Artificial Sequence
  Synthetic
cucuuccaaaagugagac

SEQ ID NO: 87050 - RNA, 19 nt, Artificial Sequence
  Synthetic
ucucuuccaaaagugagac

SEQ ID NO: 87051 - RNA, 20 nt, Artificial Sequence
  Synthetic
uucucuuccaaaagugagac

SEQ ID NO: 87052 - RNA, 21 nt, Artificial Sequence
  Synthetic
uuucucuuccaaaagugagac

SEQ ID NO: 87053 - RNA, 22 nt, Artificial Sequence
  Synthetic
guuucucuuccaaaagugagac

SEQ ID NO: 87054 - RNA, 23 nt, Artificial Sequence
  Synthetic
  misc_feature (1)..(1): n is a, c, g, or u
nguuucucuuccaaaagugagac

SEQ ID NO: 87055 - RNA, 24 nt, Artificial Sequence
  Synthetic
  misc_feature (2)..(2): n is a, c, g, or u
cnguuucucuuccaaaagugagac

SEQ ID NO: 87056 - RNA, 18 nt, Artificial Sequence
  Synthetic
caggacaaguuggaggac

SEQ ID NO: 87057 - RNA, 19 nt, Artificial Sequence
  Synthetic
ccaggacaaguuggaggac

SEQ ID NO: 87058 - RNA, 20 nt, Artificial Sequence
  Synthetic
accaggacaaguuggaggac

SEQ ID NO: 87059 - RNA, 21 nt, Artificial Sequence
  Synthetic
aaccaggacaaguuggaggac

SEQ ID NO: 87060 - RNA, 22 nt, Artificial Sequence
  Synthetic
uaaccaggacaaguuggaggac

SEQ ID NO: 87061 - RNA, 23 nt, Artificial Sequence
  Synthetic
auaaccaggacaaguuggaggac

SEQ ID NO: 87062 - RNA, 24 nt, Artificial Sequence
  Synthetic
gauaaccaggacaaguuggaggac

SEQ ID NO: 87063 - RNA, 18 nt, Artificial Sequence
  Synthetic
aggcuugaacaguaggac

SEQ ID NO: 87064 - RNA, 19 nt, Artificial Sequence
  Synthetic
gaggcuugaacaguaggac

SEQ ID NO: 87065 - RNA, 20 nt, Artificial Sequence
  Synthetic
ggaggcuugaacaguaggac

SEQ ID NO: 87066 - RNA, 21 nt, Artificial Sequence
  Synthetic
uggaggcuugaacaguaggac

SEQ ID NO: 87067 - RNA, 22 nt, Artificial Sequence
  Synthetic
uuggaggcuugaacaguaggac

SEQ ID NO: 87068 - RNA, 23 nt, Artificial Sequence
  Synthetic
cuuggaggcuugaacaguaggac

SEQ ID NO: 87069 - RNA, 24 nt, Artificial Sequence
  Synthetic
gcuuggaggcuugaacaguaggac

SEQ ID NO: 87070 - RNA, 18 nt, Artificial Sequence
  Synthetic
acagcgguaaaaagggac

SEQ ID NO: 87071 - RNA, 19 nt, Artificial Sequence
  Synthetic
aacagcgguaaaaagggac

SEQ ID NO: 87072 - RNA, 20 nt, Artificial Sequence
  Synthetic
uaacagcgguaaaaagggac

SEQ ID NO: 87073 - RNA, 21 nt, Artificial Sequence
  Synthetic
guaacagcgguaaaaagggac

SEQ ID NO: 87074 - RNA, 22 nt, Artificial Sequence
  Synthetic
gguaacagcgguaaaaagggac

SEQ ID NO: 87075 - RNA, 23 nt, Artificial Sequence
  Synthetic
ugguaacagcgguaaaaagggac

SEQ ID NO: 87076 - RNA, 24 nt, Artificial Sequence
  Synthetic
uugguaacagcgguaaaaagggac

SEQ ID NO: 87077 - RNA, 18 nt, Artificial Sequence
  Synthetic
auucagcgccgacgggac

SEQ ID NO: 87078 - RNA, 19 nt, Artificial Sequence
  Synthetic
gauucagcgccgacgggac

SEQ ID NO: 87079 - RNA, 20 nt, Artificial Sequence
  Synthetic
ggauucagcgccgacgggac

SEQ ID NO: 87080 - RNA, 18 nt, Artificial Sequence
  Synthetic
gcagacggagaaggggac

SEQ ID NO: 87081 - RNA, 19 nt, Artificial Sequence
  Synthetic
ggcagacggagaaggggac

SEQ ID NO: 87082 - RNA, 20 nt, Artificial Sequence
  Synthetic
cggcagacggagaaggggac

SEQ ID NO: 87083 - RNA, 21 nt, Artificial Sequence
  Synthetic
acggcagacggagaaggggac

SEQ ID NO: 87084 - RNA, 22 nt, Artificial Sequence
  Synthetic
aacggcagacggagaaggggac

SEQ ID NO: 87085 - RNA, 23 nt, Artificial Sequence
  Synthetic
  misc_feature (1)..(1): n is a, c, g, or u
naacggcagacggagaaggggac

SEQ ID NO: 87086 - RNA, 24 nt, Artificial Sequence
  Synthetic
  misc_feature (2)..(2): n is a, c, g, or u
gnaacggcagacggagaaggggac

SEQ ID NO: 87087 - RNA, 18 nt, Artificial Sequence
  Synthetic
ugauuggagguuggggac

SEQ ID NO: 87088 - RNA, 19 nt, Artificial Sequence
  Synthetic
gugauuggagguuggggac

SEQ ID NO: 87089 - RNA, 20 nt, Artificial Sequence
  Synthetic
agugauuggagguuggggac

SEQ ID NO: 87090 - RNA, 21 nt, Artificial Sequence
  Synthetic
gagugauuggagguuggggac

SEQ ID NO: 87091 - RNA, 22 nt, Artificial Sequence
  Synthetic
ugagugauuggagguuggggac

SEQ ID NO: 87092 - RNA, 23 nt, Artificial Sequence
  Synthetic
gugagugauuggagguuggggac

SEQ ID NO: 87093 - RNA, 24 nt, Artificial Sequence
  Synthetic
ggugagugauuggagguuggggac

SEQ ID NO: 87094 - RNA, 18 nt, Artificial Sequence
  Synthetic
  misc_feature (16)..(16): n is a, c, g, or u
auauuugcgggagagnac

SEQ ID NO: 87095 - RNA, 19 nt, Artificial Sequence
  Synthetic
  misc_feature (17)..(17): n is a, c, g, or u
uauauuugcgggagagnac

SEQ ID NO: 87096 - RNA, 20 nt, Artificial Sequence
  Synthetic
  misc_feature (18)..(18): n is a, c, g, or u
guauauuugcgggagagnac

SEQ ID NO: 87097 - RNA, 21 nt, Artificial Sequence
  Synthetic
  misc_feature (19)..(19): n is a, c, g, or u
uguauauuugcgggagagnac

SEQ ID NO: 87098 - RNA, 22 nt, Artificial Sequence
  Synthetic
  misc_feature (20)..(20): n is a, c, g, or u
auguauauuugcgggagagnac

SEQ ID NO: 87099 - RNA, 23 nt, Artificial Sequence
  Synthetic
  misc_feature (21)..(21): n is a, c, g, or u
gauguauauuugcgggagagnac

SEQ ID NO: 87100 - RNA, 24 nt, Artificial Sequence
  Synthetic
  misc_feature (22)..(22): n is a, c, g, or u
cgauguauauuugcgggagagnac

SEQ ID NO: 87101 - RNA, 18 nt, Artificial Sequence
  Synthetic
  misc_feature (4)..(4): n is a, c, g, or u
  misc_feature (16)..(16): n is a, c, g, or u
aggnuuaaagacaggnac

SEQ ID NO: 87102 - RNA, 19 nt, Artificial Sequence
  Synthetic
  misc_feature (5)..(5): n is a, c, g, or u
  misc_feature (17)..(17): n is a, c, g, or u
gaggnuuaaagacaggnac

SEQ ID NO: 87103 - RNA, 20 nt, Artificial Sequence
  Synthetic
  misc_feature (6)..(6): n is a, c, g, or u
  misc_feature (18)..(18): n is a, c, g, or u
ugaggnuuaaagacaggnac

SEQ ID NO: 87104 - RNA, 21 nt, Artificial Sequence
  Synthetic
  misc_feature (7)..(7): n is a, c, g, or u
  misc_feature (19)..(19): n is a, c, g, or u
augaggnuuaaagacaggnac

SEQ ID NO: 87105 - RNA, 22 nt, Artificial Sequence
  Synthetic
  misc_feature (8)..(8): n is a, c, g, or u
  misc_feature (20)..(20): n is a, c, g, or u
aaugaggnuuaaagacaggnac

SEQ ID NO: 87106 - RNA, 23 nt, Artificial Sequence
  Synthetic
  misc_feature (9)..(9): n is a, c, g, or u
  misc_feature (21)..(21): n is a, c, g, or u
caaugaggnuuaaagacaggnac

SEQ ID NO: 87107 - RNA, 24 nt, Artificial Sequence
  Synthetic
  misc_feature (10)..(10): n is a, c, g, or u
  misc_feature (22)..(22): n is a, c, g, or u
ccaaugaggnuuaaagacaggnac

SEQ ID NO: 87108 - RNA, 18 nt, Artificial Sequence
  Synthetic
  misc_feature (6)..(6): n is a, c, g, or u
  misc_feature (16)..(16): n is a, c, g, or u
ucuucnuuucucauunac

SEQ ID NO: 87109 - RNA, 19 nt, Artificial Sequence
  Synthetic
  misc_feature (1)..(1): n is a, c, g, or u
  misc_feature (7)..(7): n is a, c, g, or u
  misc_feature (17)..(17): n is a, c, g, or u
nucuucnuuucucauunac

SEQ ID NO: 87110 - RNA, 20 nt, Artificial Sequence
  Synthetic
  misc_feature (2)..(2): n is a, c, g, or u
  misc_feature (8)..(8): n is a, c, g, or u
  misc_feature (18)..(18): n is a, c, g, or u
anucuucnuuucucauunac

SEQ ID NO: 87111 - RNA, 21 nt, Artificial Sequence
  Synthetic
  misc_feature (3)..(3): n is a, c, g, or u
  misc_feature (9)..(9): n is a, c, g, or u
  misc_feature (19)..(19): n is a, c, g, or u
canucuucnuuucucauunac

SEQ ID NO: 87112 - RNA, 22 nt, Artificial Sequence
  Synthetic
  misc_feature (4)..(4): n is a, c, g, or u
  misc_feature (10)..(10): n is a, c, g, or u
  misc_feature (20)..(20): n is a, c, g, or u
gcanucuucnuuucucauunac

SEQ ID NO: 87113 - RNA, 23 nt, Artificial Sequence
  Synthetic
  misc_feature (5)..(5): n is a, c, g, or u
  misc_feature (11)..(11): n is a, c, g, or u
  misc_feature (21)..(21): n is a, c, g, or u
ugcanucuucnuuucucauunac

SEQ ID NO: 87114 - RNA, 24 nt, Artificial Sequence
  Synthetic
  misc_feature (6)..(6): n is a, c, g, or u
  misc_feature (12)..(12): n is a, c, g, or u
  misc_feature (22)..(22): n is a, c, g, or u
uugcanucuucnuuucucauunac

SEQ ID NO: 87115 - RNA, 18 nt, Artificial Sequence
  Synthetic
  misc_feature (3)..(3): n is a, c, g, or u
  misc_feature (12)..(12): n is a, c, g, or u
ganugaauacangcauac

SEQ ID NO: 87116 - RNA, 19 nt, Artificial Sequence
  Synthetic
  misc_feature (4)..(4): n is a, c, g, or u
  misc_feature (13)..(13): n is a, c, g, or u
aganugaauacangcauac

SEQ ID NO: 87117 - RNA, 20 nt, Artificial Sequence
  Synthetic
  misc_feature (5)..(5): n is a, c, g, or u
  misc_feature (14)..(14): n is a, c, g, or u
uaganugaauacangcauac

SEQ ID NO: 87118 - RNA, 21 nt, Artificial Sequence
  Synthetic
  misc_feature (6)..(6): n is a, c, g, or u
  misc_feature (15)..(15): n is a, c, g, or u
uuaganugaauacangcauac

SEQ ID NO: 87119 - RNA, 22 nt, Artificial Sequence
  Synthetic
  misc_feature (7)..(7): n is a, c, g, or u
  misc_feature (16)..(16): n is a, c, g, or u
cuuaganugaauacangcauac

SEQ ID NO: 87120 - RNA, 23 nt, Artificial Sequence
  Synthetic
  misc_feature (8)..(8): n is a, c, g, or u
  misc_feature (17)..(17): n is a, c, g, or u
gcuuaganugaauacangcauac

SEQ ID NO: 87121 - RNA, 24 nt, Artificial Sequence
  Synthetic
  misc_feature (9)..(9): n is a, c, g, or u
  misc_feature (18)..(18): n is a, c, g, or u
ugcuuaganugaauacangcauac

SEQ ID NO: 87122 - RNA, 18 nt, Artificial Sequence
  Synthetic
cagcaacaggagggauac

SEQ ID NO: 87123 - RNA, 19 nt, Artificial Sequence
  Synthetic
acagcaacaggagggauac

SEQ ID NO: 87124 - RNA, 20 nt, Artificial Sequence
  Synthetic
uacagcaacaggagggauac

SEQ ID NO: 87125 - RNA, 21 nt, Artificial Sequence
  Synthetic
guacagcaacaggagggauac

SEQ ID NO: 87126 - RNA, 22 nt, Artificial Sequence
  Synthetic
gguacagcaacaggagggauac

SEQ ID NO: 87127 - RNA, 23 nt, Artificial Sequence
  Synthetic
ugguacagcaacaggagggauac

SEQ ID NO: 87128 - RNA, 24 nt, Artificial Sequence
  Synthetic
uugguacagcaacaggagggauac

SEQ ID NO: 87129 - RNA, 18 nt, Artificial Sequence
  Synthetic
uaggguuuaaauguauac

SEQ ID NO: 87130 - RNA, 19 nt, Artificial Sequence
  Synthetic
uuaggguuuaaauguauac

SEQ ID NO: 87131 - RNA, 20 nt, Artificial Sequence
  Synthetic
guuaggguuuaaauguauac

SEQ ID NO: 87132 - RNA, 21 nt, Artificial Sequence
  Synthetic
uguuaggguuuaaauguauac

SEQ ID NO: 87133 - RNA, 22 nt, Artificial Sequence
  Synthetic
uuguuaggguuuaaauguauac

SEQ ID NO: 87134 - RNA, 23 nt, Artificial Sequence
  Synthetic
uuuguuaggguuuaaauguauac

SEQ ID NO: 87135 - RNA, 24 nt, Artificial Sequence
  Synthetic
uuuuguuaggguuuaaauguauac

SEQ ID NO: 87136 - RNA, 18 nt, Artificial Sequence
  Synthetic
  misc_feature (4)..(4): n is a, c, g, or u
aucnagaagaucucguac

SEQ ID NO: 87137 - RNA, 19 nt, Artificial Sequence
  Synthetic
  misc_feature (5)..(5): n is a, c, g, or u
uaucnagaagaucucguac

SEQ ID NO: 87138 - RNA, 20 nt, Artificial Sequence
  Synthetic
  misc_feature (6)..(6): n is a, c, g, or u
guaucnagaagaucucguac

SEQ ID NO: 87139 - RNA, 21 nt, Artificial Sequence
  Synthetic
  misc_feature (7)..(7): n is a, c, g, or u
gguaucnagaagaucucguac

SEQ ID NO: 87140 - RNA, 22 nt, Artificial Sequence
  Synthetic
  misc_feature (8)..(8): n is a, c, g, or u
cgguaucnagaagaucucguac

SEQ ID NO: 87141 - RNA, 23 nt, Artificial Sequence
  Synthetic
  misc_feature (9)..(9): n is a, c, g, or u
gcgguaucnagaagaucucguac

SEQ ID NO: 87142 - RNA, 24 nt, Artificial Sequence
  Synthetic
  misc_feature (10)..(10): n is a, c, g, or u
ggcgguaucnagaagaucucguac

SEQ ID NO: 87143 - RNA, 18 nt, Artificial Sequence
  Synthetic
cguccgaagguuugguac

SEQ ID NO: 87144 - RNA, 19 nt, Artificial Sequence
  Synthetic
ccguccgaagguuugguac

SEQ ID NO: 87145 - RNA, 20 nt, Artificial Sequence
  Synthetic
uccguccgaagguuugguac

SEQ ID NO: 87146 - RNA, 18 nt, Artificial Sequence
  Synthetic
gguucagguauuguuuac

SEQ ID NO: 87147 - RNA, 19 nt, Artificial Sequence
  Synthetic
agguucagguauuguuuac

SEQ ID NO: 87148 - RNA, 20 nt, Artificial Sequence
  Synthetic
aagguucagguauuguuuac

SEQ ID NO: 87149 - RNA, 21 nt, Artificial Sequence
  Synthetic
aaagguucagguauuguuuac

SEQ ID NO: 87150 - RNA, 22 nt, Artificial Sequence
  Synthetic
uaaagguucagguauuguuuac

SEQ ID NO: 87151 - RNA, 23 nt, Artificial Sequence
  Synthetic
guaaagguucagguauuguuuac

SEQ ID NO: 87152 - RNA, 24 nt, Artificial Sequence
  Synthetic
gguaaagguucagguauuguuuac

SEQ ID NO: 87153 - RNA, 18 nt, Artificial Sequence
  Synthetic
aaaaggggcagcaaaacc

SEQ ID NO: 87154 - RNA, 19 nt, Artificial Sequence
  Synthetic
uaaaaggggcagcaaaacc

SEQ ID NO: 87155 - RNA, 20 nt, Artificial Sequence
  Synthetic
guaaaaggggcagcaaaacc

SEQ ID NO: 87156 - RNA, 21 nt, Artificial Sequence
  Synthetic
uguaaaaggggcagcaaaacc

SEQ ID NO: 87157 - RNA, 22 nt, Artificial Sequence
  Synthetic
guguaaaaggggcagcaaaacc

SEQ ID NO: 87158 - RNA, 23 nt, Artificial Sequence
  Synthetic
uguguaaaaggggcagcaaaacc

SEQ ID NO: 87159 - RNA, 24 nt, Artificial Sequence
  Synthetic
uuguguaaaaggggcagcaaaacc

SEQ ID NO: 87160 - RNA, 18 nt, Artificial Sequence
  Synthetic
ugauaguccagaagaacc

SEQ ID NO: 87161 - RNA, 19 nt, Artificial Sequence
  Synthetic
uugauaguccagaagaacc

SEQ ID NO: 87162 - RNA, 20 nt, Artificial Sequence
  Synthetic
cuugauaguccagaagaacc

SEQ ID NO: 87163 - RNA, 21 nt, Artificial Sequence
  Synthetic
ccuugauaguccagaagaacc

SEQ ID NO: 87164 - RNA, 22 nt, Artificial Sequence
  Synthetic
accuugauaguccagaagaacc

SEQ ID NO: 87165 - RNA, 23 nt, Artificial Sequence
  Synthetic
uaccuugauaguccagaagaacc

SEQ ID NO: 87166 - RNA, 24 nt, Artificial Sequence
  Synthetic
auaccuugauaguccagaagaacc

SEQ ID NO: 87167 - RNA, 18 nt, Artificial Sequence
  Synthetic
gggaaagcccuacgaacc

SEQ ID NO: 87168 - RNA, 19 nt, Artificial Sequence
  Synthetic
ggggaaagcccuacgaacc

SEQ ID NO: 87169 - RNA, 20 nt, Artificial Sequence
  Synthetic
gggggaaagcccuacgaacc

SEQ ID NO: 87170 - RNA, 21 nt, Artificial Sequence
  Synthetic
ugggggaaagcccuacgaacc

SEQ ID NO: 87171 - RNA, 22 nt, Artificial Sequence
  Synthetic
gugggggaaagcccuacgaacc

SEQ ID NO: 87172 - RNA, 23 nt, Artificial Sequence
  Synthetic
agugggggaaagcccuacgaacc

SEQ ID NO: 87173 - RNA, 24 nt, Artificial Sequence
  Synthetic
cagugggggaaagcccuacgaacc

SEQ ID NO: 87174 - RNA, 18 nt, Artificial Sequence
  Synthetic
  misc_feature (6)..(6): n is a, c, g, or u
  misc_feature (9)..(9): n is a, c, g, or u
ccaugnccnaaagccacc

SEQ ID NO: 87175 - RNA, 19 nt, Artificial Sequence
  Synthetic
  misc_feature (7)..(7): n is a, c, g, or u
  misc_feature (10)..(10): n is a, c, g, or u
uccaugnccnaaagccacc

SEQ ID NO: 87176 - RNA, 20 nt, Artificial Sequence
  Synthetic
  misc_feature (8)..(8): n is a, c, g, or u
  misc_feature (11)..(11): n is a, c, g, or u
guccaugnccnaaagccacc

SEQ ID NO: 87177 - RNA, 21 nt, Artificial Sequence
  Synthetic
  misc_feature (9)..(9): n is a, c, g, or u
  misc_feature (12)..(12): n is a, c, g, or u
uguccaugnccnaaagccacc

SEQ ID NO: 87178 - RNA, 22 nt, Artificial Sequence
  Synthetic
  misc_feature (10)..(10): n is a, c, g, or u
  misc_feature (13)..(13): n is a, c, g, or u
auguccaugnccnaaagccacc

SEQ ID NO: 87179 - RNA, 23 nt, Artificial Sequence
  Synthetic
  misc_feature (11)..(11): n is a, c, g, or u
  misc_feature (14)..(14): n is a, c, g, or u
aauguccaugnccnaaagccacc

SEQ ID NO: 87180 - RNA, 24 nt, Artificial Sequence
  Synthetic
  misc_feature (12)..(12): n is a, c, g, or u
  misc_feature (15)..(15): n is a, c, g, or u
caauguccaugnccnaaagccacc

SEQ ID NO: 87181 - RNA, 18 nt, Artificial Sequence
  Synthetic
uccugaacuggagccacc

SEQ ID NO: 87182 - RNA, 19 nt, Artificial Sequence
  Synthetic
uuccugaacuggagccacc

SEQ ID NO: 87183 - RNA, 20 nt, Artificial Sequence
  Synthetic
guuccugaacuggagccacc

SEQ ID NO: 87184 - RNA, 21 nt, Artificial Sequence
  Synthetic
uguuccugaacuggagccacc

SEQ ID NO: 87185 - RNA, 22 nt, Artificial Sequence
  Synthetic
cuguuccugaacuggagccacc

SEQ ID NO: 87186 - RNA, 23 nt, Artificial Sequence
  Synthetic
acuguuccugaacuggagccacc

SEQ ID NO: 87187 - RNA, 24 nt, Artificial Sequence
  Synthetic
uacuguuccugaacuggagccacc

SEQ ID NO: 87188 - RNA, 18 nt, Artificial Sequence
  Synthetic
gagccugagggcuccacc

SEQ ID NO: 87189 - RNA, 19 nt, Artificial Sequence
  Synthetic
ugagccugagggcuccacc

SEQ ID NO: 87190 - RNA, 20 nt, Artificial Sequence
  Synthetic
cugagccugagggcuccacc

SEQ ID NO: 87191 - RNA, 21 nt, Artificial Sequence
  Synthetic
ccugagccugagggcuccacc

SEQ ID NO: 87192 - RNA, 22 nt, Artificial Sequence
  Synthetic
cccugagccugagggcuccacc

SEQ ID NO: 87193 - RNA, 23 nt, Artificial Sequence
  Synthetic
gcccugagccugagggcuccacc

SEQ ID NO: 87194 - RNA, 24 nt, Artificial Sequence
  Synthetic
ugcccugagccugagggcuccacc

SEQ ID NO: 87195 - RNA, 18 nt, Artificial Sequence
  Synthetic
guccucuuauguaagacc

SEQ ID NO: 87196 - RNA, 19 nt, Artificial Sequence
  Synthetic
aguccucuuauguaagacc

SEQ ID NO: 87197 - RNA, 20 nt, Artificial Sequence
  Synthetic
gaguccucuuauguaagacc

SEQ ID NO: 87198 - RNA, 21 nt, Artificial Sequence
  Synthetic
agaguccucuuauguaagacc

SEQ ID NO: 87199 - RNA, 22 nt, Artificial Sequence
  Synthetic
aagaguccucuuauguaagacc

SEQ ID NO: 87200 - RNA, 23 nt, Artificial Sequence
  Synthetic
caagaguccucuuauguaagacc

SEQ ID NO: 87201 - RNA, 24 nt, Artificial Sequence
  Synthetic
ccaagaguccucuuauguaagacc

SEQ ID NO: 87202 - RNA, 18 nt, Artificial Sequence
  Synthetic
  misc_feature (2)..(2): n is a, c, g, or u
  misc_feature (14)..(14): n is a, c, g, or u
gnucuuguggcaangacc

SEQ ID NO: 87203 - RNA, 19 nt, Artificial Sequence
  Synthetic
  misc_feature (3)..(3): n is a, c, g, or u
  misc_feature (15)..(15): n is a, c, g, or u
ugnucuuguggcaangacc

SEQ ID NO: 87204 - RNA, 20 nt, Artificial Sequence
  Synthetic
  misc_feature (4)..(4): n is a, c, g, or u
  misc_feature (16)..(16): n is a, c, g, or u
gugnucuuguggcaangacc

SEQ ID NO: 87205 - RNA, 21 nt, Artificial Sequence
  Synthetic
  misc_feature (5)..(5): n is a, c, g, or u
  misc_feature (17)..(17): n is a, c, g, or u
ugugnucuuguggcaangacc

SEQ ID NO: 87206 - RNA, 22 nt, Artificial Sequence
  Synthetic
  misc_feature (6)..(6): n is a, c, g, or u
  misc_feature (18)..(18): n is a, c, g, or u
augugnucuuguggcaangacc

SEQ ID NO: 87207 - RNA, 23 nt, Artificial Sequence
  Synthetic
  misc_feature (7)..(7): n is a, c, g, or u
  misc_feature (19)..(19): n is a, c, g, or u
gaugugnucuuguggcaangacc

SEQ ID NO: 87208 - RNA, 24 nt, Artificial Sequence
  Synthetic
  misc_feature (8)..(8): n is a, c, g, or u
  misc_feature (20)..(20): n is a, c, g, or u
ugaugugnucuuguggcaangacc

SEQ ID NO: 87209 - RNA, 18 nt, Artificial Sequence
  Synthetic
cccaagaauauggugacc

SEQ ID NO: 87210 - RNA, 19 nt, Artificial Sequence
  Synthetic
ucccaagaauauggugacc

SEQ ID NO: 87211 - RNA, 20 nt, Artificial Sequence
  Synthetic
uucccaagaauauggugacc

SEQ ID NO: 87212 - RNA, 21 nt, Artificial Sequence
  Synthetic
guucccaagaauauggugacc

SEQ ID NO: 87213 - RNA, 22 nt, Artificial Sequence
  Synthetic
uguucccaagaauauggugacc

SEQ ID NO: 87214 - RNA, 23 nt, Artificial Sequence
  Synthetic
uuguucccaagaauauggugacc

SEQ ID NO: 87215 - RNA, 24 nt, Artificial Sequence
  Synthetic
cuuguucccaagaauauggugacc

SEQ ID NO: 87216 - RNA, 18 nt, Artificial Sequence
  Synthetic
aggguuuaaauguauacc

SEQ ID NO: 87217 - RNA, 19 nt, Artificial Sequence
  Synthetic
uaggguuuaaauguauacc

SEQ ID NO: 87218 - RNA, 20 nt, Artificial Sequence
  Synthetic
uuaggguuuaaauguauacc

SEQ ID NO: 87219 - RNA, 21 nt, Artificial Sequence
  Synthetic
guuaggguuuaaauguauacc

SEQ ID NO: 87220 - RNA, 22 nt, Artificial Sequence
  Synthetic
uguuaggguuuaaauguauacc

SEQ ID NO: 87221 - RNA, 23 nt, Artificial Sequence
  Synthetic
uuguuaggguuuaaauguauacc

SEQ ID NO: 87222 - RNA, 24 nt, Artificial Sequence
  Synthetic
uuuguuaggguuuaaauguauacc

SEQ ID NO: 87223 - RNA, 18 nt, Artificial Sequence
  Synthetic
aaaggggcagcaaaaccc

SEQ ID NO: 87224 - RNA, 19 nt, Artificial Sequence
  Synthetic
aaaaggggcagcaaaaccc

SEQ ID NO: 87225 - RNA, 20 nt, Artificial Sequence
  Synthetic
uaaaaggggcagcaaaaccc

SEQ ID NO: 87226 - RNA, 21 nt, Artificial Sequence
  Synthetic
guaaaaggggcagcaaaaccc

SEQ ID NO: 87227 - RNA, 22 nt, Artificial Sequence
  Synthetic
uguaaaaggggcagcaaaaccc

SEQ ID NO: 87228 - RNA, 23 nt, Artificial Sequence
  Synthetic
guguaaaaggggcagcaaaaccc

SEQ ID NO: 87229 - RNA, 24 nt, Artificial Sequence
  Synthetic
uguguaaaaggggcagcaaaaccc

SEQ ID NO: 87230 - RNA, 18 nt, Artificial Sequence
  Synthetic
agccugagggcuccaccc

SEQ ID NO: 87231 - RNA, 19 nt, Artificial Sequence
  Synthetic
gagccugagggcuccaccc

SEQ ID NO: 87232 - RNA, 20 nt, Artificial Sequence
  Synthetic
ugagccugagggcuccaccc

SEQ ID NO: 87233 - RNA, 21 nt, Artificial Sequence
  Synthetic
cugagccugagggcuccaccc

SEQ ID NO: 87234 - RNA, 22 nt, Artificial Sequence
  Synthetic
ccugagccugagggcuccaccc

SEQ ID NO: 87235 - RNA, 23 nt, Artificial Sequence
  Synthetic
cccugagccugagggcuccaccc

SEQ ID NO: 87236 - RNA, 24 nt, Artificial Sequence
  Synthetic
gcccugagccugagggcuccaccc

SEQ ID NO: 87237 - RNA, 18 nt, Artificial Sequence
  Synthetic
ccaagaauauggugaccc

SEQ ID NO: 87238 - RNA, 19 nt, Artificial Sequence
  Synthetic
cccaagaauauggugaccc

SEQ ID NO: 87239 - RNA, 20 nt, Artificial Sequence
  Synthetic
ucccaagaauauggugaccc

SEQ ID NO: 87240 - RNA, 21 nt, Artificial Sequence
  Synthetic
uucccaagaauauggugaccc

SEQ ID NO: 87241 - RNA, 22 nt, Artificial Sequence
  Synthetic
guucccaagaauauggugaccc

SEQ ID NO: 87242 - RNA, 23 nt, Artificial Sequence
  Synthetic
uguucccaagaauauggugaccc

SEQ ID NO: 87243 - RNA, 24 nt, Artificial Sequence
  Synthetic
uuguucccaagaauauggugaccc

SEQ ID NO: 87244 - RNA, 18 nt, Artificial Sequence
  Synthetic
ggguuuaaauguauaccc

SEQ ID NO: 87245 - RNA, 19 nt, Artificial Sequence
  Synthetic
aggguuuaaauguauaccc

SEQ ID NO: 87246 - RNA, 20 nt, Artificial Sequence
  Synthetic
uaggguuuaaauguauaccc

SEQ ID NO: 87247 - RNA, 21 nt, Artificial Sequence
  Synthetic
uuaggguuuaaauguauaccc

SEQ ID NO: 87248 - RNA, 22 nt, Artificial Sequence
  Synthetic
guuaggguuuaaauguauaccc

SEQ ID NO: 87249 - RNA, 23 nt, Artificial Sequence
  Synthetic
uguuaggguuuaaauguauaccc

SEQ ID NO: 87250 - RNA, 24 nt, Artificial Sequence
  Synthetic
uuguuaggguuuaaauguauaccc

SEQ ID NO: 87251 - RNA, 18 nt, Artificial Sequence
  Synthetic
gccugagggcuccacccc

SEQ ID NO: 87252 - RNA, 19 nt, Artificial Sequence
  Synthetic
agccugagggcuccacccc

SEQ ID NO: 87253 - RNA, 20 nt, Artificial Sequence
  Synthetic
gagccugagggcuccacccc

SEQ ID NO: 87254 - RNA, 21 nt, Artificial Sequence
  Synthetic
ugagccugagggcuccacccc

SEQ ID NO: 87255 - RNA, 22 nt, Artificial Sequence
  Synthetic
cugagccugagggcuccacccc

SEQ ID NO: 87256 - RNA, 23 nt, Artificial Sequence
  Synthetic
ccugagccugagggcuccacccc

SEQ ID NO: 87257 - RNA, 24 nt, Artificial Sequence
  Synthetic
cccugagccugagggcuccacccc

SEQ ID NO: 87258 - RNA, 18 nt, Artificial Sequence
  Synthetic
  misc_feature (10)..(10): n is a, c, g, or u
  misc_feature (13)..(13): n is a, c, g, or u
acacacggungunccccc

SEQ ID NO: 87259 - RNA, 19 nt, Artificial Sequence
  Synthetic
  misc_feature (11)..(11): n is a, c, g, or u
  misc_feature (14)..(14): n is a, c, g, or u
gacacacggungunccccc

SEQ ID NO: 87260 - RNA, 20 nt, Artificial Sequence
  Synthetic
  misc_feature (12)..(12): n is a, c, g, or u
  misc_feature (15)..(15): n is a, c, g, or u
agacacacggungunccccc

SEQ ID NO: 87261 - RNA, 21 nt, Artificial Sequence
  Synthetic
  misc_feature (13)..(13): n is a, c, g, or u
  misc_feature (16)..(16): n is a, c, g, or u
aagacacacggungunccccc

SEQ ID NO: 87262 - RNA, 22 nt, Artificial Sequence
  Synthetic
  misc_feature (14)..(14): n is a, c, g, or u
  misc_feature (17)..(17): n is a, c, g, or u
caagacacacggungunccccc

SEQ ID NO: 87263 - RNA, 23 nt, Artificial Sequence
  Synthetic
  misc_feature (15)..(15): n is a, c, g, or u
  misc_feature (18)..(18): n is a, c, g, or u
ccaagacacacggungunccccc

SEQ ID NO: 87264 - RNA, 24 nt, Artificial Sequence
  Synthetic
  misc_feature (16)..(16): n is a, c, g, or u
  misc_feature (19)..(19): n is a, c, g, or u
gccaagacacacggungunccccc

SEQ ID NO: 87265 - RNA, 18 nt, Artificial Sequence
  Synthetic
  misc_feature (14)..(14): n is a, c, g, or u
agagucccaagcgncccc

SEQ ID NO: 87266 - RNA, 19 nt, Artificial Sequence
  Synthetic
  misc_feature (1)..(1): n is a, c, g, or u
  misc_feature (15)..(15): n is a, c, g, or u
nagagucccaagcgncccc

SEQ ID NO: 87267 - RNA, 20 nt, Artificial Sequence
  Synthetic
  misc_feature (2)..(2): n is a, c, g, or u
  misc_feature (16)..(16): n is a, c, g, or u
anagagucccaagcgncccc

SEQ ID NO: 87268 - RNA, 21 nt, Artificial Sequence
  Synthetic
  misc_feature (3)..(3): n is a, c, g, or u
  misc_feature (17)..(17): n is a, c, g, or u
ganagagucccaagcgncccc

SEQ ID NO: 87269 - RNA, 22 nt, Artificial Sequence
  Synthetic
  misc_feature (4)..(4): n is a, c, g, or u
  misc_feature (18)..(18): n is a, c, g, or u
cganagagucccaagcgncccc

SEQ ID NO: 87270 - RNA, 23 nt, Artificial Sequence
  Synthetic
  misc_feature (5)..(5): n is a, c, g, or u
  misc_feature (19)..(19): n is a, c, g, or u
acganagagucccaagcgncccc

SEQ ID NO: 87271 - RNA, 24 nt, Artificial Sequence
  Synthetic
  misc_feature (6)..(6): n is a, c, g, or u
  misc_feature (20)..(20): n is a, c, g, or u
gacganagagucccaagcgncccc

SEQ ID NO: 87272 - RNA, 18 nt, Artificial Sequence
  Synthetic
  misc_feature (11)..(11): n is a, c, g, or u
  misc_feature (14)..(14): n is a, c, g, or u
gacacacggunguncccc

SEQ ID NO: 87273 - RNA, 19 nt, Artificial Sequence
  Synthetic
  misc_feature (12)..(12): n is a, c, g, or u
  misc_feature (15)..(15): n is a, c, g, or u
agacacacggunguncccc

SEQ ID NO: 87274 - RNA, 20 nt, Artificial Sequence
  Synthetic
  misc_feature (13)..(13): n is a, c, g, or u
  misc_feature (16)..(16): n is a, c, g, or u
aagacacacggunguncccc

SEQ ID NO: 87275 - RNA, 21 nt, Artificial Sequence
  Synthetic
  misc_feature (14)..(14): n is a, c, g, or u
  misc_feature (17)..(17): n is a, c, g, or u
caagacacacggunguncccc

SEQ ID NO: 87276 - RNA, 22 nt, Artificial Sequence
  Synthetic
  misc_feature (15)..(15): n is a, c, g, or u
  misc_feature (18)..(18): n is a, c, g, or u
ccaagacacacggunguncccc

SEQ ID NO: 87277 - RNA, 23 nt, Artificial Sequence
  Synthetic
  misc_feature (16)..(16): n is a, c, g, or u
  misc_feature (19)..(19): n is a, c, g, or u
gccaagacacacggunguncccc

SEQ ID NO: 87278 - RNA, 24 nt, Artificial Sequence
  Synthetic
  misc_feature (17)..(17): n is a, c, g, or u
  misc_feature (20)..(20): n is a, c, g, or u
ggccaagacacacggunguncccc

SEQ ID NO: 87279 - RNA, 18 nt, Artificial Sequence
  Synthetic
aacagugggggaaagccc

SEQ ID NO: 87280 - RNA, 19 nt, Artificial Sequence
  Synthetic
aaacagugggggaaagccc

SEQ ID NO: 87281 - RNA, 20 nt, Artificial Sequence
  Synthetic
caaacagugggggaaagccc

SEQ ID NO: 87282 - RNA, 21 nt, Artificial Sequence
  Synthetic
ccaaacagugggggaaagccc

SEQ ID NO: 87283 - RNA, 22 nt, Artificial Sequence
  Synthetic
gccaaacagugggggaaagccc

SEQ ID NO: 87284 - RNA, 23 nt, Artificial Sequence
  Synthetic
agccaaacagugggggaaagccc

SEQ ID NO: 87285 - RNA, 24 nt, Artificial Sequence
  Synthetic
aagccaaacagugggggaaagccc

SEQ ID NO: 87286 - RNA, 18 nt, Artificial Sequence
  Synthetic
aguagaagaauaaagccc

SEQ ID NO: 87287 - RNA, 19 nt, Artificial Sequence
  Synthetic
caguagaagaauaaagccc

SEQ ID NO: 87288 - RNA, 20 nt, Artificial Sequence
  Synthetic
acaguagaagaauaaagccc

SEQ ID NO: 87289 - RNA, 21 nt, Artificial Sequence
  Synthetic
  misc_feature (1)..(1): n is a, c, g, or u
nacaguagaagaauaaagccc

SEQ ID NO: 87290 - RNA, 22 nt, Artificial Sequence
  Synthetic
  misc_feature (2)..(2): n is a, c, g, or u
gnacaguagaagaauaaagccc

SEQ ID NO: 87291 - RNA, 23 nt, Artificial Sequence
  Synthetic
  misc_feature (3)..(3): n is a, c, g, or u
ggnacaguagaagaauaaagccc

SEQ ID NO: 87292 - RNA, 24 nt, Artificial Sequence
  Synthetic
  misc_feature (4)..(4): n is a, c, g, or u
aggnacaguagaagaauaaagccc

SEQ ID NO: 87293 - RNA, 18 nt, Artificial Sequence
  Synthetic
  misc_feature (15)..(15): n is a, c, g, or u
cauccaaugacauanccc

SEQ ID NO: 87294 - RNA, 19 nt, Artificial Sequence
  Synthetic
  misc_feature (16)..(16): n is a, c, g, or u
acauccaaugacauanccc

SEQ ID NO: 87295 - RNA, 20 nt, Artificial Sequence
  Synthetic
  misc_feature (17)..(17): n is a, c, g, or u
aacauccaaugacauanccc

SEQ ID NO: 87296 - RNA, 21 nt, Artificial Sequence
  Synthetic
  misc_feature (18)..(18): n is a, c, g, or u
uaacauccaaugacauanccc

SEQ ID NO: 87297 - RNA, 22 nt, Artificial Sequence
  Synthetic
  misc_feature (19)..(19): n is a, c, g, or u
auaacauccaaugacauanccc

SEQ ID NO: 87298 - RNA, 23 nt, Artificial Sequence
  Synthetic
  misc_feature (20)..(20): n is a, c, g, or u
cauaacauccaaugacauanccc

SEQ ID NO: 87299 - RNA, 24 nt, Artificial Sequence
  Synthetic
  misc_feature (21)..(21): n is a, c, g, or u
ccauaacauccaaugacauanccc

SEQ ID NO: 87300 - RNA, 18 nt, Artificial Sequence
  Synthetic
  misc_feature (1)..(1): n is a, c, g, or u
  misc_feature (15)..(15): n is a, c, g, or u
nagagucccaagcgnccc

SEQ ID NO: 87301 - RNA, 19 nt, Artificial Sequence
  Synthetic
  misc_feature (2)..(2): n is a, c, g, or u
  misc_feature (16)..(16): n is a, c, g, or u
anagagucccaagcgnccc

SEQ ID NO: 87302 - RNA, 20 nt, Artificial Sequence
  Synthetic
  misc_feature (3)..(3): n is a, c, g, or u
  misc_feature (17)..(17): n is a, c, g, or u
ganagagucccaagcgnccc

SEQ ID NO: 87303 - RNA, 21 nt, Artificial Sequence
  Synthetic
  misc_feature (4)..(4): n is a, c, g, or u
  misc_feature (18)..(18): n is a, c, g, or u
cganagagucccaagcgnccc

SEQ ID NO: 87304 - RNA, 22 nt, Artificial Sequence
  Synthetic
  misc_feature (5)..(5): n is a, c, g, or u
  misc_feature (19)..(19): n is a, c, g, or u
acganagagucccaagcgnccc

SEQ ID NO: 87305 - RNA, 23 nt, Artificial Sequence
  Synthetic
  misc_feature (6)..(6): n is a, c, g, or u
  misc_feature (20)..(20): n is a, c, g, or u
gacganagagucccaagcgnccc

SEQ ID NO: 87306 - RNA, 24 nt, Artificial Sequence
  Synthetic
  misc_feature (7)..(7): n is a, c, g, or u
  misc_feature (21)..(21): n is a, c, g, or u
ggacganagagucccaagcgnccc

SEQ ID NO: 87307 - RNA, 18 nt, Artificial Sequence
  Synthetic
  misc_feature (12)..(12): n is a, c, g, or u
  misc_feature (15)..(15): n is a, c, g, or u
agacacacggungunccc

SEQ ID NO: 87308 - RNA, 19 nt, Artificial Sequence
  Synthetic
  misc_feature (13)..(13): n is a, c, g, or u
  misc_feature (16)..(16): n is a, c, g, or u
aagacacacggungunccc

SEQ ID NO: 87309 - RNA, 20 nt, Artificial Sequence
  Synthetic
  misc_feature (14)..(14): n is a, c, g, or u
  misc_feature (17)..(17): n is a, c, g, or u
caagacacacggungunccc

SEQ ID NO: 87310 - RNA, 21 nt, Artificial Sequence
  Synthetic
  misc_feature (15)..(15): n is a, c, g, or u
  misc_feature (18)..(18): n is a, c, g, or u
ccaagacacacggungunccc

SEQ ID NO: 87311 - RNA, 22 nt, Artificial Sequence
  Synthetic
  misc_feature (16)..(16): n is a, c, g, or u
  misc_feature (19)..(19): n is a, c, g, or u
gccaagacacacggungunccc

SEQ ID NO: 87312 - RNA, 23 nt, Artificial Sequence
  Synthetic
  misc_feature (17)..(17): n is a, c, g, or u
  misc_feature (20)..(20): n is a, c, g, or u
ggccaagacacacggungunccc

SEQ ID NO: 87313 - RNA, 24 nt, Artificial Sequence
  Synthetic
  misc_feature (18)..(18): n is a, c, g, or u
  misc_feature (21)..(21): n is a, c, g, or u
uggccaagacacacggungunccc

SEQ ID NO: 87314 - RNA, 18 nt, Artificial Sequence
  Synthetic
uggucgggaaagaauccc

SEQ ID NO: 87315 - RNA, 19 nt, Artificial Sequence
  Synthetic
guggucgggaaagaauccc

SEQ ID NO: 87316 - RNA, 20 nt, Artificial Sequence
  Synthetic
gguggucgggaaagaauccc

SEQ ID NO: 87317 - RNA, 21 nt, Artificial Sequence
  Synthetic
ugguggucgggaaagaauccc

SEQ ID NO: 87318 - RNA, 22 nt, Artificial Sequence
  Synthetic
cugguggucgggaaagaauccc

SEQ ID NO: 87319 - RNA, 23 nt, Artificial Sequence
  Synthetic
acugguggucgggaaagaauccc

SEQ ID NO: 87320 - RNA, 24 nt, Artificial Sequence
  Synthetic
aacugguggucgggaaagaauccc

SEQ ID NO: 87321 - RNA, 18 nt, Artificial Sequence
  Synthetic
gggcugaggcccacuccc

SEQ ID NO: 87322 - RNA, 19 nt, Artificial Sequence
  Synthetic
cgggcugaggcccacuccc

SEQ ID NO: 87323 - RNA, 20 nt, Artificial Sequence
  Synthetic
acgggcugaggcccacuccc

SEQ ID NO: 87324 - RNA, 21 nt, Artificial Sequence
  Synthetic
aacgggcugaggcccacuccc

SEQ ID NO: 87325 - RNA, 22 nt, Artificial Sequence
  Synthetic
aaacgggcugaggcccacuccc

SEQ ID NO: 87326 - RNA, 23 nt, Artificial Sequence
  Synthetic
gaaacgggcugaggcccacuccc

SEQ ID NO: 87327 - RNA, 24 nt, Artificial Sequence
  Synthetic
agaaacgggcugaggcccacuccc

SEQ ID NO: 87328 - RNA, 18 nt, Artificial Sequence
  Synthetic
  misc_feature (14)..(14): n is a, c, g, or u
cuagagucauuagnuccc

SEQ ID NO: 87329 - RNA, 19 nt, Artificial Sequence
  Synthetic
  misc_feature (15)..(15): n is a, c, g, or u
gcuagagucauuagnuccc

SEQ ID NO: 87330 - RNA, 20 nt, Artificial Sequence
  Synthetic
  misc_feature (1)..(1): n is a, c, g, or u
  misc_feature (16)..(16): n is a, c, g, or u
ngcuagagucauuagnuccc

SEQ ID NO: 87331 - RNA, 21 nt, Artificial Sequence
  Synthetic
  misc_feature (2)..(2): n is a, c, g, or u
  misc_feature (17)..(17): n is a, c, g, or u
ungcuagagucauuagnuccc

SEQ ID NO: 87332 - RNA, 22 nt, Artificial Sequence
  Synthetic
  misc_feature (3)..(3): n is a, c, g, or u
  misc_feature (18)..(18): n is a, c, g, or u
gungcuagagucauuagnuccc

SEQ ID NO: 87333 - RNA, 23 nt, Artificial Sequence
  Synthetic
  misc_feature (4)..(4): n is a, c, g, or u
  misc_feature (19)..(19): n is a, c, g, or u
ggungcuagagucauuagnuccc

SEQ ID NO: 87334 - RNA, 24 nt, Artificial Sequence
  Synthetic
  misc_feature (5)..(5): n is a, c, g, or u
  misc_feature (20)..(20): n is a, c, g, or u
aggungcuagagucauuagnuccc

SEQ ID NO: 87335 - RNA, 18 nt, Artificial Sequence
  Synthetic
caugaccaagccccagcc

SEQ ID NO: 87336 - RNA, 19 nt, Artificial Sequence
  Synthetic
ccaugaccaagccccagcc

SEQ ID NO: 87337 - RNA, 20 nt, Artificial Sequence
  Synthetic
cccaugaccaagccccagcc

SEQ ID NO: 87338 - RNA, 21 nt, Artificial Sequence
  Synthetic
gcccaugaccaagccccagcc

SEQ ID NO: 87339 - RNA, 22 nt, Artificial Sequence
  Synthetic
ggcccaugaccaagccccagcc

SEQ ID NO: 87340 - RNA, 23 nt, Artificial Sequence
  Synthetic
uggcccaugaccaagccccagcc

SEQ ID NO: 87341 - RNA, 24 nt, Artificial Sequence
  Synthetic
auggcccaugaccaagccccagcc

SEQ ID NO: 87342 - RNA, 18 nt, Artificial Sequence
  Synthetic
cagcacagccuagcagcc

SEQ ID NO: 87343 - RNA, 19 nt, Artificial Sequence
  Synthetic
gcagcacagccuagcagcc

SEQ ID NO: 87344 - RNA, 20 nt, Artificial Sequence
  Synthetic
ggcagcacagccuagcagcc

SEQ ID NO: 87345 - RNA, 21 nt, Artificial Sequence
  Synthetic
uggcagcacagccuagcagcc

SEQ ID NO: 87346 - RNA, 22 nt, Artificial Sequence
  Synthetic
uuggcagcacagccuagcagcc

SEQ ID NO: 87347 - RNA, 23 nt, Artificial Sequence
  Synthetic
guuggcagcacagccuagcagcc

SEQ ID NO: 87348 - RNA, 24 nt, Artificial Sequence
  Synthetic
aguuggcagcacagccuagcagcc

SEQ ID NO: 87349 - RNA, 18 nt, Artificial Sequence
  Synthetic
uggaucggcagaggagcc

SEQ ID NO: 87350 - RNA, 19 nt, Artificial Sequence
  Synthetic
auggaucggcagaggagcc

SEQ ID NO: 87351 - RNA, 20 nt, Artificial Sequence
  Synthetic
uauggaucggcagaggagcc

SEQ ID NO: 87352 - RNA, 21 nt, Artificial Sequence
  Synthetic
guauggaucggcagaggagcc

SEQ ID NO: 87353 - RNA, 22 nt, Artificial Sequence
  Synthetic
aguauggaucggcagaggagcc

SEQ ID NO: 87354 - RNA, 23 nt, Artificial Sequence
  Synthetic
caguauggaucggcagaggagcc

SEQ ID NO: 87355 - RNA, 24 nt, Artificial Sequence
  Synthetic
gcaguauggaucggcagaggagcc

SEQ ID NO: 87356 - RNA, 18 nt, Artificial Sequence
  Synthetic
uguuccugaacuggagcc

SEQ ID NO: 87357 - RNA, 19 nt, Artificial Sequence
  Synthetic
cuguuccugaacuggagcc

SEQ ID NO: 87358 - RNA, 20 nt, Artificial Sequence
  Synthetic
acuguuccugaacuggagcc

SEQ ID NO: 87359 - RNA, 21 nt, Artificial Sequence
  Synthetic
uacuguuccugaacuggagcc

SEQ ID NO: 87360 - RNA, 22 nt, Artificial Sequence
  Synthetic
uuacuguuccugaacuggagcc

SEQ ID NO: 87361 - RNA, 23 nt, Artificial Sequence
  Synthetic
uuuacuguuccugaacuggagcc

SEQ ID NO: 87362 - RNA, 24 nt, Artificial Sequence
  Synthetic
guuuacuguuccugaacuggagcc

SEQ ID NO: 87363 - RNA, 18 nt, Artificial Sequence
  Synthetic
gcacuaguaaacugagcc

SEQ ID NO: 87364 - RNA, 19 nt, Artificial Sequence
  Synthetic
ggcacuaguaaacugagcc

SEQ ID NO: 87365 - RNA, 20 nt, Artificial Sequence
  Synthetic
uggcacuaguaaacugagcc

SEQ ID NO: 87366 - RNA, 21 nt, Artificial Sequence
  Synthetic
auggcacuaguaaacugagcc

SEQ ID NO: 87367 - RNA, 22 nt, Artificial Sequence
  Synthetic
aauggcacuaguaaacugagcc

SEQ ID NO: 87368 - RNA, 23 nt, Artificial Sequence
  Synthetic
aaauggcacuaguaaacugagcc

SEQ ID NO: 87369 - RNA, 24 nt, Artificial Sequence
  Synthetic
caaauggcacuaguaaacugagcc

SEQ ID NO: 87370 - RNA, 18 nt, Artificial Sequence
  Synthetic
  misc_feature (5)..(5): n is a, c, g, or u
uguanuaugcccugagcc

SEQ ID NO: 87371 - RNA, 19 nt, Artificial Sequence
  Synthetic
  misc_feature (6)..(6): n is a, c, g, or u
uuguanuaugcccugagcc

SEQ ID NO: 87372 - RNA, 20 nt, Artificial Sequence
  Synthetic
  misc_feature (7)..(7): n is a, c, g, or u
uuuguanuaugcccugagcc

SEQ ID NO: 87373 - RNA, 21 nt, Artificial Sequence
  Synthetic
  misc_feature (8)..(8): n is a, c, g, or u
guuuguanuaugcccugagcc

SEQ ID NO: 87374 - RNA, 22 nt, Artificial Sequence
  Synthetic
  misc_feature (1)..(1): n is a, c, g, or u
  misc_feature (9)..(9): n is a, c, g, or u
nguuuguanuaugcccugagcc

SEQ ID NO: 87375 - RNA, 23 nt, Artificial Sequence
  Synthetic
  misc_feature (2)..(2): n is a, c, g, or u
  misc_feature (10)..(10): n is a, c, g, or u
anguuuguanuaugcccugagcc

SEQ ID NO: 87376 - RNA, 24 nt, Artificial Sequence
  Synthetic
  misc_feature (3)..(3): n is a, c, g, or u
  misc_feature (11)..(11): n is a, c, g, or u
aanguuuguanuaugcccugagcc

SEQ ID NO: 87377 - RNA, 18 nt, Artificial Sequence
  Synthetic
ggaagaugauaaaacgcc

SEQ ID NO: 87378 - RNA, 19 nt, Artificial Sequence
  Synthetic
aggaagaugauaaaacgcc

SEQ ID NO: 87379 - RNA, 20 nt, Artificial Sequence
  Synthetic
gaggaagaugauaaaacgcc

SEQ ID NO: 87380 - RNA, 21 nt, Artificial Sequence
  Synthetic
agaggaagaugauaaaacgcc

SEQ ID NO: 87381 - RNA, 22 nt, Artificial Sequence
  Synthetic
aagaggaagaugauaaaacgcc

SEQ ID NO: 87382 - RNA, 23 nt, Artificial Sequence
  Synthetic
gaagaggaagaugauaaaacgcc

SEQ ID NO: 87383 - RNA, 24 nt, Artificial Sequence
  Synthetic
ugaagaggaagaugauaaaacgcc

SEQ ID NO: 87384 - RNA, 18 nt, Artificial Sequence
  Synthetic
aacaagaaaaaccccgcc

SEQ ID NO: 87385 - RNA, 19 nt, Artificial Sequence
  Synthetic
caacaagaaaaaccccgcc

SEQ ID NO: 87386 - RNA, 20 nt, Artificial Sequence
  Synthetic
ucaacaagaaaaaccccgcc

SEQ ID NO: 87387 - RNA, 21 nt, Artificial Sequence
  Synthetic
gucaacaagaaaaaccccgcc

SEQ ID NO: 87388 - RNA, 22 nt, Artificial Sequence
  Synthetic
ugucaacaagaaaaaccccgcc

SEQ ID NO: 87389 - RNA, 23 nt, Artificial Sequence
  Synthetic
uugucaacaagaaaaaccccgcc

SEQ ID NO: 87390 - RNA, 24 nt, Artificial Sequence
  Synthetic
cuugucaacaagaaaaaccccgcc

SEQ ID NO: 87391 - RNA, 18 nt, Artificial Sequence
  Synthetic
uccgcgggauucagcgcc

SEQ ID NO: 87392 - RNA, 19 nt, Artificial Sequence
  Synthetic
guccgcgggauucagcgcc

SEQ ID NO: 87393 - RNA, 20 nt, Artificial Sequence
  Synthetic
cguccgcgggauucagcgcc

SEQ ID NO: 87394 - RNA, 21 nt, Artificial Sequence
  Synthetic
ucguccgcgggauucagcgcc

SEQ ID NO: 87395 - RNA, 22 nt, Artificial Sequence
  Synthetic
gucguccgcgggauucagcgcc

SEQ ID NO: 87396 - RNA, 23 nt, Artificial Sequence
  Synthetic
ggucguccgcgggauucagcgcc

SEQ ID NO: 87397 - RNA, 24 nt, Artificial Sequence
  Synthetic
gggucguccgcgggauucagcgcc

SEQ ID NO: 87398 - RNA, 18 nt, Artificial Sequence
  Synthetic
acgcaugcgcugauggcc

SEQ ID NO: 87399 - RNA, 19 nt, Artificial Sequence
  Synthetic
cacgcaugcgcugauggcc

SEQ ID NO: 87400 - RNA, 20 nt, Artificial Sequence
  Synthetic
ccacgcaugcgcugauggcc

SEQ ID NO: 87401 - RNA, 21 nt, Artificial Sequence
  Synthetic
uccacgcaugcgcugauggcc

SEQ ID NO: 87402 - RNA, 22 nt, Artificial Sequence
  Synthetic
uuccacgcaugcgcugauggcc

SEQ ID NO: 87403 - RNA, 23 nt, Artificial Sequence
  Synthetic
guuccacgcaugcgcugauggcc

SEQ ID NO: 87404 - RNA, 24 nt, Artificial Sequence
  Synthetic
gguuccacgcaugcgcugauggcc

SEQ ID NO: 87405 - RNA, 18 nt, Artificial Sequence
  Synthetic
cagucuuugaaguaugcc

SEQ ID NO: 87406 - RNA, 19 nt, Artificial Sequence
  Synthetic
acagucuuugaaguaugcc

SEQ ID NO: 87407 - RNA, 20 nt, Artificial Sequence
  Synthetic
aacagucuuugaaguaugcc

SEQ ID NO: 87408 - RNA, 21 nt, Artificial Sequence
  Synthetic
aaacagucuuugaaguaugcc

SEQ ID NO: 87409 - RNA, 22 nt, Artificial Sequence
  Synthetic
caaacagucuuugaaguaugcc

SEQ ID NO: 87410 - RNA, 23 nt, Artificial Sequence
  Synthetic
acaaacagucuuugaaguaugcc

SEQ ID NO: 87411 - RNA, 24 nt, Artificial Sequence
  Synthetic
aacaaacagucuuugaaguaugcc

SEQ ID NO: 87412 - RNA, 18 nt, Artificial Sequence
  Synthetic
  misc_feature (4)..(4): n is a, c, g, or u
  misc_feature (12)..(12): n is a, c, g, or u
caanguuuguanuaugcc

SEQ ID NO: 87413 - RNA, 19 nt, Artificial Sequence
  Synthetic
  misc_feature (5)..(5): n is a, c, g, or u
  misc_feature (13)..(13): n is a, c, g, or u
gcaanguuuguanuaugcc

SEQ ID NO: 87414 - RNA, 20 nt, Artificial Sequence
  Synthetic
  misc_feature (6)..(6): n is a, c, g, or u
  misc_feature (14)..(14): n is a, c, g, or u
ggcaanguuuguanuaugcc

SEQ ID NO: 87415 - RNA, 21 nt, Artificial Sequence
  Synthetic
  misc_feature (7)..(7): n is a, c, g, or u
  misc_feature (15)..(15): n is a, c, g, or u
uggcaanguuuguanuaugcc

SEQ ID NO: 87416 - RNA, 22 nt, Artificial Sequence
  Synthetic
  misc_feature (8)..(8): n is a, c, g, or u
  misc_feature (16)..(16): n is a, c, g, or u
cuggcaanguuuguanuaugcc

SEQ ID NO: 87417 - RNA, 23 nt, Artificial Sequence
  Synthetic
  misc_feature (9)..(9): n is a, c, g, or u
  misc_feature (17)..(17): n is a, c, g, or u
gcuggcaanguuuguanuaugcc

SEQ ID NO: 87418 - RNA, 24 nt, Artificial Sequence
  Synthetic
  misc_feature (10)..(10): n is a, c, g, or u
  misc_feature (18)..(18): n is a, c, g, or u
ugcuggcaanguuuguanuaugcc

SEQ ID NO: 87419 - RNA, 18 nt, Artificial Sequence
  Synthetic
cgcagaccaauuuaugcc

SEQ ID NO: 87420 - RNA, 19 nt, Artificial Sequence
  Synthetic
gcgcagaccaauuuaugcc

SEQ ID NO: 87421 - RNA, 20 nt, Artificial Sequence
  Synthetic
ugcgcagaccaauuuaugcc

SEQ ID NO: 87422 - RNA, 21 nt, Artificial Sequence
  Synthetic
gugcgcagaccaauuuaugcc

SEQ ID NO: 87423 - RNA, 22 nt, Artificial Sequence
  Synthetic
ggugcgcagaccaauuuaugcc

SEQ ID NO: 87424 - RNA, 23 nt, Artificial Sequence
  Synthetic
uggugcgcagaccaauuuaugcc

SEQ ID NO: 87425 - RNA, 24 nt, Artificial Sequence
  Synthetic
cuggugcgcagaccaauuuaugcc

SEQ ID NO: 87426 - RNA, 18 nt, Artificial Sequence
  Synthetic
  misc_feature (2)..(2): n is a, c, g, or u
  misc_feature (16)..(16): n is a, c, g, or u
anagagucccaagcgncc

SEQ ID NO: 87427 - RNA, 19 nt, Artificial Sequence
  Synthetic
  misc_feature (3)..(3): n is a, c, g, or u
  misc_feature (17)..(17): n is a, c, g, or u
ganagagucccaagcgncc

SEQ ID NO: 87428 - RNA, 20 nt, Artificial Sequence
  Synthetic
  misc_feature (4)..(4): n is a, c, g, or u
  misc_feature (18)..(18): n is a, c, g, or u
cganagagucccaagcgncc

SEQ ID NO: 87429 - RNA, 21 nt, Artificial Sequence
  Synthetic
  misc_feature (5)..(5): n is a, c, g, or u
  misc_feature (19)..(19): n is a, c, g, or u
acganagagucccaagcgncc

SEQ ID NO: 87430 - RNA, 22 nt, Artificial Sequence
  Synthetic
  misc_feature (6)..(6): n is a, c, g, or u
  misc_feature (20)..(20): n is a, c, g, or u
gacganagagucccaagcgncc

SEQ ID NO: 87431 - RNA, 23 nt, Artificial Sequence
  Synthetic
  misc_feature (7)..(7): n is a, c, g, or u
  misc_feature (21)..(21): n is a, c, g, or u
ggacganagagucccaagcgncc

SEQ ID NO: 87432 - RNA, 24 nt, Artificial Sequence
  Synthetic
  misc_feature (8)..(8): n is a, c, g, or u
  misc_feature (22)..(22): n is a, c, g, or u
gggacganagagucccaagcgncc

SEQ ID NO: 87433 - RNA, 18 nt, Artificial Sequence
  Synthetic
  misc_feature (4)..(4): n is a, c, g, or u
  misc_feature (16)..(16): n is a, c, g, or u
auunacugugaguggncc

SEQ ID NO: 87434 - RNA, 19 nt, Artificial Sequence
  Synthetic
  misc_feature (5)..(5): n is a, c, g, or u
  misc_feature (17)..(17): n is a, c, g, or u
cauunacugugaguggncc

SEQ ID NO: 87435 - RNA, 20 nt, Artificial Sequence
  Synthetic
  misc_feature (6)..(6): n is a, c, g, or u
  misc_feature (18)..(18): n is a, c, g, or u
ucauunacugugaguggncc

SEQ ID NO: 87436 - RNA, 21 nt, Artificial Sequence
  Synthetic
  misc_feature (7)..(7): n is a, c, g, or u
  misc_feature (19)..(19): n is a, c, g, or u
cucauunacugugaguggncc

SEQ ID NO: 87437 - RNA, 22 nt, Artificial Sequence
  Synthetic
  misc_feature (8)..(8): n is a, c, g, or u
  misc_feature (20)..(20): n is a, c, g, or u
ucucauunacugugaguggncc

SEQ ID NO: 87438 - RNA, 23 nt, Artificial Sequence
  Synthetic
  misc_feature (9)..(9): n is a, c, g, or u
  misc_feature (21)..(21): n is a, c, g, or u
uucucauunacugugaguggncc

SEQ ID NO: 87439 - RNA, 24 nt, Artificial Sequence
  Synthetic
  misc_feature (10)..(10): n is a, c, g, or u
  misc_feature (22)..(22): n is a, c, g, or u
uuucucauunacugugaguggncc

SEQ ID NO: 87440 - RNA, 18 nt, Artificial Sequence
  Synthetic
  misc_feature (3)..(3): n is a, c, g, or u
  misc_feature (16)..(16): n is a, c, g, or u
ggnucaauguccaugncc

SEQ ID NO: 87441 - RNA, 19 nt, Artificial Sequence
  Synthetic
  misc_feature (4)..(4): n is a, c, g, or u
  misc_feature (17)..(17): n is a, c, g, or u
aggnucaauguccaugncc

SEQ ID NO: 87442 - RNA, 20 nt, Artificial Sequence
  Synthetic
  misc_feature (5)..(5): n is a, c, g, or u
  misc_feature (18)..(18): n is a, c, g, or u
aaggnucaauguccaugncc

SEQ ID NO: 87443 - RNA, 21 nt, Artificial Sequence
  Synthetic
  misc_feature (6)..(6): n is a, c, g, or u
  misc_feature (19)..(19): n is a, c, g, or u
uaaggnucaauguccaugncc

SEQ ID NO: 87444 - RNA, 22 nt, Artificial Sequence
  Synthetic
  misc_feature (7)..(7): n is a, c, g, or u
  misc_feature (20)..(20): n is a, c, g, or u
auaaggnucaauguccaugncc

SEQ ID NO: 87445 - RNA, 23 nt, Artificial Sequence
  Synthetic
  misc_feature (8)..(8): n is a, c, g, or u
  misc_feature (21)..(21): n is a, c, g, or u
uauaaggnucaauguccaugncc

SEQ ID NO: 87446 - RNA, 24 nt, Artificial Sequence
  Synthetic
  misc_feature (9)..(9): n is a, c, g, or u
  misc_feature (22)..(22): n is a, c, g, or u
uuauaaggnucaauguccaugncc

SEQ ID NO: 87447 - RNA, 18 nt, Artificial Sequence
  Synthetic
gcgcaggguccccaaucc

SEQ ID NO: 87448 - RNA, 19 nt, Artificial Sequence
  Synthetic
agcgcaggguccccaaucc

SEQ ID NO: 87449 - RNA, 20 nt, Artificial Sequence
  Synthetic
cagcgcaggguccccaaucc

SEQ ID NO: 87450 - RNA, 21 nt, Artificial Sequence
  Synthetic
ucagcgcaggguccccaaucc

SEQ ID NO: 87451 - RNA, 22 nt, Artificial Sequence
  Synthetic
uucagcgcaggguccccaaucc

SEQ ID NO: 87452 - RNA, 23 nt, Artificial Sequence
  Synthetic
guucagcgcaggguccccaaucc

SEQ ID NO: 87453 - RNA, 24 nt, Artificial Sequence
  Synthetic
uguucagcgcaggguccccaaucc

SEQ ID NO: 87454 - RNA, 18 nt, Artificial Sequence
  Synthetic
guggucgggaaagaaucc

SEQ ID NO: 87455 - RNA, 19 nt, Artificial Sequence
  Synthetic
gguggucgggaaagaaucc

SEQ ID NO: 87456 - RNA, 20 nt, Artificial Sequence
  Synthetic
ugguggucgggaaagaaucc

SEQ ID NO: 87457 - RNA, 21 nt, Artificial Sequence
  Synthetic
cugguggucgggaaagaaucc

SEQ ID NO: 87458 - RNA, 22 nt, Artificial Sequence
  Synthetic
acugguggucgggaaagaaucc

SEQ ID NO: 87459 - RNA, 23 nt, Artificial Sequence
  Synthetic
aacugguggucgggaaagaaucc

SEQ ID NO: 87460 - RNA, 24 nt, Artificial Sequence
  Synthetic
caacugguggucgggaaagaaucc

SEQ ID NO: 87461 - RNA, 18 nt, Artificial Sequence
  Synthetic
  misc_feature (4)..(4): n is a, c, g, or u
caangacccauaacaucc

SEQ ID NO: 87462 - RNA, 19 nt, Artificial Sequence
  Synthetic
  misc_feature (5)..(5): n is a, c, g, or u
gcaangacccauaacaucc

SEQ ID NO: 87463 - RNA, 20 nt, Artificial Sequence
  Synthetic
  misc_feature (6)..(6): n is a, c, g, or u
ggcaangacccauaacaucc

SEQ ID NO: 87464 - RNA, 21 nt, Artificial Sequence
  Synthetic
  misc_feature (7)..(7): n is a, c, g, or u
uggcaangacccauaacaucc

SEQ ID NO: 87465 - RNA, 22 nt, Artificial Sequence
  Synthetic
  misc_feature (8)..(8): n is a, c, g, or u
guggcaangacccauaacaucc

SEQ ID NO: 87466 - RNA, 23 nt, Artificial Sequence
  Synthetic
  misc_feature (9)..(9): n is a, c, g, or u
uguggcaangacccauaacaucc

SEQ ID NO: 87467 - RNA, 24 nt, Artificial Sequence
  Synthetic
  misc_feature (10)..(10): n is a, c, g, or u
uuguggcaangacccauaacaucc

SEQ ID NO: 87468 - RNA, 18 nt, Artificial Sequence
  Synthetic
agugcgaauccacacucc

SEQ ID NO: 87469 - RNA, 19 nt, Artificial Sequence
  Synthetic
gagugcgaauccacacucc

SEQ ID NO: 87470 - RNA, 20 nt, Artificial Sequence
  Synthetic
ggagugcgaauccacacucc

SEQ ID NO: 87471 - RNA, 21 nt, Artificial Sequence
  Synthetic
aggagugcgaauccacacucc

SEQ ID NO: 87472 - RNA, 22 nt, Artificial Sequence
  Synthetic
gaggagugcgaauccacacucc

SEQ ID NO: 87473 - RNA, 23 nt, Artificial Sequence
  Synthetic
ggaggagugcgaauccacacucc

SEQ ID NO: 87474 - RNA, 24 nt, Artificial Sequence
  Synthetic
uggaggagugcgaauccacacucc

SEQ ID NO: 87475 - RNA, 18 nt, Artificial Sequence
  Synthetic
cgggcugaggcccacucc

SEQ ID NO: 87476 - RNA, 19 nt, Artificial Sequence
  Synthetic
acgggcugaggcccacucc

SEQ ID NO: 87477 - RNA, 20 nt, Artificial Sequence
  Synthetic
aacgggcugaggcccacucc

SEQ ID NO: 87478 - RNA, 21 nt, Artificial Sequence
  Synthetic
aaacgggcugaggcccacucc

SEQ ID NO: 87479 - RNA, 22 nt, Artificial Sequence
  Synthetic
gaaacgggcugaggcccacucc

SEQ ID NO: 87480 - RNA, 23 nt, Artificial Sequence
  Synthetic
agaaacgggcugaggcccacucc

SEQ ID NO: 87481 - RNA, 24 nt, Artificial Sequence
  Synthetic
gagaaacgggcugaggcccacucc

SEQ ID NO: 87482 - RNA, 18 nt, Artificial Sequence
  Synthetic
  misc_feature (1)..(1): n is a, c, g, or u
  misc_feature (6)..(6): n is a, c, g, or u
  misc_feature (10)..(11): n is a, c, g, or u
nuuaancuanncuccucc

SEQ ID NO: 87483 - RNA, 19 nt, Artificial Sequence
  Synthetic
  misc_feature (2)..(2): n is a, c, g, or u
  misc_feature (7)..(7): n is a, c, g, or u
  misc_feature (11)..(12): n is a, c, g, or u
cnuuaancuanncuccucc

SEQ ID NO: 87484 - RNA, 20 nt, Artificial Sequence
  Synthetic
  misc_feature (1)..(1): n is a, c, g, or u
  misc_feature (3)..(3): n is a, c, g, or u
  misc_feature (8)..(8): n is a, c, g, or u
  misc_feature (12)..(13): n is a, c, g, or u
ncnuuaancuanncuccucc

SEQ ID NO: 87485 - RNA, 21 nt, Artificial Sequence
  Synthetic
  misc_feature (2)..(2): n is a, c, g, or u
  misc_feature (4)..(4): n is a, c, g, or u
  misc_feature (9)..(9): n is a, c, g, or u
  misc_feature (13)..(14): n is a, c, g, or u
ancnuuaancuanncuccucc

SEQ ID NO: 87486 - RNA, 22 nt, Artificial Sequence
  Synthetic
  misc_feature (1)..(1): n is a, c, g, or u
  misc_feature (3)..(3): n is a, c, g, or u
  misc_feature (5)..(5): n is a, c, g, or u
  misc_feature (10)..(10): n is a, c, g, or u
  misc_feature (14)..(15): n is a, c, g, or u
nancnuuaancuanncuccucc

SEQ ID NO: 87487 - RNA, 23 nt, Artificial Sequence
  Synthetic
  misc_feature (2)..(2): n is a, c, g, or u
  misc_feature (4)..(4): n is a, c, g, or u
  misc_feature (6)..(6): n is a, c, g, or u
  misc_feature (11)..(11): n is a, c, g, or u
  misc_feature (15)..(16): n is a, c, g, or u
anancnuuaancuanncuccucc

SEQ ID NO: 87488 - RNA, 24 nt, Artificial Sequence
  Synthetic
  misc_feature (3)..(3): n is a, c, g, or u
  misc_feature (5)..(5): n is a, c, g, or u
  misc_feature (7)..(7): n is a, c, g, or u
  misc_feature (12)..(12): n is a, c, g, or u
  misc_feature (16)..(17): n is a, c, g, or u
aanancnuuaancuanncuccucc

SEQ ID NO: 87489 - RNA, 18 nt, Artificial Sequence
  Synthetic
  misc_feature (2)..(2): n is a, c, g, or u
uncccaccuuaugagucc

SEQ ID NO: 87490 - RNA, 19 nt, Artificial Sequence
  Synthetic
  misc_feature (3)..(3): n is a, c, g, or u
uuncccaccuuaugagucc

SEQ ID NO: 87491 - RNA, 20 nt, Artificial Sequence
  Synthetic
  misc_feature (4)..(4): n is a, c, g, or u
guuncccaccuuaugagucc

SEQ ID NO: 87492 - RNA, 21 nt, Artificial Sequence
  Synthetic
  misc_feature (5)..(5): n is a, c, g, or u
aguuncccaccuuaugagucc

SEQ ID NO: 87493 - RNA, 22 nt, Artificial Sequence
  Synthetic
  misc_feature (6)..(6): n is a, c, g, or u
aaguuncccaccuuaugagucc

SEQ ID NO: 87494 - RNA, 23 nt, Artificial Sequence
  Synthetic
  misc_feature (7)..(7): n is a, c, g, or u
aaaguuncccaccuuaugagucc

SEQ ID NO: 87495 - RNA, 24 nt, Artificial Sequence
  Synthetic
  misc_feature (8)..(8): n is a, c, g, or u
uaaaguuncccaccuuaugagucc

SEQ ID NO: 87496 - RNA, 18 nt, Artificial Sequence
  Synthetic
aacauaccuugauagucc

SEQ ID NO: 87497 - RNA, 19 nt, Artificial Sequence
  Synthetic
caacauaccuugauagucc

SEQ ID NO: 87498 - RNA, 20 nt, Artificial Sequence
  Synthetic
gcaacauaccuugauagucc

SEQ ID NO: 87499 - RNA, 18 nt, Artificial Sequence
  Synthetic
ccccgagaagggucgucc

SEQ ID NO: 87500 - RNA, 19 nt, Artificial Sequence
  Synthetic
  misc_feature (1)..(1): n is a, c, g, or u
nccccgagaagggucgucc

SEQ ID NO: 87501 - RNA, 20 nt, Artificial Sequence
  Synthetic
  misc_feature (2)..(2): n is a, c, g, or u
gnccccgagaagggucgucc

SEQ ID NO: 87502 - RNA, 21 nt, Artificial Sequence
  Synthetic
  misc_feature (3)..(3): n is a, c, g, or u
cgnccccgagaagggucgucc

SEQ ID NO: 87503 - RNA, 22 nt, Artificial Sequence
  Synthetic
  misc_feature (4)..(4): n is a, c, g, or u
gcgnccccgagaagggucgucc

SEQ ID NO: 87504 - RNA, 23 nt, Artificial Sequence
  Synthetic
  misc_feature (5)..(5): n is a, c, g, or u
agcgnccccgagaagggucgucc

SEQ ID NO: 87505 - RNA, 24 nt, Artificial Sequence
  Synthetic
  misc_feature (6)..(6): n is a, c, g, or u
aagcgnccccgagaagggucgucc

SEQ ID NO: 87506 - RNA, 18 nt, Artificial Sequence
  Synthetic
gcgaagugcacacggucc

SEQ ID NO: 87507 - RNA, 19 nt, Artificial Sequence
  Synthetic
agcgaagugcacacggucc

SEQ ID NO: 87508 - RNA, 20 nt, Artificial Sequence
  Synthetic
aagcgaagugcacacggucc

SEQ ID NO: 87509 - RNA, 21 nt, Artificial Sequence
  Synthetic
gaagcgaagugcacacggucc

SEQ ID NO: 87510 - RNA, 22 nt, Artificial Sequence
  Synthetic
ugaagcgaagugcacacggucc

SEQ ID NO: 87511 - RNA, 23 nt, Artificial Sequence
  Synthetic
gugaagcgaagugcacacggucc

SEQ ID NO: 87512 - RNA, 24 nt, Artificial Sequence
  Synthetic
ggugaagcgaagugcacacggucc

SEQ ID NO: 87513 - RNA, 18 nt, Artificial Sequence
  Synthetic
  misc_feature (10)..(10): n is a, c, g, or u
uaacacgagnaggggucc

SEQ ID NO: 87514 - RNA, 19 nt, Artificial Sequence
  Synthetic
  misc_feature (11)..(11): n is a, c, g, or u
guaacacgagnaggggucc

SEQ ID NO: 87515 - RNA, 20 nt, Artificial Sequence
  Synthetic
  misc_feature (12)..(12): n is a, c, g, or u
uguaacacgagnaggggucc

SEQ ID NO: 87516 - RNA, 21 nt, Artificial Sequence
  Synthetic
  misc_feature (13)..(13): n is a, c, g, or u
cuguaacacgagnaggggucc

SEQ ID NO: 87517 - RNA, 22 nt, Artificial Sequence
  Synthetic
  misc_feature (14)..(14): n is a, c, g, or u
ccuguaacacgagnaggggucc

SEQ ID NO: 87518 - RNA, 23 nt, Artificial Sequence
  Synthetic
  misc_feature (15)..(15): n is a, c, g, or u
gccuguaacacgagnaggggucc

SEQ ID NO: 87519 - RNA, 24 nt, Artificial Sequence
  Synthetic
  misc_feature (16)..(16): n is a, c, g, or u
cgccuguaacacgagnaggggucc

SEQ ID NO: 87520 - RNA, 18 nt, Artificial Sequence
  Synthetic
auaauauacccgccuucc

SEQ ID NO: 87521 - RNA, 19 nt, Artificial Sequence
  Synthetic
uauaauauacccgccuucc

SEQ ID NO: 87522 - RNA, 20 nt, Artificial Sequence
  Synthetic
auauaauauacccgccuucc

SEQ ID NO: 87523 - RNA, 21 nt, Artificial Sequence
  Synthetic
uauauaauauacccgccuucc

SEQ ID NO: 87524 - RNA, 22 nt, Artificial Sequence
  Synthetic
uuauauaauauacccgccuucc

SEQ ID NO: 87525 - RNA, 23 nt, Artificial Sequence
  Synthetic
cuuauauaauauacccgccuucc

SEQ ID NO: 87526 - RNA, 24 nt, Artificial Sequence
  Synthetic
ucuuauauaauauacccgccuucc

SEQ ID NO: 87527 - RNA, 18 nt, Artificial Sequence
  Synthetic
ugcuguagcucuuguucc

SEQ ID NO: 87528 - RNA, 19 nt, Artificial Sequence
  Synthetic
augcuguagcucuuguucc

SEQ ID NO: 87529 - RNA, 20 nt, Artificial Sequence
  Synthetic
caugcuguagcucuuguucc

SEQ ID NO: 87530 - RNA, 21 nt, Artificial Sequence
  Synthetic
ccaugcuguagcucuuguucc

SEQ ID NO: 87531 - RNA, 22 nt, Artificial Sequence
  Synthetic
cccaugcuguagcucuuguucc

SEQ ID NO: 87532 - RNA, 23 nt, Artificial Sequence
  Synthetic
ccccaugcuguagcucuuguucc

SEQ ID NO: 87533 - RNA, 24 nt, Artificial Sequence
  Synthetic
gccccaugcuguagcucuuguucc

SEQ ID NO: 87534 - RNA, 18 nt, Artificial Sequence
  Synthetic
cucccauaggaauuuucc

SEQ ID NO: 87535 - RNA, 19 nt, Artificial Sequence
  Synthetic
acucccauaggaauuuucc

SEQ ID NO: 87536 - RNA, 20 nt, Artificial Sequence
  Synthetic
cacucccauaggaauuuucc

SEQ ID NO: 87537 - RNA, 21 nt, Artificial Sequence
  Synthetic
ccacucccauaggaauuuucc

SEQ ID NO: 87538 - RNA, 22 nt, Artificial Sequence
  Synthetic
cccacucccauaggaauuuucc

SEQ ID NO: 87539 - RNA, 23 nt, Artificial Sequence
  Synthetic
gcccacucccauaggaauuuucc

SEQ ID NO: 87540 - RNA, 24 nt, Artificial Sequence
  Synthetic
ggcccacucccauaggaauuuucc

SEQ ID NO: 87541 - RNA, 18 nt, Artificial Sequence
  Synthetic
  misc_feature (8)..(8): n is a, c, g, or u
gaaaagangguguuuucc

SEQ ID NO: 87542 - RNA, 19 nt, Artificial Sequence
  Synthetic
  misc_feature (9)..(9): n is a, c, g, or u
ggaaaagangguguuuucc

SEQ ID NO: 87543 - RNA, 20 nt, Artificial Sequence
  Synthetic
  misc_feature (10)..(10): n is a, c, g, or u
aggaaaagangguguuuucc

SEQ ID NO: 87544 - RNA, 21 nt, Artificial Sequence
  Synthetic
  misc_feature (11)..(11): n is a, c, g, or u
uaggaaaagangguguuuucc

SEQ ID NO: 87545 - RNA, 22 nt, Artificial Sequence
  Synthetic
  misc_feature (12)..(12): n is a, c, g, or u
uuaggaaaagangguguuuucc

SEQ ID NO: 87546 - RNA, 23 nt, Artificial Sequence
  Synthetic
  misc_feature (13)..(13): n is a, c, g, or u
auuaggaaaagangguguuuucc

SEQ ID NO: 87547 - RNA, 24 nt, Artificial Sequence
  Synthetic
  misc_feature (14)..(14): n is a, c, g, or u
uauuaggaaaagangguguuuucc

SEQ ID NO: 87548 - RNA, 18 nt, Artificial Sequence
  Synthetic
gauggcccaugaccaagc

SEQ ID NO: 87549 - RNA, 19 nt, Artificial Sequence
  Synthetic
ugauggcccaugaccaagc

SEQ ID NO: 87550 - RNA, 20 nt, Artificial Sequence
  Synthetic
cugauggcccaugaccaagc

SEQ ID NO: 87551 - RNA, 21 nt, Artificial Sequence
  Synthetic
gcugauggcccaugaccaagc

SEQ ID NO: 87552 - RNA, 22 nt, Artificial Sequence
  Synthetic
cgcugauggcccaugaccaagc

SEQ ID NO: 87553 - RNA, 23 nt, Artificial Sequence
  Synthetic
gcgcugauggcccaugaccaagc

SEQ ID NO: 87554 - RNA, 24 nt, Artificial Sequence
  Synthetic
ugcgcugauggcccaugaccaagc

SEQ ID NO: 87555 - RNA, 18 nt, Artificial Sequence
  Synthetic
  misc_feature (4)..(4): n is a, c, g, or u
auungguggucuauaagc

SEQ ID NO: 87556 - RNA, 19 nt, Artificial Sequence
  Synthetic
  misc_feature (5)..(5): n is a, c, g, or u
cauungguggucuauaagc

SEQ ID NO: 87557 - RNA, 20 nt, Artificial Sequence
  Synthetic
  misc_feature (6)..(6): n is a, c, g, or u
gcauungguggucuauaagc

SEQ ID NO: 87558 - RNA, 21 nt, Artificial Sequence
  Synthetic
  misc_feature (7)..(7): n is a, c, g, or u
ggcauungguggucuauaagc

SEQ ID NO: 87559 - RNA, 22 nt, Artificial Sequence
  Synthetic
  misc_feature (8)..(8): n is a, c, g, or u
gggcauungguggucuauaagc

SEQ ID NO: 87560 - RNA, 23 nt, Artificial Sequence
  Synthetic
  misc_feature (9)..(9): n is a, c, g, or u
ggggcauungguggucuauaagc

SEQ ID NO: 87561 - RNA, 24 nt, Artificial Sequence
  Synthetic
  misc_feature (10)..(10): n is a, c, g, or u
aggggcauungguggucuauaagc

SEQ ID NO: 87562 - RNA, 18 nt, Artificial Sequence
  Synthetic
aagaaaauugguaacagc

SEQ ID NO: 87563 - RNA, 19 nt, Artificial Sequence
  Synthetic
aaagaaaauugguaacagc

SEQ ID NO: 87564 - RNA, 20 nt, Artificial Sequence
  Synthetic
aaaagaaaauugguaacagc

SEQ ID NO: 87565 - RNA, 21 nt, Artificial Sequence
  Synthetic
caaaagaaaauugguaacagc

SEQ ID NO: 87566 - RNA, 22 nt, Artificial Sequence
  Synthetic
acaaaagaaaauugguaacagc

SEQ ID NO: 87567 - RNA, 23 nt, Artificial Sequence
  Synthetic
gacaaaagaaaauugguaacagc

SEQ ID NO: 87568 - RNA, 24 nt, Artificial Sequence
  Synthetic
agacaaaagaaaauugguaacagc

SEQ ID NO: 87569 - RNA, 18 nt, Artificial Sequence
  Synthetic
agccacccaaggcacagc

SEQ ID NO: 87570 - RNA, 19 nt, Artificial Sequence
  Synthetic
aagccacccaaggcacagc

SEQ ID NO: 87571 - RNA, 20 nt, Artificial Sequence
  Synthetic
aaagccacccaaggcacagc

SEQ ID NO: 87572 - RNA, 21 nt, Artificial Sequence
  Synthetic
  misc_feature (1)..(1): n is a, c, g, or u
naaagccacccaaggcacagc

SEQ ID NO: 87573 - RNA, 22 nt, Artificial Sequence
  Synthetic
  misc_feature (2)..(2): n is a, c, g, or u
cnaaagccacccaaggcacagc

SEQ ID NO: 87574 - RNA, 23 nt, Artificial Sequence
  Synthetic
  misc_feature (3)..(3): n is a, c, g, or u
ccnaaagccacccaaggcacagc

SEQ ID NO: 87575 - RNA, 24 nt, Artificial Sequence
  Synthetic
  misc_feature (1)..(1): n is a, c, g, or u
  misc_feature (4)..(4): n is a, c, g, or u
nccnaaagccacccaaggcacagc

SEQ ID NO: 87576 - RNA, 18 nt, Artificial Sequence
  Synthetic
ccgaagguuugguacagc

SEQ ID NO: 87577 - RNA, 19 nt, Artificial Sequence
  Synthetic
uccgaagguuugguacagc

SEQ ID NO: 87578 - RNA, 20 nt, Artificial Sequence
  Synthetic
guccgaagguuugguacagc

SEQ ID NO: 87579 - RNA, 21 nt, Artificial Sequence
  Synthetic
cguccgaagguuugguacagc

SEQ ID NO: 87580 - RNA, 22 nt, Artificial Sequence
  Synthetic
ccguccgaagguuugguacagc

SEQ ID NO: 87581 - RNA, 23 nt, Artificial Sequence
  Synthetic
uccguccgaagguuugguacagc

SEQ ID NO: 87582 - RNA, 24 nt, Artificial Sequence
  Synthetic
uuccguccgaagguuugguacagc

SEQ ID NO: 87583 - RNA, 18 nt, Artificial Sequence
  Synthetic
ugaacuggagccaccagc

SEQ ID NO: 87584 - RNA, 19 nt, Artificial Sequence
  Synthetic
cugaacuggagccaccagc

SEQ ID NO: 87585 - RNA, 20 nt, Artificial Sequence
  Synthetic
ccugaacuggagccaccagc

SEQ ID NO: 87586 - RNA, 21 nt, Artificial Sequence
  Synthetic
uccugaacuggagccaccagc

SEQ ID NO: 87587 - RNA, 22 nt, Artificial Sequence
  Synthetic
uuccugaacuggagccaccagc

SEQ ID NO: 87588 - RNA, 23 nt, Artificial Sequence
  Synthetic
guuccugaacuggagccaccagc

SEQ ID NO: 87589 - RNA, 24 nt, Artificial Sequence
  Synthetic
uguuccugaacuggagccaccagc

SEQ ID NO: 87590 - RNA, 18 nt, Artificial Sequence
  Synthetic
gccgcagacacauccagc

SEQ ID NO: 87591 - RNA, 19 nt, Artificial Sequence
  Synthetic
cgccgcagacacauccagc

SEQ ID NO: 87592 - RNA, 20 nt, Artificial Sequence
  Synthetic
acgccgcagacacauccagc

SEQ ID NO: 87593 - RNA, 21 nt, Artificial Sequence
  Synthetic
aacgccgcagacacauccagc

SEQ ID NO: 87594 - RNA, 22 nt, Artificial Sequence
  Synthetic
aaacgccgcagacacauccagc

SEQ ID NO: 87595 - RNA, 23 nt, Artificial Sequence
  Synthetic
aaaacgccgcagacacauccagc

SEQ ID NO: 87596 - RNA, 24 nt, Artificial Sequence
  Synthetic
uaaaacgccgcagacacauccagc

SEQ ID NO: 87597 - RNA, 18 nt, Artificial Sequence
  Synthetic
gcagcacagccuagcagc

SEQ ID NO: 87598 - RNA, 19 nt, Artificial Sequence
  Synthetic
ggcagcacagccuagcagc

SEQ ID NO: 87599 - RNA, 20 nt, Artificial Sequence
  Synthetic
uggcagcacagccuagcagc

SEQ ID NO: 87600 - RNA, 21 nt, Artificial Sequence
  Synthetic
uuggcagcacagccuagcagc

SEQ ID NO: 87601 - RNA, 22 nt, Artificial Sequence
  Synthetic
guuggcagcacagccuagcagc

SEQ ID NO: 87602 - RNA, 23 nt, Artificial Sequence
  Synthetic
aguuggcagcacagccuagcagc

SEQ ID NO: 87603 - RNA, 24 nt, Artificial Sequence
  Synthetic
caguuggcagcacagccuagcagc

SEQ ID NO: 87604 - RNA, 18 nt, Artificial Sequence
  Synthetic
ucguccgcgggauucagc

SEQ ID NO: 87605 - RNA, 19 nt, Artificial Sequence
  Synthetic
gucguccgcgggauucagc

SEQ ID NO: 87606 - RNA, 20 nt, Artificial Sequence
  Synthetic
ggucguccgcgggauucagc

SEQ ID NO: 87607 - RNA, 18 nt, Artificial Sequence
  Synthetic
auguucuccauguucagc

SEQ ID NO: 87608 - RNA, 19 nt, Artificial Sequence
  Synthetic
gauguucuccauguucagc

SEQ ID NO: 87609 - RNA, 20 nt, Artificial Sequence
  Synthetic
ugauguucuccauguucagc

SEQ ID NO: 87610 - RNA, 21 nt, Artificial Sequence
  Synthetic
gugauguucuccauguucagc

SEQ ID NO: 87611 - RNA, 22 nt, Artificial Sequence
  Synthetic
ugugauguucuccauguucagc

SEQ ID NO: 87612 - RNA, 23 nt, Artificial Sequence
  Synthetic
augugauguucuccauguucagc

SEQ ID NO: 87613 - RNA, 24 nt, Artificial Sequence
  Synthetic
gaugugauguucuccauguucagc

SEQ ID NO: 87614 - RNA, 18 nt, Artificial Sequence
  Synthetic
  misc_feature (4)..(4): n is a, c, g, or u
  misc_feature (13)..(13): n is a, c, g, or u
ggcnucccgauanagagc

SEQ ID NO: 87615 - RNA, 19 nt, Artificial Sequence
  Synthetic
  misc_feature (5)..(5): n is a, c, g, or u
  misc_feature (14)..(14): n is a, c, g, or u
aggcnucccgauanagagc

SEQ ID NO: 87616 - RNA, 20 nt, Artificial Sequence
  Synthetic
  misc_feature (6)..(6): n is a, c, g, or u
  misc_feature (15)..(15): n is a, c, g, or u
aaggcnucccgauanagagc

SEQ ID NO: 87617 - RNA, 21 nt, Artificial Sequence
  Synthetic
  misc_feature (7)..(7): n is a, c, g, or u
  misc_feature (16)..(16): n is a, c, g, or u
uaaggcnucccgauanagagc

SEQ ID NO: 87618 - RNA, 22 nt, Artificial Sequence
  Synthetic
  misc_feature (8)..(8): n is a, c, g, or u
  misc_feature (17)..(17): n is a, c, g, or u
cuaaggcnucccgauanagagc

SEQ ID NO: 87619 - RNA, 23 nt, Artificial Sequence
  Synthetic
  misc_feature (9)..(9): n is a, c, g, or u
  misc_feature (18)..(18): n is a, c, g, or u
ucuaaggcnucccgauanagagc

SEQ ID NO: 87620 - RNA, 24 nt, Artificial Sequence
  Synthetic
  misc_feature (10)..(10): n is a, c, g, or u
  misc_feature (19)..(19): n is a, c, g, or u
cucuaaggcnucccgauanagagc

SEQ ID NO: 87621 - RNA, 18 nt, Artificial Sequence
  Synthetic
auggaucggcagaggagc

SEQ ID NO: 87622 - RNA, 19 nt, Artificial Sequence
  Synthetic
uauggaucggcagaggagc

SEQ ID NO: 87623 - RNA, 20 nt, Artificial Sequence
  Synthetic
guauggaucggcagaggagc

SEQ ID NO: 87624 - RNA, 21 nt, Artificial Sequence
  Synthetic
aguauggaucggcagaggagc

SEQ ID NO: 87625 - RNA, 22 nt, Artificial Sequence
  Synthetic
caguauggaucggcagaggagc

SEQ ID NO: 87626 - RNA, 23 nt, Artificial Sequence
  Synthetic
gcaguauggaucggcagaggagc

SEQ ID NO: 87627 - RNA, 24 nt, Artificial Sequence
  Synthetic
cgcaguauggaucggcagaggagc

SEQ ID NO: 87628 - RNA, 18 nt, Artificial Sequence
  Synthetic
ggcacuaguaaacugagc

SEQ ID NO: 87629 - RNA, 19 nt, Artificial Sequence
  Synthetic
uggcacuaguaaacugagc

SEQ ID NO: 87630 - RNA, 20 nt, Artificial Sequence
  Synthetic
auggcacuaguaaacugagc

SEQ ID NO: 87631 - RNA, 21 nt, Artificial Sequence
  Synthetic
aauggcacuaguaaacugagc

SEQ ID NO: 87632 - RNA, 22 nt, Artificial Sequence
  Synthetic
aaauggcacuaguaaacugagc

SEQ ID NO: 87633 - RNA, 23 nt, Artificial Sequence
  Synthetic
caaauggcacuaguaaacugagc

SEQ ID NO: 87634 - RNA, 24 nt, Artificial Sequence
  Synthetic
acaaauggcacuaguaaacugagc

SEQ ID NO: 87635 - RNA, 18 nt, Artificial Sequence
  Synthetic
  misc_feature (6)..(6): n is a, c, g, or u
uuguanuaugcccugagc

SEQ ID NO: 87636 - RNA, 19 nt, Artificial Sequence
  Synthetic
  misc_feature (7)..(7): n is a, c, g, or u
uuuguanuaugcccugagc

SEQ ID NO: 87637 - RNA, 20 nt, Artificial Sequence
  Synthetic
  misc_feature (8)..(8): n is a, c, g, or u
guuuguanuaugcccugagc

SEQ ID NO: 87638 - RNA, 21 nt, Artificial Sequence
  Synthetic
  misc_feature (1)..(1): n is a, c, g, or u
  misc_feature (9)..(9): n is a, c, g, or u
nguuuguanuaugcccugagc

SEQ ID NO: 87639 - RNA, 22 nt, Artificial Sequence
  Synthetic
  misc_feature (2)..(2): n is a, c, g, or u
  misc_feature (10)..(10): n is a, c, g, or u
anguuuguanuaugcccugagc

SEQ ID NO: 87640 - RNA, 23 nt, Artificial Sequence
  Synthetic
  misc_feature (3)..(3): n is a, c, g, or u
  misc_feature (11)..(11): n is a, c, g, or u
aanguuuguanuaugcccugagc

SEQ ID NO: 87641 - RNA, 24 nt, Artificial Sequence
  Synthetic
  misc_feature (4)..(4): n is a, c, g, or u
  misc_feature (12)..(12): n is a, c, g, or u
caanguuuguanuaugcccugagc

SEQ ID NO: 87642 - RNA, 18 nt, Artificial Sequence
  Synthetic
  misc_feature (15)..(15): n is a, c, g, or u
gaguaacuccacagnagc

SEQ ID NO: 87643 - RNA, 19 nt, Artificial Sequence
  Synthetic
  misc_feature (16)..(16): n is a, c, g, or u
agaguaacuccacagnagc

SEQ ID NO: 87644 - RNA, 20 nt, Artificial Sequence
  Synthetic
  misc_feature (17)..(17): n is a, c, g, or u
gagaguaacuccacagnagc

SEQ ID NO: 87645 - RNA, 21 nt, Artificial Sequence
  Synthetic
  misc_feature (18)..(18): n is a, c, g, or u
cgagaguaacuccacagnagc

SEQ ID NO: 87646 - RNA, 22 nt, Artificial Sequence
  Synthetic
  misc_feature (19)..(19): n is a, c, g, or u
acgagaguaacuccacagnagc

SEQ ID NO: 87647 - RNA, 23 nt, Artificial Sequence
  Synthetic
  misc_feature (20)..(20): n is a, c, g, or u
aacgagaguaacuccacagnagc

SEQ ID NO: 87648 - RNA, 24 nt, Artificial Sequence
  Synthetic
  misc_feature (21)..(21): n is a, c, g, or u
aaacgagaguaacuccacagnagc

SEQ ID NO: 87649 - RNA, 18 nt, Artificial Sequence
  Synthetic
aagaagaugaggcauagc

SEQ ID NO: 87650 - RNA, 19 nt, Artificial Sequence
  Synthetic
caagaagaugaggcauagc

SEQ ID NO: 87651 - RNA, 20 nt, Artificial Sequence
  Synthetic
acaagaagaugaggcauagc

SEQ ID NO: 87652 - RNA, 21 nt, Artificial Sequence
  Synthetic
aacaagaagaugaggcauagc

SEQ ID NO: 87653 - RNA, 22 nt, Artificial Sequence
  Synthetic
caacaagaagaugaggcauagc

SEQ ID NO: 87654 - RNA, 23 nt, Artificial Sequence
  Synthetic
ccaacaagaagaugaggcauagc

SEQ ID NO: 87655 - RNA, 24 nt, Artificial Sequence
  Synthetic
accaacaagaagaugaggcauagc

SEQ ID NO: 87656 - RNA, 18 nt, Artificial Sequence
  Synthetic
aggaagaugauaaaacgc

SEQ ID NO: 87657 - RNA, 19 nt, Artificial Sequence
  Synthetic
gaggaagaugauaaaacgc

SEQ ID NO: 87658 - RNA, 20 nt, Artificial Sequence
  Synthetic
agaggaagaugauaaaacgc

SEQ ID NO: 87659 - RNA, 21 nt, Artificial Sequence
  Synthetic
aagaggaagaugauaaaacgc

SEQ ID NO: 87660 - RNA, 22 nt, Artificial Sequence
  Synthetic
gaagaggaagaugauaaaacgc

SEQ ID NO: 87661 - RNA, 23 nt, Artificial Sequence
  Synthetic
ugaagaggaagaugauaaaacgc

SEQ ID NO: 87662 - RNA, 24 nt, Artificial Sequence
  Synthetic
augaagaggaagaugauaaaacgc

SEQ ID NO: 87663 - RNA, 18 nt, Artificial Sequence
  Synthetic
aaacaaaggacgucccgc

SEQ ID NO: 87664 - RNA, 19 nt, Artificial Sequence
  Synthetic
uaaacaaaggacgucccgc

SEQ ID NO: 87665 - RNA, 20 nt, Artificial Sequence
  Synthetic
guaaacaaaggacgucccgc

SEQ ID NO: 87666 - RNA, 18 nt, Artificial Sequence
  Synthetic
cacagacggggaguccgc

SEQ ID NO: 87667 - RNA, 19 nt, Artificial Sequence
  Synthetic
gcacagacggggaguccgc

SEQ ID NO: 87668 - RNA, 20 nt, Artificial Sequence
  Synthetic
ggcacagacggggaguccgc

SEQ ID NO: 87669 - RNA, 21 nt, Artificial Sequence
  Synthetic
aggcacagacggggaguccgc

SEQ ID NO: 87670 - RNA, 22 nt, Artificial Sequence
  Synthetic
aaggcacagacggggaguccgc

SEQ ID NO: 87671 - RNA, 23 nt, Artificial Sequence
  Synthetic
gaaggcacagacggggaguccgc

SEQ ID NO: 87672 - RNA, 24 nt, Artificial Sequence
  Synthetic
agaaggcacagacggggaguccgc

SEQ ID NO: 87673 - RNA, 18 nt, Artificial Sequence
  Synthetic
ggaaagaagucagaaggc

SEQ ID NO: 87674 - RNA, 19 nt, Artificial Sequence
  Synthetic
aggaaagaagucagaaggc

SEQ ID NO: 87675 - RNA, 20 nt, Artificial Sequence
  Synthetic
aaggaaagaagucagaaggc

SEQ ID NO: 87676 - RNA, 21 nt, Artificial Sequence
  Synthetic
gaaggaaagaagucagaaggc

SEQ ID NO: 87677 - RNA, 22 nt, Artificial Sequence
  Synthetic
  misc_feature (1)..(1): n is a, c, g, or u
ngaaggaaagaagucagaaggc

SEQ ID NO: 87678 - RNA, 23 nt, Artificial Sequence
  Synthetic
  misc_feature (2)..(2): n is a, c, g, or u
cngaaggaaagaagucagaaggc

SEQ ID NO: 87679 - RNA, 24 nt, Artificial Sequence
  Synthetic
  misc_feature (3)..(3): n is a, c, g, or u
acngaaggaaagaagucagaaggc

SEQ ID NO: 87680 - RNA, 18 nt, Artificial Sequence
  Synthetic
uccggcagaugagaaggc

SEQ ID NO: 87681 - RNA, 19 nt, Artificial Sequence
  Synthetic
guccggcagaugagaaggc

SEQ ID NO: 87682 - RNA, 20 nt, Artificial Sequence
  Synthetic
gguccggcagaugagaaggc

SEQ ID NO: 87683 - RNA, 21 nt, Artificial Sequence
  Synthetic
cgguccggcagaugagaaggc

SEQ ID NO: 87684 - RNA, 22 nt, Artificial Sequence
  Synthetic
acgguccggcagaugagaaggc

SEQ ID NO: 87685 - RNA, 23 nt, Artificial Sequence
  Synthetic
cacgguccggcagaugagaaggc

SEQ ID NO: 87686 - RNA, 24 nt, Artificial Sequence
  Synthetic
acacgguccggcagaugagaaggc

SEQ ID NO: 87687 - RNA, 18 nt, Artificial Sequence
  Synthetic
gaccuucgucugcgaggc

SEQ ID NO: 87688 - RNA, 19 nt, Artificial Sequence
  Synthetic
agaccuucgucugcgaggc

SEQ ID NO: 87689 - RNA, 20 nt, Artificial Sequence
  Synthetic
gagaccuucgucugcgaggc

SEQ ID NO: 87690 - RNA, 18 nt, Artificial Sequence
  Synthetic
aaggcacagcuuggaggc

SEQ ID NO: 87691 - RNA, 19 nt, Artificial Sequence
  Synthetic
caaggcacagcuuggaggc

SEQ ID NO: 87692 - RNA, 20 nt, Artificial Sequence
  Synthetic
ccaaggcacagcuuggaggc

SEQ ID NO: 87693 - RNA, 21 nt, Artificial Sequence
  Synthetic
cccaaggcacagcuuggaggc

SEQ ID NO: 87694 - RNA, 22 nt, Artificial Sequence
  Synthetic
acccaaggcacagcuuggaggc

SEQ ID NO: 87695 - RNA, 23 nt, Artificial Sequence
  Synthetic
cacccaaggcacagcuuggaggc

SEQ ID NO: 87696 - RNA, 24 nt, Artificial Sequence
  Synthetic
ccacccaaggcacagcuuggaggc

SEQ ID NO: 87697 - RNA, 18 nt, Artificial Sequence
  Synthetic
gcgagcaaaacaagcggc

SEQ ID NO: 87698 - RNA, 19 nt, Artificial Sequence
  Synthetic
ugcgagcaaaacaagcggc

SEQ ID NO: 87699 - RNA, 20 nt, Artificial Sequence
  Synthetic
cugcgagcaaaacaagcggc

SEQ ID NO: 87700 - RNA, 21 nt, Artificial Sequence
  Synthetic
gcugcgagcaaaacaagcggc

SEQ ID NO: 87701 - RNA, 22 nt, Artificial Sequence
  Synthetic
ugcugcgagcaaaacaagcggc

SEQ ID NO: 87702 - RNA, 23 nt, Artificial Sequence
  Synthetic
cugcugcgagcaaaacaagcggc

SEQ ID NO: 87703 - RNA, 24 nt, Artificial Sequence
  Synthetic
ccugcugcgagcaaaacaagcggc

SEQ ID NO: 87704 - RNA, 18 nt, Artificial Sequence
  Synthetic
uccgcaguauggaucggc

SEQ ID NO: 87705 - RNA, 19 nt, Artificial Sequence
  Synthetic
uuccgcaguauggaucggc

SEQ ID NO: 87706 - RNA, 20 nt, Artificial Sequence
  Synthetic
guuccgcaguauggaucggc

SEQ ID NO: 87707 - RNA, 21 nt, Artificial Sequence
  Synthetic
aguuccgcaguauggaucggc

SEQ ID NO: 87708 - RNA, 22 nt, Artificial Sequence
  Synthetic
gaguuccgcaguauggaucggc

SEQ ID NO: 87709 - RNA, 23 nt, Artificial Sequence
  Synthetic
ggaguuccgcaguauggaucggc

SEQ ID NO: 87710 - RNA, 24 nt, Artificial Sequence
  Synthetic
aggaguuccgcaguauggaucggc

SEQ ID NO: 87711 - RNA, 18 nt, Artificial Sequence
  Synthetic
gagccaggagaaacgggc

SEQ ID NO: 87712 - RNA, 19 nt, Artificial Sequence
  Synthetic
ugagccaggagaaacgggc

SEQ ID NO: 87713 - RNA, 20 nt, Artificial Sequence
  Synthetic
cugagccaggagaaacgggc

SEQ ID NO: 87714 - RNA, 21 nt, Artificial Sequence
  Synthetic
acugagccaggagaaacgggc

SEQ ID NO: 87715 - RNA, 22 nt, Artificial Sequence
  Synthetic
aacugagccaggagaaacgggc

SEQ ID NO: 87716 - RNA, 23 nt, Artificial Sequence
  Synthetic
aaacugagccaggagaaacgggc

SEQ ID NO: 87717 - RNA, 24 nt, Artificial Sequence
  Synthetic
uaaacugagccaggagaaacgggc

SEQ ID NO: 87718 - RNA, 18 nt, Artificial Sequence
  Synthetic
accuggccguugccgggc

SEQ ID NO: 87719 - RNA, 19 nt, Artificial Sequence
  Synthetic
gaccuggccguugccgggc

SEQ ID NO: 87720 - RNA, 20 nt, Artificial Sequence
  Synthetic
agaccuggccguugccgggc

SEQ ID NO: 87721 - RNA, 21 nt, Artificial Sequence
  Synthetic
cagaccuggccguugccgggc

SEQ ID NO: 87722 - RNA, 22 nt, Artificial Sequence
  Synthetic
acagaccuggccguugccgggc

SEQ ID NO: 87723 - RNA, 23 nt, Artificial Sequence
  Synthetic
cacagaccuggccguugccgggc

SEQ ID NO: 87724 - RNA, 24 nt, Artificial Sequence
  Synthetic
gcacagaccuggccguugccgggc

SEQ ID NO: 87725 - RNA, 18 nt, Artificial Sequence
  Synthetic
acauuguguaaaaggggc

SEQ ID NO: 87726 - RNA, 19 nt, Artificial Sequence
  Synthetic
cacauuguguaaaaggggc

SEQ ID NO: 87727 - RNA, 20 nt, Artificial Sequence
  Synthetic
ccacauuguguaaaaggggc

SEQ ID NO: 87728 - RNA, 21 nt, Artificial Sequence
  Synthetic
accacauuguguaaaaggggc

SEQ ID NO: 87729 - RNA, 22 nt, Artificial Sequence
  Synthetic
aaccacauuguguaaaaggggc

SEQ ID NO: 87730 - RNA, 23 nt, Artificial Sequence
  Synthetic
uaaccacauuguguaaaaggggc

SEQ ID NO: 87731 - RNA, 24 nt, Artificial Sequence
  Synthetic
auaaccacauuguguaaaaggggc

SEQ ID NO: 87732 - RNA, 18 nt, Artificial Sequence
  Synthetic
  misc_feature (6)..(6): n is a, c, g, or u
  misc_feature (15)..(15): n is a, c, g, or u
auacangcauacaanggc

SEQ ID NO: 87733 - RNA, 19 nt, Artificial Sequence
  Synthetic
  misc_feature (7)..(7): n is a, c, g, or u
  misc_feature (16)..(16): n is a, c, g, or u
aauacangcauacaanggc

SEQ ID NO: 87734 - RNA, 20 nt, Artificial Sequence
  Synthetic
  misc_feature (8)..(8): n is a, c, g, or u
  misc_feature (17)..(17): n is a, c, g, or u
gaauacangcauacaanggc

SEQ ID NO: 87735 - RNA, 21 nt, Artificial Sequence
  Synthetic
  misc_feature (9)..(9): n is a, c, g, or u
  misc_feature (18)..(18): n is a, c, g, or u
ugaauacangcauacaanggc

SEQ ID NO: 87736 - RNA, 22 nt, Artificial Sequence
  Synthetic
  misc_feature (1)..(1): n is a, c, g, or u
  misc_feature (10)..(10): n is a, c, g, or u
  misc_feature (19)..(19): n is a, c, g, or u
nugaauacangcauacaanggc

SEQ ID NO: 87737 - RNA, 23 nt, Artificial Sequence
  Synthetic
  misc_feature (2)..(2): n is a, c, g, or u
  misc_feature (11)..(11): n is a, c, g, or u
  misc_feature (20)..(20): n is a, c, g, or u
anugaauacangcauacaanggc

SEQ ID NO: 87738 - RNA, 24 nt, Artificial Sequence
  Synthetic
  misc_feature (3)..(3): n is a, c, g, or u
  misc_feature (12)..(12): n is a, c, g, or u
  misc_feature (21)..(21): n is a, c, g, or u
ganugaauacangcauacaanggc

SEQ ID NO: 87739 - RNA, 18 nt, Artificial Sequence
  Synthetic
  misc_feature (1)..(1): n is a, c, g, or u
  misc_feature (9)..(9): n is a, c, g, or u
nugaugugnucuuguggc

SEQ ID NO: 87740 - RNA, 19 nt, Artificial Sequence
  Synthetic
  misc_feature (2)..(2): n is a, c, g, or u
  misc_feature (10)..(10): n is a, c, g, or u
unugaugugnucuuguggc

SEQ ID NO: 87741 - RNA, 20 nt, Artificial Sequence
  Synthetic
  misc_feature (3)..(3): n is a, c, g, or u
  misc_feature (11)..(11): n is a, c, g, or u
gunugaugugnucuuguggc

SEQ ID NO: 87742 - RNA, 21 nt, Artificial Sequence
  Synthetic
  misc_feature (4)..(4): n is a, c, g, or u
  misc_feature (12)..(12): n is a, c, g, or u
ugunugaugugnucuuguggc

SEQ ID NO: 87743 - RNA, 22 nt, Artificial Sequence
  Synthetic
  misc_feature (1)..(1): n is a, c, g, or u
  misc_feature (5)..(5): n is a, c, g, or u
  misc_feature (13)..(13): n is a, c, g, or u
nugunugaugugnucuuguggc

SEQ ID NO: 87744 - RNA, 23 nt, Artificial Sequence
  Synthetic
  misc_feature (2)..(2): n is a, c, g, or u
  misc_feature (6)..(6): n is a, c, g, or u
  misc_feature (14)..(14): n is a, c, g, or u
unugunugaugugnucuuguggc

SEQ ID NO: 87745 - RNA, 24 nt, Artificial Sequence
  Synthetic
  misc_feature (3)..(3): n is a, c, g, or u
  misc_feature (7)..(7): n is a, c, g, or u
  misc_feature (15)..(15): n is a, c, g, or u
uunugunugaugugnucuuguggc

SEQ ID NO: 87746 - RNA, 18 nt, Artificial Sequence
  Synthetic
cgucagcaaacacuuggc

SEQ ID NO: 87747 - RNA, 19 nt, Artificial Sequence
  Synthetic
gcgucagcaaacacuuggc

SEQ ID NO: 87748 - RNA, 20 nt, Artificial Sequence
  Synthetic
ugcgucagcaaacacuuggc

SEQ ID NO: 87749 - RNA, 21 nt, Artificial Sequence
  Synthetic
uugcgucagcaaacacuuggc

SEQ ID NO: 87750 - RNA, 22 nt, Artificial Sequence
  Synthetic
guugcgucagcaaacacuuggc

SEQ ID NO: 87751 - RNA, 23 nt, Artificial Sequence
  Synthetic
gguugcgucagcaaacacuuggc

SEQ ID NO: 87752 - RNA, 24 nt, Artificial Sequence
  Synthetic
ggguugcgucagcaaacacuuggc

SEQ ID NO: 87753 - RNA, 18 nt, Artificial Sequence
  Synthetic
aaggccuuguaaguuggc

SEQ ID NO: 87754 - RNA, 19 nt, Artificial Sequence
  Synthetic
aaaggccuuguaaguuggc

SEQ ID NO: 87755 - RNA, 20 nt, Artificial Sequence
  Synthetic
gaaaggccuuguaaguuggc

SEQ ID NO: 87756 - RNA, 21 nt, Artificial Sequence
  Synthetic
agaaaggccuuguaaguuggc

SEQ ID NO: 87757 - RNA, 22 nt, Artificial Sequence
  Synthetic
cagaaaggccuuguaaguuggc

SEQ ID NO: 87758 - RNA, 23 nt, Artificial Sequence
  Synthetic
acagaaaggccuuguaaguuggc

SEQ ID NO: 87759 - RNA, 24 nt, Artificial Sequence
  Synthetic
cacagaaaggccuuguaaguuggc

SEQ ID NO: 87760 - RNA, 18 nt, Artificial Sequence
  Synthetic
gggacugcgaauuuuggc

SEQ ID NO: 87761 - RNA, 19 nt, Artificial Sequence
  Synthetic
ggggacugcgaauuuuggc

SEQ ID NO: 87762 - RNA, 20 nt, Artificial Sequence
  Synthetic
uggggacugcgaauuuuggc

SEQ ID NO: 87763 - RNA, 21 nt, Artificial Sequence
  Synthetic
uuggggacugcgaauuuuggc

SEQ ID NO: 87764 - RNA, 22 nt, Artificial Sequence
  Synthetic
guuggggacugcgaauuuuggc

SEQ ID NO: 87765 - RNA, 23 nt, Artificial Sequence
  Synthetic
gguuggggacugcgaauuuuggc

SEQ ID NO: 87766 - RNA, 24 nt, Artificial Sequence
  Synthetic
agguuggggacugcgaauuuuggc

SEQ ID NO: 87767 - RNA, 18 nt, Artificial Sequence
  Synthetic
  misc_feature (13)..(13): n is a, c, g, or u
  misc_feature (16)..(16): n is a, c, g, or u
cuggcgauuggungangc

SEQ ID NO: 87768 - RNA, 19 nt, Artificial Sequence
  Synthetic
  misc_feature (14)..(14): n is a, c, g, or u
  misc_feature (17)..(17): n is a, c, g, or u
acuggcgauuggungangc

SEQ ID NO: 87769 - RNA, 20 nt, Artificial Sequence
  Synthetic
  misc_feature (15)..(15): n is a, c, g, or u
  misc_feature (18)..(18): n is a, c, g, or u
gacuggcgauuggungangc

SEQ ID NO: 87770 - RNA, 21 nt, Artificial Sequence
  Synthetic
  misc_feature (16)..(16): n is a, c, g, or u
  misc_feature (19)..(19): n is a, c, g, or u
ugacuggcgauuggungangc

SEQ ID NO: 87771 - RNA, 22 nt, Artificial Sequence
  Synthetic
  misc_feature (17)..(17): n is a, c, g, or u
  misc_feature (20)..(20): n is a, c, g, or u
cugacuggcgauuggungangc

SEQ ID NO: 87772 - RNA, 23 nt, Artificial Sequence
  Synthetic
  misc_feature (18)..(18): n is a, c, g, or u
  misc_feature (21)..(21): n is a, c, g, or u
ccugacuggcgauuggungangc

SEQ ID NO: 87773 - RNA, 24 nt, Artificial Sequence
  Synthetic
  misc_feature (19)..(19): n is a, c, g, or u
  misc_feature (22)..(22): n is a, c, g, or u
uccugacuggcgauuggungangc

SEQ ID NO: 87774 - RNA, 18 nt, Artificial Sequence
  Synthetic
  misc_feature (3)..(3): n is a, c, g, or u
  misc_feature (12)..(12): n is a, c, g, or u
ugnugaggugancaaugc

SEQ ID NO: 87775 - RNA, 19 nt, Artificial Sequence
  Synthetic
  misc_feature (4)..(4): n is a, c, g, or u
  misc_feature (13)..(13): n is a, c, g, or u
augnugaggugancaaugc

SEQ ID NO: 87776 - RNA, 20 nt, Artificial Sequence
  Synthetic
  misc_feature (5)..(5): n is a, c, g, or u
  misc_feature (14)..(14): n is a, c, g, or u
uaugnugaggugancaaugc

SEQ ID NO: 87777 - RNA, 21 nt, Artificial Sequence
  Synthetic
  misc_feature (6)..(6): n is a, c, g, or u
  misc_feature (15)..(15): n is a, c, g, or u
guaugnugaggugancaaugc

SEQ ID NO: 87778 - RNA, 22 nt, Artificial Sequence
  Synthetic
  misc_feature (7)..(7): n is a, c, g, or u
  misc_feature (16)..(16): n is a, c, g, or u
aguaugnugaggugancaaugc

SEQ ID NO: 87779 - RNA, 23 nt, Artificial Sequence
  Synthetic
  misc_feature (8)..(8): n is a, c, g, or u
  misc_feature (17)..(17): n is a, c, g, or u
caguaugnugaggugancaaugc

SEQ ID NO: 87780 - RNA, 24 nt, Artificial Sequence
  Synthetic
  misc_feature (9)..(9): n is a, c, g, or u
  misc_feature (18)..(18): n is a, c, g, or u
gcaguaugnugaggugancaaugc

SEQ ID NO: 87781 - RNA, 18 nt, Artificial Sequence
  Synthetic
  misc_feature (4)..(4): n is a, c, g, or u
gaancccagcccgaaugc

SEQ ID NO: 87782 - RNA, 19 nt, Artificial Sequence
  Synthetic
  misc_feature (5)..(5): n is a, c, g, or u
ugaancccagcccgaaugc

SEQ ID NO: 87783 - RNA, 20 nt, Artificial Sequence
  Synthetic
  misc_feature (6)..(6): n is a, c, g, or u
gugaancccagcccgaaugc

SEQ ID NO: 87784 - RNA, 21 nt, Artificial Sequence
  Synthetic
  misc_feature (7)..(7): n is a, c, g, or u
ggugaancccagcccgaaugc

SEQ ID NO: 87785 - RNA, 22 nt, Artificial Sequence
  Synthetic
  misc_feature (8)..(8): n is a, c, g, or u
gggugaancccagcccgaaugc

SEQ ID NO: 87786 - RNA, 23 nt, Artificial Sequence
  Synthetic
  misc_feature (9)..(9): n is a, c, g, or u
ggggugaancccagcccgaaugc

SEQ ID NO: 87787 - RNA, 24 nt, Artificial Sequence
  Synthetic
  misc_feature (10)..(10): n is a, c, g, or u
uggggugaancccagcccgaaugc

SEQ ID NO: 87788 - RNA, 18 nt, Artificial Sequence
  Synthetic
aaagauucugccccaugc

SEQ ID NO: 87789 - RNA, 19 nt, Artificial Sequence
  Synthetic
gaaagauucugccccaugc

SEQ ID NO: 87790 - RNA, 20 nt, Artificial Sequence
  Synthetic
ggaaagauucugccccaugc

SEQ ID NO: 87791 - RNA, 21 nt, Artificial Sequence
  Synthetic
uggaaagauucugccccaugc

SEQ ID NO: 87792 - RNA, 22 nt, Artificial Sequence
  Synthetic
guggaaagauucugccccaugc

SEQ ID NO: 87793 - RNA, 23 nt, Artificial Sequence
  Synthetic
gguggaaagauucugccccaugc

SEQ ID NO: 87794 - RNA, 24 nt, Artificial Sequence
  Synthetic
ugguggaaagauucugccccaugc

SEQ ID NO: 87795 - RNA, 18 nt, Artificial Sequence
  Synthetic
acagucuuugaaguaugc

SEQ ID NO: 87796 - RNA, 19 nt, Artificial Sequence
  Synthetic
aacagucuuugaaguaugc

SEQ ID NO: 87797 - RNA, 20 nt, Artificial Sequence
  Synthetic
aaacagucuuugaaguaugc

SEQ ID NO: 87798 - RNA, 21 nt, Artificial Sequence
  Synthetic
caaacagucuuugaaguaugc

SEQ ID NO: 87799 - RNA, 22 nt, Artificial Sequence
  Synthetic
acaaacagucuuugaaguaugc

SEQ ID NO: 87800 - RNA, 23 nt, Artificial Sequence
  Synthetic
aacaaacagucuuugaaguaugc

SEQ ID NO: 87801 - RNA, 24 nt, Artificial Sequence
  Synthetic
aaacaaacagucuuugaaguaugc

SEQ ID NO: 87802 - RNA, 18 nt, Artificial Sequence
  Synthetic
  misc_feature (5)..(5): n is a, c, g, or u
  misc_feature (13)..(13): n is a, c, g, or u
gcaanguuuguanuaugc

SEQ ID NO: 87803 - RNA, 19 nt, Artificial Sequence
  Synthetic
  misc_feature (6)..(6): n is a, c, g, or u
  misc_feature (14)..(14): n is a, c, g, or u
ggcaanguuuguanuaugc

SEQ ID NO: 87804 - RNA, 20 nt, Artificial Sequence
  Synthetic
  misc_feature (7)..(7): n is a, c, g, or u
  misc_feature (15)..(15): n is a, c, g, or u
uggcaanguuuguanuaugc

SEQ ID NO: 87805 - RNA, 21 nt, Artificial Sequence
  Synthetic
  misc_feature (8)..(8): n is a, c, g, or u
  misc_feature (16)..(16): n is a, c, g, or u
cuggcaanguuuguanuaugc

SEQ ID NO: 87806 - RNA, 22 nt, Artificial Sequence
  Synthetic
  misc_feature (9)..(9): n is a, c, g, or u
  misc_feature (17)..(17): n is a, c, g, or u
gcuggcaanguuuguanuaugc

SEQ ID NO: 87807 - RNA, 23 nt, Artificial Sequence
  Synthetic
  misc_feature (10)..(10): n is a, c, g, or u
  misc_feature (18)..(18): n is a, c, g, or u
ugcuggcaanguuuguanuaugc

SEQ ID NO: 87808 - RNA, 24 nt, Artificial Sequence
  Synthetic
  misc_feature (11)..(11): n is a, c, g, or u
  misc_feature (19)..(19): n is a, c, g, or u
uugcuggcaanguuuguanuaugc

SEQ ID NO: 87809 - RNA, 18 nt, Artificial Sequence
  Synthetic
uguuugcuccagaccugc

SEQ ID NO: 87810 - RNA, 19 nt, Artificial Sequence
  Synthetic
auguuugcuccagaccugc

SEQ ID NO: 87811 - RNA, 20 nt, Artificial Sequence
  Synthetic
aauguuugcuccagaccugc

SEQ ID NO: 87812 - RNA, 21 nt, Artificial Sequence
  Synthetic
  misc_feature (1)..(1): n is a, c, g, or u
naauguuugcuccagaccugc

SEQ ID NO: 87813 - RNA, 22 nt, Artificial Sequence
  Synthetic
  misc_feature (2)..(2): n is a, c, g, or u
anaauguuugcuccagaccugc

SEQ ID NO: 87814 - RNA, 23 nt, Artificial Sequence
  Synthetic
  misc_feature (3)..(3): n is a, c, g, or u
ganaauguuugcuccagaccugc

SEQ ID NO: 87815 - RNA, 24 nt, Artificial Sequence
  Synthetic
  misc_feature (4)..(4): n is a, c, g, or u
cganaauguuugcuccagaccugc

SEQ ID NO: 87816 - RNA, 18 nt, Artificial Sequence
  Synthetic
gagaaagugaaagccugc

SEQ ID NO: 87817 - RNA, 19 nt, Artificial Sequence
  Synthetic
cgagaaagugaaagccugc

SEQ ID NO: 87818 - RNA, 20 nt, Artificial Sequence
  Synthetic
gcgagaaagugaaagccugc

SEQ ID NO: 87819 - RNA, 21 nt, Artificial Sequence
  Synthetic
ggcgagaaagugaaagccugc

SEQ ID NO: 87820 - RNA, 22 nt, Artificial Sequence
  Synthetic
uggcgagaaagugaaagccugc

SEQ ID NO: 87821 - RNA, 23 nt, Artificial Sequence
  Synthetic
uuggcgagaaagugaaagccugc

SEQ ID NO: 87822 - RNA, 24 nt, Artificial Sequence
  Synthetic
guuggcgagaaagugaaagccugc

SEQ ID NO: 87823 - RNA, 18 nt, Artificial Sequence
  Synthetic
cccaaaaggccuccgugc

SEQ ID NO: 87824 - RNA, 19 nt, Artificial Sequence
  Synthetic
ccccaaaaggccuccgugc

SEQ ID NO: 87825 - RNA, 20 nt, Artificial Sequence
  Synthetic
accccaaaaggccuccgugc

SEQ ID NO: 87826 - RNA, 21 nt, Artificial Sequence
  Synthetic
caccccaaaaggccuccgugc

SEQ ID NO: 87827 - RNA, 22 nt, Artificial Sequence
  Synthetic
ccaccccaaaaggccuccgugc

SEQ ID NO: 87828 - RNA, 23 nt, Artificial Sequence
  Synthetic
uccaccccaaaaggccuccgugc

SEQ ID NO: 87829 - RNA, 24 nt, Artificial Sequence
  Synthetic
cuccaccccaaaaggccuccgugc

SEQ ID NO: 87830 - RNA, 18 nt, Artificial Sequence
  Synthetic
guugcauggugcuggugc

SEQ ID NO: 87831 - RNA, 19 nt, Artificial Sequence
  Synthetic
aguugcauggugcuggugc

SEQ ID NO: 87832 - RNA, 20 nt, Artificial Sequence
  Synthetic
aaguugcauggugcuggugc

SEQ ID NO: 87833 - RNA, 21 nt, Artificial Sequence
  Synthetic
aaaguugcauggugcuggugc

SEQ ID NO: 87834 - RNA, 22 nt, Artificial Sequence
  Synthetic
aaaaguugcauggugcuggugc

SEQ ID NO: 87835 - RNA, 23 nt, Artificial Sequence
  Synthetic
aaaaaguugcauggugcuggugc

SEQ ID NO: 87836 - RNA, 24 nt, Artificial Sequence
  Synthetic
gaaaaaguugcauggugcuggugc

SEQ ID NO: 87837 - RNA, 18 nt, Artificial Sequence
  Synthetic
  misc_feature (12)..(12): n is a, c, g, or u
ugaaaccacaanaguugc

SEQ ID NO: 87838 - RNA, 19 nt, Artificial Sequence
  Synthetic
  misc_feature (13)..(13): n is a, c, g, or u
gugaaaccacaanaguugc

SEQ ID NO: 87839 - RNA, 20 nt, Artificial Sequence
  Synthetic
  misc_feature (14)..(14): n is a, c, g, or u
ugugaaaccacaanaguugc

SEQ ID NO: 87840 - RNA, 21 nt, Artificial Sequence
  Synthetic
  misc_feature (15)..(15): n is a, c, g, or u
augugaaaccacaanaguugc

SEQ ID NO: 87841 - RNA, 22 nt, Artificial Sequence
  Synthetic
  misc_feature (16)..(16): n is a, c, g, or u
aaugugaaaccacaanaguugc

SEQ ID NO: 87842 - RNA, 23 nt, Artificial Sequence
  Synthetic
  misc_feature (17)..(17): n is a, c, g, or u
aaaugugaaaccacaanaguugc

SEQ ID NO: 87843 - RNA, 24 nt, Artificial Sequence
  Synthetic
  misc_feature (18)..(18): n is a, c, g, or u
gaaaugugaaaccacaanaguugc

SEQ ID NO: 87844 - RNA, 18 nt, Artificial Sequence
  Synthetic
ccagccaguggggguugc

SEQ ID NO: 87845 - RNA, 19 nt, Artificial Sequence
  Synthetic
cccagccaguggggguugc

SEQ ID NO: 87846 - RNA, 20 nt, Artificial Sequence
  Synthetic
ccccagccaguggggguugc

SEQ ID NO: 87847 - RNA, 21 nt, Artificial Sequence
  Synthetic
gccccagccaguggggguugc

SEQ ID NO: 87848 - RNA, 22 nt, Artificial Sequence
  Synthetic
agccccagccaguggggguugc

SEQ ID NO: 87849 - RNA, 23 nt, Artificial Sequence
  Synthetic
aagccccagccaguggggguugc

SEQ ID NO: 87850 - RNA, 24 nt, Artificial Sequence
  Synthetic
caagccccagccaguggggguugc

SEQ ID NO: 87851 - RNA, 18 nt, Artificial Sequence
  Synthetic
gaaacgauguauauuugc

SEQ ID NO: 87852 - RNA, 19 nt, Artificial Sequence
  Synthetic
ggaaacgauguauauuugc

SEQ ID NO: 87853 - RNA, 20 nt, Artificial Sequence
  Synthetic
uggaaacgauguauauuugc

SEQ ID NO: 87854 - RNA, 21 nt, Artificial Sequence
  Synthetic
auggaaacgauguauauuugc

SEQ ID NO: 87855 - RNA, 22 nt, Artificial Sequence
  Synthetic
cauggaaacgauguauauuugc

SEQ ID NO: 87856 - RNA, 23 nt, Artificial Sequence
  Synthetic
ccauggaaacgauguauauuugc

SEQ ID NO: 87857 - RNA, 24 nt, Artificial Sequence
  Synthetic
gccauggaaacgauguauauuugc

SEQ ID NO: 87858 - RNA, 18 nt, Artificial Sequence
  Synthetic
  misc_feature (1)..(1): n is a, c, g, or u
  misc_feature (9)..(9): n is a, c, g, or u
ngucccganaauguuugc

SEQ ID NO: 87859 - RNA, 19 nt, Artificial Sequence
  Synthetic
  misc_feature (2)..(2): n is a, c, g, or u
  misc_feature (10)..(10): n is a, c, g, or u
cngucccganaauguuugc

SEQ ID NO: 87860 - RNA, 20 nt, Artificial Sequence
  Synthetic
  misc_feature (3)..(3): n is a, c, g, or u
  misc_feature (11)..(11): n is a, c, g, or u
ucngucccganaauguuugc

SEQ ID NO: 87861 - RNA, 21 nt, Artificial Sequence
  Synthetic
  misc_feature (4)..(4): n is a, c, g, or u
  misc_feature (12)..(12): n is a, c, g, or u
aucngucccganaauguuugc

SEQ ID NO: 87862 - RNA, 22 nt, Artificial Sequence
  Synthetic
  misc_feature (5)..(5): n is a, c, g, or u
  misc_feature (13)..(13): n is a, c, g, or u
uaucngucccganaauguuugc

SEQ ID NO: 87863 - RNA, 23 nt, Artificial Sequence
  Synthetic
  misc_feature (6)..(6): n is a, c, g, or u
  misc_feature (14)..(14): n is a, c, g, or u
uuaucngucccganaauguuugc

SEQ ID NO: 87864 - RNA, 24 nt, Artificial Sequence
  Synthetic
  misc_feature (7)..(7): n is a, c, g, or u
  misc_feature (15)..(15): n is a, c, g, or u
guuaucngucccganaauguuugc

SEQ ID NO: 87865 - RNA, 18 nt, Artificial Sequence
  Synthetic
uggauuugcgguguuugc

SEQ ID NO: 87866 - RNA, 19 nt, Artificial Sequence
  Synthetic
cuggauuugcgguguuugc

SEQ ID NO: 87867 - RNA, 20 nt, Artificial Sequence
  Synthetic
ucuggauuugcgguguuugc

SEQ ID NO: 87868 - RNA, 21 nt, Artificial Sequence
  Synthetic
aucuggauuugcgguguuugc

SEQ ID NO: 87869 - RNA, 22 nt, Artificial Sequence
  Synthetic
aaucuggauuugcgguguuugc

SEQ ID NO: 87870 - RNA, 23 nt, Artificial Sequence
  Synthetic
caaucuggauuugcgguguuugc

SEQ ID NO: 87871 - RNA, 24 nt, Artificial Sequence
  Synthetic
ccaaucuggauuugcgguguuugc

SEQ ID NO: 87872 - RNA, 18 nt, Artificial Sequence
  Synthetic
  misc_feature (8)..(8): n is a, c, g, or u
  misc_feature (15)..(15): n is a, c, g, or u
  misc_feature (17)..(17): n is a, c, g, or u
ccuccuanuacaaananc

SEQ ID NO: 87873 - RNA, 19 nt, Artificial Sequence
  Synthetic
  misc_feature (9)..(9): n is a, c, g, or u
  misc_feature (16)..(16): n is a, c, g, or u
  misc_feature (18)..(18): n is a, c, g, or u
gccuccuanuacaaananc

SEQ ID NO: 87874 - RNA, 20 nt, Artificial Sequence
  Synthetic
  misc_feature (10)..(10): n is a, c, g, or u
  misc_feature (17)..(17): n is a, c, g, or u
  misc_feature (19)..(19): n is a, c, g, or u
agccuccuanuacaaananc

SEQ ID NO: 87875 - RNA, 21 nt, Artificial Sequence
  Synthetic
  misc_feature (11)..(11): n is a, c, g, or u
  misc_feature (18)..(18): n is a, c, g, or u
  misc_feature (20)..(20): n is a, c, g, or u
cagccuccuanuacaaananc

SEQ ID NO: 87876 - RNA, 22 nt, Artificial Sequence
  Synthetic
  misc_feature (12)..(12): n is a, c, g, or u
  misc_feature (19)..(19): n is a, c, g, or u
  misc_feature (21)..(21): n is a, c, g, or u
acagccuccuanuacaaananc

SEQ ID NO: 87877 - RNA, 23 nt, Artificial Sequence
  Synthetic
  misc_feature (13)..(13): n is a, c, g, or u
  misc_feature (20)..(20): n is a, c, g, or u
  misc_feature (22)..(22): n is a, c, g, or u
uacagccuccuanuacaaananc

SEQ ID NO: 87878 - RNA, 24 nt, Artificial Sequence
  Synthetic
  misc_feature (14)..(14): n is a, c, g, or u
  misc_feature (21)..(21): n is a, c, g, or u
  misc_feature (23)..(23): n is a, c, g, or u
cuacagccuccuanuacaaananc

SEQ ID NO: 87879 - RNA, 18 nt, Artificial Sequence
  Synthetic
  misc_feature (3)..(3): n is a, c, g, or u
  misc_feature (17)..(17): n is a, c, g, or u
ganagagucccaagcgnc

SEQ ID NO: 87880 - RNA, 19 nt, Artificial Sequence
  Synthetic
  misc_feature (4)..(4): n is a, c, g, or u
  misc_feature (18)..(18): n is a, c, g, or u
cganagagucccaagcgnc

SEQ ID NO: 87881 - RNA, 20 nt, Artificial Sequence
  Synthetic
  misc_feature (5)..(5): n is a, c, g, or u
  misc_feature (19)..(19): n is a, c, g, or u
acganagagucccaagcgnc

SEQ ID NO: 87882 - RNA, 21 nt, Artificial Sequence
  Synthetic
  misc_feature (6)..(6): n is a, c, g, or u
  misc_feature (20)..(20): n is a, c, g, or u
gacganagagucccaagcgnc

SEQ ID NO: 87883 - RNA, 22 nt, Artificial Sequence
  Synthetic
  misc_feature (7)..(7): n is a, c, g, or u
  misc_feature (21)..(21): n is a, c, g, or u
ggacganagagucccaagcgnc

SEQ ID NO: 87884 - RNA, 23 nt, Artificial Sequence
  Synthetic
  misc_feature (8)..(8): n is a, c, g, or u
  misc_feature (22)..(22): n is a, c, g, or u
gggacganagagucccaagcgnc

SEQ ID NO: 87885 - RNA, 24 nt, Artificial Sequence
  Synthetic
  misc_feature (9)..(9): n is a, c, g, or u
  misc_feature (23)..(23): n is a, c, g, or u
ggggacganagagucccaagcgnc

SEQ ID NO: 87886 - RNA, 18 nt, Artificial Sequence
  Synthetic
  misc_feature (4)..(4): n is a, c, g, or u
  misc_feature (17)..(17): n is a, c, g, or u
aggnucaauguccaugnc

SEQ ID NO: 87887 - RNA, 19 nt, Artificial Sequence
  Synthetic
  misc_feature (5)..(5): n is a, c, g, or u
  misc_feature (18)..(18): n is a, c, g, or u
aaggnucaauguccaugnc

SEQ ID NO: 87888 - RNA, 20 nt, Artificial Sequence
  Synthetic
  misc_feature (6)..(6): n is a, c, g, or u
  misc_feature (19)..(19): n is a, c, g, or u
uaaggnucaauguccaugnc

SEQ ID NO: 87889 - RNA, 21 nt, Artificial Sequence
  Synthetic
  misc_feature (7)..(7): n is a, c, g, or u
  misc_feature (20)..(20): n is a, c, g, or u
auaaggnucaauguccaugnc

SEQ ID NO: 87890 - RNA, 22 nt, Artificial Sequence
  Synthetic
  misc_feature (8)..(8): n is a, c, g, or u
  misc_feature (21)..(21): n is a, c, g, or u
uauaaggnucaauguccaugnc

SEQ ID NO: 87891 - RNA, 23 nt, Artificial Sequence
  Synthetic
  misc_feature (9)..(9): n is a, c, g, or u
  misc_feature (22)..(22): n is a, c, g, or u
uuauaaggnucaauguccaugnc

SEQ ID NO: 87892 - RNA, 24 nt, Artificial Sequence
  Synthetic
  misc_feature (10)..(10): n is a, c, g, or u
  misc_feature (23)..(23): n is a, c, g, or u
uuuauaaggnucaauguccaugnc

SEQ ID NO: 87893 - RNA, 18 nt, Artificial Sequence
  Synthetic
  misc_feature (17)..(17): n is a, c, g, or u
ccaaaagacccacaaunc

SEQ ID NO: 87894 - RNA, 19 nt, Artificial Sequence
  Synthetic
  misc_feature (18)..(18): n is a, c, g, or u
cccaaaagacccacaaunc

SEQ ID NO: 87895 - RNA, 20 nt, Artificial Sequence
  Synthetic
  misc_feature (19)..(19): n is a, c, g, or u
acccaaaagacccacaaunc

SEQ ID NO: 87896 - RNA, 21 nt, Artificial Sequence
  Synthetic
  misc_feature (20)..(20): n is a, c, g, or u
aacccaaaagacccacaaunc

SEQ ID NO: 87897 - RNA, 22 nt, Artificial Sequence
  Synthetic
  misc_feature (21)..(21): n is a, c, g, or u
aaacccaaaagacccacaaunc

SEQ ID NO: 87898 - RNA, 23 nt, Artificial Sequence
  Synthetic
  misc_feature (22)..(22): n is a, c, g, or u
aaaacccaaaagacccacaaunc

SEQ ID NO: 87899 - RNA, 24 nt, Artificial Sequence
  Synthetic
  misc_feature (23)..(23): n is a, c, g, or u
caaaacccaaaagacccacaaunc

SEQ ID NO: 87900 - RNA, 18 nt, Artificial Sequence
  Synthetic
  misc_feature (17)..(17): n is a, c, g, or u
gucggucguugacauunc

SEQ ID NO: 87901 - RNA, 19 nt, Artificial Sequence
  Synthetic
  misc_feature (18)..(18): n is a, c, g, or u
ggucggucguugacauunc

SEQ ID NO: 87902 - RNA, 20 nt, Artificial Sequence
  Synthetic
  misc_feature (19)..(19): n is a, c, g, or u
aggucggucguugacauunc

SEQ ID NO: 87903 - RNA, 21 nt, Artificial Sequence
  Synthetic
  misc_feature (20)..(20): n is a, c, g, or u
aaggucggucguugacauunc

SEQ ID NO: 87904 - RNA, 22 nt, Artificial Sequence
  Synthetic
  misc_feature (21)..(21): n is a, c, g, or u
caaggucggucguugacauunc

SEQ ID NO: 87905 - RNA, 23 nt, Artificial Sequence
  Synthetic
  misc_feature (22)..(22): n is a, c, g, or u
ucaaggucggucguugacauunc

SEQ ID NO: 87906 - RNA, 24 nt, Artificial Sequence
  Synthetic
  misc_feature (23)..(23): n is a, c, g, or u
cucaaggucggucguugacauunc

SEQ ID NO: 87907 - RNA, 18 nt, Artificial Sequence
  Synthetic
agcgcaggguccccaauc

SEQ ID NO: 87908 - RNA, 19 nt, Artificial Sequence
  Synthetic
cagcgcaggguccccaauc

SEQ ID NO: 87909 - RNA, 20 nt, Artificial Sequence
  Synthetic
ucagcgcaggguccccaauc

SEQ ID NO: 87910 - RNA, 21 nt, Artificial Sequence
  Synthetic
uucagcgcaggguccccaauc

SEQ ID NO: 87911 - RNA, 22 nt, Artificial Sequence
  Synthetic
guucagcgcaggguccccaauc

SEQ ID NO: 87912 - RNA, 23 nt, Artificial Sequence
  Synthetic
uguucagcgcaggguccccaauc

SEQ ID NO: 87913 - RNA, 24 nt, Artificial Sequence
  Synthetic
auguucagcgcaggguccccaauc

SEQ ID NO: 87914 - RNA, 18 nt, Artificial Sequence
  Synthetic
  misc_feature (7)..(7): n is a, c, g, or u
uugacanacuuuccaauc

SEQ ID NO: 87915 - RNA, 19 nt, Artificial Sequence
  Synthetic
  misc_feature (8)..(8): n is a, c, g, or u
guugacanacuuuccaauc

SEQ ID NO: 87916 - RNA, 20 nt, Artificial Sequence
  Synthetic
  misc_feature (9)..(9): n is a, c, g, or u
cguugacanacuuuccaauc

SEQ ID NO: 87917 - RNA, 21 nt, Artificial Sequence
  Synthetic
  misc_feature (1)..(1): n is a, c, g, or u
  misc_feature (10)..(10): n is a, c, g, or u
ncguugacanacuuuccaauc

SEQ ID NO: 87918 - RNA, 22 nt, Artificial Sequence
  Synthetic
  misc_feature (2)..(2): n is a, c, g, or u
  misc_feature (11)..(11): n is a, c, g, or u
uncguugacanacuuuccaauc

SEQ ID NO: 87919 - RNA, 23 nt, Artificial Sequence
  Synthetic
  misc_feature (3)..(3): n is a, c, g, or u
  misc_feature (12)..(12): n is a, c, g, or u
auncguugacanacuuuccaauc

SEQ ID NO: 87920 - RNA, 24 nt, Artificial Sequence
  Synthetic
  misc_feature (4)..(4): n is a, c, g, or u
  misc_feature (13)..(13): n is a, c, g, or u
aauncguugacanacuuuccaauc

SEQ ID NO: 87921 - RNA, 18 nt, Artificial Sequence
  Synthetic
gguggucgggaaagaauc

SEQ ID NO: 87922 - RNA, 19 nt, Artificial Sequence
  Synthetic
ugguggucgggaaagaauc

SEQ ID NO: 87923 - RNA, 20 nt, Artificial Sequence
  Synthetic
cugguggucgggaaagaauc

SEQ ID NO: 87924 - RNA, 21 nt, Artificial Sequence
  Synthetic
acugguggucgggaaagaauc

SEQ ID NO: 87925 - RNA, 22 nt, Artificial Sequence
  Synthetic
aacugguggucgggaaagaauc

SEQ ID NO: 87926 - RNA, 23 nt, Artificial Sequence
  Synthetic
caacugguggucgggaaagaauc

SEQ ID NO: 87927 - RNA, 24 nt, Artificial Sequence
  Synthetic
ccaacugguggucgggaaagaauc

SEQ ID NO: 87928 - RNA, 18 nt, Artificial Sequence
  Synthetic
aguuccgcaguauggauc

SEQ ID NO: 87929 - RNA, 19 nt, Artificial Sequence
  Synthetic
gaguuccgcaguauggauc

SEQ ID NO: 87930 - RNA, 20 nt, Artificial Sequence
  Synthetic
ggaguuccgcaguauggauc

SEQ ID NO: 87931 - RNA, 21 nt, Artificial Sequence
  Synthetic
aggaguuccgcaguauggauc

SEQ ID NO: 87932 - RNA, 22 nt, Artificial Sequence
  Synthetic
uaggaguuccgcaguauggauc

SEQ ID NO: 87933 - RNA, 23 nt, Artificial Sequence
  Synthetic
cuaggaguuccgcaguauggauc

SEQ ID NO: 87934 - RNA, 24 nt, Artificial Sequence
  Synthetic
gcuaggaguuccgcaguauggauc

SEQ ID NO: 87935 - RNA, 18 nt, Artificial Sequence
  Synthetic
  misc_feature (1)..(1): n is a, c, g, or u
  misc_feature (8)..(8): n is a, c, g, or u
  misc_feature (14)..(14): n is a, c, g, or u
ngcuggunguugangauc

SEQ ID NO: 87936 - RNA, 19 nt, Artificial Sequence
  Synthetic
  misc_feature (1)..(2): n is a, c, g, or u
  misc_feature (9)..(9): n is a, c, g, or u
  misc_feature (15)..(15): n is a, c, g, or u
nngcuggunguugangauc

SEQ ID NO: 87937 - RNA, 20 nt, Artificial Sequence
  Synthetic
  misc_feature (2)..(3): n is a, c, g, or u
  misc_feature (10)..(10): n is a, c, g, or u
  misc_feature (16)..(16): n is a, c, g, or u
cnngcuggunguugangauc

SEQ ID NO: 87938 - RNA, 21 nt, Artificial Sequence
  Synthetic
  misc_feature (3)..(4): n is a, c, g, or u
  misc_feature (11)..(11): n is a, c, g, or u
  misc_feature (17)..(17): n is a, c, g, or u
ccnngcuggunguugangauc

SEQ ID NO: 87939 - RNA, 22 nt, Artificial Sequence
  Synthetic
  misc_feature (4)..(5): n is a, c, g, or u
  misc_feature (12)..(12): n is a, c, g, or u
  misc_feature (18)..(18): n is a, c, g, or u
cccnngcuggunguugangauc

SEQ ID NO: 87940 - RNA, 23 nt, Artificial Sequence
  Synthetic
  misc_feature (5)..(6): n is a, c, g, or u
  misc_feature (13)..(13): n is a, c, g, or u
  misc_feature (19)..(19): n is a, c, g, or u
ucccnngcuggunguugangauc

SEQ ID NO: 87941 - RNA, 24 nt, Artificial Sequence
  Synthetic
  misc_feature (6)..(7): n is a, c, g, or u
  misc_feature (14)..(14): n is a, c, g, or u
  misc_feature (20)..(20): n is a, c, g, or u
gucccnngcuggunguugangauc

SEQ ID NO: 87942 - RNA, 18 nt, Artificial Sequence
  Synthetic
  misc_feature (1)..(1): n is a, c, g, or u
nagagcugaggcgguauc

SEQ ID NO: 87943 - RNA, 19 nt, Artificial Sequence
  Synthetic
  misc_feature (2)..(2): n is a, c, g, or u
anagagcugaggcgguauc

SEQ ID NO: 87944 - RNA, 20 nt, Artificial Sequence
  Synthetic
  misc_feature (3)..(3): n is a, c, g, or u
uanagagcugaggcgguauc

SEQ ID NO: 87945 - RNA, 21 nt, Artificial Sequence
  Synthetic
  misc_feature (4)..(4): n is a, c, g, or u
auanagagcugaggcgguauc

SEQ ID NO: 87946 - RNA, 22 nt, Artificial Sequence
  Synthetic
  misc_feature (5)..(5): n is a, c, g, or u
gauanagagcugaggcgguauc

SEQ ID NO: 87947 - RNA, 23 nt, Artificial Sequence
  Synthetic
  misc_feature (6)..(6): n is a, c, g, or u
cgauanagagcugaggcgguauc

SEQ ID NO: 87948 - RNA, 24 nt, Artificial Sequence
  Synthetic
  misc_feature (7)..(7): n is a, c, g, or u
ccgauanagagcugaggcgguauc

SEQ ID NO: 87949 - RNA, 18 nt, Artificial Sequence
  Synthetic
caaaaacgagaguaacuc

SEQ ID NO: 87950 - RNA, 19 nt, Artificial Sequence
  Synthetic
gcaaaaacgagaguaacuc

SEQ ID NO: 87951 - RNA, 20 nt, Artificial Sequence
  Synthetic
ggcaaaaacgagaguaacuc

SEQ ID NO: 87952 - RNA, 21 nt, Artificial Sequence
  Synthetic
aggcaaaaacgagaguaacuc

SEQ ID NO: 87953 - RNA, 22 nt, Artificial Sequence
  Synthetic
aaggcaaaaacgagaguaacuc

SEQ ID NO: 87954 - RNA, 23 nt, Artificial Sequence
  Synthetic
gaaggcaaaaacgagaguaacuc

SEQ ID NO: 87955 - RNA, 24 nt, Artificial Sequence
  Synthetic
agaaggcaaaaacgagaguaacuc

SEQ ID NO: 87956 - RNA, 18 nt, Artificial Sequence
  Synthetic
gagugcgaauccacacuc

SEQ ID NO: 87957 - RNA, 19 nt, Artificial Sequence
  Synthetic
ggagugcgaauccacacuc

SEQ ID NO: 87958 - RNA, 20 nt, Artificial Sequence
  Synthetic
aggagugcgaauccacacuc

SEQ ID NO: 87959 - RNA, 21 nt, Artificial Sequence
  Synthetic
gaggagugcgaauccacacuc

SEQ ID NO: 87960 - RNA, 22 nt, Artificial Sequence
  Synthetic
ggaggagugcgaauccacacuc

SEQ ID NO: 87961 - RNA, 23 nt, Artificial Sequence
  Synthetic
uggaggagugcgaauccacacuc

SEQ ID NO: 87962 - RNA, 24 nt, Artificial Sequence
  Synthetic
cuggaggagugcgaauccacacuc

SEQ ID NO: 87963 - RNA, 18 nt, Artificial Sequence
  Synthetic
  misc_feature (1)..(1): n is a, c, g, or u
ncaaugcucaggagacuc

SEQ ID NO: 87964 - RNA, 19 nt, Artificial Sequence
  Synthetic
  misc_feature (2)..(2): n is a, c, g, or u
ancaaugcucaggagacuc

SEQ ID NO: 87965 - RNA, 20 nt, Artificial Sequence
  Synthetic
  misc_feature (3)..(3): n is a, c, g, or u
gancaaugcucaggagacuc

SEQ ID NO: 87966 - RNA, 21 nt, Artificial Sequence
  Synthetic
  misc_feature (4)..(4): n is a, c, g, or u
ugancaaugcucaggagacuc

SEQ ID NO: 87967 - RNA, 22 nt, Artificial Sequence
  Synthetic
  misc_feature (5)..(5): n is a, c, g, or u
gugancaaugcucaggagacuc

SEQ ID NO: 87968 - RNA, 23 nt, Artificial Sequence
  Synthetic
  misc_feature (6)..(6): n is a, c, g, or u
ggugancaaugcucaggagacuc

SEQ ID NO: 87969 - RNA, 24 nt, Artificial Sequence
  Synthetic
  misc_feature (7)..(7): n is a, c, g, or u
aggugancaaugcucaggagacuc

SEQ ID NO: 87970 - RNA, 18 nt, Artificial Sequence
  Synthetic
gcaggguccccaauccuc

SEQ ID NO: 87971 - RNA, 19 nt, Artificial Sequence
  Synthetic
cgcaggguccccaauccuc

SEQ ID NO: 87972 - RNA, 20 nt, Artificial Sequence
  Synthetic
gcgcaggguccccaauccuc

SEQ ID NO: 87973 - RNA, 21 nt, Artificial Sequence
  Synthetic
agcgcaggguccccaauccuc

SEQ ID NO: 87974 - RNA, 22 nt, Artificial Sequence
  Synthetic
cagcgcaggguccccaauccuc

SEQ ID NO: 87975 - RNA, 23 nt, Artificial Sequence
  Synthetic
ucagcgcaggguccccaauccuc

SEQ ID NO: 87976 - RNA, 24 nt, Artificial Sequence
  Synthetic
uucagcgcaggguccccaauccuc

SEQ ID NO: 87977 - RNA, 18 nt, Artificial Sequence
  Synthetic
  misc_feature (1)..(1): n is a, c, g, or u
  misc_feature (10)..(10): n is a, c, g, or u
nugaggugancaaugcuc

SEQ ID NO: 87978 - RNA, 19 nt, Artificial Sequence
  Synthetic
  misc_feature (2)..(2): n is a, c, g, or u
  misc_feature (11)..(11): n is a, c, g, or u
gnugaggugancaaugcuc

SEQ ID NO: 87979 - RNA, 20 nt, Artificial Sequence
  Synthetic
  misc_feature (3)..(3): n is a, c, g, or u
  misc_feature (12)..(12): n is a, c, g, or u
ugnugaggugancaaugcuc

SEQ ID NO: 87980 - RNA, 21 nt, Artificial Sequence
  Synthetic
  misc_feature (4)..(4): n is a, c, g, or u
  misc_feature (13)..(13): n is a, c, g, or u
augnugaggugancaaugcuc

SEQ ID NO: 87981 - RNA, 22 nt, Artificial Sequence
  Synthetic
  misc_feature (5)..(5): n is a, c, g, or u
  misc_feature (14)..(14): n is a, c, g, or u
uaugnugaggugancaaugcuc

SEQ ID NO: 87982 - RNA, 23 nt, Artificial Sequence
  Synthetic
  misc_feature (6)..(6): n is a, c, g, or u
  misc_feature (15)..(15): n is a, c, g, or u
guaugnugaggugancaaugcuc

SEQ ID NO: 87983 - RNA, 24 nt, Artificial Sequence
  Synthetic
  misc_feature (7)..(7): n is a, c, g, or u
  misc_feature (16)..(16): n is a, c, g, or u
aguaugnugaggugancaaugcuc

SEQ ID NO: 87984 - RNA, 18 nt, Artificial Sequence
  Synthetic
gauuugcgguguuugcuc

SEQ ID NO: 87985 - RNA, 19 nt, Artificial Sequence
  Synthetic
ggauuugcgguguuugcuc

SEQ ID NO: 87986 - RNA, 20 nt, Artificial Sequence
  Synthetic
uggauuugcgguguuugcuc

SEQ ID NO: 87987 - RNA, 21 nt, Artificial Sequence
  Synthetic
cuggauuugcgguguuugcuc

SEQ ID NO: 87988 - RNA, 22 nt, Artificial Sequence
  Synthetic
ucuggauuugcgguguuugcuc

SEQ ID NO: 87989 - RNA, 23 nt, Artificial Sequence
  Synthetic
aucuggauuugcgguguuugcuc

SEQ ID NO: 87990 - RNA, 24 nt, Artificial Sequence
  Synthetic
aaucuggauuugcgguguuugcuc

SEQ ID NO: 87991 - RNA, 18 nt, Artificial Sequence
  Synthetic
ucuaacaacaguagucuc

SEQ ID NO: 87992 - RNA, 19 nt, Artificial Sequence
  Synthetic
gucuaacaacaguagucuc

SEQ ID NO: 87993 - RNA, 20 nt, Artificial Sequence
  Synthetic
cgucuaacaacaguagucuc

SEQ ID NO: 87994 - RNA, 21 nt, Artificial Sequence
  Synthetic
ucgucuaacaacaguagucuc

SEQ ID NO: 87995 - RNA, 22 nt, Artificial Sequence
  Synthetic
gucgucuaacaacaguagucuc

SEQ ID NO: 87996 - RNA, 23 nt, Artificial Sequence
  Synthetic
cgucgucuaacaacaguagucuc

SEQ ID NO: 87997 - RNA, 24 nt, Artificial Sequence
  Synthetic
ucgucgucuaacaacaguagucuc

SEQ ID NO: 87998 - RNA, 18 nt, Artificial Sequence
  Synthetic
  misc_feature (4)..(4): n is a, c, g, or u
uacngaaggaaagaaguc

SEQ ID NO: 87999 - RNA, 19 nt, Artificial Sequence
  Synthetic
  misc_feature (5)..(5): n is a, c, g, or u
guacngaaggaaagaaguc

SEQ ID NO: 88000 - RNA, 20 nt, Artificial Sequence
  Synthetic
  misc_feature (6)..(6): n is a, c, g, or u
cguacngaaggaaagaaguc

SEQ ID NO: 88001 - RNA, 21 nt, Artificial Sequence
  Synthetic
  misc_feature (7)..(7): n is a, c, g, or u
ucguacngaaggaaagaaguc

SEQ ID NO: 88002 - RNA, 22 nt, Artificial Sequence
  Synthetic
  misc_feature (8)..(8): n is a, c, g, or u
cucguacngaaggaaagaaguc

SEQ ID NO: 88003 - RNA, 23 nt, Artificial Sequence
  Synthetic
  misc_feature (9)..(9): n is a, c, g, or u
ucucguacngaaggaaagaaguc

SEQ ID NO: 88004 - RNA, 24 nt, Artificial Sequence
  Synthetic
  misc_feature (10)..(10): n is a, c, g, or u
aucucguacngaaggaaagaaguc

SEQ ID NO: 88005 - RNA, 18 nt, Artificial Sequence
  Synthetic
  misc_feature (4)..(4): n is a, c, g, or u
gucnuuaaacaaacaguc

SEQ ID NO: 88006 - RNA, 19 nt, Artificial Sequence
  Synthetic
  misc_feature (5)..(5): n is a, c, g, or u
agucnuuaaacaaacaguc

SEQ ID NO: 88007 - RNA, 20 nt, Artificial Sequence
  Synthetic
  misc_feature (6)..(6): n is a, c, g, or u
cagucnuuaaacaaacaguc

SEQ ID NO: 88008 - RNA, 21 nt, Artificial Sequence
  Synthetic
  misc_feature (7)..(7): n is a, c, g, or u
ccagucnuuaaacaaacaguc

SEQ ID NO: 88009 - RNA, 22 nt, Artificial Sequence
  Synthetic
  misc_feature (8)..(8): n is a, c, g, or u
cccagucnuuaaacaaacaguc

SEQ ID NO: 88010 - RNA, 23 nt, Artificial Sequence
  Synthetic
  misc_feature (9)..(9): n is a, c, g, or u
ucccagucnuuaaacaaacaguc

SEQ ID NO: 88011 - RNA, 24 nt, Artificial Sequence
  Synthetic
  misc_feature (10)..(10): n is a, c, g, or u
cucccagucnuuaaacaaacaguc

SEQ ID NO: 88012 - RNA, 18 nt, Artificial Sequence
  Synthetic
ccccaacuccucccaguc

SEQ ID NO: 88013 - RNA, 19 nt, Artificial Sequence
  Synthetic
cccccaacuccucccaguc

SEQ ID NO: 88014 - RNA, 20 nt, Artificial Sequence
  Synthetic
ucccccaacuccucccaguc

SEQ ID NO: 88015 - RNA, 21 nt, Artificial Sequence
  Synthetic
cucccccaacuccucccaguc

SEQ ID NO: 88016 - RNA, 22 nt, Artificial Sequence
  Synthetic
ccucccccaacuccucccaguc

SEQ ID NO: 88017 - RNA, 23 nt, Artificial Sequence
  Synthetic
uccucccccaacuccucccaguc

SEQ ID NO: 88018 - RNA, 24 nt, Artificial Sequence
  Synthetic
cuccucccccaacuccucccaguc

SEQ ID NO: 88019 - RNA, 18 nt, Artificial Sequence
  Synthetic
  misc_feature (9)..(9): n is a, c, g, or u
uugacauuncagagaguc

SEQ ID NO: 88020 - RNA, 19 nt, Artificial Sequence
  Synthetic
  misc_feature (10)..(10): n is a, c, g, or u
guugacauuncagagaguc

SEQ ID NO: 88021 - RNA, 20 nt, Artificial Sequence
  Synthetic
  misc_feature (11)..(11): n is a, c, g, or u
cguugacauuncagagaguc

SEQ ID NO: 88022 - RNA, 21 nt, Artificial Sequence
  Synthetic
  misc_feature (12)..(12): n is a, c, g, or u
ucguugacauuncagagaguc

SEQ ID NO: 88023 - RNA, 22 nt, Artificial Sequence
  Synthetic
  misc_feature (13)..(13): n is a, c, g, or u
gucguugacauuncagagaguc

SEQ ID NO: 88024 - RNA, 23 nt, Artificial Sequence
  Synthetic
  misc_feature (14)..(14): n is a, c, g, or u
ggucguugacauuncagagaguc

SEQ ID NO: 88025 - RNA, 24 nt, Artificial Sequence
  Synthetic
  misc_feature (15)..(15): n is a, c, g, or u
cggucguugacauuncagagaguc

SEQ ID NO: 88026 - RNA, 18 nt, Artificial Sequence
  Synthetic
  misc_feature (12)..(12): n is a, c, g, or u
gaaggggacganagaguc

SEQ ID NO: 88027 - RNA, 19 nt, Artificial Sequence
  Synthetic
  misc_feature (13)..(13): n is a, c, g, or u
agaaggggacganagaguc

SEQ ID NO: 88028 - RNA, 20 nt, Artificial Sequence
  Synthetic
  misc_feature (14)..(14): n is a, c, g, or u
gagaaggggacganagaguc

SEQ ID NO: 88029 - RNA, 21 nt, Artificial Sequence
  Synthetic
  misc_feature (15)..(15): n is a, c, g, or u
ggagaaggggacganagaguc

SEQ ID NO: 88030 - RNA, 22 nt, Artificial Sequence
  Synthetic
  misc_feature (16)..(16): n is a, c, g, or u
cggagaaggggacganagaguc

SEQ ID NO: 88031 - RNA, 23 nt, Artificial Sequence
  Synthetic
  misc_feature (17)..(17): n is a, c, g, or u
acggagaaggggacganagaguc

SEQ ID NO: 88032 - RNA, 24 nt, Artificial Sequence
  Synthetic
  misc_feature (18)..(18): n is a, c, g, or u
gacggagaaggggacganagaguc

SEQ ID NO: 88033 - RNA, 18 nt, Artificial Sequence
  Synthetic
  misc_feature (9)..(9): n is a, c, g, or u
acccaggungcuagaguc

SEQ ID NO: 88034 - RNA, 19 nt, Artificial Sequence
  Synthetic
  misc_feature (10)..(10): n is a, c, g, or u
cacccaggungcuagaguc

SEQ ID NO: 88035 - RNA, 20 nt, Artificial Sequence
  Synthetic
  misc_feature (11)..(11): n is a, c, g, or u
ccacccaggungcuagaguc

SEQ ID NO: 88036 - RNA, 21 nt, Artificial Sequence
  Synthetic
  misc_feature (12)..(12): n is a, c, g, or u
cccacccaggungcuagaguc

SEQ ID NO: 88037 - RNA, 22 nt, Artificial Sequence
  Synthetic
  misc_feature (13)..(13): n is a, c, g, or u
acccacccaggungcuagaguc

SEQ ID NO: 88038 - RNA, 23 nt, Artificial Sequence
  Synthetic
  misc_feature (14)..(14): n is a, c, g, or u
cacccacccaggungcuagaguc

SEQ ID NO: 88039 - RNA, 24 nt, Artificial Sequence
  Synthetic
  misc_feature (1)..(1): n is a, c, g, or u
  misc_feature (15)..(15): n is a, c, g, or u
ncacccacccaggungcuagaguc

SEQ ID NO: 88040 - RNA, 18 nt, Artificial Sequence
  Synthetic
  misc_feature (3)..(3): n is a, c, g, or u
uuncccaccuuaugaguc

SEQ ID NO: 88041 - RNA, 19 nt, Artificial Sequence
  Synthetic
  misc_feature (4)..(4): n is a, c, g, or u
guuncccaccuuaugaguc

SEQ ID NO: 88042 - RNA, 20 nt, Artificial Sequence
  Synthetic
  misc_feature (5)..(5): n is a, c, g, or u
aguuncccaccuuaugaguc

SEQ ID NO: 88043 - RNA, 21 nt, Artificial Sequence
  Synthetic
  misc_feature (6)..(6): n is a, c, g, or u
aaguuncccaccuuaugaguc

SEQ ID NO: 88044 - RNA, 22 nt, Artificial Sequence
  Synthetic
  misc_feature (7)..(7): n is a, c, g, or u
aaaguuncccaccuuaugaguc

SEQ ID NO: 88045 - RNA, 23 nt, Artificial Sequence
  Synthetic
  misc_feature (8)..(8): n is a, c, g, or u
uaaaguuncccaccuuaugaguc

SEQ ID NO: 88046 - RNA, 24 nt, Artificial Sequence
  Synthetic
  misc_feature (9)..(9): n is a, c, g, or u
guaaaguuncccaccuuaugaguc

SEQ ID NO: 88047 - RNA, 18 nt, Artificial Sequence
  Synthetic
caacauaccuugauaguc

SEQ ID NO: 88048 - RNA, 19 nt, Artificial Sequence
  Synthetic
gcaacauaccuugauaguc

SEQ ID NO: 88049 - RNA, 20 nt, Artificial Sequence
  Synthetic
ggcaacauaccuugauaguc

SEQ ID NO: 88050 - RNA, 21 nt, Artificial Sequence
  Synthetic
gggcaacauaccuugauaguc

SEQ ID NO: 88051 - RNA, 22 nt, Artificial Sequence
  Synthetic
cgggcaacauaccuugauaguc

SEQ ID NO: 88052 - RNA, 23 nt, Artificial Sequence
  Synthetic
acgggcaacauaccuugauaguc

SEQ ID NO: 88053 - RNA, 24 nt, Artificial Sequence
  Synthetic
aacgggcaacauaccuugauaguc

SEQ ID NO: 88054 - RNA, 18 nt, Artificial Sequence
  Synthetic
cgucuaacaacaguaguc

SEQ ID NO: 88055 - RNA, 19 nt, Artificial Sequence
  Synthetic
ucgucuaacaacaguaguc

SEQ ID NO: 88056 - RNA, 20 nt, Artificial Sequence
  Synthetic
gucgucuaacaacaguaguc

SEQ ID NO: 88057 - RNA, 21 nt, Artificial Sequence
  Synthetic
cgucgucuaacaacaguaguc

SEQ ID NO: 88058 - RNA, 22 nt, Artificial Sequence
  Synthetic
ucgucgucuaacaacaguaguc

SEQ ID NO: 88059 - RNA, 23 nt, Artificial Sequence
  Synthetic
cucgucgucuaacaacaguaguc

SEQ ID NO: 88060 - RNA, 24 nt, Artificial Sequence
  Synthetic
ccucgucgucuaacaacaguaguc

SEQ ID NO: 88061 - RNA, 18 nt, Artificial Sequence
  Synthetic
acaggugcaauuuccguc

SEQ ID NO: 88062 - RNA, 19 nt, Artificial Sequence
  Synthetic
uacaggugcaauuuccguc

SEQ ID NO: 88063 - RNA, 20 nt, Artificial Sequence
  Synthetic
auacaggugcaauuuccguc

SEQ ID NO: 88064 - RNA, 21 nt, Artificial Sequence
  Synthetic
aauacaggugcaauuuccguc

SEQ ID NO: 88065 - RNA, 22 nt, Artificial Sequence
  Synthetic
gaauacaggugcaauuuccguc

SEQ ID NO: 88066 - RNA, 23 nt, Artificial Sequence
  Synthetic
ggaauacaggugcaauuuccguc

SEQ ID NO: 88067 - RNA, 24 nt, Artificial Sequence
  Synthetic
gggaauacaggugcaauuuccguc

SEQ ID NO: 88068 - RNA, 18 nt, Artificial Sequence
  Synthetic
gccaguggggguugcguc

SEQ ID NO: 88069 - RNA, 19 nt, Artificial Sequence
  Synthetic
agccaguggggguugcguc

SEQ ID NO: 88070 - RNA, 20 nt, Artificial Sequence
  Synthetic
cagccaguggggguugcguc

SEQ ID NO: 88071 - RNA, 21 nt, Artificial Sequence
  Synthetic
ccagccaguggggguugcguc

SEQ ID NO: 88072 - RNA, 22 nt, Artificial Sequence
  Synthetic
cccagccaguggggguugcguc

SEQ ID NO: 88073 - RNA, 23 nt, Artificial Sequence
  Synthetic
ccccagccaguggggguugcguc

SEQ ID NO: 88074 - RNA, 24 nt, Artificial Sequence
  Synthetic
gccccagccaguggggguugcguc

SEQ ID NO: 88075 - RNA, 18 nt, Artificial Sequence
  Synthetic
  misc_feature (1)..(1): n is a, c, g, or u
nccccgagaagggucguc

SEQ ID NO: 88076 - RNA, 19 nt, Artificial Sequence
  Synthetic
  misc_feature (2)..(2): n is a, c, g, or u
gnccccgagaagggucguc

SEQ ID NO: 88077 - RNA, 20 nt, Artificial Sequence
  Synthetic
  misc_feature (3)..(3): n is a, c, g, or u
cgnccccgagaagggucguc

SEQ ID NO: 88078 - RNA, 21 nt, Artificial Sequence
  Synthetic
  misc_feature (4)..(4): n is a, c, g, or u
gcgnccccgagaagggucguc

SEQ ID NO: 88079 - RNA, 22 nt, Artificial Sequence
  Synthetic
  misc_feature (5)..(5): n is a, c, g, or u
agcgnccccgagaagggucguc

SEQ ID NO: 88080 - RNA, 23 nt, Artificial Sequence
  Synthetic
  misc_feature (6)..(6): n is a, c, g, or u
aagcgnccccgagaagggucguc

SEQ ID NO: 88081 - RNA, 24 nt, Artificial Sequence
  Synthetic
  misc_feature (7)..(7): n is a, c, g, or u
caagcgnccccgagaagggucguc

SEQ ID NO: 88082 - RNA, 18 nt, Artificial Sequence
  Synthetic
gcgauugagaccuucguc

SEQ ID NO: 88083 - RNA, 19 nt, Artificial Sequence
  Synthetic
ggcgauugagaccuucguc

SEQ ID NO: 88084 - RNA, 20 nt, Artificial Sequence
  Synthetic
cggcgauugagaccuucguc

SEQ ID NO: 88085 - RNA, 21 nt, Artificial Sequence
  Synthetic
gcggcgauugagaccuucguc

SEQ ID NO: 88086 - RNA, 22 nt, Artificial Sequence
  Synthetic
cgcggcgauugagaccuucguc

SEQ ID NO: 88087 - RNA, 23 nt, Artificial Sequence
  Synthetic
acgcggcgauugagaccuucguc

SEQ ID NO: 88088 - RNA, 24 nt, Artificial Sequence
  Synthetic
gacgcggcgauugagaccuucguc

SEQ ID NO: 88089 - RNA, 18 nt, Artificial Sequence
  Synthetic
uaugccucaaggucgguc

SEQ ID NO: 88090 - RNA, 19 nt, Artificial Sequence
  Synthetic
guaugccucaaggucgguc

SEQ ID NO: 88091 - RNA, 20 nt, Artificial Sequence
  Synthetic
aguaugccucaaggucgguc

SEQ ID NO: 88092 - RNA, 21 nt, Artificial Sequence
  Synthetic
aaguaugccucaaggucgguc

SEQ ID NO: 88093 - RNA, 22 nt, Artificial Sequence
  Synthetic
gaaguaugccucaaggucgguc

SEQ ID NO: 88094 - RNA, 23 nt, Artificial Sequence
  Synthetic
ugaaguaugccucaaggucgguc

SEQ ID NO: 88095 - RNA, 24 nt, Artificial Sequence
  Synthetic
uugaaguaugccucaaggucgguc

SEQ ID NO: 88096 - RNA, 18 nt, Artificial Sequence
  Synthetic
  misc_feature (11)..(11): n is a, c, g, or u
guaacacgagnagggguc

SEQ ID NO: 88097 - RNA, 19 nt, Artificial Sequence
  Synthetic
  misc_feature (12)..(12): n is a, c, g, or u
uguaacacgagnagggguc

SEQ ID NO: 88098 - RNA, 20 nt, Artificial Sequence
  Synthetic
  misc_feature (13)..(13): n is a, c, g, or u
cuguaacacgagnagggguc

SEQ ID NO: 88099 - RNA, 21 nt, Artificial Sequence
  Synthetic
  misc_feature (14)..(14): n is a, c, g, or u
ccuguaacacgagnagggguc

SEQ ID NO: 88100 - RNA, 22 nt, Artificial Sequence
  Synthetic
  misc_feature (15)..(15): n is a, c, g, or u
gccuguaacacgagnagggguc

SEQ ID NO: 88101 - RNA, 23 nt, Artificial Sequence
  Synthetic
  misc_feature (16)..(16): n is a, c, g, or u
cgccuguaacacgagnagggguc

SEQ ID NO: 88102 - RNA, 24 nt, Artificial Sequence
  Synthetic
  misc_feature (17)..(17): n is a, c, g, or u
ccgccuguaacacgagnagggguc

SEQ ID NO: 88103 - RNA, 18 nt, Artificial Sequence
  Synthetic
  misc_feature (11)..(11): n is a, c, g, or u
uaggggcauunggugguc

SEQ ID NO: 88104 - RNA, 19 nt, Artificial Sequence
  Synthetic
  misc_feature (12)..(12): n is a, c, g, or u
auaggggcauunggugguc

SEQ ID NO: 88105 - RNA, 20 nt, Artificial Sequence
  Synthetic
  misc_feature (13)..(13): n is a, c, g, or u
gauaggggcauunggugguc

SEQ ID NO: 88106 - RNA, 21 nt, Artificial Sequence
  Synthetic
  misc_feature (14)..(14): n is a, c, g, or u
agauaggggcauunggugguc

SEQ ID NO: 88107 - RNA, 22 nt, Artificial Sequence
  Synthetic
  misc_feature (15)..(15): n is a, c, g, or u
aagauaggggcauunggugguc

SEQ ID NO: 88108 - RNA, 23 nt, Artificial Sequence
  Synthetic
  misc_feature (16)..(16): n is a, c, g, or u
uaagauaggggcauunggugguc

SEQ ID NO: 88109 - RNA, 24 nt, Artificial Sequence
  Synthetic
  misc_feature (17)..(17): n is a, c, g, or u
auaagauaggggcauunggugguc

SEQ ID NO: 88110 - RNA, 18 nt, Artificial Sequence
  Synthetic
uggauccaacuggugguc

SEQ ID NO: 88111 - RNA, 19 nt, Artificial Sequence
  Synthetic
cuggauccaacuggugguc

SEQ ID NO: 88112 - RNA, 20 nt, Artificial Sequence
  Synthetic
gcuggauccaacuggugguc

SEQ ID NO: 88113 - RNA, 21 nt, Artificial Sequence
  Synthetic
ggcuggauccaacuggugguc

SEQ ID NO: 88114 - RNA, 22 nt, Artificial Sequence
  Synthetic
aggcuggauccaacuggugguc

SEQ ID NO: 88115 - RNA, 23 nt, Artificial Sequence
  Synthetic
aaggcuggauccaacuggugguc

SEQ ID NO: 88116 - RNA, 24 nt, Artificial Sequence
  Synthetic
gaaggcuggauccaacuggugguc

SEQ ID NO: 88117 - RNA, 18 nt, Artificial Sequence
  Synthetic
auugugaggauucuuguc

SEQ ID NO: 88118 - RNA, 19 nt, Artificial Sequence
  Synthetic
uauugugaggauucuuguc

SEQ ID NO: 88119 - RNA, 20 nt, Artificial Sequence
  Synthetic
guauugugaggauucuuguc

SEQ ID NO: 88120 - RNA, 21 nt, Artificial Sequence
  Synthetic
gguauugugaggauucuuguc

SEQ ID NO: 88121 - RNA, 22 nt, Artificial Sequence
  Synthetic
cgguauugugaggauucuuguc

SEQ ID NO: 88122 - RNA, 23 nt, Artificial Sequence
  Synthetic
gcgguauugugaggauucuuguc

SEQ ID NO: 88123 - RNA, 24 nt, Artificial Sequence
  Synthetic
ugcgguauugugaggauucuuguc

SEQ ID NO: 88124 - RNA, 18 nt, Artificial Sequence
  Synthetic
auacuaacauugagauuc

SEQ ID NO: 88125 - RNA, 19 nt, Artificial Sequence
  Synthetic
aauacuaacauugagauuc

SEQ ID NO: 88126 - RNA, 20 nt, Artificial Sequence
  Synthetic
gaauacuaacauugagauuc

SEQ ID NO: 88127 - RNA, 21 nt, Artificial Sequence
  Synthetic
ggaauacuaacauugagauuc

SEQ ID NO: 88128 - RNA, 22 nt, Artificial Sequence
  Synthetic
aggaauacuaacauugagauuc

SEQ ID NO: 88129 - RNA, 23 nt, Artificial Sequence
  Synthetic
aaggaauacuaacauugagauuc

SEQ ID NO: 88130 - RNA, 24 nt, Artificial Sequence
  Synthetic
caaggaauacuaacauugagauuc

SEQ ID NO: 88131 - RNA, 18 nt, Artificial Sequence
  Synthetic
uauaauauacccgccuuc

SEQ ID NO: 88132 - RNA, 19 nt, Artificial Sequence
  Synthetic
auauaauauacccgccuuc

SEQ ID NO: 88133 - RNA, 20 nt, Artificial Sequence
  Synthetic
uauauaauauacccgccuuc

SEQ ID NO: 88134 - RNA, 21 nt, Artificial Sequence
  Synthetic
uuauauaauauacccgccuuc

SEQ ID NO: 88135 - RNA, 22 nt, Artificial Sequence
  Synthetic
cuuauauaauauacccgccuuc

SEQ ID NO: 88136 - RNA, 23 nt, Artificial Sequence
  Synthetic
ucuuauauaauauacccgccuuc

SEQ ID NO: 88137 - RNA, 24 nt, Artificial Sequence
  Synthetic
cucuuauauaauauacccgccuuc

SEQ ID NO: 88138 - RNA, 18 nt, Artificial Sequence
  Synthetic
cccgagauugagaucuuc

SEQ ID NO: 88139 - RNA, 19 nt, Artificial Sequence
  Synthetic
ucccgagauugagaucuuc

SEQ ID NO: 88140 - RNA, 20 nt, Artificial Sequence
  Synthetic
uucccgagauugagaucuuc

SEQ ID NO: 88141 - RNA, 21 nt, Artificial Sequence
  Synthetic
auucccgagauugagaucuuc

SEQ ID NO: 88142 - RNA, 22 nt, Artificial Sequence
  Synthetic
gauucccgagauugagaucuuc

SEQ ID NO: 88143 - RNA, 23 nt, Artificial Sequence
  Synthetic
agauucccgagauugagaucuuc

SEQ ID NO: 88144 - RNA, 24 nt, Artificial Sequence
  Synthetic
gagauucccgagauugagaucuuc

SEQ ID NO: 88145 - RNA, 18 nt, Artificial Sequence
  Synthetic
  misc_feature (4)..(5): n is a, c, g, or u
  misc_feature (8)..(8): n is a, c, g, or u
cuannacnguuucucuuc

SEQ ID NO: 88146 - RNA, 19 nt, Artificial Sequence
  Synthetic
  misc_feature (5)..(6): n is a, c, g, or u
  misc_feature (9)..(9): n is a, c, g, or u
ucuannacnguuucucuuc

SEQ ID NO: 88147 - RNA, 20 nt, Artificial Sequence
  Synthetic
  misc_feature (6)..(7): n is a, c, g, or u
  misc_feature (10)..(10): n is a, c, g, or u
cucuannacnguuucucuuc

SEQ ID NO: 88148 - RNA, 21 nt, Artificial Sequence
  Synthetic
  misc_feature (7)..(8): n is a, c, g, or u
  misc_feature (11)..(11): n is a, c, g, or u
acucuannacnguuucucuuc

SEQ ID NO: 88149 - RNA, 22 nt, Artificial Sequence
  Synthetic
  misc_feature (8)..(9): n is a, c, g, or u
  misc_feature (12)..(12): n is a, c, g, or u
uacucuannacnguuucucuuc

SEQ ID NO: 88150 - RNA, 23 nt, Artificial Sequence
  Synthetic
  misc_feature (9)..(10): n is a, c, g, or u
  misc_feature (13)..(13): n is a, c, g, or u
auacucuannacnguuucucuuc

SEQ ID NO: 88151 - RNA, 24 nt, Artificial Sequence
  Synthetic
  misc_feature (10)..(11): n is a, c, g, or u
  misc_feature (14)..(14): n is a, c, g, or u
aauacucuannacnguuucucuuc

SEQ ID NO: 88152 - RNA, 18 nt, Artificial Sequence
  Synthetic
gcgagggaguucuucuuc

SEQ ID NO: 88153 - RNA, 19 nt, Artificial Sequence
  Synthetic
ggcgagggaguucuucuuc

SEQ ID NO: 88154 - RNA, 20 nt, Artificial Sequence
  Synthetic
aggcgagggaguucuucuuc

SEQ ID NO: 88155 - RNA, 21 nt, Artificial Sequence
  Synthetic
gaggcgagggaguucuucuuc

SEQ ID NO: 88156 - RNA, 22 nt, Artificial Sequence
  Synthetic
cgaggcgagggaguucuucuuc

SEQ ID NO: 88157 - RNA, 23 nt, Artificial Sequence
  Synthetic
gcgaggcgagggaguucuucuuc

SEQ ID NO: 88158 - RNA, 24 nt, Artificial Sequence
  Synthetic
ugcgaggcgagggaguucuucuuc

SEQ ID NO: 88159 - RNA, 18 nt, Artificial Sequence
  Synthetic
agggauacauagagguuc

SEQ ID NO: 88160 - RNA, 19 nt, Artificial Sequence
  Synthetic
gagggauacauagagguuc

SEQ ID NO: 88161 - RNA, 20 nt, Artificial Sequence
  Synthetic
ggagggauacauagagguuc

SEQ ID NO: 88162 - RNA, 21 nt, Artificial Sequence
  Synthetic
aggagggauacauagagguuc

SEQ ID NO: 88163 - RNA, 22 nt, Artificial Sequence
  Synthetic
caggagggauacauagagguuc

SEQ ID NO: 88164 - RNA, 23 nt, Artificial Sequence
  Synthetic
acaggagggauacauagagguuc

SEQ ID NO: 88165 - RNA, 24 nt, Artificial Sequence
  Synthetic
aacaggagggauacauagagguuc

SEQ ID NO: 88166 - RNA, 18 nt, Artificial Sequence
  Synthetic
gaacaggguuuacuguuc

SEQ ID NO: 88167 - RNA, 19 nt, Artificial Sequence
  Synthetic
ggaacaggguuuacuguuc

SEQ ID NO: 88168 - RNA, 20 nt, Artificial Sequence
  Synthetic
cggaacaggguuuacuguuc

SEQ ID NO: 88169 - RNA, 21 nt, Artificial Sequence
  Synthetic
ucggaacaggguuuacuguuc

SEQ ID NO: 88170 - RNA, 22 nt, Artificial Sequence
  Synthetic
gucggaacaggguuuacuguuc

SEQ ID NO: 88171 - RNA, 23 nt, Artificial Sequence
  Synthetic
agucggaacaggguuuacuguuc

SEQ ID NO: 88172 - RNA, 24 nt, Artificial Sequence
  Synthetic
uagucggaacaggguuuacuguuc

SEQ ID NO: 88173 - RNA, 18 nt, Artificial Sequence
  Synthetic
augcuguagcucuuguuc

SEQ ID NO: 88174 - RNA, 19 nt, Artificial Sequence
  Synthetic
caugcuguagcucuuguuc

SEQ ID NO: 88175 - RNA, 20 nt, Artificial Sequence
  Synthetic
ccaugcuguagcucuuguuc

SEQ ID NO: 88176 - RNA, 21 nt, Artificial Sequence
  Synthetic
cccaugcuguagcucuuguuc

SEQ ID NO: 88177 - RNA, 22 nt, Artificial Sequence
  Synthetic
ccccaugcuguagcucuuguuc

SEQ ID NO: 88178 - RNA, 23 nt, Artificial Sequence
  Synthetic
gccccaugcuguagcucuuguuc

SEQ ID NO: 88179 - RNA, 24 nt, Artificial Sequence
  Synthetic
ugccccaugcuguagcucuuguuc

SEQ ID NO: 88180 - RNA, 18 nt, Artificial Sequence
  Synthetic
ccugaggaugaguguuuc

SEQ ID NO: 88181 - RNA, 19 nt, Artificial Sequence
  Synthetic
gccugaggaugaguguuuc

SEQ ID NO: 88182 - RNA, 20 nt, Artificial Sequence
  Synthetic
ggccugaggaugaguguuuc

SEQ ID NO: 88183 - RNA, 21 nt, Artificial Sequence
  Synthetic
uggccugaggaugaguguuuc

SEQ ID NO: 88184 - RNA, 22 nt, Artificial Sequence
  Synthetic
auggccugaggaugaguguuuc

SEQ ID NO: 88185 - RNA, 23 nt, Artificial Sequence
  Synthetic
cauggccugaggaugaguguuuc

SEQ ID NO: 88186 - RNA, 24 nt, Artificial Sequence
  Synthetic
gcauggccugaggaugaguguuuc

SEQ ID NO: 88187 - RNA, 18 nt, Artificial Sequence
  Synthetic
acucccauaggaauuuuc

SEQ ID NO: 88188 - RNA, 19 nt, Artificial Sequence
  Synthetic
cacucccauaggaauuuuc

SEQ ID NO: 88189 - RNA, 20 nt, Artificial Sequence
  Synthetic
ccacucccauaggaauuuuc

SEQ ID NO: 88190 - RNA, 21 nt, Artificial Sequence
  Synthetic
cccacucccauaggaauuuuc

SEQ ID NO: 88191 - RNA, 22 nt, Artificial Sequence
  Synthetic
gcccacucccauaggaauuuuc

SEQ ID NO: 88192 - RNA, 23 nt, Artificial Sequence
  Synthetic
ggcccacucccauaggaauuuuc

SEQ ID NO: 88193 - RNA, 24 nt, Artificial Sequence
  Synthetic
aggcccacucccauaggaauuuuc

SEQ ID NO: 88194 - RNA, 18 nt, Artificial Sequence
  Synthetic
uguuaacaggaaguuuuc

SEQ ID NO: 88195 - RNA, 19 nt, Artificial Sequence
  Synthetic
cuguuaacaggaaguuuuc

SEQ ID NO: 88196 - RNA, 20 nt, Artificial Sequence
  Synthetic
ccuguuaacaggaaguuuuc

SEQ ID NO: 88197 - RNA, 21 nt, Artificial Sequence
  Synthetic
gccuguuaacaggaaguuuuc

SEQ ID NO: 88198 - RNA, 22 nt, Artificial Sequence
  Synthetic
ggccuguuaacaggaaguuuuc

SEQ ID NO: 88199 - RNA, 23 nt, Artificial Sequence
  Synthetic
aggccuguuaacaggaaguuuuc

SEQ ID NO: 88200 - RNA, 24 nt, Artificial Sequence
  Synthetic
uaggccuguuaacaggaaguuuuc

SEQ ID NO: 88201 - RNA, 18 nt, Artificial Sequence
  Synthetic
  misc_feature (2)..(2): n is a, c, g, or u
cnguuucucuuccaaaag

SEQ ID NO: 88202 - RNA, 19 nt, Artificial Sequence
  Synthetic
  misc_feature (3)..(3): n is a, c, g, or u
acnguuucucuuccaaaag

SEQ ID NO: 88203 - RNA, 20 nt, Artificial Sequence
  Synthetic
  misc_feature (1)..(1): n is a, c, g, or u
  misc_feature (4)..(4): n is a, c, g, or u
nacnguuucucuuccaaaag

SEQ ID NO: 88204 - RNA, 21 nt, Artificial Sequence
  Synthetic
  misc_feature (1)..(2): n is a, c, g, or u
  misc_feature (5)..(5): n is a, c, g, or u
nnacnguuucucuuccaaaag

SEQ ID NO: 88205 - RNA, 22 nt, Artificial Sequence
  Synthetic
  misc_feature (2)..(3): n is a, c, g, or u
  misc_feature (6)..(6): n is a, c, g, or u
annacnguuucucuuccaaaag

SEQ ID NO: 88206 - RNA, 23 nt, Artificial Sequence
  Synthetic
  misc_feature (3)..(4): n is a, c, g, or u
  misc_feature (7)..(7): n is a, c, g, or u
uannacnguuucucuuccaaaag

SEQ ID NO: 88207 - RNA, 24 nt, Artificial Sequence
  Synthetic
  misc_feature (4)..(5): n is a, c, g, or u
  misc_feature (8)..(8): n is a, c, g, or u
cuannacnguuucucuuccaaaag

SEQ ID NO: 88208 - RNA, 18 nt, Artificial Sequence
  Synthetic
uuaaauguauacccaaag

SEQ ID NO: 88209 - RNA, 19 nt, Artificial Sequence
  Synthetic
uuuaaauguauacccaaag

SEQ ID NO: 88210 - RNA, 20 nt, Artificial Sequence
  Synthetic
guuuaaauguauacccaaag

SEQ ID NO: 88211 - RNA, 21 nt, Artificial Sequence
  Synthetic
gguuuaaauguauacccaaag

SEQ ID NO: 88212 - RNA, 22 nt, Artificial Sequence
  Synthetic
ggguuuaaauguauacccaaag

SEQ ID NO: 88213 - RNA, 23 nt, Artificial Sequence
  Synthetic
aggguuuaaauguauacccaaag

SEQ ID NO: 88214 - RNA, 24 nt, Artificial Sequence
  Synthetic
uaggguuuaaauguauacccaaag

SEQ ID NO: 88215 - RNA, 18 nt, Artificial Sequence
  Synthetic
gaugaguguuucucaaag

SEQ ID NO: 88216 - RNA, 19 nt, Artificial Sequence
  Synthetic
ggaugaguguuucucaaag

SEQ ID NO: 88217 - RNA, 20 nt, Artificial Sequence
  Synthetic
aggaugaguguuucucaaag

SEQ ID NO: 88218 - RNA, 21 nt, Artificial Sequence
  Synthetic
gaggaugaguguuucucaaag

SEQ ID NO: 88219 - RNA, 22 nt, Artificial Sequence
  Synthetic
ugaggaugaguguuucucaaag

SEQ ID NO: 88220 - RNA, 23 nt, Artificial Sequence
  Synthetic
cugaggaugaguguuucucaaag

SEQ ID NO: 88221 - RNA, 24 nt, Artificial Sequence
  Synthetic
ccugaggaugaguguuucucaaag

SEQ ID NO: 88222 - RNA, 18 nt, Artificial Sequence
  Synthetic
uguaaguuggcgagaaag

SEQ ID NO: 88223 - RNA, 19 nt, Artificial Sequence
  Synthetic
uuguaaguuggcgagaaag

SEQ ID NO: 88224 - RNA, 20 nt, Artificial Sequence
  Synthetic
cuuguaaguuggcgagaaag

SEQ ID NO: 88225 - RNA, 21 nt, Artificial Sequence
  Synthetic
ccuuguaaguuggcgagaaag

SEQ ID NO: 88226 - RNA, 22 nt, Artificial Sequence
  Synthetic
gccuuguaaguuggcgagaaag

SEQ ID NO: 88227 - RNA, 23 nt, Artificial Sequence
  Synthetic
ggccuuguaaguuggcgagaaag

SEQ ID NO: 88228 - RNA, 24 nt, Artificial Sequence
  Synthetic
aggccuuguaaguuggcgagaaag

SEQ ID NO: 88229 - RNA, 18 nt, Artificial Sequence
  Synthetic
cauccauauaacugaaag

SEQ ID NO: 88230 - RNA, 19 nt, Artificial Sequence
  Synthetic
ucauccauauaacugaaag

SEQ ID NO: 88231 - RNA, 20 nt, Artificial Sequence
  Synthetic
aucauccauauaacugaaag

SEQ ID NO: 88232 - RNA, 21 nt, Artificial Sequence
  Synthetic
caucauccauauaacugaaag

SEQ ID NO: 88233 - RNA, 22 nt, Artificial Sequence
  Synthetic
acaucauccauauaacugaaag

SEQ ID NO: 88234 - RNA, 23 nt, Artificial Sequence
  Synthetic
cacaucauccauauaacugaaag

SEQ ID NO: 88235 - RNA, 24 nt, Artificial Sequence
  Synthetic
ccacaucauccauauaacugaaag

SEQ ID NO: 88236 - RNA, 18 nt, Artificial Sequence
  Synthetic
  misc_feature (12)..(12): n is a, c, g, or u
uuccaaugaggnuuaaag

SEQ ID NO: 88237 - RNA, 19 nt, Artificial Sequence
  Synthetic
  misc_feature (13)..(13): n is a, c, g, or u
uuuccaaugaggnuuaaag

SEQ ID NO: 88238 - RNA, 20 nt, Artificial Sequence
  Synthetic
  misc_feature (14)..(14): n is a, c, g, or u
uuuuccaaugaggnuuaaag

SEQ ID NO: 88239 - RNA, 21 nt, Artificial Sequence
  Synthetic
  misc_feature (15)..(15): n is a, c, g, or u
guuuuccaaugaggnuuaaag

SEQ ID NO: 88240 - RNA, 22 nt, Artificial Sequence
  Synthetic
  misc_feature (16)..(16): n is a, c, g, or u
uguuuuccaaugaggnuuaaag

SEQ ID NO: 88241 - RNA, 23 nt, Artificial Sequence
  Synthetic
  misc_feature (17)..(17): n is a, c, g, or u
guguuuuccaaugaggnuuaaag

SEQ ID NO: 88242 - RNA, 24 nt, Artificial Sequence
  Synthetic
  misc_feature (18)..(18): n is a, c, g, or u
gguguuuuccaaugaggnuuaaag

SEQ ID NO: 88243 - RNA, 18 nt, Artificial Sequence
  Synthetic
aggauucuugucaacaag

SEQ ID NO: 88244 - RNA, 19 nt, Artificial Sequence
  Synthetic
gaggauucuugucaacaag

SEQ ID NO: 88245 - RNA, 20 nt, Artificial Sequence
  Synthetic
ugaggauucuugucaacaag

SEQ ID NO: 88246 - RNA, 21 nt, Artificial Sequence
  Synthetic
gugaggauucuugucaacaag

SEQ ID NO: 88247 - RNA, 22 nt, Artificial Sequence
  Synthetic
ugugaggauucuugucaacaag

SEQ ID NO: 88248 - RNA, 23 nt, Artificial Sequence
  Synthetic
uugugaggauucuugucaacaag

SEQ ID NO: 88249 - RNA, 24 nt, Artificial Sequence
  Synthetic
auugugaggauucuugucaacaag

SEQ ID NO: 88250 - RNA, 18 nt, Artificial Sequence
  Synthetic
agcgauaaccaggacaag

SEQ ID NO: 88251 - RNA, 19 nt, Artificial Sequence
  Synthetic
cagcgauaaccaggacaag

SEQ ID NO: 88252 - RNA, 20 nt, Artificial Sequence
  Synthetic
ccagcgauaaccaggacaag

SEQ ID NO: 88253 - RNA, 21 nt, Artificial Sequence
  Synthetic
uccagcgauaaccaggacaag

SEQ ID NO: 88254 - RNA, 22 nt, Artificial Sequence
  Synthetic
auccagcgauaaccaggacaag

SEQ ID NO: 88255 - RNA, 23 nt, Artificial Sequence
  Synthetic
cauccagcgauaaccaggacaag

SEQ ID NO: 88256 - RNA, 24 nt, Artificial Sequence
  Synthetic
acauccagcgauaaccaggacaag

SEQ ID NO: 88257 - RNA, 18 nt, Artificial Sequence
  Synthetic
  misc_feature (6)..(6): n is a, c, g, or u
cguacngaaggaaagaag

SEQ ID NO: 88258 - RNA, 19 nt, Artificial Sequence
  Synthetic
  misc_feature (7)..(7): n is a, c, g, or u
ucguacngaaggaaagaag

SEQ ID NO: 88259 - RNA, 20 nt, Artificial Sequence
  Synthetic
  misc_feature (8)..(8): n is a, c, g, or u
cucguacngaaggaaagaag

SEQ ID NO: 88260 - RNA, 21 nt, Artificial Sequence
  Synthetic
  misc_feature (9)..(9): n is a, c, g, or u
ucucguacngaaggaaagaag

SEQ ID NO: 88261 - RNA, 22 nt, Artificial Sequence
  Synthetic
  misc_feature (10)..(10): n is a, c, g, or u
aucucguacngaaggaaagaag

SEQ ID NO: 88262 - RNA, 23 nt, Artificial Sequence
  Synthetic
  misc_feature (11)..(11): n is a, c, g, or u
gaucucguacngaaggaaagaag

SEQ ID NO: 88263 - RNA, 24 nt, Artificial Sequence
  Synthetic
  misc_feature (12)..(12): n is a, c, g, or u
agaucucguacngaaggaaagaag

SEQ ID NO: 88264 - RNA, 18 nt, Artificial Sequence
  Synthetic
agaagaaccaacaagaag

SEQ ID NO: 88265 - RNA, 19 nt, Artificial Sequence
  Synthetic
cagaagaaccaacaagaag

SEQ ID NO: 88266 - RNA, 20 nt, Artificial Sequence
  Synthetic
ccagaagaaccaacaagaag

SEQ ID NO: 88267 - RNA, 21 nt, Artificial Sequence
  Synthetic
uccagaagaaccaacaagaag

SEQ ID NO: 88268 - RNA, 22 nt, Artificial Sequence
  Synthetic
guccagaagaaccaacaagaag

SEQ ID NO: 88269 - RNA, 23 nt, Artificial Sequence
  Synthetic
aguccagaagaaccaacaagaag

SEQ ID NO: 88270 - RNA, 24 nt, Artificial Sequence
  Synthetic
uaguccagaagaaccaacaagaag

SEQ ID NO: 88271 - RNA, 18 nt, Artificial Sequence
  Synthetic
aaggaaagaagucagaag

SEQ ID NO: 88272 - RNA, 19 nt, Artificial Sequence
  Synthetic
gaaggaaagaagucagaag

SEQ ID NO: 88273 - RNA, 20 nt, Artificial Sequence
  Synthetic
  misc_feature (1)..(1): n is a, c, g, or u
ngaaggaaagaagucagaag

SEQ ID NO: 88274 - RNA, 21 nt, Artificial Sequence
  Synthetic
  misc_feature (2)..(2): n is a, c, g, or u
cngaaggaaagaagucagaag

SEQ ID NO: 88275 - RNA, 22 nt, Artificial Sequence
  Synthetic
  misc_feature (3)..(3): n is a, c, g, or u
acngaaggaaagaagucagaag

SEQ ID NO: 88276 - RNA, 23 nt, Artificial Sequence
  Synthetic
  misc_feature (4)..(4): n is a, c, g, or u
uacngaaggaaagaagucagaag

SEQ ID NO: 88277 - RNA, 24 nt, Artificial Sequence
  Synthetic
  misc_feature (5)..(5): n is a, c, g, or u
guacngaaggaaagaagucagaag

SEQ ID NO: 88278 - RNA, 18 nt, Artificial Sequence
  Synthetic
uccccaauccucgagaag

SEQ ID NO: 88279 - RNA, 19 nt, Artificial Sequence
  Synthetic
guccccaauccucgagaag

SEQ ID NO: 88280 - RNA, 20 nt, Artificial Sequence
  Synthetic
gguccccaauccucgagaag

SEQ ID NO: 88281 - RNA, 21 nt, Artificial Sequence
  Synthetic
ggguccccaauccucgagaag

SEQ ID NO: 88282 - RNA, 22 nt, Artificial Sequence
  Synthetic
aggguccccaauccucgagaag

SEQ ID NO: 88283 - RNA, 23 nt, Artificial Sequence
  Synthetic
caggguccccaauccucgagaag

SEQ ID NO: 88284 - RNA, 24 nt, Artificial Sequence
  Synthetic
gcaggguccccaauccucgagaag

SEQ ID NO: 88285 - RNA, 18 nt, Artificial Sequence
  Synthetic
  misc_feature (8)..(8): n is a, c, g, or u
agacaggnacaguagaag

SEQ ID NO: 88286 - RNA, 19 nt, Artificial Sequence
  Synthetic
  misc_feature (9)..(9): n is a, c, g, or u
aagacaggnacaguagaag

SEQ ID NO: 88287 - RNA, 20 nt, Artificial Sequence
  Synthetic
  misc_feature (10)..(10): n is a, c, g, or u
aaagacaggnacaguagaag

SEQ ID NO: 88288 - RNA, 21 nt, Artificial Sequence
  Synthetic
  misc_feature (11)..(11): n is a, c, g, or u
uaaagacaggnacaguagaag

SEQ ID NO: 88289 - RNA, 22 nt, Artificial Sequence
  Synthetic
  misc_feature (12)..(12): n is a, c, g, or u
uuaaagacaggnacaguagaag

SEQ ID NO: 88290 - RNA, 23 nt, Artificial Sequence
  Synthetic
  misc_feature (1)..(1): n is a, c, g, or u
  misc_feature (13)..(13): n is a, c, g, or u
nuuaaagacaggnacaguagaag

SEQ ID NO: 88291 - RNA, 24 nt, Artificial Sequence
  Synthetic
  misc_feature (2)..(2): n is a, c, g, or u
  misc_feature (14)..(14): n is a, c, g, or u
gnuuaaagacaggnacaguagaag

SEQ ID NO: 88292 - RNA, 18 nt, Artificial Sequence
  Synthetic
  misc_feature (14)..(14): n is a, c, g, or u
gaagaucucguacngaag

SEQ ID NO: 88293 - RNA, 19 nt, Artificial Sequence
  Synthetic
  misc_feature (15)..(15): n is a, c, g, or u
agaagaucucguacngaag

SEQ ID NO: 88294 - RNA, 20 nt, Artificial Sequence
  Synthetic
  misc_feature (1)..(1): n is a, c, g, or u
  misc_feature (16)..(16): n is a, c, g, or u
nagaagaucucguacngaag

SEQ ID NO: 88295 - RNA, 21 nt, Artificial Sequence
  Synthetic
  misc_feature (2)..(2): n is a, c, g, or u
  misc_feature (17)..(17): n is a, c, g, or u
cnagaagaucucguacngaag

SEQ ID NO: 88296 - RNA, 22 nt, Artificial Sequence
  Synthetic
  misc_feature (3)..(3): n is a, c, g, or u
  misc_feature (18)..(18): n is a, c, g, or u
ucnagaagaucucguacngaag

SEQ ID NO: 88297 - RNA, 23 nt, Artificial Sequence
  Synthetic
  misc_feature (4)..(4): n is a, c, g, or u
  misc_feature (19)..(19): n is a, c, g, or u
aucnagaagaucucguacngaag

SEQ ID NO: 88298 - RNA, 24 nt, Artificial Sequence
  Synthetic
  misc_feature (5)..(5): n is a, c, g, or u
  misc_feature (20)..(20): n is a, c, g, or u
uaucnagaagaucucguacngaag

SEQ ID NO: 88299 - RNA, 18 nt, Artificial Sequence
  Synthetic
cauagcagcaggaugaag

SEQ ID NO: 88300 - RNA, 19 nt, Artificial Sequence
  Synthetic
gcauagcagcaggaugaag

SEQ ID NO: 88301 - RNA, 20 nt, Artificial Sequence
  Synthetic
ggcauagcagcaggaugaag

SEQ ID NO: 88302 - RNA, 21 nt, Artificial Sequence
  Synthetic
aggcauagcagcaggaugaag

SEQ ID NO: 88303 - RNA, 22 nt, Artificial Sequence
  Synthetic
gaggcauagcagcaggaugaag

SEQ ID NO: 88304 - RNA, 23 nt, Artificial Sequence
  Synthetic
ugaggcauagcagcaggaugaag

SEQ ID NO: 88305 - RNA, 24 nt, Artificial Sequence
  Synthetic
augaggcauagcagcaggaugaag

SEQ ID NO: 88306 - RNA, 18 nt, Artificial Sequence
  Synthetic
gcgguguuugcucugaag

SEQ ID NO: 88307 - RNA, 19 nt, Artificial Sequence
  Synthetic
ugcgguguuugcucugaag

SEQ ID NO: 88308 - RNA, 20 nt, Artificial Sequence
  Synthetic
uugcgguguuugcucugaag

SEQ ID NO: 88309 - RNA, 21 nt, Artificial Sequence
  Synthetic
uuugcgguguuugcucugaag

SEQ ID NO: 88310 - RNA, 22 nt, Artificial Sequence
  Synthetic
auuugcgguguuugcucugaag

SEQ ID NO: 88311 - RNA, 23 nt, Artificial Sequence
  Synthetic
gauuugcgguguuugcucugaag

SEQ ID NO: 88312 - RNA, 24 nt, Artificial Sequence
  Synthetic
ggauuugcgguguuugcucugaag

SEQ ID NO: 88313 - RNA, 18 nt, Artificial Sequence
  Synthetic
uccggaaguguugauaag

SEQ ID NO: 88314 - RNA, 19 nt, Artificial Sequence
  Synthetic
cuccggaaguguugauaag

SEQ ID NO: 88315 - RNA, 20 nt, Artificial Sequence
  Synthetic
ucuccggaaguguugauaag

SEQ ID NO: 88316 - RNA, 21 nt, Artificial Sequence
  Synthetic
gucuccggaaguguugauaag

SEQ ID NO: 88317 - RNA, 22 nt, Artificial Sequence
  Synthetic
agucuccggaaguguugauaag

SEQ ID NO: 88318 - RNA, 23 nt, Artificial Sequence
  Synthetic
uagucuccggaaguguugauaag

SEQ ID NO: 88319 - RNA, 24 nt, Artificial Sequence
  Synthetic
guagucuccggaaguguugauaag

SEQ ID NO: 88320 - RNA, 18 nt, Artificial Sequence
  Synthetic
  misc_feature (5)..(5): n is a, c, g, or u
cauungguggucuauaag

SEQ ID NO: 88321 - RNA, 19 nt, Artificial Sequence
  Synthetic
  misc_feature (6)..(6): n is a, c, g, or u
gcauungguggucuauaag

SEQ ID NO: 88322 - RNA, 20 nt, Artificial Sequence
  Synthetic
  misc_feature (7)..(7): n is a, c, g, or u
ggcauungguggucuauaag

SEQ ID NO: 88323 - RNA, 21 nt, Artificial Sequence
  Synthetic
  misc_feature (8)..(8): n is a, c, g, or u
gggcauungguggucuauaag

SEQ ID NO: 88324 - RNA, 22 nt, Artificial Sequence
  Synthetic
  misc_feature (9)..(9): n is a, c, g, or u
ggggcauungguggucuauaag

SEQ ID NO: 88325 - RNA, 23 nt, Artificial Sequence
  Synthetic
  misc_feature (10)..(10): n is a, c, g, or u
aggggcauungguggucuauaag

SEQ ID NO: 88326 - RNA, 24 nt, Artificial Sequence
  Synthetic
  misc_feature (11)..(11): n is a, c, g, or u
uaggggcauungguggucuauaag

SEQ ID NO: 88327 - RNA, 18 nt, Artificial Sequence
  Synthetic
uaacugaaagccaaacag

SEQ ID NO: 88328 - RNA, 19 nt, Artificial Sequence
  Synthetic
auaacugaaagccaaacag

SEQ ID NO: 88329 - RNA, 20 nt, Artificial Sequence
  Synthetic
uauaacugaaagccaaacag

SEQ ID NO: 88330 - RNA, 21 nt, Artificial Sequence
  Synthetic
auauaacugaaagccaaacag

SEQ ID NO: 88331 - RNA, 22 nt, Artificial Sequence
  Synthetic
cauauaacugaaagccaaacag

SEQ ID NO: 88332 - RNA, 23 nt, Artificial Sequence
  Synthetic
ccauauaacugaaagccaaacag

SEQ ID NO: 88333 - RNA, 24 nt, Artificial Sequence
  Synthetic
uccauauaacugaaagccaaacag

SEQ ID NO: 88334 - RNA, 18 nt, Artificial Sequence
  Synthetic
gguuugguacagcaacag

SEQ ID NO: 88335 - RNA, 19 nt, Artificial Sequence
  Synthetic
agguuugguacagcaacag

SEQ ID NO: 88336 - RNA, 20 nt, Artificial Sequence
  Synthetic
aagguuugguacagcaacag

SEQ ID NO: 88337 - RNA, 21 nt, Artificial Sequence
  Synthetic
gaagguuugguacagcaacag

SEQ ID NO: 88338 - RNA, 22 nt, Artificial Sequence
  Synthetic
cgaagguuugguacagcaacag

SEQ ID NO: 88339 - RNA, 23 nt, Artificial Sequence
  Synthetic
ccgaagguuugguacagcaacag

SEQ ID NO: 88340 - RNA, 24 nt, Artificial Sequence
  Synthetic
uccgaagguuugguacagcaacag

SEQ ID NO: 88341 - RNA, 18 nt, Artificial Sequence
  Synthetic
gcuuggaggcuugaacag

SEQ ID NO: 88342 - RNA, 19 nt, Artificial Sequence
  Synthetic
agcuuggaggcuugaacag

SEQ ID NO: 88343 - RNA, 20 nt, Artificial Sequence
  Synthetic
cagcuuggaggcuugaacag

SEQ ID NO: 88344 - RNA, 21 nt, Artificial Sequence
  Synthetic
acagcuuggaggcuugaacag

SEQ ID NO: 88345 - RNA, 22 nt, Artificial Sequence
  Synthetic
cacagcuuggaggcuugaacag

SEQ ID NO: 88346 - RNA, 23 nt, Artificial Sequence
  Synthetic
gcacagcuuggaggcuugaacag

SEQ ID NO: 88347 - RNA, 24 nt, Artificial Sequence
  Synthetic
ggcacagcuuggaggcuugaacag

SEQ ID NO: 88348 - RNA, 18 nt, Artificial Sequence
  Synthetic
cagguauuguuuacacag

SEQ ID NO: 88349 - RNA, 19 nt, Artificial Sequence
  Synthetic
ucagguauuguuuacacag

SEQ ID NO: 88350 - RNA, 20 nt, Artificial Sequence
  Synthetic
uucagguauuguuuacacag

SEQ ID NO: 88351 - RNA, 21 nt, Artificial Sequence
  Synthetic
guucagguauuguuuacacag

SEQ ID NO: 88352 - RNA, 22 nt, Artificial Sequence
  Synthetic
gguucagguauuguuuacacag

SEQ ID NO: 88353 - RNA, 23 nt, Artificial Sequence
  Synthetic
agguucagguauuguuuacacag

SEQ ID NO: 88354 - RNA, 24 nt, Artificial Sequence
  Synthetic
aagguucagguauuguuuacacag

SEQ ID NO: 88355 - RNA, 18 nt, Artificial Sequence
  Synthetic
auccaguuggcagcacag

SEQ ID NO: 88356 - RNA, 19 nt, Artificial Sequence
  Synthetic
gauccaguuggcagcacag

SEQ ID NO: 88357 - RNA, 20 nt, Artificial Sequence
  Synthetic
ggauccaguuggcagcacag

SEQ ID NO: 88358 - RNA, 21 nt, Artificial Sequence
  Synthetic
aggauccaguuggcagcacag

SEQ ID NO: 88359 - RNA, 22 nt, Artificial Sequence
  Synthetic
caggauccaguuggcagcacag

SEQ ID NO: 88360 - RNA, 23 nt, Artificial Sequence
  Synthetic
gcaggauccaguuggcagcacag

SEQ ID NO: 88361 - RNA, 24 nt, Artificial Sequence
  Synthetic
cgcaggauccaguuggcagcacag

SEQ ID NO: 88362 - RNA, 18 nt, Artificial Sequence
  Synthetic
aagccacccaaggcacag

SEQ ID NO: 88363 - RNA, 19 nt, Artificial Sequence
  Synthetic
aaagccacccaaggcacag

SEQ ID NO: 88364 - RNA, 20 nt, Artificial Sequence
  Synthetic
  misc_feature (1)..(1): n is a, c, g, or u
naaagccacccaaggcacag

SEQ ID NO: 88365 - RNA, 21 nt, Artificial Sequence
  Synthetic
  misc_feature (2)..(2): n is a, c, g, or u
cnaaagccacccaaggcacag

SEQ ID NO: 88366 - RNA, 22 nt, Artificial Sequence
  Synthetic
  misc_feature (3)..(3): n is a, c, g, or u
ccnaaagccacccaaggcacag

SEQ ID NO: 88367 - RNA, 23 nt, Artificial Sequence
  Synthetic
  misc_feature (1)..(1): n is a, c, g, or u
  misc_feature (4)..(4): n is a, c, g, or u
nccnaaagccacccaaggcacag

SEQ ID NO: 88368 - RNA, 24 nt, Artificial Sequence
  Synthetic
  misc_feature (2)..(2): n is a, c, g, or u
  misc_feature (5)..(5): n is a, c, g, or u
gnccnaaagccacccaaggcacag

SEQ ID NO: 88369 - RNA, 18 nt, Artificial Sequence
  Synthetic
gcagaugagaaggcacag

SEQ ID NO: 88370 - RNA, 19 nt, Artificial Sequence
  Synthetic
ggcagaugagaaggcacag

SEQ ID NO: 88371 - RNA, 20 nt, Artificial Sequence
  Synthetic
cggcagaugagaaggcacag

SEQ ID NO: 88372 - RNA, 21 nt, Artificial Sequence
  Synthetic
ccggcagaugagaaggcacag

SEQ ID NO: 88373 - RNA, 22 nt, Artificial Sequence
  Synthetic
uccggcagaugagaaggcacag

SEQ ID NO: 88374 - RNA, 23 nt, Artificial Sequence
  Synthetic
guccggcagaugagaaggcacag

SEQ ID NO: 88375 - RNA, 24 nt, Artificial Sequence
  Synthetic
gguccggcagaugagaaggcacag

SEQ ID NO: 88376 - RNA, 18 nt, Artificial Sequence
  Synthetic
  misc_feature (2)..(2): n is a, c, g, or u
  misc_feature (14)..(14): n is a, c, g, or u
gnuuaaagacaggnacag

SEQ ID NO: 88377 - RNA, 19 nt, Artificial Sequence
  Synthetic
  misc_feature (3)..(3): n is a, c, g, or u
  misc_feature (15)..(15): n is a, c, g, or u
ggnuuaaagacaggnacag

SEQ ID NO: 88378 - RNA, 20 nt, Artificial Sequence
  Synthetic
  misc_feature (4)..(4): n is a, c, g, or u
  misc_feature (16)..(16): n is a, c, g, or u
aggnuuaaagacaggnacag

SEQ ID NO: 88379 - RNA, 21 nt, Artificial Sequence
  Synthetic
  misc_feature (5)..(5): n is a, c, g, or u
  misc_feature (17)..(17): n is a, c, g, or u
gaggnuuaaagacaggnacag

SEQ ID NO: 88380 - RNA, 22 nt, Artificial Sequence
  Synthetic
  misc_feature (6)..(6): n is a, c, g, or u
  misc_feature (18)..(18): n is a, c, g, or u
ugaggnuuaaagacaggnacag

SEQ ID NO: 88381 - RNA, 23 nt, Artificial Sequence
  Synthetic
  misc_feature (7)..(7): n is a, c, g, or u
  misc_feature (19)..(19): n is a, c, g, or u
augaggnuuaaagacaggnacag

SEQ ID NO: 88382 - RNA, 24 nt, Artificial Sequence
  Synthetic
  misc_feature (8)..(8): n is a, c, g, or u
  misc_feature (20)..(20): n is a, c, g, or u
aaugaggnuuaaagacaggnacag

SEQ ID NO: 88383 - RNA, 18 nt, Artificial Sequence
  Synthetic
acauccagcgauaaccag

SEQ ID NO: 88384 - RNA, 19 nt, Artificial Sequence
  Synthetic
cacauccagcgauaaccag

SEQ ID NO: 88385 - RNA, 20 nt, Artificial Sequence
  Synthetic
acacauccagcgauaaccag

SEQ ID NO: 88386 - RNA, 21 nt, Artificial Sequence
  Synthetic
gacacauccagcgauaaccag

SEQ ID NO: 88387 - RNA, 22 nt, Artificial Sequence
  Synthetic
agacacauccagcgauaaccag

SEQ ID NO: 88388 - RNA, 23 nt, Artificial Sequence
  Synthetic
cagacacauccagcgauaaccag

SEQ ID NO: 88389 - RNA, 24 nt, Artificial Sequence
  Synthetic
gcagacacauccagcgauaaccag

SEQ ID NO: 88390 - RNA, 18 nt, Artificial Sequence
  Synthetic
cugaacuggagccaccag

SEQ ID NO: 88391 - RNA, 19 nt, Artificial Sequence
  Synthetic
ccugaacuggagccaccag

SEQ ID NO: 88392 - RNA, 20 nt, Artificial Sequence
  Synthetic
uccugaacuggagccaccag

SEQ ID NO: 88393 - RNA, 21 nt, Artificial Sequence
  Synthetic
uuccugaacuggagccaccag

SEQ ID NO: 88394 - RNA, 22 nt, Artificial Sequence
  Synthetic
guuccugaacuggagccaccag

SEQ ID NO: 88395 - RNA, 23 nt, Artificial Sequence
  Synthetic
uguuccugaacuggagccaccag

SEQ ID NO: 88396 - RNA, 24 nt, Artificial Sequence
  Synthetic
cuguuccugaacuggagccaccag

SEQ ID NO: 88397 - RNA, 18 nt, Artificial Sequence
  Synthetic
  misc_feature (9)..(9): n is a, c, g, or u
gucauuagnuccccccag

SEQ ID NO: 88398 - RNA, 19 nt, Artificial Sequence
  Synthetic
  misc_feature (10)..(10): n is a, c, g, or u
agucauuagnuccccccag

SEQ ID NO: 88399 - RNA, 20 nt, Artificial Sequence
  Synthetic
  misc_feature (11)..(11): n is a, c, g, or u
gagucauuagnuccccccag

SEQ ID NO: 88400 - RNA, 21 nt, Artificial Sequence
  Synthetic
  misc_feature (12)..(12): n is a, c, g, or u
agagucauuagnuccccccag

SEQ ID NO: 88401 - RNA, 22 nt, Artificial Sequence
  Synthetic
  misc_feature (13)..(13): n is a, c, g, or u
uagagucauuagnuccccccag

SEQ ID NO: 88402 - RNA, 23 nt, Artificial Sequence
  Synthetic
  misc_feature (14)..(14): n is a, c, g, or u
cuagagucauuagnuccccccag

SEQ ID NO: 88403 - RNA, 24 nt, Artificial Sequence
  Synthetic
  misc_feature (15)..(15): n is a, c, g, or u
gcuagagucauuagnuccccccag

SEQ ID NO: 88404 - RNA, 18 nt, Artificial Sequence
  Synthetic
  misc_feature (13)..(13): n is a, c, g, or u
cgguggggugaancccag

SEQ ID NO: 88405 - RNA, 19 nt, Artificial Sequence
  Synthetic
  misc_feature (14)..(14): n is a, c, g, or u
gcgguggggugaancccag

SEQ ID NO: 88406 - RNA, 20 nt, Artificial Sequence
  Synthetic
  misc_feature (15)..(15): n is a, c, g, or u
ugcgguggggugaancccag

SEQ ID NO: 88407 - RNA, 21 nt, Artificial Sequence
  Synthetic
  misc_feature (16)..(16): n is a, c, g, or u
gugcgguggggugaancccag

SEQ ID NO: 88408 - RNA, 22 nt, Artificial Sequence
  Synthetic
  misc_feature (17)..(17): n is a, c, g, or u
cgugcgguggggugaancccag

SEQ ID NO: 88409 - RNA, 23 nt, Artificial Sequence
  Synthetic
  misc_feature (18)..(18): n is a, c, g, or u
ccgugcgguggggugaancccag

SEQ ID NO: 88410 - RNA, 24 nt, Artificial Sequence
  Synthetic
  misc_feature (19)..(19): n is a, c, g, or u
uccgugcgguggggugaancccag

SEQ ID NO: 88411 - RNA, 18 nt, Artificial Sequence
  Synthetic
ugaccaagccccagccag

SEQ ID NO: 88412 - RNA, 19 nt, Artificial Sequence
  Synthetic
augaccaagccccagccag

SEQ ID NO: 88413 - RNA, 20 nt, Artificial Sequence
  Synthetic
caugaccaagccccagccag

SEQ ID NO: 88414 - RNA, 21 nt, Artificial Sequence
  Synthetic
ccaugaccaagccccagccag

SEQ ID NO: 88415 - RNA, 22 nt, Artificial Sequence
  Synthetic
cccaugaccaagccccagccag

SEQ ID NO: 88416 - RNA, 23 nt, Artificial Sequence
  Synthetic
gcccaugaccaagccccagccag

SEQ ID NO: 88417 - RNA, 24 nt, Artificial Sequence
  Synthetic
ggcccaugaccaagccccagccag

SEQ ID NO: 88418 - RNA, 18 nt, Artificial Sequence
  Synthetic
acuaguaaacugagccag

SEQ ID NO: 88419 - RNA, 19 nt, Artificial Sequence
  Synthetic
cacuaguaaacugagccag

SEQ ID NO: 88420 - RNA, 20 nt, Artificial Sequence
  Synthetic
gcacuaguaaacugagccag

SEQ ID NO: 88421 - RNA, 21 nt, Artificial Sequence
  Synthetic
ggcacuaguaaacugagccag

SEQ ID NO: 88422 - RNA, 22 nt, Artificial Sequence
  Synthetic
uggcacuaguaaacugagccag

SEQ ID NO: 88423 - RNA, 23 nt, Artificial Sequence
  Synthetic
auggcacuaguaaacugagccag

SEQ ID NO: 88424 - RNA, 24 nt, Artificial Sequence
  Synthetic
aauggcacuaguaaacugagccag

SEQ ID NO: 88425 - RNA, 18 nt, Artificial Sequence
  Synthetic
cauaccuugauaguccag

SEQ ID NO: 88426 - RNA, 19 nt, Artificial Sequence
  Synthetic
acauaccuugauaguccag

SEQ ID NO: 88427 - RNA, 20 nt, Artificial Sequence
  Synthetic
aacauaccuugauaguccag

SEQ ID NO: 88428 - RNA, 21 nt, Artificial Sequence
  Synthetic
caacauaccuugauaguccag

SEQ ID NO: 88429 - RNA, 22 nt, Artificial Sequence
  Synthetic
gcaacauaccuugauaguccag

SEQ ID NO: 88430 - RNA, 23 nt, Artificial Sequence
  Synthetic
ggcaacauaccuugauaguccag

SEQ ID NO: 88431 - RNA, 24 nt, Artificial Sequence
  Synthetic
gggcaacauaccuugauaguccag

SEQ ID NO: 88432 - RNA, 18 nt, Artificial Sequence
  Synthetic
  misc_feature (5)..(5): n is a, c, g, or u
acaanggcauuaaagcag

SEQ ID NO: 88433 - RNA, 19 nt, Artificial Sequence
  Synthetic
  misc_feature (6)..(6): n is a, c, g, or u
uacaanggcauuaaagcag

SEQ ID NO: 88434 - RNA, 20 nt, Artificial Sequence
  Synthetic
  misc_feature (7)..(7): n is a, c, g, or u
auacaanggcauuaaagcag

SEQ ID NO: 88435 - RNA, 21 nt, Artificial Sequence
  Synthetic
  misc_feature (8)..(8): n is a, c, g, or u
cauacaanggcauuaaagcag

SEQ ID NO: 88436 - RNA, 22 nt, Artificial Sequence
  Synthetic
  misc_feature (9)..(9): n is a, c, g, or u
gcauacaanggcauuaaagcag

SEQ ID NO: 88437 - RNA, 23 nt, Artificial Sequence
  Synthetic
  misc_feature (1)..(1): n is a, c, g, or u
  misc_feature (10)..(10): n is a, c, g, or u
ngcauacaanggcauuaaagcag

SEQ ID NO: 88438 - RNA, 24 nt, Artificial Sequence
  Synthetic
  misc_feature (2)..(2): n is a, c, g, or u
  misc_feature (11)..(11): n is a, c, g, or u
angcauacaanggcauuaaagcag

SEQ ID NO: 88439 - RNA, 18 nt, Artificial Sequence
  Synthetic
gaugaggcauagcagcag

SEQ ID NO: 88440 - RNA, 19 nt, Artificial Sequence
  Synthetic
agaugaggcauagcagcag

SEQ ID NO: 88441 - RNA, 20 nt, Artificial Sequence
  Synthetic
aagaugaggcauagcagcag

SEQ ID NO: 88442 - RNA, 21 nt, Artificial Sequence
  Synthetic
gaagaugaggcauagcagcag

SEQ ID NO: 88443 - RNA, 22 nt, Artificial Sequence
  Synthetic
agaagaugaggcauagcagcag

SEQ ID NO: 88444 - RNA, 23 nt, Artificial Sequence
  Synthetic
aagaagaugaggcauagcagcag

SEQ ID NO: 88445 - RNA, 24 nt, Artificial Sequence
  Synthetic
caagaagaugaggcauagcagcag

SEQ ID NO: 88446 - RNA, 18 nt, Artificial Sequence
  Synthetic
cggcuaggaguuccgcag

SEQ ID NO: 88447 - RNA, 19 nt, Artificial Sequence
  Synthetic
gcggcuaggaguuccgcag

SEQ ID NO: 88448 - RNA, 20 nt, Artificial Sequence
  Synthetic
agcggcuaggaguuccgcag

SEQ ID NO: 88449 - RNA, 21 nt, Artificial Sequence
  Synthetic
aagcggcuaggaguuccgcag

SEQ ID NO: 88450 - RNA, 22 nt, Artificial Sequence
  Synthetic
caagcggcuaggaguuccgcag

SEQ ID NO: 88451 - RNA, 23 nt, Artificial Sequence
  Synthetic
acaagcggcuaggaguuccgcag

SEQ ID NO: 88452 - RNA, 24 nt, Artificial Sequence
  Synthetic
aacaagcggcuaggaguuccgcag

SEQ ID NO: 88453 - RNA, 18 nt, Artificial Sequence
  Synthetic
  misc_feature (7)..(7): n is a, c, g, or u
  misc_feature (10)..(10): n is a, c, g, or u
ggucggncgnaacggcag

SEQ ID NO: 88454 - RNA, 19 nt, Artificial Sequence
  Synthetic
  misc_feature (8)..(8): n is a, c, g, or u
  misc_feature (11)..(11): n is a, c, g, or u
uggucggncgnaacggcag

SEQ ID NO: 88455 - RNA, 20 nt, Artificial Sequence
  Synthetic
  misc_feature (9)..(9): n is a, c, g, or u
  misc_feature (12)..(12): n is a, c, g, or u
guggucggncgnaacggcag

SEQ ID NO: 88456 - RNA, 21 nt, Artificial Sequence
  Synthetic
  misc_feature (10)..(10): n is a, c, g, or u
  misc_feature (13)..(13): n is a, c, g, or u
cguggucggncgnaacggcag

SEQ ID NO: 88457 - RNA, 22 nt, Artificial Sequence
  Synthetic
  misc_feature (11)..(11): n is a, c, g, or u
  misc_feature (14)..(14): n is a, c, g, or u
ccguggucggncgnaacggcag

SEQ ID NO: 88458 - RNA, 23 nt, Artificial Sequence
  Synthetic
  misc_feature (12)..(12): n is a, c, g, or u
  misc_feature (15)..(15): n is a, c, g, or u
cccguggucggncgnaacggcag

SEQ ID NO: 88459 - RNA, 24 nt, Artificial Sequence
  Synthetic
  misc_feature (13)..(13): n is a, c, g, or u
  misc_feature (16)..(16): n is a, c, g, or u
ccccguggucggncgnaacggcag

SEQ ID NO: 88460 - RNA, 18 nt, Artificial Sequence
  Synthetic
gugcacacgguccggcag

SEQ ID NO: 88461 - RNA, 19 nt, Artificial Sequence
  Synthetic
agugcacacgguccggcag

SEQ ID NO: 88462 - RNA, 20 nt, Artificial Sequence
  Synthetic
aagugcacacgguccggcag

SEQ ID NO: 88463 - RNA, 18 nt, Artificial Sequence
  Synthetic
cgcaguauggaucggcag

SEQ ID NO: 88464 - RNA, 19 nt, Artificial Sequence
  Synthetic
ccgcaguauggaucggcag

SEQ ID NO: 88465 - RNA, 20 nt, Artificial Sequence
  Synthetic
uccgcaguauggaucggcag

SEQ ID NO: 88466 - RNA, 21 nt, Artificial Sequence
  Synthetic
uuccgcaguauggaucggcag

SEQ ID NO: 88467 - RNA, 22 nt, Artificial Sequence
  Synthetic
guuccgcaguauggaucggcag

SEQ ID NO: 88468 - RNA, 23 nt, Artificial Sequence
  Synthetic
aguuccgcaguauggaucggcag

SEQ ID NO: 88469 - RNA, 24 nt, Artificial Sequence
  Synthetic
gaguuccgcaguauggaucggcag

SEQ ID NO: 88470 - RNA, 18 nt, Artificial Sequence
  Synthetic
auuguguaaaaggggcag

SEQ ID NO: 88471 - RNA, 19 nt, Artificial Sequence
  Synthetic
cauuguguaaaaggggcag

SEQ ID NO: 88472 - RNA, 20 nt, Artificial Sequence
  Synthetic
acauuguguaaaaggggcag

SEQ ID NO: 88473 - RNA, 21 nt, Artificial Sequence
  Synthetic
cacauuguguaaaaggggcag

SEQ ID NO: 88474 - RNA, 22 nt, Artificial Sequence
  Synthetic
ccacauuguguaaaaggggcag

SEQ ID NO: 88475 - RNA, 23 nt, Artificial Sequence
  Synthetic
accacauuguguaaaaggggcag

SEQ ID NO: 88476 - RNA, 24 nt, Artificial Sequence
  Synthetic
aaccacauuguguaaaaggggcag

SEQ ID NO: 88477 - RNA, 18 nt, Artificial Sequence
  Synthetic
gcaggauccaguuggcag

SEQ ID NO: 88478 - RNA, 19 nt, Artificial Sequence
  Synthetic
cgcaggauccaguuggcag

SEQ ID NO: 88479 - RNA, 20 nt, Artificial Sequence
  Synthetic
gcgcaggauccaguuggcag

SEQ ID NO: 88480 - RNA, 21 nt, Artificial Sequence
  Synthetic
cgcgcaggauccaguuggcag

SEQ ID NO: 88481 - RNA, 22 nt, Artificial Sequence
  Synthetic
ccgcgcaggauccaguuggcag

SEQ ID NO: 88482 - RNA, 23 nt, Artificial Sequence
  Synthetic
cccgcgcaggauccaguuggcag

SEQ ID NO: 88483 - RNA, 24 nt, Artificial Sequence
  Synthetic
ucccgcgcaggauccaguuggcag

SEQ ID NO: 88484 - RNA, 18 nt, Artificial Sequence
  Synthetic
gauguucuccauguucag

SEQ ID NO: 88485 - RNA, 19 nt, Artificial Sequence
  Synthetic
ugauguucuccauguucag

SEQ ID NO: 88486 - RNA, 20 nt, Artificial Sequence
  Synthetic
gugauguucuccauguucag

SEQ ID NO: 88487 - RNA, 21 nt, Artificial Sequence
  Synthetic
ugugauguucuccauguucag

SEQ ID NO: 88488 - RNA, 22 nt, Artificial Sequence
  Synthetic
augugauguucuccauguucag

SEQ ID NO: 88489 - RNA, 23 nt, Artificial Sequence
  Synthetic
gaugugauguucuccauguucag

SEQ ID NO: 88490 - RNA, 24 nt, Artificial Sequence
  Synthetic
ugaugugauguucuccauguucag

SEQ ID NO: 88491 - RNA, 18 nt, Artificial Sequence
  Synthetic
agagaugauuaggcagag

SEQ ID NO: 88492 - RNA, 19 nt, Artificial Sequence
  Synthetic
aagagaugauuaggcagag

SEQ ID NO: 88493 - RNA, 20 nt, Artificial Sequence
  Synthetic
caagagaugauuaggcagag

SEQ ID NO: 88494 - RNA, 21 nt, Artificial Sequence
  Synthetic
acaagagaugauuaggcagag

SEQ ID NO: 88495 - RNA, 22 nt, Artificial Sequence
  Synthetic
aacaagagaugauuaggcagag

SEQ ID NO: 88496 - RNA, 23 nt, Artificial Sequence
  Synthetic
gaacaagagaugauuaggcagag

SEQ ID NO: 88497 - RNA, 24 nt, Artificial Sequence
  Synthetic
ugaacaagagaugauuaggcagag

SEQ ID NO: 88498 - RNA, 18 nt, Artificial Sequence
  Synthetic
uccaugcgacgugcagag

SEQ ID NO: 88499 - RNA, 19 nt, Artificial Sequence
  Synthetic
cuccaugcgacgugcagag

SEQ ID NO: 88500 - RNA, 20 nt, Artificial Sequence
  Synthetic
ucuccaugcgacgugcagag

SEQ ID NO: 88501 - RNA, 21 nt, Artificial Sequence
  Synthetic
gucuccaugcgacgugcagag

SEQ ID NO: 88502 - RNA, 22 nt, Artificial Sequence
  Synthetic
ggucuccaugcgacgugcagag

SEQ ID NO: 88503 - RNA, 23 nt, Artificial Sequence
  Synthetic
uggucuccaugcgacgugcagag

SEQ ID NO: 88504 - RNA, 24 nt, Artificial Sequence
  Synthetic
guggucuccaugcgacgugcagag

SEQ ID NO: 88505 - RNA, 18 nt, Artificial Sequence
  Synthetic
  misc_feature (11)..(11): n is a, c, g, or u
cguugacauuncagagag

SEQ ID NO: 88506 - RNA, 19 nt, Artificial Sequence
  Synthetic
  misc_feature (12)..(12): n is a, c, g, or u
ucguugacauuncagagag

SEQ ID NO: 88507 - RNA, 20 nt, Artificial Sequence
  Synthetic
  misc_feature (13)..(13): n is a, c, g, or u
gucguugacauuncagagag

SEQ ID NO: 88508 - RNA, 21 nt, Artificial Sequence
  Synthetic
  misc_feature (14)..(14): n is a, c, g, or u
ggucguugacauuncagagag

SEQ ID NO: 88509 - RNA, 22 nt, Artificial Sequence
  Synthetic
  misc_feature (15)..(15): n is a, c, g, or u
cggucguugacauuncagagag

SEQ ID NO: 88510 - RNA, 23 nt, Artificial Sequence
  Synthetic
  misc_feature (16)..(16): n is a, c, g, or u
ucggucguugacauuncagagag

SEQ ID NO: 88511 - RNA, 24 nt, Artificial Sequence
  Synthetic
  misc_feature (17)..(17): n is a, c, g, or u
gucggucguugacauuncagagag

SEQ ID NO: 88512 - RNA, 18 nt, Artificial Sequence
  Synthetic
uguauauuugcgggagag

SEQ ID NO: 88513 - RNA, 19 nt, Artificial Sequence
  Synthetic
auguauauuugcgggagag

SEQ ID NO: 88514 - RNA, 20 nt, Artificial Sequence
  Synthetic
gauguauauuugcgggagag

SEQ ID NO: 88515 - RNA, 21 nt, Artificial Sequence
  Synthetic
cgauguauauuugcgggagag

SEQ ID NO: 88516 - RNA, 22 nt, Artificial Sequence
  Synthetic
acgauguauauuugcgggagag

SEQ ID NO: 88517 - RNA, 23 nt, Artificial Sequence
  Synthetic
aacgauguauauuugcgggagag

SEQ ID NO: 88518 - RNA, 24 nt, Artificial Sequence
  Synthetic
aaacgauguauauuugcgggagag

SEQ ID NO: 88519 - RNA, 18 nt, Artificial Sequence
  Synthetic
  misc_feature (5)..(5): n is a, c, g, or u
  misc_feature (14)..(14): n is a, c, g, or u
aggcnucccgauanagag

SEQ ID NO: 88520 - RNA, 19 nt, Artificial Sequence
  Synthetic
  misc_feature (6)..(6): n is a, c, g, or u
  misc_feature (15)..(15): n is a, c, g, or u
aaggcnucccgauanagag

SEQ ID NO: 88521 - RNA, 20 nt, Artificial Sequence
  Synthetic
  misc_feature (7)..(7): n is a, c, g, or u
  misc_feature (16)..(16): n is a, c, g, or u
uaaggcnucccgauanagag

SEQ ID NO: 88522 - RNA, 21 nt, Artificial Sequence
  Synthetic
  misc_feature (8)..(8): n is a, c, g, or u
  misc_feature (17)..(17): n is a, c, g, or u
cuaaggcnucccgauanagag

SEQ ID NO: 88523 - RNA, 22 nt, Artificial Sequence
  Synthetic
  misc_feature (9)..(9): n is a, c, g, or u
  misc_feature (18)..(18): n is a, c, g, or u
ucuaaggcnucccgauanagag

SEQ ID NO: 88524 - RNA, 23 nt, Artificial Sequence
  Synthetic
  misc_feature (10)..(10): n is a, c, g, or u
  misc_feature (19)..(19): n is a, c, g, or u
cucuaaggcnucccgauanagag

SEQ ID NO: 88525 - RNA, 24 nt, Artificial Sequence
  Synthetic
  misc_feature (11)..(11): n is a, c, g, or u
  misc_feature (20)..(20): n is a, c, g, or u
acucuaaggcnucccgauanagag

SEQ ID NO: 88526 - RNA, 18 nt, Artificial Sequence
  Synthetic
  misc_feature (2)..(2): n is a, c, g, or u
angauccuggaauuagag

SEQ ID NO: 88527 - RNA, 19 nt, Artificial Sequence
  Synthetic
  misc_feature (3)..(3): n is a, c, g, or u
gangauccuggaauuagag

SEQ ID NO: 88528 - RNA, 20 nt, Artificial Sequence
  Synthetic
  misc_feature (4)..(4): n is a, c, g, or u
ugangauccuggaauuagag

SEQ ID NO: 88529 - RNA, 21 nt, Artificial Sequence
  Synthetic
  misc_feature (5)..(5): n is a, c, g, or u
uugangauccuggaauuagag

SEQ ID NO: 88530 - RNA, 22 nt, Artificial Sequence
  Synthetic
  misc_feature (6)..(6): n is a, c, g, or u
guugangauccuggaauuagag

SEQ ID NO: 88531 - RNA, 23 nt, Artificial Sequence
  Synthetic
  misc_feature (1)..(1): n is a, c, g, or u
  misc_feature (7)..(7): n is a, c, g, or u
nguugangauccuggaauuagag

SEQ ID NO: 88532 - RNA, 24 nt, Artificial Sequence
  Synthetic
  misc_feature (2)..(2): n is a, c, g, or u
  misc_feature (8)..(8): n is a, c, g, or u
unguugangauccuggaauuagag

SEQ ID NO: 88533 - RNA, 18 nt, Artificial Sequence
  Synthetic
ucagaaggcaaaaacgag

SEQ ID NO: 88534 - RNA, 19 nt, Artificial Sequence
  Synthetic
gucagaaggcaaaaacgag

SEQ ID NO: 88535 - RNA, 20 nt, Artificial Sequence
  Synthetic
agucagaaggcaaaaacgag

SEQ ID NO: 88536 - RNA, 21 nt, Artificial Sequence
  Synthetic
aagucagaaggcaaaaacgag

SEQ ID NO: 88537 - RNA, 22 nt, Artificial Sequence
  Synthetic
gaagucagaaggcaaaaacgag

SEQ ID NO: 88538 - RNA, 23 nt, Artificial Sequence
  Synthetic
agaagucagaaggcaaaaacgag

SEQ ID NO: 88539 - RNA, 24 nt, Artificial Sequence
  Synthetic
aagaagucagaaggcaaaaacgag

SEQ ID NO: 88540 - RNA, 18 nt, Artificial Sequence
  Synthetic
ccccgccuguaacacgag

SEQ ID NO: 88541 - RNA, 19 nt, Artificial Sequence
  Synthetic
accccgccuguaacacgag

SEQ ID NO: 88542 - RNA, 20 nt, Artificial Sequence
  Synthetic
aaccccgccuguaacacgag

SEQ ID NO: 88543 - RNA, 18 nt, Artificial Sequence
  Synthetic
agagaaguccaccacgag

SEQ ID NO: 88544 - RNA, 19 nt, Artificial Sequence
  Synthetic
gagagaaguccaccacgag

SEQ ID NO: 88545 - RNA, 20 nt, Artificial Sequence
  Synthetic
ugagagaaguccaccacgag

SEQ ID NO: 88546 - RNA, 21 nt, Artificial Sequence
  Synthetic
uugagagaaguccaccacgag

SEQ ID NO: 88547 - RNA, 22 nt, Artificial Sequence
  Synthetic
auugagagaaguccaccacgag

SEQ ID NO: 88548 - RNA, 23 nt, Artificial Sequence
  Synthetic
aauugagagaaguccaccacgag

SEQ ID NO: 88549 - RNA, 24 nt, Artificial Sequence
  Synthetic
aaauugagagaaguccaccacgag

SEQ ID NO: 88550 - RNA, 18 nt, Artificial Sequence
  Synthetic
aacauugagauucccgag

SEQ ID NO: 88551 - RNA, 19 nt, Artificial Sequence
  Synthetic
uaacauugagauucccgag

SEQ ID NO: 88552 - RNA, 20 nt, Artificial Sequence
  Synthetic
cuaacauugagauucccgag

SEQ ID NO: 88553 - RNA, 21 nt, Artificial Sequence
  Synthetic
acuaacauugagauucccgag

SEQ ID NO: 88554 - RNA, 22 nt, Artificial Sequence
  Synthetic
uacuaacauugagauucccgag

SEQ ID NO: 88555 - RNA, 23 nt, Artificial Sequence
  Synthetic
auacuaacauugagauucccgag

SEQ ID NO: 88556 - RNA, 24 nt, Artificial Sequence
  Synthetic
aauacuaacauugagauucccgag

SEQ ID NO: 88557 - RNA, 18 nt, Artificial Sequence
  Synthetic
cuccagaccugcugcgag

SEQ ID NO: 88558 - RNA, 19 nt, Artificial Sequence
  Synthetic
gcuccagaccugcugcgag

SEQ ID NO: 88559 - RNA, 20 nt, Artificial Sequence
  Synthetic
ugcuccagaccugcugcgag

SEQ ID NO: 88560 - RNA, 21 nt, Artificial Sequence
  Synthetic
uugcuccagaccugcugcgag

SEQ ID NO: 88561 - RNA, 22 nt, Artificial Sequence
  Synthetic
uuugcuccagaccugcugcgag

SEQ ID NO: 88562 - RNA, 23 nt, Artificial Sequence
  Synthetic
guuugcuccagaccugcugcgag

SEQ ID NO: 88563 - RNA, 24 nt, Artificial Sequence
  Synthetic
uguuugcuccagaccugcugcgag

SEQ ID NO: 88564 - RNA, 18 nt, Artificial Sequence
  Synthetic
gagaccuucgucugcgag

SEQ ID NO: 88565 - RNA, 19 nt, Artificial Sequence
  Synthetic
ugagaccuucgucugcgag

SEQ ID NO: 88566 - RNA, 20 nt, Artificial Sequence
  Synthetic
uugagaccuucgucugcgag

SEQ ID NO: 88567 - RNA, 18 nt, Artificial Sequence
  Synthetic
gucuauaagcuggaggag

SEQ ID NO: 88568 - RNA, 19 nt, Artificial Sequence
  Synthetic
ggucuauaagcuggaggag

SEQ ID NO: 88569 - RNA, 20 nt, Artificial Sequence
  Synthetic
uggucuauaagcuggaggag

SEQ ID NO: 88570 - RNA, 21 nt, Artificial Sequence
  Synthetic
guggucuauaagcuggaggag

SEQ ID NO: 88571 - RNA, 22 nt, Artificial Sequence
  Synthetic
gguggucuauaagcuggaggag

SEQ ID NO: 88572 - RNA, 23 nt, Artificial Sequence
  Synthetic
  misc_feature (1)..(1): n is a, c, g, or u
ngguggucuauaagcuggaggag

SEQ ID NO: 88573 - RNA, 24 nt, Artificial Sequence
  Synthetic
  misc_feature (2)..(2): n is a, c, g, or u
ungguggucuauaagcuggaggag

SEQ ID NO: 88574 - RNA, 18 nt, Artificial Sequence
  Synthetic
  misc_feature (1)..(1): n is a, c, g, or u
  misc_feature (4)..(4): n is a, c, g, or u
ncgnaacggcagacggag

SEQ ID NO: 88575 - RNA, 19 nt, Artificial Sequence
  Synthetic
  misc_feature (2)..(2): n is a, c, g, or u
  misc_feature (5)..(5): n is a, c, g, or u
gncgnaacggcagacggag

SEQ ID NO: 88576 - RNA, 20 nt, Artificial Sequence
  Synthetic
  misc_feature (3)..(3): n is a, c, g, or u
  misc_feature (6)..(6): n is a, c, g, or u
ggncgnaacggcagacggag

SEQ ID NO: 88577 - RNA, 21 nt, Artificial Sequence
  Synthetic
  misc_feature (4)..(4): n is a, c, g, or u
  misc_feature (7)..(7): n is a, c, g, or u
cggncgnaacggcagacggag

SEQ ID NO: 88578 - RNA, 22 nt, Artificial Sequence
  Synthetic
  misc_feature (5)..(5): n is a, c, g, or u
  misc_feature (8)..(8): n is a, c, g, or u
ucggncgnaacggcagacggag

SEQ ID NO: 88579 - RNA, 23 nt, Artificial Sequence
  Synthetic
  misc_feature (6)..(6): n is a, c, g, or u
  misc_feature (9)..(9): n is a, c, g, or u
gucggncgnaacggcagacggag

SEQ ID NO: 88580 - RNA, 24 nt, Artificial Sequence
  Synthetic
  misc_feature (7)..(7): n is a, c, g, or u
  misc_feature (10)..(10): n is a, c, g, or u
ggucggncgnaacggcagacggag

SEQ ID NO: 88581 - RNA, 18 nt, Artificial Sequence
  Synthetic
guuggugagugauuggag

SEQ ID NO: 88582 - RNA, 19 nt, Artificial Sequence
  Synthetic
gguuggugagugauuggag

SEQ ID NO: 88583 - RNA, 20 nt, Artificial Sequence
  Synthetic
agguuggugagugauuggag

SEQ ID NO: 88584 - RNA, 21 nt, Artificial Sequence
  Synthetic
gagguuggugagugauuggag

SEQ ID NO: 88585 - RNA, 22 nt, Artificial Sequence
  Synthetic
ggagguuggugagugauuggag

SEQ ID NO: 88586 - RNA, 23 nt, Artificial Sequence
  Synthetic
aggagguuggugagugauuggag

SEQ ID NO: 88587 - RNA, 24 nt, Artificial Sequence
  Synthetic
caggagguuggugagugauuggag

SEQ ID NO: 88588 - RNA, 18 nt, Artificial Sequence
  Synthetic
aaccaggacaaguuggag

SEQ ID NO: 88589 - RNA, 19 nt, Artificial Sequence
  Synthetic
uaaccaggacaaguuggag

SEQ ID NO: 88590 - RNA, 20 nt, Artificial Sequence
  Synthetic
auaaccaggacaaguuggag

SEQ ID NO: 88591 - RNA, 21 nt, Artificial Sequence
  Synthetic
gauaaccaggacaaguuggag

SEQ ID NO: 88592 - RNA, 22 nt, Artificial Sequence
  Synthetic
cgauaaccaggacaaguuggag

SEQ ID NO: 88593 - RNA, 23 nt, Artificial Sequence
  Synthetic
gcgauaaccaggacaaguuggag

SEQ ID NO: 88594 - RNA, 24 nt, Artificial Sequence
  Synthetic
agcgauaaccaggacaaguuggag

SEQ ID NO: 88595 - RNA, 18 nt, Artificial Sequence
  Synthetic
  misc_feature (5)..(5): n is a, c, g, or u
aguuncccaccuuaugag

SEQ ID NO: 88596 - RNA, 19 nt, Artificial Sequence
  Synthetic
  misc_feature (6)..(6): n is a, c, g, or u
aaguuncccaccuuaugag

SEQ ID NO: 88597 - RNA, 20 nt, Artificial Sequence
  Synthetic
  misc_feature (7)..(7): n is a, c, g, or u
aaaguuncccaccuuaugag

SEQ ID NO: 88598 - RNA, 21 nt, Artificial Sequence
  Synthetic
  misc_feature (8)..(8): n is a, c, g, or u
uaaaguuncccaccuuaugag

SEQ ID NO: 88599 - RNA, 22 nt, Artificial Sequence
  Synthetic
  misc_feature (9)..(9): n is a, c, g, or u
guaaaguuncccaccuuaugag

SEQ ID NO: 88600 - RNA, 23 nt, Artificial Sequence
  Synthetic
  misc_feature (1)..(1): n is a, c, g, or u
  misc_feature (10)..(10): n is a, c, g, or u
nguaaaguuncccaccuuaugag

SEQ ID NO: 88601 - RNA, 24 nt, Artificial Sequence
  Synthetic
  misc_feature (2)..(2): n is a, c, g, or u
  misc_feature (11)..(11): n is a, c, g, or u
cnguaaaguuncccaccuuaugag

SEQ ID NO: 88602 - RNA, 18 nt, Artificial Sequence
  Synthetic
uggcacuaguaaacugag

SEQ ID NO: 88603 - RNA, 19 nt, Artificial Sequence
  Synthetic
auggcacuaguaaacugag

SEQ ID NO: 88604 - RNA, 20 nt, Artificial Sequence
  Synthetic
aauggcacuaguaaacugag

SEQ ID NO: 88605 - RNA, 21 nt, Artificial Sequence
  Synthetic
aaauggcacuaguaaacugag

SEQ ID NO: 88606 - RNA, 22 nt, Artificial Sequence
  Synthetic
caaauggcacuaguaaacugag

SEQ ID NO: 88607 - RNA, 23 nt, Artificial Sequence
  Synthetic
acaaauggcacuaguaaacugag

SEQ ID NO: 88608 - RNA, 24 nt, Artificial Sequence
  Synthetic
aacaaauggcacuaguaaacugag

SEQ ID NO: 88609 - RNA, 18 nt, Artificial Sequence
  Synthetic
  misc_feature (7)..(7): n is a, c, g, or u
uuuguanuaugcccugag

SEQ ID NO: 88610 - RNA, 19 nt, Artificial Sequence
  Synthetic
  misc_feature (8)..(8): n is a, c, g, or u
guuuguanuaugcccugag

SEQ ID NO: 88611 - RNA, 20 nt, Artificial Sequence
  Synthetic
  misc_feature (1)..(1): n is a, c, g, or u
  misc_feature (9)..(9): n is a, c, g, or u
nguuuguanuaugcccugag

SEQ ID NO: 88612 - RNA, 21 nt, Artificial Sequence
  Synthetic
  misc_feature (2)..(2): n is a, c, g, or u
  misc_feature (10)..(10): n is a, c, g, or u
anguuuguanuaugcccugag

SEQ ID NO: 88613 - RNA, 22 nt, Artificial Sequence
  Synthetic
  misc_feature (3)..(3): n is a, c, g, or u
  misc_feature (11)..(11): n is a, c, g, or u
aanguuuguanuaugcccugag

SEQ ID NO: 88614 - RNA, 23 nt, Artificial Sequence
  Synthetic
  misc_feature (4)..(4): n is a, c, g, or u
  misc_feature (12)..(12): n is a, c, g, or u
caanguuuguanuaugcccugag

SEQ ID NO: 88615 - RNA, 24 nt, Artificial Sequence
  Synthetic
  misc_feature (5)..(5): n is a, c, g, or u
  misc_feature (13)..(13): n is a, c, g, or u
gcaanguuuguanuaugcccugag

SEQ ID NO: 88616 - RNA, 18 nt, Artificial Sequence
  Synthetic
uucucuuccaaaagugag

SEQ ID NO: 88617 - RNA, 19 nt, Artificial Sequence
  Synthetic
uuucucuuccaaaagugag

SEQ ID NO: 88618 - RNA, 20 nt, Artificial Sequence
  Synthetic
guuucucuuccaaaagugag

SEQ ID NO: 88619 - RNA, 21 nt, Artificial Sequence
  Synthetic
  misc_feature (1)..(1): n is a, c, g, or u
nguuucucuuccaaaagugag

SEQ ID NO: 88620 - RNA, 22 nt, Artificial Sequence
  Synthetic
  misc_feature (2)..(2): n is a, c, g, or u
cnguuucucuuccaaaagugag

SEQ ID NO: 88621 - RNA, 23 nt, Artificial Sequence
  Synthetic
  misc_feature (3)..(3): n is a, c, g, or u
acnguuucucuuccaaaagugag

SEQ ID NO: 88622 - RNA, 24 nt, Artificial Sequence
  Synthetic
  misc_feature (1)..(1): n is a, c, g, or u
  misc_feature (4)..(4): n is a, c, g, or u
nacnguuucucuuccaaaagugag

SEQ ID NO: 88623 - RNA, 18 nt, Artificial Sequence
  Synthetic
  misc_feature (2)..(2): n is a, c, g, or u
  misc_feature (8)..(8): n is a, c, g, or u
  misc_feature (13)..(13): n is a, c, g, or u
  misc_feature (16)..(16): n is a, c, g, or u
ancccaunaaaunuanag

SEQ ID NO: 88624 - RNA, 19 nt, Artificial Sequence
  Synthetic
  misc_feature (3)..(3): n is a, c, g, or u
  misc_feature (9)..(9): n is a, c, g, or u
  misc_feature (14)..(14): n is a, c, g, or u
  misc_feature (17)..(17): n is a, c, g, or u
uancccaunaaaunuanag

SEQ ID NO: 88625 - RNA, 20 nt, Artificial Sequence
  Synthetic
  misc_feature (4)..(4): n is a, c, g, or u
  misc_feature (10)..(10): n is a, c, g, or u
  misc_feature (15)..(15): n is a, c, g, or u
  misc_feature (18)..(18): n is a, c, g, or u
auancccaunaaaunuanag

SEQ ID NO: 88626 - RNA, 21 nt, Artificial Sequence
  Synthetic
  misc_feature (5)..(5): n is a, c, g, or u
  misc_feature (11)..(11): n is a, c, g, or u
  misc_feature (16)..(16): n is a, c, g, or u
  misc_feature (19)..(19): n is a, c, g, or u
cauancccaunaaaunuanag

SEQ ID NO: 88627 - RNA, 22 nt, Artificial Sequence
  Synthetic
  misc_feature (6)..(6): n is a, c, g, or u
  misc_feature (12)..(12): n is a, c, g, or u
  misc_feature (17)..(17): n is a, c, g, or u
  misc_feature (20)..(20): n is a, c, g, or u
acauancccaunaaaunuanag

SEQ ID NO: 88628 - RNA, 23 nt, Artificial Sequence
  Synthetic
  misc_feature (7)..(7): n is a, c, g, or u
  misc_feature (13)..(13): n is a, c, g, or u
  misc_feature (18)..(18): n is a, c, g, or u
  misc_feature (21)..(21): n is a, c, g, or u
gacauancccaunaaaunuanag

SEQ ID NO: 88629 - RNA, 24 nt, Artificial Sequence
  Synthetic
  misc_feature (8)..(8): n is a, c, g, or u
  misc_feature (14)..(14): n is a, c, g, or u
  misc_feature (19)..(19): n is a, c, g, or u
  misc_feature (22)..(22): n is a, c, g, or u
ugacauancccaunaaaunuanag

SEQ ID NO: 88630 - RNA, 18 nt, Artificial Sequence
  Synthetic
ggcaacauaccuugauag

SEQ ID NO: 88631 - RNA, 19 nt, Artificial Sequence
  Synthetic
gggcaacauaccuugauag

SEQ ID NO: 88632 - RNA, 20 nt, Artificial Sequence
  Synthetic
cgggcaacauaccuugauag

SEQ ID NO: 88633 - RNA, 21 nt, Artificial Sequence
  Synthetic
acgggcaacauaccuugauag

SEQ ID NO: 88634 - RNA, 22 nt, Artificial Sequence
  Synthetic
aacgggcaacauaccuugauag

SEQ ID NO: 88635 - RNA, 23 nt, Artificial Sequence
  Synthetic
aaacgggcaacauaccuugauag

SEQ ID NO: 88636 - RNA, 24 nt, Artificial Sequence
  Synthetic
caaacgggcaacauaccuugauag

SEQ ID NO: 88637 - RNA, 18 nt, Artificial Sequence
  Synthetic
  misc_feature (4)..(4): n is a, c, g, or u
  misc_feature (6)..(6): n is a, c, g, or u
  misc_feature (12)..(12): n is a, c, g, or u
auangngagagncaguag

SEQ ID NO: 88638 - RNA, 19 nt, Artificial Sequence
  Synthetic
  misc_feature (5)..(5): n is a, c, g, or u
  misc_feature (7)..(7): n is a, c, g, or u
  misc_feature (13)..(13): n is a, c, g, or u
gauangngagagncaguag

SEQ ID NO: 88639 - RNA, 20 nt, Artificial Sequence
  Synthetic
  misc_feature (6)..(6): n is a, c, g, or u
  misc_feature (8)..(8): n is a, c, g, or u
  misc_feature (14)..(14): n is a, c, g, or u
cgauangngagagncaguag

SEQ ID NO: 88640 - RNA, 21 nt, Artificial Sequence
  Synthetic
  misc_feature (7)..(7): n is a, c, g, or u
  misc_feature (9)..(9): n is a, c, g, or u
  misc_feature (15)..(15): n is a, c, g, or u
acgauangngagagncaguag

SEQ ID NO: 88641 - RNA, 22 nt, Artificial Sequence
  Synthetic
  misc_feature (8)..(8): n is a, c, g, or u
  misc_feature (10)..(10): n is a, c, g, or u
  misc_feature (16)..(16): n is a, c, g, or u
gacgauangngagagncaguag

SEQ ID NO: 88642 - RNA, 23 nt, Artificial Sequence
  Synthetic
  misc_feature (9)..(9): n is a, c, g, or u
  misc_feature (11)..(11): n is a, c, g, or u
  misc_feature (17)..(17): n is a, c, g, or u
ugacgauangngagagncaguag

SEQ ID NO: 88643 - RNA, 24 nt, Artificial Sequence
  Synthetic
  misc_feature (10)..(10): n is a, c, g, or u
  misc_feature (12)..(12): n is a, c, g, or u
  misc_feature (18)..(18): n is a, c, g, or u
uugacgauangngagagncaguag

SEQ ID NO: 88644 - RNA, 18 nt, Artificial Sequence
  Synthetic
ugaacaagagaugauuag

SEQ ID NO: 88645 - RNA, 19 nt, Artificial Sequence
  Synthetic
augaacaagagaugauuag

SEQ ID NO: 88646 - RNA, 20 nt, Artificial Sequence
  Synthetic
caugaacaagagaugauuag

SEQ ID NO: 88647 - RNA, 21 nt, Artificial Sequence
  Synthetic
acaugaacaagagaugauuag

SEQ ID NO: 88648 - RNA, 22 nt, Artificial Sequence
  Synthetic
gacaugaacaagagaugauuag

SEQ ID NO: 88649 - RNA, 23 nt, Artificial Sequence
  Synthetic
ggacaugaacaagagaugauuag

SEQ ID NO: 88650 - RNA, 24 nt, Artificial Sequence
  Synthetic
aggacaugaacaagagaugauuag

SEQ ID NO: 88651 - RNA, 18 nt, Artificial Sequence
  Synthetic
gguguaaauguauauuag

SEQ ID NO: 88652 - RNA, 19 nt, Artificial Sequence
  Synthetic
ugguguaaauguauauuag

SEQ ID NO: 88653 - RNA, 20 nt, Artificial Sequence
  Synthetic
uugguguaaauguauauuag

SEQ ID NO: 88654 - RNA, 21 nt, Artificial Sequence
  Synthetic
cuugguguaaauguauauuag

SEQ ID NO: 88655 - RNA, 22 nt, Artificial Sequence
  Synthetic
ucuugguguaaauguauauuag

SEQ ID NO: 88656 - RNA, 23 nt, Artificial Sequence
  Synthetic
gucuugguguaaauguauauuag

SEQ ID NO: 88657 - RNA, 24 nt, Artificial Sequence
  Synthetic
ugucuugguguaaauguauauuag

SEQ ID NO: 88658 - RNA, 18 nt, Artificial Sequence
  Synthetic
aagugaaagccugcuuag

SEQ ID NO: 88659 - RNA, 19 nt, Artificial Sequence
  Synthetic
aaagugaaagccugcuuag

SEQ ID NO: 88660 - RNA, 20 nt, Artificial Sequence
  Synthetic
gaaagugaaagccugcuuag

SEQ ID NO: 88661 - RNA, 21 nt, Artificial Sequence
  Synthetic
agaaagugaaagccugcuuag

SEQ ID NO: 88662 - RNA, 22 nt, Artificial Sequence
  Synthetic
gagaaagugaaagccugcuuag

SEQ ID NO: 88663 - RNA, 23 nt, Artificial Sequence
  Synthetic
cgagaaagugaaagccugcuuag

SEQ ID NO: 88664 - RNA, 24 nt, Artificial Sequence
  Synthetic
gcgagaaagugaaagccugcuuag

SEQ ID NO: 88665 - RNA, 18 nt, Artificial Sequence
  Synthetic
ggaauuagaggacaaacg

SEQ ID NO: 88666 - RNA, 19 nt, Artificial Sequence
  Synthetic
uggaauuagaggacaaacg

SEQ ID NO: 88667 - RNA, 20 nt, Artificial Sequence
  Synthetic
cuggaauuagaggacaaacg

SEQ ID NO: 88668 - RNA, 21 nt, Artificial Sequence
  Synthetic
ccuggaauuagaggacaaacg

SEQ ID NO: 88669 - RNA, 22 nt, Artificial Sequence
  Synthetic
uccuggaauuagaggacaaacg

SEQ ID NO: 88670 - RNA, 23 nt, Artificial Sequence
  Synthetic
auccuggaauuagaggacaaacg

SEQ ID NO: 88671 - RNA, 24 nt, Artificial Sequence
  Synthetic
gauccuggaauuagaggacaaacg

SEQ ID NO: 88672 - RNA, 18 nt, Artificial Sequence
  Synthetic
  misc_feature (11)..(11): n is a, c, g, or u
  misc_feature (14)..(14): n is a, c, g, or u
ccguggucggncgnaacg

SEQ ID NO: 88673 - RNA, 19 nt, Artificial Sequence
  Synthetic
  misc_feature (12)..(12): n is a, c, g, or u
  misc_feature (15)..(15): n is a, c, g, or u
cccguggucggncgnaacg

SEQ ID NO: 88674 - RNA, 20 nt, Artificial Sequence
  Synthetic
  misc_feature (13)..(13): n is a, c, g, or u
  misc_feature (16)..(16): n is a, c, g, or u
ccccguggucggncgnaacg

SEQ ID NO: 88675 - RNA, 21 nt, Artificial Sequence
  Synthetic
  misc_feature (14)..(14): n is a, c, g, or u
  misc_feature (17)..(17): n is a, c, g, or u
gccccguggucggncgnaacg

SEQ ID NO: 88676 - RNA, 22 nt, Artificial Sequence
  Synthetic
  misc_feature (15)..(15): n is a, c, g, or u
  misc_feature (18)..(18): n is a, c, g, or u
cgccccguggucggncgnaacg

SEQ ID NO: 88677 - RNA, 23 nt, Artificial Sequence
  Synthetic
  misc_feature (16)..(16): n is a, c, g, or u
  misc_feature (19)..(19): n is a, c, g, or u
gcgccccguggucggncgnaacg

SEQ ID NO: 88678 - RNA, 24 nt, Artificial Sequence
  Synthetic
  misc_feature (17)..(17): n is a, c, g, or u
  misc_feature (20)..(20): n is a, c, g, or u
ugcgccccguggucggncgnaacg

SEQ ID NO: 88679 - RNA, 18 nt, Artificial Sequence
  Synthetic
aaccccgccuguaacacg

SEQ ID NO: 88680 - RNA, 19 nt, Artificial Sequence
  Synthetic
aaaccccgccuguaacacg

SEQ ID NO: 88681 - RNA, 20 nt, Artificial Sequence
  Synthetic
aaaaccccgccuguaacacg

SEQ ID NO: 88682 - RNA, 21 nt, Artificial Sequence
  Synthetic
aaaaaccccgccuguaacacg

SEQ ID NO: 88683 - RNA, 22 nt, Artificial Sequence
  Synthetic
gaaaaaccccgccuguaacacg

SEQ ID NO: 88684 - RNA, 23 nt, Artificial Sequence
  Synthetic
agaaaaaccccgccuguaacacg

SEQ ID NO: 88685 - RNA, 24 nt, Artificial Sequence
  Synthetic
aagaaaaaccccgccuguaacacg

SEQ ID NO: 88686 - RNA, 18 nt, Artificial Sequence
  Synthetic
  misc_feature (4)..(4): n is a, c, g, or u
  misc_feature (7)..(7): n is a, c, g, or u
cggncgnaacggcagacg

SEQ ID NO: 88687 - RNA, 19 nt, Artificial Sequence
  Synthetic
  misc_feature (5)..(5): n is a, c, g, or u
  misc_feature (8)..(8): n is a, c, g, or u
ucggncgnaacggcagacg

SEQ ID NO: 88688 - RNA, 20 nt, Artificial Sequence
  Synthetic
  misc_feature (6)..(6): n is a, c, g, or u
  misc_feature (9)..(9): n is a, c, g, or u
gucggncgnaacggcagacg

SEQ ID NO: 88689 - RNA, 21 nt, Artificial Sequence
  Synthetic
  misc_feature (7)..(7): n is a, c, g, or u
  misc_feature (10)..(10): n is a, c, g, or u
ggucggncgnaacggcagacg

SEQ ID NO: 88690 - RNA, 22 nt, Artificial Sequence
  Synthetic
  misc_feature (8)..(8): n is a, c, g, or u
  misc_feature (11)..(11): n is a, c, g, or u
uggucggncgnaacggcagacg

SEQ ID NO: 88691 - RNA, 23 nt, Artificial Sequence
  Synthetic
  misc_feature (9)..(9): n is a, c, g, or u
  misc_feature (12)..(12): n is a, c, g, or u
guggucggncgnaacggcagacg

SEQ ID NO: 88692 - RNA, 24 nt, Artificial Sequence
  Synthetic
  misc_feature (10)..(10): n is a, c, g, or u
  misc_feature (13)..(13): n is a, c, g, or u
cguggucggncgnaacggcagacg

SEQ ID NO: 88693 - RNA, 18 nt, Artificial Sequence
  Synthetic
gguggucuccaugcgacg

SEQ ID NO: 88694 - RNA, 19 nt, Artificial Sequence
  Synthetic
cgguggucuccaugcgacg

SEQ ID NO: 88695 - RNA, 20 nt, Artificial Sequence
  Synthetic
acgguggucuccaugcgacg

SEQ ID NO: 88696 - RNA, 18 nt, Artificial Sequence
  Synthetic
cagacggagaaggggacg

SEQ ID NO: 88697 - RNA, 19 nt, Artificial Sequence
  Synthetic
gcagacggagaaggggacg

SEQ ID NO: 88698 - RNA, 20 nt, Artificial Sequence
  Synthetic
ggcagacggagaaggggacg

SEQ ID NO: 88699 - RNA, 21 nt, Artificial Sequence
  Synthetic
cggcagacggagaaggggacg

SEQ ID NO: 88700 - RNA, 22 nt, Artificial Sequence
  Synthetic
acggcagacggagaaggggacg

SEQ ID NO: 88701 - RNA, 23 nt, Artificial Sequence
  Synthetic
aacggcagacggagaaggggacg

SEQ ID NO: 88702 - RNA, 24 nt, Artificial Sequence
  Synthetic
  misc_feature (1)..(1): n is a, c, g, or u
naacggcagacggagaaggggacg

SEQ ID NO: 88703 - RNA, 18 nt, Artificial Sequence
  Synthetic
  misc_feature (13)..(13): n is a, c, g, or u
gagucccaagcgnccccg

SEQ ID NO: 88704 - RNA, 19 nt, Artificial Sequence
  Synthetic
  misc_feature (14)..(14): n is a, c, g, or u
agagucccaagcgnccccg

SEQ ID NO: 88705 - RNA, 20 nt, Artificial Sequence
  Synthetic
  misc_feature (1)..(1): n is a, c, g, or u
  misc_feature (15)..(15): n is a, c, g, or u
nagagucccaagcgnccccg

SEQ ID NO: 88706 - RNA, 21 nt, Artificial Sequence
  Synthetic
  misc_feature (2)..(2): n is a, c, g, or u
  misc_feature (16)..(16): n is a, c, g, or u
anagagucccaagcgnccccg

SEQ ID NO: 88707 - RNA, 22 nt, Artificial Sequence
  Synthetic
  misc_feature (3)..(3): n is a, c, g, or u
  misc_feature (17)..(17): n is a, c, g, or u
ganagagucccaagcgnccccg

SEQ ID NO: 88708 - RNA, 23 nt, Artificial Sequence
  Synthetic
  misc_feature (4)..(4): n is a, c, g, or u
  misc_feature (18)..(18): n is a, c, g, or u
cganagagucccaagcgnccccg

SEQ ID NO: 88709 - RNA, 24 nt, Artificial Sequence
  Synthetic
  misc_feature (5)..(5): n is a, c, g, or u
  misc_feature (19)..(19): n is a, c, g, or u
acganagagucccaagcgnccccg

SEQ ID NO: 88710 - RNA, 18 nt, Artificial Sequence
  Synthetic
uaaacaaaggacgucccg

SEQ ID NO: 88711 - RNA, 19 nt, Artificial Sequence
  Synthetic
guaaacaaaggacgucccg

SEQ ID NO: 88712 - RNA, 20 nt, Artificial Sequence
  Synthetic
cguaaacaaaggacgucccg

SEQ ID NO: 88713 - RNA, 21 nt, Artificial Sequence
  Synthetic
acguaaacaaaggacgucccg

SEQ ID NO: 88714 - RNA, 22 nt, Artificial Sequence
  Synthetic
gacguaaacaaaggacgucccg

SEQ ID NO: 88715 - RNA, 23 nt, Artificial Sequence
  Synthetic
ggacguaaacaaaggacgucccg

SEQ ID NO: 88716 - RNA, 24 nt, Artificial Sequence
  Synthetic
gggacguaaacaaaggacgucccg

SEQ ID NO: 88717 - RNA, 18 nt, Artificial Sequence
  Synthetic
ccgcgggauucagcgccg

SEQ ID NO: 88718 - RNA, 19 nt, Artificial Sequence
  Synthetic
uccgcgggauucagcgccg

SEQ ID NO: 88719 - RNA, 20 nt, Artificial Sequence
  Synthetic
guccgcgggauucagcgccg

SEQ ID NO: 88720 - RNA, 21 nt, Artificial Sequence
  Synthetic
cguccgcgggauucagcgccg

SEQ ID NO: 88721 - RNA, 22 nt, Artificial Sequence
  Synthetic
ucguccgcgggauucagcgccg

SEQ ID NO: 88722 - RNA, 23 nt, Artificial Sequence
  Synthetic
gucguccgcgggauucagcgccg

SEQ ID NO: 88723 - RNA, 24 nt, Artificial Sequence
  Synthetic
ggucguccgcgggauucagcgccg

SEQ ID NO: 88724 - RNA, 18 nt, Artificial Sequence
  Synthetic
cagaccuggccguugccg

SEQ ID NO: 88725 - RNA, 19 nt, Artificial Sequence
  Synthetic
acagaccuggccguugccg

SEQ ID NO: 88726 - RNA, 20 nt, Artificial Sequence
  Synthetic
cacagaccuggccguugccg

SEQ ID NO: 88727 - RNA, 21 nt, Artificial Sequence
  Synthetic
gcacagaccuggccguugccg

SEQ ID NO: 88728 - RNA, 22 nt, Artificial Sequence
  Synthetic
ggcacagaccuggccguugccg

SEQ ID NO: 88729 - RNA, 23 nt, Artificial Sequence
  Synthetic
uggcacagaccuggccguugccg

SEQ ID NO: 88730 - RNA, 24 nt, Artificial Sequence
  Synthetic
uuggcacagaccuggccguugccg

SEQ ID NO: 88731 - RNA, 18 nt, Artificial Sequence
  Synthetic
gugcgaauccacacuccg

SEQ ID NO: 88732 - RNA, 19 nt, Artificial Sequence
  Synthetic
agugcgaauccacacuccg

SEQ ID NO: 88733 - RNA, 20 nt, Artificial Sequence
  Synthetic
gagugcgaauccacacuccg

SEQ ID NO: 88734 - RNA, 18 nt, Artificial Sequence
  Synthetic
gcacagacggggaguccg

SEQ ID NO: 88735 - RNA, 19 nt, Artificial Sequence
  Synthetic
ggcacagacggggaguccg

SEQ ID NO: 88736 - RNA, 20 nt, Artificial Sequence
  Synthetic
aggcacagacggggaguccg

SEQ ID NO: 88737 - RNA, 21 nt, Artificial Sequence
  Synthetic
aaggcacagacggggaguccg

SEQ ID NO: 88738 - RNA, 22 nt, Artificial Sequence
  Synthetic
gaaggcacagacggggaguccg

SEQ ID NO: 88739 - RNA, 23 nt, Artificial Sequence
  Synthetic
agaaggcacagacggggaguccg

SEQ ID NO: 88740 - RNA, 24 nt, Artificial Sequence
  Synthetic
gagaaggcacagacggggaguccg

SEQ ID NO: 88741 - RNA, 18 nt, Artificial Sequence
  Synthetic
auacaggugcaauuuccg

SEQ ID NO: 88742 - RNA, 19 nt, Artificial Sequence
  Synthetic
aauacaggugcaauuuccg

SEQ ID NO: 88743 - RNA, 20 nt, Artificial Sequence
  Synthetic
gaauacaggugcaauuuccg

SEQ ID NO: 88744 - RNA, 21 nt, Artificial Sequence
  Synthetic
ggaauacaggugcaauuuccg

SEQ ID NO: 88745 - RNA, 22 nt, Artificial Sequence
  Synthetic
gggaauacaggugcaauuuccg

SEQ ID NO: 88746 - RNA, 23 nt, Artificial Sequence
  Synthetic
ugggaauacaggugcaauuuccg

SEQ ID NO: 88747 - RNA, 24 nt, Artificial Sequence
  Synthetic
augggaauacaggugcaauuuccg

SEQ ID NO: 88748 - RNA, 18 nt, Artificial Sequence
  Synthetic
cugcgagcaaaacaagcg

SEQ ID NO: 88749 - RNA, 19 nt, Artificial Sequence
  Synthetic
gcugcgagcaaaacaagcg

SEQ ID NO: 88750 - RNA, 20 nt, Artificial Sequence
  Synthetic
ugcugcgagcaaaacaagcg

SEQ ID NO: 88751 - RNA, 21 nt, Artificial Sequence
  Synthetic
cugcugcgagcaaaacaagcg

SEQ ID NO: 88752 - RNA, 22 nt, Artificial Sequence
  Synthetic
ccugcugcgagcaaaacaagcg

SEQ ID NO: 88753 - RNA, 23 nt, Artificial Sequence
  Synthetic
accugcugcgagcaaaacaagcg

SEQ ID NO: 88754 - RNA, 24 nt, Artificial Sequence
  Synthetic
gaccugcugcgagcaaaacaagcg

SEQ ID NO: 88755 - RNA, 18 nt, Artificial Sequence
  Synthetic
agaaaauugguaacagcg

SEQ ID NO: 88756 - RNA, 19 nt, Artificial Sequence
  Synthetic
aagaaaauugguaacagcg

SEQ ID NO: 88757 - RNA, 20 nt, Artificial Sequence
  Synthetic
aaagaaaauugguaacagcg

SEQ ID NO: 88758 - RNA, 21 nt, Artificial Sequence
  Synthetic
aaaagaaaauugguaacagcg

SEQ ID NO: 88759 - RNA, 22 nt, Artificial Sequence
  Synthetic
caaaagaaaauugguaacagcg

SEQ ID NO: 88760 - RNA, 23 nt, Artificial Sequence
  Synthetic
acaaaagaaaauugguaacagcg

SEQ ID NO: 88761 - RNA, 24 nt, Artificial Sequence
  Synthetic
gacaaaagaaaauugguaacagcg

SEQ ID NO: 88762 - RNA, 18 nt, Artificial Sequence
  Synthetic
acagacggggaguccgcg

SEQ ID NO: 88763 - RNA, 19 nt, Artificial Sequence
  Synthetic
cacagacggggaguccgcg

SEQ ID NO: 88764 - RNA, 20 nt, Artificial Sequence
  Synthetic
gcacagacggggaguccgcg

SEQ ID NO: 88765 - RNA, 21 nt, Artificial Sequence
  Synthetic
ggcacagacggggaguccgcg

SEQ ID NO: 88766 - RNA, 22 nt, Artificial Sequence
  Synthetic
aggcacagacggggaguccgcg

SEQ ID NO: 88767 - RNA, 23 nt, Artificial Sequence
  Synthetic
aaggcacagacggggaguccgcg

SEQ ID NO: 88768 - RNA, 24 nt, Artificial Sequence
  Synthetic
gaaggcacagacggggaguccgcg

SEQ ID NO: 88769 - RNA, 18 nt, Artificial Sequence
  Synthetic
accuucgucugcgaggcg

SEQ ID NO: 88770 - RNA, 19 nt, Artificial Sequence
  Synthetic
gaccuucgucugcgaggcg

SEQ ID NO: 88771 - RNA, 20 nt, Artificial Sequence
  Synthetic
agaccuucgucugcgaggcg

SEQ ID NO: 88772 - RNA, 18 nt, Artificial Sequence
  Synthetic
aucuucugcgacgcggcg

SEQ ID NO: 88773 - RNA, 19 nt, Artificial Sequence
  Synthetic
gaucuucugcgacgcggcg

SEQ ID NO: 88774 - RNA, 20 nt, Artificial Sequence
  Synthetic
agaucuucugcgacgcggcg

SEQ ID NO: 88775 - RNA, 18 nt, Artificial Sequence
  Synthetic
aggccuuguaaguuggcg

SEQ ID NO: 88776 - RNA, 19 nt, Artificial Sequence
  Synthetic
aaggccuuguaaguuggcg

SEQ ID NO: 88777 - RNA, 20 nt, Artificial Sequence
  Synthetic
aaaggccuuguaaguuggcg

SEQ ID NO: 88778 - RNA, 21 nt, Artificial Sequence
  Synthetic
gaaaggccuuguaaguuggcg

SEQ ID NO: 88779 - RNA, 22 nt, Artificial Sequence
  Synthetic
agaaaggccuuguaaguuggcg

SEQ ID NO: 88780 - RNA, 23 nt, Artificial Sequence
  Synthetic
cagaaaggccuuguaaguuggcg

SEQ ID NO: 88781 - RNA, 24 nt, Artificial Sequence
  Synthetic
acagaaaggccuuguaaguuggcg

SEQ ID NO: 88782 - RNA, 18 nt, Artificial Sequence
  Synthetic
gcuccuaccuuguuggcg

SEQ ID NO: 88783 - RNA, 19 nt, Artificial Sequence
  Synthetic
agcuccuaccuuguuggcg

SEQ ID NO: 88784 - RNA, 20 nt, Artificial Sequence
  Synthetic
cagcuccuaccuuguuggcg

SEQ ID NO: 88785 - RNA, 21 nt, Artificial Sequence
  Synthetic
ccagcuccuaccuuguuggcg

SEQ ID NO: 88786 - RNA, 22 nt, Artificial Sequence
  Synthetic
uccagcuccuaccuuguuggcg

SEQ ID NO: 88787 - RNA, 23 nt, Artificial Sequence
  Synthetic
cuccagcuccuaccuuguuggcg

SEQ ID NO: 88788 - RNA, 24 nt, Artificial Sequence
  Synthetic
gcuccagcuccuaccuuguuggcg

SEQ ID NO: 88789 - RNA, 18 nt, Artificial Sequence
  Synthetic
ugcuccagaccugcugcg

SEQ ID NO: 88790 - RNA, 19 nt, Artificial Sequence
  Synthetic
uugcuccagaccugcugcg

SEQ ID NO: 88791 - RNA, 20 nt, Artificial Sequence
  Synthetic
uuugcuccagaccugcugcg

SEQ ID NO: 88792 - RNA, 21 nt, Artificial Sequence
  Synthetic
guuugcuccagaccugcugcg

SEQ ID NO: 88793 - RNA, 22 nt, Artificial Sequence
  Synthetic
uguuugcuccagaccugcugcg

SEQ ID NO: 88794 - RNA, 23 nt, Artificial Sequence
  Synthetic
auguuugcuccagaccugcugcg

SEQ ID NO: 88795 - RNA, 24 nt, Artificial Sequence
  Synthetic
aauguuugcuccagaccugcugcg

SEQ ID NO: 88796 - RNA, 18 nt, Artificial Sequence
  Synthetic
ccaaaaggccuccgugcg

SEQ ID NO: 88797 - RNA, 19 nt, Artificial Sequence
  Synthetic
cccaaaaggccuccgugcg

SEQ ID NO: 88798 - RNA, 20 nt, Artificial Sequence
  Synthetic
ccccaaaaggccuccgugcg

SEQ ID NO: 88799 - RNA, 21 nt, Artificial Sequence
  Synthetic
accccaaaaggccuccgugcg

SEQ ID NO: 88800 - RNA, 22 nt, Artificial Sequence
  Synthetic
caccccaaaaggccuccgugcg

SEQ ID NO: 88801 - RNA, 23 nt, Artificial Sequence
  Synthetic
ccaccccaaaaggccuccgugcg

SEQ ID NO: 88802 - RNA, 24 nt, Artificial Sequence
  Synthetic
uccaccccaaaaggccuccgugcg

SEQ ID NO: 88803 - RNA, 18 nt, Artificial Sequence
  Synthetic
aaacgauguauauuugcg

SEQ ID NO: 88804 - RNA, 19 nt, Artificial Sequence
  Synthetic
gaaacgauguauauuugcg

SEQ ID NO: 88805 - RNA, 20 nt, Artificial Sequence
  Synthetic
ggaaacgauguauauuugcg

SEQ ID NO: 88806 - RNA, 21 nt, Artificial Sequence
  Synthetic
uggaaacgauguauauuugcg

SEQ ID NO: 88807 - RNA, 22 nt, Artificial Sequence
  Synthetic
auggaaacgauguauauuugcg

SEQ ID NO: 88808 - RNA, 23 nt, Artificial Sequence
  Synthetic
cauggaaacgauguauauuugcg

SEQ ID NO: 88809 - RNA, 24 nt, Artificial Sequence
  Synthetic
ccauggaaacgauguauauuugcg

SEQ ID NO: 88810 - RNA, 18 nt, Artificial Sequence
  Synthetic
guuccgcaguauggaucg

SEQ ID NO: 88811 - RNA, 19 nt, Artificial Sequence
  Synthetic
aguuccgcaguauggaucg

SEQ ID NO: 88812 - RNA, 20 nt, Artificial Sequence
  Synthetic
gaguuccgcaguauggaucg

SEQ ID NO: 88813 - RNA, 21 nt, Artificial Sequence
  Synthetic
ggaguuccgcaguauggaucg

SEQ ID NO: 88814 - RNA, 22 nt, Artificial Sequence
  Synthetic
aggaguuccgcaguauggaucg

SEQ ID NO: 88815 - RNA, 23 nt, Artificial Sequence
  Synthetic
uaggaguuccgcaguauggaucg

SEQ ID NO: 88816 - RNA, 24 nt, Artificial Sequence
  Synthetic
cuaggaguuccgcaguauggaucg

SEQ ID NO: 88817 - RNA, 18 nt, Artificial Sequence
  Synthetic
caggguccccaauccucg

SEQ ID NO: 88818 - RNA, 19 nt, Artificial Sequence
  Synthetic
gcaggguccccaauccucg

SEQ ID NO: 88819 - RNA, 20 nt, Artificial Sequence
  Synthetic
cgcaggguccccaauccucg

SEQ ID NO: 88820 - RNA, 18 nt, Artificial Sequence
  Synthetic
  misc_feature (9)..(9): n is a, c, g, or u
  misc_feature (13)..(13): n is a, c, g, or u
uuccuugancagnagucg

SEQ ID NO: 88821 - RNA, 19 nt, Artificial Sequence
  Synthetic
  misc_feature (10)..(10): n is a, c, g, or u
  misc_feature (14)..(14): n is a, c, g, or u
guuccuugancagnagucg

SEQ ID NO: 88822 - RNA, 20 nt, Artificial Sequence
  Synthetic
  misc_feature (11)..(11): n is a, c, g, or u
  misc_feature (15)..(15): n is a, c, g, or u
gguuccuugancagnagucg

SEQ ID NO: 88823 - RNA, 21 nt, Artificial Sequence
  Synthetic
  misc_feature (12)..(12): n is a, c, g, or u
  misc_feature (16)..(16): n is a, c, g, or u
agguuccuugancagnagucg

SEQ ID NO: 88824 - RNA, 22 nt, Artificial Sequence
  Synthetic
  misc_feature (13)..(13): n is a, c, g, or u
  misc_feature (17)..(17): n is a, c, g, or u
gagguuccuugancagnagucg

SEQ ID NO: 88825 - RNA, 23 nt, Artificial Sequence
  Synthetic
  misc_feature (14)..(14): n is a, c, g, or u
  misc_feature (18)..(18): n is a, c, g, or u
agagguuccuugancagnagucg

SEQ ID NO: 88826 - RNA, 24 nt, Artificial Sequence
  Synthetic
  misc_feature (15)..(15): n is a, c, g, or u
  misc_feature (19)..(19): n is a, c, g, or u
uagagguuccuugancagnagucg

SEQ ID NO: 88827 - RNA, 18 nt, Artificial Sequence
  Synthetic
aggggaccugccucgucg

SEQ ID NO: 88828 - RNA, 19 nt, Artificial Sequence
  Synthetic
uaggggaccugccucgucg

SEQ ID NO: 88829 - RNA, 20 nt, Artificial Sequence
  Synthetic
cuaggggaccugccucgucg

SEQ ID NO: 88830 - RNA, 18 nt, Artificial Sequence
  Synthetic
ggauccaacugguggucg

SEQ ID NO: 88831 - RNA, 19 nt, Artificial Sequence
  Synthetic
uggauccaacugguggucg

SEQ ID NO: 88832 - RNA, 20 nt, Artificial Sequence
  Synthetic
cuggauccaacugguggucg

SEQ ID NO: 88833 - RNA, 21 nt, Artificial Sequence
  Synthetic
gcuggauccaacugguggucg

SEQ ID NO: 88834 - RNA, 22 nt, Artificial Sequence
  Synthetic
ggcuggauccaacugguggucg

SEQ ID NO: 88835 - RNA, 23 nt, Artificial Sequence
  Synthetic
aggcuggauccaacugguggucg

SEQ ID NO: 88836 - RNA, 24 nt, Artificial Sequence
  Synthetic
aaggcuggauccaacugguggucg

SEQ ID NO: 88837 - RNA, 18 nt, Artificial Sequence
  Synthetic
accacauuguguaaaagg

SEQ ID NO: 88838 - RNA, 19 nt, Artificial Sequence
  Synthetic
aaccacauuguguaaaagg

SEQ ID NO: 88839 - RNA, 20 nt, Artificial Sequence
  Synthetic
uaaccacauuguguaaaagg

SEQ ID NO: 88840 - RNA, 21 nt, Artificial Sequence
  Synthetic
auaaccacauuguguaaaagg

SEQ ID NO: 88841 - RNA, 22 nt, Artificial Sequence
  Synthetic
gauaaccacauuguguaaaagg

SEQ ID NO: 88842 - RNA, 23 nt, Artificial Sequence
  Synthetic
ggauaaccacauuguguaaaagg

SEQ ID NO: 88843 - RNA, 24 nt, Artificial Sequence
  Synthetic
aggauaaccacauuguguaaaagg

SEQ ID NO: 88844 - RNA, 18 nt, Artificial Sequence
  Synthetic
augaguguuucucaaagg

SEQ ID NO: 88845 - RNA, 19 nt, Artificial Sequence
  Synthetic
gaugaguguuucucaaagg

SEQ ID NO: 88846 - RNA, 20 nt, Artificial Sequence
  Synthetic
ggaugaguguuucucaaagg

SEQ ID NO: 88847 - RNA, 21 nt, Artificial Sequence
  Synthetic
aggaugaguguuucucaaagg

SEQ ID NO: 88848 - RNA, 22 nt, Artificial Sequence
  Synthetic
gaggaugaguguuucucaaagg

SEQ ID NO: 88849 - RNA, 23 nt, Artificial Sequence
  Synthetic
ugaggaugaguguuucucaaagg

SEQ ID NO: 88850 - RNA, 24 nt, Artificial Sequence
  Synthetic
cugaggaugaguguuucucaaagg

SEQ ID NO: 88851 - RNA, 18 nt, Artificial Sequence
  Synthetic
cgggcaacgggguaaagg

SEQ ID NO: 88852 - RNA, 19 nt, Artificial Sequence
  Synthetic
ccgggcaacgggguaaagg

SEQ ID NO: 88853 - RNA, 20 nt, Artificial Sequence
  Synthetic
gccgggcaacgggguaaagg

SEQ ID NO: 88854 - RNA, 21 nt, Artificial Sequence
  Synthetic
ugccgggcaacgggguaaagg

SEQ ID NO: 88855 - RNA, 22 nt, Artificial Sequence
  Synthetic
uugccgggcaacgggguaaagg

SEQ ID NO: 88856 - RNA, 23 nt, Artificial Sequence
  Synthetic
guugccgggcaacgggguaaagg

SEQ ID NO: 88857 - RNA, 24 nt, Artificial Sequence
  Synthetic
cguugccgggcaacgggguaaagg

SEQ ID NO: 88858 - RNA, 18 nt, Artificial Sequence
  Synthetic
  misc_feature (1)..(1): n is a, c, g, or u
  misc_feature (4)..(4): n is a, c, g, or u
nccnaaagccacccaagg

SEQ ID NO: 88859 - RNA, 19 nt, Artificial Sequence
  Synthetic
  misc_feature (2)..(2): n is a, c, g, or u
  misc_feature (5)..(5): n is a, c, g, or u
gnccnaaagccacccaagg

SEQ ID NO: 88860 - RNA, 20 nt, Artificial Sequence
  Synthetic
  misc_feature (3)..(3): n is a, c, g, or u
  misc_feature (6)..(6): n is a, c, g, or u
ugnccnaaagccacccaagg

SEQ ID NO: 88861 - RNA, 21 nt, Artificial Sequence
  Synthetic
  misc_feature (4)..(4): n is a, c, g, or u
  misc_feature (7)..(7): n is a, c, g, or u
augnccnaaagccacccaagg

SEQ ID NO: 88862 - RNA, 22 nt, Artificial Sequence
  Synthetic
  misc_feature (5)..(5): n is a, c, g, or u
  misc_feature (8)..(8): n is a, c, g, or u
caugnccnaaagccacccaagg

SEQ ID NO: 88863 - RNA, 23 nt, Artificial Sequence
  Synthetic
  misc_feature (6)..(6): n is a, c, g, or u
  misc_feature (9)..(9): n is a, c, g, or u
ccaugnccnaaagccacccaagg

SEQ ID NO: 88864 - RNA, 24 nt, Artificial Sequence
  Synthetic
  misc_feature (7)..(7): n is a, c, g, or u
  misc_feature (10)..(10): n is a, c, g, or u
uccaugnccnaaagccacccaagg

SEQ ID NO: 88865 - RNA, 18 nt, Artificial Sequence
  Synthetic
aggaaagaagucagaagg

SEQ ID NO: 88866 - RNA, 19 nt, Artificial Sequence
  Synthetic
aaggaaagaagucagaagg

SEQ ID NO: 88867 - RNA, 20 nt, Artificial Sequence
  Synthetic
gaaggaaagaagucagaagg

SEQ ID NO: 88868 - RNA, 21 nt, Artificial Sequence
  Synthetic
  misc_feature (1)..(1): n is a, c, g, or u
ngaaggaaagaagucagaagg

SEQ ID NO: 88869 - RNA, 22 nt, Artificial Sequence
  Synthetic
  misc_feature (2)..(2): n is a, c, g, or u
cngaaggaaagaagucagaagg

SEQ ID NO: 88870 - RNA, 23 nt, Artificial Sequence
  Synthetic
  misc_feature (3)..(3): n is a, c, g, or u
acngaaggaaagaagucagaagg

SEQ ID NO: 88871 - RNA, 24 nt, Artificial Sequence
  Synthetic
  misc_feature (4)..(4): n is a, c, g, or u
uacngaaggaaagaagucagaagg

SEQ ID NO: 88872 - RNA, 18 nt, Artificial Sequence
  Synthetic
guccggcagaugagaagg

SEQ ID NO: 88873 - RNA, 19 nt, Artificial Sequence
  Synthetic
gguccggcagaugagaagg

SEQ ID NO: 88874 - RNA, 20 nt, Artificial Sequence
  Synthetic
cgguccggcagaugagaagg

SEQ ID NO: 88875 - RNA, 21 nt, Artificial Sequence
  Synthetic
acgguccggcagaugagaagg

SEQ ID NO: 88876 - RNA, 22 nt, Artificial Sequence
  Synthetic
cacgguccggcagaugagaagg

SEQ ID NO: 88877 - RNA, 23 nt, Artificial Sequence
  Synthetic
acacgguccggcagaugagaagg

SEQ ID NO: 88878 - RNA, 24 nt, Artificial Sequence
  Synthetic
cacacgguccggcagaugagaagg

SEQ ID NO: 88879 - RNA, 18 nt, Artificial Sequence
  Synthetic
  misc_feature (13)..(13): n is a, c, g, or u
aagaucucguacngaagg

SEQ ID NO: 88880 - RNA, 19 nt, Artificial Sequence
  Synthetic
  misc_feature (14)..(14): n is a, c, g, or u
gaagaucucguacngaagg

SEQ ID NO: 88881 - RNA, 20 nt, Artificial Sequence
  Synthetic
  misc_feature (15)..(15): n is a, c, g, or u
agaagaucucguacngaagg

SEQ ID NO: 88882 - RNA, 21 nt, Artificial Sequence
  Synthetic
  misc_feature (1)..(1): n is a, c, g, or u
  misc_feature (16)..(16): n is a, c, g, or u
nagaagaucucguacngaagg

SEQ ID NO: 88883 - RNA, 22 nt, Artificial Sequence
  Synthetic
  misc_feature (2)..(2): n is a, c, g, or u
  misc_feature (17)..(17): n is a, c, g, or u
cnagaagaucucguacngaagg

SEQ ID NO: 88884 - RNA, 23 nt, Artificial Sequence
  Synthetic
  misc_feature (3)..(3): n is a, c, g, or u
  misc_feature (18)..(18): n is a, c, g, or u
ucnagaagaucucguacngaagg

SEQ ID NO: 88885 - RNA, 24 nt, Artificial Sequence
  Synthetic
  misc_feature (4)..(4): n is a, c, g, or u
  misc_feature (19)..(19): n is a, c, g, or u
aucnagaagaucucguacngaagg

SEQ ID NO: 88886 - RNA, 18 nt, Artificial Sequence
  Synthetic
cuaguaaacugagccagg

SEQ ID NO: 88887 - RNA, 19 nt, Artificial Sequence
  Synthetic
acuaguaaacugagccagg

SEQ ID NO: 88888 - RNA, 20 nt, Artificial Sequence
  Synthetic
cacuaguaaacugagccagg

SEQ ID NO: 88889 - RNA, 21 nt, Artificial Sequence
  Synthetic
gcacuaguaaacugagccagg

SEQ ID NO: 88890 - RNA, 22 nt, Artificial Sequence
  Synthetic
ggcacuaguaaacugagccagg

SEQ ID NO: 88891 - RNA, 23 nt, Artificial Sequence
  Synthetic
uggcacuaguaaacugagccagg

SEQ ID NO: 88892 - RNA, 24 nt, Artificial Sequence
  Synthetic
auggcacuaguaaacugagccagg

SEQ ID NO: 88893 - RNA, 18 nt, Artificial Sequence
  Synthetic
augaggcauagcagcagg

SEQ ID NO: 88894 - RNA, 19 nt, Artificial Sequence
  Synthetic
gaugaggcauagcagcagg

SEQ ID NO: 88895 - RNA, 20 nt, Artificial Sequence
  Synthetic
agaugaggcauagcagcagg

SEQ ID NO: 88896 - RNA, 21 nt, Artificial Sequence
  Synthetic
aagaugaggcauagcagcagg

SEQ ID NO: 88897 - RNA, 22 nt, Artificial Sequence
  Synthetic
gaagaugaggcauagcagcagg

SEQ ID NO: 88898 - RNA, 23 nt, Artificial Sequence
  Synthetic
agaagaugaggcauagcagcagg

SEQ ID NO: 88899 - RNA, 24 nt, Artificial Sequence
  Synthetic
aagaagaugaggcauagcagcagg

SEQ ID NO: 88900 - RNA, 18 nt, Artificial Sequence
  Synthetic
gagaugauuaggcagagg

SEQ ID NO: 88901 - RNA, 19 nt, Artificial Sequence
  Synthetic
agagaugauuaggcagagg

SEQ ID NO: 88902 - RNA, 20 nt, Artificial Sequence
  Synthetic
aagagaugauuaggcagagg

SEQ ID NO: 88903 - RNA, 21 nt, Artificial Sequence
  Synthetic
caagagaugauuaggcagagg

SEQ ID NO: 88904 - RNA, 22 nt, Artificial Sequence
  Synthetic
acaagagaugauuaggcagagg

SEQ ID NO: 88905 - RNA, 23 nt, Artificial Sequence
  Synthetic
aacaagagaugauuaggcagagg

SEQ ID NO: 88906 - RNA, 24 nt, Artificial Sequence
  Synthetic
gaacaagagaugauuaggcagagg

SEQ ID NO: 88907 - RNA, 18 nt, Artificial Sequence
  Synthetic
ccaugcgacgugcagagg

SEQ ID NO: 88908 - RNA, 19 nt, Artificial Sequence
  Synthetic
uccaugcgacgugcagagg

SEQ ID NO: 88909 - RNA, 20 nt, Artificial Sequence
  Synthetic
cuccaugcgacgugcagagg

SEQ ID NO: 88910 - RNA, 21 nt, Artificial Sequence
  Synthetic
ucuccaugcgacgugcagagg

SEQ ID NO: 88911 - RNA, 22 nt, Artificial Sequence
  Synthetic
gucuccaugcgacgugcagagg

SEQ ID NO: 88912 - RNA, 23 nt, Artificial Sequence
  Synthetic
ggucuccaugcgacgugcagagg

SEQ ID NO: 88913 - RNA, 24 nt, Artificial Sequence
  Synthetic
uggucuccaugcgacgugcagagg

SEQ ID NO: 88914 - RNA, 18 nt, Artificial Sequence
  Synthetic
  misc_feature (1)..(1): n is a, c, g, or u
ngauccuggaauuagagg

SEQ ID NO: 88915 - RNA, 19 nt, Artificial Sequence
  Synthetic
  misc_feature (2)..(2): n is a, c, g, or u
angauccuggaauuagagg

SEQ ID NO: 88916 - RNA, 20 nt, Artificial Sequence
  Synthetic
  misc_feature (3)..(3): n is a, c, g, or u
gangauccuggaauuagagg

SEQ ID NO: 88917 - RNA, 21 nt, Artificial Sequence
  Synthetic
  misc_feature (4)..(4): n is a, c, g, or u
ugangauccuggaauuagagg

SEQ ID NO: 88918 - RNA, 22 nt, Artificial Sequence
  Synthetic
  misc_feature (5)..(5): n is a, c, g, or u
uugangauccuggaauuagagg

SEQ ID NO: 88919 - RNA, 23 nt, Artificial Sequence
  Synthetic
  misc_feature (6)..(6): n is a, c, g, or u
guugangauccuggaauuagagg

SEQ ID NO: 88920 - RNA, 24 nt, Artificial Sequence
  Synthetic
  misc_feature (1)..(1): n is a, c, g, or u
  misc_feature (7)..(7): n is a, c, g, or u
nguugangauccuggaauuagagg

SEQ ID NO: 88921 - RNA, 18 nt, Artificial Sequence
  Synthetic
agaccuucgucugcgagg

SEQ ID NO: 88922 - RNA, 19 nt, Artificial Sequence
  Synthetic
gagaccuucgucugcgagg

SEQ ID NO: 88923 - RNA, 20 nt, Artificial Sequence
  Synthetic
ugagaccuucgucugcgagg

SEQ ID NO: 88924 - RNA, 18 nt, Artificial Sequence
  Synthetic
uuggugagugauuggagg

SEQ ID NO: 88925 - RNA, 19 nt, Artificial Sequence
  Synthetic
guuggugagugauuggagg

SEQ ID NO: 88926 - RNA, 20 nt, Artificial Sequence
  Synthetic
gguuggugagugauuggagg

SEQ ID NO: 88927 - RNA, 21 nt, Artificial Sequence
  Synthetic
agguuggugagugauuggagg

SEQ ID NO: 88928 - RNA, 22 nt, Artificial Sequence
  Synthetic
gagguuggugagugauuggagg

SEQ ID NO: 88929 - RNA, 23 nt, Artificial Sequence
  Synthetic
ggagguuggugagugauuggagg

SEQ ID NO: 88930 - RNA, 24 nt, Artificial Sequence
  Synthetic
aggagguuggugagugauuggagg

SEQ ID NO: 88931 - RNA, 18 nt, Artificial Sequence
  Synthetic
caaggcacagcuuggagg

SEQ ID NO: 88932 - RNA, 19 nt, Artificial Sequence
  Synthetic
ccaaggcacagcuuggagg

SEQ ID NO: 88933 - RNA, 20 nt, Artificial Sequence
  Synthetic
cccaaggcacagcuuggagg

SEQ ID NO: 88934 - RNA, 21 nt, Artificial Sequence
  Synthetic
acccaaggcacagcuuggagg

SEQ ID NO: 88935 - RNA, 22 nt, Artificial Sequence
  Synthetic
cacccaaggcacagcuuggagg

SEQ ID NO: 88936 - RNA, 23 nt, Artificial Sequence
  Synthetic
ccacccaaggcacagcuuggagg

SEQ ID NO: 88937 - RNA, 24 nt, Artificial Sequence
  Synthetic
gccacccaaggcacagcuuggagg

SEQ ID NO: 88938 - RNA, 18 nt, Artificial Sequence
  Synthetic
accaggacaaguuggagg

SEQ ID NO: 88939 - RNA, 19 nt, Artificial Sequence
  Synthetic
aaccaggacaaguuggagg

SEQ ID NO: 88940 - RNA, 20 nt, Artificial Sequence
  Synthetic
uaaccaggacaaguuggagg

SEQ ID NO: 88941 - RNA, 21 nt, Artificial Sequence
  Synthetic
auaaccaggacaaguuggagg

SEQ ID NO: 88942 - RNA, 22 nt, Artificial Sequence
  Synthetic
gauaaccaggacaaguuggagg

SEQ ID NO: 88943 - RNA, 23 nt, Artificial Sequence
  Synthetic
cgauaaccaggacaaguuggagg

SEQ ID NO: 88944 - RNA, 24 nt, Artificial Sequence
  Synthetic
gcgauaaccaggacaaguuggagg

SEQ ID NO: 88945 - RNA, 18 nt, Artificial Sequence
  Synthetic
  misc_feature (1)..(1): n is a, c, g, or u
ngguguuuuccaaugagg

SEQ ID NO: 88946 - RNA, 19 nt, Artificial Sequence
  Synthetic
  misc_feature (2)..(2): n is a, c, g, or u
angguguuuuccaaugagg

SEQ ID NO: 88947 - RNA, 20 nt, Artificial Sequence
  Synthetic
  misc_feature (3)..(3): n is a, c, g, or u
gangguguuuuccaaugagg

SEQ ID NO: 88948 - RNA, 21 nt, Artificial Sequence
  Synthetic
  misc_feature (4)..(4): n is a, c, g, or u
agangguguuuuccaaugagg

SEQ ID NO: 88949 - RNA, 22 nt, Artificial Sequence
  Synthetic
  misc_feature (5)..(5): n is a, c, g, or u
aagangguguuuuccaaugagg

SEQ ID NO: 88950 - RNA, 23 nt, Artificial Sequence
  Synthetic
  misc_feature (6)..(6): n is a, c, g, or u
aaagangguguuuuccaaugagg

SEQ ID NO: 88951 - RNA, 24 nt, Artificial Sequence
  Synthetic
  misc_feature (7)..(7): n is a, c, g, or u
aaaagangguguuuuccaaugagg

SEQ ID NO: 88952 - RNA, 18 nt, Artificial Sequence
  Synthetic
accaacaagaagaugagg

SEQ ID NO: 88953 - RNA, 19 nt, Artificial Sequence
  Synthetic
aaccaacaagaagaugagg

SEQ ID NO: 88954 - RNA, 20 nt, Artificial Sequence
  Synthetic
gaaccaacaagaagaugagg

SEQ ID NO: 88955 - RNA, 21 nt, Artificial Sequence
  Synthetic
agaaccaacaagaagaugagg

SEQ ID NO: 88956 - RNA, 22 nt, Artificial Sequence
  Synthetic
aagaaccaacaagaagaugagg

SEQ ID NO: 88957 - RNA, 23 nt, Artificial Sequence
  Synthetic
gaagaaccaacaagaagaugagg

SEQ ID NO: 88958 - RNA, 24 nt, Artificial Sequence
  Synthetic
agaagaaccaacaagaagaugagg

SEQ ID NO: 88959 - RNA, 18 nt, Artificial Sequence
  Synthetic
gaacaagagaugauuagg

SEQ ID NO: 88960 - RNA, 19 nt, Artificial Sequence
  Synthetic
ugaacaagagaugauuagg

SEQ ID NO: 88961 - RNA, 20 nt, Artificial Sequence
  Synthetic
augaacaagagaugauuagg

SEQ ID NO: 88962 - RNA, 21 nt, Artificial Sequence
  Synthetic
caugaacaagagaugauuagg

SEQ ID NO: 88963 - RNA, 22 nt, Artificial Sequence
  Synthetic
acaugaacaagagaugauuagg

SEQ ID NO: 88964 - RNA, 23 nt, Artificial Sequence
  Synthetic
gacaugaacaagagaugauuagg

SEQ ID NO: 88965 - RNA, 24 nt, Artificial Sequence
  Synthetic
ggacaugaacaagagaugauuagg

SEQ ID NO: 88966 - RNA, 18 nt, Artificial Sequence
  Synthetic
guguaaauguauauuagg

SEQ ID NO: 88967 - RNA, 19 nt, Artificial Sequence
  Synthetic
gguguaaauguauauuagg

SEQ ID NO: 88968 - RNA, 20 nt, Artificial Sequence
  Synthetic
ugguguaaauguauauuagg

SEQ ID NO: 88969 - RNA, 21 nt, Artificial Sequence
  Synthetic
uugguguaaauguauauuagg

SEQ ID NO: 88970 - RNA, 22 nt, Artificial Sequence
  Synthetic
cuugguguaaauguauauuagg

SEQ ID NO: 88971 - RNA, 23 nt, Artificial Sequence
  Synthetic
ucuugguguaaauguauauuagg

SEQ ID NO: 88972 - RNA, 24 nt, Artificial Sequence
  Synthetic
gucuugguguaaauguauauuagg

SEQ ID NO: 88973 - RNA, 18 nt, Artificial Sequence
  Synthetic
cugagccaggagaaacgg

SEQ ID NO: 88974 - RNA, 19 nt, Artificial Sequence
  Synthetic
acugagccaggagaaacgg

SEQ ID NO: 88975 - RNA, 20 nt, Artificial Sequence
  Synthetic
aacugagccaggagaaacgg

SEQ ID NO: 88976 - RNA, 21 nt, Artificial Sequence
  Synthetic
aaacugagccaggagaaacgg

SEQ ID NO: 88977 - RNA, 22 nt, Artificial Sequence
  Synthetic
uaaacugagccaggagaaacgg

SEQ ID NO: 88978 - RNA, 23 nt, Artificial Sequence
  Synthetic
guaaacugagccaggagaaacgg

SEQ ID NO: 88979 - RNA, 24 nt, Artificial Sequence
  Synthetic
aguaaacugagccaggagaaacgg

SEQ ID NO: 88980 - RNA, 18 nt, Artificial Sequence
  Synthetic
gccguugccgggcaacgg

SEQ ID NO: 88981 - RNA, 19 nt, Artificial Sequence
  Synthetic
ggccguugccgggcaacgg

SEQ ID NO: 88982 - RNA, 20 nt, Artificial Sequence
  Synthetic
uggccguugccgggcaacgg

SEQ ID NO: 88983 - RNA, 21 nt, Artificial Sequence
  Synthetic
cuggccguugccgggcaacgg

SEQ ID NO: 88984 - RNA, 22 nt, Artificial Sequence
  Synthetic
ccuggccguugccgggcaacgg

SEQ ID NO: 88985 - RNA, 23 nt, Artificial Sequence
  Synthetic
accuggccguugccgggcaacgg

SEQ ID NO: 88986 - RNA, 24 nt, Artificial Sequence
  Synthetic
gaccuggccguugccgggcaacgg

SEQ ID NO: 88987 - RNA, 18 nt, Artificial Sequence
  Synthetic
gaagcgaagugcacacgg

SEQ ID NO: 88988 - RNA, 19 nt, Artificial Sequence
  Synthetic
ugaagcgaagugcacacgg

SEQ ID NO: 88989 - RNA, 20 nt, Artificial Sequence
  Synthetic
gugaagcgaagugcacacgg

SEQ ID NO: 88990 - RNA, 21 nt, Artificial Sequence
  Synthetic
ggugaagcgaagugcacacgg

SEQ ID NO: 88991 - RNA, 22 nt, Artificial Sequence
  Synthetic
aggugaagcgaagugcacacgg

SEQ ID NO: 88992 - RNA, 23 nt, Artificial Sequence
  Synthetic
gaggugaagcgaagugcacacgg

SEQ ID NO: 88993 - RNA, 24 nt, Artificial Sequence
  Synthetic
agaggugaagcgaagugcacacgg

SEQ ID NO: 88994 - RNA, 18 nt, Artificial Sequence
  Synthetic
  misc_feature (3)..(3): n is a, c, g, or u
  misc_feature (6)..(6): n is a, c, g, or u
ggncgnaacggcagacgg

SEQ ID NO: 88995 - RNA, 19 nt, Artificial Sequence
  Synthetic
  misc_feature (4)..(4): n is a, c, g, or u
  misc_feature (7)..(7): n is a, c, g, or u
cggncgnaacggcagacgg

SEQ ID NO: 88996 - RNA, 20 nt, Artificial Sequence
  Synthetic
  misc_feature (5)..(5): n is a, c, g, or u
  misc_feature (8)..(8): n is a, c, g, or u
ucggncgnaacggcagacgg

SEQ ID NO: 88997 - RNA, 21 nt, Artificial Sequence
  Synthetic
  misc_feature (6)..(6): n is a, c, g, or u
  misc_feature (9)..(9): n is a, c, g, or u
gucggncgnaacggcagacgg

SEQ ID NO: 88998 - RNA, 22 nt, Artificial Sequence
  Synthetic
  misc_feature (7)..(7): n is a, c, g, or u
  misc_feature (10)..(10): n is a, c, g, or u
ggucggncgnaacggcagacgg

SEQ ID NO: 88999 - RNA, 23 nt, Artificial Sequence
  Synthetic
  misc_feature (8)..(8): n is a, c, g, or u
  misc_feature (11)..(11): n is a, c, g, or u
uggucggncgnaacggcagacgg

SEQ ID NO: 89000 - RNA, 24 nt, Artificial Sequence
  Synthetic
  misc_feature (9)..(9): n is a, c, g, or u
  misc_feature (12)..(12): n is a, c, g, or u
guggucggncgnaacggcagacgg

SEQ ID NO: 89001 - RNA, 18 nt, Artificial Sequence
  Synthetic
ugcgagcaaaacaagcgg

SEQ ID NO: 89002 - RNA, 19 nt, Artificial Sequence
  Synthetic
cugcgagcaaaacaagcgg

SEQ ID NO: 89003 - RNA, 20 nt, Artificial Sequence
  Synthetic
gcugcgagcaaaacaagcgg

SEQ ID NO: 89004 - RNA, 21 nt, Artificial Sequence
  Synthetic
ugcugcgagcaaaacaagcgg

SEQ ID NO: 89005 - RNA, 22 nt, Artificial Sequence
  Synthetic
cugcugcgagcaaaacaagcgg

SEQ ID NO: 89006 - RNA, 23 nt, Artificial Sequence
  Synthetic
ccugcugcgagcaaaacaagcgg

SEQ ID NO: 89007 - RNA, 24 nt, Artificial Sequence
  Synthetic
accugcugcgagcaaaacaagcgg

SEQ ID NO: 89008 - RNA, 18 nt, Artificial Sequence
  Synthetic
gaaaauugguaacagcgg

SEQ ID NO: 89009 - RNA, 19 nt, Artificial Sequence
  Synthetic
agaaaauugguaacagcgg

SEQ ID NO: 89010 - RNA, 20 nt, Artificial Sequence
  Synthetic
aagaaaauugguaacagcgg

SEQ ID NO: 89011 - RNA, 21 nt, Artificial Sequence
  Synthetic
aaagaaaauugguaacagcgg

SEQ ID NO: 89012 - RNA, 22 nt, Artificial Sequence
  Synthetic
aaaagaaaauugguaacagcgg

SEQ ID NO: 89013 - RNA, 23 nt, Artificial Sequence
  Synthetic
caaaagaaaauugguaacagcgg

SEQ ID NO: 89014 - RNA, 24 nt, Artificial Sequence
  Synthetic
acaaaagaaaauugguaacagcgg

SEQ ID NO: 89015 - RNA, 18 nt, Artificial Sequence
  Synthetic
aacgauguauauuugcgg

SEQ ID NO: 89016 - RNA, 19 nt, Artificial Sequence
  Synthetic
aaacgauguauauuugcgg

SEQ ID NO: 89017 - RNA, 20 nt, Artificial Sequence
  Synthetic
gaaacgauguauauuugcgg

SEQ ID NO: 89018 - RNA, 21 nt, Artificial Sequence
  Synthetic
ggaaacgauguauauuugcgg

SEQ ID NO: 89019 - RNA, 22 nt, Artificial Sequence
  Synthetic
uggaaacgauguauauuugcgg

SEQ ID NO: 89020 - RNA, 23 nt, Artificial Sequence
  Synthetic
auggaaacgauguauauuugcgg

SEQ ID NO: 89021 - RNA, 24 nt, Artificial Sequence
  Synthetic
cauggaaacgauguauauuugcgg

SEQ ID NO: 89022 - RNA, 18 nt, Artificial Sequence
  Synthetic
uuccgcaguauggaucgg

SEQ ID NO: 89023 - RNA, 19 nt, Artificial Sequence
  Synthetic
guuccgcaguauggaucgg

SEQ ID NO: 89024 - RNA, 20 nt, Artificial Sequence
  Synthetic
aguuccgcaguauggaucgg

SEQ ID NO: 89025 - RNA, 18 nt, Artificial Sequence
  Synthetic
  misc_feature (2)..(2): n is a, c, g, or u
  misc_feature (8)..(8): n is a, c, g, or u
gngagagncaguagucgg

SEQ ID NO: 89026 - RNA, 19 nt, Artificial Sequence
  Synthetic
  misc_feature (1)..(1): n is a, c, g, or u
  misc_feature (3)..(3): n is a, c, g, or u
  misc_feature (9)..(9): n is a, c, g, or u
ngngagagncaguagucgg

SEQ ID NO: 89027 - RNA, 20 nt, Artificial Sequence
  Synthetic
  misc_feature (2)..(2): n is a, c, g, or u
  misc_feature (4)..(4): n is a, c, g, or u
  misc_feature (10)..(10): n is a, c, g, or u
angngagagncaguagucgg

SEQ ID NO: 89028 - RNA, 21 nt, Artificial Sequence
  Synthetic
  misc_feature (3)..(3): n is a, c, g, or u
  misc_feature (5)..(5): n is a, c, g, or u
  misc_feature (11)..(11): n is a, c, g, or u
uangngagagncaguagucgg

SEQ ID NO: 89029 - RNA, 22 nt, Artificial Sequence
  Synthetic
  misc_feature (4)..(4): n is a, c, g, or u
  misc_feature (6)..(6): n is a, c, g, or u
  misc_feature (12)..(12): n is a, c, g, or u
auangngagagncaguagucgg

SEQ ID NO: 89030 - RNA, 23 nt, Artificial Sequence
  Synthetic
  misc_feature (5)..(5): n is a, c, g, or u
  misc_feature (7)..(7): n is a, c, g, or u
  misc_feature (13)..(13): n is a, c, g, or u
gauangngagagncaguagucgg

SEQ ID NO: 89031 - RNA, 24 nt, Artificial Sequence
  Synthetic
  misc_feature (6)..(6): n is a, c, g, or u
  misc_feature (8)..(8): n is a, c, g, or u
  misc_feature (14)..(14): n is a, c, g, or u
cgauangngagagncaguagucgg

SEQ ID NO: 89032 - RNA, 18 nt, Artificial Sequence
  Synthetic
gauccaacugguggucgg

SEQ ID NO: 89033 - RNA, 19 nt, Artificial Sequence
  Synthetic
ggauccaacugguggucgg

SEQ ID NO: 89034 - RNA, 20 nt, Artificial Sequence
  Synthetic
uggauccaacugguggucgg

SEQ ID NO: 89035 - RNA, 21 nt, Artificial Sequence
  Synthetic
cuggauccaacugguggucgg

SEQ ID NO: 89036 - RNA, 22 nt, Artificial Sequence
  Synthetic
gcuggauccaacugguggucgg

SEQ ID NO: 89037 - RNA, 23 nt, Artificial Sequence
  Synthetic
ggcuggauccaacugguggucgg

SEQ ID NO: 89038 - RNA, 24 nt, Artificial Sequence
  Synthetic
aggcuggauccaacugguggucgg

SEQ ID NO: 89039 - RNA, 18 nt, Artificial Sequence
  Synthetic
acggcagacggagaaggg

SEQ ID NO: 89040 - RNA, 19 nt, Artificial Sequence
  Synthetic
aacggcagacggagaaggg

SEQ ID NO: 89041 - RNA, 20 nt, Artificial Sequence
  Synthetic
  misc_feature (1)..(1): n is a, c, g, or u
naacggcagacggagaaggg

SEQ ID NO: 89042 - RNA, 21 nt, Artificial Sequence
  Synthetic
  misc_feature (2)..(2): n is a, c, g, or u
gnaacggcagacggagaaggg

SEQ ID NO: 89043 - RNA, 22 nt, Artificial Sequence
  Synthetic
  misc_feature (3)..(3): n is a, c, g, or u
cgnaacggcagacggagaaggg

SEQ ID NO: 89044 - RNA, 23 nt, Artificial Sequence
  Synthetic
  misc_feature (1)..(1): n is a, c, g, or u
  misc_feature (4)..(4): n is a, c, g, or u
ncgnaacggcagacggagaaggg

SEQ ID NO: 89045 - RNA, 24 nt, Artificial Sequence
  Synthetic
  misc_feature (2)..(2): n is a, c, g, or u
  misc_feature (5)..(5): n is a, c, g, or u
gncgnaacggcagacggagaaggg

SEQ ID NO: 89046 - RNA, 18 nt, Artificial Sequence
  Synthetic
  misc_feature (6)..(6): n is a, c, g, or u
cuuuunguuuuguuaggg

SEQ ID NO: 89047 - RNA, 19 nt, Artificial Sequence
  Synthetic
  misc_feature (7)..(7): n is a, c, g, or u
ucuuuunguuuuguuaggg

SEQ ID NO: 89048 - RNA, 20 nt, Artificial Sequence
  Synthetic
  misc_feature (8)..(8): n is a, c, g, or u
aucuuuunguuuuguuaggg

SEQ ID NO: 89049 - RNA, 21 nt, Artificial Sequence
  Synthetic
  misc_feature (9)..(9): n is a, c, g, or u
caucuuuunguuuuguuaggg

SEQ ID NO: 89050 - RNA, 22 nt, Artificial Sequence
  Synthetic
  misc_feature (10)..(10): n is a, c, g, or u
ccaucuuuunguuuuguuaggg

SEQ ID NO: 89051 - RNA, 23 nt, Artificial Sequence
  Synthetic
  misc_feature (11)..(11): n is a, c, g, or u
cccaucuuuunguuuuguuaggg

SEQ ID NO: 89052 - RNA, 24 nt, Artificial Sequence
  Synthetic
  misc_feature (12)..(12): n is a, c, g, or u
ccccaucuuuunguuuuguuaggg

SEQ ID NO: 89053 - RNA, 18 nt, Artificial Sequence
  Synthetic
ugagccaggagaaacggg

SEQ ID NO: 89054 - RNA, 19 nt, Artificial Sequence
  Synthetic
cugagccaggagaaacggg

SEQ ID NO: 89055 - RNA, 20 nt, Artificial Sequence
  Synthetic
acugagccaggagaaacggg

SEQ ID NO: 89056 - RNA, 21 nt, Artificial Sequence
  Synthetic
aacugagccaggagaaacggg

SEQ ID NO: 89057 - RNA, 22 nt, Artificial Sequence
  Synthetic
aaacugagccaggagaaacggg

SEQ ID NO: 89058 - RNA, 23 nt, Artificial Sequence
  Synthetic
uaaacugagccaggagaaacggg

SEQ ID NO: 89059 - RNA, 24 nt, Artificial Sequence
  Synthetic
guaaacugagccaggagaaacggg

SEQ ID NO: 89060 - RNA, 18 nt, Artificial Sequence
  Synthetic
ccguugccgggcaacggg

SEQ ID NO: 89061 - RNA, 19 nt, Artificial Sequence
  Synthetic
gccguugccgggcaacggg

SEQ ID NO: 89062 - RNA, 20 nt, Artificial Sequence
  Synthetic
ggccguugccgggcaacggg

SEQ ID NO: 89063 - RNA, 21 nt, Artificial Sequence
  Synthetic
uggccguugccgggcaacggg

SEQ ID NO: 89064 - RNA, 22 nt, Artificial Sequence
  Synthetic
cuggccguugccgggcaacggg

SEQ ID NO: 89065 - RNA, 23 nt, Artificial Sequence
  Synthetic
ccuggccguugccgggcaacggg

SEQ ID NO: 89066 - RNA, 24 nt, Artificial Sequence
  Synthetic
accuggccguugccgggcaacggg

SEQ ID NO: 89067 - RNA, 18 nt, Artificial Sequence
  Synthetic
auccaacugguggucggg

SEQ ID NO: 89068 - RNA, 19 nt, Artificial Sequence
  Synthetic
gauccaacugguggucggg

SEQ ID NO: 89069 - RNA, 20 nt, Artificial Sequence
  Synthetic
ggauccaacugguggucggg

SEQ ID NO: 89070 - RNA, 21 nt, Artificial Sequence
  Synthetic
uggauccaacugguggucggg

SEQ ID NO: 89071 - RNA, 22 nt, Artificial Sequence
  Synthetic
cuggauccaacugguggucggg

SEQ ID NO: 89072 - RNA, 23 nt, Artificial Sequence
  Synthetic
gcuggauccaacugguggucggg

SEQ ID NO: 89073 - RNA, 24 nt, Artificial Sequence
  Synthetic
ggcuggauccaacugguggucggg

SEQ ID NO: 89074 - RNA, 18 nt, Artificial Sequence
  Synthetic
cguugccgggcaacgggg

SEQ ID NO: 89075 - RNA, 19 nt, Artificial Sequence
  Synthetic
ccguugccgggcaacgggg

SEQ ID NO: 89076 - RNA, 20 nt, Artificial Sequence
  Synthetic
gccguugccgggcaacgggg

SEQ ID NO: 89077 - RNA, 21 nt, Artificial Sequence
  Synthetic
ggccguugccgggcaacgggg

SEQ ID NO: 89078 - RNA, 22 nt, Artificial Sequence
  Synthetic
uggccguugccgggcaacgggg

SEQ ID NO: 89079 - RNA, 23 nt, Artificial Sequence
  Synthetic
cuggccguugccgggcaacgggg

SEQ ID NO: 89080 - RNA, 24 nt, Artificial Sequence
  Synthetic
ccuggccguugccgggcaacgggg

SEQ ID NO: 89081 - RNA, 18 nt, Artificial Sequence
  Synthetic
gaaagccaaacagugggg

SEQ ID NO: 89082 - RNA, 19 nt, Artificial Sequence
  Synthetic
ugaaagccaaacagugggg

SEQ ID NO: 89083 - RNA, 20 nt, Artificial Sequence
  Synthetic
cugaaagccaaacagugggg

SEQ ID NO: 89084 - RNA, 21 nt, Artificial Sequence
  Synthetic
acugaaagccaaacagugggg

SEQ ID NO: 89085 - RNA, 22 nt, Artificial Sequence
  Synthetic
aacugaaagccaaacagugggg

SEQ ID NO: 89086 - RNA, 23 nt, Artificial Sequence
  Synthetic
uaacugaaagccaaacagugggg

SEQ ID NO: 89087 - RNA, 24 nt, Artificial Sequence
  Synthetic
auaacugaaagccaaacagugggg

SEQ ID NO: 89088 - RNA, 18 nt, Artificial Sequence
  Synthetic
  misc_feature (15)..(15): n is a, c, g, or u
aaagguggagacagnggg

SEQ ID NO: 89089 - RNA, 19 nt, Artificial Sequence
  Synthetic
  misc_feature (16)..(16): n is a, c, g, or u
caaagguggagacagnggg

SEQ ID NO: 89090 - RNA, 20 nt, Artificial Sequence
  Synthetic
  misc_feature (17)..(17): n is a, c, g, or u
ucaaagguggagacagnggg

SEQ ID NO: 89091 - RNA, 21 nt, Artificial Sequence
  Synthetic
  misc_feature (18)..(18): n is a, c, g, or u
cucaaagguggagacagnggg

SEQ ID NO: 89092 - RNA, 22 nt, Artificial Sequence
  Synthetic
  misc_feature (19)..(19): n is a, c, g, or u
ucucaaagguggagacagnggg

SEQ ID NO: 89093 - RNA, 23 nt, Artificial Sequence
  Synthetic
  misc_feature (20)..(20): n is a, c, g, or u
uucucaaagguggagacagnggg

SEQ ID NO: 89094 - RNA, 24 nt, Artificial Sequence
  Synthetic
  misc_feature (21)..(21): n is a, c, g, or u
uuucucaaagguggagacagnggg

SEQ ID NO: 89095 - RNA, 18 nt, Artificial Sequence
  Synthetic
  misc_feature (9)..(9): n is a, c, g, or u
aaagcccangaugauggg

SEQ ID NO: 89096 - RNA, 19 nt, Artificial Sequence
  Synthetic
  misc_feature (10)..(10): n is a, c, g, or u
gaaagcccangaugauggg

SEQ ID NO: 89097 - RNA, 20 nt, Artificial Sequence
  Synthetic
  misc_feature (11)..(11): n is a, c, g, or u
cgaaagcccangaugauggg

SEQ ID NO: 89098 - RNA, 21 nt, Artificial Sequence
  Synthetic
  misc_feature (12)..(12): n is a, c, g, or u
ccgaaagcccangaugauggg

SEQ ID NO: 89099 - RNA, 22 nt, Artificial Sequence
  Synthetic
  misc_feature (13)..(13): n is a, c, g, or u
uccgaaagcccangaugauggg

SEQ ID NO: 89100 - RNA, 23 nt, Artificial Sequence
  Synthetic
  misc_feature (14)..(14): n is a, c, g, or u
uuccgaaagcccangaugauggg

SEQ ID NO: 89101 - RNA, 24 nt, Artificial Sequence
  Synthetic
  misc_feature (15)..(15): n is a, c, g, or u
uuuccgaaagcccangaugauggg

SEQ ID NO: 89102 - RNA, 18 nt, Artificial Sequence
  Synthetic
ugaaagccaaacaguggg

SEQ ID NO: 89103 - RNA, 19 nt, Artificial Sequence
  Synthetic
cugaaagccaaacaguggg

SEQ ID NO: 89104 - RNA, 20 nt, Artificial Sequence
  Synthetic
acugaaagccaaacaguggg

SEQ ID NO: 89105 - RNA, 21 nt, Artificial Sequence
  Synthetic
aacugaaagccaaacaguggg

SEQ ID NO: 89106 - RNA, 22 nt, Artificial Sequence
  Synthetic
uaacugaaagccaaacaguggg

SEQ ID NO: 89107 - RNA, 23 nt, Artificial Sequence
  Synthetic
auaacugaaagccaaacaguggg

SEQ ID NO: 89108 - RNA, 24 nt, Artificial Sequence
  Synthetic
uauaacugaaagccaaacaguggg

SEQ ID NO: 89109 - RNA, 18 nt, Artificial Sequence
  Synthetic
aggccuccgugcgguggg

SEQ ID NO: 89110 - RNA, 19 nt, Artificial Sequence
  Synthetic
aaggccuccgugcgguggg

SEQ ID NO: 89111 - RNA, 20 nt, Artificial Sequence
  Synthetic
aaaggccuccgugcgguggg

SEQ ID NO: 89112 - RNA, 21 nt, Artificial Sequence
  Synthetic
aaaaggccuccgugcgguggg

SEQ ID NO: 89113 - RNA, 22 nt, Artificial Sequence
  Synthetic
caaaaggccuccgugcgguggg

SEQ ID NO: 89114 - RNA, 23 nt, Artificial Sequence
  Synthetic
ccaaaaggccuccgugcgguggg

SEQ ID NO: 89115 - RNA, 24 nt, Artificial Sequence
  Synthetic
cccaaaaggccuccgugcgguggg

SEQ ID NO: 89116 - RNA, 18 nt, Artificial Sequence
  Synthetic
cuuauguaagaccuuggg

SEQ ID NO: 89117 - RNA, 19 nt, Artificial Sequence
  Synthetic
ucuuauguaagaccuuggg

SEQ ID NO: 89118 - RNA, 20 nt, Artificial Sequence
  Synthetic
cucuuauguaagaccuuggg

SEQ ID NO: 89119 - RNA, 21 nt, Artificial Sequence
  Synthetic
ccucuuauguaagaccuuggg

SEQ ID NO: 89120 - RNA, 22 nt, Artificial Sequence
  Synthetic
uccucuuauguaagaccuuggg

SEQ ID NO: 89121 - RNA, 23 nt, Artificial Sequence
  Synthetic
guccucuuauguaagaccuuggg

SEQ ID NO: 89122 - RNA, 24 nt, Artificial Sequence
  Synthetic
aguccucuuauguaagaccuuggg

SEQ ID NO: 89123 - RNA, 18 nt, Artificial Sequence
  Synthetic
ccagguguccuuguuggg

SEQ ID NO: 89124 - RNA, 19 nt, Artificial Sequence
  Synthetic
gccagguguccuuguuggg

SEQ ID NO: 89125 - RNA, 20 nt, Artificial Sequence
  Synthetic
ggccagguguccuuguuggg

SEQ ID NO: 89126 - RNA, 21 nt, Artificial Sequence
  Synthetic
uggccagguguccuuguuggg

SEQ ID NO: 89127 - RNA, 22 nt, Artificial Sequence
  Synthetic
cuggccagguguccuuguuggg

SEQ ID NO: 89128 - RNA, 23 nt, Artificial Sequence
  Synthetic
ucuggccagguguccuuguuggg

SEQ ID NO: 89129 - RNA, 24 nt, Artificial Sequence
  Synthetic
gucuggccagguguccuuguuggg

SEQ ID NO: 89130 - RNA, 18 nt, Artificial Sequence
  Synthetic
  misc_feature (16)..(16): n is a, c, g, or u
caaagguggagacagngg

SEQ ID NO: 89131 - RNA, 19 nt, Artificial Sequence
  Synthetic
  misc_feature (17)..(17): n is a, c, g, or u
ucaaagguggagacagngg

SEQ ID NO: 89132 - RNA, 20 nt, Artificial Sequence
  Synthetic
  misc_feature (18)..(18): n is a, c, g, or u
cucaaagguggagacagngg

SEQ ID NO: 89133 - RNA, 21 nt, Artificial Sequence
  Synthetic
  misc_feature (19)..(19): n is a, c, g, or u
ucucaaagguggagacagngg

SEQ ID NO: 89134 - RNA, 22 nt, Artificial Sequence
  Synthetic
  misc_feature (20)..(20): n is a, c, g, or u
uucucaaagguggagacagngg

SEQ ID NO: 89135 - RNA, 23 nt, Artificial Sequence
  Synthetic
  misc_feature (21)..(21): n is a, c, g, or u
uuucucaaagguggagacagngg

SEQ ID NO: 89136 - RNA, 24 nt, Artificial Sequence
  Synthetic
  misc_feature (22)..(22): n is a, c, g, or u
guuucucaaagguggagacagngg

SEQ ID NO: 89137 - RNA, 18 nt, Artificial Sequence
  Synthetic
  misc_feature (10)..(10): n is a, c, g, or u
gaaagcccangaugaugg

SEQ ID NO: 89138 - RNA, 19 nt, Artificial Sequence
  Synthetic
  misc_feature (11)..(11): n is a, c, g, or u
cgaaagcccangaugaugg

SEQ ID NO: 89139 - RNA, 20 nt, Artificial Sequence
  Synthetic
  misc_feature (12)..(12): n is a, c, g, or u
ccgaaagcccangaugaugg

SEQ ID NO: 89140 - RNA, 21 nt, Artificial Sequence
  Synthetic
  misc_feature (13)..(13): n is a, c, g, or u
uccgaaagcccangaugaugg

SEQ ID NO: 89141 - RNA, 22 nt, Artificial Sequence
  Synthetic
  misc_feature (14)..(14): n is a, c, g, or u
uuccgaaagcccangaugaugg

SEQ ID NO: 89142 - RNA, 23 nt, Artificial Sequence
  Synthetic
  misc_feature (15)..(15): n is a, c, g, or u
uuuccgaaagcccangaugaugg

SEQ ID NO: 89143 - RNA, 24 nt, Artificial Sequence
  Synthetic
  misc_feature (16)..(16): n is a, c, g, or u
uuuuccgaaagcccangaugaugg

SEQ ID NO: 89144 - RNA, 18 nt, Artificial Sequence
  Synthetic
aggaguuccgcaguaugg

SEQ ID NO: 89145 - RNA, 19 nt, Artificial Sequence
  Synthetic
uaggaguuccgcaguaugg

SEQ ID NO: 89146 - RNA, 20 nt, Artificial Sequence
  Synthetic
cuaggaguuccgcaguaugg

SEQ ID NO: 89147 - RNA, 18 nt, Artificial Sequence
  Synthetic
aucccagaggauugcugg

SEQ ID NO: 89148 - RNA, 19 nt, Artificial Sequence
  Synthetic
aaucccagaggauugcugg

SEQ ID NO: 89149 - RNA, 20 nt, Artificial Sequence
  Synthetic
gaaucccagaggauugcugg

SEQ ID NO: 89150 - RNA, 21 nt, Artificial Sequence
  Synthetic
agaaucccagaggauugcugg

SEQ ID NO: 89151 - RNA, 22 nt, Artificial Sequence
  Synthetic
aagaaucccagaggauugcugg

SEQ ID NO: 89152 - RNA, 23 nt, Artificial Sequence
  Synthetic
aaagaaucccagaggauugcugg

SEQ ID NO: 89153 - RNA, 24 nt, Artificial Sequence
  Synthetic
gaaagaaucccagaggauugcugg

SEQ ID NO: 89154 - RNA, 18 nt, Artificial Sequence
  Synthetic
cugaaagccaaacagugg

SEQ ID NO: 89155 - RNA, 19 nt, Artificial Sequence
  Synthetic
acugaaagccaaacagugg

SEQ ID NO: 89156 - RNA, 20 nt, Artificial Sequence
  Synthetic
aacugaaagccaaacagugg

SEQ ID NO: 89157 - RNA, 21 nt, Artificial Sequence
  Synthetic
uaacugaaagccaaacagugg

SEQ ID NO: 89158 - RNA, 22 nt, Artificial Sequence
  Synthetic
auaacugaaagccaaacagugg

SEQ ID NO: 89159 - RNA, 23 nt, Artificial Sequence
  Synthetic
uauaacugaaagccaaacagugg

SEQ ID NO: 89160 - RNA, 24 nt, Artificial Sequence
  Synthetic
auauaacugaaagccaaacagugg

SEQ ID NO: 89161 - RNA, 18 nt, Artificial Sequence
  Synthetic
aaggccuccgugcggugg

SEQ ID NO: 89162 - RNA, 19 nt, Artificial Sequence
  Synthetic
aaaggccuccgugcggugg

SEQ ID NO: 89163 - RNA, 20 nt, Artificial Sequence
  Synthetic
aaaaggccuccgugcggugg

SEQ ID NO: 89164 - RNA, 21 nt, Artificial Sequence
  Synthetic
caaaaggccuccgugcggugg

SEQ ID NO: 89165 - RNA, 22 nt, Artificial Sequence
  Synthetic
ccaaaaggccuccgugcggugg

SEQ ID NO: 89166 - RNA, 23 nt, Artificial Sequence
  Synthetic
cccaaaaggccuccgugcggugg

SEQ ID NO: 89167 - RNA, 24 nt, Artificial Sequence
  Synthetic
ccccaaaaggccuccgugcggugg

SEQ ID NO: 89168 - RNA, 18 nt, Artificial Sequence
  Synthetic
gcuggauccaacuggugg

SEQ ID NO: 89169 - RNA, 19 nt, Artificial Sequence
  Synthetic
ggcuggauccaacuggugg

SEQ ID NO: 89170 - RNA, 20 nt, Artificial Sequence
  Synthetic
aggcuggauccaacuggugg

SEQ ID NO: 89171 - RNA, 21 nt, Artificial Sequence
  Synthetic
aaggcuggauccaacuggugg

SEQ ID NO: 89172 - RNA, 22 nt, Artificial Sequence
  Synthetic
gaaggcuggauccaacuggugg

SEQ ID NO: 89173 - RNA, 23 nt, Artificial Sequence
  Synthetic
ugaaggcuggauccaacuggugg

SEQ ID NO: 89174 - RNA, 24 nt, Artificial Sequence
  Synthetic
cugaaggcuggauccaacuggugg

SEQ ID NO: 89175 - RNA, 18 nt, Artificial Sequence
  Synthetic
gcgucagcaaacacuugg

SEQ ID NO: 89176 - RNA, 19 nt, Artificial Sequence
  Synthetic
ugcgucagcaaacacuugg

SEQ ID NO: 89177 - RNA, 20 nt, Artificial Sequence
  Synthetic
uugcgucagcaaacacuugg

SEQ ID NO: 89178 - RNA, 21 nt, Artificial Sequence
  Synthetic
guugcgucagcaaacacuugg

SEQ ID NO: 89179 - RNA, 22 nt, Artificial Sequence
  Synthetic
gguugcgucagcaaacacuugg

SEQ ID NO: 89180 - RNA, 23 nt, Artificial Sequence
  Synthetic
ggguugcgucagcaaacacuugg

SEQ ID NO: 89181 - RNA, 24 nt, Artificial Sequence
  Synthetic
gggguugcgucagcaaacacuugg

SEQ ID NO: 89182 - RNA, 18 nt, Artificial Sequence
  Synthetic
ucuuauguaagaccuugg

SEQ ID NO: 89183 - RNA, 19 nt, Artificial Sequence
  Synthetic
cucuuauguaagaccuugg

SEQ ID NO: 89184 - RNA, 20 nt, Artificial Sequence
  Synthetic
ccucuuauguaagaccuugg

SEQ ID NO: 89185 - RNA, 21 nt, Artificial Sequence
  Synthetic
uccucuuauguaagaccuugg

SEQ ID NO: 89186 - RNA, 22 nt, Artificial Sequence
  Synthetic
guccucuuauguaagaccuugg

SEQ ID NO: 89187 - RNA, 23 nt, Artificial Sequence
  Synthetic
aguccucuuauguaagaccuugg

SEQ ID NO: 89188 - RNA, 24 nt, Artificial Sequence
  Synthetic
gaguccucuuauguaagaccuugg

SEQ ID NO: 89189 - RNA, 18 nt, Artificial Sequence
  Synthetic
  misc_feature (9)..(9): n is a, c, g, or u
uuuuugaunaugucuugg

SEQ ID NO: 89190 - RNA, 19 nt, Artificial Sequence
  Synthetic
  misc_feature (10)..(10): n is a, c, g, or u
uuuuuugaunaugucuugg

SEQ ID NO: 89191 - RNA, 20 nt, Artificial Sequence
  Synthetic
  misc_feature (11)..(11): n is a, c, g, or u
auuuuuugaunaugucuugg

SEQ ID NO: 89192 - RNA, 21 nt, Artificial Sequence
  Synthetic
  misc_feature (12)..(12): n is a, c, g, or u
cauuuuuugaunaugucuugg

SEQ ID NO: 89193 - RNA, 22 nt, Artificial Sequence
  Synthetic
  misc_feature (13)..(13): n is a, c, g, or u
acauuuuuugaunaugucuugg

SEQ ID NO: 89194 - RNA, 23 nt, Artificial Sequence
  Synthetic
  misc_feature (14)..(14): n is a, c, g, or u
cacauuuuuugaunaugucuugg

SEQ ID NO: 89195 - RNA, 24 nt, Artificial Sequence
  Synthetic
  misc_feature (15)..(15): n is a, c, g, or u
ucacauuuuuugaunaugucuugg

SEQ ID NO: 89196 - RNA, 18 nt, Artificial Sequence
  Synthetic
aaaggccuuguaaguugg

SEQ ID NO: 89197 - RNA, 19 nt, Artificial Sequence
  Synthetic
gaaaggccuuguaaguugg

SEQ ID NO: 89198 - RNA, 20 nt, Artificial Sequence
  Synthetic
agaaaggccuuguaaguugg

SEQ ID NO: 89199 - RNA, 21 nt, Artificial Sequence
  Synthetic
cagaaaggccuuguaaguugg

SEQ ID NO: 89200 - RNA, 22 nt, Artificial Sequence
  Synthetic
acagaaaggccuuguaaguugg

SEQ ID NO: 89201 - RNA, 23 nt, Artificial Sequence
  Synthetic
cacagaaaggccuuguaaguugg

SEQ ID NO: 89202 - RNA, 24 nt, Artificial Sequence
  Synthetic
acacagaaaggccuuguaaguugg

SEQ ID NO: 89203 - RNA, 18 nt, Artificial Sequence
  Synthetic
ggaucuugcagaguuugg

SEQ ID NO: 89204 - RNA, 19 nt, Artificial Sequence
  Synthetic
gggaucuugcagaguuugg

SEQ ID NO: 89205 - RNA, 20 nt, Artificial Sequence
  Synthetic
ugggaucuugcagaguuugg

SEQ ID NO: 89206 - RNA, 21 nt, Artificial Sequence
  Synthetic
cugggaucuugcagaguuugg

SEQ ID NO: 89207 - RNA, 22 nt, Artificial Sequence
  Synthetic
  misc_feature (1)..(1): n is a, c, g, or u
ncugggaucuugcagaguuugg

SEQ ID NO: 89208 - RNA, 23 nt, Artificial Sequence
  Synthetic
  misc_feature (2)..(2): n is a, c, g, or u
cncugggaucuugcagaguuugg

SEQ ID NO: 89209 - RNA, 24 nt, Artificial Sequence
  Synthetic
  misc_feature (3)..(3): n is a, c, g, or u
acncugggaucuugcagaguuugg

SEQ ID NO: 89210 - RNA, 18 nt, Artificial Sequence
  Synthetic
uuccguccgaagguuugg

SEQ ID NO: 89211 - RNA, 19 nt, Artificial Sequence
  Synthetic
uuuccguccgaagguuugg

SEQ ID NO: 89212 - RNA, 20 nt, Artificial Sequence
  Synthetic
auuuccguccgaagguuugg

SEQ ID NO: 89213 - RNA, 18 nt, Artificial Sequence
  Synthetic
  misc_feature (13)..(13): n is a, c, g, or u
auauuugguaacnuuugg

SEQ ID NO: 89214 - RNA, 19 nt, Artificial Sequence
  Synthetic
  misc_feature (14)..(14): n is a, c, g, or u
aauauuugguaacnuuugg

SEQ ID NO: 89215 - RNA, 20 nt, Artificial Sequence
  Synthetic
  misc_feature (15)..(15): n is a, c, g, or u
aaauauuugguaacnuuugg

SEQ ID NO: 89216 - RNA, 21 nt, Artificial Sequence
  Synthetic
  misc_feature (1)..(1): n is a, c, g, or u
  misc_feature (16)..(16): n is a, c, g, or u
naaauauuugguaacnuuugg

SEQ ID NO: 89217 - RNA, 22 nt, Artificial Sequence
  Synthetic
  misc_feature (2)..(2): n is a, c, g, or u
  misc_feature (17)..(17): n is a, c, g, or u
gnaaauauuugguaacnuuugg

SEQ ID NO: 89218 - RNA, 23 nt, Artificial Sequence
  Synthetic
  misc_feature (3)..(3): n is a, c, g, or u
  misc_feature (18)..(18): n is a, c, g, or u
ggnaaauauuugguaacnuuugg

SEQ ID NO: 89219 - RNA, 24 nt, Artificial Sequence
  Synthetic
  misc_feature (4)..(4): n is a, c, g, or u
  misc_feature (19)..(19): n is a, c, g, or u
uggnaaauauuugguaacnuuugg

SEQ ID NO: 89220 - RNA, 18 nt, Artificial Sequence
  Synthetic
ggggacugcgaauuuugg

SEQ ID NO: 89221 - RNA, 19 nt, Artificial Sequence
  Synthetic
uggggacugcgaauuuugg

SEQ ID NO: 89222 - RNA, 20 nt, Artificial Sequence
  Synthetic
uuggggacugcgaauuuugg

SEQ ID NO: 89223 - RNA, 21 nt, Artificial Sequence
  Synthetic
guuggggacugcgaauuuugg

SEQ ID NO: 89224 - RNA, 22 nt, Artificial Sequence
  Synthetic
gguuggggacugcgaauuuugg

SEQ ID NO: 89225 - RNA, 23 nt, Artificial Sequence
  Synthetic
agguuggggacugcgaauuuugg

SEQ ID NO: 89226 - RNA, 24 nt, Artificial Sequence
  Synthetic
gagguuggggacugcgaauuuugg

SEQ ID NO: 89227 - RNA, 18 nt, Artificial Sequence
  Synthetic
  misc_feature (14)..(14): n is a, c, g, or u
  misc_feature (17)..(17): n is a, c, g, or u
acuggcgauuggungang

SEQ ID NO: 89228 - RNA, 19 nt, Artificial Sequence
  Synthetic
  misc_feature (15)..(15): n is a, c, g, or u
  misc_feature (18)..(18): n is a, c, g, or u
gacuggcgauuggungang

SEQ ID NO: 89229 - RNA, 20 nt, Artificial Sequence
  Synthetic
  misc_feature (16)..(16): n is a, c, g, or u
  misc_feature (19)..(19): n is a, c, g, or u
ugacuggcgauuggungang

SEQ ID NO: 89230 - RNA, 21 nt, Artificial Sequence
  Synthetic
  misc_feature (17)..(17): n is a, c, g, or u
  misc_feature (20)..(20): n is a, c, g, or u
cugacuggcgauuggungang

SEQ ID NO: 89231 - RNA, 22 nt, Artificial Sequence
  Synthetic
  misc_feature (18)..(18): n is a, c, g, or u
  misc_feature (21)..(21): n is a, c, g, or u
ccugacuggcgauuggungang

SEQ ID NO: 89232 - RNA, 23 nt, Artificial Sequence
  Synthetic
  misc_feature (19)..(19): n is a, c, g, or u
  misc_feature (22)..(22): n is a, c, g, or u
uccugacuggcgauuggungang

SEQ ID NO: 89233 - RNA, 24 nt, Artificial Sequence
  Synthetic
  misc_feature (20)..(20): n is a, c, g, or u
  misc_feature (23)..(23): n is a, c, g, or u
uuccugacuggcgauuggungang

SEQ ID NO: 89234 - RNA, 18 nt, Artificial Sequence
  Synthetic
  misc_feature (17)..(17): n is a, c, g, or u
gagaagauugacgauang

SEQ ID NO: 89235 - RNA, 19 nt, Artificial Sequence
  Synthetic
  misc_feature (18)..(18): n is a, c, g, or u
cgagaagauugacgauang

SEQ ID NO: 89236 - RNA, 20 nt, Artificial Sequence
  Synthetic
  misc_feature (19)..(19): n is a, c, g, or u
ucgagaagauugacgauang

SEQ ID NO: 89237 - RNA, 21 nt, Artificial Sequence
  Synthetic
  misc_feature (20)..(20): n is a, c, g, or u
cucgagaagauugacgauang

SEQ ID NO: 89238 - RNA, 22 nt, Artificial Sequence
  Synthetic
  misc_feature (21)..(21): n is a, c, g, or u
ccucgagaagauugacgauang

SEQ ID NO: 89239 - RNA, 23 nt, Artificial Sequence
  Synthetic
  misc_feature (22)..(22): n is a, c, g, or u
uccucgagaagauugacgauang

SEQ ID NO: 89240 - RNA, 24 nt, Artificial Sequence
  Synthetic
  misc_feature (23)..(23): n is a, c, g, or u
auccucgagaagauugacgauang

SEQ ID NO: 89241 - RNA, 18 nt, Artificial Sequence
  Synthetic
  misc_feature (2)..(2): n is a, c, g, or u
  misc_feature (17)..(17): n is a, c, g, or u
cnagaagaucucguacng

SEQ ID NO: 89242 - RNA, 19 nt, Artificial Sequence
  Synthetic
  misc_feature (3)..(3): n is a, c, g, or u
  misc_feature (18)..(18): n is a, c, g, or u
ucnagaagaucucguacng

SEQ ID NO: 89243 - RNA, 20 nt, Artificial Sequence
  Synthetic
  misc_feature (4)..(4): n is a, c, g, or u
  misc_feature (19)..(19): n is a, c, g, or u
aucnagaagaucucguacng

SEQ ID NO: 89244 - RNA, 21 nt, Artificial Sequence
  Synthetic
  misc_feature (5)..(5): n is a, c, g, or u
  misc_feature (20)..(20): n is a, c, g, or u
uaucnagaagaucucguacng

SEQ ID NO: 89245 - RNA, 22 nt, Artificial Sequence
  Synthetic
  misc_feature (6)..(6): n is a, c, g, or u
  misc_feature (21)..(21): n is a, c, g, or u
guaucnagaagaucucguacng

SEQ ID NO: 89246 - RNA, 23 nt, Artificial Sequence
  Synthetic
  misc_feature (7)..(7): n is a, c, g, or u
  misc_feature (22)..(22): n is a, c, g, or u
gguaucnagaagaucucguacng

SEQ ID NO: 89247 - RNA, 24 nt, Artificial Sequence
  Synthetic
  misc_feature (8)..(8): n is a, c, g, or u
  misc_feature (23)..(23): n is a, c, g, or u
cgguaucnagaagaucucguacng

SEQ ID NO: 89248 - RNA, 18 nt, Artificial Sequence
  Synthetic
  misc_feature (11)..(11): n is a, c, g, or u
  misc_feature (17)..(17): n is a, c, g, or u
uguguaaauanugucung

SEQ ID NO: 89249 - RNA, 19 nt, Artificial Sequence
  Synthetic
  misc_feature (12)..(12): n is a, c, g, or u
  misc_feature (18)..(18): n is a, c, g, or u
guguguaaauanugucung

SEQ ID NO: 89250 - RNA, 20 nt, Artificial Sequence
  Synthetic
  misc_feature (13)..(13): n is a, c, g, or u
  misc_feature (19)..(19): n is a, c, g, or u
aguguguaaauanugucung

SEQ ID NO: 89251 - RNA, 21 nt, Artificial Sequence
  Synthetic
  misc_feature (14)..(14): n is a, c, g, or u
  misc_feature (20)..(20): n is a, c, g, or u
gaguguguaaauanugucung

SEQ ID NO: 89252 - RNA, 22 nt, Artificial Sequence
  Synthetic
  misc_feature (15)..(15): n is a, c, g, or u
  misc_feature (21)..(21): n is a, c, g, or u
agaguguguaaauanugucung

SEQ ID NO: 89253 - RNA, 23 nt, Artificial Sequence
  Synthetic
  misc_feature (16)..(16): n is a, c, g, or u
  misc_feature (22)..(22): n is a, c, g, or u
uagaguguguaaauanugucung

SEQ ID NO: 89254 - RNA, 24 nt, Artificial Sequence
  Synthetic
  misc_feature (17)..(17): n is a, c, g, or u
  misc_feature (23)..(23): n is a, c, g, or u
auagaguguguaaauanugucung

SEQ ID NO: 89255 - RNA, 18 nt, Artificial Sequence
  Synthetic
  misc_feature (3)..(3): n is a, c, g, or u
  misc_feature (17)..(17): n is a, c, g, or u
uancacccacccaggung

SEQ ID NO: 89256 - RNA, 19 nt, Artificial Sequence
  Synthetic
  misc_feature (4)..(4): n is a, c, g, or u
  misc_feature (18)..(18): n is a, c, g, or u
uuancacccacccaggung

SEQ ID NO: 89257 - RNA, 20 nt, Artificial Sequence
  Synthetic
  misc_feature (5)..(5): n is a, c, g, or u
  misc_feature (19)..(19): n is a, c, g, or u
auuancacccacccaggung

SEQ ID NO: 89258 - RNA, 21 nt, Artificial Sequence
  Synthetic
  misc_feature (6)..(6): n is a, c, g, or u
  misc_feature (20)..(20): n is a, c, g, or u
aauuancacccacccaggung

SEQ ID NO: 89259 - RNA, 22 nt, Artificial Sequence
  Synthetic
  misc_feature (7)..(7): n is a, c, g, or u
  misc_feature (21)..(21): n is a, c, g, or u
aaauuancacccacccaggung

SEQ ID NO: 89260 - RNA, 23 nt, Artificial Sequence
  Synthetic
  misc_feature (8)..(8): n is a, c, g, or u
  misc_feature (22)..(22): n is a, c, g, or u
caaauuancacccacccaggung

SEQ ID NO: 89261 - RNA, 24 nt, Artificial Sequence
  Synthetic
  misc_feature (9)..(9): n is a, c, g, or u
  misc_feature (23)..(23): n is a, c, g, or u
ccaaauuancacccacccaggung

SEQ ID NO: 89262 - RNA, 18 nt, Artificial Sequence
  Synthetic
aaagugagacaagaaaug

SEQ ID NO: 89263 - RNA, 19 nt, Artificial Sequence
  Synthetic
aaaagugagacaagaaaug

SEQ ID NO: 89264 - RNA, 20 nt, Artificial Sequence
  Synthetic
caaaagugagacaagaaaug

SEQ ID NO: 89265 - RNA, 21 nt, Artificial Sequence
  Synthetic
ccaaaagugagacaagaaaug

SEQ ID NO: 89266 - RNA, 22 nt, Artificial Sequence
  Synthetic
uccaaaagugagacaagaaaug

SEQ ID NO: 89267 - RNA, 23 nt, Artificial Sequence
  Synthetic
uuccaaaagugagacaagaaaug

SEQ ID NO: 89268 - RNA, 24 nt, Artificial Sequence
  Synthetic
cuuccaaaagugagacaagaaaug

SEQ ID NO: 89269 - RNA, 18 nt, Artificial Sequence
  Synthetic
  misc_feature (4)..(4): n is a, c, g, or u
  misc_feature (13)..(13): n is a, c, g, or u
augnugaggugancaaug

SEQ ID NO: 89270 - RNA, 19 nt, Artificial Sequence
  Synthetic
  misc_feature (5)..(5): n is a, c, g, or u
  misc_feature (14)..(14): n is a, c, g, or u
uaugnugaggugancaaug

SEQ ID NO: 89271 - RNA, 20 nt, Artificial Sequence
  Synthetic
  misc_feature (6)..(6): n is a, c, g, or u
  misc_feature (15)..(15): n is a, c, g, or u
guaugnugaggugancaaug

SEQ ID NO: 89272 - RNA, 21 nt, Artificial Sequence
  Synthetic
  misc_feature (7)..(7): n is a, c, g, or u
  misc_feature (16)..(16): n is a, c, g, or u
aguaugnugaggugancaaug

SEQ ID NO: 89273 - RNA, 22 nt, Artificial Sequence
  Synthetic
  misc_feature (8)..(8): n is a, c, g, or u
  misc_feature (17)..(17): n is a, c, g, or u
caguaugnugaggugancaaug

SEQ ID NO: 89274 - RNA, 23 nt, Artificial Sequence
  Synthetic
  misc_feature (9)..(9): n is a, c, g, or u
  misc_feature (18)..(18): n is a, c, g, or u
gcaguaugnugaggugancaaug

SEQ ID NO: 89275 - RNA, 24 nt, Artificial Sequence
  Synthetic
  misc_feature (10)..(10): n is a, c, g, or u
  misc_feature (19)..(19): n is a, c, g, or u
ugcaguaugnugaggugancaaug

SEQ ID NO: 89276 - RNA, 18 nt, Artificial Sequence
  Synthetic
  misc_feature (4)..(4): n is a, c, g, or u
ucunguuuggaaguaaug

SEQ ID NO: 89277 - RNA, 19 nt, Artificial Sequence
  Synthetic
  misc_feature (5)..(5): n is a, c, g, or u
gucunguuuggaaguaaug

SEQ ID NO: 89278 - RNA, 20 nt, Artificial Sequence
  Synthetic
  misc_feature (6)..(6): n is a, c, g, or u
ugucunguuuggaaguaaug

SEQ ID NO: 89279 - RNA, 21 nt, Artificial Sequence
  Synthetic
  misc_feature (1)..(1): n is a, c, g, or u
  misc_feature (7)..(7): n is a, c, g, or u
nugucunguuuggaaguaaug

SEQ ID NO: 89280 - RNA, 22 nt, Artificial Sequence
  Synthetic
  misc_feature (2)..(2): n is a, c, g, or u
  misc_feature (8)..(8): n is a, c, g, or u
anugucunguuuggaaguaaug

SEQ ID NO: 89281 - RNA, 23 nt, Artificial Sequence
  Synthetic
  misc_feature (3)..(3): n is a, c, g, or u
  misc_feature (9)..(9): n is a, c, g, or u
uanugucunguuuggaaguaaug

SEQ ID NO: 89282 - RNA, 24 nt, Artificial Sequence
  Synthetic
  misc_feature (4)..(4): n is a, c, g, or u
  misc_feature (10)..(10): n is a, c, g, or u
auanugucunguuuggaaguaaug

SEQ ID NO: 89283 - RNA, 18 nt, Artificial Sequence
  Synthetic
cuugaacaguaggacaug

SEQ ID NO: 89284 - RNA, 19 nt, Artificial Sequence
  Synthetic
gcuugaacaguaggacaug

SEQ ID NO: 89285 - RNA, 20 nt, Artificial Sequence
  Synthetic
ggcuugaacaguaggacaug

SEQ ID NO: 89286 - RNA, 21 nt, Artificial Sequence
  Synthetic
aggcuugaacaguaggacaug

SEQ ID NO: 89287 - RNA, 22 nt, Artificial Sequence
  Synthetic
gaggcuugaacaguaggacaug

SEQ ID NO: 89288 - RNA, 23 nt, Artificial Sequence
  Synthetic
ggaggcuugaacaguaggacaug

SEQ ID NO: 89289 - RNA, 24 nt, Artificial Sequence
  Synthetic
uggaggcuugaacaguaggacaug

SEQ ID NO: 89290 - RNA, 18 nt, Artificial Sequence
  Synthetic
augcgcugauggcccaug

SEQ ID NO: 89291 - RNA, 19 nt, Artificial Sequence
  Synthetic
caugcgcugauggcccaug

SEQ ID NO: 89292 - RNA, 20 nt, Artificial Sequence
  Synthetic
gcaugcgcugauggcccaug

SEQ ID NO: 89293 - RNA, 21 nt, Artificial Sequence
  Synthetic
cgcaugcgcugauggcccaug

SEQ ID NO: 89294 - RNA, 22 nt, Artificial Sequence
  Synthetic
acgcaugcgcugauggcccaug

SEQ ID NO: 89295 - RNA, 23 nt, Artificial Sequence
  Synthetic
cacgcaugcgcugauggcccaug

SEQ ID NO: 89296 - RNA, 24 nt, Artificial Sequence
  Synthetic
ccacgcaugcgcugauggcccaug

SEQ ID NO: 89297 - RNA, 18 nt, Artificial Sequence
  Synthetic
gaugugauguucuccaug

SEQ ID NO: 89298 - RNA, 19 nt, Artificial Sequence
  Synthetic
ugaugugauguucuccaug

SEQ ID NO: 89299 - RNA, 20 nt, Artificial Sequence
  Synthetic
cugaugugauguucuccaug

SEQ ID NO: 89300 - RNA, 21 nt, Artificial Sequence
  Synthetic
ccugaugugauguucuccaug

SEQ ID NO: 89301 - RNA, 22 nt, Artificial Sequence
  Synthetic
uccugaugugauguucuccaug

SEQ ID NO: 89302 - RNA, 23 nt, Artificial Sequence
  Synthetic
auccugaugugauguucuccaug

SEQ ID NO: 89303 - RNA, 24 nt, Artificial Sequence
  Synthetic
aauccugaugugauguucuccaug

SEQ ID NO: 89304 - RNA, 18 nt, Artificial Sequence
  Synthetic
aggaugaagaggaagaug

SEQ ID NO: 89305 - RNA, 19 nt, Artificial Sequence
  Synthetic
caggaugaagaggaagaug

SEQ ID NO: 89306 - RNA, 20 nt, Artificial Sequence
  Synthetic
gcaggaugaagaggaagaug

SEQ ID NO: 89307 - RNA, 21 nt, Artificial Sequence
  Synthetic
agcaggaugaagaggaagaug

SEQ ID NO: 89308 - RNA, 22 nt, Artificial Sequence
  Synthetic
cagcaggaugaagaggaagaug

SEQ ID NO: 89309 - RNA, 23 nt, Artificial Sequence
  Synthetic
gcagcaggaugaagaggaagaug

SEQ ID NO: 89310 - RNA, 24 nt, Artificial Sequence
  Synthetic
agcagcaggaugaagaggaagaug

SEQ ID NO: 89311 - RNA, 18 nt, Artificial Sequence
  Synthetic
cacacgguccggcagaug

SEQ ID NO: 89312 - RNA, 19 nt, Artificial Sequence
  Synthetic
gcacacgguccggcagaug

SEQ ID NO: 89313 - RNA, 20 nt, Artificial Sequence
  Synthetic
ugcacacgguccggcagaug

SEQ ID NO: 89314 - RNA, 21 nt, Artificial Sequence
  Synthetic
gugcacacgguccggcagaug

SEQ ID NO: 89315 - RNA, 22 nt, Artificial Sequence
  Synthetic
agugcacacgguccggcagaug

SEQ ID NO: 89316 - RNA, 23 nt, Artificial Sequence
  Synthetic
aagugcacacgguccggcagaug

SEQ ID NO: 89317 - RNA, 24 nt, Artificial Sequence
  Synthetic
gaagugcacacgguccggcagaug

SEQ ID NO: 89318 - RNA, 18 nt, Artificial Sequence
  Synthetic
ggacaugaacaagagaug

SEQ ID NO: 89319 - RNA, 19 nt, Artificial Sequence
  Synthetic
aggacaugaacaagagaug

SEQ ID NO: 89320 - RNA, 20 nt, Artificial Sequence
  Synthetic
uaggacaugaacaagagaug

SEQ ID NO: 89321 - RNA, 21 nt, Artificial Sequence
  Synthetic
guaggacaugaacaagagaug

SEQ ID NO: 89322 - RNA, 22 nt, Artificial Sequence
  Synthetic
aguaggacaugaacaagagaug

SEQ ID NO: 89323 - RNA, 23 nt, Artificial Sequence
  Synthetic
caguaggacaugaacaagagaug

SEQ ID NO: 89324 - RNA, 24 nt, Artificial Sequence
  Synthetic
acaguaggacaugaacaagagaug

SEQ ID NO: 89325 - RNA, 18 nt, Artificial Sequence
  Synthetic
aggcauagcagcaggaug

SEQ ID NO: 89326 - RNA, 19 nt, Artificial Sequence
  Synthetic
gaggcauagcagcaggaug

SEQ ID NO: 89327 - RNA, 20 nt, Artificial Sequence
  Synthetic
ugaggcauagcagcaggaug

SEQ ID NO: 89328 - RNA, 21 nt, Artificial Sequence
  Synthetic
augaggcauagcagcaggaug

SEQ ID NO: 89329 - RNA, 22 nt, Artificial Sequence
  Synthetic
gaugaggcauagcagcaggaug

SEQ ID NO: 89330 - RNA, 23 nt, Artificial Sequence
  Synthetic
agaugaggcauagcagcaggaug

SEQ ID NO: 89331 - RNA, 24 nt, Artificial Sequence
  Synthetic
aagaugaggcauagcagcaggaug

SEQ ID NO: 89332 - RNA, 18 nt, Artificial Sequence
  Synthetic
  misc_feature (14)..(14): n is a, c, g, or u
uuccgaaagcccangaug

SEQ ID NO: 89333 - RNA, 19 nt, Artificial Sequence
  Synthetic
  misc_feature (15)..(15): n is a, c, g, or u
uuuccgaaagcccangaug

SEQ ID NO: 89334 - RNA, 20 nt, Artificial Sequence
  Synthetic
  misc_feature (16)..(16): n is a, c, g, or u
uuuuccgaaagcccangaug

SEQ ID NO: 89335 - RNA, 21 nt, Artificial Sequence
  Synthetic
  misc_feature (17)..(17): n is a, c, g, or u
auuuuccgaaagcccangaug

SEQ ID NO: 89336 - RNA, 22 nt, Artificial Sequence
  Synthetic
  misc_feature (18)..(18): n is a, c, g, or u
aauuuuccgaaagcccangaug

SEQ ID NO: 89337 - RNA, 23 nt, Artificial Sequence
  Synthetic
  misc_feature (19)..(19): n is a, c, g, or u
gaauuuuccgaaagcccangaug

SEQ ID NO: 89338 - RNA, 24 nt, Artificial Sequence
  Synthetic
  misc_feature (20)..(20): n is a, c, g, or u
ggaauuuuccgaaagcccangaug

SEQ ID NO: 89339 - RNA, 18 nt, Artificial Sequence
  Synthetic
uugccugagugcaguaug

SEQ ID NO: 89340 - RNA, 19 nt, Artificial Sequence
  Synthetic
cuugccugagugcaguaug

SEQ ID NO: 89341 - RNA, 20 nt, Artificial Sequence
  Synthetic
gcuugccugagugcaguaug

SEQ ID NO: 89342 - RNA, 21 nt, Artificial Sequence
  Synthetic
ugcuugccugagugcaguaug

SEQ ID NO: 89343 - RNA, 22 nt, Artificial Sequence
  Synthetic
uugcuugccugagugcaguaug

SEQ ID NO: 89344 - RNA, 23 nt, Artificial Sequence
  Synthetic
auugcuugccugagugcaguaug

SEQ ID NO: 89345 - RNA, 24 nt, Artificial Sequence
  Synthetic
  misc_feature (1)..(1): n is a, c, g, or u
nauugcuugccugagugcaguaug

SEQ ID NO: 89346 - RNA, 18 nt, Artificial Sequence
  Synthetic
uccaagaguccucuuaug

SEQ ID NO: 89347 - RNA, 19 nt, Artificial Sequence
  Synthetic
guccaagaguccucuuaug

SEQ ID NO: 89348 - RNA, 20 nt, Artificial Sequence
  Synthetic
aguccaagaguccucuuaug

SEQ ID NO: 89349 - RNA, 21 nt, Artificial Sequence
  Synthetic
gaguccaagaguccucuuaug

SEQ ID NO: 89350 - RNA, 22 nt, Artificial Sequence
  Synthetic
agaguccaagaguccucuuaug

SEQ ID NO: 89351 - RNA, 23 nt, Artificial Sequence
  Synthetic
gagaguccaagaguccucuuaug

SEQ ID NO: 89352 - RNA, 24 nt, Artificial Sequence
  Synthetic
agagaguccaagaguccucuuaug

SEQ ID NO: 89353 - RNA, 18 nt, Artificial Sequence
  Synthetic
aagcccuacgaaccacug

SEQ ID NO: 89354 - RNA, 19 nt, Artificial Sequence
  Synthetic
aaagcccuacgaaccacug

SEQ ID NO: 89355 - RNA, 20 nt, Artificial Sequence
  Synthetic
gaaagcccuacgaaccacug

SEQ ID NO: 89356 - RNA, 21 nt, Artificial Sequence
  Synthetic
ggaaagcccuacgaaccacug

SEQ ID NO: 89357 - RNA, 22 nt, Artificial Sequence
  Synthetic
gggaaagcccuacgaaccacug

SEQ ID NO: 89358 - RNA, 23 nt, Artificial Sequence
  Synthetic
ggggaaagcccuacgaaccacug

SEQ ID NO: 89359 - RNA, 24 nt, Artificial Sequence
  Synthetic
gggggaaagcccuacgaaccacug

SEQ ID NO: 89360 - RNA, 18 nt, Artificial Sequence
  Synthetic
cgagaaagugaaagccug

SEQ ID NO: 89361 - RNA, 19 nt, Artificial Sequence
  Synthetic
gcgagaaagugaaagccug

SEQ ID NO: 89362 - RNA, 20 nt, Artificial Sequence
  Synthetic
ggcgagaaagugaaagccug

SEQ ID NO: 89363 - RNA, 21 nt, Artificial Sequence
  Synthetic
uggcgagaaagugaaagccug

SEQ ID NO: 89364 - RNA, 22 nt, Artificial Sequence
  Synthetic
uuggcgagaaagugaaagccug

SEQ ID NO: 89365 - RNA, 23 nt, Artificial Sequence
  Synthetic
guuggcgagaaagugaaagccug

SEQ ID NO: 89366 - RNA, 24 nt, Artificial Sequence
  Synthetic
aguuggcgagaaagugaaagccug

SEQ ID NO: 89367 - RNA, 18 nt, Artificial Sequence
  Synthetic
ggguaggcugccuuccug

SEQ ID NO: 89368 - RNA, 19 nt, Artificial Sequence
  Synthetic
gggguaggcugccuuccug

SEQ ID NO: 89369 - RNA, 20 nt, Artificial Sequence
  Synthetic
  misc_feature (1)..(1): n is a, c, g, or u
ngggguaggcugccuuccug

SEQ ID NO: 89370 - RNA, 21 nt, Artificial Sequence
  Synthetic
  misc_feature (2)..(2): n is a, c, g, or u
gngggguaggcugccuuccug

SEQ ID NO: 89371 - RNA, 22 nt, Artificial Sequence
  Synthetic
  misc_feature (3)..(3): n is a, c, g, or u
agngggguaggcugccuuccug

SEQ ID NO: 89372 - RNA, 23 nt, Artificial Sequence
  Synthetic
  misc_feature (4)..(4): n is a, c, g, or u
cagngggguaggcugccuuccug

SEQ ID NO: 89373 - RNA, 24 nt, Artificial Sequence
  Synthetic
  misc_feature (5)..(5): n is a, c, g, or u
acagngggguaggcugccuuccug

SEQ ID NO: 89374 - RNA, 18 nt, Artificial Sequence
  Synthetic
  misc_feature (2)..(2): n is a, c, g, or u
ungguggucuauaagcug

SEQ ID NO: 89375 - RNA, 19 nt, Artificial Sequence
  Synthetic
  misc_feature (3)..(3): n is a, c, g, or u
uungguggucuauaagcug

SEQ ID NO: 89376 - RNA, 20 nt, Artificial Sequence
  Synthetic
  misc_feature (4)..(4): n is a, c, g, or u
auungguggucuauaagcug

SEQ ID NO: 89377 - RNA, 21 nt, Artificial Sequence
  Synthetic
  misc_feature (5)..(5): n is a, c, g, or u
cauungguggucuauaagcug

SEQ ID NO: 89378 - RNA, 22 nt, Artificial Sequence
  Synthetic
  misc_feature (6)..(6): n is a, c, g, or u
gcauungguggucuauaagcug

SEQ ID NO: 89379 - RNA, 23 nt, Artificial Sequence
  Synthetic
  misc_feature (7)..(7): n is a, c, g, or u
ggcauungguggucuauaagcug

SEQ ID NO: 89380 - RNA, 24 nt, Artificial Sequence
  Synthetic
  misc_feature (8)..(8): n is a, c, g, or u
gggcauungguggucuauaagcug

SEQ ID NO: 89381 - RNA, 18 nt, Artificial Sequence
  Synthetic
aagggacucaagaugcug

SEQ ID NO: 89382 - RNA, 19 nt, Artificial Sequence
  Synthetic
aaagggacucaagaugcug

SEQ ID NO: 89383 - RNA, 20 nt, Artificial Sequence
  Synthetic
aaaagggacucaagaugcug

SEQ ID NO: 89384 - RNA, 21 nt, Artificial Sequence
  Synthetic
aaaaagggacucaagaugcug

SEQ ID NO: 89385 - RNA, 22 nt, Artificial Sequence
  Synthetic
uaaaaagggacucaagaugcug

SEQ ID NO: 89386 - RNA, 23 nt, Artificial Sequence
  Synthetic
guaaaaagggacucaagaugcug

SEQ ID NO: 89387 - RNA, 24 nt, Artificial Sequence
  Synthetic
gguaaaaagggacucaagaugcug

SEQ ID NO: 89388 - RNA, 18 nt, Artificial Sequence
  Synthetic
aaucccagaggauugcug

SEQ ID NO: 89389 - RNA, 19 nt, Artificial Sequence
  Synthetic
gaaucccagaggauugcug

SEQ ID NO: 89390 - RNA, 20 nt, Artificial Sequence
  Synthetic
agaaucccagaggauugcug

SEQ ID NO: 89391 - RNA, 21 nt, Artificial Sequence
  Synthetic
aagaaucccagaggauugcug

SEQ ID NO: 89392 - RNA, 22 nt, Artificial Sequence
  Synthetic
aaagaaucccagaggauugcug

SEQ ID NO: 89393 - RNA, 23 nt, Artificial Sequence
  Synthetic
gaaagaaucccagaggauugcug

SEQ ID NO: 89394 - RNA, 24 nt, Artificial Sequence
  Synthetic
ggaaagaaucccagaggauugcug

SEQ ID NO: 89395 - RNA, 18 nt, Artificial Sequence
  Synthetic
cuaccuuguuggcgucug

SEQ ID NO: 89396 - RNA, 19 nt, Artificial Sequence
  Synthetic
ccuaccuuguuggcgucug

SEQ ID NO: 89397 - RNA, 20 nt, Artificial Sequence
  Synthetic
uccuaccuuguuggcgucug

SEQ ID NO: 89398 - RNA, 21 nt, Artificial Sequence
  Synthetic
cuccuaccuuguuggcgucug

SEQ ID NO: 89399 - RNA, 22 nt, Artificial Sequence
  Synthetic
gcuccuaccuuguuggcgucug

SEQ ID NO: 89400 - RNA, 23 nt, Artificial Sequence
  Synthetic
agcuccuaccuuguuggcgucug

SEQ ID NO: 89401 - RNA, 24 nt, Artificial Sequence
  Synthetic
cagcuccuaccuuguuggcgucug

SEQ ID NO: 89402 - RNA, 18 nt, Artificial Sequence
  Synthetic
gauugagaccuucgucug

SEQ ID NO: 89403 - RNA, 19 nt, Artificial Sequence
  Synthetic
cgauugagaccuucgucug

SEQ ID NO: 89404 - RNA, 20 nt, Artificial Sequence
  Synthetic
gcgauugagaccuucgucug

SEQ ID NO: 89405 - RNA, 18 nt, Artificial Sequence
  Synthetic
acugaaagccaaacagug

SEQ ID NO: 89406 - RNA, 19 nt, Artificial Sequence
  Synthetic
aacugaaagccaaacagug

SEQ ID NO: 89407 - RNA, 20 nt, Artificial Sequence
  Synthetic
uaacugaaagccaaacagug

SEQ ID NO: 89408 - RNA, 21 nt, Artificial Sequence
  Synthetic
auaacugaaagccaaacagug

SEQ ID NO: 89409 - RNA, 22 nt, Artificial Sequence
  Synthetic
uauaacugaaagccaaacagug

SEQ ID NO: 89410 - RNA, 23 nt, Artificial Sequence
  Synthetic
auauaacugaaagccaaacagug

SEQ ID NO: 89411 - RNA, 24 nt, Artificial Sequence
  Synthetic
cauauaacugaaagccaaacagug

SEQ ID NO: 89412 - RNA, 18 nt, Artificial Sequence
  Synthetic
cccgccuuccauagagug

SEQ ID NO: 89413 - RNA, 19 nt, Artificial Sequence
  Synthetic
acccgccuuccauagagug

SEQ ID NO: 89414 - RNA, 20 nt, Artificial Sequence
  Synthetic
uacccgccuuccauagagug

SEQ ID NO: 89415 - RNA, 18 nt, Artificial Sequence
  Synthetic
acaggagguuggugagug

SEQ ID NO: 89416 - RNA, 19 nt, Artificial Sequence
  Synthetic
gacaggagguuggugagug

SEQ ID NO: 89417 - RNA, 20 nt, Artificial Sequence
  Synthetic
ggacaggagguuggugagug

SEQ ID NO: 89418 - RNA, 21 nt, Artificial Sequence
  Synthetic
aggacaggagguuggugagug

SEQ ID NO: 89419 - RNA, 22 nt, Artificial Sequence
  Synthetic
gaggacaggagguuggugagug

SEQ ID NO: 89420 - RNA, 23 nt, Artificial Sequence
  Synthetic
ggaggacaggagguuggugagug

SEQ ID NO: 89421 - RNA, 24 nt, Artificial Sequence
  Synthetic
uggaggacaggagguuggugagug

SEQ ID NO: 89422 - RNA, 18 nt, Artificial Sequence
  Synthetic
uggucuccaugcgacgug

SEQ ID NO: 89423 - RNA, 19 nt, Artificial Sequence
  Synthetic
guggucuccaugcgacgug

SEQ ID NO: 89424 - RNA, 20 nt, Artificial Sequence
  Synthetic
gguggucuccaugcgacgug

SEQ ID NO: 89425 - RNA, 21 nt, Artificial Sequence
  Synthetic
cgguggucuccaugcgacgug

SEQ ID NO: 89426 - RNA, 22 nt, Artificial Sequence
  Synthetic
acgguggucuccaugcgacgug

SEQ ID NO: 89427 - RNA, 23 nt, Artificial Sequence
  Synthetic
cacgguggucuccaugcgacgug

SEQ ID NO: 89428 - RNA, 24 nt, Artificial Sequence
  Synthetic
ucacgguggucuccaugcgacgug

SEQ ID NO: 89429 - RNA, 18 nt, Artificial Sequence
  Synthetic
agagaggugcgccccgug

SEQ ID NO: 89430 - RNA, 19 nt, Artificial Sequence
  Synthetic
aagagaggugcgccccgug

SEQ ID NO: 89431 - RNA, 20 nt, Artificial Sequence
  Synthetic
aaagagaggugcgccccgug

SEQ ID NO: 89432 - RNA, 18 nt, Artificial Sequence
  Synthetic
gaugauuaggcagaggug

SEQ ID NO: 89433 - RNA, 19 nt, Artificial Sequence
  Synthetic
agaugauuaggcagaggug

SEQ ID NO: 89434 - RNA, 20 nt, Artificial Sequence
  Synthetic
gagaugauuaggcagaggug

SEQ ID NO: 89435 - RNA, 21 nt, Artificial Sequence
  Synthetic
agagaugauuaggcagaggug

SEQ ID NO: 89436 - RNA, 22 nt, Artificial Sequence
  Synthetic
aagagaugauuaggcagaggug

SEQ ID NO: 89437 - RNA, 23 nt, Artificial Sequence
  Synthetic
caagagaugauuaggcagaggug

SEQ ID NO: 89438 - RNA, 24 nt, Artificial Sequence
  Synthetic
acaagagaugauuaggcagaggug

SEQ ID NO: 89439 - RNA, 18 nt, Artificial Sequence
  Synthetic
ggcuggauccaacuggug

SEQ ID NO: 89440 - RNA, 19 nt, Artificial Sequence
  Synthetic
aggcuggauccaacuggug

SEQ ID NO: 89441 - RNA, 20 nt, Artificial Sequence
  Synthetic
aaggcuggauccaacuggug

SEQ ID NO: 89442 - RNA, 21 nt, Artificial Sequence
  Synthetic
gaaggcuggauccaacuggug

SEQ ID NO: 89443 - RNA, 22 nt, Artificial Sequence
  Synthetic
ugaaggcuggauccaacuggug

SEQ ID NO: 89444 - RNA, 23 nt, Artificial Sequence
  Synthetic
cugaaggcuggauccaacuggug

SEQ ID NO: 89445 - RNA, 24 nt, Artificial Sequence
  Synthetic
ucugaaggcuggauccaacuggug

SEQ ID NO: 89446 - RNA, 18 nt, Artificial Sequence
  Synthetic
aguugcauggugcuggug

SEQ ID NO: 89447 - RNA, 19 nt, Artificial Sequence
  Synthetic
aaguugcauggugcuggug

SEQ ID NO: 89448 - RNA, 20 nt, Artificial Sequence
  Synthetic
aaaguugcauggugcuggug

SEQ ID NO: 89449 - RNA, 21 nt, Artificial Sequence
  Synthetic
aaaaguugcauggugcuggug

SEQ ID NO: 89450 - RNA, 22 nt, Artificial Sequence
  Synthetic
aaaaaguugcauggugcuggug

SEQ ID NO: 89451 - RNA, 23 nt, Artificial Sequence
  Synthetic
gaaaaaguugcauggugcuggug

SEQ ID NO: 89452 - RNA, 24 nt, Artificial Sequence
  Synthetic
ugaaaaaguugcauggugcuggug

SEQ ID NO: 89453 - RNA, 18 nt, Artificial Sequence
  Synthetic
cccagaggauugcuggug

SEQ ID NO: 89454 - RNA, 19 nt, Artificial Sequence
  Synthetic
ucccagaggauugcuggug

SEQ ID NO: 89455 - RNA, 20 nt, Artificial Sequence
  Synthetic
aucccagaggauugcuggug

SEQ ID NO: 89456 - RNA, 21 nt, Artificial Sequence
  Synthetic
aaucccagaggauugcuggug

SEQ ID NO: 89457 - RNA, 22 nt, Artificial Sequence
  Synthetic
gaaucccagaggauugcuggug

SEQ ID NO: 89458 - RNA, 23 nt, Artificial Sequence
  Synthetic
agaaucccagaggauugcuggug

SEQ ID NO: 89459 - RNA, 24 nt, Artificial Sequence
  Synthetic
aagaaucccagaggauugcuggug

SEQ ID NO: 89460 - RNA, 18 nt, Artificial Sequence
  Synthetic
  misc_feature (2)..(2): n is a, c, g, or u
  misc_feature (12)..(12): n is a, c, g, or u
cnuuucucauunacugug

SEQ ID NO: 89461 - RNA, 19 nt, Artificial Sequence
  Synthetic
  misc_feature (3)..(3): n is a, c, g, or u
  misc_feature (13)..(13): n is a, c, g, or u
ucnuuucucauunacugug

SEQ ID NO: 89462 - RNA, 20 nt, Artificial Sequence
  Synthetic
  misc_feature (4)..(4): n is a, c, g, or u
  misc_feature (14)..(14): n is a, c, g, or u
uucnuuucucauunacugug

SEQ ID NO: 89463 - RNA, 21 nt, Artificial Sequence
  Synthetic
  misc_feature (5)..(5): n is a, c, g, or u
  misc_feature (15)..(15): n is a, c, g, or u
cuucnuuucucauunacugug

SEQ ID NO: 89464 - RNA, 22 nt, Artificial Sequence
  Synthetic
  misc_feature (6)..(6): n is a, c, g, or u
  misc_feature (16)..(16): n is a, c, g, or u
ucuucnuuucucauunacugug

SEQ ID NO: 89465 - RNA, 23 nt, Artificial Sequence
  Synthetic
  misc_feature (1)..(1): n is a, c, g, or u
  misc_feature (7)..(7): n is a, c, g, or u
  misc_feature (17)..(17): n is a, c, g, or u
nucuucnuuucucauunacugug

SEQ ID NO: 89466 - RNA, 24 nt, Artificial Sequence
  Synthetic
  misc_feature (2)..(2): n is a, c, g, or u
  misc_feature (8)..(8): n is a, c, g, or u
  misc_feature (18)..(18): n is a, c, g, or u
anucuucnuuucucauunacugug

SEQ ID NO: 89467 - RNA, 18 nt, Artificial Sequence
  Synthetic
caggauaaccacauugug

SEQ ID NO: 89468 - RNA, 19 nt, Artificial Sequence
  Synthetic
gcaggauaaccacauugug

SEQ ID NO: 89469 - RNA, 20 nt, Artificial Sequence
  Synthetic
agcaggauaaccacauugug

SEQ ID NO: 89470 - RNA, 21 nt, Artificial Sequence
  Synthetic
aagcaggauaaccacauugug

SEQ ID NO: 89471 - RNA, 22 nt, Artificial Sequence
  Synthetic
aaagcaggauaaccacauugug

SEQ ID NO: 89472 - RNA, 23 nt, Artificial Sequence
  Synthetic
uaaagcaggauaaccacauugug

SEQ ID NO: 89473 - RNA, 24 nt, Artificial Sequence
  Synthetic
uuaaagcaggauaaccacauugug

SEQ ID NO: 89474 - RNA, 18 nt, Artificial Sequence
  Synthetic
  misc_feature (15)..(16): n is a, c, g, or u
gaccuugggcaagannug

SEQ ID NO: 89475 - RNA, 19 nt, Artificial Sequence
  Synthetic
  misc_feature (16)..(17): n is a, c, g, or u
agaccuugggcaagannug

SEQ ID NO: 89476 - RNA, 20 nt, Artificial Sequence
  Synthetic
  misc_feature (17)..(18): n is a, c, g, or u
aagaccuugggcaagannug

SEQ ID NO: 89477 - RNA, 21 nt, Artificial Sequence
  Synthetic
  misc_feature (18)..(19): n is a, c, g, or u
uaagaccuugggcaagannug

SEQ ID NO: 89478 - RNA, 22 nt, Artificial Sequence
  Synthetic
  misc_feature (19)..(20): n is a, c, g, or u
guaagaccuugggcaagannug

SEQ ID NO: 89479 - RNA, 23 nt, Artificial Sequence
  Synthetic
  misc_feature (20)..(21): n is a, c, g, or u
uguaagaccuugggcaagannug

SEQ ID NO: 89480 - RNA, 24 nt, Artificial Sequence
  Synthetic
  misc_feature (21)..(22): n is a, c, g, or u
auguaagaccuugggcaagannug

SEQ ID NO: 89481 - RNA, 18 nt, Artificial Sequence
  Synthetic
  misc_feature (3)..(3): n is a, c, g, or u
guncccccuagaaaauug

SEQ ID NO: 89482 - RNA, 19 nt, Artificial Sequence
  Synthetic
  misc_feature (1)..(1): n is a, c, g, or u
  misc_feature (4)..(4): n is a, c, g, or u
nguncccccuagaaaauug

SEQ ID NO: 89483 - RNA, 20 nt, Artificial Sequence
  Synthetic
  misc_feature (2)..(2): n is a, c, g, or u
  misc_feature (5)..(5): n is a, c, g, or u
unguncccccuagaaaauug

SEQ ID NO: 89484 - RNA, 21 nt, Artificial Sequence
  Synthetic
  misc_feature (3)..(3): n is a, c, g, or u
  misc_feature (6)..(6): n is a, c, g, or u
gunguncccccuagaaaauug

SEQ ID NO: 89485 - RNA, 22 nt, Artificial Sequence
  Synthetic
  misc_feature (4)..(4): n is a, c, g, or u
  misc_feature (7)..(7): n is a, c, g, or u
ggunguncccccuagaaaauug

SEQ ID NO: 89486 - RNA, 23 nt, Artificial Sequence
  Synthetic
  misc_feature (5)..(5): n is a, c, g, or u
  misc_feature (8)..(8): n is a, c, g, or u
cggunguncccccuagaaaauug

SEQ ID NO: 89487 - RNA, 24 nt, Artificial Sequence
  Synthetic
  misc_feature (6)..(6): n is a, c, g, or u
  misc_feature (9)..(9): n is a, c, g, or u
acggunguncccccuagaaaauug

SEQ ID NO: 89488 - RNA, 18 nt, Artificial Sequence
  Synthetic
agcaggauaaccacauug

SEQ ID NO: 89489 - RNA, 19 nt, Artificial Sequence
  Synthetic
aagcaggauaaccacauug

SEQ ID NO: 89490 - RNA, 20 nt, Artificial Sequence
  Synthetic
aaagcaggauaaccacauug

SEQ ID NO: 89491 - RNA, 21 nt, Artificial Sequence
  Synthetic
uaaagcaggauaaccacauug

SEQ ID NO: 89492 - RNA, 22 nt, Artificial Sequence
  Synthetic
uuaaagcaggauaaccacauug

SEQ ID NO: 89493 - RNA, 23 nt, Artificial Sequence
  Synthetic
auuaaagcaggauaaccacauug

SEQ ID NO: 89494 - RNA, 24 nt, Artificial Sequence
  Synthetic
cauuaaagcaggauaaccacauug

SEQ ID NO: 89495 - RNA, 18 nt, Artificial Sequence
  Synthetic
cuuccugacuggcgauug

SEQ ID NO: 89496 - RNA, 19 nt, Artificial Sequence
  Synthetic
ccuuccugacuggcgauug

SEQ ID NO: 89497 - RNA, 20 nt, Artificial Sequence
  Synthetic
gccuuccugacuggcgauug

SEQ ID NO: 89498 - RNA, 21 nt, Artificial Sequence
  Synthetic
ugccuuccugacuggcgauug

SEQ ID NO: 89499 - RNA, 22 nt, Artificial Sequence
  Synthetic
cugccuuccugacuggcgauug

SEQ ID NO: 89500 - RNA, 23 nt, Artificial Sequence
  Synthetic
gcugccuuccugacuggcgauug

SEQ ID NO: 89501 - RNA, 24 nt, Artificial Sequence
  Synthetic
ggcugccuuccugacuggcgauug

SEQ ID NO: 89502 - RNA, 18 nt, Artificial Sequence
  Synthetic
cuagacucugcgguauug

SEQ ID NO: 89503 - RNA, 19 nt, Artificial Sequence
  Synthetic
ucuagacucugcgguauug

SEQ ID NO: 89504 - RNA, 20 nt, Artificial Sequence
  Synthetic
gucuagacucugcgguauug

SEQ ID NO: 89505 - RNA, 21 nt, Artificial Sequence
  Synthetic
agucuagacucugcgguauug

SEQ ID NO: 89506 - RNA, 22 nt, Artificial Sequence
  Synthetic
gagucuagacucugcgguauug

SEQ ID NO: 89507 - RNA, 23 nt, Artificial Sequence
  Synthetic
cgagucuagacucugcgguauug

SEQ ID NO: 89508 - RNA, 24 nt, Artificial Sequence
  Synthetic
acgagucuagacucugcgguauug

SEQ ID NO: 89509 - RNA, 18 nt, Artificial Sequence
  Synthetic
cucuuauguaagaccuug

SEQ ID NO: 89510 - RNA, 19 nt, Artificial Sequence
  Synthetic
ccucuuauguaagaccuug

SEQ ID NO: 89511 - RNA, 20 nt, Artificial Sequence
  Synthetic
uccucuuauguaagaccuug

SEQ ID NO: 89512 - RNA, 21 nt, Artificial Sequence
  Synthetic
guccucuuauguaagaccuug

SEQ ID NO: 89513 - RNA, 22 nt, Artificial Sequence
  Synthetic
aguccucuuauguaagaccuug

SEQ ID NO: 89514 - RNA, 23 nt, Artificial Sequence
  Synthetic
gaguccucuuauguaagaccuug

SEQ ID NO: 89515 - RNA, 24 nt, Artificial Sequence
  Synthetic
agaguccucuuauguaagaccuug

SEQ ID NO: 89516 - RNA, 18 nt, Artificial Sequence
  Synthetic
ucuggccagguguccuug

SEQ ID NO: 89517 - RNA, 19 nt, Artificial Sequence
  Synthetic
gucuggccagguguccuug

SEQ ID NO: 89518 - RNA, 20 nt, Artificial Sequence
  Synthetic
cgucuggccagguguccuug

SEQ ID NO: 89519 - RNA, 21 nt, Artificial Sequence
  Synthetic
gcgucuggccagguguccuug

SEQ ID NO: 89520 - RNA, 22 nt, Artificial Sequence
  Synthetic
ggcgucuggccagguguccuug

SEQ ID NO: 89521 - RNA, 23 nt, Artificial Sequence
  Synthetic
uggcgucuggccagguguccuug

SEQ ID NO: 89522 - RNA, 24 nt, Artificial Sequence
  Synthetic
uuggcgucuggccagguguccuug

SEQ ID NO: 89523 - RNA, 18 nt, Artificial Sequence
  Synthetic
auacauagagguuccuug

SEQ ID NO: 89524 - RNA, 19 nt, Artificial Sequence
  Synthetic
gauacauagagguuccuug

SEQ ID NO: 89525 - RNA, 20 nt, Artificial Sequence
  Synthetic
ggauacauagagguuccuug

SEQ ID NO: 89526 - RNA, 21 nt, Artificial Sequence
  Synthetic
gggauacauagagguuccuug

SEQ ID NO: 89527 - RNA, 22 nt, Artificial Sequence
  Synthetic
agggauacauagagguuccuug

SEQ ID NO: 89528 - RNA, 23 nt, Artificial Sequence
  Synthetic
gagggauacauagagguuccuug

SEQ ID NO: 89529 - RNA, 24 nt, Artificial Sequence
  Synthetic
ggagggauacauagagguuccuug

SEQ ID NO: 89530 - RNA, 18 nt, Artificial Sequence
  Synthetic
  misc_feature (7)..(7): n is a, c, g, or u
  misc_feature (10)..(10): n is a, c, g, or u
ccagcanagnauugcuug

SEQ ID NO: 89531 - RNA, 19 nt, Artificial Sequence
  Synthetic
  misc_feature (8)..(8): n is a, c, g, or u
  misc_feature (11)..(11): n is a, c, g, or u
cccagcanagnauugcuug

SEQ ID NO: 89532 - RNA, 20 nt, Artificial Sequence
  Synthetic
  misc_feature (9)..(9): n is a, c, g, or u
  misc_feature (12)..(12): n is a, c, g, or u
ccccagcanagnauugcuug

SEQ ID NO: 89533 - RNA, 21 nt, Artificial Sequence
  Synthetic
  misc_feature (10)..(10): n is a, c, g, or u
  misc_feature (13)..(13): n is a, c, g, or u
cccccagcanagnauugcuug

SEQ ID NO: 89534 - RNA, 22 nt, Artificial Sequence
  Synthetic
  misc_feature (11)..(11): n is a, c, g, or u
  misc_feature (14)..(14): n is a, c, g, or u
ccccccagcanagnauugcuug

SEQ ID NO: 89535 - RNA, 23 nt, Artificial Sequence
  Synthetic
  misc_feature (12)..(12): n is a, c, g, or u
  misc_feature (15)..(15): n is a, c, g, or u
uccccccagcanagnauugcuug

SEQ ID NO: 89536 - RNA, 24 nt, Artificial Sequence
  Synthetic
  misc_feature (1)..(1): n is a, c, g, or u
  misc_feature (13)..(13): n is a, c, g, or u
  misc_feature (16)..(16): n is a, c, g, or u
nuccccccagcanagnauugcuug

SEQ ID NO: 89537 - RNA, 18 nt, Artificial Sequence
  Synthetic
gauaaccaggacaaguug

SEQ ID NO: 89538 - RNA, 19 nt, Artificial Sequence
  Synthetic
cgauaaccaggacaaguug

SEQ ID NO: 89539 - RNA, 20 nt, Artificial Sequence
  Synthetic
gcgauaaccaggacaaguug

SEQ ID NO: 89540 - RNA, 21 nt, Artificial Sequence
  Synthetic
agcgauaaccaggacaaguug

SEQ ID NO: 89541 - RNA, 22 nt, Artificial Sequence
  Synthetic
cagcgauaaccaggacaaguug

SEQ ID NO: 89542 - RNA, 23 nt, Artificial Sequence
  Synthetic
ccagcgauaaccaggacaaguug

SEQ ID NO: 89543 - RNA, 24 nt, Artificial Sequence
  Synthetic
uccagcgauaaccaggacaaguug

SEQ ID NO: 89544 - RNA, 18 nt, Artificial Sequence
  Synthetic
gaaaggccuuguaaguug

SEQ ID NO: 89545 - RNA, 19 nt, Artificial Sequence
  Synthetic
agaaaggccuuguaaguug

SEQ ID NO: 89546 - RNA, 20 nt, Artificial Sequence
  Synthetic
cagaaaggccuuguaaguug

SEQ ID NO: 89547 - RNA, 21 nt, Artificial Sequence
  Synthetic
acagaaaggccuuguaaguug

SEQ ID NO: 89548 - RNA, 22 nt, Artificial Sequence
  Synthetic
cacagaaaggccuuguaaguug

SEQ ID NO: 89549 - RNA, 23 nt, Artificial Sequence
  Synthetic
acacagaaaggccuuguaaguug

SEQ ID NO: 89550 - RNA, 24 nt, Artificial Sequence
  Synthetic
uacacagaaaggccuuguaaguug

SEQ ID NO: 89551 - RNA, 18 nt, Artificial Sequence
  Synthetic
  misc_feature (13)..(13): n is a, c, g, or u
gugaaaccacaanaguug

SEQ ID NO: 89552 - RNA, 19 nt, Artificial Sequence
  Synthetic
  misc_feature (14)..(14): n is a, c, g, or u
ugugaaaccacaanaguug

SEQ ID NO: 89553 - RNA, 20 nt, Artificial Sequence
  Synthetic
  misc_feature (15)..(15): n is a, c, g, or u
augugaaaccacaanaguug

SEQ ID NO: 89554 - RNA, 21 nt, Artificial Sequence
  Synthetic
  misc_feature (16)..(16): n is a, c, g, or u
aaugugaaaccacaanaguug

SEQ ID NO: 89555 - RNA, 22 nt, Artificial Sequence
  Synthetic
  misc_feature (17)..(17): n is a, c, g, or u
aaaugugaaaccacaanaguug

SEQ ID NO: 89556 - RNA, 23 nt, Artificial Sequence
  Synthetic
  misc_feature (18)..(18): n is a, c, g, or u
gaaaugugaaaccacaanaguug

SEQ ID NO: 89557 - RNA, 24 nt, Artificial Sequence
  Synthetic
  misc_feature (19)..(19): n is a, c, g, or u
agaaaugugaaaccacaanaguug

SEQ ID NO: 89558 - RNA, 18 nt, Artificial Sequence
  Synthetic
gcacagaccuggccguug

SEQ ID NO: 89559 - RNA, 19 nt, Artificial Sequence
  Synthetic
ggcacagaccuggccguug

SEQ ID NO: 89560 - RNA, 20 nt, Artificial Sequence
  Synthetic
uggcacagaccuggccguug

SEQ ID NO: 89561 - RNA, 21 nt, Artificial Sequence
  Synthetic
uuggcacagaccuggccguug

SEQ ID NO: 89562 - RNA, 22 nt, Artificial Sequence
  Synthetic
cuuggcacagaccuggccguug

SEQ ID NO: 89563 - RNA, 23 nt, Artificial Sequence
  Synthetic
acuuggcacagaccuggccguug

SEQ ID NO: 89564 - RNA, 24 nt, Artificial Sequence
  Synthetic
cacuuggcacagaccuggccguug

SEQ ID NO: 89565 - RNA, 18 nt, Artificial Sequence
  Synthetic
gaguuugguggaagguug

SEQ ID NO: 89566 - RNA, 19 nt, Artificial Sequence
  Synthetic
agaguuugguggaagguug

SEQ ID NO: 89567 - RNA, 20 nt, Artificial Sequence
  Synthetic
cagaguuugguggaagguug

SEQ ID NO: 89568 - RNA, 21 nt, Artificial Sequence
  Synthetic
gcagaguuugguggaagguug

SEQ ID NO: 89569 - RNA, 22 nt, Artificial Sequence
  Synthetic
ugcagaguuugguggaagguug

SEQ ID NO: 89570 - RNA, 23 nt, Artificial Sequence
  Synthetic
uugcagaguuugguggaagguug

SEQ ID NO: 89571 - RNA, 24 nt, Artificial Sequence
  Synthetic
cuugcagaguuugguggaagguug

SEQ ID NO: 89572 - RNA, 18 nt, Artificial Sequence
  Synthetic
uagucuccggaaguguug

SEQ ID NO: 89573 - RNA, 19 nt, Artificial Sequence
  Synthetic
guagucuccggaaguguug

SEQ ID NO: 89574 - RNA, 20 nt, Artificial Sequence
  Synthetic
aguagucuccggaaguguug

SEQ ID NO: 89575 - RNA, 21 nt, Artificial Sequence
  Synthetic
caguagucuccggaaguguug

SEQ ID NO: 89576 - RNA, 22 nt, Artificial Sequence
  Synthetic
acaguagucuccggaaguguug

SEQ ID NO: 89577 - RNA, 23 nt, Artificial Sequence
  Synthetic
aacaguagucuccggaaguguug

SEQ ID NO: 89578 - RNA, 24 nt, Artificial Sequence
  Synthetic
caacaguagucuccggaaguguug

SEQ ID NO: 89579 - RNA, 18 nt, Artificial Sequence
  Synthetic
ggaaacgauguauauuug

SEQ ID NO: 89580 - RNA, 19 nt, Artificial Sequence
  Synthetic
uggaaacgauguauauuug

SEQ ID NO: 89581 - RNA, 20 nt, Artificial Sequence
  Synthetic
auggaaacgauguauauuug

SEQ ID NO: 89582 - RNA, 21 nt, Artificial Sequence
  Synthetic
cauggaaacgauguauauuug

SEQ ID NO: 89583 - RNA, 22 nt, Artificial Sequence
  Synthetic
ccauggaaacgauguauauuug

SEQ ID NO: 89584 - RNA, 23 nt, Artificial Sequence
  Synthetic
gccauggaaacgauguauauuug

SEQ ID NO: 89585 - RNA, 24 nt, Artificial Sequence
  Synthetic
agccauggaaacgauguauauuug

SEQ ID NO: 89586 - RNA, 18 nt, Artificial Sequence
  Synthetic
gggaucuugcagaguuug

SEQ ID NO: 89587 - RNA, 19 nt, Artificial Sequence
  Synthetic
ugggaucuugcagaguuug

SEQ ID NO: 89588 - RNA, 20 nt, Artificial Sequence
  Synthetic
cugggaucuugcagaguuug

SEQ ID NO: 89589 - RNA, 21 nt, Artificial Sequence
  Synthetic
  misc_feature (1)..(1): n is a, c, g, or u
ncugggaucuugcagaguuug

SEQ ID NO: 89590 - RNA, 22 nt, Artificial Sequence
  Synthetic
  misc_feature (2)..(2): n is a, c, g, or u
cncugggaucuugcagaguuug

SEQ ID NO: 89591 - RNA, 23 nt, Artificial Sequence
  Synthetic
  misc_feature (3)..(3): n is a, c, g, or u
acncugggaucuugcagaguuug

SEQ ID NO: 89592 - RNA, 24 nt, Artificial Sequence
  Synthetic
  misc_feature (4)..(4): n is a, c, g, or u
cacncugggaucuugcagaguuug

SEQ ID NO: 89593 - RNA, 18 nt, Artificial Sequence
  Synthetic
  misc_feature (14)..(14): n is a, c, g, or u
aauauuugguaacnuuug

SEQ ID NO: 89594 - RNA, 19 nt, Artificial Sequence
  Synthetic
  misc_feature (15)..(15): n is a, c, g, or u
aaauauuugguaacnuuug

SEQ ID NO: 89595 - RNA, 20 nt, Artificial Sequence
  Synthetic
  misc_feature (1)..(1): n is a, c, g, or u
  misc_feature (16)..(16): n is a, c, g, or u
naaauauuugguaacnuuug

SEQ ID NO: 89596 - RNA, 21 nt, Artificial Sequence
  Synthetic
  misc_feature (2)..(2): n is a, c, g, or u
  misc_feature (17)..(17): n is a, c, g, or u
gnaaauauuugguaacnuuug

SEQ ID NO: 89597 - RNA, 22 nt, Artificial Sequence
  Synthetic
  misc_feature (3)..(3): n is a, c, g, or u
  misc_feature (18)..(18): n is a, c, g, or u
ggnaaauauuugguaacnuuug

SEQ ID NO: 89598 - RNA, 23 nt, Artificial Sequence
  Synthetic
  misc_feature (4)..(4): n is a, c, g, or u
  misc_feature (19)..(19): n is a, c, g, or u
uggnaaauauuugguaacnuuug

SEQ ID NO: 89599 - RNA, 24 nt, Artificial Sequence
  Synthetic
  misc_feature (5)..(5): n is a, c, g, or u
  misc_feature (20)..(20): n is a, c, g, or u
auggnaaauauuugguaacnuuug

SEQ ID NO: 89600 - RNA, 18 nt, Artificial Sequence
  Synthetic
uggggacugcgaauuuug

SEQ ID NO: 89601 - RNA, 19 nt, Artificial Sequence
  Synthetic
uuggggacugcgaauuuug

SEQ ID NO: 89602 - RNA, 20 nt, Artificial Sequence
  Synthetic
guuggggacugcgaauuuug

SEQ ID NO: 89603 - RNA, 21 nt, Artificial Sequence
  Synthetic
gguuggggacugcgaauuuug

SEQ ID NO: 89604 - RNA, 22 nt, Artificial Sequence
  Synthetic
agguuggggacugcgaauuuug

SEQ ID NO: 89605 - RNA, 23 nt, Artificial Sequence
  Synthetic
gagguuggggacugcgaauuuug

SEQ ID NO: 89606 - RNA, 24 nt, Artificial Sequence
  Synthetic
ggagguuggggacugcgaauuuug

SEQ ID NO: 89607 - RNA, 18 nt, Artificial Sequence
  Synthetic
  misc_feature (12)..(12): n is a, c, g, or u
ccccaucuuuunguuuug

SEQ ID NO: 89608 - RNA, 19 nt, Artificial Sequence
  Synthetic
  misc_feature (13)..(13): n is a, c, g, or u
accccaucuuuunguuuug

SEQ ID NO: 89609 - RNA, 20 nt, Artificial Sequence
  Synthetic
  misc_feature (14)..(14): n is a, c, g, or u
aaccccaucuuuunguuuug

SEQ ID NO: 89610 - RNA, 21 nt, Artificial Sequence
  Synthetic
  misc_feature (15)..(15): n is a, c, g, or u
uaaccccaucuuuunguuuug

SEQ ID NO: 89611 - RNA, 22 nt, Artificial Sequence
  Synthetic
  misc_feature (16)..(16): n is a, c, g, or u
guaaccccaucuuuunguuuug

SEQ ID NO: 89612 - RNA, 23 nt, Artificial Sequence
  Synthetic
  misc_feature (17)..(17): n is a, c, g, or u
aguaaccccaucuuuunguuuug

SEQ ID NO: 89613 - RNA, 24 nt, Artificial Sequence
  Synthetic
  misc_feature (18)..(18): n is a, c, g, or u
gaguaaccccaucuuuunguuuug

SEQ ID NO: 89614 - RNA, 18 nt, Artificial Sequence
  Synthetic
  misc_feature (18)..(18): n is a, c, g, or u
ccgugcgguggggugaan

SEQ ID NO: 89615 - RNA, 19 nt, Artificial Sequence
  Synthetic
  misc_feature (19)..(19): n is a, c, g, or u
uccgugcgguggggugaan

SEQ ID NO: 89616 - RNA, 20 nt, Artificial Sequence
  Synthetic
  misc_feature (20)..(20): n is a, c, g, or u
cuccgugcgguggggugaan

SEQ ID NO: 89617 - RNA, 21 nt, Artificial Sequence
  Synthetic
  misc_feature (21)..(21): n is a, c, g, or u
ccuccgugcgguggggugaan

SEQ ID NO: 89618 - RNA, 22 nt, Artificial Sequence
  Synthetic
  misc_feature (22)..(22): n is a, c, g, or u
gccuccgugcgguggggugaan

SEQ ID NO: 89619 - RNA, 23 nt, Artificial Sequence
  Synthetic
  misc_feature (23)..(23): n is a, c, g, or u
ggccuccgugcgguggggugaan

SEQ ID NO: 89620 - RNA, 24 nt, Artificial Sequence
  Synthetic
  misc_feature (24)..(24): n is a, c, g, or u
aggccuccgugcgguggggugaan

SEQ ID NO: 89621 - RNA, 18 nt, Artificial Sequence
  Synthetic
  misc_feature (15)..(15): n is a, c, g, or u
  misc_feature (18)..(18): n is a, c, g, or u
gacuggcgauuggungan

SEQ ID NO: 89622 - RNA, 19 nt, Artificial Sequence
  Synthetic
  misc_feature (16)..(16): n is a, c, g, or u
  misc_feature (19)..(19): n is a, c, g, or u
ugacuggcgauuggungan

SEQ ID NO: 89623 - RNA, 20 nt, Artificial Sequence
  Synthetic
  misc_feature (17)..(17): n is a, c, g, or u
  misc_feature (20)..(20): n is a, c, g, or u
cugacuggcgauuggungan

SEQ ID NO: 89624 - RNA, 21 nt, Artificial Sequence
  Synthetic
  misc_feature (18)..(18): n is a, c, g, or u
  misc_feature (21)..(21): n is a, c, g, or u
ccugacuggcgauuggungan

SEQ ID NO: 89625 - RNA, 22 nt, Artificial Sequence
  Synthetic
  misc_feature (19)..(19): n is a, c, g, or u
  misc_feature (22)..(22): n is a, c, g, or u
uccugacuggcgauuggungan

SEQ ID NO: 89626 - RNA, 23 nt, Artificial Sequence
  Synthetic
  misc_feature (20)..(20): n is a, c, g, or u
  misc_feature (23)..(23): n is a, c, g, or u
uuccugacuggcgauuggungan

SEQ ID NO: 89627 - RNA, 24 nt, Artificial Sequence
  Synthetic
  misc_feature (21)..(21): n is a, c, g, or u
  misc_feature (24)..(24): n is a, c, g, or u
cuuccugacuggcgauuggungan

SEQ ID NO: 89628 - RNA, 18 nt, Artificial Sequence
  Synthetic
  misc_feature (18)..(18): n is a, c, g, or u
cgagaagauugacgauan

SEQ ID NO: 89629 - RNA, 19 nt, Artificial Sequence
  Synthetic
  misc_feature (19)..(19): n is a, c, g, or u
ucgagaagauugacgauan

SEQ ID NO: 89630 - RNA, 20 nt, Artificial Sequence
  Synthetic
  misc_feature (20)..(20): n is a, c, g, or u
cucgagaagauugacgauan

SEQ ID NO: 89631 - RNA, 21 nt, Artificial Sequence
  Synthetic
  misc_feature (21)..(21): n is a, c, g, or u
ccucgagaagauugacgauan

SEQ ID NO: 89632 - RNA, 22 nt, Artificial Sequence
  Synthetic
  misc_feature (22)..(22): n is a, c, g, or u
uccucgagaagauugacgauan

SEQ ID NO: 89633 - RNA, 23 nt, Artificial Sequence
  Synthetic
  misc_feature (23)..(23): n is a, c, g, or u
auccucgagaagauugacgauan

SEQ ID NO: 89634 - RNA, 24 nt, Artificial Sequence
  Synthetic
  misc_feature (24)..(24): n is a, c, g, or u
aauccucgagaagauugacgauan

SEQ ID NO: 89635 - RNA, 18 nt, Artificial Sequence
  Synthetic
  misc_feature (18)..(18): n is a, c, g, or u
augccuacagccuccuan

SEQ ID NO: 89636 - RNA, 19 nt, Artificial Sequence
  Synthetic
  misc_feature (19)..(19): n is a, c, g, or u
uaugccuacagccuccuan

SEQ ID NO: 89637 - RNA, 20 nt, Artificial Sequence
  Synthetic
  misc_feature (20)..(20): n is a, c, g, or u
uuaugccuacagccuccuan

SEQ ID NO: 89638 - RNA, 21 nt, Artificial Sequence
  Synthetic
  misc_feature (21)..(21): n is a, c, g, or u
uuuaugccuacagccuccuan

SEQ ID NO: 89639 - RNA, 22 nt, Artificial Sequence
  Synthetic
  misc_feature (22)..(22): n is a, c, g, or u
auuuaugccuacagccuccuan

SEQ ID NO: 89640 - RNA, 23 nt, Artificial Sequence
  Synthetic
  misc_feature (23)..(23): n is a, c, g, or u
aauuuaugccuacagccuccuan

SEQ ID NO: 89641 - RNA, 24 nt, Artificial Sequence
  Synthetic
  misc_feature (24)..(24): n is a, c, g, or u
caauuuaugccuacagccuccuan

SEQ ID NO: 89642 - RNA, 18 nt, Artificial Sequence
  Synthetic
  misc_feature (3)..(3): n is a, c, g, or u
  misc_feature (18)..(18): n is a, c, g, or u
ggnaaauauuugguaacn

SEQ ID NO: 89643 - RNA, 19 nt, Artificial Sequence
  Synthetic
  misc_feature (4)..(4): n is a, c, g, or u
  misc_feature (19)..(19): n is a, c, g, or u
uggnaaauauuugguaacn

SEQ ID NO: 89644 - RNA, 20 nt, Artificial Sequence
  Synthetic
  misc_feature (5)..(5): n is a, c, g, or u
  misc_feature (20)..(20): n is a, c, g, or u
auggnaaauauuugguaacn

SEQ ID NO: 89645 - RNA, 21 nt, Artificial Sequence
  Synthetic
  misc_feature (6)..(6): n is a, c, g, or u
  misc_feature (21)..(21): n is a, c, g, or u
aauggnaaauauuugguaacn

SEQ ID NO: 89646 - RNA, 22 nt, Artificial Sequence
  Synthetic
  misc_feature (1)..(1): n is a, c, g, or u
  misc_feature (7)..(7): n is a, c, g, or u
  misc_feature (22)..(22): n is a, c, g, or u
naauggnaaauauuugguaacn

SEQ ID NO: 89647 - RNA, 23 nt, Artificial Sequence
  Synthetic
  misc_feature (2)..(2): n is a, c, g, or u
  misc_feature (8)..(8): n is a, c, g, or u
  misc_feature (23)..(23): n is a, c, g, or u
cnaauggnaaauauuugguaacn

SEQ ID NO: 89648 - RNA, 24 nt, Artificial Sequence
  Synthetic
  misc_feature (3)..(3): n is a, c, g, or u
  misc_feature (9)..(9): n is a, c, g, or u
  misc_feature (24)..(24): n is a, c, g, or u
ucnaauggnaaauauuugguaacn

SEQ ID NO: 89649 - RNA, 18 nt, Artificial Sequence
  Synthetic
  misc_feature (18)..(18): n is a, c, g, or u
aaauacaggccucucacn

SEQ ID NO: 89650 - RNA, 19 nt, Artificial Sequence
  Synthetic
  misc_feature (19)..(19): n is a, c, g, or u
gaaauacaggccucucacn

SEQ ID NO: 89651 - RNA, 20 nt, Artificial Sequence
  Synthetic
  misc_feature (20)..(20): n is a, c, g, or u
ggaaauacaggccucucacn

SEQ ID NO: 89652 - RNA, 21 nt, Artificial Sequence
  Synthetic
  misc_feature (21)..(21): n is a, c, g, or u
gggaaauacaggccucucacn

SEQ ID NO: 89653 - RNA, 22 nt, Artificial Sequence
  Synthetic
  misc_feature (22)..(22): n is a, c, g, or u
agggaaauacaggccucucacn

SEQ ID NO: 89654 - RNA, 23 nt, Artificial Sequence
  Synthetic
  misc_feature (23)..(23): n is a, c, g, or u
cagggaaauacaggccucucacn

SEQ ID NO: 89655 - RNA, 24 nt, Artificial Sequence
  Synthetic
  misc_feature (24)..(24): n is a, c, g, or u
gcagggaaauacaggccucucacn

SEQ ID NO: 89656 - RNA, 18 nt, Artificial Sequence
  Synthetic
  misc_feature (3)..(3): n is a, c, g, or u
  misc_feature (18)..(18): n is a, c, g, or u
ucnagaagaucucguacn

SEQ ID NO: 89657 - RNA, 19 nt, Artificial Sequence
  Synthetic
  misc_feature (4)..(4): n is a, c, g, or u
  misc_feature (19)..(19): n is a, c, g, or u
aucnagaagaucucguacn

SEQ ID NO: 89658 - RNA, 20 nt, Artificial Sequence
  Synthetic
  misc_feature (5)..(5): n is a, c, g, or u
  misc_feature (20)..(20): n is a, c, g, or u
uaucnagaagaucucguacn

SEQ ID NO: 89659 - RNA, 21 nt, Artificial Sequence
  Synthetic
  misc_feature (6)..(6): n is a, c, g, or u
  misc_feature (21)..(21): n is a, c, g, or u
guaucnagaagaucucguacn

SEQ ID NO: 89660 - RNA, 22 nt, Artificial Sequence
  Synthetic
  misc_feature (7)..(7): n is a, c, g, or u
  misc_feature (22)..(22): n is a, c, g, or u
gguaucnagaagaucucguacn

SEQ ID NO: 89661 - RNA, 23 nt, Artificial Sequence
  Synthetic
  misc_feature (8)..(8): n is a, c, g, or u
  misc_feature (23)..(23): n is a, c, g, or u
cgguaucnagaagaucucguacn

SEQ ID NO: 89662 - RNA, 24 nt, Artificial Sequence
  Synthetic
  misc_feature (9)..(9): n is a, c, g, or u
  misc_feature (24)..(24): n is a, c, g, or u
gcgguaucnagaagaucucguacn

SEQ ID NO: 89663 - RNA, 18 nt, Artificial Sequence
  Synthetic
  misc_feature (18)..(18): n is a, c, g, or u
guagaagaauaaagcccn

SEQ ID NO: 89664 - RNA, 19 nt, Artificial Sequence
  Synthetic
  misc_feature (19)..(19): n is a, c, g, or u
aguagaagaauaaagcccn

SEQ ID NO: 89665 - RNA, 20 nt, Artificial Sequence
  Synthetic
  misc_feature (20)..(20): n is a, c, g, or u
caguagaagaauaaagcccn

SEQ ID NO: 89666 - RNA, 21 nt, Artificial Sequence
  Synthetic
  misc_feature (21)..(21): n is a, c, g, or u
acaguagaagaauaaagcccn

SEQ ID NO: 89667 - RNA, 22 nt, Artificial Sequence
  Synthetic
  misc_feature (1)..(1): n is a, c, g, or u
  misc_feature (22)..(22): n is a, c, g, or u
nacaguagaagaauaaagcccn

SEQ ID NO: 89668 - RNA, 23 nt, Artificial Sequence
  Synthetic
  misc_feature (2)..(2): n is a, c, g, or u
  misc_feature (23)..(23): n is a, c, g, or u
gnacaguagaagaauaaagcccn

SEQ ID NO: 89669 - RNA, 24 nt, Artificial Sequence
  Synthetic
  misc_feature (3)..(3): n is a, c, g, or u
  misc_feature (24)..(24): n is a, c, g, or u
ggnacaguagaagaauaaagcccn

SEQ ID NO: 89670 - RNA, 18 nt, Artificial Sequence
  Synthetic
  misc_feature (18)..(18): n is a, c, g, or u
ggaucggcagaggagccn

SEQ ID NO: 89671 - RNA, 19 nt, Artificial Sequence
  Synthetic
  misc_feature (19)..(19): n is a, c, g, or u
uggaucggcagaggagccn

SEQ ID NO: 89672 - RNA, 20 nt, Artificial Sequence
  Synthetic
  misc_feature (20)..(20): n is a, c, g, or u
auggaucggcagaggagccn

SEQ ID NO: 89673 - RNA, 21 nt, Artificial Sequence
  Synthetic
  misc_feature (21)..(21): n is a, c, g, or u
uauggaucggcagaggagccn

SEQ ID NO: 89674 - RNA, 22 nt, Artificial Sequence
  Synthetic
  misc_feature (22)..(22): n is a, c, g, or u
guauggaucggcagaggagccn

SEQ ID NO: 89675 - RNA, 23 nt, Artificial Sequence
  Synthetic
  misc_feature (23)..(23): n is a, c, g, or u
aguauggaucggcagaggagccn

SEQ ID NO: 89676 - RNA, 24 nt, Artificial Sequence
  Synthetic
  misc_feature (24)..(24): n is a, c, g, or u
caguauggaucggcagaggagccn

SEQ ID NO: 89677 - RNA, 18 nt, Artificial Sequence
  Synthetic
  misc_feature (18)..(18): n is a, c, g, or u
agagcugaggcgguaucn

SEQ ID NO: 89678 - RNA, 19 nt, Artificial Sequence
  Synthetic
  misc_feature (1)..(1): n is a, c, g, or u
  misc_feature (19)..(19): n is a, c, g, or u
nagagcugaggcgguaucn

SEQ ID NO: 89679 - RNA, 20 nt, Artificial Sequence
  Synthetic
  misc_feature (2)..(2): n is a, c, g, or u
  misc_feature (20)..(20): n is a, c, g, or u
anagagcugaggcgguaucn

SEQ ID NO: 89680 - RNA, 21 nt, Artificial Sequence
  Synthetic
  misc_feature (3)..(3): n is a, c, g, or u
  misc_feature (21)..(21): n is a, c, g, or u
uanagagcugaggcgguaucn

SEQ ID NO: 89681 - RNA, 22 nt, Artificial Sequence
  Synthetic
  misc_feature (4)..(4): n is a, c, g, or u
  misc_feature (22)..(22): n is a, c, g, or u
auanagagcugaggcgguaucn

SEQ ID NO: 89682 - RNA, 23 nt, Artificial Sequence
  Synthetic
  misc_feature (5)..(5): n is a, c, g, or u
  misc_feature (23)..(23): n is a, c, g, or u
gauanagagcugaggcgguaucn

SEQ ID NO: 89683 - RNA, 24 nt, Artificial Sequence
  Synthetic
  misc_feature (6)..(6): n is a, c, g, or u
  misc_feature (24)..(24): n is a, c, g, or u
cgauanagagcugaggcgguaucn

SEQ ID NO: 89684 - RNA, 18 nt, Artificial Sequence
  Synthetic
  misc_feature (18)..(18): n is a, c, g, or u
gguuuaauacccuuaucn

SEQ ID NO: 89685 - RNA, 19 nt, Artificial Sequence
  Synthetic
  misc_feature (19)..(19): n is a, c, g, or u
agguuuaauacccuuaucn

SEQ ID NO: 89686 - RNA, 20 nt, Artificial Sequence
  Synthetic
  misc_feature (20)..(20): n is a, c, g, or u
aagguuuaauacccuuaucn

SEQ ID NO: 89687 - RNA, 21 nt, Artificial Sequence
  Synthetic
  misc_feature (21)..(21): n is a, c, g, or u
uaagguuuaauacccuuaucn

SEQ ID NO: 89688 - RNA, 22 nt, Artificial Sequence
  Synthetic
  misc_feature (22)..(22): n is a, c, g, or u
auaagguuuaauacccuuaucn

SEQ ID NO: 89689 - RNA, 23 nt, Artificial Sequence
  Synthetic
  misc_feature (23)..(23): n is a, c, g, or u
aauaagguuuaauacccuuaucn

SEQ ID NO: 89690 - RNA, 24 nt, Artificial Sequence
  Synthetic
  misc_feature (24)..(24): n is a, c, g, or u
uaauaagguuuaauacccuuaucn

SEQ ID NO: 89691 - RNA, 18 nt, Artificial Sequence
  Synthetic
  misc_feature (18)..(18): n is a, c, g, or u
cccaacuccucccagucn

SEQ ID NO: 89692 - RNA, 19 nt, Artificial Sequence
  Synthetic
  misc_feature (19)..(19): n is a, c, g, or u
ccccaacuccucccagucn

SEQ ID NO: 89693 - RNA, 20 nt, Artificial Sequence
  Synthetic
  misc_feature (20)..(20): n is a, c, g, or u
cccccaacuccucccagucn

SEQ ID NO: 89694 - RNA, 21 nt, Artificial Sequence
  Synthetic
  misc_feature (21)..(21): n is a, c, g, or u
ucccccaacuccucccagucn

SEQ ID NO: 89695 - RNA, 22 nt, Artificial Sequence
  Synthetic
  misc_feature (22)..(22): n is a, c, g, or u
cucccccaacuccucccagucn

SEQ ID NO: 89696 - RNA, 23 nt, Artificial Sequence
  Synthetic
  misc_feature (23)..(23): n is a, c, g, or u
ccucccccaacuccucccagucn

SEQ ID NO: 89697 - RNA, 24 nt, Artificial Sequence
  Synthetic
  misc_feature (24)..(24): n is a, c, g, or u
uccucccccaacuccucccagucn

SEQ ID NO: 89698 - RNA, 18 nt, Artificial Sequence
  Synthetic
  misc_feature (15)..(15): n is a, c, g, or u
  misc_feature (18)..(18): n is a, c, g, or u
cgccccguggucggncgn

SEQ ID NO: 89699 - RNA, 19 nt, Artificial Sequence
  Synthetic
  misc_feature (16)..(16): n is a, c, g, or u
  misc_feature (19)..(19): n is a, c, g, or u
gcgccccguggucggncgn

SEQ ID NO: 89700 - RNA, 20 nt, Artificial Sequence
  Synthetic
  misc_feature (17)..(17): n is a, c, g, or u
  misc_feature (20)..(20): n is a, c, g, or u
ugcgccccguggucggncgn

SEQ ID NO: 89701 - RNA, 21 nt, Artificial Sequence
  Synthetic
  misc_feature (18)..(18): n is a, c, g, or u
  misc_feature (21)..(21): n is a, c, g, or u
gugcgccccguggucggncgn

SEQ ID NO: 89702 - RNA, 22 nt, Artificial Sequence
  Synthetic
  misc_feature (19)..(19): n is a, c, g, or u
  misc_feature (22)..(22): n is a, c, g, or u
ggugcgccccguggucggncgn

SEQ ID NO: 89703 - RNA, 23 nt, Artificial Sequence
  Synthetic
  misc_feature (20)..(20): n is a, c, g, or u
  misc_feature (23)..(23): n is a, c, g, or u
aggugcgccccguggucggncgn

SEQ ID NO: 89704 - RNA, 24 nt, Artificial Sequence
  Synthetic
  misc_feature (21)..(21): n is a, c, g, or u
  misc_feature (24)..(24): n is a, c, g, or u
gaggugcgccccguggucggncgn

SEQ ID NO: 89705 - RNA, 18 nt, Artificial Sequence
  Synthetic
  misc_feature (18)..(18): n is a, c, g, or u
gguguuuuccaaugaggn

SEQ ID NO: 89706 - RNA, 19 nt, Artificial Sequence
  Synthetic
  misc_feature (1)..(1): n is a, c, g, or u
  misc_feature (19)..(19): n is a, c, g, or u
ngguguuuuccaaugaggn

SEQ ID NO: 89707 - RNA, 20 nt, Artificial Sequence
  Synthetic
  misc_feature (2)..(2): n is a, c, g, or u
  misc_feature (20)..(20): n is a, c, g, or u
angguguuuuccaaugaggn

SEQ ID NO: 89708 - RNA, 21 nt, Artificial Sequence
  Synthetic
  misc_feature (3)..(3): n is a, c, g, or u
  misc_feature (21)..(21): n is a, c, g, or u
gangguguuuuccaaugaggn

SEQ ID NO: 89709 - RNA, 22 nt, Artificial Sequence
  Synthetic
  misc_feature (4)..(4): n is a, c, g, or u
  misc_feature (22)..(22): n is a, c, g, or u
agangguguuuuccaaugaggn

SEQ ID NO: 89710 - RNA, 23 nt, Artificial Sequence
  Synthetic
  misc_feature (5)..(5): n is a, c, g, or u
  misc_feature (23)..(23): n is a, c, g, or u
aagangguguuuuccaaugaggn

SEQ ID NO: 89711 - RNA, 24 nt, Artificial Sequence
  Synthetic
  misc_feature (6)..(6): n is a, c, g, or u
  misc_feature (24)..(24): n is a, c, g, or u
aaagangguguuuuccaaugaggn

SEQ ID NO: 89712 - RNA, 18 nt, Artificial Sequence
  Synthetic
  misc_feature (18)..(18): n is a, c, g, or u
gugcgccccguggucggn

SEQ ID NO: 89713 - RNA, 19 nt, Artificial Sequence
  Synthetic
  misc_feature (19)..(19): n is a, c, g, or u
ggugcgccccguggucggn

SEQ ID NO: 89714 - RNA, 20 nt, Artificial Sequence
  Synthetic
  misc_feature (20)..(20): n is a, c, g, or u
aggugcgccccguggucggn

SEQ ID NO: 89715 - RNA, 21 nt, Artificial Sequence
  Synthetic
  misc_feature (21)..(21): n is a, c, g, or u
gaggugcgccccguggucggn

SEQ ID NO: 89716 - RNA, 22 nt, Artificial Sequence
  Synthetic
  misc_feature (22)..(22): n is a, c, g, or u
agaggugcgccccguggucggn

SEQ ID NO: 89717 - RNA, 23 nt, Artificial Sequence
  Synthetic
  misc_feature (23)..(23): n is a, c, g, or u
gagaggugcgccccguggucggn

SEQ ID NO: 89718 - RNA, 24 nt, Artificial Sequence
  Synthetic
  misc_feature (24)..(24): n is a, c, g, or u
agagaggugcgccccguggucggn

SEQ ID NO: 89719 - RNA, 18 nt, Artificial Sequence
  Synthetic
  misc_feature (16)..(16): n is a, c, g, or u
  misc_feature (18)..(18): n is a, c, g, or u
agaagauugacgauangn

SEQ ID NO: 89720 - RNA, 19 nt, Artificial Sequence
  Synthetic
  misc_feature (17)..(17): n is a, c, g, or u
  misc_feature (19)..(19): n is a, c, g, or u
gagaagauugacgauangn

SEQ ID NO: 89721 - RNA, 20 nt, Artificial Sequence
  Synthetic
  misc_feature (18)..(18): n is a, c, g, or u
  misc_feature (20)..(20): n is a, c, g, or u
cgagaagauugacgauangn

SEQ ID NO: 89722 - RNA, 21 nt, Artificial Sequence
  Synthetic
  misc_feature (19)..(19): n is a, c, g, or u
  misc_feature (21)..(21): n is a, c, g, or u
ucgagaagauugacgauangn

SEQ ID NO: 89723 - RNA, 22 nt, Artificial Sequence
  Synthetic
  misc_feature (20)..(20): n is a, c, g, or u
  misc_feature (22)..(22): n is a, c, g, or u
cucgagaagauugacgauangn

SEQ ID NO: 89724 - RNA, 23 nt, Artificial Sequence
  Synthetic
  misc_feature (21)..(21): n is a, c, g, or u
  misc_feature (23)..(23): n is a, c, g, or u
ccucgagaagauugacgauangn

SEQ ID NO: 89725 - RNA, 24 nt, Artificial Sequence
  Synthetic
  misc_feature (22)..(22): n is a, c, g, or u
  misc_feature (24)..(24): n is a, c, g, or u
uccucgagaagauugacgauangn

SEQ ID NO: 89726 - RNA, 18 nt, Artificial Sequence
  Synthetic
  misc_feature (5)..(5): n is a, c, g, or u
  misc_feature (18)..(18): n is a, c, g, or u
aaggnucaauguccaugn

SEQ ID NO: 89727 - RNA, 19 nt, Artificial Sequence
  Synthetic
  misc_feature (6)..(6): n is a, c, g, or u
  misc_feature (19)..(19): n is a, c, g, or u
uaaggnucaauguccaugn

SEQ ID NO: 89728 - RNA, 20 nt, Artificial Sequence
  Synthetic
  misc_feature (7)..(7): n is a, c, g, or u
  misc_feature (20)..(20): n is a, c, g, or u
auaaggnucaauguccaugn

SEQ ID NO: 89729 - RNA, 21 nt, Artificial Sequence
  Synthetic
  misc_feature (8)..(8): n is a, c, g, or u
  misc_feature (21)..(21): n is a, c, g, or u
uauaaggnucaauguccaugn

SEQ ID NO: 89730 - RNA, 22 nt, Artificial Sequence
  Synthetic
  misc_feature (9)..(9): n is a, c, g, or u
  misc_feature (22)..(22): n is a, c, g, or u
uuauaaggnucaauguccaugn

SEQ ID NO: 89731 - RNA, 23 nt, Artificial Sequence
  Synthetic
  misc_feature (10)..(10): n is a, c, g, or u
  misc_feature (23)..(23): n is a, c, g, or u
uuuauaaggnucaauguccaugn

SEQ ID NO: 89732 - RNA, 24 nt, Artificial Sequence
  Synthetic
  misc_feature (11)..(11): n is a, c, g, or u
  misc_feature (24)..(24): n is a, c, g, or u
cuuuauaaggnucaauguccaugn

SEQ ID NO: 89733 - RNA, 18 nt, Artificial Sequence
  Synthetic
  misc_feature (7)..(7): n is a, c, g, or u
  misc_feature (13)..(13): n is a, c, g, or u
  misc_feature (18)..(18): n is a, c, g, or u
gacauancccaunaaaun

SEQ ID NO: 89734 - RNA, 19 nt, Artificial Sequence
  Synthetic
  misc_feature (8)..(8): n is a, c, g, or u
  misc_feature (14)..(14): n is a, c, g, or u
  misc_feature (19)..(19): n is a, c, g, or u
ugacauancccaunaaaun

SEQ ID NO: 89735 - RNA, 20 nt, Artificial Sequence
  Synthetic
  misc_feature (9)..(9): n is a, c, g, or u
  misc_feature (15)..(15): n is a, c, g, or u
  misc_feature (20)..(20): n is a, c, g, or u
augacauancccaunaaaun

SEQ ID NO: 89736 - RNA, 21 nt, Artificial Sequence
  Synthetic
  misc_feature (10)..(10): n is a, c, g, or u
  misc_feature (16)..(16): n is a, c, g, or u
  misc_feature (21)..(21): n is a, c, g, or u
aaugacauancccaunaaaun

SEQ ID NO: 89737 - RNA, 22 nt, Artificial Sequence
  Synthetic
  misc_feature (11)..(11): n is a, c, g, or u
  misc_feature (17)..(17): n is a, c, g, or u
  misc_feature (22)..(22): n is a, c, g, or u
caaugacauancccaunaaaun

SEQ ID NO: 89738 - RNA, 23 nt, Artificial Sequence
  Synthetic
  misc_feature (12)..(12): n is a, c, g, or u
  misc_feature (18)..(18): n is a, c, g, or u
  misc_feature (23)..(23): n is a, c, g, or u
ccaaugacauancccaunaaaun

SEQ ID NO: 89739 - RNA, 24 nt, Artificial Sequence
  Synthetic
  misc_feature (13)..(13): n is a, c, g, or u
  misc_feature (19)..(19): n is a, c, g, or u
  misc_feature (24)..(24): n is a, c, g, or u
uccaaugacauancccaunaaaun

SEQ ID NO: 89740 - RNA, 18 nt, Artificial Sequence
  Synthetic
  misc_feature (4)..(4): n is a, c, g, or u
  misc_feature (18)..(18): n is a, c, g, or u
uuancacccacccaggun

SEQ ID NO: 89741 - RNA, 19 nt, Artificial Sequence
  Synthetic
  misc_feature (5)..(5): n is a, c, g, or u
  misc_feature (19)..(19): n is a, c, g, or u
auuancacccacccaggun

SEQ ID NO: 89742 - RNA, 20 nt, Artificial Sequence
  Synthetic
  misc_feature (6)..(6): n is a, c, g, or u
  misc_feature (20)..(20): n is a, c, g, or u
aauuancacccacccaggun

SEQ ID NO: 89743 - RNA, 21 nt, Artificial Sequence
  Synthetic
  misc_feature (7)..(7): n is a, c, g, or u
  misc_feature (21)..(21): n is a, c, g, or u
aaauuancacccacccaggun

SEQ ID NO: 89744 - RNA, 22 nt, Artificial Sequence
  Synthetic
  misc_feature (8)..(8): n is a, c, g, or u
  misc_feature (22)..(22): n is a, c, g, or u
caaauuancacccacccaggun

SEQ ID NO: 89745 - RNA, 23 nt, Artificial Sequence
  Synthetic
  misc_feature (9)..(9): n is a, c, g, or u
  misc_feature (23)..(23): n is a, c, g, or u
ccaaauuancacccacccaggun

SEQ ID NO: 89746 - RNA, 24 nt, Artificial Sequence
  Synthetic
  misc_feature (10)..(10): n is a, c, g, or u
  misc_feature (24)..(24): n is a, c, g, or u
uccaaauuancacccacccaggun

SEQ ID NO: 89747 - RNA, 18 nt, Artificial Sequence
  Synthetic
  misc_feature (10)..(11): n is a, c, g, or u
  misc_feature (18)..(18): n is a, c, g, or u
cauggucccnngcuggun

SEQ ID NO: 89748 - RNA, 19 nt, Artificial Sequence
  Synthetic
  misc_feature (11)..(12): n is a, c, g, or u
  misc_feature (19)..(19): n is a, c, g, or u
gcauggucccnngcuggun

SEQ ID NO: 89749 - RNA, 20 nt, Artificial Sequence
  Synthetic
  misc_feature (12)..(13): n is a, c, g, or u
  misc_feature (20)..(20): n is a, c, g, or u
ugcauggucccnngcuggun

SEQ ID NO: 89750 - RNA, 21 nt, Artificial Sequence
  Synthetic
  misc_feature (13)..(14): n is a, c, g, or u
  misc_feature (21)..(21): n is a, c, g, or u
cugcauggucccnngcuggun

SEQ ID NO: 89751 - RNA, 22 nt, Artificial Sequence
  Synthetic
  misc_feature (14)..(15): n is a, c, g, or u
  misc_feature (22)..(22): n is a, c, g, or u
ucugcauggucccnngcuggun

SEQ ID NO: 89752 - RNA, 23 nt, Artificial Sequence
  Synthetic
  misc_feature (15)..(16): n is a, c, g, or u
  misc_feature (23)..(23): n is a, c, g, or u
uucugcauggucccnngcuggun

SEQ ID NO: 89753 - RNA, 24 nt, Artificial Sequence
  Synthetic
  misc_feature (16)..(17): n is a, c, g, or u
  misc_feature (24)..(24): n is a, c, g, or u
guucugcauggucccnngcuggun

SEQ ID NO: 89754 - RNA, 18 nt, Artificial Sequence
  Synthetic
  misc_feature (18)..(18): n is a, c, g, or u
ggucggucguugacauun

SEQ ID NO: 89755 - RNA, 19 nt, Artificial Sequence
  Synthetic
  misc_feature (19)..(19): n is a, c, g, or u
aggucggucguugacauun

SEQ ID NO: 89756 - RNA, 20 nt, Artificial Sequence
  Synthetic
  misc_feature (20)..(20): n is a, c, g, or u
aaggucggucguugacauun

SEQ ID NO: 89757 - RNA, 21 nt, Artificial Sequence
  Synthetic
  misc_feature (21)..(21): n is a, c, g, or u
caaggucggucguugacauun

SEQ ID NO: 89758 - RNA, 22 nt, Artificial Sequence
  Synthetic
  misc_feature (22)..(22): n is a, c, g, or u
ucaaggucggucguugacauun

SEQ ID NO: 89759 - RNA, 23 nt, Artificial Sequence
  Synthetic
  misc_feature (23)..(23): n is a, c, g, or u
cucaaggucggucguugacauun

SEQ ID NO: 89760 - RNA, 24 nt, Artificial Sequence
  Synthetic
  misc_feature (24)..(24): n is a, c, g, or u
ccucaaggucggucguugacauun

SEQ ID NO: 89761 - RNA, 18 nt, Artificial Sequence
  Synthetic
  misc_feature (2)..(2): n is a, c, g, or u
  misc_feature (5)..(5): n is a, c, g, or u
unguncccccuagaaaau

SEQ ID NO: 89762 - RNA, 19 nt, Artificial Sequence
  Synthetic
  misc_feature (3)..(3): n is a, c, g, or u
  misc_feature (6)..(6): n is a, c, g, or u
gunguncccccuagaaaau

SEQ ID NO: 89763 - RNA, 20 nt, Artificial Sequence
  Synthetic
  misc_feature (4)..(4): n is a, c, g, or u
  misc_feature (7)..(7): n is a, c, g, or u
ggunguncccccuagaaaau

SEQ ID NO: 89764 - RNA, 21 nt, Artificial Sequence
  Synthetic
  misc_feature (5)..(5): n is a, c, g, or u
  misc_feature (8)..(8): n is a, c, g, or u
cggunguncccccuagaaaau

SEQ ID NO: 89765 - RNA, 22 nt, Artificial Sequence
  Synthetic
  misc_feature (6)..(6): n is a, c, g, or u
  misc_feature (9)..(9): n is a, c, g, or u
acggunguncccccuagaaaau

SEQ ID NO: 89766 - RNA, 23 nt, Artificial Sequence
  Synthetic
  misc_feature (7)..(7): n is a, c, g, or u
  misc_feature (10)..(10): n is a, c, g, or u
cacggunguncccccuagaaaau

SEQ ID NO: 89767 - RNA, 24 nt, Artificial Sequence
  Synthetic
  misc_feature (8)..(8): n is a, c, g, or u
  misc_feature (11)..(11): n is a, c, g, or u
acacggunguncccccuagaaaau

SEQ ID NO: 89768 - RNA, 18 nt, Artificial Sequence
  Synthetic
aaaagugagacaagaaau

SEQ ID NO: 89769 - RNA, 19 nt, Artificial Sequence
  Synthetic
caaaagugagacaagaaau

SEQ ID NO: 89770 - RNA, 20 nt, Artificial Sequence
  Synthetic
ccaaaagugagacaagaaau

SEQ ID NO: 89771 - RNA, 21 nt, Artificial Sequence
  Synthetic
uccaaaagugagacaagaaau

SEQ ID NO: 89772 - RNA, 22 nt, Artificial Sequence
  Synthetic
uuccaaaagugagacaagaaau

SEQ ID NO: 89773 - RNA, 23 nt, Artificial Sequence
  Synthetic
cuuccaaaagugagacaagaaau

SEQ ID NO: 89774 - RNA, 24 nt, Artificial Sequence
  Synthetic
ucuuccaaaagugagacaagaaau

SEQ ID NO: 89775 - RNA, 18 nt, Artificial Sequence
  Synthetic
agccaccagcagggaaau

SEQ ID NO: 89776 - RNA, 19 nt, Artificial Sequence
  Synthetic
gagccaccagcagggaaau

SEQ ID NO: 89777 - RNA, 20 nt, Artificial Sequence
  Synthetic
ggagccaccagcagggaaau

SEQ ID NO: 89778 - RNA, 21 nt, Artificial Sequence
  Synthetic
uggagccaccagcagggaaau

SEQ ID NO: 89779 - RNA, 22 nt, Artificial Sequence
  Synthetic
cuggagccaccagcagggaaau

SEQ ID NO: 89780 - RNA, 23 nt, Artificial Sequence
  Synthetic
acuggagccaccagcagggaaau

SEQ ID NO: 89781 - RNA, 24 nt, Artificial Sequence
  Synthetic
aacuggagccaccagcagggaaau

SEQ ID NO: 89782 - RNA, 18 nt, Artificial Sequence
  Synthetic
ugguggucgggaaagaau

SEQ ID NO: 89783 - RNA, 19 nt, Artificial Sequence
  Synthetic
cugguggucgggaaagaau

SEQ ID NO: 89784 - RNA, 20 nt, Artificial Sequence
  Synthetic
acugguggucgggaaagaau

SEQ ID NO: 89785 - RNA, 21 nt, Artificial Sequence
  Synthetic
aacugguggucgggaaagaau

SEQ ID NO: 89786 - RNA, 22 nt, Artificial Sequence
  Synthetic
caacugguggucgggaaagaau

SEQ ID NO: 89787 - RNA, 23 nt, Artificial Sequence
  Synthetic
ccaacugguggucgggaaagaau

SEQ ID NO: 89788 - RNA, 24 nt, Artificial Sequence
  Synthetic
uccaacugguggucgggaaagaau

SEQ ID NO: 89789 - RNA, 18 nt, Artificial Sequence
  Synthetic
agguuggggacugcgaau

SEQ ID NO: 89790 - RNA, 19 nt, Artificial Sequence
  Synthetic
gagguuggggacugcgaau

SEQ ID NO: 89791 - RNA, 20 nt, Artificial Sequence
  Synthetic
ggagguuggggacugcgaau

SEQ ID NO: 89792 - RNA, 21 nt, Artificial Sequence
  Synthetic
uggagguuggggacugcgaau

SEQ ID NO: 89793 - RNA, 22 nt, Artificial Sequence
  Synthetic
uuggagguuggggacugcgaau

SEQ ID NO: 89794 - RNA, 23 nt, Artificial Sequence
  Synthetic
auuggagguuggggacugcgaau

SEQ ID NO: 89795 - RNA, 24 nt, Artificial Sequence
  Synthetic
gauuggagguuggggacugcgaau

SEQ ID NO: 89796 - RNA, 18 nt, Artificial Sequence
  Synthetic
cuuaugaguccaaggaau

SEQ ID NO: 89797 - RNA, 19 nt, Artificial Sequence
  Synthetic
ccuuaugaguccaaggaau

SEQ ID NO: 89798 - RNA, 20 nt, Artificial Sequence
  Synthetic
accuuaugaguccaaggaau

SEQ ID NO: 89799 - RNA, 21 nt, Artificial Sequence
  Synthetic
caccuuaugaguccaaggaau

SEQ ID NO: 89800 - RNA, 22 nt, Artificial Sequence
  Synthetic
ccaccuuaugaguccaaggaau

SEQ ID NO: 89801 - RNA, 23 nt, Artificial Sequence
  Synthetic
cccaccuuaugaguccaaggaau

SEQ ID NO: 89802 - RNA, 24 nt, Artificial Sequence
  Synthetic
  misc_feature (1)..(1): n is a, c, g, or u
ncccaccuuaugaguccaaggaau

SEQ ID NO: 89803 - RNA, 18 nt, Artificial Sequence
  Synthetic
  misc_feature (1)..(1): n is a, c, g, or u
  misc_feature (7)..(7): n is a, c, g, or u
nguugangauccuggaau

SEQ ID NO: 89804 - RNA, 19 nt, Artificial Sequence
  Synthetic
  misc_feature (2)..(2): n is a, c, g, or u
  misc_feature (8)..(8): n is a, c, g, or u
unguugangauccuggaau

SEQ ID NO: 89805 - RNA, 20 nt, Artificial Sequence
  Synthetic
  misc_feature (3)..(3): n is a, c, g, or u
  misc_feature (9)..(9): n is a, c, g, or u
gunguugangauccuggaau

SEQ ID NO: 89806 - RNA, 21 nt, Artificial Sequence
  Synthetic
  misc_feature (4)..(4): n is a, c, g, or u
  misc_feature (10)..(10): n is a, c, g, or u
ggunguugangauccuggaau

SEQ ID NO: 89807 - RNA, 22 nt, Artificial Sequence
  Synthetic
  misc_feature (5)..(5): n is a, c, g, or u
  misc_feature (11)..(11): n is a, c, g, or u
uggunguugangauccuggaau

SEQ ID NO: 89808 - RNA, 23 nt, Artificial Sequence
  Synthetic
  misc_feature (6)..(6): n is a, c, g, or u
  misc_feature (12)..(12): n is a, c, g, or u
cuggunguugangauccuggaau

SEQ ID NO: 89809 - RNA, 24 nt, Artificial Sequence
  Synthetic
  misc_feature (7)..(7): n is a, c, g, or u
  misc_feature (13)..(13): n is a, c, g, or u
gcuggunguugangauccuggaau

SEQ ID NO: 89810 - RNA, 18 nt, Artificial Sequence
  Synthetic
  misc_feature (15)..(15): n is a, c, g, or u
uuaauacccuuaucnaau

SEQ ID NO: 89811 - RNA, 19 nt, Artificial Sequence
  Synthetic
  misc_feature (16)..(16): n is a, c, g, or u
uuuaauacccuuaucnaau

SEQ ID NO: 89812 - RNA, 20 nt, Artificial Sequence
  Synthetic
  misc_feature (17)..(17): n is a, c, g, or u
guuuaauacccuuaucnaau

SEQ ID NO: 89813 - RNA, 21 nt, Artificial Sequence
  Synthetic
  misc_feature (18)..(18): n is a, c, g, or u
gguuuaauacccuuaucnaau

SEQ ID NO: 89814 - RNA, 22 nt, Artificial Sequence
  Synthetic
  misc_feature (19)..(19): n is a, c, g, or u
agguuuaauacccuuaucnaau

SEQ ID NO: 89815 - RNA, 23 nt, Artificial Sequence
  Synthetic
  misc_feature (20)..(20): n is a, c, g, or u
aagguuuaauacccuuaucnaau

SEQ ID NO: 89816 - RNA, 24 nt, Artificial Sequence
  Synthetic
  misc_feature (21)..(21): n is a, c, g, or u
uaagguuuaauacccuuaucnaau

SEQ ID NO: 89817 - RNA, 18 nt, Artificial Sequence
  Synthetic
aaggucggucguugacau

SEQ ID NO: 89818 - RNA, 19 nt, Artificial Sequence
  Synthetic
caaggucggucguugacau

SEQ ID NO: 89819 - RNA, 20 nt, Artificial Sequence
  Synthetic
ucaaggucggucguugacau

SEQ ID NO: 89820 - RNA, 18 nt, Artificial Sequence
  Synthetic
gcacagccuagcagccau

SEQ ID NO: 89821 - RNA, 19 nt, Artificial Sequence
  Synthetic
agcacagccuagcagccau

SEQ ID NO: 89822 - RNA, 20 nt, Artificial Sequence
  Synthetic
cagcacagccuagcagccau

SEQ ID NO: 89823 - RNA, 21 nt, Artificial Sequence
  Synthetic
gcagcacagccuagcagccau

SEQ ID NO: 89824 - RNA, 22 nt, Artificial Sequence
  Synthetic
ggcagcacagccuagcagccau

SEQ ID NO: 89825 - RNA, 23 nt, Artificial Sequence
  Synthetic
uggcagcacagccuagcagccau

SEQ ID NO: 89826 - RNA, 24 nt, Artificial Sequence
  Synthetic
uuggcagcacagccuagcagccau

SEQ ID NO: 89827 - RNA, 18 nt, Artificial Sequence
  Synthetic
aacaagaagaugaggcau

SEQ ID NO: 89828 - RNA, 19 nt, Artificial Sequence
  Synthetic
caacaagaagaugaggcau

SEQ ID NO: 89829 - RNA, 20 nt, Artificial Sequence
  Synthetic
ccaacaagaagaugaggcau

SEQ ID NO: 89830 - RNA, 21 nt, Artificial Sequence
  Synthetic
accaacaagaagaugaggcau

SEQ ID NO: 89831 - RNA, 22 nt, Artificial Sequence
  Synthetic
aaccaacaagaagaugaggcau

SEQ ID NO: 89832 - RNA, 23 nt, Artificial Sequence
  Synthetic
gaaccaacaagaagaugaggcau

SEQ ID NO: 89833 - RNA, 24 nt, Artificial Sequence
  Synthetic
agaaccaacaagaagaugaggcau

SEQ ID NO: 89834 - RNA, 18 nt, Artificial Sequence
  Synthetic
  misc_feature (4)..(4): n is a, c, g, or u
  misc_feature (13)..(13): n is a, c, g, or u
acangcauacaanggcau

SEQ ID NO: 89835 - RNA, 19 nt, Artificial Sequence
  Synthetic
  misc_feature (5)..(5): n is a, c, g, or u
  misc_feature (14)..(14): n is a, c, g, or u
uacangcauacaanggcau

SEQ ID NO: 89836 - RNA, 20 nt, Artificial Sequence
  Synthetic
  misc_feature (6)..(6): n is a, c, g, or u
  misc_feature (15)..(15): n is a, c, g, or u
auacangcauacaanggcau

SEQ ID NO: 89837 - RNA, 21 nt, Artificial Sequence
  Synthetic
  misc_feature (7)..(7): n is a, c, g, or u
  misc_feature (16)..(16): n is a, c, g, or u
aauacangcauacaanggcau

SEQ ID NO: 89838 - RNA, 22 nt, Artificial Sequence
  Synthetic
  misc_feature (8)..(8): n is a, c, g, or u
  misc_feature (17)..(17): n is a, c, g, or u
gaauacangcauacaanggcau

SEQ ID NO: 89839 - RNA, 23 nt, Artificial Sequence
  Synthetic
  misc_feature (9)..(9): n is a, c, g, or u
  misc_feature (18)..(18): n is a, c, g, or u
ugaauacangcauacaanggcau

SEQ ID NO: 89840 - RNA, 24 nt, Artificial Sequence
  Synthetic
  misc_feature (1)..(1): n is a, c, g, or u
  misc_feature (10)..(10): n is a, c, g, or u
  misc_feature (19)..(19): n is a, c, g, or u
nugaauacangcauacaanggcau

SEQ ID NO: 89841 - RNA, 18 nt, Artificial Sequence
  Synthetic
caggaugaagaggaagau

SEQ ID NO: 89842 - RNA, 19 nt, Artificial Sequence
  Synthetic
gcaggaugaagaggaagau

SEQ ID NO: 89843 - RNA, 20 nt, Artificial Sequence
  Synthetic
agcaggaugaagaggaagau

SEQ ID NO: 89844 - RNA, 21 nt, Artificial Sequence
  Synthetic
cagcaggaugaagaggaagau

SEQ ID NO: 89845 - RNA, 22 nt, Artificial Sequence
  Synthetic
gcagcaggaugaagaggaagau

SEQ ID NO: 89846 - RNA, 23 nt, Artificial Sequence
  Synthetic
agcagcaggaugaagaggaagau

SEQ ID NO: 89847 - RNA, 24 nt, Artificial Sequence
  Synthetic
uagcagcaggaugaagaggaagau

SEQ ID NO: 89848 - RNA, 18 nt, Artificial Sequence
  Synthetic
cggaaguguugauaagau

SEQ ID NO: 89849 - RNA, 19 nt, Artificial Sequence
  Synthetic
ccggaaguguugauaagau

SEQ ID NO: 89850 - RNA, 20 nt, Artificial Sequence
  Synthetic
uccggaaguguugauaagau

SEQ ID NO: 89851 - RNA, 21 nt, Artificial Sequence
  Synthetic
cuccggaaguguugauaagau

SEQ ID NO: 89852 - RNA, 22 nt, Artificial Sequence
  Synthetic
ucuccggaaguguugauaagau

SEQ ID NO: 89853 - RNA, 23 nt, Artificial Sequence
  Synthetic
gucuccggaaguguugauaagau

SEQ ID NO: 89854 - RNA, 24 nt, Artificial Sequence
  Synthetic
agucuccggaaguguugauaagau

SEQ ID NO: 89855 - RNA, 18 nt, Artificial Sequence
  Synthetic
gcacacgguccggcagau

SEQ ID NO: 89856 - RNA, 19 nt, Artificial Sequence
  Synthetic
ugcacacgguccggcagau

SEQ ID NO: 89857 - RNA, 20 nt, Artificial Sequence
  Synthetic
gugcacacgguccggcagau

SEQ ID NO: 89858 - RNA, 18 nt, Artificial Sequence
  Synthetic
  misc_feature (11)..(11): n is a, c, g, or u
acucuaaggcnucccgau

SEQ ID NO: 89859 - RNA, 19 nt, Artificial Sequence
  Synthetic
  misc_feature (12)..(12): n is a, c, g, or u
gacucuaaggcnucccgau

SEQ ID NO: 89860 - RNA, 20 nt, Artificial Sequence
  Synthetic
  misc_feature (13)..(13): n is a, c, g, or u
agacucuaaggcnucccgau

SEQ ID NO: 89861 - RNA, 21 nt, Artificial Sequence
  Synthetic
  misc_feature (14)..(14): n is a, c, g, or u
gagacucuaaggcnucccgau

SEQ ID NO: 89862 - RNA, 22 nt, Artificial Sequence
  Synthetic
  misc_feature (15)..(15): n is a, c, g, or u
ggagacucuaaggcnucccgau

SEQ ID NO: 89863 - RNA, 23 nt, Artificial Sequence
  Synthetic
  misc_feature (16)..(16): n is a, c, g, or u
aggagacucuaaggcnucccgau

SEQ ID NO: 89864 - RNA, 24 nt, Artificial Sequence
  Synthetic
  misc_feature (17)..(17): n is a, c, g, or u
caggagacucuaaggcnucccgau

SEQ ID NO: 89865 - RNA, 18 nt, Artificial Sequence
  Synthetic
cuucugcgacgcggcgau

SEQ ID NO: 89866 - RNA, 19 nt, Artificial Sequence
  Synthetic
ucuucugcgacgcggcgau

SEQ ID NO: 89867 - RNA, 20 nt, Artificial Sequence
  Synthetic
aucuucugcgacgcggcgau

SEQ ID NO: 89868 - RNA, 18 nt, Artificial Sequence
  Synthetic
gaggcauagcagcaggau

SEQ ID NO: 89869 - RNA, 19 nt, Artificial Sequence
  Synthetic
ugaggcauagcagcaggau

SEQ ID NO: 89870 - RNA, 20 nt, Artificial Sequence
  Synthetic
augaggcauagcagcaggau

SEQ ID NO: 89871 - RNA, 21 nt, Artificial Sequence
  Synthetic
gaugaggcauagcagcaggau

SEQ ID NO: 89872 - RNA, 22 nt, Artificial Sequence
  Synthetic
agaugaggcauagcagcaggau

SEQ ID NO: 89873 - RNA, 23 nt, Artificial Sequence
  Synthetic
aagaugaggcauagcagcaggau

SEQ ID NO: 89874 - RNA, 24 nt, Artificial Sequence
  Synthetic
gaagaugaggcauagcagcaggau

SEQ ID NO: 89875 - RNA, 18 nt, Artificial Sequence
  Synthetic
uaacuagauguucuggau

SEQ ID NO: 89876 - RNA, 19 nt, Artificial Sequence
  Synthetic
uuaacuagauguucuggau

SEQ ID NO: 89877 - RNA, 20 nt, Artificial Sequence
  Synthetic
auuaacuagauguucuggau

SEQ ID NO: 89878 - RNA, 21 nt, Artificial Sequence
  Synthetic
gauuaacuagauguucuggau

SEQ ID NO: 89879 - RNA, 22 nt, Artificial Sequence
  Synthetic
ugauuaacuagauguucuggau

SEQ ID NO: 89880 - RNA, 23 nt, Artificial Sequence
  Synthetic
augauuaacuagauguucuggau

SEQ ID NO: 89881 - RNA, 24 nt, Artificial Sequence
  Synthetic
aaugauuaacuagauguucuggau

SEQ ID NO: 89882 - RNA, 18 nt, Artificial Sequence
  Synthetic
  misc_feature (15)..(15): n is a, c, g, or u
uuuccgaaagcccangau

SEQ ID NO: 89883 - RNA, 19 nt, Artificial Sequence
  Synthetic
  misc_feature (16)..(16): n is a, c, g, or u
uuuuccgaaagcccangau

SEQ ID NO: 89884 - RNA, 20 nt, Artificial Sequence
  Synthetic
  misc_feature (17)..(17): n is a, c, g, or u
auuuuccgaaagcccangau

SEQ ID NO: 89885 - RNA, 21 nt, Artificial Sequence
  Synthetic
  misc_feature (18)..(18): n is a, c, g, or u
aauuuuccgaaagcccangau

SEQ ID NO: 89886 - RNA, 22 nt, Artificial Sequence
  Synthetic
  misc_feature (19)..(19): n is a, c, g, or u
gaauuuuccgaaagcccangau

SEQ ID NO: 89887 - RNA, 23 nt, Artificial Sequence
  Synthetic
  misc_feature (20)..(20): n is a, c, g, or u
ggaauuuuccgaaagcccangau

SEQ ID NO: 89888 - RNA, 24 nt, Artificial Sequence
  Synthetic
  misc_feature (21)..(21): n is a, c, g, or u
aggaauuuuccgaaagcccangau

SEQ ID NO: 89889 - RNA, 18 nt, Artificial Sequence
  Synthetic
  misc_feature (1)..(2): n is a, c, g, or u
  misc_feature (9)..(9): n is a, c, g, or u
  misc_feature (15)..(15): n is a, c, g, or u
nngcuggunguugangau

SEQ ID NO: 89890 - RNA, 19 nt, Artificial Sequence
  Synthetic
  misc_feature (2)..(3): n is a, c, g, or u
  misc_feature (10)..(10): n is a, c, g, or u
  misc_feature (16)..(16): n is a, c, g, or u
cnngcuggunguugangau

SEQ ID NO: 89891 - RNA, 20 nt, Artificial Sequence
  Synthetic
  misc_feature (3)..(4): n is a, c, g, or u
  misc_feature (11)..(11): n is a, c, g, or u
  misc_feature (17)..(17): n is a, c, g, or u
ccnngcuggunguugangau

SEQ ID NO: 89892 - RNA, 21 nt, Artificial Sequence
  Synthetic
  misc_feature (4)..(5): n is a, c, g, or u
  misc_feature (12)..(12): n is a, c, g, or u
  misc_feature (18)..(18): n is a, c, g, or u
cccnngcuggunguugangau

SEQ ID NO: 89893 - RNA, 22 nt, Artificial Sequence
  Synthetic
  misc_feature (5)..(6): n is a, c, g, or u
  misc_feature (13)..(13): n is a, c, g, or u
  misc_feature (19)..(19): n is a, c, g, or u
ucccnngcuggunguugangau

SEQ ID NO: 89894 - RNA, 23 nt, Artificial Sequence
  Synthetic
  misc_feature (6)..(7): n is a, c, g, or u
  misc_feature (14)..(14): n is a, c, g, or u
  misc_feature (20)..(20): n is a, c, g, or u
gucccnngcuggunguugangau

SEQ ID NO: 89895 - RNA, 24 nt, Artificial Sequence
  Synthetic
  misc_feature (7)..(8): n is a, c, g, or u
  misc_feature (15)..(15): n is a, c, g, or u
  misc_feature (21)..(21): n is a, c, g, or u
ggucccnngcuggunguugangau

SEQ ID NO: 89896 - RNA, 18 nt, Artificial Sequence
  Synthetic
  misc_feature (12)..(12): n is a, c, g, or u
  misc_feature (15)..(15): n is a, c, g, or u
acuacuaggucncungau

SEQ ID NO: 89897 - RNA, 19 nt, Artificial Sequence
  Synthetic
  misc_feature (13)..(13): n is a, c, g, or u
  misc_feature (16)..(16): n is a, c, g, or u
gacuacuaggucncungau

SEQ ID NO: 89898 - RNA, 20 nt, Artificial Sequence
  Synthetic
  misc_feature (14)..(14): n is a, c, g, or u
  misc_feature (17)..(17): n is a, c, g, or u
ugacuacuaggucncungau

SEQ ID NO: 89899 - RNA, 21 nt, Artificial Sequence
  Synthetic
  misc_feature (15)..(15): n is a, c, g, or u
  misc_feature (18)..(18): n is a, c, g, or u
cugacuacuaggucncungau

SEQ ID NO: 89900 - RNA, 22 nt, Artificial Sequence
  Synthetic
  misc_feature (16)..(16): n is a, c, g, or u
  misc_feature (19)..(19): n is a, c, g, or u
acugacuacuaggucncungau

SEQ ID NO: 89901 - RNA, 23 nt, Artificial Sequence
  Synthetic
  misc_feature (17)..(17): n is a, c, g, or u
  misc_feature (20)..(20): n is a, c, g, or u
aacugacuacuaggucncungau

SEQ ID NO: 89902 - RNA, 24 nt, Artificial Sequence
  Synthetic
  misc_feature (18)..(18): n is a, c, g, or u
  misc_feature (21)..(21): n is a, c, g, or u
uaacugacuacuaggucncungau

SEQ ID NO: 89903 - RNA, 18 nt, Artificial Sequence
  Synthetic
aggagguuggugagugau

SEQ ID NO: 89904 - RNA, 19 nt, Artificial Sequence
  Synthetic
caggagguuggugagugau

SEQ ID NO: 89905 - RNA, 20 nt, Artificial Sequence
  Synthetic
acaggagguuggugagugau

SEQ ID NO: 89906 - RNA, 21 nt, Artificial Sequence
  Synthetic
gacaggagguuggugagugau

SEQ ID NO: 89907 - RNA, 22 nt, Artificial Sequence
  Synthetic
ggacaggagguuggugagugau

SEQ ID NO: 89908 - RNA, 23 nt, Artificial Sequence
  Synthetic
aggacaggagguuggugagugau

SEQ ID NO: 89909 - RNA, 24 nt, Artificial Sequence
  Synthetic
gaggacaggagguuggugagugau

SEQ ID NO: 89910 - RNA, 18 nt, Artificial Sequence
  Synthetic
ucuuguucccaagaauau

SEQ ID NO: 89911 - RNA, 19 nt, Artificial Sequence
  Synthetic
cucuuguucccaagaauau

SEQ ID NO: 89912 - RNA, 20 nt, Artificial Sequence
  Synthetic
gcucuuguucccaagaauau

SEQ ID NO: 89913 - RNA, 21 nt, Artificial Sequence
  Synthetic
agcucuuguucccaagaauau

SEQ ID NO: 89914 - RNA, 22 nt, Artificial Sequence
  Synthetic
uagcucuuguucccaagaauau

SEQ ID NO: 89915 - RNA, 23 nt, Artificial Sequence
  Synthetic
guagcucuuguucccaagaauau

SEQ ID NO: 89916 - RNA, 24 nt, Artificial Sequence
  Synthetic
uguagcucuuguucccaagaauau

SEQ ID NO: 89917 - RNA, 18 nt, Artificial Sequence
  Synthetic
cuugguguaaauguauau

SEQ ID NO: 89918 - RNA, 19 nt, Artificial Sequence
  Synthetic
ucuugguguaaauguauau

SEQ ID NO: 89919 - RNA, 20 nt, Artificial Sequence
  Synthetic
gucuugguguaaauguauau

SEQ ID NO: 89920 - RNA, 21 nt, Artificial Sequence
  Synthetic
ugucuugguguaaauguauau

SEQ ID NO: 89921 - RNA, 22 nt, Artificial Sequence
  Synthetic
augucuugguguaaauguauau

SEQ ID NO: 89922 - RNA, 23 nt, Artificial Sequence
  Synthetic
  misc_feature (1)..(1): n is a, c, g, or u
naugucuugguguaaauguauau

SEQ ID NO: 89923 - RNA, 24 nt, Artificial Sequence
  Synthetic
  misc_feature (2)..(2): n is a, c, g, or u
unaugucuugguguaaauguauau

SEQ ID NO: 89924 - RNA, 18 nt, Artificial Sequence
  Synthetic
cuugccugagugcaguau

SEQ ID NO: 89925 - RNA, 19 nt, Artificial Sequence
  Synthetic
gcuugccugagugcaguau

SEQ ID NO: 89926 - RNA, 20 nt, Artificial Sequence
  Synthetic
ugcuugccugagugcaguau

SEQ ID NO: 89927 - RNA, 21 nt, Artificial Sequence
  Synthetic
uugcuugccugagugcaguau

SEQ ID NO: 89928 - RNA, 22 nt, Artificial Sequence
  Synthetic
auugcuugccugagugcaguau

SEQ ID NO: 89929 - RNA, 23 nt, Artificial Sequence
  Synthetic
  misc_feature (1)..(1): n is a, c, g, or u
nauugcuugccugagugcaguau

SEQ ID NO: 89930 - RNA, 24 nt, Artificial Sequence
  Synthetic
  misc_feature (2)..(2): n is a, c, g, or u
gnauugcuugccugagugcaguau

SEQ ID NO: 89931 - RNA, 18 nt, Artificial Sequence
  Synthetic
  misc_feature (2)..(2): n is a, c, g, or u
anagagcugaggcgguau

SEQ ID NO: 89932 - RNA, 19 nt, Artificial Sequence
  Synthetic
  misc_feature (3)..(3): n is a, c, g, or u
uanagagcugaggcgguau

SEQ ID NO: 89933 - RNA, 20 nt, Artificial Sequence
  Synthetic
  misc_feature (4)..(4): n is a, c, g, or u
auanagagcugaggcgguau

SEQ ID NO: 89934 - RNA, 21 nt, Artificial Sequence
  Synthetic
  misc_feature (5)..(5): n is a, c, g, or u
gauanagagcugaggcgguau

SEQ ID NO: 89935 - RNA, 22 nt, Artificial Sequence
  Synthetic
  misc_feature (6)..(6): n is a, c, g, or u
cgauanagagcugaggcgguau

SEQ ID NO: 89936 - RNA, 23 nt, Artificial Sequence
  Synthetic
  misc_feature (7)..(7): n is a, c, g, or u
ccgauanagagcugaggcgguau

SEQ ID NO: 89937 - RNA, 24 nt, Artificial Sequence
  Synthetic
  misc_feature (8)..(8): n is a, c, g, or u
cccgauanagagcugaggcgguau

SEQ ID NO: 89938 - RNA, 18 nt, Artificial Sequence
  Synthetic
gucuagacucugcgguau

SEQ ID NO: 89939 - RNA, 19 nt, Artificial Sequence
  Synthetic
agucuagacucugcgguau

SEQ ID NO: 89940 - RNA, 20 nt, Artificial Sequence
  Synthetic
gagucuagacucugcgguau

SEQ ID NO: 89941 - RNA, 21 nt, Artificial Sequence
  Synthetic
cgagucuagacucugcgguau

SEQ ID NO: 89942 - RNA, 22 nt, Artificial Sequence
  Synthetic
acgagucuagacucugcgguau

SEQ ID NO: 89943 - RNA, 23 nt, Artificial Sequence
  Synthetic
cacgagucuagacucugcgguau

SEQ ID NO: 89944 - RNA, 24 nt, Artificial Sequence
  Synthetic
ccacgagucuagacucugcgguau

SEQ ID NO: 89945 - RNA, 18 nt, Artificial Sequence
  Synthetic
gucuugguguaaauguau

SEQ ID NO: 89946 - RNA, 19 nt, Artificial Sequence
  Synthetic
ugucuugguguaaauguau

SEQ ID NO: 89947 - RNA, 20 nt, Artificial Sequence
  Synthetic
augucuugguguaaauguau

SEQ ID NO: 89948 - RNA, 21 nt, Artificial Sequence
  Synthetic
  misc_feature (1)..(1): n is a, c, g, or u
naugucuugguguaaauguau

SEQ ID NO: 89949 - RNA, 22 nt, Artificial Sequence
  Synthetic
  misc_feature (2)..(2): n is a, c, g, or u
unaugucuugguguaaauguau

SEQ ID NO: 89950 - RNA, 23 nt, Artificial Sequence
  Synthetic
  misc_feature (3)..(3): n is a, c, g, or u
aunaugucuugguguaaauguau

SEQ ID NO: 89951 - RNA, 24 nt, Artificial Sequence
  Synthetic
  misc_feature (4)..(4): n is a, c, g, or u
gaunaugucuugguguaaauguau

SEQ ID NO: 89952 - RNA, 18 nt, Artificial Sequence
  Synthetic
guccaagaguccucuuau

SEQ ID NO: 89953 - RNA, 19 nt, Artificial Sequence
  Synthetic
aguccaagaguccucuuau

SEQ ID NO: 89954 - RNA, 20 nt, Artificial Sequence
  Synthetic
gaguccaagaguccucuuau

SEQ ID NO: 89955 - RNA, 21 nt, Artificial Sequence
  Synthetic
agaguccaagaguccucuuau

SEQ ID NO: 89956 - RNA, 22 nt, Artificial Sequence
  Synthetic
gagaguccaagaguccucuuau

SEQ ID NO: 89957 - RNA, 23 nt, Artificial Sequence
  Synthetic
agagaguccaagaguccucuuau

SEQ ID NO: 89958 - RNA, 24 nt, Artificial Sequence
  Synthetic
cagagaguccaagaguccucuuau

SEQ ID NO: 89959 - RNA, 18 nt, Artificial Sequence
  Synthetic
  misc_feature (5)..(5): n is a, c, g, or u
acaanaguugccugaacu

SEQ ID NO: 89960 - RNA, 19 nt, Artificial Sequence
  Synthetic
  misc_feature (6)..(6): n is a, c, g, or u
cacaanaguugccugaacu

SEQ ID NO: 89961 - RNA, 20 nt, Artificial Sequence
  Synthetic
  misc_feature (7)..(7): n is a, c, g, or u
ccacaanaguugccugaacu

SEQ ID NO: 89962 - RNA, 21 nt, Artificial Sequence
  Synthetic
  misc_feature (8)..(8): n is a, c, g, or u
accacaanaguugccugaacu

SEQ ID NO: 89963 - RNA, 22 nt, Artificial Sequence
  Synthetic
  misc_feature (9)..(9): n is a, c, g, or u
aaccacaanaguugccugaacu

SEQ ID NO: 89964 - RNA, 23 nt, Artificial Sequence
  Synthetic
  misc_feature (10)..(10): n is a, c, g, or u
aaaccacaanaguugccugaacu

SEQ ID NO: 89965 - RNA, 24 nt, Artificial Sequence
  Synthetic
  misc_feature (11)..(11): n is a, c, g, or u
gaaaccacaanaguugccugaacu

SEQ ID NO: 89966 - RNA, 18 nt, Artificial Sequence
  Synthetic
cacaucauccauauaacu

SEQ ID NO: 89967 - RNA, 19 nt, Artificial Sequence
  Synthetic
ccacaucauccauauaacu

SEQ ID NO: 89968 - RNA, 20 nt, Artificial Sequence
  Synthetic
accacaucauccauauaacu

SEQ ID NO: 89969 - RNA, 21 nt, Artificial Sequence
  Synthetic
uaccacaucauccauauaacu

SEQ ID NO: 89970 - RNA, 22 nt, Artificial Sequence
  Synthetic
auaccacaucauccauauaacu

SEQ ID NO: 89971 - RNA, 23 nt, Artificial Sequence
  Synthetic
aauaccacaucauccauauaacu

SEQ ID NO: 89972 - RNA, 24 nt, Artificial Sequence
  Synthetic
caauaccacaucauccauauaacu

SEQ ID NO: 89973 - RNA, 18 nt, Artificial Sequence
  Synthetic
ggagugcgaauccacacu

SEQ ID NO: 89974 - RNA, 19 nt, Artificial Sequence
  Synthetic
aggagugcgaauccacacu

SEQ ID NO: 89975 - RNA, 20 nt, Artificial Sequence
  Synthetic
gaggagugcgaauccacacu

SEQ ID NO: 89976 - RNA, 21 nt, Artificial Sequence
  Synthetic
ggaggagugcgaauccacacu

SEQ ID NO: 89977 - RNA, 22 nt, Artificial Sequence
  Synthetic
uggaggagugcgaauccacacu

SEQ ID NO: 89978 - RNA, 23 nt, Artificial Sequence
  Synthetic
cuggaggagugcgaauccacacu

SEQ ID NO: 89979 - RNA, 24 nt, Artificial Sequence
  Synthetic
gcuggaggagugcgaauccacacu

SEQ ID NO: 89980 - RNA, 18 nt, Artificial Sequence
  Synthetic
cacugaacaaauggcacu

SEQ ID NO: 89981 - RNA, 19 nt, Artificial Sequence
  Synthetic
ccacugaacaaauggcacu

SEQ ID NO: 89982 - RNA, 20 nt, Artificial Sequence
  Synthetic
accacugaacaaauggcacu

SEQ ID NO: 89983 - RNA, 21 nt, Artificial Sequence
  Synthetic
aaccacugaacaaauggcacu

SEQ ID NO: 89984 - RNA, 22 nt, Artificial Sequence
  Synthetic
gaaccacugaacaaauggcacu

SEQ ID NO: 89985 - RNA, 23 nt, Artificial Sequence
  Synthetic
cgaaccacugaacaaauggcacu

SEQ ID NO: 89986 - RNA, 24 nt, Artificial Sequence
  Synthetic
acgaaccacugaacaaauggcacu

SEQ ID NO: 89987 - RNA, 18 nt, Artificial Sequence
  Synthetic
  misc_feature (2)..(2): n is a, c, g, or u
ancaaugcucaggagacu

SEQ ID NO: 89988 - RNA, 19 nt, Artificial Sequence
  Synthetic
  misc_feature (3)..(3): n is a, c, g, or u
gancaaugcucaggagacu

SEQ ID NO: 89989 - RNA, 20 nt, Artificial Sequence
  Synthetic
  misc_feature (4)..(4): n is a, c, g, or u
ugancaaugcucaggagacu

SEQ ID NO: 89990 - RNA, 21 nt, Artificial Sequence
  Synthetic
  misc_feature (5)..(5): n is a, c, g, or u
gugancaaugcucaggagacu

SEQ ID NO: 89991 - RNA, 22 nt, Artificial Sequence
  Synthetic
  misc_feature (6)..(6): n is a, c, g, or u
ggugancaaugcucaggagacu

SEQ ID NO: 89992 - RNA, 23 nt, Artificial Sequence
  Synthetic
  misc_feature (7)..(7): n is a, c, g, or u
aggugancaaugcucaggagacu

SEQ ID NO: 89993 - RNA, 24 nt, Artificial Sequence
  Synthetic
  misc_feature (8)..(8): n is a, c, g, or u
gaggugancaaugcucaggagacu

SEQ ID NO: 89994 - RNA, 18 nt, Artificial Sequence
  Synthetic
  misc_feature (6)..(6): n is a, c, g, or u
guguunacauaacugacu

SEQ ID NO: 89995 - RNA, 19 nt, Artificial Sequence
  Synthetic
  misc_feature (7)..(7): n is a, c, g, or u
aguguunacauaacugacu

SEQ ID NO: 89996 - RNA, 20 nt, Artificial Sequence
  Synthetic
  misc_feature (8)..(8): n is a, c, g, or u
uaguguunacauaacugacu

SEQ ID NO: 89997 - RNA, 21 nt, Artificial Sequence
  Synthetic
  misc_feature (9)..(9): n is a, c, g, or u
uuaguguunacauaacugacu

SEQ ID NO: 89998 - RNA, 22 nt, Artificial Sequence
  Synthetic
  misc_feature (10)..(10): n is a, c, g, or u
auuaguguunacauaacugacu

SEQ ID NO: 89999 - RNA, 23 nt, Artificial Sequence
  Synthetic
  misc_feature (11)..(11): n is a, c, g, or u
uauuaguguunacauaacugacu

SEQ ID NO: 90000 - RNA, 24 nt, Artificial Sequence
  Synthetic
  misc_feature (12)..(12): n is a, c, g, or u
auauuaguguunacauaacugacu

SEQ ID NO: 90001 - RNA, 18 nt, Artificial Sequence
  Synthetic
  misc_feature (4)..(4): n is a, c, g, or u
aacnuuuggauaaaaccu

SEQ ID NO: 90002 - RNA, 19 nt, Artificial Sequence
  Synthetic
  misc_feature (5)..(5): n is a, c, g, or u
uaacnuuuggauaaaaccu

SEQ ID NO: 90003 - RNA, 20 nt, Artificial Sequence
  Synthetic
  misc_feature (6)..(6): n is a, c, g, or u
guaacnuuuggauaaaaccu

SEQ ID NO: 90004 - RNA, 21 nt, Artificial Sequence
  Synthetic
  misc_feature (7)..(7): n is a, c, g, or u
gguaacnuuuggauaaaaccu

SEQ ID NO: 90005 - RNA, 22 nt, Artificial Sequence
  Synthetic
  misc_feature (8)..(8): n is a, c, g, or u
ugguaacnuuuggauaaaaccu

SEQ ID NO: 90006 - RNA, 23 nt, Artificial Sequence
  Synthetic
  misc_feature (9)..(9): n is a, c, g, or u
uugguaacnuuuggauaaaaccu

SEQ ID NO: 90007 - RNA, 24 nt, Artificial Sequence
  Synthetic
  misc_feature (10)..(10): n is a, c, g, or u
uuugguaacnuuuggauaaaaccu

SEQ ID NO: 90008 - RNA, 18 nt, Artificial Sequence
  Synthetic
  misc_feature (2)..(2): n is a, c, g, or u
  misc_feature (11)..(11): n is a, c, g, or u
cnguaaaguuncccaccu

SEQ ID NO: 90009 - RNA, 19 nt, Artificial Sequence
  Synthetic
  misc_feature (3)..(3): n is a, c, g, or u
  misc_feature (12)..(12): n is a, c, g, or u
ccnguaaaguuncccaccu

SEQ ID NO: 90010 - RNA, 20 nt, Artificial Sequence
  Synthetic
  misc_feature (4)..(4): n is a, c, g, or u
  misc_feature (13)..(13): n is a, c, g, or u
cccnguaaaguuncccaccu

SEQ ID NO: 90011 - RNA, 21 nt, Artificial Sequence
  Synthetic
  misc_feature (5)..(5): n is a, c, g, or u
  misc_feature (14)..(14): n is a, c, g, or u
gcccnguaaaguuncccaccu

SEQ ID NO: 90012 - RNA, 22 nt, Artificial Sequence
  Synthetic
  misc_feature (6)..(6): n is a, c, g, or u
  misc_feature (15)..(15): n is a, c, g, or u
agcccnguaaaguuncccaccu

SEQ ID NO: 90013 - RNA, 23 nt, Artificial Sequence
  Synthetic
  misc_feature (7)..(7): n is a, c, g, or u
  misc_feature (16)..(16): n is a, c, g, or u
aagcccnguaaaguuncccaccu

SEQ ID NO: 90014 - RNA, 24 nt, Artificial Sequence
  Synthetic
  misc_feature (8)..(8): n is a, c, g, or u
  misc_feature (17)..(17): n is a, c, g, or u
aaagcccnguaaaguuncccaccu

SEQ ID NO: 90015 - RNA, 18 nt, Artificial Sequence
  Synthetic
  misc_feature (9)..(9): n is a, c, g, or u
  misc_feature (12)..(12): n is a, c, g, or u
cacacggunguncccccu

SEQ ID NO: 90016 - RNA, 19 nt, Artificial Sequence
  Synthetic
  misc_feature (10)..(10): n is a, c, g, or u
  misc_feature (13)..(13): n is a, c, g, or u
acacacggunguncccccu

SEQ ID NO: 90017 - RNA, 20 nt, Artificial Sequence
  Synthetic
  misc_feature (11)..(11): n is a, c, g, or u
  misc_feature (14)..(14): n is a, c, g, or u
gacacacggunguncccccu

SEQ ID NO: 90018 - RNA, 21 nt, Artificial Sequence
  Synthetic
  misc_feature (12)..(12): n is a, c, g, or u
  misc_feature (15)..(15): n is a, c, g, or u
agacacacggunguncccccu

SEQ ID NO: 90019 - RNA, 22 nt, Artificial Sequence
  Synthetic
  misc_feature (13)..(13): n is a, c, g, or u
  misc_feature (16)..(16): n is a, c, g, or u
aagacacacggunguncccccu

SEQ ID NO: 90020 - RNA, 23 nt, Artificial Sequence
  Synthetic
  misc_feature (14)..(14): n is a, c, g, or u
  misc_feature (17)..(17): n is a, c, g, or u
caagacacacggunguncccccu

SEQ ID NO: 90021 - RNA, 24 nt, Artificial Sequence
  Synthetic
  misc_feature (15)..(15): n is a, c, g, or u
  misc_feature (18)..(18): n is a, c, g, or u
ccaagacacacggunguncccccu

SEQ ID NO: 90022 - RNA, 18 nt, Artificial Sequence
  Synthetic
acagugggggaaagcccu

SEQ ID NO: 90023 - RNA, 19 nt, Artificial Sequence
  Synthetic
aacagugggggaaagcccu

SEQ ID NO: 90024 - RNA, 20 nt, Artificial Sequence
  Synthetic
aaacagugggggaaagcccu

SEQ ID NO: 90025 - RNA, 21 nt, Artificial Sequence
  Synthetic
caaacagugggggaaagcccu

SEQ ID NO: 90026 - RNA, 22 nt, Artificial Sequence
  Synthetic
ccaaacagugggggaaagcccu

SEQ ID NO: 90027 - RNA, 23 nt, Artificial Sequence
  Synthetic
gccaaacagugggggaaagcccu

SEQ ID NO: 90028 - RNA, 24 nt, Artificial Sequence
  Synthetic
agccaaacagugggggaaagcccu

SEQ ID NO: 90029 - RNA, 18 nt, Artificial Sequence
  Synthetic
caguuggcagcacagccu

SEQ ID NO: 90030 - RNA, 19 nt, Artificial Sequence
  Synthetic
ccaguuggcagcacagccu

SEQ ID NO: 90031 - RNA, 20 nt, Artificial Sequence
  Synthetic
uccaguuggcagcacagccu

SEQ ID NO: 90032 - RNA, 21 nt, Artificial Sequence
  Synthetic
auccaguuggcagcacagccu

SEQ ID NO: 90033 - RNA, 22 nt, Artificial Sequence
  Synthetic
gauccaguuggcagcacagccu

SEQ ID NO: 90034 - RNA, 23 nt, Artificial Sequence
  Synthetic
ggauccaguuggcagcacagccu

SEQ ID NO: 90035 - RNA, 24 nt, Artificial Sequence
  Synthetic
aggauccaguuggcagcacagccu

SEQ ID NO: 90036 - RNA, 18 nt, Artificial Sequence
  Synthetic
  misc_feature (4)..(4): n is a, c, g, or u
guanuaugcccugagccu

SEQ ID NO: 90037 - RNA, 19 nt, Artificial Sequence
  Synthetic
  misc_feature (5)..(5): n is a, c, g, or u
uguanuaugcccugagccu

SEQ ID NO: 90038 - RNA, 20 nt, Artificial Sequence
  Synthetic
  misc_feature (6)..(6): n is a, c, g, or u
uuguanuaugcccugagccu

SEQ ID NO: 90039 - RNA, 21 nt, Artificial Sequence
  Synthetic
  misc_feature (7)..(7): n is a, c, g, or u
uuuguanuaugcccugagccu

SEQ ID NO: 90040 - RNA, 22 nt, Artificial Sequence
  Synthetic
  misc_feature (8)..(8): n is a, c, g, or u
guuuguanuaugcccugagccu

SEQ ID NO: 90041 - RNA, 23 nt, Artificial Sequence
  Synthetic
  misc_feature (1)..(1): n is a, c, g, or u
  misc_feature (9)..(9): n is a, c, g, or u
nguuuguanuaugcccugagccu

SEQ ID NO: 90042 - RNA, 24 nt, Artificial Sequence
  Synthetic
  misc_feature (2)..(2): n is a, c, g, or u
  misc_feature (10)..(10): n is a, c, g, or u
anguuuguanuaugcccugagccu

SEQ ID NO: 90043 - RNA, 18 nt, Artificial Sequence
  Synthetic
guuuacacagaaaggccu

SEQ ID NO: 90044 - RNA, 19 nt, Artificial Sequence
  Synthetic
uguuuacacagaaaggccu

SEQ ID NO: 90045 - RNA, 20 nt, Artificial Sequence
  Synthetic
uuguuuacacagaaaggccu

SEQ ID NO: 90046 - RNA, 21 nt, Artificial Sequence
  Synthetic
auuguuuacacagaaaggccu

SEQ ID NO: 90047 - RNA, 22 nt, Artificial Sequence
  Synthetic
uauuguuuacacagaaaggccu

SEQ ID NO: 90048 - RNA, 23 nt, Artificial Sequence
  Synthetic
guauuguuuacacagaaaggccu

SEQ ID NO: 90049 - RNA, 24 nt, Artificial Sequence
  Synthetic
gguauuguuuacacagaaaggccu

SEQ ID NO: 90050 - RNA, 18 nt, Artificial Sequence
  Synthetic
uuuccaaucaauaggccu

SEQ ID NO: 90051 - RNA, 19 nt, Artificial Sequence
  Synthetic
cuuuccaaucaauaggccu

SEQ ID NO: 90052 - RNA, 20 nt, Artificial Sequence
  Synthetic
acuuuccaaucaauaggccu

SEQ ID NO: 90053 - RNA, 21 nt, Artificial Sequence
  Synthetic
  misc_feature (1)..(1): n is a, c, g, or u
nacuuuccaaucaauaggccu

SEQ ID NO: 90054 - RNA, 22 nt, Artificial Sequence
  Synthetic
  misc_feature (2)..(2): n is a, c, g, or u
anacuuuccaaucaauaggccu

SEQ ID NO: 90055 - RNA, 23 nt, Artificial Sequence
  Synthetic
  misc_feature (3)..(3): n is a, c, g, or u
canacuuuccaaucaauaggccu

SEQ ID NO: 90056 - RNA, 24 nt, Artificial Sequence
  Synthetic
  misc_feature (4)..(4): n is a, c, g, or u
acanacuuuccaaucaauaggccu

SEQ ID NO: 90057 - RNA, 18 nt, Artificial Sequence
  Synthetic
  misc_feature (3)..(3): n is a, c, g, or u
  misc_feature (15)..(15): n is a, c, g, or u
uunacugugaguggnccu

SEQ ID NO: 90058 - RNA, 19 nt, Artificial Sequence
  Synthetic
  misc_feature (4)..(4): n is a, c, g, or u
  misc_feature (16)..(16): n is a, c, g, or u
auunacugugaguggnccu

SEQ ID NO: 90059 - RNA, 20 nt, Artificial Sequence
  Synthetic
  misc_feature (5)..(5): n is a, c, g, or u
  misc_feature (17)..(17): n is a, c, g, or u
cauunacugugaguggnccu

SEQ ID NO: 90060 - RNA, 21 nt, Artificial Sequence
  Synthetic
  misc_feature (6)..(6): n is a, c, g, or u
  misc_feature (18)..(18): n is a, c, g, or u
ucauunacugugaguggnccu

SEQ ID NO: 90061 - RNA, 22 nt, Artificial Sequence
  Synthetic
  misc_feature (7)..(7): n is a, c, g, or u
  misc_feature (19)..(19): n is a, c, g, or u
cucauunacugugaguggnccu

SEQ ID NO: 90062 - RNA, 23 nt, Artificial Sequence
  Synthetic
  misc_feature (8)..(8): n is a, c, g, or u
  misc_feature (20)..(20): n is a, c, g, or u
ucucauunacugugaguggnccu

SEQ ID NO: 90063 - RNA, 24 nt, Artificial Sequence
  Synthetic
  misc_feature (9)..(9): n is a, c, g, or u
  misc_feature (21)..(21): n is a, c, g, or u
uucucauunacugugaguggnccu

SEQ ID NO: 90064 - RNA, 18 nt, Artificial Sequence
  Synthetic
cgcaggguccccaauccu

SEQ ID NO: 90065 - RNA, 19 nt, Artificial Sequence
  Synthetic
gcgcaggguccccaauccu

SEQ ID NO: 90066 - RNA, 20 nt, Artificial Sequence
  Synthetic
agcgcaggguccccaauccu

SEQ ID NO: 90067 - RNA, 21 nt, Artificial Sequence
  Synthetic
cagcgcaggguccccaauccu

SEQ ID NO: 90068 - RNA, 22 nt, Artificial Sequence
  Synthetic
ucagcgcaggguccccaauccu

SEQ ID NO: 90069 - RNA, 23 nt, Artificial Sequence
  Synthetic
uucagcgcaggguccccaauccu

SEQ ID NO: 90070 - RNA, 24 nt, Artificial Sequence
  Synthetic
guucagcgcaggguccccaauccu

SEQ ID NO: 90071 - RNA, 18 nt, Artificial Sequence
  Synthetic
  misc_feature (3)..(3): n is a, c, g, or u
uungguggucuauaagcu

SEQ ID NO: 90072 - RNA, 19 nt, Artificial Sequence
  Synthetic
  misc_feature (4)..(4): n is a, c, g, or u
auungguggucuauaagcu

SEQ ID NO: 90073 - RNA, 20 nt, Artificial Sequence
  Synthetic
  misc_feature (5)..(5): n is a, c, g, or u
cauungguggucuauaagcu

SEQ ID NO: 90074 - RNA, 21 nt, Artificial Sequence
  Synthetic
  misc_feature (6)..(6): n is a, c, g, or u
gcauungguggucuauaagcu

SEQ ID NO: 90075 - RNA, 22 nt, Artificial Sequence
  Synthetic
  misc_feature (7)..(7): n is a, c, g, or u
ggcauungguggucuauaagcu

SEQ ID NO: 90076 - RNA, 23 nt, Artificial Sequence
  Synthetic
  misc_feature (8)..(8): n is a, c, g, or u
gggcauungguggucuauaagcu

SEQ ID NO: 90077 - RNA, 24 nt, Artificial Sequence
  Synthetic
  misc_feature (9)..(9): n is a, c, g, or u
ggggcauungguggucuauaagcu

SEQ ID NO: 90078 - RNA, 18 nt, Artificial Sequence
  Synthetic
gccacccaaggcacagcu

SEQ ID NO: 90079 - RNA, 19 nt, Artificial Sequence
  Synthetic
agccacccaaggcacagcu

SEQ ID NO: 90080 - RNA, 20 nt, Artificial Sequence
  Synthetic
aagccacccaaggcacagcu

SEQ ID NO: 90081 - RNA, 21 nt, Artificial Sequence
  Synthetic
aaagccacccaaggcacagcu

SEQ ID NO: 90082 - RNA, 22 nt, Artificial Sequence
  Synthetic
  misc_feature (1)..(1): n is a, c, g, or u
naaagccacccaaggcacagcu

SEQ ID NO: 90083 - RNA, 23 nt, Artificial Sequence
  Synthetic
  misc_feature (2)..(2): n is a, c, g, or u
cnaaagccacccaaggcacagcu

SEQ ID NO: 90084 - RNA, 24 nt, Artificial Sequence
  Synthetic
  misc_feature (3)..(3): n is a, c, g, or u
ccnaaagccacccaaggcacagcu

SEQ ID NO: 90085 - RNA, 18 nt, Artificial Sequence
  Synthetic
agguuccacgcaugcgcu

SEQ ID NO: 90086 - RNA, 19 nt, Artificial Sequence
  Synthetic
aagguuccacgcaugcgcu

SEQ ID NO: 90087 - RNA, 20 nt, Artificial Sequence
  Synthetic
aaagguuccacgcaugcgcu

SEQ ID NO: 90088 - RNA, 21 nt, Artificial Sequence
  Synthetic
  misc_feature (1)..(1): n is a, c, g, or u
naaagguuccacgcaugcgcu

SEQ ID NO: 90089 - RNA, 22 nt, Artificial Sequence
  Synthetic
  misc_feature (1)..(2): n is a, c, g, or u
nnaaagguuccacgcaugcgcu

SEQ ID NO: 90090 - RNA, 23 nt, Artificial Sequence
  Synthetic
  misc_feature (2)..(3): n is a, c, g, or u
cnnaaagguuccacgcaugcgcu

SEQ ID NO: 90091 - RNA, 24 nt, Artificial Sequence
  Synthetic
  misc_feature (3)..(4): n is a, c, g, or u
ccnnaaagguuccacgcaugcgcu

SEQ ID NO: 90092 - RNA, 18 nt, Artificial Sequence
  Synthetic
  misc_feature (2)..(2): n is a, c, g, or u
  misc_feature (11)..(11): n is a, c, g, or u
gnugaggugancaaugcu

SEQ ID NO: 90093 - RNA, 19 nt, Artificial Sequence
  Synthetic
  misc_feature (3)..(3): n is a, c, g, or u
  misc_feature (12)..(12): n is a, c, g, or u
ugnugaggugancaaugcu

SEQ ID NO: 90094 - RNA, 20 nt, Artificial Sequence
  Synthetic
  misc_feature (4)..(4): n is a, c, g, or u
  misc_feature (13)..(13): n is a, c, g, or u
augnugaggugancaaugcu

SEQ ID NO: 90095 - RNA, 21 nt, Artificial Sequence
  Synthetic
  misc_feature (5)..(5): n is a, c, g, or u
  misc_feature (14)..(14): n is a, c, g, or u
uaugnugaggugancaaugcu

SEQ ID NO: 90096 - RNA, 22 nt, Artificial Sequence
  Synthetic
  misc_feature (6)..(6): n is a, c, g, or u
  misc_feature (15)..(15): n is a, c, g, or u
guaugnugaggugancaaugcu

SEQ ID NO: 90097 - RNA, 23 nt, Artificial Sequence
  Synthetic
  misc_feature (7)..(7): n is a, c, g, or u
  misc_feature (16)..(16): n is a, c, g, or u
aguaugnugaggugancaaugcu

SEQ ID NO: 90098 - RNA, 24 nt, Artificial Sequence
  Synthetic
  misc_feature (8)..(8): n is a, c, g, or u
  misc_feature (17)..(17): n is a, c, g, or u
caguaugnugaggugancaaugcu

SEQ ID NO: 90099 - RNA, 18 nt, Artificial Sequence
  Synthetic
guuugcuccagaccugcu

SEQ ID NO: 90100 - RNA, 19 nt, Artificial Sequence
  Synthetic
uguuugcuccagaccugcu

SEQ ID NO: 90101 - RNA, 20 nt, Artificial Sequence
  Synthetic
auguuugcuccagaccugcu

SEQ ID NO: 90102 - RNA, 21 nt, Artificial Sequence
  Synthetic
aauguuugcuccagaccugcu

SEQ ID NO: 90103 - RNA, 22 nt, Artificial Sequence
  Synthetic
  misc_feature (1)..(1): n is a, c, g, or u
naauguuugcuccagaccugcu

SEQ ID NO: 90104 - RNA, 23 nt, Artificial Sequence
  Synthetic
  misc_feature (2)..(2): n is a, c, g, or u
anaauguuugcuccagaccugcu

SEQ ID NO: 90105 - RNA, 24 nt, Artificial Sequence
  Synthetic
  misc_feature (3)..(3): n is a, c, g, or u
ganaauguuugcuccagaccugcu

SEQ ID NO: 90106 - RNA, 18 nt, Artificial Sequence
  Synthetic
gaaucccagaggauugcu

SEQ ID NO: 90107 - RNA, 19 nt, Artificial Sequence
  Synthetic
agaaucccagaggauugcu

SEQ ID NO: 90108 - RNA, 20 nt, Artificial Sequence
  Synthetic
aagaaucccagaggauugcu

SEQ ID NO: 90109 - RNA, 21 nt, Artificial Sequence
  Synthetic
aaagaaucccagaggauugcu

SEQ ID NO: 90110 - RNA, 22 nt, Artificial Sequence
  Synthetic
gaaagaaucccagaggauugcu

SEQ ID NO: 90111 - RNA, 23 nt, Artificial Sequence
  Synthetic
ggaaagaaucccagaggauugcu

SEQ ID NO: 90112 - RNA, 24 nt, Artificial Sequence
  Synthetic
gggaaagaaucccagaggauugcu

SEQ ID NO: 90113 - RNA, 18 nt, Artificial Sequence
  Synthetic
gcaggaggcggauuugcu

SEQ ID NO: 90114 - RNA, 19 nt, Artificial Sequence
  Synthetic
  misc_feature (1)..(1): n is a, c, g, or u
ngcaggaggcggauuugcu

SEQ ID NO: 90115 - RNA, 20 nt, Artificial Sequence
  Synthetic
  misc_feature (2)..(2): n is a, c, g, or u
angcaggaggcggauuugcu

SEQ ID NO: 90116 - RNA, 21 nt, Artificial Sequence
  Synthetic
  misc_feature (3)..(3): n is a, c, g, or u
gangcaggaggcggauuugcu

SEQ ID NO: 90117 - RNA, 22 nt, Artificial Sequence
  Synthetic
  misc_feature (1)..(1): n is a, c, g, or u
  misc_feature (4)..(4): n is a, c, g, or u
ngangcaggaggcggauuugcu

SEQ ID NO: 90118 - RNA, 23 nt, Artificial Sequence
  Synthetic
  misc_feature (2)..(2): n is a, c, g, or u
  misc_feature (5)..(5): n is a, c, g, or u
ungangcaggaggcggauuugcu

SEQ ID NO: 90119 - RNA, 24 nt, Artificial Sequence
  Synthetic
  misc_feature (3)..(3): n is a, c, g, or u
  misc_feature (6)..(6): n is a, c, g, or u
gungangcaggaggcggauuugcu

SEQ ID NO: 90120 - RNA, 18 nt, Artificial Sequence
  Synthetic
  misc_feature (8)..(8): n is a, c, g, or u
gucccganaauguuugcu

SEQ ID NO: 90121 - RNA, 19 nt, Artificial Sequence
  Synthetic
  misc_feature (1)..(1): n is a, c, g, or u
  misc_feature (9)..(9): n is a, c, g, or u
ngucccganaauguuugcu

SEQ ID NO: 90122 - RNA, 20 nt, Artificial Sequence
  Synthetic
  misc_feature (2)..(2): n is a, c, g, or u
  misc_feature (10)..(10): n is a, c, g, or u
cngucccganaauguuugcu

SEQ ID NO: 90123 - RNA, 21 nt, Artificial Sequence
  Synthetic
  misc_feature (3)..(3): n is a, c, g, or u
  misc_feature (11)..(11): n is a, c, g, or u
ucngucccganaauguuugcu

SEQ ID NO: 90124 - RNA, 22 nt, Artificial Sequence
  Synthetic
  misc_feature (4)..(4): n is a, c, g, or u
  misc_feature (12)..(12): n is a, c, g, or u
aucngucccganaauguuugcu

SEQ ID NO: 90125 - RNA, 23 nt, Artificial Sequence
  Synthetic
  misc_feature (5)..(5): n is a, c, g, or u
  misc_feature (13)..(13): n is a, c, g, or u
uaucngucccganaauguuugcu

SEQ ID NO: 90126 - RNA, 24 nt, Artificial Sequence
  Synthetic
  misc_feature (6)..(6): n is a, c, g, or u
  misc_feature (14)..(14): n is a, c, g, or u
uuaucngucccganaauguuugcu

SEQ ID NO: 90127 - RNA, 18 nt, Artificial Sequence
  Synthetic
ggauuugcgguguuugcu

SEQ ID NO: 90128 - RNA, 19 nt, Artificial Sequence
  Synthetic
uggauuugcgguguuugcu

SEQ ID NO: 90129 - RNA, 20 nt, Artificial Sequence
  Synthetic
cuggauuugcgguguuugcu

SEQ ID NO: 90130 - RNA, 21 nt, Artificial Sequence
  Synthetic
ucuggauuugcgguguuugcu

SEQ ID NO: 90131 - RNA, 22 nt, Artificial Sequence
  Synthetic
aucuggauuugcgguguuugcu

SEQ ID NO: 90132 - RNA, 23 nt, Artificial Sequence
  Synthetic
aaucuggauuugcgguguuugcu

SEQ ID NO: 90133 - RNA, 24 nt, Artificial Sequence
  Synthetic
caaucuggauuugcgguguuugcu

SEQ ID NO: 90134 - RNA, 18 nt, Artificial Sequence
  Synthetic
  misc_feature (9)..(9): n is a, c, g, or u
ccucucacncugggaucu

SEQ ID NO: 90135 - RNA, 19 nt, Artificial Sequence
  Synthetic
  misc_feature (10)..(10): n is a, c, g, or u
gccucucacncugggaucu

SEQ ID NO: 90136 - RNA, 20 nt, Artificial Sequence
  Synthetic
  misc_feature (11)..(11): n is a, c, g, or u
ggccucucacncugggaucu

SEQ ID NO: 90137 - RNA, 21 nt, Artificial Sequence
  Synthetic
  misc_feature (12)..(12): n is a, c, g, or u
aggccucucacncugggaucu

SEQ ID NO: 90138 - RNA, 22 nt, Artificial Sequence
  Synthetic
  misc_feature (13)..(13): n is a, c, g, or u
caggccucucacncugggaucu

SEQ ID NO: 90139 - RNA, 23 nt, Artificial Sequence
  Synthetic
  misc_feature (14)..(14): n is a, c, g, or u
acaggccucucacncugggaucu

SEQ ID NO: 90140 - RNA, 24 nt, Artificial Sequence
  Synthetic
  misc_feature (15)..(15): n is a, c, g, or u
uacaggccucucacncugggaucu

SEQ ID NO: 90141 - RNA, 18 nt, Artificial Sequence
  Synthetic
  misc_feature (3)..(3): n is a, c, g, or u
  misc_feature (6)..(6): n is a, c, g, or u
  misc_feature (10)..(11): n is a, c, g, or u
ucncungaunnuggaucu

SEQ ID NO: 90142 - RNA, 19 nt, Artificial Sequence
  Synthetic
  misc_feature (4)..(4): n is a, c, g, or u
  misc_feature (7)..(7): n is a, c, g, or u
  misc_feature (11)..(12): n is a, c, g, or u
gucncungaunnuggaucu

SEQ ID NO: 90143 - RNA, 20 nt, Artificial Sequence
  Synthetic
  misc_feature (5)..(5): n is a, c, g, or u
  misc_feature (8)..(8): n is a, c, g, or u
  misc_feature (12)..(13): n is a, c, g, or u
ggucncungaunnuggaucu

SEQ ID NO: 90144 - RNA, 21 nt, Artificial Sequence
  Synthetic
  misc_feature (6)..(6): n is a, c, g, or u
  misc_feature (9)..(9): n is a, c, g, or u
  misc_feature (13)..(14): n is a, c, g, or u
aggucncungaunnuggaucu

SEQ ID NO: 90145 - RNA, 22 nt, Artificial Sequence
  Synthetic
  misc_feature (7)..(7): n is a, c, g, or u
  misc_feature (10)..(10): n is a, c, g, or u
  misc_feature (14)..(15): n is a, c, g, or u
uaggucncungaunnuggaucu

SEQ ID NO: 90146 - RNA, 23 nt, Artificial Sequence
  Synthetic
  misc_feature (8)..(8): n is a, c, g, or u
  misc_feature (11)..(11): n is a, c, g, or u
  misc_feature (15)..(16): n is a, c, g, or u
cuaggucncungaunnuggaucu

SEQ ID NO: 90147 - RNA, 24 nt, Artificial Sequence
  Synthetic
  misc_feature (9)..(9): n is a, c, g, or u
  misc_feature (12)..(12): n is a, c, g, or u
  misc_feature (16)..(17): n is a, c, g, or u
acuaggucncungaunnuggaucu

SEQ ID NO: 90148 - RNA, 18 nt, Artificial Sequence
  Synthetic
auuugcgguguuugcucu

SEQ ID NO: 90149 - RNA, 19 nt, Artificial Sequence
  Synthetic
gauuugcgguguuugcucu

SEQ ID NO: 90150 - RNA, 20 nt, Artificial Sequence
  Synthetic
ggauuugcgguguuugcucu

SEQ ID NO: 90151 - RNA, 21 nt, Artificial Sequence
  Synthetic
uggauuugcgguguuugcucu

SEQ ID NO: 90152 - RNA, 22 nt, Artificial Sequence
  Synthetic
cuggauuugcgguguuugcucu

SEQ ID NO: 90153 - RNA, 23 nt, Artificial Sequence
  Synthetic
ucuggauuugcgguguuugcucu

SEQ ID NO: 90154 - RNA, 24 nt, Artificial Sequence
  Synthetic
aucuggauuugcgguguuugcucu

SEQ ID NO: 90155 - RNA, 18 nt, Artificial Sequence
  Synthetic
  misc_feature (6)..(7): n is a, c, g, or u
  misc_feature (10)..(10): n is a, c, g, or u
cucuannacnguuucucu

SEQ ID NO: 90156 - RNA, 19 nt, Artificial Sequence
  Synthetic
  misc_feature (7)..(8): n is a, c, g, or u
  misc_feature (11)..(11): n is a, c, g, or u
acucuannacnguuucucu

SEQ ID NO: 90157 - RNA, 20 nt, Artificial Sequence
  Synthetic
  misc_feature (8)..(9): n is a, c, g, or u
  misc_feature (12)..(12): n is a, c, g, or u
uacucuannacnguuucucu

SEQ ID NO: 90158 - RNA, 21 nt, Artificial Sequence
  Synthetic
  misc_feature (9)..(10): n is a, c, g, or u
  misc_feature (13)..(13): n is a, c, g, or u
auacucuannacnguuucucu

SEQ ID NO: 90159 - RNA, 22 nt, Artificial Sequence
  Synthetic
  misc_feature (10)..(11): n is a, c, g, or u
  misc_feature (14)..(14): n is a, c, g, or u
aauacucuannacnguuucucu

SEQ ID NO: 90160 - RNA, 23 nt, Artificial Sequence
  Synthetic
  misc_feature (11)..(12): n is a, c, g, or u
  misc_feature (15)..(15): n is a, c, g, or u
aaauacucuannacnguuucucu

SEQ ID NO: 90161 - RNA, 24 nt, Artificial Sequence
  Synthetic
  misc_feature (12)..(13): n is a, c, g, or u
  misc_feature (16)..(16): n is a, c, g, or u
caaauacucuannacnguuucucu

SEQ ID NO: 90162 - RNA, 18 nt, Artificial Sequence
  Synthetic
  misc_feature (3)..(3): n is a, c, g, or u
ucnuuaaacaaacagucu

SEQ ID NO: 90163 - RNA, 19 nt, Artificial Sequence
  Synthetic
  misc_feature (4)..(4): n is a, c, g, or u
gucnuuaaacaaacagucu

SEQ ID NO: 90164 - RNA, 20 nt, Artificial Sequence
  Synthetic
  misc_feature (5)..(5): n is a, c, g, or u
agucnuuaaacaaacagucu

SEQ ID NO: 90165 - RNA, 21 nt, Artificial Sequence
  Synthetic
  misc_feature (6)..(6): n is a, c, g, or u
cagucnuuaaacaaacagucu

SEQ ID NO: 90166 - RNA, 22 nt, Artificial Sequence
  Synthetic
  misc_feature (7)..(7): n is a, c, g, or u
ccagucnuuaaacaaacagucu

SEQ ID NO: 90167 - RNA, 23 nt, Artificial Sequence
  Synthetic
  misc_feature (8)..(8): n is a, c, g, or u
cccagucnuuaaacaaacagucu

SEQ ID NO: 90168 - RNA, 24 nt, Artificial Sequence
  Synthetic
  misc_feature (9)..(9): n is a, c, g, or u
ucccagucnuuaaacaaacagucu

SEQ ID NO: 90169 - RNA, 18 nt, Artificial Sequence
  Synthetic
gucuaacaacaguagucu

SEQ ID NO: 90170 - RNA, 19 nt, Artificial Sequence
  Synthetic
cgucuaacaacaguagucu

SEQ ID NO: 90171 - RNA, 20 nt, Artificial Sequence
  Synthetic
ucgucuaacaacaguagucu

SEQ ID NO: 90172 - RNA, 21 nt, Artificial Sequence
  Synthetic
gucgucuaacaacaguagucu

SEQ ID NO: 90173 - RNA, 22 nt, Artificial Sequence
  Synthetic
cgucgucuaacaacaguagucu

SEQ ID NO: 90174 - RNA, 23 nt, Artificial Sequence
  Synthetic
ucgucgucuaacaacaguagucu

SEQ ID NO: 90175 - RNA, 24 nt, Artificial Sequence
  Synthetic
cucgucgucuaacaacaguagucu

SEQ ID NO: 90176 - RNA, 18 nt, Artificial Sequence
  Synthetic
ggaccugccucgucgucu

SEQ ID NO: 90177 - RNA, 19 nt, Artificial Sequence
  Synthetic
gggaccugccucgucgucu

SEQ ID NO: 90178 - RNA, 20 nt, Artificial Sequence
  Synthetic
ggggaccugccucgucgucu

SEQ ID NO: 90179 - RNA, 21 nt, Artificial Sequence
  Synthetic
aggggaccugccucgucgucu

SEQ ID NO: 90180 - RNA, 22 nt, Artificial Sequence
  Synthetic
uaggggaccugccucgucgucu

SEQ ID NO: 90181 - RNA, 23 nt, Artificial Sequence
  Synthetic
cuaggggaccugccucgucgucu

SEQ ID NO: 90182 - RNA, 24 nt, Artificial Sequence
  Synthetic
ucuaggggaccugccucgucgucu

SEQ ID NO: 90183 - RNA, 18 nt, Artificial Sequence
  Synthetic
cgauugagaccuucgucu

SEQ ID NO: 90184 - RNA, 19 nt, Artificial Sequence
  Synthetic
gcgauugagaccuucgucu

SEQ ID NO: 90185 - RNA, 20 nt, Artificial Sequence
  Synthetic
ggcgauugagaccuucgucu

SEQ ID NO: 90186 - RNA, 18 nt, Artificial Sequence
  Synthetic
  misc_feature (10)..(10): n is a, c, g, or u
aggggcauungguggucu

SEQ ID NO: 90187 - RNA, 19 nt, Artificial Sequence
  Synthetic
  misc_feature (11)..(11): n is a, c, g, or u
uaggggcauungguggucu

SEQ ID NO: 90188 - RNA, 20 nt, Artificial Sequence
  Synthetic
  misc_feature (12)..(12): n is a, c, g, or u
auaggggcauungguggucu

SEQ ID NO: 90189 - RNA, 21 nt, Artificial Sequence
  Synthetic
  misc_feature (13)..(13): n is a, c, g, or u
gauaggggcauungguggucu

SEQ ID NO: 90190 - RNA, 22 nt, Artificial Sequence
  Synthetic
  misc_feature (14)..(14): n is a, c, g, or u
agauaggggcauungguggucu

SEQ ID NO: 90191 - RNA, 23 nt, Artificial Sequence
  Synthetic
  misc_feature (15)..(15): n is a, c, g, or u
aagauaggggcauungguggucu

SEQ ID NO: 90192 - RNA, 24 nt, Artificial Sequence
  Synthetic
  misc_feature (16)..(16): n is a, c, g, or u
uaagauaggggcauungguggucu

SEQ ID NO: 90193 - RNA, 18 nt, Artificial Sequence
  Synthetic
  misc_feature (3)..(3): n is a, c, g, or u
  misc_feature (7)..(7): n is a, c, g, or u
  misc_feature (15)..(15): n is a, c, g, or u
uunugunugaugugnucu

SEQ ID NO: 90194 - RNA, 19 nt, Artificial Sequence
  Synthetic
  misc_feature (4)..(4): n is a, c, g, or u
  misc_feature (8)..(8): n is a, c, g, or u
  misc_feature (16)..(16): n is a, c, g, or u
uuunugunugaugugnucu

SEQ ID NO: 90195 - RNA, 20 nt, Artificial Sequence
  Synthetic
  misc_feature (5)..(5): n is a, c, g, or u
  misc_feature (9)..(9): n is a, c, g, or u
  misc_feature (17)..(17): n is a, c, g, or u
uuuunugunugaugugnucu

SEQ ID NO: 90196 - RNA, 21 nt, Artificial Sequence
  Synthetic
  misc_feature (6)..(6): n is a, c, g, or u
  misc_feature (10)..(10): n is a, c, g, or u
  misc_feature (18)..(18): n is a, c, g, or u
auuuunugunugaugugnucu

SEQ ID NO: 90197 - RNA, 22 nt, Artificial Sequence
  Synthetic
  misc_feature (7)..(7): n is a, c, g, or u
  misc_feature (11)..(11): n is a, c, g, or u
  misc_feature (19)..(19): n is a, c, g, or u
gauuuunugunugaugugnucu

SEQ ID NO: 90198 - RNA, 23 nt, Artificial Sequence
  Synthetic
  misc_feature (8)..(8): n is a, c, g, or u
  misc_feature (12)..(12): n is a, c, g, or u
  misc_feature (20)..(20): n is a, c, g, or u
ugauuuunugunugaugugnucu

SEQ ID NO: 90199 - RNA, 24 nt, Artificial Sequence
  Synthetic
  misc_feature (9)..(9): n is a, c, g, or u
  misc_feature (13)..(13): n is a, c, g, or u
  misc_feature (21)..(21): n is a, c, g, or u
uugauuuunugunugaugugnucu

SEQ ID NO: 90200 - RNA, 18 nt, Artificial Sequence
  Synthetic
cgagggaguucuucuucu

SEQ ID NO: 90201 - RNA, 19 nt, Artificial Sequence
  Synthetic
gcgagggaguucuucuucu

SEQ ID NO: 90202 - RNA, 20 nt, Artificial Sequence
  Synthetic
ggcgagggaguucuucuucu

SEQ ID NO: 90203 - RNA, 21 nt, Artificial Sequence
  Synthetic
aggcgagggaguucuucuucu

SEQ ID NO: 90204 - RNA, 22 nt, Artificial Sequence
  Synthetic
gaggcgagggaguucuucuucu

SEQ ID NO: 90205 - RNA, 23 nt, Artificial Sequence
  Synthetic
cgaggcgagggaguucuucuucu

SEQ ID NO: 90206 - RNA, 24 nt, Artificial Sequence
  Synthetic
gcgaggcgagggaguucuucuucu

SEQ ID NO: 90207 - RNA, 18 nt, Artificial Sequence
  Synthetic
aggcgagggaguucuucu

SEQ ID NO: 90208 - RNA, 19 nt, Artificial Sequence
  Synthetic
gaggcgagggaguucuucu

SEQ ID NO: 90209 - RNA, 20 nt, Artificial Sequence
  Synthetic
cgaggcgagggaguucuucu

SEQ ID NO: 90210 - RNA, 21 nt, Artificial Sequence
  Synthetic
gcgaggcgagggaguucuucu

SEQ ID NO: 90211 - RNA, 22 nt, Artificial Sequence
  Synthetic
ugcgaggcgagggaguucuucu

SEQ ID NO: 90212 - RNA, 23 nt, Artificial Sequence
  Synthetic
cugcgaggcgagggaguucuucu

SEQ ID NO: 90213 - RNA, 24 nt, Artificial Sequence
  Synthetic
ucugcgaggcgagggaguucuucu

SEQ ID NO: 90214 - RNA, 18 nt, Artificial Sequence
  Synthetic
cugaggaugaguguuucu

SEQ ID NO: 90215 - RNA, 19 nt, Artificial Sequence
  Synthetic
ccugaggaugaguguuucu

SEQ ID NO: 90216 - RNA, 20 nt, Artificial Sequence
  Synthetic
gccugaggaugaguguuucu

SEQ ID NO: 90217 - RNA, 21 nt, Artificial Sequence
  Synthetic
ggccugaggaugaguguuucu

SEQ ID NO: 90218 - RNA, 22 nt, Artificial Sequence
  Synthetic
uggccugaggaugaguguuucu

SEQ ID NO: 90219 - RNA, 23 nt, Artificial Sequence
  Synthetic
auggccugaggaugaguguuucu

SEQ ID NO: 90220 - RNA, 24 nt, Artificial Sequence
  Synthetic
cauggccugaggaugaguguuucu

SEQ ID NO: 90221 - RNA, 18 nt, Artificial Sequence
  Synthetic
guaaguuggcgagaaagu

SEQ ID NO: 90222 - RNA, 19 nt, Artificial Sequence
  Synthetic
uguaaguuggcgagaaagu

SEQ ID NO: 90223 - RNA, 20 nt, Artificial Sequence
  Synthetic
uuguaaguuggcgagaaagu

SEQ ID NO: 90224 - RNA, 21 nt, Artificial Sequence
  Synthetic
cuuguaaguuggcgagaaagu

SEQ ID NO: 90225 - RNA, 22 nt, Artificial Sequence
  Synthetic
ccuuguaaguuggcgagaaagu

SEQ ID NO: 90226 - RNA, 23 nt, Artificial Sequence
  Synthetic
gccuuguaaguuggcgagaaagu

SEQ ID NO: 90227 - RNA, 24 nt, Artificial Sequence
  Synthetic
ggccuuguaaguuggcgagaaagu

SEQ ID NO: 90228 - RNA, 18 nt, Artificial Sequence
  Synthetic
gcgauaaccaggacaagu

SEQ ID NO: 90229 - RNA, 19 nt, Artificial Sequence
  Synthetic
agcgauaaccaggacaagu

SEQ ID NO: 90230 - RNA, 20 nt, Artificial Sequence
  Synthetic
cagcgauaaccaggacaagu

SEQ ID NO: 90231 - RNA, 21 nt, Artificial Sequence
  Synthetic
ccagcgauaaccaggacaagu

SEQ ID NO: 90232 - RNA, 22 nt, Artificial Sequence
  Synthetic
uccagcgauaaccaggacaagu

SEQ ID NO: 90233 - RNA, 23 nt, Artificial Sequence
  Synthetic
auccagcgauaaccaggacaagu

SEQ ID NO: 90234 - RNA, 24 nt, Artificial Sequence
  Synthetic
cauccagcgauaaccaggacaagu

SEQ ID NO: 90235 - RNA, 18 nt, Artificial Sequence
  Synthetic
  misc_feature (5)..(5): n is a, c, g, or u
guacngaaggaaagaagu

SEQ ID NO: 90236 - RNA, 19 nt, Artificial Sequence
  Synthetic
  misc_feature (6)..(6): n is a, c, g, or u
cguacngaaggaaagaagu

SEQ ID NO: 90237 - RNA, 20 nt, Artificial Sequence
  Synthetic
  misc_feature (7)..(7): n is a, c, g, or u
ucguacngaaggaaagaagu

SEQ ID NO: 90238 - RNA, 21 nt, Artificial Sequence
  Synthetic
  misc_feature (8)..(8): n is a, c, g, or u
cucguacngaaggaaagaagu

SEQ ID NO: 90239 - RNA, 22 nt, Artificial Sequence
  Synthetic
  misc_feature (9)..(9): n is a, c, g, or u
ucucguacngaaggaaagaagu

SEQ ID NO: 90240 - RNA, 23 nt, Artificial Sequence
  Synthetic
  misc_feature (10)..(10): n is a, c, g, or u
aucucguacngaaggaaagaagu

SEQ ID NO: 90241 - RNA, 24 nt, Artificial Sequence
  Synthetic
  misc_feature (11)..(11): n is a, c, g, or u
gaucucguacngaaggaaagaagu

SEQ ID NO: 90242 - RNA, 18 nt, Artificial Sequence
  Synthetic
aacugaaagccaaacagu

SEQ ID NO: 90243 - RNA, 19 nt, Artificial Sequence
  Synthetic
uaacugaaagccaaacagu

SEQ ID NO: 90244 - RNA, 20 nt, Artificial Sequence
  Synthetic
auaacugaaagccaaacagu

SEQ ID NO: 90245 - RNA, 21 nt, Artificial Sequence
  Synthetic
uauaacugaaagccaaacagu

SEQ ID NO: 90246 - RNA, 22 nt, Artificial Sequence
  Synthetic
auauaacugaaagccaaacagu

SEQ ID NO: 90247 - RNA, 23 nt, Artificial Sequence
  Synthetic
cauauaacugaaagccaaacagu

SEQ ID NO: 90248 - RNA, 24 nt, Artificial Sequence
  Synthetic
ccauauaacugaaagccaaacagu

SEQ ID NO: 90249 - RNA, 18 nt, Artificial Sequence
  Synthetic
  misc_feature (1)..(1): n is a, c, g, or u
  misc_feature (13)..(13): n is a, c, g, or u
nuuaaagacaggnacagu

SEQ ID NO: 90250 - RNA, 19 nt, Artificial Sequence
  Synthetic
  misc_feature (2)..(2): n is a, c, g, or u
  misc_feature (14)..(14): n is a, c, g, or u
gnuuaaagacaggnacagu

SEQ ID NO: 90251 - RNA, 20 nt, Artificial Sequence
  Synthetic
  misc_feature (3)..(3): n is a, c, g, or u
  misc_feature (15)..(15): n is a, c, g, or u
ggnuuaaagacaggnacagu

SEQ ID NO: 90252 - RNA, 21 nt, Artificial Sequence
  Synthetic
  misc_feature (4)..(4): n is a, c, g, or u
  misc_feature (16)..(16): n is a, c, g, or u
aggnuuaaagacaggnacagu

SEQ ID NO: 90253 - RNA, 22 nt, Artificial Sequence
  Synthetic
  misc_feature (5)..(5): n is a, c, g, or u
  misc_feature (17)..(17): n is a, c, g, or u
gaggnuuaaagacaggnacagu

SEQ ID NO: 90254 - RNA, 23 nt, Artificial Sequence
  Synthetic
  misc_feature (6)..(6): n is a, c, g, or u
  misc_feature (18)..(18): n is a, c, g, or u
ugaggnuuaaagacaggnacagu

SEQ ID NO: 90255 - RNA, 24 nt, Artificial Sequence
  Synthetic
  misc_feature (7)..(7): n is a, c, g, or u
  misc_feature (19)..(19): n is a, c, g, or u
augaggnuuaaagacaggnacagu

SEQ ID NO: 90256 - RNA, 18 nt, Artificial Sequence
  Synthetic
  misc_feature (10)..(10): n is a, c, g, or u
guugacauuncagagagu

SEQ ID NO: 90257 - RNA, 19 nt, Artificial Sequence
  Synthetic
  misc_feature (11)..(11): n is a, c, g, or u
cguugacauuncagagagu

SEQ ID NO: 90258 - RNA, 20 nt, Artificial Sequence
  Synthetic
  misc_feature (12)..(12): n is a, c, g, or u
ucguugacauuncagagagu

SEQ ID NO: 90259 - RNA, 21 nt, Artificial Sequence
  Synthetic
  misc_feature (13)..(13): n is a, c, g, or u
gucguugacauuncagagagu

SEQ ID NO: 90260 - RNA, 22 nt, Artificial Sequence
  Synthetic
  misc_feature (14)..(14): n is a, c, g, or u
ggucguugacauuncagagagu

SEQ ID NO: 90261 - RNA, 23 nt, Artificial Sequence
  Synthetic
  misc_feature (15)..(15): n is a, c, g, or u
cggucguugacauuncagagagu

SEQ ID NO: 90262 - RNA, 24 nt, Artificial Sequence
  Synthetic
  misc_feature (16)..(16): n is a, c, g, or u
ucggucguugacauuncagagagu

SEQ ID NO: 90263 - RNA, 18 nt, Artificial Sequence
  Synthetic
  misc_feature (13)..(13): n is a, c, g, or u
agaaggggacganagagu

SEQ ID NO: 90264 - RNA, 19 nt, Artificial Sequence
  Synthetic
  misc_feature (14)..(14): n is a, c, g, or u
gagaaggggacganagagu

SEQ ID NO: 90265 - RNA, 20 nt, Artificial Sequence
  Synthetic
  misc_feature (15)..(15): n is a, c, g, or u
ggagaaggggacganagagu

SEQ ID NO: 90266 - RNA, 21 nt, Artificial Sequence
  Synthetic
  misc_feature (16)..(16): n is a, c, g, or u
cggagaaggggacganagagu

SEQ ID NO: 90267 - RNA, 22 nt, Artificial Sequence
  Synthetic
  misc_feature (17)..(17): n is a, c, g, or u
acggagaaggggacganagagu

SEQ ID NO: 90268 - RNA, 23 nt, Artificial Sequence
  Synthetic
  misc_feature (18)..(18): n is a, c, g, or u
gacggagaaggggacganagagu

SEQ ID NO: 90269 - RNA, 24 nt, Artificial Sequence
  Synthetic
  misc_feature (19)..(19): n is a, c, g, or u
agacggagaaggggacganagagu

SEQ ID NO: 90270 - RNA, 18 nt, Artificial Sequence
  Synthetic
gagaaguccaccacgagu

SEQ ID NO: 90271 - RNA, 19 nt, Artificial Sequence
  Synthetic
agagaaguccaccacgagu

SEQ ID NO: 90272 - RNA, 20 nt, Artificial Sequence
  Synthetic
gagagaaguccaccacgagu

SEQ ID NO: 90273 - RNA, 21 nt, Artificial Sequence
  Synthetic
ugagagaaguccaccacgagu

SEQ ID NO: 90274 - RNA, 22 nt, Artificial Sequence
  Synthetic
uugagagaaguccaccacgagu

SEQ ID NO: 90275 - RNA, 23 nt, Artificial Sequence
  Synthetic
auugagagaaguccaccacgagu

SEQ ID NO: 90276 - RNA, 24 nt, Artificial Sequence
  Synthetic
aauugagagaaguccaccacgagu

SEQ ID NO: 90277 - RNA, 18 nt, Artificial Sequence
  Synthetic
  misc_feature (4)..(4): n is a, c, g, or u
guuncccaccuuaugagu

SEQ ID NO: 90278 - RNA, 19 nt, Artificial Sequence
  Synthetic
  misc_feature (5)..(5): n is a, c, g, or u
aguuncccaccuuaugagu

SEQ ID NO: 90279 - RNA, 20 nt, Artificial Sequence
  Synthetic
  misc_feature (6)..(6): n is a, c, g, or u
aaguuncccaccuuaugagu

SEQ ID NO: 90280 - RNA, 21 nt, Artificial Sequence
  Synthetic
  misc_feature (7)..(7): n is a, c, g, or u
aaaguuncccaccuuaugagu

SEQ ID NO: 90281 - RNA, 22 nt, Artificial Sequence
  Synthetic
  misc_feature (8)..(8): n is a, c, g, or u
uaaaguuncccaccuuaugagu

SEQ ID NO: 90282 - RNA, 23 nt, Artificial Sequence
  Synthetic
  misc_feature (9)..(9): n is a, c, g, or u
guaaaguuncccaccuuaugagu

SEQ ID NO: 90283 - RNA, 24 nt, Artificial Sequence
  Synthetic
  misc_feature (1)..(1): n is a, c, g, or u
  misc_feature (10)..(10): n is a, c, g, or u
nguaaaguuncccaccuuaugagu

SEQ ID NO: 90284 - RNA, 18 nt, Artificial Sequence
  Synthetic
gcaacauaccuugauagu

SEQ ID NO: 90285 - RNA, 19 nt, Artificial Sequence
  Synthetic
ggcaacauaccuugauagu

SEQ ID NO: 90286 - RNA, 20 nt, Artificial Sequence
  Synthetic
gggcaacauaccuugauagu

SEQ ID NO: 90287 - RNA, 21 nt, Artificial Sequence
  Synthetic
cgggcaacauaccuugauagu

SEQ ID NO: 90288 - RNA, 22 nt, Artificial Sequence
  Synthetic
acgggcaacauaccuugauagu

SEQ ID NO: 90289 - RNA, 23 nt, Artificial Sequence
  Synthetic
aacgggcaacauaccuugauagu

SEQ ID NO: 90290 - RNA, 24 nt, Artificial Sequence
  Synthetic
aaacgggcaacauaccuugauagu

SEQ ID NO: 90291 - RNA, 18 nt, Artificial Sequence
  Synthetic
  misc_feature (3)..(3): n is a, c, g, or u
  misc_feature (5)..(5): n is a, c, g, or u
  misc_feature (11)..(11): n is a, c, g, or u
uangngagagncaguagu

SEQ ID NO: 90292 - RNA, 19 nt, Artificial Sequence
  Synthetic
  misc_feature (4)..(4): n is a, c, g, or u
  misc_feature (6)..(6): n is a, c, g, or u
  misc_feature (12)..(12): n is a, c, g, or u
auangngagagncaguagu

SEQ ID NO: 90293 - RNA, 20 nt, Artificial Sequence
  Synthetic
  misc_feature (5)..(5): n is a, c, g, or u
  misc_feature (7)..(7): n is a, c, g, or u
  misc_feature (13)..(13): n is a, c, g, or u
gauangngagagncaguagu

SEQ ID NO: 90294 - RNA, 21 nt, Artificial Sequence
  Synthetic
  misc_feature (6)..(6): n is a, c, g, or u
  misc_feature (8)..(8): n is a, c, g, or u
  misc_feature (14)..(14): n is a, c, g, or u
cgauangngagagncaguagu

SEQ ID NO: 90295 - RNA, 22 nt, Artificial Sequence
  Synthetic
  misc_feature (7)..(7): n is a, c, g, or u
  misc_feature (9)..(9): n is a, c, g, or u
  misc_feature (15)..(15): n is a, c, g, or u
acgauangngagagncaguagu

SEQ ID NO: 90296 - RNA, 23 nt, Artificial Sequence
  Synthetic
  misc_feature (8)..(8): n is a, c, g, or u
  misc_feature (10)..(10): n is a, c, g, or u
  misc_feature (16)..(16): n is a, c, g, or u
gacgauangngagagncaguagu

SEQ ID NO: 90297 - RNA, 24 nt, Artificial Sequence
  Synthetic
  misc_feature (9)..(9): n is a, c, g, or u
  misc_feature (11)..(11): n is a, c, g, or u
  misc_feature (17)..(17): n is a, c, g, or u
ugacgauangngagagncaguagu

SEQ ID NO: 90298 - RNA, 18 nt, Artificial Sequence
  Synthetic
guggucuccaugcgacgu

SEQ ID NO: 90299 - RNA, 19 nt, Artificial Sequence
  Synthetic
gguggucuccaugcgacgu

SEQ ID NO: 90300 - RNA, 20 nt, Artificial Sequence
  Synthetic
cgguggucuccaugcgacgu

SEQ ID NO: 90301 - RNA, 21 nt, Artificial Sequence
  Synthetic
acgguggucuccaugcgacgu

SEQ ID NO: 90302 - RNA, 22 nt, Artificial Sequence
  Synthetic
cacgguggucuccaugcgacgu

SEQ ID NO: 90303 - RNA, 23 nt, Artificial Sequence
  Synthetic
ucacgguggucuccaugcgacgu

SEQ ID NO: 90304 - RNA, 24 nt, Artificial Sequence
  Synthetic
uucacgguggucuccaugcgacgu

SEQ ID NO: 90305 - RNA, 18 nt, Artificial Sequence
  Synthetic
uacaggugcaauuuccgu

SEQ ID NO: 90306 - RNA, 19 nt, Artificial Sequence
  Synthetic
auacaggugcaauuuccgu

SEQ ID NO: 90307 - RNA, 20 nt, Artificial Sequence
  Synthetic
aauacaggugcaauuuccgu

SEQ ID NO: 90308 - RNA, 21 nt, Artificial Sequence
  Synthetic
gaauacaggugcaauuuccgu

SEQ ID NO: 90309 - RNA, 22 nt, Artificial Sequence
  Synthetic
ggaauacaggugcaauuuccgu

SEQ ID NO: 90310 - RNA, 23 nt, Artificial Sequence
  Synthetic
gggaauacaggugcaauuuccgu

SEQ ID NO: 90311 - RNA, 24 nt, Artificial Sequence
  Synthetic
ugggaauacaggugcaauuuccgu

SEQ ID NO: 90312 - RNA, 18 nt, Artificial Sequence
  Synthetic
cagacggggaguccgcgu

SEQ ID NO: 90313 - RNA, 19 nt, Artificial Sequence
  Synthetic
acagacggggaguccgcgu

SEQ ID NO: 90314 - RNA, 20 nt, Artificial Sequence
  Synthetic
cacagacggggaguccgcgu

SEQ ID NO: 90315 - RNA, 21 nt, Artificial Sequence
  Synthetic
gcacagacggggaguccgcgu

SEQ ID NO: 90316 - RNA, 22 nt, Artificial Sequence
  Synthetic
ggcacagacggggaguccgcgu

SEQ ID NO: 90317 - RNA, 23 nt, Artificial Sequence
  Synthetic
aggcacagacggggaguccgcgu

SEQ ID NO: 90318 - RNA, 24 nt, Artificial Sequence
  Synthetic
aaggcacagacggggaguccgcgu

SEQ ID NO: 90319 - RNA, 18 nt, Artificial Sequence
  Synthetic
  misc_feature (6)..(6): n is a, c, g, or u
guaucnagaagaucucgu

SEQ ID NO: 90320 - RNA, 19 nt, Artificial Sequence
  Synthetic
  misc_feature (7)..(7): n is a, c, g, or u
gguaucnagaagaucucgu

SEQ ID NO: 90321 - RNA, 20 nt, Artificial Sequence
  Synthetic
  misc_feature (8)..(8): n is a, c, g, or u
cgguaucnagaagaucucgu

SEQ ID NO: 90322 - RNA, 21 nt, Artificial Sequence
  Synthetic
  misc_feature (9)..(9): n is a, c, g, or u
gcgguaucnagaagaucucgu

SEQ ID NO: 90323 - RNA, 22 nt, Artificial Sequence
  Synthetic
  misc_feature (10)..(10): n is a, c, g, or u
ggcgguaucnagaagaucucgu

SEQ ID NO: 90324 - RNA, 23 nt, Artificial Sequence
  Synthetic
  misc_feature (11)..(11): n is a, c, g, or u
aggcgguaucnagaagaucucgu

SEQ ID NO: 90325 - RNA, 24 nt, Artificial Sequence
  Synthetic
  misc_feature (12)..(12): n is a, c, g, or u
gaggcgguaucnagaagaucucgu

SEQ ID NO: 90326 - RNA, 18 nt, Artificial Sequence
  Synthetic
ugaguguuucucaaaggu

SEQ ID NO: 90327 - RNA, 19 nt, Artificial Sequence
  Synthetic
augaguguuucucaaaggu

SEQ ID NO: 90328 - RNA, 20 nt, Artificial Sequence
  Synthetic
gaugaguguuucucaaaggu

SEQ ID NO: 90329 - RNA, 21 nt, Artificial Sequence
  Synthetic
ggaugaguguuucucaaaggu

SEQ ID NO: 90330 - RNA, 22 nt, Artificial Sequence
  Synthetic
aggaugaguguuucucaaaggu

SEQ ID NO: 90331 - RNA, 23 nt, Artificial Sequence
  Synthetic
gaggaugaguguuucucaaaggu

SEQ ID NO: 90332 - RNA, 24 nt, Artificial Sequence
  Synthetic
ugaggaugaguguuucucaaaggu

SEQ ID NO: 90333 - RNA, 18 nt, Artificial Sequence
  Synthetic
cagaguuugguggaaggu

SEQ ID NO: 90334 - RNA, 19 nt, Artificial Sequence
  Synthetic
gcagaguuugguggaaggu

SEQ ID NO: 90335 - RNA, 20 nt, Artificial Sequence
  Synthetic
ugcagaguuugguggaaggu

SEQ ID NO: 90336 - RNA, 21 nt, Artificial Sequence
  Synthetic
uugcagaguuugguggaaggu

SEQ ID NO: 90337 - RNA, 22 nt, Artificial Sequence
  Synthetic
cuugcagaguuugguggaaggu

SEQ ID NO: 90338 - RNA, 23 nt, Artificial Sequence
  Synthetic
ucuugcagaguuugguggaaggu

SEQ ID NO: 90339 - RNA, 24 nt, Artificial Sequence
  Synthetic
aucuugcagaguuugguggaaggu

SEQ ID NO: 90340 - RNA, 18 nt, Artificial Sequence
  Synthetic
agaugauuaggcagaggu

SEQ ID NO: 90341 - RNA, 19 nt, Artificial Sequence
  Synthetic
gagaugauuaggcagaggu

SEQ ID NO: 90342 - RNA, 20 nt, Artificial Sequence
  Synthetic
agagaugauuaggcagaggu

SEQ ID NO: 90343 - RNA, 21 nt, Artificial Sequence
  Synthetic
aagagaugauuaggcagaggu

SEQ ID NO: 90344 - RNA, 22 nt, Artificial Sequence
  Synthetic
caagagaugauuaggcagaggu

SEQ ID NO: 90345 - RNA, 23 nt, Artificial Sequence
  Synthetic
acaagagaugauuaggcagaggu

SEQ ID NO: 90346 - RNA, 24 nt, Artificial Sequence
  Synthetic
aacaagagaugauuaggcagaggu

SEQ ID NO: 90347 - RNA, 18 nt, Artificial Sequence
  Synthetic
uggugagugauuggaggu

SEQ ID NO: 90348 - RNA, 19 nt, Artificial Sequence
  Synthetic
uuggugagugauuggaggu

SEQ ID NO: 90349 - RNA, 20 nt, Artificial Sequence
  Synthetic
guuggugagugauuggaggu

SEQ ID NO: 90350 - RNA, 21 nt, Artificial Sequence
  Synthetic
gguuggugagugauuggaggu

SEQ ID NO: 90351 - RNA, 22 nt, Artificial Sequence
  Synthetic
agguuggugagugauuggaggu

SEQ ID NO: 90352 - RNA, 23 nt, Artificial Sequence
  Synthetic
gagguuggugagugauuggaggu

SEQ ID NO: 90353 - RNA, 24 nt, Artificial Sequence
  Synthetic
ggagguuggugagugauuggaggu

SEQ ID NO: 90354 - RNA, 18 nt, Artificial Sequence
  Synthetic
aaaauugguaacagcggu

SEQ ID NO: 90355 - RNA, 19 nt, Artificial Sequence
  Synthetic
gaaaauugguaacagcggu

SEQ ID NO: 90356 - RNA, 20 nt, Artificial Sequence
  Synthetic
agaaaauugguaacagcggu

SEQ ID NO: 90357 - RNA, 21 nt, Artificial Sequence
  Synthetic
aagaaaauugguaacagcggu

SEQ ID NO: 90358 - RNA, 22 nt, Artificial Sequence
  Synthetic
aaagaaaauugguaacagcggu

SEQ ID NO: 90359 - RNA, 23 nt, Artificial Sequence
  Synthetic
aaaagaaaauugguaacagcggu

SEQ ID NO: 90360 - RNA, 24 nt, Artificial Sequence
  Synthetic
caaaagaaaauugguaacagcggu

SEQ ID NO: 90361 - RNA, 18 nt, Artificial Sequence
  Synthetic
  misc_feature (12)..(12): n is a, c, g, or u
uguaacacgagnaggggu

SEQ ID NO: 90362 - RNA, 19 nt, Artificial Sequence
  Synthetic
  misc_feature (13)..(13): n is a, c, g, or u
cuguaacacgagnaggggu

SEQ ID NO: 90363 - RNA, 20 nt, Artificial Sequence
  Synthetic
  misc_feature (14)..(14): n is a, c, g, or u
ccuguaacacgagnaggggu

SEQ ID NO: 90364 - RNA, 21 nt, Artificial Sequence
  Synthetic
  misc_feature (15)..(15): n is a, c, g, or u
gccuguaacacgagnaggggu

SEQ ID NO: 90365 - RNA, 22 nt, Artificial Sequence
  Synthetic
  misc_feature (16)..(16): n is a, c, g, or u
cgccuguaacacgagnaggggu

SEQ ID NO: 90366 - RNA, 23 nt, Artificial Sequence
  Synthetic
  misc_feature (17)..(17): n is a, c, g, or u
ccgccuguaacacgagnaggggu

SEQ ID NO: 90367 - RNA, 24 nt, Artificial Sequence
  Synthetic
  misc_feature (18)..(18): n is a, c, g, or u
cccgccuguaacacgagnaggggu

SEQ ID NO: 90368 - RNA, 18 nt, Artificial Sequence
  Synthetic
ucccagaggauugcuggu

SEQ ID NO: 90369 - RNA, 19 nt, Artificial Sequence
  Synthetic
aucccagaggauugcuggu

SEQ ID NO: 90370 - RNA, 20 nt, Artificial Sequence
  Synthetic
aaucccagaggauugcuggu

SEQ ID NO: 90371 - RNA, 21 nt, Artificial Sequence
  Synthetic
gaaucccagaggauugcuggu

SEQ ID NO: 90372 - RNA, 22 nt, Artificial Sequence
  Synthetic
agaaucccagaggauugcuggu

SEQ ID NO: 90373 - RNA, 23 nt, Artificial Sequence
  Synthetic
aagaaucccagaggauugcuggu

SEQ ID NO: 90374 - RNA, 24 nt, Artificial Sequence
  Synthetic
aaagaaucccagaggauugcuggu

SEQ ID NO: 90375 - RNA, 18 nt, Artificial Sequence
  Synthetic
cuggauccaacugguggu

SEQ ID NO: 90376 - RNA, 19 nt, Artificial Sequence
  Synthetic
gcuggauccaacugguggu

SEQ ID NO: 90377 - RNA, 20 nt, Artificial Sequence
  Synthetic
ggcuggauccaacugguggu

SEQ ID NO: 90378 - RNA, 21 nt, Artificial Sequence
  Synthetic
aggcuggauccaacugguggu

SEQ ID NO: 90379 - RNA, 22 nt, Artificial Sequence
  Synthetic
aaggcuggauccaacugguggu

SEQ ID NO: 90380 - RNA, 23 nt, Artificial Sequence
  Synthetic
gaaggcuggauccaacugguggu

SEQ ID NO: 90381 - RNA, 24 nt, Artificial Sequence
  Synthetic
ugaaggcuggauccaacugguggu

SEQ ID NO: 90382 - RNA, 18 nt, Artificial Sequence
  Synthetic
agacaaaagaaaauuggu

SEQ ID NO: 90383 - RNA, 19 nt, Artificial Sequence
  Synthetic
aagacaaaagaaaauuggu

SEQ ID NO: 90384 - RNA, 20 nt, Artificial Sequence
  Synthetic
aaagacaaaagaaaauuggu

SEQ ID NO: 90385 - RNA, 21 nt, Artificial Sequence
  Synthetic
caaagacaaaagaaaauuggu

SEQ ID NO: 90386 - RNA, 22 nt, Artificial Sequence
  Synthetic
ccaaagacaaaagaaaauuggu

SEQ ID NO: 90387 - RNA, 23 nt, Artificial Sequence
  Synthetic
cccaaagacaaaagaaaauuggu

SEQ ID NO: 90388 - RNA, 24 nt, Artificial Sequence
  Synthetic
acccaaagacaaaagaaaauuggu

SEQ ID NO: 90389 - RNA, 18 nt, Artificial Sequence
  Synthetic
gaucuugcagaguuuggu

SEQ ID NO: 90390 - RNA, 19 nt, Artificial Sequence
  Synthetic
ggaucuugcagaguuuggu

SEQ ID NO: 90391 - RNA, 20 nt, Artificial Sequence
  Synthetic
gggaucuugcagaguuuggu

SEQ ID NO: 90392 - RNA, 21 nt, Artificial Sequence
  Synthetic
ugggaucuugcagaguuuggu

SEQ ID NO: 90393 - RNA, 22 nt, Artificial Sequence
  Synthetic
cugggaucuugcagaguuuggu

SEQ ID NO: 90394 - RNA, 23 nt, Artificial Sequence
  Synthetic
  misc_feature (1)..(1): n is a, c, g, or u
ncugggaucuugcagaguuuggu

SEQ ID NO: 90395 - RNA, 24 nt, Artificial Sequence
  Synthetic
  misc_feature (2)..(2): n is a, c, g, or u
cncugggaucuugcagaguuuggu

SEQ ID NO: 90396 - RNA, 18 nt, Artificial Sequence
  Synthetic
  misc_feature (1)..(1): n is a, c, g, or u
  misc_feature (16)..(16): n is a, c, g, or u
nacaacagaguuaucngu

SEQ ID NO: 90397 - RNA, 19 nt, Artificial Sequence
  Synthetic
  misc_feature (2)..(2): n is a, c, g, or u
  misc_feature (17)..(17): n is a, c, g, or u
gnacaacagaguuaucngu

SEQ ID NO: 90398 - RNA, 20 nt, Artificial Sequence
  Synthetic
  misc_feature (3)..(3): n is a, c, g, or u
  misc_feature (18)..(18): n is a, c, g, or u
agnacaacagaguuaucngu

SEQ ID NO: 90399 - RNA, 21 nt, Artificial Sequence
  Synthetic
  misc_feature (4)..(4): n is a, c, g, or u
  misc_feature (19)..(19): n is a, c, g, or u
gagnacaacagaguuaucngu

SEQ ID NO: 90400 - RNA, 22 nt, Artificial Sequence
  Synthetic
  misc_feature (5)..(5): n is a, c, g, or u
  misc_feature (20)..(20): n is a, c, g, or u
agagnacaacagaguuaucngu

SEQ ID NO: 90401 - RNA, 23 nt, Artificial Sequence
  Synthetic
  misc_feature (6)..(6): n is a, c, g, or u
  misc_feature (21)..(21): n is a, c, g, or u
gagagnacaacagaguuaucngu

SEQ ID NO: 90402 - RNA, 24 nt, Artificial Sequence
  Synthetic
  misc_feature (7)..(7): n is a, c, g, or u
  misc_feature (22)..(22): n is a, c, g, or u
ggagagnacaacagaguuaucngu

SEQ ID NO: 90403 - RNA, 18 nt, Artificial Sequence
  Synthetic
  misc_feature (10)..(10): n is a, c, g, or u
  misc_feature (16)..(16): n is a, c, g, or u
guguaaauanugucungu

SEQ ID NO: 90404 - RNA, 19 nt, Artificial Sequence
  Synthetic
  misc_feature (11)..(11): n is a, c, g, or u
  misc_feature (17)..(17): n is a, c, g, or u
uguguaaauanugucungu

SEQ ID NO: 90405 - RNA, 20 nt, Artificial Sequence
  Synthetic
  misc_feature (12)..(12): n is a, c, g, or u
  misc_feature (18)..(18): n is a, c, g, or u
guguguaaauanugucungu

SEQ ID NO: 90406 - RNA, 21 nt, Artificial Sequence
  Synthetic
  misc_feature (13)..(13): n is a, c, g, or u
  misc_feature (19)..(19): n is a, c, g, or u
aguguguaaauanugucungu

SEQ ID NO: 90407 - RNA, 22 nt, Artificial Sequence
  Synthetic
  misc_feature (14)..(14): n is a, c, g, or u
  misc_feature (20)..(20): n is a, c, g, or u
gaguguguaaauanugucungu

SEQ ID NO: 90408 - RNA, 23 nt, Artificial Sequence
  Synthetic
  misc_feature (15)..(15): n is a, c, g, or u
  misc_feature (21)..(21): n is a, c, g, or u
agaguguguaaauanugucungu

SEQ ID NO: 90409 - RNA, 24 nt, Artificial Sequence
  Synthetic
  misc_feature (16)..(16): n is a, c, g, or u
  misc_feature (22)..(22): n is a, c, g, or u
uagaguguguaaauanugucungu

SEQ ID NO: 90410 - RNA, 18 nt, Artificial Sequence
  Synthetic
uaaugauuaacuagaugu

SEQ ID NO: 90411 - RNA, 19 nt, Artificial Sequence
  Synthetic
guaaugauuaacuagaugu

SEQ ID NO: 90412 - RNA, 20 nt, Artificial Sequence
  Synthetic
aguaaugauuaacuagaugu

SEQ ID NO: 90413 - RNA, 21 nt, Artificial Sequence
  Synthetic
aaguaaugauuaacuagaugu

SEQ ID NO: 90414 - RNA, 22 nt, Artificial Sequence
  Synthetic
gaaguaaugauuaacuagaugu

SEQ ID NO: 90415 - RNA, 23 nt, Artificial Sequence
  Synthetic
ggaaguaaugauuaacuagaugu

SEQ ID NO: 90416 - RNA, 24 nt, Artificial Sequence
  Synthetic
uggaaguaaugauuaacuagaugu

SEQ ID NO: 90417 - RNA, 18 nt, Artificial Sequence
  Synthetic
agggacucaagaugcugu

SEQ ID NO: 90418 - RNA, 19 nt, Artificial Sequence
  Synthetic
aagggacucaagaugcugu

SEQ ID NO: 90419 - RNA, 20 nt, Artificial Sequence
  Synthetic
aaagggacucaagaugcugu

SEQ ID NO: 90420 - RNA, 21 nt, Artificial Sequence
  Synthetic
aaaagggacucaagaugcugu

SEQ ID NO: 90421 - RNA, 22 nt, Artificial Sequence
  Synthetic
aaaaagggacucaagaugcugu

SEQ ID NO: 90422 - RNA, 23 nt, Artificial Sequence
  Synthetic
uaaaaagggacucaagaugcugu

SEQ ID NO: 90423 - RNA, 24 nt, Artificial Sequence
  Synthetic
guaaaaagggacucaagaugcugu

SEQ ID NO: 90424 - RNA, 18 nt, Artificial Sequence
  Synthetic
aggauaaccacauugugu

SEQ ID NO: 90425 - RNA, 19 nt, Artificial Sequence
  Synthetic
caggauaaccacauugugu

SEQ ID NO: 90426 - RNA, 20 nt, Artificial Sequence
  Synthetic
gcaggauaaccacauugugu

SEQ ID NO: 90427 - RNA, 21 nt, Artificial Sequence
  Synthetic
agcaggauaaccacauugugu

SEQ ID NO: 90428 - RNA, 22 nt, Artificial Sequence
  Synthetic
aagcaggauaaccacauugugu

SEQ ID NO: 90429 - RNA, 23 nt, Artificial Sequence
  Synthetic
aaagcaggauaaccacauugugu

SEQ ID NO: 90430 - RNA, 24 nt, Artificial Sequence
  Synthetic
uaaagcaggauaaccacauugugu

SEQ ID NO: 90431 - RNA, 18 nt, Artificial Sequence
  Synthetic
gcaggauaaccacauugu

SEQ ID NO: 90432 - RNA, 19 nt, Artificial Sequence
  Synthetic
agcaggauaaccacauugu

SEQ ID NO: 90433 - RNA, 20 nt, Artificial Sequence
  Synthetic
aagcaggauaaccacauugu

SEQ ID NO: 90434 - RNA, 21 nt, Artificial Sequence
  Synthetic
aaagcaggauaaccacauugu

SEQ ID NO: 90435 - RNA, 22 nt, Artificial Sequence
  Synthetic
uaaagcaggauaaccacauugu

SEQ ID NO: 90436 - RNA, 23 nt, Artificial Sequence
  Synthetic
uuaaagcaggauaaccacauugu

SEQ ID NO: 90437 - RNA, 24 nt, Artificial Sequence
  Synthetic
auuaaagcaggauaaccacauugu

SEQ ID NO: 90438 - RNA, 18 nt, Artificial Sequence
  Synthetic
  misc_feature (4)..(4): n is a, c, g, or u
  misc_feature (12)..(12): n is a, c, g, or u
ugunugaugugnucuugu

SEQ ID NO: 90439 - RNA, 19 nt, Artificial Sequence
  Synthetic
  misc_feature (1)..(1): n is a, c, g, or u
  misc_feature (5)..(5): n is a, c, g, or u
  misc_feature (13)..(13): n is a, c, g, or u
nugunugaugugnucuugu

SEQ ID NO: 90440 - RNA, 20 nt, Artificial Sequence
  Synthetic
  misc_feature (2)..(2): n is a, c, g, or u
  misc_feature (6)..(6): n is a, c, g, or u
  misc_feature (14)..(14): n is a, c, g, or u
unugunugaugugnucuugu

SEQ ID NO: 90441 - RNA, 21 nt, Artificial Sequence
  Synthetic
  misc_feature (3)..(3): n is a, c, g, or u
  misc_feature (7)..(7): n is a, c, g, or u
  misc_feature (15)..(15): n is a, c, g, or u
uunugunugaugugnucuugu

SEQ ID NO: 90442 - RNA, 22 nt, Artificial Sequence
  Synthetic
  misc_feature (4)..(4): n is a, c, g, or u
  misc_feature (8)..(8): n is a, c, g, or u
  misc_feature (16)..(16): n is a, c, g, or u
uuunugunugaugugnucuugu

SEQ ID NO: 90443 - RNA, 23 nt, Artificial Sequence
  Synthetic
  misc_feature (5)..(5): n is a, c, g, or u
  misc_feature (9)..(9): n is a, c, g, or u
  misc_feature (17)..(17): n is a, c, g, or u
uuuunugunugaugugnucuugu

SEQ ID NO: 90444 - RNA, 24 nt, Artificial Sequence
  Synthetic
  misc_feature (6)..(6): n is a, c, g, or u
  misc_feature (10)..(10): n is a, c, g, or u
  misc_feature (18)..(18): n is a, c, g, or u
auuuunugunugaugugnucuugu

SEQ ID NO: 90445 - RNA, 18 nt, Artificial Sequence
  Synthetic
  misc_feature (17)..(17): n is a, c, g, or u
ugccuacagccuccuanu

SEQ ID NO: 90446 - RNA, 19 nt, Artificial Sequence
  Synthetic
  misc_feature (18)..(18): n is a, c, g, or u
augccuacagccuccuanu

SEQ ID NO: 90447 - RNA, 20 nt, Artificial Sequence
  Synthetic
  misc_feature (19)..(19): n is a, c, g, or u
uaugccuacagccuccuanu

SEQ ID NO: 90448 - RNA, 21 nt, Artificial Sequence
  Synthetic
  misc_feature (20)..(20): n is a, c, g, or u
uuaugccuacagccuccuanu

SEQ ID NO: 90449 - RNA, 22 nt, Artificial Sequence
  Synthetic
  misc_feature (21)..(21): n is a, c, g, or u
uuuaugccuacagccuccuanu

SEQ ID NO: 90450 - RNA, 23 nt, Artificial Sequence
  Synthetic
  misc_feature (22)..(22): n is a, c, g, or u
auuuaugccuacagccuccuanu

SEQ ID NO: 90451 - RNA, 24 nt, Artificial Sequence
  Synthetic
  misc_feature (23)..(23): n is a, c, g, or u
aauuuaugccuacagccuccuanu

SEQ ID NO: 90452 - RNA, 18 nt, Artificial Sequence
  Synthetic
  misc_feature (17)..(17): n is a, c, g, or u
guguuuuccaaugaggnu

SEQ ID NO: 90453 - RNA, 19 nt, Artificial Sequence
  Synthetic
  misc_feature (18)..(18): n is a, c, g, or u
gguguuuuccaaugaggnu

SEQ ID NO: 90454 - RNA, 20 nt, Artificial Sequence
  Synthetic
  misc_feature (1)..(1): n is a, c, g, or u
  misc_feature (19)..(19): n is a, c, g, or u
ngguguuuuccaaugaggnu

SEQ ID NO: 90455 - RNA, 21 nt, Artificial Sequence
  Synthetic
  misc_feature (2)..(2): n is a, c, g, or u
  misc_feature (20)..(20): n is a, c, g, or u
angguguuuuccaaugaggnu

SEQ ID NO: 90456 - RNA, 22 nt, Artificial Sequence
  Synthetic
  misc_feature (3)..(3): n is a, c, g, or u
  misc_feature (21)..(21): n is a, c, g, or u
gangguguuuuccaaugaggnu

SEQ ID NO: 90457 - RNA, 23 nt, Artificial Sequence
  Synthetic
  misc_feature (4)..(4): n is a, c, g, or u
  misc_feature (22)..(22): n is a, c, g, or u
agangguguuuuccaaugaggnu

SEQ ID NO: 90458 - RNA, 24 nt, Artificial Sequence
  Synthetic
  misc_feature (5)..(5): n is a, c, g, or u
  misc_feature (23)..(23): n is a, c, g, or u
aagangguguuuuccaaugaggnu

SEQ ID NO: 90459 - RNA, 18 nt, Artificial Sequence
  Synthetic
  misc_feature (16)..(17): n is a, c, g, or u
agaccuugggcaagannu

SEQ ID NO: 90460 - RNA, 19 nt, Artificial Sequence
  Synthetic
  misc_feature (17)..(18): n is a, c, g, or u
aagaccuugggcaagannu

SEQ ID NO: 90461 - RNA, 20 nt, Artificial Sequence
  Synthetic
  misc_feature (18)..(19): n is a, c, g, or u
uaagaccuugggcaagannu

SEQ ID NO: 90462 - RNA, 21 nt, Artificial Sequence
  Synthetic
  misc_feature (19)..(20): n is a, c, g, or u
guaagaccuugggcaagannu

SEQ ID NO: 90463 - RNA, 22 nt, Artificial Sequence
  Synthetic
  misc_feature (20)..(21): n is a, c, g, or u
uguaagaccuugggcaagannu

SEQ ID NO: 90464 - RNA, 23 nt, Artificial Sequence
  Synthetic
  misc_feature (21)..(22): n is a, c, g, or u
auguaagaccuugggcaagannu

SEQ ID NO: 90465 - RNA, 24 nt, Artificial Sequence
  Synthetic
  misc_feature (22)..(23): n is a, c, g, or u
uauguaagaccuugggcaagannu

SEQ ID NO: 90466 - RNA, 18 nt, Artificial Sequence
  Synthetic
  misc_feature (6)..(6): n is a, c, g, or u
  misc_feature (12)..(12): n is a, c, g, or u
  misc_feature (17)..(17): n is a, c, g, or u
acauancccaunaaaunu

SEQ ID NO: 90467 - RNA, 19 nt, Artificial Sequence
  Synthetic
  misc_feature (7)..(7): n is a, c, g, or u
  misc_feature (13)..(13): n is a, c, g, or u
  misc_feature (18)..(18): n is a, c, g, or u
gacauancccaunaaaunu

SEQ ID NO: 90468 - RNA, 20 nt, Artificial Sequence
  Synthetic
  misc_feature (8)..(8): n is a, c, g, or u
  misc_feature (14)..(14): n is a, c, g, or u
  misc_feature (19)..(19): n is a, c, g, or u
ugacauancccaunaaaunu

SEQ ID NO: 90469 - RNA, 21 nt, Artificial Sequence
  Synthetic
  misc_feature (9)..(9): n is a, c, g, or u
  misc_feature (15)..(15): n is a, c, g, or u
  misc_feature (20)..(20): n is a, c, g, or u
augacauancccaunaaaunu

SEQ ID NO: 90470 - RNA, 22 nt, Artificial Sequence
  Synthetic
  misc_feature (10)..(10): n is a, c, g, or u
  misc_feature (16)..(16): n is a, c, g, or u
  misc_feature (21)..(21): n is a, c, g, or u
aaugacauancccaunaaaunu

SEQ ID NO: 90471 - RNA, 23 nt, Artificial Sequence
  Synthetic
  misc_feature (11)..(11): n is a, c, g, or u
  misc_feature (17)..(17): n is a, c, g, or u
  misc_feature (22)..(22): n is a, c, g, or u
caaugacauancccaunaaaunu

SEQ ID NO: 90472 - RNA, 24 nt, Artificial Sequence
  Synthetic
  misc_feature (12)..(12): n is a, c, g, or u
  misc_feature (18)..(18): n is a, c, g, or u
  misc_feature (23)..(23): n is a, c, g, or u
ccaaugacauancccaunaaaunu

SEQ ID NO: 90473 - RNA, 18 nt, Artificial Sequence
  Synthetic
caaagacaaaagaaaauu

SEQ ID NO: 90474 - RNA, 19 nt, Artificial Sequence
  Synthetic
ccaaagacaaaagaaaauu

SEQ ID NO: 90475 - RNA, 20 nt, Artificial Sequence
  Synthetic
cccaaagacaaaagaaaauu

SEQ ID NO: 90476 - RNA, 21 nt, Artificial Sequence
  Synthetic
acccaaagacaaaagaaaauu

SEQ ID NO: 90477 - RNA, 22 nt, Artificial Sequence
  Synthetic
uacccaaagacaaaagaaaauu

SEQ ID NO: 90478 - RNA, 23 nt, Artificial Sequence
  Synthetic
auacccaaagacaaaagaaaauu

SEQ ID NO: 90479 - RNA, 24 nt, Artificial Sequence
  Synthetic
uauacccaaagacaaaagaaaauu

SEQ ID NO: 90480 - RNA, 18 nt, Artificial Sequence
  Synthetic
  misc_feature (1)..(1): n is a, c, g, or u
  misc_feature (4)..(4): n is a, c, g, or u
nguncccccuagaaaauu

SEQ ID NO: 90481 - RNA, 19 nt, Artificial Sequence
  Synthetic
  misc_feature (2)..(2): n is a, c, g, or u
  misc_feature (5)..(5): n is a, c, g, or u
unguncccccuagaaaauu

SEQ ID NO: 90482 - RNA, 20 nt, Artificial Sequence
  Synthetic
  misc_feature (3)..(3): n is a, c, g, or u
  misc_feature (6)..(6): n is a, c, g, or u
gunguncccccuagaaaauu

SEQ ID NO: 90483 - RNA, 21 nt, Artificial Sequence
  Synthetic
  misc_feature (4)..(4): n is a, c, g, or u
  misc_feature (7)..(7): n is a, c, g, or u
ggunguncccccuagaaaauu

SEQ ID NO: 90484 - RNA, 22 nt, Artificial Sequence
  Synthetic
  misc_feature (5)..(5): n is a, c, g, or u
  misc_feature (8)..(8): n is a, c, g, or u
cggunguncccccuagaaaauu

SEQ ID NO: 90485 - RNA, 23 nt, Artificial Sequence
  Synthetic
  misc_feature (6)..(6): n is a, c, g, or u
  misc_feature (9)..(9): n is a, c, g, or u
acggunguncccccuagaaaauu

SEQ ID NO: 90486 - RNA, 24 nt, Artificial Sequence
  Synthetic
  misc_feature (7)..(7): n is a, c, g, or u
  misc_feature (10)..(10): n is a, c, g, or u
cacggunguncccccuagaaaauu

SEQ ID NO: 90487 - RNA, 18 nt, Artificial Sequence
  Synthetic
  misc_feature (6)..(6): n is a, c, g, or u
guugangauccuggaauu

SEQ ID NO: 90488 - RNA, 19 nt, Artificial Sequence
  Synthetic
  misc_feature (1)..(1): n is a, c, g, or u
  misc_feature (7)..(7): n is a, c, g, or u
nguugangauccuggaauu

SEQ ID NO: 90489 - RNA, 20 nt, Artificial Sequence
  Synthetic
  misc_feature (2)..(2): n is a, c, g, or u
  misc_feature (8)..(8): n is a, c, g, or u
unguugangauccuggaauu

SEQ ID NO: 90490 - RNA, 21 nt, Artificial Sequence
  Synthetic
  misc_feature (3)..(3): n is a, c, g, or u
  misc_feature (9)..(9): n is a, c, g, or u
gunguugangauccuggaauu

SEQ ID NO: 90491 - RNA, 22 nt, Artificial Sequence
  Synthetic
  misc_feature (4)..(4): n is a, c, g, or u
  misc_feature (10)..(10): n is a, c, g, or u
ggunguugangauccuggaauu

SEQ ID NO: 90492 - RNA, 23 nt, Artificial Sequence
  Synthetic
  misc_feature (5)..(5): n is a, c, g, or u
  misc_feature (11)..(11): n is a, c, g, or u
uggunguugangauccuggaauu

SEQ ID NO: 90493 - RNA, 24 nt, Artificial Sequence
  Synthetic
  misc_feature (6)..(6): n is a, c, g, or u
  misc_feature (12)..(12): n is a, c, g, or u
cuggunguugangauccuggaauu

SEQ ID NO: 90494 - RNA, 18 nt, Artificial Sequence
  Synthetic
aggucggucguugacauu

SEQ ID NO: 90495 - RNA, 19 nt, Artificial Sequence
  Synthetic
aaggucggucguugacauu

SEQ ID NO: 90496 - RNA, 20 nt, Artificial Sequence
  Synthetic
caaggucggucguugacauu

SEQ ID NO: 90497 - RNA, 18 nt, Artificial Sequence
  Synthetic
aauacuaacauugagauu

SEQ ID NO: 90498 - RNA, 19 nt, Artificial Sequence
  Synthetic
gaauacuaacauugagauu

SEQ ID NO: 90499 - RNA, 20 nt, Artificial Sequence
  Synthetic
ggaauacuaacauugagauu

SEQ ID NO: 90500 - RNA, 21 nt, Artificial Sequence
  Synthetic
aggaauacuaacauugagauu

SEQ ID NO: 90501 - RNA, 22 nt, Artificial Sequence
  Synthetic
aaggaauacuaacauugagauu

SEQ ID NO: 90502 - RNA, 23 nt, Artificial Sequence
  Synthetic
caaggaauacuaacauugagauu

SEQ ID NO: 90503 - RNA, 24 nt, Artificial Sequence
  Synthetic
ccaaggaauacuaacauugagauu

SEQ ID NO: 90504 - RNA, 18 nt, Artificial Sequence
  Synthetic
uugguguaaauguauauu

SEQ ID NO: 90505 - RNA, 19 nt, Artificial Sequence
  Synthetic
cuugguguaaauguauauu

SEQ ID NO: 90506 - RNA, 20 nt, Artificial Sequence
  Synthetic
ucuugguguaaauguauauu

SEQ ID NO: 90507 - RNA, 21 nt, Artificial Sequence
  Synthetic
gucuugguguaaauguauauu

SEQ ID NO: 90508 - RNA, 22 nt, Artificial Sequence
  Synthetic
ugucuugguguaaauguauauu

SEQ ID NO: 90509 - RNA, 23 nt, Artificial Sequence
  Synthetic
augucuugguguaaauguauauu

SEQ ID NO: 90510 - RNA, 24 nt, Artificial Sequence
  Synthetic
  misc_feature (1)..(1): n is a, c, g, or u
naugucuugguguaaauguauauu

SEQ ID NO: 90511 - RNA, 18 nt, Artificial Sequence
  Synthetic
auggaaacgauguauauu

SEQ ID NO: 90512 - RNA, 19 nt, Artificial Sequence
  Synthetic
cauggaaacgauguauauu

SEQ ID NO: 90513 - RNA, 20 nt, Artificial Sequence
  Synthetic
ccauggaaacgauguauauu

SEQ ID NO: 90514 - RNA, 21 nt, Artificial Sequence
  Synthetic
gccauggaaacgauguauauu

SEQ ID NO: 90515 - RNA, 22 nt, Artificial Sequence
  Synthetic
agccauggaaacgauguauauu

SEQ ID NO: 90516 - RNA, 23 nt, Artificial Sequence
  Synthetic
cagccauggaaacgauguauauu

SEQ ID NO: 90517 - RNA, 24 nt, Artificial Sequence
  Synthetic
gcagccauggaaacgauguauauu

SEQ ID NO: 90518 - RNA, 18 nt, Artificial Sequence
  Synthetic
ucuagacucugcgguauu

SEQ ID NO: 90519 - RNA, 19 nt, Artificial Sequence
  Synthetic
gucuagacucugcgguauu

SEQ ID NO: 90520 - RNA, 20 nt, Artificial Sequence
  Synthetic
agucuagacucugcgguauu

SEQ ID NO: 90521 - RNA, 21 nt, Artificial Sequence
  Synthetic
gagucuagacucugcgguauu

SEQ ID NO: 90522 - RNA, 22 nt, Artificial Sequence
  Synthetic
cgagucuagacucugcgguauu

SEQ ID NO: 90523 - RNA, 23 nt, Artificial Sequence
  Synthetic
acgagucuagacucugcgguauu

SEQ ID NO: 90524 - RNA, 24 nt, Artificial Sequence
  Synthetic
cacgagucuagacucugcgguauu

SEQ ID NO: 90525 - RNA, 18 nt, Artificial Sequence
  Synthetic
ugcuccagcuccuaccuu

SEQ ID NO: 90526 - RNA, 19 nt, Artificial Sequence
  Synthetic
augcuccagcuccuaccuu

SEQ ID NO: 90527 - RNA, 20 nt, Artificial Sequence
  Synthetic
aaugcuccagcuccuaccuu

SEQ ID NO: 90528 - RNA, 21 nt, Artificial Sequence
  Synthetic
gaaugcuccagcuccuaccuu

SEQ ID NO: 90529 - RNA, 22 nt, Artificial Sequence
  Synthetic
cgaaugcuccagcuccuaccuu

SEQ ID NO: 90530 - RNA, 23 nt, Artificial Sequence
  Synthetic
ccgaaugcuccagcuccuaccuu

SEQ ID NO: 90531 - RNA, 24 nt, Artificial Sequence
  Synthetic
cccgaaugcuccagcuccuaccuu

SEQ ID NO: 90532 - RNA, 18 nt, Artificial Sequence
  Synthetic
  misc_feature (3)..(3): n is a, c, g, or u
agngggguaggcugccuu

SEQ ID NO: 90533 - RNA, 19 nt, Artificial Sequence
  Synthetic
  misc_feature (4)..(4): n is a, c, g, or u
cagngggguaggcugccuu

SEQ ID NO: 90534 - RNA, 20 nt, Artificial Sequence
  Synthetic
  misc_feature (5)..(5): n is a, c, g, or u
acagngggguaggcugccuu

SEQ ID NO: 90535 - RNA, 21 nt, Artificial Sequence
  Synthetic
  misc_feature (6)..(6): n is a, c, g, or u
gacagngggguaggcugccuu

SEQ ID NO: 90536 - RNA, 22 nt, Artificial Sequence
  Synthetic
  misc_feature (7)..(7): n is a, c, g, or u
agacagngggguaggcugccuu

SEQ ID NO: 90537 - RNA, 23 nt, Artificial Sequence
  Synthetic
  misc_feature (8)..(8): n is a, c, g, or u
gagacagngggguaggcugccuu

SEQ ID NO: 90538 - RNA, 24 nt, Artificial Sequence
  Synthetic
  misc_feature (9)..(9): n is a, c, g, or u
ggagacagngggguaggcugccuu

SEQ ID NO: 90539 - RNA, 18 nt, Artificial Sequence
  Synthetic
gucuggccagguguccuu

SEQ ID NO: 90540 - RNA, 19 nt, Artificial Sequence
  Synthetic
cgucuggccagguguccuu

SEQ ID NO: 90541 - RNA, 20 nt, Artificial Sequence
  Synthetic
gcgucuggccagguguccuu

SEQ ID NO: 90542 - RNA, 21 nt, Artificial Sequence
  Synthetic
ggcgucuggccagguguccuu

SEQ ID NO: 90543 - RNA, 22 nt, Artificial Sequence
  Synthetic
uggcgucuggccagguguccuu

SEQ ID NO: 90544 - RNA, 23 nt, Artificial Sequence
  Synthetic
uuggcgucuggccagguguccuu

SEQ ID NO: 90545 - RNA, 24 nt, Artificial Sequence
  Synthetic
guuggcgucuggccagguguccuu

SEQ ID NO: 90546 - RNA, 18 nt, Artificial Sequence
  Synthetic
ccacccaaggcacagcuu

SEQ ID NO: 90547 - RNA, 19 nt, Artificial Sequence
  Synthetic
gccacccaaggcacagcuu

SEQ ID NO: 90548 - RNA, 20 nt, Artificial Sequence
  Synthetic
agccacccaaggcacagcuu

SEQ ID NO: 90549 - RNA, 21 nt, Artificial Sequence
  Synthetic
aagccacccaaggcacagcuu

SEQ ID NO: 90550 - RNA, 22 nt, Artificial Sequence
  Synthetic
aaagccacccaaggcacagcuu

SEQ ID NO: 90551 - RNA, 23 nt, Artificial Sequence
  Synthetic
  misc_feature (1)..(1): n is a, c, g, or u
naaagccacccaaggcacagcuu

SEQ ID NO: 90552 - RNA, 24 nt, Artificial Sequence
  Synthetic
  misc_feature (2)..(2): n is a, c, g, or u
cnaaagccacccaaggcacagcuu

SEQ ID NO: 90553 - RNA, 18 nt, Artificial Sequence
  Synthetic
  misc_feature (8)..(8): n is a, c, g, or u
cucucacncugggaucuu

SEQ ID NO: 90554 - RNA, 19 nt, Artificial Sequence
  Synthetic
  misc_feature (9)..(9): n is a, c, g, or u
ccucucacncugggaucuu

SEQ ID NO: 90555 - RNA, 20 nt, Artificial Sequence
  Synthetic
  misc_feature (10)..(10): n is a, c, g, or u
gccucucacncugggaucuu

SEQ ID NO: 90556 - RNA, 21 nt, Artificial Sequence
  Synthetic
  misc_feature (11)..(11): n is a, c, g, or u
ggccucucacncugggaucuu

SEQ ID NO: 90557 - RNA, 22 nt, Artificial Sequence
  Synthetic
  misc_feature (12)..(12): n is a, c, g, or u
aggccucucacncugggaucuu

SEQ ID NO: 90558 - RNA, 23 nt, Artificial Sequence
  Synthetic
  misc_feature (13)..(13): n is a, c, g, or u
caggccucucacncugggaucuu

SEQ ID NO: 90559 - RNA, 24 nt, Artificial Sequence
  Synthetic
  misc_feature (14)..(14): n is a, c, g, or u
acaggccucucacncugggaucuu

SEQ ID NO: 90560 - RNA, 18 nt, Artificial Sequence
  Synthetic
  misc_feature (5)..(6): n is a, c, g, or u
  misc_feature (9)..(9): n is a, c, g, or u
ucuannacnguuucucuu

SEQ ID NO: 90561 - RNA, 19 nt, Artificial Sequence
  Synthetic
  misc_feature (6)..(7): n is a, c, g, or u
  misc_feature (10)..(10): n is a, c, g, or u
cucuannacnguuucucuu

SEQ ID NO: 90562 - RNA, 20 nt, Artificial Sequence
  Synthetic
  misc_feature (7)..(8): n is a, c, g, or u
  misc_feature (11)..(11): n is a, c, g, or u
acucuannacnguuucucuu

SEQ ID NO: 90563 - RNA, 21 nt, Artificial Sequence
  Synthetic
  misc_feature (8)..(9): n is a, c, g, or u
  misc_feature (12)..(12): n is a, c, g, or u
uacucuannacnguuucucuu

SEQ ID NO: 90564 - RNA, 22 nt, Artificial Sequence
  Synthetic
  misc_feature (9)..(10): n is a, c, g, or u
  misc_feature (13)..(13): n is a, c, g, or u
auacucuannacnguuucucuu

SEQ ID NO: 90565 - RNA, 23 nt, Artificial Sequence
  Synthetic
  misc_feature (10)..(11): n is a, c, g, or u
  misc_feature (14)..(14): n is a, c, g, or u
aauacucuannacnguuucucuu

SEQ ID NO: 90566 - RNA, 24 nt, Artificial Sequence
  Synthetic
  misc_feature (11)..(12): n is a, c, g, or u
  misc_feature (15)..(15): n is a, c, g, or u
aaauacucuannacnguuucucuu

SEQ ID NO: 90567 - RNA, 18 nt, Artificial Sequence
  Synthetic
  misc_feature (4)..(4): n is a, c, g, or u
cagnagcuccaaauucuu

SEQ ID NO: 90568 - RNA, 19 nt, Artificial Sequence
  Synthetic
  misc_feature (5)..(5): n is a, c, g, or u
acagnagcuccaaauucuu

SEQ ID NO: 90569 - RNA, 20 nt, Artificial Sequence
  Synthetic
  misc_feature (6)..(6): n is a, c, g, or u
cacagnagcuccaaauucuu

SEQ ID NO: 90570 - RNA, 21 nt, Artificial Sequence
  Synthetic
  misc_feature (7)..(7): n is a, c, g, or u
ccacagnagcuccaaauucuu

SEQ ID NO: 90571 - RNA, 22 nt, Artificial Sequence
  Synthetic
  misc_feature (8)..(8): n is a, c, g, or u
uccacagnagcuccaaauucuu

SEQ ID NO: 90572 - RNA, 23 nt, Artificial Sequence
  Synthetic
  misc_feature (9)..(9): n is a, c, g, or u
cuccacagnagcuccaaauucuu

SEQ ID NO: 90573 - RNA, 24 nt, Artificial Sequence
  Synthetic
  misc_feature (10)..(10): n is a, c, g, or u
acuccacagnagcuccaaauucuu

SEQ ID NO: 90574 - RNA, 18 nt, Artificial Sequence
  Synthetic
gguauugugaggauucuu

SEQ ID NO: 90575 - RNA, 19 nt, Artificial Sequence
  Synthetic
cgguauugugaggauucuu

SEQ ID NO: 90576 - RNA, 20 nt, Artificial Sequence
  Synthetic
gcgguauugugaggauucuu

SEQ ID NO: 90577 - RNA, 21 nt, Artificial Sequence
  Synthetic
ugcgguauugugaggauucuu

SEQ ID NO: 90578 - RNA, 22 nt, Artificial Sequence
  Synthetic
cugcgguauugugaggauucuu

SEQ ID NO: 90579 - RNA, 23 nt, Artificial Sequence
  Synthetic
ucugcgguauugugaggauucuu

SEQ ID NO: 90580 - RNA, 24 nt, Artificial Sequence
  Synthetic
cucugcgguauugugaggauucuu

SEQ ID NO: 90581 - RNA, 18 nt, Artificial Sequence
  Synthetic
ggcgagggaguucuucuu

SEQ ID NO: 90582 - RNA, 19 nt, Artificial Sequence
  Synthetic
aggcgagggaguucuucuu

SEQ ID NO: 90583 - RNA, 20 nt, Artificial Sequence
  Synthetic
gaggcgagggaguucuucuu

SEQ ID NO: 90584 - RNA, 21 nt, Artificial Sequence
  Synthetic
cgaggcgagggaguucuucuu

SEQ ID NO: 90585 - RNA, 22 nt, Artificial Sequence
  Synthetic
gcgaggcgagggaguucuucuu

SEQ ID NO: 90586 - RNA, 23 nt, Artificial Sequence
  Synthetic
ugcgaggcgagggaguucuucuu

SEQ ID NO: 90587 - RNA, 24 nt, Artificial Sequence
  Synthetic
cugcgaggcgagggaguucuucuu

SEQ ID NO: 90588 - RNA, 18 nt, Artificial Sequence
  Synthetic
cgauaaccaggacaaguu

SEQ ID NO: 90589 - RNA, 19 nt, Artificial Sequence
  Synthetic
gcgauaaccaggacaaguu

SEQ ID NO: 90590 - RNA, 20 nt, Artificial Sequence
  Synthetic
agcgauaaccaggacaaguu

SEQ ID NO: 90591 - RNA, 21 nt, Artificial Sequence
  Synthetic
cagcgauaaccaggacaaguu

SEQ ID NO: 90592 - RNA, 22 nt, Artificial Sequence
  Synthetic
ccagcgauaaccaggacaaguu

SEQ ID NO: 90593 - RNA, 23 nt, Artificial Sequence
  Synthetic
uccagcgauaaccaggacaaguu

SEQ ID NO: 90594 - RNA, 24 nt, Artificial Sequence
  Synthetic
auccagcgauaaccaggacaaguu

SEQ ID NO: 90595 - RNA, 18 nt, Artificial Sequence
  Synthetic
agaaaggccuuguaaguu

SEQ ID NO: 90596 - RNA, 19 nt, Artificial Sequence
  Synthetic
cagaaaggccuuguaaguu

SEQ ID NO: 90597 - RNA, 20 nt, Artificial Sequence
  Synthetic
acagaaaggccuuguaaguu

SEQ ID NO: 90598 - RNA, 21 nt, Artificial Sequence
  Synthetic
cacagaaaggccuuguaaguu

SEQ ID NO: 90599 - RNA, 22 nt, Artificial Sequence
  Synthetic
acacagaaaggccuuguaaguu

SEQ ID NO: 90600 - RNA, 23 nt, Artificial Sequence
  Synthetic
uacacagaaaggccuuguaaguu

SEQ ID NO: 90601 - RNA, 24 nt, Artificial Sequence
  Synthetic
uuacacagaaaggccuuguaaguu

SEQ ID NO: 90602 - RNA, 18 nt, Artificial Sequence
  Synthetic
cccgcgcaggauccaguu

SEQ ID NO: 90603 - RNA, 19 nt, Artificial Sequence
  Synthetic
ucccgcgcaggauccaguu

SEQ ID NO: 90604 - RNA, 20 nt, Artificial Sequence
  Synthetic
gucccgcgcaggauccaguu

SEQ ID NO: 90605 - RNA, 18 nt, Artificial Sequence
  Synthetic
ggcacagaccuggccguu

SEQ ID NO: 90606 - RNA, 19 nt, Artificial Sequence
  Synthetic
uggcacagaccuggccguu

SEQ ID NO: 90607 - RNA, 20 nt, Artificial Sequence
  Synthetic
uuggcacagaccuggccguu

SEQ ID NO: 90608 - RNA, 21 nt, Artificial Sequence
  Synthetic
cuuggcacagaccuggccguu

SEQ ID NO: 90609 - RNA, 22 nt, Artificial Sequence
  Synthetic
acuuggcacagaccuggccguu

SEQ ID NO: 90610 - RNA, 23 nt, Artificial Sequence
  Synthetic
cacuuggcacagaccuggccguu

SEQ ID NO: 90611 - RNA, 24 nt, Artificial Sequence
  Synthetic
acacuuggcacagaccuggccguu

SEQ ID NO: 90612 - RNA, 18 nt, Artificial Sequence
  Synthetic
agaguuugguggaagguu

SEQ ID NO: 90613 - RNA, 19 nt, Artificial Sequence
  Synthetic
cagaguuugguggaagguu

SEQ ID NO: 90614 - RNA, 20 nt, Artificial Sequence
  Synthetic
gcagaguuugguggaagguu

SEQ ID NO: 90615 - RNA, 21 nt, Artificial Sequence
  Synthetic
ugcagaguuugguggaagguu

SEQ ID NO: 90616 - RNA, 22 nt, Artificial Sequence
  Synthetic
uugcagaguuugguggaagguu

SEQ ID NO: 90617 - RNA, 23 nt, Artificial Sequence
  Synthetic
cuugcagaguuugguggaagguu

SEQ ID NO: 90618 - RNA, 24 nt, Artificial Sequence
  Synthetic
ucuugcagaguuugguggaagguu

SEQ ID NO: 90619 - RNA, 18 nt, Artificial Sequence
  Synthetic
guuggaggacaggagguu

SEQ ID NO: 90620 - RNA, 19 nt, Artificial Sequence
  Synthetic
aguuggaggacaggagguu

SEQ ID NO: 90621 - RNA, 20 nt, Artificial Sequence
  Synthetic
aaguuggaggacaggagguu

SEQ ID NO: 90622 - RNA, 21 nt, Artificial Sequence
  Synthetic
caaguuggaggacaggagguu

SEQ ID NO: 90623 - RNA, 22 nt, Artificial Sequence
  Synthetic
acaaguuggaggacaggagguu

SEQ ID NO: 90624 - RNA, 23 nt, Artificial Sequence
  Synthetic
gacaaguuggaggacaggagguu

SEQ ID NO: 90625 - RNA, 24 nt, Artificial Sequence
  Synthetic
ggacaaguuggaggacaggagguu

SEQ ID NO: 90626 - RNA, 18 nt, Artificial Sequence
  Synthetic
ggugagugauuggagguu

SEQ ID NO: 90627 - RNA, 19 nt, Artificial Sequence
  Synthetic
uggugagugauuggagguu

SEQ ID NO: 90628 - RNA, 20 nt, Artificial Sequence
  Synthetic
uuggugagugauuggagguu

SEQ ID NO: 90629 - RNA, 21 nt, Artificial Sequence
  Synthetic
guuggugagugauuggagguu

SEQ ID NO: 90630 - RNA, 22 nt, Artificial Sequence
  Synthetic
gguuggugagugauuggagguu

SEQ ID NO: 90631 - RNA, 23 nt, Artificial Sequence
  Synthetic
agguuggugagugauuggagguu

SEQ ID NO: 90632 - RNA, 24 nt, Artificial Sequence
  Synthetic
gagguuggugagugauuggagguu

SEQ ID NO: 90633 - RNA, 18 nt, Artificial Sequence
  Synthetic
  misc_feature (9)..(9): n is a, c, g, or u
  misc_feature (15)..(15): n is a, c, g, or u
uguaaauanugucunguu

SEQ ID NO: 90634 - RNA, 19 nt, Artificial Sequence
  Synthetic
  misc_feature (10)..(10): n is a, c, g, or u
  misc_feature (16)..(16): n is a, c, g, or u
guguaaauanugucunguu

SEQ ID NO: 90635 - RNA, 20 nt, Artificial Sequence
  Synthetic
  misc_feature (11)..(11): n is a, c, g, or u
  misc_feature (17)..(17): n is a, c, g, or u
uguguaaauanugucunguu

SEQ ID NO: 90636 - RNA, 21 nt, Artificial Sequence
  Synthetic
  misc_feature (12)..(12): n is a, c, g, or u
  misc_feature (18)..(18): n is a, c, g, or u
guguguaaauanugucunguu

SEQ ID NO: 90637 - RNA, 22 nt, Artificial Sequence
  Synthetic
  misc_feature (13)..(13): n is a, c, g, or u
  misc_feature (19)..(19): n is a, c, g, or u
aguguguaaauanugucunguu

SEQ ID NO: 90638 - RNA, 23 nt, Artificial Sequence
  Synthetic
  misc_feature (14)..(14): n is a, c, g, or u
  misc_feature (20)..(20): n is a, c, g, or u
gaguguguaaauanugucunguu

SEQ ID NO: 90639 - RNA, 24 nt, Artificial Sequence
  Synthetic
  misc_feature (15)..(15): n is a, c, g, or u
  misc_feature (21)..(21): n is a, c, g, or u
agaguguguaaauanugucunguu

SEQ ID NO: 90640 - RNA, 18 nt, Artificial Sequence
  Synthetic
ggaacaggguuuacuguu

SEQ ID NO: 90641 - RNA, 19 nt, Artificial Sequence
  Synthetic
cggaacaggguuuacuguu

SEQ ID NO: 90642 - RNA, 20 nt, Artificial Sequence
  Synthetic
ucggaacaggguuuacuguu

SEQ ID NO: 90643 - RNA, 21 nt, Artificial Sequence
  Synthetic
gucggaacaggguuuacuguu

SEQ ID NO: 90644 - RNA, 22 nt, Artificial Sequence
  Synthetic
agucggaacaggguuuacuguu

SEQ ID NO: 90645 - RNA, 23 nt, Artificial Sequence
  Synthetic
uagucggaacaggguuuacuguu

SEQ ID NO: 90646 - RNA, 24 nt, Artificial Sequence
  Synthetic
guagucggaacaggguuuacuguu

SEQ ID NO: 90647 - RNA, 18 nt, Artificial Sequence
  Synthetic
ccaaucaauaggccuguu

SEQ ID NO: 90648 - RNA, 19 nt, Artificial Sequence
  Synthetic
uccaaucaauaggccuguu

SEQ ID NO: 90649 - RNA, 20 nt, Artificial Sequence
  Synthetic
uuccaaucaauaggccuguu

SEQ ID NO: 90650 - RNA, 21 nt, Artificial Sequence
  Synthetic
uuuccaaucaauaggccuguu

SEQ ID NO: 90651 - RNA, 22 nt, Artificial Sequence
  Synthetic
cuuuccaaucaauaggccuguu

SEQ ID NO: 90652 - RNA, 23 nt, Artificial Sequence
  Synthetic
acuuuccaaucaauaggccuguu

SEQ ID NO: 90653 - RNA, 24 nt, Artificial Sequence
  Synthetic
  misc_feature (1)..(1): n is a, c, g, or u
nacuuuccaaucaauaggccuguu

SEQ ID NO: 90654 - RNA, 18 nt, Artificial Sequence
  Synthetic
guagucuccggaaguguu

SEQ ID NO: 90655 - RNA, 19 nt, Artificial Sequence
  Synthetic
aguagucuccggaaguguu

SEQ ID NO: 90656 - RNA, 20 nt, Artificial Sequence
  Synthetic
caguagucuccggaaguguu

SEQ ID NO: 90657 - RNA, 21 nt, Artificial Sequence
  Synthetic
acaguagucuccggaaguguu

SEQ ID NO: 90658 - RNA, 22 nt, Artificial Sequence
  Synthetic
aacaguagucuccggaaguguu

SEQ ID NO: 90659 - RNA, 23 nt, Artificial Sequence
  Synthetic
caacaguagucuccggaaguguu

SEQ ID NO: 90660 - RNA, 24 nt, Artificial Sequence
  Synthetic
acaacaguagucuccggaaguguu

SEQ ID NO: 90661 - RNA, 18 nt, Artificial Sequence
  Synthetic
caugcuguagcucuuguu

SEQ ID NO: 90662 - RNA, 19 nt, Artificial Sequence
  Synthetic
ccaugcuguagcucuuguu

SEQ ID NO: 90663 - RNA, 20 nt, Artificial Sequence
  Synthetic
cccaugcuguagcucuuguu

SEQ ID NO: 90664 - RNA, 21 nt, Artificial Sequence
  Synthetic
ccccaugcuguagcucuuguu

SEQ ID NO: 90665 - RNA, 22 nt, Artificial Sequence
  Synthetic
gccccaugcuguagcucuuguu

SEQ ID NO: 90666 - RNA, 23 nt, Artificial Sequence
  Synthetic
ugccccaugcuguagcucuuguu

SEQ ID NO: 90667 - RNA, 24 nt, Artificial Sequence
  Synthetic
cugccccaugcuguagcucuuguu

SEQ ID NO: 90668 - RNA, 18 nt, Artificial Sequence
  Synthetic
  misc_feature (16)..(16): n is a, c, g, or u
uguuuuccaaugaggnuu

SEQ ID NO: 90669 - RNA, 19 nt, Artificial Sequence
  Synthetic
  misc_feature (17)..(17): n is a, c, g, or u
guguuuuccaaugaggnuu

SEQ ID NO: 90670 - RNA, 20 nt, Artificial Sequence
  Synthetic
  misc_feature (18)..(18): n is a, c, g, or u
gguguuuuccaaugaggnuu

SEQ ID NO: 90671 - RNA, 21 nt, Artificial Sequence
  Synthetic
  misc_feature (1)..(1): n is a, c, g, or u
  misc_feature (19)..(19): n is a, c, g, or u
ngguguuuuccaaugaggnuu

SEQ ID NO: 90672 - RNA, 22 nt, Artificial Sequence
  Synthetic
  misc_feature (2)..(2): n is a, c, g, or u
  misc_feature (20)..(20): n is a, c, g, or u
angguguuuuccaaugaggnuu

SEQ ID NO: 90673 - RNA, 23 nt, Artificial Sequence
  Synthetic
  misc_feature (3)..(3): n is a, c, g, or u
  misc_feature (21)..(21): n is a, c, g, or u
gangguguuuuccaaugaggnuu

SEQ ID NO: 90674 - RNA, 24 nt, Artificial Sequence
  Synthetic
  misc_feature (4)..(4): n is a, c, g, or u
  misc_feature (22)..(22): n is a, c, g, or u
agangguguuuuccaaugaggnuu

SEQ ID NO: 90675 - RNA, 18 nt, Artificial Sequence
  Synthetic
ccacucccauaggaauuu

SEQ ID NO: 90676 - RNA, 19 nt, Artificial Sequence
  Synthetic
cccacucccauaggaauuu

SEQ ID NO: 90677 - RNA, 20 nt, Artificial Sequence
  Synthetic
gcccacucccauaggaauuu

SEQ ID NO: 90678 - RNA, 21 nt, Artificial Sequence
  Synthetic
ggcccacucccauaggaauuu

SEQ ID NO: 90679 - RNA, 22 nt, Artificial Sequence
  Synthetic
aggcccacucccauaggaauuu

SEQ ID NO: 90680 - RNA, 23 nt, Artificial Sequence
  Synthetic
gaggcccacucccauaggaauuu

SEQ ID NO: 90681 - RNA, 24 nt, Artificial Sequence
  Synthetic
ugaggcccacucccauaggaauuu

SEQ ID NO: 90682 - RNA, 18 nt, Artificial Sequence
  Synthetic
  misc_feature (3)..(3): n is a, c, g, or u
gangcaggaggcggauuu

SEQ ID NO: 90683 - RNA, 19 nt, Artificial Sequence
  Synthetic
  misc_feature (1)..(1): n is a, c, g, or u
  misc_feature (4)..(4): n is a, c, g, or u
ngangcaggaggcggauuu

SEQ ID NO: 90684 - RNA, 20 nt, Artificial Sequence
  Synthetic
  misc_feature (2)..(2): n is a, c, g, or u
  misc_feature (5)..(5): n is a, c, g, or u
ungangcaggaggcggauuu

SEQ ID NO: 90685 - RNA, 21 nt, Artificial Sequence
  Synthetic
  misc_feature (3)..(3): n is a, c, g, or u
  misc_feature (6)..(6): n is a, c, g, or u
gungangcaggaggcggauuu

SEQ ID NO: 90686 - RNA, 22 nt, Artificial Sequence
  Synthetic
  misc_feature (4)..(4): n is a, c, g, or u
  misc_feature (7)..(7): n is a, c, g, or u
ggungangcaggaggcggauuu

SEQ ID NO: 90687 - RNA, 23 nt, Artificial Sequence
  Synthetic
  misc_feature (5)..(5): n is a, c, g, or u
  misc_feature (8)..(8): n is a, c, g, or u
uggungangcaggaggcggauuu

SEQ ID NO: 90688 - RNA, 24 nt, Artificial Sequence
  Synthetic
  misc_feature (6)..(6): n is a, c, g, or u
  misc_feature (9)..(9): n is a, c, g, or u
uuggungangcaggaggcggauuu

SEQ ID NO: 90689 - RNA, 18 nt, Artificial Sequence
  Synthetic
  misc_feature (4)..(4): n is a, c, g, or u
  misc_feature (10)..(10): n is a, c, g, or u
aucnaauggnaaauauuu

SEQ ID NO: 90690 - RNA, 19 nt, Artificial Sequence
  Synthetic
  misc_feature (5)..(5): n is a, c, g, or u
  misc_feature (11)..(11): n is a, c, g, or u
uaucnaauggnaaauauuu

SEQ ID NO: 90691 - RNA, 20 nt, Artificial Sequence
  Synthetic
  misc_feature (6)..(6): n is a, c, g, or u
  misc_feature (12)..(12): n is a, c, g, or u
uuaucnaauggnaaauauuu

SEQ ID NO: 90692 - RNA, 21 nt, Artificial Sequence
  Synthetic
  misc_feature (7)..(7): n is a, c, g, or u
  misc_feature (13)..(13): n is a, c, g, or u
cuuaucnaauggnaaauauuu

SEQ ID NO: 90693 - RNA, 22 nt, Artificial Sequence
  Synthetic
  misc_feature (8)..(8): n is a, c, g, or u
  misc_feature (14)..(14): n is a, c, g, or u
ccuuaucnaauggnaaauauuu

SEQ ID NO: 90694 - RNA, 23 nt, Artificial Sequence
  Synthetic
  misc_feature (9)..(9): n is a, c, g, or u
  misc_feature (15)..(15): n is a, c, g, or u
cccuuaucnaauggnaaauauuu

SEQ ID NO: 90695 - RNA, 24 nt, Artificial Sequence
  Synthetic
  misc_feature (10)..(10): n is a, c, g, or u
  misc_feature (16)..(16): n is a, c, g, or u
acccuuaucnaauggnaaauauuu

SEQ ID NO: 90696 - RNA, 18 nt, Artificial Sequence
  Synthetic
uggaaacgauguauauuu

SEQ ID NO: 90697 - RNA, 19 nt, Artificial Sequence
  Synthetic
auggaaacgauguauauuu

SEQ ID NO: 90698 - RNA, 20 nt, Artificial Sequence
  Synthetic
cauggaaacgauguauauuu

SEQ ID NO: 90699 - RNA, 21 nt, Artificial Sequence
  Synthetic
ccauggaaacgauguauauuu

SEQ ID NO: 90700 - RNA, 22 nt, Artificial Sequence
  Synthetic
gccauggaaacgauguauauuu

SEQ ID NO: 90701 - RNA, 23 nt, Artificial Sequence
  Synthetic
agccauggaaacgauguauauuu

SEQ ID NO: 90702 - RNA, 24 nt, Artificial Sequence
  Synthetic
cagccauggaaacgauguauauuu

SEQ ID NO: 90703 - RNA, 18 nt, Artificial Sequence
  Synthetic
  misc_feature (3)..(3): n is a, c, g, or u
agnagcuccaaauucuuu

SEQ ID NO: 90704 - RNA, 19 nt, Artificial Sequence
  Synthetic
  misc_feature (4)..(4): n is a, c, g, or u
cagnagcuccaaauucuuu

SEQ ID NO: 90705 - RNA, 20 nt, Artificial Sequence
  Synthetic
  misc_feature (5)..(5): n is a, c, g, or u
acagnagcuccaaauucuuu

SEQ ID NO: 90706 - RNA, 21 nt, Artificial Sequence
  Synthetic
  misc_feature (6)..(6): n is a, c, g, or u
cacagnagcuccaaauucuuu

SEQ ID NO: 90707 - RNA, 22 nt, Artificial Sequence
  Synthetic
  misc_feature (7)..(7): n is a, c, g, or u
ccacagnagcuccaaauucuuu

SEQ ID NO: 90708 - RNA, 23 nt, Artificial Sequence
  Synthetic
  misc_feature (8)..(8): n is a, c, g, or u
uccacagnagcuccaaauucuuu

SEQ ID NO: 90709 - RNA, 24 nt, Artificial Sequence
  Synthetic
  misc_feature (9)..(9): n is a, c, g, or u
cuccacagnagcuccaaauucuuu

SEQ ID NO: 90710 - RNA, 18 nt, Artificial Sequence
  Synthetic
ccuguuaacaggaaguuu

SEQ ID NO: 90711 - RNA, 19 nt, Artificial Sequence
  Synthetic
gccuguuaacaggaaguuu

SEQ ID NO: 90712 - RNA, 20 nt, Artificial Sequence
  Synthetic
ggccuguuaacaggaaguuu

SEQ ID NO: 90713 - RNA, 21 nt, Artificial Sequence
  Synthetic
aggccuguuaacaggaaguuu

SEQ ID NO: 90714 - RNA, 22 nt, Artificial Sequence
  Synthetic
uaggccuguuaacaggaaguuu

SEQ ID NO: 90715 - RNA, 23 nt, Artificial Sequence
  Synthetic
auaggccuguuaacaggaaguuu

SEQ ID NO: 90716 - RNA, 24 nt, Artificial Sequence
  Synthetic
aauaggccuguuaacaggaaguuu

SEQ ID NO: 90717 - RNA, 18 nt, Artificial Sequence
  Synthetic
ugggaucuugcagaguuu

SEQ ID NO: 90718 - RNA, 19 nt, Artificial Sequence
  Synthetic
cugggaucuugcagaguuu

SEQ ID NO: 90719 - RNA, 20 nt, Artificial Sequence
  Synthetic
  misc_feature (1)..(1): n is a, c, g, or u
ncugggaucuugcagaguuu

SEQ ID NO: 90720 - RNA, 21 nt, Artificial Sequence
  Synthetic
  misc_feature (2)..(2): n is a, c, g, or u
cncugggaucuugcagaguuu

SEQ ID NO: 90721 - RNA, 22 nt, Artificial Sequence
  Synthetic
  misc_feature (3)..(3): n is a, c, g, or u
acncugggaucuugcagaguuu

SEQ ID NO: 90722 - RNA, 23 nt, Artificial Sequence
  Synthetic
  misc_feature (4)..(4): n is a, c, g, or u
cacncugggaucuugcagaguuu

SEQ ID NO: 90723 - RNA, 24 nt, Artificial Sequence
  Synthetic
  misc_feature (5)..(5): n is a, c, g, or u
ucacncugggaucuugcagaguuu

SEQ ID NO: 90724 - RNA, 18 nt, Artificial Sequence
  Synthetic
gccugaggaugaguguuu

SEQ ID NO: 90725 - RNA, 19 nt, Artificial Sequence
  Synthetic
ggccugaggaugaguguuu

SEQ ID NO: 90726 - RNA, 20 nt, Artificial Sequence
  Synthetic
uggccugaggaugaguguuu

SEQ ID NO: 90727 - RNA, 21 nt, Artificial Sequence
  Synthetic
auggccugaggaugaguguuu

SEQ ID NO: 90728 - RNA, 22 nt, Artificial Sequence
  Synthetic
cauggccugaggaugaguguuu

SEQ ID NO: 90729 - RNA, 23 nt, Artificial Sequence
  Synthetic
gcauggccugaggaugaguguuu

SEQ ID NO: 90730 - RNA, 24 nt, Artificial Sequence
  Synthetic
ugcauggccugaggaugaguguuu

SEQ ID NO: 90731 - RNA, 18 nt, Artificial Sequence
  Synthetic
cacucccauaggaauuuu

SEQ ID NO: 90732 - RNA, 19 nt, Artificial Sequence
  Synthetic
ccacucccauaggaauuuu

SEQ ID NO: 90733 - RNA, 20 nt, Artificial Sequence
  Synthetic
cccacucccauaggaauuuu

SEQ ID NO: 90734 - RNA, 21 nt, Artificial Sequence
  Synthetic
gcccacucccauaggaauuuu

SEQ ID NO: 90735 - RNA, 22 nt, Artificial Sequence
  Synthetic
ggcccacucccauaggaauuuu

SEQ ID NO: 90736 - RNA, 23 nt, Artificial Sequence
  Synthetic
aggcccacucccauaggaauuuu

SEQ ID NO: 90737 - RNA, 24 nt, Artificial Sequence
  Synthetic
gaggcccacucccauaggaauuuu

SEQ ID NO: 90738 - RNA, 18 nt, Artificial Sequence
  Synthetic
cuguuaacaggaaguuuu

SEQ ID NO: 90739 - RNA, 19 nt, Artificial Sequence
  Synthetic
ccuguuaacaggaaguuuu

SEQ ID NO: 90740 - RNA, 20 nt, Artificial Sequence
  Synthetic
gccuguuaacaggaaguuuu

SEQ ID NO: 90741 - RNA, 21 nt, Artificial Sequence
  Synthetic
ggccuguuaacaggaaguuuu

SEQ ID NO: 90742 - RNA, 22 nt, Artificial Sequence
  Synthetic
aggccuguuaacaggaaguuuu

SEQ ID NO: 90743 - RNA, 23 nt, Artificial Sequence
  Synthetic
uaggccuguuaacaggaaguuuu

SEQ ID NO: 90744 - RNA, 24 nt, Artificial Sequence
  Synthetic
auaggccuguuaacaggaaguuuu

SEQ ID NO: 90745 - RNA, 18 nt, Artificial Sequence
  Synthetic
  misc_feature (13)..(13): n is a, c, g, or u
accccaucuuuunguuuu

SEQ ID NO: 90746 - RNA, 19 nt, Artificial Sequence
  Synthetic
  misc_feature (14)..(14): n is a, c, g, or u
aaccccaucuuuunguuuu

SEQ ID NO: 90747 - RNA, 20 nt, Artificial Sequence
  Synthetic
  misc_feature (15)..(15): n is a, c, g, or u
uaaccccaucuuuunguuuu

SEQ ID NO: 90748 - RNA, 21 nt, Artificial Sequence
  Synthetic
  misc_feature (16)..(16): n is a, c, g, or u
guaaccccaucuuuunguuuu

SEQ ID NO: 90749 - RNA, 22 nt, Artificial Sequence
  Synthetic
  misc_feature (17)..(17): n is a, c, g, or u
aguaaccccaucuuuunguuuu

SEQ ID NO: 90750 - RNA, 23 nt, Artificial Sequence
  Synthetic
  misc_feature (18)..(18): n is a, c, g, or u
gaguaaccccaucuuuunguuuu

SEQ ID NO: 90751 - RNA, 24 nt, Artificial Sequence
  Synthetic
  misc_feature (19)..(19): n is a, c, g, or u
agaguaaccccaucuuuunguuuu

SEQ ID NO: 90752 - RNA, 18 nt, Artificial Sequence
  Synthetic
  misc_feature (9)..(9): n is a, c, g, or u
caagacaunaucaaaaaa

SEQ ID NO: 90753 - RNA, 19 nt, Artificial Sequence
  Synthetic
  misc_feature (10)..(10): n is a, c, g, or u
ccaagacaunaucaaaaaa

SEQ ID NO: 90754 - RNA, 20 nt, Artificial Sequence
  Synthetic
  misc_feature (11)..(11): n is a, c, g, or u
accaagacaunaucaaaaaa

SEQ ID NO: 90755 - RNA, 21 nt, Artificial Sequence
  Synthetic
  misc_feature (12)..(12): n is a, c, g, or u
caccaagacaunaucaaaaaa

SEQ ID NO: 90756 - RNA, 22 nt, Artificial Sequence
  Synthetic
  misc_feature (13)..(13): n is a, c, g, or u
acaccaagacaunaucaaaaaa

SEQ ID NO: 90757 - RNA, 23 nt, Artificial Sequence
  Synthetic
  misc_feature (14)..(14): n is a, c, g, or u
uacaccaagacaunaucaaaaaa

SEQ ID NO: 90758 - RNA, 24 nt, Artificial Sequence
  Synthetic
  misc_feature (15)..(15): n is a, c, g, or u
uuacaccaagacaunaucaaaaaa

SEQ ID NO: 90759 - RNA, 18 nt, Artificial Sequence
  Synthetic
auuuaaacccuaacaaaa

SEQ ID NO: 90760 - RNA, 19 nt, Artificial Sequence
  Synthetic
cauuuaaacccuaacaaaa

SEQ ID NO: 90761 - RNA, 20 nt, Artificial Sequence
  Synthetic
acauuuaaacccuaacaaaa

SEQ ID NO: 90762 - RNA, 21 nt, Artificial Sequence
  Synthetic
uacauuuaaacccuaacaaaa

SEQ ID NO: 90763 - RNA, 22 nt, Artificial Sequence
  Synthetic
auacauuuaaacccuaacaaaa

SEQ ID NO: 90764 - RNA, 23 nt, Artificial Sequence
  Synthetic
uauacauuuaaacccuaacaaaa

SEQ ID NO: 90765 - RNA, 24 nt, Artificial Sequence
  Synthetic
guauacauuuaaacccuaacaaaa

SEQ ID NO: 90766 - RNA, 18 nt, Artificial Sequence
  Synthetic
  misc_feature (2)..(2): n is a, c, g, or u
  misc_feature (10)..(10): n is a, c, g, or u
  misc_feature (14)..(14): n is a, c, g, or u
ancacaucanacanaaaa

SEQ ID NO: 90767 - RNA, 19 nt, Artificial Sequence
  Synthetic
  misc_feature (3)..(3): n is a, c, g, or u
  misc_feature (11)..(11): n is a, c, g, or u
  misc_feature (15)..(15): n is a, c, g, or u
gancacaucanacanaaaa

SEQ ID NO: 90768 - RNA, 20 nt, Artificial Sequence
  Synthetic
  misc_feature (4)..(4): n is a, c, g, or u
  misc_feature (12)..(12): n is a, c, g, or u
  misc_feature (16)..(16): n is a, c, g, or u
agancacaucanacanaaaa

SEQ ID NO: 90769 - RNA, 21 nt, Artificial Sequence
  Synthetic
  misc_feature (5)..(5): n is a, c, g, or u
  misc_feature (13)..(13): n is a, c, g, or u
  misc_feature (17)..(17): n is a, c, g, or u
aagancacaucanacanaaaa

SEQ ID NO: 90770 - RNA, 22 nt, Artificial Sequence
  Synthetic
  misc_feature (6)..(6): n is a, c, g, or u
  misc_feature (14)..(14): n is a, c, g, or u
  misc_feature (18)..(18): n is a, c, g, or u
caagancacaucanacanaaaa

SEQ ID NO: 90771 - RNA, 23 nt, Artificial Sequence
  Synthetic
  misc_feature (7)..(7): n is a, c, g, or u
  misc_feature (15)..(15): n is a, c, g, or u
  misc_feature (19)..(19): n is a, c, g, or u
acaagancacaucanacanaaaa

SEQ ID NO: 90772 - RNA, 24 nt, Artificial Sequence
  Synthetic
  misc_feature (8)..(8): n is a, c, g, or u
  misc_feature (16)..(16): n is a, c, g, or u
  misc_feature (20)..(20): n is a, c, g, or u
cacaagancacaucanacanaaaa

SEQ ID NO: 90773 - RNA, 18 nt, Artificial Sequence
  Synthetic
  misc_feature (14)..(14): n is a, c, g, or u
acccuaacaaaacnaaaa

SEQ ID NO: 90774 - RNA, 19 nt, Artificial Sequence
  Synthetic
  misc_feature (15)..(15): n is a, c, g, or u
aacccuaacaaaacnaaaa

SEQ ID NO: 90775 - RNA, 20 nt, Artificial Sequence
  Synthetic
  misc_feature (16)..(16): n is a, c, g, or u
aaacccuaacaaaacnaaaa

SEQ ID NO: 90776 - RNA, 21 nt, Artificial Sequence
  Synthetic
  misc_feature (17)..(17): n is a, c, g, or u
uaaacccuaacaaaacnaaaa

SEQ ID NO: 90777 - RNA, 22 nt, Artificial Sequence
  Synthetic
  misc_feature (18)..(18): n is a, c, g, or u
uuaaacccuaacaaaacnaaaa

SEQ ID NO: 90778 - RNA, 23 nt, Artificial Sequence
  Synthetic
  misc_feature (19)..(19): n is a, c, g, or u
uuuaaacccuaacaaaacnaaaa

SEQ ID NO: 90779 - RNA, 24 nt, Artificial Sequence
  Synthetic
  misc_feature (20)..(20): n is a, c, g, or u
auuuaaacccuaacaaaacnaaaa

SEQ ID NO: 90780 - RNA, 18 nt, Artificial Sequence
  Synthetic
cauuuaaacccuaacaaa

SEQ ID NO: 90781 - RNA, 19 nt, Artificial Sequence
  Synthetic
acauuuaaacccuaacaaa

SEQ ID NO: 90782 - RNA, 20 nt, Artificial Sequence
  Synthetic
uacauuuaaacccuaacaaa

SEQ ID NO: 90783 - RNA, 21 nt, Artificial Sequence
  Synthetic
auacauuuaaacccuaacaaa

SEQ ID NO: 90784 - RNA, 22 nt, Artificial Sequence
  Synthetic
uauacauuuaaacccuaacaaa

SEQ ID NO: 90785 - RNA, 23 nt, Artificial Sequence
  Synthetic
guauacauuuaaacccuaacaaa

SEQ ID NO: 90786 - RNA, 24 nt, Artificial Sequence
  Synthetic
gguauacauuuaaacccuaacaaa

SEQ ID NO: 90787 - RNA, 18 nt, Artificial Sequence
  Synthetic
uuaaucauuacuuccaaa

SEQ ID NO: 90788 - RNA, 19 nt, Artificial Sequence
  Synthetic
guuaaucauuacuuccaaa

SEQ ID NO: 90789 - RNA, 20 nt, Artificial Sequence
  Synthetic
aguuaaucauuacuuccaaa

SEQ ID NO: 90790 - RNA, 21 nt, Artificial Sequence
  Synthetic
uaguuaaucauuacuuccaaa

SEQ ID NO: 90791 - RNA, 22 nt, Artificial Sequence
  Synthetic
cuaguuaaucauuacuuccaaa

SEQ ID NO: 90792 - RNA, 23 nt, Artificial Sequence
  Synthetic
ucuaguuaaucauuacuuccaaa

SEQ ID NO: 90793 - RNA, 24 nt, Artificial Sequence
  Synthetic
aucuaguuaaucauuacuuccaaa

SEQ ID NO: 90794 - RNA, 18 nt, Artificial Sequence
  Synthetic
cagagcaaacaccgcaaa

SEQ ID NO: 90795 - RNA, 19 nt, Artificial Sequence
  Synthetic
ucagagcaaacaccgcaaa

SEQ ID NO: 90796 - RNA, 20 nt, Artificial Sequence
  Synthetic
uucagagcaaacaccgcaaa

SEQ ID NO: 90797 - RNA, 21 nt, Artificial Sequence
  Synthetic
cuucagagcaaacaccgcaaa

SEQ ID NO: 90798 - RNA, 22 nt, Artificial Sequence
  Synthetic
ccuucagagcaaacaccgcaaa

SEQ ID NO: 90799 - RNA, 23 nt, Artificial Sequence
  Synthetic
gccuucagagcaaacaccgcaaa

SEQ ID NO: 90800 - RNA, 24 nt, Artificial Sequence
  Synthetic
agccuucagagcaaacaccgcaaa

SEQ ID NO: 90801 - RNA, 18 nt, Artificial Sequence
  Synthetic
  misc_feature (9)..(9): n is a, c, g, or u
cucacagunaaugagaaa

SEQ ID NO: 90802 - RNA, 19 nt, Artificial Sequence
  Synthetic
  misc_feature (10)..(10): n is a, c, g, or u
acucacagunaaugagaaa

SEQ ID NO: 90803 - RNA, 20 nt, Artificial Sequence
  Synthetic
  misc_feature (11)..(11): n is a, c, g, or u
cacucacagunaaugagaaa

SEQ ID NO: 90804 - RNA, 21 nt, Artificial Sequence
  Synthetic
  misc_feature (12)..(12): n is a, c, g, or u
ccacucacagunaaugagaaa

SEQ ID NO: 90805 - RNA, 22 nt, Artificial Sequence
  Synthetic
  misc_feature (1)..(1): n is a, c, g, or u
  misc_feature (13)..(13): n is a, c, g, or u
nccacucacagunaaugagaaa

SEQ ID NO: 90806 - RNA, 23 nt, Artificial Sequence
  Synthetic
  misc_feature (2)..(2): n is a, c, g, or u
  misc_feature (14)..(14): n is a, c, g, or u
gnccacucacagunaaugagaaa

SEQ ID NO: 90807 - RNA, 24 nt, Artificial Sequence
  Synthetic
  misc_feature (3)..(3): n is a, c, g, or u
  misc_feature (15)..(15): n is a, c, g, or u
ggnccacucacagunaaugagaaa

SEQ ID NO: 90808 - RNA, 18 nt, Artificial Sequence
  Synthetic
  misc_feature (3)..(3): n is a, c, g, or u
  misc_feature (11)..(11): n is a, c, g, or u
  misc_feature (15)..(15): n is a, c, g, or u
gancacaucanacanaaa

SEQ ID NO: 90809 - RNA, 19 nt, Artificial Sequence
  Synthetic
  misc_feature (4)..(4): n is a, c, g, or u
  misc_feature (12)..(12): n is a, c, g, or u
  misc_feature (16)..(16): n is a, c, g, or u
agancacaucanacanaaa

SEQ ID NO: 90810 - RNA, 20 nt, Artificial Sequence
  Synthetic
  misc_feature (5)..(5): n is a, c, g, or u
  misc_feature (13)..(13): n is a, c, g, or u
  misc_feature (17)..(17): n is a, c, g, or u
aagancacaucanacanaaa

SEQ ID NO: 90811 - RNA, 21 nt, Artificial Sequence
  Synthetic
  misc_feature (6)..(6): n is a, c, g, or u
  misc_feature (14)..(14): n is a, c, g, or u
  misc_feature (18)..(18): n is a, c, g, or u
caagancacaucanacanaaa

SEQ ID NO: 90812 - RNA, 22 nt, Artificial Sequence
  Synthetic
  misc_feature (7)..(7): n is a, c, g, or u
  misc_feature (15)..(15): n is a, c, g, or u
  misc_feature (19)..(19): n is a, c, g, or u
acaagancacaucanacanaaa

SEQ ID NO: 90813 - RNA, 23 nt, Artificial Sequence
  Synthetic
  misc_feature (8)..(8): n is a, c, g, or u
  misc_feature (16)..(16): n is a, c, g, or u
  misc_feature (20)..(20): n is a, c, g, or u
cacaagancacaucanacanaaa

SEQ ID NO: 90814 - RNA, 24 nt, Artificial Sequence
  Synthetic
  misc_feature (9)..(9): n is a, c, g, or u
  misc_feature (17)..(17): n is a, c, g, or u
  misc_feature (21)..(21): n is a, c, g, or u
ccacaagancacaucanacanaaa

SEQ ID NO: 90815 - RNA, 18 nt, Artificial Sequence
  Synthetic
cuggccagacgccaacaa

SEQ ID NO: 90816 - RNA, 19 nt, Artificial Sequence
  Synthetic
ccuggccagacgccaacaa

SEQ ID NO: 90817 - RNA, 20 nt, Artificial Sequence
  Synthetic
accuggccagacgccaacaa

SEQ ID NO: 90818 - RNA, 21 nt, Artificial Sequence
  Synthetic
caccuggccagacgccaacaa

SEQ ID NO: 90819 - RNA, 22 nt, Artificial Sequence
  Synthetic
acaccuggccagacgccaacaa

SEQ ID NO: 90820 - RNA, 23 nt, Artificial Sequence
  Synthetic
gacaccuggccagacgccaacaa

SEQ ID NO: 90821 - RNA, 24 nt, Artificial Sequence
  Synthetic
ggacaccuggccagacgccaacaa

SEQ ID NO: 90822 - RNA, 18 nt, Artificial Sequence
  Synthetic
uugggacuucaaucccaa

SEQ ID NO: 90823 - RNA, 19 nt, Artificial Sequence
  Synthetic
auugggacuucaaucccaa

SEQ ID NO: 90824 - RNA, 20 nt, Artificial Sequence
  Synthetic
gauugggacuucaaucccaa

SEQ ID NO: 90825 - RNA, 21 nt, Artificial Sequence
  Synthetic
agauugggacuucaaucccaa

SEQ ID NO: 90826 - RNA, 22 nt, Artificial Sequence
  Synthetic
cagauugggacuucaaucccaa

SEQ ID NO: 90827 - RNA, 23 nt, Artificial Sequence
  Synthetic
ccagauugggacuucaaucccaa

SEQ ID NO: 90828 - RNA, 24 nt, Artificial Sequence
  Synthetic
uccagauugggacuucaaucccaa

SEQ ID NO: 90829 - RNA, 18 nt, Artificial Sequence
  Synthetic
guuaaucauuacuuccaa

SEQ ID NO: 90830 - RNA, 19 nt, Artificial Sequence
  Synthetic
aguuaaucauuacuuccaa

SEQ ID NO: 90831 - RNA, 20 nt, Artificial Sequence
  Synthetic
uaguuaaucauuacuuccaa

SEQ ID NO: 90832 - RNA, 21 nt, Artificial Sequence
  Synthetic
cuaguuaaucauuacuuccaa

SEQ ID NO: 90833 - RNA, 22 nt, Artificial Sequence
  Synthetic
ucuaguuaaucauuacuuccaa

SEQ ID NO: 90834 - RNA, 23 nt, Artificial Sequence
  Synthetic
aucuaguuaaucauuacuuccaa

SEQ ID NO: 90835 - RNA, 24 nt, Artificial Sequence
  Synthetic
caucuaguuaaucauuacuuccaa

SEQ ID NO: 90836 - RNA, 18 nt, Artificial Sequence
  Synthetic
  misc_feature (6)..(6): n is a, c, g, or u
auuganccuuauaaagaa

SEQ ID NO: 90837 - RNA, 19 nt, Artificial Sequence
  Synthetic
  misc_feature (7)..(7): n is a, c, g, or u
cauuganccuuauaaagaa

SEQ ID NO: 90838 - RNA, 20 nt, Artificial Sequence
  Synthetic
  misc_feature (8)..(8): n is a, c, g, or u
acauuganccuuauaaagaa

SEQ ID NO: 90839 - RNA, 21 nt, Artificial Sequence
  Synthetic
  misc_feature (9)..(9): n is a, c, g, or u
gacauuganccuuauaaagaa

SEQ ID NO: 90840 - RNA, 22 nt, Artificial Sequence
  Synthetic
  misc_feature (10)..(10): n is a, c, g, or u
ggacauuganccuuauaaagaa

SEQ ID NO: 90841 - RNA, 23 nt, Artificial Sequence
  Synthetic
  misc_feature (11)..(11): n is a, c, g, or u
uggacauuganccuuauaaagaa

SEQ ID NO: 90842 - RNA, 24 nt, Artificial Sequence
  Synthetic
  misc_feature (12)..(12): n is a, c, g, or u
auggacauuganccuuauaaagaa

SEQ ID NO: 90843 - RNA, 18 nt, Artificial Sequence
  Synthetic
  misc_feature (10)..(10): n is a, c, g, or u
acucacagunaaugagaa

SEQ ID NO: 90844 - RNA, 19 nt, Artificial Sequence
  Synthetic
  misc_feature (11)..(11): n is a, c, g, or u
cacucacagunaaugagaa

SEQ ID NO: 90845 - RNA, 20 nt, Artificial Sequence
  Synthetic
  misc_feature (12)..(12): n is a, c, g, or u
ccacucacagunaaugagaa

SEQ ID NO: 90846 - RNA, 21 nt, Artificial Sequence
  Synthetic
  misc_feature (1)..(1): n is a, c, g, or u
  misc_feature (13)..(13): n is a, c, g, or u
nccacucacagunaaugagaa

SEQ ID NO: 90847 - RNA, 22 nt, Artificial Sequence
  Synthetic
  misc_feature (2)..(2): n is a, c, g, or u
  misc_feature (14)..(14): n is a, c, g, or u
gnccacucacagunaaugagaa

SEQ ID NO: 90848 - RNA, 23 nt, Artificial Sequence
  Synthetic
  misc_feature (3)..(3): n is a, c, g, or u
  misc_feature (15)..(15): n is a, c, g, or u
ggnccacucacagunaaugagaa

SEQ ID NO: 90849 - RNA, 24 nt, Artificial Sequence
  Synthetic
  misc_feature (4)..(4): n is a, c, g, or u
  misc_feature (16)..(16): n is a, c, g, or u
aggnccacucacagunaaugagaa

SEQ ID NO: 90850 - RNA, 18 nt, Artificial Sequence
  Synthetic
gaggcagguccccuagaa

SEQ ID NO: 90851 - RNA, 19 nt, Artificial Sequence
  Synthetic
cgaggcagguccccuagaa

SEQ ID NO: 90852 - RNA, 20 nt, Artificial Sequence
  Synthetic
acgaggcagguccccuagaa

SEQ ID NO: 90853 - RNA, 21 nt, Artificial Sequence
  Synthetic
gacgaggcagguccccuagaa

SEQ ID NO: 90854 - RNA, 22 nt, Artificial Sequence
  Synthetic
cgacgaggcagguccccuagaa

SEQ ID NO: 90855 - RNA, 23 nt, Artificial Sequence
  Synthetic
acgacgaggcagguccccuagaa

SEQ ID NO: 90856 - RNA, 24 nt, Artificial Sequence
  Synthetic
gacgacgaggcagguccccuagaa

SEQ ID NO: 90857 - RNA, 18 nt, Artificial Sequence
  Synthetic
ccaaucgccagucaggaa

SEQ ID NO: 90858 - RNA, 19 nt, Artificial Sequence
  Synthetic
accaaucgccagucaggaa

SEQ ID NO: 90859 - RNA, 20 nt, Artificial Sequence
  Synthetic
  misc_feature (1)..(1): n is a, c, g, or u
naccaaucgccagucaggaa

SEQ ID NO: 90860 - RNA, 21 nt, Artificial Sequence
  Synthetic
  misc_feature (2)..(2): n is a, c, g, or u
cnaccaaucgccagucaggaa

SEQ ID NO: 90861 - RNA, 22 nt, Artificial Sequence
  Synthetic
  misc_feature (3)..(3): n is a, c, g, or u
ucnaccaaucgccagucaggaa

SEQ ID NO: 90862 - RNA, 23 nt, Artificial Sequence
  Synthetic
  misc_feature (1)..(1): n is a, c, g, or u
  misc_feature (4)..(4): n is a, c, g, or u
nucnaccaaucgccagucaggaa

SEQ ID NO: 90863 - RNA, 24 nt, Artificial Sequence
  Synthetic
  misc_feature (2)..(2): n is a, c, g, or u
  misc_feature (5)..(5): n is a, c, g, or u
cnucnaccaaucgccagucaggaa

SEQ ID NO: 90864 - RNA, 18 nt, Artificial Sequence
  Synthetic
ucaccauauucuugggaa

SEQ ID NO: 90865 - RNA, 19 nt, Artificial Sequence
  Synthetic
gucaccauauucuugggaa

SEQ ID NO: 90866 - RNA, 20 nt, Artificial Sequence
  Synthetic
ggucaccauauucuugggaa

SEQ ID NO: 90867 - RNA, 21 nt, Artificial Sequence
  Synthetic
gggucaccauauucuugggaa

SEQ ID NO: 90868 - RNA, 22 nt, Artificial Sequence
  Synthetic
ugggucaccauauucuugggaa

SEQ ID NO: 90869 - RNA, 23 nt, Artificial Sequence
  Synthetic
gugggucaccauauucuugggaa

SEQ ID NO: 90870 - RNA, 24 nt, Artificial Sequence
  Synthetic
ugugggucaccauauucuugggaa

SEQ ID NO: 90871 - RNA, 18 nt, Artificial Sequence
  Synthetic
uuuacacacucuauggaa

SEQ ID NO: 90872 - RNA, 19 nt, Artificial Sequence
  Synthetic
auuuacacacucuauggaa

SEQ ID NO: 90873 - RNA, 20 nt, Artificial Sequence
  Synthetic
uauuuacacacucuauggaa

SEQ ID NO: 90874 - RNA, 21 nt, Artificial Sequence
  Synthetic
  misc_feature (1)..(1): n is a, c, g, or u
nuauuuacacacucuauggaa

SEQ ID NO: 90875 - RNA, 22 nt, Artificial Sequence
  Synthetic
  misc_feature (2)..(2): n is a, c, g, or u
anuauuuacacacucuauggaa

SEQ ID NO: 90876 - RNA, 23 nt, Artificial Sequence
  Synthetic
  misc_feature (3)..(3): n is a, c, g, or u
canuauuuacacacucuauggaa

SEQ ID NO: 90877 - RNA, 24 nt, Artificial Sequence
  Synthetic
  misc_feature (4)..(4): n is a, c, g, or u
acanuauuuacacacucuauggaa

SEQ ID NO: 90878 - RNA, 18 nt, Artificial Sequence
  Synthetic
cuugucucacuuuuggaa

SEQ ID NO: 90879 - RNA, 19 nt, Artificial Sequence
  Synthetic
ucuugucucacuuuuggaa

SEQ ID NO: 90880 - RNA, 20 nt, Artificial Sequence
  Synthetic
uucuugucucacuuuuggaa

SEQ ID NO: 90881 - RNA, 21 nt, Artificial Sequence
  Synthetic
uuucuugucucacuuuuggaa

SEQ ID NO: 90882 - RNA, 22 nt, Artificial Sequence
  Synthetic
auuucuugucucacuuuuggaa

SEQ ID NO: 90883 - RNA, 23 nt, Artificial Sequence
  Synthetic
cauuucuugucucacuuuuggaa

SEQ ID NO: 90884 - RNA, 24 nt, Artificial Sequence
  Synthetic
acauuucuugucucacuuuuggaa

SEQ ID NO: 90885 - RNA, 18 nt, Artificial Sequence
  Synthetic
uggggacccugcgcugaa

SEQ ID NO: 90886 - RNA, 19 nt, Artificial Sequence
  Synthetic
uuggggacccugcgcugaa

SEQ ID NO: 90887 - RNA, 20 nt, Artificial Sequence
  Synthetic
auuggggacccugcgcugaa

SEQ ID NO: 90888 - RNA, 21 nt, Artificial Sequence
  Synthetic
gauuggggacccugcgcugaa

SEQ ID NO: 90889 - RNA, 22 nt, Artificial Sequence
  Synthetic
ggauuggggacccugcgcugaa

SEQ ID NO: 90890 - RNA, 23 nt, Artificial Sequence
  Synthetic
aggauuggggacccugcgcugaa

SEQ ID NO: 90891 - RNA, 24 nt, Artificial Sequence
  Synthetic
gaggauuggggacccugcgcugaa

SEQ ID NO: 90892 - RNA, 18 nt, Artificial Sequence
  Synthetic
  misc_feature (4)..(4): n is a, c, g, or u
  misc_feature (16)..(16): n is a, c, g, or u
aggnccacucacagunaa

SEQ ID NO: 90893 - RNA, 19 nt, Artificial Sequence
  Synthetic
  misc_feature (5)..(5): n is a, c, g, or u
  misc_feature (17)..(17): n is a, c, g, or u
uaggnccacucacagunaa

SEQ ID NO: 90894 - RNA, 20 nt, Artificial Sequence
  Synthetic
  misc_feature (6)..(6): n is a, c, g, or u
  misc_feature (18)..(18): n is a, c, g, or u
guaggnccacucacagunaa

SEQ ID NO: 90895 - RNA, 21 nt, Artificial Sequence
  Synthetic
  misc_feature (7)..(7): n is a, c, g, or u
  misc_feature (19)..(19): n is a, c, g, or u
uguaggnccacucacagunaa

SEQ ID NO: 90896 - RNA, 22 nt, Artificial Sequence
  Synthetic
  misc_feature (8)..(8): n is a, c, g, or u
  misc_feature (20)..(20): n is a, c, g, or u
uuguaggnccacucacagunaa

SEQ ID NO: 90897 - RNA, 23 nt, Artificial Sequence
  Synthetic
  misc_feature (9)..(9): n is a, c, g, or u
  misc_feature (21)..(21): n is a, c, g, or u
uuuguaggnccacucacagunaa

SEQ ID NO: 90898 - RNA, 24 nt, Artificial Sequence
  Synthetic
  misc_feature (1)..(1): n is a, c, g, or u
  misc_feature (10)..(10): n is a, c, g, or u
  misc_feature (22)..(22): n is a, c, g, or u
nuuuguaggnccacucacagunaa

SEQ ID NO: 90899 - RNA, 18 nt, Artificial Sequence
  Synthetic
gcccaaggucuuacauaa

SEQ ID NO: 90900 - RNA, 19 nt, Artificial Sequence
  Synthetic
ugcccaaggucuuacauaa

SEQ ID NO: 90901 - RNA, 20 nt, Artificial Sequence
  Synthetic
uugcccaaggucuuacauaa

SEQ ID NO: 90902 - RNA, 21 nt, Artificial Sequence
  Synthetic
cuugcccaaggucuuacauaa

SEQ ID NO: 90903 - RNA, 22 nt, Artificial Sequence
  Synthetic
ucuugcccaaggucuuacauaa

SEQ ID NO: 90904 - RNA, 23 nt, Artificial Sequence
  Synthetic
  misc_feature (1)..(1): n is a, c, g, or u
nucuugcccaaggucuuacauaa

SEQ ID NO: 90905 - RNA, 24 nt, Artificial Sequence
  Synthetic
  misc_feature (1)..(2): n is a, c, g, or u
nnucuugcccaaggucuuacauaa

SEQ ID NO: 90906 - RNA, 18 nt, Artificial Sequence
  Synthetic
uauuccuuggacucauaa

SEQ ID NO: 90907 - RNA, 19 nt, Artificial Sequence
  Synthetic
guauuccuuggacucauaa

SEQ ID NO: 90908 - RNA, 20 nt, Artificial Sequence
  Synthetic
aguauuccuuggacucauaa

SEQ ID NO: 90909 - RNA, 21 nt, Artificial Sequence
  Synthetic
uaguauuccuuggacucauaa

SEQ ID NO: 90910 - RNA, 22 nt, Artificial Sequence
  Synthetic
uuaguauuccuuggacucauaa

SEQ ID NO: 90911 - RNA, 23 nt, Artificial Sequence
  Synthetic
guuaguauuccuuggacucauaa

SEQ ID NO: 90912 - RNA, 24 nt, Artificial Sequence
  Synthetic
uguuaguauuccuuggacucauaa

SEQ ID NO: 90913 - RNA, 18 nt, Artificial Sequence
  Synthetic
ggcggguauauuauauaa

SEQ ID NO: 90914 - RNA, 19 nt, Artificial Sequence
  Synthetic
aggcggguauauuauauaa

SEQ ID NO: 90915 - RNA, 20 nt, Artificial Sequence
  Synthetic
aaggcggguauauuauauaa

SEQ ID NO: 90916 - RNA, 21 nt, Artificial Sequence
  Synthetic
gaaggcggguauauuauauaa

SEQ ID NO: 90917 - RNA, 22 nt, Artificial Sequence
  Synthetic
ggaaggcggguauauuauauaa

SEQ ID NO: 90918 - RNA, 23 nt, Artificial Sequence
  Synthetic
uggaaggcggguauauuauauaa

SEQ ID NO: 90919 - RNA, 24 nt, Artificial Sequence
  Synthetic
auggaaggcggguauauuauauaa

SEQ ID NO: 90920 - RNA, 18 nt, Artificial Sequence
  Synthetic
  misc_feature (10)..(10): n is a, c, g, or u
caguuaugunaacacuaa

SEQ ID NO: 90921 - RNA, 19 nt, Artificial Sequence
  Synthetic
  misc_feature (11)..(11): n is a, c, g, or u
ucaguuaugunaacacuaa

SEQ ID NO: 90922 - RNA, 20 nt, Artificial Sequence
  Synthetic
  misc_feature (12)..(12): n is a, c, g, or u
gucaguuaugunaacacuaa

SEQ ID NO: 90923 - RNA, 21 nt, Artificial Sequence
  Synthetic
  misc_feature (13)..(13): n is a, c, g, or u
agucaguuaugunaacacuaa

SEQ ID NO: 90924 - RNA, 22 nt, Artificial Sequence
  Synthetic
  misc_feature (14)..(14): n is a, c, g, or u
uagucaguuaugunaacacuaa

SEQ ID NO: 90925 - RNA, 23 nt, Artificial Sequence
  Synthetic
  misc_feature (15)..(15): n is a, c, g, or u
guagucaguuaugunaacacuaa

SEQ ID NO: 90926 - RNA, 24 nt, Artificial Sequence
  Synthetic
  misc_feature (16)..(16): n is a, c, g, or u
aguagucaguuaugunaacacuaa

SEQ ID NO: 90927 - RNA, 18 nt, Artificial Sequence
  Synthetic
uauacauuuaaacccuaa

SEQ ID NO: 90928 - RNA, 19 nt, Artificial Sequence
  Synthetic
guauacauuuaaacccuaa

SEQ ID NO: 90929 - RNA, 20 nt, Artificial Sequence
  Synthetic
gguauacauuuaaacccuaa

SEQ ID NO: 90930 - RNA, 21 nt, Artificial Sequence
  Synthetic
ggguauacauuuaaacccuaa

SEQ ID NO: 90931 - RNA, 22 nt, Artificial Sequence
  Synthetic
uggguauacauuuaaacccuaa

SEQ ID NO: 90932 - RNA, 23 nt, Artificial Sequence
  Synthetic
uuggguauacauuuaaacccuaa

SEQ ID NO: 90933 - RNA, 24 nt, Artificial Sequence
  Synthetic
uuuggguauacauuuaaacccuaa

SEQ ID NO: 90934 - RNA, 18 nt, Artificial Sequence
  Synthetic
  misc_feature (4)..(4): n is a, c, g, or u
  misc_feature (13)..(13): n is a, c, g, or u
ugcnuguauucanucuaa

SEQ ID NO: 90935 - RNA, 19 nt, Artificial Sequence
  Synthetic
  misc_feature (5)..(5): n is a, c, g, or u
  misc_feature (14)..(14): n is a, c, g, or u
augcnuguauucanucuaa

SEQ ID NO: 90936 - RNA, 20 nt, Artificial Sequence
  Synthetic
  misc_feature (6)..(6): n is a, c, g, or u
  misc_feature (15)..(15): n is a, c, g, or u
uaugcnuguauucanucuaa

SEQ ID NO: 90937 - RNA, 21 nt, Artificial Sequence
  Synthetic
  misc_feature (7)..(7): n is a, c, g, or u
  misc_feature (16)..(16): n is a, c, g, or u
guaugcnuguauucanucuaa

SEQ ID NO: 90938 - RNA, 22 nt, Artificial Sequence
  Synthetic
  misc_feature (8)..(8): n is a, c, g, or u
  misc_feature (17)..(17): n is a, c, g, or u
uguaugcnuguauucanucuaa

SEQ ID NO: 90939 - RNA, 23 nt, Artificial Sequence
  Synthetic
  misc_feature (9)..(9): n is a, c, g, or u
  misc_feature (18)..(18): n is a, c, g, or u
uuguaugcnuguauucanucuaa

SEQ ID NO: 90940 - RNA, 24 nt, Artificial Sequence
  Synthetic
  misc_feature (1)..(1): n is a, c, g, or u
  misc_feature (10)..(10): n is a, c, g, or u
  misc_feature (19)..(19): n is a, c, g, or u
nuuguaugcnuguauucanucuaa

SEQ ID NO: 90941 - RNA, 18 nt, Artificial Sequence
  Synthetic
  misc_feature (1)..(1): n is a, c, g, or u
  misc_feature (15)..(15): n is a, c, g, or u
naccugggugggugnuaa

SEQ ID NO: 90942 - RNA, 19 nt, Artificial Sequence
  Synthetic
  misc_feature (2)..(2): n is a, c, g, or u
  misc_feature (16)..(16): n is a, c, g, or u
cnaccugggugggugnuaa

SEQ ID NO: 90943 - RNA, 20 nt, Artificial Sequence
  Synthetic
  misc_feature (3)..(3): n is a, c, g, or u
  misc_feature (17)..(17): n is a, c, g, or u
gcnaccugggugggugnuaa

SEQ ID NO: 90944 - RNA, 21 nt, Artificial Sequence
  Synthetic
  misc_feature (4)..(4): n is a, c, g, or u
  misc_feature (18)..(18): n is a, c, g, or u
agcnaccugggugggugnuaa

SEQ ID NO: 90945 - RNA, 22 nt, Artificial Sequence
  Synthetic
  misc_feature (5)..(5): n is a, c, g, or u
  misc_feature (19)..(19): n is a, c, g, or u
uagcnaccugggugggugnuaa

SEQ ID NO: 90946 - RNA, 23 nt, Artificial Sequence
  Synthetic
  misc_feature (6)..(6): n is a, c, g, or u
  misc_feature (20)..(20): n is a, c, g, or u
cuagcnaccugggugggugnuaa

SEQ ID NO: 90947 - RNA, 24 nt, Artificial Sequence
  Synthetic
  misc_feature (7)..(7): n is a, c, g, or u
  misc_feature (21)..(21): n is a, c, g, or u
ucuagcnaccugggugggugnuaa

SEQ ID NO: 90948 - RNA, 18 nt, Artificial Sequence
  Synthetic
uauaagagagaaacaaca

SEQ ID NO: 90949 - RNA, 19 nt, Artificial Sequence
  Synthetic
auauaagagagaaacaaca

SEQ ID NO: 90950 - RNA, 20 nt, Artificial Sequence
  Synthetic
uauauaagagagaaacaaca

SEQ ID NO: 90951 - RNA, 21 nt, Artificial Sequence
  Synthetic
uuauauaagagagaaacaaca

SEQ ID NO: 90952 - RNA, 22 nt, Artificial Sequence
  Synthetic
auuauauaagagagaaacaaca

SEQ ID NO: 90953 - RNA, 23 nt, Artificial Sequence
  Synthetic
uauuauauaagagagaaacaaca

SEQ ID NO: 90954 - RNA, 24 nt, Artificial Sequence
  Synthetic
auauuauauaagagagaaacaaca

SEQ ID NO: 90955 - RNA, 18 nt, Artificial Sequence
  Synthetic
ggcuccaguucaggaaca

SEQ ID NO: 90956 - RNA, 19 nt, Artificial Sequence
  Synthetic
uggcuccaguucaggaaca

SEQ ID NO: 90957 - RNA, 20 nt, Artificial Sequence
  Synthetic
guggcuccaguucaggaaca

SEQ ID NO: 90958 - RNA, 21 nt, Artificial Sequence
  Synthetic
gguggcuccaguucaggaaca

SEQ ID NO: 90959 - RNA, 22 nt, Artificial Sequence
  Synthetic
ugguggcuccaguucaggaaca

SEQ ID NO: 90960 - RNA, 23 nt, Artificial Sequence
  Synthetic
cugguggcuccaguucaggaaca

SEQ ID NO: 90961 - RNA, 24 nt, Artificial Sequence
  Synthetic
gcugguggcuccaguucaggaaca

SEQ ID NO: 90962 - RNA, 18 nt, Artificial Sequence
  Synthetic
gggacccugcgcugaaca

SEQ ID NO: 90963 - RNA, 19 nt, Artificial Sequence
  Synthetic
ggggacccugcgcugaaca

SEQ ID NO: 90964 - RNA, 20 nt, Artificial Sequence
  Synthetic
uggggacccugcgcugaaca

SEQ ID NO: 90965 - RNA, 21 nt, Artificial Sequence
  Synthetic
uuggggacccugcgcugaaca

SEQ ID NO: 90966 - RNA, 22 nt, Artificial Sequence
  Synthetic
auuggggacccugcgcugaaca

SEQ ID NO: 90967 - RNA, 23 nt, Artificial Sequence
  Synthetic
gauuggggacccugcgcugaaca

SEQ ID NO: 90968 - RNA, 24 nt, Artificial Sequence
  Synthetic
ggauuggggacccugcgcugaaca

SEQ ID NO: 90969 - RNA, 18 nt, Artificial Sequence
  Synthetic
aacauggagaacaucaca

SEQ ID NO: 90970 - RNA, 19 nt, Artificial Sequence
  Synthetic
gaacauggagaacaucaca

SEQ ID NO: 90971 - RNA, 20 nt, Artificial Sequence
  Synthetic
ugaacauggagaacaucaca

SEQ ID NO: 90972 - RNA, 21 nt, Artificial Sequence
  Synthetic
cugaacauggagaacaucaca

SEQ ID NO: 90973 - RNA, 22 nt, Artificial Sequence
  Synthetic
gcugaacauggagaacaucaca

SEQ ID NO: 90974 - RNA, 23 nt, Artificial Sequence
  Synthetic
cgcugaacauggagaacaucaca

SEQ ID NO: 90975 - RNA, 24 nt, Artificial Sequence
  Synthetic
gcgcugaacauggagaacaucaca

SEQ ID NO: 90976 - RNA, 18 nt, Artificial Sequence
  Synthetic
ucaaucccaacaaggaca

SEQ ID NO: 90977 - RNA, 19 nt, Artificial Sequence
  Synthetic
uucaaucccaacaaggaca

SEQ ID NO: 90978 - RNA, 20 nt, Artificial Sequence
  Synthetic
cuucaaucccaacaaggaca

SEQ ID NO: 90979 - RNA, 21 nt, Artificial Sequence
  Synthetic
acuucaaucccaacaaggaca

SEQ ID NO: 90980 - RNA, 22 nt, Artificial Sequence
  Synthetic
gacuucaaucccaacaaggaca

SEQ ID NO: 90981 - RNA, 23 nt, Artificial Sequence
  Synthetic
ggacuucaaucccaacaaggaca

SEQ ID NO: 90982 - RNA, 24 nt, Artificial Sequence
  Synthetic
gggacuucaaucccaacaaggaca

SEQ ID NO: 90983 - RNA, 18 nt, Artificial Sequence
  Synthetic
uuugucuuuggguauaca

SEQ ID NO: 90984 - RNA, 19 nt, Artificial Sequence
  Synthetic
uuuugucuuuggguauaca

SEQ ID NO: 90985 - RNA, 20 nt, Artificial Sequence
  Synthetic
cuuuugucuuuggguauaca

SEQ ID NO: 90986 - RNA, 21 nt, Artificial Sequence
  Synthetic
ucuuuugucuuuggguauaca

SEQ ID NO: 90987 - RNA, 22 nt, Artificial Sequence
  Synthetic
uucuuuugucuuuggguauaca

SEQ ID NO: 90988 - RNA, 23 nt, Artificial Sequence
  Synthetic
uuucuuuugucuuuggguauaca

SEQ ID NO: 90989 - RNA, 24 nt, Artificial Sequence
  Synthetic
uuuucuuuugucuuuggguauaca

SEQ ID NO: 90990 - RNA, 18 nt, Artificial Sequence
  Synthetic
cuugcccaaggucuuaca

SEQ ID NO: 90991 - RNA, 19 nt, Artificial Sequence
  Synthetic
ucuugcccaaggucuuaca

SEQ ID NO: 90992 - RNA, 20 nt, Artificial Sequence
  Synthetic
  misc_feature (1)..(1): n is a, c, g, or u
nucuugcccaaggucuuaca

SEQ ID NO: 90993 - RNA, 21 nt, Artificial Sequence
  Synthetic
  misc_feature (1)..(2): n is a, c, g, or u
nnucuugcccaaggucuuaca

SEQ ID NO: 90994 - RNA, 22 nt, Artificial Sequence
  Synthetic
  misc_feature (2)..(3): n is a, c, g, or u
annucuugcccaaggucuuaca

SEQ ID NO: 90995 - RNA, 23 nt, Artificial Sequence
  Synthetic
  misc_feature (3)..(4): n is a, c, g, or u
cannucuugcccaaggucuuaca

SEQ ID NO: 90996 - RNA, 24 nt, Artificial Sequence
  Synthetic
  misc_feature (4)..(5): n is a, c, g, or u
ccannucuugcccaaggucuuaca

SEQ ID NO: 90997 - RNA, 18 nt, Artificial Sequence
  Synthetic
  misc_feature (7)..(7): n is a, c, g, or u
accccuncucguguuaca

SEQ ID NO: 90998 - RNA, 19 nt, Artificial Sequence
  Synthetic
  misc_feature (8)..(8): n is a, c, g, or u
gaccccuncucguguuaca

SEQ ID NO: 90999 - RNA, 20 nt, Artificial Sequence
  Synthetic
  misc_feature (9)..(9): n is a, c, g, or u
ggaccccuncucguguuaca

SEQ ID NO: 91000 - RNA, 21 nt, Artificial Sequence
  Synthetic
  misc_feature (10)..(10): n is a, c, g, or u
aggaccccuncucguguuaca

SEQ ID NO: 91001 - RNA, 22 nt, Artificial Sequence
  Synthetic
  misc_feature (11)..(11): n is a, c, g, or u
uaggaccccuncucguguuaca

SEQ ID NO: 91002 - RNA, 23 nt, Artificial Sequence
  Synthetic
  misc_feature (12)..(12): n is a, c, g, or u
cuaggaccccuncucguguuaca

SEQ ID NO: 91003 - RNA, 24 nt, Artificial Sequence
  Synthetic
  misc_feature (13)..(13): n is a, c, g, or u
ccuaggaccccuncucguguuaca

SEQ ID NO: 91004 - RNA, 18 nt, Artificial Sequence
  Synthetic
uccuaauauacauuuaca

SEQ ID NO: 91005 - RNA, 19 nt, Artificial Sequence
  Synthetic
uuccuaauauacauuuaca

SEQ ID NO: 91006 - RNA, 20 nt, Artificial Sequence
  Synthetic
uuuccuaauauacauuuaca

SEQ ID NO: 91007 - RNA, 21 nt, Artificial Sequence
  Synthetic
uuuuccuaauauacauuuaca

SEQ ID NO: 91008 - RNA, 22 nt, Artificial Sequence
  Synthetic
cuuuuccuaauauacauuuaca

SEQ ID NO: 91009 - RNA, 23 nt, Artificial Sequence
  Synthetic
ucuuuuccuaauauacauuuaca

SEQ ID NO: 91010 - RNA, 24 nt, Artificial Sequence
  Synthetic
  misc_feature (1)..(1): n is a, c, g, or u
nucuuuuccuaauauacauuuaca

SEQ ID NO: 91011 - RNA, 18 nt, Artificial Sequence
  Synthetic
auucuuucccgaccacca

SEQ ID NO: 91012 - RNA, 19 nt, Artificial Sequence
  Synthetic
gauucuuucccgaccacca

SEQ ID NO: 91013 - RNA, 20 nt, Artificial Sequence
  Synthetic
ggauucuuucccgaccacca

SEQ ID NO: 91014 - RNA, 21 nt, Artificial Sequence
  Synthetic
gggauucuuucccgaccacca

SEQ ID NO: 91015 - RNA, 22 nt, Artificial Sequence
  Synthetic
ugggauucuuucccgaccacca

SEQ ID NO: 91016 - RNA, 23 nt, Artificial Sequence
  Synthetic
cugggauucuuucccgaccacca

SEQ ID NO: 91017 - RNA, 24 nt, Artificial Sequence
  Synthetic
ucugggauucuuucccgaccacca

SEQ ID NO: 91018 - RNA, 18 nt, Artificial Sequence
  Synthetic
gucugcgcaccagcacca

SEQ ID NO: 91019 - RNA, 19 nt, Artificial Sequence
  Synthetic
ggucugcgcaccagcacca

SEQ ID NO: 91020 - RNA, 20 nt, Artificial Sequence
  Synthetic
uggucugcgcaccagcacca

SEQ ID NO: 91021 - RNA, 21 nt, Artificial Sequence
  Synthetic
uuggucugcgcaccagcacca

SEQ ID NO: 91022 - RNA, 22 nt, Artificial Sequence
  Synthetic
auuggucugcgcaccagcacca

SEQ ID NO: 91023 - RNA, 23 nt, Artificial Sequence
  Synthetic
aauuggucugcgcaccagcacca

SEQ ID NO: 91024 - RNA, 24 nt, Artificial Sequence
  Synthetic
aaauuggucugcgcaccagcacca

SEQ ID NO: 91025 - RNA, 18 nt, Artificial Sequence
  Synthetic
  misc_feature (8)..(8): n is a, c, g, or u
  misc_feature (11)..(11): n is a, c, g, or u
ugccguuncgnccgacca

SEQ ID NO: 91026 - RNA, 19 nt, Artificial Sequence
  Synthetic
  misc_feature (9)..(9): n is a, c, g, or u
  misc_feature (12)..(12): n is a, c, g, or u
cugccguuncgnccgacca

SEQ ID NO: 91027 - RNA, 20 nt, Artificial Sequence
  Synthetic
  misc_feature (10)..(10): n is a, c, g, or u
  misc_feature (13)..(13): n is a, c, g, or u
ucugccguuncgnccgacca

SEQ ID NO: 91028 - RNA, 21 nt, Artificial Sequence
  Synthetic
  misc_feature (11)..(11): n is a, c, g, or u
  misc_feature (14)..(14): n is a, c, g, or u
gucugccguuncgnccgacca

SEQ ID NO: 91029 - RNA, 22 nt, Artificial Sequence
  Synthetic
  misc_feature (12)..(12): n is a, c, g, or u
  misc_feature (15)..(15): n is a, c, g, or u
cgucugccguuncgnccgacca

SEQ ID NO: 91030 - RNA, 23 nt, Artificial Sequence
  Synthetic
  misc_feature (13)..(13): n is a, c, g, or u
  misc_feature (16)..(16): n is a, c, g, or u
ccgucugccguuncgnccgacca

SEQ ID NO: 91031 - RNA, 24 nt, Artificial Sequence
  Synthetic
  misc_feature (14)..(14): n is a, c, g, or u
  misc_feature (17)..(17): n is a, c, g, or u
uccgucugccguuncgnccgacca

SEQ ID NO: 91032 - RNA, 18 nt, Artificial Sequence
  Synthetic
  misc_feature (3)..(3): n is a, c, g, or u
  misc_feature (10)..(11): n is a, c, g, or u
acnaccagcnngggacca

SEQ ID NO: 91033 - RNA, 19 nt, Artificial Sequence
  Synthetic
  misc_feature (4)..(4): n is a, c, g, or u
  misc_feature (11)..(12): n is a, c, g, or u
aacnaccagcnngggacca

SEQ ID NO: 91034 - RNA, 20 nt, Artificial Sequence
  Synthetic
  misc_feature (5)..(5): n is a, c, g, or u
  misc_feature (12)..(13): n is a, c, g, or u
caacnaccagcnngggacca

SEQ ID NO: 91035 - RNA, 21 nt, Artificial Sequence
  Synthetic
  misc_feature (6)..(6): n is a, c, g, or u
  misc_feature (13)..(14): n is a, c, g, or u
ucaacnaccagcnngggacca

SEQ ID NO: 91036 - RNA, 22 nt, Artificial Sequence
  Synthetic
  misc_feature (1)..(1): n is a, c, g, or u
  misc_feature (7)..(7): n is a, c, g, or u
  misc_feature (14)..(15): n is a, c, g, or u
nucaacnaccagcnngggacca

SEQ ID NO: 91037 - RNA, 23 nt, Artificial Sequence
  Synthetic
  misc_feature (2)..(2): n is a, c, g, or u
  misc_feature (8)..(8): n is a, c, g, or u
  misc_feature (15)..(16): n is a, c, g, or u
cnucaacnaccagcnngggacca

SEQ ID NO: 91038 - RNA, 24 nt, Artificial Sequence
  Synthetic
  misc_feature (3)..(3): n is a, c, g, or u
  misc_feature (9)..(9): n is a, c, g, or u
  misc_feature (16)..(17): n is a, c, g, or u
ucnucaacnaccagcnngggacca

SEQ ID NO: 91039 - RNA, 18 nt, Artificial Sequence
  Synthetic
auugggacuucaauccca

SEQ ID NO: 91040 - RNA, 19 nt, Artificial Sequence
  Synthetic
gauugggacuucaauccca

SEQ ID NO: 91041 - RNA, 20 nt, Artificial Sequence
  Synthetic
agauugggacuucaauccca

SEQ ID NO: 91042 - RNA, 21 nt, Artificial Sequence
  Synthetic
cagauugggacuucaauccca

SEQ ID NO: 91043 - RNA, 22 nt, Artificial Sequence
  Synthetic
ccagauugggacuucaauccca

SEQ ID NO: 91044 - RNA, 23 nt, Artificial Sequence
  Synthetic
uccagauugggacuucaauccca

SEQ ID NO: 91045 - RNA, 24 nt, Artificial Sequence
  Synthetic
auccagauugggacuucaauccca

SEQ ID NO: 91046 - RNA, 18 nt, Artificial Sequence
  Synthetic
acaccuggccagacgcca

SEQ ID NO: 91047 - RNA, 19 nt, Artificial Sequence
  Synthetic
gacaccuggccagacgcca

SEQ ID NO: 91048 - RNA, 20 nt, Artificial Sequence
  Synthetic
ggacaccuggccagacgcca

SEQ ID NO: 91049 - RNA, 21 nt, Artificial Sequence
  Synthetic
aggacaccuggccagacgcca

SEQ ID NO: 91050 - RNA, 22 nt, Artificial Sequence
  Synthetic
aaggacaccuggccagacgcca

SEQ ID NO: 91051 - RNA, 23 nt, Artificial Sequence
  Synthetic
caaggacaccuggccagacgcca

SEQ ID NO: 91052 - RNA, 24 nt, Artificial Sequence
  Synthetic
acaaggacaccuggccagacgcca

SEQ ID NO: 91053 - RNA, 18 nt, Artificial Sequence
  Synthetic
  misc_feature (4)..(4): n is a, c, g, or u
  misc_feature (7)..(7): n is a, c, g, or u
ugcnucnaccaaucgcca

SEQ ID NO: 91054 - RNA, 19 nt, Artificial Sequence
  Synthetic
  misc_feature (5)..(5): n is a, c, g, or u
  misc_feature (8)..(8): n is a, c, g, or u
cugcnucnaccaaucgcca

SEQ ID NO: 91055 - RNA, 20 nt, Artificial Sequence
  Synthetic
  misc_feature (6)..(6): n is a, c, g, or u
  misc_feature (9)..(9): n is a, c, g, or u
ccugcnucnaccaaucgcca

SEQ ID NO: 91056 - RNA, 21 nt, Artificial Sequence
  Synthetic
  misc_feature (7)..(7): n is a, c, g, or u
  misc_feature (10)..(10): n is a, c, g, or u
uccugcnucnaccaaucgcca

SEQ ID NO: 91057 - RNA, 22 nt, Artificial Sequence
  Synthetic
  misc_feature (8)..(8): n is a, c, g, or u
  misc_feature (11)..(11): n is a, c, g, or u
cuccugcnucnaccaaucgcca

SEQ ID NO: 91058 - RNA, 23 nt, Artificial Sequence
  Synthetic
  misc_feature (9)..(9): n is a, c, g, or u
  misc_feature (12)..(12): n is a, c, g, or u
ccuccugcnucnaccaaucgcca

SEQ ID NO: 91059 - RNA, 24 nt, Artificial Sequence
  Synthetic
  misc_feature (10)..(10): n is a, c, g, or u
  misc_feature (13)..(13): n is a, c, g, or u
gccuccugcnucnaccaaucgcca

SEQ ID NO: 91060 - RNA, 18 nt, Artificial Sequence
  Synthetic
ugcuaggcugugcugcca

SEQ ID NO: 91061 - RNA, 19 nt, Artificial Sequence
  Synthetic
cugcuaggcugugcugcca

SEQ ID NO: 91062 - RNA, 20 nt, Artificial Sequence
  Synthetic
gcugcuaggcugugcugcca

SEQ ID NO: 91063 - RNA, 21 nt, Artificial Sequence
  Synthetic
ggcugcuaggcugugcugcca

SEQ ID NO: 91064 - RNA, 22 nt, Artificial Sequence
  Synthetic
uggcugcuaggcugugcugcca

SEQ ID NO: 91065 - RNA, 23 nt, Artificial Sequence
  Synthetic
auggcugcuaggcugugcugcca

SEQ ID NO: 91066 - RNA, 24 nt, Artificial Sequence
  Synthetic
cauggcugcuaggcugugcugcca

SEQ ID NO: 91067 - RNA, 18 nt, Artificial Sequence
  Synthetic
  misc_feature (12)..(12): n is a, c, g, or u
uguuaugggucnuugcca

SEQ ID NO: 91068 - RNA, 19 nt, Artificial Sequence
  Synthetic
  misc_feature (13)..(13): n is a, c, g, or u
auguuaugggucnuugcca

SEQ ID NO: 91069 - RNA, 20 nt, Artificial Sequence
  Synthetic
  misc_feature (14)..(14): n is a, c, g, or u
gauguuaugggucnuugcca

SEQ ID NO: 91070 - RNA, 21 nt, Artificial Sequence
  Synthetic
  misc_feature (15)..(15): n is a, c, g, or u
ggauguuaugggucnuugcca

SEQ ID NO: 91071 - RNA, 22 nt, Artificial Sequence
  Synthetic
  misc_feature (16)..(16): n is a, c, g, or u
uggauguuaugggucnuugcca

SEQ ID NO: 91072 - RNA, 23 nt, Artificial Sequence
  Synthetic
  misc_feature (17)..(17): n is a, c, g, or u
uuggauguuaugggucnuugcca

SEQ ID NO: 91073 - RNA, 24 nt, Artificial Sequence
  Synthetic
  misc_feature (18)..(18): n is a, c, g, or u
auuggauguuaugggucnuugcca

SEQ ID NO: 91074 - RNA, 18 nt, Artificial Sequence
  Synthetic
ggaacaagagcuacagca

SEQ ID NO: 91075 - RNA, 19 nt, Artificial Sequence
  Synthetic
gggaacaagagcuacagca

SEQ ID NO: 91076 - RNA, 20 nt, Artificial Sequence
  Synthetic
ugggaacaagagcuacagca

SEQ ID NO: 91077 - RNA, 21 nt, Artificial Sequence
  Synthetic
uugggaacaagagcuacagca

SEQ ID NO: 91078 - RNA, 22 nt, Artificial Sequence
  Synthetic
cuugggaacaagagcuacagca

SEQ ID NO: 91079 - RNA, 23 nt, Artificial Sequence
  Synthetic
ucuugggaacaagagcuacagca

SEQ ID NO: 91080 - RNA, 24 nt, Artificial Sequence
  Synthetic
uucuugggaacaagagcuacagca

SEQ ID NO: 91081 - RNA, 18 nt, Artificial Sequence
  Synthetic
aagguaggagcuggagca

SEQ ID NO: 91082 - RNA, 19 nt, Artificial Sequence
  Synthetic
caagguaggagcuggagca

SEQ ID NO: 91083 - RNA, 20 nt, Artificial Sequence
  Synthetic
acaagguaggagcuggagca

SEQ ID NO: 91084 - RNA, 21 nt, Artificial Sequence
  Synthetic
aacaagguaggagcuggagca

SEQ ID NO: 91085 - RNA, 22 nt, Artificial Sequence
  Synthetic
caacaagguaggagcuggagca

SEQ ID NO: 91086 - RNA, 23 nt, Artificial Sequence
  Synthetic
ccaacaagguaggagcuggagca

SEQ ID NO: 91087 - RNA, 24 nt, Artificial Sequence
  Synthetic
gccaacaagguaggagcuggagca

SEQ ID NO: 91088 - RNA, 18 nt, Artificial Sequence
  Synthetic
  misc_feature (4)..(4): n is a, c, g, or u
gggnuucaccccaccgca

SEQ ID NO: 91089 - RNA, 19 nt, Artificial Sequence
  Synthetic
  misc_feature (5)..(5): n is a, c, g, or u
ugggnuucaccccaccgca

SEQ ID NO: 91090 - RNA, 20 nt, Artificial Sequence
  Synthetic
  misc_feature (6)..(6): n is a, c, g, or u
cugggnuucaccccaccgca

SEQ ID NO: 91091 - RNA, 21 nt, Artificial Sequence
  Synthetic
  misc_feature (7)..(7): n is a, c, g, or u
gcugggnuucaccccaccgca

SEQ ID NO: 91092 - RNA, 22 nt, Artificial Sequence
  Synthetic
  misc_feature (8)..(8): n is a, c, g, or u
ggcugggnuucaccccaccgca

SEQ ID NO: 91093 - RNA, 23 nt, Artificial Sequence
  Synthetic
  misc_feature (9)..(9): n is a, c, g, or u
gggcugggnuucaccccaccgca

SEQ ID NO: 91094 - RNA, 24 nt, Artificial Sequence
  Synthetic
  misc_feature (10)..(10): n is a, c, g, or u
cgggcugggnuucaccccaccgca

SEQ ID NO: 91095 - RNA, 18 nt, Artificial Sequence
  Synthetic
gaacucccucgccucgca

SEQ ID NO: 91096 - RNA, 19 nt, Artificial Sequence
  Synthetic
agaacucccucgccucgca

SEQ ID NO: 91097 - RNA, 20 nt, Artificial Sequence
  Synthetic
aagaacucccucgccucgca

SEQ ID NO: 91098 - RNA, 21 nt, Artificial Sequence
  Synthetic
gaagaacucccucgccucgca

SEQ ID NO: 91099 - RNA, 22 nt, Artificial Sequence
  Synthetic
agaagaacucccucgccucgca

SEQ ID NO: 91100 - RNA, 23 nt, Artificial Sequence
  Synthetic
aagaagaacucccucgccucgca

SEQ ID NO: 91101 - RNA, 24 nt, Artificial Sequence
  Synthetic
gaagaagaacucccucgccucgca

SEQ ID NO: 91102 - RNA, 18 nt, Artificial Sequence
  Synthetic
ucaccucugcacgucgca

SEQ ID NO: 91103 - RNA, 19 nt, Artificial Sequence
  Synthetic
uucaccucugcacgucgca

SEQ ID NO: 91104 - RNA, 20 nt, Artificial Sequence
  Synthetic
cuucaccucugcacgucgca

SEQ ID NO: 91105 - RNA, 21 nt, Artificial Sequence
  Synthetic
gcuucaccucugcacgucgca

SEQ ID NO: 91106 - RNA, 22 nt, Artificial Sequence
  Synthetic
cgcuucaccucugcacgucgca

SEQ ID NO: 91107 - RNA, 23 nt, Artificial Sequence
  Synthetic
ucgcuucaccucugcacgucgca

SEQ ID NO: 91108 - RNA, 24 nt, Artificial Sequence
  Synthetic
uucgcuucaccucugcacgucgca

SEQ ID NO: 91109 - RNA, 18 nt, Artificial Sequence
  Synthetic
ucauccucaggccaugca

SEQ ID NO: 91110 - RNA, 19 nt, Artificial Sequence
  Synthetic
cucauccucaggccaugca

SEQ ID NO: 91111 - RNA, 20 nt, Artificial Sequence
  Synthetic
acucauccucaggccaugca

SEQ ID NO: 91112 - RNA, 21 nt, Artificial Sequence
  Synthetic
cacucauccucaggccaugca

SEQ ID NO: 91113 - RNA, 22 nt, Artificial Sequence
  Synthetic
acacucauccucaggccaugca

SEQ ID NO: 91114 - RNA, 23 nt, Artificial Sequence
  Synthetic
aacacucauccucaggccaugca

SEQ ID NO: 91115 - RNA, 24 nt, Artificial Sequence
  Synthetic
aaacacucauccucaggccaugca

SEQ ID NO: 91116 - RNA, 18 nt, Artificial Sequence
  Synthetic
  misc_feature (9)..(9): n is a, c, g, or u
ucaccucancauacugca

SEQ ID NO: 91117 - RNA, 19 nt, Artificial Sequence
  Synthetic
  misc_feature (1)..(1): n is a, c, g, or u
  misc_feature (10)..(10): n is a, c, g, or u
nucaccucancauacugca

SEQ ID NO: 91118 - RNA, 20 nt, Artificial Sequence
  Synthetic
  misc_feature (2)..(2): n is a, c, g, or u
  misc_feature (11)..(11): n is a, c, g, or u
gnucaccucancauacugca

SEQ ID NO: 91119 - RNA, 21 nt, Artificial Sequence
  Synthetic
  misc_feature (3)..(3): n is a, c, g, or u
  misc_feature (12)..(12): n is a, c, g, or u
ugnucaccucancauacugca

SEQ ID NO: 91120 - RNA, 22 nt, Artificial Sequence
  Synthetic
  misc_feature (4)..(4): n is a, c, g, or u
  misc_feature (13)..(13): n is a, c, g, or u
uugnucaccucancauacugca

SEQ ID NO: 91121 - RNA, 23 nt, Artificial Sequence
  Synthetic
  misc_feature (5)..(5): n is a, c, g, or u
  misc_feature (14)..(14): n is a, c, g, or u
auugnucaccucancauacugca

SEQ ID NO: 91122 - RNA, 24 nt, Artificial Sequence
  Synthetic
  misc_feature (6)..(6): n is a, c, g, or u
  misc_feature (15)..(15): n is a, c, g, or u
cauugnucaccucancauacugca

SEQ ID NO: 91123 - RNA, 18 nt, Artificial Sequence
  Synthetic
  misc_feature (5)..(5): n is a, c, g, or u
cucancauacugcacuca

SEQ ID NO: 91124 - RNA, 19 nt, Artificial Sequence
  Synthetic
  misc_feature (6)..(6): n is a, c, g, or u
ccucancauacugcacuca

SEQ ID NO: 91125 - RNA, 20 nt, Artificial Sequence
  Synthetic
  misc_feature (7)..(7): n is a, c, g, or u
accucancauacugcacuca

SEQ ID NO: 91126 - RNA, 21 nt, Artificial Sequence
  Synthetic
  misc_feature (8)..(8): n is a, c, g, or u
caccucancauacugcacuca

SEQ ID NO: 91127 - RNA, 22 nt, Artificial Sequence
  Synthetic
  misc_feature (9)..(9): n is a, c, g, or u
ucaccucancauacugcacuca

SEQ ID NO: 91128 - RNA, 23 nt, Artificial Sequence
  Synthetic
  misc_feature (1)..(1): n is a, c, g, or u
  misc_feature (10)..(10): n is a, c, g, or u
nucaccucancauacugcacuca

SEQ ID NO: 91129 - RNA, 24 nt, Artificial Sequence
  Synthetic
  misc_feature (2)..(2): n is a, c, g, or u
  misc_feature (11)..(11): n is a, c, g, or u
gnucaccucancauacugcacuca

SEQ ID NO: 91130 - RNA, 18 nt, Artificial Sequence
  Synthetic
  misc_feature (1)..(1): n is a, c, g, or u
  misc_feature (13)..(13): n is a, c, g, or u
nccugucuuuaanccuca

SEQ ID NO: 91131 - RNA, 19 nt, Artificial Sequence
  Synthetic
  misc_feature (2)..(2): n is a, c, g, or u
  misc_feature (14)..(14): n is a, c, g, or u
unccugucuuuaanccuca

SEQ ID NO: 91132 - RNA, 20 nt, Artificial Sequence
  Synthetic
  misc_feature (3)..(3): n is a, c, g, or u
  misc_feature (15)..(15): n is a, c, g, or u
gunccugucuuuaanccuca

SEQ ID NO: 91133 - RNA, 21 nt, Artificial Sequence
  Synthetic
  misc_feature (4)..(4): n is a, c, g, or u
  misc_feature (16)..(16): n is a, c, g, or u
ugunccugucuuuaanccuca

SEQ ID NO: 91134 - RNA, 22 nt, Artificial Sequence
  Synthetic
  misc_feature (5)..(5): n is a, c, g, or u
  misc_feature (17)..(17): n is a, c, g, or u
cugunccugucuuuaanccuca

SEQ ID NO: 91135 - RNA, 23 nt, Artificial Sequence
  Synthetic
  misc_feature (6)..(6): n is a, c, g, or u
  misc_feature (18)..(18): n is a, c, g, or u
acugunccugucuuuaanccuca

SEQ ID NO: 91136 - RNA, 24 nt, Artificial Sequence
  Synthetic
  misc_feature (7)..(7): n is a, c, g, or u
  misc_feature (19)..(19): n is a, c, g, or u
uacugunccugucuuuaanccuca

SEQ ID NO: 91137 - RNA, 18 nt, Artificial Sequence
  Synthetic
  misc_feature (3)..(3): n is a, c, g, or u
ucnaccaaucgccaguca

SEQ ID NO: 91138 - RNA, 19 nt, Artificial Sequence
  Synthetic
  misc_feature (1)..(1): n is a, c, g, or u
  misc_feature (4)..(4): n is a, c, g, or u
nucnaccaaucgccaguca

SEQ ID NO: 91139 - RNA, 20 nt, Artificial Sequence
  Synthetic
  misc_feature (2)..(2): n is a, c, g, or u
  misc_feature (5)..(5): n is a, c, g, or u
cnucnaccaaucgccaguca

SEQ ID NO: 91140 - RNA, 21 nt, Artificial Sequence
  Synthetic
  misc_feature (3)..(3): n is a, c, g, or u
  misc_feature (6)..(6): n is a, c, g, or u
gcnucnaccaaucgccaguca

SEQ ID NO: 91141 - RNA, 22 nt, Artificial Sequence
  Synthetic
  misc_feature (4)..(4): n is a, c, g, or u
  misc_feature (7)..(7): n is a, c, g, or u
ugcnucnaccaaucgccaguca

SEQ ID NO: 91142 - RNA, 23 nt, Artificial Sequence
  Synthetic
  misc_feature (5)..(5): n is a, c, g, or u
  misc_feature (8)..(8): n is a, c, g, or u
cugcnucnaccaaucgccaguca

SEQ ID NO: 91143 - RNA, 24 nt, Artificial Sequence
  Synthetic
  misc_feature (6)..(6): n is a, c, g, or u
  misc_feature (9)..(9): n is a, c, g, or u
ccugcnucnaccaaucgccaguca

SEQ ID NO: 91144 - RNA, 18 nt, Artificial Sequence
  Synthetic
  misc_feature (11)..(11): n is a, c, g, or u
  misc_feature (15)..(15): n is a, c, g, or u
cugcacgacuncugnuca

SEQ ID NO: 91145 - RNA, 19 nt, Artificial Sequence
  Synthetic
  misc_feature (12)..(12): n is a, c, g, or u
  misc_feature (16)..(16): n is a, c, g, or u
ccugcacgacuncugnuca

SEQ ID NO: 91146 - RNA, 20 nt, Artificial Sequence
  Synthetic
  misc_feature (13)..(13): n is a, c, g, or u
  misc_feature (17)..(17): n is a, c, g, or u
accugcacgacuncugnuca

SEQ ID NO: 91147 - RNA, 21 nt, Artificial Sequence
  Synthetic
  misc_feature (14)..(14): n is a, c, g, or u
  misc_feature (18)..(18): n is a, c, g, or u
aaccugcacgacuncugnuca

SEQ ID NO: 91148 - RNA, 22 nt, Artificial Sequence
  Synthetic
  misc_feature (15)..(15): n is a, c, g, or u
  misc_feature (19)..(19): n is a, c, g, or u
gaaccugcacgacuncugnuca

SEQ ID NO: 91149 - RNA, 23 nt, Artificial Sequence
  Synthetic
  misc_feature (16)..(16): n is a, c, g, or u
  misc_feature (20)..(20): n is a, c, g, or u
agaaccugcacgacuncugnuca

SEQ ID NO: 91150 - RNA, 24 nt, Artificial Sequence
  Synthetic
  misc_feature (17)..(17): n is a, c, g, or u
  misc_feature (21)..(21): n is a, c, g, or u
cagaaccugcacgacuncugnuca

SEQ ID NO: 91151 - RNA, 18 nt, Artificial Sequence
  Synthetic
auaugggccuaaaguuca

SEQ ID NO: 91152 - RNA, 19 nt, Artificial Sequence
  Synthetic
aauaugggccuaaaguuca

SEQ ID NO: 91153 - RNA, 20 nt, Artificial Sequence
  Synthetic
uaauaugggccuaaaguuca

SEQ ID NO: 91154 - RNA, 21 nt, Artificial Sequence
  Synthetic
cuaauaugggccuaaaguuca

SEQ ID NO: 91155 - RNA, 22 nt, Artificial Sequence
  Synthetic
acuaauaugggccuaaaguuca

SEQ ID NO: 91156 - RNA, 23 nt, Artificial Sequence
  Synthetic
cacuaauaugggccuaaaguuca

SEQ ID NO: 91157 - RNA, 24 nt, Artificial Sequence
  Synthetic
acacuaauaugggccuaaaguuca

SEQ ID NO: 91158 - RNA, 18 nt, Artificial Sequence
  Synthetic
cggguauauuauauaaga

SEQ ID NO: 91159 - RNA, 19 nt, Artificial Sequence
  Synthetic
gcggguauauuauauaaga

SEQ ID NO: 91160 - RNA, 20 nt, Artificial Sequence
  Synthetic
ggcggguauauuauauaaga

SEQ ID NO: 91161 - RNA, 21 nt, Artificial Sequence
  Synthetic
aggcggguauauuauauaaga

SEQ ID NO: 91162 - RNA, 22 nt, Artificial Sequence
  Synthetic
aaggcggguauauuauauaaga

SEQ ID NO: 91163 - RNA, 23 nt, Artificial Sequence
  Synthetic
gaaggcggguauauuauauaaga

SEQ ID NO: 91164 - RNA, 24 nt, Artificial Sequence
  Synthetic
ggaaggcggguauauuauauaaga

SEQ ID NO: 91165 - RNA, 18 nt, Artificial Sequence
  Synthetic
aaacaccgcaaauccaga

SEQ ID NO: 91166 - RNA, 19 nt, Artificial Sequence
  Synthetic
caaacaccgcaaauccaga

SEQ ID NO: 91167 - RNA, 20 nt, Artificial Sequence
  Synthetic
gcaaacaccgcaaauccaga

SEQ ID NO: 91168 - RNA, 21 nt, Artificial Sequence
  Synthetic
agcaaacaccgcaaauccaga

SEQ ID NO: 91169 - RNA, 22 nt, Artificial Sequence
  Synthetic
gagcaaacaccgcaaauccaga

SEQ ID NO: 91170 - RNA, 23 nt, Artificial Sequence
  Synthetic
agagcaaacaccgcaaauccaga

SEQ ID NO: 91171 - RNA, 24 nt, Artificial Sequence
  Synthetic
cagagcaaacaccgcaaauccaga

SEQ ID NO: 91172 - RNA, 18 nt, Artificial Sequence
  Synthetic
acucccucgccucgcaga

SEQ ID NO: 91173 - RNA, 19 nt, Artificial Sequence
  Synthetic
aacucccucgccucgcaga

SEQ ID NO: 91174 - RNA, 20 nt, Artificial Sequence
  Synthetic
gaacucccucgccucgcaga

SEQ ID NO: 91175 - RNA, 21 nt, Artificial Sequence
  Synthetic
agaacucccucgccucgcaga

SEQ ID NO: 91176 - RNA, 22 nt, Artificial Sequence
  Synthetic
aagaacucccucgccucgcaga

SEQ ID NO: 91177 - RNA, 23 nt, Artificial Sequence
  Synthetic
gaagaacucccucgccucgcaga

SEQ ID NO: 91178 - RNA, 24 nt, Artificial Sequence
  Synthetic
agaagaacucccucgccucgcaga

SEQ ID NO: 91179 - RNA, 18 nt, Artificial Sequence
  Synthetic
uuggauccagccuucaga

SEQ ID NO: 91180 - RNA, 19 nt, Artificial Sequence
  Synthetic
guuggauccagccuucaga

SEQ ID NO: 91181 - RNA, 20 nt, Artificial Sequence
  Synthetic
aguuggauccagccuucaga

SEQ ID NO: 91182 - RNA, 21 nt, Artificial Sequence
  Synthetic
caguuggauccagccuucaga

SEQ ID NO: 91183 - RNA, 22 nt, Artificial Sequence
  Synthetic
ccaguuggauccagccuucaga

SEQ ID NO: 91184 - RNA, 23 nt, Artificial Sequence
  Synthetic
accaguuggauccagccuucaga

SEQ ID NO: 91185 - RNA, 24 nt, Artificial Sequence
  Synthetic
caccaguuggauccagccuucaga

SEQ ID NO: 91186 - RNA, 18 nt, Artificial Sequence
  Synthetic
uauauuauauaagagaga

SEQ ID NO: 91187 - RNA, 19 nt, Artificial Sequence
  Synthetic
guauauuauauaagagaga

SEQ ID NO: 91188 - RNA, 20 nt, Artificial Sequence
  Synthetic
gguauauuauauaagagaga

SEQ ID NO: 91189 - RNA, 21 nt, Artificial Sequence
  Synthetic
ggguauauuauauaagagaga

SEQ ID NO: 91190 - RNA, 22 nt, Artificial Sequence
  Synthetic
cggguauauuauauaagagaga

SEQ ID NO: 91191 - RNA, 23 nt, Artificial Sequence
  Synthetic
gcggguauauuauauaagagaga

SEQ ID NO: 91192 - RNA, 24 nt, Artificial Sequence
  Synthetic
ggcggguauauuauauaagagaga

SEQ ID NO: 91193 - RNA, 18 nt, Artificial Sequence
  Synthetic
  misc_feature (11)..(11): n is a, c, g, or u
cacucacagunaaugaga

SEQ ID NO: 91194 - RNA, 19 nt, Artificial Sequence
  Synthetic
  misc_feature (12)..(12): n is a, c, g, or u
ccacucacagunaaugaga

SEQ ID NO: 91195 - RNA, 20 nt, Artificial Sequence
  Synthetic
  misc_feature (1)..(1): n is a, c, g, or u
  misc_feature (13)..(13): n is a, c, g, or u
nccacucacagunaaugaga

SEQ ID NO: 91196 - RNA, 21 nt, Artificial Sequence
  Synthetic
  misc_feature (2)..(2): n is a, c, g, or u
  misc_feature (14)..(14): n is a, c, g, or u
gnccacucacagunaaugaga

SEQ ID NO: 91197 - RNA, 22 nt, Artificial Sequence
  Synthetic
  misc_feature (3)..(3): n is a, c, g, or u
  misc_feature (15)..(15): n is a, c, g, or u
ggnccacucacagunaaugaga

SEQ ID NO: 91198 - RNA, 23 nt, Artificial Sequence
  Synthetic
  misc_feature (4)..(4): n is a, c, g, or u
  misc_feature (16)..(16): n is a, c, g, or u
aggnccacucacagunaaugaga

SEQ ID NO: 91199 - RNA, 24 nt, Artificial Sequence
  Synthetic
  misc_feature (5)..(5): n is a, c, g, or u
  misc_feature (17)..(17): n is a, c, g, or u
uaggnccacucacagunaaugaga

SEQ ID NO: 91200 - RNA, 18 nt, Artificial Sequence
  Synthetic
cgaggcagguccccuaga

SEQ ID NO: 91201 - RNA, 19 nt, Artificial Sequence
  Synthetic
acgaggcagguccccuaga

SEQ ID NO: 91202 - RNA, 20 nt, Artificial Sequence
  Synthetic
gacgaggcagguccccuaga

SEQ ID NO: 91203 - RNA, 21 nt, Artificial Sequence
  Synthetic
cgacgaggcagguccccuaga

SEQ ID NO: 91204 - RNA, 22 nt, Artificial Sequence
  Synthetic
acgacgaggcagguccccuaga

SEQ ID NO: 91205 - RNA, 23 nt, Artificial Sequence
  Synthetic
gacgacgaggcagguccccuaga

SEQ ID NO: 91206 - RNA, 24 nt, Artificial Sequence
  Synthetic
agacgacgaggcagguccccuaga

SEQ ID NO: 91207 - RNA, 18 nt, Artificial Sequence
  Synthetic
acuacuguuguuagacga

SEQ ID NO: 91208 - RNA, 19 nt, Artificial Sequence
  Synthetic
gacuacuguuguuagacga

SEQ ID NO: 91209 - RNA, 20 nt, Artificial Sequence
  Synthetic
agacuacuguuguuagacga

SEQ ID NO: 91210 - RNA, 18 nt, Artificial Sequence
  Synthetic
acuguuguuagacgacga

SEQ ID NO: 91211 - RNA, 19 nt, Artificial Sequence
  Synthetic
uacuguuguuagacgacga

SEQ ID NO: 91212 - RNA, 20 nt, Artificial Sequence
  Synthetic
cuacuguuguuagacgacga

SEQ ID NO: 91213 - RNA, 21 nt, Artificial Sequence
  Synthetic
acuacuguuguuagacgacga

SEQ ID NO: 91214 - RNA, 22 nt, Artificial Sequence
  Synthetic
gacuacuguuguuagacgacga

SEQ ID NO: 91215 - RNA, 23 nt, Artificial Sequence
  Synthetic
agacuacuguuguuagacgacga

SEQ ID NO: 91216 - RNA, 24 nt, Artificial Sequence
  Synthetic
gagacuacuguuguuagacgacga

SEQ ID NO: 91217 - RNA, 18 nt, Artificial Sequence
  Synthetic
cgucaaucuucucgagga

SEQ ID NO: 91218 - RNA, 19 nt, Artificial Sequence
  Synthetic
ucgucaaucuucucgagga

SEQ ID NO: 91219 - RNA, 20 nt, Artificial Sequence
  Synthetic
aucgucaaucuucucgagga

SEQ ID NO: 91220 - RNA, 21 nt, Artificial Sequence
  Synthetic
uaucgucaaucuucucgagga

SEQ ID NO: 91221 - RNA, 22 nt, Artificial Sequence
  Synthetic
  misc_feature (1)..(1): n is a, c, g, or u
nuaucgucaaucuucucgagga

SEQ ID NO: 91222 - RNA, 23 nt, Artificial Sequence
  Synthetic
  misc_feature (2)..(2): n is a, c, g, or u
cnuaucgucaaucuucucgagga

SEQ ID NO: 91223 - RNA, 24 nt, Artificial Sequence
  Synthetic
  misc_feature (1)..(1): n is a, c, g, or u
  misc_feature (3)..(3): n is a, c, g, or u
ncnuaucgucaaucuucucgagga

SEQ ID NO: 91224 - RNA, 18 nt, Artificial Sequence
  Synthetic
  misc_feature (7)..(7): n is a, c, g, or u
guuuaangacugggagga

SEQ ID NO: 91225 - RNA, 19 nt, Artificial Sequence
  Synthetic
  misc_feature (8)..(8): n is a, c, g, or u
uguuuaangacugggagga

SEQ ID NO: 91226 - RNA, 20 nt, Artificial Sequence
  Synthetic
  misc_feature (9)..(9): n is a, c, g, or u
uuguuuaangacugggagga

SEQ ID NO: 91227 - RNA, 21 nt, Artificial Sequence
  Synthetic
  misc_feature (10)..(10): n is a, c, g, or u
uuuguuuaangacugggagga

SEQ ID NO: 91228 - RNA, 22 nt, Artificial Sequence
  Synthetic
  misc_feature (11)..(11): n is a, c, g, or u
guuuguuuaangacugggagga

SEQ ID NO: 91229 - RNA, 23 nt, Artificial Sequence
  Synthetic
  misc_feature (12)..(12): n is a, c, g, or u
uguuuguuuaangacugggagga

SEQ ID NO: 91230 - RNA, 24 nt, Artificial Sequence
  Synthetic
  misc_feature (13)..(13): n is a, c, g, or u
cuguuuguuuaangacugggagga

SEQ ID NO: 91231 - RNA, 18 nt, Artificial Sequence
  Synthetic
gacgccaacaagguagga

SEQ ID NO: 91232 - RNA, 19 nt, Artificial Sequence
  Synthetic
agacgccaacaagguagga

SEQ ID NO: 91233 - RNA, 20 nt, Artificial Sequence
  Synthetic
cagacgccaacaagguagga

SEQ ID NO: 91234 - RNA, 21 nt, Artificial Sequence
  Synthetic
ccagacgccaacaagguagga

SEQ ID NO: 91235 - RNA, 22 nt, Artificial Sequence
  Synthetic
gccagacgccaacaagguagga

SEQ ID NO: 91236 - RNA, 23 nt, Artificial Sequence
  Synthetic
ggccagacgccaacaagguagga

SEQ ID NO: 91237 - RNA, 24 nt, Artificial Sequence
  Synthetic
uggccagacgccaacaagguagga

SEQ ID NO: 91238 - RNA, 18 nt, Artificial Sequence
  Synthetic
cuguaccaaaccuucgga

SEQ ID NO: 91239 - RNA, 19 nt, Artificial Sequence
  Synthetic
gcuguaccaaaccuucgga

SEQ ID NO: 91240 - RNA, 20 nt, Artificial Sequence
  Synthetic
ugcuguaccaaaccuucgga

SEQ ID NO: 91241 - RNA, 18 nt, Artificial Sequence
  Synthetic
cggaaaauuccuauggga

SEQ ID NO: 91242 - RNA, 19 nt, Artificial Sequence
  Synthetic
ucggaaaauuccuauggga

SEQ ID NO: 91243 - RNA, 20 nt, Artificial Sequence
  Synthetic
uucggaaaauuccuauggga

SEQ ID NO: 91244 - RNA, 21 nt, Artificial Sequence
  Synthetic
uuucggaaaauuccuauggga

SEQ ID NO: 91245 - RNA, 22 nt, Artificial Sequence
  Synthetic
cuuucggaaaauuccuauggga

SEQ ID NO: 91246 - RNA, 23 nt, Artificial Sequence
  Synthetic
gcuuucggaaaauuccuauggga

SEQ ID NO: 91247 - RNA, 24 nt, Artificial Sequence
  Synthetic
ggcuuucggaaaauuccuauggga

SEQ ID NO: 91248 - RNA, 18 nt, Artificial Sequence
  Synthetic
gucaccauauucuuggga

SEQ ID NO: 91249 - RNA, 19 nt, Artificial Sequence
  Synthetic
ggucaccauauucuuggga

SEQ ID NO: 91250 - RNA, 20 nt, Artificial Sequence
  Synthetic
gggucaccauauucuuggga

SEQ ID NO: 91251 - RNA, 21 nt, Artificial Sequence
  Synthetic
ugggucaccauauucuuggga

SEQ ID NO: 91252 - RNA, 22 nt, Artificial Sequence
  Synthetic
gugggucaccauauucuuggga

SEQ ID NO: 91253 - RNA, 23 nt, Artificial Sequence
  Synthetic
ugugggucaccauauucuuggga

SEQ ID NO: 91254 - RNA, 24 nt, Artificial Sequence
  Synthetic
uugugggucaccauauucuuggga

SEQ ID NO: 91255 - RNA, 18 nt, Artificial Sequence
  Synthetic
gcucgcagcaggucugga

SEQ ID NO: 91256 - RNA, 19 nt, Artificial Sequence
  Synthetic
ugcucgcagcaggucugga

SEQ ID NO: 91257 - RNA, 20 nt, Artificial Sequence
  Synthetic
uugcucgcagcaggucugga

SEQ ID NO: 91258 - RNA, 21 nt, Artificial Sequence
  Synthetic
uuugcucgcagcaggucugga

SEQ ID NO: 91259 - RNA, 22 nt, Artificial Sequence
  Synthetic
uuuugcucgcagcaggucugga

SEQ ID NO: 91260 - RNA, 23 nt, Artificial Sequence
  Synthetic
guuuugcucgcagcaggucugga

SEQ ID NO: 91261 - RNA, 24 nt, Artificial Sequence
  Synthetic
uguuuugcucgcagcaggucugga

SEQ ID NO: 91262 - RNA, 18 nt, Artificial Sequence
  Synthetic
ucccgaccaccaguugga

SEQ ID NO: 91263 - RNA, 19 nt, Artificial Sequence
  Synthetic
uucccgaccaccaguugga

SEQ ID NO: 91264 - RNA, 20 nt, Artificial Sequence
  Synthetic
uuucccgaccaccaguugga

SEQ ID NO: 91265 - RNA, 21 nt, Artificial Sequence
  Synthetic
cuuucccgaccaccaguugga

SEQ ID NO: 91266 - RNA, 22 nt, Artificial Sequence
  Synthetic
ucuuucccgaccaccaguugga

SEQ ID NO: 91267 - RNA, 23 nt, Artificial Sequence
  Synthetic
uucuuucccgaccaccaguugga

SEQ ID NO: 91268 - RNA, 24 nt, Artificial Sequence
  Synthetic
auucuuucccgaccaccaguugga

SEQ ID NO: 91269 - RNA, 18 nt, Artificial Sequence
  Synthetic
ucuugucucacuuuugga

SEQ ID NO: 91270 - RNA, 19 nt, Artificial Sequence
  Synthetic
uucuugucucacuuuugga

SEQ ID NO: 91271 - RNA, 20 nt, Artificial Sequence
  Synthetic
uuucuugucucacuuuugga

SEQ ID NO: 91272 - RNA, 21 nt, Artificial Sequence
  Synthetic
auuucuugucucacuuuugga

SEQ ID NO: 91273 - RNA, 22 nt, Artificial Sequence
  Synthetic
cauuucuugucucacuuuugga

SEQ ID NO: 91274 - RNA, 23 nt, Artificial Sequence
  Synthetic
acauuucuugucucacuuuugga

SEQ ID NO: 91275 - RNA, 24 nt, Artificial Sequence
  Synthetic
cacauuucuugucucacuuuugga

SEQ ID NO: 91276 - RNA, 18 nt, Artificial Sequence
  Synthetic
  misc_feature (16)..(16): n is a, c, g, or u
agacuguuuguuuaanga

SEQ ID NO: 91277 - RNA, 19 nt, Artificial Sequence
  Synthetic
  misc_feature (17)..(17): n is a, c, g, or u
aagacuguuuguuuaanga

SEQ ID NO: 91278 - RNA, 20 nt, Artificial Sequence
  Synthetic
  misc_feature (18)..(18): n is a, c, g, or u
aaagacuguuuguuuaanga

SEQ ID NO: 91279 - RNA, 21 nt, Artificial Sequence
  Synthetic
  misc_feature (19)..(19): n is a, c, g, or u
caaagacuguuuguuuaanga

SEQ ID NO: 91280 - RNA, 22 nt, Artificial Sequence
  Synthetic
  misc_feature (20)..(20): n is a, c, g, or u
ucaaagacuguuuguuuaanga

SEQ ID NO: 91281 - RNA, 23 nt, Artificial Sequence
  Synthetic
  misc_feature (21)..(21): n is a, c, g, or u
uucaaagacuguuuguuuaanga

SEQ ID NO: 91282 - RNA, 24 nt, Artificial Sequence
  Synthetic
  misc_feature (22)..(22): n is a, c, g, or u
cuucaaagacuguuuguuuaanga

SEQ ID NO: 91283 - RNA, 18 nt, Artificial Sequence
  Synthetic
  misc_feature (10)..(10): n is a, c, g, or u
  misc_feature (16)..(16): n is a, c, g, or u
caaauauuunccauunga

SEQ ID NO: 91284 - RNA, 19 nt, Artificial Sequence
  Synthetic
  misc_feature (11)..(11): n is a, c, g, or u
  misc_feature (17)..(17): n is a, c, g, or u
ccaaauauuunccauunga

SEQ ID NO: 91285 - RNA, 20 nt, Artificial Sequence
  Synthetic
  misc_feature (12)..(12): n is a, c, g, or u
  misc_feature (18)..(18): n is a, c, g, or u
accaaauauuunccauunga

SEQ ID NO: 91286 - RNA, 21 nt, Artificial Sequence
  Synthetic
  misc_feature (13)..(13): n is a, c, g, or u
  misc_feature (19)..(19): n is a, c, g, or u
uaccaaauauuunccauunga

SEQ ID NO: 91287 - RNA, 22 nt, Artificial Sequence
  Synthetic
  misc_feature (14)..(14): n is a, c, g, or u
  misc_feature (20)..(20): n is a, c, g, or u
uuaccaaauauuunccauunga

SEQ ID NO: 91288 - RNA, 23 nt, Artificial Sequence
  Synthetic
  misc_feature (15)..(15): n is a, c, g, or u
  misc_feature (21)..(21): n is a, c, g, or u
guuaccaaauauuunccauunga

SEQ ID NO: 91289 - RNA, 24 nt, Artificial Sequence
  Synthetic
  misc_feature (1)..(1): n is a, c, g, or u
  misc_feature (16)..(16): n is a, c, g, or u
  misc_feature (22)..(22): n is a, c, g, or u
nguuaccaaauauuunccauunga

SEQ ID NO: 91290 - RNA, 18 nt, Artificial Sequence
  Synthetic
gugccaaguguuugcuga

SEQ ID NO: 91291 - RNA, 19 nt, Artificial Sequence
  Synthetic
ugugccaaguguuugcuga

SEQ ID NO: 91292 - RNA, 20 nt, Artificial Sequence
  Synthetic
cugugccaaguguuugcuga

SEQ ID NO: 91293 - RNA, 21 nt, Artificial Sequence
  Synthetic
ucugugccaaguguuugcuga

SEQ ID NO: 91294 - RNA, 22 nt, Artificial Sequence
  Synthetic
gucugugccaaguguuugcuga

SEQ ID NO: 91295 - RNA, 23 nt, Artificial Sequence
  Synthetic
ggucugugccaaguguuugcuga

SEQ ID NO: 91296 - RNA, 24 nt, Artificial Sequence
  Synthetic
aggucugugccaaguguuugcuga

SEQ ID NO: 91297 - RNA, 18 nt, Artificial Sequence
  Synthetic
uguuaacaggccuauuga

SEQ ID NO: 91298 - RNA, 19 nt, Artificial Sequence
  Synthetic
cuguuaacaggccuauuga

SEQ ID NO: 91299 - RNA, 20 nt, Artificial Sequence
  Synthetic
ccuguuaacaggccuauuga

SEQ ID NO: 91300 - RNA, 21 nt, Artificial Sequence
  Synthetic
uccuguuaacaggccuauuga

SEQ ID NO: 91301 - RNA, 22 nt, Artificial Sequence
  Synthetic
uuccuguuaacaggccuauuga

SEQ ID NO: 91302 - RNA, 23 nt, Artificial Sequence
  Synthetic
cuuccuguuaacaggccuauuga

SEQ ID NO: 91303 - RNA, 24 nt, Artificial Sequence
  Synthetic
acuuccuguuaacaggccuauuga

SEQ ID NO: 91304 - RNA, 18 nt, Artificial Sequence
  Synthetic
cgggguuuuucuuguuga

SEQ ID NO: 91305 - RNA, 19 nt, Artificial Sequence
  Synthetic
gcgggguuuuucuuguuga

SEQ ID NO: 91306 - RNA, 20 nt, Artificial Sequence
  Synthetic
ggcgggguuuuucuuguuga

SEQ ID NO: 91307 - RNA, 21 nt, Artificial Sequence
  Synthetic
aggcgggguuuuucuuguuga

SEQ ID NO: 91308 - RNA, 22 nt, Artificial Sequence
  Synthetic
caggcgggguuuuucuuguuga

SEQ ID NO: 91309 - RNA, 23 nt, Artificial Sequence
  Synthetic
acaggcgggguuuuucuuguuga

SEQ ID NO: 91310 - RNA, 24 nt, Artificial Sequence
  Synthetic
uacaggcgggguuuuucuuguuga

SEQ ID NO: 91311 - RNA, 18 nt, Artificial Sequence
  Synthetic
  misc_feature (9)..(9): n is a, c, g, or u
  misc_feature (17)..(17): n is a, c, g, or u
ccacaagancacaucana

SEQ ID NO: 91312 - RNA, 19 nt, Artificial Sequence
  Synthetic
  misc_feature (10)..(10): n is a, c, g, or u
  misc_feature (18)..(18): n is a, c, g, or u
gccacaagancacaucana

SEQ ID NO: 91313 - RNA, 20 nt, Artificial Sequence
  Synthetic
  misc_feature (11)..(11): n is a, c, g, or u
  misc_feature (19)..(19): n is a, c, g, or u
ugccacaagancacaucana

SEQ ID NO: 91314 - RNA, 21 nt, Artificial Sequence
  Synthetic
  misc_feature (12)..(12): n is a, c, g, or u
  misc_feature (20)..(20): n is a, c, g, or u
uugccacaagancacaucana

SEQ ID NO: 91315 - RNA, 22 nt, Artificial Sequence
  Synthetic
  misc_feature (1)..(1): n is a, c, g, or u
  misc_feature (13)..(13): n is a, c, g, or u
  misc_feature (21)..(21): n is a, c, g, or u
nuugccacaagancacaucana

SEQ ID NO: 91316 - RNA, 23 nt, Artificial Sequence
  Synthetic
  misc_feature (2)..(2): n is a, c, g, or u
  misc_feature (14)..(14): n is a, c, g, or u
  misc_feature (22)..(22): n is a, c, g, or u
cnuugccacaagancacaucana

SEQ ID NO: 91317 - RNA, 24 nt, Artificial Sequence
  Synthetic
  misc_feature (3)..(3): n is a, c, g, or u
  misc_feature (15)..(15): n is a, c, g, or u
  misc_feature (23)..(23): n is a, c, g, or u
ucnuugccacaagancacaucana

SEQ ID NO: 91318 - RNA, 18 nt, Artificial Sequence
  Synthetic
  misc_feature (2)..(2): n is a, c, g, or u
  misc_feature (17)..(17): n is a, c, g, or u
ancuaaugacucuagcna

SEQ ID NO: 91319 - RNA, 19 nt, Artificial Sequence
  Synthetic
  misc_feature (3)..(3): n is a, c, g, or u
  misc_feature (18)..(18): n is a, c, g, or u
gancuaaugacucuagcna

SEQ ID NO: 91320 - RNA, 20 nt, Artificial Sequence
  Synthetic
  misc_feature (4)..(4): n is a, c, g, or u
  misc_feature (19)..(19): n is a, c, g, or u
ggancuaaugacucuagcna

SEQ ID NO: 91321 - RNA, 21 nt, Artificial Sequence
  Synthetic
  misc_feature (5)..(5): n is a, c, g, or u
  misc_feature (20)..(20): n is a, c, g, or u
gggancuaaugacucuagcna

SEQ ID NO: 91322 - RNA, 22 nt, Artificial Sequence
  Synthetic
  misc_feature (6)..(6): n is a, c, g, or u
  misc_feature (21)..(21): n is a, c, g, or u
ggggancuaaugacucuagcna

SEQ ID NO: 91323 - RNA, 23 nt, Artificial Sequence
  Synthetic
  misc_feature (7)..(7): n is a, c, g, or u
  misc_feature (22)..(22): n is a, c, g, or u
gggggancuaaugacucuagcna

SEQ ID NO: 91324 - RNA, 24 nt, Artificial Sequence
  Synthetic
  misc_feature (8)..(8): n is a, c, g, or u
  misc_feature (23)..(23): n is a, c, g, or u
ggggggancuaaugacucuagcna

SEQ ID NO: 91325 - RNA, 18 nt, Artificial Sequence
  Synthetic
  misc_feature (16)..(17): n is a, c, g, or u
aauuuggaagauccanna

SEQ ID NO: 91326 - RNA, 19 nt, Artificial Sequence
  Synthetic
  misc_feature (17)..(18): n is a, c, g, or u
uaauuuggaagauccanna

SEQ ID NO: 91327 - RNA, 20 nt, Artificial Sequence
  Synthetic
  misc_feature (1)..(1): n is a, c, g, or u
  misc_feature (18)..(19): n is a, c, g, or u
nuaauuuggaagauccanna

SEQ ID NO: 91328 - RNA, 21 nt, Artificial Sequence
  Synthetic
  misc_feature (2)..(2): n is a, c, g, or u
  misc_feature (19)..(20): n is a, c, g, or u
gnuaauuuggaagauccanna

SEQ ID NO: 91329 - RNA, 22 nt, Artificial Sequence
  Synthetic
  misc_feature (3)..(3): n is a, c, g, or u
  misc_feature (20)..(21): n is a, c, g, or u
ugnuaauuuggaagauccanna

SEQ ID NO: 91330 - RNA, 23 nt, Artificial Sequence
  Synthetic
  misc_feature (4)..(4): n is a, c, g, or u
  misc_feature (21)..(22): n is a, c, g, or u
gugnuaauuuggaagauccanna

SEQ ID NO: 91331 - RNA, 24 nt, Artificial Sequence
  Synthetic
  misc_feature (5)..(5): n is a, c, g, or u
  misc_feature (22)..(23): n is a, c, g, or u
ggugnuaauuuggaagauccanna

SEQ ID NO: 91332 - RNA, 18 nt, Artificial Sequence
  Synthetic
  misc_feature (17)..(17): n is a, c, g, or u
auuuacaccaagacauna

SEQ ID NO: 91333 - RNA, 19 nt, Artificial Sequence
  Synthetic
  misc_feature (18)..(18): n is a, c, g, or u
cauuuacaccaagacauna

SEQ ID NO: 91334 - RNA, 20 nt, Artificial Sequence
  Synthetic
  misc_feature (19)..(19): n is a, c, g, or u
acauuuacaccaagacauna

SEQ ID NO: 91335 - RNA, 21 nt, Artificial Sequence
  Synthetic
  misc_feature (20)..(20): n is a, c, g, or u
uacauuuacaccaagacauna

SEQ ID NO: 91336 - RNA, 22 nt, Artificial Sequence
  Synthetic
  misc_feature (21)..(21): n is a, c, g, or u
auacauuuacaccaagacauna

SEQ ID NO: 91337 - RNA, 23 nt, Artificial Sequence
  Synthetic
  misc_feature (22)..(22): n is a, c, g, or u
uauacauuuacaccaagacauna

SEQ ID NO: 91338 - RNA, 24 nt, Artificial Sequence
  Synthetic
  misc_feature (23)..(23): n is a, c, g, or u
auauacauuuacaccaagacauna

SEQ ID NO: 91339 - RNA, 18 nt, Artificial Sequence
  Synthetic
  misc_feature (5)..(5): n is a, c, g, or u
  misc_feature (17)..(17): n is a, c, g, or u
uaggnccacucacaguna

SEQ ID NO: 91340 - RNA, 19 nt, Artificial Sequence
  Synthetic
  misc_feature (6)..(6): n is a, c, g, or u
  misc_feature (18)..(18): n is a, c, g, or u
guaggnccacucacaguna

SEQ ID NO: 91341 - RNA, 20 nt, Artificial Sequence
  Synthetic
  misc_feature (7)..(7): n is a, c, g, or u
  misc_feature (19)..(19): n is a, c, g, or u
uguaggnccacucacaguna

SEQ ID NO: 91342 - RNA, 21 nt, Artificial Sequence
  Synthetic
  misc_feature (8)..(8): n is a, c, g, or u
  misc_feature (20)..(20): n is a, c, g, or u
uuguaggnccacucacaguna

SEQ ID NO: 91343 - RNA, 22 nt, Artificial Sequence
  Synthetic
  misc_feature (9)..(9): n is a, c, g, or u
  misc_feature (21)..(21): n is a, c, g, or u
uuuguaggnccacucacaguna

SEQ ID NO: 91344 - RNA, 23 nt, Artificial Sequence
  Synthetic
  misc_feature (1)..(1): n is a, c, g, or u
  misc_feature (10)..(10): n is a, c, g, or u
  misc_feature (22)..(22): n is a, c, g, or u
nuuuguaggnccacucacaguna

SEQ ID NO: 91345 - RNA, 24 nt, Artificial Sequence
  Synthetic
  misc_feature (2)..(2): n is a, c, g, or u
  misc_feature (11)..(11): n is a, c, g, or u
  misc_feature (23)..(23): n is a, c, g, or u
anuuuguaggnccacucacaguna

SEQ ID NO: 91346 - RNA, 18 nt, Artificial Sequence
  Synthetic
cuuucuguguaaacaaua

SEQ ID NO: 91347 - RNA, 19 nt, Artificial Sequence
  Synthetic
ccuuucuguguaaacaaua

SEQ ID NO: 91348 - RNA, 20 nt, Artificial Sequence
  Synthetic
gccuuucuguguaaacaaua

SEQ ID NO: 91349 - RNA, 21 nt, Artificial Sequence
  Synthetic
ggccuuucuguguaaacaaua

SEQ ID NO: 91350 - RNA, 22 nt, Artificial Sequence
  Synthetic
aggccuuucuguguaaacaaua

SEQ ID NO: 91351 - RNA, 23 nt, Artificial Sequence
  Synthetic
aaggccuuucuguguaaacaaua

SEQ ID NO: 91352 - RNA, 24 nt, Artificial Sequence
  Synthetic
caaggccuuucuguguaaacaaua

SEQ ID NO: 91353 - RNA, 18 nt, Artificial Sequence
  Synthetic
ugcccaaggucuuacaua

SEQ ID NO: 91354 - RNA, 19 nt, Artificial Sequence
  Synthetic
uugcccaaggucuuacaua

SEQ ID NO: 91355 - RNA, 20 nt, Artificial Sequence
  Synthetic
cuugcccaaggucuuacaua

SEQ ID NO: 91356 - RNA, 21 nt, Artificial Sequence
  Synthetic
ucuugcccaaggucuuacaua

SEQ ID NO: 91357 - RNA, 22 nt, Artificial Sequence
  Synthetic
  misc_feature (1)..(1): n is a, c, g, or u
nucuugcccaaggucuuacaua

SEQ ID NO: 91358 - RNA, 23 nt, Artificial Sequence
  Synthetic
  misc_feature (1)..(2): n is a, c, g, or u
nnucuugcccaaggucuuacaua

SEQ ID NO: 91359 - RNA, 24 nt, Artificial Sequence
  Synthetic
  misc_feature (2)..(3): n is a, c, g, or u
annucuugcccaaggucuuacaua

SEQ ID NO: 91360 - RNA, 18 nt, Artificial Sequence
  Synthetic
aggcggguauauuauaua

SEQ ID NO: 91361 - RNA, 19 nt, Artificial Sequence
  Synthetic
aaggcggguauauuauaua

SEQ ID NO: 91362 - RNA, 20 nt, Artificial Sequence
  Synthetic
gaaggcggguauauuauaua

SEQ ID NO: 91363 - RNA, 21 nt, Artificial Sequence
  Synthetic
ggaaggcggguauauuauaua

SEQ ID NO: 91364 - RNA, 22 nt, Artificial Sequence
  Synthetic
uggaaggcggguauauuauaua

SEQ ID NO: 91365 - RNA, 23 nt, Artificial Sequence
  Synthetic
auggaaggcggguauauuauaua

SEQ ID NO: 91366 - RNA, 24 nt, Artificial Sequence
  Synthetic
uauggaaggcggguauauuauaua

SEQ ID NO: 91367 - RNA, 18 nt, Artificial Sequence
  Synthetic
gaaggcggguauauuaua

SEQ ID NO: 91368 - RNA, 19 nt, Artificial Sequence
  Synthetic
ggaaggcggguauauuaua

SEQ ID NO: 91369 - RNA, 20 nt, Artificial Sequence
  Synthetic
uggaaggcggguauauuaua

SEQ ID NO: 91370 - RNA, 21 nt, Artificial Sequence
  Synthetic
auggaaggcggguauauuaua

SEQ ID NO: 91371 - RNA, 22 nt, Artificial Sequence
  Synthetic
uauggaaggcggguauauuaua

SEQ ID NO: 91372 - RNA, 23 nt, Artificial Sequence
  Synthetic
cuauggaaggcggguauauuaua

SEQ ID NO: 91373 - RNA, 24 nt, Artificial Sequence
  Synthetic
ucuauggaaggcggguauauuaua

SEQ ID NO: 91374 - RNA, 18 nt, Artificial Sequence
  Synthetic
guugguucuucuggacua

SEQ ID NO: 91375 - RNA, 19 nt, Artificial Sequence
  Synthetic
uguugguucuucuggacua

SEQ ID NO: 91376 - RNA, 20 nt, Artificial Sequence
  Synthetic
uuguugguucuucuggacua

SEQ ID NO: 91377 - RNA, 21 nt, Artificial Sequence
  Synthetic
cuuguugguucuucuggacua

SEQ ID NO: 91378 - RNA, 22 nt, Artificial Sequence
  Synthetic
ucuuguugguucuucuggacua

SEQ ID NO: 91379 - RNA, 23 nt, Artificial Sequence
  Synthetic
uucuuguugguucuucuggacua

SEQ ID NO: 91380 - RNA, 24 nt, Artificial Sequence
  Synthetic
cuucuuguugguucuucuggacua

SEQ ID NO: 91381 - RNA, 18 nt, Artificial Sequence
  Synthetic
guauacauuuaaacccua

SEQ ID NO: 91382 - RNA, 19 nt, Artificial Sequence
  Synthetic
gguauacauuuaaacccua

SEQ ID NO: 91383 - RNA, 20 nt, Artificial Sequence
  Synthetic
ggguauacauuuaaacccua

SEQ ID NO: 91384 - RNA, 21 nt, Artificial Sequence
  Synthetic
uggguauacauuuaaacccua

SEQ ID NO: 91385 - RNA, 22 nt, Artificial Sequence
  Synthetic
uuggguauacauuuaaacccua

SEQ ID NO: 91386 - RNA, 23 nt, Artificial Sequence
  Synthetic
uuuggguauacauuuaaacccua

SEQ ID NO: 91387 - RNA, 24 nt, Artificial Sequence
  Synthetic
cuuuggguauacauuuaaacccua

SEQ ID NO: 91388 - RNA, 18 nt, Artificial Sequence
  Synthetic
gacgaggcagguccccua

SEQ ID NO: 91389 - RNA, 19 nt, Artificial Sequence
  Synthetic
cgacgaggcagguccccua

SEQ ID NO: 91390 - RNA, 20 nt, Artificial Sequence
  Synthetic
acgacgaggcagguccccua

SEQ ID NO: 91391 - RNA, 18 nt, Artificial Sequence
  Synthetic
gcuuucggaaaauuccua

SEQ ID NO: 91392 - RNA, 19 nt, Artificial Sequence
  Synthetic
ggcuuucggaaaauuccua

SEQ ID NO: 91393 - RNA, 20 nt, Artificial Sequence
  Synthetic
gggcuuucggaaaauuccua

SEQ ID NO: 91394 - RNA, 21 nt, Artificial Sequence
  Synthetic
ugggcuuucggaaaauuccua

SEQ ID NO: 91395 - RNA, 22 nt, Artificial Sequence
  Synthetic
  misc_feature (1)..(1): n is a, c, g, or u
nugggcuuucggaaaauuccua

SEQ ID NO: 91396 - RNA, 23 nt, Artificial Sequence
  Synthetic
  misc_feature (2)..(2): n is a, c, g, or u
cnugggcuuucggaaaauuccua

SEQ ID NO: 91397 - RNA, 24 nt, Artificial Sequence
  Synthetic
  misc_feature (3)..(3): n is a, c, g, or u
ucnugggcuuucggaaaauuccua

SEQ ID NO: 91398 - RNA, 18 nt, Artificial Sequence
  Synthetic
  misc_feature (3)..(3): n is a, c, g, or u
canuauuuacacacucua

SEQ ID NO: 91399 - RNA, 19 nt, Artificial Sequence
  Synthetic
  misc_feature (4)..(4): n is a, c, g, or u
acanuauuuacacacucua

SEQ ID NO: 91400 - RNA, 20 nt, Artificial Sequence
  Synthetic
  misc_feature (5)..(5): n is a, c, g, or u
gacanuauuuacacacucua

SEQ ID NO: 91401 - RNA, 21 nt, Artificial Sequence
  Synthetic
  misc_feature (6)..(6): n is a, c, g, or u
agacanuauuuacacacucua

SEQ ID NO: 91402 - RNA, 22 nt, Artificial Sequence
  Synthetic
  misc_feature (1)..(1): n is a, c, g, or u
  misc_feature (7)..(7): n is a, c, g, or u
nagacanuauuuacacacucua

SEQ ID NO: 91403 - RNA, 23 nt, Artificial Sequence
  Synthetic
  misc_feature (2)..(2): n is a, c, g, or u
  misc_feature (8)..(8): n is a, c, g, or u
cnagacanuauuuacacacucua

SEQ ID NO: 91404 - RNA, 24 nt, Artificial Sequence
  Synthetic
  misc_feature (3)..(3): n is a, c, g, or u
  misc_feature (9)..(9): n is a, c, g, or u
acnagacanuauuuacacacucua

SEQ ID NO: 91405 - RNA, 18 nt, Artificial Sequence
  Synthetic
  misc_feature (5)..(5): n is a, c, g, or u
  misc_feature (14)..(14): n is a, c, g, or u
augcnuguauucanucua

SEQ ID NO: 91406 - RNA, 19 nt, Artificial Sequence
  Synthetic
  misc_feature (6)..(6): n is a, c, g, or u
  misc_feature (15)..(15): n is a, c, g, or u
uaugcnuguauucanucua

SEQ ID NO: 91407 - RNA, 20 nt, Artificial Sequence
  Synthetic
  misc_feature (7)..(7): n is a, c, g, or u
  misc_feature (16)..(16): n is a, c, g, or u
guaugcnuguauucanucua

SEQ ID NO: 91408 - RNA, 21 nt, Artificial Sequence
  Synthetic
  misc_feature (8)..(8): n is a, c, g, or u
  misc_feature (17)..(17): n is a, c, g, or u
uguaugcnuguauucanucua

SEQ ID NO: 91409 - RNA, 22 nt, Artificial Sequence
  Synthetic
  misc_feature (9)..(9): n is a, c, g, or u
  misc_feature (18)..(18): n is a, c, g, or u
uuguaugcnuguauucanucua

SEQ ID NO: 91410 - RNA, 23 nt, Artificial Sequence
  Synthetic
  misc_feature (1)..(1): n is a, c, g, or u
  misc_feature (10)..(10): n is a, c, g, or u
  misc_feature (19)..(19): n is a, c, g, or u
nuuguaugcnuguauucanucua

SEQ ID NO: 91411 - RNA, 24 nt, Artificial Sequence
  Synthetic
  misc_feature (2)..(2): n is a, c, g, or u
  misc_feature (11)..(11): n is a, c, g, or u
  misc_feature (20)..(20): n is a, c, g, or u
cnuuguaugcnuguauucanucua

SEQ ID NO: 91412 - RNA, 18 nt, Artificial Sequence
  Synthetic
acuucucucaauuuucua

SEQ ID NO: 91413 - RNA, 19 nt, Artificial Sequence
  Synthetic
gacuucucucaauuuucua

SEQ ID NO: 91414 - RNA, 20 nt, Artificial Sequence
  Synthetic
ggacuucucucaauuuucua

SEQ ID NO: 91415 - RNA, 21 nt, Artificial Sequence
  Synthetic
uggacuucucucaauuuucua

SEQ ID NO: 91416 - RNA, 22 nt, Artificial Sequence
  Synthetic
guggacuucucucaauuuucua

SEQ ID NO: 91417 - RNA, 23 nt, Artificial Sequence
  Synthetic
gguggacuucucucaauuuucua

SEQ ID NO: 91418 - RNA, 24 nt, Artificial Sequence
  Synthetic
ugguggacuucucucaauuuucua

SEQ ID NO: 91419 - RNA, 18 nt, Artificial Sequence
  Synthetic
  misc_feature (2)..(2): n is a, c, g, or u
  misc_feature (8)..(8): n is a, c, g, or u
unccauungauaagggua

SEQ ID NO: 91420 - RNA, 19 nt, Artificial Sequence
  Synthetic
  misc_feature (3)..(3): n is a, c, g, or u
  misc_feature (9)..(9): n is a, c, g, or u
uunccauungauaagggua

SEQ ID NO: 91421 - RNA, 20 nt, Artificial Sequence
  Synthetic
  misc_feature (4)..(4): n is a, c, g, or u
  misc_feature (10)..(10): n is a, c, g, or u
uuunccauungauaagggua

SEQ ID NO: 91422 - RNA, 21 nt, Artificial Sequence
  Synthetic
  misc_feature (5)..(5): n is a, c, g, or u
  misc_feature (11)..(11): n is a, c, g, or u
auuunccauungauaagggua

SEQ ID NO: 91423 - RNA, 22 nt, Artificial Sequence
  Synthetic
  misc_feature (6)..(6): n is a, c, g, or u
  misc_feature (12)..(12): n is a, c, g, or u
uauuunccauungauaagggua

SEQ ID NO: 91424 - RNA, 23 nt, Artificial Sequence
  Synthetic
  misc_feature (7)..(7): n is a, c, g, or u
  misc_feature (13)..(13): n is a, c, g, or u
auauuunccauungauaagggua

SEQ ID NO: 91425 - RNA, 24 nt, Artificial Sequence
  Synthetic
  misc_feature (8)..(8): n is a, c, g, or u
  misc_feature (14)..(14): n is a, c, g, or u
aauauuunccauungauaagggua

SEQ ID NO: 91426 - RNA, 18 nt, Artificial Sequence
  Synthetic
uauauggaugauguggua

SEQ ID NO: 91427 - RNA, 19 nt, Artificial Sequence
  Synthetic
uuauauggaugauguggua

SEQ ID NO: 91428 - RNA, 20 nt, Artificial Sequence
  Synthetic
guuauauggaugauguggua

SEQ ID NO: 91429 - RNA, 21 nt, Artificial Sequence
  Synthetic
aguuauauggaugauguggua

SEQ ID NO: 91430 - RNA, 22 nt, Artificial Sequence
  Synthetic
caguuauauggaugauguggua

SEQ ID NO: 91431 - RNA, 23 nt, Artificial Sequence
  Synthetic
ucaguuauauggaugauguggua

SEQ ID NO: 91432 - RNA, 24 nt, Artificial Sequence
  Synthetic
uucaguuauauggaugauguggua

SEQ ID NO: 91433 - RNA, 18 nt, Artificial Sequence
  Synthetic
aucccuccuguugcugua

SEQ ID NO: 91434 - RNA, 19 nt, Artificial Sequence
  Synthetic
uaucccuccuguugcugua

SEQ ID NO: 91435 - RNA, 20 nt, Artificial Sequence
  Synthetic
guaucccuccuguugcugua

SEQ ID NO: 91436 - RNA, 21 nt, Artificial Sequence
  Synthetic
uguaucccuccuguugcugua

SEQ ID NO: 91437 - RNA, 22 nt, Artificial Sequence
  Synthetic
auguaucccuccuguugcugua

SEQ ID NO: 91438 - RNA, 23 nt, Artificial Sequence
  Synthetic
uauguaucccuccuguugcugua

SEQ ID NO: 91439 - RNA, 24 nt, Artificial Sequence
  Synthetic
cuauguaucccuccuguugcugua

SEQ ID NO: 91440 - RNA, 18 nt, Artificial Sequence
  Synthetic
  misc_feature (3)..(3): n is a, c, g, or u
  misc_feature (8)..(8): n is a, c, g, or u
  misc_feature (10)..(10): n is a, c, g, or u
  misc_feature (12)..(12): n is a, c, g, or u
agnuuaangnunuuugua

SEQ ID NO: 91441 - RNA, 19 nt, Artificial Sequence
  Synthetic
  misc_feature (4)..(4): n is a, c, g, or u
  misc_feature (9)..(9): n is a, c, g, or u
  misc_feature (11)..(11): n is a, c, g, or u
  misc_feature (13)..(13): n is a, c, g, or u
uagnuuaangnunuuugua

SEQ ID NO: 91442 - RNA, 20 nt, Artificial Sequence
  Synthetic
  misc_feature (1)..(1): n is a, c, g, or u
  misc_feature (5)..(5): n is a, c, g, or u
  misc_feature (10)..(10): n is a, c, g, or u
  misc_feature (12)..(12): n is a, c, g, or u
  misc_feature (14)..(14): n is a, c, g, or u
nuagnuuaangnunuuugua

SEQ ID NO: 91443 - RNA, 21 nt, Artificial Sequence
  Synthetic
  misc_feature (1)..(2): n is a, c, g, or u
  misc_feature (6)..(6): n is a, c, g, or u
  misc_feature (11)..(11): n is a, c, g, or u
  misc_feature (13)..(13): n is a, c, g, or u
  misc_feature (15)..(15): n is a, c, g, or u
nnuagnuuaangnunuuugua

SEQ ID NO: 91444 - RNA, 22 nt, Artificial Sequence
  Synthetic
  misc_feature (2)..(3): n is a, c, g, or u
  misc_feature (7)..(7): n is a, c, g, or u
  misc_feature (12)..(12): n is a, c, g, or u
  misc_feature (14)..(14): n is a, c, g, or u
  misc_feature (16)..(16): n is a, c, g, or u
gnnuagnuuaangnunuuugua

SEQ ID NO: 91445 - RNA, 23 nt, Artificial Sequence
  Synthetic
  misc_feature (3)..(4): n is a, c, g, or u
  misc_feature (8)..(8): n is a, c, g, or u
  misc_feature (13)..(13): n is a, c, g, or u
  misc_feature (15)..(15): n is a, c, g, or u
  misc_feature (17)..(17): n is a, c, g, or u
agnnuagnuuaangnunuuugua

SEQ ID NO: 91446 - RNA, 24 nt, Artificial Sequence
  Synthetic
  misc_feature (4)..(5): n is a, c, g, or u
  misc_feature (9)..(9): n is a, c, g, or u
  misc_feature (14)..(14): n is a, c, g, or u
  misc_feature (16)..(16): n is a, c, g, or u
  misc_feature (18)..(18): n is a, c, g, or u
gagnnuagnuuaangnunuuugua

SEQ ID NO: 91447 - RNA, 18 nt, Artificial Sequence
  Synthetic
  misc_feature (5)..(5): n is a, c, g, or u
  misc_feature (7)..(7): n is a, c, g, or u
  misc_feature (9)..(9): n is a, c, g, or u
  misc_feature (16)..(16): n is a, c, g, or u
uuaangnunuuuguanua

SEQ ID NO: 91448 - RNA, 19 nt, Artificial Sequence
  Synthetic
  misc_feature (1)..(1): n is a, c, g, or u
  misc_feature (6)..(6): n is a, c, g, or u
  misc_feature (8)..(8): n is a, c, g, or u
  misc_feature (10)..(10): n is a, c, g, or u
  misc_feature (17)..(17): n is a, c, g, or u
nuuaangnunuuuguanua

SEQ ID NO: 91449 - RNA, 20 nt, Artificial Sequence
  Synthetic
  misc_feature (2)..(2): n is a, c, g, or u
  misc_feature (7)..(7): n is a, c, g, or u
  misc_feature (9)..(9): n is a, c, g, or u
  misc_feature (11)..(11): n is a, c, g, or u
  misc_feature (18)..(18): n is a, c, g, or u
gnuuaangnunuuuguanua

SEQ ID NO: 91450 - RNA, 21 nt, Artificial Sequence
  Synthetic
  misc_feature (3)..(3): n is a, c, g, or u
  misc_feature (8)..(8): n is a, c, g, or u
  misc_feature (10)..(10): n is a, c, g, or u
  misc_feature (12)..(12): n is a, c, g, or u
  misc_feature (19)..(19): n is a, c, g, or u
agnuuaangnunuuuguanua

SEQ ID NO: 91451 - RNA, 22 nt, Artificial Sequence
  Synthetic
  misc_feature (4)..(4): n is a, c, g, or u
  misc_feature (9)..(9): n is a, c, g, or u
  misc_feature (11)..(11): n is a, c, g, or u
  misc_feature (13)..(13): n is a, c, g, or u
  misc_feature (20)..(20): n is a, c, g, or u
uagnuuaangnunuuuguanua

SEQ ID NO: 91452 - RNA, 23 nt, Artificial Sequence
  Synthetic
  misc_feature (1)..(1): n is a, c, g, or u
  misc_feature (5)..(5): n is a, c, g, or u
  misc_feature (10)..(10): n is a, c, g, or u
  misc_feature (12)..(12): n is a, c, g, or u
  misc_feature (14)..(14): n is a, c, g, or u
  misc_feature (21)..(21): n is a, c, g, or u
nuagnuuaangnunuuuguanua

SEQ ID NO: 91453 - RNA, 24 nt, Artificial Sequence
  Synthetic
  misc_feature (1)..(2): n is a, c, g, or u
  misc_feature (6)..(6): n is a, c, g, or u
  misc_feature (11)..(11): n is a, c, g, or u
  misc_feature (13)..(13): n is a, c, g, or u
  misc_feature (15)..(15): n is a, c, g, or u
  misc_feature (22)..(22): n is a, c, g, or u
nnuagnuuaangnunuuuguanua

SEQ ID NO: 91454 - RNA, 18 nt, Artificial Sequence
  Synthetic
  misc_feature (16)..(16): n is a, c, g, or u
uaccgccucagcucunua

SEQ ID NO: 91455 - RNA, 19 nt, Artificial Sequence
  Synthetic
  misc_feature (17)..(17): n is a, c, g, or u
auaccgccucagcucunua

SEQ ID NO: 91456 - RNA, 20 nt, Artificial Sequence
  Synthetic
  misc_feature (18)..(18): n is a, c, g, or u
gauaccgccucagcucunua

SEQ ID NO: 91457 - RNA, 21 nt, Artificial Sequence
  Synthetic
  misc_feature (1)..(1): n is a, c, g, or u
  misc_feature (19)..(19): n is a, c, g, or u
ngauaccgccucagcucunua

SEQ ID NO: 91458 - RNA, 22 nt, Artificial Sequence
  Synthetic
  misc_feature (2)..(2): n is a, c, g, or u
  misc_feature (20)..(20): n is a, c, g, or u
ungauaccgccucagcucunua

SEQ ID NO: 91459 - RNA, 23 nt, Artificial Sequence
  Synthetic
  misc_feature (3)..(3): n is a, c, g, or u
  misc_feature (21)..(21): n is a, c, g, or u
cungauaccgccucagcucunua

SEQ ID NO: 91460 - RNA, 24 nt, Artificial Sequence
  Synthetic
  misc_feature (4)..(4): n is a, c, g, or u
  misc_feature (22)..(22): n is a, c, g, or u
ucungauaccgccucagcucunua

SEQ ID NO: 91461 - RNA, 18 nt, Artificial Sequence
  Synthetic
uggaaggcggguauauua

SEQ ID NO: 91462 - RNA, 19 nt, Artificial Sequence
  Synthetic
auggaaggcggguauauua

SEQ ID NO: 91463 - RNA, 20 nt, Artificial Sequence
  Synthetic
uauggaaggcggguauauua

SEQ ID NO: 91464 - RNA, 21 nt, Artificial Sequence
  Synthetic
cuauggaaggcggguauauua

SEQ ID NO: 91465 - RNA, 22 nt, Artificial Sequence
  Synthetic
ucuauggaaggcggguauauua

SEQ ID NO: 91466 - RNA, 23 nt, Artificial Sequence
  Synthetic
cucuauggaaggcggguauauua

SEQ ID NO: 91467 - RNA, 24 nt, Artificial Sequence
  Synthetic
acucuauggaaggcggguauauua

SEQ ID NO: 91468 - RNA, 18 nt, Artificial Sequence
  Synthetic
ggguauuaaaccuuauua

SEQ ID NO: 91469 - RNA, 19 nt, Artificial Sequence
  Synthetic
aggguauuaaaccuuauua

SEQ ID NO: 91470 - RNA, 20 nt, Artificial Sequence
  Synthetic
aaggguauuaaaccuuauua

SEQ ID NO: 91471 - RNA, 21 nt, Artificial Sequence
  Synthetic
uaaggguauuaaaccuuauua

SEQ ID NO: 91472 - RNA, 22 nt, Artificial Sequence
  Synthetic
auaaggguauuaaaccuuauua

SEQ ID NO: 91473 - RNA, 23 nt, Artificial Sequence
  Synthetic
gauaaggguauuaaaccuuauua

SEQ ID NO: 91474 - RNA, 24 nt, Artificial Sequence
  Synthetic
  misc_feature (1)..(1): n is a, c, g, or u
ngauaaggguauuaaaccuuauua

SEQ ID NO: 91475 - RNA, 18 nt, Artificial Sequence
  Synthetic
cacuuucucgccaacuua

SEQ ID NO: 91476 - RNA, 19 nt, Artificial Sequence
  Synthetic
ucacuuucucgccaacuua

SEQ ID NO: 91477 - RNA, 20 nt, Artificial Sequence
  Synthetic
uucacuuucucgccaacuua

SEQ ID NO: 91478 - RNA, 21 nt, Artificial Sequence
  Synthetic
uuucacuuucucgccaacuua

SEQ ID NO: 91479 - RNA, 22 nt, Artificial Sequence
  Synthetic
cuuucacuuucucgccaacuua

SEQ ID NO: 91480 - RNA, 23 nt, Artificial Sequence
  Synthetic
gcuuucacuuucucgccaacuua

SEQ ID NO: 91481 - RNA, 24 nt, Artificial Sequence
  Synthetic
ggcuuucacuuucucgccaacuua

SEQ ID NO: 91482 - RNA, 18 nt, Artificial Sequence
  Synthetic
  misc_feature (13)..(13): n is a, c, g, or u
cauggacauuganccuua

SEQ ID NO: 91483 - RNA, 19 nt, Artificial Sequence
  Synthetic
  misc_feature (1)..(1): n is a, c, g, or u
  misc_feature (14)..(14): n is a, c, g, or u
ncauggacauuganccuua

SEQ ID NO: 91484 - RNA, 20 nt, Artificial Sequence
  Synthetic
  misc_feature (2)..(2): n is a, c, g, or u
  misc_feature (15)..(15): n is a, c, g, or u
gncauggacauuganccuua

SEQ ID NO: 91485 - RNA, 21 nt, Artificial Sequence
  Synthetic
  misc_feature (3)..(3): n is a, c, g, or u
  misc_feature (16)..(16): n is a, c, g, or u
ggncauggacauuganccuua

SEQ ID NO: 91486 - RNA, 22 nt, Artificial Sequence
  Synthetic
  misc_feature (1)..(1): n is a, c, g, or u
  misc_feature (4)..(4): n is a, c, g, or u
  misc_feature (17)..(17): n is a, c, g, or u
nggncauggacauuganccuua

SEQ ID NO: 91487 - RNA, 23 nt, Artificial Sequence
  Synthetic
  misc_feature (2)..(2): n is a, c, g, or u
  misc_feature (5)..(5): n is a, c, g, or u
  misc_feature (18)..(18): n is a, c, g, or u
unggncauggacauuganccuua

SEQ ID NO: 91488 - RNA, 24 nt, Artificial Sequence
  Synthetic
  misc_feature (3)..(3): n is a, c, g, or u
  misc_feature (6)..(6): n is a, c, g, or u
  misc_feature (19)..(19): n is a, c, g, or u
uunggncauggacauuganccuua

SEQ ID NO: 91489 - RNA, 18 nt, Artificial Sequence
  Synthetic
  misc_feature (1)..(1): n is a, c, g, or u
nucuugcccaaggucuua

SEQ ID NO: 91490 - RNA, 19 nt, Artificial Sequence
  Synthetic
  misc_feature (1)..(2): n is a, c, g, or u
nnucuugcccaaggucuua

SEQ ID NO: 91491 - RNA, 20 nt, Artificial Sequence
  Synthetic
  misc_feature (2)..(3): n is a, c, g, or u
annucuugcccaaggucuua

SEQ ID NO: 91492 - RNA, 21 nt, Artificial Sequence
  Synthetic
  misc_feature (3)..(4): n is a, c, g, or u
cannucuugcccaaggucuua

SEQ ID NO: 91493 - RNA, 22 nt, Artificial Sequence
  Synthetic
  misc_feature (4)..(5): n is a, c, g, or u
ccannucuugcccaaggucuua

SEQ ID NO: 91494 - RNA, 23 nt, Artificial Sequence
  Synthetic
  misc_feature (5)..(6): n is a, c, g, or u
accannucuugcccaaggucuua

SEQ ID NO: 91495 - RNA, 24 nt, Artificial Sequence
  Synthetic
  misc_feature (6)..(7): n is a, c, g, or u
caccannucuugcccaaggucuua

SEQ ID NO: 91496 - RNA, 18 nt, Artificial Sequence
  Synthetic
cuguuuggcuuucaguua

SEQ ID NO: 91497 - RNA, 19 nt, Artificial Sequence
  Synthetic
acuguuuggcuuucaguua

SEQ ID NO: 91498 - RNA, 20 nt, Artificial Sequence
  Synthetic
cacuguuuggcuuucaguua

SEQ ID NO: 91499 - RNA, 21 nt, Artificial Sequence
  Synthetic
ccacuguuuggcuuucaguua

SEQ ID NO: 91500 - RNA, 22 nt, Artificial Sequence
  Synthetic
cccacuguuuggcuuucaguua

SEQ ID NO: 91501 - RNA, 23 nt, Artificial Sequence
  Synthetic
ccccacuguuuggcuuucaguua

SEQ ID NO: 91502 - RNA, 24 nt, Artificial Sequence
  Synthetic
cccccacuguuuggcuuucaguua

SEQ ID NO: 91503 - RNA, 18 nt, Artificial Sequence
  Synthetic
uuagaaaacuuccuguua

SEQ ID NO: 91504 - RNA, 19 nt, Artificial Sequence
  Synthetic
uuuagaaaacuuccuguua

SEQ ID NO: 91505 - RNA, 20 nt, Artificial Sequence
  Synthetic
uuuuagaaaacuuccuguua

SEQ ID NO: 91506 - RNA, 21 nt, Artificial Sequence
  Synthetic
guuuuagaaaacuuccuguua

SEQ ID NO: 91507 - RNA, 22 nt, Artificial Sequence
  Synthetic
uguuuuagaaaacuuccuguua

SEQ ID NO: 91508 - RNA, 23 nt, Artificial Sequence
  Synthetic
auguuuuagaaaacuuccuguua

SEQ ID NO: 91509 - RNA, 24 nt, Artificial Sequence
  Synthetic
aauguuuuagaaaacuuccuguua

SEQ ID NO: 91510 - RNA, 18 nt, Artificial Sequence
  Synthetic
cggagacuacuguuguua

SEQ ID NO: 91511 - RNA, 19 nt, Artificial Sequence
  Synthetic
ccggagacuacuguuguua

SEQ ID NO: 91512 - RNA, 20 nt, Artificial Sequence
  Synthetic
uccggagacuacuguuguua

SEQ ID NO: 91513 - RNA, 21 nt, Artificial Sequence
  Synthetic
uuccggagacuacuguuguua

SEQ ID NO: 91514 - RNA, 22 nt, Artificial Sequence
  Synthetic
cuuccggagacuacuguuguua

SEQ ID NO: 91515 - RNA, 23 nt, Artificial Sequence
  Synthetic
acuuccggagacuacuguuguua

SEQ ID NO: 91516 - RNA, 24 nt, Artificial Sequence
  Synthetic
cacuuccggagacuacuguuguua

SEQ ID NO: 91517 - RNA, 18 nt, Artificial Sequence
  Synthetic
  misc_feature (11)..(11): n is a, c, g, or u
auaaggugggnaacuuua

SEQ ID NO: 91518 - RNA, 19 nt, Artificial Sequence
  Synthetic
  misc_feature (12)..(12): n is a, c, g, or u
cauaaggugggnaacuuua

SEQ ID NO: 91519 - RNA, 20 nt, Artificial Sequence
  Synthetic
  misc_feature (13)..(13): n is a, c, g, or u
ucauaaggugggnaacuuua

SEQ ID NO: 91520 - RNA, 21 nt, Artificial Sequence
  Synthetic
  misc_feature (14)..(14): n is a, c, g, or u
cucauaaggugggnaacuuua

SEQ ID NO: 91521 - RNA, 22 nt, Artificial Sequence
  Synthetic
  misc_feature (15)..(15): n is a, c, g, or u
acucauaaggugggnaacuuua

SEQ ID NO: 91522 - RNA, 23 nt, Artificial Sequence
  Synthetic
  misc_feature (16)..(16): n is a, c, g, or u
gacucauaaggugggnaacuuua

SEQ ID NO: 91523 - RNA, 24 nt, Artificial Sequence
  Synthetic
  misc_feature (17)..(17): n is a, c, g, or u
ggacucauaaggugggnaacuuua

SEQ ID NO: 91524 - RNA, 18 nt, Artificial Sequence
  Synthetic
ggggcgcaccucucuuua

SEQ ID NO: 91525 - RNA, 19 nt, Artificial Sequence
  Synthetic
cggggcgcaccucucuuua

SEQ ID NO: 91526 - RNA, 20 nt, Artificial Sequence
  Synthetic
acggggcgcaccucucuuua

SEQ ID NO: 91527 - RNA, 21 nt, Artificial Sequence
  Synthetic
cacggggcgcaccucucuuua

SEQ ID NO: 91528 - RNA, 22 nt, Artificial Sequence
  Synthetic
ccacggggcgcaccucucuuua

SEQ ID NO: 91529 - RNA, 23 nt, Artificial Sequence
  Synthetic
accacggggcgcaccucucuuua

SEQ ID NO: 91530 - RNA, 24 nt, Artificial Sequence
  Synthetic
gaccacggggcgcaccucucuuua

SEQ ID NO: 91531 - RNA, 18 nt, Artificial Sequence
  Synthetic
uaugccugcuagguuuua

SEQ ID NO: 91532 - RNA, 19 nt, Artificial Sequence
  Synthetic
uuaugccugcuagguuuua

SEQ ID NO: 91533 - RNA, 20 nt, Artificial Sequence
  Synthetic
auuaugccugcuagguuuua

SEQ ID NO: 91534 - RNA, 21 nt, Artificial Sequence
  Synthetic
  misc_feature (1)..(1): n is a, c, g, or u
nauuaugccugcuagguuuua

SEQ ID NO: 91535 - RNA, 22 nt, Artificial Sequence
  Synthetic
  misc_feature (2)..(2): n is a, c, g, or u
unauuaugccugcuagguuuua

SEQ ID NO: 91536 - RNA, 23 nt, Artificial Sequence
  Synthetic
  misc_feature (3)..(3): n is a, c, g, or u
uunauuaugccugcuagguuuua

SEQ ID NO: 91537 - RNA, 24 nt, Artificial Sequence
  Synthetic
  misc_feature (4)..(4): n is a, c, g, or u
auunauuaugccugcuagguuuua

SEQ ID NO: 91538 - RNA, 18 nt, Artificial Sequence
  Synthetic
aaaucaaagaauguuuua

SEQ ID NO: 91539 - RNA, 19 nt, Artificial Sequence
  Synthetic
aaaaucaaagaauguuuua

SEQ ID NO: 91540 - RNA, 20 nt, Artificial Sequence
  Synthetic
  misc_feature (1)..(1): n is a, c, g, or u
naaaaucaaagaauguuuua

SEQ ID NO: 91541 - RNA, 21 nt, Artificial Sequence
  Synthetic
  misc_feature (2)..(2): n is a, c, g, or u
anaaaaucaaagaauguuuua

SEQ ID NO: 91542 - RNA, 22 nt, Artificial Sequence
  Synthetic
  misc_feature (3)..(3): n is a, c, g, or u
canaaaaucaaagaauguuuua

SEQ ID NO: 91543 - RNA, 23 nt, Artificial Sequence
  Synthetic
  misc_feature (4)..(4): n is a, c, g, or u
acanaaaaucaaagaauguuuua

SEQ ID NO: 91544 - RNA, 24 nt, Artificial Sequence
  Synthetic
  misc_feature (1)..(1): n is a, c, g, or u
  misc_feature (5)..(5): n is a, c, g, or u
nacanaaaaucaaagaauguuuua

SEQ ID NO: 91545 - RNA, 18 nt, Artificial Sequence
  Synthetic
uuuaaacccuaacaaaac

SEQ ID NO: 91546 - RNA, 19 nt, Artificial Sequence
  Synthetic
auuuaaacccuaacaaaac

SEQ ID NO: 91547 - RNA, 20 nt, Artificial Sequence
  Synthetic
cauuuaaacccuaacaaaac

SEQ ID NO: 91548 - RNA, 21 nt, Artificial Sequence
  Synthetic
acauuuaaacccuaacaaaac

SEQ ID NO: 91549 - RNA, 22 nt, Artificial Sequence
  Synthetic
uacauuuaaacccuaacaaaac

SEQ ID NO: 91550 - RNA, 23 nt, Artificial Sequence
  Synthetic
auacauuuaaacccuaacaaaac

SEQ ID NO: 91551 - RNA, 24 nt, Artificial Sequence
  Synthetic
uauacauuuaaacccuaacaaaac

SEQ ID NO: 91552 - RNA, 18 nt, Artificial Sequence
  Synthetic
uuggguauacauuuaaac

SEQ ID NO: 91553 - RNA, 19 nt, Artificial Sequence
  Synthetic
uuuggguauacauuuaaac

SEQ ID NO: 91554 - RNA, 20 nt, Artificial Sequence
  Synthetic
cuuuggguauacauuuaaac

SEQ ID NO: 91555 - RNA, 21 nt, Artificial Sequence
  Synthetic
ucuuuggguauacauuuaaac

SEQ ID NO: 91556 - RNA, 22 nt, Artificial Sequence
  Synthetic
gucuuuggguauacauuuaaac

SEQ ID NO: 91557 - RNA, 23 nt, Artificial Sequence
  Synthetic
ugucuuuggguauacauuuaaac

SEQ ID NO: 91558 - RNA, 24 nt, Artificial Sequence
  Synthetic
uugucuuuggguauacauuuaaac

SEQ ID NO: 91559 - RNA, 18 nt, Artificial Sequence
  Synthetic
ugggacuucaaucccaac

SEQ ID NO: 91560 - RNA, 19 nt, Artificial Sequence
  Synthetic
uugggacuucaaucccaac

SEQ ID NO: 91561 - RNA, 20 nt, Artificial Sequence
  Synthetic
auugggacuucaaucccaac

SEQ ID NO: 91562 - RNA, 21 nt, Artificial Sequence
  Synthetic
gauugggacuucaaucccaac

SEQ ID NO: 91563 - RNA, 22 nt, Artificial Sequence
  Synthetic
agauugggacuucaaucccaac

SEQ ID NO: 91564 - RNA, 23 nt, Artificial Sequence
  Synthetic
cagauugggacuucaaucccaac

SEQ ID NO: 91565 - RNA, 24 nt, Artificial Sequence
  Synthetic
ccagauugggacuucaaucccaac

SEQ ID NO: 91566 - RNA, 18 nt, Artificial Sequence
  Synthetic
uggcuccaguucaggaac

SEQ ID NO: 91567 - RNA, 19 nt, Artificial Sequence
  Synthetic
guggcuccaguucaggaac

SEQ ID NO: 91568 - RNA, 20 nt, Artificial Sequence
  Synthetic
gguggcuccaguucaggaac

SEQ ID NO: 91569 - RNA, 21 nt, Artificial Sequence
  Synthetic
ugguggcuccaguucaggaac

SEQ ID NO: 91570 - RNA, 22 nt, Artificial Sequence
  Synthetic
cugguggcuccaguucaggaac

SEQ ID NO: 91571 - RNA, 23 nt, Artificial Sequence
  Synthetic
gcugguggcuccaguucaggaac

SEQ ID NO: 91572 - RNA, 24 nt, Artificial Sequence
  Synthetic
ugcugguggcuccaguucaggaac

SEQ ID NO: 91573 - RNA, 18 nt, Artificial Sequence
  Synthetic
caccauauucuugggaac

SEQ ID NO: 91574 - RNA, 19 nt, Artificial Sequence
  Synthetic
ucaccauauucuugggaac

SEQ ID NO: 91575 - RNA, 20 nt, Artificial Sequence
  Synthetic
gucaccauauucuugggaac

SEQ ID NO: 91576 - RNA, 21 nt, Artificial Sequence
  Synthetic
ggucaccauauucuugggaac

SEQ ID NO: 91577 - RNA, 22 nt, Artificial Sequence
  Synthetic
gggucaccauauucuugggaac

SEQ ID NO: 91578 - RNA, 23 nt, Artificial Sequence
  Synthetic
ugggucaccauauucuugggaac

SEQ ID NO: 91579 - RNA, 24 nt, Artificial Sequence
  Synthetic
gugggucaccauauucuugggaac

SEQ ID NO: 91580 - RNA, 18 nt, Artificial Sequence
  Synthetic
ggggacccugcgcugaac

SEQ ID NO: 91581 - RNA, 19 nt, Artificial Sequence
  Synthetic
uggggacccugcgcugaac

SEQ ID NO: 91582 - RNA, 20 nt, Artificial Sequence
  Synthetic
uuggggacccugcgcugaac

SEQ ID NO: 91583 - RNA, 21 nt, Artificial Sequence
  Synthetic
auuggggacccugcgcugaac

SEQ ID NO: 91584 - RNA, 22 nt, Artificial Sequence
  Synthetic
gauuggggacccugcgcugaac

SEQ ID NO: 91585 - RNA, 23 nt, Artificial Sequence
  Synthetic
ggauuggggacccugcgcugaac

SEQ ID NO: 91586 - RNA, 24 nt, Artificial Sequence
  Synthetic
aggauuggggacccugcgcugaac

SEQ ID NO: 91587 - RNA, 18 nt, Artificial Sequence
  Synthetic
agccuucagagcaaacac

SEQ ID NO: 91588 - RNA, 19 nt, Artificial Sequence
  Synthetic
cagccuucagagcaaacac

SEQ ID NO: 91589 - RNA, 20 nt, Artificial Sequence
  Synthetic
ccagccuucagagcaaacac

SEQ ID NO: 91590 - RNA, 21 nt, Artificial Sequence
  Synthetic
uccagccuucagagcaaacac

SEQ ID NO: 91591 - RNA, 22 nt, Artificial Sequence
  Synthetic
auccagccuucagagcaaacac

SEQ ID NO: 91592 - RNA, 23 nt, Artificial Sequence
  Synthetic
gauccagccuucagagcaaacac

SEQ ID NO: 91593 - RNA, 24 nt, Artificial Sequence
  Synthetic
ggauccagccuucagagcaaacac

SEQ ID NO: 91594 - RNA, 18 nt, Artificial Sequence
  Synthetic
ccuaauauacauuuacac

SEQ ID NO: 91595 - RNA, 19 nt, Artificial Sequence
  Synthetic
uccuaauauacauuuacac

SEQ ID NO: 91596 - RNA, 20 nt, Artificial Sequence
  Synthetic
uuccuaauauacauuuacac

SEQ ID NO: 91597 - RNA, 21 nt, Artificial Sequence
  Synthetic
uuuccuaauauacauuuacac

SEQ ID NO: 91598 - RNA, 22 nt, Artificial Sequence
  Synthetic
uuuuccuaauauacauuuacac

SEQ ID NO: 91599 - RNA, 23 nt, Artificial Sequence
  Synthetic
cuuuuccuaauauacauuuacac

SEQ ID NO: 91600 - RNA, 24 nt, Artificial Sequence
  Synthetic
ucuuuuccuaauauacauuuacac

SEQ ID NO: 91601 - RNA, 18 nt, Artificial Sequence
  Synthetic
acgucgcauggagaccac

SEQ ID NO: 91602 - RNA, 19 nt, Artificial Sequence
  Synthetic
cacgucgcauggagaccac

SEQ ID NO: 91603 - RNA, 20 nt, Artificial Sequence
  Synthetic
gcacgucgcauggagaccac

SEQ ID NO: 91604 - RNA, 21 nt, Artificial Sequence
  Synthetic
ugcacgucgcauggagaccac

SEQ ID NO: 91605 - RNA, 22 nt, Artificial Sequence
  Synthetic
cugcacgucgcauggagaccac

SEQ ID NO: 91606 - RNA, 23 nt, Artificial Sequence
  Synthetic
ucugcacgucgcauggagaccac

SEQ ID NO: 91607 - RNA, 24 nt, Artificial Sequence
  Synthetic
cucugcacgucgcauggagaccac

SEQ ID NO: 91608 - RNA, 18 nt, Artificial Sequence
  Synthetic
  misc_feature (3)..(3): n is a, c, g, or u
ggnuucaccccaccgcac

SEQ ID NO: 91609 - RNA, 19 nt, Artificial Sequence
  Synthetic
  misc_feature (4)..(4): n is a, c, g, or u
gggnuucaccccaccgcac

SEQ ID NO: 91610 - RNA, 20 nt, Artificial Sequence
  Synthetic
  misc_feature (5)..(5): n is a, c, g, or u
ugggnuucaccccaccgcac

SEQ ID NO: 91611 - RNA, 21 nt, Artificial Sequence
  Synthetic
  misc_feature (6)..(6): n is a, c, g, or u
cugggnuucaccccaccgcac

SEQ ID NO: 91612 - RNA, 22 nt, Artificial Sequence
  Synthetic
  misc_feature (7)..(7): n is a, c, g, or u
gcugggnuucaccccaccgcac

SEQ ID NO: 91613 - RNA, 23 nt, Artificial Sequence
  Synthetic
  misc_feature (8)..(8): n is a, c, g, or u
ggcugggnuucaccccaccgcac

SEQ ID NO: 91614 - RNA, 24 nt, Artificial Sequence
  Synthetic
  misc_feature (9)..(9): n is a, c, g, or u
gggcugggnuucaccccaccgcac

SEQ ID NO: 91615 - RNA, 18 nt, Artificial Sequence
  Synthetic
  misc_feature (8)..(8): n is a, c, g, or u
caccucancauacugcac

SEQ ID NO: 91616 - RNA, 19 nt, Artificial Sequence
  Synthetic
  misc_feature (9)..(9): n is a, c, g, or u
ucaccucancauacugcac

SEQ ID NO: 91617 - RNA, 20 nt, Artificial Sequence
  Synthetic
  misc_feature (1)..(1): n is a, c, g, or u
  misc_feature (10)..(10): n is a, c, g, or u
nucaccucancauacugcac

SEQ ID NO: 91618 - RNA, 21 nt, Artificial Sequence
  Synthetic
  misc_feature (2)..(2): n is a, c, g, or u
  misc_feature (11)..(11): n is a, c, g, or u
gnucaccucancauacugcac

SEQ ID NO: 91619 - RNA, 22 nt, Artificial Sequence
  Synthetic
  misc_feature (3)..(3): n is a, c, g, or u
  misc_feature (12)..(12): n is a, c, g, or u
ugnucaccucancauacugcac

SEQ ID NO: 91620 - RNA, 23 nt, Artificial Sequence
  Synthetic
  misc_feature (4)..(4): n is a, c, g, or u
  misc_feature (13)..(13): n is a, c, g, or u
uugnucaccucancauacugcac

SEQ ID NO: 91621 - RNA, 24 nt, Artificial Sequence
  Synthetic
  misc_feature (5)..(5): n is a, c, g, or u
  misc_feature (14)..(14): n is a, c, g, or u
auugnucaccucancauacugcac

SEQ ID NO: 91622 - RNA, 18 nt, Artificial Sequence
  Synthetic
gaacauggagaacaucac

SEQ ID NO: 91623 - RNA, 19 nt, Artificial Sequence
  Synthetic
ugaacauggagaacaucac

SEQ ID NO: 91624 - RNA, 20 nt, Artificial Sequence
  Synthetic
cugaacauggagaacaucac

SEQ ID NO: 91625 - RNA, 21 nt, Artificial Sequence
  Synthetic
gcugaacauggagaacaucac

SEQ ID NO: 91626 - RNA, 22 nt, Artificial Sequence
  Synthetic
cgcugaacauggagaacaucac

SEQ ID NO: 91627 - RNA, 23 nt, Artificial Sequence
  Synthetic
gcgcugaacauggagaacaucac

SEQ ID NO: 91628 - RNA, 24 nt, Artificial Sequence
  Synthetic
ugcgcugaacauggagaacaucac

SEQ ID NO: 91629 - RNA, 18 nt, Artificial Sequence
  Synthetic
aaggacaccuggccagac

SEQ ID NO: 91630 - RNA, 19 nt, Artificial Sequence
  Synthetic
caaggacaccuggccagac

SEQ ID NO: 91631 - RNA, 20 nt, Artificial Sequence
  Synthetic
acaaggacaccuggccagac

SEQ ID NO: 91632 - RNA, 21 nt, Artificial Sequence
  Synthetic
aacaaggacaccuggccagac

SEQ ID NO: 91633 - RNA, 22 nt, Artificial Sequence
  Synthetic
caacaaggacaccuggccagac

SEQ ID NO: 91634 - RNA, 23 nt, Artificial Sequence
  Synthetic
ccaacaaggacaccuggccagac

SEQ ID NO: 91635 - RNA, 24 nt, Artificial Sequence
  Synthetic
cccaacaaggacaccuggccagac

SEQ ID NO: 91636 - RNA, 18 nt, Artificial Sequence
  Synthetic
agacuacuguuguuagac

SEQ ID NO: 91637 - RNA, 19 nt, Artificial Sequence
  Synthetic
gagacuacuguuguuagac

SEQ ID NO: 91638 - RNA, 20 nt, Artificial Sequence
  Synthetic
ggagacuacuguuguuagac

SEQ ID NO: 91639 - RNA, 21 nt, Artificial Sequence
  Synthetic
cggagacuacuguuguuagac

SEQ ID NO: 91640 - RNA, 22 nt, Artificial Sequence
  Synthetic
ccggagacuacuguuguuagac

SEQ ID NO: 91641 - RNA, 23 nt, Artificial Sequence
  Synthetic
uccggagacuacuguuguuagac

SEQ ID NO: 91642 - RNA, 24 nt, Artificial Sequence
  Synthetic
uuccggagacuacuguuguuagac

SEQ ID NO: 91643 - RNA, 18 nt, Artificial Sequence
  Synthetic
  misc_feature (2)..(2): n is a, c, g, or u
gnaaugucaacgaccgac

SEQ ID NO: 91644 - RNA, 19 nt, Artificial Sequence
  Synthetic
  misc_feature (3)..(3): n is a, c, g, or u
ugnaaugucaacgaccgac

SEQ ID NO: 91645 - RNA, 20 nt, Artificial Sequence
  Synthetic
  misc_feature (4)..(4): n is a, c, g, or u
cugnaaugucaacgaccgac

SEQ ID NO: 91646 - RNA, 21 nt, Artificial Sequence
  Synthetic
  misc_feature (5)..(5): n is a, c, g, or u
ucugnaaugucaacgaccgac

SEQ ID NO: 91647 - RNA, 22 nt, Artificial Sequence
  Synthetic
  misc_feature (6)..(6): n is a, c, g, or u
cucugnaaugucaacgaccgac

SEQ ID NO: 91648 - RNA, 23 nt, Artificial Sequence
  Synthetic
  misc_feature (7)..(7): n is a, c, g, or u
ucucugnaaugucaacgaccgac

SEQ ID NO: 91649 - RNA, 24 nt, Artificial Sequence
  Synthetic
  misc_feature (8)..(8): n is a, c, g, or u
cucucugnaaugucaacgaccgac

SEQ ID NO: 91650 - RNA, 18 nt, Artificial Sequence
  Synthetic
  misc_feature (10)..(10): n is a, c, g, or u
  misc_feature (13)..(13): n is a, c, g, or u
ucugccguuncgnccgac

SEQ ID NO: 91651 - RNA, 19 nt, Artificial Sequence
  Synthetic
  misc_feature (11)..(11): n is a, c, g, or u
  misc_feature (14)..(14): n is a, c, g, or u
gucugccguuncgnccgac

SEQ ID NO: 91652 - RNA, 20 nt, Artificial Sequence
  Synthetic
  misc_feature (12)..(12): n is a, c, g, or u
  misc_feature (15)..(15): n is a, c, g, or u
cgucugccguuncgnccgac

SEQ ID NO: 91653 - RNA, 21 nt, Artificial Sequence
  Synthetic
  misc_feature (13)..(13): n is a, c, g, or u
  misc_feature (16)..(16): n is a, c, g, or u
ccgucugccguuncgnccgac

SEQ ID NO: 91654 - RNA, 22 nt, Artificial Sequence
  Synthetic
  misc_feature (14)..(14): n is a, c, g, or u
  misc_feature (17)..(17): n is a, c, g, or u
uccgucugccguuncgnccgac

SEQ ID NO: 91655 - RNA, 23 nt, Artificial Sequence
  Synthetic
  misc_feature (15)..(15): n is a, c, g, or u
  misc_feature (18)..(18): n is a, c, g, or u
cuccgucugccguuncgnccgac

SEQ ID NO: 91656 - RNA, 24 nt, Artificial Sequence
  Synthetic
  misc_feature (16)..(16): n is a, c, g, or u
  misc_feature (19)..(19): n is a, c, g, or u
ucuccgucugccguuncgnccgac

SEQ ID NO: 91657 - RNA, 18 nt, Artificial Sequence
  Synthetic
  misc_feature (8)..(8): n is a, c, g, or u
  misc_feature (11)..(11): n is a, c, g, or u
uggcuuunggncauggac

SEQ ID NO: 91658 - RNA, 19 nt, Artificial Sequence
  Synthetic
  misc_feature (9)..(9): n is a, c, g, or u
  misc_feature (12)..(12): n is a, c, g, or u
guggcuuunggncauggac

SEQ ID NO: 91659 - RNA, 20 nt, Artificial Sequence
  Synthetic
  misc_feature (10)..(10): n is a, c, g, or u
  misc_feature (13)..(13): n is a, c, g, or u
gguggcuuunggncauggac

SEQ ID NO: 91660 - RNA, 21 nt, Artificial Sequence
  Synthetic
  misc_feature (11)..(11): n is a, c, g, or u
  misc_feature (14)..(14): n is a, c, g, or u
ggguggcuuunggncauggac

SEQ ID NO: 91661 - RNA, 22 nt, Artificial Sequence
  Synthetic
  misc_feature (12)..(12): n is a, c, g, or u
  misc_feature (15)..(15): n is a, c, g, or u
uggguggcuuunggncauggac

SEQ ID NO: 91662 - RNA, 23 nt, Artificial Sequence
  Synthetic
  misc_feature (13)..(13): n is a, c, g, or u
  misc_feature (16)..(16): n is a, c, g, or u
uuggguggcuuunggncauggac

SEQ ID NO: 91663 - RNA, 24 nt, Artificial Sequence
  Synthetic
  misc_feature (14)..(14): n is a, c, g, or u
  misc_feature (17)..(17): n is a, c, g, or u
cuuggguggcuuunggncauggac

SEQ ID NO: 91664 - RNA, 18 nt, Artificial Sequence
  Synthetic
  misc_feature (15)..(15): n is a, c, g, or u
gacuguuuguuuaangac

SEQ ID NO: 91665 - RNA, 19 nt, Artificial Sequence
  Synthetic
  misc_feature (16)..(16): n is a, c, g, or u
agacuguuuguuuaangac

SEQ ID NO: 91666 - RNA, 20 nt, Artificial Sequence
  Synthetic
  misc_feature (17)..(17): n is a, c, g, or u
aagacuguuuguuuaangac

SEQ ID NO: 91667 - RNA, 21 nt, Artificial Sequence
  Synthetic
  misc_feature (18)..(18): n is a, c, g, or u
aaagacuguuuguuuaangac

SEQ ID NO: 91668 - RNA, 22 nt, Artificial Sequence
  Synthetic
  misc_feature (19)..(19): n is a, c, g, or u
caaagacuguuuguuuaangac

SEQ ID NO: 91669 - RNA, 23 nt, Artificial Sequence
  Synthetic
  misc_feature (20)..(20): n is a, c, g, or u
ucaaagacuguuuguuuaangac

SEQ ID NO: 91670 - RNA, 24 nt, Artificial Sequence
  Synthetic
  misc_feature (21)..(21): n is a, c, g, or u
uucaaagacuguuuguuuaangac

SEQ ID NO: 91671 - RNA, 18 nt, Artificial Sequence
  Synthetic
  misc_feature (10)..(10): n is a, c, g, or u
cuggggggancuaaugac

SEQ ID NO: 91672 - RNA, 19 nt, Artificial Sequence
  Synthetic
  misc_feature (11)..(11): n is a, c, g, or u
gcuggggggancuaaugac

SEQ ID NO: 91673 - RNA, 20 nt, Artificial Sequence
  Synthetic
  misc_feature (12)..(12): n is a, c, g, or u
ugcuggggggancuaaugac

SEQ ID NO: 91674 - RNA, 21 nt, Artificial Sequence
  Synthetic
  misc_feature (1)..(1): n is a, c, g, or u
  misc_feature (13)..(13): n is a, c, g, or u
nugcuggggggancuaaugac

SEQ ID NO: 91675 - RNA, 22 nt, Artificial Sequence
  Synthetic
  misc_feature (2)..(2): n is a, c, g, or u
  misc_feature (14)..(14): n is a, c, g, or u
unugcuggggggancuaaugac

SEQ ID NO: 91676 - RNA, 23 nt, Artificial Sequence
  Synthetic
  misc_feature (3)..(3): n is a, c, g, or u
  misc_feature (15)..(15): n is a, c, g, or u
cunugcuggggggancuaaugac

SEQ ID NO: 91677 - RNA, 24 nt, Artificial Sequence
  Synthetic
  misc_feature (1)..(1): n is a, c, g, or u
  misc_feature (4)..(4): n is a, c, g, or u
  misc_feature (16)..(16): n is a, c, g, or u
ncunugcuggggggancuaaugac

SEQ ID NO: 91678 - RNA, 18 nt, Artificial Sequence
  Synthetic
  misc_feature (8)..(8): n is a, c, g, or u
  misc_feature (16)..(16): n is a, c, g, or u
cacaagancacaucanac

SEQ ID NO: 91679 - RNA, 19 nt, Artificial Sequence
  Synthetic
  misc_feature (9)..(9): n is a, c, g, or u
  misc_feature (17)..(17): n is a, c, g, or u
ccacaagancacaucanac

SEQ ID NO: 91680 - RNA, 20 nt, Artificial Sequence
  Synthetic
  misc_feature (10)..(10): n is a, c, g, or u
  misc_feature (18)..(18): n is a, c, g, or u
gccacaagancacaucanac

SEQ ID NO: 91681 - RNA, 21 nt, Artificial Sequence
  Synthetic
  misc_feature (11)..(11): n is a, c, g, or u
  misc_feature (19)..(19): n is a, c, g, or u
ugccacaagancacaucanac

SEQ ID NO: 91682 - RNA, 22 nt, Artificial Sequence
  Synthetic
  misc_feature (12)..(12): n is a, c, g, or u
  misc_feature (20)..(20): n is a, c, g, or u
uugccacaagancacaucanac

SEQ ID NO: 91683 - RNA, 23 nt, Artificial Sequence
  Synthetic
  misc_feature (1)..(1): n is a, c, g, or u
  misc_feature (13)..(13): n is a, c, g, or u
  misc_feature (21)..(21): n is a, c, g, or u
nuugccacaagancacaucanac

SEQ ID NO: 91684 - RNA, 24 nt, Artificial Sequence
  Synthetic
  misc_feature (2)..(2): n is a, c, g, or u
  misc_feature (14)..(14): n is a, c, g, or u
  misc_feature (22)..(22): n is a, c, g, or u
cnuugccacaagancacaucanac

SEQ ID NO: 91685 - RNA, 18 nt, Artificial Sequence
  Synthetic
uuucuguguaaacaauac

SEQ ID NO: 91686 - RNA, 19 nt, Artificial Sequence
  Synthetic
cuuucuguguaaacaauac

SEQ ID NO: 91687 - RNA, 20 nt, Artificial Sequence
  Synthetic
ccuuucuguguaaacaauac

SEQ ID NO: 91688 - RNA, 21 nt, Artificial Sequence
  Synthetic
gccuuucuguguaaacaauac

SEQ ID NO: 91689 - RNA, 22 nt, Artificial Sequence
  Synthetic
ggccuuucuguguaaacaauac

SEQ ID NO: 91690 - RNA, 23 nt, Artificial Sequence
  Synthetic
aggccuuucuguguaaacaauac

SEQ ID NO: 91691 - RNA, 24 nt, Artificial Sequence
  Synthetic
aaggccuuucuguguaaacaauac

SEQ ID NO: 91692 - RNA, 18 nt, Artificial Sequence
  Synthetic
caagaauccucacaauac

SEQ ID NO: 91693 - RNA, 19 nt, Artificial Sequence
  Synthetic
acaagaauccucacaauac

SEQ ID NO: 91694 - RNA, 20 nt, Artificial Sequence
  Synthetic
gacaagaauccucacaauac

SEQ ID NO: 91695 - RNA, 21 nt, Artificial Sequence
  Synthetic
ugacaagaauccucacaauac

SEQ ID NO: 91696 - RNA, 22 nt, Artificial Sequence
  Synthetic
uugacaagaauccucacaauac

SEQ ID NO: 91697 - RNA, 23 nt, Artificial Sequence
  Synthetic
guugacaagaauccucacaauac

SEQ ID NO: 91698 - RNA, 24 nt, Artificial Sequence
  Synthetic
uguugacaagaauccucacaauac

SEQ ID NO: 91699 - RNA, 18 nt, Artificial Sequence
  Synthetic
uccucugccgauccauac

SEQ ID NO: 91700 - RNA, 19 nt, Artificial Sequence
  Synthetic
cuccucugccgauccauac

SEQ ID NO: 91701 - RNA, 20 nt, Artificial Sequence
  Synthetic
gcuccucugccgauccauac

SEQ ID NO: 91702 - RNA, 21 nt, Artificial Sequence
  Synthetic
ggcuccucugccgauccauac

SEQ ID NO: 91703 - RNA, 22 nt, Artificial Sequence
  Synthetic
  misc_feature (1)..(1): n is a, c, g, or u
nggcuccucugccgauccauac

SEQ ID NO: 91704 - RNA, 23 nt, Artificial Sequence
  Synthetic
  misc_feature (1)..(2): n is a, c, g, or u
nnggcuccucugccgauccauac

SEQ ID NO: 91705 - RNA, 24 nt, Artificial Sequence
  Synthetic
  misc_feature (2)..(3): n is a, c, g, or u
unnggcuccucugccgauccauac

SEQ ID NO: 91706 - RNA, 18 nt, Artificial Sequence
  Synthetic
accgaccuugaggcauac

SEQ ID NO: 91707 - RNA, 19 nt, Artificial Sequence
  Synthetic
gaccgaccuugaggcauac

SEQ ID NO: 91708 - RNA, 20 nt, Artificial Sequence
  Synthetic
cgaccgaccuugaggcauac

SEQ ID NO: 91709 - RNA, 18 nt, Artificial Sequence
  Synthetic
ucuugcccaaggucuuac

SEQ ID NO: 91710 - RNA, 19 nt, Artificial Sequence
  Synthetic
  misc_feature (1)..(1): n is a, c, g, or u
nucuugcccaaggucuuac

SEQ ID NO: 91711 - RNA, 20 nt, Artificial Sequence
  Synthetic
  misc_feature (1)..(2): n is a, c, g, or u
nnucuugcccaaggucuuac

SEQ ID NO: 91712 - RNA, 21 nt, Artificial Sequence
  Synthetic
  misc_feature (2)..(3): n is a, c, g, or u
annucuugcccaaggucuuac

SEQ ID NO: 91713 - RNA, 22 nt, Artificial Sequence
  Synthetic
  misc_feature (3)..(4): n is a, c, g, or u
cannucuugcccaaggucuuac

SEQ ID NO: 91714 - RNA, 23 nt, Artificial Sequence
  Synthetic
  misc_feature (4)..(5): n is a, c, g, or u
ccannucuugcccaaggucuuac

SEQ ID NO: 91715 - RNA, 24 nt, Artificial Sequence
  Synthetic
  misc_feature (5)..(6): n is a, c, g, or u
accannucuugcccaaggucuuac

SEQ ID NO: 91716 - RNA, 18 nt, Artificial Sequence
  Synthetic
uuccuaauauacauuuac

SEQ ID NO: 91717 - RNA, 19 nt, Artificial Sequence
  Synthetic
uuuccuaauauacauuuac

SEQ ID NO: 91718 - RNA, 20 nt, Artificial Sequence
  Synthetic
uuuuccuaauauacauuuac

SEQ ID NO: 91719 - RNA, 21 nt, Artificial Sequence
  Synthetic
cuuuuccuaauauacauuuac

SEQ ID NO: 91720 - RNA, 22 nt, Artificial Sequence
  Synthetic
ucuuuuccuaauauacauuuac

SEQ ID NO: 91721 - RNA, 23 nt, Artificial Sequence
  Synthetic
  misc_feature (1)..(1): n is a, c, g, or u
nucuuuuccuaauauacauuuac

SEQ ID NO: 91722 - RNA, 24 nt, Artificial Sequence
  Synthetic
  misc_feature (2)..(2): n is a, c, g, or u
cnucuuuuccuaauauacauuuac

SEQ ID NO: 91723 - RNA, 18 nt, Artificial Sequence
  Synthetic
gggcgcaccucucuuuac

SEQ ID NO: 91724 - RNA, 19 nt, Artificial Sequence
  Synthetic
ggggcgcaccucucuuuac

SEQ ID NO: 91725 - RNA, 20 nt, Artificial Sequence
  Synthetic
cggggcgcaccucucuuuac

SEQ ID NO: 91726 - RNA, 18 nt, Artificial Sequence
  Synthetic
cuguugcuguaccaaacc

SEQ ID NO: 91727 - RNA, 19 nt, Artificial Sequence
  Synthetic
ccuguugcuguaccaaacc

SEQ ID NO: 91728 - RNA, 20 nt, Artificial Sequence
  Synthetic
uccuguugcuguaccaaacc

SEQ ID NO: 91729 - RNA, 21 nt, Artificial Sequence
  Synthetic
cuccuguugcuguaccaaacc

SEQ ID NO: 91730 - RNA, 22 nt, Artificial Sequence
  Synthetic
ccuccuguugcuguaccaaacc

SEQ ID NO: 91731 - RNA, 23 nt, Artificial Sequence
  Synthetic
cccuccuguugcuguaccaaacc

SEQ ID NO: 91732 - RNA, 24 nt, Artificial Sequence
  Synthetic
ucccuccuguugcuguaccaaacc

SEQ ID NO: 91733 - RNA, 18 nt, Artificial Sequence
  Synthetic
cgucgcauggagaccacc

SEQ ID NO: 91734 - RNA, 19 nt, Artificial Sequence
  Synthetic
acgucgcauggagaccacc

SEQ ID NO: 91735 - RNA, 20 nt, Artificial Sequence
  Synthetic
cacgucgcauggagaccacc

SEQ ID NO: 91736 - RNA, 21 nt, Artificial Sequence
  Synthetic
gcacgucgcauggagaccacc

SEQ ID NO: 91737 - RNA, 22 nt, Artificial Sequence
  Synthetic
ugcacgucgcauggagaccacc

SEQ ID NO: 91738 - RNA, 23 nt, Artificial Sequence
  Synthetic
cugcacgucgcauggagaccacc

SEQ ID NO: 91739 - RNA, 24 nt, Artificial Sequence
  Synthetic
ucugcacgucgcauggagaccacc

SEQ ID NO: 91740 - RNA, 18 nt, Artificial Sequence
  Synthetic
  misc_feature (7)..(7): n is a, c, g, or u
uaccccncugucuccacc

SEQ ID NO: 91741 - RNA, 19 nt, Artificial Sequence
  Synthetic
  misc_feature (8)..(8): n is a, c, g, or u
cuaccccncugucuccacc

SEQ ID NO: 91742 - RNA, 20 nt, Artificial Sequence
  Synthetic
  misc_feature (9)..(9): n is a, c, g, or u
ccuaccccncugucuccacc

SEQ ID NO: 91743 - RNA, 21 nt, Artificial Sequence
  Synthetic
  misc_feature (10)..(10): n is a, c, g, or u
gccuaccccncugucuccacc

SEQ ID NO: 91744 - RNA, 22 nt, Artificial Sequence
  Synthetic
  misc_feature (11)..(11): n is a, c, g, or u
agccuaccccncugucuccacc

SEQ ID NO: 91745 - RNA, 23 nt, Artificial Sequence
  Synthetic
  misc_feature (12)..(12): n is a, c, g, or u
cagccuaccccncugucuccacc

SEQ ID NO: 91746 - RNA, 24 nt, Artificial Sequence
  Synthetic
  misc_feature (13)..(13): n is a, c, g, or u
gcagccuaccccncugucuccacc

SEQ ID NO: 91747 - RNA, 18 nt, Artificial Sequence
  Synthetic
  misc_feature (1)..(1): n is a, c, g, or u
naaugucaacgaccgacc

SEQ ID NO: 91748 - RNA, 19 nt, Artificial Sequence
  Synthetic
  misc_feature (2)..(2): n is a, c, g, or u
gnaaugucaacgaccgacc

SEQ ID NO: 91749 - RNA, 20 nt, Artificial Sequence
  Synthetic
  misc_feature (3)..(3): n is a, c, g, or u
ugnaaugucaacgaccgacc

SEQ ID NO: 91750 - RNA, 21 nt, Artificial Sequence
  Synthetic
  misc_feature (4)..(4): n is a, c, g, or u
cugnaaugucaacgaccgacc

SEQ ID NO: 91751 - RNA, 22 nt, Artificial Sequence
  Synthetic
  misc_feature (5)..(5): n is a, c, g, or u
ucugnaaugucaacgaccgacc

SEQ ID NO: 91752 - RNA, 23 nt, Artificial Sequence
  Synthetic
  misc_feature (6)..(6): n is a, c, g, or u
cucugnaaugucaacgaccgacc

SEQ ID NO: 91753 - RNA, 24 nt, Artificial Sequence
  Synthetic
  misc_feature (7)..(7): n is a, c, g, or u
ucucugnaaugucaacgaccgacc

SEQ ID NO: 91754 - RNA, 18 nt, Artificial Sequence
  Synthetic
  misc_feature (9)..(9): n is a, c, g, or u
  misc_feature (12)..(12): n is a, c, g, or u
cugccguuncgnccgacc

SEQ ID NO: 91755 - RNA, 19 nt, Artificial Sequence
  Synthetic
  misc_feature (10)..(10): n is a, c, g, or u
  misc_feature (13)..(13): n is a, c, g, or u
ucugccguuncgnccgacc

SEQ ID NO: 91756 - RNA, 20 nt, Artificial Sequence
  Synthetic
  misc_feature (11)..(11): n is a, c, g, or u
  misc_feature (14)..(14): n is a, c, g, or u
gucugccguuncgnccgacc

SEQ ID NO: 91757 - RNA, 21 nt, Artificial Sequence
  Synthetic
  misc_feature (12)..(12): n is a, c, g, or u
  misc_feature (15)..(15): n is a, c, g, or u
cgucugccguuncgnccgacc

SEQ ID NO: 91758 - RNA, 22 nt, Artificial Sequence
  Synthetic
  misc_feature (13)..(13): n is a, c, g, or u
  misc_feature (16)..(16): n is a, c, g, or u
ccgucugccguuncgnccgacc

SEQ ID NO: 91759 - RNA, 23 nt, Artificial Sequence
  Synthetic
  misc_feature (14)..(14): n is a, c, g, or u
  misc_feature (17)..(17): n is a, c, g, or u
uccgucugccguuncgnccgacc

SEQ ID NO: 91760 - RNA, 24 nt, Artificial Sequence
  Synthetic
  misc_feature (15)..(15): n is a, c, g, or u
  misc_feature (18)..(18): n is a, c, g, or u
cuccgucugccguuncgnccgacc

SEQ ID NO: 91761 - RNA, 18 nt, Artificial Sequence
  Synthetic
aagaauccucacaauacc

SEQ ID NO: 91762 - RNA, 19 nt, Artificial Sequence
  Synthetic
caagaauccucacaauacc

SEQ ID NO: 91763 - RNA, 20 nt, Artificial Sequence
  Synthetic
acaagaauccucacaauacc

SEQ ID NO: 91764 - RNA, 21 nt, Artificial Sequence
  Synthetic
gacaagaauccucacaauacc

SEQ ID NO: 91765 - RNA, 22 nt, Artificial Sequence
  Synthetic
ugacaagaauccucacaauacc

SEQ ID NO: 91766 - RNA, 23 nt, Artificial Sequence
  Synthetic
uugacaagaauccucacaauacc

SEQ ID NO: 91767 - RNA, 24 nt, Artificial Sequence
  Synthetic
guugacaagaauccucacaauacc

SEQ ID NO: 91768 - RNA, 18 nt, Artificial Sequence
  Synthetic
uuugcugacgcaaccccc

SEQ ID NO: 91769 - RNA, 19 nt, Artificial Sequence
  Synthetic
guuugcugacgcaaccccc

SEQ ID NO: 91770 - RNA, 20 nt, Artificial Sequence
  Synthetic
uguuugcugacgcaaccccc

SEQ ID NO: 91771 - RNA, 21 nt, Artificial Sequence
  Synthetic
guguuugcugacgcaaccccc

SEQ ID NO: 91772 - RNA, 22 nt, Artificial Sequence
  Synthetic
aguguuugcugacgcaaccccc

SEQ ID NO: 91773 - RNA, 23 nt, Artificial Sequence
  Synthetic
aaguguuugcugacgcaaccccc

SEQ ID NO: 91774 - RNA, 24 nt, Artificial Sequence
  Synthetic
caaguguuugcugacgcaaccccc

SEQ ID NO: 91775 - RNA, 18 nt, Artificial Sequence
  Synthetic
acgacgaggcaggucccc

SEQ ID NO: 91776 - RNA, 19 nt, Artificial Sequence
  Synthetic
gacgacgaggcaggucccc

SEQ ID NO: 91777 - RNA, 20 nt, Artificial Sequence
  Synthetic
agacgacgaggcaggucccc

SEQ ID NO: 91778 - RNA, 18 nt, Artificial Sequence
  Synthetic
ccuuuugggguggagccc

SEQ ID NO: 91779 - RNA, 19 nt, Artificial Sequence
  Synthetic
gccuuuugggguggagccc

SEQ ID NO: 91780 - RNA, 20 nt, Artificial Sequence
  Synthetic
ggccuuuugggguggagccc

SEQ ID NO: 91781 - RNA, 21 nt, Artificial Sequence
  Synthetic
aggccuuuugggguggagccc

SEQ ID NO: 91782 - RNA, 22 nt, Artificial Sequence
  Synthetic
gaggccuuuugggguggagccc

SEQ ID NO: 91783 - RNA, 23 nt, Artificial Sequence
  Synthetic
ggaggccuuuugggguggagccc

SEQ ID NO: 91784 - RNA, 24 nt, Artificial Sequence
  Synthetic
cggaggccuuuugggguggagccc

SEQ ID NO: 91785 - RNA, 18 nt, Artificial Sequence
  Synthetic
accuuuaccccguugccc

SEQ ID NO: 91786 - RNA, 19 nt, Artificial Sequence
  Synthetic
aaccuuuaccccguugccc

SEQ ID NO: 91787 - RNA, 20 nt, Artificial Sequence
  Synthetic
gaaccuuuaccccguugccc

SEQ ID NO: 91788 - RNA, 21 nt, Artificial Sequence
  Synthetic
ugaaccuuuaccccguugccc

SEQ ID NO: 91789 - RNA, 22 nt, Artificial Sequence
  Synthetic
cugaaccuuuaccccguugccc

SEQ ID NO: 91790 - RNA, 23 nt, Artificial Sequence
  Synthetic
ccugaaccuuuaccccguugccc

SEQ ID NO: 91791 - RNA, 24 nt, Artificial Sequence
  Synthetic
accugaaccuuuaccccguugccc

SEQ ID NO: 91792 - RNA, 18 nt, Artificial Sequence
  Synthetic
gauugggacuucaauccc

SEQ ID NO: 91793 - RNA, 19 nt, Artificial Sequence
  Synthetic
agauugggacuucaauccc

SEQ ID NO: 91794 - RNA, 20 nt, Artificial Sequence
  Synthetic
cagauugggacuucaauccc

SEQ ID NO: 91795 - RNA, 21 nt, Artificial Sequence
  Synthetic
ccagauugggacuucaauccc

SEQ ID NO: 91796 - RNA, 22 nt, Artificial Sequence
  Synthetic
uccagauugggacuucaauccc

SEQ ID NO: 91797 - RNA, 23 nt, Artificial Sequence
  Synthetic
auccagauugggacuucaauccc

SEQ ID NO: 91798 - RNA, 24 nt, Artificial Sequence
  Synthetic
aauccagauugggacuucaauccc

SEQ ID NO: 91799 - RNA, 18 nt, Artificial Sequence
  Synthetic
ccgucggcgcugaauccc

SEQ ID NO: 91800 - RNA, 19 nt, Artificial Sequence
  Synthetic
cccgucggcgcugaauccc

SEQ ID NO: 91801 - RNA, 20 nt, Artificial Sequence
  Synthetic
ucccgucggcgcugaauccc

SEQ ID NO: 91802 - RNA, 18 nt, Artificial Sequence
  Synthetic
guccuuuguuuacguccc

SEQ ID NO: 91803 - RNA, 19 nt, Artificial Sequence
  Synthetic
cguccuuuguuuacguccc

SEQ ID NO: 91804 - RNA, 20 nt, Artificial Sequence
  Synthetic
acguccuuuguuuacguccc

SEQ ID NO: 91805 - RNA, 21 nt, Artificial Sequence
  Synthetic
gacguccuuuguuuacguccc

SEQ ID NO: 91806 - RNA, 22 nt, Artificial Sequence
  Synthetic
ggacguccuuuguuuacguccc

SEQ ID NO: 91807 - RNA, 23 nt, Artificial Sequence
  Synthetic
gggacguccuuuguuuacguccc

SEQ ID NO: 91808 - RNA, 24 nt, Artificial Sequence
  Synthetic
cgggacguccuuuguuuacguccc

SEQ ID NO: 91809 - RNA, 18 nt, Artificial Sequence
  Synthetic
gacgacgaggcagguccc

SEQ ID NO: 91810 - RNA, 19 nt, Artificial Sequence
  Synthetic
agacgacgaggcagguccc

SEQ ID NO: 91811 - RNA, 20 nt, Artificial Sequence
  Synthetic
uagacgacgaggcagguccc

SEQ ID NO: 91812 - RNA, 18 nt, Artificial Sequence
  Synthetic
uguccuacuguucaagcc

SEQ ID NO: 91813 - RNA, 19 nt, Artificial Sequence
  Synthetic
auguccuacuguucaagcc

SEQ ID NO: 91814 - RNA, 20 nt, Artificial Sequence
  Synthetic
cauguccuacuguucaagcc

SEQ ID NO: 91815 - RNA, 21 nt, Artificial Sequence
  Synthetic
ucauguccuacuguucaagcc

SEQ ID NO: 91816 - RNA, 22 nt, Artificial Sequence
  Synthetic
uucauguccuacuguucaagcc

SEQ ID NO: 91817 - RNA, 23 nt, Artificial Sequence
  Synthetic
guucauguccuacuguucaagcc

SEQ ID NO: 91818 - RNA, 24 nt, Artificial Sequence
  Synthetic
uguucauguccuacuguucaagcc

SEQ ID NO: 91819 - RNA, 18 nt, Artificial Sequence
  Synthetic
caccaguuggauccagcc

SEQ ID NO: 91820 - RNA, 19 nt, Artificial Sequence
  Synthetic
ccaccaguuggauccagcc

SEQ ID NO: 91821 - RNA, 20 nt, Artificial Sequence
  Synthetic
accaccaguuggauccagcc

SEQ ID NO: 91822 - RNA, 21 nt, Artificial Sequence
  Synthetic
gaccaccaguuggauccagcc

SEQ ID NO: 91823 - RNA, 22 nt, Artificial Sequence
  Synthetic
cgaccaccaguuggauccagcc

SEQ ID NO: 91824 - RNA, 23 nt, Artificial Sequence
  Synthetic
ccgaccaccaguuggauccagcc

SEQ ID NO: 91825 - RNA, 24 nt, Artificial Sequence
  Synthetic
cccgaccaccaguuggauccagcc

SEQ ID NO: 91826 - RNA, 18 nt, Artificial Sequence
  Synthetic
gccuuuugggguggagcc

SEQ ID NO: 91827 - RNA, 19 nt, Artificial Sequence
  Synthetic
ggccuuuugggguggagcc

SEQ ID NO: 91828 - RNA, 20 nt, Artificial Sequence
  Synthetic
aggccuuuugggguggagcc

SEQ ID NO: 91829 - RNA, 21 nt, Artificial Sequence
  Synthetic
gaggccuuuugggguggagcc

SEQ ID NO: 91830 - RNA, 22 nt, Artificial Sequence
  Synthetic
ggaggccuuuugggguggagcc

SEQ ID NO: 91831 - RNA, 23 nt, Artificial Sequence
  Synthetic
cggaggccuuuugggguggagcc

SEQ ID NO: 91832 - RNA, 24 nt, Artificial Sequence
  Synthetic
acggaggccuuuugggguggagcc

SEQ ID NO: 91833 - RNA, 18 nt, Artificial Sequence
  Synthetic
gacaccuggccagacgcc

SEQ ID NO: 91834 - RNA, 19 nt, Artificial Sequence
  Synthetic
ggacaccuggccagacgcc

SEQ ID NO: 91835 - RNA, 20 nt, Artificial Sequence
  Synthetic
aggacaccuggccagacgcc

SEQ ID NO: 91836 - RNA, 21 nt, Artificial Sequence
  Synthetic
aaggacaccuggccagacgcc

SEQ ID NO: 91837 - RNA, 22 nt, Artificial Sequence
  Synthetic
caaggacaccuggccagacgcc

SEQ ID NO: 91838 - RNA, 23 nt, Artificial Sequence
  Synthetic
acaaggacaccuggccagacgcc

SEQ ID NO: 91839 - RNA, 24 nt, Artificial Sequence
  Synthetic
aacaaggacaccuggccagacgcc

SEQ ID NO: 91840 - RNA, 18 nt, Artificial Sequence
  Synthetic
ggggcuuggucaugggcc

SEQ ID NO: 91841 - RNA, 19 nt, Artificial Sequence
  Synthetic
uggggcuuggucaugggcc

SEQ ID NO: 91842 - RNA, 20 nt, Artificial Sequence
  Synthetic
cuggggcuuggucaugggcc

SEQ ID NO: 91843 - RNA, 21 nt, Artificial Sequence
  Synthetic
gcuggggcuuggucaugggcc

SEQ ID NO: 91844 - RNA, 22 nt, Artificial Sequence
  Synthetic
ggcuggggcuuggucaugggcc

SEQ ID NO: 91845 - RNA, 23 nt, Artificial Sequence
  Synthetic
uggcuggggcuuggucaugggcc

SEQ ID NO: 91846 - RNA, 24 nt, Artificial Sequence
  Synthetic
cuggcuggggcuuggucaugggcc

SEQ ID NO: 91847 - RNA, 18 nt, Artificial Sequence
  Synthetic
  misc_feature (6)..(6): n is a, c, g, or u
  misc_feature (15)..(15): n is a, c, g, or u
gcucunuaucgggangcc

SEQ ID NO: 91848 - RNA, 19 nt, Artificial Sequence
  Synthetic
  misc_feature (7)..(7): n is a, c, g, or u
  misc_feature (16)..(16): n is a, c, g, or u
agcucunuaucgggangcc

SEQ ID NO: 91849 - RNA, 20 nt, Artificial Sequence
  Synthetic
  misc_feature (8)..(8): n is a, c, g, or u
  misc_feature (17)..(17): n is a, c, g, or u
cagcucunuaucgggangcc

SEQ ID NO: 91850 - RNA, 21 nt, Artificial Sequence
  Synthetic
  misc_feature (9)..(9): n is a, c, g, or u
  misc_feature (18)..(18): n is a, c, g, or u
ucagcucunuaucgggangcc

SEQ ID NO: 91851 - RNA, 22 nt, Artificial Sequence
  Synthetic
  misc_feature (10)..(10): n is a, c, g, or u
  misc_feature (19)..(19): n is a, c, g, or u
cucagcucunuaucgggangcc

SEQ ID NO: 91852 - RNA, 23 nt, Artificial Sequence
  Synthetic
  misc_feature (11)..(11): n is a, c, g, or u
  misc_feature (20)..(20): n is a, c, g, or u
ccucagcucunuaucgggangcc

SEQ ID NO: 91853 - RNA, 24 nt, Artificial Sequence
  Synthetic
  misc_feature (12)..(12): n is a, c, g, or u
  misc_feature (21)..(21): n is a, c, g, or u
gccucagcucunuaucgggangcc

SEQ ID NO: 91854 - RNA, 18 nt, Artificial Sequence
  Synthetic
  misc_feature (5)..(5): n is a, c, g, or u
  misc_feature (13)..(13): n is a, c, g, or u
cauanuacaaacnuugcc

SEQ ID NO: 91855 - RNA, 19 nt, Artificial Sequence
  Synthetic
  misc_feature (6)..(6): n is a, c, g, or u
  misc_feature (14)..(14): n is a, c, g, or u
gcauanuacaaacnuugcc

SEQ ID NO: 91856 - RNA, 20 nt, Artificial Sequence
  Synthetic
  misc_feature (7)..(7): n is a, c, g, or u
  misc_feature (15)..(15): n is a, c, g, or u
ggcauanuacaaacnuugcc

SEQ ID NO: 91857 - RNA, 21 nt, Artificial Sequence
  Synthetic
  misc_feature (8)..(8): n is a, c, g, or u
  misc_feature (16)..(16): n is a, c, g, or u
gggcauanuacaaacnuugcc

SEQ ID NO: 91858 - RNA, 22 nt, Artificial Sequence
  Synthetic
  misc_feature (9)..(9): n is a, c, g, or u
  misc_feature (17)..(17): n is a, c, g, or u
agggcauanuacaaacnuugcc

SEQ ID NO: 91859 - RNA, 23 nt, Artificial Sequence
  Synthetic
  misc_feature (10)..(10): n is a, c, g, or u
  misc_feature (18)..(18): n is a, c, g, or u
cagggcauanuacaaacnuugcc

SEQ ID NO: 91860 - RNA, 24 nt, Artificial Sequence
  Synthetic
  misc_feature (11)..(11): n is a, c, g, or u
  misc_feature (19)..(19): n is a, c, g, or u
ucagggcauanuacaaacnuugcc

SEQ ID NO: 91861 - RNA, 18 nt, Artificial Sequence
  Synthetic
  misc_feature (13)..(13): n is a, c, g, or u
auguuaugggucnuugcc

SEQ ID NO: 91862 - RNA, 19 nt, Artificial Sequence
  Synthetic
  misc_feature (14)..(14): n is a, c, g, or u
gauguuaugggucnuugcc

SEQ ID NO: 91863 - RNA, 20 nt, Artificial Sequence
  Synthetic
  misc_feature (15)..(15): n is a, c, g, or u
ggauguuaugggucnuugcc

SEQ ID NO: 91864 - RNA, 21 nt, Artificial Sequence
  Synthetic
  misc_feature (16)..(16): n is a, c, g, or u
uggauguuaugggucnuugcc

SEQ ID NO: 91865 - RNA, 22 nt, Artificial Sequence
  Synthetic
  misc_feature (17)..(17): n is a, c, g, or u
uuggauguuaugggucnuugcc

SEQ ID NO: 91866 - RNA, 23 nt, Artificial Sequence
  Synthetic
  misc_feature (18)..(18): n is a, c, g, or u
auuggauguuaugggucnuugcc

SEQ ID NO: 91867 - RNA, 24 nt, Artificial Sequence
  Synthetic
  misc_feature (19)..(19): n is a, c, g, or u
cauuggauguuaugggucnuugcc

SEQ ID NO: 91868 - RNA, 18 nt, Artificial Sequence
  Synthetic
ucuuuccaccagcaaucc

SEQ ID NO: 91869 - RNA, 19 nt, Artificial Sequence
  Synthetic
aucuuuccaccagcaaucc

SEQ ID NO: 91870 - RNA, 20 nt, Artificial Sequence
  Synthetic
aaucuuuccaccagcaaucc

SEQ ID NO: 91871 - RNA, 21 nt, Artificial Sequence
  Synthetic
gaaucuuuccaccagcaaucc

SEQ ID NO: 91872 - RNA, 22 nt, Artificial Sequence
  Synthetic
agaaucuuuccaccagcaaucc

SEQ ID NO: 91873 - RNA, 23 nt, Artificial Sequence
  Synthetic
cagaaucuuuccaccagcaaucc

SEQ ID NO: 91874 - RNA, 24 nt, Artificial Sequence
  Synthetic
gcagaaucuuuccaccagcaaucc

SEQ ID NO: 91875 - RNA, 18 nt, Artificial Sequence
  Synthetic
cccgucggcgcugaaucc

SEQ ID NO: 91876 - RNA, 19 nt, Artificial Sequence
  Synthetic
ucccgucggcgcugaaucc

SEQ ID NO: 91877 - RNA, 20 nt, Artificial Sequence
  Synthetic
gucccgucggcgcugaaucc

SEQ ID NO: 91878 - RNA, 18 nt, Artificial Sequence
  Synthetic
uuugagaaacacucaucc

SEQ ID NO: 91879 - RNA, 19 nt, Artificial Sequence
  Synthetic
cuuugagaaacacucaucc

SEQ ID NO: 91880 - RNA, 20 nt, Artificial Sequence
  Synthetic
ccuuugagaaacacucaucc

SEQ ID NO: 91881 - RNA, 21 nt, Artificial Sequence
  Synthetic
accuuugagaaacacucaucc

SEQ ID NO: 91882 - RNA, 22 nt, Artificial Sequence
  Synthetic
caccuuugagaaacacucaucc

SEQ ID NO: 91883 - RNA, 23 nt, Artificial Sequence
  Synthetic
ccaccuuugagaaacacucaucc

SEQ ID NO: 91884 - RNA, 24 nt, Artificial Sequence
  Synthetic
uccaccuuugagaaacacucaucc

SEQ ID NO: 91885 - RNA, 18 nt, Artificial Sequence
  Synthetic
aguguggauucgcacucc

SEQ ID NO: 91886 - RNA, 19 nt, Artificial Sequence
  Synthetic
gaguguggauucgcacucc

SEQ ID NO: 91887 - RNA, 20 nt, Artificial Sequence
  Synthetic
ggaguguggauucgcacucc

SEQ ID NO: 91888 - RNA, 18 nt, Artificial Sequence
  Synthetic
  misc_feature (12)..(12): n is a, c, g, or u
aacucuguuguncucucc

SEQ ID NO: 91889 - RNA, 19 nt, Artificial Sequence
  Synthetic
  misc_feature (13)..(13): n is a, c, g, or u
uaacucuguuguncucucc

SEQ ID NO: 91890 - RNA, 20 nt, Artificial Sequence
  Synthetic
  misc_feature (14)..(14): n is a, c, g, or u
auaacucuguuguncucucc

SEQ ID NO: 91891 - RNA, 21 nt, Artificial Sequence
  Synthetic
  misc_feature (15)..(15): n is a, c, g, or u
gauaacucuguuguncucucc

SEQ ID NO: 91892 - RNA, 22 nt, Artificial Sequence
  Synthetic
  misc_feature (1)..(1): n is a, c, g, or u
  misc_feature (16)..(16): n is a, c, g, or u
ngauaacucuguuguncucucc

SEQ ID NO: 91893 - RNA, 23 nt, Artificial Sequence
  Synthetic
  misc_feature (2)..(2): n is a, c, g, or u
  misc_feature (17)..(17): n is a, c, g, or u
cngauaacucuguuguncucucc

SEQ ID NO: 91894 - RNA, 24 nt, Artificial Sequence
  Synthetic
  misc_feature (3)..(3): n is a, c, g, or u
  misc_feature (18)..(18): n is a, c, g, or u
acngauaacucuguuguncucucc

SEQ ID NO: 91895 - RNA, 18 nt, Artificial Sequence
  Synthetic
agacgacgaggcaggucc

SEQ ID NO: 91896 - RNA, 19 nt, Artificial Sequence
  Synthetic
uagacgacgaggcaggucc

SEQ ID NO: 91897 - RNA, 20 nt, Artificial Sequence
  Synthetic
uuagacgacgaggcaggucc

SEQ ID NO: 91898 - RNA, 21 nt, Artificial Sequence
  Synthetic
guuagacgacgaggcaggucc

SEQ ID NO: 91899 - RNA, 22 nt, Artificial Sequence
  Synthetic
uguuagacgacgaggcaggucc

SEQ ID NO: 91900 - RNA, 23 nt, Artificial Sequence
  Synthetic
uuguuagacgacgaggcaggucc

SEQ ID NO: 91901 - RNA, 24 nt, Artificial Sequence
  Synthetic
guuguuagacgacgaggcaggucc

SEQ ID NO: 91902 - RNA, 18 nt, Artificial Sequence
  Synthetic
cucaccaaccuccugucc

SEQ ID NO: 91903 - RNA, 19 nt, Artificial Sequence
  Synthetic
acucaccaaccuccugucc

SEQ ID NO: 91904 - RNA, 20 nt, Artificial Sequence
  Synthetic
cacucaccaaccuccugucc

SEQ ID NO: 91905 - RNA, 21 nt, Artificial Sequence
  Synthetic
ucacucaccaaccuccugucc

SEQ ID NO: 91906 - RNA, 22 nt, Artificial Sequence
  Synthetic
aucacucaccaaccuccugucc

SEQ ID NO: 91907 - RNA, 23 nt, Artificial Sequence
  Synthetic
aaucacucaccaaccuccugucc

SEQ ID NO: 91908 - RNA, 24 nt, Artificial Sequence
  Synthetic
caaucacucaccaaccuccugucc

SEQ ID NO: 91909 - RNA, 18 nt, Artificial Sequence
  Synthetic
gggcuuucggaaaauucc

SEQ ID NO: 91910 - RNA, 19 nt, Artificial Sequence
  Synthetic
ugggcuuucggaaaauucc

SEQ ID NO: 91911 - RNA, 20 nt, Artificial Sequence
  Synthetic
  misc_feature (1)..(1): n is a, c, g, or u
nugggcuuucggaaaauucc

SEQ ID NO: 91912 - RNA, 21 nt, Artificial Sequence
  Synthetic
  misc_feature (2)..(2): n is a, c, g, or u
cnugggcuuucggaaaauucc

SEQ ID NO: 91913 - RNA, 22 nt, Artificial Sequence
  Synthetic
  misc_feature (3)..(3): n is a, c, g, or u
ucnugggcuuucggaaaauucc

SEQ ID NO: 91914 - RNA, 23 nt, Artificial Sequence
  Synthetic
  misc_feature (4)..(4): n is a, c, g, or u
aucnugggcuuucggaaaauucc

SEQ ID NO: 91915 - RNA, 24 nt, Artificial Sequence
  Synthetic
  misc_feature (5)..(5): n is a, c, g, or u
caucnugggcuuucggaaaauucc

SEQ ID NO: 91916 - RNA, 18 nt, Artificial Sequence
  Synthetic
acaucacaucaggauucc

SEQ ID NO: 91917 - RNA, 19 nt, Artificial Sequence
  Synthetic
aacaucacaucaggauucc

SEQ ID NO: 91918 - RNA, 20 nt, Artificial Sequence
  Synthetic
gaacaucacaucaggauucc

SEQ ID NO: 91919 - RNA, 21 nt, Artificial Sequence
  Synthetic
agaacaucacaucaggauucc

SEQ ID NO: 91920 - RNA, 22 nt, Artificial Sequence
  Synthetic
gagaacaucacaucaggauucc

SEQ ID NO: 91921 - RNA, 23 nt, Artificial Sequence
  Synthetic
ggagaacaucacaucaggauucc

SEQ ID NO: 91922 - RNA, 24 nt, Artificial Sequence
  Synthetic
uggagaacaucacaucaggauucc

SEQ ID NO: 91923 - RNA, 18 nt, Artificial Sequence
  Synthetic
ucucaauguuaguauucc

SEQ ID NO: 91924 - RNA, 19 nt, Artificial Sequence
  Synthetic
aucucaauguuaguauucc

SEQ ID NO: 91925 - RNA, 20 nt, Artificial Sequence
  Synthetic
aaucucaauguuaguauucc

SEQ ID NO: 91926 - RNA, 21 nt, Artificial Sequence
  Synthetic
gaaucucaauguuaguauucc

SEQ ID NO: 91927 - RNA, 22 nt, Artificial Sequence
  Synthetic
ggaaucucaauguuaguauucc

SEQ ID NO: 91928 - RNA, 23 nt, Artificial Sequence
  Synthetic
gggaaucucaauguuaguauucc

SEQ ID NO: 91929 - RNA, 24 nt, Artificial Sequence
  Synthetic
cgggaaucucaauguuaguauucc

SEQ ID NO: 91930 - RNA, 18 nt, Artificial Sequence
  Synthetic
uaucuuaucaacacuucc

SEQ ID NO: 91931 - RNA, 19 nt, Artificial Sequence
  Synthetic
cuaucuuaucaacacuucc

SEQ ID NO: 91932 - RNA, 20 nt, Artificial Sequence
  Synthetic
ccuaucuuaucaacacuucc

SEQ ID NO: 91933 - RNA, 21 nt, Artificial Sequence
  Synthetic
cccuaucuuaucaacacuucc

SEQ ID NO: 91934 - RNA, 22 nt, Artificial Sequence
  Synthetic
ccccuaucuuaucaacacuucc

SEQ ID NO: 91935 - RNA, 23 nt, Artificial Sequence
  Synthetic
gccccuaucuuaucaacacuucc

SEQ ID NO: 91936 - RNA, 24 nt, Artificial Sequence
  Synthetic
ugccccuaucuuaucaacacuucc

SEQ ID NO: 91937 - RNA, 18 nt, Artificial Sequence
  Synthetic
auggggcagaaucuuucc

SEQ ID NO: 91938 - RNA, 19 nt, Artificial Sequence
  Synthetic
cauggggcagaaucuuucc

SEQ ID NO: 91939 - RNA, 20 nt, Artificial Sequence
  Synthetic
gcauggggcagaaucuuucc

SEQ ID NO: 91940 - RNA, 21 nt, Artificial Sequence
  Synthetic
agcauggggcagaaucuuucc

SEQ ID NO: 91941 - RNA, 22 nt, Artificial Sequence
  Synthetic
cagcauggggcagaaucuuucc

SEQ ID NO: 91942 - RNA, 23 nt, Artificial Sequence
  Synthetic
acagcauggggcagaaucuuucc

SEQ ID NO: 91943 - RNA, 24 nt, Artificial Sequence
  Synthetic
uacagcauggggcagaaucuuucc

SEQ ID NO: 91944 - RNA, 18 nt, Artificial Sequence
  Synthetic
gggaacaagagcuacagc

SEQ ID NO: 91945 - RNA, 19 nt, Artificial Sequence
  Synthetic
ugggaacaagagcuacagc

SEQ ID NO: 91946 - RNA, 20 nt, Artificial Sequence
  Synthetic
uugggaacaagagcuacagc

SEQ ID NO: 91947 - RNA, 21 nt, Artificial Sequence
  Synthetic
cuugggaacaagagcuacagc

SEQ ID NO: 91948 - RNA, 22 nt, Artificial Sequence
  Synthetic
ucuugggaacaagagcuacagc

SEQ ID NO: 91949 - RNA, 23 nt, Artificial Sequence
  Synthetic
uucuugggaacaagagcuacagc

SEQ ID NO: 91950 - RNA, 24 nt, Artificial Sequence
  Synthetic
auucuugggaacaagagcuacagc

SEQ ID NO: 91951 - RNA, 18 nt, Artificial Sequence
  Synthetic
  misc_feature (6)..(6): n is a, c, g, or u
  misc_feature (12)..(12): n is a, c, g, or u
ggaucnucaacnaccagc

SEQ ID NO: 91952 - RNA, 19 nt, Artificial Sequence
  Synthetic
  misc_feature (7)..(7): n is a, c, g, or u
  misc_feature (13)..(13): n is a, c, g, or u
aggaucnucaacnaccagc

SEQ ID NO: 91953 - RNA, 20 nt, Artificial Sequence
  Synthetic
  misc_feature (8)..(8): n is a, c, g, or u
  misc_feature (14)..(14): n is a, c, g, or u
caggaucnucaacnaccagc

SEQ ID NO: 91954 - RNA, 21 nt, Artificial Sequence
  Synthetic
  misc_feature (9)..(9): n is a, c, g, or u
  misc_feature (15)..(15): n is a, c, g, or u
ccaggaucnucaacnaccagc

SEQ ID NO: 91955 - RNA, 22 nt, Artificial Sequence
  Synthetic
  misc_feature (10)..(10): n is a, c, g, or u
  misc_feature (16)..(16): n is a, c, g, or u
uccaggaucnucaacnaccagc

SEQ ID NO: 91956 - RNA, 23 nt, Artificial Sequence
  Synthetic
  misc_feature (11)..(11): n is a, c, g, or u
  misc_feature (17)..(17): n is a, c, g, or u
uuccaggaucnucaacnaccagc

SEQ ID NO: 91957 - RNA, 24 nt, Artificial Sequence
  Synthetic
  misc_feature (12)..(12): n is a, c, g, or u
  misc_feature (18)..(18): n is a, c, g, or u
auuccaggaucnucaacnaccagc

SEQ ID NO: 91958 - RNA, 18 nt, Artificial Sequence
  Synthetic
auucuugggaacaagagc

SEQ ID NO: 91959 - RNA, 19 nt, Artificial Sequence
  Synthetic
uauucuugggaacaagagc

SEQ ID NO: 91960 - RNA, 20 nt, Artificial Sequence
  Synthetic
auauucuugggaacaagagc

SEQ ID NO: 91961 - RNA, 21 nt, Artificial Sequence
  Synthetic
cauauucuugggaacaagagc

SEQ ID NO: 91962 - RNA, 22 nt, Artificial Sequence
  Synthetic
ccauauucuugggaacaagagc

SEQ ID NO: 91963 - RNA, 23 nt, Artificial Sequence
  Synthetic
accauauucuugggaacaagagc

SEQ ID NO: 91964 - RNA, 24 nt, Artificial Sequence
  Synthetic
caccauauucuugggaacaagagc

SEQ ID NO: 91965 - RNA, 18 nt, Artificial Sequence
  Synthetic
cgccaacaagguaggagc

SEQ ID NO: 91966 - RNA, 19 nt, Artificial Sequence
  Synthetic
acgccaacaagguaggagc

SEQ ID NO: 91967 - RNA, 20 nt, Artificial Sequence
  Synthetic
gacgccaacaagguaggagc

SEQ ID NO: 91968 - RNA, 21 nt, Artificial Sequence
  Synthetic
agacgccaacaagguaggagc

SEQ ID NO: 91969 - RNA, 22 nt, Artificial Sequence
  Synthetic
cagacgccaacaagguaggagc

SEQ ID NO: 91970 - RNA, 23 nt, Artificial Sequence
  Synthetic
ccagacgccaacaagguaggagc

SEQ ID NO: 91971 - RNA, 24 nt, Artificial Sequence
  Synthetic
gccagacgccaacaagguaggagc

SEQ ID NO: 91972 - RNA, 18 nt, Artificial Sequence
  Synthetic
  misc_feature (5)..(5): n is a, c, g, or u
ugggnuucaccccaccgc

SEQ ID NO: 91973 - RNA, 19 nt, Artificial Sequence
  Synthetic
  misc_feature (6)..(6): n is a, c, g, or u
cugggnuucaccccaccgc

SEQ ID NO: 91974 - RNA, 20 nt, Artificial Sequence
  Synthetic
  misc_feature (7)..(7): n is a, c, g, or u
gcugggnuucaccccaccgc

SEQ ID NO: 91975 - RNA, 21 nt, Artificial Sequence
  Synthetic
  misc_feature (8)..(8): n is a, c, g, or u
ggcugggnuucaccccaccgc

SEQ ID NO: 91976 - RNA, 22 nt, Artificial Sequence
  Synthetic
  misc_feature (9)..(9): n is a, c, g, or u
gggcugggnuucaccccaccgc

SEQ ID NO: 91977 - RNA, 23 nt, Artificial Sequence
  Synthetic
  misc_feature (10)..(10): n is a, c, g, or u
cgggcugggnuucaccccaccgc

SEQ ID NO: 91978 - RNA, 24 nt, Artificial Sequence
  Synthetic
  misc_feature (11)..(11): n is a, c, g, or u
ucgggcugggnuucaccccaccgc

SEQ ID NO: 91979 - RNA, 18 nt, Artificial Sequence
  Synthetic
  misc_feature (10)..(10): n is a, c, g, or u
agaucuucungauaccgc

SEQ ID NO: 91980 - RNA, 19 nt, Artificial Sequence
  Synthetic
  misc_feature (11)..(11): n is a, c, g, or u
gagaucuucungauaccgc

SEQ ID NO: 91981 - RNA, 20 nt, Artificial Sequence
  Synthetic
  misc_feature (12)..(12): n is a, c, g, or u
cgagaucuucungauaccgc

SEQ ID NO: 91982 - RNA, 21 nt, Artificial Sequence
  Synthetic
  misc_feature (13)..(13): n is a, c, g, or u
acgagaucuucungauaccgc

SEQ ID NO: 91983 - RNA, 22 nt, Artificial Sequence
  Synthetic
  misc_feature (14)..(14): n is a, c, g, or u
uacgagaucuucungauaccgc

SEQ ID NO: 91984 - RNA, 23 nt, Artificial Sequence
  Synthetic
  misc_feature (15)..(15): n is a, c, g, or u
guacgagaucuucungauaccgc

SEQ ID NO: 91985 - RNA, 24 nt, Artificial Sequence
  Synthetic
  misc_feature (1)..(1): n is a, c, g, or u
  misc_feature (16)..(16): n is a, c, g, or u
nguacgagaucuucungauaccgc

SEQ ID NO: 91986 - RNA, 18 nt, Artificial Sequence
  Synthetic
gcauaaauuggucugcgc

SEQ ID NO: 91987 - RNA, 19 nt, Artificial Sequence
  Synthetic
ggcauaaauuggucugcgc

SEQ ID NO: 91988 - RNA, 20 nt, Artificial Sequence
  Synthetic
aggcauaaauuggucugcgc

SEQ ID NO: 91989 - RNA, 18 nt, Artificial Sequence
  Synthetic
  misc_feature (15)..(15): n is a, c, g, or u
gacccuucucggggncgc

SEQ ID NO: 91990 - RNA, 19 nt, Artificial Sequence
  Synthetic
  misc_feature (16)..(16): n is a, c, g, or u
cgacccuucucggggncgc

SEQ ID NO: 91991 - RNA, 20 nt, Artificial Sequence
  Synthetic
  misc_feature (17)..(17): n is a, c, g, or u
acgacccuucucggggncgc

SEQ ID NO: 91992 - RNA, 18 nt, Artificial Sequence
  Synthetic
gccgcuuguuuugcucgc

SEQ ID NO: 91993 - RNA, 19 nt, Artificial Sequence
  Synthetic
agccgcuuguuuugcucgc

SEQ ID NO: 91994 - RNA, 20 nt, Artificial Sequence
  Synthetic
uagccgcuuguuuugcucgc

SEQ ID NO: 91995 - RNA, 21 nt, Artificial Sequence
  Synthetic
cuagccgcuuguuuugcucgc

SEQ ID NO: 91996 - RNA, 22 nt, Artificial Sequence
  Synthetic
ccuagccgcuuguuuugcucgc

SEQ ID NO: 91997 - RNA, 23 nt, Artificial Sequence
  Synthetic
uccuagccgcuuguuuugcucgc

SEQ ID NO: 91998 - RNA, 24 nt, Artificial Sequence
  Synthetic
cuccuagccgcuuguuuugcucgc

SEQ ID NO: 91999 - RNA, 18 nt, Artificial Sequence
  Synthetic
uucaccucugcacgucgc

SEQ ID NO: 92000 - RNA, 19 nt, Artificial Sequence
  Synthetic
cuucaccucugcacgucgc

SEQ ID NO: 92001 - RNA, 20 nt, Artificial Sequence
  Synthetic
gcuucaccucugcacgucgc

SEQ ID NO: 92002 - RNA, 21 nt, Artificial Sequence
  Synthetic
cgcuucaccucugcacgucgc

SEQ ID NO: 92003 - RNA, 22 nt, Artificial Sequence
  Synthetic
ucgcuucaccucugcacgucgc

SEQ ID NO: 92004 - RNA, 23 nt, Artificial Sequence
  Synthetic
uucgcuucaccucugcacgucgc

SEQ ID NO: 92005 - RNA, 24 nt, Artificial Sequence
  Synthetic
cuucgcuucaccucugcacgucgc

SEQ ID NO: 92006 - RNA, 18 nt, Artificial Sequence
  Synthetic
ucucaaucgccgcgucgc

SEQ ID NO: 92007 - RNA, 19 nt, Artificial Sequence
  Synthetic
gucucaaucgccgcgucgc

SEQ ID NO: 92008 - RNA, 20 nt, Artificial Sequence
  Synthetic
ggucucaaucgccgcgucgc

SEQ ID NO: 92009 - RNA, 18 nt, Artificial Sequence
  Synthetic
gggguggagcccucaggc

SEQ ID NO: 92010 - RNA, 19 nt, Artificial Sequence
  Synthetic
ugggguggagcccucaggc

SEQ ID NO: 92011 - RNA, 20 nt, Artificial Sequence
  Synthetic
uugggguggagcccucaggc

SEQ ID NO: 92012 - RNA, 21 nt, Artificial Sequence
  Synthetic
uuugggguggagcccucaggc

SEQ ID NO: 92013 - RNA, 22 nt, Artificial Sequence
  Synthetic
uuuugggguggagcccucaggc

SEQ ID NO: 92014 - RNA, 23 nt, Artificial Sequence
  Synthetic
cuuuugggguggagcccucaggc

SEQ ID NO: 92015 - RNA, 24 nt, Artificial Sequence
  Synthetic
ccuuuugggguggagcccucaggc

SEQ ID NO: 92016 - RNA, 18 nt, Artificial Sequence
  Synthetic
  misc_feature (1)..(1): n is a, c, g, or u
  misc_feature (3)..(3): n is a, c, g, or u
  misc_feature (10)..(10): n is a, c, g, or u
nunuuuguanuaggaggc

SEQ ID NO: 92017 - RNA, 19 nt, Artificial Sequence
  Synthetic
  misc_feature (2)..(2): n is a, c, g, or u
  misc_feature (4)..(4): n is a, c, g, or u
  misc_feature (11)..(11): n is a, c, g, or u
gnunuuuguanuaggaggc

SEQ ID NO: 92018 - RNA, 20 nt, Artificial Sequence
  Synthetic
  misc_feature (1)..(1): n is a, c, g, or u
  misc_feature (3)..(3): n is a, c, g, or u
  misc_feature (5)..(5): n is a, c, g, or u
  misc_feature (12)..(12): n is a, c, g, or u
ngnunuuuguanuaggaggc

SEQ ID NO: 92019 - RNA, 21 nt, Artificial Sequence
  Synthetic
  misc_feature (2)..(2): n is a, c, g, or u
  misc_feature (4)..(4): n is a, c, g, or u
  misc_feature (6)..(6): n is a, c, g, or u
  misc_feature (13)..(13): n is a, c, g, or u
angnunuuuguanuaggaggc

SEQ ID NO: 92020 - RNA, 22 nt, Artificial Sequence
  Synthetic
  misc_feature (3)..(3): n is a, c, g, or u
  misc_feature (5)..(5): n is a, c, g, or u
  misc_feature (7)..(7): n is a, c, g, or u
  misc_feature (14)..(14): n is a, c, g, or u
aangnunuuuguanuaggaggc

SEQ ID NO: 92021 - RNA, 23 nt, Artificial Sequence
  Synthetic
  misc_feature (4)..(4): n is a, c, g, or u
  misc_feature (6)..(6): n is a, c, g, or u
  misc_feature (8)..(8): n is a, c, g, or u
  misc_feature (15)..(15): n is a, c, g, or u
uaangnunuuuguanuaggaggc

SEQ ID NO: 92022 - RNA, 24 nt, Artificial Sequence
  Synthetic
  misc_feature (5)..(5): n is a, c, g, or u
  misc_feature (7)..(7): n is a, c, g, or u
  misc_feature (9)..(9): n is a, c, g, or u
  misc_feature (16)..(16): n is a, c, g, or u
uuaangnunuuuguanuaggaggc

SEQ ID NO: 92023 - RNA, 18 nt, Artificial Sequence
  Synthetic
uuuaccccguugcccggc

SEQ ID NO: 92024 - RNA, 19 nt, Artificial Sequence
  Synthetic
cuuuaccccguugcccggc

SEQ ID NO: 92025 - RNA, 20 nt, Artificial Sequence
  Synthetic
ccuuuaccccguugcccggc

SEQ ID NO: 92026 - RNA, 18 nt, Artificial Sequence
  Synthetic
uguuuacgucccgucggc

SEQ ID NO: 92027 - RNA, 19 nt, Artificial Sequence
  Synthetic
uuguuuacgucccgucggc

SEQ ID NO: 92028 - RNA, 20 nt, Artificial Sequence
  Synthetic
uuuguuuacgucccgucggc

SEQ ID NO: 92029 - RNA, 21 nt, Artificial Sequence
  Synthetic
cuuuguuuacgucccgucggc

SEQ ID NO: 92030 - RNA, 22 nt, Artificial Sequence
  Synthetic
ccuuuguuuacgucccgucggc

SEQ ID NO: 92031 - RNA, 23 nt, Artificial Sequence
  Synthetic
uccuuuguuuacgucccgucggc

SEQ ID NO: 92032 - RNA, 24 nt, Artificial Sequence
  Synthetic
guccuuuguuuacgucccgucggc

SEQ ID NO: 92033 - RNA, 18 nt, Artificial Sequence
  Synthetic
  misc_feature (3)..(3): n is a, c, g, or u
gunaacacuaauaugggc

SEQ ID NO: 92034 - RNA, 19 nt, Artificial Sequence
  Synthetic
  misc_feature (4)..(4): n is a, c, g, or u
ugunaacacuaauaugggc

SEQ ID NO: 92035 - RNA, 20 nt, Artificial Sequence
  Synthetic
  misc_feature (5)..(5): n is a, c, g, or u
augunaacacuaauaugggc

SEQ ID NO: 92036 - RNA, 21 nt, Artificial Sequence
  Synthetic
  misc_feature (6)..(6): n is a, c, g, or u
uaugunaacacuaauaugggc

SEQ ID NO: 92037 - RNA, 22 nt, Artificial Sequence
  Synthetic
  misc_feature (7)..(7): n is a, c, g, or u
uuaugunaacacuaauaugggc

SEQ ID NO: 92038 - RNA, 23 nt, Artificial Sequence
  Synthetic
  misc_feature (8)..(8): n is a, c, g, or u
guuaugunaacacuaauaugggc

SEQ ID NO: 92039 - RNA, 24 nt, Artificial Sequence
  Synthetic
  misc_feature (9)..(9): n is a, c, g, or u
aguuaugunaacacuaauaugggc

SEQ ID NO: 92040 - RNA, 18 nt, Artificial Sequence
  Synthetic
auuccuaugggagugggc

SEQ ID NO: 92041 - RNA, 19 nt, Artificial Sequence
  Synthetic
aauuccuaugggagugggc

SEQ ID NO: 92042 - RNA, 20 nt, Artificial Sequence
  Synthetic
aaauuccuaugggagugggc

SEQ ID NO: 92043 - RNA, 21 nt, Artificial Sequence
  Synthetic
aaaauuccuaugggagugggc

SEQ ID NO: 92044 - RNA, 22 nt, Artificial Sequence
  Synthetic
gaaaauuccuaugggagugggc

SEQ ID NO: 92045 - RNA, 23 nt, Artificial Sequence
  Synthetic
ggaaaauuccuaugggagugggc

SEQ ID NO: 92046 - RNA, 24 nt, Artificial Sequence
  Synthetic
cggaaaauuccuaugggagugggc

SEQ ID NO: 92047 - RNA, 18 nt, Artificial Sequence
  Synthetic
gacgcaacccccacuggc

SEQ ID NO: 92048 - RNA, 19 nt, Artificial Sequence
  Synthetic
ugacgcaacccccacuggc

SEQ ID NO: 92049 - RNA, 20 nt, Artificial Sequence
  Synthetic
cugacgcaacccccacuggc

SEQ ID NO: 92050 - RNA, 21 nt, Artificial Sequence
  Synthetic
gcugacgcaacccccacuggc

SEQ ID NO: 92051 - RNA, 22 nt, Artificial Sequence
  Synthetic
ugcugacgcaacccccacuggc

SEQ ID NO: 92052 - RNA, 23 nt, Artificial Sequence
  Synthetic
uugcugacgcaacccccacuggc

SEQ ID NO: 92053 - RNA, 24 nt, Artificial Sequence
  Synthetic
uuugcugacgcaacccccacuggc

SEQ ID NO: 92054 - RNA, 18 nt, Artificial Sequence
  Synthetic
  misc_feature (7)..(7): n is a, c, g, or u
  misc_feature (16)..(16): n is a, c, g, or u
agcucunuaucgggangc

SEQ ID NO: 92055 - RNA, 19 nt, Artificial Sequence
  Synthetic
  misc_feature (8)..(8): n is a, c, g, or u
  misc_feature (17)..(17): n is a, c, g, or u
cagcucunuaucgggangc

SEQ ID NO: 92056 - RNA, 20 nt, Artificial Sequence
  Synthetic
  misc_feature (9)..(9): n is a, c, g, or u
  misc_feature (18)..(18): n is a, c, g, or u
ucagcucunuaucgggangc

SEQ ID NO: 92057 - RNA, 21 nt, Artificial Sequence
  Synthetic
  misc_feature (10)..(10): n is a, c, g, or u
  misc_feature (19)..(19): n is a, c, g, or u
cucagcucunuaucgggangc

SEQ ID NO: 92058 - RNA, 22 nt, Artificial Sequence
  Synthetic
  misc_feature (11)..(11): n is a, c, g, or u
  misc_feature (20)..(20): n is a, c, g, or u
ccucagcucunuaucgggangc

SEQ ID NO: 92059 - RNA, 23 nt, Artificial Sequence
  Synthetic
  misc_feature (12)..(12): n is a, c, g, or u
  misc_feature (21)..(21): n is a, c, g, or u
gccucagcucunuaucgggangc

SEQ ID NO: 92060 - RNA, 24 nt, Artificial Sequence
  Synthetic
  misc_feature (13)..(13): n is a, c, g, or u
  misc_feature (22)..(22): n is a, c, g, or u
cgccucagcucunuaucgggangc

SEQ ID NO: 92061 - RNA, 18 nt, Artificial Sequence
  Synthetic
cucauccucaggccaugc

SEQ ID NO: 92062 - RNA, 19 nt, Artificial Sequence
  Synthetic
acucauccucaggccaugc

SEQ ID NO: 92063 - RNA, 20 nt, Artificial Sequence
  Synthetic
cacucauccucaggccaugc

SEQ ID NO: 92064 - RNA, 21 nt, Artificial Sequence
  Synthetic
acacucauccucaggccaugc

SEQ ID NO: 92065 - RNA, 22 nt, Artificial Sequence
  Synthetic
aacacucauccucaggccaugc

SEQ ID NO: 92066 - RNA, 23 nt, Artificial Sequence
  Synthetic
aaacacucauccucaggccaugc

SEQ ID NO: 92067 - RNA, 24 nt, Artificial Sequence
  Synthetic
gaaacacucauccucaggccaugc

SEQ ID NO: 92068 - RNA, 18 nt, Artificial Sequence
  Synthetic
ugggccaucagcgcaugc

SEQ ID NO: 92069 - RNA, 19 nt, Artificial Sequence
  Synthetic
augggccaucagcgcaugc

SEQ ID NO: 92070 - RNA, 20 nt, Artificial Sequence
  Synthetic
caugggccaucagcgcaugc

SEQ ID NO: 92071 - RNA, 21 nt, Artificial Sequence
  Synthetic
ucaugggccaucagcgcaugc

SEQ ID NO: 92072 - RNA, 22 nt, Artificial Sequence
  Synthetic
gucaugggccaucagcgcaugc

SEQ ID NO: 92073 - RNA, 23 nt, Artificial Sequence
  Synthetic
ggucaugggccaucagcgcaugc

SEQ ID NO: 92074 - RNA, 24 nt, Artificial Sequence
  Synthetic
uggucaugggccaucagcgcaugc

SEQ ID NO: 92075 - RNA, 18 nt, Artificial Sequence
  Synthetic
gaggauuggggacccugc

SEQ ID NO: 92076 - RNA, 19 nt, Artificial Sequence
  Synthetic
cgaggauuggggacccugc

SEQ ID NO: 92077 - RNA, 20 nt, Artificial Sequence
  Synthetic
ucgaggauuggggacccugc

SEQ ID NO: 92078 - RNA, 21 nt, Artificial Sequence
  Synthetic
cucgaggauuggggacccugc

SEQ ID NO: 92079 - RNA, 22 nt, Artificial Sequence
  Synthetic
ucucgaggauuggggacccugc

SEQ ID NO: 92080 - RNA, 23 nt, Artificial Sequence
  Synthetic
uucucgaggauuggggacccugc

SEQ ID NO: 92081 - RNA, 24 nt, Artificial Sequence
  Synthetic
cuucucgaggauuggggacccugc

SEQ ID NO: 92082 - RNA, 18 nt, Artificial Sequence
  Synthetic
cugccaacuggauccugc

SEQ ID NO: 92083 - RNA, 19 nt, Artificial Sequence
  Synthetic
gcugccaacuggauccugc

SEQ ID NO: 92084 - RNA, 20 nt, Artificial Sequence
  Synthetic
ugcugccaacuggauccugc

SEQ ID NO: 92085 - RNA, 21 nt, Artificial Sequence
  Synthetic
gugcugccaacuggauccugc

SEQ ID NO: 92086 - RNA, 22 nt, Artificial Sequence
  Synthetic
ugugcugccaacuggauccugc

SEQ ID NO: 92087 - RNA, 23 nt, Artificial Sequence
  Synthetic
cugugcugccaacuggauccugc

SEQ ID NO: 92088 - RNA, 24 nt, Artificial Sequence
  Synthetic
gcugugcugccaacuggauccugc

SEQ ID NO: 92089 - RNA, 18 nt, Artificial Sequence
  Synthetic
caagccuccaagcugugc

SEQ ID NO: 92090 - RNA, 19 nt, Artificial Sequence
  Synthetic
ucaagccuccaagcugugc

SEQ ID NO: 92091 - RNA, 20 nt, Artificial Sequence
  Synthetic
uucaagccuccaagcugugc

SEQ ID NO: 92092 - RNA, 21 nt, Artificial Sequence
  Synthetic
guucaagccuccaagcugugc

SEQ ID NO: 92093 - RNA, 22 nt, Artificial Sequence
  Synthetic
uguucaagccuccaagcugugc

SEQ ID NO: 92094 - RNA, 23 nt, Artificial Sequence
  Synthetic
cuguucaagccuccaagcugugc

SEQ ID NO: 92095 - RNA, 24 nt, Artificial Sequence
  Synthetic
acuguucaagccuccaagcugugc

SEQ ID NO: 92096 - RNA, 18 nt, Artificial Sequence
  Synthetic
  misc_feature (12)..(12): n is a, c, g, or u
  misc_feature (15)..(15): n is a, c, g, or u
aggcaagcaauncunugc

SEQ ID NO: 92097 - RNA, 19 nt, Artificial Sequence
  Synthetic
  misc_feature (13)..(13): n is a, c, g, or u
  misc_feature (16)..(16): n is a, c, g, or u
caggcaagcaauncunugc

SEQ ID NO: 92098 - RNA, 20 nt, Artificial Sequence
  Synthetic
  misc_feature (14)..(14): n is a, c, g, or u
  misc_feature (17)..(17): n is a, c, g, or u
ucaggcaagcaauncunugc

SEQ ID NO: 92099 - RNA, 21 nt, Artificial Sequence
  Synthetic
  misc_feature (15)..(15): n is a, c, g, or u
  misc_feature (18)..(18): n is a, c, g, or u
cucaggcaagcaauncunugc

SEQ ID NO: 92100 - RNA, 22 nt, Artificial Sequence
  Synthetic
  misc_feature (16)..(16): n is a, c, g, or u
  misc_feature (19)..(19): n is a, c, g, or u
acucaggcaagcaauncunugc

SEQ ID NO: 92101 - RNA, 23 nt, Artificial Sequence
  Synthetic
  misc_feature (17)..(17): n is a, c, g, or u
  misc_feature (20)..(20): n is a, c, g, or u
cacucaggcaagcaauncunugc

SEQ ID NO: 92102 - RNA, 24 nt, Artificial Sequence
  Synthetic
  misc_feature (18)..(18): n is a, c, g, or u
  misc_feature (21)..(21): n is a, c, g, or u
gcacucaggcaagcaauncunugc

SEQ ID NO: 92103 - RNA, 18 nt, Artificial Sequence
  Synthetic
  misc_feature (11)..(12): n is a, c, g, or u
acgcccaccannucuugc

SEQ ID NO: 92104 - RNA, 19 nt, Artificial Sequence
  Synthetic
  misc_feature (12)..(13): n is a, c, g, or u
aacgcccaccannucuugc

SEQ ID NO: 92105 - RNA, 20 nt, Artificial Sequence
  Synthetic
  misc_feature (13)..(14): n is a, c, g, or u
gaacgcccaccannucuugc

SEQ ID NO: 92106 - RNA, 21 nt, Artificial Sequence
  Synthetic
  misc_feature (14)..(15): n is a, c, g, or u
ugaacgcccaccannucuugc

SEQ ID NO: 92107 - RNA, 22 nt, Artificial Sequence
  Synthetic
  misc_feature (15)..(16): n is a, c, g, or u
gugaacgcccaccannucuugc

SEQ ID NO: 92108 - RNA, 23 nt, Artificial Sequence
  Synthetic
  misc_feature (16)..(17): n is a, c, g, or u
cgugaacgcccaccannucuugc

SEQ ID NO: 92109 - RNA, 24 nt, Artificial Sequence
  Synthetic
  misc_feature (17)..(18): n is a, c, g, or u
ccgugaacgcccaccannucuugc

SEQ ID NO: 92110 - RNA, 18 nt, Artificial Sequence
  Synthetic
  misc_feature (14)..(14): n is a, c, g, or u
gauguuaugggucnuugc

SEQ ID NO: 92111 - RNA, 19 nt, Artificial Sequence
  Synthetic
  misc_feature (15)..(15): n is a, c, g, or u
ggauguuaugggucnuugc

SEQ ID NO: 92112 - RNA, 20 nt, Artificial Sequence
  Synthetic
  misc_feature (16)..(16): n is a, c, g, or u
uggauguuaugggucnuugc

SEQ ID NO: 92113 - RNA, 21 nt, Artificial Sequence
  Synthetic
  misc_feature (17)..(17): n is a, c, g, or u
uuggauguuaugggucnuugc

SEQ ID NO: 92114 - RNA, 22 nt, Artificial Sequence
  Synthetic
  misc_feature (18)..(18): n is a, c, g, or u
auuggauguuaugggucnuugc

SEQ ID NO: 92115 - RNA, 23 nt, Artificial Sequence
  Synthetic
  misc_feature (19)..(19): n is a, c, g, or u
cauuggauguuaugggucnuugc

SEQ ID NO: 92116 - RNA, 24 nt, Artificial Sequence
  Synthetic
  misc_feature (20)..(20): n is a, c, g, or u
ucauuggauguuaugggucnuugc

SEQ ID NO: 92117 - RNA, 18 nt, Artificial Sequence
  Synthetic
  misc_feature (14)..(14): n is a, c, g, or u
  misc_feature (17)..(17): n is a, c, g, or u
cuuggguggcuuunggnc

SEQ ID NO: 92118 - RNA, 19 nt, Artificial Sequence
  Synthetic
  misc_feature (15)..(15): n is a, c, g, or u
  misc_feature (18)..(18): n is a, c, g, or u
ccuuggguggcuuunggnc

SEQ ID NO: 92119 - RNA, 20 nt, Artificial Sequence
  Synthetic
  misc_feature (16)..(16): n is a, c, g, or u
  misc_feature (19)..(19): n is a, c, g, or u
gccuuggguggcuuunggnc

SEQ ID NO: 92120 - RNA, 21 nt, Artificial Sequence
  Synthetic
  misc_feature (17)..(17): n is a, c, g, or u
  misc_feature (20)..(20): n is a, c, g, or u
ugccuuggguggcuuunggnc

SEQ ID NO: 92121 - RNA, 22 nt, Artificial Sequence
  Synthetic
  misc_feature (18)..(18): n is a, c, g, or u
  misc_feature (21)..(21): n is a, c, g, or u
gugccuuggguggcuuunggnc

SEQ ID NO: 92122 - RNA, 23 nt, Artificial Sequence
  Synthetic
  misc_feature (19)..(19): n is a, c, g, or u
  misc_feature (22)..(22): n is a, c, g, or u
ugugccuuggguggcuuunggnc

SEQ ID NO: 92123 - RNA, 24 nt, Artificial Sequence
  Synthetic
  misc_feature (20)..(20): n is a, c, g, or u
  misc_feature (23)..(23): n is a, c, g, or u
cugugccuuggguggcuuunggnc

SEQ ID NO: 92124 - RNA, 18 nt, Artificial Sequence
  Synthetic
  misc_feature (17)..(17): n is a, c, g, or u
uaaagaauuuggagcunc

SEQ ID NO: 92125 - RNA, 19 nt, Artificial Sequence
  Synthetic
  misc_feature (18)..(18): n is a, c, g, or u
auaaagaauuuggagcunc

SEQ ID NO: 92126 - RNA, 20 nt, Artificial Sequence
  Synthetic
  misc_feature (19)..(19): n is a, c, g, or u
uauaaagaauuuggagcunc

SEQ ID NO: 92127 - RNA, 21 nt, Artificial Sequence
  Synthetic
  misc_feature (20)..(20): n is a, c, g, or u
uuauaaagaauuuggagcunc

SEQ ID NO: 92128 - RNA, 22 nt, Artificial Sequence
  Synthetic
  misc_feature (21)..(21): n is a, c, g, or u
cuuauaaagaauuuggagcunc

SEQ ID NO: 92129 - RNA, 23 nt, Artificial Sequence
  Synthetic
  misc_feature (22)..(22): n is a, c, g, or u
ccuuauaaagaauuuggagcunc

SEQ ID NO: 92130 - RNA, 24 nt, Artificial Sequence
  Synthetic
  misc_feature (1)..(1): n is a, c, g, or u
  misc_feature (23)..(23): n is a, c, g, or u
nccuuauaaagaauuuggagcunc

SEQ ID NO: 92131 - RNA, 18 nt, Artificial Sequence
  Synthetic
  misc_feature (8)..(8): n is a, c, g, or u
  misc_feature (12)..(12): n is a, c, g, or u
cacaucanacanaaaauc

SEQ ID NO: 92132 - RNA, 19 nt, Artificial Sequence
  Synthetic
  misc_feature (1)..(1): n is a, c, g, or u
  misc_feature (9)..(9): n is a, c, g, or u
  misc_feature (13)..(13): n is a, c, g, or u
ncacaucanacanaaaauc

SEQ ID NO: 92133 - RNA, 20 nt, Artificial Sequence
  Synthetic
  misc_feature (2)..(2): n is a, c, g, or u
  misc_feature (10)..(10): n is a, c, g, or u
  misc_feature (14)..(14): n is a, c, g, or u
ancacaucanacanaaaauc

SEQ ID NO: 92134 - RNA, 21 nt, Artificial Sequence
  Synthetic
  misc_feature (3)..(3): n is a, c, g, or u
  misc_feature (11)..(11): n is a, c, g, or u
  misc_feature (15)..(15): n is a, c, g, or u
gancacaucanacanaaaauc

SEQ ID NO: 92135 - RNA, 22 nt, Artificial Sequence
  Synthetic
  misc_feature (4)..(4): n is a, c, g, or u
  misc_feature (12)..(12): n is a, c, g, or u
  misc_feature (16)..(16): n is a, c, g, or u
agancacaucanacanaaaauc

SEQ ID NO: 92136 - RNA, 23 nt, Artificial Sequence
  Synthetic
  misc_feature (5)..(5): n is a, c, g, or u
  misc_feature (13)..(13): n is a, c, g, or u
  misc_feature (17)..(17): n is a, c, g, or u
aagancacaucanacanaaaauc

SEQ ID NO: 92137 - RNA, 24 nt, Artificial Sequence
  Synthetic
  misc_feature (6)..(6): n is a, c, g, or u
  misc_feature (14)..(14): n is a, c, g, or u
  misc_feature (18)..(18): n is a, c, g, or u
caagancacaucanacanaaaauc

SEQ ID NO: 92138 - RNA, 18 nt, Artificial Sequence
  Synthetic
ucgcagaagaucucaauc

SEQ ID NO: 92139 - RNA, 19 nt, Artificial Sequence
  Synthetic
gucgcagaagaucucaauc

SEQ ID NO: 92140 - RNA, 20 nt, Artificial Sequence
  Synthetic
cgucgcagaagaucucaauc

SEQ ID NO: 92141 - RNA, 18 nt, Artificial Sequence
  Synthetic
uauucccaucccaucauc

SEQ ID NO: 92142 - RNA, 19 nt, Artificial Sequence
  Synthetic
guauucccaucccaucauc

SEQ ID NO: 92143 - RNA, 20 nt, Artificial Sequence
  Synthetic
uguauucccaucccaucauc

SEQ ID NO: 92144 - RNA, 21 nt, Artificial Sequence
  Synthetic
cuguauucccaucccaucauc

SEQ ID NO: 92145 - RNA, 22 nt, Artificial Sequence
  Synthetic
ccuguauucccaucccaucauc

SEQ ID NO: 92146 - RNA, 23 nt, Artificial Sequence
  Synthetic
accuguauucccaucccaucauc

SEQ ID NO: 92147 - RNA, 24 nt, Artificial Sequence
  Synthetic
caccuguauucccaucccaucauc

SEQ ID NO: 92148 - RNA, 18 nt, Artificial Sequence
  Synthetic
cuuugagaaacacucauc

SEQ ID NO: 92149 - RNA, 19 nt, Artificial Sequence
  Synthetic
ccuuugagaaacacucauc

SEQ ID NO: 92150 - RNA, 20 nt, Artificial Sequence
  Synthetic
accuuugagaaacacucauc

SEQ ID NO: 92151 - RNA, 21 nt, Artificial Sequence
  Synthetic
caccuuugagaaacacucauc

SEQ ID NO: 92152 - RNA, 22 nt, Artificial Sequence
  Synthetic
ccaccuuugagaaacacucauc

SEQ ID NO: 92153 - RNA, 23 nt, Artificial Sequence
  Synthetic
uccaccuuugagaaacacucauc

SEQ ID NO: 92154 - RNA, 24 nt, Artificial Sequence
  Synthetic
cuccaccuuugagaaacacucauc

SEQ ID NO: 92155 - RNA, 18 nt, Artificial Sequence
  Synthetic
uccucuaauuccaggauc

SEQ ID NO: 92156 - RNA, 19 nt, Artificial Sequence
  Synthetic
guccucuaauuccaggauc

SEQ ID NO: 92157 - RNA, 20 nt, Artificial Sequence
  Synthetic
uguccucuaauuccaggauc

SEQ ID NO: 92158 - RNA, 21 nt, Artificial Sequence
  Synthetic
uuguccucuaauuccaggauc

SEQ ID NO: 92159 - RNA, 22 nt, Artificial Sequence
  Synthetic
uuuguccucuaauuccaggauc

SEQ ID NO: 92160 - RNA, 23 nt, Artificial Sequence
  Synthetic
guuuguccucuaauuccaggauc

SEQ ID NO: 92161 - RNA, 24 nt, Artificial Sequence
  Synthetic
cguuuguccucuaauuccaggauc

SEQ ID NO: 92162 - RNA, 18 nt, Artificial Sequence
  Synthetic
  misc_feature (15)..(15): n is a, c, g, or u
uuacaccaagacaunauc

SEQ ID NO: 92163 - RNA, 19 nt, Artificial Sequence
  Synthetic
  misc_feature (16)..(16): n is a, c, g, or u
uuuacaccaagacaunauc

SEQ ID NO: 92164 - RNA, 20 nt, Artificial Sequence
  Synthetic
  misc_feature (17)..(17): n is a, c, g, or u
auuuacaccaagacaunauc

SEQ ID NO: 92165 - RNA, 21 nt, Artificial Sequence
  Synthetic
  misc_feature (18)..(18): n is a, c, g, or u
cauuuacaccaagacaunauc

SEQ ID NO: 92166 - RNA, 22 nt, Artificial Sequence
  Synthetic
  misc_feature (19)..(19): n is a, c, g, or u
acauuuacaccaagacaunauc

SEQ ID NO: 92167 - RNA, 23 nt, Artificial Sequence
  Synthetic
  misc_feature (20)..(20): n is a, c, g, or u
uacauuuacaccaagacaunauc

SEQ ID NO: 92168 - RNA, 24 nt, Artificial Sequence
  Synthetic
  misc_feature (21)..(21): n is a, c, g, or u
auacauuuacaccaagacaunauc

SEQ ID NO: 92169 - RNA, 18 nt, Artificial Sequence
  Synthetic
guauuaaaccuuauuauc

SEQ ID NO: 92170 - RNA, 19 nt, Artificial Sequence
  Synthetic
gguauuaaaccuuauuauc

SEQ ID NO: 92171 - RNA, 20 nt, Artificial Sequence
  Synthetic
ggguauuaaaccuuauuauc

SEQ ID NO: 92172 - RNA, 21 nt, Artificial Sequence
  Synthetic
aggguauuaaaccuuauuauc

SEQ ID NO: 92173 - RNA, 22 nt, Artificial Sequence
  Synthetic
aaggguauuaaaccuuauuauc

SEQ ID NO: 92174 - RNA, 23 nt, Artificial Sequence
  Synthetic
uaaggguauuaaaccuuauuauc

SEQ ID NO: 92175 - RNA, 24 nt, Artificial Sequence
  Synthetic
auaaggguauuaaaccuuauuauc

SEQ ID NO: 92176 - RNA, 18 nt, Artificial Sequence
  Synthetic
caacuuguccugguuauc

SEQ ID NO: 92177 - RNA, 19 nt, Artificial Sequence
  Synthetic
ccaacuuguccugguuauc

SEQ ID NO: 92178 - RNA, 20 nt, Artificial Sequence
  Synthetic
uccaacuuguccugguuauc

SEQ ID NO: 92179 - RNA, 21 nt, Artificial Sequence
  Synthetic
cuccaacuuguccugguuauc

SEQ ID NO: 92180 - RNA, 22 nt, Artificial Sequence
  Synthetic
ccuccaacuuguccugguuauc

SEQ ID NO: 92181 - RNA, 23 nt, Artificial Sequence
  Synthetic
uccuccaacuuguccugguuauc

SEQ ID NO: 92182 - RNA, 24 nt, Artificial Sequence
  Synthetic
guccuccaacuuguccugguuauc

SEQ ID NO: 92183 - RNA, 18 nt, Artificial Sequence
  Synthetic
caaccuuccaccaaacuc

SEQ ID NO: 92184 - RNA, 19 nt, Artificial Sequence
  Synthetic
acaaccuuccaccaaacuc

SEQ ID NO: 92185 - RNA, 20 nt, Artificial Sequence
  Synthetic
cacaaccuuccaccaaacuc

SEQ ID NO: 92186 - RNA, 18 nt, Artificial Sequence
  Synthetic
  misc_feature (5)..(5): n is a, c, g, or u
gacanuauuuacacacuc

SEQ ID NO: 92187 - RNA, 19 nt, Artificial Sequence
  Synthetic
  misc_feature (6)..(6): n is a, c, g, or u
agacanuauuuacacacuc

SEQ ID NO: 92188 - RNA, 20 nt, Artificial Sequence
  Synthetic
  misc_feature (1)..(1): n is a, c, g, or u
  misc_feature (7)..(7): n is a, c, g, or u
nagacanuauuuacacacuc

SEQ ID NO: 92189 - RNA, 21 nt, Artificial Sequence
  Synthetic
  misc_feature (2)..(2): n is a, c, g, or u
  misc_feature (8)..(8): n is a, c, g, or u
cnagacanuauuuacacacuc

SEQ ID NO: 92190 - RNA, 22 nt, Artificial Sequence
  Synthetic
  misc_feature (3)..(3): n is a, c, g, or u
  misc_feature (9)..(9): n is a, c, g, or u
acnagacanuauuuacacacuc

SEQ ID NO: 92191 - RNA, 23 nt, Artificial Sequence
  Synthetic
  misc_feature (4)..(4): n is a, c, g, or u
  misc_feature (10)..(10): n is a, c, g, or u
aacnagacanuauuuacacacuc

SEQ ID NO: 92192 - RNA, 24 nt, Artificial Sequence
  Synthetic
  misc_feature (5)..(5): n is a, c, g, or u
  misc_feature (11)..(11): n is a, c, g, or u
aaacnagacanuauuuacacacuc

SEQ ID NO: 92193 - RNA, 18 nt, Artificial Sequence
  Synthetic
cccaaccuccaaucacuc

SEQ ID NO: 92194 - RNA, 19 nt, Artificial Sequence
  Synthetic
ccccaaccuccaaucacuc

SEQ ID NO: 92195 - RNA, 20 nt, Artificial Sequence
  Synthetic
uccccaaccuccaaucacuc

SEQ ID NO: 92196 - RNA, 21 nt, Artificial Sequence
  Synthetic
guccccaaccuccaaucacuc

SEQ ID NO: 92197 - RNA, 22 nt, Artificial Sequence
  Synthetic
aguccccaaccuccaaucacuc

SEQ ID NO: 92198 - RNA, 23 nt, Artificial Sequence
  Synthetic
caguccccaaccuccaaucacuc

SEQ ID NO: 92199 - RNA, 24 nt, Artificial Sequence
  Synthetic
gcaguccccaaccuccaaucacuc

SEQ ID NO: 92200 - RNA, 18 nt, Artificial Sequence
  Synthetic
ucuuacauaagaggacuc

SEQ ID NO: 92201 - RNA, 19 nt, Artificial Sequence
  Synthetic
gucuuacauaagaggacuc

SEQ ID NO: 92202 - RNA, 20 nt, Artificial Sequence
  Synthetic
ggucuuacauaagaggacuc

SEQ ID NO: 92203 - RNA, 21 nt, Artificial Sequence
  Synthetic
aggucuuacauaagaggacuc

SEQ ID NO: 92204 - RNA, 22 nt, Artificial Sequence
  Synthetic
aaggucuuacauaagaggacuc

SEQ ID NO: 92205 - RNA, 23 nt, Artificial Sequence
  Synthetic
caaggucuuacauaagaggacuc

SEQ ID NO: 92206 - RNA, 24 nt, Artificial Sequence
  Synthetic
ccaaggucuuacauaagaggacuc

SEQ ID NO: 92207 - RNA, 18 nt, Artificial Sequence
  Synthetic
uuaguauuccuuggacuc

SEQ ID NO: 92208 - RNA, 19 nt, Artificial Sequence
  Synthetic
guuaguauuccuuggacuc

SEQ ID NO: 92209 - RNA, 20 nt, Artificial Sequence
  Synthetic
uguuaguauuccuuggacuc

SEQ ID NO: 92210 - RNA, 21 nt, Artificial Sequence
  Synthetic
auguuaguauuccuuggacuc

SEQ ID NO: 92211 - RNA, 22 nt, Artificial Sequence
  Synthetic
aauguuaguauuccuuggacuc

SEQ ID NO: 92212 - RNA, 23 nt, Artificial Sequence
  Synthetic
caauguuaguauuccuuggacuc

SEQ ID NO: 92213 - RNA, 24 nt, Artificial Sequence
  Synthetic
ucaauguuaguauuccuuggacuc

SEQ ID NO: 92214 - RNA, 18 nt, Artificial Sequence
  Synthetic
gaagaacucccucgccuc

SEQ ID NO: 92215 - RNA, 19 nt, Artificial Sequence
  Synthetic
agaagaacucccucgccuc

SEQ ID NO: 92216 - RNA, 20 nt, Artificial Sequence
  Synthetic
aagaagaacucccucgccuc

SEQ ID NO: 92217 - RNA, 21 nt, Artificial Sequence
  Synthetic
gaagaagaacucccucgccuc

SEQ ID NO: 92218 - RNA, 22 nt, Artificial Sequence
  Synthetic
agaagaagaacucccucgccuc

SEQ ID NO: 92219 - RNA, 23 nt, Artificial Sequence
  Synthetic
uagaagaagaacucccucgccuc

SEQ ID NO: 92220 - RNA, 24 nt, Artificial Sequence
  Synthetic
cuagaagaagaacucccucgccuc

SEQ ID NO: 92221 - RNA, 18 nt, Artificial Sequence
  Synthetic
  misc_feature (2)..(2): n is a, c, g, or u
  misc_feature (14)..(14): n is a, c, g, or u
unccugucuuuaanccuc

SEQ ID NO: 92222 - RNA, 19 nt, Artificial Sequence
  Synthetic
  misc_feature (3)..(3): n is a, c, g, or u
  misc_feature (15)..(15): n is a, c, g, or u
gunccugucuuuaanccuc

SEQ ID NO: 92223 - RNA, 20 nt, Artificial Sequence
  Synthetic
  misc_feature (4)..(4): n is a, c, g, or u
  misc_feature (16)..(16): n is a, c, g, or u
ugunccugucuuuaanccuc

SEQ ID NO: 92224 - RNA, 21 nt, Artificial Sequence
  Synthetic
  misc_feature (5)..(5): n is a, c, g, or u
  misc_feature (17)..(17): n is a, c, g, or u
cugunccugucuuuaanccuc

SEQ ID NO: 92225 - RNA, 22 nt, Artificial Sequence
  Synthetic
  misc_feature (6)..(6): n is a, c, g, or u
  misc_feature (18)..(18): n is a, c, g, or u
acugunccugucuuuaanccuc

SEQ ID NO: 92226 - RNA, 23 nt, Artificial Sequence
  Synthetic
  misc_feature (7)..(7): n is a, c, g, or u
  misc_feature (19)..(19): n is a, c, g, or u
uacugunccugucuuuaanccuc

SEQ ID NO: 92227 - RNA, 24 nt, Artificial Sequence
  Synthetic
  misc_feature (8)..(8): n is a, c, g, or u
  misc_feature (20)..(20): n is a, c, g, or u
cuacugunccugucuuuaanccuc

SEQ ID NO: 92228 - RNA, 18 nt, Artificial Sequence
  Synthetic
  misc_feature (5)..(5): n is a, c, g, or u
gggangccuuagagucuc

SEQ ID NO: 92229 - RNA, 19 nt, Artificial Sequence
  Synthetic
  misc_feature (6)..(6): n is a, c, g, or u
cgggangccuuagagucuc

SEQ ID NO: 92230 - RNA, 20 nt, Artificial Sequence
  Synthetic
  misc_feature (7)..(7): n is a, c, g, or u
ucgggangccuuagagucuc

SEQ ID NO: 92231 - RNA, 21 nt, Artificial Sequence
  Synthetic
  misc_feature (8)..(8): n is a, c, g, or u
aucgggangccuuagagucuc

SEQ ID NO: 92232 - RNA, 22 nt, Artificial Sequence
  Synthetic
  misc_feature (9)..(9): n is a, c, g, or u
uaucgggangccuuagagucuc

SEQ ID NO: 92233 - RNA, 23 nt, Artificial Sequence
  Synthetic
  misc_feature (1)..(1): n is a, c, g, or u
  misc_feature (10)..(10): n is a, c, g, or u
nuaucgggangccuuagagucuc

SEQ ID NO: 92234 - RNA, 24 nt, Artificial Sequence
  Synthetic
  misc_feature (2)..(2): n is a, c, g, or u
  misc_feature (11)..(11): n is a, c, g, or u
unuaucgggangccuuagagucuc

SEQ ID NO: 92235 - RNA, 18 nt, Artificial Sequence
  Synthetic
gcaggcuuucacuuucuc

SEQ ID NO: 92236 - RNA, 19 nt, Artificial Sequence
  Synthetic
agcaggcuuucacuuucuc

SEQ ID NO: 92237 - RNA, 20 nt, Artificial Sequence
  Synthetic
aagcaggcuuucacuuucuc

SEQ ID NO: 92238 - RNA, 21 nt, Artificial Sequence
  Synthetic
uaagcaggcuuucacuuucuc

SEQ ID NO: 92239 - RNA, 22 nt, Artificial Sequence
  Synthetic
cuaagcaggcuuucacuuucuc

SEQ ID NO: 92240 - RNA, 23 nt, Artificial Sequence
  Synthetic
ucuaagcaggcuuucacuuucuc

SEQ ID NO: 92241 - RNA, 24 nt, Artificial Sequence
  Synthetic
  misc_feature (1)..(1): n is a, c, g, or u
nucuaagcaggcuuucacuuucuc

SEQ ID NO: 92242 - RNA, 18 nt, Artificial Sequence
  Synthetic
  misc_feature (1)..(1): n is a, c, g, or u
  misc_feature (4)..(4): n is a, c, g, or u
nucnaccaaucgccaguc

SEQ ID NO: 92243 - RNA, 19 nt, Artificial Sequence
  Synthetic
  misc_feature (2)..(2): n is a, c, g, or u
  misc_feature (5)..(5): n is a, c, g, or u
cnucnaccaaucgccaguc

SEQ ID NO: 92244 - RNA, 20 nt, Artificial Sequence
  Synthetic
  misc_feature (3)..(3): n is a, c, g, or u
  misc_feature (6)..(6): n is a, c, g, or u
gcnucnaccaaucgccaguc

SEQ ID NO: 92245 - RNA, 21 nt, Artificial Sequence
  Synthetic
  misc_feature (4)..(4): n is a, c, g, or u
  misc_feature (7)..(7): n is a, c, g, or u
ugcnucnaccaaucgccaguc

SEQ ID NO: 92246 - RNA, 22 nt, Artificial Sequence
  Synthetic
  misc_feature (5)..(5): n is a, c, g, or u
  misc_feature (8)..(8): n is a, c, g, or u
cugcnucnaccaaucgccaguc

SEQ ID NO: 92247 - RNA, 23 nt, Artificial Sequence
  Synthetic
  misc_feature (6)..(6): n is a, c, g, or u
  misc_feature (9)..(9): n is a, c, g, or u
ccugcnucnaccaaucgccaguc

SEQ ID NO: 92248 - RNA, 24 nt, Artificial Sequence
  Synthetic
  misc_feature (7)..(7): n is a, c, g, or u
  misc_feature (10)..(10): n is a, c, g, or u
uccugcnucnaccaaucgccaguc

SEQ ID NO: 92249 - RNA, 18 nt, Artificial Sequence
  Synthetic
uggccaaaauucgcaguc

SEQ ID NO: 92250 - RNA, 19 nt, Artificial Sequence
  Synthetic
uuggccaaaauucgcaguc

SEQ ID NO: 92251 - RNA, 20 nt, Artificial Sequence
  Synthetic
cuuggccaaaauucgcaguc

SEQ ID NO: 92252 - RNA, 21 nt, Artificial Sequence
  Synthetic
ucuuggccaaaauucgcaguc

SEQ ID NO: 92253 - RNA, 22 nt, Artificial Sequence
  Synthetic
gucuuggccaaaauucgcaguc

SEQ ID NO: 92254 - RNA, 23 nt, Artificial Sequence
  Synthetic
ugucuuggccaaaauucgcaguc

SEQ ID NO: 92255 - RNA, 24 nt, Artificial Sequence
  Synthetic
gugucuuggccaaaauucgcaguc

SEQ ID NO: 92256 - RNA, 18 nt, Artificial Sequence
  Synthetic
ggucucaaucgccgcguc

SEQ ID NO: 92257 - RNA, 19 nt, Artificial Sequence
  Synthetic
aggucucaaucgccgcguc

SEQ ID NO: 92258 - RNA, 20 nt, Artificial Sequence
  Synthetic
aaggucucaaucgccgcguc

SEQ ID NO: 92259 - RNA, 18 nt, Artificial Sequence
  Synthetic
uuuugcucgcagcagguc

SEQ ID NO: 92260 - RNA, 19 nt, Artificial Sequence
  Synthetic
guuuugcucgcagcagguc

SEQ ID NO: 92261 - RNA, 20 nt, Artificial Sequence
  Synthetic
uguuuugcucgcagcagguc

SEQ ID NO: 92262 - RNA, 21 nt, Artificial Sequence
  Synthetic
uuguuuugcucgcagcagguc

SEQ ID NO: 92263 - RNA, 22 nt, Artificial Sequence
  Synthetic
cuuguuuugcucgcagcagguc

SEQ ID NO: 92264 - RNA, 23 nt, Artificial Sequence
  Synthetic
gcuuguuuugcucgcagcagguc

SEQ ID NO: 92265 - RNA, 24 nt, Artificial Sequence
  Synthetic
cgcuuguuuugcucgcagcagguc

SEQ ID NO: 92266 - RNA, 18 nt, Artificial Sequence
  Synthetic
acuggcuggggcuugguc

SEQ ID NO: 92267 - RNA, 19 nt, Artificial Sequence
  Synthetic
cacuggcuggggcuugguc

SEQ ID NO: 92268 - RNA, 20 nt, Artificial Sequence
  Synthetic
ccacuggcuggggcuugguc

SEQ ID NO: 92269 - RNA, 21 nt, Artificial Sequence
  Synthetic
cccacuggcuggggcuugguc

SEQ ID NO: 92270 - RNA, 22 nt, Artificial Sequence
  Synthetic
ccccacuggcuggggcuugguc

SEQ ID NO: 92271 - RNA, 23 nt, Artificial Sequence
  Synthetic
cccccacuggcuggggcuugguc

SEQ ID NO: 92272 - RNA, 24 nt, Artificial Sequence
  Synthetic
acccccacuggcuggggcuugguc

SEQ ID NO: 92273 - RNA, 18 nt, Artificial Sequence
  Synthetic
  misc_feature (12)..(12): n is a, c, g, or u
uggacucucugnaauguc

SEQ ID NO: 92274 - RNA, 19 nt, Artificial Sequence
  Synthetic
  misc_feature (13)..(13): n is a, c, g, or u
uuggacucucugnaauguc

SEQ ID NO: 92275 - RNA, 20 nt, Artificial Sequence
  Synthetic
  misc_feature (14)..(14): n is a, c, g, or u
cuuggacucucugnaauguc

SEQ ID NO: 92276 - RNA, 21 nt, Artificial Sequence
  Synthetic
  misc_feature (15)..(15): n is a, c, g, or u
ucuuggacucucugnaauguc

SEQ ID NO: 92277 - RNA, 22 nt, Artificial Sequence
  Synthetic
  misc_feature (16)..(16): n is a, c, g, or u
cucuuggacucucugnaauguc

SEQ ID NO: 92278 - RNA, 23 nt, Artificial Sequence
  Synthetic
  misc_feature (17)..(17): n is a, c, g, or u
acucuuggacucucugnaauguc

SEQ ID NO: 92279 - RNA, 24 nt, Artificial Sequence
  Synthetic
  misc_feature (18)..(18): n is a, c, g, or u
gacucuuggacucucugnaauguc

SEQ ID NO: 92280 - RNA, 18 nt, Artificial Sequence
  Synthetic
  misc_feature (1)..(1): n is a, c, g, or u
  misc_feature (6)..(6): n is a, c, g, or u
  misc_feature (12)..(12): n is a, c, g, or u
nauuunaugggnuauguc

SEQ ID NO: 92281 - RNA, 19 nt, Artificial Sequence
  Synthetic
  misc_feature (2)..(2): n is a, c, g, or u
  misc_feature (7)..(7): n is a, c, g, or u
  misc_feature (13)..(13): n is a, c, g, or u
anauuunaugggnuauguc

SEQ ID NO: 92282 - RNA, 20 nt, Artificial Sequence
  Synthetic
  misc_feature (3)..(3): n is a, c, g, or u
  misc_feature (8)..(8): n is a, c, g, or u
  misc_feature (14)..(14): n is a, c, g, or u
uanauuunaugggnuauguc

SEQ ID NO: 92283 - RNA, 21 nt, Artificial Sequence
  Synthetic
  misc_feature (1)..(1): n is a, c, g, or u
  misc_feature (4)..(4): n is a, c, g, or u
  misc_feature (9)..(9): n is a, c, g, or u
  misc_feature (15)..(15): n is a, c, g, or u
nuanauuunaugggnuauguc

SEQ ID NO: 92284 - RNA, 22 nt, Artificial Sequence
  Synthetic
  misc_feature (2)..(2): n is a, c, g, or u
  misc_feature (5)..(5): n is a, c, g, or u
  misc_feature (10)..(10): n is a, c, g, or u
  misc_feature (16)..(16): n is a, c, g, or u
unuanauuunaugggnuauguc

SEQ ID NO: 92285 - RNA, 23 nt, Artificial Sequence
  Synthetic
  misc_feature (3)..(3): n is a, c, g, or u
  misc_feature (6)..(6): n is a, c, g, or u
  misc_feature (11)..(11): n is a, c, g, or u
  misc_feature (17)..(17): n is a, c, g, or u
cunuanauuunaugggnuauguc

SEQ ID NO: 92286 - RNA, 24 nt, Artificial Sequence
  Synthetic
  misc_feature (4)..(4): n is a, c, g, or u
  misc_feature (7)..(7): n is a, c, g, or u
  misc_feature (12)..(12): n is a, c, g, or u
  misc_feature (18)..(18): n is a, c, g, or u
ucunuanauuunaugggnuauguc

SEQ ID NO: 92287 - RNA, 18 nt, Artificial Sequence
  Synthetic
  misc_feature (12)..(12): n is a, c, g, or u
ucuucuacugunccuguc

SEQ ID NO: 92288 - RNA, 19 nt, Artificial Sequence
  Synthetic
  misc_feature (13)..(13): n is a, c, g, or u
uucuucuacugunccuguc

SEQ ID NO: 92289 - RNA, 20 nt, Artificial Sequence
  Synthetic
  misc_feature (14)..(14): n is a, c, g, or u
auucuucuacugunccuguc

SEQ ID NO: 92290 - RNA, 21 nt, Artificial Sequence
  Synthetic
  misc_feature (15)..(15): n is a, c, g, or u
uauucuucuacugunccuguc

SEQ ID NO: 92291 - RNA, 22 nt, Artificial Sequence
  Synthetic
  misc_feature (16)..(16): n is a, c, g, or u
uuauucuucuacugunccuguc

SEQ ID NO: 92292 - RNA, 23 nt, Artificial Sequence
  Synthetic
  misc_feature (17)..(17): n is a, c, g, or u
uuuauucuucuacugunccuguc

SEQ ID NO: 92293 - RNA, 24 nt, Artificial Sequence
  Synthetic
  misc_feature (18)..(18): n is a, c, g, or u
cuuuauucuucuacugunccuguc

SEQ ID NO: 92294 - RNA, 18 nt, Artificial Sequence
  Synthetic
guuaucgcuggauguguc

SEQ ID NO: 92295 - RNA, 19 nt, Artificial Sequence
  Synthetic
gguuaucgcuggauguguc

SEQ ID NO: 92296 - RNA, 20 nt, Artificial Sequence
  Synthetic
ugguuaucgcuggauguguc

SEQ ID NO: 92297 - RNA, 21 nt, Artificial Sequence
  Synthetic
cugguuaucgcuggauguguc

SEQ ID NO: 92298 - RNA, 22 nt, Artificial Sequence
  Synthetic
ccugguuaucgcuggauguguc

SEQ ID NO: 92299 - RNA, 23 nt, Artificial Sequence
  Synthetic
uccugguuaucgcuggauguguc

SEQ ID NO: 92300 - RNA, 24 nt, Artificial Sequence
  Synthetic
guccugguuaucgcuggauguguc

SEQ ID NO: 92301 - RNA, 18 nt, Artificial Sequence
  Synthetic
uaccaauuuucuuuuguc

SEQ ID NO: 92302 - RNA, 19 nt, Artificial Sequence
  Synthetic
uuaccaauuuucuuuuguc

SEQ ID NO: 92303 - RNA, 20 nt, Artificial Sequence
  Synthetic
guuaccaauuuucuuuuguc

SEQ ID NO: 92304 - RNA, 21 nt, Artificial Sequence
  Synthetic
uguuaccaauuuucuuuuguc

SEQ ID NO: 92305 - RNA, 22 nt, Artificial Sequence
  Synthetic
cuguuaccaauuuucuuuuguc

SEQ ID NO: 92306 - RNA, 23 nt, Artificial Sequence
  Synthetic
gcuguuaccaauuuucuuuuguc

SEQ ID NO: 92307 - RNA, 24 nt, Artificial Sequence
  Synthetic
cgcuguuaccaauuuucuuuuguc

SEQ ID NO: 92308 - RNA, 18 nt, Artificial Sequence
  Synthetic
  misc_feature (12)..(12): n is a, c, g, or u
  misc_feature (16)..(16): n is a, c, g, or u
ccugcacgacuncugnuc

SEQ ID NO: 92309 - RNA, 19 nt, Artificial Sequence
  Synthetic
  misc_feature (13)..(13): n is a, c, g, or u
  misc_feature (17)..(17): n is a, c, g, or u
accugcacgacuncugnuc

SEQ ID NO: 92310 - RNA, 20 nt, Artificial Sequence
  Synthetic
  misc_feature (14)..(14): n is a, c, g, or u
  misc_feature (18)..(18): n is a, c, g, or u
aaccugcacgacuncugnuc

SEQ ID NO: 92311 - RNA, 21 nt, Artificial Sequence
  Synthetic
  misc_feature (15)..(15): n is a, c, g, or u
  misc_feature (19)..(19): n is a, c, g, or u
gaaccugcacgacuncugnuc

SEQ ID NO: 92312 - RNA, 22 nt, Artificial Sequence
  Synthetic
  misc_feature (16)..(16): n is a, c, g, or u
  misc_feature (20)..(20): n is a, c, g, or u
agaaccugcacgacuncugnuc

SEQ ID NO: 92313 - RNA, 23 nt, Artificial Sequence
  Synthetic
  misc_feature (17)..(17): n is a, c, g, or u
  misc_feature (21)..(21): n is a, c, g, or u
cagaaccugcacgacuncugnuc

SEQ ID NO: 92314 - RNA, 24 nt, Artificial Sequence
  Synthetic
  misc_feature (18)..(18): n is a, c, g, or u
  misc_feature (22)..(22): n is a, c, g, or u
gcagaaccugcacgacuncugnuc

SEQ ID NO: 92315 - RNA, 18 nt, Artificial Sequence
  Synthetic
aacaucacaucaggauuc

SEQ ID NO: 92316 - RNA, 19 nt, Artificial Sequence
  Synthetic
gaacaucacaucaggauuc

SEQ ID NO: 92317 - RNA, 20 nt, Artificial Sequence
  Synthetic
agaacaucacaucaggauuc

SEQ ID NO: 92318 - RNA, 21 nt, Artificial Sequence
  Synthetic
gagaacaucacaucaggauuc

SEQ ID NO: 92319 - RNA, 22 nt, Artificial Sequence
  Synthetic
ggagaacaucacaucaggauuc

SEQ ID NO: 92320 - RNA, 23 nt, Artificial Sequence
  Synthetic
uggagaacaucacaucaggauuc

SEQ ID NO: 92321 - RNA, 24 nt, Artificial Sequence
  Synthetic
auggagaacaucacaucaggauuc

SEQ ID NO: 92322 - RNA, 18 nt, Artificial Sequence
  Synthetic
uugugggucaccauauuc

SEQ ID NO: 92323 - RNA, 19 nt, Artificial Sequence
  Synthetic
uuugugggucaccauauuc

SEQ ID NO: 92324 - RNA, 20 nt, Artificial Sequence
  Synthetic
uuuugugggucaccauauuc

SEQ ID NO: 92325 - RNA, 21 nt, Artificial Sequence
  Synthetic
auuuugugggucaccauauuc

SEQ ID NO: 92326 - RNA, 22 nt, Artificial Sequence
  Synthetic
cauuuugugggucaccauauuc

SEQ ID NO: 92327 - RNA, 23 nt, Artificial Sequence
  Synthetic
ucauuuugugggucaccauauuc

SEQ ID NO: 92328 - RNA, 24 nt, Artificial Sequence
  Synthetic
cucauuuugugggucaccauauuc

SEQ ID NO: 92329 - RNA, 18 nt, Artificial Sequence
  Synthetic
aucucaauguuaguauuc

SEQ ID NO: 92330 - RNA, 19 nt, Artificial Sequence
  Synthetic
aaucucaauguuaguauuc

SEQ ID NO: 92331 - RNA, 20 nt, Artificial Sequence
  Synthetic
gaaucucaauguuaguauuc

SEQ ID NO: 92332 - RNA, 21 nt, Artificial Sequence
  Synthetic
ggaaucucaauguuaguauuc

SEQ ID NO: 92333 - RNA, 22 nt, Artificial Sequence
  Synthetic
gggaaucucaauguuaguauuc

SEQ ID NO: 92334 - RNA, 23 nt, Artificial Sequence
  Synthetic
cgggaaucucaauguuaguauuc

SEQ ID NO: 92335 - RNA, 24 nt, Artificial Sequence
  Synthetic
ucgggaaucucaauguuaguauuc

SEQ ID NO: 92336 - RNA, 18 nt, Artificial Sequence
  Synthetic
cuaucuuaucaacacuuc

SEQ ID NO: 92337 - RNA, 19 nt, Artificial Sequence
  Synthetic
ccuaucuuaucaacacuuc

SEQ ID NO: 92338 - RNA, 20 nt, Artificial Sequence
  Synthetic
cccuaucuuaucaacacuuc

SEQ ID NO: 92339 - RNA, 21 nt, Artificial Sequence
  Synthetic
ccccuaucuuaucaacacuuc

SEQ ID NO: 92340 - RNA, 22 nt, Artificial Sequence
  Synthetic
gccccuaucuuaucaacacuuc

SEQ ID NO: 92341 - RNA, 23 nt, Artificial Sequence
  Synthetic
ugccccuaucuuaucaacacuuc

SEQ ID NO: 92342 - RNA, 24 nt, Artificial Sequence
  Synthetic
augccccuaucuuaucaacacuuc

SEQ ID NO: 92343 - RNA, 18 nt, Artificial Sequence
  Synthetic
gaccuugaggcauacuuc

SEQ ID NO: 92344 - RNA, 19 nt, Artificial Sequence
  Synthetic
cgaccuugaggcauacuuc

SEQ ID NO: 92345 - RNA, 20 nt, Artificial Sequence
  Synthetic
ccgaccuugaggcauacuuc

SEQ ID NO: 92346 - RNA, 18 nt, Artificial Sequence
  Synthetic
ucccgcggacgacccuuc

SEQ ID NO: 92347 - RNA, 19 nt, Artificial Sequence
  Synthetic
aucccgcggacgacccuuc

SEQ ID NO: 92348 - RNA, 20 nt, Artificial Sequence
  Synthetic
aaucccgcggacgacccuuc

SEQ ID NO: 92349 - RNA, 18 nt, Artificial Sequence
  Synthetic
  misc_feature (2)..(2): n is a, c, g, or u
  misc_feature (4)..(4): n is a, c, g, or u
cncnuaucgucaaucuuc

SEQ ID NO: 92350 - RNA, 19 nt, Artificial Sequence
  Synthetic
  misc_feature (3)..(3): n is a, c, g, or u
  misc_feature (5)..(5): n is a, c, g, or u
ucncnuaucgucaaucuuc

SEQ ID NO: 92351 - RNA, 20 nt, Artificial Sequence
  Synthetic
  misc_feature (4)..(4): n is a, c, g, or u
  misc_feature (6)..(6): n is a, c, g, or u
cucncnuaucgucaaucuuc

SEQ ID NO: 92352 - RNA, 21 nt, Artificial Sequence
  Synthetic
  misc_feature (5)..(5): n is a, c, g, or u
  misc_feature (7)..(7): n is a, c, g, or u
ucucncnuaucgucaaucuuc

SEQ ID NO: 92353 - RNA, 22 nt, Artificial Sequence
  Synthetic
  misc_feature (6)..(6): n is a, c, g, or u
  misc_feature (8)..(8): n is a, c, g, or u
cucucncnuaucgucaaucuuc

SEQ ID NO: 92354 - RNA, 23 nt, Artificial Sequence
  Synthetic
  misc_feature (1)..(1): n is a, c, g, or u
  misc_feature (7)..(7): n is a, c, g, or u
  misc_feature (9)..(9): n is a, c, g, or u
ncucucncnuaucgucaaucuuc

SEQ ID NO: 92355 - RNA, 24 nt, Artificial Sequence
  Synthetic
  misc_feature (2)..(2): n is a, c, g, or u
  misc_feature (8)..(8): n is a, c, g, or u
  misc_feature (10)..(10): n is a, c, g, or u
gncucucncnuaucgucaaucuuc

SEQ ID NO: 92356 - RNA, 18 nt, Artificial Sequence
  Synthetic
ugcugguggcuccaguuc

SEQ ID NO: 92357 - RNA, 19 nt, Artificial Sequence
  Synthetic
cugcugguggcuccaguuc

SEQ ID NO: 92358 - RNA, 20 nt, Artificial Sequence
  Synthetic
ccugcugguggcuccaguuc

SEQ ID NO: 92359 - RNA, 21 nt, Artificial Sequence
  Synthetic
cccugcugguggcuccaguuc

SEQ ID NO: 92360 - RNA, 22 nt, Artificial Sequence
  Synthetic
ucccugcugguggcuccaguuc

SEQ ID NO: 92361 - RNA, 23 nt, Artificial Sequence
  Synthetic
uucccugcugguggcuccaguuc

SEQ ID NO: 92362 - RNA, 24 nt, Artificial Sequence
  Synthetic
uuucccugcugguggcuccaguuc

SEQ ID NO: 92363 - RNA, 18 nt, Artificial Sequence
  Synthetic
ccauuuguucagugguuc

SEQ ID NO: 92364 - RNA, 19 nt, Artificial Sequence
  Synthetic
gccauuuguucagugguuc

SEQ ID NO: 92365 - RNA, 20 nt, Artificial Sequence
  Synthetic
ugccauuuguucagugguuc

SEQ ID NO: 92366 - RNA, 21 nt, Artificial Sequence
  Synthetic
gugccauuuguucagugguuc

SEQ ID NO: 92367 - RNA, 22 nt, Artificial Sequence
  Synthetic
agugccauuuguucagugguuc

SEQ ID NO: 92368 - RNA, 23 nt, Artificial Sequence
  Synthetic
uagugccauuuguucagugguuc

SEQ ID NO: 92369 - RNA, 24 nt, Artificial Sequence
  Synthetic
cuagugccauuuguucagugguuc

SEQ ID NO: 92370 - RNA, 18 nt, Artificial Sequence
  Synthetic
  misc_feature (9)..(9): n is a, c, g, or u
ccaucaucnugggcuuuc

SEQ ID NO: 92371 - RNA, 19 nt, Artificial Sequence
  Synthetic
  misc_feature (10)..(10): n is a, c, g, or u
cccaucaucnugggcuuuc

SEQ ID NO: 92372 - RNA, 20 nt, Artificial Sequence
  Synthetic
  misc_feature (11)..(11): n is a, c, g, or u
ucccaucaucnugggcuuuc

SEQ ID NO: 92373 - RNA, 21 nt, Artificial Sequence
  Synthetic
  misc_feature (12)..(12): n is a, c, g, or u
aucccaucaucnugggcuuuc

SEQ ID NO: 92374 - RNA, 22 nt, Artificial Sequence
  Synthetic
  misc_feature (13)..(13): n is a, c, g, or u
caucccaucaucnugggcuuuc

SEQ ID NO: 92375 - RNA, 23 nt, Artificial Sequence
  Synthetic
  misc_feature (14)..(14): n is a, c, g, or u
ccaucccaucaucnugggcuuuc

SEQ ID NO: 92376 - RNA, 24 nt, Artificial Sequence
  Synthetic
  misc_feature (15)..(15): n is a, c, g, or u
cccaucccaucaucnugggcuuuc

SEQ ID NO: 92377 - RNA, 18 nt, Artificial Sequence
  Synthetic
gcaaauauacaucguuuc

SEQ ID NO: 92378 - RNA, 19 nt, Artificial Sequence
  Synthetic
cgcaaauauacaucguuuc

SEQ ID NO: 92379 - RNA, 20 nt, Artificial Sequence
  Synthetic
ccgcaaauauacaucguuuc

SEQ ID NO: 92380 - RNA, 21 nt, Artificial Sequence
  Synthetic
cccgcaaauauacaucguuuc

SEQ ID NO: 92381 - RNA, 22 nt, Artificial Sequence
  Synthetic
ucccgcaaauauacaucguuuc

SEQ ID NO: 92382 - RNA, 23 nt, Artificial Sequence
  Synthetic
cucccgcaaauauacaucguuuc

SEQ ID NO: 92383 - RNA, 24 nt, Artificial Sequence
  Synthetic
ucucccgcaaauauacaucguuuc

SEQ ID NO: 92384 - RNA, 18 nt, Artificial Sequence
  Synthetic
ggacuucucucaauuuuc

SEQ ID NO: 92385 - RNA, 19 nt, Artificial Sequence
  Synthetic
uggacuucucucaauuuuc

SEQ ID NO: 92386 - RNA, 20 nt, Artificial Sequence
  Synthetic
guggacuucucucaauuuuc

SEQ ID NO: 92387 - RNA, 21 nt, Artificial Sequence
  Synthetic
gguggacuucucucaauuuuc

SEQ ID NO: 92388 - RNA, 22 nt, Artificial Sequence
  Synthetic
ugguggacuucucucaauuuuc

SEQ ID NO: 92389 - RNA, 23 nt, Artificial Sequence
  Synthetic
gugguggacuucucucaauuuuc

SEQ ID NO: 92390 - RNA, 24 nt, Artificial Sequence
  Synthetic
cgugguggacuucucucaauuuuc

SEQ ID NO: 92391 - RNA, 18 nt, Artificial Sequence
  Synthetic
  misc_feature (13)..(13): n is a, c, g, or u
cccuaacaaaacnaaaag

SEQ ID NO: 92392 - RNA, 19 nt, Artificial Sequence
  Synthetic
  misc_feature (14)..(14): n is a, c, g, or u
acccuaacaaaacnaaaag

SEQ ID NO: 92393 - RNA, 20 nt, Artificial Sequence
  Synthetic
  misc_feature (15)..(15): n is a, c, g, or u
aacccuaacaaaacnaaaag

SEQ ID NO: 92394 - RNA, 21 nt, Artificial Sequence
  Synthetic
  misc_feature (16)..(16): n is a, c, g, or u
aaacccuaacaaaacnaaaag

SEQ ID NO: 92395 - RNA, 22 nt, Artificial Sequence
  Synthetic
  misc_feature (17)..(17): n is a, c, g, or u
uaaacccuaacaaaacnaaaag

SEQ ID NO: 92396 - RNA, 23 nt, Artificial Sequence
  Synthetic
  misc_feature (18)..(18): n is a, c, g, or u
uuaaacccuaacaaaacnaaaag

SEQ ID NO: 92397 - RNA, 24 nt, Artificial Sequence
  Synthetic
  misc_feature (19)..(19): n is a, c, g, or u
uuuaaacccuaacaaaacnaaaag

SEQ ID NO: 92398 - RNA, 18 nt, Artificial Sequence
  Synthetic
acuaauaugggccuaaag

SEQ ID NO: 92399 - RNA, 19 nt, Artificial Sequence
  Synthetic
cacuaauaugggccuaaag

SEQ ID NO: 92400 - RNA, 20 nt, Artificial Sequence
  Synthetic
acacuaauaugggccuaaag

SEQ ID NO: 92401 - RNA, 21 nt, Artificial Sequence
  Synthetic
aacacuaauaugggccuaaag

SEQ ID NO: 92402 - RNA, 22 nt, Artificial Sequence
  Synthetic
  misc_feature (1)..(1): n is a, c, g, or u
naacacuaauaugggccuaaag

SEQ ID NO: 92403 - RNA, 23 nt, Artificial Sequence
  Synthetic
  misc_feature (2)..(2): n is a, c, g, or u
unaacacuaauaugggccuaaag

SEQ ID NO: 92404 - RNA, 24 nt, Artificial Sequence
  Synthetic
  misc_feature (3)..(3): n is a, c, g, or u
gunaacacuaauaugggccuaaag

SEQ ID NO: 92405 - RNA, 18 nt, Artificial Sequence
  Synthetic
uggccagacgccaacaag

SEQ ID NO: 92406 - RNA, 19 nt, Artificial Sequence
  Synthetic
cuggccagacgccaacaag

SEQ ID NO: 92407 - RNA, 20 nt, Artificial Sequence
  Synthetic
ccuggccagacgccaacaag

SEQ ID NO: 92408 - RNA, 21 nt, Artificial Sequence
  Synthetic
accuggccagacgccaacaag

SEQ ID NO: 92409 - RNA, 22 nt, Artificial Sequence
  Synthetic
caccuggccagacgccaacaag

SEQ ID NO: 92410 - RNA, 23 nt, Artificial Sequence
  Synthetic
acaccuggccagacgccaacaag

SEQ ID NO: 92411 - RNA, 24 nt, Artificial Sequence
  Synthetic
gacaccuggccagacgccaacaag

SEQ ID NO: 92412 - RNA, 18 nt, Artificial Sequence
  Synthetic
aggcagguccccuagaag

SEQ ID NO: 92413 - RNA, 19 nt, Artificial Sequence
  Synthetic
gaggcagguccccuagaag

SEQ ID NO: 92414 - RNA, 20 nt, Artificial Sequence
  Synthetic
cgaggcagguccccuagaag

SEQ ID NO: 92415 - RNA, 18 nt, Artificial Sequence
  Synthetic
uugucucacuuuuggaag

SEQ ID NO: 92416 - RNA, 19 nt, Artificial Sequence
  Synthetic
cuugucucacuuuuggaag

SEQ ID NO: 92417 - RNA, 20 nt, Artificial Sequence
  Synthetic
ucuugucucacuuuuggaag

SEQ ID NO: 92418 - RNA, 21 nt, Artificial Sequence
  Synthetic
uucuugucucacuuuuggaag

SEQ ID NO: 92419 - RNA, 22 nt, Artificial Sequence
  Synthetic
uuucuugucucacuuuuggaag

SEQ ID NO: 92420 - RNA, 23 nt, Artificial Sequence
  Synthetic
auuucuugucucacuuuuggaag

SEQ ID NO: 92421 - RNA, 24 nt, Artificial Sequence
  Synthetic
cauuucuugucucacuuuuggaag

SEQ ID NO: 92422 - RNA, 18 nt, Artificial Sequence
  Synthetic
auuccuuggacucauaag

SEQ ID NO: 92423 - RNA, 19 nt, Artificial Sequence
  Synthetic
uauuccuuggacucauaag

SEQ ID NO: 92424 - RNA, 20 nt, Artificial Sequence
  Synthetic
guauuccuuggacucauaag

SEQ ID NO: 92425 - RNA, 21 nt, Artificial Sequence
  Synthetic
aguauuccuuggacucauaag

SEQ ID NO: 92426 - RNA, 22 nt, Artificial Sequence
  Synthetic
uaguauuccuuggacucauaag

SEQ ID NO: 92427 - RNA, 23 nt, Artificial Sequence
  Synthetic
uuaguauuccuuggacucauaag

SEQ ID NO: 92428 - RNA, 24 nt, Artificial Sequence
  Synthetic
guuaguauuccuuggacucauaag

SEQ ID NO: 92429 - RNA, 18 nt, Artificial Sequence
  Synthetic
gcggguauauuauauaag

SEQ ID NO: 92430 - RNA, 19 nt, Artificial Sequence
  Synthetic
ggcggguauauuauauaag

SEQ ID NO: 92431 - RNA, 20 nt, Artificial Sequence
  Synthetic
aggcggguauauuauauaag

SEQ ID NO: 92432 - RNA, 21 nt, Artificial Sequence
  Synthetic
aaggcggguauauuauauaag

SEQ ID NO: 92433 - RNA, 22 nt, Artificial Sequence
  Synthetic
gaaggcggguauauuauauaag

SEQ ID NO: 92434 - RNA, 23 nt, Artificial Sequence
  Synthetic
ggaaggcggguauauuauauaag

SEQ ID NO: 92435 - RNA, 24 nt, Artificial Sequence
  Synthetic
uggaaggcggguauauuauauaag

SEQ ID NO: 92436 - RNA, 18 nt, Artificial Sequence
  Synthetic
ugggaacaagagcuacag

SEQ ID NO: 92437 - RNA, 19 nt, Artificial Sequence
  Synthetic
uugggaacaagagcuacag

SEQ ID NO: 92438 - RNA, 20 nt, Artificial Sequence
  Synthetic
cuugggaacaagagcuacag

SEQ ID NO: 92439 - RNA, 21 nt, Artificial Sequence
  Synthetic
ucuugggaacaagagcuacag

SEQ ID NO: 92440 - RNA, 22 nt, Artificial Sequence
  Synthetic
uucuugggaacaagagcuacag

SEQ ID NO: 92441 - RNA, 23 nt, Artificial Sequence
  Synthetic
auucuugggaacaagagcuacag

SEQ ID NO: 92442 - RNA, 24 nt, Artificial Sequence
  Synthetic
uauucuugggaacaagagcuacag

SEQ ID NO: 92443 - RNA, 18 nt, Artificial Sequence
  Synthetic
  misc_feature (6)..(6): n is a, c, g, or u
ccccuncucguguuacag

SEQ ID NO: 92444 - RNA, 19 nt, Artificial Sequence
  Synthetic
  misc_feature (7)..(7): n is a, c, g, or u
accccuncucguguuacag

SEQ ID NO: 92445 - RNA, 20 nt, Artificial Sequence
  Synthetic
  misc_feature (8)..(8): n is a, c, g, or u
gaccccuncucguguuacag

SEQ ID NO: 92446 - RNA, 21 nt, Artificial Sequence
  Synthetic
  misc_feature (9)..(9): n is a, c, g, or u
ggaccccuncucguguuacag

SEQ ID NO: 92447 - RNA, 22 nt, Artificial Sequence
  Synthetic
  misc_feature (10)..(10): n is a, c, g, or u
aggaccccuncucguguuacag

SEQ ID NO: 92448 - RNA, 23 nt, Artificial Sequence
  Synthetic
  misc_feature (11)..(11): n is a, c, g, or u
uaggaccccuncucguguuacag

SEQ ID NO: 92449 - RNA, 24 nt, Artificial Sequence
  Synthetic
  misc_feature (12)..(12): n is a, c, g, or u
cuaggaccccuncucguguuacag

SEQ ID NO: 92450 - RNA, 18 nt, Artificial Sequence
  Synthetic
  misc_feature (7)..(7): n is a, c, g, or u
  misc_feature (13)..(13): n is a, c, g, or u
aggaucnucaacnaccag

SEQ ID NO: 92451 - RNA, 19 nt, Artificial Sequence
  Synthetic
  misc_feature (8)..(8): n is a, c, g, or u
  misc_feature (14)..(14): n is a, c, g, or u
caggaucnucaacnaccag

SEQ ID NO: 92452 - RNA, 20 nt, Artificial Sequence
  Synthetic
  misc_feature (9)..(9): n is a, c, g, or u
  misc_feature (15)..(15): n is a, c, g, or u
ccaggaucnucaacnaccag

SEQ ID NO: 92453 - RNA, 21 nt, Artificial Sequence
  Synthetic
  misc_feature (10)..(10): n is a, c, g, or u
  misc_feature (16)..(16): n is a, c, g, or u
uccaggaucnucaacnaccag

SEQ ID NO: 92454 - RNA, 22 nt, Artificial Sequence
  Synthetic
  misc_feature (11)..(11): n is a, c, g, or u
  misc_feature (17)..(17): n is a, c, g, or u
uuccaggaucnucaacnaccag

SEQ ID NO: 92455 - RNA, 23 nt, Artificial Sequence
  Synthetic
  misc_feature (12)..(12): n is a, c, g, or u
  misc_feature (18)..(18): n is a, c, g, or u
auuccaggaucnucaacnaccag

SEQ ID NO: 92456 - RNA, 24 nt, Artificial Sequence
  Synthetic
  misc_feature (13)..(13): n is a, c, g, or u
  misc_feature (19)..(19): n is a, c, g, or u
aauuccaggaucnucaacnaccag

SEQ ID NO: 92457 - RNA, 18 nt, Artificial Sequence
  Synthetic
aacucugcaagaucccag

SEQ ID NO: 92458 - RNA, 19 nt, Artificial Sequence
  Synthetic
aaacucugcaagaucccag

SEQ ID NO: 92459 - RNA, 20 nt, Artificial Sequence
  Synthetic
caaacucugcaagaucccag

SEQ ID NO: 92460 - RNA, 21 nt, Artificial Sequence
  Synthetic
ccaaacucugcaagaucccag

SEQ ID NO: 92461 - RNA, 22 nt, Artificial Sequence
  Synthetic
accaaacucugcaagaucccag

SEQ ID NO: 92462 - RNA, 23 nt, Artificial Sequence
  Synthetic
caccaaacucugcaagaucccag

SEQ ID NO: 92463 - RNA, 24 nt, Artificial Sequence
  Synthetic
ccaccaaacucugcaagaucccag

SEQ ID NO: 92464 - RNA, 18 nt, Artificial Sequence
  Synthetic
  misc_feature (3)..(3): n is a, c, g, or u
  misc_feature (6)..(6): n is a, c, g, or u
gcnucnaccaaucgccag

SEQ ID NO: 92465 - RNA, 19 nt, Artificial Sequence
  Synthetic
  misc_feature (4)..(4): n is a, c, g, or u
  misc_feature (7)..(7): n is a, c, g, or u
ugcnucnaccaaucgccag

SEQ ID NO: 92466 - RNA, 20 nt, Artificial Sequence
  Synthetic
  misc_feature (5)..(5): n is a, c, g, or u
  misc_feature (8)..(8): n is a, c, g, or u
cugcnucnaccaaucgccag

SEQ ID NO: 92467 - RNA, 21 nt, Artificial Sequence
  Synthetic
  misc_feature (6)..(6): n is a, c, g, or u
  misc_feature (9)..(9): n is a, c, g, or u
ccugcnucnaccaaucgccag

SEQ ID NO: 92468 - RNA, 22 nt, Artificial Sequence
  Synthetic
  misc_feature (7)..(7): n is a, c, g, or u
  misc_feature (10)..(10): n is a, c, g, or u
uccugcnucnaccaaucgccag

SEQ ID NO: 92469 - RNA, 23 nt, Artificial Sequence
  Synthetic
  misc_feature (8)..(8): n is a, c, g, or u
  misc_feature (11)..(11): n is a, c, g, or u
cuccugcnucnaccaaucgccag

SEQ ID NO: 92470 - RNA, 24 nt, Artificial Sequence
  Synthetic
  misc_feature (9)..(9): n is a, c, g, or u
  misc_feature (12)..(12): n is a, c, g, or u
ccuccugcnucnaccaaucgccag

SEQ ID NO: 92471 - RNA, 18 nt, Artificial Sequence
  Synthetic
caaacaccgcaaauccag

SEQ ID NO: 92472 - RNA, 19 nt, Artificial Sequence
  Synthetic
gcaaacaccgcaaauccag

SEQ ID NO: 92473 - RNA, 20 nt, Artificial Sequence
  Synthetic
agcaaacaccgcaaauccag

SEQ ID NO: 92474 - RNA, 21 nt, Artificial Sequence
  Synthetic
gagcaaacaccgcaaauccag

SEQ ID NO: 92475 - RNA, 22 nt, Artificial Sequence
  Synthetic
agagcaaacaccgcaaauccag

SEQ ID NO: 92476 - RNA, 23 nt, Artificial Sequence
  Synthetic
cagagcaaacaccgcaaauccag

SEQ ID NO: 92477 - RNA, 24 nt, Artificial Sequence
  Synthetic
ucagagcaaacaccgcaaauccag

SEQ ID NO: 92478 - RNA, 18 nt, Artificial Sequence
  Synthetic
cccugcugguggcuccag

SEQ ID NO: 92479 - RNA, 19 nt, Artificial Sequence
  Synthetic
ucccugcugguggcuccag

SEQ ID NO: 92480 - RNA, 20 nt, Artificial Sequence
  Synthetic
uucccugcugguggcuccag

SEQ ID NO: 92481 - RNA, 21 nt, Artificial Sequence
  Synthetic
uuucccugcugguggcuccag

SEQ ID NO: 92482 - RNA, 22 nt, Artificial Sequence
  Synthetic
auuucccugcugguggcuccag

SEQ ID NO: 92483 - RNA, 23 nt, Artificial Sequence
  Synthetic
uauuucccugcugguggcuccag

SEQ ID NO: 92484 - RNA, 24 nt, Artificial Sequence
  Synthetic
guauuucccugcugguggcuccag

SEQ ID NO: 92485 - RNA, 18 nt, Artificial Sequence
  Synthetic
aacucccucgccucgcag

SEQ ID NO: 92486 - RNA, 19 nt, Artificial Sequence
  Synthetic
gaacucccucgccucgcag

SEQ ID NO: 92487 - RNA, 20 nt, Artificial Sequence
  Synthetic
agaacucccucgccucgcag

SEQ ID NO: 92488 - RNA, 21 nt, Artificial Sequence
  Synthetic
aagaacucccucgccucgcag

SEQ ID NO: 92489 - RNA, 22 nt, Artificial Sequence
  Synthetic
gaagaacucccucgccucgcag

SEQ ID NO: 92490 - RNA, 23 nt, Artificial Sequence
  Synthetic
agaagaacucccucgccucgcag

SEQ ID NO: 92491 - RNA, 24 nt, Artificial Sequence
  Synthetic
aagaagaacucccucgccucgcag

SEQ ID NO: 92492 - RNA, 18 nt, Artificial Sequence
  Synthetic
cauccucaggccaugcag

SEQ ID NO: 92493 - RNA, 19 nt, Artificial Sequence
  Synthetic
ucauccucaggccaugcag

SEQ ID NO: 92494 - RNA, 20 nt, Artificial Sequence
  Synthetic
cucauccucaggccaugcag

SEQ ID NO: 92495 - RNA, 21 nt, Artificial Sequence
  Synthetic
acucauccucaggccaugcag

SEQ ID NO: 92496 - RNA, 22 nt, Artificial Sequence
  Synthetic
cacucauccucaggccaugcag

SEQ ID NO: 92497 - RNA, 23 nt, Artificial Sequence
  Synthetic
acacucauccucaggccaugcag

SEQ ID NO: 92498 - RNA, 24 nt, Artificial Sequence
  Synthetic
aacacucauccucaggccaugcag

SEQ ID NO: 92499 - RNA, 18 nt, Artificial Sequence
  Synthetic
  misc_feature (4)..(4): n is a, c, g, or u
ucancauacugcacucag

SEQ ID NO: 92500 - RNA, 19 nt, Artificial Sequence
  Synthetic
  misc_feature (5)..(5): n is a, c, g, or u
cucancauacugcacucag

SEQ ID NO: 92501 - RNA, 20 nt, Artificial Sequence
  Synthetic
  misc_feature (6)..(6): n is a, c, g, or u
ccucancauacugcacucag

SEQ ID NO: 92502 - RNA, 21 nt, Artificial Sequence
  Synthetic
  misc_feature (7)..(7): n is a, c, g, or u
accucancauacugcacucag

SEQ ID NO: 92503 - RNA, 22 nt, Artificial Sequence
  Synthetic
  misc_feature (8)..(8): n is a, c, g, or u
caccucancauacugcacucag

SEQ ID NO: 92504 - RNA, 23 nt, Artificial Sequence
  Synthetic
  misc_feature (9)..(9): n is a, c, g, or u
ucaccucancauacugcacucag

SEQ ID NO: 92505 - RNA, 24 nt, Artificial Sequence
  Synthetic
  misc_feature (1)..(1): n is a, c, g, or u
  misc_feature (10)..(10): n is a, c, g, or u
nucaccucancauacugcacucag

SEQ ID NO: 92506 - RNA, 18 nt, Artificial Sequence
  Synthetic
  misc_feature (2)..(2): n is a, c, g, or u
cnaccaaucgccagucag

SEQ ID NO: 92507 - RNA, 19 nt, Artificial Sequence
  Synthetic
  misc_feature (3)..(3): n is a, c, g, or u
ucnaccaaucgccagucag

SEQ ID NO: 92508 - RNA, 20 nt, Artificial Sequence
  Synthetic
  misc_feature (1)..(1): n is a, c, g, or u
  misc_feature (4)..(4): n is a, c, g, or u
nucnaccaaucgccagucag

SEQ ID NO: 92509 - RNA, 21 nt, Artificial Sequence
  Synthetic
  misc_feature (2)..(2): n is a, c, g, or u
  misc_feature (5)..(5): n is a, c, g, or u
cnucnaccaaucgccagucag

SEQ ID NO: 92510 - RNA, 22 nt, Artificial Sequence
  Synthetic
  misc_feature (3)..(3): n is a, c, g, or u
  misc_feature (6)..(6): n is a, c, g, or u
gcnucnaccaaucgccagucag

SEQ ID NO: 92511 - RNA, 23 nt, Artificial Sequence
  Synthetic
  misc_feature (4)..(4): n is a, c, g, or u
  misc_feature (7)..(7): n is a, c, g, or u
ugcnucnaccaaucgccagucag

SEQ ID NO: 92512 - RNA, 24 nt, Artificial Sequence
  Synthetic
  misc_feature (5)..(5): n is a, c, g, or u
  misc_feature (8)..(8): n is a, c, g, or u
cugcnucnaccaaucgccagucag

SEQ ID NO: 92513 - RNA, 18 nt, Artificial Sequence
  Synthetic
guuggauccagccuucag

SEQ ID NO: 92514 - RNA, 19 nt, Artificial Sequence
  Synthetic
aguuggauccagccuucag

SEQ ID NO: 92515 - RNA, 20 nt, Artificial Sequence
  Synthetic
caguuggauccagccuucag

SEQ ID NO: 92516 - RNA, 21 nt, Artificial Sequence
  Synthetic
ccaguuggauccagccuucag

SEQ ID NO: 92517 - RNA, 22 nt, Artificial Sequence
  Synthetic
accaguuggauccagccuucag

SEQ ID NO: 92518 - RNA, 23 nt, Artificial Sequence
  Synthetic
caccaguuggauccagccuucag

SEQ ID NO: 92519 - RNA, 24 nt, Artificial Sequence
  Synthetic
ccaccaguuggauccagccuucag

SEQ ID NO: 92520 - RNA, 18 nt, Artificial Sequence
  Synthetic
ggguauauuauauaagag

SEQ ID NO: 92521 - RNA, 19 nt, Artificial Sequence
  Synthetic
cggguauauuauauaagag

SEQ ID NO: 92522 - RNA, 20 nt, Artificial Sequence
  Synthetic
gcggguauauuauauaagag

SEQ ID NO: 92523 - RNA, 21 nt, Artificial Sequence
  Synthetic
ggcggguauauuauauaagag

SEQ ID NO: 92524 - RNA, 22 nt, Artificial Sequence
  Synthetic
aggcggguauauuauauaagag

SEQ ID NO: 92525 - RNA, 23 nt, Artificial Sequence
  Synthetic
aaggcggguauauuauauaagag

SEQ ID NO: 92526 - RNA, 24 nt, Artificial Sequence
  Synthetic
gaaggcggguauauuauauaagag

SEQ ID NO: 92527 - RNA, 18 nt, Artificial Sequence
  Synthetic
ccucacaauaccgcagag

SEQ ID NO: 92528 - RNA, 19 nt, Artificial Sequence
  Synthetic
uccucacaauaccgcagag

SEQ ID NO: 92529 - RNA, 20 nt, Artificial Sequence
  Synthetic
auccucacaauaccgcagag

SEQ ID NO: 92530 - RNA, 21 nt, Artificial Sequence
  Synthetic
aauccucacaauaccgcagag

SEQ ID NO: 92531 - RNA, 22 nt, Artificial Sequence
  Synthetic
gaauccucacaauaccgcagag

SEQ ID NO: 92532 - RNA, 23 nt, Artificial Sequence
  Synthetic
agaauccucacaauaccgcagag

SEQ ID NO: 92533 - RNA, 24 nt, Artificial Sequence
  Synthetic
aagaauccucacaauaccgcagag

SEQ ID NO: 92534 - RNA, 18 nt, Artificial Sequence
  Synthetic
gaggaguugggggaggag

SEQ ID NO: 92535 - RNA, 19 nt, Artificial Sequence
  Synthetic
ggaggaguugggggaggag

SEQ ID NO: 92536 - RNA, 20 nt, Artificial Sequence
  Synthetic
gggaggaguugggggaggag

SEQ ID NO: 92537 - RNA, 21 nt, Artificial Sequence
  Synthetic
ugggaggaguugggggaggag

SEQ ID NO: 92538 - RNA, 22 nt, Artificial Sequence
  Synthetic
cugggaggaguugggggaggag

SEQ ID NO: 92539 - RNA, 23 nt, Artificial Sequence
  Synthetic
acugggaggaguugggggaggag

SEQ ID NO: 92540 - RNA, 24 nt, Artificial Sequence
  Synthetic
gacugggaggaguugggggaggag

SEQ ID NO: 92541 - RNA, 18 nt, Artificial Sequence
  Synthetic
  misc_feature (6)..(6): n is a, c, g, or u
uuuaangacugggaggag

SEQ ID NO: 92542 - RNA, 19 nt, Artificial Sequence
  Synthetic
  misc_feature (7)..(7): n is a, c, g, or u
guuuaangacugggaggag

SEQ ID NO: 92543 - RNA, 20 nt, Artificial Sequence
  Synthetic
  misc_feature (8)..(8): n is a, c, g, or u
uguuuaangacugggaggag

SEQ ID NO: 92544 - RNA, 21 nt, Artificial Sequence
  Synthetic
  misc_feature (9)..(9): n is a, c, g, or u
uuguuuaangacugggaggag

SEQ ID NO: 92545 - RNA, 22 nt, Artificial Sequence
  Synthetic
  misc_feature (10)..(10): n is a, c, g, or u
uuuguuuaangacugggaggag

SEQ ID NO: 92546 - RNA, 23 nt, Artificial Sequence
  Synthetic
  misc_feature (11)..(11): n is a, c, g, or u
guuuguuuaangacugggaggag

SEQ ID NO: 92547 - RNA, 24 nt, Artificial Sequence
  Synthetic
  misc_feature (12)..(12): n is a, c, g, or u
uguuuguuuaangacugggaggag

SEQ ID NO: 92548 - RNA, 18 nt, Artificial Sequence
  Synthetic
acgccaacaagguaggag

SEQ ID NO: 92549 - RNA, 19 nt, Artificial Sequence
  Synthetic
gacgccaacaagguaggag

SEQ ID NO: 92550 - RNA, 20 nt, Artificial Sequence
  Synthetic
agacgccaacaagguaggag

SEQ ID NO: 92551 - RNA, 21 nt, Artificial Sequence
  Synthetic
cagacgccaacaagguaggag

SEQ ID NO: 92552 - RNA, 22 nt, Artificial Sequence
  Synthetic
ccagacgccaacaagguaggag

SEQ ID NO: 92553 - RNA, 23 nt, Artificial Sequence
  Synthetic
gccagacgccaacaagguaggag

SEQ ID NO: 92554 - RNA, 24 nt, Artificial Sequence
  Synthetic
ggccagacgccaacaagguaggag

SEQ ID NO: 92555 - RNA, 18 nt, Artificial Sequence
  Synthetic
auuuggugucuuucggag

SEQ ID NO: 92556 - RNA, 19 nt, Artificial Sequence
  Synthetic
uauuuggugucuuucggag

SEQ ID NO: 92557 - RNA, 20 nt, Artificial Sequence
  Synthetic
guauuuggugucuuucggag

SEQ ID NO: 92558 - RNA, 21 nt, Artificial Sequence
  Synthetic
aguauuuggugucuuucggag

SEQ ID NO: 92559 - RNA, 22 nt, Artificial Sequence
  Synthetic
gaguauuuggugucuuucggag

SEQ ID NO: 92560 - RNA, 23 nt, Artificial Sequence
  Synthetic
agaguauuuggugucuuucggag

SEQ ID NO: 92561 - RNA, 24 nt, Artificial Sequence
  Synthetic
uagaguauuuggugucuuucggag

SEQ ID NO: 92562 - RNA, 18 nt, Artificial Sequence
  Synthetic
acgaggcagguccccuag

SEQ ID NO: 92563 - RNA, 19 nt, Artificial Sequence
  Synthetic
gacgaggcagguccccuag

SEQ ID NO: 92564 - RNA, 20 nt, Artificial Sequence
  Synthetic
cgacgaggcagguccccuag

SEQ ID NO: 92565 - RNA, 21 nt, Artificial Sequence
  Synthetic
acgacgaggcagguccccuag

SEQ ID NO: 92566 - RNA, 22 nt, Artificial Sequence
  Synthetic
gacgacgaggcagguccccuag

SEQ ID NO: 92567 - RNA, 23 nt, Artificial Sequence
  Synthetic
agacgacgaggcagguccccuag

SEQ ID NO: 92568 - RNA, 24 nt, Artificial Sequence
  Synthetic
uagacgacgaggcagguccccuag

SEQ ID NO: 92569 - RNA, 18 nt, Artificial Sequence
  Synthetic
  misc_feature (14)..(15): n is a, c, g, or u
guugggggaggagnnuag

SEQ ID NO: 92570 - RNA, 19 nt, Artificial Sequence
  Synthetic
  misc_feature (15)..(16): n is a, c, g, or u
aguugggggaggagnnuag

SEQ ID NO: 92571 - RNA, 20 nt, Artificial Sequence
  Synthetic
  misc_feature (16)..(17): n is a, c, g, or u
gaguugggggaggagnnuag

SEQ ID NO: 92572 - RNA, 21 nt, Artificial Sequence
  Synthetic
  misc_feature (17)..(18): n is a, c, g, or u
ggaguugggggaggagnnuag

SEQ ID NO: 92573 - RNA, 22 nt, Artificial Sequence
  Synthetic
  misc_feature (18)..(19): n is a, c, g, or u
aggaguugggggaggagnnuag

SEQ ID NO: 92574 - RNA, 23 nt, Artificial Sequence
  Synthetic
  misc_feature (19)..(20): n is a, c, g, or u
gaggaguugggggaggagnnuag

SEQ ID NO: 92575 - RNA, 24 nt, Artificial Sequence
  Synthetic
  misc_feature (20)..(21): n is a, c, g, or u
ggaggaguugggggaggagnnuag

SEQ ID NO: 92576 - RNA, 18 nt, Artificial Sequence
  Synthetic
ccccguugcccggcaacg

SEQ ID NO: 92577 - RNA, 19 nt, Artificial Sequence
  Synthetic
accccguugcccggcaacg

SEQ ID NO: 92578 - RNA, 20 nt, Artificial Sequence
  Synthetic
uaccccguugcccggcaacg

SEQ ID NO: 92579 - RNA, 18 nt, Artificial Sequence
  Synthetic
  misc_feature (8)..(8): n is a, c, g, or u
cucucugnaaugucaacg

SEQ ID NO: 92580 - RNA, 19 nt, Artificial Sequence
  Synthetic
  misc_feature (9)..(9): n is a, c, g, or u
acucucugnaaugucaacg

SEQ ID NO: 92581 - RNA, 20 nt, Artificial Sequence
  Synthetic
  misc_feature (10)..(10): n is a, c, g, or u
gacucucugnaaugucaacg

SEQ ID NO: 92582 - RNA, 21 nt, Artificial Sequence
  Synthetic
  misc_feature (11)..(11): n is a, c, g, or u
ggacucucugnaaugucaacg

SEQ ID NO: 92583 - RNA, 22 nt, Artificial Sequence
  Synthetic
  misc_feature (12)..(12): n is a, c, g, or u
uggacucucugnaaugucaacg

SEQ ID NO: 92584 - RNA, 23 nt, Artificial Sequence
  Synthetic
  misc_feature (13)..(13): n is a, c, g, or u
uuggacucucugnaaugucaacg

SEQ ID NO: 92585 - RNA, 24 nt, Artificial Sequence
  Synthetic
  misc_feature (14)..(14): n is a, c, g, or u
cuuggacucucugnaaugucaacg

SEQ ID NO: 92586 - RNA, 18 nt, Artificial Sequence
  Synthetic
gacuacuguuguuagacg

SEQ ID NO: 92587 - RNA, 19 nt, Artificial Sequence
  Synthetic
agacuacuguuguuagacg

SEQ ID NO: 92588 - RNA, 20 nt, Artificial Sequence
  Synthetic
gagacuacuguuguuagacg

SEQ ID NO: 92589 - RNA, 21 nt, Artificial Sequence
  Synthetic
ggagacuacuguuguuagacg

SEQ ID NO: 92590 - RNA, 22 nt, Artificial Sequence
  Synthetic
cggagacuacuguuguuagacg

SEQ ID NO: 92591 - RNA, 23 nt, Artificial Sequence
  Synthetic
ccggagacuacuguuguuagacg

SEQ ID NO: 92592 - RNA, 24 nt, Artificial Sequence
  Synthetic
uccggagacuacuguuguuagacg

SEQ ID NO: 92593 - RNA, 18 nt, Artificial Sequence
  Synthetic
  misc_feature (6)..(6): n is a, c, g, or u
cugggnuucaccccaccg

SEQ ID NO: 92594 - RNA, 19 nt, Artificial Sequence
  Synthetic
  misc_feature (7)..(7): n is a, c, g, or u
gcugggnuucaccccaccg

SEQ ID NO: 92595 - RNA, 20 nt, Artificial Sequence
  Synthetic
  misc_feature (8)..(8): n is a, c, g, or u
ggcugggnuucaccccaccg

SEQ ID NO: 92596 - RNA, 21 nt, Artificial Sequence
  Synthetic
  misc_feature (9)..(9): n is a, c, g, or u
gggcugggnuucaccccaccg

SEQ ID NO: 92597 - RNA, 22 nt, Artificial Sequence
  Synthetic
  misc_feature (10)..(10): n is a, c, g, or u
cgggcugggnuucaccccaccg

SEQ ID NO: 92598 - RNA, 23 nt, Artificial Sequence
  Synthetic
  misc_feature (11)..(11): n is a, c, g, or u
ucgggcugggnuucaccccaccg

SEQ ID NO: 92599 - RNA, 24 nt, Artificial Sequence
  Synthetic
  misc_feature (12)..(12): n is a, c, g, or u
uucgggcugggnuucaccccaccg

SEQ ID NO: 92600 - RNA, 18 nt, Artificial Sequence
  Synthetic
ucggcgcugaaucccgcg

SEQ ID NO: 92601 - RNA, 19 nt, Artificial Sequence
  Synthetic
gucggcgcugaaucccgcg

SEQ ID NO: 92602 - RNA, 20 nt, Artificial Sequence
  Synthetic
cgucggcgcugaaucccgcg

SEQ ID NO: 92603 - RNA, 18 nt, Artificial Sequence
  Synthetic
gggccaucagcgcaugcg

SEQ ID NO: 92604 - RNA, 19 nt, Artificial Sequence
  Synthetic
ugggccaucagcgcaugcg

SEQ ID NO: 92605 - RNA, 20 nt, Artificial Sequence
  Synthetic
augggccaucagcgcaugcg

SEQ ID NO: 92606 - RNA, 21 nt, Artificial Sequence
  Synthetic
caugggccaucagcgcaugcg

SEQ ID NO: 92607 - RNA, 22 nt, Artificial Sequence
  Synthetic
ucaugggccaucagcgcaugcg

SEQ ID NO: 92608 - RNA, 23 nt, Artificial Sequence
  Synthetic
gucaugggccaucagcgcaugcg

SEQ ID NO: 92609 - RNA, 24 nt, Artificial Sequence
  Synthetic
ggucaugggccaucagcgcaugcg

SEQ ID NO: 92610 - RNA, 18 nt, Artificial Sequence
  Synthetic
aggauuggggacccugcg

SEQ ID NO: 92611 - RNA, 19 nt, Artificial Sequence
  Synthetic
gaggauuggggacccugcg

SEQ ID NO: 92612 - RNA, 20 nt, Artificial Sequence
  Synthetic
cgaggauuggggacccugcg

SEQ ID NO: 92613 - RNA, 21 nt, Artificial Sequence
  Synthetic
ucgaggauuggggacccugcg

SEQ ID NO: 92614 - RNA, 22 nt, Artificial Sequence
  Synthetic
cucgaggauuggggacccugcg

SEQ ID NO: 92615 - RNA, 23 nt, Artificial Sequence
  Synthetic
ucucgaggauuggggacccugcg

SEQ ID NO: 92616 - RNA, 24 nt, Artificial Sequence
  Synthetic
uucucgaggauuggggacccugcg

SEQ ID NO: 92617 - RNA, 18 nt, Artificial Sequence
  Synthetic
ugccaacuggauccugcg

SEQ ID NO: 92618 - RNA, 19 nt, Artificial Sequence
  Synthetic
cugccaacuggauccugcg

SEQ ID NO: 92619 - RNA, 20 nt, Artificial Sequence
  Synthetic
gcugccaacuggauccugcg

SEQ ID NO: 92620 - RNA, 21 nt, Artificial Sequence
  Synthetic
ugcugccaacuggauccugcg

SEQ ID NO: 92621 - RNA, 22 nt, Artificial Sequence
  Synthetic
gugcugccaacuggauccugcg

SEQ ID NO: 92622 - RNA, 23 nt, Artificial Sequence
  Synthetic
ugugcugccaacuggauccugcg

SEQ ID NO: 92623 - RNA, 24 nt, Artificial Sequence
  Synthetic
cugugcugccaacuggauccugcg

SEQ ID NO: 92624 - RNA, 18 nt, Artificial Sequence
  Synthetic
  misc_feature (16)..(16): n is a, c, g, or u
cgacccuucucggggncg

SEQ ID NO: 92625 - RNA, 19 nt, Artificial Sequence
  Synthetic
  misc_feature (17)..(17): n is a, c, g, or u
acgacccuucucggggncg

SEQ ID NO: 92626 - RNA, 20 nt, Artificial Sequence
  Synthetic
  misc_feature (18)..(18): n is a, c, g, or u
gacgacccuucucggggncg

SEQ ID NO: 92627 - RNA, 18 nt, Artificial Sequence
  Synthetic
  misc_feature (16)..(16): n is a, c, g, or u
ucuccgucugccguuncg

SEQ ID NO: 92628 - RNA, 19 nt, Artificial Sequence
  Synthetic
  misc_feature (17)..(17): n is a, c, g, or u
uucuccgucugccguuncg

SEQ ID NO: 92629 - RNA, 20 nt, Artificial Sequence
  Synthetic
  misc_feature (18)..(18): n is a, c, g, or u
cuucuccgucugccguuncg

SEQ ID NO: 92630 - RNA, 21 nt, Artificial Sequence
  Synthetic
  misc_feature (19)..(19): n is a, c, g, or u
ccuucuccgucugccguuncg

SEQ ID NO: 92631 - RNA, 22 nt, Artificial Sequence
  Synthetic
  misc_feature (20)..(20): n is a, c, g, or u
cccuucuccgucugccguuncg

SEQ ID NO: 92632 - RNA, 23 nt, Artificial Sequence
  Synthetic
  misc_feature (21)..(21): n is a, c, g, or u
ccccuucuccgucugccguuncg

SEQ ID NO: 92633 - RNA, 24 nt, Artificial Sequence
  Synthetic
  misc_feature (22)..(22): n is a, c, g, or u
uccccuucuccgucugccguuncg

SEQ ID NO: 92634 - RNA, 18 nt, Artificial Sequence
  Synthetic
cuucaccucugcacgucg

SEQ ID NO: 92635 - RNA, 19 nt, Artificial Sequence
  Synthetic
gcuucaccucugcacgucg

SEQ ID NO: 92636 - RNA, 20 nt, Artificial Sequence
  Synthetic
cgcuucaccucugcacgucg

SEQ ID NO: 92637 - RNA, 21 nt, Artificial Sequence
  Synthetic
ucgcuucaccucugcacgucg

SEQ ID NO: 92638 - RNA, 22 nt, Artificial Sequence
  Synthetic
uucgcuucaccucugcacgucg

SEQ ID NO: 92639 - RNA, 23 nt, Artificial Sequence
  Synthetic
cuucgcuucaccucugcacgucg

SEQ ID NO: 92640 - RNA, 24 nt, Artificial Sequence
  Synthetic
acuucgcuucaccucugcacgucg

SEQ ID NO: 92641 - RNA, 18 nt, Artificial Sequence
  Synthetic
gucucaaucgccgcgucg

SEQ ID NO: 92642 - RNA, 19 nt, Artificial Sequence
  Synthetic
ggucucaaucgccgcgucg

SEQ ID NO: 92643 - RNA, 20 nt, Artificial Sequence
  Synthetic
aggucucaaucgccgcgucg

SEQ ID NO: 92644 - RNA, 21 nt, Artificial Sequence
  Synthetic
aaggucucaaucgccgcgucg

SEQ ID NO: 92645 - RNA, 22 nt, Artificial Sequence
  Synthetic
gaaggucucaaucgccgcgucg

SEQ ID NO: 92646 - RNA, 23 nt, Artificial Sequence
  Synthetic
cgaaggucucaaucgccgcgucg

SEQ ID NO: 92647 - RNA, 24 nt, Artificial Sequence
  Synthetic
acgaaggucucaaucgccgcgucg

SEQ ID NO: 92648 - RNA, 18 nt, Artificial Sequence
  Synthetic
ugcuguaccaaaccuucg

SEQ ID NO: 92649 - RNA, 19 nt, Artificial Sequence
  Synthetic
uugcuguaccaaaccuucg

SEQ ID NO: 92650 - RNA, 20 nt, Artificial Sequence
  Synthetic
guugcuguaccaaaccuucg

SEQ ID NO: 92651 - RNA, 21 nt, Artificial Sequence
  Synthetic
uguugcuguaccaaaccuucg

SEQ ID NO: 92652 - RNA, 22 nt, Artificial Sequence
  Synthetic
cuguugcuguaccaaaccuucg

SEQ ID NO: 92653 - RNA, 23 nt, Artificial Sequence
  Synthetic
ccuguugcuguaccaaaccuucg

SEQ ID NO: 92654 - RNA, 24 nt, Artificial Sequence
  Synthetic
uccuguugcuguaccaaaccuucg

SEQ ID NO: 92655 - RNA, 18 nt, Artificial Sequence
  Synthetic
cauuuguucagugguucg

SEQ ID NO: 92656 - RNA, 19 nt, Artificial Sequence
  Synthetic
ccauuuguucagugguucg

SEQ ID NO: 92657 - RNA, 20 nt, Artificial Sequence
  Synthetic
gccauuuguucagugguucg

SEQ ID NO: 92658 - RNA, 21 nt, Artificial Sequence
  Synthetic
ugccauuuguucagugguucg

SEQ ID NO: 92659 - RNA, 22 nt, Artificial Sequence
  Synthetic
gugccauuuguucagugguucg

SEQ ID NO: 92660 - RNA, 23 nt, Artificial Sequence
  Synthetic
agugccauuuguucagugguucg

SEQ ID NO: 92661 - RNA, 24 nt, Artificial Sequence
  Synthetic
uagugccauuuguucagugguucg

SEQ ID NO: 92662 - RNA, 18 nt, Artificial Sequence
  Synthetic
ggccagacgccaacaagg

SEQ ID NO: 92663 - RNA, 19 nt, Artificial Sequence
  Synthetic
uggccagacgccaacaagg

SEQ ID NO: 92664 - RNA, 20 nt, Artificial Sequence
  Synthetic
cuggccagacgccaacaagg

SEQ ID NO: 92665 - RNA, 18 nt, Artificial Sequence
  Synthetic
uguuuugcucgcagcagg

SEQ ID NO: 92666 - RNA, 19 nt, Artificial Sequence
  Synthetic
uuguuuugcucgcagcagg

SEQ ID NO: 92667 - RNA, 20 nt, Artificial Sequence
  Synthetic
cuuguuuugcucgcagcagg

SEQ ID NO: 92668 - RNA, 21 nt, Artificial Sequence
  Synthetic
gcuuguuuugcucgcagcagg

SEQ ID NO: 92669 - RNA, 22 nt, Artificial Sequence
  Synthetic
cgcuuguuuugcucgcagcagg

SEQ ID NO: 92670 - RNA, 23 nt, Artificial Sequence
  Synthetic
ccgcuuguuuugcucgcagcagg

SEQ ID NO: 92671 - RNA, 24 nt, Artificial Sequence
  Synthetic
gccgcuuguuuugcucgcagcagg

SEQ ID NO: 92672 - RNA, 18 nt, Artificial Sequence
  Synthetic
ugggguggagcccucagg

SEQ ID NO: 92673 - RNA, 19 nt, Artificial Sequence
  Synthetic
uugggguggagcccucagg

SEQ ID NO: 92674 - RNA, 20 nt, Artificial Sequence
  Synthetic
uuugggguggagcccucagg

SEQ ID NO: 92675 - RNA, 21 nt, Artificial Sequence
  Synthetic
uuuugggguggagcccucagg

SEQ ID NO: 92676 - RNA, 22 nt, Artificial Sequence
  Synthetic
cuuuugggguggagcccucagg

SEQ ID NO: 92677 - RNA, 23 nt, Artificial Sequence
  Synthetic
ccuuuugggguggagcccucagg

SEQ ID NO: 92678 - RNA, 24 nt, Artificial Sequence
  Synthetic
gccuuuugggguggagcccucagg

SEQ ID NO: 92679 - RNA, 18 nt, Artificial Sequence
  Synthetic
ucgucaaucuucucgagg

SEQ ID NO: 92680 - RNA, 19 nt, Artificial Sequence
  Synthetic
aucgucaaucuucucgagg

SEQ ID NO: 92681 - RNA, 20 nt, Artificial Sequence
  Synthetic
uaucgucaaucuucucgagg

SEQ ID NO: 92682 - RNA, 21 nt, Artificial Sequence
  Synthetic
  misc_feature (1)..(1): n is a, c, g, or u
nuaucgucaaucuucucgagg

SEQ ID NO: 92683 - RNA, 22 nt, Artificial Sequence
  Synthetic
  misc_feature (2)..(2): n is a, c, g, or u
cnuaucgucaaucuucucgagg

SEQ ID NO: 92684 - RNA, 23 nt, Artificial Sequence
  Synthetic
  misc_feature (1)..(1): n is a, c, g, or u
  misc_feature (3)..(3): n is a, c, g, or u
ncnuaucgucaaucuucucgagg

SEQ ID NO: 92685 - RNA, 24 nt, Artificial Sequence
  Synthetic
  misc_feature (2)..(2): n is a, c, g, or u
  misc_feature (4)..(4): n is a, c, g, or u
cncnuaucgucaaucuucucgagg

SEQ ID NO: 92686 - RNA, 18 nt, Artificial Sequence
  Synthetic
  misc_feature (4)..(4): n is a, c, g, or u
guanuaggaggcuguagg

SEQ ID NO: 92687 - RNA, 19 nt, Artificial Sequence
  Synthetic
  misc_feature (5)..(5): n is a, c, g, or u
uguanuaggaggcuguagg

SEQ ID NO: 92688 - RNA, 20 nt, Artificial Sequence
  Synthetic
  misc_feature (6)..(6): n is a, c, g, or u
uuguanuaggaggcuguagg

SEQ ID NO: 92689 - RNA, 21 nt, Artificial Sequence
  Synthetic
  misc_feature (7)..(7): n is a, c, g, or u
uuuguanuaggaggcuguagg

SEQ ID NO: 92690 - RNA, 22 nt, Artificial Sequence
  Synthetic
  misc_feature (1)..(1): n is a, c, g, or u
  misc_feature (8)..(8): n is a, c, g, or u
nuuuguanuaggaggcuguagg

SEQ ID NO: 92691 - RNA, 23 nt, Artificial Sequence
  Synthetic
  misc_feature (2)..(2): n is a, c, g, or u
  misc_feature (9)..(9): n is a, c, g, or u
unuuuguanuaggaggcuguagg

SEQ ID NO: 92692 - RNA, 24 nt, Artificial Sequence
  Synthetic
  misc_feature (1)..(1): n is a, c, g, or u
  misc_feature (3)..(3): n is a, c, g, or u
  misc_feature (10)..(10): n is a, c, g, or u
nunuuuguanuaggaggcuguagg

SEQ ID NO: 92693 - RNA, 18 nt, Artificial Sequence
  Synthetic
aggagcuggagcauucgg

SEQ ID NO: 92694 - RNA, 19 nt, Artificial Sequence
  Synthetic
uaggagcuggagcauucgg

SEQ ID NO: 92695 - RNA, 20 nt, Artificial Sequence
  Synthetic
guaggagcuggagcauucgg

SEQ ID NO: 92696 - RNA, 21 nt, Artificial Sequence
  Synthetic
gguaggagcuggagcauucgg

SEQ ID NO: 92697 - RNA, 22 nt, Artificial Sequence
  Synthetic
agguaggagcuggagcauucgg

SEQ ID NO: 92698 - RNA, 23 nt, Artificial Sequence
  Synthetic
aagguaggagcuggagcauucgg

SEQ ID NO: 92699 - RNA, 24 nt, Artificial Sequence
  Synthetic
caagguaggagcuggagcauucgg

SEQ ID NO: 92700 - RNA, 18 nt, Artificial Sequence
  Synthetic
gcuguaccaaaccuucgg

SEQ ID NO: 92701 - RNA, 19 nt, Artificial Sequence
  Synthetic
ugcuguaccaaaccuucgg

SEQ ID NO: 92702 - RNA, 20 nt, Artificial Sequence
  Synthetic
uugcuguaccaaaccuucgg

SEQ ID NO: 92703 - RNA, 21 nt, Artificial Sequence
  Synthetic
guugcuguaccaaaccuucgg

SEQ ID NO: 92704 - RNA, 22 nt, Artificial Sequence
  Synthetic
uguugcuguaccaaaccuucgg

SEQ ID NO: 92705 - RNA, 23 nt, Artificial Sequence
  Synthetic
cuguugcuguaccaaaccuucgg

SEQ ID NO: 92706 - RNA, 24 nt, Artificial Sequence
  Synthetic
ccuguugcuguaccaaaccuucgg

SEQ ID NO: 92707 - RNA, 18 nt, Artificial Sequence
  Synthetic
ggagcuggagcauucggg

SEQ ID NO: 92708 - RNA, 19 nt, Artificial Sequence
  Synthetic
aggagcuggagcauucggg

SEQ ID NO: 92709 - RNA, 20 nt, Artificial Sequence
  Synthetic
uaggagcuggagcauucggg

SEQ ID NO: 92710 - RNA, 21 nt, Artificial Sequence
  Synthetic
guaggagcuggagcauucggg

SEQ ID NO: 92711 - RNA, 22 nt, Artificial Sequence
  Synthetic
gguaggagcuggagcauucggg

SEQ ID NO: 92712 - RNA, 23 nt, Artificial Sequence
  Synthetic
agguaggagcuggagcauucggg

SEQ ID NO: 92713 - RNA, 24 nt, Artificial Sequence
  Synthetic
aagguaggagcuggagcauucggg

SEQ ID NO: 92714 - RNA, 18 nt, Artificial Sequence
  Synthetic
acugggaggaguuggggg

SEQ ID NO: 92715 - RNA, 19 nt, Artificial Sequence
  Synthetic
gacugggaggaguuggggg

SEQ ID NO: 92716 - RNA, 20 nt, Artificial Sequence
  Synthetic
  misc_feature (1)..(1): n is a, c, g, or u
ngacugggaggaguuggggg

SEQ ID NO: 92717 - RNA, 21 nt, Artificial Sequence
  Synthetic
  misc_feature (2)..(2): n is a, c, g, or u
angacugggaggaguuggggg

SEQ ID NO: 92718 - RNA, 22 nt, Artificial Sequence
  Synthetic
  misc_feature (3)..(3): n is a, c, g, or u
aangacugggaggaguuggggg

SEQ ID NO: 92719 - RNA, 23 nt, Artificial Sequence
  Synthetic
  misc_feature (4)..(4): n is a, c, g, or u
uaangacugggaggaguuggggg

SEQ ID NO: 92720 - RNA, 24 nt, Artificial Sequence
  Synthetic
  misc_feature (5)..(5): n is a, c, g, or u
uuaangacugggaggaguuggggg

SEQ ID NO: 92721 - RNA, 18 nt, Artificial Sequence
  Synthetic
gaugaugugguauugggg

SEQ ID NO: 92722 - RNA, 19 nt, Artificial Sequence
  Synthetic
ggaugaugugguauugggg

SEQ ID NO: 92723 - RNA, 20 nt, Artificial Sequence
  Synthetic
uggaugaugugguauugggg

SEQ ID NO: 92724 - RNA, 21 nt, Artificial Sequence
  Synthetic
auggaugaugugguauugggg

SEQ ID NO: 92725 - RNA, 22 nt, Artificial Sequence
  Synthetic
uauggaugaugugguauugggg

SEQ ID NO: 92726 - RNA, 23 nt, Artificial Sequence
  Synthetic
auauggaugaugugguauugggg

SEQ ID NO: 92727 - RNA, 24 nt, Artificial Sequence
  Synthetic
uauauggaugaugugguauugggg

SEQ ID NO: 92728 - RNA, 18 nt, Artificial Sequence
  Synthetic
gacugggaggaguugggg

SEQ ID NO: 92729 - RNA, 19 nt, Artificial Sequence
  Synthetic
  misc_feature (1)..(1): n is a, c, g, or u
ngacugggaggaguugggg

SEQ ID NO: 92730 - RNA, 20 nt, Artificial Sequence
  Synthetic
  misc_feature (2)..(2): n is a, c, g, or u
angacugggaggaguugggg

SEQ ID NO: 92731 - RNA, 21 nt, Artificial Sequence
  Synthetic
  misc_feature (3)..(3): n is a, c, g, or u
aangacugggaggaguugggg

SEQ ID NO: 92732 - RNA, 22 nt, Artificial Sequence
  Synthetic
  misc_feature (4)..(4): n is a, c, g, or u
uaangacugggaggaguugggg

SEQ ID NO: 92733 - RNA, 23 nt, Artificial Sequence
  Synthetic
  misc_feature (5)..(5): n is a, c, g, or u
uuaangacugggaggaguugggg

SEQ ID NO: 92734 - RNA, 24 nt, Artificial Sequence
  Synthetic
  misc_feature (6)..(6): n is a, c, g, or u
uuuaangacugggaggaguugggg

SEQ ID NO: 92735 - RNA, 18 nt, Artificial Sequence
  Synthetic
cacggaggccuuuugggg

SEQ ID NO: 92736 - RNA, 19 nt, Artificial Sequence
  Synthetic
gcacggaggccuuuugggg

SEQ ID NO: 92737 - RNA, 20 nt, Artificial Sequence
  Synthetic
cgcacggaggccuuuugggg

SEQ ID NO: 92738 - RNA, 21 nt, Artificial Sequence
  Synthetic
ccgcacggaggccuuuugggg

SEQ ID NO: 92739 - RNA, 22 nt, Artificial Sequence
  Synthetic
accgcacggaggccuuuugggg

SEQ ID NO: 92740 - RNA, 23 nt, Artificial Sequence
  Synthetic
caccgcacggaggccuuuugggg

SEQ ID NO: 92741 - RNA, 24 nt, Artificial Sequence
  Synthetic
ccaccgcacggaggccuuuugggg

SEQ ID NO: 92742 - RNA, 18 nt, Artificial Sequence
  Synthetic
caagagcuacagcauggg

SEQ ID NO: 92743 - RNA, 19 nt, Artificial Sequence
  Synthetic
acaagagcuacagcauggg

SEQ ID NO: 92744 - RNA, 20 nt, Artificial Sequence
  Synthetic
aacaagagcuacagcauggg

SEQ ID NO: 92745 - RNA, 21 nt, Artificial Sequence
  Synthetic
gaacaagagcuacagcauggg

SEQ ID NO: 92746 - RNA, 22 nt, Artificial Sequence
  Synthetic
ggaacaagagcuacagcauggg

SEQ ID NO: 92747 - RNA, 23 nt, Artificial Sequence
  Synthetic
gggaacaagagcuacagcauggg

SEQ ID NO: 92748 - RNA, 24 nt, Artificial Sequence
  Synthetic
ugggaacaagagcuacagcauggg

SEQ ID NO: 92749 - RNA, 18 nt, Artificial Sequence
  Synthetic
  misc_feature (4)..(4): n is a, c, g, or u
ugunaacacuaauauggg

SEQ ID NO: 92750 - RNA, 19 nt, Artificial Sequence
  Synthetic
  misc_feature (5)..(5): n is a, c, g, or u
augunaacacuaauauggg

SEQ ID NO: 92751 - RNA, 20 nt, Artificial Sequence
  Synthetic
  misc_feature (6)..(6): n is a, c, g, or u
uaugunaacacuaauauggg

SEQ ID NO: 92752 - RNA, 21 nt, Artificial Sequence
  Synthetic
  misc_feature (7)..(7): n is a, c, g, or u
uuaugunaacacuaauauggg

SEQ ID NO: 92753 - RNA, 22 nt, Artificial Sequence
  Synthetic
  misc_feature (8)..(8): n is a, c, g, or u
guuaugunaacacuaauauggg

SEQ ID NO: 92754 - RNA, 23 nt, Artificial Sequence
  Synthetic
  misc_feature (9)..(9): n is a, c, g, or u
aguuaugunaacacuaauauggg

SEQ ID NO: 92755 - RNA, 24 nt, Artificial Sequence
  Synthetic
  misc_feature (10)..(10): n is a, c, g, or u
caguuaugunaacacuaauauggg

SEQ ID NO: 92756 - RNA, 18 nt, Artificial Sequence
  Synthetic
ucggaaaauuccuauggg

SEQ ID NO: 92757 - RNA, 19 nt, Artificial Sequence
  Synthetic
uucggaaaauuccuauggg

SEQ ID NO: 92758 - RNA, 20 nt, Artificial Sequence
  Synthetic
uuucggaaaauuccuauggg

SEQ ID NO: 92759 - RNA, 21 nt, Artificial Sequence
  Synthetic
cuuucggaaaauuccuauggg

SEQ ID NO: 92760 - RNA, 22 nt, Artificial Sequence
  Synthetic
gcuuucggaaaauuccuauggg

SEQ ID NO: 92761 - RNA, 23 nt, Artificial Sequence
  Synthetic
ggcuuucggaaaauuccuauggg

SEQ ID NO: 92762 - RNA, 24 nt, Artificial Sequence
  Synthetic
gggcuuucggaaaauuccuauggg

SEQ ID NO: 92763 - RNA, 18 nt, Artificial Sequence
  Synthetic
ggucaccauauucuuggg

SEQ ID NO: 92764 - RNA, 19 nt, Artificial Sequence
  Synthetic
gggucaccauauucuuggg

SEQ ID NO: 92765 - RNA, 20 nt, Artificial Sequence
  Synthetic
ugggucaccauauucuuggg

SEQ ID NO: 92766 - RNA, 21 nt, Artificial Sequence
  Synthetic
gugggucaccauauucuuggg

SEQ ID NO: 92767 - RNA, 22 nt, Artificial Sequence
  Synthetic
ugugggucaccauauucuuggg

SEQ ID NO: 92768 - RNA, 23 nt, Artificial Sequence
  Synthetic
uugugggucaccauauucuuggg

SEQ ID NO: 92769 - RNA, 24 nt, Artificial Sequence
  Synthetic
uuugugggucaccauauucuuggg

SEQ ID NO: 92770 - RNA, 18 nt, Artificial Sequence
  Synthetic
  misc_feature (1)..(1): n is a, c, g, or u
ngacugggaggaguuggg

SEQ ID NO: 92771 - RNA, 19 nt, Artificial Sequence
  Synthetic
  misc_feature (2)..(2): n is a, c, g, or u
angacugggaggaguuggg

SEQ ID NO: 92772 - RNA, 20 nt, Artificial Sequence
  Synthetic
  misc_feature (3)..(3): n is a, c, g, or u
aangacugggaggaguuggg

SEQ ID NO: 92773 - RNA, 21 nt, Artificial Sequence
  Synthetic
  misc_feature (4)..(4): n is a, c, g, or u
uaangacugggaggaguuggg

SEQ ID NO: 92774 - RNA, 22 nt, Artificial Sequence
  Synthetic
  misc_feature (5)..(5): n is a, c, g, or u
uuaangacugggaggaguuggg

SEQ ID NO: 92775 - RNA, 23 nt, Artificial Sequence
  Synthetic
  misc_feature (6)..(6): n is a, c, g, or u
uuuaangacugggaggaguuggg

SEQ ID NO: 92776 - RNA, 24 nt, Artificial Sequence
  Synthetic
  misc_feature (7)..(7): n is a, c, g, or u
guuuaangacugggaggaguuggg

SEQ ID NO: 92777 - RNA, 18 nt, Artificial Sequence
  Synthetic
gcacggaggccuuuuggg

SEQ ID NO: 92778 - RNA, 19 nt, Artificial Sequence
  Synthetic
cgcacggaggccuuuuggg

SEQ ID NO: 92779 - RNA, 20 nt, Artificial Sequence
  Synthetic
ccgcacggaggccuuuuggg

SEQ ID NO: 92780 - RNA, 21 nt, Artificial Sequence
  Synthetic
accgcacggaggccuuuuggg

SEQ ID NO: 92781 - RNA, 22 nt, Artificial Sequence
  Synthetic
caccgcacggaggccuuuuggg

SEQ ID NO: 92782 - RNA, 23 nt, Artificial Sequence
  Synthetic
ccaccgcacggaggccuuuuggg

SEQ ID NO: 92783 - RNA, 24 nt, Artificial Sequence
  Synthetic
cccaccgcacggaggccuuuuggg

SEQ ID NO: 92784 - RNA, 18 nt, Artificial Sequence
  Synthetic
acaagagcuacagcaugg

SEQ ID NO: 92785 - RNA, 19 nt, Artificial Sequence
  Synthetic
aacaagagcuacagcaugg

SEQ ID NO: 92786 - RNA, 20 nt, Artificial Sequence
  Synthetic
gaacaagagcuacagcaugg

SEQ ID NO: 92787 - RNA, 21 nt, Artificial Sequence
  Synthetic
ggaacaagagcuacagcaugg

SEQ ID NO: 92788 - RNA, 22 nt, Artificial Sequence
  Synthetic
gggaacaagagcuacagcaugg

SEQ ID NO: 92789 - RNA, 23 nt, Artificial Sequence
  Synthetic
ugggaacaagagcuacagcaugg

SEQ ID NO: 92790 - RNA, 24 nt, Artificial Sequence
  Synthetic
uugggaacaagagcuacagcaugg

SEQ ID NO: 92791 - RNA, 18 nt, Artificial Sequence
  Synthetic
ugacgcaacccccacugg

SEQ ID NO: 92792 - RNA, 19 nt, Artificial Sequence
  Synthetic
cugacgcaacccccacugg

SEQ ID NO: 92793 - RNA, 20 nt, Artificial Sequence
  Synthetic
gcugacgcaacccccacugg

SEQ ID NO: 92794 - RNA, 21 nt, Artificial Sequence
  Synthetic
ugcugacgcaacccccacugg

SEQ ID NO: 92795 - RNA, 22 nt, Artificial Sequence
  Synthetic
uugcugacgcaacccccacugg

SEQ ID NO: 92796 - RNA, 23 nt, Artificial Sequence
  Synthetic
uuugcugacgcaacccccacugg

SEQ ID NO: 92797 - RNA, 24 nt, Artificial Sequence
  Synthetic
guuugcugacgcaacccccacugg

SEQ ID NO: 92798 - RNA, 18 nt, Artificial Sequence
  Synthetic
  misc_feature (12)..(12): n is a, c, g, or u
uguuuguuuaangacugg

SEQ ID NO: 92799 - RNA, 19 nt, Artificial Sequence
  Synthetic
  misc_feature (13)..(13): n is a, c, g, or u
cuguuuguuuaangacugg

SEQ ID NO: 92800 - RNA, 20 nt, Artificial Sequence
  Synthetic
  misc_feature (14)..(14): n is a, c, g, or u
acuguuuguuuaangacugg

SEQ ID NO: 92801 - RNA, 21 nt, Artificial Sequence
  Synthetic
  misc_feature (15)..(15): n is a, c, g, or u
gacuguuuguuuaangacugg

SEQ ID NO: 92802 - RNA, 22 nt, Artificial Sequence
  Synthetic
  misc_feature (16)..(16): n is a, c, g, or u
agacuguuuguuuaangacugg

SEQ ID NO: 92803 - RNA, 23 nt, Artificial Sequence
  Synthetic
  misc_feature (17)..(17): n is a, c, g, or u
aagacuguuuguuuaangacugg

SEQ ID NO: 92804 - RNA, 24 nt, Artificial Sequence
  Synthetic
  misc_feature (18)..(18): n is a, c, g, or u
aaagacuguuuguuuaangacugg

SEQ ID NO: 92805 - RNA, 18 nt, Artificial Sequence
  Synthetic
cccaacaaggacaccugg

SEQ ID NO: 92806 - RNA, 19 nt, Artificial Sequence
  Synthetic
ucccaacaaggacaccugg

SEQ ID NO: 92807 - RNA, 20 nt, Artificial Sequence
  Synthetic
aucccaacaaggacaccugg

SEQ ID NO: 92808 - RNA, 21 nt, Artificial Sequence
  Synthetic
aaucccaacaaggacaccugg

SEQ ID NO: 92809 - RNA, 22 nt, Artificial Sequence
  Synthetic
caaucccaacaaggacaccugg

SEQ ID NO: 92810 - RNA, 23 nt, Artificial Sequence
  Synthetic
ucaaucccaacaaggacaccugg

SEQ ID NO: 92811 - RNA, 24 nt, Artificial Sequence
  Synthetic
uucaaucccaacaaggacaccugg

SEQ ID NO: 92812 - RNA, 18 nt, Artificial Sequence
  Synthetic
  misc_feature (9)..(9): n is a, c, g, or u
  misc_feature (12)..(12): n is a, c, g, or u
caagcaauncunugcugg

SEQ ID NO: 92813 - RNA, 19 nt, Artificial Sequence
  Synthetic
  misc_feature (10)..(10): n is a, c, g, or u
  misc_feature (13)..(13): n is a, c, g, or u
gcaagcaauncunugcugg

SEQ ID NO: 92814 - RNA, 20 nt, Artificial Sequence
  Synthetic
  misc_feature (11)..(11): n is a, c, g, or u
  misc_feature (14)..(14): n is a, c, g, or u
ggcaagcaauncunugcugg

SEQ ID NO: 92815 - RNA, 21 nt, Artificial Sequence
  Synthetic
  misc_feature (12)..(12): n is a, c, g, or u
  misc_feature (15)..(15): n is a, c, g, or u
aggcaagcaauncunugcugg

SEQ ID NO: 92816 - RNA, 22 nt, Artificial Sequence
  Synthetic
  misc_feature (13)..(13): n is a, c, g, or u
  misc_feature (16)..(16): n is a, c, g, or u
caggcaagcaauncunugcugg

SEQ ID NO: 92817 - RNA, 23 nt, Artificial Sequence
  Synthetic
  misc_feature (14)..(14): n is a, c, g, or u
  misc_feature (17)..(17): n is a, c, g, or u
ucaggcaagcaauncunugcugg

SEQ ID NO: 92818 - RNA, 24 nt, Artificial Sequence
  Synthetic
  misc_feature (15)..(15): n is a, c, g, or u
  misc_feature (18)..(18): n is a, c, g, or u
cucaggcaagcaauncunugcugg

SEQ ID NO: 92819 - RNA, 18 nt, Artificial Sequence
  Synthetic
ugcucgcagcaggucugg

SEQ ID NO: 92820 - RNA, 19 nt, Artificial Sequence
  Synthetic
uugcucgcagcaggucugg

SEQ ID NO: 92821 - RNA, 20 nt, Artificial Sequence
  Synthetic
uuugcucgcagcaggucugg

SEQ ID NO: 92822 - RNA, 21 nt, Artificial Sequence
  Synthetic
uuuugcucgcagcaggucugg

SEQ ID NO: 92823 - RNA, 22 nt, Artificial Sequence
  Synthetic
guuuugcucgcagcaggucugg

SEQ ID NO: 92824 - RNA, 23 nt, Artificial Sequence
  Synthetic
uguuuugcucgcagcaggucugg

SEQ ID NO: 92825 - RNA, 24 nt, Artificial Sequence
  Synthetic
uuguuuugcucgcagcaggucugg

SEQ ID NO: 92826 - RNA, 18 nt, Artificial Sequence
  Synthetic
  misc_feature (1)..(1): n is a, c, g, or u
  misc_feature (4)..(4): n is a, c, g, or u
nacnaccgugugucuugg

SEQ ID NO: 92827 - RNA, 19 nt, Artificial Sequence
  Synthetic
  misc_feature (2)..(2): n is a, c, g, or u
  misc_feature (5)..(5): n is a, c, g, or u
gnacnaccgugugucuugg

SEQ ID NO: 92828 - RNA, 20 nt, Artificial Sequence
  Synthetic
  misc_feature (3)..(3): n is a, c, g, or u
  misc_feature (6)..(6): n is a, c, g, or u
ggnacnaccgugugucuugg

SEQ ID NO: 92829 - RNA, 21 nt, Artificial Sequence
  Synthetic
  misc_feature (4)..(4): n is a, c, g, or u
  misc_feature (7)..(7): n is a, c, g, or u
gggnacnaccgugugucuugg

SEQ ID NO: 92830 - RNA, 22 nt, Artificial Sequence
  Synthetic
  misc_feature (5)..(5): n is a, c, g, or u
  misc_feature (8)..(8): n is a, c, g, or u
ggggnacnaccgugugucuugg

SEQ ID NO: 92831 - RNA, 23 nt, Artificial Sequence
  Synthetic
  misc_feature (6)..(6): n is a, c, g, or u
  misc_feature (9)..(9): n is a, c, g, or u
gggggnacnaccgugugucuugg

SEQ ID NO: 92832 - RNA, 24 nt, Artificial Sequence
  Synthetic
  misc_feature (7)..(7): n is a, c, g, or u
  misc_feature (10)..(10): n is a, c, g, or u
agggggnacnaccgugugucuugg

SEQ ID NO: 92833 - RNA, 18 nt, Artificial Sequence
  Synthetic
  misc_feature (2)..(2): n is a, c, g, or u
angacugggaggaguugg

SEQ ID NO: 92834 - RNA, 19 nt, Artificial Sequence
  Synthetic
  misc_feature (3)..(3): n is a, c, g, or u
aangacugggaggaguugg

SEQ ID NO: 92835 - RNA, 20 nt, Artificial Sequence
  Synthetic
  misc_feature (4)..(4): n is a, c, g, or u
uaangacugggaggaguugg

SEQ ID NO: 92836 - RNA, 21 nt, Artificial Sequence
  Synthetic
  misc_feature (5)..(5): n is a, c, g, or u
uuaangacugggaggaguugg

SEQ ID NO: 92837 - RNA, 22 nt, Artificial Sequence
  Synthetic
  misc_feature (6)..(6): n is a, c, g, or u
uuuaangacugggaggaguugg

SEQ ID NO: 92838 - RNA, 23 nt, Artificial Sequence
  Synthetic
  misc_feature (7)..(7): n is a, c, g, or u
guuuaangacugggaggaguugg

SEQ ID NO: 92839 - RNA, 24 nt, Artificial Sequence
  Synthetic
  misc_feature (8)..(8): n is a, c, g, or u
uguuuaangacugggaggaguugg

SEQ ID NO: 92840 - RNA, 18 nt, Artificial Sequence
  Synthetic
uucuugucucacuuuugg

SEQ ID NO: 92841 - RNA, 19 nt, Artificial Sequence
  Synthetic
uuucuugucucacuuuugg

SEQ ID NO: 92842 - RNA, 20 nt, Artificial Sequence
  Synthetic
auuucuugucucacuuuugg

SEQ ID NO: 92843 - RNA, 21 nt, Artificial Sequence
  Synthetic
cauuucuugucucacuuuugg

SEQ ID NO: 92844 - RNA, 22 nt, Artificial Sequence
  Synthetic
acauuucuugucucacuuuugg

SEQ ID NO: 92845 - RNA, 23 nt, Artificial Sequence
  Synthetic
cacauuucuugucucacuuuugg

SEQ ID NO: 92846 - RNA, 24 nt, Artificial Sequence
  Synthetic
ucacauuucuugucucacuuuugg

SEQ ID NO: 92847 - RNA, 18 nt, Artificial Sequence
  Synthetic
cgcacggaggccuuuugg

SEQ ID NO: 92848 - RNA, 19 nt, Artificial Sequence
  Synthetic
ccgcacggaggccuuuugg

SEQ ID NO: 92849 - RNA, 20 nt, Artificial Sequence
  Synthetic
accgcacggaggccuuuugg

SEQ ID NO: 92850 - RNA, 21 nt, Artificial Sequence
  Synthetic
caccgcacggaggccuuuugg

SEQ ID NO: 92851 - RNA, 22 nt, Artificial Sequence
  Synthetic
ccaccgcacggaggccuuuugg

SEQ ID NO: 92852 - RNA, 23 nt, Artificial Sequence
  Synthetic
cccaccgcacggaggccuuuugg

SEQ ID NO: 92853 - RNA, 24 nt, Artificial Sequence
  Synthetic
ccccaccgcacggaggccuuuugg

SEQ ID NO: 92854 - RNA, 18 nt, Artificial Sequence
  Synthetic
  misc_feature (17)..(17): n is a, c, g, or u
aagacuguuuguuuaang

SEQ ID NO: 92855 - RNA, 19 nt, Artificial Sequence
  Synthetic
  misc_feature (18)..(18): n is a, c, g, or u
aaagacuguuuguuuaang

SEQ ID NO: 92856 - RNA, 20 nt, Artificial Sequence
  Synthetic
  misc_feature (19)..(19): n is a, c, g, or u
caaagacuguuuguuuaang

SEQ ID NO: 92857 - RNA, 21 nt, Artificial Sequence
  Synthetic
  misc_feature (20)..(20): n is a, c, g, or u
ucaaagacuguuuguuuaang

SEQ ID NO: 92858 - RNA, 22 nt, Artificial Sequence
  Synthetic
  misc_feature (21)..(21): n is a, c, g, or u
uucaaagacuguuuguuuaang

SEQ ID NO: 92859 - RNA, 23 nt, Artificial Sequence
  Synthetic
  misc_feature (22)..(22): n is a, c, g, or u
cuucaaagacuguuuguuuaang

SEQ ID NO: 92860 - RNA, 24 nt, Artificial Sequence
  Synthetic
  misc_feature (23)..(23): n is a, c, g, or u
acuucaaagacuguuuguuuaang

SEQ ID NO: 92861 - RNA, 18 nt, Artificial Sequence
  Synthetic
  misc_feature (17)..(17): n is a, c, g, or u
cugacuucuuuccuucng

SEQ ID NO: 92862 - RNA, 19 nt, Artificial Sequence
  Synthetic
  misc_feature (18)..(18): n is a, c, g, or u
ucugacuucuuuccuucng

SEQ ID NO: 92863 - RNA, 20 nt, Artificial Sequence
  Synthetic
  misc_feature (19)..(19): n is a, c, g, or u
uucugacuucuuuccuucng

SEQ ID NO: 92864 - RNA, 21 nt, Artificial Sequence
  Synthetic
  misc_feature (20)..(20): n is a, c, g, or u
cuucugacuucuuuccuucng

SEQ ID NO: 92865 - RNA, 22 nt, Artificial Sequence
  Synthetic
  misc_feature (21)..(21): n is a, c, g, or u
ccuucugacuucuuuccuucng

SEQ ID NO: 92866 - RNA, 23 nt, Artificial Sequence
  Synthetic
  misc_feature (22)..(22): n is a, c, g, or u
gccuucugacuucuuuccuucng

SEQ ID NO: 92867 - RNA, 24 nt, Artificial Sequence
  Synthetic
  misc_feature (23)..(23): n is a, c, g, or u
ugccuucugacuucuuuccuucng

SEQ ID NO: 92868 - RNA, 18 nt, Artificial Sequence
  Synthetic
  misc_feature (17)..(17): n is a, c, g, or u
cucugcaagaucccagng

SEQ ID NO: 92869 - RNA, 19 nt, Artificial Sequence
  Synthetic
  misc_feature (18)..(18): n is a, c, g, or u
acucugcaagaucccagng

SEQ ID NO: 92870 - RNA, 20 nt, Artificial Sequence
  Synthetic
  misc_feature (19)..(19): n is a, c, g, or u
aacucugcaagaucccagng

SEQ ID NO: 92871 - RNA, 21 nt, Artificial Sequence
  Synthetic
  misc_feature (20)..(20): n is a, c, g, or u
aaacucugcaagaucccagng

SEQ ID NO: 92872 - RNA, 22 nt, Artificial Sequence
  Synthetic
  misc_feature (21)..(21): n is a, c, g, or u
caaacucugcaagaucccagng

SEQ ID NO: 92873 - RNA, 23 nt, Artificial Sequence
  Synthetic
  misc_feature (22)..(22): n is a, c, g, or u
ccaaacucugcaagaucccagng

SEQ ID NO: 92874 - RNA, 24 nt, Artificial Sequence
  Synthetic
  misc_feature (23)..(23): n is a, c, g, or u
accaaacucugcaagaucccagng

SEQ ID NO: 92875 - RNA, 18 nt, Artificial Sequence
  Synthetic
  misc_feature (11)..(11): n is a, c, g, or u
  misc_feature (17)..(17): n is a, c, g, or u
ccaaauauuunccauung

SEQ ID NO: 92876 - RNA, 19 nt, Artificial Sequence
  Synthetic
  misc_feature (12)..(12): n is a, c, g, or u
  misc_feature (18)..(18): n is a, c, g, or u
accaaauauuunccauung

SEQ ID NO: 92877 - RNA, 20 nt, Artificial Sequence
  Synthetic
  misc_feature (13)..(13): n is a, c, g, or u
  misc_feature (19)..(19): n is a, c, g, or u
uaccaaauauuunccauung

SEQ ID NO: 92878 - RNA, 21 nt, Artificial Sequence
  Synthetic
  misc_feature (14)..(14): n is a, c, g, or u
  misc_feature (20)..(20): n is a, c, g, or u
uuaccaaauauuunccauung

SEQ ID NO: 92879 - RNA, 22 nt, Artificial Sequence
  Synthetic
  misc_feature (15)..(15): n is a, c, g, or u
  misc_feature (21)..(21): n is a, c, g, or u
guuaccaaauauuunccauung

SEQ ID NO: 92880 - RNA, 23 nt, Artificial Sequence
  Synthetic
  misc_feature (1)..(1): n is a, c, g, or u
  misc_feature (16)..(16): n is a, c, g, or u
  misc_feature (22)..(22): n is a, c, g, or u
nguuaccaaauauuunccauung

SEQ ID NO: 92881 - RNA, 24 nt, Artificial Sequence
  Synthetic
  misc_feature (2)..(2): n is a, c, g, or u
  misc_feature (17)..(17): n is a, c, g, or u
  misc_feature (23)..(23): n is a, c, g, or u
anguuaccaaauauuunccauung

SEQ ID NO: 92882 - RNA, 18 nt, Artificial Sequence
  Synthetic
  misc_feature (2)..(2): n is a, c, g, or u
  misc_feature (14)..(14): n is a, c, g, or u
gnccacucacagunaaug

SEQ ID NO: 92883 - RNA, 19 nt, Artificial Sequence
  Synthetic
  misc_feature (3)..(3): n is a, c, g, or u
  misc_feature (15)..(15): n is a, c, g, or u
ggnccacucacagunaaug

SEQ ID NO: 92884 - RNA, 20 nt, Artificial Sequence
  Synthetic
  misc_feature (4)..(4): n is a, c, g, or u
  misc_feature (16)..(16): n is a, c, g, or u
aggnccacucacagunaaug

SEQ ID NO: 92885 - RNA, 21 nt, Artificial Sequence
  Synthetic
  misc_feature (5)..(5): n is a, c, g, or u
  misc_feature (17)..(17): n is a, c, g, or u
uaggnccacucacagunaaug

SEQ ID NO: 92886 - RNA, 22 nt, Artificial Sequence
  Synthetic
  misc_feature (6)..(6): n is a, c, g, or u
  misc_feature (18)..(18): n is a, c, g, or u
guaggnccacucacagunaaug

SEQ ID NO: 92887 - RNA, 23 nt, Artificial Sequence
  Synthetic
  misc_feature (7)..(7): n is a, c, g, or u
  misc_feature (19)..(19): n is a, c, g, or u
uguaggnccacucacagunaaug

SEQ ID NO: 92888 - RNA, 24 nt, Artificial Sequence
  Synthetic
  misc_feature (8)..(8): n is a, c, g, or u
  misc_feature (20)..(20): n is a, c, g, or u
uuguaggnccacucacagunaaug

SEQ ID NO: 92889 - RNA, 18 nt, Artificial Sequence
  Synthetic
gacccugcgcugaacaug

SEQ ID NO: 92890 - RNA, 19 nt, Artificial Sequence
  Synthetic
ggacccugcgcugaacaug

SEQ ID NO: 92891 - RNA, 20 nt, Artificial Sequence
  Synthetic
gggacccugcgcugaacaug

SEQ ID NO: 92892 - RNA, 21 nt, Artificial Sequence
  Synthetic
ggggacccugcgcugaacaug

SEQ ID NO: 92893 - RNA, 22 nt, Artificial Sequence
  Synthetic
uggggacccugcgcugaacaug

SEQ ID NO: 92894 - RNA, 23 nt, Artificial Sequence
  Synthetic
uuggggacccugcgcugaacaug

SEQ ID NO: 92895 - RNA, 24 nt, Artificial Sequence
  Synthetic
auuggggacccugcgcugaacaug

SEQ ID NO: 92896 - RNA, 18 nt, Artificial Sequence
  Synthetic
  misc_feature (1)..(1): n is a, c, g, or u
  misc_feature (8)..(9): n is a, c, g, or u
naccagcnngggaccaug

SEQ ID NO: 92897 - RNA, 19 nt, Artificial Sequence
  Synthetic
  misc_feature (2)..(2): n is a, c, g, or u
  misc_feature (9)..(10): n is a, c, g, or u
cnaccagcnngggaccaug

SEQ ID NO: 92898 - RNA, 20 nt, Artificial Sequence
  Synthetic
  misc_feature (3)..(3): n is a, c, g, or u
  misc_feature (10)..(11): n is a, c, g, or u
acnaccagcnngggaccaug

SEQ ID NO: 92899 - RNA, 21 nt, Artificial Sequence
  Synthetic
  misc_feature (4)..(4): n is a, c, g, or u
  misc_feature (11)..(12): n is a, c, g, or u
aacnaccagcnngggaccaug

SEQ ID NO: 92900 - RNA, 22 nt, Artificial Sequence
  Synthetic
  misc_feature (5)..(5): n is a, c, g, or u
  misc_feature (12)..(13): n is a, c, g, or u
caacnaccagcnngggaccaug

SEQ ID NO: 92901 - RNA, 23 nt, Artificial Sequence
  Synthetic
  misc_feature (6)..(6): n is a, c, g, or u
  misc_feature (13)..(14): n is a, c, g, or u
ucaacnaccagcnngggaccaug

SEQ ID NO: 92902 - RNA, 24 nt, Artificial Sequence
  Synthetic
  misc_feature (1)..(1): n is a, c, g, or u
  misc_feature (7)..(7): n is a, c, g, or u
  misc_feature (14)..(15): n is a, c, g, or u
nucaacnaccagcnngggaccaug

SEQ ID NO: 92903 - RNA, 18 nt, Artificial Sequence
  Synthetic
augggccaucagcgcaug

SEQ ID NO: 92904 - RNA, 19 nt, Artificial Sequence
  Synthetic
caugggccaucagcgcaug

SEQ ID NO: 92905 - RNA, 20 nt, Artificial Sequence
  Synthetic
ucaugggccaucagcgcaug

SEQ ID NO: 92906 - RNA, 21 nt, Artificial Sequence
  Synthetic
gucaugggccaucagcgcaug

SEQ ID NO: 92907 - RNA, 22 nt, Artificial Sequence
  Synthetic
ggucaugggccaucagcgcaug

SEQ ID NO: 92908 - RNA, 23 nt, Artificial Sequence
  Synthetic
uggucaugggccaucagcgcaug

SEQ ID NO: 92909 - RNA, 24 nt, Artificial Sequence
  Synthetic
uuggucaugggccaucagcgcaug

SEQ ID NO: 92910 - RNA, 18 nt, Artificial Sequence
  Synthetic
  misc_feature (1)..(1): n is a, c, g, or u
nuauuuacacacucuaug

SEQ ID NO: 92911 - RNA, 19 nt, Artificial Sequence
  Synthetic
  misc_feature (2)..(2): n is a, c, g, or u
anuauuuacacacucuaug

SEQ ID NO: 92912 - RNA, 20 nt, Artificial Sequence
  Synthetic
  misc_feature (3)..(3): n is a, c, g, or u
canuauuuacacacucuaug

SEQ ID NO: 92913 - RNA, 21 nt, Artificial Sequence
  Synthetic
  misc_feature (4)..(4): n is a, c, g, or u
acanuauuuacacacucuaug

SEQ ID NO: 92914 - RNA, 22 nt, Artificial Sequence
  Synthetic
  misc_feature (5)..(5): n is a, c, g, or u
gacanuauuuacacacucuaug

SEQ ID NO: 92915 - RNA, 23 nt, Artificial Sequence
  Synthetic
  misc_feature (6)..(6): n is a, c, g, or u
agacanuauuuacacacucuaug

SEQ ID NO: 92916 - RNA, 24 nt, Artificial Sequence
  Synthetic
  misc_feature (1)..(1): n is a, c, g, or u
  misc_feature (7)..(7): n is a, c, g, or u
nagacanuauuuacacacucuaug

SEQ ID NO: 92917 - RNA, 18 nt, Artificial Sequence
  Synthetic
cugacgcaacccccacug

SEQ ID NO: 92918 - RNA, 19 nt, Artificial Sequence
  Synthetic
gcugacgcaacccccacug

SEQ ID NO: 92919 - RNA, 20 nt, Artificial Sequence
  Synthetic
ugcugacgcaacccccacug

SEQ ID NO: 92920 - RNA, 18 nt, Artificial Sequence
  Synthetic
uagggcuuucccccacug

SEQ ID NO: 92921 - RNA, 19 nt, Artificial Sequence
  Synthetic
guagggcuuucccccacug

SEQ ID NO: 92922 - RNA, 20 nt, Artificial Sequence
  Synthetic
cguagggcuuucccccacug

SEQ ID NO: 92923 - RNA, 21 nt, Artificial Sequence
  Synthetic
ucguagggcuuucccccacug

SEQ ID NO: 92924 - RNA, 22 nt, Artificial Sequence
  Synthetic
uucguagggcuuucccccacug

SEQ ID NO: 92925 - RNA, 23 nt, Artificial Sequence
  Synthetic
guucguagggcuuucccccacug

SEQ ID NO: 92926 - RNA, 24 nt, Artificial Sequence
  Synthetic
gguucguagggcuuucccccacug

SEQ ID NO: 92927 - RNA, 18 nt, Artificial Sequence
  Synthetic
  misc_feature (13)..(13): n is a, c, g, or u
cuguuuguuuaangacug

SEQ ID NO: 92928 - RNA, 19 nt, Artificial Sequence
  Synthetic
  misc_feature (14)..(14): n is a, c, g, or u
acuguuuguuuaangacug

SEQ ID NO: 92929 - RNA, 20 nt, Artificial Sequence
  Synthetic
  misc_feature (15)..(15): n is a, c, g, or u
gacuguuuguuuaangacug

SEQ ID NO: 92930 - RNA, 21 nt, Artificial Sequence
  Synthetic
  misc_feature (16)..(16): n is a, c, g, or u
agacuguuuguuuaangacug

SEQ ID NO: 92931 - RNA, 22 nt, Artificial Sequence
  Synthetic
  misc_feature (17)..(17): n is a, c, g, or u
aagacuguuuguuuaangacug

SEQ ID NO: 92932 - RNA, 23 nt, Artificial Sequence
  Synthetic
  misc_feature (18)..(18): n is a, c, g, or u
aaagacuguuuguuuaangacug

SEQ ID NO: 92933 - RNA, 24 nt, Artificial Sequence
  Synthetic
  misc_feature (19)..(19): n is a, c, g, or u
caaagacuguuuguuuaangacug

SEQ ID NO: 92934 - RNA, 18 nt, Artificial Sequence
  Synthetic
cucugccgauccauacug

SEQ ID NO: 92935 - RNA, 19 nt, Artificial Sequence
  Synthetic
ccucugccgauccauacug

SEQ ID NO: 92936 - RNA, 20 nt, Artificial Sequence
  Synthetic
uccucugccgauccauacug

SEQ ID NO: 92937 - RNA, 21 nt, Artificial Sequence
  Synthetic
cuccucugccgauccauacug

SEQ ID NO: 92938 - RNA, 22 nt, Artificial Sequence
  Synthetic
gcuccucugccgauccauacug

SEQ ID NO: 92939 - RNA, 23 nt, Artificial Sequence
  Synthetic
ggcuccucugccgauccauacug

SEQ ID NO: 92940 - RNA, 24 nt, Artificial Sequence
  Synthetic
  misc_feature (1)..(1): n is a, c, g, or u
nggcuccucugccgauccauacug

SEQ ID NO: 92941 - RNA, 18 nt, Artificial Sequence
  Synthetic
cuuguucauguccuacug

SEQ ID NO: 92942 - RNA, 19 nt, Artificial Sequence
  Synthetic
ucuuguucauguccuacug

SEQ ID NO: 92943 - RNA, 20 nt, Artificial Sequence
  Synthetic
cucuuguucauguccuacug

SEQ ID NO: 92944 - RNA, 21 nt, Artificial Sequence
  Synthetic
ucucuuguucauguccuacug

SEQ ID NO: 92945 - RNA, 22 nt, Artificial Sequence
  Synthetic
aucucuuguucauguccuacug

SEQ ID NO: 92946 - RNA, 23 nt, Artificial Sequence
  Synthetic
caucucuuguucauguccuacug

SEQ ID NO: 92947 - RNA, 24 nt, Artificial Sequence
  Synthetic
ucaucucuuguucauguccuacug

SEQ ID NO: 92948 - RNA, 18 nt, Artificial Sequence
  Synthetic
gggaccaugcagaaccug

SEQ ID NO: 92949 - RNA, 19 nt, Artificial Sequence
  Synthetic
  misc_feature (1)..(1): n is a, c, g, or u
ngggaccaugcagaaccug

SEQ ID NO: 92950 - RNA, 20 nt, Artificial Sequence
  Synthetic
  misc_feature (1)..(2): n is a, c, g, or u
nngggaccaugcagaaccug

SEQ ID NO: 92951 - RNA, 21 nt, Artificial Sequence
  Synthetic
  misc_feature (2)..(3): n is a, c, g, or u
cnngggaccaugcagaaccug

SEQ ID NO: 92952 - RNA, 22 nt, Artificial Sequence
  Synthetic
  misc_feature (3)..(4): n is a, c, g, or u
gcnngggaccaugcagaaccug

SEQ ID NO: 92953 - RNA, 23 nt, Artificial Sequence
  Synthetic
  misc_feature (4)..(5): n is a, c, g, or u
agcnngggaccaugcagaaccug

SEQ ID NO: 92954 - RNA, 24 nt, Artificial Sequence
  Synthetic
  misc_feature (5)..(6): n is a, c, g, or u
cagcnngggaccaugcagaaccug

SEQ ID NO: 92955 - RNA, 18 nt, Artificial Sequence
  Synthetic
ucccaacaaggacaccug

SEQ ID NO: 92956 - RNA, 19 nt, Artificial Sequence
  Synthetic
aucccaacaaggacaccug

SEQ ID NO: 92957 - RNA, 20 nt, Artificial Sequence
  Synthetic
aaucccaacaaggacaccug

SEQ ID NO: 92958 - RNA, 21 nt, Artificial Sequence
  Synthetic
caaucccaacaaggacaccug

SEQ ID NO: 92959 - RNA, 22 nt, Artificial Sequence
  Synthetic
ucaaucccaacaaggacaccug

SEQ ID NO: 92960 - RNA, 23 nt, Artificial Sequence
  Synthetic
uucaaucccaacaaggacaccug

SEQ ID NO: 92961 - RNA, 24 nt, Artificial Sequence
  Synthetic
cuucaaucccaacaaggacaccug

SEQ ID NO: 92962 - RNA, 18 nt, Artificial Sequence
  Synthetic
  misc_feature (13)..(13): n is a, c, g, or u
aaugacucuagcnaccug

SEQ ID NO: 92963 - RNA, 19 nt, Artificial Sequence
  Synthetic
  misc_feature (14)..(14): n is a, c, g, or u
uaaugacucuagcnaccug

SEQ ID NO: 92964 - RNA, 20 nt, Artificial Sequence
  Synthetic
  misc_feature (15)..(15): n is a, c, g, or u
cuaaugacucuagcnaccug

SEQ ID NO: 92965 - RNA, 21 nt, Artificial Sequence
  Synthetic
  misc_feature (1)..(1): n is a, c, g, or u
  misc_feature (16)..(16): n is a, c, g, or u
ncuaaugacucuagcnaccug

SEQ ID NO: 92966 - RNA, 22 nt, Artificial Sequence
  Synthetic
  misc_feature (2)..(2): n is a, c, g, or u
  misc_feature (17)..(17): n is a, c, g, or u
ancuaaugacucuagcnaccug

SEQ ID NO: 92967 - RNA, 23 nt, Artificial Sequence
  Synthetic
  misc_feature (3)..(3): n is a, c, g, or u
  misc_feature (18)..(18): n is a, c, g, or u
gancuaaugacucuagcnaccug

SEQ ID NO: 92968 - RNA, 24 nt, Artificial Sequence
  Synthetic
  misc_feature (4)..(4): n is a, c, g, or u
  misc_feature (19)..(19): n is a, c, g, or u
ggancuaaugacucuagcnaccug

SEQ ID NO: 92969 - RNA, 18 nt, Artificial Sequence
  Synthetic
gcugccaacuggauccug

SEQ ID NO: 92970 - RNA, 19 nt, Artificial Sequence
  Synthetic
ugcugccaacuggauccug

SEQ ID NO: 92971 - RNA, 20 nt, Artificial Sequence
  Synthetic
gugcugccaacuggauccug

SEQ ID NO: 92972 - RNA, 21 nt, Artificial Sequence
  Synthetic
ugugcugccaacuggauccug

SEQ ID NO: 92973 - RNA, 22 nt, Artificial Sequence
  Synthetic
cugugcugccaacuggauccug

SEQ ID NO: 92974 - RNA, 23 nt, Artificial Sequence
  Synthetic
gcugugcugccaacuggauccug

SEQ ID NO: 92975 - RNA, 24 nt, Artificial Sequence
  Synthetic
ggcugugcugccaacuggauccug

SEQ ID NO: 92976 - RNA, 18 nt, Artificial Sequence
  Synthetic
acaucguuuccauggcug

SEQ ID NO: 92977 - RNA, 19 nt, Artificial Sequence
  Synthetic
uacaucguuuccauggcug

SEQ ID NO: 92978 - RNA, 20 nt, Artificial Sequence
  Synthetic
auacaucguuuccauggcug

SEQ ID NO: 92979 - RNA, 21 nt, Artificial Sequence
  Synthetic
uauacaucguuuccauggcug

SEQ ID NO: 92980 - RNA, 22 nt, Artificial Sequence
  Synthetic
auauacaucguuuccauggcug

SEQ ID NO: 92981 - RNA, 23 nt, Artificial Sequence
  Synthetic
aauauacaucguuuccauggcug

SEQ ID NO: 92982 - RNA, 24 nt, Artificial Sequence
  Synthetic
aaauauacaucguuuccauggcug

SEQ ID NO: 92983 - RNA, 18 nt, Artificial Sequence
  Synthetic
  misc_feature (10)..(10): n is a, c, g, or u
  misc_feature (13)..(13): n is a, c, g, or u
gcaagcaauncunugcug

SEQ ID NO: 92984 - RNA, 19 nt, Artificial Sequence
  Synthetic
  misc_feature (11)..(11): n is a, c, g, or u
  misc_feature (14)..(14): n is a, c, g, or u
ggcaagcaauncunugcug

SEQ ID NO: 92985 - RNA, 20 nt, Artificial Sequence
  Synthetic
  misc_feature (12)..(12): n is a, c, g, or u
  misc_feature (15)..(15): n is a, c, g, or u
aggcaagcaauncunugcug

SEQ ID NO: 92986 - RNA, 21 nt, Artificial Sequence
  Synthetic
  misc_feature (13)..(13): n is a, c, g, or u
  misc_feature (16)..(16): n is a, c, g, or u
caggcaagcaauncunugcug

SEQ ID NO: 92987 - RNA, 22 nt, Artificial Sequence
  Synthetic
  misc_feature (14)..(14): n is a, c, g, or u
  misc_feature (17)..(17): n is a, c, g, or u
ucaggcaagcaauncunugcug

SEQ ID NO: 92988 - RNA, 23 nt, Artificial Sequence
  Synthetic
  misc_feature (15)..(15): n is a, c, g, or u
  misc_feature (18)..(18): n is a, c, g, or u
cucaggcaagcaauncunugcug

SEQ ID NO: 92989 - RNA, 24 nt, Artificial Sequence
  Synthetic
  misc_feature (16)..(16): n is a, c, g, or u
  misc_feature (19)..(19): n is a, c, g, or u
acucaggcaagcaauncunugcug

SEQ ID NO: 92990 - RNA, 18 nt, Artificial Sequence
  Synthetic
  misc_feature (15)..(15): n is a, c, g, or u
gaaccugcacgacuncug

SEQ ID NO: 92991 - RNA, 19 nt, Artificial Sequence
  Synthetic
  misc_feature (16)..(16): n is a, c, g, or u
agaaccugcacgacuncug

SEQ ID NO: 92992 - RNA, 20 nt, Artificial Sequence
  Synthetic
  misc_feature (17)..(17): n is a, c, g, or u
cagaaccugcacgacuncug

SEQ ID NO: 92993 - RNA, 21 nt, Artificial Sequence
  Synthetic
  misc_feature (18)..(18): n is a, c, g, or u
gcagaaccugcacgacuncug

SEQ ID NO: 92994 - RNA, 22 nt, Artificial Sequence
  Synthetic
  misc_feature (19)..(19): n is a, c, g, or u
ugcagaaccugcacgacuncug

SEQ ID NO: 92995 - RNA, 23 nt, Artificial Sequence
  Synthetic
  misc_feature (20)..(20): n is a, c, g, or u
augcagaaccugcacgacuncug

SEQ ID NO: 92996 - RNA, 24 nt, Artificial Sequence
  Synthetic
  misc_feature (21)..(21): n is a, c, g, or u
caugcagaaccugcacgacuncug

SEQ ID NO: 92997 - RNA, 18 nt, Artificial Sequence
  Synthetic
ucugugccuucucaucug

SEQ ID NO: 92998 - RNA, 19 nt, Artificial Sequence
  Synthetic
gucugugccuucucaucug

SEQ ID NO: 92999 - RNA, 20 nt, Artificial Sequence
  Synthetic
cgucugugccuucucaucug

SEQ ID NO: 93000 - RNA, 21 nt, Artificial Sequence
  Synthetic
ccgucugugccuucucaucug

SEQ ID NO: 93001 - RNA, 22 nt, Artificial Sequence
  Synthetic
cccgucugugccuucucaucug

SEQ ID NO: 93002 - RNA, 23 nt, Artificial Sequence
  Synthetic
ccccgucugugccuucucaucug

SEQ ID NO: 93003 - RNA, 24 nt, Artificial Sequence
  Synthetic
uccccgucugugccuucucaucug

SEQ ID NO: 93004 - RNA, 18 nt, Artificial Sequence
  Synthetic
uauugggggccaagucug

SEQ ID NO: 93005 - RNA, 19 nt, Artificial Sequence
  Synthetic
guauugggggccaagucug

SEQ ID NO: 93006 - RNA, 20 nt, Artificial Sequence
  Synthetic
gguauugggggccaagucug

SEQ ID NO: 93007 - RNA, 21 nt, Artificial Sequence
  Synthetic
ugguauugggggccaagucug

SEQ ID NO: 93008 - RNA, 22 nt, Artificial Sequence
  Synthetic
gugguauugggggccaagucug

SEQ ID NO: 93009 - RNA, 23 nt, Artificial Sequence
  Synthetic
ugugguauugggggccaagucug

SEQ ID NO: 93010 - RNA, 24 nt, Artificial Sequence
  Synthetic
augugguauugggggccaagucug

SEQ ID NO: 93011 - RNA, 18 nt, Artificial Sequence
  Synthetic
acuuacaaggccuuucug

SEQ ID NO: 93012 - RNA, 19 nt, Artificial Sequence
  Synthetic
aacuuacaaggccuuucug

SEQ ID NO: 93013 - RNA, 20 nt, Artificial Sequence
  Synthetic
caacuuacaaggccuuucug

SEQ ID NO: 93014 - RNA, 21 nt, Artificial Sequence
  Synthetic
ccaacuuacaaggccuuucug

SEQ ID NO: 93015 - RNA, 22 nt, Artificial Sequence
  Synthetic
gccaacuuacaaggccuuucug

SEQ ID NO: 93016 - RNA, 23 nt, Artificial Sequence
  Synthetic
cgccaacuuacaaggccuuucug

SEQ ID NO: 93017 - RNA, 24 nt, Artificial Sequence
  Synthetic
ucgccaacuuacaaggccuuucug

SEQ ID NO: 93018 - RNA, 18 nt, Artificial Sequence
  Synthetic
gcagagucuagacucgug

SEQ ID NO: 93019 - RNA, 19 nt, Artificial Sequence
  Synthetic
cgcagagucuagacucgug

SEQ ID NO: 93020 - RNA, 20 nt, Artificial Sequence
  Synthetic
ccgcagagucuagacucgug

SEQ ID NO: 93021 - RNA, 21 nt, Artificial Sequence
  Synthetic
accgcagagucuagacucgug

SEQ ID NO: 93022 - RNA, 22 nt, Artificial Sequence
  Synthetic
uaccgcagagucuagacucgug

SEQ ID NO: 93023 - RNA, 23 nt, Artificial Sequence
  Synthetic
auaccgcagagucuagacucgug

SEQ ID NO: 93024 - RNA, 24 nt, Artificial Sequence
  Synthetic
aauaccgcagagucuagacucgug

SEQ ID NO: 93025 - RNA, 18 nt, Artificial Sequence
  Synthetic
ccuuggacucauaaggug

SEQ ID NO: 93026 - RNA, 19 nt, Artificial Sequence
  Synthetic
uccuuggacucauaaggug

SEQ ID NO: 93027 - RNA, 20 nt, Artificial Sequence
  Synthetic
uuccuuggacucauaaggug

SEQ ID NO: 93028 - RNA, 21 nt, Artificial Sequence
  Synthetic
auuccuuggacucauaaggug

SEQ ID NO: 93029 - RNA, 22 nt, Artificial Sequence
  Synthetic
uauuccuuggacucauaaggug

SEQ ID NO: 93030 - RNA, 23 nt, Artificial Sequence
  Synthetic
guauuccuuggacucauaaggug

SEQ ID NO: 93031 - RNA, 24 nt, Artificial Sequence
  Synthetic
aguauuccuuggacucauaaggug

SEQ ID NO: 93032 - RNA, 18 nt, Artificial Sequence
  Synthetic
  misc_feature (15)..(15): n is a, c, g, or u
cugcaagaucccagngug

SEQ ID NO: 93033 - RNA, 19 nt, Artificial Sequence
  Synthetic
  misc_feature (16)..(16): n is a, c, g, or u
ucugcaagaucccagngug

SEQ ID NO: 93034 - RNA, 20 nt, Artificial Sequence
  Synthetic
  misc_feature (17)..(17): n is a, c, g, or u
cucugcaagaucccagngug

SEQ ID NO: 93035 - RNA, 21 nt, Artificial Sequence
  Synthetic
  misc_feature (18)..(18): n is a, c, g, or u
acucugcaagaucccagngug

SEQ ID NO: 93036 - RNA, 22 nt, Artificial Sequence
  Synthetic
  misc_feature (19)..(19): n is a, c, g, or u
aacucugcaagaucccagngug

SEQ ID NO: 93037 - RNA, 23 nt, Artificial Sequence
  Synthetic
  misc_feature (20)..(20): n is a, c, g, or u
aaacucugcaagaucccagngug

SEQ ID NO: 93038 - RNA, 24 nt, Artificial Sequence
  Synthetic
  misc_feature (21)..(21): n is a, c, g, or u
caaacucugcaagaucccagngug

SEQ ID NO: 93039 - RNA, 18 nt, Artificial Sequence
  Synthetic
  misc_feature (13)..(13): n is a, c, g, or u
  misc_feature (16)..(16): n is a, c, g, or u
caggcaagcaauncunug

SEQ ID NO: 93040 - RNA, 19 nt, Artificial Sequence
  Synthetic
  misc_feature (14)..(14): n is a, c, g, or u
  misc_feature (17)..(17): n is a, c, g, or u
ucaggcaagcaauncunug

SEQ ID NO: 93041 - RNA, 20 nt, Artificial Sequence
  Synthetic
  misc_feature (15)..(15): n is a, c, g, or u
  misc_feature (18)..(18): n is a, c, g, or u
cucaggcaagcaauncunug

SEQ ID NO: 93042 - RNA, 21 nt, Artificial Sequence
  Synthetic
  misc_feature (16)..(16): n is a, c, g, or u
  misc_feature (19)..(19): n is a, c, g, or u
acucaggcaagcaauncunug

SEQ ID NO: 93043 - RNA, 22 nt, Artificial Sequence
  Synthetic
  misc_feature (17)..(17): n is a, c, g, or u
  misc_feature (20)..(20): n is a, c, g, or u
cacucaggcaagcaauncunug

SEQ ID NO: 93044 - RNA, 23 nt, Artificial Sequence
  Synthetic
  misc_feature (18)..(18): n is a, c, g, or u
  misc_feature (21)..(21): n is a, c, g, or u
gcacucaggcaagcaauncunug

SEQ ID NO: 93045 - RNA, 24 nt, Artificial Sequence
  Synthetic
  misc_feature (19)..(19): n is a, c, g, or u
  misc_feature (22)..(22): n is a, c, g, or u
ugcacucaggcaagcaauncunug

SEQ ID NO: 93046 - RNA, 18 nt, Artificial Sequence
  Synthetic
  misc_feature (10)..(10): n is a, c, g, or u
ugucuuuaanccucauug

SEQ ID NO: 93047 - RNA, 19 nt, Artificial Sequence
  Synthetic
  misc_feature (11)..(11): n is a, c, g, or u
cugucuuuaanccucauug

SEQ ID NO: 93048 - RNA, 20 nt, Artificial Sequence
  Synthetic
  misc_feature (12)..(12): n is a, c, g, or u
ccugucuuuaanccucauug

SEQ ID NO: 93049 - RNA, 21 nt, Artificial Sequence
  Synthetic
  misc_feature (1)..(1): n is a, c, g, or u
  misc_feature (13)..(13): n is a, c, g, or u
nccugucuuuaanccucauug

SEQ ID NO: 93050 - RNA, 22 nt, Artificial Sequence
  Synthetic
  misc_feature (2)..(2): n is a, c, g, or u
  misc_feature (14)..(14): n is a, c, g, or u
unccugucuuuaanccucauug

SEQ ID NO: 93051 - RNA, 23 nt, Artificial Sequence
  Synthetic
  misc_feature (3)..(3): n is a, c, g, or u
  misc_feature (15)..(15): n is a, c, g, or u
gunccugucuuuaanccucauug

SEQ ID NO: 93052 - RNA, 24 nt, Artificial Sequence
  Synthetic
  misc_feature (4)..(4): n is a, c, g, or u
  misc_feature (16)..(16): n is a, c, g, or u
ugunccugucuuuaanccucauug

SEQ ID NO: 93053 - RNA, 18 nt, Artificial Sequence
  Synthetic
cuguuaacaggccuauug

SEQ ID NO: 93054 - RNA, 19 nt, Artificial Sequence
  Synthetic
ccuguuaacaggccuauug

SEQ ID NO: 93055 - RNA, 20 nt, Artificial Sequence
  Synthetic
uccuguuaacaggccuauug

SEQ ID NO: 93056 - RNA, 21 nt, Artificial Sequence
  Synthetic
uuccuguuaacaggccuauug

SEQ ID NO: 93057 - RNA, 22 nt, Artificial Sequence
  Synthetic
cuuccuguuaacaggccuauug

SEQ ID NO: 93058 - RNA, 23 nt, Artificial Sequence
  Synthetic
acuuccuguuaacaggccuauug

SEQ ID NO: 93059 - RNA, 24 nt, Artificial Sequence
  Synthetic
aacuuccuguuaacaggccuauug

SEQ ID NO: 93060 - RNA, 18 nt, Artificial Sequence
  Synthetic
ccuccaagcugugccuug

SEQ ID NO: 93061 - RNA, 19 nt, Artificial Sequence
  Synthetic
gccuccaagcugugccuug

SEQ ID NO: 93062 - RNA, 20 nt, Artificial Sequence
  Synthetic
agccuccaagcugugccuug

SEQ ID NO: 93063 - RNA, 21 nt, Artificial Sequence
  Synthetic
aagccuccaagcugugccuug

SEQ ID NO: 93064 - RNA, 22 nt, Artificial Sequence
  Synthetic
caagccuccaagcugugccuug

SEQ ID NO: 93065 - RNA, 23 nt, Artificial Sequence
  Synthetic
ucaagccuccaagcugugccuug

SEQ ID NO: 93066 - RNA, 24 nt, Artificial Sequence
  Synthetic
uucaagccuccaagcugugccuug

SEQ ID NO: 93067 - RNA, 18 nt, Artificial Sequence
  Synthetic
  misc_feature (2)..(2): n is a, c, g, or u
  misc_feature (5)..(5): n is a, c, g, or u
gnacnaccgugugucuug

SEQ ID NO: 93068 - RNA, 19 nt, Artificial Sequence
  Synthetic
  misc_feature (3)..(3): n is a, c, g, or u
  misc_feature (6)..(6): n is a, c, g, or u
ggnacnaccgugugucuug

SEQ ID NO: 93069 - RNA, 20 nt, Artificial Sequence
  Synthetic
  misc_feature (4)..(4): n is a, c, g, or u
  misc_feature (7)..(7): n is a, c, g, or u
gggnacnaccgugugucuug

SEQ ID NO: 93070 - RNA, 21 nt, Artificial Sequence
  Synthetic
  misc_feature (5)..(5): n is a, c, g, or u
  misc_feature (8)..(8): n is a, c, g, or u
ggggnacnaccgugugucuug

SEQ ID NO: 93071 - RNA, 22 nt, Artificial Sequence
  Synthetic
  misc_feature (6)..(6): n is a, c, g, or u
  misc_feature (9)..(9): n is a, c, g, or u
gggggnacnaccgugugucuug

SEQ ID NO: 93072 - RNA, 23 nt, Artificial Sequence
  Synthetic
  misc_feature (7)..(7): n is a, c, g, or u
  misc_feature (10)..(10): n is a, c, g, or u
agggggnacnaccgugugucuug

SEQ ID NO: 93073 - RNA, 24 nt, Artificial Sequence
  Synthetic
  misc_feature (8)..(8): n is a, c, g, or u
  misc_feature (11)..(11): n is a, c, g, or u
uagggggnacnaccgugugucuug

SEQ ID NO: 93074 - RNA, 18 nt, Artificial Sequence
  Synthetic
  misc_feature (12)..(13): n is a, c, g, or u
aacgcccaccannucuug

SEQ ID NO: 93075 - RNA, 19 nt, Artificial Sequence
  Synthetic
  misc_feature (13)..(14): n is a, c, g, or u
gaacgcccaccannucuug

SEQ ID NO: 93076 - RNA, 20 nt, Artificial Sequence
  Synthetic
  misc_feature (14)..(15): n is a, c, g, or u
ugaacgcccaccannucuug

SEQ ID NO: 93077 - RNA, 21 nt, Artificial Sequence
  Synthetic
  misc_feature (15)..(16): n is a, c, g, or u
gugaacgcccaccannucuug

SEQ ID NO: 93078 - RNA, 22 nt, Artificial Sequence
  Synthetic
  misc_feature (16)..(17): n is a, c, g, or u
cgugaacgcccaccannucuug

SEQ ID NO: 93079 - RNA, 23 nt, Artificial Sequence
  Synthetic
  misc_feature (17)..(18): n is a, c, g, or u
ccgugaacgcccaccannucuug

SEQ ID NO: 93080 - RNA, 24 nt, Artificial Sequence
  Synthetic
  misc_feature (18)..(19): n is a, c, g, or u
accgugaacgcccaccannucuug

SEQ ID NO: 93081 - RNA, 18 nt, Artificial Sequence
  Synthetic
  misc_feature (3)..(3): n is a, c, g, or u
aangacugggaggaguug

SEQ ID NO: 93082 - RNA, 19 nt, Artificial Sequence
  Synthetic
  misc_feature (4)..(4): n is a, c, g, or u
uaangacugggaggaguug

SEQ ID NO: 93083 - RNA, 20 nt, Artificial Sequence
  Synthetic
  misc_feature (5)..(5): n is a, c, g, or u
uuaangacugggaggaguug

SEQ ID NO: 93084 - RNA, 21 nt, Artificial Sequence
  Synthetic
  misc_feature (6)..(6): n is a, c, g, or u
uuuaangacugggaggaguug

SEQ ID NO: 93085 - RNA, 22 nt, Artificial Sequence
  Synthetic
  misc_feature (7)..(7): n is a, c, g, or u
guuuaangacugggaggaguug

SEQ ID NO: 93086 - RNA, 23 nt, Artificial Sequence
  Synthetic
  misc_feature (8)..(8): n is a, c, g, or u
uguuuaangacugggaggaguug

SEQ ID NO: 93087 - RNA, 24 nt, Artificial Sequence
  Synthetic
  misc_feature (9)..(9): n is a, c, g, or u
uuguuuaangacugggaggaguug

SEQ ID NO: 93088 - RNA, 18 nt, Artificial Sequence
  Synthetic
ugaaccuuuaccccguug

SEQ ID NO: 93089 - RNA, 19 nt, Artificial Sequence
  Synthetic
cugaaccuuuaccccguug

SEQ ID NO: 93090 - RNA, 20 nt, Artificial Sequence
  Synthetic
ccugaaccuuuaccccguug

SEQ ID NO: 93091 - RNA, 21 nt, Artificial Sequence
  Synthetic
accugaaccuuuaccccguug

SEQ ID NO: 93092 - RNA, 22 nt, Artificial Sequence
  Synthetic
uaccugaaccuuuaccccguug

SEQ ID NO: 93093 - RNA, 23 nt, Artificial Sequence
  Synthetic
auaccugaaccuuuaccccguug

SEQ ID NO: 93094 - RNA, 24 nt, Artificial Sequence
  Synthetic
aauaccugaaccuuuaccccguug

SEQ ID NO: 93095 - RNA, 18 nt, Artificial Sequence
  Synthetic
uuccggagacuacuguug

SEQ ID NO: 93096 - RNA, 19 nt, Artificial Sequence
  Synthetic
cuuccggagacuacuguug

SEQ ID NO: 93097 - RNA, 20 nt, Artificial Sequence
  Synthetic
acuuccggagacuacuguug

SEQ ID NO: 93098 - RNA, 21 nt, Artificial Sequence
  Synthetic
cacuuccggagacuacuguug

SEQ ID NO: 93099 - RNA, 22 nt, Artificial Sequence
  Synthetic
acacuuccggagacuacuguug

SEQ ID NO: 93100 - RNA, 23 nt, Artificial Sequence
  Synthetic
aacacuuccggagacuacuguug

SEQ ID NO: 93101 - RNA, 24 nt, Artificial Sequence
  Synthetic
caacacuuccggagacuacuguug

SEQ ID NO: 93102 - RNA, 18 nt, Artificial Sequence
  Synthetic
gcgggguuuuucuuguug

SEQ ID NO: 93103 - RNA, 19 nt, Artificial Sequence
  Synthetic
ggcgggguuuuucuuguug

SEQ ID NO: 93104 - RNA, 20 nt, Artificial Sequence
  Synthetic
aggcgggguuuuucuuguug

SEQ ID NO: 93105 - RNA, 21 nt, Artificial Sequence
  Synthetic
caggcgggguuuuucuuguug

SEQ ID NO: 93106 - RNA, 22 nt, Artificial Sequence
  Synthetic
acaggcgggguuuuucuuguug

SEQ ID NO: 93107 - RNA, 23 nt, Artificial Sequence
  Synthetic
uacaggcgggguuuuucuuguug

SEQ ID NO: 93108 - RNA, 24 nt, Artificial Sequence
  Synthetic
uuacaggcgggguuuuucuuguug

SEQ ID NO: 93109 - RNA, 18 nt, Artificial Sequence
  Synthetic
  misc_feature (3)..(3): n is a, c, g, or u
ccncugucuccaccuuug

SEQ ID NO: 93110 - RNA, 19 nt, Artificial Sequence
  Synthetic
  misc_feature (4)..(4): n is a, c, g, or u
cccncugucuccaccuuug

SEQ ID NO: 93111 - RNA, 20 nt, Artificial Sequence
  Synthetic
  misc_feature (5)..(5): n is a, c, g, or u
ccccncugucuccaccuuug

SEQ ID NO: 93112 - RNA, 21 nt, Artificial Sequence
  Synthetic
  misc_feature (6)..(6): n is a, c, g, or u
accccncugucuccaccuuug

SEQ ID NO: 93113 - RNA, 22 nt, Artificial Sequence
  Synthetic
  misc_feature (7)..(7): n is a, c, g, or u
uaccccncugucuccaccuuug

SEQ ID NO: 93114 - RNA, 23 nt, Artificial Sequence
  Synthetic
  misc_feature (8)..(8): n is a, c, g, or u
cuaccccncugucuccaccuuug

SEQ ID NO: 93115 - RNA, 24 nt, Artificial Sequence
  Synthetic
  misc_feature (9)..(9): n is a, c, g, or u
ccuaccccncugucuccaccuuug

SEQ ID NO: 93116 - RNA, 18 nt, Artificial Sequence
  Synthetic
uacuucaaagacuguuug

SEQ ID NO: 93117 - RNA, 19 nt, Artificial Sequence
  Synthetic
auacuucaaagacuguuug

SEQ ID NO: 93118 - RNA, 20 nt, Artificial Sequence
  Synthetic
cauacuucaaagacuguuug

SEQ ID NO: 93119 - RNA, 21 nt, Artificial Sequence
  Synthetic
gcauacuucaaagacuguuug

SEQ ID NO: 93120 - RNA, 22 nt, Artificial Sequence
  Synthetic
ggcauacuucaaagacuguuug

SEQ ID NO: 93121 - RNA, 23 nt, Artificial Sequence
  Synthetic
aggcauacuucaaagacuguuug

SEQ ID NO: 93122 - RNA, 24 nt, Artificial Sequence
  Synthetic
gaggcauacuucaaagacuguuug

SEQ ID NO: 93123 - RNA, 18 nt, Artificial Sequence
  Synthetic
uuucuugucucacuuuug

SEQ ID NO: 93124 - RNA, 19 nt, Artificial Sequence
  Synthetic
auuucuugucucacuuuug

SEQ ID NO: 93125 - RNA, 20 nt, Artificial Sequence
  Synthetic
cauuucuugucucacuuuug

SEQ ID NO: 93126 - RNA, 21 nt, Artificial Sequence
  Synthetic
acauuucuugucucacuuuug

SEQ ID NO: 93127 - RNA, 22 nt, Artificial Sequence
  Synthetic
cacauuucuugucucacuuuug

SEQ ID NO: 93128 - RNA, 23 nt, Artificial Sequence
  Synthetic
ucacauuucuugucucacuuuug

SEQ ID NO: 93129 - RNA, 24 nt, Artificial Sequence
  Synthetic
uucacauuucuugucucacuuuug

SEQ ID NO: 93130 - RNA, 18 nt, Artificial Sequence
  Synthetic
  misc_feature (8)..(8): n is a, c, g, or u
  misc_feature (18)..(18): n is a, c, g, or u
ucacagunaaugagaaan

SEQ ID NO: 93131 - RNA, 19 nt, Artificial Sequence
  Synthetic
  misc_feature (9)..(9): n is a, c, g, or u
  misc_feature (19)..(19): n is a, c, g, or u
cucacagunaaugagaaan

SEQ ID NO: 93132 - RNA, 20 nt, Artificial Sequence
  Synthetic
  misc_feature (10)..(10): n is a, c, g, or u
  misc_feature (20)..(20): n is a, c, g, or u
acucacagunaaugagaaan

SEQ ID NO: 93133 - RNA, 21 nt, Artificial Sequence
  Synthetic
  misc_feature (11)..(11): n is a, c, g, or u
  misc_feature (21)..(21): n is a, c, g, or u
cacucacagunaaugagaaan

SEQ ID NO: 93134 - RNA, 22 nt, Artificial Sequence
  Synthetic
  misc_feature (12)..(12): n is a, c, g, or u
  misc_feature (22)..(22): n is a, c, g, or u
ccacucacagunaaugagaaan

SEQ ID NO: 93135 - RNA, 23 nt, Artificial Sequence
  Synthetic
  misc_feature (1)..(1): n is a, c, g, or u
  misc_feature (13)..(13): n is a, c, g, or u
  misc_feature (23)..(23): n is a, c, g, or u
nccacucacagunaaugagaaan

SEQ ID NO: 93136 - RNA, 24 nt, Artificial Sequence
  Synthetic
  misc_feature (2)..(2): n is a, c, g, or u
  misc_feature (14)..(14): n is a, c, g, or u
  misc_feature (24)..(24): n is a, c, g, or u
gnccacucacagunaaugagaaan

SEQ ID NO: 93137 - RNA, 18 nt, Artificial Sequence
  Synthetic
  misc_feature (9)..(9): n is a, c, g, or u
  misc_feature (18)..(18): n is a, c, g, or u
uuguaugcnuguauucan

SEQ ID NO: 93138 - RNA, 19 nt, Artificial Sequence
  Synthetic
  misc_feature (1)..(1): n is a, c, g, or u
  misc_feature (10)..(10): n is a, c, g, or u
  misc_feature (19)..(19): n is a, c, g, or u
nuuguaugcnuguauucan

SEQ ID NO: 93139 - RNA, 20 nt, Artificial Sequence
  Synthetic
  misc_feature (2)..(2): n is a, c, g, or u
  misc_feature (11)..(11): n is a, c, g, or u
  misc_feature (20)..(20): n is a, c, g, or u
cnuuguaugcnuguauucan

SEQ ID NO: 93140 - RNA, 21 nt, Artificial Sequence
  Synthetic
  misc_feature (3)..(3): n is a, c, g, or u
  misc_feature (12)..(12): n is a, c, g, or u
  misc_feature (21)..(21): n is a, c, g, or u
ccnuuguaugcnuguauucan

SEQ ID NO: 93141 - RNA, 22 nt, Artificial Sequence
  Synthetic
  misc_feature (4)..(4): n is a, c, g, or u
  misc_feature (13)..(13): n is a, c, g, or u
  misc_feature (22)..(22): n is a, c, g, or u
gccnuuguaugcnuguauucan

SEQ ID NO: 93142 - RNA, 23 nt, Artificial Sequence
  Synthetic
  misc_feature (5)..(5): n is a, c, g, or u
  misc_feature (14)..(14): n is a, c, g, or u
  misc_feature (23)..(23): n is a, c, g, or u
ugccnuuguaugcnuguauucan

SEQ ID NO: 93143 - RNA, 24 nt, Artificial Sequence
  Synthetic
  misc_feature (6)..(6): n is a, c, g, or u
  misc_feature (15)..(15): n is a, c, g, or u
  misc_feature (24)..(24): n is a, c, g, or u
augccnuuguaugcnuguauucan

SEQ ID NO: 93144 - RNA, 18 nt, Artificial Sequence
  Synthetic
  misc_feature (18)..(18): n is a, c, g, or u
cucaggcucagggcauan

SEQ ID NO: 93145 - RNA, 19 nt, Artificial Sequence
  Synthetic
  misc_feature (19)..(19): n is a, c, g, or u
ccucaggcucagggcauan

SEQ ID NO: 93146 - RNA, 20 nt, Artificial Sequence
  Synthetic
  misc_feature (20)..(20): n is a, c, g, or u
cccucaggcucagggcauan

SEQ ID NO: 93147 - RNA, 21 nt, Artificial Sequence
  Synthetic
  misc_feature (21)..(21): n is a, c, g, or u
gcccucaggcucagggcauan

SEQ ID NO: 93148 - RNA, 22 nt, Artificial Sequence
  Synthetic
  misc_feature (22)..(22): n is a, c, g, or u
agcccucaggcucagggcauan

SEQ ID NO: 93149 - RNA, 23 nt, Artificial Sequence
  Synthetic
  misc_feature (23)..(23): n is a, c, g, or u
gagcccucaggcucagggcauan

SEQ ID NO: 93150 - RNA, 24 nt, Artificial Sequence
  Synthetic
  misc_feature (24)..(24): n is a, c, g, or u
ggagcccucaggcucagggcauan

SEQ ID NO: 93151 - RNA, 18 nt, Artificial Sequence
  Synthetic
  misc_feature (2)..(2): n is a, c, g, or u
  misc_feature (7)..(7): n is a, c, g, or u
  misc_feature (9)..(9): n is a, c, g, or u
  misc_feature (11)..(11): n is a, c, g, or u
  misc_feature (18)..(18): n is a, c, g, or u
gnuuaangnunuuuguan

SEQ ID NO: 93152 - RNA, 19 nt, Artificial Sequence
  Synthetic
  misc_feature (3)..(3): n is a, c, g, or u
  misc_feature (8)..(8): n is a, c, g, or u
  misc_feature (10)..(10): n is a, c, g, or u
  misc_feature (12)..(12): n is a, c, g, or u
  misc_feature (19)..(19): n is a, c, g, or u
agnuuaangnunuuuguan

SEQ ID NO: 93153 - RNA, 20 nt, Artificial Sequence
  Synthetic
  misc_feature (4)..(4): n is a, c, g, or u
  misc_feature (9)..(9): n is a, c, g, or u
  misc_feature (11)..(11): n is a, c, g, or u
  misc_feature (13)..(13): n is a, c, g, or u
  misc_feature (20)..(20): n is a, c, g, or u
uagnuuaangnunuuuguan

SEQ ID NO: 93154 - RNA, 21 nt, Artificial Sequence
  Synthetic
  misc_feature (1)..(1): n is a, c, g, or u
  misc_feature (5)..(5): n is a, c, g, or u
  misc_feature (10)..(10): n is a, c, g, or u
  misc_feature (12)..(12): n is a, c, g, or u
  misc_feature (14)..(14): n is a, c, g, or u
  misc_feature (21)..(21): n is a, c, g, or u
nuagnuuaangnunuuuguan

SEQ ID NO: 93155 - RNA, 22 nt, Artificial Sequence
  Synthetic
  misc_feature (1)..(2): n is a, c, g, or u
  misc_feature (6)..(6): n is a, c, g, or u
  misc_feature (11)..(11): n is a, c, g, or u
  misc_feature (13)..(13): n is a, c, g, or u
  misc_feature (15)..(15): n is a, c, g, or u
  misc_feature (22)..(22): n is a, c, g, or u
nnuagnuuaangnunuuuguan

SEQ ID NO: 93156 - RNA, 23 nt, Artificial Sequence
  Synthetic
  misc_feature (2)..(3): n is a, c, g, or u
  misc_feature (7)..(7): n is a, c, g, or u
  misc_feature (12)..(12): n is a, c, g, or u
  misc_feature (14)..(14): n is a, c, g, or u
  misc_feature (16)..(16): n is a, c, g, or u
  misc_feature (23)..(23): n is a, c, g, or u
gnnuagnuuaangnunuuuguan

SEQ ID NO: 93157 - RNA, 24 nt, Artificial Sequence
  Synthetic
  misc_feature (3)..(4): n is a, c, g, or u
  misc_feature (8)..(8): n is a, c, g, or u
  misc_feature (13)..(13): n is a, c, g, or u
  misc_feature (15)..(15): n is a, c, g, or u
  misc_feature (17)..(17): n is a, c, g, or u
  misc_feature (24)..(24): n is a, c, g, or u
agnnuagnuuaangnunuuuguan

SEQ ID NO: 93158 - RNA, 18 nt, Artificial Sequence
  Synthetic
  misc_feature (18)..(18): n is a, c, g, or u
uuaaacccuaacaaaacn

SEQ ID NO: 93159 - RNA, 19 nt, Artificial Sequence
  Synthetic
  misc_feature (19)..(19): n is a, c, g, or u
uuuaaacccuaacaaaacn

SEQ ID NO: 93160 - RNA, 20 nt, Artificial Sequence
  Synthetic
  misc_feature (20)..(20): n is a, c, g, or u
auuuaaacccuaacaaaacn

SEQ ID NO: 93161 - RNA, 21 nt, Artificial Sequence
  Synthetic
  misc_feature (21)..(21): n is a, c, g, or u
cauuuaaacccuaacaaaacn

SEQ ID NO: 93162 - RNA, 22 nt, Artificial Sequence
  Synthetic
  misc_feature (22)..(22): n is a, c, g, or u
acauuuaaacccuaacaaaacn

SEQ ID NO: 93163 - RNA, 23 nt, Artificial Sequence
  Synthetic
  misc_feature (23)..(23): n is a, c, g, or u
uacauuuaaacccuaacaaaacn

SEQ ID NO: 93164 - RNA, 24 nt, Artificial Sequence
  Synthetic
  misc_feature (24)..(24): n is a, c, g, or u
auacauuuaaacccuaacaaaacn

SEQ ID NO: 93165 - RNA, 18 nt, Artificial Sequence
  Synthetic
  misc_feature (12)..(12): n is a, c, g, or u
  misc_feature (18)..(18): n is a, c, g, or u
auuccaggaucnucaacn

SEQ ID NO: 93166 - RNA, 19 nt, Artificial Sequence
  Synthetic
  misc_feature (13)..(13): n is a, c, g, or u
  misc_feature (19)..(19): n is a, c, g, or u
aauuccaggaucnucaacn

SEQ ID NO: 93167 - RNA, 20 nt, Artificial Sequence
  Synthetic
  misc_feature (14)..(14): n is a, c, g, or u
  misc_feature (20)..(20): n is a, c, g, or u
uaauuccaggaucnucaacn

SEQ ID NO: 93168 - RNA, 21 nt, Artificial Sequence
  Synthetic
  misc_feature (15)..(15): n is a, c, g, or u
  misc_feature (21)..(21): n is a, c, g, or u
cuaauuccaggaucnucaacn

SEQ ID NO: 93169 - RNA, 22 nt, Artificial Sequence
  Synthetic
  misc_feature (16)..(16): n is a, c, g, or u
  misc_feature (22)..(22): n is a, c, g, or u
ucuaauuccaggaucnucaacn

SEQ ID NO: 93170 - RNA, 23 nt, Artificial Sequence
  Synthetic
  misc_feature (17)..(17): n is a, c, g, or u
  misc_feature (23)..(23): n is a, c, g, or u
cucuaauuccaggaucnucaacn

SEQ ID NO: 93171 - RNA, 24 nt, Artificial Sequence
  Synthetic
  misc_feature (18)..(18): n is a, c, g, or u
  misc_feature (24)..(24): n is a, c, g, or u
ccucuaauuccaggaucnucaacn

SEQ ID NO: 93172 - RNA, 18 nt, Artificial Sequence
  Synthetic
  misc_feature (10)..(10): n is a, c, g, or u
  misc_feature (18)..(18): n is a, c, g, or u
gcaaacauunucgggacn

SEQ ID NO: 93173 - RNA, 19 nt, Artificial Sequence
  Synthetic
  misc_feature (11)..(11): n is a, c, g, or u
  misc_feature (19)..(19): n is a, c, g, or u
agcaaacauunucgggacn

SEQ ID NO: 93174 - RNA, 20 nt, Artificial Sequence
  Synthetic
  misc_feature (12)..(12): n is a, c, g, or u
  misc_feature (20)..(20): n is a, c, g, or u
gagcaaacauunucgggacn

SEQ ID NO: 93175 - RNA, 21 nt, Artificial Sequence
  Synthetic
  misc_feature (13)..(13): n is a, c, g, or u
  misc_feature (21)..(21): n is a, c, g, or u
ggagcaaacauunucgggacn

SEQ ID NO: 93176 - RNA, 22 nt, Artificial Sequence
  Synthetic
  misc_feature (14)..(14): n is a, c, g, or u
  misc_feature (22)..(22): n is a, c, g, or u
uggagcaaacauunucgggacn

SEQ ID NO: 93177 - RNA, 23 nt, Artificial Sequence
  Synthetic
  misc_feature (15)..(15): n is a, c, g, or u
  misc_feature (23)..(23): n is a, c, g, or u
cuggagcaaacauunucgggacn

SEQ ID NO: 93178 - RNA, 24 nt, Artificial Sequence
  Synthetic
  misc_feature (16)..(16): n is a, c, g, or u
  misc_feature (24)..(24): n is a, c, g, or u
ucuggagcaaacauunucgggacn

SEQ ID NO: 93179 - RNA, 18 nt, Artificial Sequence
  Synthetic
  misc_feature (5)..(5): n is a, c, g, or u
  misc_feature (11)..(11): n is a, c, g, or u
  misc_feature (18)..(18): n is a, c, g, or u
gaucnucaacnaccagcn

SEQ ID NO: 93180 - RNA, 19 nt, Artificial Sequence
  Synthetic
  misc_feature (6)..(6): n is a, c, g, or u
  misc_feature (12)..(12): n is a, c, g, or u
  misc_feature (19)..(19): n is a, c, g, or u
ggaucnucaacnaccagcn

SEQ ID NO: 93181 - RNA, 20 nt, Artificial Sequence
  Synthetic
  misc_feature (7)..(7): n is a, c, g, or u
  misc_feature (13)..(13): n is a, c, g, or u
  misc_feature (20)..(20): n is a, c, g, or u
aggaucnucaacnaccagcn

SEQ ID NO: 93182 - RNA, 21 nt, Artificial Sequence
  Synthetic
  misc_feature (8)..(8): n is a, c, g, or u
  misc_feature (14)..(14): n is a, c, g, or u
  misc_feature (21)..(21): n is a, c, g, or u
caggaucnucaacnaccagcn

SEQ ID NO: 93183 - RNA, 22 nt, Artificial Sequence
  Synthetic
  misc_feature (9)..(9): n is a, c, g, or u
  misc_feature (15)..(15): n is a, c, g, or u
  misc_feature (22)..(22): n is a, c, g, or u
ccaggaucnucaacnaccagcn

SEQ ID NO: 93184 - RNA, 23 nt, Artificial Sequence
  Synthetic
  misc_feature (10)..(10): n is a, c, g, or u
  misc_feature (16)..(16): n is a, c, g, or u
  misc_feature (23)..(23): n is a, c, g, or u
uccaggaucnucaacnaccagcn

SEQ ID NO: 93185 - RNA, 24 nt, Artificial Sequence
  Synthetic
  misc_feature (11)..(11): n is a, c, g, or u
  misc_feature (17)..(17): n is a, c, g, or u
  misc_feature (24)..(24): n is a, c, g, or u
uuccaggaucnucaacnaccagcn

SEQ ID NO: 93186 - RNA, 18 nt, Artificial Sequence
  Synthetic
  misc_feature (13)..(14): n is a, c, g, or u
  misc_feature (18)..(18): n is a, c, g, or u
uuggaagauccannaucn

SEQ ID NO: 93187 - RNA, 19 nt, Artificial Sequence
  Synthetic
  misc_feature (14)..(15): n is a, c, g, or u
  misc_feature (19)..(19): n is a, c, g, or u
uuuggaagauccannaucn

SEQ ID NO: 93188 - RNA, 20 nt, Artificial Sequence
  Synthetic
  misc_feature (15)..(16): n is a, c, g, or u
  misc_feature (20)..(20): n is a, c, g, or u
auuuggaagauccannaucn

SEQ ID NO: 93189 - RNA, 21 nt, Artificial Sequence
  Synthetic
  misc_feature (16)..(17): n is a, c, g, or u
  misc_feature (21)..(21): n is a, c, g, or u
aauuuggaagauccannaucn

SEQ ID NO: 93190 - RNA, 22 nt, Artificial Sequence
  Synthetic
  misc_feature (17)..(18): n is a, c, g, or u
  misc_feature (22)..(22): n is a, c, g, or u
uaauuuggaagauccannaucn

SEQ ID NO: 93191 - RNA, 23 nt, Artificial Sequence
  Synthetic
  misc_feature (1)..(1): n is a, c, g, or u
  misc_feature (18)..(19): n is a, c, g, or u
  misc_feature (23)..(23): n is a, c, g, or u
nuaauuuggaagauccannaucn

SEQ ID NO: 93192 - RNA, 24 nt, Artificial Sequence
  Synthetic
  misc_feature (2)..(2): n is a, c, g, or u
  misc_feature (19)..(20): n is a, c, g, or u
  misc_feature (24)..(24): n is a, c, g, or u
gnuaauuuggaagauccannaucn

SEQ ID NO: 93193 - RNA, 18 nt, Artificial Sequence
  Synthetic
  misc_feature (18)..(18): n is a, c, g, or u
acucugcaagaucccagn

SEQ ID NO: 93194 - RNA, 19 nt, Artificial Sequence
  Synthetic
  misc_feature (19)..(19): n is a, c, g, or u
aacucugcaagaucccagn

SEQ ID NO: 93195 - RNA, 20 nt, Artificial Sequence
  Synthetic
  misc_feature (20)..(20): n is a, c, g, or u
aaacucugcaagaucccagn

SEQ ID NO: 93196 - RNA, 21 nt, Artificial Sequence
  Synthetic
  misc_feature (21)..(21): n is a, c, g, or u
caaacucugcaagaucccagn

SEQ ID NO: 93197 - RNA, 22 nt, Artificial Sequence
  Synthetic
  misc_feature (22)..(22): n is a, c, g, or u
ccaaacucugcaagaucccagn

SEQ ID NO: 93198 - RNA, 23 nt, Artificial Sequence
  Synthetic
  misc_feature (23)..(23): n is a, c, g, or u
accaaacucugcaagaucccagn

SEQ ID NO: 93199 - RNA, 24 nt, Artificial Sequence
  Synthetic
  misc_feature (24)..(24): n is a, c, g, or u
caccaaacucugcaagaucccagn

SEQ ID NO: 93200 - RNA, 18 nt, Artificial Sequence
  Synthetic
  misc_feature (15)..(15): n is a, c, g, or u
  misc_feature (18)..(18): n is a, c, g, or u
ccuuggguggcuuunggn

SEQ ID NO: 93201 - RNA, 19 nt, Artificial Sequence
  Synthetic
  misc_feature (16)..(16): n is a, c, g, or u
  misc_feature (19)..(19): n is a, c, g, or u
gccuuggguggcuuunggn

SEQ ID NO: 93202 - RNA, 20 nt, Artificial Sequence
  Synthetic
  misc_feature (17)..(17): n is a, c, g, or u
  misc_feature (20)..(20): n is a, c, g, or u
ugccuuggguggcuuunggn

SEQ ID NO: 93203 - RNA, 21 nt, Artificial Sequence
  Synthetic
  misc_feature (18)..(18): n is a, c, g, or u
  misc_feature (21)..(21): n is a, c, g, or u
gugccuuggguggcuuunggn

SEQ ID NO: 93204 - RNA, 22 nt, Artificial Sequence
  Synthetic
  misc_feature (19)..(19): n is a, c, g, or u
  misc_feature (22)..(22): n is a, c, g, or u
ugugccuuggguggcuuunggn

SEQ ID NO: 93205 - RNA, 23 nt, Artificial Sequence
  Synthetic
  misc_feature (20)..(20): n is a, c, g, or u
  misc_feature (23)..(23): n is a, c, g, or u
cugugccuuggguggcuuunggn

SEQ ID NO: 93206 - RNA, 24 nt, Artificial Sequence
  Synthetic
  misc_feature (21)..(21): n is a, c, g, or u
  misc_feature (24)..(24): n is a, c, g, or u
gcugugccuuggguggcuuunggn

SEQ ID NO: 93207 - RNA, 18 nt, Artificial Sequence
  Synthetic
  misc_feature (14)..(14): n is a, c, g, or u
  misc_feature (18)..(18): n is a, c, g, or u
aaccugcacgacuncugn

SEQ ID NO: 93208 - RNA, 19 nt, Artificial Sequence
  Synthetic
  misc_feature (15)..(15): n is a, c, g, or u
  misc_feature (19)..(19): n is a, c, g, or u
gaaccugcacgacuncugn

SEQ ID NO: 93209 - RNA, 20 nt, Artificial Sequence
  Synthetic
  misc_feature (16)..(16): n is a, c, g, or u
  misc_feature (20)..(20): n is a, c, g, or u
agaaccugcacgacuncugn

SEQ ID NO: 93210 - RNA, 21 nt, Artificial Sequence
  Synthetic
  misc_feature (17)..(17): n is a, c, g, or u
  misc_feature (21)..(21): n is a, c, g, or u
cagaaccugcacgacuncugn

SEQ ID NO: 93211 - RNA, 22 nt, Artificial Sequence
  Synthetic
  misc_feature (18)..(18): n is a, c, g, or u
  misc_feature (22)..(22): n is a, c, g, or u
gcagaaccugcacgacuncugn

SEQ ID NO: 93212 - RNA, 23 nt, Artificial Sequence
  Synthetic
  misc_feature (19)..(19): n is a, c, g, or u
  misc_feature (23)..(23): n is a, c, g, or u
ugcagaaccugcacgacuncugn

SEQ ID NO: 93213 - RNA, 24 nt, Artificial Sequence
  Synthetic
  misc_feature (20)..(20): n is a, c, g, or u
  misc_feature (24)..(24): n is a, c, g, or u
augcagaaccugcacgacuncugn

SEQ ID NO: 93214 - RNA, 18 nt, Artificial Sequence
  Synthetic
  misc_feature (18)..(18): n is a, c, g, or u
cauuuacaccaagacaun

SEQ ID NO: 93215 - RNA, 19 nt, Artificial Sequence
  Synthetic
  misc_feature (19)..(19): n is a, c, g, or u
acauuuacaccaagacaun

SEQ ID NO: 93216 - RNA, 20 nt, Artificial Sequence
  Synthetic
  misc_feature (20)..(20): n is a, c, g, or u
uacauuuacaccaagacaun

SEQ ID NO: 93217 - RNA, 21 nt, Artificial Sequence
  Synthetic
  misc_feature (21)..(21): n is a, c, g, or u
auacauuuacaccaagacaun

SEQ ID NO: 93218 - RNA, 22 nt, Artificial Sequence
  Synthetic
  misc_feature (22)..(22): n is a, c, g, or u
uauacauuuacaccaagacaun

SEQ ID NO: 93219 - RNA, 23 nt, Artificial Sequence
  Synthetic
  misc_feature (23)..(23): n is a, c, g, or u
auauacauuuacaccaagacaun

SEQ ID NO: 93220 - RNA, 24 nt, Artificial Sequence
  Synthetic
  misc_feature (24)..(24): n is a, c, g, or u
aauauacauuuacaccaagacaun

SEQ ID NO: 93221 - RNA, 18 nt, Artificial Sequence
  Synthetic
  misc_feature (6)..(6): n is a, c, g, or u
  misc_feature (18)..(18): n is a, c, g, or u
guaggnccacucacagun

SEQ ID NO: 93222 - RNA, 19 nt, Artificial Sequence
  Synthetic
  misc_feature (7)..(7): n is a, c, g, or u
  misc_feature (19)..(19): n is a, c, g, or u
uguaggnccacucacagun

SEQ ID NO: 93223 - RNA, 20 nt, Artificial Sequence
  Synthetic
  misc_feature (8)..(8): n is a, c, g, or u
  misc_feature (20)..(20): n is a, c, g, or u
uuguaggnccacucacagun

SEQ ID NO: 93224 - RNA, 21 nt, Artificial Sequence
  Synthetic
  misc_feature (9)..(9): n is a, c, g, or u
  misc_feature (21)..(21): n is a, c, g, or u
uuuguaggnccacucacagun

SEQ ID NO: 93225 - RNA, 22 nt, Artificial Sequence
  Synthetic
  misc_feature (1)..(1): n is a, c, g, or u
  misc_feature (10)..(10): n is a, c, g, or u
  misc_feature (22)..(22): n is a, c, g, or u
nuuuguaggnccacucacagun

SEQ ID NO: 93226 - RNA, 23 nt, Artificial Sequence
  Synthetic
  misc_feature (2)..(2): n is a, c, g, or u
  misc_feature (11)..(11): n is a, c, g, or u
  misc_feature (23)..(23): n is a, c, g, or u
anuuuguaggnccacucacagun

SEQ ID NO: 93227 - RNA, 24 nt, Artificial Sequence
  Synthetic
  misc_feature (3)..(3): n is a, c, g, or u
  misc_feature (12)..(12): n is a, c, g, or u
  misc_feature (24)..(24): n is a, c, g, or u
canuuuguaggnccacucacagun

SEQ ID NO: 93228 - RNA, 18 nt, Artificial Sequence
  Synthetic
  misc_feature (15)..(15): n is a, c, g, or u
  misc_feature (18)..(18): n is a, c, g, or u
uuuggaagagaaacngun

SEQ ID NO: 93229 - RNA, 19 nt, Artificial Sequence
  Synthetic
  misc_feature (16)..(16): n is a, c, g, or u
  misc_feature (19)..(19): n is a, c, g, or u
uuuuggaagagaaacngun

SEQ ID NO: 93230 - RNA, 20 nt, Artificial Sequence
  Synthetic
  misc_feature (17)..(17): n is a, c, g, or u
  misc_feature (20)..(20): n is a, c, g, or u
cuuuuggaagagaaacngun

SEQ ID NO: 93231 - RNA, 21 nt, Artificial Sequence
  Synthetic
  misc_feature (18)..(18): n is a, c, g, or u
  misc_feature (21)..(21): n is a, c, g, or u
acuuuuggaagagaaacngun

SEQ ID NO: 93232 - RNA, 22 nt, Artificial Sequence
  Synthetic
  misc_feature (19)..(19): n is a, c, g, or u
  misc_feature (22)..(22): n is a, c, g, or u
cacuuuuggaagagaaacngun

SEQ ID NO: 93233 - RNA, 23 nt, Artificial Sequence
  Synthetic
  misc_feature (20)..(20): n is a, c, g, or u
  misc_feature (23)..(23): n is a, c, g, or u
ucacuuuuggaagagaaacngun

SEQ ID NO: 93234 - RNA, 24 nt, Artificial Sequence
  Synthetic
  misc_feature (21)..(21): n is a, c, g, or u
  misc_feature (24)..(24): n is a, c, g, or u
cucacuuuuggaagagaaacngun

SEQ ID NO: 93235 - RNA, 18 nt, Artificial Sequence
  Synthetic
  misc_feature (18)..(18): n is a, c, g, or u
ggucuggagcaaacauun

SEQ ID NO: 93236 - RNA, 19 nt, Artificial Sequence
  Synthetic
  misc_feature (19)..(19): n is a, c, g, or u
aggucuggagcaaacauun

SEQ ID NO: 93237 - RNA, 20 nt, Artificial Sequence
  Synthetic
  misc_feature (20)..(20): n is a, c, g, or u
caggucuggagcaaacauun

SEQ ID NO: 93238 - RNA, 21 nt, Artificial Sequence
  Synthetic
  misc_feature (21)..(21): n is a, c, g, or u
gcaggucuggagcaaacauun

SEQ ID NO: 93239 - RNA, 22 nt, Artificial Sequence
  Synthetic
  misc_feature (22)..(22): n is a, c, g, or u
agcaggucuggagcaaacauun

SEQ ID NO: 93240 - RNA, 23 nt, Artificial Sequence
  Synthetic
  misc_feature (23)..(23): n is a, c, g, or u
cagcaggucuggagcaaacauun

SEQ ID NO: 93241 - RNA, 24 nt, Artificial Sequence
  Synthetic
  misc_feature (24)..(24): n is a, c, g, or u
gcagcaggucuggagcaaacauun

SEQ ID NO: 93242 - RNA, 18 nt, Artificial Sequence
  Synthetic
  misc_feature (12)..(12): n is a, c, g, or u
  misc_feature (18)..(18): n is a, c, g, or u
accaaauauuunccauun

SEQ ID NO: 93243 - RNA, 19 nt, Artificial Sequence
  Synthetic
  misc_feature (13)..(13): n is a, c, g, or u
  misc_feature (19)..(19): n is a, c, g, or u
uaccaaauauuunccauun

SEQ ID NO: 93244 - RNA, 20 nt, Artificial Sequence
  Synthetic
  misc_feature (14)..(14): n is a, c, g, or u
  misc_feature (20)..(20): n is a, c, g, or u
uuaccaaauauuunccauun

SEQ ID NO: 93245 - RNA, 21 nt, Artificial Sequence
  Synthetic
  misc_feature (15)..(15): n is a, c, g, or u
  misc_feature (21)..(21): n is a, c, g, or u
guuaccaaauauuunccauun

SEQ ID NO: 93246 - RNA, 22 nt, Artificial Sequence
  Synthetic
  misc_feature (1)..(1): n is a, c, g, or u
  misc_feature (16)..(16): n is a, c, g, or u
  misc_feature (22)..(22): n is a, c, g, or u
nguuaccaaauauuunccauun

SEQ ID NO: 93247 - RNA, 23 nt, Artificial Sequence
  Synthetic
  misc_feature (2)..(2): n is a, c, g, or u
  misc_feature (17)..(17): n is a, c, g, or u
  misc_feature (23)..(23): n is a, c, g, or u
anguuaccaaauauuunccauun

SEQ ID NO: 93248 - RNA, 24 nt, Artificial Sequence
  Synthetic
  misc_feature (3)..(3): n is a, c, g, or u
  misc_feature (18)..(18): n is a, c, g, or u
  misc_feature (24)..(24): n is a, c, g, or u
aanguuaccaaauauuunccauun

SEQ ID NO: 93249 - RNA, 18 nt, Artificial Sequence
  Synthetic
  misc_feature (10)..(10): n is a, c, g, or u
  misc_feature (13)..(13): n is a, c, g, or u
  misc_feature (18)..(18): n is a, c, g, or u
gguuacucunuanauuun

SEQ ID NO: 93250 - RNA, 19 nt, Artificial Sequence
  Synthetic
  misc_feature (11)..(11): n is a, c, g, or u
  misc_feature (14)..(14): n is a, c, g, or u
  misc_feature (19)..(19): n is a, c, g, or u
ggguuacucunuanauuun

SEQ ID NO: 93251 - RNA, 20 nt, Artificial Sequence
  Synthetic
  misc_feature (12)..(12): n is a, c, g, or u
  misc_feature (15)..(15): n is a, c, g, or u
  misc_feature (20)..(20): n is a, c, g, or u
gggguuacucunuanauuun

SEQ ID NO: 93252 - RNA, 21 nt, Artificial Sequence
  Synthetic
  misc_feature (13)..(13): n is a, c, g, or u
  misc_feature (16)..(16): n is a, c, g, or u
  misc_feature (21)..(21): n is a, c, g, or u
ugggguuacucunuanauuun

SEQ ID NO: 93253 - RNA, 22 nt, Artificial Sequence
  Synthetic
  misc_feature (14)..(14): n is a, c, g, or u
  misc_feature (17)..(17): n is a, c, g, or u
  misc_feature (22)..(22): n is a, c, g, or u
augggguuacucunuanauuun

SEQ ID NO: 93254 - RNA, 23 nt, Artificial Sequence
  Synthetic
  misc_feature (15)..(15): n is a, c, g, or u
  misc_feature (18)..(18): n is a, c, g, or u
  misc_feature (23)..(23): n is a, c, g, or u
gaugggguuacucunuanauuun

SEQ ID NO: 93255 - RNA, 24 nt, Artificial Sequence
  Synthetic
  misc_feature (16)..(16): n is a, c, g, or u
  misc_feature (19)..(19): n is a, c, g, or u
  misc_feature (24)..(24): n is a, c, g, or u
agaugggguuacucunuanauuun

SEQ ID NO: 93256 - RNA, 18 nt, Artificial Sequence
  Synthetic
  misc_feature (8)..(8): n is a, c, g, or u
aagacaunaucaaaaaau

SEQ ID NO: 93257 - RNA, 19 nt, Artificial Sequence
  Synthetic
  misc_feature (9)..(9): n is a, c, g, or u
caagacaunaucaaaaaau

SEQ ID NO: 93258 - RNA, 20 nt, Artificial Sequence
  Synthetic
  misc_feature (10)..(10): n is a, c, g, or u
ccaagacaunaucaaaaaau

SEQ ID NO: 93259 - RNA, 21 nt, Artificial Sequence
  Synthetic
  misc_feature (11)..(11): n is a, c, g, or u
accaagacaunaucaaaaaau

SEQ ID NO: 93260 - RNA, 22 nt, Artificial Sequence
  Synthetic
  misc_feature (12)..(12): n is a, c, g, or u
caccaagacaunaucaaaaaau

SEQ ID NO: 93261 - RNA, 23 nt, Artificial Sequence
  Synthetic
  misc_feature (13)..(13): n is a, c, g, or u
acaccaagacaunaucaaaaaau

SEQ ID NO: 93262 - RNA, 24 nt, Artificial Sequence
  Synthetic
  misc_feature (14)..(14): n is a, c, g, or u
uacaccaagacaunaucaaaaaau

SEQ ID NO: 93263 - RNA, 18 nt, Artificial Sequence
  Synthetic
  misc_feature (1)..(1): n is a, c, g, or u
  misc_feature (9)..(9): n is a, c, g, or u
  misc_feature (13)..(13): n is a, c, g, or u
ncacaucanacanaaaau

SEQ ID NO: 93264 - RNA, 19 nt, Artificial Sequence
  Synthetic
  misc_feature (2)..(2): n is a, c, g, or u
  misc_feature (10)..(10): n is a, c, g, or u
  misc_feature (14)..(14): n is a, c, g, or u
ancacaucanacanaaaau

SEQ ID NO: 93265 - RNA, 20 nt, Artificial Sequence
  Synthetic
  misc_feature (3)..(3): n is a, c, g, or u
  misc_feature (11)..(11): n is a, c, g, or u
  misc_feature (15)..(15): n is a, c, g, or u
gancacaucanacanaaaau

SEQ ID NO: 93266 - RNA, 21 nt, Artificial Sequence
  Synthetic
  misc_feature (4)..(4): n is a, c, g, or u
  misc_feature (12)..(12): n is a, c, g, or u
  misc_feature (16)..(16): n is a, c, g, or u
agancacaucanacanaaaau

SEQ ID NO: 93267 - RNA, 22 nt, Artificial Sequence
  Synthetic
  misc_feature (5)..(5): n is a, c, g, or u
  misc_feature (13)..(13): n is a, c, g, or u
  misc_feature (17)..(17): n is a, c, g, or u
aagancacaucanacanaaaau

SEQ ID NO: 93268 - RNA, 23 nt, Artificial Sequence
  Synthetic
  misc_feature (6)..(6): n is a, c, g, or u
  misc_feature (14)..(14): n is a, c, g, or u
  misc_feature (18)..(18): n is a, c, g, or u
caagancacaucanacanaaaau

SEQ ID NO: 93269 - RNA, 24 nt, Artificial Sequence
  Synthetic
  misc_feature (7)..(7): n is a, c, g, or u
  misc_feature (15)..(15): n is a, c, g, or u
  misc_feature (19)..(19): n is a, c, g, or u
acaagancacaucanacanaaaau

SEQ ID NO: 93270 - RNA, 18 nt, Artificial Sequence
  Synthetic
gucgcagaagaucucaau

SEQ ID NO: 93271 - RNA, 19 nt, Artificial Sequence
  Synthetic
cgucgcagaagaucucaau

SEQ ID NO: 93272 - RNA, 20 nt, Artificial Sequence
  Synthetic
gcgucgcagaagaucucaau

SEQ ID NO: 93273 - RNA, 18 nt, Artificial Sequence
  Synthetic
ccagauugggacuucaau

SEQ ID NO: 93274 - RNA, 19 nt, Artificial Sequence
  Synthetic
uccagauugggacuucaau

SEQ ID NO: 93275 - RNA, 20 nt, Artificial Sequence
  Synthetic
auccagauugggacuucaau

SEQ ID NO: 93276 - RNA, 21 nt, Artificial Sequence
  Synthetic
aauccagauugggacuucaau

SEQ ID NO: 93277 - RNA, 22 nt, Artificial Sequence
  Synthetic
aaauccagauugggacuucaau

SEQ ID NO: 93278 - RNA, 23 nt, Artificial Sequence
  Synthetic
caaauccagauugggacuucaau

SEQ ID NO: 93279 - RNA, 24 nt, Artificial Sequence
  Synthetic
gcaaauccagauugggacuucaau

SEQ ID NO: 93280 - RNA, 18 nt, Artificial Sequence
  Synthetic
  misc_feature (5)..(5): n is a, c, g, or u
uuganccuuauaaagaau

SEQ ID NO: 93281 - RNA, 19 nt, Artificial Sequence
  Synthetic
  misc_feature (6)..(6): n is a, c, g, or u
auuganccuuauaaagaau

SEQ ID NO: 93282 - RNA, 20 nt, Artificial Sequence
  Synthetic
  misc_feature (7)..(7): n is a, c, g, or u
cauuganccuuauaaagaau

SEQ ID NO: 93283 - RNA, 21 nt, Artificial Sequence
  Synthetic
  misc_feature (8)..(8): n is a, c, g, or u
acauuganccuuauaaagaau

SEQ ID NO: 93284 - RNA, 22 nt, Artificial Sequence
  Synthetic
  misc_feature (9)..(9): n is a, c, g, or u
gacauuganccuuauaaagaau

SEQ ID NO: 93285 - RNA, 23 nt, Artificial Sequence
  Synthetic
  misc_feature (10)..(10): n is a, c, g, or u
ggacauuganccuuauaaagaau

SEQ ID NO: 93286 - RNA, 24 nt, Artificial Sequence
  Synthetic
  misc_feature (11)..(11): n is a, c, g, or u
uggacauuganccuuauaaagaau

SEQ ID NO: 93287 - RNA, 18 nt, Artificial Sequence
  Synthetic
  misc_feature (15)..(15): n is a, c, g, or u
ucuuggacucucugnaau

SEQ ID NO: 93288 - RNA, 19 nt, Artificial Sequence
  Synthetic
  misc_feature (16)..(16): n is a, c, g, or u
cucuuggacucucugnaau

SEQ ID NO: 93289 - RNA, 20 nt, Artificial Sequence
  Synthetic
  misc_feature (17)..(17): n is a, c, g, or u
acucuuggacucucugnaau

SEQ ID NO: 93290 - RNA, 21 nt, Artificial Sequence
  Synthetic
  misc_feature (18)..(18): n is a, c, g, or u
gacucuuggacucucugnaau

SEQ ID NO: 93291 - RNA, 22 nt, Artificial Sequence
  Synthetic
  misc_feature (19)..(19): n is a, c, g, or u
ggacucuuggacucucugnaau

SEQ ID NO: 93292 - RNA, 23 nt, Artificial Sequence
  Synthetic
  misc_feature (20)..(20): n is a, c, g, or u
aggacucuuggacucucugnaau

SEQ ID NO: 93293 - RNA, 24 nt, Artificial Sequence
  Synthetic
  misc_feature (21)..(21): n is a, c, g, or u
gaggacucuuggacucucugnaau

SEQ ID NO: 93294 - RNA, 18 nt, Artificial Sequence
  Synthetic
  misc_feature (3)..(3): n is a, c, g, or u
  misc_feature (15)..(15): n is a, c, g, or u
ggnccacucacagunaau

SEQ ID NO: 93295 - RNA, 19 nt, Artificial Sequence
  Synthetic
  misc_feature (4)..(4): n is a, c, g, or u
  misc_feature (16)..(16): n is a, c, g, or u
aggnccacucacagunaau

SEQ ID NO: 93296 - RNA, 20 nt, Artificial Sequence
  Synthetic
  misc_feature (5)..(5): n is a, c, g, or u
  misc_feature (17)..(17): n is a, c, g, or u
uaggnccacucacagunaau

SEQ ID NO: 93297 - RNA, 21 nt, Artificial Sequence
  Synthetic
  misc_feature (6)..(6): n is a, c, g, or u
  misc_feature (18)..(18): n is a, c, g, or u
guaggnccacucacagunaau

SEQ ID NO: 93298 - RNA, 22 nt, Artificial Sequence
  Synthetic
  misc_feature (7)..(7): n is a, c, g, or u
  misc_feature (19)..(19): n is a, c, g, or u
uguaggnccacucacagunaau

SEQ ID NO: 93299 - RNA, 23 nt, Artificial Sequence
  Synthetic
  misc_feature (8)..(8): n is a, c, g, or u
  misc_feature (20)..(20): n is a, c, g, or u
uuguaggnccacucacagunaau

SEQ ID NO: 93300 - RNA, 24 nt, Artificial Sequence
  Synthetic
  misc_feature (9)..(9): n is a, c, g, or u
  misc_feature (21)..(21): n is a, c, g, or u
uuuguaggnccacucacagunaau

SEQ ID NO: 93301 - RNA, 18 nt, Artificial Sequence
  Synthetic
  misc_feature (9)..(9): n is a, c, g, or u
aguuaugunaacacuaau

SEQ ID NO: 93302 - RNA, 19 nt, Artificial Sequence
  Synthetic
  misc_feature (10)..(10): n is a, c, g, or u
caguuaugunaacacuaau

SEQ ID NO: 93303 - RNA, 20 nt, Artificial Sequence
  Synthetic
  misc_feature (11)..(11): n is a, c, g, or u
ucaguuaugunaacacuaau

SEQ ID NO: 93304 - RNA, 21 nt, Artificial Sequence
  Synthetic
  misc_feature (12)..(12): n is a, c, g, or u
gucaguuaugunaacacuaau

SEQ ID NO: 93305 - RNA, 22 nt, Artificial Sequence
  Synthetic
  misc_feature (13)..(13): n is a, c, g, or u
agucaguuaugunaacacuaau

SEQ ID NO: 93306 - RNA, 23 nt, Artificial Sequence
  Synthetic
  misc_feature (14)..(14): n is a, c, g, or u
uagucaguuaugunaacacuaau

SEQ ID NO: 93307 - RNA, 24 nt, Artificial Sequence
  Synthetic
  misc_feature (15)..(15): n is a, c, g, or u
guagucaguuaugunaacacuaau

SEQ ID NO: 93308 - RNA, 18 nt, Artificial Sequence
  Synthetic
gcccguuuguccucuaau

SEQ ID NO: 93309 - RNA, 19 nt, Artificial Sequence
  Synthetic
ugcccguuuguccucuaau

SEQ ID NO: 93310 - RNA, 20 nt, Artificial Sequence
  Synthetic
uugcccguuuguccucuaau

SEQ ID NO: 93311 - RNA, 21 nt, Artificial Sequence
  Synthetic
guugcccguuuguccucuaau

SEQ ID NO: 93312 - RNA, 22 nt, Artificial Sequence
  Synthetic
uguugcccguuuguccucuaau

SEQ ID NO: 93313 - RNA, 23 nt, Artificial Sequence
  Synthetic
auguugcccguuuguccucuaau

SEQ ID NO: 93314 - RNA, 24 nt, Artificial Sequence
  Synthetic
uauguugcccguuuguccucuaau

SEQ ID NO: 93315 - RNA, 18 nt, Artificial Sequence
  Synthetic
  misc_feature (14)..(14): n is a, c, g, or u
accugggugggugnuaau

SEQ ID NO: 93316 - RNA, 19 nt, Artificial Sequence
  Synthetic
  misc_feature (1)..(1): n is a, c, g, or u
  misc_feature (15)..(15): n is a, c, g, or u
naccugggugggugnuaau

SEQ ID NO: 93317 - RNA, 20 nt, Artificial Sequence
  Synthetic
  misc_feature (2)..(2): n is a, c, g, or u
  misc_feature (16)..(16): n is a, c, g, or u
cnaccugggugggugnuaau

SEQ ID NO: 93318 - RNA, 21 nt, Artificial Sequence
  Synthetic
  misc_feature (3)..(3): n is a, c, g, or u
  misc_feature (17)..(17): n is a, c, g, or u
gcnaccugggugggugnuaau

SEQ ID NO: 93319 - RNA, 22 nt, Artificial Sequence
  Synthetic
  misc_feature (4)..(4): n is a, c, g, or u
  misc_feature (18)..(18): n is a, c, g, or u
agcnaccugggugggugnuaau

SEQ ID NO: 93320 - RNA, 23 nt, Artificial Sequence
  Synthetic
  misc_feature (5)..(5): n is a, c, g, or u
  misc_feature (19)..(19): n is a, c, g, or u
uagcnaccugggugggugnuaau

SEQ ID NO: 93321 - RNA, 24 nt, Artificial Sequence
  Synthetic
  misc_feature (6)..(6): n is a, c, g, or u
  misc_feature (20)..(20): n is a, c, g, or u
cuagcnaccugggugggugnuaau

SEQ ID NO: 93322 - RNA, 18 nt, Artificial Sequence
  Synthetic
ggacccugcgcugaacau

SEQ ID NO: 93323 - RNA, 19 nt, Artificial Sequence
  Synthetic
gggacccugcgcugaacau

SEQ ID NO: 93324 - RNA, 20 nt, Artificial Sequence
  Synthetic
ggggacccugcgcugaacau

SEQ ID NO: 93325 - RNA, 21 nt, Artificial Sequence
  Synthetic
uggggacccugcgcugaacau

SEQ ID NO: 93326 - RNA, 22 nt, Artificial Sequence
  Synthetic
uuggggacccugcgcugaacau

SEQ ID NO: 93327 - RNA, 23 nt, Artificial Sequence
  Synthetic
auuggggacccugcgcugaacau

SEQ ID NO: 93328 - RNA, 24 nt, Artificial Sequence
  Synthetic
gauuggggacccugcgcugaacau

SEQ ID NO: 93329 - RNA, 18 nt, Artificial Sequence
  Synthetic
uugucuuuggguauacau

SEQ ID NO: 93330 - RNA, 19 nt, Artificial Sequence
  Synthetic
uuugucuuuggguauacau

SEQ ID NO: 93331 - RNA, 20 nt, Artificial Sequence
  Synthetic
uuuugucuuuggguauacau

SEQ ID NO: 93332 - RNA, 21 nt, Artificial Sequence
  Synthetic
cuuuugucuuuggguauacau

SEQ ID NO: 93333 - RNA, 22 nt, Artificial Sequence
  Synthetic
ucuuuugucuuuggguauacau

SEQ ID NO: 93334 - RNA, 23 nt, Artificial Sequence
  Synthetic
uucuuuugucuuuggguauacau

SEQ ID NO: 93335 - RNA, 24 nt, Artificial Sequence
  Synthetic
uuucuuuugucuuuggguauacau

SEQ ID NO: 93336 - RNA, 18 nt, Artificial Sequence
  Synthetic
uugcccaaggucuuacau

SEQ ID NO: 93337 - RNA, 19 nt, Artificial Sequence
  Synthetic
cuugcccaaggucuuacau

SEQ ID NO: 93338 - RNA, 20 nt, Artificial Sequence
  Synthetic
ucuugcccaaggucuuacau

SEQ ID NO: 93339 - RNA, 21 nt, Artificial Sequence
  Synthetic
  misc_feature (1)..(1): n is a, c, g, or u
nucuugcccaaggucuuacau

SEQ ID NO: 93340 - RNA, 22 nt, Artificial Sequence
  Synthetic
  misc_feature (1)..(2): n is a, c, g, or u
nnucuugcccaaggucuuacau

SEQ ID NO: 93341 - RNA, 23 nt, Artificial Sequence
  Synthetic
  misc_feature (2)..(3): n is a, c, g, or u
annucuugcccaaggucuuacau

SEQ ID NO: 93342 - RNA, 24 nt, Artificial Sequence
  Synthetic
  misc_feature (3)..(4): n is a, c, g, or u
cannucuugcccaaggucuuacau

SEQ ID NO: 93343 - RNA, 18 nt, Artificial Sequence
  Synthetic
  misc_feature (2)..(2): n is a, c, g, or u
  misc_feature (9)..(10): n is a, c, g, or u
cnaccagcnngggaccau

SEQ ID NO: 93344 - RNA, 19 nt, Artificial Sequence
  Synthetic
  misc_feature (3)..(3): n is a, c, g, or u
  misc_feature (10)..(11): n is a, c, g, or u
acnaccagcnngggaccau

SEQ ID NO: 93345 - RNA, 20 nt, Artificial Sequence
  Synthetic
  misc_feature (4)..(4): n is a, c, g, or u
  misc_feature (11)..(12): n is a, c, g, or u
aacnaccagcnngggaccau

SEQ ID NO: 93346 - RNA, 21 nt, Artificial Sequence
  Synthetic
  misc_feature (5)..(5): n is a, c, g, or u
  misc_feature (12)..(13): n is a, c, g, or u
caacnaccagcnngggaccau

SEQ ID NO: 93347 - RNA, 22 nt, Artificial Sequence
  Synthetic
  misc_feature (6)..(6): n is a, c, g, or u
  misc_feature (13)..(14): n is a, c, g, or u
ucaacnaccagcnngggaccau

SEQ ID NO: 93348 - RNA, 23 nt, Artificial Sequence
  Synthetic
  misc_feature (1)..(1): n is a, c, g, or u
  misc_feature (7)..(7): n is a, c, g, or u
  misc_feature (14)..(15): n is a, c, g, or u
nucaacnaccagcnngggaccau

SEQ ID NO: 93349 - RNA, 24 nt, Artificial Sequence
  Synthetic
  misc_feature (2)..(2): n is a, c, g, or u
  misc_feature (8)..(8): n is a, c, g, or u
  misc_feature (15)..(16): n is a, c, g, or u
cnucaacnaccagcnngggaccau

SEQ ID NO: 93350 - RNA, 18 nt, Artificial Sequence
  Synthetic
gccaagucuguacagcau

SEQ ID NO: 93351 - RNA, 19 nt, Artificial Sequence
  Synthetic
ggccaagucuguacagcau

SEQ ID NO: 93352 - RNA, 20 nt, Artificial Sequence
  Synthetic
gggccaagucuguacagcau

SEQ ID NO: 93353 - RNA, 21 nt, Artificial Sequence
  Synthetic
ggggccaagucuguacagcau

SEQ ID NO: 93354 - RNA, 22 nt, Artificial Sequence
  Synthetic
gggggccaagucuguacagcau

SEQ ID NO: 93355 - RNA, 23 nt, Artificial Sequence
  Synthetic
ugggggccaagucuguacagcau

SEQ ID NO: 93356 - RNA, 24 nt, Artificial Sequence
  Synthetic
uugggggccaagucuguacagcau

SEQ ID NO: 93357 - RNA, 18 nt, Artificial Sequence
  Synthetic
agguaggagcuggagcau

SEQ ID NO: 93358 - RNA, 19 nt, Artificial Sequence
  Synthetic
aagguaggagcuggagcau

SEQ ID NO: 93359 - RNA, 20 nt, Artificial Sequence
  Synthetic
caagguaggagcuggagcau

SEQ ID NO: 93360 - RNA, 21 nt, Artificial Sequence
  Synthetic
acaagguaggagcuggagcau

SEQ ID NO: 93361 - RNA, 22 nt, Artificial Sequence
  Synthetic
aacaagguaggagcuggagcau

SEQ ID NO: 93362 - RNA, 23 nt, Artificial Sequence
  Synthetic
caacaagguaggagcuggagcau

SEQ ID NO: 93363 - RNA, 24 nt, Artificial Sequence
  Synthetic
ccaacaagguaggagcuggagcau

SEQ ID NO: 93364 - RNA, 18 nt, Artificial Sequence
  Synthetic
caccucugcacgucgcau

SEQ ID NO: 93365 - RNA, 19 nt, Artificial Sequence
  Synthetic
ucaccucugcacgucgcau

SEQ ID NO: 93366 - RNA, 20 nt, Artificial Sequence
  Synthetic
uucaccucugcacgucgcau

SEQ ID NO: 93367 - RNA, 21 nt, Artificial Sequence
  Synthetic
cuucaccucugcacgucgcau

SEQ ID NO: 93368 - RNA, 22 nt, Artificial Sequence
  Synthetic
gcuucaccucugcacgucgcau

SEQ ID NO: 93369 - RNA, 23 nt, Artificial Sequence
  Synthetic
cgcuucaccucugcacgucgcau

SEQ ID NO: 93370 - RNA, 24 nt, Artificial Sequence
  Synthetic
ucgcuucaccucugcacgucgcau

SEQ ID NO: 93371 - RNA, 18 nt, Artificial Sequence
  Synthetic
guauucccaucccaucau

SEQ ID NO: 93372 - RNA, 19 nt, Artificial Sequence
  Synthetic
uguauucccaucccaucau

SEQ ID NO: 93373 - RNA, 20 nt, Artificial Sequence
  Synthetic
cuguauucccaucccaucau

SEQ ID NO: 93374 - RNA, 21 nt, Artificial Sequence
  Synthetic
ccuguauucccaucccaucau

SEQ ID NO: 93375 - RNA, 22 nt, Artificial Sequence
  Synthetic
accuguauucccaucccaucau

SEQ ID NO: 93376 - RNA, 23 nt, Artificial Sequence
  Synthetic
caccuguauucccaucccaucau

SEQ ID NO: 93377 - RNA, 24 nt, Artificial Sequence
  Synthetic
gcaccuguauucccaucccaucau

SEQ ID NO: 93378 - RNA, 18 nt, Artificial Sequence
  Synthetic
  misc_feature (12)..(12): n is a, c, g, or u
ccugucuuuaanccucau

SEQ ID NO: 93379 - RNA, 19 nt, Artificial Sequence
  Synthetic
  misc_feature (1)..(1): n is a, c, g, or u
  misc_feature (13)..(13): n is a, c, g, or u
nccugucuuuaanccucau

SEQ ID NO: 93380 - RNA, 20 nt, Artificial Sequence
  Synthetic
  misc_feature (2)..(2): n is a, c, g, or u
  misc_feature (14)..(14): n is a, c, g, or u
unccugucuuuaanccucau

SEQ ID NO: 93381 - RNA, 21 nt, Artificial Sequence
  Synthetic
  misc_feature (3)..(3): n is a, c, g, or u
  misc_feature (15)..(15): n is a, c, g, or u
gunccugucuuuaanccucau

SEQ ID NO: 93382 - RNA, 22 nt, Artificial Sequence
  Synthetic
  misc_feature (4)..(4): n is a, c, g, or u
  misc_feature (16)..(16): n is a, c, g, or u
ugunccugucuuuaanccucau

SEQ ID NO: 93383 - RNA, 23 nt, Artificial Sequence
  Synthetic
  misc_feature (5)..(5): n is a, c, g, or u
  misc_feature (17)..(17): n is a, c, g, or u
cugunccugucuuuaanccucau

SEQ ID NO: 93384 - RNA, 24 nt, Artificial Sequence
  Synthetic
  misc_feature (6)..(6): n is a, c, g, or u
  misc_feature (18)..(18): n is a, c, g, or u
acugunccugucuuuaanccucau

SEQ ID NO: 93385 - RNA, 18 nt, Artificial Sequence
  Synthetic
caccaaacucugcaagau

SEQ ID NO: 93386 - RNA, 19 nt, Artificial Sequence
  Synthetic
ccaccaaacucugcaagau

SEQ ID NO: 93387 - RNA, 20 nt, Artificial Sequence
  Synthetic
uccaccaaacucugcaagau

SEQ ID NO: 93388 - RNA, 21 nt, Artificial Sequence
  Synthetic
uuccaccaaacucugcaagau

SEQ ID NO: 93389 - RNA, 22 nt, Artificial Sequence
  Synthetic
cuuccaccaaacucugcaagau

SEQ ID NO: 93390 - RNA, 23 nt, Artificial Sequence
  Synthetic
ccuuccaccaaacucugcaagau

SEQ ID NO: 93391 - RNA, 24 nt, Artificial Sequence
  Synthetic
accuuccaccaaacucugcaagau

SEQ ID NO: 93392 - RNA, 18 nt, Artificial Sequence
  Synthetic
aacaccgcaaauccagau

SEQ ID NO: 93393 - RNA, 19 nt, Artificial Sequence
  Synthetic
aaacaccgcaaauccagau

SEQ ID NO: 93394 - RNA, 20 nt, Artificial Sequence
  Synthetic
caaacaccgcaaauccagau

SEQ ID NO: 93395 - RNA, 21 nt, Artificial Sequence
  Synthetic
gcaaacaccgcaaauccagau

SEQ ID NO: 93396 - RNA, 22 nt, Artificial Sequence
  Synthetic
agcaaacaccgcaaauccagau

SEQ ID NO: 93397 - RNA, 23 nt, Artificial Sequence
  Synthetic
gagcaaacaccgcaaauccagau

SEQ ID NO: 93398 - RNA, 24 nt, Artificial Sequence
  Synthetic
agagcaaacaccgcaaauccagau

SEQ ID NO: 93399 - RNA, 18 nt, Artificial Sequence
  Synthetic
gucaaucuucucgaggau

SEQ ID NO: 93400 - RNA, 19 nt, Artificial Sequence
  Synthetic
cgucaaucuucucgaggau

SEQ ID NO: 93401 - RNA, 20 nt, Artificial Sequence
  Synthetic
ucgucaaucuucucgaggau

SEQ ID NO: 93402 - RNA, 21 nt, Artificial Sequence
  Synthetic
aucgucaaucuucucgaggau

SEQ ID NO: 93403 - RNA, 22 nt, Artificial Sequence
  Synthetic
uaucgucaaucuucucgaggau

SEQ ID NO: 93404 - RNA, 23 nt, Artificial Sequence
  Synthetic
  misc_feature (1)..(1): n is a, c, g, or u
nuaucgucaaucuucucgaggau

SEQ ID NO: 93405 - RNA, 24 nt, Artificial Sequence
  Synthetic
  misc_feature (2)..(2): n is a, c, g, or u
cnuaucgucaaucuucucgaggau

SEQ ID NO: 93406 - RNA, 18 nt, Artificial Sequence
  Synthetic
guuaacaggccuauugau

SEQ ID NO: 93407 - RNA, 19 nt, Artificial Sequence
  Synthetic
uguuaacaggccuauugau

SEQ ID NO: 93408 - RNA, 20 nt, Artificial Sequence
  Synthetic
cuguuaacaggccuauugau

SEQ ID NO: 93409 - RNA, 21 nt, Artificial Sequence
  Synthetic
ccuguuaacaggccuauugau

SEQ ID NO: 93410 - RNA, 22 nt, Artificial Sequence
  Synthetic
uccuguuaacaggccuauugau

SEQ ID NO: 93411 - RNA, 23 nt, Artificial Sequence
  Synthetic
uuccuguuaacaggccuauugau

SEQ ID NO: 93412 - RNA, 24 nt, Artificial Sequence
  Synthetic
cuuccuguuaacaggccuauugau

SEQ ID NO: 93413 - RNA, 18 nt, Artificial Sequence
  Synthetic
  misc_feature (7)..(7): n is a, c, g, or u
  misc_feature (16)..(16): n is a, c, g, or u
gaaagunugucaacgnau

SEQ ID NO: 93414 - RNA, 19 nt, Artificial Sequence
  Synthetic
  misc_feature (8)..(8): n is a, c, g, or u
  misc_feature (17)..(17): n is a, c, g, or u
ggaaagunugucaacgnau

SEQ ID NO: 93415 - RNA, 20 nt, Artificial Sequence
  Synthetic
  misc_feature (9)..(9): n is a, c, g, or u
  misc_feature (18)..(18): n is a, c, g, or u
uggaaagunugucaacgnau

SEQ ID NO: 93416 - RNA, 21 nt, Artificial Sequence
  Synthetic
  misc_feature (10)..(10): n is a, c, g, or u
  misc_feature (19)..(19): n is a, c, g, or u
uuggaaagunugucaacgnau

SEQ ID NO: 93417 - RNA, 22 nt, Artificial Sequence
  Synthetic
  misc_feature (11)..(11): n is a, c, g, or u
  misc_feature (20)..(20): n is a, c, g, or u
auuggaaagunugucaacgnau

SEQ ID NO: 93418 - RNA, 23 nt, Artificial Sequence
  Synthetic
  misc_feature (12)..(12): n is a, c, g, or u
  misc_feature (21)..(21): n is a, c, g, or u
gauuggaaagunugucaacgnau

SEQ ID NO: 93419 - RNA, 24 nt, Artificial Sequence
  Synthetic
  misc_feature (13)..(13): n is a, c, g, or u
  misc_feature (22)..(22): n is a, c, g, or u
ugauuggaaagunugucaacgnau

SEQ ID NO: 93420 - RNA, 18 nt, Artificial Sequence
  Synthetic
  misc_feature (16)..(16): n is a, c, g, or u
uuuacaccaagacaunau

SEQ ID NO: 93421 - RNA, 19 nt, Artificial Sequence
  Synthetic
  misc_feature (17)..(17): n is a, c, g, or u
auuuacaccaagacaunau

SEQ ID NO: 93422 - RNA, 20 nt, Artificial Sequence
  Synthetic
  misc_feature (18)..(18): n is a, c, g, or u
cauuuacaccaagacaunau

SEQ ID NO: 93423 - RNA, 21 nt, Artificial Sequence
  Synthetic
  misc_feature (19)..(19): n is a, c, g, or u
acauuuacaccaagacaunau

SEQ ID NO: 93424 - RNA, 22 nt, Artificial Sequence
  Synthetic
  misc_feature (20)..(20): n is a, c, g, or u
uacauuuacaccaagacaunau

SEQ ID NO: 93425 - RNA, 23 nt, Artificial Sequence
  Synthetic
  misc_feature (21)..(21): n is a, c, g, or u
auacauuuacaccaagacaunau

SEQ ID NO: 93426 - RNA, 24 nt, Artificial Sequence
  Synthetic
  misc_feature (22)..(22): n is a, c, g, or u
uauacauuuacaccaagacaunau

SEQ ID NO: 93427 - RNA, 18 nt, Artificial Sequence
  Synthetic
aaggcggguauauuauau

SEQ ID NO: 93428 - RNA, 19 nt, Artificial Sequence
  Synthetic
gaaggcggguauauuauau

SEQ ID NO: 93429 - RNA, 20 nt, Artificial Sequence
  Synthetic
ggaaggcggguauauuauau

SEQ ID NO: 93430 - RNA, 21 nt, Artificial Sequence
  Synthetic
uggaaggcggguauauuauau

SEQ ID NO: 93431 - RNA, 22 nt, Artificial Sequence
  Synthetic
auggaaggcggguauauuauau

SEQ ID NO: 93432 - RNA, 23 nt, Artificial Sequence
  Synthetic
uauggaaggcggguauauuauau

SEQ ID NO: 93433 - RNA, 24 nt, Artificial Sequence
  Synthetic
cuauggaaggcggguauauuauau

SEQ ID NO: 93434 - RNA, 18 nt, Artificial Sequence
  Synthetic
  misc_feature (2)..(2): n is a, c, g, or u
anuauuuacacacucuau

SEQ ID NO: 93435 - RNA, 19 nt, Artificial Sequence
  Synthetic
  misc_feature (3)..(3): n is a, c, g, or u
canuauuuacacacucuau

SEQ ID NO: 93436 - RNA, 20 nt, Artificial Sequence
  Synthetic
  misc_feature (4)..(4): n is a, c, g, or u
acanuauuuacacacucuau

SEQ ID NO: 93437 - RNA, 21 nt, Artificial Sequence
  Synthetic
  misc_feature (5)..(5): n is a, c, g, or u
gacanuauuuacacacucuau

SEQ ID NO: 93438 - RNA, 22 nt, Artificial Sequence
  Synthetic
  misc_feature (6)..(6): n is a, c, g, or u
agacanuauuuacacacucuau

SEQ ID NO: 93439 - RNA, 23 nt, Artificial Sequence
  Synthetic
  misc_feature (1)..(1): n is a, c, g, or u
  misc_feature (7)..(7): n is a, c, g, or u
nagacanuauuuacacacucuau

SEQ ID NO: 93440 - RNA, 24 nt, Artificial Sequence
  Synthetic
  misc_feature (2)..(2): n is a, c, g, or u
  misc_feature (8)..(8): n is a, c, g, or u
cnagacanuauuuacacacucuau

SEQ ID NO: 93441 - RNA, 18 nt, Artificial Sequence
  Synthetic
auauggaugaugugguau

SEQ ID NO: 93442 - RNA, 19 nt, Artificial Sequence
  Synthetic
uauauggaugaugugguau

SEQ ID NO: 93443 - RNA, 20 nt, Artificial Sequence
  Synthetic
uuauauggaugaugugguau

SEQ ID NO: 93444 - RNA, 21 nt, Artificial Sequence
  Synthetic
guuauauggaugaugugguau

SEQ ID NO: 93445 - RNA, 22 nt, Artificial Sequence
  Synthetic
aguuauauggaugaugugguau

SEQ ID NO: 93446 - RNA, 23 nt, Artificial Sequence
  Synthetic
caguuauauggaugaugugguau

SEQ ID NO: 93447 - RNA, 24 nt, Artificial Sequence
  Synthetic
ucaguuauauggaugaugugguau

SEQ ID NO: 93448 - RNA, 18 nt, Artificial Sequence
  Synthetic
  misc_feature (15)..(15): n is a, c, g, or u
accgccucagcucunuau

SEQ ID NO: 93449 - RNA, 19 nt, Artificial Sequence
  Synthetic
  misc_feature (16)..(16): n is a, c, g, or u
uaccgccucagcucunuau

SEQ ID NO: 93450 - RNA, 20 nt, Artificial Sequence
  Synthetic
  misc_feature (17)..(17): n is a, c, g, or u
auaccgccucagcucunuau

SEQ ID NO: 93451 - RNA, 21 nt, Artificial Sequence
  Synthetic
  misc_feature (18)..(18): n is a, c, g, or u
gauaccgccucagcucunuau

SEQ ID NO: 93452 - RNA, 22 nt, Artificial Sequence
  Synthetic
  misc_feature (1)..(1): n is a, c, g, or u
  misc_feature (19)..(19): n is a, c, g, or u
ngauaccgccucagcucunuau

SEQ ID NO: 93453 - RNA, 23 nt, Artificial Sequence
  Synthetic
  misc_feature (2)..(2): n is a, c, g, or u
  misc_feature (20)..(20): n is a, c, g, or u
ungauaccgccucagcucunuau

SEQ ID NO: 93454 - RNA, 24 nt, Artificial Sequence
  Synthetic
  misc_feature (3)..(3): n is a, c, g, or u
  misc_feature (21)..(21): n is a, c, g, or u
cungauaccgccucagcucunuau

SEQ ID NO: 93455 - RNA, 18 nt, Artificial Sequence
  Synthetic
ggaaggcggguauauuau

SEQ ID NO: 93456 - RNA, 19 nt, Artificial Sequence
  Synthetic
uggaaggcggguauauuau

SEQ ID NO: 93457 - RNA, 20 nt, Artificial Sequence
  Synthetic
auggaaggcggguauauuau

SEQ ID NO: 93458 - RNA, 21 nt, Artificial Sequence
  Synthetic
uauggaaggcggguauauuau

SEQ ID NO: 93459 - RNA, 22 nt, Artificial Sequence
  Synthetic
cuauggaaggcggguauauuau

SEQ ID NO: 93460 - RNA, 23 nt, Artificial Sequence
  Synthetic
ucuauggaaggcggguauauuau

SEQ ID NO: 93461 - RNA, 24 nt, Artificial Sequence
  Synthetic
cucuauggaaggcggguauauuau

SEQ ID NO: 93462 - RNA, 18 nt, Artificial Sequence
  Synthetic
gguauuaaaccuuauuau

SEQ ID NO: 93463 - RNA, 19 nt, Artificial Sequence
  Synthetic
ggguauuaaaccuuauuau

SEQ ID NO: 93464 - RNA, 20 nt, Artificial Sequence
  Synthetic
aggguauuaaaccuuauuau

SEQ ID NO: 93465 - RNA, 21 nt, Artificial Sequence
  Synthetic
aaggguauuaaaccuuauuau

SEQ ID NO: 93466 - RNA, 22 nt, Artificial Sequence
  Synthetic
uaaggguauuaaaccuuauuau

SEQ ID NO: 93467 - RNA, 23 nt, Artificial Sequence
  Synthetic
auaaggguauuaaaccuuauuau

SEQ ID NO: 93468 - RNA, 24 nt, Artificial Sequence
  Synthetic
gauaaggguauuaaaccuuauuau

SEQ ID NO: 93469 - RNA, 18 nt, Artificial Sequence
  Synthetic
  misc_feature (12)..(12): n is a, c, g, or u
auggacauuganccuuau

SEQ ID NO: 93470 - RNA, 19 nt, Artificial Sequence
  Synthetic
  misc_feature (13)..(13): n is a, c, g, or u
cauggacauuganccuuau

SEQ ID NO: 93471 - RNA, 20 nt, Artificial Sequence
  Synthetic
  misc_feature (1)..(1): n is a, c, g, or u
  misc_feature (14)..(14): n is a, c, g, or u
ncauggacauuganccuuau

SEQ ID NO: 93472 - RNA, 21 nt, Artificial Sequence
  Synthetic
  misc_feature (2)..(2): n is a, c, g, or u
  misc_feature (15)..(15): n is a, c, g, or u
gncauggacauuganccuuau

SEQ ID NO: 93473 - RNA, 22 nt, Artificial Sequence
  Synthetic
  misc_feature (3)..(3): n is a, c, g, or u
  misc_feature (16)..(16): n is a, c, g, or u
ggncauggacauuganccuuau

SEQ ID NO: 93474 - RNA, 23 nt, Artificial Sequence
  Synthetic
  misc_feature (1)..(1): n is a, c, g, or u
  misc_feature (4)..(4): n is a, c, g, or u
  misc_feature (17)..(17): n is a, c, g, or u
nggncauggacauuganccuuau

SEQ ID NO: 93475 - RNA, 24 nt, Artificial Sequence
  Synthetic
  misc_feature (2)..(2): n is a, c, g, or u
  misc_feature (5)..(5): n is a, c, g, or u
  misc_feature (18)..(18): n is a, c, g, or u
unggncauggacauuganccuuau

SEQ ID NO: 93476 - RNA, 18 nt, Artificial Sequence
  Synthetic
gaccuaguagucaguuau

SEQ ID NO: 93477 - RNA, 19 nt, Artificial Sequence
  Synthetic
  misc_feature (1)..(1): n is a, c, g, or u
ngaccuaguagucaguuau

SEQ ID NO: 93478 - RNA, 20 nt, Artificial Sequence
  Synthetic
  misc_feature (2)..(2): n is a, c, g, or u
gngaccuaguagucaguuau

SEQ ID NO: 93479 - RNA, 21 nt, Artificial Sequence
  Synthetic
  misc_feature (3)..(3): n is a, c, g, or u
agngaccuaguagucaguuau

SEQ ID NO: 93480 - RNA, 22 nt, Artificial Sequence
  Synthetic
  misc_feature (1)..(1): n is a, c, g, or u
  misc_feature (4)..(4): n is a, c, g, or u
nagngaccuaguagucaguuau

SEQ ID NO: 93481 - RNA, 23 nt, Artificial Sequence
  Synthetic
  misc_feature (2)..(2): n is a, c, g, or u
  misc_feature (5)..(5): n is a, c, g, or u
cnagngaccuaguagucaguuau

SEQ ID NO: 93482 - RNA, 24 nt, Artificial Sequence
  Synthetic
  misc_feature (3)..(3): n is a, c, g, or u
  misc_feature (6)..(6): n is a, c, g, or u
ucnagngaccuaguagucaguuau

SEQ ID NO: 93483 - RNA, 18 nt, Artificial Sequence
  Synthetic
augccugcuagguuuuau

SEQ ID NO: 93484 - RNA, 19 nt, Artificial Sequence
  Synthetic
uaugccugcuagguuuuau

SEQ ID NO: 93485 - RNA, 20 nt, Artificial Sequence
  Synthetic
uuaugccugcuagguuuuau

SEQ ID NO: 93486 - RNA, 21 nt, Artificial Sequence
  Synthetic
auuaugccugcuagguuuuau

SEQ ID NO: 93487 - RNA, 22 nt, Artificial Sequence
  Synthetic
  misc_feature (1)..(1): n is a, c, g, or u
nauuaugccugcuagguuuuau

SEQ ID NO: 93488 - RNA, 23 nt, Artificial Sequence
  Synthetic
  misc_feature (2)..(2): n is a, c, g, or u
unauuaugccugcuagguuuuau

SEQ ID NO: 93489 - RNA, 24 nt, Artificial Sequence
  Synthetic
  misc_feature (3)..(3): n is a, c, g, or u
uunauuaugccugcuagguuuuau

SEQ ID NO: 93490 - RNA, 18 nt, Artificial Sequence
  Synthetic
uucacuuucucgccaacu

SEQ ID NO: 93491 - RNA, 19 nt, Artificial Sequence
  Synthetic
uuucacuuucucgccaacu

SEQ ID NO: 93492 - RNA, 20 nt, Artificial Sequence
  Synthetic
cuuucacuuucucgccaacu

SEQ ID NO: 93493 - RNA, 21 nt, Artificial Sequence
  Synthetic
gcuuucacuuucucgccaacu

SEQ ID NO: 93494 - RNA, 22 nt, Artificial Sequence
  Synthetic
ggcuuucacuuucucgccaacu

SEQ ID NO: 93495 - RNA, 23 nt, Artificial Sequence
  Synthetic
aggcuuucacuuucucgccaacu

SEQ ID NO: 93496 - RNA, 24 nt, Artificial Sequence
  Synthetic
caggcuuucacuuucucgccaacu

SEQ ID NO: 93497 - RNA, 18 nt, Artificial Sequence
  Synthetic
gauccauacugcggaacu

SEQ ID NO: 93498 - RNA, 19 nt, Artificial Sequence
  Synthetic
cgauccauacugcggaacu

SEQ ID NO: 93499 - RNA, 20 nt, Artificial Sequence
  Synthetic
ccgauccauacugcggaacu

SEQ ID NO: 93500 - RNA, 18 nt, Artificial Sequence
  Synthetic
cccuaucuuaucaacacu

SEQ ID NO: 93501 - RNA, 19 nt, Artificial Sequence
  Synthetic
ccccuaucuuaucaacacu

SEQ ID NO: 93502 - RNA, 20 nt, Artificial Sequence
  Synthetic
gccccuaucuuaucaacacu

SEQ ID NO: 93503 - RNA, 21 nt, Artificial Sequence
  Synthetic
ugccccuaucuuaucaacacu

SEQ ID NO: 93504 - RNA, 22 nt, Artificial Sequence
  Synthetic
augccccuaucuuaucaacacu

SEQ ID NO: 93505 - RNA, 23 nt, Artificial Sequence
  Synthetic
aaugccccuaucuuaucaacacu

SEQ ID NO: 93506 - RNA, 24 nt, Artificial Sequence
  Synthetic
  misc_feature (1)..(1): n is a, c, g, or u
naaugccccuaucuuaucaacacu

SEQ ID NO: 93507 - RNA, 18 nt, Artificial Sequence
  Synthetic
cacauuucuugucucacu

SEQ ID NO: 93508 - RNA, 19 nt, Artificial Sequence
  Synthetic
ucacauuucuugucucacu

SEQ ID NO: 93509 - RNA, 20 nt, Artificial Sequence
  Synthetic
uucacauuucuugucucacu

SEQ ID NO: 93510 - RNA, 21 nt, Artificial Sequence
  Synthetic
uuucacauuucuugucucacu

SEQ ID NO: 93511 - RNA, 22 nt, Artificial Sequence
  Synthetic
guuucacauuucuugucucacu

SEQ ID NO: 93512 - RNA, 23 nt, Artificial Sequence
  Synthetic
gguuucacauuucuugucucacu

SEQ ID NO: 93513 - RNA, 24 nt, Artificial Sequence
  Synthetic
ugguuucacauuucuugucucacu

SEQ ID NO: 93514 - RNA, 18 nt, Artificial Sequence
  Synthetic
gucuuacauaagaggacu

SEQ ID NO: 93515 - RNA, 19 nt, Artificial Sequence
  Synthetic
ggucuuacauaagaggacu

SEQ ID NO: 93516 - RNA, 20 nt, Artificial Sequence
  Synthetic
aggucuuacauaagaggacu

SEQ ID NO: 93517 - RNA, 21 nt, Artificial Sequence
  Synthetic
aaggucuuacauaagaggacu

SEQ ID NO: 93518 - RNA, 22 nt, Artificial Sequence
  Synthetic
caaggucuuacauaagaggacu

SEQ ID NO: 93519 - RNA, 23 nt, Artificial Sequence
  Synthetic
ccaaggucuuacauaagaggacu

SEQ ID NO: 93520 - RNA, 24 nt, Artificial Sequence
  Synthetic
cccaaggucuuacauaagaggacu

SEQ ID NO: 93521 - RNA, 18 nt, Artificial Sequence
  Synthetic
uguugguucuucuggacu

SEQ ID NO: 93522 - RNA, 19 nt, Artificial Sequence
  Synthetic
uuguugguucuucuggacu

SEQ ID NO: 93523 - RNA, 20 nt, Artificial Sequence
  Synthetic
cuuguugguucuucuggacu

SEQ ID NO: 93524 - RNA, 21 nt, Artificial Sequence
  Synthetic
ucuuguugguucuucuggacu

SEQ ID NO: 93525 - RNA, 22 nt, Artificial Sequence
  Synthetic
uucuuguugguucuucuggacu

SEQ ID NO: 93526 - RNA, 23 nt, Artificial Sequence
  Synthetic
cuucuuguugguucuucuggacu

SEQ ID NO: 93527 - RNA, 24 nt, Artificial Sequence
  Synthetic
ucuucuuguugguucuucuggacu

SEQ ID NO: 93528 - RNA, 18 nt, Artificial Sequence
  Synthetic
guuaguauuccuuggacu

SEQ ID NO: 93529 - RNA, 19 nt, Artificial Sequence
  Synthetic
uguuaguauuccuuggacu

SEQ ID NO: 93530 - RNA, 20 nt, Artificial Sequence
  Synthetic
auguuaguauuccuuggacu

SEQ ID NO: 93531 - RNA, 21 nt, Artificial Sequence
  Synthetic
aauguuaguauuccuuggacu

SEQ ID NO: 93532 - RNA, 22 nt, Artificial Sequence
  Synthetic
caauguuaguauuccuuggacu

SEQ ID NO: 93533 - RNA, 23 nt, Artificial Sequence
  Synthetic
ucaauguuaguauuccuuggacu

SEQ ID NO: 93534 - RNA, 24 nt, Artificial Sequence
  Synthetic
cucaauguuaguauuccuuggacu

SEQ ID NO: 93535 - RNA, 18 nt, Artificial Sequence
  Synthetic
  misc_feature (14)..(14): n is a, c, g, or u
acuguuuguuuaangacu

SEQ ID NO: 93536 - RNA, 19 nt, Artificial Sequence
  Synthetic
  misc_feature (15)..(15): n is a, c, g, or u
gacuguuuguuuaangacu

SEQ ID NO: 93537 - RNA, 20 nt, Artificial Sequence
  Synthetic
  misc_feature (16)..(16): n is a, c, g, or u
agacuguuuguuuaangacu

SEQ ID NO: 93538 - RNA, 21 nt, Artificial Sequence
  Synthetic
  misc_feature (17)..(17): n is a, c, g, or u
aagacuguuuguuuaangacu

SEQ ID NO: 93539 - RNA, 22 nt, Artificial Sequence
  Synthetic
  misc_feature (18)..(18): n is a, c, g, or u
aaagacuguuuguuuaangacu

SEQ ID NO: 93540 - RNA, 23 nt, Artificial Sequence
  Synthetic
  misc_feature (19)..(19): n is a, c, g, or u
caaagacuguuuguuuaangacu

SEQ ID NO: 93541 - RNA, 24 nt, Artificial Sequence
  Synthetic
  misc_feature (20)..(20): n is a, c, g, or u
ucaaagacuguuuguuuaangacu

SEQ ID NO: 93542 - RNA, 18 nt, Artificial Sequence
  Synthetic
ccucugccgauccauacu

SEQ ID NO: 93543 - RNA, 19 nt, Artificial Sequence
  Synthetic
uccucugccgauccauacu

SEQ ID NO: 93544 - RNA, 20 nt, Artificial Sequence
  Synthetic
cuccucugccgauccauacu

SEQ ID NO: 93545 - RNA, 21 nt, Artificial Sequence
  Synthetic
gcuccucugccgauccauacu

SEQ ID NO: 93546 - RNA, 22 nt, Artificial Sequence
  Synthetic
ggcuccucugccgauccauacu

SEQ ID NO: 93547 - RNA, 23 nt, Artificial Sequence
  Synthetic
  misc_feature (1)..(1): n is a, c, g, or u
nggcuccucugccgauccauacu

SEQ ID NO: 93548 - RNA, 24 nt, Artificial Sequence
  Synthetic
  misc_feature (1)..(2): n is a, c, g, or u
nnggcuccucugccgauccauacu

SEQ ID NO: 93549 - RNA, 18 nt, Artificial Sequence
  Synthetic
ccgaccuugaggcauacu

SEQ ID NO: 93550 - RNA, 19 nt, Artificial Sequence
  Synthetic
accgaccuugaggcauacu

SEQ ID NO: 93551 - RNA, 20 nt, Artificial Sequence
  Synthetic
gaccgaccuugaggcauacu

SEQ ID NO: 93552 - RNA, 18 nt, Artificial Sequence
  Synthetic
aucuaguuaaucauuacu

SEQ ID NO: 93553 - RNA, 19 nt, Artificial Sequence
  Synthetic
caucuaguuaaucauuacu

SEQ ID NO: 93554 - RNA, 20 nt, Artificial Sequence
  Synthetic
acaucuaguuaaucauuacu

SEQ ID NO: 93555 - RNA, 21 nt, Artificial Sequence
  Synthetic
aacaucuaguuaaucauuacu

SEQ ID NO: 93556 - RNA, 22 nt, Artificial Sequence
  Synthetic
gaacaucuaguuaaucauuacu

SEQ ID NO: 93557 - RNA, 23 nt, Artificial Sequence
  Synthetic
agaacaucuaguuaaucauuacu

SEQ ID NO: 93558 - RNA, 24 nt, Artificial Sequence
  Synthetic
cagaacaucuaguuaaucauuacu

SEQ ID NO: 93559 - RNA, 18 nt, Artificial Sequence
  Synthetic
uguugcuguaccaaaccu

SEQ ID NO: 93560 - RNA, 19 nt, Artificial Sequence
  Synthetic
cuguugcuguaccaaaccu

SEQ ID NO: 93561 - RNA, 20 nt, Artificial Sequence
  Synthetic
ccuguugcuguaccaaaccu

SEQ ID NO: 93562 - RNA, 21 nt, Artificial Sequence
  Synthetic
uccuguugcuguaccaaaccu

SEQ ID NO: 93563 - RNA, 22 nt, Artificial Sequence
  Synthetic
cuccuguugcuguaccaaaccu

SEQ ID NO: 93564 - RNA, 23 nt, Artificial Sequence
  Synthetic
ccuccuguugcuguaccaaaccu

SEQ ID NO: 93565 - RNA, 24 nt, Artificial Sequence
  Synthetic
cccuccuguugcuguaccaaaccu

SEQ ID NO: 93566 - RNA, 18 nt, Artificial Sequence
  Synthetic
  misc_feature (6)..(6): n is a, c, g, or u
accccncugucuccaccu

SEQ ID NO: 93567 - RNA, 19 nt, Artificial Sequence
  Synthetic
  misc_feature (7)..(7): n is a, c, g, or u
uaccccncugucuccaccu

SEQ ID NO: 93568 - RNA, 20 nt, Artificial Sequence
  Synthetic
  misc_feature (8)..(8): n is a, c, g, or u
cuaccccncugucuccaccu

SEQ ID NO: 93569 - RNA, 21 nt, Artificial Sequence
  Synthetic
  misc_feature (9)..(9): n is a, c, g, or u
ccuaccccncugucuccaccu

SEQ ID NO: 93570 - RNA, 22 nt, Artificial Sequence
  Synthetic
  misc_feature (10)..(10): n is a, c, g, or u
gccuaccccncugucuccaccu

SEQ ID NO: 93571 - RNA, 23 nt, Artificial Sequence
  Synthetic
  misc_feature (11)..(11): n is a, c, g, or u
agccuaccccncugucuccaccu

SEQ ID NO: 93572 - RNA, 24 nt, Artificial Sequence
  Synthetic
  misc_feature (12)..(12): n is a, c, g, or u
cagccuaccccncugucuccaccu

SEQ ID NO: 93573 - RNA, 18 nt, Artificial Sequence
  Synthetic
aaugucaacgaccgaccu

SEQ ID NO: 93574 - RNA, 19 nt, Artificial Sequence
  Synthetic
  misc_feature (1)..(1): n is a, c, g, or u
naaugucaacgaccgaccu

SEQ ID NO: 93575 - RNA, 20 nt, Artificial Sequence
  Synthetic
  misc_feature (2)..(2): n is a, c, g, or u
gnaaugucaacgaccgaccu

SEQ ID NO: 93576 - RNA, 21 nt, Artificial Sequence
  Synthetic
  misc_feature (3)..(3): n is a, c, g, or u
ugnaaugucaacgaccgaccu

SEQ ID NO: 93577 - RNA, 22 nt, Artificial Sequence
  Synthetic
  misc_feature (4)..(4): n is a, c, g, or u
cugnaaugucaacgaccgaccu

SEQ ID NO: 93578 - RNA, 23 nt, Artificial Sequence
  Synthetic
  misc_feature (5)..(5): n is a, c, g, or u
ucugnaaugucaacgaccgaccu

SEQ ID NO: 93579 - RNA, 24 nt, Artificial Sequence
  Synthetic
  misc_feature (6)..(6): n is a, c, g, or u
cucugnaaugucaacgaccgaccu

SEQ ID NO: 93580 - RNA, 18 nt, Artificial Sequence
  Synthetic
gguauacauuuaaacccu

SEQ ID NO: 93581 - RNA, 19 nt, Artificial Sequence
  Synthetic
ggguauacauuuaaacccu

SEQ ID NO: 93582 - RNA, 20 nt, Artificial Sequence
  Synthetic
uggguauacauuuaaacccu

SEQ ID NO: 93583 - RNA, 21 nt, Artificial Sequence
  Synthetic
uuggguauacauuuaaacccu

SEQ ID NO: 93584 - RNA, 22 nt, Artificial Sequence
  Synthetic
uuuggguauacauuuaaacccu

SEQ ID NO: 93585 - RNA, 23 nt, Artificial Sequence
  Synthetic
cuuuggguauacauuuaaacccu

SEQ ID NO: 93586 - RNA, 24 nt, Artificial Sequence
  Synthetic
ucuuuggguauacauuuaaacccu

SEQ ID NO: 93587 - RNA, 18 nt, Artificial Sequence
  Synthetic
cgacgaggcagguccccu

SEQ ID NO: 93588 - RNA, 19 nt, Artificial Sequence
  Synthetic
acgacgaggcagguccccu

SEQ ID NO: 93589 - RNA, 20 nt, Artificial Sequence
  Synthetic
gacgacgaggcagguccccu

SEQ ID NO: 93590 - RNA, 18 nt, Artificial Sequence
  Synthetic
guccuacuguucaagccu

SEQ ID NO: 93591 - RNA, 19 nt, Artificial Sequence
  Synthetic
uguccuacuguucaagccu

SEQ ID NO: 93592 - RNA, 20 nt, Artificial Sequence
  Synthetic
auguccuacuguucaagccu

SEQ ID NO: 93593 - RNA, 21 nt, Artificial Sequence
  Synthetic
cauguccuacuguucaagccu

SEQ ID NO: 93594 - RNA, 22 nt, Artificial Sequence
  Synthetic
ucauguccuacuguucaagccu

SEQ ID NO: 93595 - RNA, 23 nt, Artificial Sequence
  Synthetic
uucauguccuacuguucaagccu

SEQ ID NO: 93596 - RNA, 24 nt, Artificial Sequence
  Synthetic
guucauguccuacuguucaagccu

SEQ ID NO: 93597 - RNA, 18 nt, Artificial Sequence
  Synthetic
accaguuggauccagccu

SEQ ID NO: 93598 - RNA, 19 nt, Artificial Sequence
  Synthetic
caccaguuggauccagccu

SEQ ID NO: 93599 - RNA, 20 nt, Artificial Sequence
  Synthetic
ccaccaguuggauccagccu

SEQ ID NO: 93600 - RNA, 21 nt, Artificial Sequence
  Synthetic
accaccaguuggauccagccu

SEQ ID NO: 93601 - RNA, 22 nt, Artificial Sequence
  Synthetic
gaccaccaguuggauccagccu

SEQ ID NO: 93602 - RNA, 23 nt, Artificial Sequence
  Synthetic
cgaccaccaguuggauccagccu

SEQ ID NO: 93603 - RNA, 24 nt, Artificial Sequence
  Synthetic
ccgaccaccaguuggauccagccu

SEQ ID NO: 93604 - RNA, 18 nt, Artificial Sequence
  Synthetic
agaagaacucccucgccu

SEQ ID NO: 93605 - RNA, 19 nt, Artificial Sequence
  Synthetic
aagaagaacucccucgccu

SEQ ID NO: 93606 - RNA, 20 nt, Artificial Sequence
  Synthetic
gaagaagaacucccucgccu

SEQ ID NO: 93607 - RNA, 21 nt, Artificial Sequence
  Synthetic
agaagaagaacucccucgccu

SEQ ID NO: 93608 - RNA, 22 nt, Artificial Sequence
  Synthetic
uagaagaagaacucccucgccu

SEQ ID NO: 93609 - RNA, 23 nt, Artificial Sequence
  Synthetic
cuagaagaagaacucccucgccu

SEQ ID NO: 93610 - RNA, 24 nt, Artificial Sequence
  Synthetic
ccuagaagaagaacucccucgccu

SEQ ID NO: 93611 - RNA, 18 nt, Artificial Sequence
  Synthetic
cccaccgcacggaggccu

SEQ ID NO: 93612 - RNA, 19 nt, Artificial Sequence
  Synthetic
ccccaccgcacggaggccu

SEQ ID NO: 93613 - RNA, 20 nt, Artificial Sequence
  Synthetic
accccaccgcacggaggccu

SEQ ID NO: 93614 - RNA, 21 nt, Artificial Sequence
  Synthetic
caccccaccgcacggaggccu

SEQ ID NO: 93615 - RNA, 22 nt, Artificial Sequence
  Synthetic
ucaccccaccgcacggaggccu

SEQ ID NO: 93616 - RNA, 23 nt, Artificial Sequence
  Synthetic
uucaccccaccgcacggaggccu

SEQ ID NO: 93617 - RNA, 24 nt, Artificial Sequence
  Synthetic
  misc_feature (1)..(1): n is a, c, g, or u
nuucaccccaccgcacggaggccu

SEQ ID NO: 93618 - RNA, 18 nt, Artificial Sequence
  Synthetic
  misc_feature (1)..(1): n is a, c, g, or u
  misc_feature (9)..(9): n is a, c, g, or u
nugcaauunauuaugccu

SEQ ID NO: 93619 - RNA, 19 nt, Artificial Sequence
  Synthetic
  misc_feature (2)..(2): n is a, c, g, or u
  misc_feature (10)..(10): n is a, c, g, or u
anugcaauunauuaugccu

SEQ ID NO: 93620 - RNA, 20 nt, Artificial Sequence
  Synthetic
  misc_feature (3)..(3): n is a, c, g, or u
  misc_feature (11)..(11): n is a, c, g, or u
ganugcaauunauuaugccu

SEQ ID NO: 93621 - RNA, 21 nt, Artificial Sequence
  Synthetic
  misc_feature (4)..(4): n is a, c, g, or u
  misc_feature (12)..(12): n is a, c, g, or u
aganugcaauunauuaugccu

SEQ ID NO: 93622 - RNA, 22 nt, Artificial Sequence
  Synthetic
  misc_feature (5)..(5): n is a, c, g, or u
  misc_feature (13)..(13): n is a, c, g, or u
aaganugcaauunauuaugccu

SEQ ID NO: 93623 - RNA, 23 nt, Artificial Sequence
  Synthetic
  misc_feature (6)..(6): n is a, c, g, or u
  misc_feature (14)..(14): n is a, c, g, or u
gaaganugcaauunauuaugccu

SEQ ID NO: 93624 - RNA, 24 nt, Artificial Sequence
  Synthetic
  misc_feature (1)..(1): n is a, c, g, or u
  misc_feature (7)..(7): n is a, c, g, or u
  misc_feature (15)..(15): n is a, c, g, or u
ngaaganugcaauunauuaugccu

SEQ ID NO: 93625 - RNA, 18 nt, Artificial Sequence
  Synthetic
uuacucucguuuuugccu

SEQ ID NO: 93626 - RNA, 19 nt, Artificial Sequence
  Synthetic
guuacucucguuuuugccu

SEQ ID NO: 93627 - RNA, 20 nt, Artificial Sequence
  Synthetic
aguuacucucguuuuugccu

SEQ ID NO: 93628 - RNA, 21 nt, Artificial Sequence
  Synthetic
gaguuacucucguuuuugccu

SEQ ID NO: 93629 - RNA, 22 nt, Artificial Sequence
  Synthetic
ggaguuacucucguuuuugccu

SEQ ID NO: 93630 - RNA, 23 nt, Artificial Sequence
  Synthetic
uggaguuacucucguuuuugccu

SEQ ID NO: 93631 - RNA, 24 nt, Artificial Sequence
  Synthetic
guggaguuacucucguuuuugccu

SEQ ID NO: 93632 - RNA, 18 nt, Artificial Sequence
  Synthetic
  misc_feature (2)..(2): n is a, c, g, or u
  misc_feature (15)..(15): n is a, c, g, or u
gncauggacauuganccu

SEQ ID NO: 93633 - RNA, 19 nt, Artificial Sequence
  Synthetic
  misc_feature (3)..(3): n is a, c, g, or u
  misc_feature (16)..(16): n is a, c, g, or u
ggncauggacauuganccu

SEQ ID NO: 93634 - RNA, 20 nt, Artificial Sequence
  Synthetic
  misc_feature (1)..(1): n is a, c, g, or u
  misc_feature (4)..(4): n is a, c, g, or u
  misc_feature (17)..(17): n is a, c, g, or u
nggncauggacauuganccu

SEQ ID NO: 93635 - RNA, 21 nt, Artificial Sequence
  Synthetic
  misc_feature (2)..(2): n is a, c, g, or u
  misc_feature (5)..(5): n is a, c, g, or u
  misc_feature (18)..(18): n is a, c, g, or u
unggncauggacauuganccu

SEQ ID NO: 93636 - RNA, 22 nt, Artificial Sequence
  Synthetic
  misc_feature (3)..(3): n is a, c, g, or u
  misc_feature (6)..(6): n is a, c, g, or u
  misc_feature (19)..(19): n is a, c, g, or u
uunggncauggacauuganccu

SEQ ID NO: 93637 - RNA, 23 nt, Artificial Sequence
  Synthetic
  misc_feature (4)..(4): n is a, c, g, or u
  misc_feature (7)..(7): n is a, c, g, or u
  misc_feature (20)..(20): n is a, c, g, or u
uuunggncauggacauuganccu

SEQ ID NO: 93638 - RNA, 24 nt, Artificial Sequence
  Synthetic
  misc_feature (5)..(5): n is a, c, g, or u
  misc_feature (8)..(8): n is a, c, g, or u
  misc_feature (21)..(21): n is a, c, g, or u
cuuunggncauggacauuganccu

SEQ ID NO: 93639 - RNA, 18 nt, Artificial Sequence
  Synthetic
cuuuccaccagcaauccu

SEQ ID NO: 93640 - RNA, 19 nt, Artificial Sequence
  Synthetic
ucuuuccaccagcaauccu

SEQ ID NO: 93641 - RNA, 20 nt, Artificial Sequence
  Synthetic
aucuuuccaccagcaauccu

SEQ ID NO: 93642 - RNA, 21 nt, Artificial Sequence
  Synthetic
aaucuuuccaccagcaauccu

SEQ ID NO: 93643 - RNA, 22 nt, Artificial Sequence
  Synthetic
gaaucuuuccaccagcaauccu

SEQ ID NO: 93644 - RNA, 23 nt, Artificial Sequence
  Synthetic
agaaucuuuccaccagcaauccu

SEQ ID NO: 93645 - RNA, 24 nt, Artificial Sequence
  Synthetic
cagaaucuuuccaccagcaauccu

SEQ ID NO: 93646 - RNA, 18 nt, Artificial Sequence
  Synthetic
ggcuuucggaaaauuccu

SEQ ID NO: 93647 - RNA, 19 nt, Artificial Sequence
  Synthetic
gggcuuucggaaaauuccu

SEQ ID NO: 93648 - RNA, 20 nt, Artificial Sequence
  Synthetic
ugggcuuucggaaaauuccu

SEQ ID NO: 93649 - RNA, 21 nt, Artificial Sequence
  Synthetic
  misc_feature (1)..(1): n is a, c, g, or u
nugggcuuucggaaaauuccu

SEQ ID NO: 93650 - RNA, 22 nt, Artificial Sequence
  Synthetic
  misc_feature (2)..(2): n is a, c, g, or u
cnugggcuuucggaaaauuccu

SEQ ID NO: 93651 - RNA, 23 nt, Artificial Sequence
  Synthetic
  misc_feature (3)..(3): n is a, c, g, or u
ucnugggcuuucggaaaauuccu

SEQ ID NO: 93652 - RNA, 24 nt, Artificial Sequence
  Synthetic
  misc_feature (4)..(4): n is a, c, g, or u
aucnugggcuuucggaaaauuccu

SEQ ID NO: 93653 - RNA, 18 nt, Artificial Sequence
  Synthetic
uguuuuagaaaacuuccu

SEQ ID NO: 93654 - RNA, 19 nt, Artificial Sequence
  Synthetic
auguuuuagaaaacuuccu

SEQ ID NO: 93655 - RNA, 20 nt, Artificial Sequence
  Synthetic
aauguuuuagaaaacuuccu

SEQ ID NO: 93656 - RNA, 21 nt, Artificial Sequence
  Synthetic
gaauguuuuagaaaacuuccu

SEQ ID NO: 93657 - RNA, 22 nt, Artificial Sequence
  Synthetic
agaauguuuuagaaaacuuccu

SEQ ID NO: 93658 - RNA, 23 nt, Artificial Sequence
  Synthetic
aagaauguuuuagaaaacuuccu

SEQ ID NO: 93659 - RNA, 24 nt, Artificial Sequence
  Synthetic
aaagaauguuuuagaaaacuuccu

SEQ ID NO: 93660 - RNA, 18 nt, Artificial Sequence
  Synthetic
auucgcacuccuccagcu

SEQ ID NO: 93661 - RNA, 19 nt, Artificial Sequence
  Synthetic
gauucgcacuccuccagcu

SEQ ID NO: 93662 - RNA, 20 nt, Artificial Sequence
  Synthetic
ggauucgcacuccuccagcu

SEQ ID NO: 93663 - RNA, 21 nt, Artificial Sequence
  Synthetic
uggauucgcacuccuccagcu

SEQ ID NO: 93664 - RNA, 22 nt, Artificial Sequence
  Synthetic
guggauucgcacuccuccagcu

SEQ ID NO: 93665 - RNA, 23 nt, Artificial Sequence
  Synthetic
uguggauucgcacuccuccagcu

SEQ ID NO: 93666 - RNA, 24 nt, Artificial Sequence
  Synthetic
guguggauucgcacuccuccagcu

SEQ ID NO: 93667 - RNA, 18 nt, Artificial Sequence
  Synthetic
  misc_feature (14)..(14): n is a, c, g, or u
acccuucucggggncgcu

SEQ ID NO: 93668 - RNA, 19 nt, Artificial Sequence
  Synthetic
  misc_feature (15)..(15): n is a, c, g, or u
gacccuucucggggncgcu

SEQ ID NO: 93669 - RNA, 20 nt, Artificial Sequence
  Synthetic
  misc_feature (16)..(16): n is a, c, g, or u
cgacccuucucggggncgcu

SEQ ID NO: 93670 - RNA, 21 nt, Artificial Sequence
  Synthetic
  misc_feature (17)..(17): n is a, c, g, or u
acgacccuucucggggncgcu

SEQ ID NO: 93671 - RNA, 22 nt, Artificial Sequence
  Synthetic
  misc_feature (18)..(18): n is a, c, g, or u
gacgacccuucucggggncgcu

SEQ ID NO: 93672 - RNA, 23 nt, Artificial Sequence
  Synthetic
  misc_feature (19)..(19): n is a, c, g, or u
ggacgacccuucucggggncgcu

SEQ ID NO: 93673 - RNA, 24 nt, Artificial Sequence
  Synthetic
  misc_feature (20)..(20): n is a, c, g, or u
cggacgacccuucucggggncgcu

SEQ ID NO: 93674 - RNA, 18 nt, Artificial Sequence
  Synthetic
ggguggagcccucaggcu

SEQ ID NO: 93675 - RNA, 19 nt, Artificial Sequence
  Synthetic
gggguggagcccucaggcu

SEQ ID NO: 93676 - RNA, 20 nt, Artificial Sequence
  Synthetic
ugggguggagcccucaggcu

SEQ ID NO: 93677 - RNA, 21 nt, Artificial Sequence
  Synthetic
uugggguggagcccucaggcu

SEQ ID NO: 93678 - RNA, 22 nt, Artificial Sequence
  Synthetic
uuugggguggagcccucaggcu

SEQ ID NO: 93679 - RNA, 23 nt, Artificial Sequence
  Synthetic
uuuugggguggagcccucaggcu

SEQ ID NO: 93680 - RNA, 24 nt, Artificial Sequence
  Synthetic
cuuuugggguggagcccucaggcu

SEQ ID NO: 93681 - RNA, 18 nt, Artificial Sequence
  Synthetic
  misc_feature (2)..(2): n is a, c, g, or u
  misc_feature (9)..(9): n is a, c, g, or u
unuuuguanuaggaggcu

SEQ ID NO: 93682 - RNA, 19 nt, Artificial Sequence
  Synthetic
  misc_feature (1)..(1): n is a, c, g, or u
  misc_feature (3)..(3): n is a, c, g, or u
  misc_feature (10)..(10): n is a, c, g, or u
nunuuuguanuaggaggcu

SEQ ID NO: 93683 - RNA, 20 nt, Artificial Sequence
  Synthetic
  misc_feature (2)..(2): n is a, c, g, or u
  misc_feature (4)..(4): n is a, c, g, or u
  misc_feature (11)..(11): n is a, c, g, or u
gnunuuuguanuaggaggcu

SEQ ID NO: 93684 - RNA, 21 nt, Artificial Sequence
  Synthetic
  misc_feature (1)..(1): n is a, c, g, or u
  misc_feature (3)..(3): n is a, c, g, or u
  misc_feature (5)..(5): n is a, c, g, or u
  misc_feature (12)..(12): n is a, c, g, or u
ngnunuuuguanuaggaggcu

SEQ ID NO: 93685 - RNA, 22 nt, Artificial Sequence
  Synthetic
  misc_feature (2)..(2): n is a, c, g, or u
  misc_feature (4)..(4): n is a, c, g, or u
  misc_feature (6)..(6): n is a, c, g, or u
  misc_feature (13)..(13): n is a, c, g, or u
angnunuuuguanuaggaggcu

SEQ ID NO: 93686 - RNA, 23 nt, Artificial Sequence
  Synthetic
  misc_feature (3)..(3): n is a, c, g, or u
  misc_feature (5)..(5): n is a, c, g, or u
  misc_feature (7)..(7): n is a, c, g, or u
  misc_feature (14)..(14): n is a, c, g, or u
aangnunuuuguanuaggaggcu

SEQ ID NO: 93687 - RNA, 24 nt, Artificial Sequence
  Synthetic
  misc_feature (4)..(4): n is a, c, g, or u
  misc_feature (6)..(6): n is a, c, g, or u
  misc_feature (8)..(8): n is a, c, g, or u
  misc_feature (15)..(15): n is a, c, g, or u
uaangnunuuuguanuaggaggcu

SEQ ID NO: 93688 - RNA, 18 nt, Artificial Sequence
  Synthetic
  misc_feature (12)..(12): n is a, c, g, or u
aucccaucaucnugggcu

SEQ ID NO: 93689 - RNA, 19 nt, Artificial Sequence
  Synthetic
  misc_feature (13)..(13): n is a, c, g, or u
caucccaucaucnugggcu

SEQ ID NO: 93690 - RNA, 20 nt, Artificial Sequence
  Synthetic
  misc_feature (14)..(14): n is a, c, g, or u
ccaucccaucaucnugggcu

SEQ ID NO: 93691 - RNA, 21 nt, Artificial Sequence
  Synthetic
  misc_feature (15)..(15): n is a, c, g, or u
cccaucccaucaucnugggcu

SEQ ID NO: 93692 - RNA, 22 nt, Artificial Sequence
  Synthetic
  misc_feature (16)..(16): n is a, c, g, or u
ucccaucccaucaucnugggcu

SEQ ID NO: 93693 - RNA, 23 nt, Artificial Sequence
  Synthetic
  misc_feature (17)..(17): n is a, c, g, or u
uucccaucccaucaucnugggcu

SEQ ID NO: 93694 - RNA, 24 nt, Artificial Sequence
  Synthetic
  misc_feature (18)..(18): n is a, c, g, or u
auucccaucccaucaucnugggcu

SEQ ID NO: 93695 - RNA, 18 nt, Artificial Sequence
  Synthetic
uacaucguuuccauggcu

SEQ ID NO: 93696 - RNA, 19 nt, Artificial Sequence
  Synthetic
auacaucguuuccauggcu

SEQ ID NO: 93697 - RNA, 20 nt, Artificial Sequence
  Synthetic
uauacaucguuuccauggcu

SEQ ID NO: 93698 - RNA, 21 nt, Artificial Sequence
  Synthetic
auauacaucguuuccauggcu

SEQ ID NO: 93699 - RNA, 22 nt, Artificial Sequence
  Synthetic
aauauacaucguuuccauggcu

SEQ ID NO: 93700 - RNA, 23 nt, Artificial Sequence
  Synthetic
aaauauacaucguuuccauggcu

SEQ ID NO: 93701 - RNA, 24 nt, Artificial Sequence
  Synthetic
caaauauacaucguuuccauggcu

SEQ ID NO: 93702 - RNA, 18 nt, Artificial Sequence
  Synthetic
gcugugccuuggguggcu

SEQ ID NO: 93703 - RNA, 19 nt, Artificial Sequence
  Synthetic
agcugugccuuggguggcu

SEQ ID NO: 93704 - RNA, 20 nt, Artificial Sequence
  Synthetic
aagcugugccuuggguggcu

SEQ ID NO: 93705 - RNA, 21 nt, Artificial Sequence
  Synthetic
caagcugugccuuggguggcu

SEQ ID NO: 93706 - RNA, 22 nt, Artificial Sequence
  Synthetic
ccaagcugugccuuggguggcu

SEQ ID NO: 93707 - RNA, 23 nt, Artificial Sequence
  Synthetic
uccaagcugugccuuggguggcu

SEQ ID NO: 93708 - RNA, 24 nt, Artificial Sequence
  Synthetic
cuccaagcugugccuuggguggcu

SEQ ID NO: 93709 - RNA, 18 nt, Artificial Sequence
  Synthetic
ggccuguauuucccugcu

SEQ ID NO: 93710 - RNA, 19 nt, Artificial Sequence
  Synthetic
aggccuguauuucccugcu

SEQ ID NO: 93711 - RNA, 20 nt, Artificial Sequence
  Synthetic
gaggccuguauuucccugcu

SEQ ID NO: 93712 - RNA, 21 nt, Artificial Sequence
  Synthetic
agaggccuguauuucccugcu

SEQ ID NO: 93713 - RNA, 22 nt, Artificial Sequence
  Synthetic
gagaggccuguauuucccugcu

SEQ ID NO: 93714 - RNA, 23 nt, Artificial Sequence
  Synthetic
ugagaggccuguauuucccugcu

SEQ ID NO: 93715 - RNA, 24 nt, Artificial Sequence
  Synthetic
gugagaggccuguauuucccugcu

SEQ ID NO: 93716 - RNA, 18 nt, Artificial Sequence
  Synthetic
uggcugcuaggcugugcu

SEQ ID NO: 93717 - RNA, 19 nt, Artificial Sequence
  Synthetic
auggcugcuaggcugugcu

SEQ ID NO: 93718 - RNA, 20 nt, Artificial Sequence
  Synthetic
cauggcugcuaggcugugcu

SEQ ID NO: 93719 - RNA, 21 nt, Artificial Sequence
  Synthetic
ccauggcugcuaggcugugcu

SEQ ID NO: 93720 - RNA, 22 nt, Artificial Sequence
  Synthetic
uccauggcugcuaggcugugcu

SEQ ID NO: 93721 - RNA, 23 nt, Artificial Sequence
  Synthetic
uuccauggcugcuaggcugugcu

SEQ ID NO: 93722 - RNA, 24 nt, Artificial Sequence
  Synthetic
uuuccauggcugcuaggcugugcu

SEQ ID NO: 93723 - RNA, 18 nt, Artificial Sequence
  Synthetic
  misc_feature (11)..(11): n is a, c, g, or u
  misc_feature (14)..(14): n is a, c, g, or u
ggcaagcaauncunugcu

SEQ ID NO: 93724 - RNA, 19 nt, Artificial Sequence
  Synthetic
  misc_feature (12)..(12): n is a, c, g, or u
  misc_feature (15)..(15): n is a, c, g, or u
aggcaagcaauncunugcu

SEQ ID NO: 93725 - RNA, 20 nt, Artificial Sequence
  Synthetic
  misc_feature (13)..(13): n is a, c, g, or u
  misc_feature (16)..(16): n is a, c, g, or u
caggcaagcaauncunugcu

SEQ ID NO: 93726 - RNA, 21 nt, Artificial Sequence
  Synthetic
  misc_feature (14)..(14): n is a, c, g, or u
  misc_feature (17)..(17): n is a, c, g, or u
ucaggcaagcaauncunugcu

SEQ ID NO: 93727 - RNA, 22 nt, Artificial Sequence
  Synthetic
  misc_feature (15)..(15): n is a, c, g, or u
  misc_feature (18)..(18): n is a, c, g, or u
cucaggcaagcaauncunugcu

SEQ ID NO: 93728 - RNA, 23 nt, Artificial Sequence
  Synthetic
  misc_feature (16)..(16): n is a, c, g, or u
  misc_feature (19)..(19): n is a, c, g, or u
acucaggcaagcaauncunugcu

SEQ ID NO: 93729 - RNA, 24 nt, Artificial Sequence
  Synthetic
  misc_feature (17)..(17): n is a, c, g, or u
  misc_feature (20)..(20): n is a, c, g, or u
cacucaggcaagcaauncunugcu

SEQ ID NO: 93730 - RNA, 18 nt, Artificial Sequence
  Synthetic
cuagccgcuuguuuugcu

SEQ ID NO: 93731 - RNA, 19 nt, Artificial Sequence
  Synthetic
ccuagccgcuuguuuugcu

SEQ ID NO: 93732 - RNA, 20 nt, Artificial Sequence
  Synthetic
uccuagccgcuuguuuugcu

SEQ ID NO: 93733 - RNA, 21 nt, Artificial Sequence
  Synthetic
cuccuagccgcuuguuuugcu

SEQ ID NO: 93734 - RNA, 22 nt, Artificial Sequence
  Synthetic
acuccuagccgcuuguuuugcu

SEQ ID NO: 93735 - RNA, 23 nt, Artificial Sequence
  Synthetic
aacuccuagccgcuuguuuugcu

SEQ ID NO: 93736 - RNA, 24 nt, Artificial Sequence
  Synthetic
gaacuccuagccgcuuguuuugcu

SEQ ID NO: 93737 - RNA, 18 nt, Artificial Sequence
  Synthetic
  misc_feature (1)..(1): n is a, c, g, or u
  misc_feature (4)..(4): n is a, c, g, or u
  misc_feature (16)..(16): n is a, c, g, or u
ncunugcuggggggancu

SEQ ID NO: 93738 - RNA, 19 nt, Artificial Sequence
  Synthetic
  misc_feature (2)..(2): n is a, c, g, or u
  misc_feature (5)..(5): n is a, c, g, or u
  misc_feature (17)..(17): n is a, c, g, or u
uncunugcuggggggancu

SEQ ID NO: 93739 - RNA, 20 nt, Artificial Sequence
  Synthetic
  misc_feature (3)..(3): n is a, c, g, or u
  misc_feature (6)..(6): n is a, c, g, or u
  misc_feature (18)..(18): n is a, c, g, or u
auncunugcuggggggancu

SEQ ID NO: 93740 - RNA, 21 nt, Artificial Sequence
  Synthetic
  misc_feature (4)..(4): n is a, c, g, or u
  misc_feature (7)..(7): n is a, c, g, or u
  misc_feature (19)..(19): n is a, c, g, or u
aauncunugcuggggggancu

SEQ ID NO: 93741 - RNA, 22 nt, Artificial Sequence
  Synthetic
  misc_feature (5)..(5): n is a, c, g, or u
  misc_feature (8)..(8): n is a, c, g, or u
  misc_feature (20)..(20): n is a, c, g, or u
caauncunugcuggggggancu

SEQ ID NO: 93742 - RNA, 23 nt, Artificial Sequence
  Synthetic
  misc_feature (6)..(6): n is a, c, g, or u
  misc_feature (9)..(9): n is a, c, g, or u
  misc_feature (21)..(21): n is a, c, g, or u
gcaauncunugcuggggggancu

SEQ ID NO: 93743 - RNA, 24 nt, Artificial Sequence
  Synthetic
  misc_feature (7)..(7): n is a, c, g, or u
  misc_feature (10)..(10): n is a, c, g, or u
  misc_feature (22)..(22): n is a, c, g, or u
agcaauncunugcuggggggancu

SEQ ID NO: 93744 - RNA, 18 nt, Artificial Sequence
  Synthetic
  misc_feature (16)..(16): n is a, c, g, or u
aaagaauuuggagcuncu

SEQ ID NO: 93745 - RNA, 19 nt, Artificial Sequence
  Synthetic
  misc_feature (17)..(17): n is a, c, g, or u
uaaagaauuuggagcuncu

SEQ ID NO: 93746 - RNA, 20 nt, Artificial Sequence
  Synthetic
  misc_feature (18)..(18): n is a, c, g, or u
auaaagaauuuggagcuncu

SEQ ID NO: 93747 - RNA, 21 nt, Artificial Sequence
  Synthetic
  misc_feature (19)..(19): n is a, c, g, or u
uauaaagaauuuggagcuncu

SEQ ID NO: 93748 - RNA, 22 nt, Artificial Sequence
  Synthetic
  misc_feature (20)..(20): n is a, c, g, or u
uuauaaagaauuuggagcuncu

SEQ ID NO: 93749 - RNA, 23 nt, Artificial Sequence
  Synthetic
  misc_feature (21)..(21): n is a, c, g, or u
cuuauaaagaauuuggagcuncu

SEQ ID NO: 93750 - RNA, 24 nt, Artificial Sequence
  Synthetic
  misc_feature (22)..(22): n is a, c, g, or u
ccuuauaaagaauuuggagcuncu

SEQ ID NO: 93751 - RNA, 18 nt, Artificial Sequence
  Synthetic
cgcagaagaucucaaucu

SEQ ID NO: 93752 - RNA, 19 nt, Artificial Sequence
  Synthetic
ucgcagaagaucucaaucu

SEQ ID NO: 93753 - RNA, 20 nt, Artificial Sequence
  Synthetic
gucgcagaagaucucaaucu

SEQ ID NO: 93754 - RNA, 18 nt, Artificial Sequence
  Synthetic
gucugugccuucucaucu

SEQ ID NO: 93755 - RNA, 19 nt, Artificial Sequence
  Synthetic
cgucugugccuucucaucu

SEQ ID NO: 93756 - RNA, 20 nt, Artificial Sequence
  Synthetic
ccgucugugccuucucaucu

SEQ ID NO: 93757 - RNA, 21 nt, Artificial Sequence
  Synthetic
cccgucugugccuucucaucu

SEQ ID NO: 93758 - RNA, 22 nt, Artificial Sequence
  Synthetic
ccccgucugugccuucucaucu

SEQ ID NO: 93759 - RNA, 23 nt, Artificial Sequence
  Synthetic
uccccgucugugccuucucaucu

SEQ ID NO: 93760 - RNA, 24 nt, Artificial Sequence
  Synthetic
cuccccgucugugccuucucaucu

SEQ ID NO: 93761 - RNA, 18 nt, Artificial Sequence
  Synthetic
aaccuuccaccaaacucu

SEQ ID NO: 93762 - RNA, 19 nt, Artificial Sequence
  Synthetic
caaccuuccaccaaacucu

SEQ ID NO: 93763 - RNA, 20 nt, Artificial Sequence
  Synthetic
acaaccuuccaccaaacucu

SEQ ID NO: 93764 - RNA, 21 nt, Artificial Sequence
  Synthetic
cacaaccuuccaccaaacucu

SEQ ID NO: 93765 - RNA, 22 nt, Artificial Sequence
  Synthetic
ccacaaccuuccaccaaacucu

SEQ ID NO: 93766 - RNA, 23 nt, Artificial Sequence
  Synthetic
uccacaaccuuccaccaaacucu

SEQ ID NO: 93767 - RNA, 24 nt, Artificial Sequence
  Synthetic
cuccacaaccuuccaccaaacucu

SEQ ID NO: 93768 - RNA, 18 nt, Artificial Sequence
  Synthetic
  misc_feature (4)..(4): n is a, c, g, or u
acanuauuuacacacucu

SEQ ID NO: 93769 - RNA, 19 nt, Artificial Sequence
  Synthetic
  misc_feature (5)..(5): n is a, c, g, or u
gacanuauuuacacacucu

SEQ ID NO: 93770 - RNA, 20 nt, Artificial Sequence
  Synthetic
  misc_feature (6)..(6): n is a, c, g, or u
agacanuauuuacacacucu

SEQ ID NO: 93771 - RNA, 21 nt, Artificial Sequence
  Synthetic
  misc_feature (1)..(1): n is a, c, g, or u
  misc_feature (7)..(7): n is a, c, g, or u
nagacanuauuuacacacucu

SEQ ID NO: 93772 - RNA, 22 nt, Artificial Sequence
  Synthetic
  misc_feature (2)..(2): n is a, c, g, or u
  misc_feature (8)..(8): n is a, c, g, or u
cnagacanuauuuacacacucu

SEQ ID NO: 93773 - RNA, 23 nt, Artificial Sequence
  Synthetic
  misc_feature (3)..(3): n is a, c, g, or u
  misc_feature (9)..(9): n is a, c, g, or u
acnagacanuauuuacacacucu

SEQ ID NO: 93774 - RNA, 24 nt, Artificial Sequence
  Synthetic
  misc_feature (4)..(4): n is a, c, g, or u
  misc_feature (10)..(10): n is a, c, g, or u
aacnagacanuauuuacacacucu

SEQ ID NO: 93775 - RNA, 18 nt, Artificial Sequence
  Synthetic
  misc_feature (6)..(6): n is a, c, g, or u
cgggangccuuagagucu

SEQ ID NO: 93776 - RNA, 19 nt, Artificial Sequence
  Synthetic
  misc_feature (7)..(7): n is a, c, g, or u
ucgggangccuuagagucu

SEQ ID NO: 93777 - RNA, 20 nt, Artificial Sequence
  Synthetic
  misc_feature (8)..(8): n is a, c, g, or u
aucgggangccuuagagucu

SEQ ID NO: 93778 - RNA, 21 nt, Artificial Sequence
  Synthetic
  misc_feature (9)..(9): n is a, c, g, or u
uaucgggangccuuagagucu

SEQ ID NO: 93779 - RNA, 22 nt, Artificial Sequence
  Synthetic
  misc_feature (1)..(1): n is a, c, g, or u
  misc_feature (10)..(10): n is a, c, g, or u
nuaucgggangccuuagagucu

SEQ ID NO: 93780 - RNA, 23 nt, Artificial Sequence
  Synthetic
  misc_feature (2)..(2): n is a, c, g, or u
  misc_feature (11)..(11): n is a, c, g, or u
unuaucgggangccuuagagucu

SEQ ID NO: 93781 - RNA, 24 nt, Artificial Sequence
  Synthetic
  misc_feature (3)..(3): n is a, c, g, or u
  misc_feature (12)..(12): n is a, c, g, or u
cunuaucgggangccuuagagucu

SEQ ID NO: 93782 - RNA, 18 nt, Artificial Sequence
  Synthetic
  misc_feature (7)..(7): n is a, c, g, or u
ucaacgnauugugggucu

SEQ ID NO: 93783 - RNA, 19 nt, Artificial Sequence
  Synthetic
  misc_feature (8)..(8): n is a, c, g, or u
gucaacgnauugugggucu

SEQ ID NO: 93784 - RNA, 20 nt, Artificial Sequence
  Synthetic
  misc_feature (9)..(9): n is a, c, g, or u
ugucaacgnauugugggucu

SEQ ID NO: 93785 - RNA, 21 nt, Artificial Sequence
  Synthetic
  misc_feature (1)..(1): n is a, c, g, or u
  misc_feature (10)..(10): n is a, c, g, or u
nugucaacgnauugugggucu

SEQ ID NO: 93786 - RNA, 22 nt, Artificial Sequence
  Synthetic
  misc_feature (2)..(2): n is a, c, g, or u
  misc_feature (11)..(11): n is a, c, g, or u
unugucaacgnauugugggucu

SEQ ID NO: 93787 - RNA, 23 nt, Artificial Sequence
  Synthetic
  misc_feature (3)..(3): n is a, c, g, or u
  misc_feature (12)..(12): n is a, c, g, or u
gunugucaacgnauugugggucu

SEQ ID NO: 93788 - RNA, 24 nt, Artificial Sequence
  Synthetic
  misc_feature (4)..(4): n is a, c, g, or u
  misc_feature (13)..(13): n is a, c, g, or u
agunugucaacgnauugugggucu

SEQ ID NO: 93789 - RNA, 18 nt, Artificial Sequence
  Synthetic
  misc_feature (1)..(1): n is a, c, g, or u
nuagaguauuuggugucu

SEQ ID NO: 93790 - RNA, 19 nt, Artificial Sequence
  Synthetic
  misc_feature (1)..(2): n is a, c, g, or u
nnuagaguauuuggugucu

SEQ ID NO: 93791 - RNA, 20 nt, Artificial Sequence
  Synthetic
  misc_feature (2)..(3): n is a, c, g, or u
unnuagaguauuuggugucu

SEQ ID NO: 93792 - RNA, 21 nt, Artificial Sequence
  Synthetic
  misc_feature (3)..(4): n is a, c, g, or u
gunnuagaguauuuggugucu

SEQ ID NO: 93793 - RNA, 22 nt, Artificial Sequence
  Synthetic
  misc_feature (1)..(1): n is a, c, g, or u
  misc_feature (4)..(5): n is a, c, g, or u
ngunnuagaguauuuggugucu

SEQ ID NO: 93794 - RNA, 23 nt, Artificial Sequence
  Synthetic
  misc_feature (2)..(2): n is a, c, g, or u
  misc_feature (5)..(6): n is a, c, g, or u
cngunnuagaguauuuggugucu

SEQ ID NO: 93795 - RNA, 24 nt, Artificial Sequence
  Synthetic
  misc_feature (3)..(3): n is a, c, g, or u
  misc_feature (6)..(7): n is a, c, g, or u
acngunnuagaguauuuggugucu

SEQ ID NO: 93796 - RNA, 18 nt, Artificial Sequence
  Synthetic
ugugggucaccauauucu

SEQ ID NO: 93797 - RNA, 19 nt, Artificial Sequence
  Synthetic
uugugggucaccauauucu

SEQ ID NO: 93798 - RNA, 20 nt, Artificial Sequence
  Synthetic
uuugugggucaccauauucu

SEQ ID NO: 93799 - RNA, 21 nt, Artificial Sequence
  Synthetic
uuuugugggucaccauauucu

SEQ ID NO: 93800 - RNA, 22 nt, Artificial Sequence
  Synthetic
auuuugugggucaccauauucu

SEQ ID NO: 93801 - RNA, 23 nt, Artificial Sequence
  Synthetic
cauuuugugggucaccauauucu

SEQ ID NO: 93802 - RNA, 24 nt, Artificial Sequence
  Synthetic
ucauuuugugggucaccauauucu

SEQ ID NO: 93803 - RNA, 18 nt, Artificial Sequence
  Synthetic
cccgcggacgacccuucu

SEQ ID NO: 93804 - RNA, 19 nt, Artificial Sequence
  Synthetic
ucccgcggacgacccuucu

SEQ ID NO: 93805 - RNA, 20 nt, Artificial Sequence
  Synthetic
aucccgcggacgacccuucu

SEQ ID NO: 93806 - RNA, 21 nt, Artificial Sequence
  Synthetic
aaucccgcggacgacccuucu

SEQ ID NO: 93807 - RNA, 22 nt, Artificial Sequence
  Synthetic
gaaucccgcggacgacccuucu

SEQ ID NO: 93808 - RNA, 23 nt, Artificial Sequence
  Synthetic
ugaaucccgcggacgacccuucu

SEQ ID NO: 93809 - RNA, 24 nt, Artificial Sequence
  Synthetic
cugaaucccgcggacgacccuucu

SEQ ID NO: 93810 - RNA, 18 nt, Artificial Sequence
  Synthetic
  misc_feature (1)..(1): n is a, c, g, or u
  misc_feature (3)..(3): n is a, c, g, or u
ncnuaucgucaaucuucu

SEQ ID NO: 93811 - RNA, 19 nt, Artificial Sequence
  Synthetic
  misc_feature (2)..(2): n is a, c, g, or u
  misc_feature (4)..(4): n is a, c, g, or u
cncnuaucgucaaucuucu

SEQ ID NO: 93812 - RNA, 20 nt, Artificial Sequence
  Synthetic
  misc_feature (3)..(3): n is a, c, g, or u
  misc_feature (5)..(5): n is a, c, g, or u
ucncnuaucgucaaucuucu

SEQ ID NO: 93813 - RNA, 21 nt, Artificial Sequence
  Synthetic
  misc_feature (4)..(4): n is a, c, g, or u
  misc_feature (6)..(6): n is a, c, g, or u
cucncnuaucgucaaucuucu

SEQ ID NO: 93814 - RNA, 22 nt, Artificial Sequence
  Synthetic
  misc_feature (5)..(5): n is a, c, g, or u
  misc_feature (7)..(7): n is a, c, g, or u
ucucncnuaucgucaaucuucu

SEQ ID NO: 93815 - RNA, 23 nt, Artificial Sequence
  Synthetic
  misc_feature (6)..(6): n is a, c, g, or u
  misc_feature (8)..(8): n is a, c, g, or u
cucucncnuaucgucaaucuucu

SEQ ID NO: 93816 - RNA, 24 nt, Artificial Sequence
  Synthetic
  misc_feature (1)..(1): n is a, c, g, or u
  misc_feature (7)..(7): n is a, c, g, or u
  misc_feature (9)..(9): n is a, c, g, or u
ncucucncnuaucgucaaucuucu

SEQ ID NO: 93817 - RNA, 18 nt, Artificial Sequence
  Synthetic
caucuucuuguugguucu

SEQ ID NO: 93818 - RNA, 19 nt, Artificial Sequence
  Synthetic
ucaucuucuuguugguucu

SEQ ID NO: 93819 - RNA, 20 nt, Artificial Sequence
  Synthetic
cucaucuucuuguugguucu

SEQ ID NO: 93820 - RNA, 21 nt, Artificial Sequence
  Synthetic
ccucaucuucuuguugguucu

SEQ ID NO: 93821 - RNA, 22 nt, Artificial Sequence
  Synthetic
gccucaucuucuuguugguucu

SEQ ID NO: 93822 - RNA, 23 nt, Artificial Sequence
  Synthetic
ugccucaucuucuuguugguucu

SEQ ID NO: 93823 - RNA, 24 nt, Artificial Sequence
  Synthetic
augccucaucuucuuguugguucu

SEQ ID NO: 93824 - RNA, 18 nt, Artificial Sequence
  Synthetic
gggccucagcccguuucu

SEQ ID NO: 93825 - RNA, 19 nt, Artificial Sequence
  Synthetic
ugggccucagcccguuucu

SEQ ID NO: 93826 - RNA, 20 nt, Artificial Sequence
  Synthetic
gugggccucagcccguuucu

SEQ ID NO: 93827 - RNA, 21 nt, Artificial Sequence
  Synthetic
agugggccucagcccguuucu

SEQ ID NO: 93828 - RNA, 22 nt, Artificial Sequence
  Synthetic
gagugggccucagcccguuucu

SEQ ID NO: 93829 - RNA, 23 nt, Artificial Sequence
  Synthetic
ggagugggccucagcccguuucu

SEQ ID NO: 93830 - RNA, 24 nt, Artificial Sequence
  Synthetic
gggagugggccucagcccguuucu

SEQ ID NO: 93831 - RNA, 18 nt, Artificial Sequence
  Synthetic
gacuucucucaauuuucu

SEQ ID NO: 93832 - RNA, 19 nt, Artificial Sequence
  Synthetic
ggacuucucucaauuuucu

SEQ ID NO: 93833 - RNA, 20 nt, Artificial Sequence
  Synthetic
uggacuucucucaauuuucu

SEQ ID NO: 93834 - RNA, 21 nt, Artificial Sequence
  Synthetic
guggacuucucucaauuuucu

SEQ ID NO: 93835 - RNA, 22 nt, Artificial Sequence
  Synthetic
gguggacuucucucaauuuucu

SEQ ID NO: 93836 - RNA, 23 nt, Artificial Sequence
  Synthetic
ugguggacuucucucaauuuucu

SEQ ID NO: 93837 - RNA, 24 nt, Artificial Sequence
  Synthetic
gugguggacuucucucaauuuucu

SEQ ID NO: 93838 - RNA, 18 nt, Artificial Sequence
  Synthetic
cuaauaugggccuaaagu

SEQ ID NO: 93839 - RNA, 19 nt, Artificial Sequence
  Synthetic
acuaauaugggccuaaagu

SEQ ID NO: 93840 - RNA, 20 nt, Artificial Sequence
  Synthetic
cacuaauaugggccuaaagu

SEQ ID NO: 93841 - RNA, 21 nt, Artificial Sequence
  Synthetic
acacuaauaugggccuaaagu

SEQ ID NO: 93842 - RNA, 22 nt, Artificial Sequence
  Synthetic
aacacuaauaugggccuaaagu

SEQ ID NO: 93843 - RNA, 23 nt, Artificial Sequence
  Synthetic
  misc_feature (1)..(1): n is a, c, g, or u
naacacuaauaugggccuaaagu

SEQ ID NO: 93844 - RNA, 24 nt, Artificial Sequence
  Synthetic
  misc_feature (2)..(2): n is a, c, g, or u
unaacacuaauaugggccuaaagu

SEQ ID NO: 93845 - RNA, 18 nt, Artificial Sequence
  Synthetic
  misc_feature (2)..(2): n is a, c, g, or u
  misc_feature (5)..(5): n is a, c, g, or u
cnucnaccaaucgccagu

SEQ ID NO: 93846 - RNA, 19 nt, Artificial Sequence
  Synthetic
  misc_feature (3)..(3): n is a, c, g, or u
  misc_feature (6)..(6): n is a, c, g, or u
gcnucnaccaaucgccagu

SEQ ID NO: 93847 - RNA, 20 nt, Artificial Sequence
  Synthetic
  misc_feature (4)..(4): n is a, c, g, or u
  misc_feature (7)..(7): n is a, c, g, or u
ugcnucnaccaaucgccagu

SEQ ID NO: 93848 - RNA, 21 nt, Artificial Sequence
  Synthetic
  misc_feature (5)..(5): n is a, c, g, or u
  misc_feature (8)..(8): n is a, c, g, or u
cugcnucnaccaaucgccagu

SEQ ID NO: 93849 - RNA, 22 nt, Artificial Sequence
  Synthetic
  misc_feature (6)..(6): n is a, c, g, or u
  misc_feature (9)..(9): n is a, c, g, or u
ccugcnucnaccaaucgccagu

SEQ ID NO: 93850 - RNA, 23 nt, Artificial Sequence
  Synthetic
  misc_feature (7)..(7): n is a, c, g, or u
  misc_feature (10)..(10): n is a, c, g, or u
uccugcnucnaccaaucgccagu

SEQ ID NO: 93851 - RNA, 24 nt, Artificial Sequence
  Synthetic
  misc_feature (8)..(8): n is a, c, g, or u
  misc_feature (11)..(11): n is a, c, g, or u
cuccugcnucnaccaaucgccagu

SEQ ID NO: 93852 - RNA, 18 nt, Artificial Sequence
  Synthetic
ccugcugguggcuccagu

SEQ ID NO: 93853 - RNA, 19 nt, Artificial Sequence
  Synthetic
cccugcugguggcuccagu

SEQ ID NO: 93854 - RNA, 20 nt, Artificial Sequence
  Synthetic
ucccugcugguggcuccagu

SEQ ID NO: 93855 - RNA, 21 nt, Artificial Sequence
  Synthetic
uucccugcugguggcuccagu

SEQ ID NO: 93856 - RNA, 22 nt, Artificial Sequence
  Synthetic
uuucccugcugguggcuccagu

SEQ ID NO: 93857 - RNA, 23 nt, Artificial Sequence
  Synthetic
auuucccugcugguggcuccagu

SEQ ID NO: 93858 - RNA, 24 nt, Artificial Sequence
  Synthetic
uauuucccugcugguggcuccagu

SEQ ID NO: 93859 - RNA, 18 nt, Artificial Sequence
  Synthetic
cucacaauaccgcagagu

SEQ ID NO: 93860 - RNA, 19 nt, Artificial Sequence
  Synthetic
ccucacaauaccgcagagu

SEQ ID NO: 93861 - RNA, 20 nt, Artificial Sequence
  Synthetic
uccucacaauaccgcagagu

SEQ ID NO: 93862 - RNA, 21 nt, Artificial Sequence
  Synthetic
auccucacaauaccgcagagu

SEQ ID NO: 93863 - RNA, 22 nt, Artificial Sequence
  Synthetic
aauccucacaauaccgcagagu

SEQ ID NO: 93864 - RNA, 23 nt, Artificial Sequence
  Synthetic
gaauccucacaauaccgcagagu

SEQ ID NO: 93865 - RNA, 24 nt, Artificial Sequence
  Synthetic
agaauccucacaauaccgcagagu

SEQ ID NO: 93866 - RNA, 18 nt, Artificial Sequence
  Synthetic
  misc_feature (5)..(5): n is a, c, g, or u
uuaangacugggaggagu

SEQ ID NO: 93867 - RNA, 19 nt, Artificial Sequence
  Synthetic
  misc_feature (6)..(6): n is a, c, g, or u
uuuaangacugggaggagu

SEQ ID NO: 93868 - RNA, 20 nt, Artificial Sequence
  Synthetic
  misc_feature (7)..(7): n is a, c, g, or u
guuuaangacugggaggagu

SEQ ID NO: 93869 - RNA, 21 nt, Artificial Sequence
  Synthetic
  misc_feature (8)..(8): n is a, c, g, or u
uguuuaangacugggaggagu

SEQ ID NO: 93870 - RNA, 22 nt, Artificial Sequence
  Synthetic
  misc_feature (9)..(9): n is a, c, g, or u
uuguuuaangacugggaggagu

SEQ ID NO: 93871 - RNA, 23 nt, Artificial Sequence
  Synthetic
  misc_feature (10)..(10): n is a, c, g, or u
uuuguuuaangacugggaggagu

SEQ ID NO: 93872 - RNA, 24 nt, Artificial Sequence
  Synthetic
  misc_feature (11)..(11): n is a, c, g, or u
guuuguuuaangacugggaggagu

SEQ ID NO: 93873 - RNA, 18 nt, Artificial Sequence
  Synthetic
aggucucaaucgccgcgu

SEQ ID NO: 93874 - RNA, 19 nt, Artificial Sequence
  Synthetic
aaggucucaaucgccgcgu

SEQ ID NO: 93875 - RNA, 20 nt, Artificial Sequence
  Synthetic
gaaggucucaaucgccgcgu

SEQ ID NO: 93876 - RNA, 18 nt, Artificial Sequence
  Synthetic
cgcagagucuagacucgu

SEQ ID NO: 93877 - RNA, 19 nt, Artificial Sequence
  Synthetic
ccgcagagucuagacucgu

SEQ ID NO: 93878 - RNA, 20 nt, Artificial Sequence
  Synthetic
accgcagagucuagacucgu

SEQ ID NO: 93879 - RNA, 21 nt, Artificial Sequence
  Synthetic
uaccgcagagucuagacucgu

SEQ ID NO: 93880 - RNA, 22 nt, Artificial Sequence
  Synthetic
auaccgcagagucuagacucgu

SEQ ID NO: 93881 - RNA, 23 nt, Artificial Sequence
  Synthetic
aauaccgcagagucuagacucgu

SEQ ID NO: 93882 - RNA, 24 nt, Artificial Sequence
  Synthetic
caauaccgcagagucuagacucgu

SEQ ID NO: 93883 - RNA, 18 nt, Artificial Sequence
  Synthetic
gccagacgccaacaaggu

SEQ ID NO: 93884 - RNA, 19 nt, Artificial Sequence
  Synthetic
ggccagacgccaacaaggu

SEQ ID NO: 93885 - RNA, 20 nt, Artificial Sequence
  Synthetic
uggccagacgccaacaaggu

SEQ ID NO: 93886 - RNA, 21 nt, Artificial Sequence
  Synthetic
cuggccagacgccaacaaggu

SEQ ID NO: 93887 - RNA, 22 nt, Artificial Sequence
  Synthetic
ccuggccagacgccaacaaggu

SEQ ID NO: 93888 - RNA, 23 nt, Artificial Sequence
  Synthetic
accuggccagacgccaacaaggu

SEQ ID NO: 93889 - RNA, 24 nt, Artificial Sequence
  Synthetic
caccuggccagacgccaacaaggu

SEQ ID NO: 93890 - RNA, 18 nt, Artificial Sequence
  Synthetic
guuuugcucgcagcaggu

SEQ ID NO: 93891 - RNA, 19 nt, Artificial Sequence
  Synthetic
uguuuugcucgcagcaggu

SEQ ID NO: 93892 - RNA, 20 nt, Artificial Sequence
  Synthetic
uuguuuugcucgcagcaggu

SEQ ID NO: 93893 - RNA, 21 nt, Artificial Sequence
  Synthetic
cuuguuuugcucgcagcaggu

SEQ ID NO: 93894 - RNA, 22 nt, Artificial Sequence
  Synthetic
gcuuguuuugcucgcagcaggu

SEQ ID NO: 93895 - RNA, 23 nt, Artificial Sequence
  Synthetic
cgcuuguuuugcucgcagcaggu

SEQ ID NO: 93896 - RNA, 24 nt, Artificial Sequence
  Synthetic
ccgcuuguuuugcucgcagcaggu

SEQ ID NO: 93897 - RNA, 18 nt, Artificial Sequence
  Synthetic
  misc_feature (3)..(3): n is a, c, g, or u
  misc_feature (9)..(9): n is a, c, g, or u
uunccauungauaagggu

SEQ ID NO: 93898 - RNA, 19 nt, Artificial Sequence
  Synthetic
  misc_feature (4)..(4): n is a, c, g, or u
  misc_feature (10)..(10): n is a, c, g, or u
uuunccauungauaagggu

SEQ ID NO: 93899 - RNA, 20 nt, Artificial Sequence
  Synthetic
  misc_feature (5)..(5): n is a, c, g, or u
  misc_feature (11)..(11): n is a, c, g, or u
auuunccauungauaagggu

SEQ ID NO: 93900 - RNA, 21 nt, Artificial Sequence
  Synthetic
  misc_feature (6)..(6): n is a, c, g, or u
  misc_feature (12)..(12): n is a, c, g, or u
uauuunccauungauaagggu

SEQ ID NO: 93901 - RNA, 22 nt, Artificial Sequence
  Synthetic
  misc_feature (7)..(7): n is a, c, g, or u
  misc_feature (13)..(13): n is a, c, g, or u
auauuunccauungauaagggu

SEQ ID NO: 93902 - RNA, 23 nt, Artificial Sequence
  Synthetic
  misc_feature (8)..(8): n is a, c, g, or u
  misc_feature (14)..(14): n is a, c, g, or u
aauauuunccauungauaagggu

SEQ ID NO: 93903 - RNA, 24 nt, Artificial Sequence
  Synthetic
  misc_feature (9)..(9): n is a, c, g, or u
  misc_feature (15)..(15): n is a, c, g, or u
aaauauuunccauungauaagggu

SEQ ID NO: 93904 - RNA, 18 nt, Artificial Sequence
  Synthetic
uuauauggaugauguggu

SEQ ID NO: 93905 - RNA, 19 nt, Artificial Sequence
  Synthetic
guuauauggaugauguggu

SEQ ID NO: 93906 - RNA, 20 nt, Artificial Sequence
  Synthetic
aguuauauggaugauguggu

SEQ ID NO: 93907 - RNA, 21 nt, Artificial Sequence
  Synthetic
caguuauauggaugauguggu

SEQ ID NO: 93908 - RNA, 22 nt, Artificial Sequence
  Synthetic
ucaguuauauggaugauguggu

SEQ ID NO: 93909 - RNA, 23 nt, Artificial Sequence
  Synthetic
uucaguuauauggaugauguggu

SEQ ID NO: 93910 - RNA, 24 nt, Artificial Sequence
  Synthetic
uuucaguuauauggaugauguggu

SEQ ID NO: 93911 - RNA, 18 nt, Artificial Sequence
  Synthetic
cacuggcuggggcuuggu

SEQ ID NO: 93912 - RNA, 19 nt, Artificial Sequence
  Synthetic
ccacuggcuggggcuuggu

SEQ ID NO: 93913 - RNA, 20 nt, Artificial Sequence
  Synthetic
cccacuggcuggggcuuggu

SEQ ID NO: 93914 - RNA, 21 nt, Artificial Sequence
  Synthetic
ccccacuggcuggggcuuggu

SEQ ID NO: 93915 - RNA, 22 nt, Artificial Sequence
  Synthetic
cccccacuggcuggggcuuggu

SEQ ID NO: 93916 - RNA, 23 nt, Artificial Sequence
  Synthetic
acccccacuggcuggggcuuggu

SEQ ID NO: 93917 - RNA, 24 nt, Artificial Sequence
  Synthetic
aacccccacuggcuggggcuuggu

SEQ ID NO: 93918 - RNA, 18 nt, Artificial Sequence
  Synthetic
  misc_feature (16)..(16): n is a, c, g, or u
uuuuggaagagaaacngu

SEQ ID NO: 93919 - RNA, 19 nt, Artificial Sequence
  Synthetic
  misc_feature (17)..(17): n is a, c, g, or u
cuuuuggaagagaaacngu

SEQ ID NO: 93920 - RNA, 20 nt, Artificial Sequence
  Synthetic
  misc_feature (18)..(18): n is a, c, g, or u
acuuuuggaagagaaacngu

SEQ ID NO: 93921 - RNA, 21 nt, Artificial Sequence
  Synthetic
  misc_feature (19)..(19): n is a, c, g, or u
cacuuuuggaagagaaacngu

SEQ ID NO: 93922 - RNA, 22 nt, Artificial Sequence
  Synthetic
  misc_feature (20)..(20): n is a, c, g, or u
ucacuuuuggaagagaaacngu

SEQ ID NO: 93923 - RNA, 23 nt, Artificial Sequence
  Synthetic
  misc_feature (21)..(21): n is a, c, g, or u
cucacuuuuggaagagaaacngu

SEQ ID NO: 93924 - RNA, 24 nt, Artificial Sequence
  Synthetic
  misc_feature (22)..(22): n is a, c, g, or u
ucucacuuuuggaagagaaacngu

SEQ ID NO: 93925 - RNA, 18 nt, Artificial Sequence
  Synthetic
  misc_feature (16)..(16): n is a, c, g, or u
ugacuucuuuccuucngu

SEQ ID NO: 93926 - RNA, 19 nt, Artificial Sequence
  Synthetic
  misc_feature (17)..(17): n is a, c, g, or u
cugacuucuuuccuucngu

SEQ ID NO: 93927 - RNA, 20 nt, Artificial Sequence
  Synthetic
  misc_feature (18)..(18): n is a, c, g, or u
ucugacuucuuuccuucngu

SEQ ID NO: 93928 - RNA, 21 nt, Artificial Sequence
  Synthetic
  misc_feature (19)..(19): n is a, c, g, or u
uucugacuucuuuccuucngu

SEQ ID NO: 93929 - RNA, 22 nt, Artificial Sequence
  Synthetic
  misc_feature (20)..(20): n is a, c, g, or u
cuucugacuucuuuccuucngu

SEQ ID NO: 93930 - RNA, 23 nt, Artificial Sequence
  Synthetic
  misc_feature (21)..(21): n is a, c, g, or u
ccuucugacuucuuuccuucngu

SEQ ID NO: 93931 - RNA, 24 nt, Artificial Sequence
  Synthetic
  misc_feature (22)..(22): n is a, c, g, or u
gccuucugacuucuuuccuucngu

SEQ ID NO: 93932 - RNA, 18 nt, Artificial Sequence
  Synthetic
  misc_feature (16)..(16): n is a, c, g, or u
ucugcaagaucccagngu

SEQ ID NO: 93933 - RNA, 19 nt, Artificial Sequence
  Synthetic
  misc_feature (17)..(17): n is a, c, g, or u
cucugcaagaucccagngu

SEQ ID NO: 93934 - RNA, 20 nt, Artificial Sequence
  Synthetic
  misc_feature (18)..(18): n is a, c, g, or u
acucugcaagaucccagngu

SEQ ID NO: 93935 - RNA, 21 nt, Artificial Sequence
  Synthetic
  misc_feature (19)..(19): n is a, c, g, or u
aacucugcaagaucccagngu

SEQ ID NO: 93936 - RNA, 22 nt, Artificial Sequence
  Synthetic
  misc_feature (20)..(20): n is a, c, g, or u
aaacucugcaagaucccagngu

SEQ ID NO: 93937 - RNA, 23 nt, Artificial Sequence
  Synthetic
  misc_feature (21)..(21): n is a, c, g, or u
caaacucugcaagaucccagngu

SEQ ID NO: 93938 - RNA, 24 nt, Artificial Sequence
  Synthetic
  misc_feature (22)..(22): n is a, c, g, or u
ccaaacucugcaagaucccagngu

SEQ ID NO: 93939 - RNA, 18 nt, Artificial Sequence
  Synthetic
  misc_feature (3)..(3): n is a, c, g, or u
canaaaaucaaagaaugu

SEQ ID NO: 93940 - RNA, 19 nt, Artificial Sequence
  Synthetic
  misc_feature (4)..(4): n is a, c, g, or u
acanaaaaucaaagaaugu

SEQ ID NO: 93941 - RNA, 20 nt, Artificial Sequence
  Synthetic
  misc_feature (1)..(1): n is a, c, g, or u
  misc_feature (5)..(5): n is a, c, g, or u
nacanaaaaucaaagaaugu

SEQ ID NO: 93942 - RNA, 21 nt, Artificial Sequence
  Synthetic
  misc_feature (2)..(2): n is a, c, g, or u
  misc_feature (6)..(6): n is a, c, g, or u
anacanaaaaucaaagaaugu

SEQ ID NO: 93943 - RNA, 22 nt, Artificial Sequence
  Synthetic
  misc_feature (3)..(3): n is a, c, g, or u
  misc_feature (7)..(7): n is a, c, g, or u
canacanaaaaucaaagaaugu

SEQ ID NO: 93944 - RNA, 23 nt, Artificial Sequence
  Synthetic
  misc_feature (4)..(4): n is a, c, g, or u
  misc_feature (8)..(8): n is a, c, g, or u
ucanacanaaaaucaaagaaugu

SEQ ID NO: 93945 - RNA, 24 nt, Artificial Sequence
  Synthetic
  misc_feature (5)..(5): n is a, c, g, or u
  misc_feature (9)..(9): n is a, c, g, or u
aucanacanaaaaucaaagaaugu

SEQ ID NO: 93946 - RNA, 18 nt, Artificial Sequence
  Synthetic
  misc_feature (3)..(3): n is a, c, g, or u
ggnuaugucauuggaugu

SEQ ID NO: 93947 - RNA, 19 nt, Artificial Sequence
  Synthetic
  misc_feature (4)..(4): n is a, c, g, or u
gggnuaugucauuggaugu

SEQ ID NO: 93948 - RNA, 20 nt, Artificial Sequence
  Synthetic
  misc_feature (5)..(5): n is a, c, g, or u
ugggnuaugucauuggaugu

SEQ ID NO: 93949 - RNA, 21 nt, Artificial Sequence
  Synthetic
  misc_feature (6)..(6): n is a, c, g, or u
augggnuaugucauuggaugu

SEQ ID NO: 93950 - RNA, 22 nt, Artificial Sequence
  Synthetic
  misc_feature (1)..(1): n is a, c, g, or u
  misc_feature (7)..(7): n is a, c, g, or u
naugggnuaugucauuggaugu

SEQ ID NO: 93951 - RNA, 23 nt, Artificial Sequence
  Synthetic
  misc_feature (2)..(2): n is a, c, g, or u
  misc_feature (8)..(8): n is a, c, g, or u
unaugggnuaugucauuggaugu

SEQ ID NO: 93952 - RNA, 24 nt, Artificial Sequence
  Synthetic
  misc_feature (3)..(3): n is a, c, g, or u
  misc_feature (9)..(9): n is a, c, g, or u
uunaugggnuaugucauuggaugu

SEQ ID NO: 93953 - RNA, 18 nt, Artificial Sequence
  Synthetic
uuguucauguccuacugu

SEQ ID NO: 93954 - RNA, 19 nt, Artificial Sequence
  Synthetic
cuuguucauguccuacugu

SEQ ID NO: 93955 - RNA, 20 nt, Artificial Sequence
  Synthetic
ucuuguucauguccuacugu

SEQ ID NO: 93956 - RNA, 21 nt, Artificial Sequence
  Synthetic
cucuuguucauguccuacugu

SEQ ID NO: 93957 - RNA, 22 nt, Artificial Sequence
  Synthetic
ucucuuguucauguccuacugu

SEQ ID NO: 93958 - RNA, 23 nt, Artificial Sequence
  Synthetic
aucucuuguucauguccuacugu

SEQ ID NO: 93959 - RNA, 24 nt, Artificial Sequence
  Synthetic
caucucuuguucauguccuacugu

SEQ ID NO: 93960 - RNA, 18 nt, Artificial Sequence
  Synthetic
aggaacaguaaacccugu

SEQ ID NO: 93961 - RNA, 19 nt, Artificial Sequence
  Synthetic
caggaacaguaaacccugu

SEQ ID NO: 93962 - RNA, 20 nt, Artificial Sequence
  Synthetic
ucaggaacaguaaacccugu

SEQ ID NO: 93963 - RNA, 21 nt, Artificial Sequence
  Synthetic
uucaggaacaguaaacccugu

SEQ ID NO: 93964 - RNA, 22 nt, Artificial Sequence
  Synthetic
guucaggaacaguaaacccugu

SEQ ID NO: 93965 - RNA, 23 nt, Artificial Sequence
  Synthetic
aguucaggaacaguaaacccugu

SEQ ID NO: 93966 - RNA, 24 nt, Artificial Sequence
  Synthetic
caguucaggaacaguaaacccugu

SEQ ID NO: 93967 - RNA, 18 nt, Artificial Sequence
  Synthetic
uaucccuccuguugcugu

SEQ ID NO: 93968 - RNA, 19 nt, Artificial Sequence
  Synthetic
guaucccuccuguugcugu

SEQ ID NO: 93969 - RNA, 20 nt, Artificial Sequence
  Synthetic
uguaucccuccuguugcugu

SEQ ID NO: 93970 - RNA, 21 nt, Artificial Sequence
  Synthetic
auguaucccuccuguugcugu

SEQ ID NO: 93971 - RNA, 22 nt, Artificial Sequence
  Synthetic
uauguaucccuccuguugcugu

SEQ ID NO: 93972 - RNA, 23 nt, Artificial Sequence
  Synthetic
cuauguaucccuccuguugcugu

SEQ ID NO: 93973 - RNA, 24 nt, Artificial Sequence
  Synthetic
ucuauguaucccuccuguugcugu

SEQ ID NO: 93974 - RNA, 18 nt, Artificial Sequence
  Synthetic
ggcaacggccaggucugu

SEQ ID NO: 93975 - RNA, 19 nt, Artificial Sequence
  Synthetic
cggcaacggccaggucugu

SEQ ID NO: 93976 - RNA, 20 nt, Artificial Sequence
  Synthetic
ccggcaacggccaggucugu

SEQ ID NO: 93977 - RNA, 21 nt, Artificial Sequence
  Synthetic
cccggcaacggccaggucugu

SEQ ID NO: 93978 - RNA, 22 nt, Artificial Sequence
  Synthetic
gcccggcaacggccaggucugu

SEQ ID NO: 93979 - RNA, 23 nt, Artificial Sequence
  Synthetic
ugcccggcaacggccaggucugu

SEQ ID NO: 93980 - RNA, 24 nt, Artificial Sequence
  Synthetic
uugcccggcaacggccaggucugu

SEQ ID NO: 93981 - RNA, 18 nt, Artificial Sequence
  Synthetic
cuuacaaggccuuucugu

SEQ ID NO: 93982 - RNA, 19 nt, Artificial Sequence
  Synthetic
acuuacaaggccuuucugu

SEQ ID NO: 93983 - RNA, 20 nt, Artificial Sequence
  Synthetic
aacuuacaaggccuuucugu

SEQ ID NO: 93984 - RNA, 21 nt, Artificial Sequence
  Synthetic
caacuuacaaggccuuucugu

SEQ ID NO: 93985 - RNA, 22 nt, Artificial Sequence
  Synthetic
ccaacuuacaaggccuuucugu

SEQ ID NO: 93986 - RNA, 23 nt, Artificial Sequence
  Synthetic
gccaacuuacaaggccuuucugu

SEQ ID NO: 93987 - RNA, 24 nt, Artificial Sequence
  Synthetic
cgccaacuuacaaggccuuucugu

SEQ ID NO: 93988 - RNA, 18 nt, Artificial Sequence
  Synthetic
  misc_feature (11)..(11): n is a, c, g, or u
uaggaccccuncucgugu

SEQ ID NO: 93989 - RNA, 19 nt, Artificial Sequence
  Synthetic
  misc_feature (12)..(12): n is a, c, g, or u
cuaggaccccuncucgugu

SEQ ID NO: 93990 - RNA, 20 nt, Artificial Sequence
  Synthetic
  misc_feature (13)..(13): n is a, c, g, or u
ccuaggaccccuncucgugu

SEQ ID NO: 93991 - RNA, 21 nt, Artificial Sequence
  Synthetic
  misc_feature (14)..(14): n is a, c, g, or u
uccuaggaccccuncucgugu

SEQ ID NO: 93992 - RNA, 22 nt, Artificial Sequence
  Synthetic
  misc_feature (15)..(15): n is a, c, g, or u
uuccuaggaccccuncucgugu

SEQ ID NO: 93993 - RNA, 23 nt, Artificial Sequence
  Synthetic
  misc_feature (16)..(16): n is a, c, g, or u
auuccuaggaccccuncucgugu

SEQ ID NO: 93994 - RNA, 24 nt, Artificial Sequence
  Synthetic
  misc_feature (17)..(17): n is a, c, g, or u
gauuccuaggaccccuncucgugu

SEQ ID NO: 93995 - RNA, 18 nt, Artificial Sequence
  Synthetic
  misc_feature (6)..(6): n is a, c, g, or u
  misc_feature (9)..(9): n is a, c, g, or u
gggggnacnaccgugugu

SEQ ID NO: 93996 - RNA, 19 nt, Artificial Sequence
  Synthetic
  misc_feature (7)..(7): n is a, c, g, or u
  misc_feature (10)..(10): n is a, c, g, or u
agggggnacnaccgugugu

SEQ ID NO: 93997 - RNA, 20 nt, Artificial Sequence
  Synthetic
  misc_feature (8)..(8): n is a, c, g, or u
  misc_feature (11)..(11): n is a, c, g, or u
uagggggnacnaccgugugu

SEQ ID NO: 93998 - RNA, 21 nt, Artificial Sequence
  Synthetic
  misc_feature (9)..(9): n is a, c, g, or u
  misc_feature (12)..(12): n is a, c, g, or u
cuagggggnacnaccgugugu

SEQ ID NO: 93999 - RNA, 22 nt, Artificial Sequence
  Synthetic
  misc_feature (10)..(10): n is a, c, g, or u
  misc_feature (13)..(13): n is a, c, g, or u
ucuagggggnacnaccgugugu

SEQ ID NO: 94000 - RNA, 23 nt, Artificial Sequence
  Synthetic
  misc_feature (11)..(11): n is a, c, g, or u
  misc_feature (14)..(14): n is a, c, g, or u
uucuagggggnacnaccgugugu

SEQ ID NO: 94001 - RNA, 24 nt, Artificial Sequence
  Synthetic
  misc_feature (12)..(12): n is a, c, g, or u
  misc_feature (15)..(15): n is a, c, g, or u
uuucuagggggnacnaccgugugu

SEQ ID NO: 94002 - RNA, 18 nt, Artificial Sequence
  Synthetic
  misc_feature (4)..(4): n is a, c, g, or u
  misc_feature (9)..(9): n is a, c, g, or u
  misc_feature (11)..(11): n is a, c, g, or u
  misc_feature (13)..(13): n is a, c, g, or u
uagnuuaangnunuuugu

SEQ ID NO: 94003 - RNA, 19 nt, Artificial Sequence
  Synthetic
  misc_feature (1)..(1): n is a, c, g, or u
  misc_feature (5)..(5): n is a, c, g, or u
  misc_feature (10)..(10): n is a, c, g, or u
  misc_feature (12)..(12): n is a, c, g, or u
  misc_feature (14)..(14): n is a, c, g, or u
nuagnuuaangnunuuugu

SEQ ID NO: 94004 - RNA, 20 nt, Artificial Sequence
  Synthetic
  misc_feature (1)..(2): n is a, c, g, or u
  misc_feature (6)..(6): n is a, c, g, or u
  misc_feature (11)..(11): n is a, c, g, or u
  misc_feature (13)..(13): n is a, c, g, or u
  misc_feature (15)..(15): n is a, c, g, or u
nnuagnuuaangnunuuugu

SEQ ID NO: 94005 - RNA, 21 nt, Artificial Sequence
  Synthetic
  misc_feature (2)..(3): n is a, c, g, or u
  misc_feature (7)..(7): n is a, c, g, or u
  misc_feature (12)..(12): n is a, c, g, or u
  misc_feature (14)..(14): n is a, c, g, or u
  misc_feature (16)..(16): n is a, c, g, or u
gnnuagnuuaangnunuuugu

SEQ ID NO: 94006 - RNA, 22 nt, Artificial Sequence
  Synthetic
  misc_feature (3)..(4): n is a, c, g, or u
  misc_feature (8)..(8): n is a, c, g, or u
  misc_feature (13)..(13): n is a, c, g, or u
  misc_feature (15)..(15): n is a, c, g, or u
  misc_feature (17)..(17): n is a, c, g, or u
agnnuagnuuaangnunuuugu

SEQ ID NO: 94007 - RNA, 23 nt, Artificial Sequence
  Synthetic
  misc_feature (4)..(5): n is a, c, g, or u
  misc_feature (9)..(9): n is a, c, g, or u
  misc_feature (14)..(14): n is a, c, g, or u
  misc_feature (16)..(16): n is a, c, g, or u
  misc_feature (18)..(18): n is a, c, g, or u
gagnnuagnuuaangnunuuugu

SEQ ID NO: 94008 - RNA, 24 nt, Artificial Sequence
  Synthetic
  misc_feature (5)..(6): n is a, c, g, or u
  misc_feature (10)..(10): n is a, c, g, or u
  misc_feature (15)..(15): n is a, c, g, or u
  misc_feature (17)..(17): n is a, c, g, or u
  misc_feature (19)..(19): n is a, c, g, or u
ggagnnuagnuuaangnunuuugu

SEQ ID NO: 94009 - RNA, 18 nt, Artificial Sequence
  Synthetic
  misc_feature (8)..(8): n is a, c, g, or u
  misc_feature (17)..(17): n is a, c, g, or u
uguaugcnuguauucanu

SEQ ID NO: 94010 - RNA, 19 nt, Artificial Sequence
  Synthetic
  misc_feature (9)..(9): n is a, c, g, or u
  misc_feature (18)..(18): n is a, c, g, or u
uuguaugcnuguauucanu

SEQ ID NO: 94011 - RNA, 20 nt, Artificial Sequence
  Synthetic
  misc_feature (1)..(1): n is a, c, g, or u
  misc_feature (10)..(10): n is a, c, g, or u
  misc_feature (19)..(19): n is a, c, g, or u
nuuguaugcnuguauucanu

SEQ ID NO: 94012 - RNA, 21 nt, Artificial Sequence
  Synthetic
  misc_feature (2)..(2): n is a, c, g, or u
  misc_feature (11)..(11): n is a, c, g, or u
  misc_feature (20)..(20): n is a, c, g, or u
cnuuguaugcnuguauucanu

SEQ ID NO: 94013 - RNA, 22 nt, Artificial Sequence
  Synthetic
  misc_feature (3)..(3): n is a, c, g, or u
  misc_feature (12)..(12): n is a, c, g, or u
  misc_feature (21)..(21): n is a, c, g, or u
ccnuuguaugcnuguauucanu

SEQ ID NO: 94014 - RNA, 23 nt, Artificial Sequence
  Synthetic
  misc_feature (4)..(4): n is a, c, g, or u
  misc_feature (13)..(13): n is a, c, g, or u
  misc_feature (22)..(22): n is a, c, g, or u
gccnuuguaugcnuguauucanu

SEQ ID NO: 94015 - RNA, 24 nt, Artificial Sequence
  Synthetic
  misc_feature (5)..(5): n is a, c, g, or u
  misc_feature (14)..(14): n is a, c, g, or u
  misc_feature (23)..(23): n is a, c, g, or u
ugccnuuguaugcnuguauucanu

SEQ ID NO: 94016 - RNA, 18 nt, Artificial Sequence
  Synthetic
  misc_feature (17)..(17): n is a, c, g, or u
ucaggcucagggcauanu

SEQ ID NO: 94017 - RNA, 19 nt, Artificial Sequence
  Synthetic
  misc_feature (18)..(18): n is a, c, g, or u
cucaggcucagggcauanu

SEQ ID NO: 94018 - RNA, 20 nt, Artificial Sequence
  Synthetic
  misc_feature (19)..(19): n is a, c, g, or u
ccucaggcucagggcauanu

SEQ ID NO: 94019 - RNA, 21 nt, Artificial Sequence
  Synthetic
  misc_feature (20)..(20): n is a, c, g, or u
cccucaggcucagggcauanu

SEQ ID NO: 94020 - RNA, 22 nt, Artificial Sequence
  Synthetic
  misc_feature (21)..(21): n is a, c, g, or u
gcccucaggcucagggcauanu

SEQ ID NO: 94021 - RNA, 23 nt, Artificial Sequence
  Synthetic
  misc_feature (22)..(22): n is a, c, g, or u
agcccucaggcucagggcauanu

SEQ ID NO: 94022 - RNA, 24 nt, Artificial Sequence
  Synthetic
  misc_feature (23)..(23): n is a, c, g, or u
gagcccucaggcucagggcauanu

SEQ ID NO: 94023 - RNA, 18 nt, Artificial Sequence
  Synthetic
  misc_feature (1)..(1): n is a, c, g, or u
  misc_feature (6)..(6): n is a, c, g, or u
  misc_feature (8)..(8): n is a, c, g, or u
  misc_feature (10)..(10): n is a, c, g, or u
  misc_feature (17)..(17): n is a, c, g, or u
nuuaangnunuuuguanu

SEQ ID NO: 94024 - RNA, 19 nt, Artificial Sequence
  Synthetic
  misc_feature (2)..(2): n is a, c, g, or u
  misc_feature (7)..(7): n is a, c, g, or u
  misc_feature (9)..(9): n is a, c, g, or u
  misc_feature (11)..(11): n is a, c, g, or u
  misc_feature (18)..(18): n is a, c, g, or u
gnuuaangnunuuuguanu

SEQ ID NO: 94025 - RNA, 20 nt, Artificial Sequence
  Synthetic
  misc_feature (3)..(3): n is a, c, g, or u
  misc_feature (8)..(8): n is a, c, g, or u
  misc_feature (10)..(10): n is a, c, g, or u
  misc_feature (12)..(12): n is a, c, g, or u
  misc_feature (19)..(19): n is a, c, g, or u
agnuuaangnunuuuguanu

SEQ ID NO: 94026 - RNA, 21 nt, Artificial Sequence
  Synthetic
  misc_feature (4)..(4): n is a, c, g, or u
  misc_feature (9)..(9): n is a, c, g, or u
  misc_feature (11)..(11): n is a, c, g, or u
  misc_feature (13)..(13): n is a, c, g, or u
  misc_feature (20)..(20): n is a, c, g, or u
uagnuuaangnunuuuguanu

SEQ ID NO: 94027 - RNA, 22 nt, Artificial Sequence
  Synthetic
  misc_feature (1)..(1): n is a, c, g, or u
  misc_feature (5)..(5): n is a, c, g, or u
  misc_feature (10)..(10): n is a, c, g, or u
  misc_feature (12)..(12): n is a, c, g, or u
  misc_feature (14)..(14): n is a, c, g, or u
  misc_feature (21)..(21): n is a, c, g, or u
nuagnuuaangnunuuuguanu

SEQ ID NO: 94028 - RNA, 23 nt, Artificial Sequence
  Synthetic
  misc_feature (1)..(2): n is a, c, g, or u
  misc_feature (6)..(6): n is a, c, g, or u
  misc_feature (11)..(11): n is a, c, g, or u
  misc_feature (13)..(13): n is a, c, g, or u
  misc_feature (15)..(15): n is a, c, g, or u
  misc_feature (22)..(22): n is a, c, g, or u
nnuagnuuaangnunuuuguanu

SEQ ID NO: 94029 - RNA, 24 nt, Artificial Sequence
  Synthetic
  misc_feature (2)..(3): n is a, c, g, or u
  misc_feature (7)..(7): n is a, c, g, or u
  misc_feature (12)..(12): n is a, c, g, or u
  misc_feature (14)..(14): n is a, c, g, or u
  misc_feature (16)..(16): n is a, c, g, or u
  misc_feature (23)..(23): n is a, c, g, or u
gnnuagnuuaangnunuuuguanu

SEQ ID NO: 94030 - RNA, 18 nt, Artificial Sequence
  Synthetic
  misc_feature (13)..(13): n is a, c, g, or u
  misc_feature (17)..(17): n is a, c, g, or u
accugcacgacuncugnu

SEQ ID NO: 94031 - RNA, 19 nt, Artificial Sequence
  Synthetic
  misc_feature (14)..(14): n is a, c, g, or u
  misc_feature (18)..(18): n is a, c, g, or u
aaccugcacgacuncugnu

SEQ ID NO: 94032 - RNA, 20 nt, Artificial Sequence
  Synthetic
  misc_feature (15)..(15): n is a, c, g, or u
  misc_feature (19)..(19): n is a, c, g, or u
gaaccugcacgacuncugnu

SEQ ID NO: 94033 - RNA, 21 nt, Artificial Sequence
  Synthetic
  misc_feature (16)..(16): n is a, c, g, or u
  misc_feature (20)..(20): n is a, c, g, or u
agaaccugcacgacuncugnu

SEQ ID NO: 94034 - RNA, 22 nt, Artificial Sequence
  Synthetic
  misc_feature (17)..(17): n is a, c, g, or u
  misc_feature (21)..(21): n is a, c, g, or u
cagaaccugcacgacuncugnu

SEQ ID NO: 94035 - RNA, 23 nt, Artificial Sequence
  Synthetic
  misc_feature (18)..(18): n is a, c, g, or u
  misc_feature (22)..(22): n is a, c, g, or u
gcagaaccugcacgacuncugnu

SEQ ID NO: 94036 - RNA, 24 nt, Artificial Sequence
  Synthetic
  misc_feature (19)..(19): n is a, c, g, or u
  misc_feature (23)..(23): n is a, c, g, or u
ugcagaaccugcacgacuncugnu

SEQ ID NO: 94037 - RNA, 18 nt, Artificial Sequence
  Synthetic
  misc_feature (14)..(14): n is a, c, g, or u
  misc_feature (17)..(17): n is a, c, g, or u
ucaggcaagcaauncunu

SEQ ID NO: 94038 - RNA, 19 nt, Artificial Sequence
  Synthetic
  misc_feature (15)..(15): n is a, c, g, or u
  misc_feature (18)..(18): n is a, c, g, or u
cucaggcaagcaauncunu

SEQ ID NO: 94039 - RNA, 20 nt, Artificial Sequence
  Synthetic
  misc_feature (16)..(16): n is a, c, g, or u
  misc_feature (19)..(19): n is a, c, g, or u
acucaggcaagcaauncunu

SEQ ID NO: 94040 - RNA, 21 nt, Artificial Sequence
  Synthetic
  misc_feature (17)..(17): n is a, c, g, or u
  misc_feature (20)..(20): n is a, c, g, or u
cacucaggcaagcaauncunu

SEQ ID NO: 94041 - RNA, 22 nt, Artificial Sequence
  Synthetic
  misc_feature (18)..(18): n is a, c, g, or u
  misc_feature (21)..(21): n is a, c, g, or u
gcacucaggcaagcaauncunu

SEQ ID NO: 94042 - RNA, 23 nt, Artificial Sequence
  Synthetic
  misc_feature (19)..(19): n is a, c, g, or u
  misc_feature (22)..(22): n is a, c, g, or u
ugcacucaggcaagcaauncunu

SEQ ID NO: 94043 - RNA, 24 nt, Artificial Sequence
  Synthetic
  misc_feature (20)..(20): n is a, c, g, or u
  misc_feature (23)..(23): n is a, c, g, or u
cugcacucaggcaagcaauncunu

SEQ ID NO: 94044 - RNA, 18 nt, Artificial Sequence
  Synthetic
  misc_feature (17)..(17): n is a, c, g, or u
auaccgccucagcucunu

SEQ ID NO: 94045 - RNA, 19 nt, Artificial Sequence
  Synthetic
  misc_feature (18)..(18): n is a, c, g, or u
gauaccgccucagcucunu

SEQ ID NO: 94046 - RNA, 20 nt, Artificial Sequence
  Synthetic
  misc_feature (1)..(1): n is a, c, g, or u
  misc_feature (19)..(19): n is a, c, g, or u
ngauaccgccucagcucunu

SEQ ID NO: 94047 - RNA, 21 nt, Artificial Sequence
  Synthetic
  misc_feature (2)..(2): n is a, c, g, or u
  misc_feature (20)..(20): n is a, c, g, or u
ungauaccgccucagcucunu

SEQ ID NO: 94048 - RNA, 22 nt, Artificial Sequence
  Synthetic
  misc_feature (3)..(3): n is a, c, g, or u
  misc_feature (21)..(21): n is a, c, g, or u
cungauaccgccucagcucunu

SEQ ID NO: 94049 - RNA, 23 nt, Artificial Sequence
  Synthetic
  misc_feature (4)..(4): n is a, c, g, or u
  misc_feature (22)..(22): n is a, c, g, or u
ucungauaccgccucagcucunu

SEQ ID NO: 94050 - RNA, 24 nt, Artificial Sequence
  Synthetic
  misc_feature (5)..(5): n is a, c, g, or u
  misc_feature (23)..(23): n is a, c, g, or u
uucungauaccgccucagcucunu

SEQ ID NO: 94051 - RNA, 18 nt, Artificial Sequence
  Synthetic
  misc_feature (17)..(17): n is a, c, g, or u
cuauugauuggaaagunu

SEQ ID NO: 94052 - RNA, 19 nt, Artificial Sequence
  Synthetic
  misc_feature (18)..(18): n is a, c, g, or u
ccuauugauuggaaagunu

SEQ ID NO: 94053 - RNA, 20 nt, Artificial Sequence
  Synthetic
  misc_feature (19)..(19): n is a, c, g, or u
gccuauugauuggaaagunu

SEQ ID NO: 94054 - RNA, 21 nt, Artificial Sequence
  Synthetic
  misc_feature (20)..(20): n is a, c, g, or u
ggccuauugauuggaaagunu

SEQ ID NO: 94055 - RNA, 22 nt, Artificial Sequence
  Synthetic
  misc_feature (21)..(21): n is a, c, g, or u
aggccuauugauuggaaagunu

SEQ ID NO: 94056 - RNA, 23 nt, Artificial Sequence
  Synthetic
  misc_feature (22)..(22): n is a, c, g, or u
caggccuauugauuggaaagunu

SEQ ID NO: 94057 - RNA, 24 nt, Artificial Sequence
  Synthetic
  misc_feature (23)..(23): n is a, c, g, or u
acaggccuauugauuggaaagunu

SEQ ID NO: 94058 - RNA, 18 nt, Artificial Sequence
  Synthetic
  misc_feature (17)..(17): n is a, c, g, or u
gucuggagcaaacauunu

SEQ ID NO: 94059 - RNA, 19 nt, Artificial Sequence
  Synthetic
  misc_feature (18)..(18): n is a, c, g, or u
ggucuggagcaaacauunu

SEQ ID NO: 94060 - RNA, 20 nt, Artificial Sequence
  Synthetic
  misc_feature (19)..(19): n is a, c, g, or u
aggucuggagcaaacauunu

SEQ ID NO: 94061 - RNA, 21 nt, Artificial Sequence
  Synthetic
  misc_feature (20)..(20): n is a, c, g, or u
caggucuggagcaaacauunu

SEQ ID NO: 94062 - RNA, 22 nt, Artificial Sequence
  Synthetic
  misc_feature (21)..(21): n is a, c, g, or u
gcaggucuggagcaaacauunu

SEQ ID NO: 94063 - RNA, 23 nt, Artificial Sequence
  Synthetic
  misc_feature (22)..(22): n is a, c, g, or u
agcaggucuggagcaaacauunu

SEQ ID NO: 94064 - RNA, 24 nt, Artificial Sequence
  Synthetic
  misc_feature (23)..(23): n is a, c, g, or u
cagcaggucuggagcaaacauunu

SEQ ID NO: 94065 - RNA, 18 nt, Artificial Sequence
  Synthetic
  misc_feature (4)..(4): n is a, c, g, or u
uganccuuauaaagaauu

SEQ ID NO: 94066 - RNA, 19 nt, Artificial Sequence
  Synthetic
  misc_feature (5)..(5): n is a, c, g, or u
uuganccuuauaaagaauu

SEQ ID NO: 94067 - RNA, 20 nt, Artificial Sequence
  Synthetic
  misc_feature (6)..(6): n is a, c, g, or u
auuganccuuauaaagaauu

SEQ ID NO: 94068 - RNA, 21 nt, Artificial Sequence
  Synthetic
  misc_feature (7)..(7): n is a, c, g, or u
cauuganccuuauaaagaauu

SEQ ID NO: 94069 - RNA, 22 nt, Artificial Sequence
  Synthetic
  misc_feature (8)..(8): n is a, c, g, or u
acauuganccuuauaaagaauu

SEQ ID NO: 94070 - RNA, 23 nt, Artificial Sequence
  Synthetic
  misc_feature (9)..(9): n is a, c, g, or u
gacauuganccuuauaaagaauu

SEQ ID NO: 94071 - RNA, 24 nt, Artificial Sequence
  Synthetic
  misc_feature (10)..(10): n is a, c, g, or u
ggacauuganccuuauaaagaauu

SEQ ID NO: 94072 - RNA, 18 nt, Artificial Sequence
  Synthetic
cccguuuguccucuaauu

SEQ ID NO: 94073 - RNA, 19 nt, Artificial Sequence
  Synthetic
gcccguuuguccucuaauu

SEQ ID NO: 94074 - RNA, 20 nt, Artificial Sequence
  Synthetic
ugcccguuuguccucuaauu

SEQ ID NO: 94075 - RNA, 21 nt, Artificial Sequence
  Synthetic
uugcccguuuguccucuaauu

SEQ ID NO: 94076 - RNA, 22 nt, Artificial Sequence
  Synthetic
guugcccguuuguccucuaauu

SEQ ID NO: 94077 - RNA, 23 nt, Artificial Sequence
  Synthetic
uguugcccguuuguccucuaauu

SEQ ID NO: 94078 - RNA, 24 nt, Artificial Sequence
  Synthetic
auguugcccguuuguccucuaauu

SEQ ID NO: 94079 - RNA, 18 nt, Artificial Sequence
  Synthetic
  misc_feature (13)..(13): n is a, c, g, or u
ccugggugggugnuaauu

SEQ ID NO: 94080 - RNA, 19 nt, Artificial Sequence
  Synthetic
  misc_feature (14)..(14): n is a, c, g, or u
accugggugggugnuaauu

SEQ ID NO: 94081 - RNA, 20 nt, Artificial Sequence
  Synthetic
  misc_feature (1)..(1): n is a, c, g, or u
  misc_feature (15)..(15): n is a, c, g, or u
naccugggugggugnuaauu

SEQ ID NO: 94082 - RNA, 21 nt, Artificial Sequence
  Synthetic
  misc_feature (2)..(2): n is a, c, g, or u
  misc_feature (16)..(16): n is a, c, g, or u
cnaccugggugggugnuaauu

SEQ ID NO: 94083 - RNA, 22 nt, Artificial Sequence
  Synthetic
  misc_feature (3)..(3): n is a, c, g, or u
  misc_feature (17)..(17): n is a, c, g, or u
gcnaccugggugggugnuaauu

SEQ ID NO: 94084 - RNA, 23 nt, Artificial Sequence
  Synthetic
  misc_feature (4)..(4): n is a, c, g, or u
  misc_feature (18)..(18): n is a, c, g, or u
agcnaccugggugggugnuaauu

SEQ ID NO: 94085 - RNA, 24 nt, Artificial Sequence
  Synthetic
  misc_feature (5)..(5): n is a, c, g, or u
  misc_feature (19)..(19): n is a, c, g, or u
uagcnaccugggugggugnuaauu

SEQ ID NO: 94086 - RNA, 18 nt, Artificial Sequence
  Synthetic
aggucuggagcaaacauu

SEQ ID NO: 94087 - RNA, 19 nt, Artificial Sequence
  Synthetic
caggucuggagcaaacauu

SEQ ID NO: 94088 - RNA, 20 nt, Artificial Sequence
  Synthetic
gcaggucuggagcaaacauu

SEQ ID NO: 94089 - RNA, 21 nt, Artificial Sequence
  Synthetic
agcaggucuggagcaaacauu

SEQ ID NO: 94090 - RNA, 22 nt, Artificial Sequence
  Synthetic
cagcaggucuggagcaaacauu

SEQ ID NO: 94091 - RNA, 23 nt, Artificial Sequence
  Synthetic
gcagcaggucuggagcaaacauu

SEQ ID NO: 94092 - RNA, 24 nt, Artificial Sequence
  Synthetic
cgcagcaggucuggagcaaacauu

SEQ ID NO: 94093 - RNA, 18 nt, Artificial Sequence
  Synthetic
  misc_feature (11)..(11): n is a, c, g, or u
cugucuuuaanccucauu

SEQ ID NO: 94094 - RNA, 19 nt, Artificial Sequence
  Synthetic
  misc_feature (12)..(12): n is a, c, g, or u
ccugucuuuaanccucauu

SEQ ID NO: 94095 - RNA, 20 nt, Artificial Sequence
  Synthetic
  misc_feature (1)..(1): n is a, c, g, or u
  misc_feature (13)..(13): n is a, c, g, or u
nccugucuuuaanccucauu

SEQ ID NO: 94096 - RNA, 21 nt, Artificial Sequence
  Synthetic
  misc_feature (2)..(2): n is a, c, g, or u
  misc_feature (14)..(14): n is a, c, g, or u
unccugucuuuaanccucauu

SEQ ID NO: 94097 - RNA, 22 nt, Artificial Sequence
  Synthetic
  misc_feature (3)..(3): n is a, c, g, or u
  misc_feature (15)..(15): n is a, c, g, or u
gunccugucuuuaanccucauu

SEQ ID NO: 94098 - RNA, 23 nt, Artificial Sequence
  Synthetic
  misc_feature (4)..(4): n is a, c, g, or u
  misc_feature (16)..(16): n is a, c, g, or u
ugunccugucuuuaanccucauu

SEQ ID NO: 94099 - RNA, 24 nt, Artificial Sequence
  Synthetic
  misc_feature (5)..(5): n is a, c, g, or u
  misc_feature (17)..(17): n is a, c, g, or u
cugunccugucuuuaanccucauu

SEQ ID NO: 94100 - RNA, 18 nt, Artificial Sequence
  Synthetic
gaacaucacaucaggauu

SEQ ID NO: 94101 - RNA, 19 nt, Artificial Sequence
  Synthetic
agaacaucacaucaggauu

SEQ ID NO: 94102 - RNA, 20 nt, Artificial Sequence
  Synthetic
gagaacaucacaucaggauu

SEQ ID NO: 94103 - RNA, 21 nt, Artificial Sequence
  Synthetic
ggagaacaucacaucaggauu

SEQ ID NO: 94104 - RNA, 22 nt, Artificial Sequence
  Synthetic
uggagaacaucacaucaggauu

SEQ ID NO: 94105 - RNA, 23 nt, Artificial Sequence
  Synthetic
auggagaacaucacaucaggauu

SEQ ID NO: 94106 - RNA, 24 nt, Artificial Sequence
  Synthetic
cauggagaacaucacaucaggauu

SEQ ID NO: 94107 - RNA, 18 nt, Artificial Sequence
  Synthetic
ucaaucuucucgaggauu

SEQ ID NO: 94108 - RNA, 19 nt, Artificial Sequence
  Synthetic
gucaaucuucucgaggauu

SEQ ID NO: 94109 - RNA, 20 nt, Artificial Sequence
  Synthetic
cgucaaucuucucgaggauu

SEQ ID NO: 94110 - RNA, 21 nt, Artificial Sequence
  Synthetic
ucgucaaucuucucgaggauu

SEQ ID NO: 94111 - RNA, 22 nt, Artificial Sequence
  Synthetic
aucgucaaucuucucgaggauu

SEQ ID NO: 94112 - RNA, 23 nt, Artificial Sequence
  Synthetic
uaucgucaaucuucucgaggauu

SEQ ID NO: 94113 - RNA, 24 nt, Artificial Sequence
  Synthetic
  misc_feature (1)..(1): n is a, c, g, or u
nuaucgucaaucuucucgaggauu

SEQ ID NO: 94114 - RNA, 18 nt, Artificial Sequence
  Synthetic
uuaacaggccuauugauu

SEQ ID NO: 94115 - RNA, 19 nt, Artificial Sequence
  Synthetic
guuaacaggccuauugauu

SEQ ID NO: 94116 - RNA, 20 nt, Artificial Sequence
  Synthetic
uguuaacaggccuauugauu

SEQ ID NO: 94117 - RNA, 21 nt, Artificial Sequence
  Synthetic
cuguuaacaggccuauugauu

SEQ ID NO: 94118 - RNA, 22 nt, Artificial Sequence
  Synthetic
ccuguuaacaggccuauugauu

SEQ ID NO: 94119 - RNA, 23 nt, Artificial Sequence
  Synthetic
uccuguuaacaggccuauugauu

SEQ ID NO: 94120 - RNA, 24 nt, Artificial Sequence
  Synthetic
uuccuguuaacaggccuauugauu

SEQ ID NO: 94121 - RNA, 18 nt, Artificial Sequence
  Synthetic
uuugugggucaccauauu

SEQ ID NO: 94122 - RNA, 19 nt, Artificial Sequence
  Synthetic
uuuugugggucaccauauu

SEQ ID NO: 94123 - RNA, 20 nt, Artificial Sequence
  Synthetic
auuuugugggucaccauauu

SEQ ID NO: 94124 - RNA, 21 nt, Artificial Sequence
  Synthetic
cauuuugugggucaccauauu

SEQ ID NO: 94125 - RNA, 22 nt, Artificial Sequence
  Synthetic
ucauuuugugggucaccauauu

SEQ ID NO: 94126 - RNA, 23 nt, Artificial Sequence
  Synthetic
cucauuuugugggucaccauauu

SEQ ID NO: 94127 - RNA, 24 nt, Artificial Sequence
  Synthetic
ccucauuuugugggucaccauauu

SEQ ID NO: 94128 - RNA, 18 nt, Artificial Sequence
  Synthetic
uauggaugaugugguauu

SEQ ID NO: 94129 - RNA, 19 nt, Artificial Sequence
  Synthetic
auauggaugaugugguauu

SEQ ID NO: 94130 - RNA, 20 nt, Artificial Sequence
  Synthetic
uauauggaugaugugguauu

SEQ ID NO: 94131 - RNA, 21 nt, Artificial Sequence
  Synthetic
uuauauggaugaugugguauu

SEQ ID NO: 94132 - RNA, 22 nt, Artificial Sequence
  Synthetic
guuauauggaugaugugguauu

SEQ ID NO: 94133 - RNA, 23 nt, Artificial Sequence
  Synthetic
aguuauauggaugaugugguauu

SEQ ID NO: 94134 - RNA, 24 nt, Artificial Sequence
  Synthetic
caguuauauggaugaugugguauu

SEQ ID NO: 94135 - RNA, 18 nt, Artificial Sequence
  Synthetic
ucacuuucucgccaacuu

SEQ ID NO: 94136 - RNA, 19 nt, Artificial Sequence
  Synthetic
uucacuuucucgccaacuu

SEQ ID NO: 94137 - RNA, 20 nt, Artificial Sequence
  Synthetic
uuucacuuucucgccaacuu

SEQ ID NO: 94138 - RNA, 21 nt, Artificial Sequence
  Synthetic
cuuucacuuucucgccaacuu

SEQ ID NO: 94139 - RNA, 22 nt, Artificial Sequence
  Synthetic
gcuuucacuuucucgccaacuu

SEQ ID NO: 94140 - RNA, 23 nt, Artificial Sequence
  Synthetic
ggcuuucacuuucucgccaacuu

SEQ ID NO: 94141 - RNA, 24 nt, Artificial Sequence
  Synthetic
aggcuuucacuuucucgccaacuu

SEQ ID NO: 94142 - RNA, 18 nt, Artificial Sequence
  Synthetic
ccuaucuuaucaacacuu

SEQ ID NO: 94143 - RNA, 19 nt, Artificial Sequence
  Synthetic
cccuaucuuaucaacacuu

SEQ ID NO: 94144 - RNA, 20 nt, Artificial Sequence
  Synthetic
ccccuaucuuaucaacacuu

SEQ ID NO: 94145 - RNA, 21 nt, Artificial Sequence
  Synthetic
gccccuaucuuaucaacacuu

SEQ ID NO: 94146 - RNA, 22 nt, Artificial Sequence
  Synthetic
ugccccuaucuuaucaacacuu

SEQ ID NO: 94147 - RNA, 23 nt, Artificial Sequence
  Synthetic
augccccuaucuuaucaacacuu

SEQ ID NO: 94148 - RNA, 24 nt, Artificial Sequence
  Synthetic
aaugccccuaucuuaucaacacuu

SEQ ID NO: 94149 - RNA, 18 nt, Artificial Sequence
  Synthetic
acauuucuugucucacuu

SEQ ID NO: 94150 - RNA, 19 nt, Artificial Sequence
  Synthetic
cacauuucuugucucacuu

SEQ ID NO: 94151 - RNA, 20 nt, Artificial Sequence
  Synthetic
ucacauuucuugucucacuu

SEQ ID NO: 94152 - RNA, 21 nt, Artificial Sequence
  Synthetic
uucacauuucuugucucacuu

SEQ ID NO: 94153 - RNA, 22 nt, Artificial Sequence
  Synthetic
uuucacauuucuugucucacuu

SEQ ID NO: 94154 - RNA, 23 nt, Artificial Sequence
  Synthetic
guuucacauuucuugucucacuu

SEQ ID NO: 94155 - RNA, 24 nt, Artificial Sequence
  Synthetic
gguuucacauuucuugucucacuu

SEQ ID NO: 94156 - RNA, 18 nt, Artificial Sequence
  Synthetic
cgaccuugaggcauacuu

SEQ ID NO: 94157 - RNA, 19 nt, Artificial Sequence
  Synthetic
ccgaccuugaggcauacuu

SEQ ID NO: 94158 - RNA, 20 nt, Artificial Sequence
  Synthetic
accgaccuugaggcauacuu

SEQ ID NO: 94159 - RNA, 21 nt, Artificial Sequence
  Synthetic
gaccgaccuugaggcauacuu

SEQ ID NO: 94160 - RNA, 22 nt, Artificial Sequence
  Synthetic
cgaccgaccuugaggcauacuu

SEQ ID NO: 94161 - RNA, 23 nt, Artificial Sequence
  Synthetic
acgaccgaccuugaggcauacuu

SEQ ID NO: 94162 - RNA, 24 nt, Artificial Sequence
  Synthetic
aacgaccgaccuugaggcauacuu

SEQ ID NO: 94163 - RNA, 18 nt, Artificial Sequence
  Synthetic
ucuaguuaaucauuacuu

SEQ ID NO: 94164 - RNA, 19 nt, Artificial Sequence
  Synthetic
aucuaguuaaucauuacuu

SEQ ID NO: 94165 - RNA, 20 nt, Artificial Sequence
  Synthetic
caucuaguuaaucauuacuu

SEQ ID NO: 94166 - RNA, 21 nt, Artificial Sequence
  Synthetic
acaucuaguuaaucauuacuu

SEQ ID NO: 94167 - RNA, 22 nt, Artificial Sequence
  Synthetic
aacaucuaguuaaucauuacuu

SEQ ID NO: 94168 - RNA, 23 nt, Artificial Sequence
  Synthetic
gaacaucuaguuaaucauuacuu

SEQ ID NO: 94169 - RNA, 24 nt, Artificial Sequence
  Synthetic
agaacaucuaguuaaucauuacuu

SEQ ID NO: 94170 - RNA, 18 nt, Artificial Sequence
  Synthetic
gcgcaugcguggaaccuu

SEQ ID NO: 94171 - RNA, 19 nt, Artificial Sequence
  Synthetic
agcgcaugcguggaaccuu

SEQ ID NO: 94172 - RNA, 20 nt, Artificial Sequence
  Synthetic
cagcgcaugcguggaaccuu

SEQ ID NO: 94173 - RNA, 21 nt, Artificial Sequence
  Synthetic
ucagcgcaugcguggaaccuu

SEQ ID NO: 94174 - RNA, 22 nt, Artificial Sequence
  Synthetic
aucagcgcaugcguggaaccuu

SEQ ID NO: 94175 - RNA, 23 nt, Artificial Sequence
  Synthetic
caucagcgcaugcguggaaccuu

SEQ ID NO: 94176 - RNA, 24 nt, Artificial Sequence
  Synthetic
ccaucagcgcaugcguggaaccuu

SEQ ID NO: 94177 - RNA, 18 nt, Artificial Sequence
  Synthetic
  misc_feature (5)..(5): n is a, c, g, or u
ccccncugucuccaccuu

SEQ ID NO: 94178 - RNA, 19 nt, Artificial Sequence
  Synthetic
  misc_feature (6)..(6): n is a, c, g, or u
accccncugucuccaccuu

SEQ ID NO: 94179 - RNA, 20 nt, Artificial Sequence
  Synthetic
  misc_feature (7)..(7): n is a, c, g, or u
uaccccncugucuccaccuu

SEQ ID NO: 94180 - RNA, 21 nt, Artificial Sequence
  Synthetic
  misc_feature (8)..(8): n is a, c, g, or u
cuaccccncugucuccaccuu

SEQ ID NO: 94181 - RNA, 22 nt, Artificial Sequence
  Synthetic
  misc_feature (9)..(9): n is a, c, g, or u
ccuaccccncugucuccaccuu

SEQ ID NO: 94182 - RNA, 23 nt, Artificial Sequence
  Synthetic
  misc_feature (10)..(10): n is a, c, g, or u
gccuaccccncugucuccaccuu

SEQ ID NO: 94183 - RNA, 24 nt, Artificial Sequence
  Synthetic
  misc_feature (11)..(11): n is a, c, g, or u
agccuaccccncugucuccaccuu

SEQ ID NO: 94184 - RNA, 18 nt, Artificial Sequence
  Synthetic
aucccgcggacgacccuu

SEQ ID NO: 94185 - RNA, 19 nt, Artificial Sequence
  Synthetic
aaucccgcggacgacccuu

SEQ ID NO: 94186 - RNA, 20 nt, Artificial Sequence
  Synthetic
gaaucccgcggacgacccuu

SEQ ID NO: 94187 - RNA, 18 nt, Artificial Sequence
  Synthetic
ccaguuggauccagccuu

SEQ ID NO: 94188 - RNA, 19 nt, Artificial Sequence
  Synthetic
accaguuggauccagccuu

SEQ ID NO: 94189 - RNA, 20 nt, Artificial Sequence
  Synthetic
caccaguuggauccagccuu

SEQ ID NO: 94190 - RNA, 21 nt, Artificial Sequence
  Synthetic
ccaccaguuggauccagccuu

SEQ ID NO: 94191 - RNA, 22 nt, Artificial Sequence
  Synthetic
accaccaguuggauccagccuu

SEQ ID NO: 94192 - RNA, 23 nt, Artificial Sequence
  Synthetic
gaccaccaguuggauccagccuu

SEQ ID NO: 94193 - RNA, 24 nt, Artificial Sequence
  Synthetic
cgaccaccaguuggauccagccuu

SEQ ID NO: 94194 - RNA, 18 nt, Artificial Sequence
  Synthetic
ccaccgcacggaggccuu

SEQ ID NO: 94195 - RNA, 19 nt, Artificial Sequence
  Synthetic
cccaccgcacggaggccuu

SEQ ID NO: 94196 - RNA, 20 nt, Artificial Sequence
  Synthetic
ccccaccgcacggaggccuu

SEQ ID NO: 94197 - RNA, 18 nt, Artificial Sequence
  Synthetic
  misc_feature (1)..(1): n is a, c, g, or u
  misc_feature (14)..(14): n is a, c, g, or u
ncauggacauuganccuu

SEQ ID NO: 94198 - RNA, 19 nt, Artificial Sequence
  Synthetic
  misc_feature (2)..(2): n is a, c, g, or u
  misc_feature (15)..(15): n is a, c, g, or u
gncauggacauuganccuu

SEQ ID NO: 94199 - RNA, 20 nt, Artificial Sequence
  Synthetic
  misc_feature (3)..(3): n is a, c, g, or u
  misc_feature (16)..(16): n is a, c, g, or u
ggncauggacauuganccuu

SEQ ID NO: 94200 - RNA, 21 nt, Artificial Sequence
  Synthetic
  misc_feature (1)..(1): n is a, c, g, or u
  misc_feature (4)..(4): n is a, c, g, or u
  misc_feature (17)..(17): n is a, c, g, or u
nggncauggacauuganccuu

SEQ ID NO: 94201 - RNA, 22 nt, Artificial Sequence
  Synthetic
  misc_feature (2)..(2): n is a, c, g, or u
  misc_feature (5)..(5): n is a, c, g, or u
  misc_feature (18)..(18): n is a, c, g, or u
unggncauggacauuganccuu

SEQ ID NO: 94202 - RNA, 23 nt, Artificial Sequence
  Synthetic
  misc_feature (3)..(3): n is a, c, g, or u
  misc_feature (6)..(6): n is a, c, g, or u
  misc_feature (19)..(19): n is a, c, g, or u
uunggncauggacauuganccuu

SEQ ID NO: 94203 - RNA, 24 nt, Artificial Sequence
  Synthetic
  misc_feature (4)..(4): n is a, c, g, or u
  misc_feature (7)..(7): n is a, c, g, or u
  misc_feature (20)..(20): n is a, c, g, or u
uuunggncauggacauuganccuu

SEQ ID NO: 94204 - RNA, 18 nt, Artificial Sequence
  Synthetic
uucgcacuccuccagcuu

SEQ ID NO: 94205 - RNA, 19 nt, Artificial Sequence
  Synthetic
auucgcacuccuccagcuu

SEQ ID NO: 94206 - RNA, 20 nt, Artificial Sequence
  Synthetic
gauucgcacuccuccagcuu

SEQ ID NO: 94207 - RNA, 21 nt, Artificial Sequence
  Synthetic
ggauucgcacuccuccagcuu

SEQ ID NO: 94208 - RNA, 22 nt, Artificial Sequence
  Synthetic
uggauucgcacuccuccagcuu

SEQ ID NO: 94209 - RNA, 23 nt, Artificial Sequence
  Synthetic
guggauucgcacuccuccagcuu

SEQ ID NO: 94210 - RNA, 24 nt, Artificial Sequence
  Synthetic
uguggauucgcacuccuccagcuu

SEQ ID NO: 94211 - RNA, 18 nt, Artificial Sequence
  Synthetic
  misc_feature (11)..(11): n is a, c, g, or u
ucccaucaucnugggcuu

SEQ ID NO: 94212 - RNA, 19 nt, Artificial Sequence
  Synthetic
  misc_feature (12)..(12): n is a, c, g, or u
aucccaucaucnugggcuu

SEQ ID NO: 94213 - RNA, 20 nt, Artificial Sequence
  Synthetic
  misc_feature (13)..(13): n is a, c, g, or u
caucccaucaucnugggcuu

SEQ ID NO: 94214 - RNA, 21 nt, Artificial Sequence
  Synthetic
  misc_feature (14)..(14): n is a, c, g, or u
ccaucccaucaucnugggcuu

SEQ ID NO: 94215 - RNA, 22 nt, Artificial Sequence
  Synthetic
  misc_feature (15)..(15): n is a, c, g, or u
cccaucccaucaucnugggcuu

SEQ ID NO: 94216 - RNA, 23 nt, Artificial Sequence
  Synthetic
  misc_feature (16)..(16): n is a, c, g, or u
ucccaucccaucaucnugggcuu

SEQ ID NO: 94217 - RNA, 24 nt, Artificial Sequence
  Synthetic
  misc_feature (17)..(17): n is a, c, g, or u
uucccaucccaucaucnugggcuu

SEQ ID NO: 94218 - RNA, 18 nt, Artificial Sequence
  Synthetic
  misc_feature (3)..(3): n is a, c, g, or u
  misc_feature (5)..(5): n is a, c, g, or u
ucncnuaucgucaaucuu

SEQ ID NO: 94219 - RNA, 19 nt, Artificial Sequence
  Synthetic
  misc_feature (4)..(4): n is a, c, g, or u
  misc_feature (6)..(6): n is a, c, g, or u
cucncnuaucgucaaucuu

SEQ ID NO: 94220 - RNA, 20 nt, Artificial Sequence
  Synthetic
  misc_feature (5)..(5): n is a, c, g, or u
  misc_feature (7)..(7): n is a, c, g, or u
ucucncnuaucgucaaucuu

SEQ ID NO: 94221 - RNA, 21 nt, Artificial Sequence
  Synthetic
  misc_feature (6)..(6): n is a, c, g, or u
  misc_feature (8)..(8): n is a, c, g, or u
cucucncnuaucgucaaucuu

SEQ ID NO: 94222 - RNA, 22 nt, Artificial Sequence
  Synthetic
  misc_feature (1)..(1): n is a, c, g, or u
  misc_feature (7)..(7): n is a, c, g, or u
  misc_feature (9)..(9): n is a, c, g, or u
ncucucncnuaucgucaaucuu

SEQ ID NO: 94223 - RNA, 23 nt, Artificial Sequence
  Synthetic
  misc_feature (2)..(2): n is a, c, g, or u
  misc_feature (8)..(8): n is a, c, g, or u
  misc_feature (10)..(10): n is a, c, g, or u
gncucucncnuaucgucaaucuu

SEQ ID NO: 94224 - RNA, 24 nt, Artificial Sequence
  Synthetic
  misc_feature (3)..(3): n is a, c, g, or u
  misc_feature (9)..(9): n is a, c, g, or u
  misc_feature (11)..(11): n is a, c, g, or u
ugncucucncnuaucgucaaucuu

SEQ ID NO: 94225 - RNA, 18 nt, Artificial Sequence
  Synthetic
  misc_feature (4)..(4): n is a, c, g, or u
accnaaugccccuaucuu

SEQ ID NO: 94226 - RNA, 19 nt, Artificial Sequence
  Synthetic
  misc_feature (5)..(5): n is a, c, g, or u
caccnaaugccccuaucuu

SEQ ID NO: 94227 - RNA, 20 nt, Artificial Sequence
  Synthetic
  misc_feature (6)..(6): n is a, c, g, or u
ccaccnaaugccccuaucuu

SEQ ID NO: 94228 - RNA, 21 nt, Artificial Sequence
  Synthetic
  misc_feature (7)..(7): n is a, c, g, or u
accaccnaaugccccuaucuu

SEQ ID NO: 94229 - RNA, 22 nt, Artificial Sequence
  Synthetic
  misc_feature (8)..(8): n is a, c, g, or u
gaccaccnaaugccccuaucuu

SEQ ID NO: 94230 - RNA, 23 nt, Artificial Sequence
  Synthetic
  misc_feature (9)..(9): n is a, c, g, or u
agaccaccnaaugccccuaucuu

SEQ ID NO: 94231 - RNA, 24 nt, Artificial Sequence
  Synthetic
  misc_feature (10)..(10): n is a, c, g, or u
uagaccaccnaaugccccuaucuu

SEQ ID NO: 94232 - RNA, 18 nt, Artificial Sequence
  Synthetic
uagaguauuuggugucuu

SEQ ID NO: 94233 - RNA, 19 nt, Artificial Sequence
  Synthetic
  misc_feature (1)..(1): n is a, c, g, or u
nuagaguauuuggugucuu

SEQ ID NO: 94234 - RNA, 20 nt, Artificial Sequence
  Synthetic
  misc_feature (1)..(2): n is a, c, g, or u
nnuagaguauuuggugucuu

SEQ ID NO: 94235 - RNA, 21 nt, Artificial Sequence
  Synthetic
  misc_feature (2)..(3): n is a, c, g, or u
unnuagaguauuuggugucuu

SEQ ID NO: 94236 - RNA, 22 nt, Artificial Sequence
  Synthetic
  misc_feature (3)..(4): n is a, c, g, or u
gunnuagaguauuuggugucuu

SEQ ID NO: 94237 - RNA, 23 nt, Artificial Sequence
  Synthetic
  misc_feature (1)..(1): n is a, c, g, or u
  misc_feature (4)..(5): n is a, c, g, or u
ngunnuagaguauuuggugucuu

SEQ ID NO: 94238 - RNA, 24 nt, Artificial Sequence
  Synthetic
  misc_feature (2)..(2): n is a, c, g, or u
  misc_feature (5)..(6): n is a, c, g, or u
cngunnuagaguauuuggugucuu

SEQ ID NO: 94239 - RNA, 18 nt, Artificial Sequence
  Synthetic
gugggucaccauauucuu

SEQ ID NO: 94240 - RNA, 19 nt, Artificial Sequence
  Synthetic
ugugggucaccauauucuu

SEQ ID NO: 94241 - RNA, 20 nt, Artificial Sequence
  Synthetic
uugugggucaccauauucuu

SEQ ID NO: 94242 - RNA, 21 nt, Artificial Sequence
  Synthetic
uuugugggucaccauauucuu

SEQ ID NO: 94243 - RNA, 22 nt, Artificial Sequence
  Synthetic
uuuugugggucaccauauucuu

SEQ ID NO: 94244 - RNA, 23 nt, Artificial Sequence
  Synthetic
auuuugugggucaccauauucuu

SEQ ID NO: 94245 - RNA, 24 nt, Artificial Sequence
  Synthetic
cauuuugugggucaccauauucuu

SEQ ID NO: 94246 - RNA, 18 nt, Artificial Sequence
  Synthetic
aucuucuuguugguucuu

SEQ ID NO: 94247 - RNA, 19 nt, Artificial Sequence
  Synthetic
caucuucuuguugguucuu

SEQ ID NO: 94248 - RNA, 20 nt, Artificial Sequence
  Synthetic
ucaucuucuuguugguucuu

SEQ ID NO: 94249 - RNA, 21 nt, Artificial Sequence
  Synthetic
cucaucuucuuguugguucuu

SEQ ID NO: 94250 - RNA, 22 nt, Artificial Sequence
  Synthetic
ccucaucuucuuguugguucuu

SEQ ID NO: 94251 - RNA, 23 nt, Artificial Sequence
  Synthetic
gccucaucuucuuguugguucuu

SEQ ID NO: 94252 - RNA, 24 nt, Artificial Sequence
  Synthetic
ugccucaucuucuuguugguucuu

SEQ ID NO: 94253 - RNA, 18 nt, Artificial Sequence
  Synthetic
acaggcgggguuuuucuu

SEQ ID NO: 94254 - RNA, 19 nt, Artificial Sequence
  Synthetic
uacaggcgggguuuuucuu

SEQ ID NO: 94255 - RNA, 20 nt, Artificial Sequence
  Synthetic
uuacaggcgggguuuuucuu

SEQ ID NO: 94256 - RNA, 21 nt, Artificial Sequence
  Synthetic
guuacaggcgggguuuuucuu

SEQ ID NO: 94257 - RNA, 22 nt, Artificial Sequence
  Synthetic
uguuacaggcgggguuuuucuu

SEQ ID NO: 94258 - RNA, 23 nt, Artificial Sequence
  Synthetic
guguuacaggcgggguuuuucuu

SEQ ID NO: 94259 - RNA, 24 nt, Artificial Sequence
  Synthetic
cguguuacaggcgggguuuuucuu

SEQ ID NO: 94260 - RNA, 18 nt, Artificial Sequence
  Synthetic
cugcugguggcuccaguu

SEQ ID NO: 94261 - RNA, 19 nt, Artificial Sequence
  Synthetic
ccugcugguggcuccaguu

SEQ ID NO: 94262 - RNA, 20 nt, Artificial Sequence
  Synthetic
cccugcugguggcuccaguu

SEQ ID NO: 94263 - RNA, 21 nt, Artificial Sequence
  Synthetic
ucccugcugguggcuccaguu

SEQ ID NO: 94264 - RNA, 22 nt, Artificial Sequence
  Synthetic
uucccugcugguggcuccaguu

SEQ ID NO: 94265 - RNA, 23 nt, Artificial Sequence
  Synthetic
uuucccugcugguggcuccaguu

SEQ ID NO: 94266 - RNA, 24 nt, Artificial Sequence
  Synthetic
auuucccugcugguggcuccaguu

SEQ ID NO: 94267 - RNA, 18 nt, Artificial Sequence
  Synthetic
  misc_feature (4)..(4): n is a, c, g, or u
uaangacugggaggaguu

SEQ ID NO: 94268 - RNA, 19 nt, Artificial Sequence
  Synthetic
  misc_feature (5)..(5): n is a, c, g, or u
uuaangacugggaggaguu

SEQ ID NO: 94269 - RNA, 20 nt, Artificial Sequence
  Synthetic
  misc_feature (6)..(6): n is a, c, g, or u
uuuaangacugggaggaguu

SEQ ID NO: 94270 - RNA, 21 nt, Artificial Sequence
  Synthetic
  misc_feature (7)..(7): n is a, c, g, or u
guuuaangacugggaggaguu

SEQ ID NO: 94271 - RNA, 22 nt, Artificial Sequence
  Synthetic
  misc_feature (8)..(8): n is a, c, g, or u
uguuuaangacugggaggaguu

SEQ ID NO: 94272 - RNA, 23 nt, Artificial Sequence
  Synthetic
  misc_feature (9)..(9): n is a, c, g, or u
uuguuuaangacugggaggaguu

SEQ ID NO: 94273 - RNA, 24 nt, Artificial Sequence
  Synthetic
  misc_feature (10)..(10): n is a, c, g, or u
uuuguuuaangacugggaggaguu

SEQ ID NO: 94274 - RNA, 18 nt, Artificial Sequence
  Synthetic
gccauuuguucagugguu

SEQ ID NO: 94275 - RNA, 19 nt, Artificial Sequence
  Synthetic
ugccauuuguucagugguu

SEQ ID NO: 94276 - RNA, 20 nt, Artificial Sequence
  Synthetic
gugccauuuguucagugguu

SEQ ID NO: 94277 - RNA, 21 nt, Artificial Sequence
  Synthetic
agugccauuuguucagugguu

SEQ ID NO: 94278 - RNA, 22 nt, Artificial Sequence
  Synthetic
uagugccauuuguucagugguu

SEQ ID NO: 94279 - RNA, 23 nt, Artificial Sequence
  Synthetic
cuagugccauuuguucagugguu

SEQ ID NO: 94280 - RNA, 24 nt, Artificial Sequence
  Synthetic
acuagugccauuuguucagugguu

SEQ ID NO: 94281 - RNA, 18 nt, Artificial Sequence
  Synthetic
  misc_feature (15)..(15): n is a, c, g, or u
agguuuuauccaaanguu

SEQ ID NO: 94282 - RNA, 19 nt, Artificial Sequence
  Synthetic
  misc_feature (16)..(16): n is a, c, g, or u
uagguuuuauccaaanguu

SEQ ID NO: 94283 - RNA, 20 nt, Artificial Sequence
  Synthetic
  misc_feature (17)..(17): n is a, c, g, or u
cuagguuuuauccaaanguu

SEQ ID NO: 94284 - RNA, 21 nt, Artificial Sequence
  Synthetic
  misc_feature (18)..(18): n is a, c, g, or u
gcuagguuuuauccaaanguu

SEQ ID NO: 94285 - RNA, 22 nt, Artificial Sequence
  Synthetic
  misc_feature (19)..(19): n is a, c, g, or u
ugcuagguuuuauccaaanguu

SEQ ID NO: 94286 - RNA, 23 nt, Artificial Sequence
  Synthetic
  misc_feature (20)..(20): n is a, c, g, or u
cugcuagguuuuauccaaanguu

SEQ ID NO: 94287 - RNA, 24 nt, Artificial Sequence
  Synthetic
  misc_feature (21)..(21): n is a, c, g, or u
ccugcuagguuuuauccaaanguu

SEQ ID NO: 94288 - RNA, 18 nt, Artificial Sequence
  Synthetic
  misc_feature (2)..(2): n is a, c, g, or u
anaaaaucaaagaauguu

SEQ ID NO: 94289 - RNA, 19 nt, Artificial Sequence
  Synthetic
  misc_feature (3)..(3): n is a, c, g, or u
canaaaaucaaagaauguu

SEQ ID NO: 94290 - RNA, 20 nt, Artificial Sequence
  Synthetic
  misc_feature (4)..(4): n is a, c, g, or u
acanaaaaucaaagaauguu

SEQ ID NO: 94291 - RNA, 21 nt, Artificial Sequence
  Synthetic
  misc_feature (1)..(1): n is a, c, g, or u
  misc_feature (5)..(5): n is a, c, g, or u
nacanaaaaucaaagaauguu

SEQ ID NO: 94292 - RNA, 22 nt, Artificial Sequence
  Synthetic
  misc_feature (2)..(2): n is a, c, g, or u
  misc_feature (6)..(6): n is a, c, g, or u
anacanaaaaucaaagaauguu

SEQ ID NO: 94293 - RNA, 23 nt, Artificial Sequence
  Synthetic
  misc_feature (3)..(3): n is a, c, g, or u
  misc_feature (7)..(7): n is a, c, g, or u
canacanaaaaucaaagaauguu

SEQ ID NO: 94294 - RNA, 24 nt, Artificial Sequence
  Synthetic
  misc_feature (4)..(4): n is a, c, g, or u
  misc_feature (8)..(8): n is a, c, g, or u
ucanacanaaaaucaaagaauguu

SEQ ID NO: 94295 - RNA, 18 nt, Artificial Sequence
  Synthetic
cuuccggagacuacuguu

SEQ ID NO: 94296 - RNA, 19 nt, Artificial Sequence
  Synthetic
acuuccggagacuacuguu

SEQ ID NO: 94297 - RNA, 20 nt, Artificial Sequence
  Synthetic
cacuuccggagacuacuguu

SEQ ID NO: 94298 - RNA, 21 nt, Artificial Sequence
  Synthetic
acacuuccggagacuacuguu

SEQ ID NO: 94299 - RNA, 22 nt, Artificial Sequence
  Synthetic
aacacuuccggagacuacuguu

SEQ ID NO: 94300 - RNA, 23 nt, Artificial Sequence
  Synthetic
caacacuuccggagacuacuguu

SEQ ID NO: 94301 - RNA, 24 nt, Artificial Sequence
  Synthetic
ucaacacuuccggagacuacuguu

SEQ ID NO: 94302 - RNA, 18 nt, Artificial Sequence
  Synthetic
uuuagaaaacuuccuguu

SEQ ID NO: 94303 - RNA, 19 nt, Artificial Sequence
  Synthetic
uuuuagaaaacuuccuguu

SEQ ID NO: 94304 - RNA, 20 nt, Artificial Sequence
  Synthetic
guuuuagaaaacuuccuguu

SEQ ID NO: 94305 - RNA, 21 nt, Artificial Sequence
  Synthetic
uguuuuagaaaacuuccuguu

SEQ ID NO: 94306 - RNA, 22 nt, Artificial Sequence
  Synthetic
auguuuuagaaaacuuccuguu

SEQ ID NO: 94307 - RNA, 23 nt, Artificial Sequence
  Synthetic
aauguuuuagaaaacuuccuguu

SEQ ID NO: 94308 - RNA, 24 nt, Artificial Sequence
  Synthetic
gaauguuuuagaaaacuuccuguu

SEQ ID NO: 94309 - RNA, 18 nt, Artificial Sequence
  Synthetic
  misc_feature (10)..(10): n is a, c, g, or u
aggaccccuncucguguu

SEQ ID NO: 94310 - RNA, 19 nt, Artificial Sequence
  Synthetic
  misc_feature (11)..(11): n is a, c, g, or u
uaggaccccuncucguguu

SEQ ID NO: 94311 - RNA, 20 nt, Artificial Sequence
  Synthetic
  misc_feature (12)..(12): n is a, c, g, or u
cuaggaccccuncucguguu

SEQ ID NO: 94312 - RNA, 21 nt, Artificial Sequence
  Synthetic
  misc_feature (13)..(13): n is a, c, g, or u
ccuaggaccccuncucguguu

SEQ ID NO: 94313 - RNA, 22 nt, Artificial Sequence
  Synthetic
  misc_feature (14)..(14): n is a, c, g, or u
uccuaggaccccuncucguguu

SEQ ID NO: 94314 - RNA, 23 nt, Artificial Sequence
  Synthetic
  misc_feature (15)..(15): n is a, c, g, or u
uuccuaggaccccuncucguguu

SEQ ID NO: 94315 - RNA, 24 nt, Artificial Sequence
  Synthetic
  misc_feature (16)..(16): n is a, c, g, or u
auuccuaggaccccuncucguguu

SEQ ID NO: 94316 - RNA, 18 nt, Artificial Sequence
  Synthetic
ggcgggguuuuucuuguu

SEQ ID NO: 94317 - RNA, 19 nt, Artificial Sequence
  Synthetic
aggcgggguuuuucuuguu

SEQ ID NO: 94318 - RNA, 20 nt, Artificial Sequence
  Synthetic
caggcgggguuuuucuuguu

SEQ ID NO: 94319 - RNA, 21 nt, Artificial Sequence
  Synthetic
acaggcgggguuuuucuuguu

SEQ ID NO: 94320 - RNA, 22 nt, Artificial Sequence
  Synthetic
uacaggcgggguuuuucuuguu

SEQ ID NO: 94321 - RNA, 23 nt, Artificial Sequence
  Synthetic
uuacaggcgggguuuuucuuguu

SEQ ID NO: 94322 - RNA, 24 nt, Artificial Sequence
  Synthetic
guuacaggcgggguuuuucuuguu

SEQ ID NO: 94323 - RNA, 18 nt, Artificial Sequence
  Synthetic
  misc_feature (16)..(16): n is a, c, g, or u
caaaaaaugugaacanuu

SEQ ID NO: 94324 - RNA, 19 nt, Artificial Sequence
  Synthetic
  misc_feature (17)..(17): n is a, c, g, or u
ucaaaaaaugugaacanuu

SEQ ID NO: 94325 - RNA, 20 nt, Artificial Sequence
  Synthetic
  misc_feature (18)..(18): n is a, c, g, or u
aucaaaaaaugugaacanuu

SEQ ID NO: 94326 - RNA, 21 nt, Artificial Sequence
  Synthetic
  misc_feature (1)..(1): n is a, c, g, or u
  misc_feature (19)..(19): n is a, c, g, or u
naucaaaaaaugugaacanuu

SEQ ID NO: 94327 - RNA, 22 nt, Artificial Sequence
  Synthetic
  misc_feature (2)..(2): n is a, c, g, or u
  misc_feature (20)..(20): n is a, c, g, or u
unaucaaaaaaugugaacanuu

SEQ ID NO: 94328 - RNA, 23 nt, Artificial Sequence
  Synthetic
  misc_feature (3)..(3): n is a, c, g, or u
  misc_feature (21)..(21): n is a, c, g, or u
aunaucaaaaaaugugaacanuu

SEQ ID NO: 94329 - RNA, 24 nt, Artificial Sequence
  Synthetic
  misc_feature (4)..(4): n is a, c, g, or u
  misc_feature (22)..(22): n is a, c, g, or u
caunaucaaaaaaugugaacanuu

SEQ ID NO: 94330 - RNA, 18 nt, Artificial Sequence
  Synthetic
  misc_feature (8)..(8): n is a, c, g, or u
  misc_feature (16)..(16): n is a, c, g, or u
gggcauanuacaaacnuu

SEQ ID NO: 94331 - RNA, 19 nt, Artificial Sequence
  Synthetic
  misc_feature (9)..(9): n is a, c, g, or u
  misc_feature (17)..(17): n is a, c, g, or u
agggcauanuacaaacnuu

SEQ ID NO: 94332 - RNA, 20 nt, Artificial Sequence
  Synthetic
  misc_feature (10)..(10): n is a, c, g, or u
  misc_feature (18)..(18): n is a, c, g, or u
cagggcauanuacaaacnuu

SEQ ID NO: 94333 - RNA, 21 nt, Artificial Sequence
  Synthetic
  misc_feature (11)..(11): n is a, c, g, or u
  misc_feature (19)..(19): n is a, c, g, or u
ucagggcauanuacaaacnuu

SEQ ID NO: 94334 - RNA, 22 nt, Artificial Sequence
  Synthetic
  misc_feature (12)..(12): n is a, c, g, or u
  misc_feature (20)..(20): n is a, c, g, or u
cucagggcauanuacaaacnuu

SEQ ID NO: 94335 - RNA, 23 nt, Artificial Sequence
  Synthetic
  misc_feature (13)..(13): n is a, c, g, or u
  misc_feature (21)..(21): n is a, c, g, or u
gcucagggcauanuacaaacnuu

SEQ ID NO: 94336 - RNA, 24 nt, Artificial Sequence
  Synthetic
  misc_feature (14)..(14): n is a, c, g, or u
  misc_feature (22)..(22): n is a, c, g, or u
ggcucagggcauanuacaaacnuu

SEQ ID NO: 94337 - RNA, 18 nt, Artificial Sequence
  Synthetic
guggacuucucucaauuu

SEQ ID NO: 94338 - RNA, 19 nt, Artificial Sequence
  Synthetic
gguggacuucucucaauuu

SEQ ID NO: 94339 - RNA, 20 nt, Artificial Sequence
  Synthetic
ugguggacuucucucaauuu

SEQ ID NO: 94340 - RNA, 21 nt, Artificial Sequence
  Synthetic
gugguggacuucucucaauuu

SEQ ID NO: 94341 - RNA, 22 nt, Artificial Sequence
  Synthetic
cgugguggacuucucucaauuu

SEQ ID NO: 94342 - RNA, 23 nt, Artificial Sequence
  Synthetic
ucgugguggacuucucucaauuu

SEQ ID NO: 94343 - RNA, 24 nt, Artificial Sequence
  Synthetic
cucgugguggacuucucucaauuu

SEQ ID NO: 94344 - RNA, 18 nt, Artificial Sequence
  Synthetic
  misc_feature (12)..(12): n is a, c, g, or u
cugggugggugnuaauuu

SEQ ID NO: 94345 - RNA, 19 nt, Artificial Sequence
  Synthetic
  misc_feature (13)..(13): n is a, c, g, or u
ccugggugggugnuaauuu

SEQ ID NO: 94346 - RNA, 20 nt, Artificial Sequence
  Synthetic
  misc_feature (14)..(14): n is a, c, g, or u
accugggugggugnuaauuu

SEQ ID NO: 94347 - RNA, 21 nt, Artificial Sequence
  Synthetic
  misc_feature (1)..(1): n is a, c, g, or u
  misc_feature (15)..(15): n is a, c, g, or u
naccugggugggugnuaauuu

SEQ ID NO: 94348 - RNA, 22 nt, Artificial Sequence
  Synthetic
  misc_feature (2)..(2): n is a, c, g, or u
  misc_feature (16)..(16): n is a, c, g, or u
cnaccugggugggugnuaauuu

SEQ ID NO: 94349 - RNA, 23 nt, Artificial Sequence
  Synthetic
  misc_feature (3)..(3): n is a, c, g, or u
  misc_feature (17)..(17): n is a, c, g, or u
gcnaccugggugggugnuaauuu

SEQ ID NO: 94350 - RNA, 24 nt, Artificial Sequence
  Synthetic
  misc_feature (4)..(4): n is a, c, g, or u
  misc_feature (18)..(18): n is a, c, g, or u
agcnaccugggugggugnuaauuu

SEQ ID NO: 94351 - RNA, 18 nt, Artificial Sequence
  Synthetic
  misc_feature (5)..(5): n is a, c, g, or u
acacnuagcgccucauuu

SEQ ID NO: 94352 - RNA, 19 nt, Artificial Sequence
  Synthetic
  misc_feature (6)..(6): n is a, c, g, or u
aacacnuagcgccucauuu

SEQ ID NO: 94353 - RNA, 20 nt, Artificial Sequence
  Synthetic
  misc_feature (7)..(7): n is a, c, g, or u
caacacnuagcgccucauuu

SEQ ID NO: 94354 - RNA, 21 nt, Artificial Sequence
  Synthetic
  misc_feature (8)..(8): n is a, c, g, or u
acaacacnuagcgccucauuu

SEQ ID NO: 94355 - RNA, 22 nt, Artificial Sequence
  Synthetic
  misc_feature (9)..(9): n is a, c, g, or u
aacaacacnuagcgccucauuu

SEQ ID NO: 94356 - RNA, 23 nt, Artificial Sequence
  Synthetic
  misc_feature (10)..(10): n is a, c, g, or u
aaacaacacnuagcgccucauuu

SEQ ID NO: 94357 - RNA, 24 nt, Artificial Sequence
  Synthetic
  misc_feature (11)..(11): n is a, c, g, or u
gaaacaacacnuagcgccucauuu

SEQ ID NO: 94358 - RNA, 18 nt, Artificial Sequence
  Synthetic
  misc_feature (11)..(11): n is a, c, g, or u
  misc_feature (14)..(14): n is a, c, g, or u
ggguuacucunuanauuu

SEQ ID NO: 94359 - RNA, 19 nt, Artificial Sequence
  Synthetic
  misc_feature (12)..(12): n is a, c, g, or u
  misc_feature (15)..(15): n is a, c, g, or u
gggguuacucunuanauuu

SEQ ID NO: 94360 - RNA, 20 nt, Artificial Sequence
  Synthetic
  misc_feature (13)..(13): n is a, c, g, or u
  misc_feature (16)..(16): n is a, c, g, or u
ugggguuacucunuanauuu

SEQ ID NO: 94361 - RNA, 21 nt, Artificial Sequence
  Synthetic
  misc_feature (14)..(14): n is a, c, g, or u
  misc_feature (17)..(17): n is a, c, g, or u
augggguuacucunuanauuu

SEQ ID NO: 94362 - RNA, 22 nt, Artificial Sequence
  Synthetic
  misc_feature (15)..(15): n is a, c, g, or u
  misc_feature (18)..(18): n is a, c, g, or u
gaugggguuacucunuanauuu

SEQ ID NO: 94363 - RNA, 23 nt, Artificial Sequence
  Synthetic
  misc_feature (16)..(16): n is a, c, g, or u
  misc_feature (19)..(19): n is a, c, g, or u
agaugggguuacucunuanauuu

SEQ ID NO: 94364 - RNA, 24 nt, Artificial Sequence
  Synthetic
  misc_feature (17)..(17): n is a, c, g, or u
  misc_feature (20)..(20): n is a, c, g, or u
aagaugggguuacucunuanauuu

SEQ ID NO: 94365 - RNA, 18 nt, Artificial Sequence
  Synthetic
  misc_feature (12)..(12): n is a, c, g, or u
cauaaggugggnaacuuu

SEQ ID NO: 94366 - RNA, 19 nt, Artificial Sequence
  Synthetic
  misc_feature (13)..(13): n is a, c, g, or u
ucauaaggugggnaacuuu

SEQ ID NO: 94367 - RNA, 20 nt, Artificial Sequence
  Synthetic
  misc_feature (14)..(14): n is a, c, g, or u
cucauaaggugggnaacuuu

SEQ ID NO: 94368 - RNA, 21 nt, Artificial Sequence
  Synthetic
  misc_feature (15)..(15): n is a, c, g, or u
acucauaaggugggnaacuuu

SEQ ID NO: 94369 - RNA, 22 nt, Artificial Sequence
  Synthetic
  misc_feature (16)..(16): n is a, c, g, or u
gacucauaaggugggnaacuuu

SEQ ID NO: 94370 - RNA, 23 nt, Artificial Sequence
  Synthetic
  misc_feature (17)..(17): n is a, c, g, or u
ggacucauaaggugggnaacuuu

SEQ ID NO: 94371 - RNA, 24 nt, Artificial Sequence
  Synthetic
  misc_feature (18)..(18): n is a, c, g, or u
uggacucauaaggugggnaacuuu

SEQ ID NO: 94372 - RNA, 18 nt, Artificial Sequence
  Synthetic
cauuucuugucucacuuu

SEQ ID NO: 94373 - RNA, 19 nt, Artificial Sequence
  Synthetic
acauuucuugucucacuuu

SEQ ID NO: 94374 - RNA, 20 nt, Artificial Sequence
  Synthetic
cacauuucuugucucacuuu

SEQ ID NO: 94375 - RNA, 21 nt, Artificial Sequence
  Synthetic
ucacauuucuugucucacuuu

SEQ ID NO: 94376 - RNA, 22 nt, Artificial Sequence
  Synthetic
uucacauuucuugucucacuuu

SEQ ID NO: 94377 - RNA, 23 nt, Artificial Sequence
  Synthetic
uuucacauuucuugucucacuuu

SEQ ID NO: 94378 - RNA, 24 nt, Artificial Sequence
  Synthetic
guuucacauuucuugucucacuuu

SEQ ID NO: 94379 - RNA, 18 nt, Artificial Sequence
  Synthetic
  misc_feature (4)..(4): n is a, c, g, or u
cccncugucuccaccuuu

SEQ ID NO: 94380 - RNA, 19 nt, Artificial Sequence
  Synthetic
  misc_feature (5)..(5): n is a, c, g, or u
ccccncugucuccaccuuu

SEQ ID NO: 94381 - RNA, 20 nt, Artificial Sequence
  Synthetic
  misc_feature (6)..(6): n is a, c, g, or u
accccncugucuccaccuuu

SEQ ID NO: 94382 - RNA, 21 nt, Artificial Sequence
  Synthetic
  misc_feature (7)..(7): n is a, c, g, or u
uaccccncugucuccaccuuu

SEQ ID NO: 94383 - RNA, 22 nt, Artificial Sequence
  Synthetic
  misc_feature (8)..(8): n is a, c, g, or u
cuaccccncugucuccaccuuu

SEQ ID NO: 94384 - RNA, 23 nt, Artificial Sequence
  Synthetic
  misc_feature (9)..(9): n is a, c, g, or u
ccuaccccncugucuccaccuuu

SEQ ID NO: 94385 - RNA, 24 nt, Artificial Sequence
  Synthetic
  misc_feature (10)..(10): n is a, c, g, or u
gccuaccccncugucuccaccuuu

SEQ ID NO: 94386 - RNA, 18 nt, Artificial Sequence
  Synthetic
  misc_feature (10)..(10): n is a, c, g, or u
cccaucaucnugggcuuu

SEQ ID NO: 94387 - RNA, 19 nt, Artificial Sequence
  Synthetic
  misc_feature (11)..(11): n is a, c, g, or u
ucccaucaucnugggcuuu

SEQ ID NO: 94388 - RNA, 20 nt, Artificial Sequence
  Synthetic
  misc_feature (12)..(12): n is a, c, g, or u
aucccaucaucnugggcuuu

SEQ ID NO: 94389 - RNA, 21 nt, Artificial Sequence
  Synthetic
  misc_feature (13)..(13): n is a, c, g, or u
caucccaucaucnugggcuuu

SEQ ID NO: 94390 - RNA, 22 nt, Artificial Sequence
  Synthetic
  misc_feature (14)..(14): n is a, c, g, or u
ccaucccaucaucnugggcuuu

SEQ ID NO: 94391 - RNA, 23 nt, Artificial Sequence
  Synthetic
  misc_feature (15)..(15): n is a, c, g, or u
cccaucccaucaucnugggcuuu

SEQ ID NO: 94392 - RNA, 24 nt, Artificial Sequence
  Synthetic
  misc_feature (16)..(16): n is a, c, g, or u
ucccaucccaucaucnugggcuuu

SEQ ID NO: 94393 - RNA, 18 nt, Artificial Sequence
  Synthetic
aauccucugggauucuuu

SEQ ID NO: 94394 - RNA, 19 nt, Artificial Sequence
  Synthetic
caauccucugggauucuuu

SEQ ID NO: 94395 - RNA, 20 nt, Artificial Sequence
  Synthetic
gcaauccucugggauucuuu

SEQ ID NO: 94396 - RNA, 21 nt, Artificial Sequence
  Synthetic
agcaauccucugggauucuuu

SEQ ID NO: 94397 - RNA, 22 nt, Artificial Sequence
  Synthetic
cagcaauccucugggauucuuu

SEQ ID NO: 94398 - RNA, 23 nt, Artificial Sequence
  Synthetic
ccagcaauccucugggauucuuu

SEQ ID NO: 94399 - RNA, 24 nt, Artificial Sequence
  Synthetic
accagcaauccucugggauucuuu

SEQ ID NO: 94400 - RNA, 18 nt, Artificial Sequence
  Synthetic
  misc_feature (1)..(1): n is a, c, g, or u
naaaaucaaagaauguuu

SEQ ID NO: 94401 - RNA, 19 nt, Artificial Sequence
  Synthetic
  misc_feature (2)..(2): n is a, c, g, or u
anaaaaucaaagaauguuu

SEQ ID NO: 94402 - RNA, 20 nt, Artificial Sequence
  Synthetic
  misc_feature (3)..(3): n is a, c, g, or u
canaaaaucaaagaauguuu

SEQ ID NO: 94403 - RNA, 21 nt, Artificial Sequence
  Synthetic
  misc_feature (4)..(4): n is a, c, g, or u
acanaaaaucaaagaauguuu

SEQ ID NO: 94404 - RNA, 22 nt, Artificial Sequence
  Synthetic
  misc_feature (1)..(1): n is a, c, g, or u
  misc_feature (5)..(5): n is a, c, g, or u
nacanaaaaucaaagaauguuu

SEQ ID NO: 94405 - RNA, 23 nt, Artificial Sequence
  Synthetic
  misc_feature (2)..(2): n is a, c, g, or u
  misc_feature (6)..(6): n is a, c, g, or u
anacanaaaaucaaagaauguuu

SEQ ID NO: 94406 - RNA, 24 nt, Artificial Sequence
  Synthetic
  misc_feature (3)..(3): n is a, c, g, or u
  misc_feature (7)..(7): n is a, c, g, or u
canacanaaaaucaaagaauguuu

SEQ ID NO: 94407 - RNA, 18 nt, Artificial Sequence
  Synthetic
ggucugugccaaguguuu

SEQ ID NO: 94408 - RNA, 19 nt, Artificial Sequence
  Synthetic
aggucugugccaaguguuu

SEQ ID NO: 94409 - RNA, 20 nt, Artificial Sequence
  Synthetic
caggucugugccaaguguuu

SEQ ID NO: 94410 - RNA, 21 nt, Artificial Sequence
  Synthetic
ccaggucugugccaaguguuu

SEQ ID NO: 94411 - RNA, 22 nt, Artificial Sequence
  Synthetic
gccaggucugugccaaguguuu

SEQ ID NO: 94412 - RNA, 23 nt, Artificial Sequence
  Synthetic
ggccaggucugugccaaguguuu

SEQ ID NO: 94413 - RNA, 24 nt, Artificial Sequence
  Synthetic
cggccaggucugugccaaguguuu

SEQ ID NO: 94414 - RNA, 18 nt, Artificial Sequence
  Synthetic
uucaaagacuguuuguuu

SEQ ID NO: 94415 - RNA, 19 nt, Artificial Sequence
  Synthetic
cuucaaagacuguuuguuu

SEQ ID NO: 94416 - RNA, 20 nt, Artificial Sequence
  Synthetic
acuucaaagacuguuuguuu

SEQ ID NO: 94417 - RNA, 21 nt, Artificial Sequence
  Synthetic
uacuucaaagacuguuuguuu

SEQ ID NO: 94418 - RNA, 22 nt, Artificial Sequence
  Synthetic
auacuucaaagacuguuuguuu

SEQ ID NO: 94419 - RNA, 23 nt, Artificial Sequence
  Synthetic
cauacuucaaagacuguuuguuu

SEQ ID NO: 94420 - RNA, 24 nt, Artificial Sequence
  Synthetic
gcauacuucaaagacuguuuguuu

SEQ ID NO: 94421 - RNA, 18 nt, Artificial Sequence
  Synthetic
  misc_feature (15)..(15): n is a, c, g, or u
aaaaaaugugaacanuuu

SEQ ID NO: 94422 - RNA, 19 nt, Artificial Sequence
  Synthetic
  misc_feature (16)..(16): n is a, c, g, or u
caaaaaaugugaacanuuu

SEQ ID NO: 94423 - RNA, 20 nt, Artificial Sequence
  Synthetic
  misc_feature (17)..(17): n is a, c, g, or u
ucaaaaaaugugaacanuuu

SEQ ID NO: 94424 - RNA, 21 nt, Artificial Sequence
  Synthetic
  misc_feature (18)..(18): n is a, c, g, or u
aucaaaaaaugugaacanuuu

SEQ ID NO: 94425 - RNA, 22 nt, Artificial Sequence
  Synthetic
  misc_feature (1)..(1): n is a, c, g, or u
  misc_feature (19)..(19): n is a, c, g, or u
naucaaaaaaugugaacanuuu

SEQ ID NO: 94426 - RNA, 23 nt, Artificial Sequence
  Synthetic
  misc_feature (2)..(2): n is a, c, g, or u
  misc_feature (20)..(20): n is a, c, g, or u
unaucaaaaaaugugaacanuuu

SEQ ID NO: 94427 - RNA, 24 nt, Artificial Sequence
  Synthetic
  misc_feature (3)..(3): n is a, c, g, or u
  misc_feature (21)..(21): n is a, c, g, or u
aunaucaaaaaaugugaacanuuu

SEQ ID NO: 94428 - RNA, 18 nt, Artificial Sequence
  Synthetic
uggacuucucucaauuuu

SEQ ID NO: 94429 - RNA, 19 nt, Artificial Sequence
  Synthetic
guggacuucucucaauuuu

SEQ ID NO: 94430 - RNA, 20 nt, Artificial Sequence
  Synthetic
gguggacuucucucaauuuu

SEQ ID NO: 94431 - RNA, 21 nt, Artificial Sequence
  Synthetic
ugguggacuucucucaauuuu

SEQ ID NO: 94432 - RNA, 22 nt, Artificial Sequence
  Synthetic
gugguggacuucucucaauuuu

SEQ ID NO: 94433 - RNA, 23 nt, Artificial Sequence
  Synthetic
cgugguggacuucucucaauuuu

SEQ ID NO: 94434 - RNA, 24 nt, Artificial Sequence
  Synthetic
ucgugguggacuucucucaauuuu

SEQ ID NO: 94435 - RNA, 18 nt, Artificial Sequence
  Synthetic
auuucuugucucacuuuu

SEQ ID NO: 94436 - RNA, 19 nt, Artificial Sequence
  Synthetic
cauuucuugucucacuuuu

SEQ ID NO: 94437 - RNA, 20 nt, Artificial Sequence
  Synthetic
acauuucuugucucacuuuu

SEQ ID NO: 94438 - RNA, 21 nt, Artificial Sequence
  Synthetic
cacauuucuugucucacuuuu

SEQ ID NO: 94439 - RNA, 22 nt, Artificial Sequence
  Synthetic
ucacauuucuugucucacuuuu

SEQ ID NO: 94440 - RNA, 23 nt, Artificial Sequence
  Synthetic
uucacauuucuugucucacuuuu

SEQ ID NO: 94441 - RNA, 24 nt, Artificial Sequence
  Synthetic
uuucacauuucuugucucacuuuu

SEQ ID NO: 94442 - RNA, 18 nt, Artificial Sequence
  Synthetic
aaaaucaaagaauguuuu

SEQ ID NO: 94443 - RNA, 19 nt, Artificial Sequence
  Synthetic
  misc_feature (1)..(1): n is a, c, g, or u
naaaaucaaagaauguuuu

SEQ ID NO: 94444 - RNA, 20 nt, Artificial Sequence
  Synthetic
  misc_feature (2)..(2): n is a, c, g, or u
anaaaaucaaagaauguuuu

SEQ ID NO: 94445 - RNA, 21 nt, Artificial Sequence
  Synthetic
  misc_feature (3)..(3): n is a, c, g, or u
canaaaaucaaagaauguuuu

SEQ ID NO: 94446 - RNA, 22 nt, Artificial Sequence
  Synthetic
  misc_feature (4)..(4): n is a, c, g, or u
acanaaaaucaaagaauguuuu

SEQ ID NO: 94447 - RNA, 23 nt, Artificial Sequence
  Synthetic
  misc_feature (1)..(1): n is a, c, g, or u
  misc_feature (5)..(5): n is a, c, g, or u
nacanaaaaucaaagaauguuuu

SEQ ID NO: 94448 - RNA, 24 nt, Artificial Sequence
  Synthetic
  misc_feature (2)..(2): n is a, c, g, or u
  misc_feature (6)..(6): n is a, c, g, or u
anacanaaaaucaaagaauguuuu

SEQ ID NO: 94449 - RNA, 17 nt, Artificial Sequence
  Synthetic
gccguuccggccgacca

SEQ ID NO: 94450 - RNA, 17 nt, Artificial Sequence
  Synthetic
gcgggauucagcgccga

SEQ ID NO: 94451 - RNA, 17 nt, Artificial Sequence
  Synthetic
  misc_feature (6)..(6): n is a, c, g, or u
gugcanuuuccguccga

SEQ ID NO: 94452 - RNA, 17 nt, Artificial Sequence
  Synthetic
guuuacuguuccggaac

SEQ ID NO: 94453 - RNA, 17 nt, Artificial Sequence
  Synthetic
gaggcaguagucggaac

SEQ ID NO: 94454 - RNA, 17 nt, Artificial Sequence
  Synthetic
gcugacgcaacccccac

SEQ ID NO: 94455 - RNA, 17 nt, Artificial Sequence
  Synthetic
ggagcacccacgugucc

SEQ ID NO: 94456 - RNA, 17 nt, Artificial Sequence
  Synthetic
gcaguauggaucggcag

SEQ ID NO: 94457 - RNA, 17 nt, Artificial Sequence
  Synthetic
gcgcaccucucuuuacg

SEQ ID NO: 94458 - RNA, 17 nt, Artificial Sequence
  Synthetic
gucggcgcugaaucccg

SEQ ID NO: 94459 - RNA, 17 nt, Artificial Sequence
  Synthetic
gccaacuggauccugcg

SEQ ID NO: 94460 - RNA, 17 nt, Artificial Sequence
  Synthetic
gcggacgacccgucucg

SEQ ID NO: 94461 - RNA, 17 nt, Artificial Sequence
  Synthetic
guccccaugccuugucg

SEQ ID NO: 94462 - RNA, 17 nt, Artificial Sequence
  Synthetic
gucaacgaccgaccuug

SEQ ID NO: 94463 - RNA, 17 nt, Artificial Sequence
  Synthetic
gugggucaccauauucu

SEQ ID NO: 94464 - RNA, 17 nt, Artificial Sequence
  Synthetic
gcagcgccucauuuugu

SEQ ID NO: 94465 - RNA, 17 nt, Artificial Sequence
  Synthetic
ggaguagccccaacguu

SEQ ID NO: 94466 - RNA, 17 nt, Artificial Sequence
  Synthetic
ggcuuucccccacuguu

SEQ ID NO: 94467 - RNA, 20 nt, Artificial Sequence
  Synthetic
  misc_feature (14)..(14): n is a, c, g, or u
ggggacgguagagncccaaa

SEQ ID NO: 94468 - RNA, 20 nt, Artificial Sequence
  Synthetic
gaucggcagaggagccacaa

SEQ ID NO: 94469 - RNA, 20 nt, Artificial Sequence
  Synthetic
  misc_feature (8)..(8): n is a, c, g, or u
guugccgngcaacgggguaa

SEQ ID NO: 94470 - RNA, 20 nt, Artificial Sequence
  Synthetic
gaccuucgucugcgaggcga

SEQ ID NO: 94471 - RNA, 20 nt, Artificial Sequence
  Synthetic
gggcuuucgcaagauuccua

SEQ ID NO: 94472 - RNA, 20 nt, Artificial Sequence
  Synthetic
gcgagggaguucuucuucua

SEQ ID NO: 94473 - RNA, 20 nt, Artificial Sequence
  Synthetic
ggacuucucucaauuuucua

SEQ ID NO: 94474 - RNA, 20 nt, Artificial Sequence
  Synthetic
  misc_feature (2)..(2): n is a, c, g, or u
gncccaaacggccccgagac

SEQ ID NO: 94475 - RNA, 20 nt, Artificial Sequence
  Synthetic
gggggagcacccacgugucc

SEQ ID NO: 94476 - RNA, 20 nt, Artificial Sequence
  Synthetic
  misc_feature (19)..(19): n is a, c, g, or u
gaagcgaagugcacacggnc

SEQ ID NO: 94477 - RNA, 20 nt, Artificial Sequence
  Synthetic
  misc_feature (3)..(3): n is a, c, g, or u
gcnggguccaacuggugauc

SEQ ID NO: 94478 - RNA, 20 nt, Artificial Sequence
  Synthetic
gauugagaucuucugcgacg

SEQ ID NO: 94479 - RNA, 20 nt, Artificial Sequence
  Synthetic
ggggcgcaccucucuuuacg

SEQ ID NO: 94480 - RNA, 20 nt, Artificial Sequence
  Synthetic
guaaagagaggugcgccccg

SEQ ID NO: 94481 - RNA, 20 nt, Artificial Sequence
  Synthetic
gccccgagacgggucguccg

SEQ ID NO: 94482 - RNA, 20 nt, Artificial Sequence
  Synthetic
gauugagaccuucgucugcg

SEQ ID NO: 94483 - RNA, 20 nt, Artificial Sequence
  Synthetic
ggaugacugucucuuagagg

SEQ ID NO: 94484 - RNA, 20 nt, Artificial Sequence
  Synthetic
  misc_feature (8)..(8): n is a, c, g, or u
gaccuggngggcguucacgg

SEQ ID NO: 94485 - RNA, 20 nt, Artificial Sequence
  Synthetic
  misc_feature (19)..(19): n is a, c, g, or u
gaagauugacgauaugggng

SEQ ID NO: 94486 - RNA, 20 nt, Artificial Sequence
  Synthetic
gucaaucuucucgaggacug

SEQ ID NO: 94487 - RNA, 20 nt, Artificial Sequence
  Synthetic
  misc_feature (18)..(18): n is a, c, g, or u
gacgcaacccccacuggnug

SEQ ID NO: 94488 - RNA, 20 nt, Artificial Sequence
  Synthetic
gggaacaagagcuacagcau

SEQ ID NO: 94489 - RNA, 20 nt, Artificial Sequence
  Synthetic
ggguugcgucagcaaacacu

SEQ ID NO: 94490 - RNA, 20 nt, Artificial Sequence
  Synthetic
guugaugaaucuggccaccu

SEQ ID NO: 94491 - RNA, 20 nt, Artificial Sequence
  Synthetic
gacaaacgggcaacauaccu

SEQ ID NO: 94492 - RNA, 20 nt, Artificial Sequence
  Synthetic
guaacacgagcagggguccu

SEQ ID NO: 94493 - RNA, 20 nt, Artificial Sequence
  Synthetic
gucgcagaagaucucaaucu

SEQ ID NO: 94494 - RNA, 20 nt, Artificial Sequence
  Synthetic
guccuuugucuacgucccgu

SEQ ID NO: 94495 - RNA, 17 nt, Artificial Sequence
  Synthetic
cgacgggacguagacaa

SEQ ID NO: 94496 - RNA, 17 nt, Artificial Sequence
  Synthetic
  misc_feature (13)..(13): n is a, c, g, or u
ugaccguugccgngcaa

SEQ ID NO: 94497 - RNA, 17 nt, Artificial Sequence
  Synthetic
cccguggucggccggaa

SEQ ID NO: 94498 - RNA, 17 nt, Artificial Sequence
  Synthetic
cgccuguaacacgagca

SEQ ID NO: 94499 - RNA, 17 nt, Artificial Sequence
  Synthetic
caccucugcacgucgca

SEQ ID NO: 94500 - RNA, 17 nt, Artificial Sequence
  Synthetic
cccaaacggccccgaga

SEQ ID NO: 94501 - RNA, 17 nt, Artificial Sequence
  Synthetic
cuucgucugcgaggcga

SEQ ID NO: 94502 - RNA, 17 nt, Artificial Sequence
  Synthetic
cgagaagauugacgaua

SEQ ID NO: 94503 - RNA, 17 nt, Artificial Sequence
  Synthetic
cuuucgcaagauuccua

SEQ ID NO: 94504 - RNA, 17 nt, Artificial Sequence
  Synthetic
auguuccggagacucua

SEQ ID NO: 94505 - RNA, 17 nt, Artificial Sequence
  Synthetic
cuaggaguuccgcagua

SEQ ID NO: 94506 - RNA, 17 nt, Artificial Sequence
  Synthetic
uuguucagugguucgua

SEQ ID NO: 94507 - RNA, 17 nt, Artificial Sequence
  Synthetic
ccguuccggccgaccac

SEQ ID NO: 94508 - RNA, 17 nt, Artificial Sequence
  Synthetic
cgggauucagcgccgac

SEQ ID NO: 94509 - RNA, 17 nt, Artificial Sequence
  Synthetic
ucaaucuucucgaggac

SEQ ID NO: 94510 - RNA, 17 nt, Artificial Sequence
  Synthetic
accccugcucguguuac

SEQ ID NO: 94511 - RNA, 17 nt, Artificial Sequence
  Synthetic
  misc_feature (15)..(15): n is a, c, g, or u
caccgugaacgcccncc

SEQ ID NO: 94512 - RNA, 17 nt, Artificial Sequence
  Synthetic
uuaggauagaaccuagc

SEQ ID NO: 94513 - RNA, 17 nt, Artificial Sequence
  Synthetic
cgagacgggucguccgc

SEQ ID NO: 94514 - RNA, 17 nt, Artificial Sequence
  Synthetic
caaaggacgucccgcgc

SEQ ID NO: 94515 - RNA, 17 nt, Artificial Sequence
  Synthetic
uuguuagacgacgaggc

SEQ ID NO: 94516 - RNA, 17 nt, Artificial Sequence
  Synthetic
cuugcauggucccgugc

SEQ ID NO: 94517 - RNA, 17 nt, Artificial Sequence
  Synthetic
cgcggacgacccgucuc

SEQ ID NO: 94518 - RNA, 17 nt, Artificial Sequence
  Synthetic
uccaccaaucggcaguc

SEQ ID NO: 94519 - RNA, 17 nt, Artificial Sequence
  Synthetic
uuugcucgcagccgguc

SEQ ID NO: 94520 - RNA, 17 nt, Artificial Sequence
  Synthetic
aacaggguuuacuguuc

SEQ ID NO: 94521 - RNA, 17 nt, Artificial Sequence
  Synthetic
agguguauuuccgagag

SEQ ID NO: 94522 - RNA, 17 nt, Artificial Sequence
  Synthetic
  misc_feature (11)..(11): n is a, c, g, or u
accguugccgngcaacg

SEQ ID NO: 94523 - RNA, 17 nt, Artificial Sequence
  Synthetic
cguuccggccgaccacg

SEQ ID NO: 94524 - RNA, 17 nt, Artificial Sequence
  Synthetic
acuguuguuagacgacg

SEQ ID NO: 94525 - RNA, 17 nt, Artificial Sequence
  Synthetic
ugagaucuucugcgacg

SEQ ID NO: 94526 - RNA, 17 nt, Artificial Sequence
  Synthetic
aagagaggugcgccccg

SEQ ID NO: 94527 - RNA, 17 nt, Artificial Sequence
  Synthetic
ccgagacgggucguccg

SEQ ID NO: 94528 - RNA, 17 nt, Artificial Sequence
  Synthetic
ugagaccuucgucugcg

SEQ ID NO: 94529 - RNA, 17 nt, Artificial Sequence
  Synthetic
uaucgucaaucuucucg

SEQ ID NO: 94530 - RNA, 17 nt, Artificial Sequence
  Synthetic
agagucuagacucgugg

SEQ ID NO: 94531 - RNA, 17 nt, Artificial Sequence
  Synthetic
ugacugccgauuggugg

SEQ ID NO: 94532 - RNA, 17 nt, Artificial Sequence
  Synthetic
aaccucgacaaggcaug

SEQ ID NO: 94533 - RNA, 17 nt, Artificial Sequence
  Synthetic
ucugccgauccauacug

SEQ ID NO: 94534 - RNA, 17 nt, Artificial Sequence
  Synthetic
cacgagucuagacucug

SEQ ID NO: 94535 - RNA, 17 nt, Artificial Sequence
  Synthetic
cgcagcgccucauuuug

SEQ ID NO: 94536 - RNA, 17 nt, Artificial Sequence
  Synthetic
aaaccucgacaaggcau

SEQ ID NO: 94537 - RNA, 17 nt, Artificial Sequence
  Synthetic
aguuccgcaguauggau

SEQ ID NO: 94538 - RNA, 17 nt, Artificial Sequence
  Synthetic
uugcgucagcaaacacu

SEQ ID NO: 94539 - RNA, 17 nt, Artificial Sequence
  Synthetic
caaucuucucgaggacu

SEQ ID NO: 94540 - RNA, 17 nt, Artificial Sequence
  Synthetic
ccgcggacgacccgucu

SEQ ID NO: 94541 - RNA, 17 nt, Artificial Sequence
  Synthetic
cccgcgcaggauccagu

SEQ ID NO: 94542 - RNA, 17 nt, Artificial Sequence
  Synthetic
cuuugucuacgucccgu

SEQ ID NO: 94543 - RNA, 17 nt, Artificial Sequence
  Synthetic
cccgucucggggccguu

SEQ ID NO: 94544 - RNA, 17 nt, Artificial Sequence
  Synthetic
caugccuugucgagguu

SEQ ID NO: 94545 - RNA, 17 nt, Artificial Sequence
  Synthetic
ccgucucggggccguuu

SEQ ID NO: 94546 - RNA, 20 nt, Artificial Sequence
  Synthetic
ccuacgaaccacugaacaaa

SEQ ID NO: 94547 - RNA, 20 nt, Artificial Sequence
  Synthetic
cgccgacgggacguagacaa

SEQ ID NO: 94548 - RNA, 20 nt, Artificial Sequence
  Synthetic
  misc_feature (16)..(16): n is a, c, g, or u
accugaccguugccgngcaa

SEQ ID NO: 94549 - RNA, 20 nt, Artificial Sequence
  Synthetic
cgccccguggucggccggaa

SEQ ID NO: 94550 - RNA, 20 nt, Artificial Sequence
  Synthetic
cacuuucucgccaacuuaca

SEQ ID NO: 94551 - RNA, 20 nt, Artificial Sequence
  Synthetic
ucugccguuccggccgacca

SEQ ID NO: 94552 - RNA, 20 nt, Artificial Sequence
  Synthetic
ccccgccuguaacacgagca

SEQ ID NO: 94553 - RNA, 20 nt, Artificial Sequence
  Synthetic
uuccaaaccucgacaaggca

SEQ ID NO: 94554 - RNA, 20 nt, Artificial Sequence
  Synthetic
  misc_feature (12)..(12): n is a, c, g, or u
ucgaggagaucncgaauaga

SEQ ID NO: 94555 - RNA, 20 nt, Artificial Sequence
  Synthetic
cucccucgccucgcagacga

SEQ ID NO: 94556 - RNA, 20 nt, Artificial Sequence
  Synthetic
uccgcgggauucagcgccga

SEQ ID NO: 94557 - RNA, 20 nt, Artificial Sequence
  Synthetic
ucaauaugcccugagccuga

SEQ ID NO: 94558 - RNA, 20 nt, Artificial Sequence
  Synthetic
agcucuuguucccaagaaua

SEQ ID NO: 94559 - RNA, 20 nt, Artificial Sequence
  Synthetic
uaguaucccuuggacucaua

SEQ ID NO: 94560 - RNA, 20 nt, Artificial Sequence
  Synthetic
ccggaaguguugauaagaua

SEQ ID NO: 94561 - RNA, 20 nt, Artificial Sequence
  Synthetic
ccucgagaagauugacgaua

SEQ ID NO: 94562 - RNA, 20 nt, Artificial Sequence
  Synthetic
acaauguuccggagacucua

SEQ ID NO: 94563 - RNA, 20 nt, Artificial Sequence
  Synthetic
cugcuaggaguuccgcagua

SEQ ID NO: 94564 - RNA, 20 nt, Artificial Sequence
  Synthetic
cauuuguucagugguucgua

SEQ ID NO: 94565 - RNA, 20 nt, Artificial Sequence
  Synthetic
  misc_feature (15)..(15): n is a, c, g, or u
ccugaccguugccgngcaac

SEQ ID NO: 94566 - RNA, 20 nt, Artificial Sequence
  Synthetic
aggguuuacuguuccggaac

SEQ ID NO: 94567 - RNA, 20 nt, Artificial Sequence
  Synthetic
cugccguuccggccgaccac

SEQ ID NO: 94568 - RNA, 20 nt, Artificial Sequence
  Synthetic
uuugcugacgcaacccccac

SEQ ID NO: 94569 - RNA, 20 nt, Artificial Sequence
  Synthetic
ccgcgggauucagcgccgac

SEQ ID NO: 94570 - RNA, 20 nt, Artificial Sequence
  Synthetic
ucgucaaucuucucgaggac

SEQ ID NO: 94571 - RNA, 20 nt, Artificial Sequence
  Synthetic
aggaccccugcucguguuac

SEQ ID NO: 94572 - RNA, 20 nt, Artificial Sequence
  Synthetic
uggcacuaguaaacugagcc

SEQ ID NO: 94573 - RNA, 20 nt, Artificial Sequence
  Synthetic
cccguuuguccucuacuucc

SEQ ID NO: 94574 - RNA, 20 nt, Artificial Sequence
  Synthetic
accccgccuguaacacgagc

SEQ ID NO: 94575 - RNA, 20 nt, Artificial Sequence
  Synthetic
ccccgagacgggucguccgc

SEQ ID NO: 94576 - RNA, 20 nt, Artificial Sequence
  Synthetic
agacaaaggacgucccgcgc

SEQ ID NO: 94577 - RNA, 20 nt, Artificial Sequence
  Synthetic
cuguuguuagacgacgaggc

SEQ ID NO: 94578 - RNA, 20 nt, Artificial Sequence
  Synthetic
aggugcgccccguggucggc

SEQ ID NO: 94579 - RNA, 20 nt, Artificial Sequence
  Synthetic
acuacuaauucccuggaugc

SEQ ID NO: 94580 - RNA, 20 nt, Artificial Sequence
  Synthetic
ucgcagaagaucucaaucuc

SEQ ID NO: 94581 - RNA, 20 nt, Artificial Sequence
  Synthetic
ucgggaggccuuagagucuc

SEQ ID NO: 94582 - RNA, 20 nt, Artificial Sequence
  Synthetic
ucccgcggacgacccgucuc

SEQ ID NO: 94583 - RNA, 20 nt, Artificial Sequence
  Synthetic
  misc_feature (9)..(9): n is a, c, g, or u
cccguugcncggcaacgguc

SEQ ID NO: 94584 - RNA, 20 nt, Artificial Sequence
  Synthetic
cggaacaggguuuacuguuc

SEQ ID NO: 94585 - RNA, 20 nt, Artificial Sequence
  Synthetic
uccgcaguauggaucggcag

SEQ ID NO: 94586 - RNA, 20 nt, Artificial Sequence
  Synthetic
aggagguguauuuccgagag

SEQ ID NO: 94587 - RNA, 20 nt, Artificial Sequence
  Synthetic
ucgcaagauuccuaugggag

SEQ ID NO: 94588 - RNA, 20 nt, Artificial Sequence
  Synthetic
cggaaguguugauaagauag

SEQ ID NO: 94589 - RNA, 20 nt, Artificial Sequence
  Synthetic
ugccguuccggccgaccacg

SEQ ID NO: 94590 - RNA, 20 nt, Artificial Sequence
  Synthetic
acuacuguuguuagacgacg

SEQ ID NO: 94591 - RNA, 20 nt, Artificial Sequence
  Synthetic
cccgucggcgcugaaucccg

SEQ ID NO: 94592 - RNA, 20 nt, Artificial Sequence
  Synthetic
uaccacagagucuagacucg

SEQ ID NO: 94593 - RNA, 20 nt, Artificial Sequence
  Synthetic
cccgcggacgacccgucucg

SEQ ID NO: 94594 - RNA, 20 nt, Artificial Sequence
  Synthetic
ccauaucgucaaucuucucg

SEQ ID NO: 94595 - RNA, 20 nt, Artificial Sequence
  Synthetic
accccugcucguguuacagg

SEQ ID NO: 94596 - RNA, 20 nt, Artificial Sequence
  Synthetic
acuucucucaauuuucuagg

SEQ ID NO: 94597 - RNA, 20 nt, Artificial Sequence
  Synthetic
  misc_feature (7)..(7): n is a, c, g, or u
cgccucngcucuguaucggg

SEQ ID NO: 94598 - RNA, 20 nt, Artificial Sequence
  Synthetic
cacagagucuagacucgugg

SEQ ID NO: 94599 - RNA, 20 nt, Artificial Sequence
  Synthetic
uccugacugccgauuggugg

SEQ ID NO: 94600 - RNA, 20 nt, Artificial Sequence
  Synthetic
ccaaaccucgacaaggcaug

SEQ ID NO: 94601 - RNA, 20 nt, Artificial Sequence
  Synthetic
uccucugccgauccauacug

SEQ ID NO: 94602 - RNA, 20 nt, Artificial Sequence
  Synthetic
caccacgagucuagacucug

SEQ ID NO: 94603 - RNA, 20 nt, Artificial Sequence
  Synthetic
aaugucaacgaccgaccuug

SEQ ID NO: 94604 - RNA, 20 nt, Artificial Sequence
  Synthetic
ccuaauaaaaccaaacguug

SEQ ID NO: 94605 - RNA, 20 nt, Artificial Sequence
  Synthetic
  misc_feature (1)..(1): n is a, c, g, or u
ncgcaugcguggaaccuuug

SEQ ID NO: 94606 - RNA, 20 nt, Artificial Sequence
  Synthetic
  misc_feature (20)..(20): n is a, c, g, or u
ugaaccuuuaccccguugcn

SEQ ID NO: 94607 - RNA, 20 nt, Artificial Sequence
  Synthetic
uccaaaccucgacaaggcau

SEQ ID NO: 94608 - RNA, 20 nt, Artificial Sequence
  Synthetic
aggaguuccgcaguauggau

SEQ ID NO: 94609 - RNA, 20 nt, Artificial Sequence
  Synthetic
cucgagaagauugacgauau

SEQ ID NO: 94610 - RNA, 20 nt, Artificial Sequence
  Synthetic
uuauauggaugaugugguau

SEQ ID NO: 94611 - RNA, 20 nt, Artificial Sequence
  Synthetic
  misc_feature (11)..(11): n is a, c, g, or u
acaccgccucngcucuguau

SEQ ID NO: 94612 - RNA, 20 nt, Artificial Sequence
  Synthetic
cgucaaucuucucgaggacu

SEQ ID NO: 94613 - RNA, 20 nt, Artificial Sequence
  Synthetic
ugcgagcaaaacaagcugcu

SEQ ID NO: 94614 - RNA, 20 nt, Artificial Sequence
  Synthetic
aucccgcggacgacccgucu

SEQ ID NO: 94615 - RNA, 20 nt, Artificial Sequence
  Synthetic
cacagaaaggccuuguaagu

SEQ ID NO: 94616 - RNA, 20 nt, Artificial Sequence
  Synthetic
cgucccgcgcaggauccagu

SEQ ID NO: 94617 - RNA, 20 nt, Artificial Sequence
  Synthetic
cgcaagauuccuaugggagu

SEQ ID NO: 94618 - RNA, 20 nt, Artificial Sequence
  Synthetic
ccauuuguucagugguucgu

SEQ ID NO: 94619 - RNA, 20 nt, Artificial Sequence
  Synthetic
aucccuuggacucauaaggu

SEQ ID NO: 94620 - RNA, 20 nt, Artificial Sequence
  Synthetic
cacgcagcgccucauuuugu

SEQ ID NO: 94621 - RNA, 20 nt, Artificial Sequence
  Synthetic
aagggaguagccccaacguu

SEQ ID NO: 94622 - RNA, 20 nt, Artificial Sequence
  Synthetic
cgacccgucucggggccguu

SEQ ID NO: 94623 - RNA, 20 nt, Artificial Sequence
  Synthetic
ccccaugccuugucgagguu

SEQ ID NO: 94624 - RNA, 20 nt, Artificial Sequence
  Synthetic
uagggcuuucccccacuguu

SEQ ID NO: 94625 - RNA, 17 nt, Artificial Sequence
  Synthetic
  misc_feature (9)..(9): n is a, c, g, or u
gguaauagngguaaaaa

SEQ ID NO: 94626 - RNA, 17 nt, Artificial Sequence
  Synthetic
  misc_feature (11)..(11): n is a, c, g, or u
gacgguagagncccaaa

SEQ ID NO: 94627 - RNA, 17 nt, Artificial Sequence
  Synthetic
  misc_feature (11)..(11): n is a, c, g, or u
  misc_feature (13)..(13): n is a, c, g, or u
gaacggcagangnagaa

SEQ ID NO: 94628 - RNA, 17 nt, Artificial Sequence
  Synthetic
  misc_feature (5)..(5): n is a, c, g, or u
gccgngcaacgggguaa

SEQ ID NO: 94629 - RNA, 17 nt, Artificial Sequence
  Synthetic
ggacuucaaccccaaca

SEQ ID NO: 94630 - RNA, 17 nt, Artificial Sequence
  Synthetic
  misc_feature (9)..(9): n is a, c, g, or u
ggguucacnccaccaca

SEQ ID NO: 94631 - RNA, 17 nt, Artificial Sequence
  Synthetic
gugaagcgaagugcaca

SEQ ID NO: 94632 - RNA, 17 nt, Artificial Sequence
  Synthetic
guucuucuggacuacca

SEQ ID NO: 94633 - RNA, 17 nt, Artificial Sequence
  Synthetic
  misc_feature (6)..(6): n is a, c, g, or u
  misc_feature (9)..(9): n is a, c, g, or u
gcacanccnagcagcca

SEQ ID NO: 94634 - RNA, 17 nt, Artificial Sequence
  Synthetic
  misc_feature (7)..(7): n is a, c, g, or u
ggaaganccagcaucca

SEQ ID NO: 94635 - RNA, 17 nt, Artificial Sequence
  Synthetic
gaacaagagcuacagca

SEQ ID NO: 94636 - RNA, 17 nt, Artificial Sequence
  Synthetic
gaggugaaaaaguugca

SEQ ID NO: 94637 - RNA, 17 nt, Artificial Sequence
  Synthetic
  misc_feature (8)..(8): n is a, c, g, or u
gaccuggngggcguuca

SEQ ID NO: 94638 - RNA, 17 nt, Artificial Sequence
  Synthetic
gaaggaaagaagucaga

SEQ ID NO: 94639 - RNA, 17 nt, Artificial Sequence
  Synthetic
  misc_feature (12)..(12): n is a, c, g, or u
  misc_feature (14)..(14): n is a, c, g, or u
ggaacggcagangnaga

SEQ ID NO: 94640 - RNA, 17 nt, Artificial Sequence
  Synthetic
  misc_feature (6)..(6): n is a, c, g, or u
  misc_feature (8)..(8): n is a, c, g, or u
gcagangnagaagggga

SEQ ID NO: 94641 - RNA, 17 nt, Artificial Sequence
  Synthetic
  misc_feature (12)..(12): n is a, c, g, or u
gcgaaagcccangauga

SEQ ID NO: 94642 - RNA, 17 nt, Artificial Sequence
  Synthetic
  misc_feature (7)..(7): n is a, c, g, or u
gcuagancccagaguga

SEQ ID NO: 94643 - RNA, 17 nt, Artificial Sequence
  Synthetic
  misc_feature (16)..(16): n is a, c, g, or u
ggacccugcaccgaana

SEQ ID NO: 94644 - RNA, 17 nt, Artificial Sequence
  Synthetic
  misc_feature (2)..(2): n is a, c, g, or u
gnauguucaggauaaua

SEQ ID NO: 94645 - RNA, 17 nt, Artificial Sequence
  Synthetic
gaaguguugauaagaua

SEQ ID NO: 94646 - RNA, 17 nt, Artificial Sequence
  Synthetic
gcuccaaauucuuuaua

SEQ ID NO: 94647 - RNA, 17 nt, Artificial Sequence
  Synthetic
ggaaguagaggacaaac

SEQ ID NO: 94648 - RNA, 17 nt, Artificial Sequence
  Synthetic
  misc_feature (12)..(12): n is a, c, g, or u
gaccguugccgngcaac

SEQ ID NO: 94649 - RNA, 17 nt, Artificial Sequence
  Synthetic
gaugagaaggcacagac

SEQ ID NO: 94650 - RNA, 17 nt, Artificial Sequence
  Synthetic
  misc_feature (4)..(4): n is a, c, g, or u
gcunacuacuaauuccc

SEQ ID NO: 94651 - RNA, 17 nt, Artificial Sequence
  Synthetic
  misc_feature (2)..(2): n is a, c, g, or u
  misc_feature (7)..(7): n is a, c, g, or u
gngggancauucgggcc

SEQ ID NO: 94652 - RNA, 17 nt, Artificial Sequence
  Synthetic
  misc_feature (7)..(7): n is a, c, g, or u
gacugcnaauuuuggcc

SEQ ID NO: 94653 - RNA, 17 nt, Artificial Sequence
  Synthetic
guuuguccucuacuucc

SEQ ID NO: 94654 - RNA, 17 nt, Artificial Sequence
  Synthetic
gaacuggagccaccagc

SEQ ID NO: 94655 - RNA, 17 nt, Artificial Sequence
  Synthetic
  misc_feature (3)..(3): n is a, c, g, or u
  misc_feature (15)..(15): n is a, c, g, or u
ganuuggcuccgaangc

SEQ ID NO: 94656 - RNA, 17 nt, Artificial Sequence
  Synthetic
  misc_feature (9)..(9): n is a, c, g, or u
ggccuauanuuuccugc

SEQ ID NO: 94657 - RNA, 17 nt, Artificial Sequence
  Synthetic
  misc_feature (16)..(16): n is a, c, g, or u
gcgaagugcacacggnc

SEQ ID NO: 94658 - RNA, 17 nt, Artificial Sequence
  Synthetic
  misc_feature (12)..(12): n is a, c, g, or u
  misc_feature (16)..(16): n is a, c, g, or u
gcaggaggaggngcunc

SEQ ID NO: 94659 - RNA, 17 nt, Artificial Sequence
  Synthetic
ggguugaagucccaauc

SEQ ID NO: 94660 - RNA, 17 nt, Artificial Sequence
  Synthetic
gggugaguugaugaauc

SEQ ID NO: 94661 - RNA, 17 nt, Artificial Sequence
  Synthetic
ggguccaacuggugauc

SEQ ID NO: 94662 - RNA, 17 nt, Artificial Sequence
  Synthetic
guggagcccucaggcuc

SEQ ID NO: 94663 - RNA, 17 nt, Artificial Sequence
  Synthetic
ggaggccuuagagucuc

SEQ ID NO: 94664 - RNA, 17 nt, Artificial Sequence
  Synthetic
  misc_feature (6)..(6): n is a, c, g, or u
guugcncggcaacgguc

SEQ ID NO: 94665 - RNA, 17 nt, Artificial Sequence
  Synthetic
  misc_feature (15)..(15): n is a, c, g, or u
gagggaguuugccanuc

SEQ ID NO: 94666 - RNA, 17 nt, Artificial Sequence
  Synthetic
gcugguggcuccaguuc

SEQ ID NO: 94667 - RNA, 17 nt, Artificial Sequence
  Synthetic
gccuguaacacgagcag

SEQ ID NO: 94668 - RNA, 17 nt, Artificial Sequence
  Synthetic
ggagaccgcguaaagag

SEQ ID NO: 94669 - RNA, 17 nt, Artificial Sequence
  Synthetic
  misc_feature (7)..(7): n is a, c, g, or u
ggcaaancagguaggag

SEQ ID NO: 94670 - RNA, 17 nt, Artificial Sequence
  Synthetic
gggaguucuucuucuag

SEQ ID NO: 94671 - RNA, 17 nt, Artificial Sequence
  Synthetic
gauguuccuggaaguag

SEQ ID NO: 94672 - RNA, 17 nt, Artificial Sequence
  Synthetic
ggaugacugucucuuag

SEQ ID NO: 94673 - RNA, 17 nt, Artificial Sequence
  Synthetic
  misc_feature (8)..(9): n is a, c, g, or u
ggccaucnncgcaugcg

SEQ ID NO: 94674 - RNA, 17 nt, Artificial Sequence
  Synthetic
  misc_feature (5)..(5): n is a, c, g, or u
gagcngaggcggugucg

SEQ ID NO: 94675 - RNA, 17 nt, Artificial Sequence
  Synthetic
gaaucuggccaccuggg

SEQ ID NO: 94676 - RNA, 17 nt, Artificial Sequence
  Synthetic
gguuggugagugauugg

SEQ ID NO: 94677 - RNA, 17 nt, Artificial Sequence
  Synthetic
ggaugaugugguauugg

SEQ ID NO: 94678 - RNA, 17 nt, Artificial Sequence
  Synthetic
  misc_feature (2)..(2): n is a, c, g, or u
gnucuagcagagcuugg

SEQ ID NO: 94679 - RNA, 17 nt, Artificial Sequence
  Synthetic
  misc_feature (16)..(16): n is a, c, g, or u
gauugacgauaugggng

SEQ ID NO: 94680 - RNA, 17 nt, Artificial Sequence
  Synthetic
gccccuuuuacacaaug

SEQ ID NO: 94681 - RNA, 17 nt, Artificial Sequence
  Synthetic
gaaccaacaagaagaug

SEQ ID NO: 94682 - RNA, 17 nt, Artificial Sequence
  Synthetic
gacucugugguauugug

SEQ ID NO: 94683 - RNA, 17 nt, Artificial Sequence
  Synthetic
  misc_feature (15)..(15): n is a, c, g, or u
gcaacccccacuggnug

SEQ ID NO: 94684 - RNA, 17 nt, Artificial Sequence
  Synthetic
  misc_feature (5)..(5): n is a, c, g, or u
gccanugauccuuguug

SEQ ID NO: 94685 - RNA, 17 nt, Artificial Sequence
  Synthetic
  misc_feature (6)..(6): n is a, c, g, or u
  misc_feature (17)..(17): n is a, c, g, or u
gcaaancagguaggagn

SEQ ID NO: 94686 - RNA, 17 nt, Artificial Sequence
  Synthetic
  misc_feature (15)..(15): n is a, c, g, or u
  misc_feature (17)..(17): n is a, c, g, or u
gguggucuguaagcngn

SEQ ID NO: 94687 - RNA, 17 nt, Artificial Sequence
  Synthetic
ggaaguguugauaagau

SEQ ID NO: 94688 - RNA, 17 nt, Artificial Sequence
  Synthetic
  misc_feature (6)..(6): n is a, c, g, or u
gcccangaugaugggau

SEQ ID NO: 94689 - RNA, 17 nt, Artificial Sequence
  Synthetic
  misc_feature (3)..(3): n is a, c, g, or u
  misc_feature (15)..(15): n is a, c, g, or u
ggnuggggcuuggcnau

SEQ ID NO: 94690 - RNA, 17 nt, Artificial Sequence
  Synthetic
gagaagauugacgauau

SEQ ID NO: 94691 - RNA, 17 nt, Artificial Sequence
  Synthetic
gaugaaucuggccaccu

SEQ ID NO: 94692 - RNA, 17 nt, Artificial Sequence
  Synthetic
gccuccaagcugugccu

SEQ ID NO: 94693 - RNA, 17 nt, Artificial Sequence
  Synthetic
gagcaaaacaagcugcu

SEQ ID NO: 94694 - RNA, 17 nt, Artificial Sequence
  Synthetic
gcagaagaucucaaucu

SEQ ID NO: 94695 - RNA, 17 nt, Artificial Sequence
  Synthetic
gagggaguucuucuucu

SEQ ID NO: 94696 - RNA, 17 nt, Artificial Sequence
  Synthetic
gauauguaauuggaagu

SEQ ID NO: 94697 - RNA, 17 nt, Artificial Sequence
  Synthetic
  misc_feature (12)..(12): n is a, c, g, or u
gccaagccccanccagu

SEQ ID NO: 94698 - RNA, 17 nt, Artificial Sequence
  Synthetic
gguggagagaugggagu

SEQ ID NO: 94699 - RNA, 17 nt, Artificial Sequence
  Synthetic
gaaguaugccucaaggu

SEQ ID NO: 94700 - RNA, 17 nt, Artificial Sequence
  Synthetic
gcuacagcaugggaggu

SEQ ID NO: 94701 - RNA, 17 nt, Artificial Sequence
  Synthetic
ggugagugauuggaggu

SEQ ID NO: 94702 - RNA, 17 nt, Artificial Sequence
  Synthetic
gaggugcgccccguggu

SEQ ID NO: 94703 - RNA, 17 nt, Artificial Sequence
  Synthetic
ggcaagcuauucugugu

SEQ ID NO: 94704 - RNA, 17 nt, Artificial Sequence
  Synthetic
  misc_feature (9)..(9): n is a, c, g, or u
guaugucanagaauugu

SEQ ID NO: 94705 - RNA, 17 nt, Artificial Sequence
  Synthetic
  misc_feature (6)..(6): n is a, c, g, or u
gacccnuauaaagaauu

SEQ ID NO: 94706 - RNA, 17 nt, Artificial Sequence
  Synthetic
gauaagauaggggcauu

SEQ ID NO: 94707 - RNA, 17 nt, Artificial Sequence
  Synthetic
  misc_feature (8)..(8): n is a, c, g, or u
  misc_feature (13)..(13): n is a, c, g, or u
guaggagngggancauu

SEQ ID NO: 94708 - RNA, 17 nt, Artificial Sequence
  Synthetic
gugagugauuggagguu

SEQ ID NO: 94709 - RNA, 17 nt, Artificial Sequence
  Synthetic
gcaagcuauucuguguu

SEQ ID NO: 94710 - RNA, 17 nt, Artificial Sequence
  Synthetic
  misc_feature (6)..(6): n is a, c, g, or u
ggccanugauccuuguu

SEQ ID NO: 94711 - RNA, 17 nt, Artificial Sequence
  Synthetic
  misc_feature (3)..(3): n is a, c, g, or u
  misc_feature (7)..(7): n is a, c, g, or u
  misc_feature (15)..(15): n is a, c, g, or u
gungugnucuccaunuu

SEQ ID NO: 94712 - RNA, 17 nt, Artificial Sequence
  Synthetic
gugccuuggguggcuuu

SEQ ID NO: 94713 - RNA, 17 nt, Artificial Sequence
  Synthetic
gaguauuuggugucuuu

SEQ ID NO: 94714 - RNA, 20 nt, Artificial Sequence
  Synthetic
  misc_feature (2)..(2): n is a, c, g, or u
  misc_feature (5)..(5): n is a, c, g, or u
gnuanccacauuguguaaaa

SEQ ID NO: 94715 - RNA, 20 nt, Artificial Sequence
  Synthetic
guaaacugagccaggagaaa

SEQ ID NO: 94716 - RNA, 20 nt, Artificial Sequence
  Synthetic
  misc_feature (3)..(3): n is a, c, g, or u
  misc_feature (6)..(6): n is a, c, g, or u
ggnuanccacauuguguaaa

SEQ ID NO: 94717 - RNA, 20 nt, Artificial Sequence
  Synthetic
  misc_feature (2)..(2): n is a, c, g, or u
  misc_feature (18)..(18): n is a, c, g, or u
gnuuguauacaugcauanaa

SEQ ID NO: 94718 - RNA, 20 nt, Artificial Sequence
  Synthetic
  misc_feature (15)..(15): n is a, c, g, or u
  misc_feature (18)..(18): n is a, c, g, or u
gguuuaaugccuuunucnaa

SEQ ID NO: 94719 - RNA, 20 nt, Artificial Sequence
  Synthetic
  misc_feature (2)..(2): n is a, c, g, or u
gngaggcaguagucggaaca

SEQ ID NO: 94720 - RNA, 20 nt, Artificial Sequence
  Synthetic
gaggugaagcgaagugcaca

SEQ ID NO: 94721 - RNA, 20 nt, Artificial Sequence
  Synthetic
  misc_feature (9)..(9): n is a, c, g, or u
  misc_feature (12)..(12): n is a, c, g, or u
gcagcacanccnagcagcca

SEQ ID NO: 94722 - RNA, 20 nt, Artificial Sequence
  Synthetic
  misc_feature (4)..(4): n is a, c, g, or u
  misc_feature (9)..(9): n is a, c, g, or u
gagngggancauucgggcca

SEQ ID NO: 94723 - RNA, 20 nt, Artificial Sequence
  Synthetic
ggaaauacaccuccuuucca

SEQ ID NO: 94724 - RNA, 20 nt, Artificial Sequence
  Synthetic
  misc_feature (4)..(4): n is a, c, g, or u
gganucgugcaggucuugca

SEQ ID NO: 94725 - RNA, 20 nt, Artificial Sequence
  Synthetic
gcagaggugaaaaaguugca

SEQ ID NO: 94726 - RNA, 20 nt, Artificial Sequence
  Synthetic
ggguggagcccucaggcuca

SEQ ID NO: 94727 - RNA, 20 nt, Artificial Sequence
  Synthetic
  misc_feature (16)..(16): n is a, c, g, or u
gggcuacucccuuaanuuca

SEQ ID NO: 94728 - RNA, 20 nt, Artificial Sequence
  Synthetic
gguuuuguacagcaacaaga

SEQ ID NO: 94729 - RNA, 20 nt, Artificial Sequence
  Synthetic
ggcagaugagaaggcacaga

SEQ ID NO: 94730 - RNA, 20 nt, Artificial Sequence
  Synthetic
gucucuuagagguggagaga

SEQ ID NO: 94731 - RNA, 20 nt, Artificial Sequence
  Synthetic
  misc_feature (15)..(15): n is a, c, g, or u
  misc_feature (17)..(17): n is a, c, g, or u
gccggaacggcagangnaga

SEQ ID NO: 94732 - RNA, 20 nt, Artificial Sequence
  Synthetic
  misc_feature (10)..(10): n is a, c, g, or u
gaaagcccangaugauggga

SEQ ID NO: 94733 - RNA, 20 nt, Artificial Sequence
  Synthetic
gaagcuccaaauucuuuaua

SEQ ID NO: 94734 - RNA, 20 nt, Artificial Sequence
  Synthetic
  misc_feature (3)..(3): n is a, c, g, or u
ggngaggcaguagucggaac

SEQ ID NO: 94735 - RNA, 20 nt, Artificial Sequence
  Synthetic
ggaacaucaacuaccagcac

SEQ ID NO: 94736 - RNA, 20 nt, Artificial Sequence
  Synthetic
gcagaugagaaggcacagac

SEQ ID NO: 94737 - RNA, 20 nt, Artificial Sequence
  Synthetic
  misc_feature (5)..(5): n is a, c, g, or u
  misc_feature (10)..(10): n is a, c, g, or u
ggagngggancauucgggcc

SEQ ID NO: 94738 - RNA, 20 nt, Artificial Sequence
  Synthetic
  misc_feature (10)..(10): n is a, c, g, or u
ggggacugcnaauuuuggcc

SEQ ID NO: 94739 - RNA, 20 nt, Artificial Sequence
  Synthetic
gggccucaguccguuucucc

SEQ ID NO: 94740 - RNA, 20 nt, Artificial Sequence
  Synthetic
gugcugguaguugauguucc

SEQ ID NO: 94741 - RNA, 20 nt, Artificial Sequence
  Synthetic
gacugccgauugguggaggc

SEQ ID NO: 94742 - RNA, 20 nt, Artificial Sequence
  Synthetic
  misc_feature (6)..(6): n is a, c, g, or u
  misc_feature (15)..(15): n is a, c, g, or u
  misc_feature (18)..(18): n is a, c, g, or u
gcauanaaaggcaunaangc

SEQ ID NO: 94743 - RNA, 20 nt, Artificial Sequence
  Synthetic
gucugugccuucucaucugc

SEQ ID NO: 94744 - RNA, 20 nt, Artificial Sequence
  Synthetic
ggucuugcauggucccgugc

SEQ ID NO: 94745 - RNA, 20 nt, Artificial Sequence
  Synthetic
  misc_feature (4)..(4): n is a, c, g, or u
  misc_feature (12)..(12): n is a, c, g, or u
gugnucuccaunuucggugc

SEQ ID NO: 94746 - RNA, 20 nt, Artificial Sequence
  Synthetic
gugaaaaaguugcauggugc

SEQ ID NO: 94747 - RNA, 20 nt, Artificial Sequence
  Synthetic
  misc_feature (15)..(15): n is a, c, g, or u
  misc_feature (19)..(19): n is a, c, g, or u
gaggcaggaggaggngcunc

SEQ ID NO: 94748 - RNA, 20 nt, Artificial Sequence
  Synthetic
gggguggagcccucaggcuc

SEQ ID NO: 94749 - RNA, 20 nt, Artificial Sequence
  Synthetic
gccuccaccaaucggcaguc

SEQ ID NO: 94750 - RNA, 20 nt, Artificial Sequence
  Synthetic
ggcauagcagcaggaugaag

SEQ ID NO: 94751 - RNA, 20 nt, Artificial Sequence
  Synthetic
gucauccucaggccaugcag

SEQ ID NO: 94752 - RNA, 20 nt, Artificial Sequence
  Synthetic
  misc_feature (4)..(4): n is a, c, g, or u
ggunuccaugcgacgugcag

SEQ ID NO: 94753 - RNA, 20 nt, Artificial Sequence
  Synthetic
gcaacaagagggaaacauag

SEQ ID NO: 94754 - RNA, 20 nt, Artificial Sequence
  Synthetic
gacuucucucaauuuucuag

SEQ ID NO: 94755 - RNA, 20 nt, Artificial Sequence
  Synthetic
guugauguuccuggaaguag

SEQ ID NO: 94756 - RNA, 20 nt, Artificial Sequence
  Synthetic
gcugccaacuggauccugcg

SEQ ID NO: 94757 - RNA, 20 nt, Artificial Sequence
  Synthetic
gaugaaucuggccaccuggg

SEQ ID NO: 94758 - RNA, 20 nt, Artificial Sequence
  Synthetic
  misc_feature (9)..(9): n is a, c, g, or u
ggccuauanuuuccugcugg

SEQ ID NO: 94759 - RNA, 20 nt, Artificial Sequence
  Synthetic
gauaagauaggggcauuugg

SEQ ID NO: 94760 - RNA, 20 nt, Artificial Sequence
  Synthetic
  misc_feature (19)..(19): n is a, c, g, or u
ggccucccgauacagagcng

SEQ ID NO: 94761 - RNA, 20 nt, Artificial Sequence
  Synthetic
  misc_feature (3)..(3): n is a, c, g, or u
gcngccccuuuuacacaaug

SEQ ID NO: 94762 - RNA, 20 nt, Artificial Sequence
  Synthetic
gaagaaccaacaagaagaug

SEQ ID NO: 94763 - RNA, 20 nt, Artificial Sequence
  Synthetic
gagccaggagaaacggacug

SEQ ID NO: 94764 - RNA, 20 nt, Artificial Sequence
  Synthetic
gucaauaugcccugagccug

SEQ ID NO: 94765 - RNA, 20 nt, Artificial Sequence
  Synthetic
gucuuccacugcauggccug

SEQ ID NO: 94766 - RNA, 20 nt, Artificial Sequence
  Synthetic
ggcauuauuuacauacucug

SEQ ID NO: 94767 - RNA, 20 nt, Artificial Sequence
  Synthetic
  misc_feature (2)..(2): n is a, c, g, or u
gnuaucgcuggaugugucug

SEQ ID NO: 94768 - RNA, 20 nt, Artificial Sequence
  Synthetic
  misc_feature (13)..(13): n is a, c, g, or u
gaaaguaugucanagaauug

SEQ ID NO: 94769 - RNA, 20 nt, Artificial Sequence
  Synthetic
ggauauguaauuggaaguug

SEQ ID NO: 94770 - RNA, 20 nt, Artificial Sequence
  Synthetic
  misc_feature (20)..(20): n is a, c, g, or u
guauucccaucccaucaucn

SEQ ID NO: 94771 - RNA, 20 nt, Artificial Sequence
  Synthetic
  misc_feature (2)..(2): n is a, c, g, or u
  misc_feature (9)..(9): n is a, c, g, or u
  misc_feature (20)..(20): n is a, c, g, or u
gnggcaaancagguaggagn

SEQ ID NO: 94772 - RNA, 20 nt, Artificial Sequence
  Synthetic
  misc_feature (20)..(20): n is a, c, g, or u
gaccuugggcaagaccuggn

SEQ ID NO: 94773 - RNA, 20 nt, Artificial Sequence
  Synthetic
ggacugaggcccacucccau

SEQ ID NO: 94774 - RNA, 20 nt, Artificial Sequence
  Synthetic
  misc_feature (15)..(15): n is a, c, g, or u
ggcuacucccuuaanuucau

SEQ ID NO: 94775 - RNA, 20 nt, Artificial Sequence
  Synthetic
gggaaagaaucccagaggau

SEQ ID NO: 94776 - RNA, 20 nt, Artificial Sequence
  Synthetic
ggcuuucgcaagauuccuau

SEQ ID NO: 94777 - RNA, 20 nt, Artificial Sequence
  Synthetic
  misc_feature (7)..(7): n is a, c, g, or u
gucuuanauaagaggacucu

SEQ ID NO: 94778 - RNA, 20 nt, Artificial Sequence
  Synthetic
ggcgagggaguucuucuucu

SEQ ID NO: 94779 - RNA, 20 nt, Artificial Sequence
  Synthetic
  misc_feature (9)..(9): n is a, c, g, or u
gauaugggngaggcaguagu

SEQ ID NO: 94780 - RNA, 20 nt, Artificial Sequence
  Synthetic
guuggugagugauuggaggu

SEQ ID NO: 94781 - RNA, 20 nt, Artificial Sequence
  Synthetic
gcuaugccucaucuucuugu

SEQ ID NO: 94782 - RNA, 20 nt, Artificial Sequence
  Synthetic
guugauaagauaggggcauu

SEQ ID NO: 94783 - RNA, 20 nt, Artificial Sequence
  Synthetic
ggaaagaaucccagaggauu

SEQ ID NO: 94784 - RNA, 20 nt, Artificial Sequence
  Synthetic
gacaugaacaugagaugauu

SEQ ID NO: 94785 - RNA, 20 nt, Artificial Sequence
  Synthetic
  misc_feature (11)..(11): n is a, c, g, or u
guccucuuaunuaagaccuu

SEQ ID NO: 94786 - RNA, 20 nt, Artificial Sequence
  Synthetic
gggauauguaauuggaaguu

SEQ ID NO: 94787 - RNA, 20 nt, Artificial Sequence
  Synthetic
ggcaaauauuugguaagguu

SEQ ID NO: 94788 - RNA, 20 nt, Artificial Sequence
  Synthetic
  misc_feature (6)..(6): n is a, c, g, or u
  misc_feature (10)..(10): n is a, c, g, or u
  misc_feature (18)..(18): n is a, c, g, or u
gaugungugnucuccaunuu

SEQ ID NO: 94789 - RNA, 20 nt, Artificial Sequence
  Synthetic
gcugugccuuggguggcuuu

SEQ ID NO: 94790 - RNA, 20 nt, Artificial Sequence
  Synthetic
gacccgucucggggccguuu

SEQ ID NO: 94791 - RNA, 17 nt, Artificial Sequence
  Synthetic
uuacaguuaaugaaaaa

SEQ ID NO: 94792 - RNA, 17 nt, Artificial Sequence
  Synthetic
  misc_feature (10)..(10): n is a, c, g, or u
ugguaauagngguaaaa

SEQ ID NO: 94793 - RNA, 17 nt, Artificial Sequence
  Synthetic
  misc_feature (2)..(2): n is a, c, g, or u
anccacauuguguaaaa

SEQ ID NO: 94794 - RNA, 17 nt, Artificial Sequence
  Synthetic
acgaaccacugaacaaa

SEQ ID NO: 94795 - RNA, 17 nt, Artificial Sequence
  Synthetic
uggaaguagaggacaaa

SEQ ID NO: 94796 - RNA, 17 nt, Artificial Sequence
  Synthetic
aacugagccaggagaaa

SEQ ID NO: 94797 - RNA, 17 nt, Artificial Sequence
  Synthetic
  misc_feature (3)..(3): n is a, c, g, or u
uanccacauuguguaaa

SEQ ID NO: 94798 - RNA, 17 nt, Artificial Sequence
  Synthetic
cggcagaggagccacaa

SEQ ID NO: 94799 - RNA, 17 nt, Artificial Sequence
  Synthetic
ccaccuuaugaguccaa

SEQ ID NO: 94800 - RNA, 17 nt, Artificial Sequence
  Synthetic
  misc_feature (11)..(11): n is a, c, g, or u
accccguugcncggcaa

SEQ ID NO: 94801 - RNA, 17 nt, Artificial Sequence
  Synthetic
auauuguuuacacagaa

SEQ ID NO: 94802 - RNA, 17 nt, Artificial Sequence
  Synthetic
  misc_feature (1)..(1): n is a, c, g, or u
  misc_feature (4)..(4): n is a, c, g, or u
nccnagcagccauggaa

SEQ ID NO: 94803 - RNA, 17 nt, Artificial Sequence
  Synthetic
  misc_feature (12)..(12): n is a, c, g, or u
  misc_feature (15)..(15): n is a, c, g, or u
uauuugcccuunganaa

SEQ ID NO: 94804 - RNA, 17 nt, Artificial Sequence
  Synthetic
  misc_feature (15)..(15): n is a, c, g, or u
uguauacaugcauanaa

SEQ ID NO: 94805 - RNA, 17 nt, Artificial Sequence
  Synthetic
  misc_feature (12)..(12): n is a, c, g, or u
  misc_feature (15)..(15): n is a, c, g, or u
uuaaugccuuunucnaa

SEQ ID NO: 94806 - RNA, 17 nt, Artificial Sequence
  Synthetic
  misc_feature (13)..(13): n is a, c, g, or u
auaucccaugaanuuaa

SEQ ID NO: 94807 - RNA, 17 nt, Artificial Sequence
  Synthetic
aggcaguagucggaaca

SEQ ID NO: 94808 - RNA, 17 nt, Artificial Sequence
  Synthetic
ucuuccaaaccucgaca

SEQ ID NO: 94809 - RNA, 17 nt, Artificial Sequence
  Synthetic
uuucucgccaacuuaca

SEQ ID NO: 94810 - RNA, 17 nt, Artificial Sequence
  Synthetic
  misc_feature (6)..(6): n is a, c, g, or u
ugcccnaaagccaccca

SEQ ID NO: 94811 - RNA, 17 nt, Artificial Sequence
  Synthetic
  misc_feature (3)..(3): n is a, c, g, or u
ccnccaggucuugccca

SEQ ID NO: 94812 - RNA, 17 nt, Artificial Sequence
  Synthetic
  misc_feature (1)..(1): n is a, c, g, or u
  misc_feature (6)..(6): n is a, c, g, or u
ngggancauucgggcca

SEQ ID NO: 94813 - RNA, 17 nt, Artificial Sequence
  Synthetic
cccaccuuaugagucca

SEQ ID NO: 94814 - RNA, 17 nt, Artificial Sequence
  Synthetic
aauacaccuccuuucca

SEQ ID NO: 94815 - RNA, 17 nt, Artificial Sequence
  Synthetic
aacaucaacuaccagca

SEQ ID NO: 94816 - RNA, 17 nt, Artificial Sequence
  Synthetic
caaaccucgacaaggca

SEQ ID NO: 94817 - RNA, 17 nt, Artificial Sequence
  Synthetic
  misc_feature (12)..(12): n is a, c, g, or u
uggguggcuuungggca

SEQ ID NO: 94818 - RNA, 17 nt, Artificial Sequence
  Synthetic
  misc_feature (8)..(8): n is a, c, g, or u
ucuccaunuucggugca

SEQ ID NO: 94819 - RNA, 17 nt, Artificial Sequence
  Synthetic
  misc_feature (1)..(1): n is a, c, g, or u
nucgugcaggucuugca

SEQ ID NO: 94820 - RNA, 17 nt, Artificial Sequence
  Synthetic
cuuugaaguaugccuca

SEQ ID NO: 94821 - RNA, 17 nt, Artificial Sequence
  Synthetic
uggagcccucaggcuca

SEQ ID NO: 94822 - RNA, 17 nt, Artificial Sequence
  Synthetic
  misc_feature (8)..(8): n is a, c, g, or u
ugcacganuccugcuca

SEQ ID NO: 94823 - RNA, 17 nt, Artificial Sequence
  Synthetic
  misc_feature (13)..(13): n is a, c, g, or u
cuacucccuuaanuuca

SEQ ID NO: 94824 - RNA, 17 nt, Artificial Sequence
  Synthetic
uuuguacagcaacaaga

SEQ ID NO: 94825 - RNA, 17 nt, Artificial Sequence
  Synthetic
uuucauuaacuguaaga

SEQ ID NO: 94826 - RNA, 17 nt, Artificial Sequence
  Synthetic
agaugagaaggcacaga

SEQ ID NO: 94827 - RNA, 17 nt, Artificial Sequence
  Synthetic
ucuuagagguggagaga

SEQ ID NO: 94828 - RNA, 17 nt, Artificial Sequence
  Synthetic
  misc_feature (4)..(4): n is a, c, g, or u
cggnccggcagaugaga

SEQ ID NO: 94829 - RNA, 17 nt, Artificial Sequence
  Synthetic
  misc_feature (9)..(9): n is a, c, g, or u
aggagaucncgaauaga

SEQ ID NO: 94830 - RNA, 17 nt, Artificial Sequence
  Synthetic
ccucgccucgcagacga

SEQ ID NO: 94831 - RNA, 17 nt, Artificial Sequence
  Synthetic
uguacaaaaccuucgga

SEQ ID NO: 94832 - RNA, 17 nt, Artificial Sequence
  Synthetic
  misc_feature (7)..(7): n is a, c, g, or u
agcccangaugauggga

SEQ ID NO: 94833 - RNA, 17 nt, Artificial Sequence
  Synthetic
uuuacauacucugugga

SEQ ID NO: 94834 - RNA, 17 nt, Artificial Sequence
  Synthetic
  misc_feature (8)..(8): n is a, c, g, or u
  misc_feature (15)..(15): n is a, c, g, or u
ugaaugunaggaaanga

SEQ ID NO: 94835 - RNA, 17 nt, Artificial Sequence
  Synthetic
  misc_feature (14)..(15): n is a, c, g, or u
uuccacgcaugcgnnga

SEQ ID NO: 94836 - RNA, 17 nt, Artificial Sequence
  Synthetic
auaugcccugagccuga

SEQ ID NO: 94837 - RNA, 17 nt, Artificial Sequence
  Synthetic
  misc_feature (13)..(13): n is a, c, g, or u
  misc_feature (16)..(16): n is a, c, g, or u
uuuaaugccuuunucna

SEQ ID NO: 94838 - RNA, 17 nt, Artificial Sequence
  Synthetic
ucuuguucccaagaaua

SEQ ID NO: 94839 - RNA, 17 nt, Artificial Sequence
  Synthetic
cuaugucaauguuaaua

SEQ ID NO: 94840 - RNA, 17 nt, Artificial Sequence
  Synthetic
uaucccuuggacucaua

SEQ ID NO: 94841 - RNA, 17 nt, Artificial Sequence
  Synthetic
uuuggcuuucaguuaua

SEQ ID NO: 94842 - RNA, 17 nt, Artificial Sequence
  Synthetic
agggaguucuucuucua

SEQ ID NO: 94843 - RNA, 17 nt, Artificial Sequence
  Synthetic
cuucucucaauuuucua

SEQ ID NO: 94844 - RNA, 17 nt, Artificial Sequence
  Synthetic
agggcaaauauuuggua

SEQ ID NO: 94845 - RNA, 17 nt, Artificial Sequence
  Synthetic
  misc_feature (8)..(8): n is a, c, g, or u
cuugccunagugcugua

SEQ ID NO: 94846 - RNA, 17 nt, Artificial Sequence
  Synthetic
aacguuugguuuuauua

SEQ ID NO: 94847 - RNA, 17 nt, Artificial Sequence
  Synthetic
  misc_feature (14)..(14): n is a, c, g, or u
cauaucccaugaanuua

SEQ ID NO: 94848 - RNA, 17 nt, Artificial Sequence
  Synthetic
  misc_feature (2)..(2): n is a, c, g, or u
  misc_feature (5)..(5): n is a, c, g, or u
unggnugugcugccaac

SEQ ID NO: 94849 - RNA, 17 nt, Artificial Sequence
  Synthetic
  misc_feature (5)..(5): n is a, c, g, or u
  misc_feature (8)..(8): n is a, c, g, or u
cgaangcnggguccaac

SEQ ID NO: 94850 - RNA, 17 nt, Artificial Sequence
  Synthetic
acaucaacuaccagcac

SEQ ID NO: 94851 - RNA, 17 nt, Artificial Sequence
  Synthetic
  misc_feature (3)..(3): n is a, c, g, or u
canucaggauuaaagac

SEQ ID NO: 94852 - RNA, 17 nt, Artificial Sequence
  Synthetic
ucuuccaaaaguaagac

SEQ ID NO: 94853 - RNA, 17 nt, Artificial Sequence
  Synthetic
  misc_feature (2)..(2): n is a, c, g, or u
  misc_feature (8)..(8): n is a, c, g, or u
unaguuungcuccagac

SEQ ID NO: 94854 - RNA, 17 nt, Artificial Sequence
  Synthetic
ccaaacggccccgagac

SEQ ID NO: 94855 - RNA, 17 nt, Artificial Sequence
  Synthetic
  misc_feature (6)..(6): n is a, c, g, or u
  misc_feature (8)..(8): n is a, c, g, or u
  misc_feature (14)..(14): n is a, c, g, or u
acugununuuuaangac

SEQ ID NO: 94856 - RNA, 17 nt, Artificial Sequence
  Synthetic
aaggugggaaacuuuac

SEQ ID NO: 94857 - RNA, 17 nt, Artificial Sequence
  Synthetic
ugaugaaucuggccacc

SEQ ID NO: 94858 - RNA, 17 nt, Artificial Sequence
  Synthetic
agaccuugggcaagacc

SEQ ID NO: 94859 - RNA, 17 nt, Artificial Sequence
  Synthetic
  misc_feature (9)..(9): n is a, c, g, or u
ugugguggngugaaccc

SEQ ID NO: 94860 - RNA, 17 nt, Artificial Sequence
  Synthetic
caaauuacuucccaccc

SEQ ID NO: 94861 - RNA, 17 nt, Artificial Sequence
  Synthetic
cacuaguaaacugagcc

SEQ ID NO: 94862 - RNA, 17 nt, Artificial Sequence
  Synthetic
  misc_feature (15)..(15): n is a, c, g, or u
cacauccagcgauancc

SEQ ID NO: 94863 - RNA, 17 nt, Artificial Sequence
  Synthetic
  misc_feature (8)..(8): n is a, c, g, or u
uggaaganccagcaucc

SEQ ID NO: 94864 - RNA, 17 nt, Artificial Sequence
  Synthetic
ccucaguccguuucucc

SEQ ID NO: 94865 - RNA, 17 nt, Artificial Sequence
  Synthetic
  misc_feature (11)..(11): n is a, c, g, or u
uguccuccaanuugucc

SEQ ID NO: 94866 - RNA, 17 nt, Artificial Sequence
  Synthetic
cugguaguugauguucc

SEQ ID NO: 94867 - RNA, 17 nt, Artificial Sequence
  Synthetic
  misc_feature (11)..(11): n is a, c, g, or u
auguauacaancuaagc

SEQ ID NO: 94868 - RNA, 17 nt, Artificial Sequence
  Synthetic
agaugaggcauagcagc

SEQ ID NO: 94869 - RNA, 17 nt, Artificial Sequence
  Synthetic
cuuguuuugcucgcagc

SEQ ID NO: 94870 - RNA, 17 nt, Artificial Sequence
  Synthetic
ccgccuguaacacgagc

SEQ ID NO: 94871 - RNA, 17 nt, Artificial Sequence
  Synthetic
auagagguuccuugagc

SEQ ID NO: 94872 - RNA, 17 nt, Artificial Sequence
  Synthetic
ccaacuggauccugcgc

SEQ ID NO: 94873 - RNA, 17 nt, Artificial Sequence
  Synthetic
  misc_feature (1)..(1): n is a, c, g, or u
  misc_feature (11)..(11): n is a, c, g, or u
nuuguccuggnuaucgc

SEQ ID NO: 94874 - RNA, 17 nt, Artificial Sequence
  Synthetic
cauacucuguggaaggc

SEQ ID NO: 94875 - RNA, 17 nt, Artificial Sequence
  Synthetic
cugcucguguuacaggc

SEQ ID NO: 94876 - RNA, 17 nt, Artificial Sequence
  Synthetic
ugccgauugguggaggc

SEQ ID NO: 94877 - RNA, 17 nt, Artificial Sequence
  Synthetic
ugcgccccguggucggc

SEQ ID NO: 94878 - RNA, 17 nt, Artificial Sequence
  Synthetic
  misc_feature (3)..(3): n is a, c, g, or u
  misc_feature (12)..(12): n is a, c, g, or u
  misc_feature (15)..(15): n is a, c, g, or u
uanaaaggcaunaangc

SEQ ID NO: 94879 - RNA, 17 nt, Artificial Sequence
  Synthetic
acuaauucccuggaugc

SEQ ID NO: 94880 - RNA, 17 nt, Artificial Sequence
  Synthetic
ugugccuucucaucugc

SEQ ID NO: 94881 - RNA, 17 nt, Artificial Sequence
  Synthetic
  misc_feature (11)..(11): n is a, c, g, or u
uugagcagganucgugc

SEQ ID NO: 94882 - RNA, 17 nt, Artificial Sequence
  Synthetic
  misc_feature (1)..(1): n is a, c, g, or u
  misc_feature (9)..(9): n is a, c, g, or u
nucuccaunuucggugc

SEQ ID NO: 94883 - RNA, 17 nt, Artificial Sequence
  Synthetic
aaaaaguugcauggugc

SEQ ID NO: 94884 - RNA, 17 nt, Artificial Sequence
  Synthetic
  misc_feature (1)..(1): n is a, c, g, or u
  misc_feature (9)..(9): n is a, c, g, or u
  misc_feature (16)..(16): n is a, c, g, or u
nuggccagnggcaaanc

SEQ ID NO: 94885 - RNA, 17 nt, Artificial Sequence
  Synthetic
  misc_feature (9)..(9): n is a, c, g, or u
  misc_feature (16)..(16): n is a, c, g, or u
ccuaccugnuuugccnc

SEQ ID NO: 94886 - RNA, 17 nt, Artificial Sequence
  Synthetic
  misc_feature (8)..(8): n is a, c, g, or u
  misc_feature (12)..(12): n is a, c, g, or u
auggagancacnacauc

SEQ ID NO: 94887 - RNA, 17 nt, Artificial Sequence
  Synthetic
  misc_feature (7)..(7): n is a, c, g, or u
cgccucngcucuguauc

SEQ ID NO: 94888 - RNA, 17 nt, Artificial Sequence
  Synthetic
  misc_feature (1)..(1): n is a, c, g, or u
nuauaggccccucacuc

SEQ ID NO: 94889 - RNA, 17 nt, Artificial Sequence
  Synthetic
uuugggguggagcccuc

SEQ ID NO: 94890 - RNA, 17 nt, Artificial Sequence
  Synthetic
uucuguucccaauccuc

SEQ ID NO: 94891 - RNA, 17 nt, Artificial Sequence
  Synthetic
aagagacagucauccuc

SEQ ID NO: 94892 - RNA, 17 nt, Artificial Sequence
  Synthetic
cagaagaucucaaucuc

SEQ ID NO: 94893 - RNA, 17 nt, Artificial Sequence
  Synthetic
  misc_feature (7)..(7): n is a, c, g, or u
  misc_feature (12)..(12): n is a, c, g, or u
uaggagngggancauuc

SEQ ID NO: 94894 - RNA, 17 nt, Artificial Sequence
  Synthetic
uaucuuaucaacacuuc

SEQ ID NO: 94895 - RNA, 17 nt, Artificial Sequence
  Synthetic
cuucuuguugguucuuc

SEQ ID NO: 94896 - RNA, 17 nt, Artificial Sequence
  Synthetic
  misc_feature (5)..(5): n is a, c, g, or u
  misc_feature (7)..(7): n is a, c, g, or u
uucuncnucugccguuc

SEQ ID NO: 94897 - RNA, 17 nt, Artificial Sequence
  Synthetic
ugaggugaacaauguuc

SEQ ID NO: 94898 - RNA, 17 nt, Artificial Sequence
  Synthetic
  misc_feature (11)..(11): n is a, c, g, or u
ugauuaacugnauguuc

SEQ ID NO: 94899 - RNA, 17 nt, Artificial Sequence
  Synthetic
cuaacaacaguaguuuc

SEQ ID NO: 94900 - RNA, 17 nt, Artificial Sequence
  Synthetic
  misc_feature (1)..(1): n is a, c, g, or u
nccacauuguguaaaag

SEQ ID NO: 94901 - RNA, 17 nt, Artificial Sequence
  Synthetic
uuuuguacagcaacaag

SEQ ID NO: 94902 - RNA, 17 nt, Artificial Sequence
  Synthetic
  misc_feature (5)..(5): n is a, c, g, or u
acaanuuggaggacaag

SEQ ID NO: 94903 - RNA, 17 nt, Artificial Sequence
  Synthetic
  misc_feature (10)..(10): n is a, c, g, or u
  misc_feature (12)..(12): n is a, c, g, or u
aacggcagangnagaag

SEQ ID NO: 94904 - RNA, 17 nt, Artificial Sequence
  Synthetic
auagcagcaggaugaag

SEQ ID NO: 94905 - RNA, 17 nt, Artificial Sequence
  Synthetic
  misc_feature (12)..(12): n is a, c, g, or u
ccaaggucuuanauaag

SEQ ID NO: 94906 - RNA, 17 nt, Artificial Sequence
  Synthetic
uuuucauuaacuguaag

SEQ ID NO: 94907 - RNA, 17 nt, Artificial Sequence
  Synthetic
aacugaaagccaaacag

SEQ ID NO: 94908 - RNA, 17 nt, Artificial Sequence
  Synthetic
ucgggaaagaaucccag

SEQ ID NO: 94909 - RNA, 17 nt, Artificial Sequence
  Synthetic
  misc_feature (10)..(10): n is a, c, g, or u
caaggaucanuggccag

SEQ ID NO: 94910 - RNA, 17 nt, Artificial Sequence
  Synthetic
  misc_feature (1)..(1): n is a, c, g, or u
  misc_feature (13)..(13): n is a, c, g, or u
ngccaagccccanccag

SEQ ID NO: 94911 - RNA, 17 nt, Artificial Sequence
  Synthetic
augagaugauuaggcag

SEQ ID NO: 94912 - RNA, 17 nt, Artificial Sequence
  Synthetic
auccucaggccaugcag

SEQ ID NO: 94913 - RNA, 17 nt, Artificial Sequence
  Synthetic
  misc_feature (1)..(1): n is a, c, g, or u
nuccaugcgacgugcag

SEQ ID NO: 94914 - RNA, 17 nt, Artificial Sequence
  Synthetic
uagugccauuuguucag

SEQ ID NO: 94915 - RNA, 17 nt, Artificial Sequence
  Synthetic
caagauuccuaugggag

SEQ ID NO: 94916 - RNA, 17 nt, Artificial Sequence
  Synthetic
  misc_feature (6)..(6): n is a, c, g, or u
cuagancccagagugag

SEQ ID NO: 94917 - RNA, 17 nt, Artificial Sequence
  Synthetic
aagaaaauugguaauag

SEQ ID NO: 94918 - RNA, 17 nt, Artificial Sequence
  Synthetic
acaagagggaaacauag

SEQ ID NO: 94919 - RNA, 17 nt, Artificial Sequence
  Synthetic
aaguguugauaagauag

SEQ ID NO: 94920 - RNA, 17 nt, Artificial Sequence
  Synthetic
uucucucaauuuucuag

SEQ ID NO: 94921 - RNA, 17 nt, Artificial Sequence
  Synthetic
auuuuggccaggacacg

SEQ ID NO: 94922 - RNA, 17 nt, Artificial Sequence
  Synthetic
augagaaggcacagacg

SEQ ID NO: 94923 - RNA, 17 nt, Artificial Sequence
  Synthetic
ugcucguguuacaggcg

SEQ ID NO: 94924 - RNA, 17 nt, Artificial Sequence
  Synthetic
ccuucgucugcgaggcg

SEQ ID NO: 94925 - RNA, 17 nt, Artificial Sequence
  Synthetic
cacagagucuagacucg

SEQ ID NO: 94926 - RNA, 17 nt, Artificial Sequence
  Synthetic
  misc_feature (1)..(1): n is a, c, g, or u
nagcagccauggaaagg

SEQ ID NO: 94927 - RNA, 17 nt, Artificial Sequence
  Synthetic
cccuuggacucauaagg

SEQ ID NO: 94928 - RNA, 17 nt, Artificial Sequence
  Synthetic
ccugcucguguuacagg

SEQ ID NO: 94929 - RNA, 17 nt, Artificial Sequence
  Synthetic
auuacuucccacccagg

SEQ ID NO: 94930 - RNA, 17 nt, Artificial Sequence
  Synthetic
cgauugguggaggcagg

SEQ ID NO: 94931 - RNA, 17 nt, Artificial Sequence
  Synthetic
ugacugucucuuagagg

SEQ ID NO: 94932 - RNA, 17 nt, Artificial Sequence
  Synthetic
uugguggaggcaggagg

SEQ ID NO: 94933 - RNA, 17 nt, Artificial Sequence
  Synthetic
  misc_feature (13)..(13): n is a, c, g, or u
ccgauacagagcngagg

SEQ ID NO: 94934 - RNA, 17 nt, Artificial Sequence
  Synthetic
ucucucaauuuucuagg

SEQ ID NO: 94935 - RNA, 17 nt, Artificial Sequence
  Synthetic
  misc_feature (5)..(5): n is a, c, g, or u
cuggngggcguucacgg

SEQ ID NO: 94936 - RNA, 17 nt, Artificial Sequence
  Synthetic
  misc_feature (4)..(4): n is a, c, g, or u
cucngcucuguaucggg

SEQ ID NO: 94937 - RNA, 17 nt, Artificial Sequence
  Synthetic
cugggaggaguuggggg

SEQ ID NO: 94938 - RNA, 17 nt, Artificial Sequence
  Synthetic
  misc_feature (6)..(6): n is a, c, g, or u
acggcngucuuuugggg

SEQ ID NO: 94939 - RNA, 17 nt, Artificial Sequence
  Synthetic
aagagcuacagcauggg

SEQ ID NO: 94940 - RNA, 17 nt, Artificial Sequence
  Synthetic
  misc_feature (2)..(2): n is a, c, g, or u
  misc_feature (4)..(4): n is a, c, g, or u
  misc_feature (10)..(10): n is a, c, g, or u
ununuuuaangacuggg

SEQ ID NO: 94941 - RNA, 17 nt, Artificial Sequence
  Synthetic
ccaagcugugccuuggg

SEQ ID NO: 94942 - RNA, 17 nt, Artificial Sequence
  Synthetic
  misc_feature (2)..(2): n is a, c, g, or u
  misc_feature (4)..(4): n is a, c, g, or u
  misc_feature (15)..(15): n is a, c, g, or u
angnucuuuguacungg

SEQ ID NO: 94943 - RNA, 17 nt, Artificial Sequence
  Synthetic
ccuugggcaagaccugg

SEQ ID NO: 94944 - RNA, 17 nt, Artificial Sequence
  Synthetic
  misc_feature (6)..(6): n is a, c, g, or u
cuauanuuuccugcugg

SEQ ID NO: 94945 - RNA, 17 nt, Artificial Sequence
  Synthetic
ugaaagccaaacagugg

SEQ ID NO: 94946 - RNA, 17 nt, Artificial Sequence
  Synthetic
  misc_feature (10)..(10): n is a, c, g, or u
caagccccanccagugg

SEQ ID NO: 94947 - RNA, 17 nt, Artificial Sequence
  Synthetic
  misc_feature (8)..(8): n is a, c, g, or u
aaaagacngccgugugg

SEQ ID NO: 94948 - RNA, 17 nt, Artificial Sequence
  Synthetic
uccugacugccgauugg

SEQ ID NO: 94949 - RNA, 17 nt, Artificial Sequence
  Synthetic
cccaaggcacagcuugg

SEQ ID NO: 94950 - RNA, 17 nt, Artificial Sequence
  Synthetic
  misc_feature (1)..(1): n is a, c, g, or u
ngacugggaggaguugg

SEQ ID NO: 94951 - RNA, 17 nt, Artificial Sequence
  Synthetic
  misc_feature (3)..(3): n is a, c, g, or u
  misc_feature (13)..(13): n is a, c, g, or u
uanccaggacaanuugg

SEQ ID NO: 94952 - RNA, 17 nt, Artificial Sequence
  Synthetic
aagauaggggcauuugg

SEQ ID NO: 94953 - RNA, 17 nt, Artificial Sequence
  Synthetic
  misc_feature (9)..(9): n is a, c, g, or u
  misc_feature (16)..(16): n is a, c, g, or u
augaaugunaggaaang

SEQ ID NO: 94954 - RNA, 17 nt, Artificial Sequence
  Synthetic
  misc_feature (2)..(2): n is a, c, g, or u
  misc_feature (13)..(14): n is a, c, g, or u
  misc_feature (16)..(16): n is a, c, g, or u
unacauucauuunnang

SEQ ID NO: 94955 - RNA, 17 nt, Artificial Sequence
  Synthetic
  misc_feature (16)..(16): n is a, c, g, or u
cucccgauacagagcng

SEQ ID NO: 94956 - RNA, 17 nt, Artificial Sequence
  Synthetic
uggugacccacaaaaug

SEQ ID NO: 94957 - RNA, 17 nt, Artificial Sequence
  Synthetic
caguuauauggaugaug

SEQ ID NO: 94958 - RNA, 17 nt, Artificial Sequence
  Synthetic
uagaugucaacaauaug

SEQ ID NO: 94959 - RNA, 17 nt, Artificial Sequence
  Synthetic
aaucuucucgaggacug

SEQ ID NO: 94960 - RNA, 17 nt, Artificial Sequence
  Synthetic
ccaggagaaacggacug

SEQ ID NO: 94961 - RNA, 17 nt, Artificial Sequence
  Synthetic
aauaugcccugagccug

SEQ ID NO: 94962 - RNA, 17 nt, Artificial Sequence
  Synthetic
uuccacugcauggccug

SEQ ID NO: 94963 - RNA, 17 nt, Artificial Sequence
  Synthetic
auuauuuacauacucug

SEQ ID NO: 94964 - RNA, 17 nt, Artificial Sequence
  Synthetic
aucgcuggaugugucug

SEQ ID NO: 94965 - RNA, 17 nt, Artificial Sequence
  Synthetic
agaauuuggagcuucug

SEQ ID NO: 94966 - RNA, 17 nt, Artificial Sequence
  Synthetic
cugaaagccaaacagug

SEQ ID NO: 94967 - RNA, 17 nt, Artificial Sequence
  Synthetic
  misc_feature (11)..(11): n is a, c, g, or u
ccaagccccanccagug

SEQ ID NO: 94968 - RNA, 17 nt, Artificial Sequence
  Synthetic
  misc_feature (8)..(8): n is a, c, g, or u
ugcuagancccagagug

SEQ ID NO: 94969 - RNA, 17 nt, Artificial Sequence
  Synthetic
uggugucuuuuggagug

SEQ ID NO: 94970 - RNA, 17 nt, Artificial Sequence
  Synthetic
  misc_feature (11)..(11): n is a, c, g, or u
cccaaaagacngccgug

SEQ ID NO: 94971 - RNA, 17 nt, Artificial Sequence
  Synthetic
  misc_feature (3)..(3): n is a, c, g, or u
cunagugcuguauggug

SEQ ID NO: 94972 - RNA, 17 nt, Artificial Sequence
  Synthetic
  misc_feature (3)..(3): n is a, c, g, or u
  misc_feature (15)..(15): n is a, c, g, or u
aanucagacaacuanug

SEQ ID NO: 94973 - RNA, 17 nt, Artificial Sequence
  Synthetic
  misc_feature (1)..(1): n is a, c, g, or u
  misc_feature (15)..(15): n is a, c, g, or u
nguacaauauguucnug

SEQ ID NO: 94974 - RNA, 17 nt, Artificial Sequence
  Synthetic
  misc_feature (10)..(10): n is a, c, g, or u
aguaugucanagaauug

SEQ ID NO: 94975 - RNA, 17 nt, Artificial Sequence
  Synthetic
uggaugaugugguauug

SEQ ID NO: 94976 - RNA, 17 nt, Artificial Sequence
  Synthetic
uauguaauuggaaguug

SEQ ID NO: 94977 - RNA, 17 nt, Artificial Sequence
  Synthetic
  misc_feature (2)..(2): n is a, c, g, or u
angacugggaggaguug

SEQ ID NO: 94978 - RNA, 17 nt, Artificial Sequence
  Synthetic
aauaaaaccaaacguug

SEQ ID NO: 94979 - RNA, 17 nt, Artificial Sequence
  Synthetic
ugagugauuggagguug

SEQ ID NO: 94980 - RNA, 17 nt, Artificial Sequence
  Synthetic
caagcuauucuguguug

SEQ ID NO: 94981 - RNA, 17 nt, Artificial Sequence
  Synthetic
caugcguggaaccuuug

SEQ ID NO: 94982 - RNA, 17 nt, Artificial Sequence
  Synthetic
  misc_feature (9)..(9): n is a, c, g, or u
cacacggcngucuuuug

SEQ ID NO: 94983 - RNA, 17 nt, Artificial Sequence
  Synthetic
  misc_feature (17)..(17): n is a, c, g, or u
accccaacaaggaucan

SEQ ID NO: 94984 - RNA, 17 nt, Artificial Sequence
  Synthetic
  misc_feature (17)..(17): n is a, c, g, or u
cugucuuuaauccugan

SEQ ID NO: 94985 - RNA, 17 nt, Artificial Sequence
  Synthetic
  misc_feature (17)..(17): n is a, c, g, or u
cuccaaauucuuuauan

SEQ ID NO: 94986 - RNA, 17 nt, Artificial Sequence
  Synthetic
  misc_feature (17)..(17): n is a, c, g, or u
ucaauaggucuauuuan

SEQ ID NO: 94987 - RNA, 17 nt, Artificial Sequence
  Synthetic
  misc_feature (2)..(2): n is a, c, g, or u
  misc_feature (14)..(14): n is a, c, g, or u
  misc_feature (17)..(17): n is a, c, g, or u
anuuggcuccgaangcn

SEQ ID NO: 94988 - RNA, 17 nt, Artificial Sequence
  Synthetic
  misc_feature (17)..(17): n is a, c, g, or u
accuuuaccccguugcn

SEQ ID NO: 94989 - RNA, 17 nt, Artificial Sequence
  Synthetic
  misc_feature (17)..(17): n is a, c, g, or u
uucccaucccaucaucn

SEQ ID NO: 94990 - RNA, 17 nt, Artificial Sequence
  Synthetic
  misc_feature (17)..(17): n is a, c, g, or u
acgcaacccccacuggn

SEQ ID NO: 94991 - RNA, 17 nt, Artificial Sequence
  Synthetic
  misc_feature (17)..(17): n is a, c, g, or u
cuugggcaagaccuggn

SEQ ID NO: 94992 - RNA, 17 nt, Artificial Sequence
  Synthetic
  misc_feature (16)..(17): n is a, c, g, or u
agcuugguggaaugunn

SEQ ID NO: 94993 - RNA, 17 nt, Artificial Sequence
  Synthetic
  misc_feature (17)..(17): n is a, c, g, or u
cucaccauacagcacun

SEQ ID NO: 94994 - RNA, 17 nt, Artificial Sequence
  Synthetic
  misc_feature (3)..(3): n is a, c, g, or u
  misc_feature (5)..(6): n is a, c, g, or u
  misc_feature (17)..(17): n is a, c, g, or u
ucnunnaaaugaaugun

SEQ ID NO: 94995 - RNA, 17 nt, Artificial Sequence
  Synthetic
  misc_feature (1)..(1): n is a, c, g, or u
  misc_feature (17)..(17): n is a, c, g, or u
nagaauugugggucuun

SEQ ID NO: 94996 - RNA, 17 nt, Artificial Sequence
  Synthetic
  misc_feature (17)..(17): n is a, c, g, or u
ugccuuggguggcuuun

SEQ ID NO: 94997 - RNA, 17 nt, Artificial Sequence
  Synthetic
caaagacaaaagaaaau

SEQ ID NO: 94998 - RNA, 17 nt, Artificial Sequence
  Synthetic
aggcuguaggcauaaau

SEQ ID NO: 94999 - RNA, 17 nt, Artificial Sequence
  Synthetic
cuccugccuccaccaau

SEQ ID NO: 95000 - RNA, 17 nt, Artificial Sequence
  Synthetic
cauacuuuccaaucaau

SEQ ID NO: 95001 - RNA, 17 nt, Artificial Sequence
  Synthetic
uucaugggauauguaau

SEQ ID NO: 95002 - RNA, 17 nt, Artificial Sequence
  Synthetic
cugaggcccacucccau

SEQ ID NO: 95003 - RNA, 17 nt, Artificial Sequence
  Synthetic
aacaagagcuacagcau

SEQ ID NO: 95004 - RNA, 17 nt, Artificial Sequence
  Synthetic
  misc_feature (12)..(12): n is a, c, g, or u
uacucccuuaanuucau

SEQ ID NO: 95005 - RNA, 17 nt, Artificial Sequence
  Synthetic
  misc_feature (2)..(2): n is a, c, g, or u
anucaaacaauccagau

SEQ ID NO: 95006 - RNA, 17 nt, Artificial Sequence
  Synthetic
cuuagagguggagagau

SEQ ID NO: 95007 - RNA, 17 nt, Artificial Sequence
  Synthetic
ucuuccugacugccgau

SEQ ID NO: 95008 - RNA, 17 nt, Artificial Sequence
  Synthetic
aaagaaucccagaggau

SEQ ID NO: 95009 - RNA, 17 nt, Artificial Sequence
  Synthetic
  misc_feature (11)..(11): n is a, c, g, or u
cgaaagcccangaugau

SEQ ID NO: 95010 - RNA, 17 nt, Artificial Sequence
  Synthetic
agagguuggugagugau

SEQ ID NO: 95011 - RNA, 17 nt, Artificial Sequence
  Synthetic
  misc_feature (1)..(1): n is a, c, g, or u
nggguccaacuggugau

SEQ ID NO: 95012 - RNA, 17 nt, Artificial Sequence
  Synthetic
uaaauagaccuauugau

SEQ ID NO: 95013 - RNA, 17 nt, Artificial Sequence
  Synthetic
  misc_feature (9)..(9): n is a, c, g, or u
  misc_feature (15)..(15): n is a, c, g, or u
ucuggagcnaaacunau

SEQ ID NO: 95014 - RNA, 17 nt, Artificial Sequence
  Synthetic
uaugucaauguuaauau

SEQ ID NO: 95015 - RNA, 17 nt, Artificial Sequence
  Synthetic
uuucgcaagauuccuau

SEQ ID NO: 95016 - RNA, 17 nt, Artificial Sequence
  Synthetic
uauggaugaugugguau

SEQ ID NO: 95017 - RNA, 17 nt, Artificial Sequence
  Synthetic
  misc_feature (8)..(8): n is a, c, g, or u
ccgccucngcucuguau

SEQ ID NO: 95018 - RNA, 17 nt, Artificial Sequence
  Synthetic
  misc_feature (14)..(14): n is a, c, g, or u
caccagcaggaaanuau

SEQ ID NO: 95019 - RNA, 17 nt, Artificial Sequence
  Synthetic
  misc_feature (12)..(12): n is a, c, g, or u
aucauuacuucnaaacu

SEQ ID NO: 95020 - RNA, 17 nt, Artificial Sequence
  Synthetic
aagauguuguacagacu

SEQ ID NO: 95021 - RNA, 17 nt, Artificial Sequence
  Synthetic
  misc_feature (5)..(5): n is a, c, g, or u
  misc_feature (7)..(7): n is a, c, g, or u
  misc_feature (13)..(13): n is a, c, g, or u
cugununuuuaangacu

SEQ ID NO: 95022 - RNA, 17 nt, Artificial Sequence
  Synthetic
  misc_feature (5)..(5): n is a, c, g, or u
  misc_feature (7)..(7): n is a, c, g, or u
uuaangnucuuuguacu

SEQ ID NO: 95023 - RNA, 17 nt, Artificial Sequence
  Synthetic
aggugggaaacuuuacu

SEQ ID NO: 95024 - RNA, 17 nt, Artificial Sequence
  Synthetic
  misc_feature (9)..(9): n is a, c, g, or u
ccucuuaunuaagaccu

SEQ ID NO: 95025 - RNA, 17 nt, Artificial Sequence
  Synthetic
aaacgggcaacauaccu

SEQ ID NO: 95026 - RNA, 17 nt, Artificial Sequence
  Synthetic
ucaauguuaguaucccu

SEQ ID NO: 95027 - RNA, 17 nt, Artificial Sequence
  Synthetic
acacgagcagggguccu

SEQ ID NO: 95028 - RNA, 17 nt, Artificial Sequence
  Synthetic
  misc_feature (3)..(3): n is a, c, g, or u
acnacaucaggauuccu

SEQ ID NO: 95029 - RNA, 17 nt, Artificial Sequence
  Synthetic
ccacccaaggcacagcu

SEQ ID NO: 95030 - RNA, 17 nt, Artificial Sequence
  Synthetic
  misc_feature (5)..(5): n is a, c, g, or u
ugggnucuagcagagcu

SEQ ID NO: 95031 - RNA, 17 nt, Artificial Sequence
  Synthetic
  misc_feature (10)..(10): n is a, c, g, or u
ccccacuggnuggggcu

SEQ ID NO: 95032 - RNA, 17 nt, Artificial Sequence
  Synthetic
  misc_feature (5)..(5): n is a, c, g, or u
aauunauuaugccugcu

SEQ ID NO: 95033 - RNA, 17 nt, Artificial Sequence
  Synthetic
uccuuuccauggcugcu

SEQ ID NO: 95034 - RNA, 17 nt, Artificial Sequence
  Synthetic
uauaggccccucacucu

SEQ ID NO: 95035 - RNA, 17 nt, Artificial Sequence
  Synthetic
  misc_feature (4)..(4): n is a, c, g, or u
uuanauaagaggacucu

SEQ ID NO: 95036 - RNA, 17 nt, Artificial Sequence
  Synthetic
ucuguucccaauccucu

SEQ ID NO: 95037 - RNA, 17 nt, Artificial Sequence
  Synthetic
acucuguuguccucucu

SEQ ID NO: 95038 - RNA, 17 nt, Artificial Sequence
  Synthetic
acuucucucaauuuucu

SEQ ID NO: 95039 - RNA, 17 nt, Artificial Sequence
  Synthetic
agaaaggccuuguaagu

SEQ ID NO: 95040 - RNA, 17 nt, Artificial Sequence
  Synthetic
acugaaagccaaacagu

SEQ ID NO: 95041 - RNA, 17 nt, Artificial Sequence
  Synthetic
uuggaggcuugaacagu

SEQ ID NO: 95042 - RNA, 17 nt, Artificial Sequence
  Synthetic
cuuucccgaucaccagu

SEQ ID NO: 95043 - RNA, 17 nt, Artificial Sequence
  Synthetic
  misc_feature (4)..(4): n is a, c, g, or u
uaangacugggaggagu

SEQ ID NO: 95044 - RNA, 17 nt, Artificial Sequence
  Synthetic
aagauuccuaugggagu

SEQ ID NO: 95045 - RNA, 17 nt, Artificial Sequence
  Synthetic
  misc_feature (6)..(6): n is a, c, g, or u
augggngaggcaguagu

SEQ ID NO: 95046 - RNA, 17 nt, Artificial Sequence
  Synthetic
cuaauaaaaccaaacgu

SEQ ID NO: 95047 - RNA, 17 nt, Artificial Sequence
  Synthetic
uuuuggccaggacacgu

SEQ ID NO: 95048 - RNA, 17 nt, Artificial Sequence
  Synthetic
uuuguucagugguucgu

SEQ ID NO: 95049 - RNA, 17 nt, Artificial Sequence
  Synthetic
ccuuggacucauaaggu

SEQ ID NO: 95050 - RNA, 17 nt, Artificial Sequence
  Synthetic
  misc_feature (5)..(5): n is a, c, g, or u
  misc_feature (12)..(12): n is a, c, g, or u
ccagnggcaaancaggu

SEQ ID NO: 95051 - RNA, 17 nt, Artificial Sequence
  Synthetic
  misc_feature (1)..(1): n is a, c, g, or u
nuuggaggacaagaggu

SEQ ID NO: 95052 - RNA, 17 nt, Artificial Sequence
  Synthetic
aaucuggccaccugggu

SEQ ID NO: 95053 - RNA, 17 nt, Artificial Sequence
  Synthetic
agaugucaacaauaugu

SEQ ID NO: 95054 - RNA, 17 nt, Artificial Sequence
  Synthetic
  misc_feature (8)..(8): n is a, c, g, or u
uuguacunggaggcugu

SEQ ID NO: 95055 - RNA, 17 nt, Artificial Sequence
  Synthetic
  misc_feature (7)..(7): n is a, c, g, or u
uggccanugauccuugu

SEQ ID NO: 95056 - RNA, 17 nt, Artificial Sequence
  Synthetic
augccucaucuucuugu

SEQ ID NO: 95057 - RNA, 17 nt, Artificial Sequence
  Synthetic
  misc_feature (6)..(6): n is a, c, g, or u
  misc_feature (16)..(16): n is a, c, g, or u
cgauanccaggacaanu

SEQ ID NO: 95058 - RNA, 17 nt, Artificial Sequence
  Synthetic
  misc_feature (16)..(16): n is a, c, g, or u
aguugggggaggaganu

SEQ ID NO: 95059 - RNA, 17 nt, Artificial Sequence
  Synthetic
  misc_feature (16)..(16): n is a, c, g, or u
aucuggauuguuuganu

SEQ ID NO: 95060 - RNA, 17 nt, Artificial Sequence
  Synthetic
  misc_feature (16)..(16): n is a, c, g, or u
ucccaucccaucaucnu

SEQ ID NO: 95061 - RNA, 17 nt, Artificial Sequence
  Synthetic
  misc_feature (16)..(16): n is a, c, g, or u
cgcaacccccacuggnu

SEQ ID NO: 95062 - RNA, 17 nt, Artificial Sequence
  Synthetic
  misc_feature (16)..(16): n is a, c, g, or u
agaauugugggucuunu

SEQ ID NO: 95063 - RNA, 17 nt, Artificial Sequence
  Synthetic
cugggugggaaguaauu

SEQ ID NO: 95064 - RNA, 17 nt, Artificial Sequence
  Synthetic
  misc_feature (1)..(1): n is a, c, g, or u
nucaaacaauccagauu

SEQ ID NO: 95065 - RNA, 17 nt, Artificial Sequence
  Synthetic
aagaaucccagaggauu

SEQ ID NO: 95066 - RNA, 17 nt, Artificial Sequence
  Synthetic
augaacaugagaugauu

SEQ ID NO: 95067 - RNA, 17 nt, Artificial Sequence
  Synthetic
  misc_feature (1)..(1): n is a, c, g, or u
  misc_feature (4)..(4): n is a, c, g, or u
nucnaagggcaaauauu

SEQ ID NO: 95068 - RNA, 17 nt, Artificial Sequence
  Synthetic
aacuguucuugaguauu

SEQ ID NO: 95069 - RNA, 17 nt, Artificial Sequence
  Synthetic
auggaugaugugguauu

SEQ ID NO: 95070 - RNA, 17 nt, Artificial Sequence
  Synthetic
caacguuugguuuuauu

SEQ ID NO: 95071 - RNA, 17 nt, Artificial Sequence
  Synthetic
uugcuguacaaaaccuu

SEQ ID NO: 95072 - RNA, 17 nt, Artificial Sequence
  Synthetic
  misc_feature (8)..(8): n is a, c, g, or u
cucuuaunuaagaccuu

SEQ ID NO: 95073 - RNA, 17 nt, Artificial Sequence
  Synthetic
ccuccaagcugugccuu

SEQ ID NO: 95074 - RNA, 17 nt, Artificial Sequence
  Synthetic
caauuuucuuuugucuu

SEQ ID NO: 95075 - RNA, 17 nt, Artificial Sequence
  Synthetic
ugggucaccauauucuu

SEQ ID NO: 95076 - RNA, 17 nt, Artificial Sequence
  Synthetic
auauguaauuggaaguu

SEQ ID NO: 95077 - RNA, 17 nt, Artificial Sequence
  Synthetic
  misc_feature (3)..(3): n is a, c, g, or u
aangacugggaggaguu

SEQ ID NO: 95078 - RNA, 17 nt, Artificial Sequence
  Synthetic
uaauaaaaccaaacguu

SEQ ID NO: 95079 - RNA, 17 nt, Artificial Sequence
  Synthetic
aaauauuugguaagguu

SEQ ID NO: 95080 - RNA, 17 nt, Artificial Sequence
  Synthetic
  misc_feature (12)..(12): n is a, c, g, or u
  misc_feature (15)..(15): n is a, c, g, or u
caguuggacccngcnuu

SEQ ID NO: 95081 - RNA, 17 nt, Artificial Sequence
  Synthetic
  misc_feature (12)..(12): n is a, c, g, or u
uuggggacugcnaauuu

SEQ ID NO: 95082 - RNA, 17 nt, Artificial Sequence
  Synthetic
auuuccugucuuacuuu

SEQ ID NO: 95083 - RNA, 17 nt, Artificial Sequence
  Synthetic
  misc_feature (11)..(11): n is a, c, g, or u
accacacggcngucuuu

SEQ ID NO: 95084 - RNA, 17 nt, Artificial Sequence
  Synthetic
aauuuucuuuugucuuu

SEQ ID NO: 95085 - RNA, 17 nt, Artificial Sequence
  Synthetic
  misc_feature (10)..(10): n is a, c, g, or u
ccacacggcngucuuuu

SEQ ID NO: 95086 - RNA, 17 nt, Artificial Sequence
  Synthetic
  misc_feature (1)..(1): n is a, c, g, or u
  misc_feature (13)..(13): n is a, c, g, or u
nuaguugucuganuuuu

SEQ ID NO: 95087 - RNA, 20 nt, Artificial Sequence
  Synthetic
cucuuacaguuaaugaaaaa

SEQ ID NO: 95088 - RNA, 20 nt, Artificial Sequence
  Synthetic
  misc_feature (12)..(12): n is a, c, g, or u
auugguaauagngguaaaaa

SEQ ID NO: 95089 - RNA, 20 nt, Artificial Sequence
  Synthetic
  misc_feature (13)..(13): n is a, c, g, or u
aauugguaauagngguaaaa

SEQ ID NO: 95090 - RNA, 20 nt, Artificial Sequence
  Synthetic
uccuggaaguagaggacaaa

SEQ ID NO: 95091 - RNA, 20 nt, Artificial Sequence
  Synthetic
uucccaccuuaugaguccaa

SEQ ID NO: 95092 - RNA, 20 nt, Artificial Sequence
  Synthetic
  misc_feature (14)..(14): n is a, c, g, or u
uuuaccccguugcncggcaa

SEQ ID NO: 95093 - RNA, 20 nt, Artificial Sequence
  Synthetic
cagauauuguuuacacagaa

SEQ ID NO: 95094 - RNA, 20 nt, Artificial Sequence
  Synthetic
  misc_feature (14)..(14): n is a, c, g, or u
  misc_feature (16)..(16): n is a, c, g, or u
ccggaacggcagangnagaa

SEQ ID NO: 95095 - RNA, 20 nt, Artificial Sequence
  Synthetic
  misc_feature (4)..(4): n is a, c, g, or u
  misc_feature (7)..(7): n is a, c, g, or u
acanccnagcagccauggaa

SEQ ID NO: 95096 - RNA, 20 nt, Artificial Sequence
  Synthetic
  misc_feature (15)..(15): n is a, c, g, or u
  misc_feature (18)..(18): n is a, c, g, or u
aaauauuugcccuunganaa

SEQ ID NO: 95097 - RNA, 20 nt, Artificial Sequence
  Synthetic
  misc_feature (16)..(16): n is a, c, g, or u
uacauaucccaugaanuuaa

SEQ ID NO: 95098 - RNA, 20 nt, Artificial Sequence
  Synthetic
uugggacuucaaccccaaca

SEQ ID NO: 95099 - RNA, 20 nt, Artificial Sequence
  Synthetic
  misc_feature (12)..(12): n is a, c, g, or u
ccaggguucacnccaccaca

SEQ ID NO: 95100 - RNA, 20 nt, Artificial Sequence
  Synthetic
uggucuuccaaaccucgaca

SEQ ID NO: 95101 - RNA, 20 nt, Artificial Sequence
  Synthetic
uugguucuucuggacuacca

SEQ ID NO: 95102 - RNA, 20 nt, Artificial Sequence
  Synthetic
  misc_feature (9)..(9): n is a, c, g, or u
ccaugcccnaaagccaccca

SEQ ID NO: 95103 - RNA, 20 nt, Artificial Sequence
  Synthetic
  misc_feature (6)..(6): n is a, c, g, or u
cgcccnccaggucuugccca

SEQ ID NO: 95104 - RNA, 20 nt, Artificial Sequence
  Synthetic
  misc_feature (10)..(10): n is a, c, g, or u
uuuggaaganccagcaucca

SEQ ID NO: 95105 - RNA, 20 nt, Artificial Sequence
  Synthetic
uuucccaccuuaugagucca

SEQ ID NO: 95106 - RNA, 20 nt, Artificial Sequence
  Synthetic
ugggaacaagagcuacagca

SEQ ID NO: 95107 - RNA, 20 nt, Artificial Sequence
  Synthetic
aggaacaucaacuaccagca

SEQ ID NO: 95108 - RNA, 20 nt, Artificial Sequence
  Synthetic
cuucaccucugcacgucgca

SEQ ID NO: 95109 - RNA, 20 nt, Artificial Sequence
  Synthetic
  misc_feature (15)..(15): n is a, c, g, or u
ccuuggguggcuuungggca

SEQ ID NO: 95110 - RNA, 20 nt, Artificial Sequence
  Synthetic
  misc_feature (3)..(3): n is a, c, g, or u
  misc_feature (11)..(11): n is a, c, g, or u
ugnucuccaunuucggugca

SEQ ID NO: 95111 - RNA, 20 nt, Artificial Sequence
  Synthetic
agucuuugaaguaugccuca

SEQ ID NO: 95112 - RNA, 20 nt, Artificial Sequence
  Synthetic
  misc_feature (11)..(11): n is a, c, g, or u
accugcacganuccugcuca

SEQ ID NO: 95113 - RNA, 20 nt, Artificial Sequence
  Synthetic
  misc_feature (11)..(11): n is a, c, g, or u
caagaccuggngggcguuca

SEQ ID NO: 95114 - RNA, 20 nt, Artificial Sequence
  Synthetic
uuuuuucauuaacuguaaga

SEQ ID NO: 95115 - RNA, 20 nt, Artificial Sequence
  Synthetic
auagaaggaaagaagucaga

SEQ ID NO: 95116 - RNA, 20 nt, Artificial Sequence
  Synthetic
  misc_feature (3)..(3): n is a, c, g, or u
agncccaaacggccccgaga

SEQ ID NO: 95117 - RNA, 20 nt, Artificial Sequence
  Synthetic
  misc_feature (7)..(7): n is a, c, g, or u
acacggnccggcagaugaga

SEQ ID NO: 95118 - RNA, 20 nt, Artificial Sequence
  Synthetic
  misc_feature (9)..(9): n is a, c, g, or u
caagugcanuuuccguccga

SEQ ID NO: 95119 - RNA, 20 nt, Artificial Sequence
  Synthetic
ugcuguacaaaaccuucgga

SEQ ID NO: 95120 - RNA, 20 nt, Artificial Sequence
  Synthetic
  misc_feature (9)..(9): n is a, c, g, or u
  misc_feature (11)..(11): n is a, c, g, or u
acggcagangnagaagggga

SEQ ID NO: 95121 - RNA, 20 nt, Artificial Sequence
  Synthetic
uuauuuacauacucugugga

SEQ ID NO: 95122 - RNA, 20 nt, Artificial Sequence
  Synthetic
  misc_feature (11)..(11): n is a, c, g, or u
  misc_feature (18)..(18): n is a, c, g, or u
aaaugaaugunaggaaanga

SEQ ID NO: 95123 - RNA, 20 nt, Artificial Sequence
  Synthetic
  misc_feature (17)..(18): n is a, c, g, or u
agguuccacgcaugcgnnga

SEQ ID NO: 95124 - RNA, 20 nt, Artificial Sequence
  Synthetic
  misc_feature (15)..(15): n is a, c, g, or u
cuugcgaaagcccangauga

SEQ ID NO: 95125 - RNA, 20 nt, Artificial Sequence
  Synthetic
  misc_feature (10)..(10): n is a, c, g, or u
ucugcuagancccagaguga

SEQ ID NO: 95126 - RNA, 20 nt, Artificial Sequence
  Synthetic
  misc_feature (19)..(19): n is a, c, g, or u
uggggacccugcaccgaana

SEQ ID NO: 95127 - RNA, 20 nt, Artificial Sequence
  Synthetic
  misc_feature (1)..(1): n is a, c, g, or u
  misc_feature (16)..(16): n is a, c, g, or u
  misc_feature (19)..(19): n is a, c, g, or u
ngguuuaaugccuuunucna

SEQ ID NO: 95128 - RNA, 20 nt, Artificial Sequence
  Synthetic
  misc_feature (5)..(5): n is a, c, g, or u
acugnauguucaggauaaua

SEQ ID NO: 95129 - RNA, 20 nt, Artificial Sequence
  Synthetic
  misc_feature (1)..(1): n is a, c, g, or u
nagcuaugucaauguuaaua

SEQ ID NO: 95130 - RNA, 20 nt, Artificial Sequence
  Synthetic
cuguuuggcuuucaguuaua

SEQ ID NO: 95131 - RNA, 20 nt, Artificial Sequence
  Synthetic
  misc_feature (2)..(2): n is a, c, g, or u
cnaagggcaaauauuuggua

SEQ ID NO: 95132 - RNA, 20 nt, Artificial Sequence
  Synthetic
  misc_feature (11)..(11): n is a, c, g, or u
uagcuugccunagugcugua

SEQ ID NO: 95133 - RNA, 20 nt, Artificial Sequence
  Synthetic
cccaacguuugguuuuauua

SEQ ID NO: 95134 - RNA, 20 nt, Artificial Sequence
  Synthetic
  misc_feature (17)..(17): n is a, c, g, or u
uuacauaucccaugaanuua

SEQ ID NO: 95135 - RNA, 20 nt, Artificial Sequence
  Synthetic
ccuggaaguagaggacaaac

SEQ ID NO: 95136 - RNA, 20 nt, Artificial Sequence
  Synthetic
  misc_feature (5)..(5): n is a, c, g, or u
  misc_feature (8)..(8): n is a, c, g, or u
ugcunggnugugcugccaac

SEQ ID NO: 95137 - RNA, 20 nt, Artificial Sequence
  Synthetic
  misc_feature (8)..(8): n is a, c, g, or u
  misc_feature (11)..(11): n is a, c, g, or u
cuccgaangcnggguccaac

SEQ ID NO: 95138 - RNA, 20 nt, Artificial Sequence
  Synthetic
  misc_feature (6)..(6): n is a, c, g, or u
ugccanucaggauuaaagac

SEQ ID NO: 95139 - RNA, 20 nt, Artificial Sequence
  Synthetic
uucucuuccaaaaguaagac

SEQ ID NO: 95140 - RNA, 20 nt, Artificial Sequence
  Synthetic
  misc_feature (5)..(5): n is a, c, g, or u
  misc_feature (11)..(11): n is a, c, g, or u
cgaunaguuungcuccagac

SEQ ID NO: 95141 - RNA, 20 nt, Artificial Sequence
  Synthetic
  misc_feature (9)..(9): n is a, c, g, or u
  misc_feature (11)..(11): n is a, c, g, or u
  misc_feature (17)..(17): n is a, c, g, or u
aagacugununuuuaangac

SEQ ID NO: 95142 - RNA, 20 nt, Artificial Sequence
  Synthetic
cauaaggugggaaacuuuac

SEQ ID NO: 95143 - RNA, 20 nt, Artificial Sequence
  Synthetic
aguugaugaaucuggccacc

SEQ ID NO: 95144 - RNA, 20 nt, Artificial Sequence
  Synthetic
  misc_feature (1)..(1): n is a, c, g, or u
nuaagaccuugggcaagacc

SEQ ID NO: 95145 - RNA, 20 nt, Artificial Sequence
  Synthetic
  misc_feature (12)..(12): n is a, c, g, or u
ccgugugguggngugaaccc

SEQ ID NO: 95146 - RNA, 20 nt, Artificial Sequence
  Synthetic
uuccaaauuacuucccaccc

SEQ ID NO: 95147 - RNA, 20 nt, Artificial Sequence
  Synthetic
  misc_feature (7)..(7): n is a, c, g, or u
auagcunacuacuaauuccc

SEQ ID NO: 95148 - RNA, 20 nt, Artificial Sequence
  Synthetic
  misc_feature (18)..(18): n is a, c, g, or u
agacacauccagcgauancc

SEQ ID NO: 95149 - RNA, 20 nt, Artificial Sequence
  Synthetic
  misc_feature (1)..(1): n is a, c, g, or u
  misc_feature (18)..(18): n is a, c, g, or u
naccaccgugaacgcccncc

SEQ ID NO: 95150 - RNA, 20 nt, Artificial Sequence
  Synthetic
  misc_feature (11)..(11): n is a, c, g, or u
auuuggaaganccagcaucc

SEQ ID NO: 95151 - RNA, 20 nt, Artificial Sequence
  Synthetic
  misc_feature (14)..(14): n is a, c, g, or u
ucuuguccuccaanuugucc

SEQ ID NO: 95152 - RNA, 20 nt, Artificial Sequence
  Synthetic
  misc_feature (14)..(14): n is a, c, g, or u
ugcauguauacaancuaagc

SEQ ID NO: 95153 - RNA, 20 nt, Artificial Sequence
  Synthetic
ccggaacuggagccaccagc

SEQ ID NO: 95154 - RNA, 20 nt, Artificial Sequence
  Synthetic
agaagaugaggcauagcagc

SEQ ID NO: 95155 - RNA, 20 nt, Artificial Sequence
  Synthetic
cagcuuguuuugcucgcagc

SEQ ID NO: 95156 - RNA, 20 nt, Artificial Sequence
  Synthetic
aacauagagguuccuugagc

SEQ ID NO: 95157 - RNA, 20 nt, Artificial Sequence
  Synthetic
agguuaggauagaaccuagc

SEQ ID NO: 95158 - RNA, 20 nt, Artificial Sequence
  Synthetic
cugccaacuggauccugcgc

SEQ ID NO: 95159 - RNA, 20 nt, Artificial Sequence
  Synthetic
  misc_feature (4)..(4): n is a, c, g, or u
  misc_feature (14)..(14): n is a, c, g, or u
caanuuguccuggnuaucgc

SEQ ID NO: 95160 - RNA, 20 nt, Artificial Sequence
  Synthetic
uuacauacucuguggaaggc

SEQ ID NO: 95161 - RNA, 20 nt, Artificial Sequence
  Synthetic
ccccugcucguguuacaggc

SEQ ID NO: 95162 - RNA, 20 nt, Artificial Sequence
  Synthetic
  misc_feature (6)..(6): n is a, c, g, or u
  misc_feature (18)..(18): n is a, c, g, or u
uuuganuuggcuccgaangc

SEQ ID NO: 95163 - RNA, 20 nt, Artificial Sequence
  Synthetic
  misc_feature (12)..(12): n is a, c, g, or u
aggggccuauanuuuccugc

SEQ ID NO: 95164 - RNA, 20 nt, Artificial Sequence
  Synthetic
  misc_feature (14)..(14): n is a, c, g, or u
uccuugagcagganucgugc

SEQ ID NO: 95165 - RNA, 20 nt, Artificial Sequence
  Synthetic
  misc_feature (4)..(4): n is a, c, g, or u
  misc_feature (12)..(12): n is a, c, g, or u
  misc_feature (19)..(19): n is a, c, g, or u
ucanuggccagnggcaaanc

SEQ ID NO: 95166 - RNA, 20 nt, Artificial Sequence
  Synthetic
  misc_feature (1)..(1): n is a, c, g, or u
  misc_feature (12)..(12): n is a, c, g, or u
  misc_feature (19)..(19): n is a, c, g, or u
ncuccuaccugnuuugccnc

SEQ ID NO: 95167 - RNA, 20 nt, Artificial Sequence
  Synthetic
uugggguugaagucccaauc

SEQ ID NO: 95168 - RNA, 20 nt, Artificial Sequence
  Synthetic
uuggggugaguugaugaauc

SEQ ID NO: 95169 - RNA, 20 nt, Artificial Sequence
  Synthetic
  misc_feature (3)..(3): n is a, c, g, or u
  misc_feature (11)..(11): n is a, c, g, or u
  misc_feature (15)..(15): n is a, c, g, or u
aanauggagancacnacauc

SEQ ID NO: 95170 - RNA, 20 nt, Artificial Sequence
  Synthetic
  misc_feature (10)..(10): n is a, c, g, or u
caccgccucngcucuguauc

SEQ ID NO: 95171 - RNA, 20 nt, Artificial Sequence
  Synthetic
  misc_feature (4)..(4): n is a, c, g, or u
aaanuauaggccccucacuc

SEQ ID NO: 95172 - RNA, 20 nt, Artificial Sequence
  Synthetic
ucuuuugggguggagcccuc

SEQ ID NO: 95173 - RNA, 20 nt, Artificial Sequence
  Synthetic
ucuuucuguucccaauccuc

SEQ ID NO: 95174 - RNA, 20 nt, Artificial Sequence
  Synthetic
ucuaagagacagucauccuc

SEQ ID NO: 95175 - RNA, 20 nt, Artificial Sequence
  Synthetic
uguuuugcucgcagccgguc

SEQ ID NO: 95176 - RNA, 20 nt, Artificial Sequence
  Synthetic
  misc_feature (3)..(3): n is a, c, g, or u
  misc_feature (18)..(18): n is a, c, g, or u
aangagggaguuugccanuc

SEQ ID NO: 95177 - RNA, 20 nt, Artificial Sequence
  Synthetic
  misc_feature (10)..(10): n is a, c, g, or u
  misc_feature (15)..(15): n is a, c, g, or u
agguaggagngggancauuc

SEQ ID NO: 95178 - RNA, 20 nt, Artificial Sequence
  Synthetic
cccuaucuuaucaacacuuc

SEQ ID NO: 95179 - RNA, 20 nt, Artificial Sequence
  Synthetic
caucuucuuguugguucuuc

SEQ ID NO: 95180 - RNA, 20 nt, Artificial Sequence
  Synthetic
ccugcugguggcuccaguuc

SEQ ID NO: 95181 - RNA, 20 nt, Artificial Sequence
  Synthetic
  misc_feature (8)..(8): n is a, c, g, or u
  misc_feature (10)..(10): n is a, c, g, or u
cccuucuncnucugccguuc

SEQ ID NO: 95182 - RNA, 20 nt, Artificial Sequence
  Synthetic
uggugaggugaacaauguuc

SEQ ID NO: 95183 - RNA, 20 nt, Artificial Sequence
  Synthetic
  misc_feature (14)..(14): n is a, c, g, or u
uaaugauuaacugnauguuc

SEQ ID NO: 95184 - RNA, 20 nt, Artificial Sequence
  Synthetic
cgucuaacaacaguaguuuc

SEQ ID NO: 95185 - RNA, 20 nt, Artificial Sequence
  Synthetic
  misc_feature (1)..(1): n is a, c, g, or u
  misc_feature (4)..(4): n is a, c, g, or u
nuanccacauuguguaaaag

SEQ ID NO: 95186 - RNA, 20 nt, Artificial Sequence
  Synthetic
agguuuuguacagcaacaag

SEQ ID NO: 95187 - RNA, 20 nt, Artificial Sequence
  Synthetic
  misc_feature (8)..(8): n is a, c, g, or u
aggacaanuuggaggacaag

SEQ ID NO: 95188 - RNA, 20 nt, Artificial Sequence
  Synthetic
  misc_feature (13)..(13): n is a, c, g, or u
  misc_feature (15)..(15): n is a, c, g, or u
cggaacggcagangnagaag

SEQ ID NO: 95189 - RNA, 20 nt, Artificial Sequence
  Synthetic
  misc_feature (15)..(15): n is a, c, g, or u
ugcccaaggucuuanauaag

SEQ ID NO: 95190 - RNA, 20 nt, Artificial Sequence
  Synthetic
cuuuuuucauuaacuguaag

SEQ ID NO: 95191 - RNA, 20 nt, Artificial Sequence
  Synthetic
uauaacugaaagccaaacag

SEQ ID NO: 95192 - RNA, 20 nt, Artificial Sequence
  Synthetic
ugaucgggaaagaaucccag

SEQ ID NO: 95193 - RNA, 20 nt, Artificial Sequence
  Synthetic
  misc_feature (13)..(13): n is a, c, g, or u
caacaaggaucanuggccag

SEQ ID NO: 95194 - RNA, 20 nt, Artificial Sequence
  Synthetic
  misc_feature (1)..(1): n is a, c, g, or u
  misc_feature (4)..(4): n is a, c, g, or u
  misc_feature (16)..(16): n is a, c, g, or u
naungccaagccccanccag

SEQ ID NO: 95195 - RNA, 20 nt, Artificial Sequence
  Synthetic
cccgccuguaacacgagcag

SEQ ID NO: 95196 - RNA, 20 nt, Artificial Sequence
  Synthetic
aacaugagaugauuaggcag

SEQ ID NO: 95197 - RNA, 20 nt, Artificial Sequence
  Synthetic
uacuagugccauuuguucag

SEQ ID NO: 95198 - RNA, 20 nt, Artificial Sequence
  Synthetic
cggggagaccgcguaaagag

SEQ ID NO: 95199 - RNA, 20 nt, Artificial Sequence
  Synthetic
  misc_feature (3)..(3): n is a, c, g, or u
  misc_feature (10)..(10): n is a, c, g, or u
agnggcaaancagguaggag

SEQ ID NO: 95200 - RNA, 20 nt, Artificial Sequence
  Synthetic
  misc_feature (9)..(9): n is a, c, g, or u
cugcuagancccagagugag

SEQ ID NO: 95201 - RNA, 20 nt, Artificial Sequence
  Synthetic
caaaagaaaauugguaauag

SEQ ID NO: 95202 - RNA, 20 nt, Artificial Sequence
  Synthetic
cgagggaguucuucuucuag

SEQ ID NO: 95203 - RNA, 20 nt, Artificial Sequence
  Synthetic
ugaggaugacugucucuuag

SEQ ID NO: 95204 - RNA, 20 nt, Artificial Sequence
  Synthetic
  misc_feature (14)..(14): n is a, c, g, or u
cugaccguugccgngcaacg

SEQ ID NO: 95205 - RNA, 20 nt, Artificial Sequence
  Synthetic
  misc_feature (2)..(2): n is a, c, g, or u
cnaauuuuggccaggacacg

SEQ ID NO: 95206 - RNA, 20 nt, Artificial Sequence
  Synthetic
cagaugagaaggcacagacg

SEQ ID NO: 95207 - RNA, 20 nt, Artificial Sequence
  Synthetic
cccugcucguguuacaggcg

SEQ ID NO: 95208 - RNA, 20 nt, Artificial Sequence
  Synthetic
agaccuucgucugcgaggcg

SEQ ID NO: 95209 - RNA, 20 nt, Artificial Sequence
  Synthetic
  misc_feature (3)..(3): n is a, c, g, or u
  misc_feature (11)..(12): n is a, c, g, or u
aunggccaucnncgcaugcg

SEQ ID NO: 95210 - RNA, 20 nt, Artificial Sequence
  Synthetic
  misc_feature (8)..(8): n is a, c, g, or u
acagagcngaggcggugucg

SEQ ID NO: 95211 - RNA, 20 nt, Artificial Sequence
  Synthetic
  misc_feature (3)..(3): n is a, c, g, or u
uunguccccaugccuugucg

SEQ ID NO: 95212 - RNA, 20 nt, Artificial Sequence
  Synthetic
  misc_feature (1)..(1): n is a, c, g, or u
  misc_feature (4)..(4): n is a, c, g, or u
nccnagcagccauggaaagg

SEQ ID NO: 95213 - RNA, 20 nt, Artificial Sequence
  Synthetic
uaucccuuggacucauaagg

SEQ ID NO: 95214 - RNA, 20 nt, Artificial Sequence
  Synthetic
caaauuacuucccacccagg

SEQ ID NO: 95215 - RNA, 20 nt, Artificial Sequence
  Synthetic
ugccgauugguggaggcagg

SEQ ID NO: 95216 - RNA, 20 nt, Artificial Sequence
  Synthetic
cgauugguggaggcaggagg

SEQ ID NO: 95217 - RNA, 20 nt, Artificial Sequence
  Synthetic
  misc_feature (16)..(16): n is a, c, g, or u
cucccgauacagagcngagg

SEQ ID NO: 95218 - RNA, 20 nt, Artificial Sequence
  Synthetic
  misc_feature (1)..(1): n is a, c, g, or u
ngacugggaggaguuggggg

SEQ ID NO: 95219 - RNA, 20 nt, Artificial Sequence
  Synthetic
  misc_feature (9)..(9): n is a, c, g, or u
cacacggcngucuuuugggg

SEQ ID NO: 95220 - RNA, 20 nt, Artificial Sequence
  Synthetic
aacaagagcuacagcauggg

SEQ ID NO: 95221 - RNA, 20 nt, Artificial Sequence
  Synthetic
  misc_feature (5)..(5): n is a, c, g, or u
  misc_feature (7)..(7): n is a, c, g, or u
  misc_feature (13)..(13): n is a, c, g, or u
cugununuuuaangacuggg

SEQ ID NO: 95222 - RNA, 20 nt, Artificial Sequence
  Synthetic
ccuccaagcugugccuuggg

SEQ ID NO: 95223 - RNA, 20 nt, Artificial Sequence
  Synthetic
  misc_feature (5)..(5): n is a, c, g, or u
  misc_feature (7)..(7): n is a, c, g, or u
  misc_feature (18)..(18): n is a, c, g, or u
uuaangnucuuuguacungg

SEQ ID NO: 95224 - RNA, 20 nt, Artificial Sequence
  Synthetic
agaccuugggcaagaccugg

SEQ ID NO: 95225 - RNA, 20 nt, Artificial Sequence
  Synthetic
aacugaaagccaaacagugg

SEQ ID NO: 95226 - RNA, 20 nt, Artificial Sequence
  Synthetic
  misc_feature (1)..(1): n is a, c, g, or u
  misc_feature (13)..(13): n is a, c, g, or u
ngccaagccccanccagugg

SEQ ID NO: 95227 - RNA, 20 nt, Artificial Sequence
  Synthetic
  misc_feature (11)..(11): n is a, c, g, or u
cccaaaagacngccgugugg

SEQ ID NO: 95228 - RNA, 20 nt, Artificial Sequence
  Synthetic
ucuuccugacugccgauugg

SEQ ID NO: 95229 - RNA, 20 nt, Artificial Sequence
  Synthetic
agagguuggugagugauugg

SEQ ID NO: 95230 - RNA, 20 nt, Artificial Sequence
  Synthetic
uauggaugaugugguauugg

SEQ ID NO: 95231 - RNA, 20 nt, Artificial Sequence
  Synthetic
ccacccaaggcacagcuugg

SEQ ID NO: 95232 - RNA, 20 nt, Artificial Sequence
  Synthetic
  misc_feature (5)..(5): n is a, c, g, or u
ugggnucuagcagagcuugg

SEQ ID NO: 95233 - RNA, 20 nt, Artificial Sequence
  Synthetic
  misc_feature (4)..(4): n is a, c, g, or u
uaangacugggaggaguugg

SEQ ID NO: 95234 - RNA, 20 nt, Artificial Sequence
  Synthetic
  misc_feature (6)..(6): n is a, c, g, or u
  misc_feature (16)..(16): n is a, c, g, or u
cgauanccaggacaanuugg

SEQ ID NO: 95235 - RNA, 20 nt, Artificial Sequence
  Synthetic
  misc_feature (1)..(1): n is a, c, g, or u
  misc_feature (12)..(12): n is a, c, g, or u
  misc_feature (19)..(19): n is a, c, g, or u
naaaugaaugunaggaaang

SEQ ID NO: 95236 - RNA, 20 nt, Artificial Sequence
  Synthetic
  misc_feature (5)..(5): n is a, c, g, or u
  misc_feature (16)..(17): n is a, c, g, or u
  misc_feature (19)..(19): n is a, c, g, or u
uccunacauucauuunnang

SEQ ID NO: 95237 - RNA, 20 nt, Artificial Sequence
  Synthetic
auauggugacccacaaaaug

SEQ ID NO: 95238 - RNA, 20 nt, Artificial Sequence
  Synthetic
uuucaguuauauggaugaug

SEQ ID NO: 95239 - RNA, 20 nt, Artificial Sequence
  Synthetic
  misc_feature (1)..(1): n is a, c, g, or u
naauagaugucaacaauaug

SEQ ID NO: 95240 - RNA, 20 nt, Artificial Sequence
  Synthetic
uaaagaauuuggagcuucug

SEQ ID NO: 95241 - RNA, 20 nt, Artificial Sequence
  Synthetic
uaacugaaagccaaacagug

SEQ ID NO: 95242 - RNA, 20 nt, Artificial Sequence
  Synthetic
  misc_feature (2)..(2): n is a, c, g, or u
  misc_feature (14)..(14): n is a, c, g, or u
ungccaagccccanccagug

SEQ ID NO: 95243 - RNA, 20 nt, Artificial Sequence
  Synthetic
  misc_feature (11)..(11): n is a, c, g, or u
cucugcuagancccagagug

SEQ ID NO: 95244 - RNA, 20 nt, Artificial Sequence
  Synthetic
auuuggugucuuuuggagug

SEQ ID NO: 95245 - RNA, 20 nt, Artificial Sequence
  Synthetic
  misc_feature (14)..(14): n is a, c, g, or u
caccccaaaagacngccgug

SEQ ID NO: 95246 - RNA, 20 nt, Artificial Sequence
  Synthetic
  misc_feature (6)..(6): n is a, c, g, or u
ugccunagugcuguauggug

SEQ ID NO: 95247 - RNA, 20 nt, Artificial Sequence
  Synthetic
cuagacucugugguauugug

SEQ ID NO: 95248 - RNA, 20 nt, Artificial Sequence
  Synthetic
  misc_feature (6)..(6): n is a, c, g, or u
  misc_feature (18)..(18): n is a, c, g, or u
uaaaanucagacaacuanug

SEQ ID NO: 95249 - RNA, 20 nt, Artificial Sequence
  Synthetic
  misc_feature (3)..(4): n is a, c, g, or u
  misc_feature (18)..(18): n is a, c, g, or u
uunnguacaauauguucnug

SEQ ID NO: 95250 - RNA, 20 nt, Artificial Sequence
  Synthetic
auauggaugaugugguauug

SEQ ID NO: 95251 - RNA, 20 nt, Artificial Sequence
  Synthetic
  misc_feature (5)..(5): n is a, c, g, or u
uuaangacugggaggaguug

SEQ ID NO: 95252 - RNA, 20 nt, Artificial Sequence
  Synthetic
uggugagugauuggagguug

SEQ ID NO: 95253 - RNA, 20 nt, Artificial Sequence
  Synthetic
aggcaagcuauucuguguug

SEQ ID NO: 95254 - RNA, 20 nt, Artificial Sequence
  Synthetic
  misc_feature (8)..(8): n is a, c, g, or u
cuggccanugauccuuguug

SEQ ID NO: 95255 - RNA, 20 nt, Artificial Sequence
  Synthetic
acacgcagcgccucauuuug

SEQ ID NO: 95256 - RNA, 20 nt, Artificial Sequence
  Synthetic
  misc_feature (12)..(12): n is a, c, g, or u
caccacacggcngucuuuug

SEQ ID NO: 95257 - RNA, 20 nt, Artificial Sequence
  Synthetic
  misc_feature (20)..(20): n is a, c, g, or u
ucaaccccaacaaggaucan

SEQ ID NO: 95258 - RNA, 20 nt, Artificial Sequence
  Synthetic
  misc_feature (20)..(20): n is a, c, g, or u
uaccugucuuuaauccugan

SEQ ID NO: 95259 - RNA, 20 nt, Artificial Sequence
  Synthetic
  misc_feature (20)..(20): n is a, c, g, or u
aagcuccaaauucuuuauan

SEQ ID NO: 95260 - RNA, 20 nt, Artificial Sequence
  Synthetic
  misc_feature (20)..(20): n is a, c, g, or u
caaucaauaggucuauuuan

SEQ ID NO: 95261 - RNA, 20 nt, Artificial Sequence
  Synthetic
  misc_feature (5)..(5): n is a, c, g, or u
  misc_feature (17)..(17): n is a, c, g, or u
  misc_feature (20)..(20): n is a, c, g, or u
uuganuuggcuccgaangcn

SEQ ID NO: 95262 - RNA, 20 nt, Artificial Sequence
  Synthetic
  misc_feature (20)..(20): n is a, c, g, or u
cugacgcaacccccacuggn

SEQ ID NO: 95263 - RNA, 20 nt, Artificial Sequence
  Synthetic
  misc_feature (18)..(18): n is a, c, g, or u
  misc_feature (20)..(20): n is a, c, g, or u
uuugguggucuguaagcngn

SEQ ID NO: 95264 - RNA, 20 nt, Artificial Sequence
  Synthetic
  misc_feature (19)..(20): n is a, c, g, or u
cagagcuugguggaaugunn

SEQ ID NO: 95265 - RNA, 20 nt, Artificial Sequence
  Synthetic
  misc_feature (20)..(20): n is a, c, g, or u
caccucaccauacagcacun

SEQ ID NO: 95266 - RNA, 20 nt, Artificial Sequence
  Synthetic
  misc_feature (6)..(6): n is a, c, g, or u
  misc_feature (8)..(9): n is a, c, g, or u
  misc_feature (20)..(20): n is a, c, g, or u
uccucnunnaaaugaaugun

SEQ ID NO: 95267 - RNA, 20 nt, Artificial Sequence
  Synthetic
  misc_feature (4)..(4): n is a, c, g, or u
  misc_feature (20)..(20): n is a, c, g, or u
ucanagaauugugggucuun

SEQ ID NO: 95268 - RNA, 20 nt, Artificial Sequence
  Synthetic
  misc_feature (20)..(20): n is a, c, g, or u
cugugccuuggguggcuuun

SEQ ID NO: 95269 - RNA, 20 nt, Artificial Sequence
  Synthetic
acccaaagacaaaagaaaau

SEQ ID NO: 95270 - RNA, 20 nt, Artificial Sequence
  Synthetic
  misc_feature (1)..(1): n is a, c, g, or u
nggaggcuguaggcauaaau

SEQ ID NO: 95271 - RNA, 20 nt, Artificial Sequence
  Synthetic
cuccuccugccuccaccaau

SEQ ID NO: 95272 - RNA, 20 nt, Artificial Sequence
  Synthetic
ugacauacuuuccaaucaau

SEQ ID NO: 95273 - RNA, 20 nt, Artificial Sequence
  Synthetic
  misc_feature (3)..(3): n is a, c, g, or u
aanuucaugggauauguaau

SEQ ID NO: 95274 - RNA, 20 nt, Artificial Sequence
  Synthetic
uccggaaguguugauaagau

SEQ ID NO: 95275 - RNA, 20 nt, Artificial Sequence
  Synthetic
  misc_feature (5)..(5): n is a, c, g, or u
ccaanucaaacaauccagau

SEQ ID NO: 95276 - RNA, 20 nt, Artificial Sequence
  Synthetic
ucucuuagagguggagagau

SEQ ID NO: 95277 - RNA, 20 nt, Artificial Sequence
  Synthetic
cugucuuccugacugccgau

SEQ ID NO: 95278 - RNA, 20 nt, Artificial Sequence
  Synthetic
  misc_feature (9)..(9): n is a, c, g, or u
aaagcccangaugaugggau

SEQ ID NO: 95279 - RNA, 20 nt, Artificial Sequence
  Synthetic
  misc_feature (14)..(14): n is a, c, g, or u
uugcgaaagcccangaugau

SEQ ID NO: 95280 - RNA, 20 nt, Artificial Sequence
  Synthetic
acaagagguuggugagugau

SEQ ID NO: 95281 - RNA, 20 nt, Artificial Sequence
  Synthetic
  misc_feature (1)..(1): n is a, c, g, or u
  misc_feature (4)..(4): n is a, c, g, or u
ngcnggguccaacuggugau

SEQ ID NO: 95282 - RNA, 20 nt, Artificial Sequence
  Synthetic
  misc_feature (3)..(3): n is a, c, g, or u
cunuaaauagaccuauugau

SEQ ID NO: 95283 - RNA, 20 nt, Artificial Sequence
  Synthetic
  misc_feature (6)..(6): n is a, c, g, or u
  misc_feature (18)..(18): n is a, c, g, or u
acuggnuggggcuuggcnau

SEQ ID NO: 95284 - RNA, 20 nt, Artificial Sequence
  Synthetic
  misc_feature (12)..(12): n is a, c, g, or u
  misc_feature (18)..(18): n is a, c, g, or u
cggucuggagcnaaacunau

SEQ ID NO: 95285 - RNA, 20 nt, Artificial Sequence
  Synthetic
agcuaugucaauguuaauau

SEQ ID NO: 95286 - RNA, 20 nt, Artificial Sequence
  Synthetic
  misc_feature (17)..(17): n is a, c, g, or u
agccaccagcaggaaanuau

SEQ ID NO: 95287 - RNA, 20 nt, Artificial Sequence
  Synthetic
  misc_feature (15)..(15): n is a, c, g, or u
uuaaucauuacuucnaaacu

SEQ ID NO: 95288 - RNA, 20 nt, Artificial Sequence
  Synthetic
  misc_feature (1)..(1): n is a, c, g, or u
nucaagauguuguacagacu

SEQ ID NO: 95289 - RNA, 20 nt, Artificial Sequence
  Synthetic
  misc_feature (8)..(8): n is a, c, g, or u
  misc_feature (10)..(10): n is a, c, g, or u
  misc_feature (16)..(16): n is a, c, g, or u
agacugununuuuaangacu

SEQ ID NO: 95290 - RNA, 20 nt, Artificial Sequence
  Synthetic
  misc_feature (8)..(8): n is a, c, g, or u
  misc_feature (10)..(10): n is a, c, g, or u
agguuaangnucuuuguacu

SEQ ID NO: 95291 - RNA, 20 nt, Artificial Sequence
  Synthetic
auaaggugggaaacuuuacu

SEQ ID NO: 95292 - RNA, 20 nt, Artificial Sequence
  Synthetic
  misc_feature (12)..(12): n is a, c, g, or u
aguccucuuaunuaagaccu

SEQ ID NO: 95293 - RNA, 20 nt, Artificial Sequence
  Synthetic
aucucaauguuaguaucccu

SEQ ID NO: 95294 - RNA, 20 nt, Artificial Sequence
  Synthetic
caagccuccaagcugugccu

SEQ ID NO: 95295 - RNA, 20 nt, Artificial Sequence
  Synthetic
  misc_feature (2)..(2): n is a, c, g, or u
  misc_feature (6)..(6): n is a, c, g, or u
ancacnacaucaggauuccu

SEQ ID NO: 95296 - RNA, 20 nt, Artificial Sequence
  Synthetic
aagccacccaaggcacagcu

SEQ ID NO: 95297 - RNA, 20 nt, Artificial Sequence
  Synthetic
  misc_feature (8)..(8): n is a, c, g, or u
cucugggnucuagcagagcu

SEQ ID NO: 95298 - RNA, 20 nt, Artificial Sequence
  Synthetic
  misc_feature (13)..(13): n is a, c, g, or u
aacccccacuggnuggggcu

SEQ ID NO: 95299 - RNA, 20 nt, Artificial Sequence
  Synthetic
  misc_feature (8)..(8): n is a, c, g, or u
uaaaauunauuaugccugcu

SEQ ID NO: 95300 - RNA, 20 nt, Artificial Sequence
  Synthetic
accuccuuuccauggcugcu

SEQ ID NO: 95301 - RNA, 20 nt, Artificial Sequence
  Synthetic
  misc_feature (3)..(3): n is a, c, g, or u
aanuauaggccccucacucu

SEQ ID NO: 95302 - RNA, 20 nt, Artificial Sequence
  Synthetic
cuuucuguucccaauccucu

SEQ ID NO: 95303 - RNA, 20 nt, Artificial Sequence
  Synthetic
acaacucuguuguccucucu

SEQ ID NO: 95304 - RNA, 20 nt, Artificial Sequence
  Synthetic
uuugugggucaccauauucu

SEQ ID NO: 95305 - RNA, 20 nt, Artificial Sequence
  Synthetic
uggacuucucucaauuuucu

SEQ ID NO: 95306 - RNA, 20 nt, Artificial Sequence
  Synthetic
ugggauauguaauuggaagu

SEQ ID NO: 95307 - RNA, 20 nt, Artificial Sequence
  Synthetic
auaacugaaagccaaacagu

SEQ ID NO: 95308 - RNA, 20 nt, Artificial Sequence
  Synthetic
agcuuggaggcuugaacagu

SEQ ID NO: 95309 - RNA, 20 nt, Artificial Sequence
  Synthetic
auucuuucccgaucaccagu

SEQ ID NO: 95310 - RNA, 20 nt, Artificial Sequence
  Synthetic
  misc_feature (3)..(3): n is a, c, g, or u
  misc_feature (15)..(15): n is a, c, g, or u
aungccaagccccanccagu

SEQ ID NO: 95311 - RNA, 20 nt, Artificial Sequence
  Synthetic
  misc_feature (1)..(1): n is a, c, g, or u
  misc_feature (7)..(7): n is a, c, g, or u
nuuuaangacugggaggagu

SEQ ID NO: 95312 - RNA, 20 nt, Artificial Sequence
  Synthetic
agagguggagagaugggagu

SEQ ID NO: 95313 - RNA, 20 nt, Artificial Sequence
  Synthetic
acccuaauaaaaccaaacgu

SEQ ID NO: 95314 - RNA, 20 nt, Artificial Sequence
  Synthetic
  misc_feature (1)..(1): n is a, c, g, or u
naauuuuggccaggacacgu

SEQ ID NO: 95315 - RNA, 20 nt, Artificial Sequence
  Synthetic
uuugaaguaugccucaaggu

SEQ ID NO: 95316 - RNA, 20 nt, Artificial Sequence
  Synthetic
  misc_feature (8)..(8): n is a, c, g, or u
  misc_feature (15)..(15): n is a, c, g, or u
uggccagnggcaaancaggu

SEQ ID NO: 95317 - RNA, 20 nt, Artificial Sequence
  Synthetic
  misc_feature (4)..(4): n is a, c, g, or u
caanuuggaggacaagaggu

SEQ ID NO: 95318 - RNA, 20 nt, Artificial Sequence
  Synthetic
agagcuacagcaugggaggu

SEQ ID NO: 95319 - RNA, 20 nt, Artificial Sequence
  Synthetic
augaaucuggccaccugggu

SEQ ID NO: 95320 - RNA, 20 nt, Artificial Sequence
  Synthetic
agagaggugcgccccguggu

SEQ ID NO: 95321 - RNA, 20 nt, Artificial Sequence
  Synthetic
aauagaugucaacaauaugu

SEQ ID NO: 95322 - RNA, 20 nt, Artificial Sequence
  Synthetic
  misc_feature (11)..(11): n is a, c, g, or u
ucuuuguacunggaggcugu

SEQ ID NO: 95323 - RNA, 20 nt, Artificial Sequence
  Synthetic
  misc_feature (2)..(2): n is a, c, g, or u
unaggcaagcuauucugugu

SEQ ID NO: 95324 - RNA, 20 nt, Artificial Sequence
  Synthetic
  misc_feature (12)..(12): n is a, c, g, or u
aaaguaugucanagaauugu

SEQ ID NO: 95325 - RNA, 20 nt, Artificial Sequence
  Synthetic
  misc_feature (2)..(2): n is a, c, g, or u
  misc_feature (10)..(10): n is a, c, g, or u
cncuggccanugauccuugu

SEQ ID NO: 95326 - RNA, 20 nt, Artificial Sequence
  Synthetic
  misc_feature (9)..(9): n is a, c, g, or u
  misc_feature (19)..(19): n is a, c, g, or u
cagcgauanccaggacaanu

SEQ ID NO: 95327 - RNA, 20 nt, Artificial Sequence
  Synthetic
  misc_feature (19)..(19): n is a, c, g, or u
aggaguugggggaggaganu

SEQ ID NO: 95328 - RNA, 20 nt, Artificial Sequence
  Synthetic
  misc_feature (19)..(19): n is a, c, g, or u
ccaaucuggauuguuuganu

SEQ ID NO: 95329 - RNA, 20 nt, Artificial Sequence
  Synthetic
  misc_feature (19)..(19): n is a, c, g, or u
uauucccaucccaucaucnu

SEQ ID NO: 95330 - RNA, 20 nt, Artificial Sequence
  Synthetic
  misc_feature (19)..(19): n is a, c, g, or u
ugacgcaacccccacuggnu

SEQ ID NO: 95331 - RNA, 20 nt, Artificial Sequence
  Synthetic
  misc_feature (3)..(3): n is a, c, g, or u
  misc_feature (19)..(19): n is a, c, g, or u
canagaauugugggucuunu

SEQ ID NO: 95332 - RNA, 20 nt, Artificial Sequence
  Synthetic
  misc_feature (9)..(9): n is a, c, g, or u
auugacccnuauaaagaauu

SEQ ID NO: 95333 - RNA, 20 nt, Artificial Sequence
  Synthetic
caccugggugggaaguaauu

SEQ ID NO: 95334 - RNA, 20 nt, Artificial Sequence
  Synthetic
  misc_feature (11)..(11): n is a, c, g, or u
  misc_feature (16)..(16): n is a, c, g, or u
cagguaggagngggancauu

SEQ ID NO: 95335 - RNA, 20 nt, Artificial Sequence
  Synthetic
  misc_feature (4)..(4): n is a, c, g, or u
caanucaaacaauccagauu

SEQ ID NO: 95336 - RNA, 20 nt, Artificial Sequence
  Synthetic
  misc_feature (4)..(4): n is a, c, g, or u
  misc_feature (7)..(7): n is a, c, g, or u
uuunucnaagggcaaauauu

SEQ ID NO: 95337 - RNA, 20 nt, Artificial Sequence
  Synthetic
agaaacuguucuugaguauu

SEQ ID NO: 95338 - RNA, 20 nt, Artificial Sequence
  Synthetic
uauauggaugaugugguauu

SEQ ID NO: 95339 - RNA, 20 nt, Artificial Sequence
  Synthetic
ccccaacguuugguuuuauu

SEQ ID NO: 95340 - RNA, 20 nt, Artificial Sequence
  Synthetic
uuguugcuguacaaaaccuu

SEQ ID NO: 95341 - RNA, 20 nt, Artificial Sequence
  Synthetic
aagccuccaagcugugccuu

SEQ ID NO: 95342 - RNA, 20 nt, Artificial Sequence
  Synthetic
uaccaauuuucuuuugucuu

SEQ ID NO: 95343 - RNA, 20 nt, Artificial Sequence
  Synthetic
uugugggucaccauauucuu

SEQ ID NO: 95344 - RNA, 20 nt, Artificial Sequence
  Synthetic
  misc_feature (6)..(6): n is a, c, g, or u
uuuaangacugggaggaguu

SEQ ID NO: 95345 - RNA, 20 nt, Artificial Sequence
  Synthetic
cccuaauaaaaccaaacguu

SEQ ID NO: 95346 - RNA, 20 nt, Artificial Sequence
  Synthetic
uuggugagugauuggagguu

SEQ ID NO: 95347 - RNA, 20 nt, Artificial Sequence
  Synthetic
  misc_feature (1)..(1): n is a, c, g, or u
naggcaagcuauucuguguu

SEQ ID NO: 95348 - RNA, 20 nt, Artificial Sequence
  Synthetic
  misc_feature (1)..(1): n is a, c, g, or u
  misc_feature (9)..(9): n is a, c, g, or u
ncuggccanugauccuuguu

SEQ ID NO: 95349 - RNA, 20 nt, Artificial Sequence
  Synthetic
  misc_feature (15)..(15): n is a, c, g, or u
  misc_feature (18)..(18): n is a, c, g, or u
caccaguuggacccngcnuu

SEQ ID NO: 95350 - RNA, 20 nt, Artificial Sequence
  Synthetic
  misc_feature (15)..(15): n is a, c, g, or u
agguuggggacugcnaauuu

SEQ ID NO: 95351 - RNA, 20 nt, Artificial Sequence
  Synthetic
cacauuuccugucuuacuuu

SEQ ID NO: 95352 - RNA, 20 nt, Artificial Sequence
  Synthetic
  misc_feature (1)..(1): n is a, c, g, or u
  misc_feature (14)..(14): n is a, c, g, or u
nccaccacacggcngucuuu

SEQ ID NO: 95353 - RNA, 20 nt, Artificial Sequence
  Synthetic
cuugaguauuuggugucuuu

SEQ ID NO: 95354 - RNA, 20 nt, Artificial Sequence
  Synthetic
accaauuuucuuuugucuuu

SEQ ID NO: 95355 - RNA, 20 nt, Artificial Sequence
  Synthetic
  misc_feature (13)..(13): n is a, c, g, or u
ccaccacacggcngucuuuu

SEQ ID NO: 95356 - RNA, 20 nt, Artificial Sequence
  Synthetic
  misc_feature (4)..(4): n is a, c, g, or u
  misc_feature (16)..(16): n is a, c, g, or u
acanuaguugucuganuuuu

SEQ ID NO: 95357 - RNA, 23 nt, Artificial Sequence
  Synthetic
gaaagaagucagaaggcaaaaaa

SEQ ID NO: 95358 - RNA, 24 nt, Artificial Sequence
  Synthetic
ggaaagaagucagaaggcaaaaaa

SEQ ID NO: 95359 - RNA, 20 nt, Artificial Sequence
  Synthetic
guauuuccgagagaggacaa

SEQ ID NO: 95360 - RNA, 22 nt, Artificial Sequence
  Synthetic
guguauuuccgagagaggacaa

SEQ ID NO: 95361 - RNA, 23 nt, Artificial Sequence
  Synthetic
gguguauuuccgagagaggacaa

SEQ ID NO: 95362 - RNA, 21 nt, Artificial Sequence
  Synthetic
  misc_feature (17)..(17): n is a, c, g, or u
gaccugaccguugccgngcaa

SEQ ID NO: 95363 - RNA, 22 nt, Artificial Sequence
  Synthetic
gauucaucaacucaccccaaca

SEQ ID NO: 95364 - RNA, 18 nt, Artificial Sequence
  Synthetic
gaucgggaaagaauccca

SEQ ID NO: 95365 - RNA, 20 nt, Artificial Sequence
  Synthetic
gugaucgggaaagaauccca

SEQ ID NO: 95366 - RNA, 21 nt, Artificial Sequence
  Synthetic
ggugaucgggaaagaauccca

SEQ ID NO: 95367 - RNA, 21 nt, Artificial Sequence
  Synthetic
guuucccaccuuaugagucca

SEQ ID NO: 95368 - RNA, 20 nt, Artificial Sequence
  Synthetic
gaccuucgucugcgaggcga

SEQ ID NO: 95369 - RNA, 22 nt, Artificial Sequence
  Synthetic
gagaccuucgucugcgaggcga

SEQ ID NO: 95370 - RNA, 19 nt, Artificial Sequence
  Synthetic
guccaacuggugaucggga

SEQ ID NO: 95371 - RNA, 20 nt, Artificial Sequence
  Synthetic
gguccaacuggugaucggga

SEQ ID NO: 95372 - RNA, 21 nt, Artificial Sequence
  Synthetic
ggguccaacuggugaucggga

SEQ ID NO: 95373 - RNA, 24 nt, Artificial Sequence
  Synthetic
  misc_feature (3)..(3): n is a, c, g, or u
gcnggguccaacuggugaucggga

SEQ ID NO: 95374 - RNA, 24 nt, Artificial Sequence
  Synthetic
  misc_feature (19)..(19): n is a, c, g, or u
gaaucuugcgaaagcccangauga

SEQ ID NO: 95375 - RNA, 24 nt, Artificial Sequence
  Synthetic
  misc_feature (7)..(7): n is a, c, g, or u
gacugcnaauuuuggccaggacac

SEQ ID NO: 95376 - RNA, 21 nt, Artificial Sequence
  Synthetic
gaaaauugagagaaguccacc

SEQ ID NO: 95377 - RNA, 23 nt, Artificial Sequence
  Synthetic
  misc_feature (17)..(17): n is a, c, g, or u
gucguugacauugcugngagucc

SEQ ID NO: 95378 - RNA, 24 nt, Artificial Sequence
  Synthetic
  misc_feature (18)..(18): n is a, c, g, or u
ggucguugacauugcugngagucc

SEQ ID NO: 95379 - RNA, 22 nt, Artificial Sequence
  Synthetic
  misc_feature (10)..(10): n is a, c, g, or u
gacauagcunacuacuaauucc

SEQ ID NO: 95380 - RNA, 22 nt, Artificial Sequence
  Synthetic
  misc_feature (10)..(10): n is a, c, g, or u
gugugguggngugaacccuggc

SEQ ID NO: 95381 - RNA, 18 nt, Artificial Sequence
  Synthetic
ggcggugucgaggagauc

SEQ ID NO: 95382 - RNA, 20 nt, Artificial Sequence
  Synthetic
gaggcggugucgaggagauc

SEQ ID NO: 95383 - RNA, 23 nt, Artificial Sequence
  Synthetic
  misc_feature (3)..(3): n is a, c, g, or u
gcngaggcggugucgaggagauc

SEQ ID NO: 95384 - RNA, 23 nt, Artificial Sequence
  Synthetic
  misc_feature (7)..(7): n is a, c, g, or u
guagagncccaaacggccccgag

SEQ ID NO: 95385 - RNA, 24 nt, Artificial Sequence
  Synthetic
  misc_feature (8)..(8): n is a, c, g, or u
gguagagncccaaacggccccgag

SEQ ID NO: 95386 - RNA, 21 nt, Artificial Sequence
  Synthetic
gauuaaagacagguacaguag

SEQ ID NO: 95387 - RNA, 22 nt, Artificial Sequence
  Synthetic
ggauuaaagacagguacaguag

SEQ ID NO: 95388 - RNA, 20 nt, Artificial Sequence
  Synthetic
gccccgagacgggucguccg

SEQ ID NO: 95389 - RNA, 21 nt, Artificial Sequence
  Synthetic
ggccccgagacgggucguccg

SEQ ID NO: 95390 - RNA, 18 nt, Artificial Sequence
  Synthetic
gacaaaggacgucccgcg

SEQ ID NO: 95391 - RNA, 21 nt, Artificial Sequence
  Synthetic
guagacaaaggacgucccgcg

SEQ ID NO: 95392 - RNA, 24 nt, Artificial Sequence
  Synthetic
gacguagacaaaggacgucccgcg

SEQ ID NO: 95393 - RNA, 24 nt, Artificial Sequence
  Synthetic
  misc_feature (11)..(11): n is a, c, g, or u
  misc_feature (23)..(23): n is a, c, g, or u
gauuguuuganuuggcuccgaang

SEQ ID NO: 95394 - RNA, 22 nt, Artificial Sequence
  Synthetic
  misc_feature (3)..(3): n is a, c, g, or u
  misc_feature (7)..(7): n is a, c, g, or u
  misc_feature (15)..(15): n is a, c, g, or u
gungugnucuccaunuucggug

SEQ ID NO: 95395 - RNA, 24 nt, Artificial Sequence
  Synthetic
  misc_feature (6)..(6): n is a, c, g, or u
gacaanuuggaggacaagagguug

SEQ ID NO: 95396 - RNA, 23 nt, Artificial Sequence
  Synthetic
  misc_feature (21)..(21): n is a, c, g, or u
  misc_feature (23)..(23): n is a, c, g, or u
gcauuugguggucuguaagcngn

SEQ ID NO: 95397 - RNA, 24 nt, Artificial Sequence
  Synthetic
  misc_feature (22)..(22): n is a, c, g, or u
  misc_feature (24)..(24): n is a, c, g, or u
ggcauuugguggucuguaagcngn

SEQ ID NO: 95398 - RNA, 20 nt, Artificial Sequence
  Synthetic
guugggguugaagucccaau

SEQ ID NO: 95399 - RNA, 19 nt, Artificial Sequence
  Synthetic
gacugaggcccacucccau

SEQ ID NO: 95400 - RNA, 20 nt, Artificial Sequence
  Synthetic
ggacugaggcccacucccau

SEQ ID NO: 95401 - RNA, 21 nt, Artificial Sequence
  Synthetic
gucucuuagagguggagagau

SEQ ID NO: 95402 - RNA, 21 nt, Artificial Sequence
  Synthetic
  misc_feature (10)..(10): n is a, c, g, or u
gaaagcccangaugaugggau

SEQ ID NO: 95403 - RNA, 23 nt, Artificial Sequence
  Synthetic
  misc_feature (12)..(12): n is a, c, g, or u
gcgaaagcccangaugaugggau

SEQ ID NO: 95404 - RNA, 20 nt, Artificial Sequence
  Synthetic
gccccaacguuugguuuuau

SEQ ID NO: 95405 - RNA, 23 nt, Artificial Sequence
  Synthetic
guagccccaacguuugguuuuau

SEQ ID NO: 95406 - RNA, 20 nt, Artificial Sequence
  Synthetic
guaacacgagcagggguccu

SEQ ID NO: 95407 - RNA, 24 nt, Artificial Sequence
  Synthetic
gccuguaacacgagcagggguccu

SEQ ID NO: 95408 - RNA, 19 nt, Artificial Sequence
  Synthetic
gcgagcaaaacaagcugcu

SEQ ID NO: 95409 - RNA, 22 nt, Artificial Sequence
  Synthetic
gcugcgagcaaaacaagcugcu

SEQ ID NO: 95410 - RNA, 23 nt, Artificial Sequence
  Synthetic
ggcugcgagcaaaacaagcugcu

SEQ ID NO: 95411 - RNA, 19 nt, Artificial Sequence
  Synthetic
gucggucguugacauugcu

SEQ ID NO: 95412 - RNA, 20 nt, Artificial Sequence
  Synthetic
ggucggucguugacauugcu

SEQ ID NO: 95413 - RNA, 24 nt, Artificial Sequence
  Synthetic
  misc_feature (4)..(4): n is a, c, g, or u
  misc_feature (7)..(7): n is a, c, g, or u
  misc_feature (19)..(19): n is a, c, g, or u
gccnaungccaagccccanccagu

SEQ ID NO: 95414 - RNA, 20 nt, Artificial Sequence
  Synthetic
gcugcuaggaguuccgcagu

SEQ ID NO: 95415 - RNA, 22 nt, Artificial Sequence
  Synthetic
  misc_feature (14)..(14): n is a, c, g, or u
  misc_feature (16)..(16): n is a, c, g, or u
guggucuguaagcngnaggagu

SEQ ID NO: 95416 - RNA, 23 nt, Artificial Sequence
  Synthetic
  misc_feature (15)..(15): n is a, c, g, or u
  misc_feature (17)..(17): n is a, c, g, or u
gguggucuguaagcngnaggagu

SEQ ID NO: 95417 - RNA, 18 nt, Artificial Sequence
  Synthetic
gcaaauauuugguaaggu

SEQ ID NO: 95418 - RNA, 19 nt, Artificial Sequence
  Synthetic
ggcaaauauuugguaaggu

SEQ ID NO: 95419 - RNA, 20 nt, Artificial Sequence
  Synthetic
gggcaaauauuugguaaggu

SEQ ID NO: 95420 - RNA, 21 nt, Artificial Sequence
  Synthetic
gucuagacucugugguauugu

SEQ ID NO: 95421 - RNA, 23 nt, Artificial Sequence
  Synthetic
gagucuagacucugugguauugu

SEQ ID NO: 95422 - RNA, 22 nt, Artificial Sequence
  Synthetic
  misc_feature (4)..(4): n is a, c, g, or u
  misc_feature (12)..(12): n is a, c, g, or u
gccncuggccanugauccuugu

SEQ ID NO: 95423 - RNA, 22 nt, Artificial Sequence
  Synthetic
gcccaguaaaguuucccaccuu

SEQ ID NO: 95424 - RNA, 23 nt, Artificial Sequence
  Synthetic
  misc_feature (18)..(18): n is a, c, g, or u
gaaguaaugauuaacugnauguu

SEQ ID NO: 95425 - RNA, 21 nt, Artificial Sequence
  Synthetic
  misc_feature (7)..(7): n is a, c, g, or u
  misc_feature (10)..(10): n is a, c, g, or u
gcugcunggnugugcugccaa

SEQ ID NO: 95426 - RNA, 22 nt, Artificial Sequence
  Synthetic
  misc_feature (8)..(8): n is a, c, g, or u
  misc_feature (11)..(11): n is a, c, g, or u
ggcugcunggnugugcugccaa

SEQ ID NO: 95427 - RNA, 22 nt, Artificial Sequence
  Synthetic
gacaagaauccucacaauacca

SEQ ID NO: 95428 - RNA, 24 nt, Artificial Sequence
  Synthetic
  misc_feature (14)..(14): n is a, c, g, or u
guaauuuggaaganccagcaucca

SEQ ID NO: 95429 - RNA, 21 nt, Artificial Sequence
  Synthetic
  misc_feature (17)..(17): n is a, c, g, or u
ggggcuacucccuuaanuuca

SEQ ID NO: 95430 - RNA, 24 nt, Artificial Sequence
  Synthetic
  misc_feature (20)..(20): n is a, c, g, or u
guuggggcuacucccuuaanuuca

SEQ ID NO: 95431 - RNA, 21 nt, Artificial Sequence
  Synthetic
  misc_feature (17)..(17): n is a, c, g, or u
gcauggacauugacccnuaua

SEQ ID NO: 95432 - RNA, 22 nt, Artificial Sequence
  Synthetic
  misc_feature (18)..(18): n is a, c, g, or u
ggcauggacauugacccnuaua

SEQ ID NO: 95433 - RNA, 23 nt, Artificial Sequence
  Synthetic
  misc_feature (19)..(19): n is a, c, g, or u
gggcauggacauugacccnuaua

SEQ ID NO: 95434 - RNA, 21 nt, Artificial Sequence
  Synthetic
gauugggacuucaaccccaac

SEQ ID NO: 95435 - RNA, 18 nt, Artificial Sequence
  Synthetic
guugaugaaucuggccac

SEQ ID NO: 95436 - RNA, 20 nt, Artificial Sequence
  Synthetic
gaguugaugaaucuggccac

SEQ ID NO: 95437 - RNA, 22 nt, Artificial Sequence
  Synthetic
gugaguugaugaaucuggccac

SEQ ID NO: 95438 - RNA, 23 nt, Artificial Sequence
  Synthetic
ggugaguugaugaaucuggccac

SEQ ID NO: 95439 - RNA, 24 nt, Artificial Sequence
  Synthetic
gggugaguugaugaaucuggccac

SEQ ID NO: 95440 - RNA, 18 nt, Artificial Sequence
  Synthetic
gggguuuuucuuguugac

SEQ ID NO: 95441 - RNA, 20 nt, Artificial Sequence
  Synthetic
gcgggguuuuucuuguugac

SEQ ID NO: 95442 - RNA, 21 nt, Artificial Sequence
  Synthetic
ggcgggguuuuucuuguugac

SEQ ID NO: 95443 - RNA, 22 nt, Artificial Sequence
  Synthetic
guucaagccuccaagcugugcc

SEQ ID NO: 95444 - RNA, 22 nt, Artificial Sequence
  Synthetic
  misc_feature (8)..(8): n is a, c, g, or u
  misc_feature (13)..(13): n is a, c, g, or u
guaggagngggancauucgggc

SEQ ID NO: 95445 - RNA, 23 nt, Artificial Sequence
  Synthetic
  misc_feature (9)..(9): n is a, c, g, or u
  misc_feature (14)..(14): n is a, c, g, or u
gguaggagngggancauucgggc

SEQ ID NO: 95446 - RNA, 18 nt, Artificial Sequence
  Synthetic
gcagaagaucucaaucuc

SEQ ID NO: 95447 - RNA, 21 nt, Artificial Sequence
  Synthetic
gucgcagaagaucucaaucuc

SEQ ID NO: 95448 - RNA, 23 nt, Artificial Sequence
  Synthetic
gcgucgcagaagaucucaaucuc

SEQ ID NO: 95449 - RNA, 18 nt, Artificial Sequence
  Synthetic
gucuacgucccgucggcg

SEQ ID NO: 95450 - RNA, 21 nt, Artificial Sequence
  Synthetic
gaccccugcucguguuacagg

SEQ ID NO: 95451 - RNA, 22 nt, Artificial Sequence
  Synthetic
ggaccccugcucguguuacagg

SEQ ID NO: 95452 - RNA, 20 nt, Artificial Sequence
  Synthetic
gcaagcuauucuguguuggg

SEQ ID NO: 95453 - RNA, 21 nt, Artificial Sequence
  Synthetic
ggcaagcuauucuguguuggg

SEQ ID NO: 95454 - RNA, 24 nt, Artificial Sequence
  Synthetic
gcuauucuguguuggggugaguug

SEQ ID NO: 95455 - RNA, 19 nt, Artificial Sequence
  Synthetic
gcuuucgcaagauuccuau

SEQ ID NO: 95456 - RNA, 20 nt, Artificial Sequence
  Synthetic
ggcuuucgcaagauuccuau

SEQ ID NO: 95457 - RNA, 21 nt, Artificial Sequence
  Synthetic
gggcuuucgcaagauuccuau

SEQ ID NO: 95458 - RNA, 19 nt, Artificial Sequence
  Synthetic
gcucuguaucgggaggccu

SEQ ID NO: 95459 - RNA, 21 nt, Artificial Sequence
  Synthetic
guauuuggugucuuuuggagu

SEQ ID NO: 95460 - RNA, 23 nt, Artificial Sequence
  Synthetic
gaguauuuggugucuuuuggagu

SEQ ID NO: 95461 - RNA, 24 nt, Artificial Sequence
  Synthetic
  misc_feature (6)..(6): n is a, c, g, or u
gcacunaggcaagcuauucugugu

SEQ ID NO: 95462 - RNA, 24 nt, Artificial Sequence
  Synthetic
  misc_feature (18)..(18): n is a, c, g, or u
gauuggaaaguaugucanagaauu

SEQ ID NO: 95463 - RNA, 23 nt, Artificial Sequence
  Synthetic
guucuugaguauuuggugucuuu

SEQ ID NO: 95464 - RNA, 21 nt, Artificial Sequence
  Synthetic
aagaagucagaaggcaaaaaa

SEQ ID NO: 95465 - RNA, 22 nt, Artificial Sequence
  Synthetic
aaagaagucagaaggcaaaaaa

SEQ ID NO: 95466 - RNA, 18 nt, Artificial Sequence
  Synthetic
auuuccgagagaggacaa

SEQ ID NO: 95467 - RNA, 19 nt, Artificial Sequence
  Synthetic
uauuuccgagagaggacaa

SEQ ID NO: 95468 - RNA, 21 nt, Artificial Sequence
  Synthetic
uguauuuccgagagaggacaa

SEQ ID NO: 95469 - RNA, 24 nt, Artificial Sequence
  Synthetic
agguguauuuccgagagaggacaa

SEQ ID NO: 95470 - RNA, 18 nt, Artificial Sequence
  Synthetic
  misc_feature (14)..(14): n is a, c, g, or u
cugaccguugccgngcaa

SEQ ID NO: 95471 - RNA, 19 nt, Artificial Sequence
  Synthetic
  misc_feature (15)..(15): n is a, c, g, or u
ccugaccguugccgngcaa

SEQ ID NO: 95472 - RNA, 20 nt, Artificial Sequence
  Synthetic
  misc_feature (16)..(16): n is a, c, g, or u
accugaccguugccgngcaa

SEQ ID NO: 95473 - RNA, 22 nt, Artificial Sequence
  Synthetic
  misc_feature (18)..(18): n is a, c, g, or u
agaccugaccguugccgngcaa

SEQ ID NO: 95474 - RNA, 23 nt, Artificial Sequence
  Synthetic
  misc_feature (1)..(1): n is a, c, g, or u
  misc_feature (19)..(19): n is a, c, g, or u
nagaccugaccguugccgngcaa

SEQ ID NO: 95475 - RNA, 24 nt, Artificial Sequence
  Synthetic
  misc_feature (2)..(2): n is a, c, g, or u
  misc_feature (20)..(20): n is a, c, g, or u
anagaccugaccguugccgngcaa

SEQ ID NO: 95476 - RNA, 21 nt, Artificial Sequence
  Synthetic
  misc_feature (5)..(5): n is a, c, g, or u
ugggngaggcaguagucggaa

SEQ ID NO: 95477 - RNA, 22 nt, Artificial Sequence
  Synthetic
  misc_feature (6)..(6): n is a, c, g, or u
augggngaggcaguagucggaa

SEQ ID NO: 95478 - RNA, 23 nt, Artificial Sequence
  Synthetic
  misc_feature (7)..(7): n is a, c, g, or u
uaugggngaggcaguagucggaa

SEQ ID NO: 95479 - RNA, 24 nt, Artificial Sequence
  Synthetic
  misc_feature (8)..(8): n is a, c, g, or u
auaugggngaggcaguagucggaa

SEQ ID NO: 95480 - RNA, 21 nt, Artificial Sequence
  Synthetic
  misc_feature (17)..(17): n is a, c, g, or u
uuacauaucccaugaanuuaa

SEQ ID NO: 95481 - RNA, 22 nt, Artificial Sequence
  Synthetic
  misc_feature (18)..(18): n is a, c, g, or u
auuacauaucccaugaanuuaa

SEQ ID NO: 95482 - RNA, 23 nt, Artificial Sequence
  Synthetic
  misc_feature (19)..(19): n is a, c, g, or u
aauuacauaucccaugaanuuaa

SEQ ID NO: 95483 - RNA, 24 nt, Artificial Sequence
  Synthetic
  misc_feature (20)..(20): n is a, c, g, or u
caauuacauaucccaugaanuuaa

SEQ ID NO: 95484 - RNA, 21 nt, Artificial Sequence
  Synthetic
auucaucaacucaccccaaca

SEQ ID NO: 95485 - RNA, 23 nt, Artificial Sequence
  Synthetic
agauucaucaacucaccccaaca

SEQ ID NO: 95486 - RNA, 24 nt, Artificial Sequence
  Synthetic
cagauucaucaacucaccccaaca

SEQ ID NO: 95487 - RNA, 19 nt, Artificial Sequence
  Synthetic
ugaucgggaaagaauccca

SEQ ID NO: 95488 - RNA, 22 nt, Artificial Sequence
  Synthetic
uggugaucgggaaagaauccca

SEQ ID NO: 95489 - RNA, 23 nt, Artificial Sequence
  Synthetic
cuggugaucgggaaagaauccca

SEQ ID NO: 95490 - RNA, 24 nt, Artificial Sequence
  Synthetic
acuggugaucgggaaagaauccca

SEQ ID NO: 95491 - RNA, 22 nt, Artificial Sequence
  Synthetic
aguuucccaccuuaugagucca

SEQ ID NO: 95492 - RNA, 23 nt, Artificial Sequence
  Synthetic
aaguuucccaccuuaugagucca

SEQ ID NO: 95493 - RNA, 24 nt, Artificial Sequence
  Synthetic
aaaguuucccaccuuaugagucca

SEQ ID NO: 95494 - RNA, 21 nt, Artificial Sequence
  Synthetic
  misc_feature (6)..(6): n is a, c, g, or u
  misc_feature (10)..(10): n is a, c, g, or u
auauanaaunccagccuucca

SEQ ID NO: 95495 - RNA, 22 nt, Artificial Sequence
  Synthetic
  misc_feature (7)..(7): n is a, c, g, or u
  misc_feature (11)..(11): n is a, c, g, or u
uauauanaaunccagccuucca

SEQ ID NO: 95496 - RNA, 23 nt, Artificial Sequence
  Synthetic
  misc_feature (8)..(8): n is a, c, g, or u
  misc_feature (12)..(12): n is a, c, g, or u
uuauauanaaunccagccuucca

SEQ ID NO: 95497 - RNA, 24 nt, Artificial Sequence
  Synthetic
  misc_feature (9)..(9): n is a, c, g, or u
  misc_feature (13)..(13): n is a, c, g, or u
cuuauauanaaunccagccuucca

SEQ ID NO: 95498 - RNA, 18 nt, Artificial Sequence
  Synthetic
ccuucgucugcgaggcga

SEQ ID NO: 95499 - RNA, 19 nt, Artificial Sequence
  Synthetic
accuucgucugcgaggcga

SEQ ID NO: 95500 - RNA, 21 nt, Artificial Sequence
  Synthetic
agaccuucgucugcgaggcga

SEQ ID NO: 95501 - RNA, 23 nt, Artificial Sequence
  Synthetic
ugagaccuucgucugcgaggcga

SEQ ID NO: 95502 - RNA, 24 nt, Artificial Sequence
  Synthetic
uugagaccuucgucugcgaggcga

SEQ ID NO: 95503 - RNA, 18 nt, Artificial Sequence
  Synthetic
uccaacuggugaucggga

SEQ ID NO: 95504 - RNA, 22 nt, Artificial Sequence
  Synthetic
  misc_feature (1)..(1): n is a, c, g, or u
nggguccaacuggugaucggga

SEQ ID NO: 95505 - RNA, 23 nt, Artificial Sequence
  Synthetic
  misc_feature (2)..(2): n is a, c, g, or u
cnggguccaacuggugaucggga

SEQ ID NO: 95506 - RNA, 18 nt, Artificial Sequence
  Synthetic
  misc_feature (13)..(13): n is a, c, g, or u
ugcgaaagcccangauga

SEQ ID NO: 95507 - RNA, 19 nt, Artificial Sequence
  Synthetic
  misc_feature (14)..(14): n is a, c, g, or u
uugcgaaagcccangauga

SEQ ID NO: 95508 - RNA, 20 nt, Artificial Sequence
  Synthetic
  misc_feature (15)..(15): n is a, c, g, or u
cuugcgaaagcccangauga

SEQ ID NO: 95509 - RNA, 21 nt, Artificial Sequence
  Synthetic
  misc_feature (16)..(16): n is a, c, g, or u
ucuugcgaaagcccangauga

SEQ ID NO: 95510 - RNA, 22 nt, Artificial Sequence
  Synthetic
  misc_feature (17)..(17): n is a, c, g, or u
aucuugcgaaagcccangauga

SEQ ID NO: 95511 - RNA, 23 nt, Artificial Sequence
  Synthetic
  misc_feature (18)..(18): n is a, c, g, or u
aaucuugcgaaagcccangauga

SEQ ID NO: 95512 - RNA, 21 nt, Artificial Sequence
  Synthetic
  misc_feature (4)..(4): n is a, c, g, or u
ugcnaauuuuggccaggacac

SEQ ID NO: 95513 - RNA, 22 nt, Artificial Sequence
  Synthetic
  misc_feature (5)..(5): n is a, c, g, or u
cugcnaauuuuggccaggacac

SEQ ID NO: 95514 - RNA, 23 nt, Artificial Sequence
  Synthetic
  misc_feature (6)..(6): n is a, c, g, or u
acugcnaauuuuggccaggacac

SEQ ID NO: 95515 - RNA, 22 nt, Artificial Sequence
  Synthetic
agaaaauugagagaaguccacc

SEQ ID NO: 95516 - RNA, 23 nt, Artificial Sequence
  Synthetic
uagaaaauugagagaaguccacc

SEQ ID NO: 95517 - RNA, 24 nt, Artificial Sequence
  Synthetic
cuagaaaauugagagaaguccacc

SEQ ID NO: 95518 - RNA, 21 nt, Artificial Sequence
  Synthetic
caugcuguagcucuuguuccc

SEQ ID NO: 95519 - RNA, 22 nt, Artificial Sequence
  Synthetic
ccaugcuguagcucuuguuccc

SEQ ID NO: 95520 - RNA, 23 nt, Artificial Sequence
  Synthetic
cccaugcuguagcucuuguuccc

SEQ ID NO: 95521 - RNA, 24 nt, Artificial Sequence
  Synthetic
ucccaugcuguagcucuuguuccc

SEQ ID NO: 95522 - RNA, 21 nt, Artificial Sequence
  Synthetic
  misc_feature (15)..(15): n is a, c, g, or u
cguugacauugcugngagucc

SEQ ID NO: 95523 - RNA, 22 nt, Artificial Sequence
  Synthetic
  misc_feature (16)..(16): n is a, c, g, or u
ucguugacauugcugngagucc

SEQ ID NO: 95524 - RNA, 21 nt, Artificial Sequence
  Synthetic
  misc_feature (9)..(9): n is a, c, g, or u
acauagcunacuacuaauucc

SEQ ID NO: 95525 - RNA, 23 nt, Artificial Sequence
  Synthetic
  misc_feature (11)..(11): n is a, c, g, or u
ugacauagcunacuacuaauucc

SEQ ID NO: 95526 - RNA, 24 nt, Artificial Sequence
  Synthetic
  misc_feature (12)..(12): n is a, c, g, or u
uugacauagcunacuacuaauucc

SEQ ID NO: 95527 - RNA, 18 nt, Artificial Sequence
  Synthetic
cccgccuguaacacgagc

SEQ ID NO: 95528 - RNA, 19 nt, Artificial Sequence
  Synthetic
ccccgccuguaacacgagc

SEQ ID NO: 95529 - RNA, 20 nt, Artificial Sequence
  Synthetic
accccgccuguaacacgagc

SEQ ID NO: 95530 - RNA, 21 nt, Artificial Sequence
  Synthetic
aaccccgccuguaacacgagc

SEQ ID NO: 95531 - RNA, 22 nt, Artificial Sequence
  Synthetic
aaaccccgccuguaacacgagc

SEQ ID NO: 95532 - RNA, 23 nt, Artificial Sequence
  Synthetic
aaaaccccgccuguaacacgagc

SEQ ID NO: 95533 - RNA, 24 nt, Artificial Sequence
  Synthetic
aaaaaccccgccuguaacacgagc

SEQ ID NO: 95534 - RNA, 21 nt, Artificial Sequence
  Synthetic
  misc_feature (9)..(9): n is a, c, g, or u
ugugguggngugaacccuggc

SEQ ID NO: 95535 - RNA, 23 nt, Artificial Sequence
  Synthetic
  misc_feature (11)..(11): n is a, c, g, or u
cgugugguggngugaacccuggc

SEQ ID NO: 95536 - RNA, 24 nt, Artificial Sequence
  Synthetic
  misc_feature (12)..(12): n is a, c, g, or u
ccgugugguggngugaacccuggc

SEQ ID NO: 95537 - RNA, 19 nt, Artificial Sequence
  Synthetic
aggcggugucgaggagauc

SEQ ID NO: 95538 - RNA, 21 nt, Artificial Sequence
  Synthetic
  misc_feature (1)..(1): n is a, c, g, or u
ngaggcggugucgaggagauc

SEQ ID NO: 95539 - RNA, 22 nt, Artificial Sequence
  Synthetic
  misc_feature (2)..(2): n is a, c, g, or u
cngaggcggugucgaggagauc

SEQ ID NO: 95540 - RNA, 24 nt, Artificial Sequence
  Synthetic
  misc_feature (4)..(4): n is a, c, g, or u
agcngaggcggugucgaggagauc

SEQ ID NO: 95541 - RNA, 21 nt, Artificial Sequence
  Synthetic
caagaagaugaggcauagcag

SEQ ID NO: 95542 - RNA, 22 nt, Artificial Sequence
  Synthetic
acaagaagaugaggcauagcag

SEQ ID NO: 95543 - RNA, 23 nt, Artificial Sequence
  Synthetic
aacaagaagaugaggcauagcag

SEQ ID NO: 95544 - RNA, 24 nt, Artificial Sequence
  Synthetic
caacaagaagaugaggcauagcag

SEQ ID NO: 95545 - RNA, 21 nt, Artificial Sequence
  Synthetic
  misc_feature (5)..(5): n is a, c, g, or u
agagncccaaacggccccgag

SEQ ID NO: 95546 - RNA, 22 nt, Artificial Sequence
  Synthetic
  misc_feature (6)..(6): n is a, c, g, or u
uagagncccaaacggccccgag

SEQ ID NO: 95547 - RNA, 23 nt, Artificial Sequence
  Synthetic
aggauuaaagacagguacaguag

SEQ ID NO: 95548 - RNA, 24 nt, Artificial Sequence
  Synthetic
caggauuaaagacagguacaguag

SEQ ID NO: 95549 - RNA, 18 nt, Artificial Sequence
  Synthetic
cccgagacgggucguccg

SEQ ID NO: 95550 - RNA, 19 nt, Artificial Sequence
  Synthetic
ccccgagacgggucguccg

SEQ ID NO: 95551 - RNA, 22 nt, Artificial Sequence
  Synthetic
cggccccgagacgggucguccg

SEQ ID NO: 95552 - RNA, 23 nt, Artificial Sequence
  Synthetic
acggccccgagacgggucguccg

SEQ ID NO: 95553 - RNA, 24 nt, Artificial Sequence
  Synthetic
aacggccccgagacgggucguccg

SEQ ID NO: 95554 - RNA, 19 nt, Artificial Sequence
  Synthetic
agacaaaggacgucccgcg

SEQ ID NO: 95555 - RNA, 20 nt, Artificial Sequence
  Synthetic
uagacaaaggacgucccgcg

SEQ ID NO: 95556 - RNA, 22 nt, Artificial Sequence
  Synthetic
cguagacaaaggacgucccgcg

SEQ ID NO: 95557 - RNA, 23 nt, Artificial Sequence
  Synthetic
acguagacaaaggacgucccgcg

SEQ ID NO: 95558 - RNA, 21 nt, Artificial Sequence
  Synthetic
  misc_feature (6)..(6): n is a, c, g, or u
cugggnucuagcagagcuugg

SEQ ID NO: 95559 - RNA, 22 nt, Artificial Sequence
  Synthetic
  misc_feature (7)..(7): n is a, c, g, or u
ucugggnucuagcagagcuugg

SEQ ID NO: 95560 - RNA, 23 nt, Artificial Sequence
  Synthetic
  misc_feature (8)..(8): n is a, c, g, or u
cucugggnucuagcagagcuugg

SEQ ID NO: 95561 - RNA, 24 nt, Artificial Sequence
  Synthetic
  misc_feature (9)..(9): n is a, c, g, or u
acucugggnucuagcagagcuugg

SEQ ID NO: 95562 - RNA, 21 nt, Artificial Sequence
  Synthetic
  misc_feature (8)..(8): n is a, c, g, or u
  misc_feature (20)..(20): n is a, c, g, or u
uguuuganuuggcuccgaang

SEQ ID NO: 95563 - RNA, 22 nt, Artificial Sequence
  Synthetic
  misc_feature (9)..(9): n is a, c, g, or u
  misc_feature (21)..(21): n is a, c, g, or u
uuguuuganuuggcuccgaang

SEQ ID NO: 95564 - RNA, 23 nt, Artificial Sequence
  Synthetic
  misc_feature (10)..(10): n is a, c, g, or u
  misc_feature (22)..(22): n is a, c, g, or u
auuguuuganuuggcuccgaang

SEQ ID NO: 95565 - RNA, 21 nt, Artificial Sequence
  Synthetic
  misc_feature (2)..(2): n is a, c, g, or u
  misc_feature (6)..(6): n is a, c, g, or u
  misc_feature (14)..(14): n is a, c, g, or u
ungugnucuccaunuucggug

SEQ ID NO: 95566 - RNA, 23 nt, Artificial Sequence
  Synthetic
  misc_feature (4)..(4): n is a, c, g, or u
  misc_feature (8)..(8): n is a, c, g, or u
  misc_feature (16)..(16): n is a, c, g, or u
ugungugnucuccaunuucggug

SEQ ID NO: 95567 - RNA, 24 nt, Artificial Sequence
  Synthetic
  misc_feature (5)..(5): n is a, c, g, or u
  misc_feature (9)..(9): n is a, c, g, or u
  misc_feature (17)..(17): n is a, c, g, or u
augungugnucuccaunuucggug

SEQ ID NO: 95568 - RNA, 21 nt, Artificial Sequence
  Synthetic
  misc_feature (3)..(3): n is a, c, g, or u
aanuuggaggacaagagguug

SEQ ID NO: 95569 - RNA, 22 nt, Artificial Sequence
  Synthetic
  misc_feature (4)..(4): n is a, c, g, or u
caanuuggaggacaagagguug

SEQ ID NO: 95570 - RNA, 23 nt, Artificial Sequence
  Synthetic
  misc_feature (5)..(5): n is a, c, g, or u
acaanuuggaggacaagagguug

SEQ ID NO: 95571 - RNA, 21 nt, Artificial Sequence
  Synthetic
  misc_feature (19)..(19): n is a, c, g, or u
  misc_feature (21)..(21): n is a, c, g, or u
auuugguggucuguaagcngn

SEQ ID NO: 95572 - RNA, 22 nt, Artificial Sequence
  Synthetic
  misc_feature (20)..(20): n is a, c, g, or u
  misc_feature (22)..(22): n is a, c, g, or u
cauuugguggucuguaagcngn

SEQ ID NO: 95573 - RNA, 18 nt, Artificial Sequence
  Synthetic
ugggguugaagucccaau

SEQ ID NO: 95574 - RNA, 19 nt, Artificial Sequence
  Synthetic
uugggguugaagucccaau

SEQ ID NO: 95575 - RNA, 21 nt, Artificial Sequence
  Synthetic
uguugggguugaagucccaau

SEQ ID NO: 95576 - RNA, 22 nt, Artificial Sequence
  Synthetic
uuguugggguugaagucccaau

SEQ ID NO: 95577 - RNA, 23 nt, Artificial Sequence
  Synthetic
cuuguugggguugaagucccaau

SEQ ID NO: 95578 - RNA, 24 nt, Artificial Sequence
  Synthetic
ccuuguugggguugaagucccaau

SEQ ID NO: 95579 - RNA, 18 nt, Artificial Sequence
  Synthetic
acugaggcccacucccau

SEQ ID NO: 95580 - RNA, 21 nt, Artificial Sequence
  Synthetic
cggacugaggcccacucccau

SEQ ID NO: 95581 - RNA, 22 nt, Artificial Sequence
  Synthetic
acggacugaggcccacucccau

SEQ ID NO: 95582 - RNA, 23 nt, Artificial Sequence
  Synthetic
aacggacugaggcccacucccau

SEQ ID NO: 95583 - RNA, 24 nt, Artificial Sequence
  Synthetic
aaacggacugaggcccacucccau

SEQ ID NO: 95584 - RNA, 22 nt, Artificial Sequence
  Synthetic
ugucucuuagagguggagagau

SEQ ID NO: 95585 - RNA, 23 nt, Artificial Sequence
  Synthetic
cugucucuuagagguggagagau

SEQ ID NO: 95586 - RNA, 24 nt, Artificial Sequence
  Synthetic
acugucucuuagagguggagagau

SEQ ID NO: 95587 - RNA, 22 nt, Artificial Sequence
  Synthetic
  misc_feature (11)..(11): n is a, c, g, or u
cgaaagcccangaugaugggau

SEQ ID NO: 95588 - RNA, 24 nt, Artificial Sequence
  Synthetic
  misc_feature (13)..(13): n is a, c, g, or u
ugcgaaagcccangaugaugggau

SEQ ID NO: 95589 - RNA, 21 nt, Artificial Sequence
  Synthetic
cagaagcuccaaauucuuuau

SEQ ID NO: 95590 - RNA, 22 nt, Artificial Sequence
  Synthetic
acagaagcuccaaauucuuuau

SEQ ID NO: 95591 - RNA, 23 nt, Artificial Sequence
  Synthetic
cacagaagcuccaaauucuuuau

SEQ ID NO: 95592 - RNA, 24 nt, Artificial Sequence
  Synthetic
ccacagaagcuccaaauucuuuau

SEQ ID NO: 95593 - RNA, 18 nt, Artificial Sequence
  Synthetic
cccaacguuugguuuuau

SEQ ID NO: 95594 - RNA, 19 nt, Artificial Sequence
  Synthetic
ccccaacguuugguuuuau

SEQ ID NO: 95595 - RNA, 21 nt, Artificial Sequence
  Synthetic
agccccaacguuugguuuuau

SEQ ID NO: 95596 - RNA, 22 nt, Artificial Sequence
  Synthetic
uagccccaacguuugguuuuau

SEQ ID NO: 95597 - RNA, 24 nt, Artificial Sequence
  Synthetic
aguagccccaacguuugguuuuau

SEQ ID NO: 95598 - RNA, 18 nt, Artificial Sequence
  Synthetic
aacacgagcagggguccu

SEQ ID NO: 95599 - RNA, 19 nt, Artificial Sequence
  Synthetic
uaacacgagcagggguccu

SEQ ID NO: 95600 - RNA, 21 nt, Artificial Sequence
  Synthetic
uguaacacgagcagggguccu

SEQ ID NO: 95601 - RNA, 22 nt, Artificial Sequence
  Synthetic
cuguaacacgagcagggguccu

SEQ ID NO: 95602 - RNA, 23 nt, Artificial Sequence
  Synthetic
ccuguaacacgagcagggguccu

SEQ ID NO: 95603 - RNA, 18 nt, Artificial Sequence
  Synthetic
cgagcaaaacaagcugcu

SEQ ID NO: 95604 - RNA, 20 nt, Artificial Sequence
  Synthetic
ugcgagcaaaacaagcugcu

SEQ ID NO: 95605 - RNA, 21 nt, Artificial Sequence
  Synthetic
cugcgagcaaaacaagcugcu

SEQ ID NO: 95606 - RNA, 24 nt, Artificial Sequence
  Synthetic
cggcugcgagcaaaacaagcugcu

SEQ ID NO: 95607 - RNA, 18 nt, Artificial Sequence
  Synthetic
ucggucguugacauugcu

SEQ ID NO: 95608 - RNA, 21 nt, Artificial Sequence
  Synthetic
aggucggucguugacauugcu

SEQ ID NO: 95609 - RNA, 22 nt, Artificial Sequence
  Synthetic
aaggucggucguugacauugcu

SEQ ID NO: 95610 - RNA, 23 nt, Artificial Sequence
  Synthetic
caaggucggucguugacauugcu

SEQ ID NO: 95611 - RNA, 24 nt, Artificial Sequence
  Synthetic
ucaaggucggucguugacauugcu

SEQ ID NO: 95612 - RNA, 21 nt, Artificial Sequence
  Synthetic
  misc_feature (1)..(1): n is a, c, g, or u
  misc_feature (4)..(4): n is a, c, g, or u
  misc_feature (16)..(16): n is a, c, g, or u
naungccaagccccanccagu

SEQ ID NO: 95613 - RNA, 22 nt, Artificial Sequence
  Synthetic
  misc_feature (2)..(2): n is a, c, g, or u
  misc_feature (5)..(5): n is a, c, g, or u
  misc_feature (17)..(17): n is a, c, g, or u
cnaungccaagccccanccagu

SEQ ID NO: 95614 - RNA, 23 nt, Artificial Sequence
  Synthetic
  misc_feature (3)..(3): n is a, c, g, or u
  misc_feature (6)..(6): n is a, c, g, or u
  misc_feature (18)..(18): n is a, c, g, or u
ccnaungccaagccccanccagu

SEQ ID NO: 95615 - RNA, 18 nt, Artificial Sequence
  Synthetic
ugcuaggaguuccgcagu

SEQ ID NO: 95616 - RNA, 19 nt, Artificial Sequence
  Synthetic
cugcuaggaguuccgcagu

SEQ ID NO: 95617 - RNA, 21 nt, Artificial Sequence
  Synthetic
agcugcuaggaguuccgcagu

SEQ ID NO: 95618 - RNA, 22 nt, Artificial Sequence
  Synthetic
aagcugcuaggaguuccgcagu

SEQ ID NO: 95619 - RNA, 23 nt, Artificial Sequence
  Synthetic
caagcugcuaggaguuccgcagu

SEQ ID NO: 95620 - RNA, 24 nt, Artificial Sequence
  Synthetic
acaagcugcuaggaguuccgcagu

SEQ ID NO: 95621 - RNA, 21 nt, Artificial Sequence
  Synthetic
  misc_feature (13)..(13): n is a, c, g, or u
  misc_feature (15)..(15): n is a, c, g, or u
uggucuguaagcngnaggagu

SEQ ID NO: 95622 - RNA, 24 nt, Artificial Sequence
  Synthetic
  misc_feature (16)..(16): n is a, c, g, or u
  misc_feature (18)..(18): n is a, c, g, or u
ugguggucuguaagcngnaggagu

SEQ ID NO: 95623 - RNA, 21 nt, Artificial Sequence
  Synthetic
agggcaaauauuugguaaggu

SEQ ID NO: 95624 - RNA, 22 nt, Artificial Sequence
  Synthetic
aagggcaaauauuugguaaggu

SEQ ID NO: 95625 - RNA, 23 nt, Artificial Sequence
  Synthetic
  misc_feature (1)..(1): n is a, c, g, or u
naagggcaaauauuugguaaggu

SEQ ID NO: 95626 - RNA, 24 nt, Artificial Sequence
  Synthetic
  misc_feature (2)..(2): n is a, c, g, or u
cnaagggcaaauauuugguaaggu

SEQ ID NO: 95627 - RNA, 22 nt, Artificial Sequence
  Synthetic
agucuagacucugugguauugu

SEQ ID NO: 95628 - RNA, 24 nt, Artificial Sequence
  Synthetic
cgagucuagacucugugguauugu

SEQ ID NO: 95629 - RNA, 21 nt, Artificial Sequence
  Synthetic
  misc_feature (3)..(3): n is a, c, g, or u
  misc_feature (11)..(11): n is a, c, g, or u
ccncuggccanugauccuugu

SEQ ID NO: 95630 - RNA, 23 nt, Artificial Sequence
  Synthetic
  misc_feature (5)..(5): n is a, c, g, or u
  misc_feature (13)..(13): n is a, c, g, or u
ugccncuggccanugauccuugu

SEQ ID NO: 95631 - RNA, 24 nt, Artificial Sequence
  Synthetic
  misc_feature (6)..(6): n is a, c, g, or u
  misc_feature (14)..(14): n is a, c, g, or u
uugccncuggccanugauccuugu

SEQ ID NO: 95632 - RNA, 21 nt, Artificial Sequence
  Synthetic
cccaguaaaguuucccaccuu

SEQ ID NO: 95633 - RNA, 23 nt, Artificial Sequence
  Synthetic
agcccaguaaaguuucccaccuu

SEQ ID NO: 95634 - RNA, 24 nt, Artificial Sequence
  Synthetic
aagcccaguaaaguuucccaccuu

SEQ ID NO: 95635 - RNA, 21 nt, Artificial Sequence
  Synthetic
  misc_feature (16)..(16): n is a, c, g, or u
aguaaugauuaacugnauguu

SEQ ID NO: 95636 - RNA, 22 nt, Artificial Sequence
  Synthetic
  misc_feature (17)..(17): n is a, c, g, or u
aaguaaugauuaacugnauguu

SEQ ID NO: 95637 - RNA, 24 nt, Artificial Sequence
  Synthetic
  misc_feature (1)..(1): n is a, c, g, or u
  misc_feature (19)..(19): n is a, c, g, or u
ngaaguaaugauuaacugnauguu

SEQ ID NO: 95638 - RNA, 23 nt, Artificial Sequence
  Synthetic
  misc_feature (9)..(9): n is a, c, g, or u
  misc_feature (12)..(12): n is a, c, g, or u
uggcugcunggnugugcugccaa

SEQ ID NO: 95639 - RNA, 24 nt, Artificial Sequence
  Synthetic
  misc_feature (10)..(10): n is a, c, g, or u
  misc_feature (13)..(13): n is a, c, g, or u
auggcugcunggnugugcugccaa

SEQ ID NO: 95640 - RNA, 18 nt, Artificial Sequence
  Synthetic
agaauccucacaauacca

SEQ ID NO: 95641 - RNA, 19 nt, Artificial Sequence
  Synthetic
aagaauccucacaauacca

SEQ ID NO: 95642 - RNA, 20 nt, Artificial Sequence
  Synthetic
caagaauccucacaauacca

SEQ ID NO: 95643 - RNA, 21 nt, Artificial Sequence
  Synthetic
acaagaauccucacaauacca

SEQ ID NO: 95644 - RNA, 23 nt, Artificial Sequence
  Synthetic
ugacaagaauccucacaauacca

SEQ ID NO: 95645 - RNA, 24 nt, Artificial Sequence
  Synthetic
uugacaagaauccucacaauacca

SEQ ID NO: 95646 - RNA, 21 nt, Artificial Sequence
  Synthetic
  misc_feature (11)..(11): n is a, c, g, or u
auuuggaaganccagcaucca

SEQ ID NO: 95647 - RNA, 22 nt, Artificial Sequence
  Synthetic
  misc_feature (12)..(12): n is a, c, g, or u
aauuuggaaganccagcaucca

SEQ ID NO: 95648 - RNA, 23 nt, Artificial Sequence
  Synthetic
  misc_feature (13)..(13): n is a, c, g, or u
uaauuuggaaganccagcaucca

SEQ ID NO: 95649 - RNA, 21 nt, Artificial Sequence
  Synthetic
uauugauuggaaaguauguca

SEQ ID NO: 95650 - RNA, 22 nt, Artificial Sequence
  Synthetic
cuauugauuggaaaguauguca

SEQ ID NO: 95651 - RNA, 23 nt, Artificial Sequence
  Synthetic
ccuauugauuggaaaguauguca

SEQ ID NO: 95652 - RNA, 24 nt, Artificial Sequence
  Synthetic
accuauugauuggaaaguauguca

SEQ ID NO: 95653 - RNA, 22 nt, Artificial Sequence
  Synthetic
  misc_feature (18)..(18): n is a, c, g, or u
uggggcuacucccuuaanuuca

SEQ ID NO: 95654 - RNA, 23 nt, Artificial Sequence
  Synthetic
  misc_feature (19)..(19): n is a, c, g, or u
uuggggcuacucccuuaanuuca

SEQ ID NO: 95655 - RNA, 24 nt, Artificial Sequence
  Synthetic
  misc_feature (1)..(1): n is a, c, g, or u
  misc_feature (20)..(20): n is a, c, g, or u
ngggcauggacauugacccnuaua

SEQ ID NO: 95656 - RNA, 22 nt, Artificial Sequence
  Synthetic
agauugggacuucaaccccaac

SEQ ID NO: 95657 - RNA, 23 nt, Artificial Sequence
  Synthetic
cagauugggacuucaaccccaac

SEQ ID NO: 95658 - RNA, 24 nt, Artificial Sequence
  Synthetic
ccagauugggacuucaaccccaac

SEQ ID NO: 95659 - RNA, 19 nt, Artificial Sequence
  Synthetic
aguugaugaaucuggccac

SEQ ID NO: 95660 - RNA, 21 nt, Artificial Sequence
  Synthetic
ugaguugaugaaucuggccac

SEQ ID NO: 95661 - RNA, 19 nt, Artificial Sequence
  Synthetic
cgggguuuuucuuguugac

SEQ ID NO: 95662 - RNA, 22 nt, Artificial Sequence
  Synthetic
aggcgggguuuuucuuguugac

SEQ ID NO: 95663 - RNA, 23 nt, Artificial Sequence
  Synthetic
caggcgggguuuuucuuguugac

SEQ ID NO: 95664 - RNA, 24 nt, Artificial Sequence
  Synthetic
acaggcgggguuuuucuuguugac

SEQ ID NO: 95665 - RNA, 18 nt, Artificial Sequence
  Synthetic
aagccuccaagcugugcc

SEQ ID NO: 95666 - RNA, 19 nt, Artificial Sequence
  Synthetic
caagccuccaagcugugcc

SEQ ID NO: 95667 - RNA, 20 nt, Artificial Sequence
  Synthetic
ucaagccuccaagcugugcc

SEQ ID NO: 95668 - RNA, 21 nt, Artificial Sequence
  Synthetic
uucaagccuccaagcugugcc

SEQ ID NO: 95669 - RNA, 23 nt, Artificial Sequence
  Synthetic
uguucaagccuccaagcugugcc

SEQ ID NO: 95670 - RNA, 24 nt, Artificial Sequence
  Synthetic
cuguucaagccuccaagcugugcc

SEQ ID NO: 95671 - RNA, 21 nt, Artificial Sequence
  Synthetic
  misc_feature (19)..(19): n is a, c, g, or u
ccaccaagcucugcuagancc

SEQ ID NO: 95672 - RNA, 22 nt, Artificial Sequence
  Synthetic
  misc_feature (20)..(20): n is a, c, g, or u
uccaccaagcucugcuagancc

SEQ ID NO: 95673 - RNA, 23 nt, Artificial Sequence
  Synthetic
  misc_feature (21)..(21): n is a, c, g, or u
uuccaccaagcucugcuagancc

SEQ ID NO: 95674 - RNA, 24 nt, Artificial Sequence
  Synthetic
  misc_feature (22)..(22): n is a, c, g, or u
auuccaccaagcucugcuagancc

SEQ ID NO: 95675 - RNA, 21 nt, Artificial Sequence
  Synthetic
  misc_feature (7)..(7): n is a, c, g, or u
  misc_feature (12)..(12): n is a, c, g, or u
uaggagngggancauucgggc

SEQ ID NO: 95676 - RNA, 24 nt, Artificial Sequence
  Synthetic
  misc_feature (10)..(10): n is a, c, g, or u
  misc_feature (15)..(15): n is a, c, g, or u
agguaggagngggancauucgggc

SEQ ID NO: 95677 - RNA, 21 nt, Artificial Sequence
  Synthetic
aucuuucuguucccaauccuc

SEQ ID NO: 95678 - RNA, 22 nt, Artificial Sequence
  Synthetic
aaucuuucuguucccaauccuc

SEQ ID NO: 95679 - RNA, 23 nt, Artificial Sequence
  Synthetic
  misc_feature (1)..(1): n is a, c, g, or u
naaucuuucuguucccaauccuc

SEQ ID NO: 95680 - RNA, 24 nt, Artificial Sequence
  Synthetic
  misc_feature (2)..(2): n is a, c, g, or u
cnaaucuuucuguucccaauccuc

SEQ ID NO: 95681 - RNA, 19 nt, Artificial Sequence
  Synthetic
cgcagaagaucucaaucuc

SEQ ID NO: 95682 - RNA, 20 nt, Artificial Sequence
  Synthetic
ucgcagaagaucucaaucuc

SEQ ID NO: 95683 - RNA, 22 nt, Artificial Sequence
  Synthetic
cgucgcagaagaucucaaucuc

SEQ ID NO: 95684 - RNA, 24 nt, Artificial Sequence
  Synthetic
cgcgucgcagaagaucucaaucuc

SEQ ID NO: 95685 - RNA, 21 nt, Artificial Sequence
  Synthetic
cuuuuggaagagaaacuguuc

SEQ ID NO: 95686 - RNA, 22 nt, Artificial Sequence
  Synthetic
acuuuuggaagagaaacuguuc

SEQ ID NO: 95687 - RNA, 23 nt, Artificial Sequence
  Synthetic
uacuuuuggaagagaaacuguuc

SEQ ID NO: 95688 - RNA, 24 nt, Artificial Sequence
  Synthetic
uuacuuuuggaagagaaacuguuc

SEQ ID NO: 95689 - RNA, 19 nt, Artificial Sequence
  Synthetic
ugucuacgucccgucggcg

SEQ ID NO: 95690 - RNA, 20 nt, Artificial Sequence
  Synthetic
uugucuacgucccgucggcg

SEQ ID NO: 95691 - RNA, 21 nt, Artificial Sequence
  Synthetic
uuugucuacgucccgucggcg

SEQ ID NO: 95692 - RNA, 22 nt, Artificial Sequence
  Synthetic
cuuugucuacgucccgucggcg

SEQ ID NO: 95693 - RNA, 23 nt, Artificial Sequence
  Synthetic
ccuuugucuacgucccgucggcg

SEQ ID NO: 95694 - RNA, 24 nt, Artificial Sequence
  Synthetic
uccuuugucuacgucccgucggcg

SEQ ID NO: 95695 - RNA, 21 nt, Artificial Sequence
  Synthetic
  misc_feature (6)..(6): n is a, c, g, or u
  misc_feature (16)..(16): n is a, c, g, or u
uccaanuuguccuggnuaucg

SEQ ID NO: 95696 - RNA, 22 nt, Artificial Sequence
  Synthetic
  misc_feature (7)..(7): n is a, c, g, or u
  misc_feature (17)..(17): n is a, c, g, or u
cuccaanuuguccuggnuaucg

SEQ ID NO: 95697 - RNA, 23 nt, Artificial Sequence
  Synthetic
  misc_feature (8)..(8): n is a, c, g, or u
  misc_feature (18)..(18): n is a, c, g, or u
ccuccaanuuguccuggnuaucg

SEQ ID NO: 95698 - RNA, 24 nt, Artificial Sequence
  Synthetic
  misc_feature (9)..(9): n is a, c, g, or u
  misc_feature (19)..(19): n is a, c, g, or u
uccuccaanuuguccuggnuaucg

SEQ ID NO: 95699 - RNA, 18 nt, Artificial Sequence
  Synthetic
cccugcucguguuacagg

SEQ ID NO: 95700 - RNA, 19 nt, Artificial Sequence
  Synthetic
ccccugcucguguuacagg

SEQ ID NO: 95701 - RNA, 20 nt, Artificial Sequence
  Synthetic
accccugcucguguuacagg

SEQ ID NO: 95702 - RNA, 23 nt, Artificial Sequence
  Synthetic
aggaccccugcucguguuacagg

SEQ ID NO: 95703 - RNA, 24 nt, Artificial Sequence
  Synthetic
uaggaccccugcucguguuacagg

SEQ ID NO: 95704 - RNA, 18 nt, Artificial Sequence
  Synthetic
aagcuauucuguguuggg

SEQ ID NO: 95705 - RNA, 19 nt, Artificial Sequence
  Synthetic
caagcuauucuguguuggg

SEQ ID NO: 95706 - RNA, 22 nt, Artificial Sequence
  Synthetic
aggcaagcuauucuguguuggg

SEQ ID NO: 95707 - RNA, 23 nt, Artificial Sequence
  Synthetic
  misc_feature (1)..(1): n is a, c, g, or u
naggcaagcuauucuguguuggg

SEQ ID NO: 95708 - RNA, 24 nt, Artificial Sequence
  Synthetic
  misc_feature (2)..(2): n is a, c, g, or u
unaggcaagcuauucuguguuggg

SEQ ID NO: 95709 - RNA, 18 nt, Artificial Sequence
  Synthetic
aagaauuuggagcuucug

SEQ ID NO: 95710 - RNA, 19 nt, Artificial Sequence
  Synthetic
aaagaauuuggagcuucug

SEQ ID NO: 95711 - RNA, 20 nt, Artificial Sequence
  Synthetic
uaaagaauuuggagcuucug

SEQ ID NO: 95712 - RNA, 21 nt, Artificial Sequence
  Synthetic
auaaagaauuuggagcuucug

SEQ ID NO: 95713 - RNA, 22 nt, Artificial Sequence
  Synthetic
uauaaagaauuuggagcuucug

SEQ ID NO: 95714 - RNA, 23 nt, Artificial Sequence
  Synthetic
  misc_feature (1)..(1): n is a, c, g, or u
nuauaaagaauuuggagcuucug

SEQ ID NO: 95715 - RNA, 24 nt, Artificial Sequence
  Synthetic
  misc_feature (2)..(2): n is a, c, g, or u
cnuauaaagaauuuggagcuucug

SEQ ID NO: 95716 - RNA, 21 nt, Artificial Sequence
  Synthetic
auucuguguuggggugaguug

SEQ ID NO: 95717 - RNA, 22 nt, Artificial Sequence
  Synthetic
uauucuguguuggggugaguug

SEQ ID NO: 95718 - RNA, 23 nt, Artificial Sequence
  Synthetic
cuauucuguguuggggugaguug

SEQ ID NO: 95719 - RNA, 21 nt, Artificial Sequence
  Synthetic
  misc_feature (5)..(5): n is a, c, g, or u
  misc_feature (13)..(13): n is a, c, g, or u
  misc_feature (17)..(17): n is a, c, g, or u
cgaanauggagancacnacau

SEQ ID NO: 95720 - RNA, 22 nt, Artificial Sequence
  Synthetic
  misc_feature (6)..(6): n is a, c, g, or u
  misc_feature (14)..(14): n is a, c, g, or u
  misc_feature (18)..(18): n is a, c, g, or u
ccgaanauggagancacnacau

SEQ ID NO: 95721 - RNA, 23 nt, Artificial Sequence
  Synthetic
  misc_feature (7)..(7): n is a, c, g, or u
  misc_feature (15)..(15): n is a, c, g, or u
  misc_feature (19)..(19): n is a, c, g, or u
accgaanauggagancacnacau

SEQ ID NO: 95722 - RNA, 24 nt, Artificial Sequence
  Synthetic
  misc_feature (8)..(8): n is a, c, g, or u
  misc_feature (16)..(16): n is a, c, g, or u
  misc_feature (20)..(20): n is a, c, g, or u
caccgaanauggagancacnacau

SEQ ID NO: 95723 - RNA, 18 nt, Artificial Sequence
  Synthetic
cuuucgcaagauuccuau

SEQ ID NO: 95724 - RNA, 22 nt, Artificial Sequence
  Synthetic
ugggcuuucgcaagauuccuau

SEQ ID NO: 95725 - RNA, 23 nt, Artificial Sequence
  Synthetic
  misc_feature (1)..(1): n is a, c, g, or u
nugggcuuucgcaagauuccuau

SEQ ID NO: 95726 - RNA, 24 nt, Artificial Sequence
  Synthetic
  misc_feature (2)..(2): n is a, c, g, or u
cnugggcuuucgcaagauuccuau

SEQ ID NO: 95727 - RNA, 21 nt, Artificial Sequence
  Synthetic
cacuguuuggcuuucaguuau

SEQ ID NO: 95728 - RNA, 22 nt, Artificial Sequence
  Synthetic
ccacuguuuggcuuucaguuau

SEQ ID NO: 95729 - RNA, 23 nt, Artificial Sequence
  Synthetic
cccacuguuuggcuuucaguuau

SEQ ID NO: 95730 - RNA, 24 nt, Artificial Sequence
  Synthetic
ccccacuguuuggcuuucaguuau

SEQ ID NO: 95731 - RNA, 18 nt, Artificial Sequence
  Synthetic
cucuguaucgggaggccu

SEQ ID NO: 95732 - RNA, 20 nt, Artificial Sequence
  Synthetic
  misc_feature (1)..(1): n is a, c, g, or u
ngcucuguaucgggaggccu

SEQ ID NO: 95733 - RNA, 21 nt, Artificial Sequence
  Synthetic
  misc_feature (2)..(2): n is a, c, g, or u
cngcucuguaucgggaggccu

SEQ ID NO: 95734 - RNA, 22 nt, Artificial Sequence
  Synthetic
  misc_feature (3)..(3): n is a, c, g, or u
ucngcucuguaucgggaggccu

SEQ ID NO: 95735 - RNA, 23 nt, Artificial Sequence
  Synthetic
  misc_feature (4)..(4): n is a, c, g, or u
cucngcucuguaucgggaggccu

SEQ ID NO: 95736 - RNA, 24 nt, Artificial Sequence
  Synthetic
  misc_feature (5)..(5): n is a, c, g, or u
ccucngcucuguaucgggaggccu

SEQ ID NO: 95737 - RNA, 21 nt, Artificial Sequence
  Synthetic
auuaccaauuuucuuuugucu

SEQ ID NO: 95738 - RNA, 22 nt, Artificial Sequence
  Synthetic
uauuaccaauuuucuuuugucu

SEQ ID NO: 95739 - RNA, 23 nt, Artificial Sequence
  Synthetic
cuauuaccaauuuucuuuugucu

SEQ ID NO: 95740 - RNA, 24 nt, Artificial Sequence
  Synthetic
  misc_feature (1)..(1): n is a, c, g, or u
ncuauuaccaauuuucuuuugucu

SEQ ID NO: 95741 - RNA, 21 nt, Artificial Sequence
  Synthetic
augggauauguaauuggaagu

SEQ ID NO: 95742 - RNA, 22 nt, Artificial Sequence
  Synthetic
caugggauauguaauuggaagu

SEQ ID NO: 95743 - RNA, 23 nt, Artificial Sequence
  Synthetic
ucaugggauauguaauuggaagu

SEQ ID NO: 95744 - RNA, 24 nt, Artificial Sequence
  Synthetic
uucaugggauauguaauuggaagu

SEQ ID NO: 95745 - RNA, 22 nt, Artificial Sequence
  Synthetic
aguauuuggugucuuuuggagu

SEQ ID NO: 95746 - RNA, 24 nt, Artificial Sequence
  Synthetic
ugaguauuuggugucuuuuggagu

SEQ ID NO: 95747 - RNA, 21 nt, Artificial Sequence
  Synthetic
  misc_feature (3)..(3): n is a, c, g, or u
cunaggcaagcuauucugugu

SEQ ID NO: 95748 - RNA, 22 nt, Artificial Sequence
  Synthetic
  misc_feature (4)..(4): n is a, c, g, or u
acunaggcaagcuauucugugu

SEQ ID NO: 95749 - RNA, 23 nt, Artificial Sequence
  Synthetic
  misc_feature (5)..(5): n is a, c, g, or u
cacunaggcaagcuauucugugu

SEQ ID NO: 95750 - RNA, 21 nt, Artificial Sequence
  Synthetic
  misc_feature (15)..(15): n is a, c, g, or u
uggaaaguaugucanagaauu

SEQ ID NO: 95751 - RNA, 22 nt, Artificial Sequence
  Synthetic
  misc_feature (16)..(16): n is a, c, g, or u
uuggaaaguaugucanagaauu

SEQ ID NO: 95752 - RNA, 23 nt, Artificial Sequence
  Synthetic
  misc_feature (17)..(17): n is a, c, g, or u
auuggaaaguaugucanagaauu

SEQ ID NO: 95753 - RNA, 21 nt, Artificial Sequence
  Synthetic
  misc_feature (2)..(2): n is a, c, g, or u
  misc_feature (15)..(15): n is a, c, g, or u
cnccaccacacggcngucuuu

SEQ ID NO: 95754 - RNA, 22 nt, Artificial Sequence
  Synthetic
  misc_feature (3)..(3): n is a, c, g, or u
  misc_feature (16)..(16): n is a, c, g, or u
acnccaccacacggcngucuuu

SEQ ID NO: 95755 - RNA, 23 nt, Artificial Sequence
  Synthetic
  misc_feature (4)..(4): n is a, c, g, or u
  misc_feature (17)..(17): n is a, c, g, or u
cacnccaccacacggcngucuuu

SEQ ID NO: 95756 - RNA, 24 nt, Artificial Sequence
  Synthetic
  misc_feature (5)..(5): n is a, c, g, or u
  misc_feature (18)..(18): n is a, c, g, or u
ucacnccaccacacggcngucuuu

SEQ ID NO: 95757 - RNA, 21 nt, Artificial Sequence
  Synthetic
ucuugaguauuuggugucuuu

SEQ ID NO: 95758 - RNA, 22 nt, Artificial Sequence
  Synthetic
uucuugaguauuuggugucuuu

SEQ ID NO: 95759 - RNA, 24 nt, Artificial Sequence
  Synthetic
uguucuugaguauuuggugucuuu

SEQ ID NO: 95760 - RNA, 18 nt, Artificial Sequence
  Synthetic
cacgcagcgccucauuuu

SEQ ID NO: 95761 - RNA, 19 nt, Artificial Sequence
  Synthetic
acacgcagcgccucauuuu

SEQ ID NO: 95762 - RNA, 20 nt, Artificial Sequence
  Synthetic
uacacgcagcgccucauuuu

SEQ ID NO: 95763 - RNA, 21 nt, Artificial Sequence
  Synthetic
cuacacgcagcgccucauuuu

SEQ ID NO: 95764 - RNA, 22 nt, Artificial Sequence
  Synthetic
acuacacgcagcgccucauuuu

SEQ ID NO: 95765 - RNA, 23 nt, Artificial Sequence
  Synthetic
aacuacacgcagcgccucauuuu

SEQ ID NO: 95766 - RNA, 24 nt, Artificial Sequence
  Synthetic
aaacuacacgcagcgccucauuuu

SEQ ID NO: 95767 - RNA, 18 nt, Artificial Sequence
  Synthetic
aagucagaaggcaaaaaa

SEQ ID NO: 95768 - RNA, 19 nt, Artificial Sequence
  Synthetic
gaagucagaaggcaaaaaa

SEQ ID NO: 95769 - RNA, 20 nt, Artificial Sequence
  Synthetic
agaagucagaaggcaaaaaa

SEQ ID NO: 95770 - RNA, 18 nt, Artificial Sequence
  Synthetic
  misc_feature (2)..(2): n is a, c, g, or u
gngaggcaguagucggaa

SEQ ID NO: 95771 - RNA, 19 nt, Artificial Sequence
  Synthetic
  misc_feature (3)..(3): n is a, c, g, or u
ggngaggcaguagucggaa

SEQ ID NO: 95772 - RNA, 20 nt, Artificial Sequence
  Synthetic
  misc_feature (4)..(4): n is a, c, g, or u
gggngaggcaguagucggaa

SEQ ID NO: 95773 - RNA, 18 nt, Artificial Sequence
  Synthetic
  misc_feature (1)..(1): n is a, c, g, or u
  misc_feature (7)..(7): n is a, c, g, or u
  misc_feature (13)..(13): n is a, c, g, or u
  misc_feature (15)..(16): n is a, c, g, or u
nauaaunuccucnunnaa

SEQ ID NO: 95774 - RNA, 19 nt, Artificial Sequence
  Synthetic
  misc_feature (2)..(2): n is a, c, g, or u
  misc_feature (8)..(8): n is a, c, g, or u
  misc_feature (14)..(14): n is a, c, g, or u
  misc_feature (16)..(17): n is a, c, g, or u
unauaaunuccucnunnaa

SEQ ID NO: 95775 - RNA, 20 nt, Artificial Sequence
  Synthetic
  misc_feature (3)..(3): n is a, c, g, or u
  misc_feature (9)..(9): n is a, c, g, or u
  misc_feature (15)..(15): n is a, c, g, or u
  misc_feature (17)..(18): n is a, c, g, or u
uunauaaunuccucnunnaa

SEQ ID NO: 95776 - RNA, 21 nt, Artificial Sequence
  Synthetic
  misc_feature (4)..(4): n is a, c, g, or u
  misc_feature (10)..(10): n is a, c, g, or u
  misc_feature (16)..(16): n is a, c, g, or u
  misc_feature (18)..(19): n is a, c, g, or u
auunauaaunuccucnunnaa

SEQ ID NO: 95777 - RNA, 22 nt, Artificial Sequence
  Synthetic
  misc_feature (5)..(5): n is a, c, g, or u
  misc_feature (11)..(11): n is a, c, g, or u
  misc_feature (17)..(17): n is a, c, g, or u
  misc_feature (19)..(20): n is a, c, g, or u
uauunauaaunuccucnunnaa

SEQ ID NO: 95778 - RNA, 23 nt, Artificial Sequence
  Synthetic
  misc_feature (6)..(6): n is a, c, g, or u
  misc_feature (12)..(12): n is a, c, g, or u
  misc_feature (18)..(18): n is a, c, g, or u
  misc_feature (20)..(21): n is a, c, g, or u
cuauunauaaunuccucnunnaa

SEQ ID NO: 95779 - RNA, 24 nt, Artificial Sequence
  Synthetic
  misc_feature (7)..(7): n is a, c, g, or u
  misc_feature (13)..(13): n is a, c, g, or u
  misc_feature (19)..(19): n is a, c, g, or u
  misc_feature (21)..(22): n is a, c, g, or u
ucuauunauaaunuccucnunnaa

SEQ ID NO: 95780 - RNA, 18 nt, Artificial Sequence
  Synthetic
  misc_feature (14)..(14): n is a, c, g, or u
cauaucccaugaanuuaa

SEQ ID NO: 95781 - RNA, 19 nt, Artificial Sequence
  Synthetic
  misc_feature (15)..(15): n is a, c, g, or u
acauaucccaugaanuuaa

SEQ ID NO: 95782 - RNA, 20 nt, Artificial Sequence
  Synthetic
  misc_feature (16)..(16): n is a, c, g, or u
uacauaucccaugaanuuaa

SEQ ID NO: 95783 - RNA, 18 nt, Artificial Sequence
  Synthetic
caucaacucaccccaaca

SEQ ID NO: 95784 - RNA, 19 nt, Artificial Sequence
  Synthetic
ucaucaacucaccccaaca

SEQ ID NO: 95785 - RNA, 20 nt, Artificial Sequence
  Synthetic
uucaucaacucaccccaaca

SEQ ID NO: 95786 - RNA, 18 nt, Artificial Sequence
  Synthetic
ucccaccuuaugagucca

SEQ ID NO: 95787 - RNA, 19 nt, Artificial Sequence
  Synthetic
uucccaccuuaugagucca

SEQ ID NO: 95788 - RNA, 20 nt, Artificial Sequence
  Synthetic
uuucccaccuuaugagucca

SEQ ID NO: 95789 - RNA, 18 nt, Artificial Sequence
  Synthetic
  misc_feature (3)..(3): n is a, c, g, or u
  misc_feature (7)..(7): n is a, c, g, or u
uanaaunccagccuucca

SEQ ID NO: 95790 - RNA, 19 nt, Artificial Sequence
  Synthetic
  misc_feature (4)..(4): n is a, c, g, or u
  misc_feature (8)..(8): n is a, c, g, or u
auanaaunccagccuucca

SEQ ID NO: 95791 - RNA, 20 nt, Artificial Sequence
  Synthetic
  misc_feature (5)..(5): n is a, c, g, or u
  misc_feature (9)..(9): n is a, c, g, or u
uauanaaunccagccuucca

SEQ ID NO: 95792 - RNA, 18 nt, Artificial Sequence
  Synthetic
  misc_feature (9)..(9): n is a, c, g, or u
  misc_feature (16)..(16): n is a, c, g, or u
augaaugunaggaaanga

SEQ ID NO: 95793 - RNA, 19 nt, Artificial Sequence
  Synthetic
  misc_feature (10)..(10): n is a, c, g, or u
  misc_feature (17)..(17): n is a, c, g, or u
aaugaaugunaggaaanga

SEQ ID NO: 95794 - RNA, 20 nt, Artificial Sequence
  Synthetic
  misc_feature (11)..(11): n is a, c, g, or u
  misc_feature (18)..(18): n is a, c, g, or u
aaaugaaugunaggaaanga

SEQ ID NO: 95795 - RNA, 21 nt, Artificial Sequence
  Synthetic
  misc_feature (1)..(1): n is a, c, g, or u
  misc_feature (12)..(12): n is a, c, g, or u
  misc_feature (19)..(19): n is a, c, g, or u
naaaugaaugunaggaaanga

SEQ ID NO: 95796 - RNA, 22 nt, Artificial Sequence
  Synthetic
  misc_feature (1)..(2): n is a, c, g, or u
  misc_feature (13)..(13): n is a, c, g, or u
  misc_feature (20)..(20): n is a, c, g, or u
nnaaaugaaugunaggaaanga

SEQ ID NO: 95797 - RNA, 23 nt, Artificial Sequence
  Synthetic
  misc_feature (2)..(3): n is a, c, g, or u
  misc_feature (14)..(14): n is a, c, g, or u
  misc_feature (21)..(21): n is a, c, g, or u
unnaaaugaaugunaggaaanga

SEQ ID NO: 95798 - RNA, 24 nt, Artificial Sequence
  Synthetic
  misc_feature (1)..(1): n is a, c, g, or u
  misc_feature (3)..(4): n is a, c, g, or u
  misc_feature (15)..(15): n is a, c, g, or u
  misc_feature (22)..(22): n is a, c, g, or u
nunnaaaugaaugunaggaaanga

SEQ ID NO: 95799 - RNA, 18 nt, Artificial Sequence
  Synthetic
  misc_feature (1)..(1): n is a, c, g, or u
naauuuuggccaggacac

SEQ ID NO: 95800 - RNA, 19 nt, Artificial Sequence
  Synthetic
  misc_feature (2)..(2): n is a, c, g, or u
cnaauuuuggccaggacac

SEQ ID NO: 95801 - RNA, 20 nt, Artificial Sequence
  Synthetic
  misc_feature (3)..(3): n is a, c, g, or u
gcnaauuuuggccaggacac

SEQ ID NO: 95802 - RNA, 18 nt, Artificial Sequence
  Synthetic
aauugagagaaguccacc

SEQ ID NO: 95803 - RNA, 19 nt, Artificial Sequence
  Synthetic
aaauugagagaaguccacc

SEQ ID NO: 95804 - RNA, 20 nt, Artificial Sequence
  Synthetic
aaaauugagagaaguccacc

SEQ ID NO: 95805 - RNA, 18 nt, Artificial Sequence
  Synthetic
gcuguagcucuuguuccc

SEQ ID NO: 95806 - RNA, 19 nt, Artificial Sequence
  Synthetic
ugcuguagcucuuguuccc

SEQ ID NO: 95807 - RNA, 20 nt, Artificial Sequence
  Synthetic
augcuguagcucuuguuccc

SEQ ID NO: 95808 - RNA, 18 nt, Artificial Sequence
  Synthetic
  misc_feature (12)..(12): n is a, c, g, or u
ugacauugcugngagucc

SEQ ID NO: 95809 - RNA, 19 nt, Artificial Sequence
  Synthetic
  misc_feature (13)..(13): n is a, c, g, or u
uugacauugcugngagucc

SEQ ID NO: 95810 - RNA, 20 nt, Artificial Sequence
  Synthetic
  misc_feature (14)..(14): n is a, c, g, or u
guugacauugcugngagucc

SEQ ID NO: 95811 - RNA, 18 nt, Artificial Sequence
  Synthetic
  misc_feature (6)..(6): n is a, c, g, or u
uagcunacuacuaauucc

SEQ ID NO: 95812 - RNA, 19 nt, Artificial Sequence
  Synthetic
  misc_feature (7)..(7): n is a, c, g, or u
auagcunacuacuaauucc

SEQ ID NO: 95813 - RNA, 20 nt, Artificial Sequence
  Synthetic
  misc_feature (8)..(8): n is a, c, g, or u
cauagcunacuacuaauucc

SEQ ID NO: 95814 - RNA, 18 nt, Artificial Sequence
  Synthetic
  misc_feature (6)..(6): n is a, c, g, or u
gguggngugaacccuggc

SEQ ID NO: 95815 - RNA, 19 nt, Artificial Sequence
  Synthetic
  misc_feature (7)..(7): n is a, c, g, or u
ugguggngugaacccuggc

SEQ ID NO: 95816 - RNA, 20 nt, Artificial Sequence
  Synthetic
  misc_feature (8)..(8): n is a, c, g, or u
gugguggngugaacccuggc

SEQ ID NO: 95817 - RNA, 18 nt, Artificial Sequence
  Synthetic
gaagaugaggcauagcag

SEQ ID NO: 95818 - RNA, 19 nt, Artificial Sequence
  Synthetic
agaagaugaggcauagcag

SEQ ID NO: 95819 - RNA, 20 nt, Artificial Sequence
  Synthetic
aagaagaugaggcauagcag

SEQ ID NO: 95820 - RNA, 18 nt, Artificial Sequence
  Synthetic
  misc_feature (2)..(2): n is a, c, g, or u
gncccaaacggccccgag

SEQ ID NO: 95821 - RNA, 19 nt, Artificial Sequence
  Synthetic
  misc_feature (3)..(3): n is a, c, g, or u
agncccaaacggccccgag

SEQ ID NO: 95822 - RNA, 20 nt, Artificial Sequence
  Synthetic
  misc_feature (4)..(4): n is a, c, g, or u
gagncccaaacggccccgag

SEQ ID NO: 95823 - RNA, 18 nt, Artificial Sequence
  Synthetic
uaaagacagguacaguag

SEQ ID NO: 95824 - RNA, 19 nt, Artificial Sequence
  Synthetic
uuaaagacagguacaguag

SEQ ID NO: 95825 - RNA, 20 nt, Artificial Sequence
  Synthetic
auuaaagacagguacaguag

SEQ ID NO: 95826 - RNA, 18 nt, Artificial Sequence
  Synthetic
  misc_feature (3)..(3): n is a, c, g, or u
ggnucuagcagagcuugg

SEQ ID NO: 95827 - RNA, 19 nt, Artificial Sequence
  Synthetic
  misc_feature (4)..(4): n is a, c, g, or u
gggnucuagcagagcuugg

SEQ ID NO: 95828 - RNA, 20 nt, Artificial Sequence
  Synthetic
  misc_feature (5)..(5): n is a, c, g, or u
ugggnucuagcagagcuugg

SEQ ID NO: 95829 - RNA, 18 nt, Artificial Sequence
  Synthetic
  misc_feature (5)..(5): n is a, c, g, or u
  misc_feature (17)..(17): n is a, c, g, or u
uuganuuggcuccgaang

SEQ ID NO: 95830 - RNA, 19 nt, Artificial Sequence
  Synthetic
  misc_feature (6)..(6): n is a, c, g, or u
  misc_feature (18)..(18): n is a, c, g, or u
uuuganuuggcuccgaang

SEQ ID NO: 95831 - RNA, 20 nt, Artificial Sequence
  Synthetic
  misc_feature (7)..(7): n is a, c, g, or u
  misc_feature (19)..(19): n is a, c, g, or u
guuuganuuggcuccgaang

SEQ ID NO: 95832 - RNA, 18 nt, Artificial Sequence
  Synthetic
  misc_feature (3)..(3): n is a, c, g, or u
  misc_feature (11)..(11): n is a, c, g, or u
ugnucuccaunuucggug

SEQ ID NO: 95833 - RNA, 19 nt, Artificial Sequence
  Synthetic
  misc_feature (4)..(4): n is a, c, g, or u
  misc_feature (12)..(12): n is a, c, g, or u
gugnucuccaunuucggug

SEQ ID NO: 95834 - RNA, 20 nt, Artificial Sequence
  Synthetic
  misc_feature (1)..(1): n is a, c, g, or u
  misc_feature (5)..(5): n is a, c, g, or u
  misc_feature (13)..(13): n is a, c, g, or u
ngugnucuccaunuucggug

SEQ ID NO: 95835 - RNA, 18 nt, Artificial Sequence
  Synthetic
uuggaggacaagagguug

SEQ ID NO: 95836 - RNA, 19 nt, Artificial Sequence
  Synthetic
  misc_feature (1)..(1): n is a, c, g, or u
nuuggaggacaagagguug

SEQ ID NO: 95837 - RNA, 20 nt, Artificial Sequence
  Synthetic
  misc_feature (2)..(2): n is a, c, g, or u
anuuggaggacaagagguug

SEQ ID NO: 95838 - RNA, 18 nt, Artificial Sequence
  Synthetic
  misc_feature (16)..(16): n is a, c, g, or u
  misc_feature (18)..(18): n is a, c, g, or u
ugguggucuguaagcngn

SEQ ID NO: 95839 - RNA, 19 nt, Artificial Sequence
  Synthetic
  misc_feature (17)..(17): n is a, c, g, or u
  misc_feature (19)..(19): n is a, c, g, or u
uugguggucuguaagcngn

SEQ ID NO: 95840 - RNA, 20 nt, Artificial Sequence
  Synthetic
  misc_feature (18)..(18): n is a, c, g, or u
  misc_feature (20)..(20): n is a, c, g, or u
uuugguggucuguaagcngn

SEQ ID NO: 95841 - RNA, 18 nt, Artificial Sequence
  Synthetic
ucuuagagguggagagau

SEQ ID NO: 95842 - RNA, 19 nt, Artificial Sequence
  Synthetic
cucuuagagguggagagau

SEQ ID NO: 95843 - RNA, 20 nt, Artificial Sequence
  Synthetic
ucucuuagagguggagagau

SEQ ID NO: 95844 - RNA, 18 nt, Artificial Sequence
  Synthetic
  misc_feature (7)..(7): n is a, c, g, or u
agcccangaugaugggau

SEQ ID NO: 95845 - RNA, 19 nt, Artificial Sequence
  Synthetic
  misc_feature (8)..(8): n is a, c, g, or u
aagcccangaugaugggau

SEQ ID NO: 95846 - RNA, 20 nt, Artificial Sequence
  Synthetic
  misc_feature (9)..(9): n is a, c, g, or u
aaagcccangaugaugggau

SEQ ID NO: 95847 - RNA, 18 nt, Artificial Sequence
  Synthetic
aagcuccaaauucuuuau

SEQ ID NO: 95848 - RNA, 19 nt, Artificial Sequence
  Synthetic
gaagcuccaaauucuuuau

SEQ ID NO: 95849 - RNA, 20 nt, Artificial Sequence
  Synthetic
agaagcuccaaauucuuuau

SEQ ID NO: 95850 - RNA, 18 nt, Artificial Sequence
  Synthetic
ucuuccacugcauggccu

SEQ ID NO: 95851 - RNA, 19 nt, Artificial Sequence
  Synthetic
gucuuccacugcauggccu

SEQ ID NO: 95852 - RNA, 20 nt, Artificial Sequence
  Synthetic
ugucuuccacugcauggccu

SEQ ID NO: 95853 - RNA, 18 nt, Artificial Sequence
  Synthetic
  misc_feature (1)..(1): n is a, c, g, or u
  misc_feature (13)..(13): n is a, c, g, or u
ngccaagccccanccagu

SEQ ID NO: 95854 - RNA, 19 nt, Artificial Sequence
  Synthetic
  misc_feature (2)..(2): n is a, c, g, or u
  misc_feature (14)..(14): n is a, c, g, or u
ungccaagccccanccagu

SEQ ID NO: 95855 - RNA, 20 nt, Artificial Sequence
  Synthetic
  misc_feature (3)..(3): n is a, c, g, or u
  misc_feature (15)..(15): n is a, c, g, or u
aungccaagccccanccagu

SEQ ID NO: 95856 - RNA, 18 nt, Artificial Sequence
  Synthetic
  misc_feature (10)..(10): n is a, c, g, or u
  misc_feature (12)..(12): n is a, c, g, or u
ucuguaagcngnaggagu

SEQ ID NO: 95857 - RNA, 19 nt, Artificial Sequence
  Synthetic
  misc_feature (11)..(11): n is a, c, g, or u
  misc_feature (13)..(13): n is a, c, g, or u
gucuguaagcngnaggagu

SEQ ID NO: 95858 - RNA, 20 nt, Artificial Sequence
  Synthetic
  misc_feature (12)..(12): n is a, c, g, or u
  misc_feature (14)..(14): n is a, c, g, or u
ggucuguaagcngnaggagu

SEQ ID NO: 95859 - RNA, 18 nt, Artificial Sequence
  Synthetic
uagacucugugguauugu

SEQ ID NO: 95860 - RNA, 19 nt, Artificial Sequence
  Synthetic
cuagacucugugguauugu

SEQ ID NO: 95861 - RNA, 20 nt, Artificial Sequence
  Synthetic
ucuagacucugugguauugu

SEQ ID NO: 95862 - RNA, 18 nt, Artificial Sequence
  Synthetic
  misc_feature (8)..(8): n is a, c, g, or u
cuggccanugauccuugu

SEQ ID NO: 95863 - RNA, 19 nt, Artificial Sequence
  Synthetic
  misc_feature (1)..(1): n is a, c, g, or u
  misc_feature (9)..(9): n is a, c, g, or u
ncuggccanugauccuugu

SEQ ID NO: 95864 - RNA, 20 nt, Artificial Sequence
  Synthetic
  misc_feature (2)..(2): n is a, c, g, or u
  misc_feature (10)..(10): n is a, c, g, or u
cncuggccanugauccuugu

SEQ ID NO: 95865 - RNA, 18 nt, Artificial Sequence
  Synthetic
  misc_feature (2)..(2): n is a, c, g, or u
  misc_feature (17)..(17): n is a, c, g, or u
angagggaguuugccanu

SEQ ID NO: 95866 - RNA, 19 nt, Artificial Sequence
  Synthetic
  misc_feature (3)..(3): n is a, c, g, or u
  misc_feature (18)..(18): n is a, c, g, or u
aangagggaguuugccanu

SEQ ID NO: 95867 - RNA, 20 nt, Artificial Sequence
  Synthetic
  misc_feature (4)..(4): n is a, c, g, or u
  misc_feature (19)..(19): n is a, c, g, or u
aaangagggaguuugccanu

SEQ ID NO: 95868 - RNA, 21 nt, Artificial Sequence
  Synthetic
  misc_feature (5)..(5): n is a, c, g, or u
  misc_feature (20)..(20): n is a, c, g, or u
gaaangagggaguuugccanu

SEQ ID NO: 95869 - RNA, 22 nt, Artificial Sequence
  Synthetic
  misc_feature (6)..(6): n is a, c, g, or u
  misc_feature (21)..(21): n is a, c, g, or u
ggaaangagggaguuugccanu

SEQ ID NO: 95870 - RNA, 23 nt, Artificial Sequence
  Synthetic
  misc_feature (7)..(7): n is a, c, g, or u
  misc_feature (22)..(22): n is a, c, g, or u
aggaaangagggaguuugccanu

SEQ ID NO: 95871 - RNA, 24 nt, Artificial Sequence
  Synthetic
  misc_feature (1)..(1): n is a, c, g, or u
  misc_feature (8)..(8): n is a, c, g, or u
  misc_feature (23)..(23): n is a, c, g, or u
naggaaangagggaguuugccanu

SEQ ID NO: 95872 - RNA, 18 nt, Artificial Sequence
  Synthetic
aguaaaguuucccaccuu

SEQ ID NO: 95873 - RNA, 19 nt, Artificial Sequence
  Synthetic
caguaaaguuucccaccuu

SEQ ID NO: 95874 - RNA, 20 nt, Artificial Sequence
  Synthetic
ccaguaaaguuucccaccuu

SEQ ID NO: 95875 - RNA, 18 nt, Artificial Sequence
  Synthetic
  misc_feature (13)..(13): n is a, c, g, or u
aaugauuaacugnauguu

SEQ ID NO: 95876 - RNA, 19 nt, Artificial Sequence
  Synthetic
  misc_feature (14)..(14): n is a, c, g, or u
uaaugauuaacugnauguu

SEQ ID NO: 95877 - RNA, 20 nt, Artificial Sequence
  Synthetic
  misc_feature (15)..(15): n is a, c, g, or u
guaaugauuaacugnauguu

SEQ ID NO: 95878 - RNA, 18 nt, Artificial Sequence
  Synthetic
  misc_feature (4)..(4): n is a, c, g, or u
  misc_feature (7)..(7): n is a, c, g, or u
gcunggnugugcugccaa

SEQ ID NO: 95879 - RNA, 19 nt, Artificial Sequence
  Synthetic
  misc_feature (5)..(5): n is a, c, g, or u
  misc_feature (8)..(8): n is a, c, g, or u
ugcunggnugugcugccaa

SEQ ID NO: 95880 - RNA, 20 nt, Artificial Sequence
  Synthetic
  misc_feature (6)..(6): n is a, c, g, or u
  misc_feature (9)..(9): n is a, c, g, or u
cugcunggnugugcugccaa

SEQ ID NO: 95881 - RNA, 18 nt, Artificial Sequence
  Synthetic
  misc_feature (8)..(8): n is a, c, g, or u
uggaaganccagcaucca

SEQ ID NO: 95882 - RNA, 19 nt, Artificial Sequence
  Synthetic
  misc_feature (9)..(9): n is a, c, g, or u
uuggaaganccagcaucca

SEQ ID NO: 95883 - RNA, 20 nt, Artificial Sequence
  Synthetic
  misc_feature (10)..(10): n is a, c, g, or u
uuuggaaganccagcaucca

SEQ ID NO: 95884 - RNA, 18 nt, Artificial Sequence
  Synthetic
ugauuggaaaguauguca

SEQ ID NO: 95885 - RNA, 19 nt, Artificial Sequence
  Synthetic
uugauuggaaaguauguca

SEQ ID NO: 95886 - RNA, 20 nt, Artificial Sequence
  Synthetic
auugauuggaaaguauguca

SEQ ID NO: 95887 - RNA, 18 nt, Artificial Sequence
  Synthetic
  misc_feature (14)..(14): n is a, c, g, or u
gcuacucccuuaanuuca

SEQ ID NO: 95888 - RNA, 19 nt, Artificial Sequence
  Synthetic
  misc_feature (15)..(15): n is a, c, g, or u
ggcuacucccuuaanuuca

SEQ ID NO: 95889 - RNA, 20 nt, Artificial Sequence
  Synthetic
  misc_feature (16)..(16): n is a, c, g, or u
gggcuacucccuuaanuuca

SEQ ID NO: 95890 - RNA, 18 nt, Artificial Sequence
  Synthetic
  misc_feature (14)..(14): n is a, c, g, or u
uggacauugacccnuaua

SEQ ID NO: 95891 - RNA, 19 nt, Artificial Sequence
  Synthetic
  misc_feature (15)..(15): n is a, c, g, or u
auggacauugacccnuaua

SEQ ID NO: 95892 - RNA, 20 nt, Artificial Sequence
  Synthetic
  misc_feature (16)..(16): n is a, c, g, or u
cauggacauugacccnuaua

SEQ ID NO: 95893 - RNA, 18 nt, Artificial Sequence
  Synthetic
ugggacuucaaccccaac

SEQ ID NO: 95894 - RNA, 19 nt, Artificial Sequence
  Synthetic
uugggacuucaaccccaac

SEQ ID NO: 95895 - RNA, 20 nt, Artificial Sequence
  Synthetic
auugggacuucaaccccaac

SEQ ID NO: 95896 - RNA, 18 nt, Artificial Sequence
  Synthetic
  misc_feature (16)..(16): n is a, c, g, or u
ccaagcucugcuagancc

SEQ ID NO: 95897 - RNA, 19 nt, Artificial Sequence
  Synthetic
  misc_feature (17)..(17): n is a, c, g, or u
accaagcucugcuagancc

SEQ ID NO: 95898 - RNA, 20 nt, Artificial Sequence
  Synthetic
  misc_feature (18)..(18): n is a, c, g, or u
caccaagcucugcuagancc

SEQ ID NO: 95899 - RNA, 18 nt, Artificial Sequence
  Synthetic
  misc_feature (4)..(4): n is a, c, g, or u
  misc_feature (9)..(9): n is a, c, g, or u
gagngggancauucgggc

SEQ ID NO: 95900 - RNA, 19 nt, Artificial Sequence
  Synthetic
  misc_feature (5)..(5): n is a, c, g, or u
  misc_feature (10)..(10): n is a, c, g, or u
ggagngggancauucgggc

SEQ ID NO: 95901 - RNA, 20 nt, Artificial Sequence
  Synthetic
  misc_feature (6)..(6): n is a, c, g, or u
  misc_feature (11)..(11): n is a, c, g, or u
aggagngggancauucgggc

SEQ ID NO: 95902 - RNA, 18 nt, Artificial Sequence
  Synthetic
uuucuguucccaauccuc

SEQ ID NO: 95903 - RNA, 19 nt, Artificial Sequence
  Synthetic
cuuucuguucccaauccuc

SEQ ID NO: 95904 - RNA, 20 nt, Artificial Sequence
  Synthetic
ucuuucuguucccaauccuc

SEQ ID NO: 95905 - RNA, 18 nt, Artificial Sequence
  Synthetic
uuggaagagaaacuguuc

SEQ ID NO: 95906 - RNA, 19 nt, Artificial Sequence
  Synthetic
uuuggaagagaaacuguuc

SEQ ID NO: 95907 - RNA, 20 nt, Artificial Sequence
  Synthetic
uuuuggaagagaaacuguuc

SEQ ID NO: 95908 - RNA, 18 nt, Artificial Sequence
  Synthetic
  misc_feature (3)..(3): n is a, c, g, or u
  misc_feature (13)..(13): n is a, c, g, or u
aanuuguccuggnuaucg

SEQ ID NO: 95909 - RNA, 19 nt, Artificial Sequence
  Synthetic
  misc_feature (4)..(4): n is a, c, g, or u
  misc_feature (14)..(14): n is a, c, g, or u
caanuuguccuggnuaucg

SEQ ID NO: 95910 - RNA, 20 nt, Artificial Sequence
  Synthetic
  misc_feature (5)..(5): n is a, c, g, or u
  misc_feature (15)..(15): n is a, c, g, or u
ccaanuuguccuggnuaucg

SEQ ID NO: 95911 - RNA, 18 nt, Artificial Sequence
  Synthetic
  misc_feature (3)..(3): n is a, c, g, or u
  misc_feature (5)..(5): n is a, c, g, or u
  misc_feature (11)..(11): n is a, c, g, or u
gununuuuaangacuggg

SEQ ID NO: 95912 - RNA, 19 nt, Artificial Sequence
  Synthetic
  misc_feature (4)..(4): n is a, c, g, or u
  misc_feature (6)..(6): n is a, c, g, or u
  misc_feature (12)..(12): n is a, c, g, or u
ugununuuuaangacuggg

SEQ ID NO: 95913 - RNA, 20 nt, Artificial Sequence
  Synthetic
  misc_feature (5)..(5): n is a, c, g, or u
  misc_feature (7)..(7): n is a, c, g, or u
  misc_feature (13)..(13): n is a, c, g, or u
cugununuuuaangacuggg

SEQ ID NO: 95914 - RNA, 21 nt, Artificial Sequence
  Synthetic
  misc_feature (6)..(6): n is a, c, g, or u
  misc_feature (8)..(8): n is a, c, g, or u
  misc_feature (14)..(14): n is a, c, g, or u
acugununuuuaangacuggg

SEQ ID NO: 95915 - RNA, 22 nt, Artificial Sequence
  Synthetic
  misc_feature (7)..(7): n is a, c, g, or u
  misc_feature (9)..(9): n is a, c, g, or u
  misc_feature (15)..(15): n is a, c, g, or u
gacugununuuuaangacuggg

SEQ ID NO: 95916 - RNA, 23 nt, Artificial Sequence
  Synthetic
  misc_feature (8)..(8): n is a, c, g, or u
  misc_feature (10)..(10): n is a, c, g, or u
  misc_feature (16)..(16): n is a, c, g, or u
agacugununuuuaangacuggg

SEQ ID NO: 95917 - RNA, 24 nt, Artificial Sequence
  Synthetic
  misc_feature (9)..(9): n is a, c, g, or u
  misc_feature (11)..(11): n is a, c, g, or u
  misc_feature (17)..(17): n is a, c, g, or u
aagacugununuuuaangacuggg

SEQ ID NO: 95918 - RNA, 18 nt, Artificial Sequence
  Synthetic
cuguguuggggugaguug

SEQ ID NO: 95919 - RNA, 19 nt, Artificial Sequence
  Synthetic
ucuguguuggggugaguug

SEQ ID NO: 95920 - RNA, 20 nt, Artificial Sequence
  Synthetic
uucuguguuggggugaguug

SEQ ID NO: 95921 - RNA, 18 nt, Artificial Sequence
  Synthetic
  misc_feature (2)..(2): n is a, c, g, or u
  misc_feature (10)..(10): n is a, c, g, or u
  misc_feature (14)..(14): n is a, c, g, or u
anauggagancacnacau

SEQ ID NO: 95922 - RNA, 19 nt, Artificial Sequence
  Synthetic
  misc_feature (3)..(3): n is a, c, g, or u
  misc_feature (11)..(11): n is a, c, g, or u
  misc_feature (15)..(15): n is a, c, g, or u
aanauggagancacnacau

SEQ ID NO: 95923 - RNA, 20 nt, Artificial Sequence
  Synthetic
  misc_feature (4)..(4): n is a, c, g, or u
  misc_feature (12)..(12): n is a, c, g, or u
  misc_feature (16)..(16): n is a, c, g, or u
gaanauggagancacnacau

SEQ ID NO: 95924 - RNA, 18 nt, Artificial Sequence
  Synthetic
uguuuggcuuucaguuau

SEQ ID NO: 95925 - RNA, 19 nt, Artificial Sequence
  Synthetic
cuguuuggcuuucaguuau

SEQ ID NO: 95926 - RNA, 20 nt, Artificial Sequence
  Synthetic
acuguuuggcuuucaguuau

SEQ ID NO: 95927 - RNA, 18 nt, Artificial Sequence
  Synthetic
accaauuuucuuuugucu

SEQ ID NO: 95928 - RNA, 19 nt, Artificial Sequence
  Synthetic
uaccaauuuucuuuugucu

SEQ ID NO: 95929 - RNA, 20 nt, Artificial Sequence
  Synthetic
uuaccaauuuucuuuugucu

SEQ ID NO: 95930 - RNA, 18 nt, Artificial Sequence
  Synthetic
ggauauguaauuggaagu

SEQ ID NO: 95931 - RNA, 19 nt, Artificial Sequence
  Synthetic
gggauauguaauuggaagu

SEQ ID NO: 95932 - RNA, 20 nt, Artificial Sequence
  Synthetic
ugggauauguaauuggaagu

SEQ ID NO: 95933 - RNA, 18 nt, Artificial Sequence
  Synthetic
uuuggugucuuuuggagu

SEQ ID NO: 95934 - RNA, 19 nt, Artificial Sequence
  Synthetic
auuuggugucuuuuggagu

SEQ ID NO: 95935 - RNA, 20 nt, Artificial Sequence
  Synthetic
uauuuggugucuuuuggagu

SEQ ID NO: 95936 - RNA, 18 nt, Artificial Sequence
  Synthetic
aggcaagcuauucugugu

SEQ ID NO: 95937 - RNA, 19 nt, Artificial Sequence
  Synthetic
  misc_feature (1)..(1): n is a, c, g, or u
naggcaagcuauucugugu

SEQ ID NO: 95938 - RNA, 20 nt, Artificial Sequence
  Synthetic
  misc_feature (2)..(2): n is a, c, g, or u
unaggcaagcuauucugugu

SEQ ID NO: 95939 - RNA, 18 nt, Artificial Sequence
  Synthetic
  misc_feature (12)..(12): n is a, c, g, or u
aaaguaugucanagaauu

SEQ ID NO: 95940 - RNA, 19 nt, Artificial Sequence
  Synthetic
  misc_feature (13)..(13): n is a, c, g, or u
gaaaguaugucanagaauu

SEQ ID NO: 95941 - RNA, 20 nt, Artificial Sequence
  Synthetic
  misc_feature (14)..(14): n is a, c, g, or u
ggaaaguaugucanagaauu

SEQ ID NO: 95942 - RNA, 18 nt, Artificial Sequence
  Synthetic
  misc_feature (12)..(12): n is a, c, g, or u
caccacacggcngucuuu

SEQ ID NO: 95943 - RNA, 19 nt, Artificial Sequence
  Synthetic
  misc_feature (13)..(13): n is a, c, g, or u
ccaccacacggcngucuuu

SEQ ID NO: 95944 - RNA, 20 nt, Artificial Sequence
  Synthetic
  misc_feature (1)..(1): n is a, c, g, or u
  misc_feature (14)..(14): n is a, c, g, or u
nccaccacacggcngucuuu

SEQ ID NO: 95945 - RNA, 18 nt, Artificial Sequence
  Synthetic
ugaguauuuggugucuuu

SEQ ID NO: 95946 - RNA, 19 nt, Artificial Sequence
  Synthetic
uugaguauuuggugucuuu

SEQ ID NO: 95947 - RNA, 20 nt, Artificial Sequence
  Synthetic
cuugaguauuuggugucuuu

SEQ ID NO: 95948 - RNA, 18 nt, Artificial Sequence
  Synthetic
agaagucagaaggcaaaa

SEQ ID NO: 95949 - RNA, 19 nt, Artificial Sequence
  Synthetic
aagaagucagaaggcaaaa

SEQ ID NO: 95950 - RNA, 20 nt, Artificial Sequence
  Synthetic
aaagaagucagaaggcaaaa

SEQ ID NO: 95951 - RNA, 21 nt, Artificial Sequence
  Synthetic
gaaagaagucagaaggcaaaa

SEQ ID NO: 95952 - RNA, 22 nt, Artificial Sequence
  Synthetic
ggaaagaagucagaaggcaaaa

SEQ ID NO: 95953 - RNA, 23 nt, Artificial Sequence
  Synthetic
aggaaagaagucagaaggcaaaa

SEQ ID NO: 95954 - RNA, 24 nt, Artificial Sequence
  Synthetic
aaggaaagaagucagaaggcaaaa

SEQ ID NO: 95955 - RNA, 18 nt, Artificial Sequence
  Synthetic
ggugcucccccuagaaaa

SEQ ID NO: 95956 - RNA, 19 nt, Artificial Sequence
  Synthetic
gggugcucccccuagaaaa

SEQ ID NO: 95957 - RNA, 20 nt, Artificial Sequence
  Synthetic
ugggugcucccccuagaaaa

SEQ ID NO: 95958 - RNA, 21 nt, Artificial Sequence
  Synthetic
gugggugcucccccuagaaaa

SEQ ID NO: 95959 - RNA, 22 nt, Artificial Sequence
  Synthetic
cgugggugcucccccuagaaaa

SEQ ID NO: 95960 - RNA, 23 nt, Artificial Sequence
  Synthetic
acgugggugcucccccuagaaaa

SEQ ID NO: 95961 - RNA, 24 nt, Artificial Sequence
  Synthetic
cacgugggugcucccccuagaaaa

SEQ ID NO: 95962 - RNA, 18 nt, Artificial Sequence
  Synthetic
  misc_feature (11)..(11): n is a, c, g, or u
uugguaauagngguaaaa

SEQ ID NO: 95963 - RNA, 19 nt, Artificial Sequence
  Synthetic
  misc_feature (12)..(12): n is a, c, g, or u
auugguaauagngguaaaa

SEQ ID NO: 95964 - RNA, 20 nt, Artificial Sequence
  Synthetic
  misc_feature (13)..(13): n is a, c, g, or u
aauugguaauagngguaaaa

SEQ ID NO: 95965 - RNA, 21 nt, Artificial Sequence
  Synthetic
  misc_feature (14)..(14): n is a, c, g, or u
aaauugguaauagngguaaaa

SEQ ID NO: 95966 - RNA, 22 nt, Artificial Sequence
  Synthetic
  misc_feature (15)..(15): n is a, c, g, or u
aaaauugguaauagngguaaaa

SEQ ID NO: 95967 - RNA, 23 nt, Artificial Sequence
  Synthetic
  misc_feature (16)..(16): n is a, c, g, or u
gaaaauugguaauagngguaaaa

SEQ ID NO: 95968 - RNA, 24 nt, Artificial Sequence
  Synthetic
  misc_feature (17)..(17): n is a, c, g, or u
agaaaauugguaauagngguaaaa

SEQ ID NO: 95969 - RNA, 18 nt, Artificial Sequence
  Synthetic
aauauggugacccacaaa

SEQ ID NO: 95970 - RNA, 19 nt, Artificial Sequence
  Synthetic
gaauauggugacccacaaa

SEQ ID NO: 95971 - RNA, 20 nt, Artificial Sequence
  Synthetic
agaauauggugacccacaaa

SEQ ID NO: 95972 - RNA, 21 nt, Artificial Sequence
  Synthetic
aagaauauggugacccacaaa

SEQ ID NO: 95973 - RNA, 22 nt, Artificial Sequence
  Synthetic
caagaauauggugacccacaaa

SEQ ID NO: 95974 - RNA, 23 nt, Artificial Sequence
  Synthetic
ccaagaauauggugacccacaaa

SEQ ID NO: 95975 - RNA, 24 nt, Artificial Sequence
  Synthetic
cccaagaauauggugacccacaaa

SEQ ID NO: 95976 - RNA, 18 nt, Artificial Sequence
  Synthetic
uuguaaguuggcgagaaa

SEQ ID NO: 95977 - RNA, 19 nt, Artificial Sequence
  Synthetic
cuuguaaguuggcgagaaa

SEQ ID NO: 95978 - RNA, 20 nt, Artificial Sequence
  Synthetic
ccuuguaaguuggcgagaaa

SEQ ID NO: 95979 - RNA, 21 nt, Artificial Sequence
  Synthetic
gccuuguaaguuggcgagaaa

SEQ ID NO: 95980 - RNA, 22 nt, Artificial Sequence
  Synthetic
ggccuuguaaguuggcgagaaa

SEQ ID NO: 95981 - RNA, 23 nt, Artificial Sequence
  Synthetic
aggccuuguaaguuggcgagaaa

SEQ ID NO: 95982 - RNA, 24 nt, Artificial Sequence
  Synthetic
aaggccuuguaaguuggcgagaaa

SEQ ID NO: 95983 - RNA, 18 nt, Artificial Sequence
  Synthetic
acaaauggcacuaguaaa

SEQ ID NO: 95984 - RNA, 19 nt, Artificial Sequence
  Synthetic
aacaaauggcacuaguaaa

SEQ ID NO: 95985 - RNA, 20 nt, Artificial Sequence
  Synthetic
gaacaaauggcacuaguaaa

SEQ ID NO: 95986 - RNA, 21 nt, Artificial Sequence
  Synthetic
ugaacaaauggcacuaguaaa

SEQ ID NO: 95987 - RNA, 22 nt, Artificial Sequence
  Synthetic
cugaacaaauggcacuaguaaa

SEQ ID NO: 95988 - RNA, 23 nt, Artificial Sequence
  Synthetic
acugaacaaauggcacuaguaaa

SEQ ID NO: 95989 - RNA, 24 nt, Artificial Sequence
  Synthetic
cacugaacaaauggcacuaguaaa

SEQ ID NO: 95990 - RNA, 18 nt, Artificial Sequence
  Synthetic
acggggagaccgcguaaa

SEQ ID NO: 95991 - RNA, 19 nt, Artificial Sequence
  Synthetic
gacggggagaccgcguaaa

SEQ ID NO: 95992 - RNA, 20 nt, Artificial Sequence
  Synthetic
agacggggagaccgcguaaa

SEQ ID NO: 95993 - RNA, 21 nt, Artificial Sequence
  Synthetic
cagacggggagaccgcguaaa

SEQ ID NO: 95994 - RNA, 22 nt, Artificial Sequence
  Synthetic
acagacggggagaccgcguaaa

SEQ ID NO: 95995 - RNA, 23 nt, Artificial Sequence
  Synthetic
cacagacggggagaccgcguaaa

SEQ ID NO: 95996 - RNA, 24 nt, Artificial Sequence
  Synthetic
gcacagacggggagaccgcguaaa

SEQ ID NO: 95997 - RNA, 18 nt, Artificial Sequence
  Synthetic
  misc_feature (12)..(12): n is a, c, g, or u
auugguaauagngguaaa

SEQ ID NO: 95998 - RNA, 19 nt, Artificial Sequence
  Synthetic
  misc_feature (13)..(13): n is a, c, g, or u
aauugguaauagngguaaa

SEQ ID NO: 95999 - RNA, 20 nt, Artificial Sequence
  Synthetic
  misc_feature (14)..(14): n is a, c, g, or u
aaauugguaauagngguaaa

SEQ ID NO: 96000 - RNA, 21 nt, Artificial Sequence
  Synthetic
  misc_feature (15)..(15): n is a, c, g, or u
aaaauugguaauagngguaaa

SEQ ID NO: 96001 - RNA, 22 nt, Artificial Sequence
  Synthetic
  misc_feature (16)..(16): n is a, c, g, or u
gaaaauugguaauagngguaaa

SEQ ID NO: 96002 - RNA, 23 nt, Artificial Sequence
  Synthetic
  misc_feature (17)..(17): n is a, c, g, or u
agaaaauugguaauagngguaaa

SEQ ID NO: 96003 - RNA, 24 nt, Artificial Sequence
  Synthetic
  misc_feature (18)..(18): n is a, c, g, or u
aagaaaauugguaauagngguaaa

SEQ ID NO: 96004 - RNA, 18 nt, Artificial Sequence
  Synthetic
  misc_feature (1)..(1): n is a, c, g, or u
  misc_feature (4)..(4): n is a, c, g, or u
nuanccacauuguguaaa

SEQ ID NO: 96005 - RNA, 19 nt, Artificial Sequence
  Synthetic
  misc_feature (2)..(2): n is a, c, g, or u
  misc_feature (5)..(5): n is a, c, g, or u
gnuanccacauuguguaaa

SEQ ID NO: 96006 - RNA, 20 nt, Artificial Sequence
  Synthetic
  misc_feature (3)..(3): n is a, c, g, or u
  misc_feature (6)..(6): n is a, c, g, or u
ggnuanccacauuguguaaa

SEQ ID NO: 96007 - RNA, 21 nt, Artificial Sequence
  Synthetic
  misc_feature (1)..(1): n is a, c, g, or u
  misc_feature (4)..(4): n is a, c, g, or u
  misc_feature (7)..(7): n is a, c, g, or u
nggnuanccacauuguguaaa

SEQ ID NO: 96008 - RNA, 22 nt, Artificial Sequence
  Synthetic
  misc_feature (2)..(2): n is a, c, g, or u
  misc_feature (5)..(5): n is a, c, g, or u
  misc_feature (8)..(8): n is a, c, g, or u
cnggnuanccacauuguguaaa

SEQ ID NO: 96009 - RNA, 23 nt, Artificial Sequence
  Synthetic
  misc_feature (3)..(3): n is a, c, g, or u
  misc_feature (6)..(6): n is a, c, g, or u
  misc_feature (9)..(9): n is a, c, g, or u
gcnggnuanccacauuguguaaa

SEQ ID NO: 96010 - RNA, 24 nt, Artificial Sequence
  Synthetic
  misc_feature (1)..(1): n is a, c, g, or u
  misc_feature (4)..(4): n is a, c, g, or u
  misc_feature (7)..(7): n is a, c, g, or u
  misc_feature (10)..(10): n is a, c, g, or u
ngcnggnuanccacauuguguaaa

SEQ ID NO: 96011 - RNA, 18 nt, Artificial Sequence
  Synthetic
gguuuuguacagcaacaa

SEQ ID NO: 96012 - RNA, 19 nt, Artificial Sequence
  Synthetic
agguuuuguacagcaacaa

SEQ ID NO: 96013 - RNA, 20 nt, Artificial Sequence
  Synthetic
aagguuuuguacagcaacaa

SEQ ID NO: 96014 - RNA, 21 nt, Artificial Sequence
  Synthetic
gaagguuuuguacagcaacaa

SEQ ID NO: 96015 - RNA, 22 nt, Artificial Sequence
  Synthetic
cgaagguuuuguacagcaacaa

SEQ ID NO: 96016 - RNA, 23 nt, Artificial Sequence
  Synthetic
ccgaagguuuuguacagcaacaa

SEQ ID NO: 96017 - RNA, 24 nt, Artificial Sequence
  Synthetic
uccgaagguuuuguacagcaacaa

SEQ ID NO: 96018 - RNA, 18 nt, Artificial Sequence
  Synthetic
auguauacccaaagacaa

SEQ ID NO: 96019 - RNA, 19 nt, Artificial Sequence
  Synthetic
aauguauacccaaagacaa

SEQ ID NO: 96020 - RNA, 20 nt, Artificial Sequence
  Synthetic
aaauguauacccaaagacaa

SEQ ID NO: 96021 - RNA, 21 nt, Artificial Sequence
  Synthetic
  misc_feature (1)..(1): n is a, c, g, or u
naaauguauacccaaagacaa

SEQ ID NO: 96022 - RNA, 22 nt, Artificial Sequence
  Synthetic
  misc_feature (2)..(2): n is a, c, g, or u
unaaauguauacccaaagacaa

SEQ ID NO: 96023 - RNA, 23 nt, Artificial Sequence
  Synthetic
  misc_feature (3)..(3): n is a, c, g, or u
uunaaauguauacccaaagacaa

SEQ ID NO: 96024 - RNA, 24 nt, Artificial Sequence
  Synthetic
  misc_feature (4)..(4): n is a, c, g, or u
guunaaauguauacccaaagacaa

SEQ ID NO: 96025 - RNA, 18 nt, Artificial Sequence
  Synthetic
ccuggaaguagaggacaa

SEQ ID NO: 96026 - RNA, 19 nt, Artificial Sequence
  Synthetic
uccuggaaguagaggacaa

SEQ ID NO: 96027 - RNA, 20 nt, Artificial Sequence
  Synthetic
uuccuggaaguagaggacaa

SEQ ID NO: 96028 - RNA, 21 nt, Artificial Sequence
  Synthetic
guuccuggaaguagaggacaa

SEQ ID NO: 96029 - RNA, 22 nt, Artificial Sequence
  Synthetic
uguuccuggaaguagaggacaa

SEQ ID NO: 96030 - RNA, 23 nt, Artificial Sequence
  Synthetic
auguuccuggaaguagaggacaa

SEQ ID NO: 96031 - RNA, 24 nt, Artificial Sequence
  Synthetic
gauguuccuggaaguagaggacaa

SEQ ID NO: 96032 - RNA, 18 nt, Artificial Sequence
  Synthetic
uaaacugagccaggagaa

SEQ ID NO: 96033 - RNA, 19 nt, Artificial Sequence
  Synthetic
guaaacugagccaggagaa

SEQ ID NO: 96034 - RNA, 20 nt, Artificial Sequence
  Synthetic
aguaaacugagccaggagaa

SEQ ID NO: 96035 - RNA, 21 nt, Artificial Sequence
  Synthetic
uaguaaacugagccaggagaa

SEQ ID NO: 96036 - RNA, 22 nt, Artificial Sequence
  Synthetic
cuaguaaacugagccaggagaa

SEQ ID NO: 96037 - RNA, 23 nt, Artificial Sequence
  Synthetic
acuaguaaacugagccaggagaa

SEQ ID NO: 96038 - RNA, 24 nt, Artificial Sequence
  Synthetic
cacuaguaaacugagccaggagaa

SEQ ID NO: 96039 - RNA, 18 nt, Artificial Sequence
  Synthetic
  misc_feature (12)..(12): n is a, c, g, or u
  misc_feature (14)..(14): n is a, c, g, or u
ggaacggcagangnagaa

SEQ ID NO: 96040 - RNA, 19 nt, Artificial Sequence
  Synthetic
  misc_feature (13)..(13): n is a, c, g, or u
  misc_feature (15)..(15): n is a, c, g, or u
cggaacggcagangnagaa

SEQ ID NO: 96041 - RNA, 20 nt, Artificial Sequence
  Synthetic
  misc_feature (14)..(14): n is a, c, g, or u
  misc_feature (16)..(16): n is a, c, g, or u
ccggaacggcagangnagaa

SEQ ID NO: 96042 - RNA, 21 nt, Artificial Sequence
  Synthetic
  misc_feature (15)..(15): n is a, c, g, or u
  misc_feature (17)..(17): n is a, c, g, or u
gccggaacggcagangnagaa

SEQ ID NO: 96043 - RNA, 22 nt, Artificial Sequence
  Synthetic
  misc_feature (16)..(16): n is a, c, g, or u
  misc_feature (18)..(18): n is a, c, g, or u
ggccggaacggcagangnagaa

SEQ ID NO: 96044 - RNA, 23 nt, Artificial Sequence
  Synthetic
  misc_feature (17)..(17): n is a, c, g, or u
  misc_feature (19)..(19): n is a, c, g, or u
cggccggaacggcagangnagaa

SEQ ID NO: 96045 - RNA, 24 nt, Artificial Sequence
  Synthetic
  misc_feature (18)..(18): n is a, c, g, or u
  misc_feature (20)..(20): n is a, c, g, or u
ucggccggaacggcagangnagaa

SEQ ID NO: 96046 - RNA, 18 nt, Artificial Sequence
  Synthetic
  misc_feature (14)..(14): n is a, c, g, or u
ugucgaggagaucncgaa

SEQ ID NO: 96047 - RNA, 19 nt, Artificial Sequence
  Synthetic
  misc_feature (15)..(15): n is a, c, g, or u
gugucgaggagaucncgaa

SEQ ID NO: 96048 - RNA, 20 nt, Artificial Sequence
  Synthetic
  misc_feature (16)..(16): n is a, c, g, or u
ggugucgaggagaucncgaa

SEQ ID NO: 96049 - RNA, 21 nt, Artificial Sequence
  Synthetic
  misc_feature (17)..(17): n is a, c, g, or u
cggugucgaggagaucncgaa

SEQ ID NO: 96050 - RNA, 22 nt, Artificial Sequence
  Synthetic
  misc_feature (18)..(18): n is a, c, g, or u
gcggugucgaggagaucncgaa

SEQ ID NO: 96051 - RNA, 23 nt, Artificial Sequence
  Synthetic
  misc_feature (19)..(19): n is a, c, g, or u
ggcggugucgaggagaucncgaa

SEQ ID NO: 96052 - RNA, 24 nt, Artificial Sequence
  Synthetic
  misc_feature (20)..(20): n is a, c, g, or u
aggcggugucgaggagaucncgaa

SEQ ID NO: 96053 - RNA, 18 nt, Artificial Sequence
  Synthetic
  misc_feature (1)..(2): n is a, c, g, or u
  misc_feature (13)..(13): n is a, c, g, or u
nnaaaugaaugunaggaa

SEQ ID NO: 96054 - RNA, 19 nt, Artificial Sequence
  Synthetic
  misc_feature (2)..(3): n is a, c, g, or u
  misc_feature (14)..(14): n is a, c, g, or u
unnaaaugaaugunaggaa

SEQ ID NO: 96055 - RNA, 20 nt, Artificial Sequence
  Synthetic
  misc_feature (1)..(1): n is a, c, g, or u
  misc_feature (3)..(4): n is a, c, g, or u
  misc_feature (15)..(15): n is a, c, g, or u
nunnaaaugaaugunaggaa

SEQ ID NO: 96056 - RNA, 21 nt, Artificial Sequence
  Synthetic
  misc_feature (2)..(2): n is a, c, g, or u
  misc_feature (4)..(5): n is a, c, g, or u
  misc_feature (16)..(16): n is a, c, g, or u
cnunnaaaugaaugunaggaa

SEQ ID NO: 96057 - RNA, 22 nt, Artificial Sequence
  Synthetic
  misc_feature (3)..(3): n is a, c, g, or u
  misc_feature (5)..(6): n is a, c, g, or u
  misc_feature (17)..(17): n is a, c, g, or u
ucnunnaaaugaaugunaggaa

SEQ ID NO: 96058 - RNA, 23 nt, Artificial Sequence
  Synthetic
  misc_feature (4)..(4): n is a, c, g, or u
  misc_feature (6)..(7): n is a, c, g, or u
  misc_feature (18)..(18): n is a, c, g, or u
cucnunnaaaugaaugunaggaa

SEQ ID NO: 96059 - RNA, 24 nt, Artificial Sequence
  Synthetic
  misc_feature (5)..(5): n is a, c, g, or u
  misc_feature (7)..(8): n is a, c, g, or u
  misc_feature (19)..(19): n is a, c, g, or u
ccucnunnaaaugaaugunaggaa

SEQ ID NO: 96060 - RNA, 18 nt, Artificial Sequence
  Synthetic
ggguuuacuguuccggaa

SEQ ID NO: 96061 - RNA, 19 nt, Artificial Sequence
  Synthetic
aggguuuacuguuccggaa

SEQ ID NO: 96062 - RNA, 20 nt, Artificial Sequence
  Synthetic
caggguuuacuguuccggaa

SEQ ID NO: 96063 - RNA, 21 nt, Artificial Sequence
  Synthetic
acaggguuuacuguuccggaa

SEQ ID NO: 96064 - RNA, 22 nt, Artificial Sequence
  Synthetic
aacaggguuuacuguuccggaa

SEQ ID NO: 96065 - RNA, 23 nt, Artificial Sequence
  Synthetic
gaacaggguuuacuguuccggaa

SEQ ID NO: 96066 - RNA, 24 nt, Artificial Sequence
  Synthetic
ggaacaggguuuacuguuccggaa

SEQ ID NO: 96067 - RNA, 18 nt, Artificial Sequence
  Synthetic
aucccagaggauugggaa

SEQ ID NO: 96068 - RNA, 19 nt, Artificial Sequence
  Synthetic
aaucccagaggauugggaa

SEQ ID NO: 96069 - RNA, 20 nt, Artificial Sequence
  Synthetic
gaaucccagaggauugggaa

SEQ ID NO: 96070 - RNA, 21 nt, Artificial Sequence
  Synthetic
agaaucccagaggauugggaa

SEQ ID NO: 96071 - RNA, 22 nt, Artificial Sequence
  Synthetic
aagaaucccagaggauugggaa

SEQ ID NO: 96072 - RNA, 23 nt, Artificial Sequence
  Synthetic
aaagaaucccagaggauugggaa

SEQ ID NO: 96073 - RNA, 24 nt, Artificial Sequence
  Synthetic
gaaagaaucccagaggauugggaa

SEQ ID NO: 96074 - RNA, 18 nt, Artificial Sequence
  Synthetic
  misc_feature (2)..(2): n is a, c, g, or u
  misc_feature (5)..(5): n is a, c, g, or u
anccnagcagccauggaa

SEQ ID NO: 96075 - RNA, 19 nt, Artificial Sequence
  Synthetic
  misc_feature (3)..(3): n is a, c, g, or u
  misc_feature (6)..(6): n is a, c, g, or u
canccnagcagccauggaa

SEQ ID NO: 96076 - RNA, 20 nt, Artificial Sequence
  Synthetic
  misc_feature (4)..(4): n is a, c, g, or u
  misc_feature (7)..(7): n is a, c, g, or u
acanccnagcagccauggaa

SEQ ID NO: 96077 - RNA, 21 nt, Artificial Sequence
  Synthetic
  misc_feature (5)..(5): n is a, c, g, or u
  misc_feature (8)..(8): n is a, c, g, or u
cacanccnagcagccauggaa

SEQ ID NO: 96078 - RNA, 22 nt, Artificial Sequence
  Synthetic
  misc_feature (6)..(6): n is a, c, g, or u
  misc_feature (9)..(9): n is a, c, g, or u
gcacanccnagcagccauggaa

SEQ ID NO: 96079 - RNA, 23 nt, Artificial Sequence
  Synthetic
  misc_feature (7)..(7): n is a, c, g, or u
  misc_feature (10)..(10): n is a, c, g, or u
agcacanccnagcagccauggaa

SEQ ID NO: 96080 - RNA, 24 nt, Artificial Sequence
  Synthetic
  misc_feature (8)..(8): n is a, c, g, or u
  misc_feature (11)..(11): n is a, c, g, or u
cagcacanccnagcagccauggaa

SEQ ID NO: 96081 - RNA, 18 nt, Artificial Sequence
  Synthetic
gcauagcagcaggaugaa

SEQ ID NO: 96082 - RNA, 19 nt, Artificial Sequence
  Synthetic
ggcauagcagcaggaugaa

SEQ ID NO: 96083 - RNA, 20 nt, Artificial Sequence
  Synthetic
aggcauagcagcaggaugaa

SEQ ID NO: 96084 - RNA, 21 nt, Artificial Sequence
  Synthetic
gaggcauagcagcaggaugaa

SEQ ID NO: 96085 - RNA, 22 nt, Artificial Sequence
  Synthetic
ugaggcauagcagcaggaugaa

SEQ ID NO: 96086 - RNA, 23 nt, Artificial Sequence
  Synthetic
augaggcauagcagcaggaugaa

SEQ ID NO: 96087 - RNA, 24 nt, Artificial Sequence
  Synthetic
gaugaggcauagcagcaggaugaa

SEQ ID NO: 96088 - RNA, 18 nt, Artificial Sequence
  Synthetic
gcgacgugcagaggugaa

SEQ ID NO: 96089 - RNA, 19 nt, Artificial Sequence
  Synthetic
ugcgacgugcagaggugaa

SEQ ID NO: 96090 - RNA, 20 nt, Artificial Sequence
  Synthetic
augcgacgugcagaggugaa

SEQ ID NO: 96091 - RNA, 21 nt, Artificial Sequence
  Synthetic
caugcgacgugcagaggugaa

SEQ ID NO: 96092 - RNA, 22 nt, Artificial Sequence
  Synthetic
ccaugcgacgugcagaggugaa

SEQ ID NO: 96093 - RNA, 23 nt, Artificial Sequence
  Synthetic
uccaugcgacgugcagaggugaa

SEQ ID NO: 96094 - RNA, 24 nt, Artificial Sequence
  Synthetic
  misc_feature (1)..(1): n is a, c, g, or u
nuccaugcgacgugcagaggugaa

SEQ ID NO: 96095 - RNA, 18 nt, Artificial Sequence
  Synthetic
accacaucauccauauaa

SEQ ID NO: 96096 - RNA, 19 nt, Artificial Sequence
  Synthetic
uaccacaucauccauauaa

SEQ ID NO: 96097 - RNA, 20 nt, Artificial Sequence
  Synthetic
auaccacaucauccauauaa

SEQ ID NO: 96098 - RNA, 21 nt, Artificial Sequence
  Synthetic
aauaccacaucauccauauaa

SEQ ID NO: 96099 - RNA, 22 nt, Artificial Sequence
  Synthetic
caauaccacaucauccauauaa

SEQ ID NO: 96100 - RNA, 23 nt, Artificial Sequence
  Synthetic
ccaauaccacaucauccauauaa

SEQ ID NO: 96101 - RNA, 24 nt, Artificial Sequence
  Synthetic
cccaauaccacaucauccauauaa

SEQ ID NO: 96102 - RNA, 18 nt, Artificial Sequence
  Synthetic
uuuuuucauuaacuguaa

SEQ ID NO: 96103 - RNA, 19 nt, Artificial Sequence
  Synthetic
cuuuuuucauuaacuguaa

SEQ ID NO: 96104 - RNA, 20 nt, Artificial Sequence
  Synthetic
ccuuuuuucauuaacuguaa

SEQ ID NO: 96105 - RNA, 21 nt, Artificial Sequence
  Synthetic
uccuuuuuucauuaacuguaa

SEQ ID NO: 96106 - RNA, 22 nt, Artificial Sequence
  Synthetic
cuccuuuuuucauuaacuguaa

SEQ ID NO: 96107 - RNA, 23 nt, Artificial Sequence
  Synthetic
ucuccuuuuuucauuaacuguaa

SEQ ID NO: 96108 - RNA, 24 nt, Artificial Sequence
  Synthetic
aucuccuuuuuucauuaacuguaa

SEQ ID NO: 96109 - RNA, 18 nt, Artificial Sequence
  Synthetic
  misc_feature (2)..(2): n is a, c, g, or u
  misc_feature (5)..(5): n is a, c, g, or u
gnuanccacauuguguaa

SEQ ID NO: 96110 - RNA, 19 nt, Artificial Sequence
  Synthetic
  misc_feature (3)..(3): n is a, c, g, or u
  misc_feature (6)..(6): n is a, c, g, or u
ggnuanccacauuguguaa

SEQ ID NO: 96111 - RNA, 20 nt, Artificial Sequence
  Synthetic
  misc_feature (1)..(1): n is a, c, g, or u
  misc_feature (4)..(4): n is a, c, g, or u
  misc_feature (7)..(7): n is a, c, g, or u
nggnuanccacauuguguaa

SEQ ID NO: 96112 - RNA, 21 nt, Artificial Sequence
  Synthetic
  misc_feature (2)..(2): n is a, c, g, or u
  misc_feature (5)..(5): n is a, c, g, or u
  misc_feature (8)..(8): n is a, c, g, or u
cnggnuanccacauuguguaa

SEQ ID NO: 96113 - RNA, 22 nt, Artificial Sequence
  Synthetic
  misc_feature (3)..(3): n is a, c, g, or u
  misc_feature (6)..(6): n is a, c, g, or u
  misc_feature (9)..(9): n is a, c, g, or u
gcnggnuanccacauuguguaa

SEQ ID NO: 96114 - RNA, 23 nt, Artificial Sequence
  Synthetic
  misc_feature (1)..(1): n is a, c, g, or u
  misc_feature (4)..(4): n is a, c, g, or u
  misc_feature (7)..(7): n is a, c, g, or u
  misc_feature (10)..(10): n is a, c, g, or u
ngcnggnuanccacauuguguaa

SEQ ID NO: 96115 - RNA, 24 nt, Artificial Sequence
  Synthetic
  misc_feature (2)..(2): n is a, c, g, or u
  misc_feature (5)..(5): n is a, c, g, or u
  misc_feature (8)..(8): n is a, c, g, or u
  misc_feature (11)..(11): n is a, c, g, or u
angcnggnuanccacauuguguaa

SEQ ID NO: 96116 - RNA, 18 nt, Artificial Sequence
  Synthetic
auaacugaaagccaaaca

SEQ ID NO: 96117 - RNA, 19 nt, Artificial Sequence
  Synthetic
uauaacugaaagccaaaca

SEQ ID NO: 96118 - RNA, 20 nt, Artificial Sequence
  Synthetic
auauaacugaaagccaaaca

SEQ ID NO: 96119 - RNA, 21 nt, Artificial Sequence
  Synthetic
cauauaacugaaagccaaaca

SEQ ID NO: 96120 - RNA, 22 nt, Artificial Sequence
  Synthetic
ccauauaacugaaagccaaaca

SEQ ID NO: 96121 - RNA, 23 nt, Artificial Sequence
  Synthetic
uccauauaacugaaagccaaaca

SEQ ID NO: 96122 - RNA, 24 nt, Artificial Sequence
  Synthetic
auccauauaacugaaagccaaaca

SEQ ID NO: 96123 - RNA, 18 nt, Artificial Sequence
  Synthetic
agcaacaagagggaaaca

SEQ ID NO: 96124 - RNA, 19 nt, Artificial Sequence
  Synthetic
cagcaacaagagggaaaca

SEQ ID NO: 96125 - RNA, 20 nt, Artificial Sequence
  Synthetic
acagcaacaagagggaaaca

SEQ ID NO: 96126 - RNA, 21 nt, Artificial Sequence
  Synthetic
uacagcaacaagagggaaaca

SEQ ID NO: 96127 - RNA, 22 nt, Artificial Sequence
  Synthetic
guacagcaacaagagggaaaca

SEQ ID NO: 96128 - RNA, 23 nt, Artificial Sequence
  Synthetic
uguacagcaacaagagggaaaca

SEQ ID NO: 96129 - RNA, 24 nt, Artificial Sequence
  Synthetic
uuguacagcaacaagagggaaaca

SEQ ID NO: 96130 - RNA, 18 nt, Artificial Sequence
  Synthetic
guccaagggauacuaaca

SEQ ID NO: 96131 - RNA, 19 nt, Artificial Sequence
  Synthetic
aguccaagggauacuaaca

SEQ ID NO: 96132 - RNA, 20 nt, Artificial Sequence
  Synthetic
gaguccaagggauacuaaca

SEQ ID NO: 96133 - RNA, 21 nt, Artificial Sequence
  Synthetic
ugaguccaagggauacuaaca

SEQ ID NO: 96134 - RNA, 22 nt, Artificial Sequence
  Synthetic
augaguccaagggauacuaaca

SEQ ID NO: 96135 - RNA, 23 nt, Artificial Sequence
  Synthetic
uaugaguccaagggauacuaaca

SEQ ID NO: 96136 - RNA, 24 nt, Artificial Sequence
  Synthetic
uuaugaguccaagggauacuaaca

SEQ ID NO: 96137 - RNA, 18 nt, Artificial Sequence
  Synthetic
gccgacgggacguagaca

SEQ ID NO: 96138 - RNA, 19 nt, Artificial Sequence
  Synthetic
cgccgacgggacguagaca

SEQ ID NO: 96139 - RNA, 20 nt, Artificial Sequence
  Synthetic
gcgccgacgggacguagaca

SEQ ID NO: 96140 - RNA, 21 nt, Artificial Sequence
  Synthetic
agcgccgacgggacguagaca

SEQ ID NO: 96141 - RNA, 22 nt, Artificial Sequence
  Synthetic
cagcgccgacgggacguagaca

SEQ ID NO: 96142 - RNA, 23 nt, Artificial Sequence
  Synthetic
ucagcgccgacgggacguagaca

SEQ ID NO: 96143 - RNA, 24 nt, Artificial Sequence
  Synthetic
uucagcgccgacgggacguagaca

SEQ ID NO: 96144 - RNA, 18 nt, Artificial Sequence
  Synthetic
guucagauauuguuuaca

SEQ ID NO: 96145 - RNA, 19 nt, Artificial Sequence
  Synthetic
gguucagauauuguuuaca

SEQ ID NO: 96146 - RNA, 20 nt, Artificial Sequence
  Synthetic
agguucagauauuguuuaca

SEQ ID NO: 96147 - RNA, 21 nt, Artificial Sequence
  Synthetic
aagguucagauauuguuuaca

SEQ ID NO: 96148 - RNA, 22 nt, Artificial Sequence
  Synthetic
aaagguucagauauuguuuaca

SEQ ID NO: 96149 - RNA, 23 nt, Artificial Sequence
  Synthetic
uaaagguucagauauuguuuaca

SEQ ID NO: 96150 - RNA, 24 nt, Artificial Sequence
  Synthetic
guaaagguucagauauuguuuaca

SEQ ID NO: 96151 - RNA, 18 nt, Artificial Sequence
  Synthetic
ggaaagcccuacgaacca

SEQ ID NO: 96152 - RNA, 19 nt, Artificial Sequence
  Synthetic
gggaaagcccuacgaacca

SEQ ID NO: 96153 - RNA, 20 nt, Artificial Sequence
  Synthetic
ggggaaagcccuacgaacca

SEQ ID NO: 96154 - RNA, 21 nt, Artificial Sequence
  Synthetic
gggggaaagcccuacgaacca

SEQ ID NO: 96155 - RNA, 22 nt, Artificial Sequence
  Synthetic
ugggggaaagcccuacgaacca

SEQ ID NO: 96156 - RNA, 23 nt, Artificial Sequence
  Synthetic
gugggggaaagcccuacgaacca

SEQ ID NO: 96157 - RNA, 24 nt, Artificial Sequence
  Synthetic
agugggggaaagcccuacgaacca

SEQ ID NO: 96158 - RNA, 18 nt, Artificial Sequence
  Synthetic
gacugaggcccacuccca

SEQ ID NO: 96159 - RNA, 19 nt, Artificial Sequence
  Synthetic
ggacugaggcccacuccca

SEQ ID NO: 96160 - RNA, 20 nt, Artificial Sequence
  Synthetic
cggacugaggcccacuccca

SEQ ID NO: 96161 - RNA, 21 nt, Artificial Sequence
  Synthetic
acggacugaggcccacuccca

SEQ ID NO: 96162 - RNA, 22 nt, Artificial Sequence
  Synthetic
aacggacugaggcccacuccca

SEQ ID NO: 96163 - RNA, 23 nt, Artificial Sequence
  Synthetic
aaacggacugaggcccacuccca

SEQ ID NO: 96164 - RNA, 24 nt, Artificial Sequence
  Synthetic
gaaacggacugaggcccacuccca

SEQ ID NO: 96165 - RNA, 18 nt, Artificial Sequence
  Synthetic
  misc_feature (7)..(7): n is a, c, g, or u
  misc_feature (10)..(10): n is a, c, g, or u
agcacanccnagcagcca

SEQ ID NO: 96166 - RNA, 19 nt, Artificial Sequence
  Synthetic
  misc_feature (8)..(8): n is a, c, g, or u
  misc_feature (11)..(11): n is a, c, g, or u
cagcacanccnagcagcca

SEQ ID NO: 96167 - RNA, 20 nt, Artificial Sequence
  Synthetic
  misc_feature (9)..(9): n is a, c, g, or u
  misc_feature (12)..(12): n is a, c, g, or u
gcagcacanccnagcagcca

SEQ ID NO: 96168 - RNA, 21 nt, Artificial Sequence
  Synthetic
  misc_feature (10)..(10): n is a, c, g, or u
  misc_feature (13)..(13): n is a, c, g, or u
ggcagcacanccnagcagcca

SEQ ID NO: 96169 - RNA, 22 nt, Artificial Sequence
  Synthetic
  misc_feature (11)..(11): n is a, c, g, or u
  misc_feature (14)..(14): n is a, c, g, or u
uggcagcacanccnagcagcca

SEQ ID NO: 96170 - RNA, 23 nt, Artificial Sequence
  Synthetic
  misc_feature (12)..(12): n is a, c, g, or u
  misc_feature (15)..(15): n is a, c, g, or u
uuggcagcacanccnagcagcca

SEQ ID NO: 96171 - RNA, 24 nt, Artificial Sequence
  Synthetic
  misc_feature (13)..(13): n is a, c, g, or u
  misc_feature (16)..(16): n is a, c, g, or u
guuggcagcacanccnagcagcca

SEQ ID NO: 96172 - RNA, 18 nt, Artificial Sequence
  Synthetic
  misc_feature (3)..(3): n is a, c, g, or u
  misc_feature (15)..(15): n is a, c, g, or u
aungccaagccccancca

SEQ ID NO: 96173 - RNA, 19 nt, Artificial Sequence
  Synthetic
  misc_feature (1)..(1): n is a, c, g, or u
  misc_feature (4)..(4): n is a, c, g, or u
  misc_feature (16)..(16): n is a, c, g, or u
naungccaagccccancca

SEQ ID NO: 96174 - RNA, 20 nt, Artificial Sequence
  Synthetic
  misc_feature (2)..(2): n is a, c, g, or u
  misc_feature (5)..(5): n is a, c, g, or u
  misc_feature (17)..(17): n is a, c, g, or u
cnaungccaagccccancca

SEQ ID NO: 96175 - RNA, 21 nt, Artificial Sequence
  Synthetic
  misc_feature (3)..(3): n is a, c, g, or u
  misc_feature (6)..(6): n is a, c, g, or u
  misc_feature (18)..(18): n is a, c, g, or u
ccnaungccaagccccancca

SEQ ID NO: 96176 - RNA, 22 nt, Artificial Sequence
  Synthetic
  misc_feature (4)..(4): n is a, c, g, or u
  misc_feature (7)..(7): n is a, c, g, or u
  misc_feature (19)..(19): n is a, c, g, or u
gccnaungccaagccccancca

SEQ ID NO: 96177 - RNA, 23 nt, Artificial Sequence
  Synthetic
  misc_feature (5)..(5): n is a, c, g, or u
  misc_feature (8)..(8): n is a, c, g, or u
  misc_feature (20)..(20): n is a, c, g, or u
ggccnaungccaagccccancca

SEQ ID NO: 96178 - RNA, 24 nt, Artificial Sequence
  Synthetic
  misc_feature (6)..(6): n is a, c, g, or u
  misc_feature (9)..(9): n is a, c, g, or u
  misc_feature (21)..(21): n is a, c, g, or u
uggccnaungccaagccccancca

SEQ ID NO: 96179 - RNA, 18 nt, Artificial Sequence
  Synthetic
aaaaagagaguaacucca

SEQ ID NO: 96180 - RNA, 19 nt, Artificial Sequence
  Synthetic
aaaaaagagaguaacucca

SEQ ID NO: 96181 - RNA, 20 nt, Artificial Sequence
  Synthetic
caaaaaagagaguaacucca

SEQ ID NO: 96182 - RNA, 21 nt, Artificial Sequence
  Synthetic
gcaaaaaagagaguaacucca

SEQ ID NO: 96183 - RNA, 22 nt, Artificial Sequence
  Synthetic
ggcaaaaaagagaguaacucca

SEQ ID NO: 96184 - RNA, 23 nt, Artificial Sequence
  Synthetic
aggcaaaaaagagaguaacucca

SEQ ID NO: 96185 - RNA, 24 nt, Artificial Sequence
  Synthetic
aaggcaaaaaagagaguaacucca

SEQ ID NO: 96186 - RNA, 18 nt, Artificial Sequence
  Synthetic
ccgcaguauggaucggca

SEQ ID NO: 96187 - RNA, 19 nt, Artificial Sequence
  Synthetic
uccgcaguauggaucggca

SEQ ID NO: 96188 - RNA, 20 nt, Artificial Sequence
  Synthetic
uuccgcaguauggaucggca

SEQ ID NO: 96189 - RNA, 21 nt, Artificial Sequence
  Synthetic
guuccgcaguauggaucggca

SEQ ID NO: 96190 - RNA, 22 nt, Artificial Sequence
  Synthetic
aguuccgcaguauggaucggca

SEQ ID NO: 96191 - RNA, 23 nt, Artificial Sequence
  Synthetic
gaguuccgcaguauggaucggca

SEQ ID NO: 96192 - RNA, 24 nt, Artificial Sequence
  Synthetic
ggaguuccgcaguauggaucggca

SEQ ID NO: 96193 - RNA, 18 nt, Artificial Sequence
  Synthetic
  misc_feature (15)..(15): n is a, c, g, or u
ccugaccguugccgngca

SEQ ID NO: 96194 - RNA, 19 nt, Artificial Sequence
  Synthetic
  misc_feature (16)..(16): n is a, c, g, or u
accugaccguugccgngca

SEQ ID NO: 96195 - RNA, 20 nt, Artificial Sequence
  Synthetic
  misc_feature (17)..(17): n is a, c, g, or u
gaccugaccguugccgngca

SEQ ID NO: 96196 - RNA, 21 nt, Artificial Sequence
  Synthetic
  misc_feature (18)..(18): n is a, c, g, or u
agaccugaccguugccgngca

SEQ ID NO: 96197 - RNA, 22 nt, Artificial Sequence
  Synthetic
  misc_feature (1)..(1): n is a, c, g, or u
  misc_feature (19)..(19): n is a, c, g, or u
nagaccugaccguugccgngca

SEQ ID NO: 96198 - RNA, 23 nt, Artificial Sequence
  Synthetic
  misc_feature (2)..(2): n is a, c, g, or u
  misc_feature (20)..(20): n is a, c, g, or u
anagaccugaccguugccgngca

SEQ ID NO: 96199 - RNA, 24 nt, Artificial Sequence
  Synthetic
  misc_feature (3)..(3): n is a, c, g, or u
  misc_feature (21)..(21): n is a, c, g, or u
canagaccugaccguugccgngca

SEQ ID NO: 96200 - RNA, 18 nt, Artificial Sequence
  Synthetic
uuuuguacagcaacaaga

SEQ ID NO: 96201 - RNA, 19 nt, Artificial Sequence
  Synthetic
guuuuguacagcaacaaga

SEQ ID NO: 96202 - RNA, 20 nt, Artificial Sequence
  Synthetic
gguuuuguacagcaacaaga

SEQ ID NO: 96203 - RNA, 21 nt, Artificial Sequence
  Synthetic
agguuuuguacagcaacaaga

SEQ ID NO: 96204 - RNA, 22 nt, Artificial Sequence
  Synthetic
aagguuuuguacagcaacaaga

SEQ ID NO: 96205 - RNA, 23 nt, Artificial Sequence
  Synthetic
gaagguuuuguacagcaacaaga

SEQ ID NO: 96206 - RNA, 24 nt, Artificial Sequence
  Synthetic
cgaagguuuuguacagcaacaaga

SEQ ID NO: 96207 - RNA, 18 nt, Artificial Sequence
  Synthetic
ccggaaguguugauaaga

SEQ ID NO: 96208 - RNA, 19 nt, Artificial Sequence
  Synthetic
uccggaaguguugauaaga

SEQ ID NO: 96209 - RNA, 20 nt, Artificial Sequence
  Synthetic
uuccggaaguguugauaaga

SEQ ID NO: 96210 - RNA, 21 nt, Artificial Sequence
  Synthetic
uuuccggaaguguugauaaga

SEQ ID NO: 96211 - RNA, 22 nt, Artificial Sequence
  Synthetic
guuuccggaaguguugauaaga

SEQ ID NO: 96212 - RNA, 23 nt, Artificial Sequence
  Synthetic
aguuuccggaaguguugauaaga

SEQ ID NO: 96213 - RNA, 24 nt, Artificial Sequence
  Synthetic
uaguuuccggaaguguugauaaga

SEQ ID NO: 96214 - RNA, 18 nt, Artificial Sequence
  Synthetic
ucucuuccaaaaguaaga

SEQ ID NO: 96215 - RNA, 19 nt, Artificial Sequence
  Synthetic
uucucuuccaaaaguaaga

SEQ ID NO: 96216 - RNA, 20 nt, Artificial Sequence
  Synthetic
uuucucuuccaaaaguaaga

SEQ ID NO: 96217 - RNA, 21 nt, Artificial Sequence
  Synthetic
guuucucuuccaaaaguaaga

SEQ ID NO: 96218 - RNA, 22 nt, Artificial Sequence
  Synthetic
aguuucucuuccaaaaguaaga

SEQ ID NO: 96219 - RNA, 23 nt, Artificial Sequence
  Synthetic
caguuucucuuccaaaaguaaga

SEQ ID NO: 96220 - RNA, 24 nt, Artificial Sequence
  Synthetic
acaguuucucuuccaaaaguaaga

SEQ ID NO: 96221 - RNA, 18 nt, Artificial Sequence
  Synthetic
cagaugagaaggcacaga

SEQ ID NO: 96222 - RNA, 19 nt, Artificial Sequence
  Synthetic
gcagaugagaaggcacaga

SEQ ID NO: 96223 - RNA, 20 nt, Artificial Sequence
  Synthetic
ggcagaugagaaggcacaga

SEQ ID NO: 96224 - RNA, 21 nt, Artificial Sequence
  Synthetic
cggcagaugagaaggcacaga

SEQ ID NO: 96225 - RNA, 22 nt, Artificial Sequence
  Synthetic
ccggcagaugagaaggcacaga

SEQ ID NO: 96226 - RNA, 23 nt, Artificial Sequence
  Synthetic
  misc_feature (1)..(1): n is a, c, g, or u
nccggcagaugagaaggcacaga

SEQ ID NO: 96227 - RNA, 24 nt, Artificial Sequence
  Synthetic
  misc_feature (2)..(2): n is a, c, g, or u
gnccggcagaugagaaggcacaga

SEQ ID NO: 96228 - RNA, 18 nt, Artificial Sequence
  Synthetic
cucuuagagguggagaga

SEQ ID NO: 96229 - RNA, 19 nt, Artificial Sequence
  Synthetic
ucucuuagagguggagaga

SEQ ID NO: 96230 - RNA, 20 nt, Artificial Sequence
  Synthetic
gucucuuagagguggagaga

SEQ ID NO: 96231 - RNA, 21 nt, Artificial Sequence
  Synthetic
ugucucuuagagguggagaga

SEQ ID NO: 96232 - RNA, 22 nt, Artificial Sequence
  Synthetic
cugucucuuagagguggagaga

SEQ ID NO: 96233 - RNA, 23 nt, Artificial Sequence
  Synthetic
acugucucuuagagguggagaga

SEQ ID NO: 96234 - RNA, 24 nt, Artificial Sequence
  Synthetic
gacugucucuuagagguggagaga

SEQ ID NO: 96235 - RNA, 18 nt, Artificial Sequence
  Synthetic
acauugagauucccgaga

SEQ ID NO: 96236 - RNA, 19 nt, Artificial Sequence
  Synthetic
aacauugagauucccgaga

SEQ ID NO: 96237 - RNA, 20 nt, Artificial Sequence
  Synthetic
uaacauugagauucccgaga

SEQ ID NO: 96238 - RNA, 21 nt, Artificial Sequence
  Synthetic
cuaacauugagauucccgaga

SEQ ID NO: 96239 - RNA, 22 nt, Artificial Sequence
  Synthetic
acuaacauugagauucccgaga

SEQ ID NO: 96240 - RNA, 23 nt, Artificial Sequence
  Synthetic
uacuaacauugagauucccgaga

SEQ ID NO: 96241 - RNA, 24 nt, Artificial Sequence
  Synthetic
auacuaacauugagauucccgaga

SEQ ID NO: 96242 - RNA, 18 nt, Artificial Sequence
  Synthetic
ggagguguauuuccgaga

SEQ ID NO: 96243 - RNA, 19 nt, Artificial Sequence
  Synthetic
aggagguguauuuccgaga

SEQ ID NO: 96244 - RNA, 20 nt, Artificial Sequence
  Synthetic
aaggagguguauuuccgaga

SEQ ID NO: 96245 - RNA, 21 nt, Artificial Sequence
  Synthetic
aaaggagguguauuuccgaga

SEQ ID NO: 96246 - RNA, 22 nt, Artificial Sequence
  Synthetic
gaaaggagguguauuuccgaga

SEQ ID NO: 96247 - RNA, 23 nt, Artificial Sequence
  Synthetic
ggaaaggagguguauuuccgaga

SEQ ID NO: 96248 - RNA, 24 nt, Artificial Sequence
  Synthetic
uggaaaggagguguauuuccgaga

SEQ ID NO: 96249 - RNA, 18 nt, Artificial Sequence
  Synthetic
  misc_feature (13)..(13): n is a, c, g, or u
  misc_feature (15)..(15): n is a, c, g, or u
cggaacggcagangnaga

SEQ ID NO: 96250 - RNA, 19 nt, Artificial Sequence
  Synthetic
  misc_feature (14)..(14): n is a, c, g, or u
  misc_feature (16)..(16): n is a, c, g, or u
ccggaacggcagangnaga

SEQ ID NO: 96251 - RNA, 20 nt, Artificial Sequence
  Synthetic
  misc_feature (15)..(15): n is a, c, g, or u
  misc_feature (17)..(17): n is a, c, g, or u
gccggaacggcagangnaga

SEQ ID NO: 96252 - RNA, 21 nt, Artificial Sequence
  Synthetic
  misc_feature (16)..(16): n is a, c, g, or u
  misc_feature (18)..(18): n is a, c, g, or u
ggccggaacggcagangnaga

SEQ ID NO: 96253 - RNA, 22 nt, Artificial Sequence
  Synthetic
  misc_feature (17)..(17): n is a, c, g, or u
  misc_feature (19)..(19): n is a, c, g, or u
cggccggaacggcagangnaga

SEQ ID NO: 96254 - RNA, 23 nt, Artificial Sequence
  Synthetic
  misc_feature (18)..(18): n is a, c, g, or u
  misc_feature (20)..(20): n is a, c, g, or u
ucggccggaacggcagangnaga

SEQ ID NO: 96255 - RNA, 24 nt, Artificial Sequence
  Synthetic
  misc_feature (19)..(19): n is a, c, g, or u
  misc_feature (21)..(21): n is a, c, g, or u
gucggccggaacggcagangnaga

SEQ ID NO: 96256 - RNA, 18 nt, Artificial Sequence
  Synthetic
  misc_feature (10)..(10): n is a, c, g, or u
gaggagaucncgaauaga

SEQ ID NO: 96257 - RNA, 19 nt, Artificial Sequence
  Synthetic
  misc_feature (11)..(11): n is a, c, g, or u
cgaggagaucncgaauaga

SEQ ID NO: 96258 - RNA, 20 nt, Artificial Sequence
  Synthetic
  misc_feature (12)..(12): n is a, c, g, or u
ucgaggagaucncgaauaga

SEQ ID NO: 96259 - RNA, 21 nt, Artificial Sequence
  Synthetic
  misc_feature (13)..(13): n is a, c, g, or u
gucgaggagaucncgaauaga

SEQ ID NO: 96260 - RNA, 22 nt, Artificial Sequence
  Synthetic
  misc_feature (14)..(14): n is a, c, g, or u
ugucgaggagaucncgaauaga

SEQ ID NO: 96261 - RNA, 23 nt, Artificial Sequence
  Synthetic
  misc_feature (15)..(15): n is a, c, g, or u
gugucgaggagaucncgaauaga

SEQ ID NO: 96262 - RNA, 24 nt, Artificial Sequence
  Synthetic
  misc_feature (16)..(16): n is a, c, g, or u
ggugucgaggagaucncgaauaga

SEQ ID NO: 96263 - RNA, 18 nt, Artificial Sequence
  Synthetic
cgcgggauucagcgccga

SEQ ID NO: 96264 - RNA, 19 nt, Artificial Sequence
  Synthetic
ccgcgggauucagcgccga

SEQ ID NO: 96265 - RNA, 20 nt, Artificial Sequence
  Synthetic
uccgcgggauucagcgccga

SEQ ID NO: 96266 - RNA, 21 nt, Artificial Sequence
  Synthetic
guccgcgggauucagcgccga

SEQ ID NO: 96267 - RNA, 22 nt, Artificial Sequence
  Synthetic
cguccgcgggauucagcgccga

SEQ ID NO: 96268 - RNA, 23 nt, Artificial Sequence
  Synthetic
ucguccgcgggauucagcgccga

SEQ ID NO: 96269 - RNA, 24 nt, Artificial Sequence
  Synthetic
gucguccgcgggauucagcgccga

SEQ ID NO: 96270 - RNA, 18 nt, Artificial Sequence
  Synthetic
aaggagguguauuuccga

SEQ ID NO: 96271 - RNA, 19 nt, Artificial Sequence
  Synthetic
aaaggagguguauuuccga

SEQ ID NO: 96272 - RNA, 20 nt, Artificial Sequence
  Synthetic
gaaaggagguguauuuccga

SEQ ID NO: 96273 - RNA, 21 nt, Artificial Sequence
  Synthetic
ggaaaggagguguauuuccga

SEQ ID NO: 96274 - RNA, 22 nt, Artificial Sequence
  Synthetic
uggaaaggagguguauuuccga

SEQ ID NO: 96275 - RNA, 23 nt, Artificial Sequence
  Synthetic
auggaaaggagguguauuuccga

SEQ ID NO: 96276 - RNA, 24 nt, Artificial Sequence
  Synthetic
cauggaaaggagguguauuuccga

SEQ ID NO: 96277 - RNA, 18 nt, Artificial Sequence
  Synthetic
ucuucugcgacgcggcga

SEQ ID NO: 96278 - RNA, 19 nt, Artificial Sequence
  Synthetic
aucuucugcgacgcggcga

SEQ ID NO: 96279 - RNA, 20 nt, Artificial Sequence
  Synthetic
gaucuucugcgacgcggcga

SEQ ID NO: 96280 - RNA, 21 nt, Artificial Sequence
  Synthetic
agaucuucugcgacgcggcga

SEQ ID NO: 96281 - RNA, 22 nt, Artificial Sequence
  Synthetic
gagaucuucugcgacgcggcga

SEQ ID NO: 96282 - RNA, 23 nt, Artificial Sequence
  Synthetic
ugagaucuucugcgacgcggcga

SEQ ID NO: 96283 - RNA, 24 nt, Artificial Sequence
  Synthetic
uugagaucuucugcgacgcggcga

SEQ ID NO: 96284 - RNA, 18 nt, Artificial Sequence
  Synthetic
  misc_feature (6)..(6): n is a, c, g, or u
agaucncgaauagaagga

SEQ ID NO: 96285 - RNA, 19 nt, Artificial Sequence
  Synthetic
  misc_feature (7)..(7): n is a, c, g, or u
gagaucncgaauagaagga

SEQ ID NO: 96286 - RNA, 20 nt, Artificial Sequence
  Synthetic
  misc_feature (8)..(8): n is a, c, g, or u
ggagaucncgaauagaagga

SEQ ID NO: 96287 - RNA, 21 nt, Artificial Sequence
  Synthetic
  misc_feature (9)..(9): n is a, c, g, or u
aggagaucncgaauagaagga

SEQ ID NO: 96288 - RNA, 22 nt, Artificial Sequence
  Synthetic
  misc_feature (10)..(10): n is a, c, g, or u
gaggagaucncgaauagaagga

SEQ ID NO: 96289 - RNA, 23 nt, Artificial Sequence
  Synthetic
  misc_feature (11)..(11): n is a, c, g, or u
cgaggagaucncgaauagaagga

SEQ ID NO: 96290 - RNA, 24 nt, Artificial Sequence
  Synthetic
  misc_feature (12)..(12): n is a, c, g, or u
ucgaggagaucncgaauagaagga

SEQ ID NO: 96291 - RNA, 18 nt, Artificial Sequence
  Synthetic
ggaaagaaucccagagga

SEQ ID NO: 96292 - RNA, 19 nt, Artificial Sequence
  Synthetic
gggaaagaaucccagagga

SEQ ID NO: 96293 - RNA, 20 nt, Artificial Sequence
  Synthetic
cgggaaagaaucccagagga

SEQ ID NO: 96294 - RNA, 21 nt, Artificial Sequence
  Synthetic
ucgggaaagaaucccagagga

SEQ ID NO: 96295 - RNA, 22 nt, Artificial Sequence
  Synthetic
aucgggaaagaaucccagagga

SEQ ID NO: 96296 - RNA, 23 nt, Artificial Sequence
  Synthetic
gaucgggaaagaaucccagagga

SEQ ID NO: 96297 - RNA, 24 nt, Artificial Sequence
  Synthetic
ugaucgggaaagaaucccagagga

SEQ ID NO: 96298 - RNA, 18 nt, Artificial Sequence
  Synthetic
uauuugguaagguuagga

SEQ ID NO: 96299 - RNA, 19 nt, Artificial Sequence
  Synthetic
auauuugguaagguuagga

SEQ ID NO: 96300 - RNA, 20 nt, Artificial Sequence
  Synthetic
aauauuugguaagguuagga

SEQ ID NO: 96301 - RNA, 21 nt, Artificial Sequence
  Synthetic
aaauauuugguaagguuagga

SEQ ID NO: 96302 - RNA, 22 nt, Artificial Sequence
  Synthetic
caaauauuugguaagguuagga

SEQ ID NO: 96303 - RNA, 23 nt, Artificial Sequence
  Synthetic
gcaaauauuugguaagguuagga

SEQ ID NO: 96304 - RNA, 24 nt, Artificial Sequence
  Synthetic
ggcaaauauuugguaagguuagga

SEQ ID NO: 96305 - RNA, 18 nt, Artificial Sequence
  Synthetic
ugagccaggagaaacgga

SEQ ID NO: 96306 - RNA, 19 nt, Artificial Sequence
  Synthetic
cugagccaggagaaacgga

SEQ ID NO: 96307 - RNA, 20 nt, Artificial Sequence
  Synthetic
acugagccaggagaaacgga

SEQ ID NO: 96308 - RNA, 21 nt, Artificial Sequence
  Synthetic
aacugagccaggagaaacgga

SEQ ID NO: 96309 - RNA, 22 nt, Artificial Sequence
  Synthetic
aaacugagccaggagaaacgga

SEQ ID NO: 96310 - RNA, 23 nt, Artificial Sequence
  Synthetic
uaaacugagccaggagaaacgga

SEQ ID NO: 96311 - RNA, 24 nt, Artificial Sequence
  Synthetic
guaaacugagccaggagaaacgga

SEQ ID NO: 96312 - RNA, 18 nt, Artificial Sequence
  Synthetic
  misc_feature (8)..(8): n is a, c, g, or u
aagcccangaugauggga

SEQ ID NO: 96313 - RNA, 19 nt, Artificial Sequence
  Synthetic
  misc_feature (9)..(9): n is a, c, g, or u
aaagcccangaugauggga

SEQ ID NO: 96314 - RNA, 20 nt, Artificial Sequence
  Synthetic
  misc_feature (10)..(10): n is a, c, g, or u
gaaagcccangaugauggga

SEQ ID NO: 96315 - RNA, 21 nt, Artificial Sequence
  Synthetic
  misc_feature (11)..(11): n is a, c, g, or u
cgaaagcccangaugauggga

SEQ ID NO: 96316 - RNA, 22 nt, Artificial Sequence
  Synthetic
  misc_feature (12)..(12): n is a, c, g, or u
gcgaaagcccangaugauggga

SEQ ID NO: 96317 - RNA, 23 nt, Artificial Sequence
  Synthetic
  misc_feature (13)..(13): n is a, c, g, or u
ugcgaaagcccangaugauggga

SEQ ID NO: 96318 - RNA, 24 nt, Artificial Sequence
  Synthetic
  misc_feature (14)..(14): n is a, c, g, or u
uugcgaaagcccangaugauggga

SEQ ID NO: 96319 - RNA, 18 nt, Artificial Sequence
  Synthetic
  misc_feature (3)..(3): n is a, c, g, or u
  misc_feature (6)..(6): n is a, c, g, or u
canccnagcagccaugga

SEQ ID NO: 96320 - RNA, 19 nt, Artificial Sequence
  Synthetic
  misc_feature (4)..(4): n is a, c, g, or u
  misc_feature (7)..(7): n is a, c, g, or u
acanccnagcagccaugga

SEQ ID NO: 96321 - RNA, 20 nt, Artificial Sequence
  Synthetic
  misc_feature (5)..(5): n is a, c, g, or u
  misc_feature (8)..(8): n is a, c, g, or u
cacanccnagcagccaugga

SEQ ID NO: 96322 - RNA, 21 nt, Artificial Sequence
  Synthetic
  misc_feature (6)..(6): n is a, c, g, or u
  misc_feature (9)..(9): n is a, c, g, or u
gcacanccnagcagccaugga

SEQ ID NO: 96323 - RNA, 22 nt, Artificial Sequence
  Synthetic
  misc_feature (7)..(7): n is a, c, g, or u
  misc_feature (10)..(10): n is a, c, g, or u
agcacanccnagcagccaugga

SEQ ID NO: 96324 - RNA, 23 nt, Artificial Sequence
  Synthetic
  misc_feature (8)..(8): n is a, c, g, or u
  misc_feature (11)..(11): n is a, c, g, or u
cagcacanccnagcagccaugga

SEQ ID NO: 96325 - RNA, 24 nt, Artificial Sequence
  Synthetic
  misc_feature (9)..(9): n is a, c, g, or u
  misc_feature (12)..(12): n is a, c, g, or u
gcagcacanccnagcagccaugga

SEQ ID NO: 96326 - RNA, 18 nt, Artificial Sequence
  Synthetic
caagagguuggugaguga

SEQ ID NO: 96327 - RNA, 19 nt, Artificial Sequence
  Synthetic
acaagagguuggugaguga

SEQ ID NO: 96328 - RNA, 20 nt, Artificial Sequence
  Synthetic
gacaagagguuggugaguga

SEQ ID NO: 96329 - RNA, 21 nt, Artificial Sequence
  Synthetic
ggacaagagguuggugaguga

SEQ ID NO: 96330 - RNA, 22 nt, Artificial Sequence
  Synthetic
aggacaagagguuggugaguga

SEQ ID NO: 96331 - RNA, 23 nt, Artificial Sequence
  Synthetic
gaggacaagagguuggugaguga

SEQ ID NO: 96332 - RNA, 24 nt, Artificial Sequence
  Synthetic
ggaggacaagagguuggugaguga

SEQ ID NO: 96333 - RNA, 18 nt, Artificial Sequence
  Synthetic
  misc_feature (3)..(3): n is a, c, g, or u
gcnggguccaacugguga

SEQ ID NO: 96334 - RNA, 19 nt, Artificial Sequence
  Synthetic
  misc_feature (1)..(1): n is a, c, g, or u
  misc_feature (4)..(4): n is a, c, g, or u
ngcnggguccaacugguga

SEQ ID NO: 96335 - RNA, 20 nt, Artificial Sequence
  Synthetic
  misc_feature (2)..(2): n is a, c, g, or u
  misc_feature (5)..(5): n is a, c, g, or u
angcnggguccaacugguga

SEQ ID NO: 96336 - RNA, 21 nt, Artificial Sequence
  Synthetic
  misc_feature (3)..(3): n is a, c, g, or u
  misc_feature (6)..(6): n is a, c, g, or u
aangcnggguccaacugguga

SEQ ID NO: 96337 - RNA, 22 nt, Artificial Sequence
  Synthetic
  misc_feature (4)..(4): n is a, c, g, or u
  misc_feature (7)..(7): n is a, c, g, or u
gaangcnggguccaacugguga

SEQ ID NO: 96338 - RNA, 23 nt, Artificial Sequence
  Synthetic
  misc_feature (5)..(5): n is a, c, g, or u
  misc_feature (8)..(8): n is a, c, g, or u
cgaangcnggguccaacugguga

SEQ ID NO: 96339 - RNA, 24 nt, Artificial Sequence
  Synthetic
  misc_feature (6)..(6): n is a, c, g, or u
  misc_feature (9)..(9): n is a, c, g, or u
ccgaangcnggguccaacugguga

SEQ ID NO: 96340 - RNA, 18 nt, Artificial Sequence
  Synthetic
cucccccuagaaaauuga

SEQ ID NO: 96341 - RNA, 19 nt, Artificial Sequence
  Synthetic
gcucccccuagaaaauuga

SEQ ID NO: 96342 - RNA, 20 nt, Artificial Sequence
  Synthetic
ugcucccccuagaaaauuga

SEQ ID NO: 96343 - RNA, 21 nt, Artificial Sequence
  Synthetic
gugcucccccuagaaaauuga

SEQ ID NO: 96344 - RNA, 22 nt, Artificial Sequence
  Synthetic
ggugcucccccuagaaaauuga

SEQ ID NO: 96345 - RNA, 23 nt, Artificial Sequence
  Synthetic
gggugcucccccuagaaaauuga

SEQ ID NO: 96346 - RNA, 24 nt, Artificial Sequence
  Synthetic
ugggugcucccccuagaaaauuga

SEQ ID NO: 96347 - RNA, 18 nt, Artificial Sequence
  Synthetic
cucuaaggccucccgaua

SEQ ID NO: 96348 - RNA, 19 nt, Artificial Sequence
  Synthetic
acucuaaggccucccgaua

SEQ ID NO: 96349 - RNA, 20 nt, Artificial Sequence
  Synthetic
gacucuaaggccucccgaua

SEQ ID NO: 96350 - RNA, 21 nt, Artificial Sequence
  Synthetic
agacucuaaggccucccgaua

SEQ ID NO: 96351 - RNA, 22 nt, Artificial Sequence
  Synthetic
gagacucuaaggccucccgaua

SEQ ID NO: 96352 - RNA, 23 nt, Artificial Sequence
  Synthetic
ggagacucuaaggccucccgaua

SEQ ID NO: 96353 - RNA, 24 nt, Artificial Sequence
  Synthetic
cggagacucuaaggccucccgaua

SEQ ID NO: 96354 - RNA, 18 nt, Artificial Sequence
  Synthetic
gagggaguucuucuucua

SEQ ID NO: 96355 - RNA, 19 nt, Artificial Sequence
  Synthetic
cgagggaguucuucuucua

SEQ ID NO: 96356 - RNA, 20 nt, Artificial Sequence
  Synthetic
gcgagggaguucuucuucua

SEQ ID NO: 96357 - RNA, 21 nt, Artificial Sequence
  Synthetic
ggcgagggaguucuucuucua

SEQ ID NO: 96358 - RNA, 22 nt, Artificial Sequence
  Synthetic
aggcgagggaguucuucuucua

SEQ ID NO: 96359 - RNA, 23 nt, Artificial Sequence
  Synthetic
gaggcgagggaguucuucuucua

SEQ ID NO: 96360 - RNA, 24 nt, Artificial Sequence
  Synthetic
cgaggcgagggaguucuucuucua

SEQ ID NO: 96361 - RNA, 18 nt, Artificial Sequence
  Synthetic
uugauguuccuggaagua

SEQ ID NO: 96362 - RNA, 19 nt, Artificial Sequence
  Synthetic
guugauguuccuggaagua

SEQ ID NO: 96363 - RNA, 20 nt, Artificial Sequence
  Synthetic
aguugauguuccuggaagua

SEQ ID NO: 96364 - RNA, 21 nt, Artificial Sequence
  Synthetic
uaguugauguuccuggaagua

SEQ ID NO: 96365 - RNA, 22 nt, Artificial Sequence
  Synthetic
guaguugauguuccuggaagua

SEQ ID NO: 96366 - RNA, 23 nt, Artificial Sequence
  Synthetic
gguaguugauguuccuggaagua

SEQ ID NO: 96367 - RNA, 24 nt, Artificial Sequence
  Synthetic
ugguaguugauguuccuggaagua

SEQ ID NO: 96368 - RNA, 18 nt, Artificial Sequence
  Synthetic
agacggggagaccgcgua

SEQ ID NO: 96369 - RNA, 19 nt, Artificial Sequence
  Synthetic
cagacggggagaccgcgua

SEQ ID NO: 96370 - RNA, 20 nt, Artificial Sequence
  Synthetic
acagacggggagaccgcgua

SEQ ID NO: 96371 - RNA, 21 nt, Artificial Sequence
  Synthetic
cacagacggggagaccgcgua

SEQ ID NO: 96372 - RNA, 22 nt, Artificial Sequence
  Synthetic
gcacagacggggagaccgcgua

SEQ ID NO: 96373 - RNA, 23 nt, Artificial Sequence
  Synthetic
ggcacagacggggagaccgcgua

SEQ ID NO: 96374 - RNA, 24 nt, Artificial Sequence
  Synthetic
aggcacagacggggagaccgcgua

SEQ ID NO: 96375 - RNA, 18 nt, Artificial Sequence
  Synthetic
  misc_feature (15)..(15): n is a, c, g, or u
acauaucccaugaanuua

SEQ ID NO: 96376 - RNA, 19 nt, Artificial Sequence
  Synthetic
  misc_feature (16)..(16): n is a, c, g, or u
uacauaucccaugaanuua

SEQ ID NO: 96377 - RNA, 20 nt, Artificial Sequence
  Synthetic
  misc_feature (17)..(17): n is a, c, g, or u
uuacauaucccaugaanuua

SEQ ID NO: 96378 - RNA, 21 nt, Artificial Sequence
  Synthetic
  misc_feature (18)..(18): n is a, c, g, or u
auuacauaucccaugaanuua

SEQ ID NO: 96379 - RNA, 22 nt, Artificial Sequence
  Synthetic
  misc_feature (19)..(19): n is a, c, g, or u
aauuacauaucccaugaanuua

SEQ ID NO: 96380 - RNA, 23 nt, Artificial Sequence
  Synthetic
  misc_feature (20)..(20): n is a, c, g, or u
caauuacauaucccaugaanuua

SEQ ID NO: 96381 - RNA, 24 nt, Artificial Sequence
  Synthetic
  misc_feature (21)..(21): n is a, c, g, or u
ccaauuacauaucccaugaanuua

SEQ ID NO: 96382 - RNA, 18 nt, Artificial Sequence
  Synthetic
uaguccagaagaaccaac

SEQ ID NO: 96383 - RNA, 19 nt, Artificial Sequence
  Synthetic
guaguccagaagaaccaac

SEQ ID NO: 96384 - RNA, 20 nt, Artificial Sequence
  Synthetic
gguaguccagaagaaccaac

SEQ ID NO: 96385 - RNA, 21 nt, Artificial Sequence
  Synthetic
ugguaguccagaagaaccaac

SEQ ID NO: 96386 - RNA, 22 nt, Artificial Sequence
  Synthetic
uugguaguccagaagaaccaac

SEQ ID NO: 96387 - RNA, 23 nt, Artificial Sequence
  Synthetic
cuugguaguccagaagaaccaac

SEQ ID NO: 96388 - RNA, 24 nt, Artificial Sequence
  Synthetic
ccuugguaguccagaagaaccaac

SEQ ID NO: 96389 - RNA, 18 nt, Artificial Sequence
  Synthetic
aagguuuuguacagcaac

SEQ ID NO: 96390 - RNA, 19 nt, Artificial Sequence
  Synthetic
gaagguuuuguacagcaac

SEQ ID NO: 96391 - RNA, 20 nt, Artificial Sequence
  Synthetic
cgaagguuuuguacagcaac

SEQ ID NO: 96392 - RNA, 21 nt, Artificial Sequence
  Synthetic
ccgaagguuuuguacagcaac

SEQ ID NO: 96393 - RNA, 22 nt, Artificial Sequence
  Synthetic
uccgaagguuuuguacagcaac

SEQ ID NO: 96394 - RNA, 23 nt, Artificial Sequence
  Synthetic
guccgaagguuuuguacagcaac

SEQ ID NO: 96395 - RNA, 24 nt, Artificial Sequence
  Synthetic
cguccgaagguuuuguacagcaac

SEQ ID NO: 96396 - RNA, 18 nt, Artificial Sequence
  Synthetic
gugaggauucuugucaac

SEQ ID NO: 96397 - RNA, 19 nt, Artificial Sequence
  Synthetic
ugugaggauucuugucaac

SEQ ID NO: 96398 - RNA, 20 nt, Artificial Sequence
  Synthetic
uugugaggauucuugucaac

SEQ ID NO: 96399 - RNA, 21 nt, Artificial Sequence
  Synthetic
auugugaggauucuugucaac

SEQ ID NO: 96400 - RNA, 22 nt, Artificial Sequence
  Synthetic
uauugugaggauucuugucaac

SEQ ID NO: 96401 - RNA, 23 nt, Artificial Sequence
  Synthetic
guauugugaggauucuugucaac

SEQ ID NO: 96402 - RNA, 24 nt, Artificial Sequence
  Synthetic
gguauugugaggauucuugucaac

SEQ ID NO: 96403 - RNA, 18 nt, Artificial Sequence
  Synthetic
gguuuacuguuccggaac

SEQ ID NO: 96404 - RNA, 19 nt, Artificial Sequence
  Synthetic
ggguuuacuguuccggaac

SEQ ID NO: 96405 - RNA, 20 nt, Artificial Sequence
  Synthetic
aggguuuacuguuccggaac

SEQ ID NO: 96406 - RNA, 21 nt, Artificial Sequence
  Synthetic
caggguuuacuguuccggaac

SEQ ID NO: 96407 - RNA, 22 nt, Artificial Sequence
  Synthetic
acaggguuuacuguuccggaac

SEQ ID NO: 96408 - RNA, 23 nt, Artificial Sequence
  Synthetic
aacaggguuuacuguuccggaac

SEQ ID NO: 96409 - RNA, 24 nt, Artificial Sequence
  Synthetic
gaacaggguuuacuguuccggaac

SEQ ID NO: 96410 - RNA, 18 nt, Artificial Sequence
  Synthetic
gaacaguaggacaugaac

SEQ ID NO: 96411 - RNA, 19 nt, Artificial Sequence
  Synthetic
ugaacaguaggacaugaac

SEQ ID NO: 96412 - RNA, 20 nt, Artificial Sequence
  Synthetic
uugaacaguaggacaugaac

SEQ ID NO: 96413 - RNA, 21 nt, Artificial Sequence
  Synthetic
cuugaacaguaggacaugaac

SEQ ID NO: 96414 - RNA, 22 nt, Artificial Sequence
  Synthetic
gcuugaacaguaggacaugaac

SEQ ID NO: 96415 - RNA, 23 nt, Artificial Sequence
  Synthetic
ggcuugaacaguaggacaugaac

SEQ ID NO: 96416 - RNA, 24 nt, Artificial Sequence
  Synthetic
aggcuugaacaguaggacaugaac

SEQ ID NO: 96417 - RNA, 18 nt, Artificial Sequence
  Synthetic
aaaaaccccgccuguaac

SEQ ID NO: 96418 - RNA, 19 nt, Artificial Sequence
  Synthetic
gaaaaaccccgccuguaac

SEQ ID NO: 96419 - RNA, 20 nt, Artificial Sequence
  Synthetic
agaaaaaccccgccuguaac

SEQ ID NO: 96420 - RNA, 21 nt, Artificial Sequence
  Synthetic
aagaaaaaccccgccuguaac

SEQ ID NO: 96421 - RNA, 22 nt, Artificial Sequence
  Synthetic
caagaaaaaccccgccuguaac

SEQ ID NO: 96422 - RNA, 23 nt, Artificial Sequence
  Synthetic
acaagaaaaaccccgccuguaac

SEQ ID NO: 96423 - RNA, 24 nt, Artificial Sequence
  Synthetic
aacaagaaaaaccccgccuguaac

SEQ ID NO: 96424 - RNA, 18 nt, Artificial Sequence
  Synthetic
cucuuccaaaaguaagac

SEQ ID NO: 96425 - RNA, 19 nt, Artificial Sequence
  Synthetic
ucucuuccaaaaguaagac

SEQ ID NO: 96426 - RNA, 20 nt, Artificial Sequence
  Synthetic
uucucuuccaaaaguaagac

SEQ ID NO: 96427 - RNA, 21 nt, Artificial Sequence
  Synthetic
uuucucuuccaaaaguaagac

SEQ ID NO: 96428 - RNA, 22 nt, Artificial Sequence
  Synthetic
guuucucuuccaaaaguaagac

SEQ ID NO: 96429 - RNA, 23 nt, Artificial Sequence
  Synthetic
aguuucucuuccaaaaguaagac

SEQ ID NO: 96430 - RNA, 24 nt, Artificial Sequence
  Synthetic
caguuucucuuccaaaaguaagac

SEQ ID NO: 96431 - RNA, 18 nt, Artificial Sequence
  Synthetic
agaugagaaggcacagac

SEQ ID NO: 96432 - RNA, 19 nt, Artificial Sequence
  Synthetic
cagaugagaaggcacagac

SEQ ID NO: 96433 - RNA, 20 nt, Artificial Sequence
  Synthetic
gcagaugagaaggcacagac

SEQ ID NO: 96434 - RNA, 21 nt, Artificial Sequence
  Synthetic
ggcagaugagaaggcacagac

SEQ ID NO: 96435 - RNA, 22 nt, Artificial Sequence
  Synthetic
cggcagaugagaaggcacagac

SEQ ID NO: 96436 - RNA, 23 nt, Artificial Sequence
  Synthetic
ccggcagaugagaaggcacagac

SEQ ID NO: 96437 - RNA, 24 nt, Artificial Sequence
  Synthetic
  misc_feature (1)..(1): n is a, c, g, or u
nccggcagaugagaaggcacagac

SEQ ID NO: 96438 - RNA, 18 nt, Artificial Sequence
  Synthetic
  misc_feature (9)..(9): n is a, c, g, or u
caggacaanuuggaggac

SEQ ID NO: 96439 - RNA, 19 nt, Artificial Sequence
  Synthetic
  misc_feature (10)..(10): n is a, c, g, or u
ccaggacaanuuggaggac

SEQ ID NO: 96440 - RNA, 20 nt, Artificial Sequence
  Synthetic
  misc_feature (1)..(1): n is a, c, g, or u
  misc_feature (11)..(11): n is a, c, g, or u
nccaggacaanuuggaggac

SEQ ID NO: 96441 - RNA, 21 nt, Artificial Sequence
  Synthetic
  misc_feature (2)..(2): n is a, c, g, or u
  misc_feature (12)..(12): n is a, c, g, or u
anccaggacaanuuggaggac

SEQ ID NO: 96442 - RNA, 22 nt, Artificial Sequence
  Synthetic
  misc_feature (3)..(3): n is a, c, g, or u
  misc_feature (13)..(13): n is a, c, g, or u
uanccaggacaanuuggaggac

SEQ ID NO: 96443 - RNA, 23 nt, Artificial Sequence
  Synthetic
  misc_feature (4)..(4): n is a, c, g, or u
  misc_feature (14)..(14): n is a, c, g, or u
auanccaggacaanuuggaggac

SEQ ID NO: 96444 - RNA, 24 nt, Artificial Sequence
  Synthetic
  misc_feature (5)..(5): n is a, c, g, or u
  misc_feature (15)..(15): n is a, c, g, or u
gauanccaggacaanuuggaggac

SEQ ID NO: 96445 - RNA, 18 nt, Artificial Sequence
  Synthetic
aggcuugaacaguaggac

SEQ ID NO: 96446 - RNA, 19 nt, Artificial Sequence
  Synthetic
gaggcuugaacaguaggac

SEQ ID NO: 96447 - RNA, 20 nt, Artificial Sequence
  Synthetic
ggaggcuugaacaguaggac

SEQ ID NO: 96448 - RNA, 21 nt, Artificial Sequence
  Synthetic
uggaggcuugaacaguaggac

SEQ ID NO: 96449 - RNA, 22 nt, Artificial Sequence
  Synthetic
uuggaggcuugaacaguaggac

SEQ ID NO: 96450 - RNA, 23 nt, Artificial Sequence
  Synthetic
cuuggaggcuugaacaguaggac

SEQ ID NO: 96451 - RNA, 24 nt, Artificial Sequence
  Synthetic
gcuuggaggcuugaacaguaggac

SEQ ID NO: 96452 - RNA, 18 nt, Artificial Sequence
  Synthetic
  misc_feature (11)..(11): n is a, c, g, or u
guccucuuaunuaagacc

SEQ ID NO: 96453 - RNA, 19 nt, Artificial Sequence
  Synthetic
  misc_feature (12)..(12): n is a, c, g, or u
aguccucuuaunuaagacc

SEQ ID NO: 96454 - RNA, 20 nt, Artificial Sequence
  Synthetic
  misc_feature (13)..(13): n is a, c, g, or u
gaguccucuuaunuaagacc

SEQ ID NO: 96455 - RNA, 21 nt, Artificial Sequence
  Synthetic
  misc_feature (14)..(14): n is a, c, g, or u
agaguccucuuaunuaagacc

SEQ ID NO: 96456 - RNA, 22 nt, Artificial Sequence
  Synthetic
  misc_feature (15)..(15): n is a, c, g, or u
aagaguccucuuaunuaagacc

SEQ ID NO: 96457 - RNA, 23 nt, Artificial Sequence
  Synthetic
  misc_feature (16)..(16): n is a, c, g, or u
caagaguccucuuaunuaagacc

SEQ ID NO: 96458 - RNA, 24 nt, Artificial Sequence
  Synthetic
  misc_feature (17)..(17): n is a, c, g, or u
ccaagaguccucuuaunuaagacc

SEQ ID NO: 96459 - RNA, 18 nt, Artificial Sequence
  Synthetic
acacgugggugcuccccc

SEQ ID NO: 96460 - RNA, 19 nt, Artificial Sequence
  Synthetic
gacacgugggugcuccccc

SEQ ID NO: 96461 - RNA, 20 nt, Artificial Sequence
  Synthetic
ggacacgugggugcuccccc

SEQ ID NO: 96462 - RNA, 21 nt, Artificial Sequence
  Synthetic
aggacacgugggugcuccccc

SEQ ID NO: 96463 - RNA, 22 nt, Artificial Sequence
  Synthetic
caggacacgugggugcuccccc

SEQ ID NO: 96464 - RNA, 23 nt, Artificial Sequence
  Synthetic
ccaggacacgugggugcuccccc

SEQ ID NO: 96465 - RNA, 24 nt, Artificial Sequence
  Synthetic
gccaggacacgugggugcuccccc

SEQ ID NO: 96466 - RNA, 18 nt, Artificial Sequence
  Synthetic
cuuccaauuacauauccc

SEQ ID NO: 96467 - RNA, 19 nt, Artificial Sequence
  Synthetic
acuuccaauuacauauccc

SEQ ID NO: 96468 - RNA, 20 nt, Artificial Sequence
  Synthetic
aacuuccaauuacauauccc

SEQ ID NO: 96469 - RNA, 21 nt, Artificial Sequence
  Synthetic
caacuuccaauuacauauccc

SEQ ID NO: 96470 - RNA, 22 nt, Artificial Sequence
  Synthetic
ccaacuuccaauuacauauccc

SEQ ID NO: 96471 - RNA, 23 nt, Artificial Sequence
  Synthetic
cccaacuuccaauuacauauccc

SEQ ID NO: 96472 - RNA, 24 nt, Artificial Sequence
  Synthetic
ccccaacuuccaauuacauauccc

SEQ ID NO: 96473 - RNA, 18 nt, Artificial Sequence
  Synthetic
  misc_feature (8)..(8): n is a, c, g, or u
  misc_feature (11)..(11): n is a, c, g, or u
cagcacanccnagcagcc

SEQ ID NO: 96474 - RNA, 19 nt, Artificial Sequence
  Synthetic
  misc_feature (9)..(9): n is a, c, g, or u
  misc_feature (12)..(12): n is a, c, g, or u
gcagcacanccnagcagcc

SEQ ID NO: 96475 - RNA, 20 nt, Artificial Sequence
  Synthetic
  misc_feature (10)..(10): n is a, c, g, or u
  misc_feature (13)..(13): n is a, c, g, or u
ggcagcacanccnagcagcc

SEQ ID NO: 96476 - RNA, 21 nt, Artificial Sequence
  Synthetic
  misc_feature (11)..(11): n is a, c, g, or u
  misc_feature (14)..(14): n is a, c, g, or u
uggcagcacanccnagcagcc

SEQ ID NO: 96477 - RNA, 22 nt, Artificial Sequence
  Synthetic
  misc_feature (12)..(12): n is a, c, g, or u
  misc_feature (15)..(15): n is a, c, g, or u
uuggcagcacanccnagcagcc

SEQ ID NO: 96478 - RNA, 23 nt, Artificial Sequence
  Synthetic
  misc_feature (13)..(13): n is a, c, g, or u
  misc_feature (16)..(16): n is a, c, g, or u
guuggcagcacanccnagcagcc

SEQ ID NO: 96479 - RNA, 24 nt, Artificial Sequence
  Synthetic
  misc_feature (14)..(14): n is a, c, g, or u
  misc_feature (17)..(17): n is a, c, g, or u
aguuggcagcacanccnagcagcc

SEQ ID NO: 96480 - RNA, 18 nt, Artificial Sequence
  Synthetic
gcacuaguaaacugagcc

SEQ ID NO: 96481 - RNA, 19 nt, Artificial Sequence
  Synthetic
ggcacuaguaaacugagcc

SEQ ID NO: 96482 - RNA, 20 nt, Artificial Sequence
  Synthetic
uggcacuaguaaacugagcc

SEQ ID NO: 96483 - RNA, 21 nt, Artificial Sequence
  Synthetic
auggcacuaguaaacugagcc

SEQ ID NO: 96484 - RNA, 22 nt, Artificial Sequence
  Synthetic
aauggcacuaguaaacugagcc

SEQ ID NO: 96485 - RNA, 23 nt, Artificial Sequence
  Synthetic
aaauggcacuaguaaacugagcc

SEQ ID NO: 96486 - RNA, 24 nt, Artificial Sequence
  Synthetic
caaauggcacuaguaaacugagcc

SEQ ID NO: 96487 - RNA, 18 nt, Artificial Sequence
  Synthetic
  misc_feature (7)..(7): n is a, c, g, or u
guagagncccaaacggcc

SEQ ID NO: 96488 - RNA, 19 nt, Artificial Sequence
  Synthetic
  misc_feature (8)..(8): n is a, c, g, or u
gguagagncccaaacggcc

SEQ ID NO: 96489 - RNA, 20 nt, Artificial Sequence
  Synthetic
  misc_feature (9)..(9): n is a, c, g, or u
cgguagagncccaaacggcc

SEQ ID NO: 96490 - RNA, 21 nt, Artificial Sequence
  Synthetic
  misc_feature (10)..(10): n is a, c, g, or u
acgguagagncccaaacggcc

SEQ ID NO: 96491 - RNA, 22 nt, Artificial Sequence
  Synthetic
  misc_feature (11)..(11): n is a, c, g, or u
gacgguagagncccaaacggcc

SEQ ID NO: 96492 - RNA, 23 nt, Artificial Sequence
  Synthetic
  misc_feature (12)..(12): n is a, c, g, or u
ggacgguagagncccaaacggcc

SEQ ID NO: 96493 - RNA, 24 nt, Artificial Sequence
  Synthetic
  misc_feature (13)..(13): n is a, c, g, or u
gggacgguagagncccaaacggcc

SEQ ID NO: 96494 - RNA, 18 nt, Artificial Sequence
  Synthetic
cacuguugucaauaugcc

SEQ ID NO: 96495 - RNA, 19 nt, Artificial Sequence
  Synthetic
gcacuguugucaauaugcc

SEQ ID NO: 96496 - RNA, 20 nt, Artificial Sequence
  Synthetic
ggcacuguugucaauaugcc

SEQ ID NO: 96497 - RNA, 21 nt, Artificial Sequence
  Synthetic
uggcacuguugucaauaugcc

SEQ ID NO: 96498 - RNA, 22 nt, Artificial Sequence
  Synthetic
cuggcacuguugucaauaugcc

SEQ ID NO: 96499 - RNA, 23 nt, Artificial Sequence
  Synthetic
  misc_feature (1)..(1): n is a, c, g, or u
ncuggcacuguugucaauaugcc

SEQ ID NO: 96500 - RNA, 24 nt, Artificial Sequence
  Synthetic
  misc_feature (2)..(2): n is a, c, g, or u
uncuggcacuguugucaauaugcc

SEQ ID NO: 96501 - RNA, 18 nt, Artificial Sequence
  Synthetic
gugaucgggaaagaaucc

SEQ ID NO: 96502 - RNA, 19 nt, Artificial Sequence
  Synthetic
ggugaucgggaaagaaucc

SEQ ID NO: 96503 - RNA, 20 nt, Artificial Sequence
  Synthetic
uggugaucgggaaagaaucc

SEQ ID NO: 96504 - RNA, 21 nt, Artificial Sequence
  Synthetic
cuggugaucgggaaagaaucc

SEQ ID NO: 96505 - RNA, 22 nt, Artificial Sequence
  Synthetic
acuggugaucgggaaagaaucc

SEQ ID NO: 96506 - RNA, 23 nt, Artificial Sequence
  Synthetic
aacuggugaucgggaaagaaucc

SEQ ID NO: 96507 - RNA, 24 nt, Artificial Sequence
  Synthetic
caacuggugaucgggaaagaaucc

SEQ ID NO: 96508 - RNA, 18 nt, Artificial Sequence
  Synthetic
gugcaggguccccagucc

SEQ ID NO: 96509 - RNA, 19 nt, Artificial Sequence
  Synthetic
ggugcaggguccccagucc

SEQ ID NO: 96510 - RNA, 20 nt, Artificial Sequence
  Synthetic
cggugcaggguccccagucc

SEQ ID NO: 96511 - RNA, 21 nt, Artificial Sequence
  Synthetic
ucggugcaggguccccagucc

SEQ ID NO: 96512 - RNA, 22 nt, Artificial Sequence
  Synthetic
uucggugcaggguccccagucc

SEQ ID NO: 96513 - RNA, 23 nt, Artificial Sequence
  Synthetic
  misc_feature (1)..(1): n is a, c, g, or u
nuucggugcaggguccccagucc

SEQ ID NO: 96514 - RNA, 24 nt, Artificial Sequence
  Synthetic
  misc_feature (2)..(2): n is a, c, g, or u
unuucggugcaggguccccagucc

SEQ ID NO: 96515 - RNA, 18 nt, Artificial Sequence
  Synthetic
uucccaccuuaugagucc

SEQ ID NO: 96516 - RNA, 19 nt, Artificial Sequence
  Synthetic
uuucccaccuuaugagucc

SEQ ID NO: 96517 - RNA, 20 nt, Artificial Sequence
  Synthetic
guuucccaccuuaugagucc

SEQ ID NO: 96518 - RNA, 21 nt, Artificial Sequence
  Synthetic
aguuucccaccuuaugagucc

SEQ ID NO: 96519 - RNA, 22 nt, Artificial Sequence
  Synthetic
aaguuucccaccuuaugagucc

SEQ ID NO: 96520 - RNA, 23 nt, Artificial Sequence
  Synthetic
aaaguuucccaccuuaugagucc

SEQ ID NO: 96521 - RNA, 24 nt, Artificial Sequence
  Synthetic
uaaaguuucccaccuuaugagucc

SEQ ID NO: 96522 - RNA, 18 nt, Artificial Sequence
  Synthetic
ccccgagacgggucgucc

SEQ ID NO: 96523 - RNA, 19 nt, Artificial Sequence
  Synthetic
gccccgagacgggucgucc

SEQ ID NO: 96524 - RNA, 20 nt, Artificial Sequence
  Synthetic
ggccccgagacgggucgucc

SEQ ID NO: 96525 - RNA, 21 nt, Artificial Sequence
  Synthetic
cggccccgagacgggucgucc

SEQ ID NO: 96526 - RNA, 22 nt, Artificial Sequence
  Synthetic
acggccccgagacgggucgucc

SEQ ID NO: 96527 - RNA, 23 nt, Artificial Sequence
  Synthetic
aacggccccgagacgggucgucc

SEQ ID NO: 96528 - RNA, 24 nt, Artificial Sequence
  Synthetic
aaacggccccgagacgggucgucc

SEQ ID NO: 96529 - RNA, 18 nt, Artificial Sequence
  Synthetic
uaacacgagcaggggucc

SEQ ID NO: 96530 - RNA, 19 nt, Artificial Sequence
  Synthetic
guaacacgagcaggggucc

SEQ ID NO: 96531 - RNA, 20 nt, Artificial Sequence
  Synthetic
uguaacacgagcaggggucc

SEQ ID NO: 96532 - RNA, 21 nt, Artificial Sequence
  Synthetic
cuguaacacgagcaggggucc

SEQ ID NO: 96533 - RNA, 22 nt, Artificial Sequence
  Synthetic
ccuguaacacgagcaggggucc

SEQ ID NO: 96534 - RNA, 23 nt, Artificial Sequence
  Synthetic
gccuguaacacgagcaggggucc

SEQ ID NO: 96535 - RNA, 24 nt, Artificial Sequence
  Synthetic
cgccuguaacacgagcaggggucc

SEQ ID NO: 96536 - RNA, 18 nt, Artificial Sequence
  Synthetic
gggaaacauagagguucc

SEQ ID NO: 96537 - RNA, 19 nt, Artificial Sequence
  Synthetic
agggaaacauagagguucc

SEQ ID NO: 96538 - RNA, 20 nt, Artificial Sequence
  Synthetic
gagggaaacauagagguucc

SEQ ID NO: 96539 - RNA, 21 nt, Artificial Sequence
  Synthetic
agagggaaacauagagguucc

SEQ ID NO: 96540 - RNA, 22 nt, Artificial Sequence
  Synthetic
aagagggaaacauagagguucc

SEQ ID NO: 96541 - RNA, 23 nt, Artificial Sequence
  Synthetic
caagagggaaacauagagguucc

SEQ ID NO: 96542 - RNA, 24 nt, Artificial Sequence
  Synthetic
acaagagggaaacauagagguucc

SEQ ID NO: 96543 - RNA, 18 nt, Artificial Sequence
  Synthetic
gcugguaguugauguucc

SEQ ID NO: 96544 - RNA, 19 nt, Artificial Sequence
  Synthetic
ugcugguaguugauguucc

SEQ ID NO: 96545 - RNA, 20 nt, Artificial Sequence
  Synthetic
gugcugguaguugauguucc

SEQ ID NO: 96546 - RNA, 21 nt, Artificial Sequence
  Synthetic
cgugcugguaguugauguucc

SEQ ID NO: 96547 - RNA, 22 nt, Artificial Sequence
  Synthetic
ccgugcugguaguugauguucc

SEQ ID NO: 96548 - RNA, 23 nt, Artificial Sequence
  Synthetic
cccgugcugguaguugauguucc

SEQ ID NO: 96549 - RNA, 24 nt, Artificial Sequence
  Synthetic
ucccgugcugguaguugauguucc

SEQ ID NO: 96550 - RNA, 18 nt, Artificial Sequence
  Synthetic
gaaaggagguguauuucc

SEQ ID NO: 96551 - RNA, 19 nt, Artificial Sequence
  Synthetic
ggaaaggagguguauuucc

SEQ ID NO: 96552 - RNA, 20 nt, Artificial Sequence
  Synthetic
uggaaaggagguguauuucc

SEQ ID NO: 96553 - RNA, 21 nt, Artificial Sequence
  Synthetic
auggaaaggagguguauuucc

SEQ ID NO: 96554 - RNA, 22 nt, Artificial Sequence
  Synthetic
cauggaaaggagguguauuucc

SEQ ID NO: 96555 - RNA, 23 nt, Artificial Sequence
  Synthetic
ccauggaaaggagguguauuucc

SEQ ID NO: 96556 - RNA, 24 nt, Artificial Sequence
  Synthetic
gccauggaaaggagguguauuucc

SEQ ID NO: 96557 - RNA, 18 nt, Artificial Sequence
  Synthetic
agccacccaaggcacagc

SEQ ID NO: 96558 - RNA, 19 nt, Artificial Sequence
  Synthetic
aagccacccaaggcacagc

SEQ ID NO: 96559 - RNA, 20 nt, Artificial Sequence
  Synthetic
aaagccacccaaggcacagc

SEQ ID NO: 96560 - RNA, 21 nt, Artificial Sequence
  Synthetic
  misc_feature (1)..(1): n is a, c, g, or u
naaagccacccaaggcacagc

SEQ ID NO: 96561 - RNA, 22 nt, Artificial Sequence
  Synthetic
  misc_feature (2)..(2): n is a, c, g, or u
cnaaagccacccaaggcacagc

SEQ ID NO: 96562 - RNA, 23 nt, Artificial Sequence
  Synthetic
  misc_feature (3)..(3): n is a, c, g, or u
ccnaaagccacccaaggcacagc

SEQ ID NO: 96563 - RNA, 24 nt, Artificial Sequence
  Synthetic
  misc_feature (4)..(4): n is a, c, g, or u
cccnaaagccacccaaggcacagc

SEQ ID NO: 96564 - RNA, 18 nt, Artificial Sequence
  Synthetic
ggaacuggagccaccagc

SEQ ID NO: 96565 - RNA, 19 nt, Artificial Sequence
  Synthetic
cggaacuggagccaccagc

SEQ ID NO: 96566 - RNA, 20 nt, Artificial Sequence
  Synthetic
ccggaacuggagccaccagc

SEQ ID NO: 96567 - RNA, 21 nt, Artificial Sequence
  Synthetic
uccggaacuggagccaccagc

SEQ ID NO: 96568 - RNA, 22 nt, Artificial Sequence
  Synthetic
uuccggaacuggagccaccagc

SEQ ID NO: 96569 - RNA, 23 nt, Artificial Sequence
  Synthetic
guuccggaacuggagccaccagc

SEQ ID NO: 96570 - RNA, 24 nt, Artificial Sequence
  Synthetic
uguuccggaacuggagccaccagc

SEQ ID NO: 96571 - RNA, 18 nt, Artificial Sequence
  Synthetic
ggcacuaguaaacugagc

SEQ ID NO: 96572 - RNA, 19 nt, Artificial Sequence
  Synthetic
uggcacuaguaaacugagc

SEQ ID NO: 96573 - RNA, 20 nt, Artificial Sequence
  Synthetic
auggcacuaguaaacugagc

SEQ ID NO: 96574 - RNA, 21 nt, Artificial Sequence
  Synthetic
aauggcacuaguaaacugagc

SEQ ID NO: 96575 - RNA, 22 nt, Artificial Sequence
  Synthetic
aaauggcacuaguaaacugagc

SEQ ID NO: 96576 - RNA, 23 nt, Artificial Sequence
  Synthetic
caaauggcacuaguaaacugagc

SEQ ID NO: 96577 - RNA, 24 nt, Artificial Sequence
  Synthetic
acaaauggcacuaguaaacugagc

SEQ ID NO: 96578 - RNA, 18 nt, Artificial Sequence
  Synthetic
ugucaauaugcccugagc

SEQ ID NO: 96579 - RNA, 19 nt, Artificial Sequence
  Synthetic
uugucaauaugcccugagc

SEQ ID NO: 96580 - RNA, 20 nt, Artificial Sequence
  Synthetic
guugucaauaugcccugagc

SEQ ID NO: 96581 - RNA, 21 nt, Artificial Sequence
  Synthetic
uguugucaauaugcccugagc

SEQ ID NO: 96582 - RNA, 22 nt, Artificial Sequence
  Synthetic
cuguugucaauaugcccugagc

SEQ ID NO: 96583 - RNA, 23 nt, Artificial Sequence
  Synthetic
acuguugucaauaugcccugagc

SEQ ID NO: 96584 - RNA, 24 nt, Artificial Sequence
  Synthetic
cacuguugucaauaugcccugagc

SEQ ID NO: 96585 - RNA, 18 nt, Artificial Sequence
  Synthetic
gaccuucgucugcgaggc

SEQ ID NO: 96586 - RNA, 19 nt, Artificial Sequence
  Synthetic
agaccuucgucugcgaggc

SEQ ID NO: 96587 - RNA, 20 nt, Artificial Sequence
  Synthetic
gagaccuucgucugcgaggc

SEQ ID NO: 96588 - RNA, 21 nt, Artificial Sequence
  Synthetic
ugagaccuucgucugcgaggc

SEQ ID NO: 96589 - RNA, 22 nt, Artificial Sequence
  Synthetic
uugagaccuucgucugcgaggc

SEQ ID NO: 96590 - RNA, 23 nt, Artificial Sequence
  Synthetic
auugagaccuucgucugcgaggc

SEQ ID NO: 96591 - RNA, 24 nt, Artificial Sequence
  Synthetic
gauugagaccuucgucugcgaggc

SEQ ID NO: 96592 - RNA, 18 nt, Artificial Sequence
  Synthetic
cugccgauugguggaggc

SEQ ID NO: 96593 - RNA, 19 nt, Artificial Sequence
  Synthetic
acugccgauugguggaggc

SEQ ID NO: 96594 - RNA, 20 nt, Artificial Sequence
  Synthetic
gacugccgauugguggaggc

SEQ ID NO: 96595 - RNA, 21 nt, Artificial Sequence
  Synthetic
ugacugccgauugguggaggc

SEQ ID NO: 96596 - RNA, 22 nt, Artificial Sequence
  Synthetic
cugacugccgauugguggaggc

SEQ ID NO: 96597 - RNA, 23 nt, Artificial Sequence
  Synthetic
ccugacugccgauugguggaggc

SEQ ID NO: 96598 - RNA, 24 nt, Artificial Sequence
  Synthetic
uccugacugccgauugguggaggc

SEQ ID NO: 96599 - RNA, 18 nt, Artificial Sequence
  Synthetic
aaggcacagcuuggaggc

SEQ ID NO: 96600 - RNA, 19 nt, Artificial Sequence
  Synthetic
caaggcacagcuuggaggc

SEQ ID NO: 96601 - RNA, 20 nt, Artificial Sequence
  Synthetic
ccaaggcacagcuuggaggc

SEQ ID NO: 96602 - RNA, 21 nt, Artificial Sequence
  Synthetic
cccaaggcacagcuuggaggc

SEQ ID NO: 96603 - RNA, 22 nt, Artificial Sequence
  Synthetic
acccaaggcacagcuuggaggc

SEQ ID NO: 96604 - RNA, 23 nt, Artificial Sequence
  Synthetic
cacccaaggcacagcuuggaggc

SEQ ID NO: 96605 - RNA, 24 nt, Artificial Sequence
  Synthetic
ccacccaaggcacagcuuggaggc

SEQ ID NO: 96606 - RNA, 18 nt, Artificial Sequence
  Synthetic
gugcgccccguggucggc

SEQ ID NO: 96607 - RNA, 19 nt, Artificial Sequence
  Synthetic
ggugcgccccguggucggc

SEQ ID NO: 96608 - RNA, 20 nt, Artificial Sequence
  Synthetic
aggugcgccccguggucggc

SEQ ID NO: 96609 - RNA, 21 nt, Artificial Sequence
  Synthetic
gaggugcgccccguggucggc

SEQ ID NO: 96610 - RNA, 22 nt, Artificial Sequence
  Synthetic
agaggugcgccccguggucggc

SEQ ID NO: 96611 - RNA, 23 nt, Artificial Sequence
  Synthetic
gagaggugcgccccguggucggc

SEQ ID NO: 96612 - RNA, 24 nt, Artificial Sequence
  Synthetic
agagaggugcgccccguggucggc

SEQ ID NO: 96613 - RNA, 18 nt, Artificial Sequence
  Synthetic
aaggccuuguaaguuggc

SEQ ID NO: 96614 - RNA, 19 nt, Artificial Sequence
  Synthetic
aaaggccuuguaaguuggc

SEQ ID NO: 96615 - RNA, 20 nt, Artificial Sequence
  Synthetic
gaaaggccuuguaaguuggc

SEQ ID NO: 96616 - RNA, 21 nt, Artificial Sequence
  Synthetic
agaaaggccuuguaaguuggc

SEQ ID NO: 96617 - RNA, 22 nt, Artificial Sequence
  Synthetic
cagaaaggccuuguaaguuggc

SEQ ID NO: 96618 - RNA, 23 nt, Artificial Sequence
  Synthetic
acagaaaggccuuguaaguuggc

SEQ ID NO: 96619 - RNA, 24 nt, Artificial Sequence
  Synthetic
cacagaaaggccuuguaaguuggc

SEQ ID NO: 96620 - RNA, 18 nt, Artificial Sequence
  Synthetic
  misc_feature (9)..(9): n is a, c, g, or u
gggacugcnaauuuuggc

SEQ ID NO: 96621 - RNA, 19 nt, Artificial Sequence
  Synthetic
  misc_feature (10)..(10): n is a, c, g, or u
ggggacugcnaauuuuggc

SEQ ID NO: 96622 - RNA, 20 nt, Artificial Sequence
  Synthetic
  misc_feature (11)..(11): n is a, c, g, or u
uggggacugcnaauuuuggc

SEQ ID NO: 96623 - RNA, 21 nt, Artificial Sequence
  Synthetic
  misc_feature (12)..(12): n is a, c, g, or u
uuggggacugcnaauuuuggc

SEQ ID NO: 96624 - RNA, 22 nt, Artificial Sequence
  Synthetic
  misc_feature (13)..(13): n is a, c, g, or u
guuggggacugcnaauuuuggc

SEQ ID NO: 96625 - RNA, 23 nt, Artificial Sequence
  Synthetic
  misc_feature (14)..(14): n is a, c, g, or u
gguuggggacugcnaauuuuggc

SEQ ID NO: 96626 - RNA, 24 nt, Artificial Sequence
  Synthetic
  misc_feature (15)..(15): n is a, c, g, or u
agguuggggacugcnaauuuuggc

SEQ ID NO: 96627 - RNA, 18 nt, Artificial Sequence
  Synthetic
gcgagcaaaacaagcugc

SEQ ID NO: 96628 - RNA, 19 nt, Artificial Sequence
  Synthetic
ugcgagcaaaacaagcugc

SEQ ID NO: 96629 - RNA, 20 nt, Artificial Sequence
  Synthetic
cugcgagcaaaacaagcugc

SEQ ID NO: 96630 - RNA, 21 nt, Artificial Sequence
  Synthetic
gcugcgagcaaaacaagcugc

SEQ ID NO: 96631 - RNA, 22 nt, Artificial Sequence
  Synthetic
ggcugcgagcaaaacaagcugc

SEQ ID NO: 96632 - RNA, 23 nt, Artificial Sequence
  Synthetic
cggcugcgagcaaaacaagcugc

SEQ ID NO: 96633 - RNA, 24 nt, Artificial Sequence
  Synthetic
ccggcugcgagcaaaacaagcugc

SEQ ID NO: 96634 - RNA, 18 nt, Artificial Sequence
  Synthetic
  misc_feature (17)..(17): n is a, c, g, or u
gacacauccagcgauanc

SEQ ID NO: 96635 - RNA, 19 nt, Artificial Sequence
  Synthetic
  misc_feature (18)..(18): n is a, c, g, or u
agacacauccagcgauanc

SEQ ID NO: 96636 - RNA, 20 nt, Artificial Sequence
  Synthetic
  misc_feature (19)..(19): n is a, c, g, or u
cagacacauccagcgauanc

SEQ ID NO: 96637 - RNA, 21 nt, Artificial Sequence
  Synthetic
  misc_feature (20)..(20): n is a, c, g, or u
gcagacacauccagcgauanc

SEQ ID NO: 96638 - RNA, 22 nt, Artificial Sequence
  Synthetic
  misc_feature (21)..(21): n is a, c, g, or u
cgcagacacauccagcgauanc

SEQ ID NO: 96639 - RNA, 23 nt, Artificial Sequence
  Synthetic
  misc_feature (22)..(22): n is a, c, g, or u
ccgcagacacauccagcgauanc

SEQ ID NO: 96640 - RNA, 24 nt, Artificial Sequence
  Synthetic
  misc_feature (23)..(23): n is a, c, g, or u
gccgcagacacauccagcgauanc

SEQ ID NO: 96641 - RNA, 18 nt, Artificial Sequence
  Synthetic
  misc_feature (1)..(1): n is a, c, g, or u
nggguccaacuggugauc

SEQ ID NO: 96642 - RNA, 19 nt, Artificial Sequence
  Synthetic
  misc_feature (2)..(2): n is a, c, g, or u
cnggguccaacuggugauc

SEQ ID NO: 96643 - RNA, 20 nt, Artificial Sequence
  Synthetic
  misc_feature (3)..(3): n is a, c, g, or u
gcnggguccaacuggugauc

SEQ ID NO: 96644 - RNA, 21 nt, Artificial Sequence
  Synthetic
  misc_feature (1)..(1): n is a, c, g, or u
  misc_feature (4)..(4): n is a, c, g, or u
ngcnggguccaacuggugauc

SEQ ID NO: 96645 - RNA, 22 nt, Artificial Sequence
  Synthetic
  misc_feature (2)..(2): n is a, c, g, or u
  misc_feature (5)..(5): n is a, c, g, or u
angcnggguccaacuggugauc

SEQ ID NO: 96646 - RNA, 23 nt, Artificial Sequence
  Synthetic
  misc_feature (3)..(3): n is a, c, g, or u
  misc_feature (6)..(6): n is a, c, g, or u
aangcnggguccaacuggugauc

SEQ ID NO: 96647 - RNA, 24 nt, Artificial Sequence
  Synthetic
  misc_feature (4)..(4): n is a, c, g, or u
  misc_feature (7)..(7): n is a, c, g, or u
gaangcnggguccaacuggugauc

SEQ ID NO: 96648 - RNA, 18 nt, Artificial Sequence
  Synthetic
aaaagacaccaaauacuc

SEQ ID NO: 96649 - RNA, 19 nt, Artificial Sequence
  Synthetic
caaaagacaccaaauacuc

SEQ ID NO: 96650 - RNA, 20 nt, Artificial Sequence
  Synthetic
ccaaaagacaccaaauacuc

SEQ ID NO: 96651 - RNA, 21 nt, Artificial Sequence
  Synthetic
uccaaaagacaccaaauacuc

SEQ ID NO: 96652 - RNA, 22 nt, Artificial Sequence
  Synthetic
cuccaaaagacaccaaauacuc

SEQ ID NO: 96653 - RNA, 23 nt, Artificial Sequence
  Synthetic
acuccaaaagacaccaaauacuc

SEQ ID NO: 96654 - RNA, 24 nt, Artificial Sequence
  Synthetic
cacuccaaaagacaccaaauacuc

SEQ ID NO: 96655 - RNA, 18 nt, Artificial Sequence
  Synthetic
gcaggguccccaguccuc

SEQ ID NO: 96656 - RNA, 19 nt, Artificial Sequence
  Synthetic
ugcaggguccccaguccuc

SEQ ID NO: 96657 - RNA, 20 nt, Artificial Sequence
  Synthetic
gugcaggguccccaguccuc

SEQ ID NO: 96658 - RNA, 21 nt, Artificial Sequence
  Synthetic
ggugcaggguccccaguccuc

SEQ ID NO: 96659 - RNA, 22 nt, Artificial Sequence
  Synthetic
cggugcaggguccccaguccuc

SEQ ID NO: 96660 - RNA, 23 nt, Artificial Sequence
  Synthetic
ucggugcaggguccccaguccuc

SEQ ID NO: 96661 - RNA, 24 nt, Artificial Sequence
  Synthetic
uucggugcaggguccccaguccuc

SEQ ID NO: 96662 - RNA, 18 nt, Artificial Sequence
  Synthetic
caacauaccuugguaguc

SEQ ID NO: 96663 - RNA, 19 nt, Artificial Sequence
  Synthetic
gcaacauaccuugguaguc

SEQ ID NO: 96664 - RNA, 20 nt, Artificial Sequence
  Synthetic
ggcaacauaccuugguaguc

SEQ ID NO: 96665 - RNA, 21 nt, Artificial Sequence
  Synthetic
gggcaacauaccuugguaguc

SEQ ID NO: 96666 - RNA, 22 nt, Artificial Sequence
  Synthetic
cgggcaacauaccuugguaguc

SEQ ID NO: 96667 - RNA, 23 nt, Artificial Sequence
  Synthetic
acgggcaacauaccuugguaguc

SEQ ID NO: 96668 - RNA, 24 nt, Artificial Sequence
  Synthetic
aacgggcaacauaccuugguaguc

SEQ ID NO: 96669 - RNA, 18 nt, Artificial Sequence
  Synthetic
  misc_feature (7)..(7): n is a, c, g, or u
cagagcngaggcgguguc

SEQ ID NO: 96670 - RNA, 19 nt, Artificial Sequence
  Synthetic
  misc_feature (8)..(8): n is a, c, g, or u
acagagcngaggcgguguc

SEQ ID NO: 96671 - RNA, 20 nt, Artificial Sequence
  Synthetic
  misc_feature (9)..(9): n is a, c, g, or u
uacagagcngaggcgguguc

SEQ ID NO: 96672 - RNA, 21 nt, Artificial Sequence
  Synthetic
  misc_feature (10)..(10): n is a, c, g, or u
auacagagcngaggcgguguc

SEQ ID NO: 96673 - RNA, 22 nt, Artificial Sequence
  Synthetic
  misc_feature (11)..(11): n is a, c, g, or u
gauacagagcngaggcgguguc

SEQ ID NO: 96674 - RNA, 23 nt, Artificial Sequence
  Synthetic
  misc_feature (12)..(12): n is a, c, g, or u
cgauacagagcngaggcgguguc

SEQ ID NO: 96675 - RNA, 24 nt, Artificial Sequence
  Synthetic
  misc_feature (13)..(13): n is a, c, g, or u
ccgauacagagcngaggcgguguc

SEQ ID NO: 96676 - RNA, 18 nt, Artificial Sequence
  Synthetic
auacuaacauugagauuc

SEQ ID NO: 96677 - RNA, 19 nt, Artificial Sequence
  Synthetic
gauacuaacauugagauuc

SEQ ID NO: 96678 - RNA, 20 nt, Artificial Sequence
  Synthetic
ggauacuaacauugagauuc

SEQ ID NO: 96679 - RNA, 21 nt, Artificial Sequence
  Synthetic
gggauacuaacauugagauuc

SEQ ID NO: 96680 - RNA, 22 nt, Artificial Sequence
  Synthetic
agggauacuaacauugagauuc

SEQ ID NO: 96681 - RNA, 23 nt, Artificial Sequence
  Synthetic
aagggauacuaacauugagauuc

SEQ ID NO: 96682 - RNA, 24 nt, Artificial Sequence
  Synthetic
caagggauacuaacauugagauuc

SEQ ID NO: 96683 - RNA, 18 nt, Artificial Sequence
  Synthetic
gcgagggaguucuucuuc

SEQ ID NO: 96684 - RNA, 19 nt, Artificial Sequence
  Synthetic
ggcgagggaguucuucuuc

SEQ ID NO: 96685 - RNA, 20 nt, Artificial Sequence
  Synthetic
aggcgagggaguucuucuuc

SEQ ID NO: 96686 - RNA, 21 nt, Artificial Sequence
  Synthetic
gaggcgagggaguucuucuuc

SEQ ID NO: 96687 - RNA, 22 nt, Artificial Sequence
  Synthetic
cgaggcgagggaguucuucuuc

SEQ ID NO: 96688 - RNA, 23 nt, Artificial Sequence
  Synthetic
gcgaggcgagggaguucuucuuc

SEQ ID NO: 96689 - RNA, 24 nt, Artificial Sequence
  Synthetic
ugcgaggcgagggaguucuucuuc

SEQ ID NO: 96690 - RNA, 18 nt, Artificial Sequence
  Synthetic
gugaggugaacaauguuc

SEQ ID NO: 96691 - RNA, 19 nt, Artificial Sequence
  Synthetic
ggugaggugaacaauguuc

SEQ ID NO: 96692 - RNA, 20 nt, Artificial Sequence
  Synthetic
uggugaggugaacaauguuc

SEQ ID NO: 96693 - RNA, 21 nt, Artificial Sequence
  Synthetic
auggugaggugaacaauguuc

SEQ ID NO: 96694 - RNA, 22 nt, Artificial Sequence
  Synthetic
uauggugaggugaacaauguuc

SEQ ID NO: 96695 - RNA, 23 nt, Artificial Sequence
  Synthetic
guauggugaggugaacaauguuc

SEQ ID NO: 96696 - RNA, 24 nt, Artificial Sequence
  Synthetic
uguauggugaggugaacaauguuc

SEQ ID NO: 96697 - RNA, 18 nt, Artificial Sequence
  Synthetic
ugcugguaguugauguuc

SEQ ID NO: 96698 - RNA, 19 nt, Artificial Sequence
  Synthetic
gugcugguaguugauguuc

SEQ ID NO: 96699 - RNA, 20 nt, Artificial Sequence
  Synthetic
cgugcugguaguugauguuc

SEQ ID NO: 96700 - RNA, 21 nt, Artificial Sequence
  Synthetic
ccgugcugguaguugauguuc

SEQ ID NO: 96701 - RNA, 22 nt, Artificial Sequence
  Synthetic
cccgugcugguaguugauguuc

SEQ ID NO: 96702 - RNA, 23 nt, Artificial Sequence
  Synthetic
ucccgugcugguaguugauguuc

SEQ ID NO: 96703 - RNA, 24 nt, Artificial Sequence
  Synthetic
gucccgugcugguaguugauguuc

SEQ ID NO: 96704 - RNA, 18 nt, Artificial Sequence
  Synthetic
gaacaggguuuacuguuc

SEQ ID NO: 96705 - RNA, 19 nt, Artificial Sequence
  Synthetic
ggaacaggguuuacuguuc

SEQ ID NO: 96706 - RNA, 20 nt, Artificial Sequence
  Synthetic
cggaacaggguuuacuguuc

SEQ ID NO: 96707 - RNA, 21 nt, Artificial Sequence
  Synthetic
ucggaacaggguuuacuguuc

SEQ ID NO: 96708 - RNA, 22 nt, Artificial Sequence
  Synthetic
gucggaacaggguuuacuguuc

SEQ ID NO: 96709 - RNA, 23 nt, Artificial Sequence
  Synthetic
agucggaacaggguuuacuguuc

SEQ ID NO: 96710 - RNA, 24 nt, Artificial Sequence
  Synthetic
uagucggaacaggguuuacuguuc

SEQ ID NO: 96711 - RNA, 18 nt, Artificial Sequence
  Synthetic
ucuaacaacaguaguuuc

SEQ ID NO: 96712 - RNA, 19 nt, Artificial Sequence
  Synthetic
gucuaacaacaguaguuuc

SEQ ID NO: 96713 - RNA, 20 nt, Artificial Sequence
  Synthetic
cgucuaacaacaguaguuuc

SEQ ID NO: 96714 - RNA, 21 nt, Artificial Sequence
  Synthetic
ucgucuaacaacaguaguuuc

SEQ ID NO: 96715 - RNA, 22 nt, Artificial Sequence
  Synthetic
gucgucuaacaacaguaguuuc

SEQ ID NO: 96716 - RNA, 23 nt, Artificial Sequence
  Synthetic
cgucgucuaacaacaguaguuuc

SEQ ID NO: 96717 - RNA, 24 nt, Artificial Sequence
  Synthetic
ucgucgucuaacaacaguaguuuc

SEQ ID NO: 96718 - RNA, 18 nt, Artificial Sequence
  Synthetic
guuuuguacagcaacaag

SEQ ID NO: 96719 - RNA, 19 nt, Artificial Sequence
  Synthetic
gguuuuguacagcaacaag

SEQ ID NO: 96720 - RNA, 20 nt, Artificial Sequence
  Synthetic
agguuuuguacagcaacaag

SEQ ID NO: 96721 - RNA, 21 nt, Artificial Sequence
  Synthetic
aagguuuuguacagcaacaag

SEQ ID NO: 96722 - RNA, 22 nt, Artificial Sequence
  Synthetic
gaagguuuuguacagcaacaag

SEQ ID NO: 96723 - RNA, 23 nt, Artificial Sequence
  Synthetic
cgaagguuuuguacagcaacaag

SEQ ID NO: 96724 - RNA, 24 nt, Artificial Sequence
  Synthetic
ccgaagguuuuguacagcaacaag

SEQ ID NO: 96725 - RNA, 18 nt, Artificial Sequence
  Synthetic
agaagaaccaacaagaag

SEQ ID NO: 96726 - RNA, 19 nt, Artificial Sequence
  Synthetic
cagaagaaccaacaagaag

SEQ ID NO: 96727 - RNA, 20 nt, Artificial Sequence
  Synthetic
ccagaagaaccaacaagaag

SEQ ID NO: 96728 - RNA, 21 nt, Artificial Sequence
  Synthetic
uccagaagaaccaacaagaag

SEQ ID NO: 96729 - RNA, 22 nt, Artificial Sequence
  Synthetic
guccagaagaaccaacaagaag

SEQ ID NO: 96730 - RNA, 23 nt, Artificial Sequence
  Synthetic
aguccagaagaaccaacaagaag

SEQ ID NO: 96731 - RNA, 24 nt, Artificial Sequence
  Synthetic
uaguccagaagaaccaacaagaag

SEQ ID NO: 96732 - RNA, 18 nt, Artificial Sequence
  Synthetic
aguugauguuccuggaag

SEQ ID NO: 96733 - RNA, 19 nt, Artificial Sequence
  Synthetic
uaguugauguuccuggaag

SEQ ID NO: 96734 - RNA, 20 nt, Artificial Sequence
  Synthetic
guaguugauguuccuggaag

SEQ ID NO: 96735 - RNA, 21 nt, Artificial Sequence
  Synthetic
gguaguugauguuccuggaag

SEQ ID NO: 96736 - RNA, 22 nt, Artificial Sequence
  Synthetic
ugguaguugauguuccuggaag

SEQ ID NO: 96737 - RNA, 23 nt, Artificial Sequence
  Synthetic
cugguaguugauguuccuggaag

SEQ ID NO: 96738 - RNA, 24 nt, Artificial Sequence
  Synthetic
gcugguaguugauguuccuggaag

SEQ ID NO: 96739 - RNA, 18 nt, Artificial Sequence
  Synthetic
cauagcagcaggaugaag

SEQ ID NO: 96740 - RNA, 19 nt, Artificial Sequence
  Synthetic
gcauagcagcaggaugaag

SEQ ID NO: 96741 - RNA, 20 nt, Artificial Sequence
  Synthetic
ggcauagcagcaggaugaag

SEQ ID NO: 96742 - RNA, 21 nt, Artificial Sequence
  Synthetic
aggcauagcagcaggaugaag

SEQ ID NO: 96743 - RNA, 22 nt, Artificial Sequence
  Synthetic
gaggcauagcagcaggaugaag

SEQ ID NO: 96744 - RNA, 23 nt, Artificial Sequence
  Synthetic
ugaggcauagcagcaggaugaag

SEQ ID NO: 96745 - RNA, 24 nt, Artificial Sequence
  Synthetic
augaggcauagcagcaggaugaag

SEQ ID NO: 96746 - RNA, 18 nt, Artificial Sequence
  Synthetic
uaacugaaagccaaacag

SEQ ID NO: 96747 - RNA, 19 nt, Artificial Sequence
  Synthetic
auaacugaaagccaaacag

SEQ ID NO: 96748 - RNA, 20 nt, Artificial Sequence
  Synthetic
uauaacugaaagccaaacag

SEQ ID NO: 96749 - RNA, 21 nt, Artificial Sequence
  Synthetic
auauaacugaaagccaaacag

SEQ ID NO: 96750 - RNA, 22 nt, Artificial Sequence
  Synthetic
cauauaacugaaagccaaacag

SEQ ID NO: 96751 - RNA, 23 nt, Artificial Sequence
  Synthetic
ccauauaacugaaagccaaacag

SEQ ID NO: 96752 - RNA, 24 nt, Artificial Sequence
  Synthetic
uccauauaacugaaagccaaacag

SEQ ID NO: 96753 - RNA, 18 nt, Artificial Sequence
  Synthetic
gcuuggaggcuugaacag

SEQ ID NO: 96754 - RNA, 19 nt, Artificial Sequence
  Synthetic
agcuuggaggcuugaacag

SEQ ID NO: 96755 - RNA, 20 nt, Artificial Sequence
  Synthetic
cagcuuggaggcuugaacag

SEQ ID NO: 96756 - RNA, 21 nt, Artificial Sequence
  Synthetic
acagcuuggaggcuugaacag

SEQ ID NO: 96757 - RNA, 22 nt, Artificial Sequence
  Synthetic
cacagcuuggaggcuugaacag

SEQ ID NO: 96758 - RNA, 23 nt, Artificial Sequence
  Synthetic
gcacagcuuggaggcuugaacag

SEQ ID NO: 96759 - RNA, 24 nt, Artificial Sequence
  Synthetic
ggcacagcuuggaggcuugaacag

SEQ ID NO: 96760 - RNA, 18 nt, Artificial Sequence
  Synthetic
gcagaugagaaggcacag

SEQ ID NO: 96761 - RNA, 19 nt, Artificial Sequence
  Synthetic
ggcagaugagaaggcacag

SEQ ID NO: 96762 - RNA, 20 nt, Artificial Sequence
  Synthetic
cggcagaugagaaggcacag

SEQ ID NO: 96763 - RNA, 21 nt, Artificial Sequence
  Synthetic
ccggcagaugagaaggcacag

SEQ ID NO: 96764 - RNA, 22 nt, Artificial Sequence
  Synthetic
  misc_feature (1)..(1): n is a, c, g, or u
nccggcagaugagaaggcacag

SEQ ID NO: 96765 - RNA, 23 nt, Artificial Sequence
  Synthetic
  misc_feature (2)..(2): n is a, c, g, or u
gnccggcagaugagaaggcacag

SEQ ID NO: 96766 - RNA, 24 nt, Artificial Sequence
  Synthetic
  misc_feature (3)..(3): n is a, c, g, or u
ggnccggcagaugagaaggcacag

SEQ ID NO: 96767 - RNA, 18 nt, Artificial Sequence
  Synthetic
gauuaaagacagguacag

SEQ ID NO: 96768 - RNA, 19 nt, Artificial Sequence
  Synthetic
ggauuaaagacagguacag

SEQ ID NO: 96769 - RNA, 20 nt, Artificial Sequence
  Synthetic
aggauuaaagacagguacag

SEQ ID NO: 96770 - RNA, 21 nt, Artificial Sequence
  Synthetic
caggauuaaagacagguacag

SEQ ID NO: 96771 - RNA, 22 nt, Artificial Sequence
  Synthetic
ucaggauuaaagacagguacag

SEQ ID NO: 96772 - RNA, 23 nt, Artificial Sequence
  Synthetic
  misc_feature (1)..(1): n is a, c, g, or u
nucaggauuaaagacagguacag

SEQ ID NO: 96773 - RNA, 24 nt, Artificial Sequence
  Synthetic
  misc_feature (2)..(2): n is a, c, g, or u
anucaggauuaaagacagguacag

SEQ ID NO: 96774 - RNA, 18 nt, Artificial Sequence
  Synthetic
cggaacuggagccaccag

SEQ ID NO: 96775 - RNA, 19 nt, Artificial Sequence
  Synthetic
ccggaacuggagccaccag

SEQ ID NO: 96776 - RNA, 20 nt, Artificial Sequence
  Synthetic
uccggaacuggagccaccag

SEQ ID NO: 96777 - RNA, 21 nt, Artificial Sequence
  Synthetic
uuccggaacuggagccaccag

SEQ ID NO: 96778 - RNA, 22 nt, Artificial Sequence
  Synthetic
guuccggaacuggagccaccag

SEQ ID NO: 96779 - RNA, 23 nt, Artificial Sequence
  Synthetic
uguuccggaacuggagccaccag

SEQ ID NO: 96780 - RNA, 24 nt, Artificial Sequence
  Synthetic
cuguuccggaacuggagccaccag

SEQ ID NO: 96781 - RNA, 18 nt, Artificial Sequence
  Synthetic
acuaguaaacugagccag

SEQ ID NO: 96782 - RNA, 19 nt, Artificial Sequence
  Synthetic
cacuaguaaacugagccag

SEQ ID NO: 96783 - RNA, 20 nt, Artificial Sequence
  Synthetic
gcacuaguaaacugagccag

SEQ ID NO: 96784 - RNA, 21 nt, Artificial Sequence
  Synthetic
ggcacuaguaaacugagccag

SEQ ID NO: 96785 - RNA, 22 nt, Artificial Sequence
  Synthetic
uggcacuaguaaacugagccag

SEQ ID NO: 96786 - RNA, 23 nt, Artificial Sequence
  Synthetic
auggcacuaguaaacugagccag

SEQ ID NO: 96787 - RNA, 24 nt, Artificial Sequence
  Synthetic
aauggcacuaguaaacugagccag

SEQ ID NO: 96788 - RNA, 18 nt, Artificial Sequence
  Synthetic
  misc_feature (2)..(2): n is a, c, g, or u
  misc_feature (14)..(14): n is a, c, g, or u
ungccaagccccanccag

SEQ ID NO: 96789 - RNA, 19 nt, Artificial Sequence
  Synthetic
  misc_feature (3)..(3): n is a, c, g, or u
  misc_feature (15)..(15): n is a, c, g, or u
aungccaagccccanccag

SEQ ID NO: 96790 - RNA, 20 nt, Artificial Sequence
  Synthetic
  misc_feature (1)..(1): n is a, c, g, or u
  misc_feature (4)..(4): n is a, c, g, or u
  misc_feature (16)..(16): n is a, c, g, or u
naungccaagccccanccag

SEQ ID NO: 96791 - RNA, 21 nt, Artificial Sequence
  Synthetic
  misc_feature (2)..(2): n is a, c, g, or u
  misc_feature (5)..(5): n is a, c, g, or u
  misc_feature (17)..(17): n is a, c, g, or u
cnaungccaagccccanccag

SEQ ID NO: 96792 - RNA, 22 nt, Artificial Sequence
  Synthetic
  misc_feature (3)..(3): n is a, c, g, or u
  misc_feature (6)..(6): n is a, c, g, or u
  misc_feature (18)..(18): n is a, c, g, or u
ccnaungccaagccccanccag

SEQ ID NO: 96793 - RNA, 23 nt, Artificial Sequence
  Synthetic
  misc_feature (4)..(4): n is a, c, g, or u
  misc_feature (7)..(7): n is a, c, g, or u
  misc_feature (19)..(19): n is a, c, g, or u
gccnaungccaagccccanccag

SEQ ID NO: 96794 - RNA, 24 nt, Artificial Sequence
  Synthetic
  misc_feature (5)..(5): n is a, c, g, or u
  misc_feature (8)..(8): n is a, c, g, or u
  misc_feature (20)..(20): n is a, c, g, or u
ggccnaungccaagccccanccag

SEQ ID NO: 96795 - RNA, 18 nt, Artificial Sequence
  Synthetic
cauaccuugguaguccag

SEQ ID NO: 96796 - RNA, 19 nt, Artificial Sequence
  Synthetic
acauaccuugguaguccag

SEQ ID NO: 96797 - RNA, 20 nt, Artificial Sequence
  Synthetic
aacauaccuugguaguccag

SEQ ID NO: 96798 - RNA, 21 nt, Artificial Sequence
  Synthetic
caacauaccuugguaguccag

SEQ ID NO: 96799 - RNA, 22 nt, Artificial Sequence
  Synthetic
gcaacauaccuugguaguccag

SEQ ID NO: 96800 - RNA, 23 nt, Artificial Sequence
  Synthetic
ggcaacauaccuugguaguccag

SEQ ID NO: 96801 - RNA, 24 nt, Artificial Sequence
  Synthetic
gggcaacauaccuugguaguccag

SEQ ID NO: 96802 - RNA, 18 nt, Artificial Sequence
  Synthetic
gccgauugguggaggcag

SEQ ID NO: 96803 - RNA, 19 nt, Artificial Sequence
  Synthetic
ugccgauugguggaggcag

SEQ ID NO: 96804 - RNA, 20 nt, Artificial Sequence
  Synthetic
cugccgauugguggaggcag

SEQ ID NO: 96805 - RNA, 21 nt, Artificial Sequence
  Synthetic
acugccgauugguggaggcag

SEQ ID NO: 96806 - RNA, 22 nt, Artificial Sequence
  Synthetic
gacugccgauugguggaggcag

SEQ ID NO: 96807 - RNA, 23 nt, Artificial Sequence
  Synthetic
ugacugccgauugguggaggcag

SEQ ID NO: 96808 - RNA, 24 nt, Artificial Sequence
  Synthetic
cugacugccgauugguggaggcag

SEQ ID NO: 96809 - RNA, 18 nt, Artificial Sequence
  Synthetic
  misc_feature (11)..(11): n is a, c, g, or u
gugcacacggnccggcag

SEQ ID NO: 96810 - RNA, 19 nt, Artificial Sequence
  Synthetic
  misc_feature (12)..(12): n is a, c, g, or u
agugcacacggnccggcag

SEQ ID NO: 96811 - RNA, 20 nt, Artificial Sequence
  Synthetic
  misc_feature (13)..(13): n is a, c, g, or u
aagugcacacggnccggcag

SEQ ID NO: 96812 - RNA, 21 nt, Artificial Sequence
  Synthetic
  misc_feature (14)..(14): n is a, c, g, or u
gaagugcacacggnccggcag

SEQ ID NO: 96813 - RNA, 22 nt, Artificial Sequence
  Synthetic
  misc_feature (15)..(15): n is a, c, g, or u
cgaagugcacacggnccggcag

SEQ ID NO: 96814 - RNA, 23 nt, Artificial Sequence
  Synthetic
  misc_feature (16)..(16): n is a, c, g, or u
gcgaagugcacacggnccggcag

SEQ ID NO: 96815 - RNA, 24 nt, Artificial Sequence
  Synthetic
  misc_feature (17)..(17): n is a, c, g, or u
agcgaagugcacacggnccggcag

SEQ ID NO: 96816 - RNA, 18 nt, Artificial Sequence
  Synthetic
cgcaguauggaucggcag

SEQ ID NO: 96817 - RNA, 19 nt, Artificial Sequence
  Synthetic
ccgcaguauggaucggcag

SEQ ID NO: 96818 - RNA, 20 nt, Artificial Sequence
  Synthetic
uccgcaguauggaucggcag

SEQ ID NO: 96819 - RNA, 21 nt, Artificial Sequence
  Synthetic
uuccgcaguauggaucggcag

SEQ ID NO: 96820 - RNA, 22 nt, Artificial Sequence
  Synthetic
guuccgcaguauggaucggcag

SEQ ID NO: 96821 - RNA, 23 nt, Artificial Sequence
  Synthetic
aguuccgcaguauggaucggcag

SEQ ID NO: 96822 - RNA, 24 nt, Artificial Sequence
  Synthetic
gaguuccgcaguauggaucggcag

SEQ ID NO: 96823 - RNA, 18 nt, Artificial Sequence
  Synthetic
aggccucccgauacagag

SEQ ID NO: 96824 - RNA, 19 nt, Artificial Sequence
  Synthetic
aaggccucccgauacagag

SEQ ID NO: 96825 - RNA, 20 nt, Artificial Sequence
  Synthetic
uaaggccucccgauacagag

SEQ ID NO: 96826 - RNA, 21 nt, Artificial Sequence
  Synthetic
cuaaggccucccgauacagag

SEQ ID NO: 96827 - RNA, 22 nt, Artificial Sequence
  Synthetic
ucuaaggccucccgauacagag

SEQ ID NO: 96828 - RNA, 23 nt, Artificial Sequence
  Synthetic
cucuaaggccucccgauacagag

SEQ ID NO: 96829 - RNA, 24 nt, Artificial Sequence
  Synthetic
acucuaaggccucccgauacagag

SEQ ID NO: 96830 - RNA, 18 nt, Artificial Sequence
  Synthetic
ugagaugauuaggcagag

SEQ ID NO: 96831 - RNA, 19 nt, Artificial Sequence
  Synthetic
augagaugauuaggcagag

SEQ ID NO: 96832 - RNA, 20 nt, Artificial Sequence
  Synthetic
caugagaugauuaggcagag

SEQ ID NO: 96833 - RNA, 21 nt, Artificial Sequence
  Synthetic
acaugagaugauuaggcagag

SEQ ID NO: 96834 - RNA, 22 nt, Artificial Sequence
  Synthetic
aacaugagaugauuaggcagag

SEQ ID NO: 96835 - RNA, 23 nt, Artificial Sequence
  Synthetic
gaacaugagaugauuaggcagag

SEQ ID NO: 96836 - RNA, 24 nt, Artificial Sequence
  Synthetic
ugaacaugagaugauuaggcagag

SEQ ID NO: 96837 - RNA, 18 nt, Artificial Sequence
  Synthetic
uccaugcgacgugcagag

SEQ ID NO: 96838 - RNA, 19 nt, Artificial Sequence
  Synthetic
  misc_feature (1)..(1): n is a, c, g, or u
nuccaugcgacgugcagag

SEQ ID NO: 96839 - RNA, 20 nt, Artificial Sequence
  Synthetic
  misc_feature (2)..(2): n is a, c, g, or u
unuccaugcgacgugcagag

SEQ ID NO: 96840 - RNA, 21 nt, Artificial Sequence
  Synthetic
  misc_feature (3)..(3): n is a, c, g, or u
gunuccaugcgacgugcagag

SEQ ID NO: 96841 - RNA, 22 nt, Artificial Sequence
  Synthetic
  misc_feature (4)..(4): n is a, c, g, or u
ggunuccaugcgacgugcagag

SEQ ID NO: 96842 - RNA, 23 nt, Artificial Sequence
  Synthetic
  misc_feature (5)..(5): n is a, c, g, or u
uggunuccaugcgacgugcagag

SEQ ID NO: 96843 - RNA, 24 nt, Artificial Sequence
  Synthetic
  misc_feature (6)..(6): n is a, c, g, or u
guggunuccaugcgacgugcagag

SEQ ID NO: 96844 - RNA, 18 nt, Artificial Sequence
  Synthetic
ucucuuagagguggagag

SEQ ID NO: 96845 - RNA, 19 nt, Artificial Sequence
  Synthetic
gucucuuagagguggagag

SEQ ID NO: 96846 - RNA, 20 nt, Artificial Sequence
  Synthetic
ugucucuuagagguggagag

SEQ ID NO: 96847 - RNA, 21 nt, Artificial Sequence
  Synthetic
cugucucuuagagguggagag

SEQ ID NO: 96848 - RNA, 22 nt, Artificial Sequence
  Synthetic
acugucucuuagagguggagag

SEQ ID NO: 96849 - RNA, 23 nt, Artificial Sequence
  Synthetic
gacugucucuuagagguggagag

SEQ ID NO: 96850 - RNA, 24 nt, Artificial Sequence
  Synthetic
ugacugucucuuagagguggagag

SEQ ID NO: 96851 - RNA, 18 nt, Artificial Sequence
  Synthetic
gaugacugucucuuagag

SEQ ID NO: 96852 - RNA, 19 nt, Artificial Sequence
  Synthetic
ggaugacugucucuuagag

SEQ ID NO: 96853 - RNA, 20 nt, Artificial Sequence
  Synthetic
aggaugacugucucuuagag

SEQ ID NO: 96854 - RNA, 21 nt, Artificial Sequence
  Synthetic
gaggaugacugucucuuagag

SEQ ID NO: 96855 - RNA, 22 nt, Artificial Sequence
  Synthetic
ugaggaugacugucucuuagag

SEQ ID NO: 96856 - RNA, 23 nt, Artificial Sequence
  Synthetic
cugaggaugacugucucuuagag

SEQ ID NO: 96857 - RNA, 24 nt, Artificial Sequence
  Synthetic
ccugaggaugacugucucuuagag

SEQ ID NO: 96858 - RNA, 18 nt, Artificial Sequence
  Synthetic
ccccgccuguaacacgag

SEQ ID NO: 96859 - RNA, 19 nt, Artificial Sequence
  Synthetic
accccgccuguaacacgag

SEQ ID NO: 96860 - RNA, 20 nt, Artificial Sequence
  Synthetic
aaccccgccuguaacacgag

SEQ ID NO: 96861 - RNA, 21 nt, Artificial Sequence
  Synthetic
aaaccccgccuguaacacgag

SEQ ID NO: 96862 - RNA, 22 nt, Artificial Sequence
  Synthetic
aaaaccccgccuguaacacgag

SEQ ID NO: 96863 - RNA, 23 nt, Artificial Sequence
  Synthetic
aaaaaccccgccuguaacacgag

SEQ ID NO: 96864 - RNA, 24 nt, Artificial Sequence
  Synthetic
gaaaaaccccgccuguaacacgag

SEQ ID NO: 96865 - RNA, 18 nt, Artificial Sequence
  Synthetic
gagaccuucgucugcgag

SEQ ID NO: 96866 - RNA, 19 nt, Artificial Sequence
  Synthetic
ugagaccuucgucugcgag

SEQ ID NO: 96867 - RNA, 20 nt, Artificial Sequence
  Synthetic
uugagaccuucgucugcgag

SEQ ID NO: 96868 - RNA, 21 nt, Artificial Sequence
  Synthetic
auugagaccuucgucugcgag

SEQ ID NO: 96869 - RNA, 22 nt, Artificial Sequence
  Synthetic
gauugagaccuucgucugcgag

SEQ ID NO: 96870 - RNA, 23 nt, Artificial Sequence
  Synthetic
cgauugagaccuucgucugcgag

SEQ ID NO: 96871 - RNA, 24 nt, Artificial Sequence
  Synthetic
gcgauugagaccuucgucugcgag

SEQ ID NO: 96872 - RNA, 18 nt, Artificial Sequence
  Synthetic
  misc_feature (2)..(2): n is a, c, g, or u
unagugcuguauggugag

SEQ ID NO: 96873 - RNA, 19 nt, Artificial Sequence
  Synthetic
  misc_feature (3)..(3): n is a, c, g, or u
cunagugcuguauggugag

SEQ ID NO: 96874 - RNA, 20 nt, Artificial Sequence
  Synthetic
  misc_feature (4)..(4): n is a, c, g, or u
ccunagugcuguauggugag

SEQ ID NO: 96875 - RNA, 21 nt, Artificial Sequence
  Synthetic
  misc_feature (5)..(5): n is a, c, g, or u
gccunagugcuguauggugag

SEQ ID NO: 96876 - RNA, 22 nt, Artificial Sequence
  Synthetic
  misc_feature (6)..(6): n is a, c, g, or u
ugccunagugcuguauggugag

SEQ ID NO: 96877 - RNA, 23 nt, Artificial Sequence
  Synthetic
  misc_feature (7)..(7): n is a, c, g, or u
uugccunagugcuguauggugag

SEQ ID NO: 96878 - RNA, 24 nt, Artificial Sequence
  Synthetic
  misc_feature (8)..(8): n is a, c, g, or u
cuugccunagugcuguauggugag

SEQ ID NO: 96879 - RNA, 18 nt, Artificial Sequence
  Synthetic
acauagagguuccuugag

SEQ ID NO: 96880 - RNA, 19 nt, Artificial Sequence
  Synthetic
aacauagagguuccuugag

SEQ ID NO: 96881 - RNA, 20 nt, Artificial Sequence
  Synthetic
aaacauagagguuccuugag

SEQ ID NO: 96882 - RNA, 21 nt, Artificial Sequence
  Synthetic
gaaacauagagguuccuugag

SEQ ID NO: 96883 - RNA, 22 nt, Artificial Sequence
  Synthetic
ggaaacauagagguuccuugag

SEQ ID NO: 96884 - RNA, 23 nt, Artificial Sequence
  Synthetic
gggaaacauagagguuccuugag

SEQ ID NO: 96885 - RNA, 24 nt, Artificial Sequence
  Synthetic
agggaaacauagagguuccuugag

SEQ ID NO: 96886 - RNA, 18 nt, Artificial Sequence
  Synthetic
  misc_feature (14)..(14): n is a, c, g, or u
  misc_feature (16)..(16): n is a, c, g, or u
ccggaacggcagangnag

SEQ ID NO: 96887 - RNA, 19 nt, Artificial Sequence
  Synthetic
  misc_feature (15)..(15): n is a, c, g, or u
  misc_feature (17)..(17): n is a, c, g, or u
gccggaacggcagangnag

SEQ ID NO: 96888 - RNA, 20 nt, Artificial Sequence
  Synthetic
  misc_feature (16)..(16): n is a, c, g, or u
  misc_feature (18)..(18): n is a, c, g, or u
ggccggaacggcagangnag

SEQ ID NO: 96889 - RNA, 21 nt, Artificial Sequence
  Synthetic
  misc_feature (17)..(17): n is a, c, g, or u
  misc_feature (19)..(19): n is a, c, g, or u
cggccggaacggcagangnag

SEQ ID NO: 96890 - RNA, 22 nt, Artificial Sequence
  Synthetic
  misc_feature (18)..(18): n is a, c, g, or u
  misc_feature (20)..(20): n is a, c, g, or u
ucggccggaacggcagangnag

SEQ ID NO: 96891 - RNA, 23 nt, Artificial Sequence
  Synthetic
  misc_feature (19)..(19): n is a, c, g, or u
  misc_feature (21)..(21): n is a, c, g, or u
gucggccggaacggcagangnag

SEQ ID NO: 96892 - RNA, 24 nt, Artificial Sequence
  Synthetic
  misc_feature (20)..(20): n is a, c, g, or u
  misc_feature (22)..(22): n is a, c, g, or u
ggucggccggaacggcagangnag

SEQ ID NO: 96893 - RNA, 18 nt, Artificial Sequence
  Synthetic
  misc_feature (11)..(11): n is a, c, g, or u
cgaggagaucncgaauag

SEQ ID NO: 96894 - RNA, 19 nt, Artificial Sequence
  Synthetic
  misc_feature (12)..(12): n is a, c, g, or u
ucgaggagaucncgaauag

SEQ ID NO: 96895 - RNA, 20 nt, Artificial Sequence
  Synthetic
  misc_feature (13)..(13): n is a, c, g, or u
gucgaggagaucncgaauag

SEQ ID NO: 96896 - RNA, 21 nt, Artificial Sequence
  Synthetic
  misc_feature (14)..(14): n is a, c, g, or u
ugucgaggagaucncgaauag

SEQ ID NO: 96897 - RNA, 22 nt, Artificial Sequence
  Synthetic
  misc_feature (15)..(15): n is a, c, g, or u
gugucgaggagaucncgaauag

SEQ ID NO: 96898 - RNA, 23 nt, Artificial Sequence
  Synthetic
  misc_feature (16)..(16): n is a, c, g, or u
ggugucgaggagaucncgaauag

SEQ ID NO: 96899 - RNA, 24 nt, Artificial Sequence
  Synthetic
  misc_feature (17)..(17): n is a, c, g, or u
cggugucgaggagaucncgaauag

SEQ ID NO: 96900 - RNA, 18 nt, Artificial Sequence
  Synthetic
  misc_feature (13)..(13): n is a, c, g, or u
ccucacucugggnucuag

SEQ ID NO: 96901 - RNA, 19 nt, Artificial Sequence
  Synthetic
  misc_feature (14)..(14): n is a, c, g, or u
cccucacucugggnucuag

SEQ ID NO: 96902 - RNA, 20 nt, Artificial Sequence
  Synthetic
  misc_feature (15)..(15): n is a, c, g, or u
ccccucacucugggnucuag

SEQ ID NO: 96903 - RNA, 21 nt, Artificial Sequence
  Synthetic
  misc_feature (16)..(16): n is a, c, g, or u
gccccucacucugggnucuag

SEQ ID NO: 96904 - RNA, 22 nt, Artificial Sequence
  Synthetic
  misc_feature (17)..(17): n is a, c, g, or u
ggccccucacucugggnucuag

SEQ ID NO: 96905 - RNA, 23 nt, Artificial Sequence
  Synthetic
  misc_feature (18)..(18): n is a, c, g, or u
aggccccucacucugggnucuag

SEQ ID NO: 96906 - RNA, 24 nt, Artificial Sequence
  Synthetic
  misc_feature (19)..(19): n is a, c, g, or u
uaggccccucacucugggnucuag

SEQ ID NO: 96907 - RNA, 18 nt, Artificial Sequence
  Synthetic
  misc_feature (8)..(8): n is a, c, g, or u
auaugggngaggcaguag

SEQ ID NO: 96908 - RNA, 19 nt, Artificial Sequence
  Synthetic
  misc_feature (9)..(9): n is a, c, g, or u
gauaugggngaggcaguag

SEQ ID NO: 96909 - RNA, 20 nt, Artificial Sequence
  Synthetic
  misc_feature (10)..(10): n is a, c, g, or u
cgauaugggngaggcaguag

SEQ ID NO: 96910 - RNA, 21 nt, Artificial Sequence
  Synthetic
  misc_feature (11)..(11): n is a, c, g, or u
acgauaugggngaggcaguag

SEQ ID NO: 96911 - RNA, 22 nt, Artificial Sequence
  Synthetic
  misc_feature (12)..(12): n is a, c, g, or u
gacgauaugggngaggcaguag

SEQ ID NO: 96912 - RNA, 23 nt, Artificial Sequence
  Synthetic
  misc_feature (13)..(13): n is a, c, g, or u
ugacgauaugggngaggcaguag

SEQ ID NO: 96913 - RNA, 24 nt, Artificial Sequence
  Synthetic
  misc_feature (14)..(14): n is a, c, g, or u
uugacgauaugggngaggcaguag

SEQ ID NO: 96914 - RNA, 18 nt, Artificial Sequence
  Synthetic
gaugagaaggcacagacg

SEQ ID NO: 96915 - RNA, 19 nt, Artificial Sequence
  Synthetic
agaugagaaggcacagacg

SEQ ID NO: 96916 - RNA, 20 nt, Artificial Sequence
  Synthetic
cagaugagaaggcacagacg

SEQ ID NO: 96917 - RNA, 21 nt, Artificial Sequence
  Synthetic
gcagaugagaaggcacagacg

SEQ ID NO: 96918 - RNA, 22 nt, Artificial Sequence
  Synthetic
ggcagaugagaaggcacagacg

SEQ ID NO: 96919 - RNA, 23 nt, Artificial Sequence
  Synthetic
cggcagaugagaaggcacagacg

SEQ ID NO: 96920 - RNA, 24 nt, Artificial Sequence
  Synthetic
ccggcagaugagaaggcacagacg

SEQ ID NO: 96921 - RNA, 18 nt, Artificial Sequence
  Synthetic
ccgcgggauucagcgccg

SEQ ID NO: 96922 - RNA, 19 nt, Artificial Sequence
  Synthetic
uccgcgggauucagcgccg

SEQ ID NO: 96923 - RNA, 20 nt, Artificial Sequence
  Synthetic
guccgcgggauucagcgccg

SEQ ID NO: 96924 - RNA, 21 nt, Artificial Sequence
  Synthetic
cguccgcgggauucagcgccg

SEQ ID NO: 96925 - RNA, 22 nt, Artificial Sequence
  Synthetic
ucguccgcgggauucagcgccg

SEQ ID NO: 96926 - RNA, 23 nt, Artificial Sequence
  Synthetic
gucguccgcgggauucagcgccg

SEQ ID NO: 96927 - RNA, 24 nt, Artificial Sequence
  Synthetic
ggucguccgcgggauucagcgccg

SEQ ID NO: 96928 - RNA, 18 nt, Artificial Sequence
  Synthetic
accuucgucugcgaggcg

SEQ ID NO: 96929 - RNA, 19 nt, Artificial Sequence
  Synthetic
gaccuucgucugcgaggcg

SEQ ID NO: 96930 - RNA, 20 nt, Artificial Sequence
  Synthetic
agaccuucgucugcgaggcg

SEQ ID NO: 96931 - RNA, 21 nt, Artificial Sequence
  Synthetic
gagaccuucgucugcgaggcg

SEQ ID NO: 96932 - RNA, 22 nt, Artificial Sequence
  Synthetic
ugagaccuucgucugcgaggcg

SEQ ID NO: 96933 - RNA, 23 nt, Artificial Sequence
  Synthetic
uugagaccuucgucugcgaggcg

SEQ ID NO: 96934 - RNA, 24 nt, Artificial Sequence
  Synthetic
auugagaccuucgucugcgaggcg

SEQ ID NO: 96935 - RNA, 18 nt, Artificial Sequence
  Synthetic
  misc_feature (6)..(6): n is a, c, g, or u
agagcngaggcggugucg

SEQ ID NO: 96936 - RNA, 19 nt, Artificial Sequence
  Synthetic
  misc_feature (7)..(7): n is a, c, g, or u
cagagcngaggcggugucg

SEQ ID NO: 96937 - RNA, 20 nt, Artificial Sequence
  Synthetic
  misc_feature (8)..(8): n is a, c, g, or u
acagagcngaggcggugucg

SEQ ID NO: 96938 - RNA, 21 nt, Artificial Sequence
  Synthetic
  misc_feature (9)..(9): n is a, c, g, or u
uacagagcngaggcggugucg

SEQ ID NO: 96939 - RNA, 22 nt, Artificial Sequence
  Synthetic
  misc_feature (10)..(10): n is a, c, g, or u
auacagagcngaggcggugucg

SEQ ID NO: 96940 - RNA, 23 nt, Artificial Sequence
  Synthetic
  misc_feature (11)..(11): n is a, c, g, or u
gauacagagcngaggcggugucg

SEQ ID NO: 96941 - RNA, 24 nt, Artificial Sequence
  Synthetic
  misc_feature (12)..(12): n is a, c, g, or u
cgauacagagcngaggcggugucg

SEQ ID NO: 96942 - RNA, 18 nt, Artificial Sequence
  Synthetic
augaggcauagcagcagg

SEQ ID NO: 96943 - RNA, 19 nt, Artificial Sequence
  Synthetic
gaugaggcauagcagcagg

SEQ ID NO: 96944 - RNA, 20 nt, Artificial Sequence
  Synthetic
agaugaggcauagcagcagg

SEQ ID NO: 96945 - RNA, 21 nt, Artificial Sequence
  Synthetic
aagaugaggcauagcagcagg

SEQ ID NO: 96946 - RNA, 22 nt, Artificial Sequence
  Synthetic
gaagaugaggcauagcagcagg

SEQ ID NO: 96947 - RNA, 23 nt, Artificial Sequence
  Synthetic
agaagaugaggcauagcagcagg

SEQ ID NO: 96948 - RNA, 24 nt, Artificial Sequence
  Synthetic
aagaagaugaggcauagcagcagg

SEQ ID NO: 96949 - RNA, 18 nt, Artificial Sequence
  Synthetic
ccgauugguggaggcagg

SEQ ID NO: 96950 - RNA, 19 nt, Artificial Sequence
  Synthetic
gccgauugguggaggcagg

SEQ ID NO: 96951 - RNA, 20 nt, Artificial Sequence
  Synthetic
ugccgauugguggaggcagg

SEQ ID NO: 96952 - RNA, 21 nt, Artificial Sequence
  Synthetic
cugccgauugguggaggcagg

SEQ ID NO: 96953 - RNA, 22 nt, Artificial Sequence
  Synthetic
acugccgauugguggaggcagg

SEQ ID NO: 96954 - RNA, 23 nt, Artificial Sequence
  Synthetic
gacugccgauugguggaggcagg

SEQ ID NO: 96955 - RNA, 24 nt, Artificial Sequence
  Synthetic
ugacugccgauugguggaggcagg

SEQ ID NO: 96956 - RNA, 18 nt, Artificial Sequence
  Synthetic
augacugucucuuagagg

SEQ ID NO: 96957 - RNA, 19 nt, Artificial Sequence
  Synthetic
gaugacugucucuuagagg

SEQ ID NO: 96958 - RNA, 20 nt, Artificial Sequence
  Synthetic
ggaugacugucucuuagagg

SEQ ID NO: 96959 - RNA, 21 nt, Artificial Sequence
  Synthetic
aggaugacugucucuuagagg

SEQ ID NO: 96960 - RNA, 22 nt, Artificial Sequence
  Synthetic
gaggaugacugucucuuagagg

SEQ ID NO: 96961 - RNA, 23 nt, Artificial Sequence
  Synthetic
ugaggaugacugucucuuagagg

SEQ ID NO: 96962 - RNA, 24 nt, Artificial Sequence
  Synthetic
cugaggaugacugucucuuagagg

SEQ ID NO: 96963 - RNA, 18 nt, Artificial Sequence
  Synthetic
acugccgauugguggagg

SEQ ID NO: 96964 - RNA, 19 nt, Artificial Sequence
  Synthetic
gacugccgauugguggagg

SEQ ID NO: 96965 - RNA, 20 nt, Artificial Sequence
  Synthetic
ugacugccgauugguggagg

SEQ ID NO: 96966 - RNA, 21 nt, Artificial Sequence
  Synthetic
cugacugccgauugguggagg

SEQ ID NO: 96967 - RNA, 22 nt, Artificial Sequence
  Synthetic
ccugacugccgauugguggagg

SEQ ID NO: 96968 - RNA, 23 nt, Artificial Sequence
  Synthetic
uccugacugccgauugguggagg

SEQ ID NO: 96969 - RNA, 24 nt, Artificial Sequence
  Synthetic
uuccugacugccgauugguggagg

SEQ ID NO: 96970 - RNA, 18 nt, Artificial Sequence
  Synthetic
uuggugagugauuggagg

SEQ ID NO: 96971 - RNA, 19 nt, Artificial Sequence
  Synthetic
guuggugagugauuggagg

SEQ ID NO: 96972 - RNA, 20 nt, Artificial Sequence
  Synthetic
gguuggugagugauuggagg

SEQ ID NO: 96973 - RNA, 21 nt, Artificial Sequence
  Synthetic
agguuggugagugauuggagg

SEQ ID NO: 96974 - RNA, 22 nt, Artificial Sequence
  Synthetic
gagguuggugagugauuggagg

SEQ ID NO: 96975 - RNA, 23 nt, Artificial Sequence
  Synthetic
agagguuggugagugauuggagg

SEQ ID NO: 96976 - RNA, 24 nt, Artificial Sequence
  Synthetic
aagagguuggugagugauuggagg

SEQ ID NO: 96977 - RNA, 18 nt, Artificial Sequence
  Synthetic
gaacaugagaugauuagg

SEQ ID NO: 96978 - RNA, 19 nt, Artificial Sequence
  Synthetic
ugaacaugagaugauuagg

SEQ ID NO: 96979 - RNA, 20 nt, Artificial Sequence
  Synthetic
augaacaugagaugauuagg

SEQ ID NO: 96980 - RNA, 21 nt, Artificial Sequence
  Synthetic
caugaacaugagaugauuagg

SEQ ID NO: 96981 - RNA, 22 nt, Artificial Sequence
  Synthetic
acaugaacaugagaugauuagg

SEQ ID NO: 96982 - RNA, 23 nt, Artificial Sequence
  Synthetic
gacaugaacaugagaugauuagg

SEQ ID NO: 96983 - RNA, 24 nt, Artificial Sequence
  Synthetic
ggacaugaacaugagaugauuagg

SEQ ID NO: 96984 - RNA, 18 nt, Artificial Sequence
  Synthetic
  misc_feature (4)..(4): n is a, c, g, or u
  misc_feature (6)..(6): n is a, c, g, or u
agangnagaaggggacgg

SEQ ID NO: 96985 - RNA, 19 nt, Artificial Sequence
  Synthetic
  misc_feature (5)..(5): n is a, c, g, or u
  misc_feature (7)..(7): n is a, c, g, or u
cagangnagaaggggacgg

SEQ ID NO: 96986 - RNA, 20 nt, Artificial Sequence
  Synthetic
  misc_feature (6)..(6): n is a, c, g, or u
  misc_feature (8)..(8): n is a, c, g, or u
gcagangnagaaggggacgg

SEQ ID NO: 96987 - RNA, 21 nt, Artificial Sequence
  Synthetic
  misc_feature (7)..(7): n is a, c, g, or u
  misc_feature (9)..(9): n is a, c, g, or u
ggcagangnagaaggggacgg

SEQ ID NO: 96988 - RNA, 22 nt, Artificial Sequence
  Synthetic
  misc_feature (8)..(8): n is a, c, g, or u
  misc_feature (10)..(10): n is a, c, g, or u
cggcagangnagaaggggacgg

SEQ ID NO: 96989 - RNA, 23 nt, Artificial Sequence
  Synthetic
  misc_feature (9)..(9): n is a, c, g, or u
  misc_feature (11)..(11): n is a, c, g, or u
acggcagangnagaaggggacgg

SEQ ID NO: 96990 - RNA, 24 nt, Artificial Sequence
  Synthetic
  misc_feature (10)..(10): n is a, c, g, or u
  misc_feature (12)..(12): n is a, c, g, or u
aacggcagangnagaaggggacgg

SEQ ID NO: 96991 - RNA, 18 nt, Artificial Sequence
  Synthetic
uuccgcaguauggaucgg

SEQ ID NO: 96992 - RNA, 19 nt, Artificial Sequence
  Synthetic
guuccgcaguauggaucgg

SEQ ID NO: 96993 - RNA, 20 nt, Artificial Sequence
  Synthetic
aguuccgcaguauggaucgg

SEQ ID NO: 96994 - RNA, 21 nt, Artificial Sequence
  Synthetic
gaguuccgcaguauggaucgg

SEQ ID NO: 96995 - RNA, 22 nt, Artificial Sequence
  Synthetic
ggaguuccgcaguauggaucgg

SEQ ID NO: 96996 - RNA, 23 nt, Artificial Sequence
  Synthetic
aggaguuccgcaguauggaucgg

SEQ ID NO: 96997 - RNA, 24 nt, Artificial Sequence
  Synthetic
uaggaguuccgcaguauggaucgg

SEQ ID NO: 96998 - RNA, 18 nt, Artificial Sequence
  Synthetic
ggugcgccccguggucgg

SEQ ID NO: 96999 - RNA, 19 nt, Artificial Sequence
  Synthetic
aggugcgccccguggucgg

SEQ ID NO: 97000 - RNA, 20 nt, Artificial Sequence
  Synthetic
gaggugcgccccguggucgg

SEQ ID NO: 97001 - RNA, 21 nt, Artificial Sequence
  Synthetic
agaggugcgccccguggucgg

SEQ ID NO: 97002 - RNA, 22 nt, Artificial Sequence
  Synthetic
gagaggugcgccccguggucgg

SEQ ID NO: 97003 - RNA, 23 nt, Artificial Sequence
  Synthetic
agagaggugcgccccguggucgg

SEQ ID NO: 97004 - RNA, 24 nt, Artificial Sequence
  Synthetic
aagagaggugcgccccguggucgg

SEQ ID NO: 97005 - RNA, 18 nt, Artificial Sequence
  Synthetic
  misc_feature (3)..(3): n is a, c, g, or u
canugauccuuguugggg

SEQ ID NO: 97006 - RNA, 19 nt, Artificial Sequence
  Synthetic
  misc_feature (4)..(4): n is a, c, g, or u
ccanugauccuuguugggg

SEQ ID NO: 97007 - RNA, 20 nt, Artificial Sequence
  Synthetic
  misc_feature (5)..(5): n is a, c, g, or u
gccanugauccuuguugggg

SEQ ID NO: 97008 - RNA, 21 nt, Artificial Sequence
  Synthetic
  misc_feature (6)..(6): n is a, c, g, or u
ggccanugauccuuguugggg

SEQ ID NO: 97009 - RNA, 22 nt, Artificial Sequence
  Synthetic
  misc_feature (7)..(7): n is a, c, g, or u
uggccanugauccuuguugggg

SEQ ID NO: 97010 - RNA, 23 nt, Artificial Sequence
  Synthetic
  misc_feature (8)..(8): n is a, c, g, or u
cuggccanugauccuuguugggg

SEQ ID NO: 97011 - RNA, 24 nt, Artificial Sequence
  Synthetic
  misc_feature (1)..(1): n is a, c, g, or u
  misc_feature (9)..(9): n is a, c, g, or u
ncuggccanugauccuuguugggg

SEQ ID NO: 97012 - RNA, 18 nt, Artificial Sequence
  Synthetic
  misc_feature (9)..(9): n is a, c, g, or u
aaagcccangaugauggg

SEQ ID NO: 97013 - RNA, 19 nt, Artificial Sequence
  Synthetic
  misc_feature (10)..(10): n is a, c, g, or u
gaaagcccangaugauggg

SEQ ID NO: 97014 - RNA, 20 nt, Artificial Sequence
  Synthetic
  misc_feature (11)..(11): n is a, c, g, or u
cgaaagcccangaugauggg

SEQ ID NO: 97015 - RNA, 21 nt, Artificial Sequence
  Synthetic
  misc_feature (12)..(12): n is a, c, g, or u
gcgaaagcccangaugauggg

SEQ ID NO: 97016 - RNA, 22 nt, Artificial Sequence
  Synthetic
  misc_feature (13)..(13): n is a, c, g, or u
ugcgaaagcccangaugauggg

SEQ ID NO: 97017 - RNA, 23 nt, Artificial Sequence
  Synthetic
  misc_feature (14)..(14): n is a, c, g, or u
uugcgaaagcccangaugauggg

SEQ ID NO: 97018 - RNA, 24 nt, Artificial Sequence
  Synthetic
  misc_feature (15)..(15): n is a, c, g, or u
cuugcgaaagcccangaugauggg

SEQ ID NO: 97019 - RNA, 18 nt, Artificial Sequence
  Synthetic
agaagauugacgauaugg

SEQ ID NO: 97020 - RNA, 19 nt, Artificial Sequence
  Synthetic
gagaagauugacgauaugg

SEQ ID NO: 97021 - RNA, 20 nt, Artificial Sequence
  Synthetic
cgagaagauugacgauaugg

SEQ ID NO: 97022 - RNA, 21 nt, Artificial Sequence
  Synthetic
ucgagaagauugacgauaugg

SEQ ID NO: 97023 - RNA, 22 nt, Artificial Sequence
  Synthetic
cucgagaagauugacgauaugg

SEQ ID NO: 97024 - RNA, 23 nt, Artificial Sequence
  Synthetic
ccucgagaagauugacgauaugg

SEQ ID NO: 97025 - RNA, 24 nt, Artificial Sequence
  Synthetic
uccucgagaagauugacgauaugg

SEQ ID NO: 97026 - RNA, 18 nt, Artificial Sequence
  Synthetic
cugaaagccaaacagugg

SEQ ID NO: 97027 - RNA, 19 nt, Artificial Sequence
  Synthetic
acugaaagccaaacagugg

SEQ ID NO: 97028 - RNA, 20 nt, Artificial Sequence
  Synthetic
aacugaaagccaaacagugg

SEQ ID NO: 97029 - RNA, 21 nt, Artificial Sequence
  Synthetic
uaacugaaagccaaacagugg

SEQ ID NO: 97030 - RNA, 22 nt, Artificial Sequence
  Synthetic
auaacugaaagccaaacagugg

SEQ ID NO: 97031 - RNA, 23 nt, Artificial Sequence
  Synthetic
uauaacugaaagccaaacagugg

SEQ ID NO: 97032 - RNA, 24 nt, Artificial Sequence
  Synthetic
auauaacugaaagccaaacagugg

SEQ ID NO: 97033 - RNA, 18 nt, Artificial Sequence
  Synthetic
uuccugacugccgauugg

SEQ ID NO: 97034 - RNA, 19 nt, Artificial Sequence
  Synthetic
cuuccugacugccgauugg

SEQ ID NO: 97035 - RNA, 20 nt, Artificial Sequence
  Synthetic
ucuuccugacugccgauugg

SEQ ID NO: 97036 - RNA, 21 nt, Artificial Sequence
  Synthetic
gucuuccugacugccgauugg

SEQ ID NO: 97037 - RNA, 22 nt, Artificial Sequence
  Synthetic
ugucuuccugacugccgauugg

SEQ ID NO: 97038 - RNA, 23 nt, Artificial Sequence
  Synthetic
cugucuuccugacugccgauugg

SEQ ID NO: 97039 - RNA, 24 nt, Artificial Sequence
  Synthetic
gcugucuuccugacugccgauugg

SEQ ID NO: 97040 - RNA, 18 nt, Artificial Sequence
  Synthetic
  misc_feature (10)..(10): n is a, c, g, or u
  misc_feature (17)..(17): n is a, c, g, or u
aaugaaugunaggaaang

SEQ ID NO: 97041 - RNA, 19 nt, Artificial Sequence
  Synthetic
  misc_feature (11)..(11): n is a, c, g, or u
  misc_feature (18)..(18): n is a, c, g, or u
aaaugaaugunaggaaang

SEQ ID NO: 97042 - RNA, 20 nt, Artificial Sequence
  Synthetic
  misc_feature (1)..(1): n is a, c, g, or u
  misc_feature (12)..(12): n is a, c, g, or u
  misc_feature (19)..(19): n is a, c, g, or u
naaaugaaugunaggaaang

SEQ ID NO: 97043 - RNA, 21 nt, Artificial Sequence
  Synthetic
  misc_feature (1)..(2): n is a, c, g, or u
  misc_feature (13)..(13): n is a, c, g, or u
  misc_feature (20)..(20): n is a, c, g, or u
nnaaaugaaugunaggaaang

SEQ ID NO: 97044 - RNA, 22 nt, Artificial Sequence
  Synthetic
  misc_feature (2)..(3): n is a, c, g, or u
  misc_feature (14)..(14): n is a, c, g, or u
  misc_feature (21)..(21): n is a, c, g, or u
unnaaaugaaugunaggaaang

SEQ ID NO: 97045 - RNA, 23 nt, Artificial Sequence
  Synthetic
  misc_feature (1)..(1): n is a, c, g, or u
  misc_feature (3)..(4): n is a, c, g, or u
  misc_feature (15)..(15): n is a, c, g, or u
  misc_feature (22)..(22): n is a, c, g, or u
nunnaaaugaaugunaggaaang

SEQ ID NO: 97046 - RNA, 24 nt, Artificial Sequence
  Synthetic
  misc_feature (2)..(2): n is a, c, g, or u
  misc_feature (4)..(5): n is a, c, g, or u
  misc_feature (16)..(16): n is a, c, g, or u
  misc_feature (23)..(23): n is a, c, g, or u
cnunnaaaugaaugunaggaaang

SEQ ID NO: 97047 - RNA, 18 nt, Artificial Sequence
  Synthetic
  misc_feature (17)..(17): n is a, c, g, or u
cggccggaacggcagang

SEQ ID NO: 97048 - RNA, 19 nt, Artificial Sequence
  Synthetic
  misc_feature (18)..(18): n is a, c, g, or u
ucggccggaacggcagang

SEQ ID NO: 97049 - RNA, 20 nt, Artificial Sequence
  Synthetic
  misc_feature (19)..(19): n is a, c, g, or u
gucggccggaacggcagang

SEQ ID NO: 97050 - RNA, 21 nt, Artificial Sequence
  Synthetic
  misc_feature (20)..(20): n is a, c, g, or u
ggucggccggaacggcagang

SEQ ID NO: 97051 - RNA, 22 nt, Artificial Sequence
  Synthetic
  misc_feature (21)..(21): n is a, c, g, or u
uggucggccggaacggcagang

SEQ ID NO: 97052 - RNA, 23 nt, Artificial Sequence
  Synthetic
  misc_feature (22)..(22): n is a, c, g, or u
guggucggccggaacggcagang

SEQ ID NO: 97053 - RNA, 24 nt, Artificial Sequence
  Synthetic
  misc_feature (23)..(23): n is a, c, g, or u
cguggucggccggaacggcagang

SEQ ID NO: 97054 - RNA, 18 nt, Artificial Sequence
  Synthetic
  misc_feature (17)..(17): n is a, c, g, or u
uugguggucuguaagcng

SEQ ID NO: 97055 - RNA, 19 nt, Artificial Sequence
  Synthetic
  misc_feature (18)..(18): n is a, c, g, or u
uuugguggucuguaagcng

SEQ ID NO: 97056 - RNA, 20 nt, Artificial Sequence
  Synthetic
  misc_feature (19)..(19): n is a, c, g, or u
auuugguggucuguaagcng

SEQ ID NO: 97057 - RNA, 21 nt, Artificial Sequence
  Synthetic
  misc_feature (20)..(20): n is a, c, g, or u
cauuugguggucuguaagcng

SEQ ID NO: 97058 - RNA, 22 nt, Artificial Sequence
  Synthetic
  misc_feature (21)..(21): n is a, c, g, or u
gcauuugguggucuguaagcng

SEQ ID NO: 97059 - RNA, 23 nt, Artificial Sequence
  Synthetic
  misc_feature (22)..(22): n is a, c, g, or u
ggcauuugguggucuguaagcng

SEQ ID NO: 97060 - RNA, 24 nt, Artificial Sequence
  Synthetic
  misc_feature (23)..(23): n is a, c, g, or u
gggcauuugguggucuguaagcng

SEQ ID NO: 97061 - RNA, 18 nt, Artificial Sequence
  Synthetic
aggcauagcagcaggaug

SEQ ID NO: 97062 - RNA, 19 nt, Artificial Sequence
  Synthetic
gaggcauagcagcaggaug

SEQ ID NO: 97063 - RNA, 20 nt, Artificial Sequence
  Synthetic
ugaggcauagcagcaggaug

SEQ ID NO: 97064 - RNA, 21 nt, Artificial Sequence
  Synthetic
augaggcauagcagcaggaug

SEQ ID NO: 97065 - RNA, 22 nt, Artificial Sequence
  Synthetic
gaugaggcauagcagcaggaug

SEQ ID NO: 97066 - RNA, 23 nt, Artificial Sequence
  Synthetic
agaugaggcauagcagcaggaug

SEQ ID NO: 97067 - RNA, 24 nt, Artificial Sequence
  Synthetic
aagaugaggcauagcagcaggaug

SEQ ID NO: 97068 - RNA, 18 nt, Artificial Sequence
  Synthetic
  misc_feature (14)..(14): n is a, c, g, or u
uugcgaaagcccangaug

SEQ ID NO: 97069 - RNA, 19 nt, Artificial Sequence
  Synthetic
  misc_feature (15)..(15): n is a, c, g, or u
cuugcgaaagcccangaug

SEQ ID NO: 97070 - RNA, 20 nt, Artificial Sequence
  Synthetic
  misc_feature (16)..(16): n is a, c, g, or u
ucuugcgaaagcccangaug

SEQ ID NO: 97071 - RNA, 21 nt, Artificial Sequence
  Synthetic
  misc_feature (17)..(17): n is a, c, g, or u
aucuugcgaaagcccangaug

SEQ ID NO: 97072 - RNA, 22 nt, Artificial Sequence
  Synthetic
  misc_feature (18)..(18): n is a, c, g, or u
aaucuugcgaaagcccangaug

SEQ ID NO: 97073 - RNA, 23 nt, Artificial Sequence
  Synthetic
  misc_feature (19)..(19): n is a, c, g, or u
gaaucuugcgaaagcccangaug

SEQ ID NO: 97074 - RNA, 24 nt, Artificial Sequence
  Synthetic
  misc_feature (20)..(20): n is a, c, g, or u
ggaaucuugcgaaagcccangaug

SEQ ID NO: 97075 - RNA, 18 nt, Artificial Sequence
  Synthetic
  misc_feature (7)..(7): n is a, c, g, or u
uugccunagugcuguaug

SEQ ID NO: 97076 - RNA, 19 nt, Artificial Sequence
  Synthetic
  misc_feature (8)..(8): n is a, c, g, or u
cuugccunagugcuguaug

SEQ ID NO: 97077 - RNA, 20 nt, Artificial Sequence
  Synthetic
  misc_feature (9)..(9): n is a, c, g, or u
gcuugccunagugcuguaug

SEQ ID NO: 97078 - RNA, 21 nt, Artificial Sequence
  Synthetic
  misc_feature (10)..(10): n is a, c, g, or u
agcuugccunagugcuguaug

SEQ ID NO: 97079 - RNA, 22 nt, Artificial Sequence
  Synthetic
  misc_feature (11)..(11): n is a, c, g, or u
uagcuugccunagugcuguaug

SEQ ID NO: 97080 - RNA, 23 nt, Artificial Sequence
  Synthetic
  misc_feature (12)..(12): n is a, c, g, or u
auagcuugccunagugcuguaug

SEQ ID NO: 97081 - RNA, 24 nt, Artificial Sequence
  Synthetic
  misc_feature (13)..(13): n is a, c, g, or u
aauagcuugccunagugcuguaug

SEQ ID NO: 97082 - RNA, 18 nt, Artificial Sequence
  Synthetic
gaccuugggcaagaccug

SEQ ID NO: 97083 - RNA, 19 nt, Artificial Sequence
  Synthetic
agaccuugggcaagaccug

SEQ ID NO: 97084 - RNA, 20 nt, Artificial Sequence
  Synthetic
aagaccuugggcaagaccug

SEQ ID NO: 97085 - RNA, 21 nt, Artificial Sequence
  Synthetic
uaagaccuugggcaagaccug

SEQ ID NO: 97086 - RNA, 22 nt, Artificial Sequence
  Synthetic
  misc_feature (1)..(1): n is a, c, g, or u
nuaagaccuugggcaagaccug

SEQ ID NO: 97087 - RNA, 23 nt, Artificial Sequence
  Synthetic
  misc_feature (2)..(2): n is a, c, g, or u
unuaagaccuugggcaagaccug

SEQ ID NO: 97088 - RNA, 24 nt, Artificial Sequence
  Synthetic
  misc_feature (3)..(3): n is a, c, g, or u
aunuaagaccuugggcaagaccug

SEQ ID NO: 97089 - RNA, 18 nt, Artificial Sequence
  Synthetic
aaaaguugcauggugcug

SEQ ID NO: 97090 - RNA, 19 nt, Artificial Sequence
  Synthetic
aaaaaguugcauggugcug

SEQ ID NO: 97091 - RNA, 20 nt, Artificial Sequence
  Synthetic
gaaaaaguugcauggugcug

SEQ ID NO: 97092 - RNA, 21 nt, Artificial Sequence
  Synthetic
ugaaaaaguugcauggugcug

SEQ ID NO: 97093 - RNA, 22 nt, Artificial Sequence
  Synthetic
gugaaaaaguugcauggugcug

SEQ ID NO: 97094 - RNA, 23 nt, Artificial Sequence
  Synthetic
ggugaaaaaguugcauggugcug

SEQ ID NO: 97095 - RNA, 24 nt, Artificial Sequence
  Synthetic
aggugaaaaaguugcauggugcug

SEQ ID NO: 97096 - RNA, 18 nt, Artificial Sequence
  Synthetic
acugaaagccaaacagug

SEQ ID NO: 97097 - RNA, 19 nt, Artificial Sequence
  Synthetic
aacugaaagccaaacagug

SEQ ID NO: 97098 - RNA, 20 nt, Artificial Sequence
  Synthetic
uaacugaaagccaaacagug

SEQ ID NO: 97099 - RNA, 21 nt, Artificial Sequence
  Synthetic
auaacugaaagccaaacagug

SEQ ID NO: 97100 - RNA, 22 nt, Artificial Sequence
  Synthetic
uauaacugaaagccaaacagug

SEQ ID NO: 97101 - RNA, 23 nt, Artificial Sequence
  Synthetic
auauaacugaaagccaaacagug

SEQ ID NO: 97102 - RNA, 24 nt, Artificial Sequence
  Synthetic
cauauaacugaaagccaaacagug

SEQ ID NO: 97103 - RNA, 18 nt, Artificial Sequence
  Synthetic
  misc_feature (5)..(5): n is a, c, g, or u
uggunuccaugcgacgug

SEQ ID NO: 97104 - RNA, 19 nt, Artificial Sequence
  Synthetic
  misc_feature (6)..(6): n is a, c, g, or u
guggunuccaugcgacgug

SEQ ID NO: 97105 - RNA, 20 nt, Artificial Sequence
  Synthetic
  misc_feature (7)..(7): n is a, c, g, or u
gguggunuccaugcgacgug

SEQ ID NO: 97106 - RNA, 21 nt, Artificial Sequence
  Synthetic
  misc_feature (8)..(8): n is a, c, g, or u
cgguggunuccaugcgacgug

SEQ ID NO: 97107 - RNA, 22 nt, Artificial Sequence
  Synthetic
  misc_feature (9)..(9): n is a, c, g, or u
acgguggunuccaugcgacgug

SEQ ID NO: 97108 - RNA, 23 nt, Artificial Sequence
  Synthetic
  misc_feature (10)..(10): n is a, c, g, or u
cacgguggunuccaugcgacgug

SEQ ID NO: 97109 - RNA, 24 nt, Artificial Sequence
  Synthetic
  misc_feature (11)..(11): n is a, c, g, or u
ucacgguggunuccaugcgacgug

SEQ ID NO: 97110 - RNA, 18 nt, Artificial Sequence
  Synthetic
gacugucucuuagaggug

SEQ ID NO: 97111 - RNA, 19 nt, Artificial Sequence
  Synthetic
ugacugucucuuagaggug

SEQ ID NO: 97112 - RNA, 20 nt, Artificial Sequence
  Synthetic
augacugucucuuagaggug

SEQ ID NO: 97113 - RNA, 21 nt, Artificial Sequence
  Synthetic
gaugacugucucuuagaggug

SEQ ID NO: 97114 - RNA, 22 nt, Artificial Sequence
  Synthetic
ggaugacugucucuuagaggug

SEQ ID NO: 97115 - RNA, 23 nt, Artificial Sequence
  Synthetic
aggaugacugucucuuagaggug

SEQ ID NO: 97116 - RNA, 24 nt, Artificial Sequence
  Synthetic
gaggaugacugucucuuagaggug

SEQ ID NO: 97117 - RNA, 18 nt, Artificial Sequence
  Synthetic
  misc_feature (9)..(9): n is a, c, g, or u
uacagagcngaggcggug

SEQ ID NO: 97118 - RNA, 19 nt, Artificial Sequence
  Synthetic
  misc_feature (10)..(10): n is a, c, g, or u
auacagagcngaggcggug

SEQ ID NO: 97119 - RNA, 20 nt, Artificial Sequence
  Synthetic
  misc_feature (11)..(11): n is a, c, g, or u
gauacagagcngaggcggug

SEQ ID NO: 97120 - RNA, 21 nt, Artificial Sequence
  Synthetic
  misc_feature (12)..(12): n is a, c, g, or u
cgauacagagcngaggcggug

SEQ ID NO: 97121 - RNA, 22 nt, Artificial Sequence
  Synthetic
  misc_feature (13)..(13): n is a, c, g, or u
ccgauacagagcngaggcggug

SEQ ID NO: 97122 - RNA, 23 nt, Artificial Sequence
  Synthetic
  misc_feature (14)..(14): n is a, c, g, or u
cccgauacagagcngaggcggug

SEQ ID NO: 97123 - RNA, 24 nt, Artificial Sequence
  Synthetic
  misc_feature (15)..(15): n is a, c, g, or u
ucccgauacagagcngaggcggug

SEQ ID NO: 97124 - RNA, 18 nt, Artificial Sequence
  Synthetic
cuuccugacugccgauug

SEQ ID NO: 97125 - RNA, 19 nt, Artificial Sequence
  Synthetic
ucuuccugacugccgauug

SEQ ID NO: 97126 - RNA, 20 nt, Artificial Sequence
  Synthetic
gucuuccugacugccgauug

SEQ ID NO: 97127 - RNA, 21 nt, Artificial Sequence
  Synthetic
ugucuuccugacugccgauug

SEQ ID NO: 97128 - RNA, 22 nt, Artificial Sequence
  Synthetic
cugucuuccugacugccgauug

SEQ ID NO: 97129 - RNA, 23 nt, Artificial Sequence
  Synthetic
gcugucuuccugacugccgauug

SEQ ID NO: 97130 - RNA, 24 nt, Artificial Sequence
  Synthetic
ggcugucuuccugacugccgauug

SEQ ID NO: 97131 - RNA, 18 nt, Artificial Sequence
  Synthetic
  misc_feature (4)..(4): n is a, c, g, or u
auunguccccaugccuug

SEQ ID NO: 97132 - RNA, 19 nt, Artificial Sequence
  Synthetic
  misc_feature (5)..(5): n is a, c, g, or u
gauunguccccaugccuug

SEQ ID NO: 97133 - RNA, 20 nt, Artificial Sequence
  Synthetic
  misc_feature (6)..(6): n is a, c, g, or u
agauunguccccaugccuug

SEQ ID NO: 97134 - RNA, 21 nt, Artificial Sequence
  Synthetic
  misc_feature (7)..(7): n is a, c, g, or u
aagauunguccccaugccuug

SEQ ID NO: 97135 - RNA, 22 nt, Artificial Sequence
  Synthetic
  misc_feature (8)..(8): n is a, c, g, or u
aaagauunguccccaugccuug

SEQ ID NO: 97136 - RNA, 23 nt, Artificial Sequence
  Synthetic
  misc_feature (9)..(9): n is a, c, g, or u
gaaagauunguccccaugccuug

SEQ ID NO: 97137 - RNA, 24 nt, Artificial Sequence
  Synthetic
  misc_feature (10)..(10): n is a, c, g, or u
agaaagauunguccccaugccuug

SEQ ID NO: 97138 - RNA, 18 nt, Artificial Sequence
  Synthetic
  misc_feature (1)..(1): n is a, c, g, or u
  misc_feature (9)..(9): n is a, c, g, or u
ncuggccanugauccuug

SEQ ID NO: 97139 - RNA, 19 nt, Artificial Sequence
  Synthetic
  misc_feature (2)..(2): n is a, c, g, or u
  misc_feature (10)..(10): n is a, c, g, or u
cncuggccanugauccuug

SEQ ID NO: 97140 - RNA, 20 nt, Artificial Sequence
  Synthetic
  misc_feature (3)..(3): n is a, c, g, or u
  misc_feature (11)..(11): n is a, c, g, or u
ccncuggccanugauccuug

SEQ ID NO: 97141 - RNA, 21 nt, Artificial Sequence
  Synthetic
  misc_feature (4)..(4): n is a, c, g, or u
  misc_feature (12)..(12): n is a, c, g, or u
gccncuggccanugauccuug

SEQ ID NO: 97142 - RNA, 22 nt, Artificial Sequence
  Synthetic
  misc_feature (5)..(5): n is a, c, g, or u
  misc_feature (13)..(13): n is a, c, g, or u
ugccncuggccanugauccuug

SEQ ID NO: 97143 - RNA, 23 nt, Artificial Sequence
  Synthetic
  misc_feature (6)..(6): n is a, c, g, or u
  misc_feature (14)..(14): n is a, c, g, or u
uugccncuggccanugauccuug

SEQ ID NO: 97144 - RNA, 24 nt, Artificial Sequence
  Synthetic
  misc_feature (7)..(7): n is a, c, g, or u
  misc_feature (15)..(15): n is a, c, g, or u
uuugccncuggccanugauccuug

SEQ ID NO: 97145 - RNA, 18 nt, Artificial Sequence
  Synthetic
  misc_feature (4)..(4): n is a, c, g, or u
gggnucuagcagagcuug

SEQ ID NO: 97146 - RNA, 19 nt, Artificial Sequence
  Synthetic
  misc_feature (5)..(5): n is a, c, g, or u
ugggnucuagcagagcuug

SEQ ID NO: 97147 - RNA, 20 nt, Artificial Sequence
  Synthetic
  misc_feature (6)..(6): n is a, c, g, or u
cugggnucuagcagagcuug

SEQ ID NO: 97148 - RNA, 21 nt, Artificial Sequence
  Synthetic
  misc_feature (7)..(7): n is a, c, g, or u
ucugggnucuagcagagcuug

SEQ ID NO: 97149 - RNA, 22 nt, Artificial Sequence
  Synthetic
  misc_feature (8)..(8): n is a, c, g, or u
cucugggnucuagcagagcuug

SEQ ID NO: 97150 - RNA, 23 nt, Artificial Sequence
  Synthetic
  misc_feature (9)..(9): n is a, c, g, or u
acucugggnucuagcagagcuug

SEQ ID NO: 97151 - RNA, 24 nt, Artificial Sequence
  Synthetic
  misc_feature (10)..(10): n is a, c, g, or u
cacucugggnucuagcagagcuug

SEQ ID NO: 97152 - RNA, 18 nt, Artificial Sequence
  Synthetic
gaaaggccuuguaaguug

SEQ ID NO: 97153 - RNA, 19 nt, Artificial Sequence
  Synthetic
agaaaggccuuguaaguug

SEQ ID NO: 97154 - RNA, 20 nt, Artificial Sequence
  Synthetic
cagaaaggccuuguaaguug

SEQ ID NO: 97155 - RNA, 21 nt, Artificial Sequence
  Synthetic
acagaaaggccuuguaaguug

SEQ ID NO: 97156 - RNA, 22 nt, Artificial Sequence
  Synthetic
cacagaaaggccuuguaaguug

SEQ ID NO: 97157 - RNA, 23 nt, Artificial Sequence
  Synthetic
acacagaaaggccuuguaaguug

SEQ ID NO: 97158 - RNA, 24 nt, Artificial Sequence
  Synthetic
uacacagaaaggccuuguaaguug

SEQ ID NO: 97159 - RNA, 18 nt, Artificial Sequence
  Synthetic
  misc_feature (5)..(5): n is a, c, g, or u
  misc_feature (15)..(15): n is a, c, g, or u
gauanccaggacaanuug

SEQ ID NO: 97160 - RNA, 19 nt, Artificial Sequence
  Synthetic
  misc_feature (6)..(6): n is a, c, g, or u
  misc_feature (16)..(16): n is a, c, g, or u
cgauanccaggacaanuug

SEQ ID NO: 97161 - RNA, 20 nt, Artificial Sequence
  Synthetic
  misc_feature (7)..(7): n is a, c, g, or u
  misc_feature (17)..(17): n is a, c, g, or u
gcgauanccaggacaanuug

SEQ ID NO: 97162 - RNA, 21 nt, Artificial Sequence
  Synthetic
  misc_feature (8)..(8): n is a, c, g, or u
  misc_feature (18)..(18): n is a, c, g, or u
agcgauanccaggacaanuug

SEQ ID NO: 97163 - RNA, 22 nt, Artificial Sequence
  Synthetic
  misc_feature (9)..(9): n is a, c, g, or u
  misc_feature (19)..(19): n is a, c, g, or u
cagcgauanccaggacaanuug

SEQ ID NO: 97164 - RNA, 23 nt, Artificial Sequence
  Synthetic
  misc_feature (10)..(10): n is a, c, g, or u
  misc_feature (20)..(20): n is a, c, g, or u
ccagcgauanccaggacaanuug

SEQ ID NO: 97165 - RNA, 24 nt, Artificial Sequence
  Synthetic
  misc_feature (11)..(11): n is a, c, g, or u
  misc_feature (21)..(21): n is a, c, g, or u
uccagcgauanccaggacaanuug

SEQ ID NO: 97166 - RNA, 18 nt, Artificial Sequence
  Synthetic
  misc_feature (11)..(11): n is a, c, g, or u
  misc_feature (18)..(18): n is a, c, g, or u
aaaugaaugunaggaaan

SEQ ID NO: 97167 - RNA, 19 nt, Artificial Sequence
  Synthetic
  misc_feature (1)..(1): n is a, c, g, or u
  misc_feature (12)..(12): n is a, c, g, or u
  misc_feature (19)..(19): n is a, c, g, or u
naaaugaaugunaggaaan

SEQ ID NO: 97168 - RNA, 20 nt, Artificial Sequence
  Synthetic
  misc_feature (1)..(2): n is a, c, g, or u
  misc_feature (13)..(13): n is a, c, g, or u
  misc_feature (20)..(20): n is a, c, g, or u
nnaaaugaaugunaggaaan

SEQ ID NO: 97169 - RNA, 21 nt, Artificial Sequence
  Synthetic
  misc_feature (2)..(3): n is a, c, g, or u
  misc_feature (14)..(14): n is a, c, g, or u
  misc_feature (21)..(21): n is a, c, g, or u
unnaaaugaaugunaggaaan

SEQ ID NO: 97170 - RNA, 22 nt, Artificial Sequence
  Synthetic
  misc_feature (1)..(1): n is a, c, g, or u
  misc_feature (3)..(4): n is a, c, g, or u
  misc_feature (15)..(15): n is a, c, g, or u
  misc_feature (22)..(22): n is a, c, g, or u
nunnaaaugaaugunaggaaan

SEQ ID NO: 97171 - RNA, 23 nt, Artificial Sequence
  Synthetic
  misc_feature (2)..(2): n is a, c, g, or u
  misc_feature (4)..(5): n is a, c, g, or u
  misc_feature (16)..(16): n is a, c, g, or u
  misc_feature (23)..(23): n is a, c, g, or u
cnunnaaaugaaugunaggaaan

SEQ ID NO: 97172 - RNA, 24 nt, Artificial Sequence
  Synthetic
  misc_feature (3)..(3): n is a, c, g, or u
  misc_feature (5)..(6): n is a, c, g, or u
  misc_feature (17)..(17): n is a, c, g, or u
  misc_feature (24)..(24): n is a, c, g, or u
ucnunnaaaugaaugunaggaaan

SEQ ID NO: 97173 - RNA, 18 nt, Artificial Sequence
  Synthetic
  misc_feature (8)..(8): n is a, c, g, or u
  misc_feature (18)..(18): n is a, c, g, or u
agcgauanccaggacaan

SEQ ID NO: 97174 - RNA, 19 nt, Artificial Sequence
  Synthetic
  misc_feature (9)..(9): n is a, c, g, or u
  misc_feature (19)..(19): n is a, c, g, or u
cagcgauanccaggacaan

SEQ ID NO: 97175 - RNA, 20 nt, Artificial Sequence
  Synthetic
  misc_feature (10)..(10): n is a, c, g, or u
  misc_feature (20)..(20): n is a, c, g, or u
ccagcgauanccaggacaan

SEQ ID NO: 97176 - RNA, 21 nt, Artificial Sequence
  Synthetic
  misc_feature (11)..(11): n is a, c, g, or u
  misc_feature (21)..(21): n is a, c, g, or u
uccagcgauanccaggacaan

SEQ ID NO: 97177 - RNA, 22 nt, Artificial Sequence
  Synthetic
  misc_feature (12)..(12): n is a, c, g, or u
  misc_feature (22)..(22): n is a, c, g, or u
auccagcgauanccaggacaan

SEQ ID NO: 97178 - RNA, 23 nt, Artificial Sequence
  Synthetic
  misc_feature (13)..(13): n is a, c, g, or u
  misc_feature (23)..(23): n is a, c, g, or u
cauccagcgauanccaggacaan

SEQ ID NO: 97179 - RNA, 24 nt, Artificial Sequence
  Synthetic
  misc_feature (14)..(14): n is a, c, g, or u
  misc_feature (24)..(24): n is a, c, g, or u
acauccagcgauanccaggacaan

SEQ ID NO: 97180 - RNA, 18 nt, Artificial Sequence
  Synthetic
  misc_feature (15)..(15): n is a, c, g, or u
  misc_feature (18)..(18): n is a, c, g, or u
gguuuaaugccuuunucn

SEQ ID NO: 97181 - RNA, 19 nt, Artificial Sequence
  Synthetic
  misc_feature (1)..(1): n is a, c, g, or u
  misc_feature (16)..(16): n is a, c, g, or u
  misc_feature (19)..(19): n is a, c, g, or u
ngguuuaaugccuuunucn

SEQ ID NO: 97182 - RNA, 20 nt, Artificial Sequence
  Synthetic
  misc_feature (2)..(2): n is a, c, g, or u
  misc_feature (17)..(17): n is a, c, g, or u
  misc_feature (20)..(20): n is a, c, g, or u
angguuuaaugccuuunucn

SEQ ID NO: 97183 - RNA, 21 nt, Artificial Sequence
  Synthetic
  misc_feature (3)..(3): n is a, c, g, or u
  misc_feature (18)..(18): n is a, c, g, or u
  misc_feature (21)..(21): n is a, c, g, or u
uangguuuaaugccuuunucn

SEQ ID NO: 97184 - RNA, 22 nt, Artificial Sequence
  Synthetic
  misc_feature (4)..(4): n is a, c, g, or u
  misc_feature (19)..(19): n is a, c, g, or u
  misc_feature (22)..(22): n is a, c, g, or u
auangguuuaaugccuuunucn

SEQ ID NO: 97185 - RNA, 23 nt, Artificial Sequence
  Synthetic
  misc_feature (5)..(5): n is a, c, g, or u
  misc_feature (20)..(20): n is a, c, g, or u
  misc_feature (23)..(23): n is a, c, g, or u
aauangguuuaaugccuuunucn

SEQ ID NO: 97186 - RNA, 24 nt, Artificial Sequence
  Synthetic
  misc_feature (6)..(6): n is a, c, g, or u
  misc_feature (21)..(21): n is a, c, g, or u
  misc_feature (24)..(24): n is a, c, g, or u
uaauangguuuaaugccuuunucn

SEQ ID NO: 97187 - RNA, 18 nt, Artificial Sequence
  Synthetic
  misc_feature (5)..(5): n is a, c, g, or u
  misc_feature (18)..(18): n is a, c, g, or u
agacngccgugugguggn

SEQ ID NO: 97188 - RNA, 19 nt, Artificial Sequence
  Synthetic
  misc_feature (6)..(6): n is a, c, g, or u
  misc_feature (19)..(19): n is a, c, g, or u
aagacngccgugugguggn

SEQ ID NO: 97189 - RNA, 20 nt, Artificial Sequence
  Synthetic
  misc_feature (7)..(7): n is a, c, g, or u
  misc_feature (20)..(20): n is a, c, g, or u
aaagacngccgugugguggn

SEQ ID NO: 97190 - RNA, 21 nt, Artificial Sequence
  Synthetic
  misc_feature (8)..(8): n is a, c, g, or u
  misc_feature (21)..(21): n is a, c, g, or u
aaaagacngccgugugguggn

SEQ ID NO: 97191 - RNA, 22 nt, Artificial Sequence
  Synthetic
  misc_feature (9)..(9): n is a, c, g, or u
  misc_feature (22)..(22): n is a, c, g, or u
caaaagacngccgugugguggn

SEQ ID NO: 97192 - RNA, 23 nt, Artificial Sequence
  Synthetic
  misc_feature (10)..(10): n is a, c, g, or u
  misc_feature (23)..(23): n is a, c, g, or u
ccaaaagacngccgugugguggn

SEQ ID NO: 97193 - RNA, 24 nt, Artificial Sequence
  Synthetic
  misc_feature (11)..(11): n is a, c, g, or u
  misc_feature (24)..(24): n is a, c, g, or u
cccaaaagacngccgugugguggn

SEQ ID NO: 97194 - RNA, 18 nt, Artificial Sequence
  Synthetic
  misc_feature (17)..(18): n is a, c, g, or u
gagcuugguggaaugunn

SEQ ID NO: 97195 - RNA, 19 nt, Artificial Sequence
  Synthetic
  misc_feature (18)..(19): n is a, c, g, or u
agagcuugguggaaugunn

SEQ ID NO: 97196 - RNA, 20 nt, Artificial Sequence
  Synthetic
  misc_feature (19)..(20): n is a, c, g, or u
cagagcuugguggaaugunn

SEQ ID NO: 97197 - RNA, 21 nt, Artificial Sequence
  Synthetic
  misc_feature (20)..(21): n is a, c, g, or u
gcagagcuugguggaaugunn

SEQ ID NO: 97198 - RNA, 22 nt, Artificial Sequence
  Synthetic
  misc_feature (21)..(22): n is a, c, g, or u
agcagagcuugguggaaugunn

SEQ ID NO: 97199 - RNA, 23 nt, Artificial Sequence
  Synthetic
  misc_feature (22)..(23): n is a, c, g, or u
uagcagagcuugguggaaugunn

SEQ ID NO: 97200 - RNA, 24 nt, Artificial Sequence
  Synthetic
  misc_feature (23)..(24): n is a, c, g, or u
cuagcagagcuugguggaaugunn

SEQ ID NO: 97201 - RNA, 18 nt, Artificial Sequence
  Synthetic
  misc_feature (18)..(18): n is a, c, g, or u
agagcuugguggaaugun

SEQ ID NO: 97202 - RNA, 19 nt, Artificial Sequence
  Synthetic
  misc_feature (19)..(19): n is a, c, g, or u
cagagcuugguggaaugun

SEQ ID NO: 97203 - RNA, 20 nt, Artificial Sequence
  Synthetic
  misc_feature (20)..(20): n is a, c, g, or u
gcagagcuugguggaaugun

SEQ ID NO: 97204 - RNA, 21 nt, Artificial Sequence
  Synthetic
  misc_feature (21)..(21): n is a, c, g, or u
agcagagcuugguggaaugun

SEQ ID NO: 97205 - RNA, 22 nt, Artificial Sequence
  Synthetic
  misc_feature (22)..(22): n is a, c, g, or u
uagcagagcuugguggaaugun

SEQ ID NO: 97206 - RNA, 23 nt, Artificial Sequence
  Synthetic
  misc_feature (23)..(23): n is a, c, g, or u
cuagcagagcuugguggaaugun

SEQ ID NO: 97207 - RNA, 24 nt, Artificial Sequence
  Synthetic
  misc_feature (24)..(24): n is a, c, g, or u
ucuagcagagcuugguggaaugun

SEQ ID NO: 97208 - RNA, 18 nt, Artificial Sequence
  Synthetic
  misc_feature (4)..(4): n is a, c, g, or u
  misc_feature (6)..(7): n is a, c, g, or u
  misc_feature (18)..(18): n is a, c, g, or u
cucnunnaaaugaaugun

SEQ ID NO: 97209 - RNA, 19 nt, Artificial Sequence
  Synthetic
  misc_feature (5)..(5): n is a, c, g, or u
  misc_feature (7)..(8): n is a, c, g, or u
  misc_feature (19)..(19): n is a, c, g, or u
ccucnunnaaaugaaugun

SEQ ID NO: 97210 - RNA, 20 nt, Artificial Sequence
  Synthetic
  misc_feature (6)..(6): n is a, c, g, or u
  misc_feature (8)..(9): n is a, c, g, or u
  misc_feature (20)..(20): n is a, c, g, or u
uccucnunnaaaugaaugun

SEQ ID NO: 97211 - RNA, 21 nt, Artificial Sequence
  Synthetic
  misc_feature (1)..(1): n is a, c, g, or u
  misc_feature (7)..(7): n is a, c, g, or u
  misc_feature (9)..(10): n is a, c, g, or u
  misc_feature (21)..(21): n is a, c, g, or u
nuccucnunnaaaugaaugun

SEQ ID NO: 97212 - RNA, 22 nt, Artificial Sequence
  Synthetic
  misc_feature (2)..(2): n is a, c, g, or u
  misc_feature (8)..(8): n is a, c, g, or u
  misc_feature (10)..(11): n is a, c, g, or u
  misc_feature (22)..(22): n is a, c, g, or u
unuccucnunnaaaugaaugun

SEQ ID NO: 97213 - RNA, 23 nt, Artificial Sequence
  Synthetic
  misc_feature (3)..(3): n is a, c, g, or u
  misc_feature (9)..(9): n is a, c, g, or u
  misc_feature (11)..(12): n is a, c, g, or u
  misc_feature (23)..(23): n is a, c, g, or u
aunuccucnunnaaaugaaugun

SEQ ID NO: 97214 - RNA, 24 nt, Artificial Sequence
  Synthetic
  misc_feature (4)..(4): n is a, c, g, or u
  misc_feature (10)..(10): n is a, c, g, or u
  misc_feature (12)..(13): n is a, c, g, or u
  misc_feature (24)..(24): n is a, c, g, or u
aaunuccucnunnaaaugaaugun

SEQ ID NO: 97215 - RNA, 18 nt, Artificial Sequence
  Synthetic
aaaaguaagacaggaaau

SEQ ID NO: 97216 - RNA, 19 nt, Artificial Sequence
  Synthetic
caaaaguaagacaggaaau

SEQ ID NO: 97217 - RNA, 20 nt, Artificial Sequence
  Synthetic
ccaaaaguaagacaggaaau

SEQ ID NO: 97218 - RNA, 21 nt, Artificial Sequence
  Synthetic
uccaaaaguaagacaggaaau

SEQ ID NO: 97219 - RNA, 22 nt, Artificial Sequence
  Synthetic
uuccaaaaguaagacaggaaau

SEQ ID NO: 97220 - RNA, 23 nt, Artificial Sequence
  Synthetic
cuuccaaaaguaagacaggaaau

SEQ ID NO: 97221 - RNA, 24 nt, Artificial Sequence
  Synthetic
ucuuccaaaaguaagacaggaaau

SEQ ID NO: 97222 - RNA, 18 nt, Artificial Sequence
  Synthetic
cggaaguguugauaagau

SEQ ID NO: 97223 - RNA, 19 nt, Artificial Sequence
  Synthetic
ccggaaguguugauaagau

SEQ ID NO: 97224 - RNA, 20 nt, Artificial Sequence
  Synthetic
uccggaaguguugauaagau

SEQ ID NO: 97225 - RNA, 21 nt, Artificial Sequence
  Synthetic
uuccggaaguguugauaagau

SEQ ID NO: 97226 - RNA, 22 nt, Artificial Sequence
  Synthetic
uuuccggaaguguugauaagau

SEQ ID NO: 97227 - RNA, 23 nt, Artificial Sequence
  Synthetic
guuuccggaaguguugauaagau

SEQ ID NO: 97228 - RNA, 24 nt, Artificial Sequence
  Synthetic
aguuuccggaaguguugauaagau

SEQ ID NO: 97229 - RNA, 18 nt, Artificial Sequence
  Synthetic
  misc_feature (9)..(9): n is a, c, g, or u
gcacacggnccggcagau

SEQ ID NO: 97230 - RNA, 19 nt, Artificial Sequence
  Synthetic
  misc_feature (10)..(10): n is a, c, g, or u
ugcacacggnccggcagau

SEQ ID NO: 97231 - RNA, 20 nt, Artificial Sequence
  Synthetic
  misc_feature (11)..(11): n is a, c, g, or u
gugcacacggnccggcagau

SEQ ID NO: 97232 - RNA, 21 nt, Artificial Sequence
  Synthetic
  misc_feature (12)..(12): n is a, c, g, or u
agugcacacggnccggcagau

SEQ ID NO: 97233 - RNA, 22 nt, Artificial Sequence
  Synthetic
  misc_feature (13)..(13): n is a, c, g, or u
aagugcacacggnccggcagau

SEQ ID NO: 97234 - RNA, 23 nt, Artificial Sequence
  Synthetic
  misc_feature (14)..(14): n is a, c, g, or u
gaagugcacacggnccggcagau

SEQ ID NO: 97235 - RNA, 24 nt, Artificial Sequence
  Synthetic
  misc_feature (15)..(15): n is a, c, g, or u
cgaagugcacacggnccggcagau

SEQ ID NO: 97236 - RNA, 18 nt, Artificial Sequence
  Synthetic
cucgagaagauugacgau

SEQ ID NO: 97237 - RNA, 19 nt, Artificial Sequence
  Synthetic
ccucgagaagauugacgau

SEQ ID NO: 97238 - RNA, 20 nt, Artificial Sequence
  Synthetic
uccucgagaagauugacgau

SEQ ID NO: 97239 - RNA, 21 nt, Artificial Sequence
  Synthetic
guccucgagaagauugacgau

SEQ ID NO: 97240 - RNA, 22 nt, Artificial Sequence
  Synthetic
aguccucgagaagauugacgau

SEQ ID NO: 97241 - RNA, 23 nt, Artificial Sequence
  Synthetic
caguccucgagaagauugacgau

SEQ ID NO: 97242 - RNA, 24 nt, Artificial Sequence
  Synthetic
ccaguccucgagaagauugacgau

SEQ ID NO: 97243 - RNA, 18 nt, Artificial Sequence
  Synthetic
gaaagaaucccagaggau

SEQ ID NO: 97244 - RNA, 19 nt, Artificial Sequence
  Synthetic
ggaaagaaucccagaggau

SEQ ID NO: 97245 - RNA, 20 nt, Artificial Sequence
  Synthetic
gggaaagaaucccagaggau

SEQ ID NO: 97246 - RNA, 21 nt, Artificial Sequence
  Synthetic
cgggaaagaaucccagaggau

SEQ ID NO: 97247 - RNA, 22 nt, Artificial Sequence
  Synthetic
ucgggaaagaaucccagaggau

SEQ ID NO: 97248 - RNA, 23 nt, Artificial Sequence
  Synthetic
aucgggaaagaaucccagaggau

SEQ ID NO: 97249 - RNA, 24 nt, Artificial Sequence
  Synthetic
gaucgggaaagaaucccagaggau

SEQ ID NO: 97250 - RNA, 18 nt, Artificial Sequence
  Synthetic
aagagguuggugagugau

SEQ ID NO: 97251 - RNA, 19 nt, Artificial Sequence
  Synthetic
caagagguuggugagugau

SEQ ID NO: 97252 - RNA, 20 nt, Artificial Sequence
  Synthetic
acaagagguuggugagugau

SEQ ID NO: 97253 - RNA, 21 nt, Artificial Sequence
  Synthetic
gacaagagguuggugagugau

SEQ ID NO: 97254 - RNA, 22 nt, Artificial Sequence
  Synthetic
ggacaagagguuggugagugau

SEQ ID NO: 97255 - RNA, 23 nt, Artificial Sequence
  Synthetic
aggacaagagguuggugagugau

SEQ ID NO: 97256 - RNA, 24 nt, Artificial Sequence
  Synthetic
gaggacaagagguuggugagugau

SEQ ID NO: 97257 - RNA, 18 nt, Artificial Sequence
  Synthetic
  misc_feature (2)..(2): n is a, c, g, or u
cnggguccaacuggugau

SEQ ID NO: 97258 - RNA, 19 nt, Artificial Sequence
  Synthetic
  misc_feature (3)..(3): n is a, c, g, or u
gcnggguccaacuggugau

SEQ ID NO: 97259 - RNA, 20 nt, Artificial Sequence
  Synthetic
  misc_feature (1)..(1): n is a, c, g, or u
  misc_feature (4)..(4): n is a, c, g, or u
ngcnggguccaacuggugau

SEQ ID NO: 97260 - RNA, 21 nt, Artificial Sequence
  Synthetic
  misc_feature (2)..(2): n is a, c, g, or u
  misc_feature (5)..(5): n is a, c, g, or u
angcnggguccaacuggugau

SEQ ID NO: 97261 - RNA, 22 nt, Artificial Sequence
  Synthetic
  misc_feature (3)..(3): n is a, c, g, or u
  misc_feature (6)..(6): n is a, c, g, or u
aangcnggguccaacuggugau

SEQ ID NO: 97262 - RNA, 23 nt, Artificial Sequence
  Synthetic
  misc_feature (4)..(4): n is a, c, g, or u
  misc_feature (7)..(7): n is a, c, g, or u
gaangcnggguccaacuggugau

SEQ ID NO: 97263 - RNA, 24 nt, Artificial Sequence
  Synthetic
  misc_feature (5)..(5): n is a, c, g, or u
  misc_feature (8)..(8): n is a, c, g, or u
cgaangcnggguccaacuggugau

SEQ ID NO: 97264 - RNA, 18 nt, Artificial Sequence
  Synthetic
  misc_feature (3)..(3): n is a, c, g, or u
aanuauaggccccucacu

SEQ ID NO: 97265 - RNA, 19 nt, Artificial Sequence
  Synthetic
  misc_feature (4)..(4): n is a, c, g, or u
aaanuauaggccccucacu

SEQ ID NO: 97266 - RNA, 20 nt, Artificial Sequence
  Synthetic
  misc_feature (5)..(5): n is a, c, g, or u
gaaanuauaggccccucacu

SEQ ID NO: 97267 - RNA, 21 nt, Artificial Sequence
  Synthetic
  misc_feature (6)..(6): n is a, c, g, or u
ggaaanuauaggccccucacu

SEQ ID NO: 97268 - RNA, 22 nt, Artificial Sequence
  Synthetic
  misc_feature (7)..(7): n is a, c, g, or u
aggaaanuauaggccccucacu

SEQ ID NO: 97269 - RNA, 23 nt, Artificial Sequence
  Synthetic
  misc_feature (8)..(8): n is a, c, g, or u
caggaaanuauaggccccucacu

SEQ ID NO: 97270 - RNA, 24 nt, Artificial Sequence
  Synthetic
  misc_feature (9)..(9): n is a, c, g, or u
gcaggaaanuauaggccccucacu

SEQ ID NO: 97271 - RNA, 18 nt, Artificial Sequence
  Synthetic
acagugggggaaagcccu

SEQ ID NO: 97272 - RNA, 19 nt, Artificial Sequence
  Synthetic
aacagugggggaaagcccu

SEQ ID NO: 97273 - RNA, 20 nt, Artificial Sequence
  Synthetic
aaacagugggggaaagcccu

SEQ ID NO: 97274 - RNA, 21 nt, Artificial Sequence
  Synthetic
caaacagugggggaaagcccu

SEQ ID NO: 97275 - RNA, 22 nt, Artificial Sequence
  Synthetic
ccaaacagugggggaaagcccu

SEQ ID NO: 97276 - RNA, 23 nt, Artificial Sequence
  Synthetic
gccaaacagugggggaaagcccu

SEQ ID NO: 97277 - RNA, 24 nt, Artificial Sequence
  Synthetic
agccaaacagugggggaaagcccu

SEQ ID NO: 97278 - RNA, 18 nt, Artificial Sequence
  Synthetic
ucaauaugcccugagccu

SEQ ID NO: 97279 - RNA, 19 nt, Artificial Sequence
  Synthetic
gucaauaugcccugagccu

SEQ ID NO: 97280 - RNA, 20 nt, Artificial Sequence
  Synthetic
ugucaauaugcccugagccu

SEQ ID NO: 97281 - RNA, 21 nt, Artificial Sequence
  Synthetic
uugucaauaugcccugagccu

SEQ ID NO: 97282 - RNA, 22 nt, Artificial Sequence
  Synthetic
guugucaauaugcccugagccu

SEQ ID NO: 97283 - RNA, 23 nt, Artificial Sequence
  Synthetic
uguugucaauaugcccugagccu

SEQ ID NO: 97284 - RNA, 24 nt, Artificial Sequence
  Synthetic
cuguugucaauaugcccugagccu

SEQ ID NO: 97285 - RNA, 18 nt, Artificial Sequence
  Synthetic
gccacccaaggcacagcu

SEQ ID NO: 97286 - RNA, 19 nt, Artificial Sequence
  Synthetic
agccacccaaggcacagcu

SEQ ID NO: 97287 - RNA, 20 nt, Artificial Sequence
  Synthetic
aagccacccaaggcacagcu

SEQ ID NO: 97288 - RNA, 21 nt, Artificial Sequence
  Synthetic
aaagccacccaaggcacagcu

SEQ ID NO: 97289 - RNA, 22 nt, Artificial Sequence
  Synthetic
  misc_feature (1)..(1): n is a, c, g, or u
naaagccacccaaggcacagcu

SEQ ID NO: 97290 - RNA, 23 nt, Artificial Sequence
  Synthetic
  misc_feature (2)..(2): n is a, c, g, or u
cnaaagccacccaaggcacagcu

SEQ ID NO: 97291 - RNA, 24 nt, Artificial Sequence
  Synthetic
  misc_feature (3)..(3): n is a, c, g, or u
ccnaaagccacccaaggcacagcu

SEQ ID NO: 97292 - RNA, 18 nt, Artificial Sequence
  Synthetic
  misc_feature (4)..(4): n is a, c, g, or u
uuungcuccagaccggcu

SEQ ID NO: 97293 - RNA, 19 nt, Artificial Sequence
  Synthetic
  misc_feature (5)..(5): n is a, c, g, or u
guuungcuccagaccggcu

SEQ ID NO: 97294 - RNA, 20 nt, Artificial Sequence
  Synthetic
  misc_feature (6)..(6): n is a, c, g, or u
aguuungcuccagaccggcu

SEQ ID NO: 97295 - RNA, 21 nt, Artificial Sequence
  Synthetic
  misc_feature (1)..(1): n is a, c, g, or u
  misc_feature (7)..(7): n is a, c, g, or u
naguuungcuccagaccggcu

SEQ ID NO: 97296 - RNA, 22 nt, Artificial Sequence
  Synthetic
  misc_feature (2)..(2): n is a, c, g, or u
  misc_feature (8)..(8): n is a, c, g, or u
unaguuungcuccagaccggcu

SEQ ID NO: 97297 - RNA, 23 nt, Artificial Sequence
  Synthetic
  misc_feature (3)..(3): n is a, c, g, or u
  misc_feature (9)..(9): n is a, c, g, or u
aunaguuungcuccagaccggcu

SEQ ID NO: 97298 - RNA, 24 nt, Artificial Sequence
  Synthetic
  misc_feature (4)..(4): n is a, c, g, or u
  misc_feature (10)..(10): n is a, c, g, or u
gaunaguuungcuccagaccggcu

SEQ ID NO: 97299 - RNA, 18 nt, Artificial Sequence
  Synthetic
  misc_feature (12)..(12): n is a, c, g, or u
ggauuguuuganuuggcu

SEQ ID NO: 97300 - RNA, 19 nt, Artificial Sequence
  Synthetic
  misc_feature (13)..(13): n is a, c, g, or u
uggauuguuuganuuggcu

SEQ ID NO: 97301 - RNA, 20 nt, Artificial Sequence
  Synthetic
  misc_feature (14)..(14): n is a, c, g, or u
cuggauuguuuganuuggcu

SEQ ID NO: 97302 - RNA, 21 nt, Artificial Sequence
  Synthetic
  misc_feature (15)..(15): n is a, c, g, or u
ucuggauuguuuganuuggcu

SEQ ID NO: 97303 - RNA, 22 nt, Artificial Sequence
  Synthetic
  misc_feature (16)..(16): n is a, c, g, or u
aucuggauuguuuganuuggcu

SEQ ID NO: 97304 - RNA, 23 nt, Artificial Sequence
  Synthetic
  misc_feature (17)..(17): n is a, c, g, or u
aaucuggauuguuuganuuggcu

SEQ ID NO: 97305 - RNA, 24 nt, Artificial Sequence
  Synthetic
  misc_feature (18)..(18): n is a, c, g, or u
caaucuggauuguuuganuuggcu

SEQ ID NO: 97306 - RNA, 18 nt, Artificial Sequence
  Synthetic
cugaggaugacugucucu

SEQ ID NO: 97307 - RNA, 19 nt, Artificial Sequence
  Synthetic
ccugaggaugacugucucu

SEQ ID NO: 97308 - RNA, 20 nt, Artificial Sequence
  Synthetic
gccugaggaugacugucucu

SEQ ID NO: 97309 - RNA, 21 nt, Artificial Sequence
  Synthetic
ggccugaggaugacugucucu

SEQ ID NO: 97310 - RNA, 22 nt, Artificial Sequence
  Synthetic
uggccugaggaugacugucucu

SEQ ID NO: 97311 - RNA, 23 nt, Artificial Sequence
  Synthetic
auggccugaggaugacugucucu

SEQ ID NO: 97312 - RNA, 24 nt, Artificial Sequence
  Synthetic
cauggccugaggaugacugucucu

SEQ ID NO: 97313 - RNA, 18 nt, Artificial Sequence
  Synthetic
  misc_feature (3)..(3): n is a, c, g, or u
  misc_feature (9)..(9): n is a, c, g, or u
  misc_feature (11)..(11): n is a, c, g, or u
ucnuuaaananacagucu

SEQ ID NO: 97314 - RNA, 19 nt, Artificial Sequence
  Synthetic
  misc_feature (4)..(4): n is a, c, g, or u
  misc_feature (10)..(10): n is a, c, g, or u
  misc_feature (12)..(12): n is a, c, g, or u
gucnuuaaananacagucu

SEQ ID NO: 97315 - RNA, 20 nt, Artificial Sequence
  Synthetic
  misc_feature (5)..(5): n is a, c, g, or u
  misc_feature (11)..(11): n is a, c, g, or u
  misc_feature (13)..(13): n is a, c, g, or u
agucnuuaaananacagucu

SEQ ID NO: 97316 - RNA, 21 nt, Artificial Sequence
  Synthetic
  misc_feature (6)..(6): n is a, c, g, or u
  misc_feature (12)..(12): n is a, c, g, or u
  misc_feature (14)..(14): n is a, c, g, or u
cagucnuuaaananacagucu

SEQ ID NO: 97317 - RNA, 22 nt, Artificial Sequence
  Synthetic
  misc_feature (7)..(7): n is a, c, g, or u
  misc_feature (13)..(13): n is a, c, g, or u
  misc_feature (15)..(15): n is a, c, g, or u
ccagucnuuaaananacagucu

SEQ ID NO: 97318 - RNA, 23 nt, Artificial Sequence
  Synthetic
  misc_feature (8)..(8): n is a, c, g, or u
  misc_feature (14)..(14): n is a, c, g, or u
  misc_feature (16)..(16): n is a, c, g, or u
cccagucnuuaaananacagucu

SEQ ID NO: 97319 - RNA, 24 nt, Artificial Sequence
  Synthetic
  misc_feature (9)..(9): n is a, c, g, or u
  misc_feature (15)..(15): n is a, c, g, or u
  misc_feature (17)..(17): n is a, c, g, or u
ucccagucnuuaaananacagucu

SEQ ID NO: 97320 - RNA, 18 nt, Artificial Sequence
  Synthetic
cgauugagaccuucgucu

SEQ ID NO: 97321 - RNA, 19 nt, Artificial Sequence
  Synthetic
gcgauugagaccuucgucu

SEQ ID NO: 97322 - RNA, 20 nt, Artificial Sequence
  Synthetic
ggcgauugagaccuucgucu

SEQ ID NO: 97323 - RNA, 21 nt, Artificial Sequence
  Synthetic
cggcgauugagaccuucgucu

SEQ ID NO: 97324 - RNA, 22 nt, Artificial Sequence
  Synthetic
gcggcgauugagaccuucgucu

SEQ ID NO: 97325 - RNA, 23 nt, Artificial Sequence
  Synthetic
cgcggcgauugagaccuucgucu

SEQ ID NO: 97326 - RNA, 24 nt, Artificial Sequence
  Synthetic
acgcggcgauugagaccuucgucu

SEQ ID NO: 97327 - RNA, 18 nt, Artificial Sequence
  Synthetic
cgagggaguucuucuucu

SEQ ID NO: 97328 - RNA, 19 nt, Artificial Sequence
  Synthetic
gcgagggaguucuucuucu

SEQ ID NO: 97329 - RNA, 20 nt, Artificial Sequence
  Synthetic
ggcgagggaguucuucuucu

SEQ ID NO: 97330 - RNA, 21 nt, Artificial Sequence
  Synthetic
aggcgagggaguucuucuucu

SEQ ID NO: 97331 - RNA, 22 nt, Artificial Sequence
  Synthetic
gaggcgagggaguucuucuucu

SEQ ID NO: 97332 - RNA, 23 nt, Artificial Sequence
  Synthetic
cgaggcgagggaguucuucuucu

SEQ ID NO: 97333 - RNA, 24 nt, Artificial Sequence
  Synthetic
gcgaggcgagggaguucuucuucu

SEQ ID NO: 97334 - RNA, 18 nt, Artificial Sequence
  Synthetic
gaauagaaggaaagaagu

SEQ ID NO: 97335 - RNA, 19 nt, Artificial Sequence
  Synthetic
cgaauagaaggaaagaagu

SEQ ID NO: 97336 - RNA, 20 nt, Artificial Sequence
  Synthetic
  misc_feature (1)..(1): n is a, c, g, or u
ncgaauagaaggaaagaagu

SEQ ID NO: 97337 - RNA, 21 nt, Artificial Sequence
  Synthetic
  misc_feature (2)..(2): n is a, c, g, or u
cncgaauagaaggaaagaagu

SEQ ID NO: 97338 - RNA, 22 nt, Artificial Sequence
  Synthetic
  misc_feature (3)..(3): n is a, c, g, or u
ucncgaauagaaggaaagaagu

SEQ ID NO: 97339 - RNA, 23 nt, Artificial Sequence
  Synthetic
  misc_feature (4)..(4): n is a, c, g, or u
aucncgaauagaaggaaagaagu

SEQ ID NO: 97340 - RNA, 24 nt, Artificial Sequence
  Synthetic
  misc_feature (5)..(5): n is a, c, g, or u
gaucncgaauagaaggaaagaagu

SEQ ID NO: 97341 - RNA, 18 nt, Artificial Sequence
  Synthetic
aacugaaagccaaacagu

SEQ ID NO: 97342 - RNA, 19 nt, Artificial Sequence
  Synthetic
uaacugaaagccaaacagu

SEQ ID NO: 97343 - RNA, 20 nt, Artificial Sequence
  Synthetic
auaacugaaagccaaacagu

SEQ ID NO: 97344 - RNA, 21 nt, Artificial Sequence
  Synthetic
uauaacugaaagccaaacagu

SEQ ID NO: 97345 - RNA, 22 nt, Artificial Sequence
  Synthetic
auauaacugaaagccaaacagu

SEQ ID NO: 97346 - RNA, 23 nt, Artificial Sequence
  Synthetic
cauauaacugaaagccaaacagu

SEQ ID NO: 97347 - RNA, 24 nt, Artificial Sequence
  Synthetic
ccauauaacugaaagccaaacagu

SEQ ID NO: 97348 - RNA, 18 nt, Artificial Sequence
  Synthetic
  misc_feature (7)..(7): n is a, c, g, or u
uaugggngaggcaguagu

SEQ ID NO: 97349 - RNA, 19 nt, Artificial Sequence
  Synthetic
  misc_feature (8)..(8): n is a, c, g, or u
auaugggngaggcaguagu

SEQ ID NO: 97350 - RNA, 20 nt, Artificial Sequence
  Synthetic
  misc_feature (9)..(9): n is a, c, g, or u
gauaugggngaggcaguagu

SEQ ID NO: 97351 - RNA, 21 nt, Artificial Sequence
  Synthetic
  misc_feature (10)..(10): n is a, c, g, or u
cgauaugggngaggcaguagu

SEQ ID NO: 97352 - RNA, 22 nt, Artificial Sequence
  Synthetic
  misc_feature (11)..(11): n is a, c, g, or u
acgauaugggngaggcaguagu

SEQ ID NO: 97353 - RNA, 23 nt, Artificial Sequence
  Synthetic
  misc_feature (12)..(12): n is a, c, g, or u
gacgauaugggngaggcaguagu

SEQ ID NO: 97354 - RNA, 24 nt, Artificial Sequence
  Synthetic
  misc_feature (13)..(13): n is a, c, g, or u
ugacgauaugggngaggcaguagu

SEQ ID NO: 97355 - RNA, 18 nt, Artificial Sequence
  Synthetic
  misc_feature (11)..(11): n is a, c, g, or u
uacaagugcanuuuccgu

SEQ ID NO: 97356 - RNA, 19 nt, Artificial Sequence
  Synthetic
  misc_feature (12)..(12): n is a, c, g, or u
auacaagugcanuuuccgu

SEQ ID NO: 97357 - RNA, 20 nt, Artificial Sequence
  Synthetic
  misc_feature (13)..(13): n is a, c, g, or u
aauacaagugcanuuuccgu

SEQ ID NO: 97358 - RNA, 21 nt, Artificial Sequence
  Synthetic
  misc_feature (14)..(14): n is a, c, g, or u
gaauacaagugcanuuuccgu

SEQ ID NO: 97359 - RNA, 22 nt, Artificial Sequence
  Synthetic
  misc_feature (15)..(15): n is a, c, g, or u
ggaauacaagugcanuuuccgu

SEQ ID NO: 97360 - RNA, 23 nt, Artificial Sequence
  Synthetic
  misc_feature (16)..(16): n is a, c, g, or u
gggaauacaagugcanuuuccgu

SEQ ID NO: 97361 - RNA, 24 nt, Artificial Sequence
  Synthetic
  misc_feature (17)..(17): n is a, c, g, or u
ugggaauacaagugcanuuuccgu

SEQ ID NO: 97362 - RNA, 18 nt, Artificial Sequence
  Synthetic
cccaugccuugucgaggu

SEQ ID NO: 97363 - RNA, 19 nt, Artificial Sequence
  Synthetic
ccccaugccuugucgaggu

SEQ ID NO: 97364 - RNA, 20 nt, Artificial Sequence
  Synthetic
uccccaugccuugucgaggu

SEQ ID NO: 97365 - RNA, 21 nt, Artificial Sequence
  Synthetic
guccccaugccuugucgaggu

SEQ ID NO: 97366 - RNA, 22 nt, Artificial Sequence
  Synthetic
  misc_feature (1)..(1): n is a, c, g, or u
nguccccaugccuugucgaggu

SEQ ID NO: 97367 - RNA, 23 nt, Artificial Sequence
  Synthetic
  misc_feature (2)..(2): n is a, c, g, or u
unguccccaugccuugucgaggu

SEQ ID NO: 97368 - RNA, 24 nt, Artificial Sequence
  Synthetic
  misc_feature (3)..(3): n is a, c, g, or u
uunguccccaugccuugucgaggu

SEQ ID NO: 97369 - RNA, 18 nt, Artificial Sequence
  Synthetic
uggugagugauuggaggu

SEQ ID NO: 97370 - RNA, 19 nt, Artificial Sequence
  Synthetic
uuggugagugauuggaggu

SEQ ID NO: 97371 - RNA, 20 nt, Artificial Sequence
  Synthetic
guuggugagugauuggaggu

SEQ ID NO: 97372 - RNA, 21 nt, Artificial Sequence
  Synthetic
gguuggugagugauuggaggu

SEQ ID NO: 97373 - RNA, 22 nt, Artificial Sequence
  Synthetic
agguuggugagugauuggaggu

SEQ ID NO: 97374 - RNA, 23 nt, Artificial Sequence
  Synthetic
gagguuggugagugauuggaggu

SEQ ID NO: 97375 - RNA, 24 nt, Artificial Sequence
  Synthetic
agagguuggugagugauuggaggu

SEQ ID NO: 97376 - RNA, 18 nt, Artificial Sequence
  Synthetic
  misc_feature (5)..(5): n is a, c, g, or u
  misc_feature (7)..(8): n is a, c, g, or u
ccucnunnaaaugaaugu

SEQ ID NO: 97377 - RNA, 19 nt, Artificial Sequence
  Synthetic
  misc_feature (6)..(6): n is a, c, g, or u
  misc_feature (8)..(9): n is a, c, g, or u
uccucnunnaaaugaaugu

SEQ ID NO: 97378 - RNA, 20 nt, Artificial Sequence
  Synthetic
  misc_feature (1)..(1): n is a, c, g, or u
  misc_feature (7)..(7): n is a, c, g, or u
  misc_feature (9)..(10): n is a, c, g, or u
nuccucnunnaaaugaaugu

SEQ ID NO: 97379 - RNA, 21 nt, Artificial Sequence
  Synthetic
  misc_feature (2)..(2): n is a, c, g, or u
  misc_feature (8)..(8): n is a, c, g, or u
  misc_feature (10)..(11): n is a, c, g, or u
unuccucnunnaaaugaaugu

SEQ ID NO: 97380 - RNA, 22 nt, Artificial Sequence
  Synthetic
  misc_feature (3)..(3): n is a, c, g, or u
  misc_feature (9)..(9): n is a, c, g, or u
  misc_feature (11)..(12): n is a, c, g, or u
aunuccucnunnaaaugaaugu

SEQ ID NO: 97381 - RNA, 23 nt, Artificial Sequence
  Synthetic
  misc_feature (4)..(4): n is a, c, g, or u
  misc_feature (10)..(10): n is a, c, g, or u
  misc_feature (12)..(13): n is a, c, g, or u
aaunuccucnunnaaaugaaugu

SEQ ID NO: 97382 - RNA, 24 nt, Artificial Sequence
  Synthetic
  misc_feature (5)..(5): n is a, c, g, or u
  misc_feature (11)..(11): n is a, c, g, or u
  misc_feature (13)..(14): n is a, c, g, or u
uaaunuccucnunnaaaugaaugu

SEQ ID NO: 97383 - RNA, 18 nt, Artificial Sequence
  Synthetic
ccuuuuuucauuaacugu

SEQ ID NO: 97384 - RNA, 19 nt, Artificial Sequence
  Synthetic
uccuuuuuucauuaacugu

SEQ ID NO: 97385 - RNA, 20 nt, Artificial Sequence
  Synthetic
cuccuuuuuucauuaacugu

SEQ ID NO: 97386 - RNA, 21 nt, Artificial Sequence
  Synthetic
ucuccuuuuuucauuaacugu

SEQ ID NO: 97387 - RNA, 22 nt, Artificial Sequence
  Synthetic
aucuccuuuuuucauuaacugu

SEQ ID NO: 97388 - RNA, 23 nt, Artificial Sequence
  Synthetic
aaucuccuuuuuucauuaacugu

SEQ ID NO: 97389 - RNA, 24 nt, Artificial Sequence
  Synthetic
uaaucuccuuuuuucauuaacugu

SEQ ID NO: 97390 - RNA, 18 nt, Artificial Sequence
  Synthetic
  misc_feature (7)..(7): n is a, c, g, or u
  misc_feature (17)..(17): n is a, c, g, or u
gcgauanccaggacaanu

SEQ ID NO: 97391 - RNA, 19 nt, Artificial Sequence
  Synthetic
  misc_feature (8)..(8): n is a, c, g, or u
  misc_feature (18)..(18): n is a, c, g, or u
agcgauanccaggacaanu

SEQ ID NO: 97392 - RNA, 20 nt, Artificial Sequence
  Synthetic
  misc_feature (9)..(9): n is a, c, g, or u
  misc_feature (19)..(19): n is a, c, g, or u
cagcgauanccaggacaanu

SEQ ID NO: 97393 - RNA, 21 nt, Artificial Sequence
  Synthetic
  misc_feature (10)..(10): n is a, c, g, or u
  misc_feature (20)..(20): n is a, c, g, or u
ccagcgauanccaggacaanu

SEQ ID NO: 97394 - RNA, 22 nt, Artificial Sequence
  Synthetic
  misc_feature (11)..(11): n is a, c, g, or u
  misc_feature (21)..(21): n is a, c, g, or u
uccagcgauanccaggacaanu

SEQ ID NO: 97395 - RNA, 23 nt, Artificial Sequence
  Synthetic
  misc_feature (12)..(12): n is a, c, g, or u
  misc_feature (22)..(22): n is a, c, g, or u
auccagcgauanccaggacaanu

SEQ ID NO: 97396 - RNA, 24 nt, Artificial Sequence
  Synthetic
  misc_feature (13)..(13): n is a, c, g, or u
  misc_feature (23)..(23): n is a, c, g, or u
cauccagcgauanccaggacaanu

SEQ ID NO: 97397 - RNA, 18 nt, Artificial Sequence
  Synthetic
ugcucccccuagaaaauu

SEQ ID NO: 97398 - RNA, 19 nt, Artificial Sequence
  Synthetic
gugcucccccuagaaaauu

SEQ ID NO: 97399 - RNA, 20 nt, Artificial Sequence
  Synthetic
ggugcucccccuagaaaauu

SEQ ID NO: 97400 - RNA, 21 nt, Artificial Sequence
  Synthetic
gggugcucccccuagaaaauu

SEQ ID NO: 97401 - RNA, 22 nt, Artificial Sequence
  Synthetic
ugggugcucccccuagaaaauu

SEQ ID NO: 97402 - RNA, 23 nt, Artificial Sequence
  Synthetic
gugggugcucccccuagaaaauu

SEQ ID NO: 97403 - RNA, 24 nt, Artificial Sequence
  Synthetic
cgugggugcucccccuagaaaauu

SEQ ID NO: 97404 - RNA, 18 nt, Artificial Sequence
  Synthetic
aaagaaucccagaggauu

SEQ ID NO: 97405 - RNA, 19 nt, Artificial Sequence
  Synthetic
gaaagaaucccagaggauu

SEQ ID NO: 97406 - RNA, 20 nt, Artificial Sequence
  Synthetic
ggaaagaaucccagaggauu

SEQ ID NO: 97407 - RNA, 21 nt, Artificial Sequence
  Synthetic
gggaaagaaucccagaggauu

SEQ ID NO: 97408 - RNA, 22 nt, Artificial Sequence
  Synthetic
cgggaaagaaucccagaggauu

SEQ ID NO: 97409 - RNA, 23 nt, Artificial Sequence
  Synthetic
ucgggaaagaaucccagaggauu

SEQ ID NO: 97410 - RNA, 24 nt, Artificial Sequence
  Synthetic
aucgggaaagaaucccagaggauu

SEQ ID NO: 97411 - RNA, 18 nt, Artificial Sequence
  Synthetic
ucuagacucugugguauu

SEQ ID NO: 97412 - RNA, 19 nt, Artificial Sequence
  Synthetic
gucuagacucugugguauu

SEQ ID NO: 97413 - RNA, 20 nt, Artificial Sequence
  Synthetic
agucuagacucugugguauu

SEQ ID NO: 97414 - RNA, 21 nt, Artificial Sequence
  Synthetic
gagucuagacucugugguauu

SEQ ID NO: 97415 - RNA, 22 nt, Artificial Sequence
  Synthetic
cgagucuagacucugugguauu

SEQ ID NO: 97416 - RNA, 23 nt, Artificial Sequence
  Synthetic
acgagucuagacucugugguauu

SEQ ID NO: 97417 - RNA, 24 nt, Artificial Sequence
  Synthetic
cacgagucuagacucugugguauu

SEQ ID NO: 97418 - RNA, 18 nt, Artificial Sequence
  Synthetic
cacucccauaggaaucuu

SEQ ID NO: 97419 - RNA, 19 nt, Artificial Sequence
  Synthetic
ccacucccauaggaaucuu

SEQ ID NO: 97420 - RNA, 20 nt, Artificial Sequence
  Synthetic
cccacucccauaggaaucuu

SEQ ID NO: 97421 - RNA, 21 nt, Artificial Sequence
  Synthetic
gcccacucccauaggaaucuu

SEQ ID NO: 97422 - RNA, 22 nt, Artificial Sequence
  Synthetic
ggcccacucccauaggaaucuu

SEQ ID NO: 97423 - RNA, 23 nt, Artificial Sequence
  Synthetic
aggcccacucccauaggaaucuu

SEQ ID NO: 97424 - RNA, 24 nt, Artificial Sequence
  Synthetic
gaggcccacucccauaggaaucuu

SEQ ID NO: 97425 - RNA, 18 nt, Artificial Sequence
  Synthetic
uguaaauaaugccuaguu

SEQ ID NO: 97426 - RNA, 19 nt, Artificial Sequence
  Synthetic
auguaaauaaugccuaguu

SEQ ID NO: 97427 - RNA, 20 nt, Artificial Sequence
  Synthetic
uauguaaauaaugccuaguu

SEQ ID NO: 97428 - RNA, 21 nt, Artificial Sequence
  Synthetic
guauguaaauaaugccuaguu

SEQ ID NO: 97429 - RNA, 22 nt, Artificial Sequence
  Synthetic
aguauguaaauaaugccuaguu

SEQ ID NO: 97430 - RNA, 23 nt, Artificial Sequence
  Synthetic
gaguauguaaauaaugccuaguu

SEQ ID NO: 97431 - RNA, 24 nt, Artificial Sequence
  Synthetic
agaguauguaaauaaugccuaguu

SEQ ID NO: 97432 - RNA, 18 nt, Artificial Sequence
  Synthetic
ccaugccuugucgagguu

SEQ ID NO: 97433 - RNA, 19 nt, Artificial Sequence
  Synthetic
cccaugccuugucgagguu

SEQ ID NO: 97434 - RNA, 20 nt, Artificial Sequence
  Synthetic
ccccaugccuugucgagguu

SEQ ID NO: 97435 - RNA, 21 nt, Artificial Sequence
  Synthetic
uccccaugccuugucgagguu

SEQ ID NO: 97436 - RNA, 22 nt, Artificial Sequence
  Synthetic
guccccaugccuugucgagguu

SEQ ID NO: 97437 - RNA, 23 nt, Artificial Sequence
  Synthetic
  misc_feature (1)..(1): n is a, c, g, or u
nguccccaugccuugucgagguu

SEQ ID NO: 97438 - RNA, 24 nt, Artificial Sequence
  Synthetic
  misc_feature (2)..(2): n is a, c, g, or u
unguccccaugccuugucgagguu

SEQ ID NO: 97439 - RNA, 18 nt, Artificial Sequence
  Synthetic
ggugagugauuggagguu

SEQ ID NO: 97440 - RNA, 19 nt, Artificial Sequence
  Synthetic
uggugagugauuggagguu

SEQ ID NO: 97441 - RNA, 20 nt, Artificial Sequence
  Synthetic
uuggugagugauuggagguu

SEQ ID NO: 97442 - RNA, 21 nt, Artificial Sequence
  Synthetic
guuggugagugauuggagguu

SEQ ID NO: 97443 - RNA, 22 nt, Artificial Sequence
  Synthetic
gguuggugagugauuggagguu

SEQ ID NO: 97444 - RNA, 23 nt, Artificial Sequence
  Synthetic
agguuggugagugauuggagguu

SEQ ID NO: 97445 - RNA, 24 nt, Artificial Sequence
  Synthetic
gagguuggugagugauuggagguu

SEQ ID NO: 97446 - RNA, 18 nt, Artificial Sequence
  Synthetic
ggugaggugaacaauguu

SEQ ID NO: 97447 - RNA, 19 nt, Artificial Sequence
  Synthetic
uggugaggugaacaauguu

SEQ ID NO: 97448 - RNA, 20 nt, Artificial Sequence
  Synthetic
auggugaggugaacaauguu

SEQ ID NO: 97449 - RNA, 21 nt, Artificial Sequence
  Synthetic
uauggugaggugaacaauguu

SEQ ID NO: 97450 - RNA, 22 nt, Artificial Sequence
  Synthetic
guauggugaggugaacaauguu

SEQ ID NO: 97451 - RNA, 23 nt, Artificial Sequence
  Synthetic
uguauggugaggugaacaauguu

SEQ ID NO: 97452 - RNA, 24 nt, Artificial Sequence
  Synthetic
cuguauggugaggugaacaauguu

SEQ ID NO: 97453 - RNA, 18 nt, Artificial Sequence
  Synthetic
ggaacaggguuuacuguu

SEQ ID NO: 97454 - RNA, 19 nt, Artificial Sequence
  Synthetic
cggaacaggguuuacuguu

SEQ ID NO: 97455 - RNA, 20 nt, Artificial Sequence
  Synthetic
ucggaacaggguuuacuguu

SEQ ID NO: 97456 - RNA, 21 nt, Artificial Sequence
  Synthetic
gucggaacaggguuuacuguu

SEQ ID NO: 97457 - RNA, 22 nt, Artificial Sequence
  Synthetic
agucggaacaggguuuacuguu

SEQ ID NO: 97458 - RNA, 23 nt, Artificial Sequence
  Synthetic
uagucggaacaggguuuacuguu

SEQ ID NO: 97459 - RNA, 24 nt, Artificial Sequence
  Synthetic
guagucggaacaggguuuacuguu

SEQ ID NO: 97460 - RNA, 18 nt, Artificial Sequence
  Synthetic
  misc_feature (16)..(16): n is a, c, g, or u
uacauaucccaugaanuu

SEQ ID NO: 97461 - RNA, 19 nt, Artificial Sequence
  Synthetic
  misc_feature (17)..(17): n is a, c, g, or u
uuacauaucccaugaanuu

SEQ ID NO: 97462 - RNA, 20 nt, Artificial Sequence
  Synthetic
  misc_feature (18)..(18): n is a, c, g, or u
auuacauaucccaugaanuu

SEQ ID NO: 97463 - RNA, 21 nt, Artificial Sequence
  Synthetic
  misc_feature (19)..(19): n is a, c, g, or u
aauuacauaucccaugaanuu

SEQ ID NO: 97464 - RNA, 22 nt, Artificial Sequence
  Synthetic
  misc_feature (20)..(20): n is a, c, g, or u
caauuacauaucccaugaanuu

SEQ ID NO: 97465 - RNA, 23 nt, Artificial Sequence
  Synthetic
  misc_feature (21)..(21): n is a, c, g, or u
ccaauuacauaucccaugaanuu

SEQ ID NO: 97466 - RNA, 24 nt, Artificial Sequence
  Synthetic
  misc_feature (22)..(22): n is a, c, g, or u
uccaauuacauaucccaugaanuu

SEQ ID NO: 97467 - RNA, 18 nt, Artificial Sequence
  Synthetic
uggaaaggagguguauuu

SEQ ID NO: 97468 - RNA, 19 nt, Artificial Sequence
  Synthetic
auggaaaggagguguauuu

SEQ ID NO: 97469 - RNA, 20 nt, Artificial Sequence
  Synthetic
cauggaaaggagguguauuu

SEQ ID NO: 97470 - RNA, 21 nt, Artificial Sequence
  Synthetic
ccauggaaaggagguguauuu

SEQ ID NO: 97471 - RNA, 22 nt, Artificial Sequence
  Synthetic
gccauggaaaggagguguauuu

SEQ ID NO: 97472 - RNA, 23 nt, Artificial Sequence
  Synthetic
agccauggaaaggagguguauuu

SEQ ID NO: 97473 - RNA, 24 nt, Artificial Sequence
  Synthetic
cagccauggaaaggagguguauuu

SEQ ID NO: 97474 - RNA, 18 nt, Artificial Sequence
  Synthetic
  misc_feature (9)..(9): n is a, c, g, or u
  misc_feature (13)..(13): n is a, c, g, or u
ucuauuuanaggnaguuu

SEQ ID NO: 97475 - RNA, 19 nt, Artificial Sequence
  Synthetic
  misc_feature (10)..(10): n is a, c, g, or u
  misc_feature (14)..(14): n is a, c, g, or u
gucuauuuanaggnaguuu

SEQ ID NO: 97476 - RNA, 20 nt, Artificial Sequence
  Synthetic
  misc_feature (11)..(11): n is a, c, g, or u
  misc_feature (15)..(15): n is a, c, g, or u
ggucuauuuanaggnaguuu

SEQ ID NO: 97477 - RNA, 21 nt, Artificial Sequence
  Synthetic
  misc_feature (12)..(12): n is a, c, g, or u
  misc_feature (16)..(16): n is a, c, g, or u
aggucuauuuanaggnaguuu

SEQ ID NO: 97478 - RNA, 22 nt, Artificial Sequence
  Synthetic
  misc_feature (13)..(13): n is a, c, g, or u
  misc_feature (17)..(17): n is a, c, g, or u
uaggucuauuuanaggnaguuu

SEQ ID NO: 97479 - RNA, 23 nt, Artificial Sequence
  Synthetic
  misc_feature (14)..(14): n is a, c, g, or u
  misc_feature (18)..(18): n is a, c, g, or u
auaggucuauuuanaggnaguuu

SEQ ID NO: 97480 - RNA, 24 nt, Artificial Sequence
  Synthetic
  misc_feature (15)..(15): n is a, c, g, or u
  misc_feature (19)..(19): n is a, c, g, or u
aauaggucuauuuanaggnaguuu

SEQ ID NO: 97481 - RNA, 18 nt, Artificial Sequence
  Synthetic
gucuaacaacaguaguuu

SEQ ID NO: 97482 - RNA, 19 nt, Artificial Sequence
  Synthetic
cgucuaacaacaguaguuu

SEQ ID NO: 97483 - RNA, 20 nt, Artificial Sequence
  Synthetic
ucgucuaacaacaguaguuu

SEQ ID NO: 97484 - RNA, 21 nt, Artificial Sequence
  Synthetic
gucgucuaacaacaguaguuu

SEQ ID NO: 97485 - RNA, 22 nt, Artificial Sequence
  Synthetic
cgucgucuaacaacaguaguuu

SEQ ID NO: 97486 - RNA, 23 nt, Artificial Sequence
  Synthetic
ucgucgucuaacaacaguaguuu

SEQ ID NO: 97487 - RNA, 24 nt, Artificial Sequence
  Synthetic
cucgucgucuaacaacaguaguuu

SEQ ID NO: 97488 - RNA, 18 nt, Artificial Sequence
  Synthetic
cuuacaguuaaugaaaaa

SEQ ID NO: 97489 - RNA, 19 nt, Artificial Sequence
  Synthetic
ucuuacaguuaaugaaaaa

SEQ ID NO: 97490 - RNA, 20 nt, Artificial Sequence
  Synthetic
cucuuacaguuaaugaaaaa

SEQ ID NO: 97491 - RNA, 21 nt, Artificial Sequence
  Synthetic
ccucuuacaguuaaugaaaaa

SEQ ID NO: 97492 - RNA, 22 nt, Artificial Sequence
  Synthetic
cccucuuacaguuaaugaaaaa

SEQ ID NO: 97493 - RNA, 23 nt, Artificial Sequence
  Synthetic
gcccucuuacaguuaaugaaaaa

SEQ ID NO: 97494 - RNA, 24 nt, Artificial Sequence
  Synthetic
ggcccucuuacaguuaaugaaaaa

SEQ ID NO: 97495 - RNA, 18 nt, Artificial Sequence
  Synthetic
ucuuacaguuaaugaaaa

SEQ ID NO: 97496 - RNA, 19 nt, Artificial Sequence
  Synthetic
cucuuacaguuaaugaaaa

SEQ ID NO: 97497 - RNA, 20 nt, Artificial Sequence
  Synthetic
ccucuuacaguuaaugaaaa

SEQ ID NO: 97498 - RNA, 21 nt, Artificial Sequence
  Synthetic
cccucuuacaguuaaugaaaa

SEQ ID NO: 97499 - RNA, 22 nt, Artificial Sequence
  Synthetic
gcccucuuacaguuaaugaaaa

SEQ ID NO: 97500 - RNA, 23 nt, Artificial Sequence
  Synthetic
ggcccucuuacaguuaaugaaaa

SEQ ID NO: 97501 - RNA, 24 nt, Artificial Sequence
  Synthetic
gggcccucuuacaguuaaugaaaa

SEQ ID NO: 97502 - RNA, 18 nt, Artificial Sequence
  Synthetic
ccugucuuacuuuuggaa

SEQ ID NO: 97503 - RNA, 19 nt, Artificial Sequence
  Synthetic
uccugucuuacuuuuggaa

SEQ ID NO: 97504 - RNA, 20 nt, Artificial Sequence
  Synthetic
uuccugucuuacuuuuggaa

SEQ ID NO: 97505 - RNA, 21 nt, Artificial Sequence
  Synthetic
uuuccugucuuacuuuuggaa

SEQ ID NO: 97506 - RNA, 22 nt, Artificial Sequence
  Synthetic
auuuccugucuuacuuuuggaa

SEQ ID NO: 97507 - RNA, 23 nt, Artificial Sequence
  Synthetic
cauuuccugucuuacuuuuggaa

SEQ ID NO: 97508 - RNA, 24 nt, Artificial Sequence
  Synthetic
acauuuccugucuuacuuuuggaa

SEQ ID NO: 97509 - RNA, 18 nt, Artificial Sequence
  Synthetic
  misc_feature (14)..(14): n is a, c, g, or u
gcccaaggucuuanauaa

SEQ ID NO: 97510 - RNA, 19 nt, Artificial Sequence
  Synthetic
  misc_feature (15)..(15): n is a, c, g, or u
ugcccaaggucuuanauaa

SEQ ID NO: 97511 - RNA, 20 nt, Artificial Sequence
  Synthetic
  misc_feature (16)..(16): n is a, c, g, or u
uugcccaaggucuuanauaa

SEQ ID NO: 97512 - RNA, 21 nt, Artificial Sequence
  Synthetic
  misc_feature (17)..(17): n is a, c, g, or u
cuugcccaaggucuuanauaa

SEQ ID NO: 97513 - RNA, 22 nt, Artificial Sequence
  Synthetic
  misc_feature (18)..(18): n is a, c, g, or u
ucuugcccaaggucuuanauaa

SEQ ID NO: 97514 - RNA, 23 nt, Artificial Sequence
  Synthetic
  misc_feature (19)..(19): n is a, c, g, or u
gucuugcccaaggucuuanauaa

SEQ ID NO: 97515 - RNA, 24 nt, Artificial Sequence
  Synthetic
  misc_feature (20)..(20): n is a, c, g, or u
ggucuugcccaaggucuuanauaa

SEQ ID NO: 97516 - RNA, 18 nt, Artificial Sequence
  Synthetic
  misc_feature (7)..(7): n is a, c, g, or u
  misc_feature (11)..(11): n is a, c, g, or u
ggcuggnauunuauauaa

SEQ ID NO: 97517 - RNA, 19 nt, Artificial Sequence
  Synthetic
  misc_feature (8)..(8): n is a, c, g, or u
  misc_feature (12)..(12): n is a, c, g, or u
aggcuggnauunuauauaa

SEQ ID NO: 97518 - RNA, 20 nt, Artificial Sequence
  Synthetic
  misc_feature (9)..(9): n is a, c, g, or u
  misc_feature (13)..(13): n is a, c, g, or u
aaggcuggnauunuauauaa

SEQ ID NO: 97519 - RNA, 21 nt, Artificial Sequence
  Synthetic
  misc_feature (10)..(10): n is a, c, g, or u
  misc_feature (14)..(14): n is a, c, g, or u
gaaggcuggnauunuauauaa

SEQ ID NO: 97520 - RNA, 22 nt, Artificial Sequence
  Synthetic
  misc_feature (11)..(11): n is a, c, g, or u
  misc_feature (15)..(15): n is a, c, g, or u
ggaaggcuggnauunuauauaa

SEQ ID NO: 97521 - RNA, 23 nt, Artificial Sequence
  Synthetic
  misc_feature (12)..(12): n is a, c, g, or u
  misc_feature (16)..(16): n is a, c, g, or u
uggaaggcuggnauunuauauaa

SEQ ID NO: 97522 - RNA, 24 nt, Artificial Sequence
  Synthetic
  misc_feature (13)..(13): n is a, c, g, or u
  misc_feature (17)..(17): n is a, c, g, or u
guggaaggcuggnauunuauauaa

SEQ ID NO: 97523 - RNA, 18 nt, Artificial Sequence
  Synthetic
  misc_feature (2)..(2): n is a, c, g, or u
anuucaugggauauguaa

SEQ ID NO: 97524 - RNA, 19 nt, Artificial Sequence
  Synthetic
  misc_feature (3)..(3): n is a, c, g, or u
aanuucaugggauauguaa

SEQ ID NO: 97525 - RNA, 20 nt, Artificial Sequence
  Synthetic
  misc_feature (4)..(4): n is a, c, g, or u
uaanuucaugggauauguaa

SEQ ID NO: 97526 - RNA, 21 nt, Artificial Sequence
  Synthetic
  misc_feature (5)..(5): n is a, c, g, or u
uuaanuucaugggauauguaa

SEQ ID NO: 97527 - RNA, 22 nt, Artificial Sequence
  Synthetic
  misc_feature (6)..(6): n is a, c, g, or u
cuuaanuucaugggauauguaa

SEQ ID NO: 97528 - RNA, 23 nt, Artificial Sequence
  Synthetic
  misc_feature (7)..(7): n is a, c, g, or u
ccuuaanuucaugggauauguaa

SEQ ID NO: 97529 - RNA, 24 nt, Artificial Sequence
  Synthetic
  misc_feature (8)..(8): n is a, c, g, or u
cccuuaanuucaugggauauguaa

SEQ ID NO: 97530 - RNA, 18 nt, Artificial Sequence
  Synthetic
ugccguuccggccgacca

SEQ ID NO: 97531 - RNA, 19 nt, Artificial Sequence
  Synthetic
cugccguuccggccgacca

SEQ ID NO: 97532 - RNA, 20 nt, Artificial Sequence
  Synthetic
ucugccguuccggccgacca

SEQ ID NO: 97533 - RNA, 21 nt, Artificial Sequence
  Synthetic
  misc_feature (1)..(1): n is a, c, g, or u
nucugccguuccggccgacca

SEQ ID NO: 97534 - RNA, 22 nt, Artificial Sequence
  Synthetic
  misc_feature (2)..(2): n is a, c, g, or u
cnucugccguuccggccgacca

SEQ ID NO: 97535 - RNA, 23 nt, Artificial Sequence
  Synthetic
  misc_feature (1)..(1): n is a, c, g, or u
  misc_feature (3)..(3): n is a, c, g, or u
ncnucugccguuccggccgacca

SEQ ID NO: 97536 - RNA, 24 nt, Artificial Sequence
  Synthetic
  misc_feature (2)..(2): n is a, c, g, or u
  misc_feature (4)..(4): n is a, c, g, or u
uncnucugccguuccggccgacca

SEQ ID NO: 97537 - RNA, 18 nt, Artificial Sequence
  Synthetic
ggaacaagagcuacagca

SEQ ID NO: 97538 - RNA, 19 nt, Artificial Sequence
  Synthetic
gggaacaagagcuacagca

SEQ ID NO: 97539 - RNA, 20 nt, Artificial Sequence
  Synthetic
ugggaacaagagcuacagca

SEQ ID NO: 97540 - RNA, 21 nt, Artificial Sequence
  Synthetic
uugggaacaagagcuacagca

SEQ ID NO: 97541 - RNA, 22 nt, Artificial Sequence
  Synthetic
cuugggaacaagagcuacagca

SEQ ID NO: 97542 - RNA, 23 nt, Artificial Sequence
  Synthetic
ucuugggaacaagagcuacagca

SEQ ID NO: 97543 - RNA, 24 nt, Artificial Sequence
  Synthetic
uucuugggaacaagagcuacagca

SEQ ID NO: 97544 - RNA, 18 nt, Artificial Sequence
  Synthetic
gaacaucaacuaccagca

SEQ ID NO: 97545 - RNA, 19 nt, Artificial Sequence
  Synthetic
ggaacaucaacuaccagca

SEQ ID NO: 97546 - RNA, 20 nt, Artificial Sequence
  Synthetic
aggaacaucaacuaccagca

SEQ ID NO: 97547 - RNA, 21 nt, Artificial Sequence
  Synthetic
caggaacaucaacuaccagca

SEQ ID NO: 97548 - RNA, 22 nt, Artificial Sequence
  Synthetic
ccaggaacaucaacuaccagca

SEQ ID NO: 97549 - RNA, 23 nt, Artificial Sequence
  Synthetic
uccaggaacaucaacuaccagca

SEQ ID NO: 97550 - RNA, 24 nt, Artificial Sequence
  Synthetic
uuccaggaacaucaacuaccagca

SEQ ID NO: 97551 - RNA, 18 nt, Artificial Sequence
  Synthetic
ccaaaccucgacaaggca

SEQ ID NO: 97552 - RNA, 19 nt, Artificial Sequence
  Synthetic
uccaaaccucgacaaggca

SEQ ID NO: 97553 - RNA, 20 nt, Artificial Sequence
  Synthetic
uuccaaaccucgacaaggca

SEQ ID NO: 97554 - RNA, 21 nt, Artificial Sequence
  Synthetic
cuuccaaaccucgacaaggca

SEQ ID NO: 97555 - RNA, 22 nt, Artificial Sequence
  Synthetic
ucuuccaaaccucgacaaggca

SEQ ID NO: 97556 - RNA, 23 nt, Artificial Sequence
  Synthetic
gucuuccaaaccucgacaaggca

SEQ ID NO: 97557 - RNA, 24 nt, Artificial Sequence
  Synthetic
ggucuuccaaaccucgacaaggca

SEQ ID NO: 97558 - RNA, 18 nt, Artificial Sequence
  Synthetic
ucauccucaggccaugca

SEQ ID NO: 97559 - RNA, 19 nt, Artificial Sequence
  Synthetic
gucauccucaggccaugca

SEQ ID NO: 97560 - RNA, 20 nt, Artificial Sequence
  Synthetic
agucauccucaggccaugca

SEQ ID NO: 97561 - RNA, 21 nt, Artificial Sequence
  Synthetic
cagucauccucaggccaugca

SEQ ID NO: 97562 - RNA, 22 nt, Artificial Sequence
  Synthetic
acagucauccucaggccaugca

SEQ ID NO: 97563 - RNA, 23 nt, Artificial Sequence
  Synthetic
gacagucauccucaggccaugca

SEQ ID NO: 97564 - RNA, 24 nt, Artificial Sequence
  Synthetic
agacagucauccucaggccaugca

SEQ ID NO: 97565 - RNA, 18 nt, Artificial Sequence
  Synthetic
aggacuggggacccugca

SEQ ID NO: 97566 - RNA, 19 nt, Artificial Sequence
  Synthetic
gaggacuggggacccugca

SEQ ID NO: 97567 - RNA, 20 nt, Artificial Sequence
  Synthetic
cgaggacuggggacccugca

SEQ ID NO: 97568 - RNA, 21 nt, Artificial Sequence
  Synthetic
ucgaggacuggggacccugca

SEQ ID NO: 97569 - RNA, 22 nt, Artificial Sequence
  Synthetic
cucgaggacuggggacccugca

SEQ ID NO: 97570 - RNA, 23 nt, Artificial Sequence
  Synthetic
ucucgaggacuggggacccugca

SEQ ID NO: 97571 - RNA, 24 nt, Artificial Sequence
  Synthetic
uucucgaggacuggggacccugca

SEQ ID NO: 97572 - RNA, 18 nt, Artificial Sequence
  Synthetic
  misc_feature (9)..(9): n is a, c, g, or u
cugcacganuccugcuca

SEQ ID NO: 97573 - RNA, 19 nt, Artificial Sequence
  Synthetic
  misc_feature (10)..(10): n is a, c, g, or u
ccugcacganuccugcuca

SEQ ID NO: 97574 - RNA, 20 nt, Artificial Sequence
  Synthetic
  misc_feature (11)..(11): n is a, c, g, or u
accugcacganuccugcuca

SEQ ID NO: 97575 - RNA, 21 nt, Artificial Sequence
  Synthetic
  misc_feature (12)..(12): n is a, c, g, or u
gaccugcacganuccugcuca

SEQ ID NO: 97576 - RNA, 22 nt, Artificial Sequence
  Synthetic
  misc_feature (13)..(13): n is a, c, g, or u
agaccugcacganuccugcuca

SEQ ID NO: 97577 - RNA, 23 nt, Artificial Sequence
  Synthetic
  misc_feature (14)..(14): n is a, c, g, or u
aagaccugcacganuccugcuca

SEQ ID NO: 97578 - RNA, 24 nt, Artificial Sequence
  Synthetic
  misc_feature (15)..(15): n is a, c, g, or u
caagaccugcacganuccugcuca

SEQ ID NO: 97579 - RNA, 18 nt, Artificial Sequence
  Synthetic
  misc_feature (5)..(5): n is a, c, g, or u
  misc_feature (9)..(9): n is a, c, g, or u
cuggnauunuauauaaga

SEQ ID NO: 97580 - RNA, 19 nt, Artificial Sequence
  Synthetic
  misc_feature (6)..(6): n is a, c, g, or u
  misc_feature (10)..(10): n is a, c, g, or u
gcuggnauunuauauaaga

SEQ ID NO: 97581 - RNA, 20 nt, Artificial Sequence
  Synthetic
  misc_feature (7)..(7): n is a, c, g, or u
  misc_feature (11)..(11): n is a, c, g, or u
ggcuggnauunuauauaaga

SEQ ID NO: 97582 - RNA, 21 nt, Artificial Sequence
  Synthetic
  misc_feature (8)..(8): n is a, c, g, or u
  misc_feature (12)..(12): n is a, c, g, or u
aggcuggnauunuauauaaga

SEQ ID NO: 97583 - RNA, 22 nt, Artificial Sequence
  Synthetic
  misc_feature (9)..(9): n is a, c, g, or u
  misc_feature (13)..(13): n is a, c, g, or u
aaggcuggnauunuauauaaga

SEQ ID NO: 97584 - RNA, 23 nt, Artificial Sequence
  Synthetic
  misc_feature (10)..(10): n is a, c, g, or u
  misc_feature (14)..(14): n is a, c, g, or u
gaaggcuggnauunuauauaaga

SEQ ID NO: 97585 - RNA, 24 nt, Artificial Sequence
  Synthetic
  misc_feature (11)..(11): n is a, c, g, or u
  misc_feature (15)..(15): n is a, c, g, or u
ggaaggcuggnauunuauauaaga

SEQ ID NO: 97586 - RNA, 18 nt, Artificial Sequence
  Synthetic
  misc_feature (12)..(12): n is a, c, g, or u
gcucugcuagancccaga

SEQ ID NO: 97587 - RNA, 19 nt, Artificial Sequence
  Synthetic
  misc_feature (13)..(13): n is a, c, g, or u
agcucugcuagancccaga

SEQ ID NO: 97588 - RNA, 20 nt, Artificial Sequence
  Synthetic
  misc_feature (14)..(14): n is a, c, g, or u
aagcucugcuagancccaga

SEQ ID NO: 97589 - RNA, 21 nt, Artificial Sequence
  Synthetic
  misc_feature (15)..(15): n is a, c, g, or u
caagcucugcuagancccaga

SEQ ID NO: 97590 - RNA, 22 nt, Artificial Sequence
  Synthetic
  misc_feature (16)..(16): n is a, c, g, or u
ccaagcucugcuagancccaga

SEQ ID NO: 97591 - RNA, 23 nt, Artificial Sequence
  Synthetic
  misc_feature (17)..(17): n is a, c, g, or u
accaagcucugcuagancccaga

SEQ ID NO: 97592 - RNA, 24 nt, Artificial Sequence
  Synthetic
  misc_feature (18)..(18): n is a, c, g, or u
caccaagcucugcuagancccaga

SEQ ID NO: 97593 - RNA, 18 nt, Artificial Sequence
  Synthetic
  misc_feature (4)..(4): n is a, c, g, or u
caanucaaacaauccaga

SEQ ID NO: 97594 - RNA, 19 nt, Artificial Sequence
  Synthetic
  misc_feature (5)..(5): n is a, c, g, or u
ccaanucaaacaauccaga

SEQ ID NO: 97595 - RNA, 20 nt, Artificial Sequence
  Synthetic
  misc_feature (6)..(6): n is a, c, g, or u
gccaanucaaacaauccaga

SEQ ID NO: 97596 - RNA, 21 nt, Artificial Sequence
  Synthetic
  misc_feature (7)..(7): n is a, c, g, or u
agccaanucaaacaauccaga

SEQ ID NO: 97597 - RNA, 22 nt, Artificial Sequence
  Synthetic
  misc_feature (8)..(8): n is a, c, g, or u
gagccaanucaaacaauccaga

SEQ ID NO: 97598 - RNA, 23 nt, Artificial Sequence
  Synthetic
  misc_feature (9)..(9): n is a, c, g, or u
ggagccaanucaaacaauccaga

SEQ ID NO: 97599 - RNA, 24 nt, Artificial Sequence
  Synthetic
  misc_feature (10)..(10): n is a, c, g, or u
cggagccaanucaaacaauccaga

SEQ ID NO: 97600 - RNA, 18 nt, Artificial Sequence
  Synthetic
cgucaaucuucucgagga

SEQ ID NO: 97601 - RNA, 19 nt, Artificial Sequence
  Synthetic
ucgucaaucuucucgagga

SEQ ID NO: 97602 - RNA, 20 nt, Artificial Sequence
  Synthetic
aucgucaaucuucucgagga

SEQ ID NO: 97603 - RNA, 21 nt, Artificial Sequence
  Synthetic
uaucgucaaucuucucgagga

SEQ ID NO: 97604 - RNA, 22 nt, Artificial Sequence
  Synthetic
auaucgucaaucuucucgagga

SEQ ID NO: 97605 - RNA, 23 nt, Artificial Sequence
  Synthetic
cauaucgucaaucuucucgagga

SEQ ID NO: 97606 - RNA, 24 nt, Artificial Sequence
  Synthetic
ccauaucgucaaucuucucgagga

SEQ ID NO: 97607 - RNA, 18 nt, Artificial Sequence
  Synthetic
  misc_feature (2)..(2): n is a, c, g, or u
  misc_feature (9)..(9): n is a, c, g, or u
gnggcaaancagguagga

SEQ ID NO: 97608 - RNA, 19 nt, Artificial Sequence
  Synthetic
  misc_feature (3)..(3): n is a, c, g, or u
  misc_feature (10)..(10): n is a, c, g, or u
agnggcaaancagguagga

SEQ ID NO: 97609 - RNA, 20 nt, Artificial Sequence
  Synthetic
  misc_feature (4)..(4): n is a, c, g, or u
  misc_feature (11)..(11): n is a, c, g, or u
cagnggcaaancagguagga

SEQ ID NO: 97610 - RNA, 21 nt, Artificial Sequence
  Synthetic
  misc_feature (5)..(5): n is a, c, g, or u
  misc_feature (12)..(12): n is a, c, g, or u
ccagnggcaaancagguagga

SEQ ID NO: 97611 - RNA, 22 nt, Artificial Sequence
  Synthetic
  misc_feature (6)..(6): n is a, c, g, or u
  misc_feature (13)..(13): n is a, c, g, or u
gccagnggcaaancagguagga

SEQ ID NO: 97612 - RNA, 23 nt, Artificial Sequence
  Synthetic
  misc_feature (7)..(7): n is a, c, g, or u
  misc_feature (14)..(14): n is a, c, g, or u
ggccagnggcaaancagguagga

SEQ ID NO: 97613 - RNA, 24 nt, Artificial Sequence
  Synthetic
  misc_feature (8)..(8): n is a, c, g, or u
  misc_feature (15)..(15): n is a, c, g, or u
uggccagnggcaaancagguagga

SEQ ID NO: 97614 - RNA, 18 nt, Artificial Sequence
  Synthetic
cuguacaaaaccuucgga

SEQ ID NO: 97615 - RNA, 19 nt, Artificial Sequence
  Synthetic
gcuguacaaaaccuucgga

SEQ ID NO: 97616 - RNA, 20 nt, Artificial Sequence
  Synthetic
ugcuguacaaaaccuucgga

SEQ ID NO: 97617 - RNA, 21 nt, Artificial Sequence
  Synthetic
uugcuguacaaaaccuucgga

SEQ ID NO: 97618 - RNA, 22 nt, Artificial Sequence
  Synthetic
guugcuguacaaaaccuucgga

SEQ ID NO: 97619 - RNA, 23 nt, Artificial Sequence
  Synthetic
uguugcuguacaaaaccuucgga

SEQ ID NO: 97620 - RNA, 24 nt, Artificial Sequence
  Synthetic
uuguugcuguacaaaaccuucgga

SEQ ID NO: 97621 - RNA, 18 nt, Artificial Sequence
  Synthetic
cgcaagauuccuauggga

SEQ ID NO: 97622 - RNA, 19 nt, Artificial Sequence
  Synthetic
ucgcaagauuccuauggga

SEQ ID NO: 97623 - RNA, 20 nt, Artificial Sequence
  Synthetic
uucgcaagauuccuauggga

SEQ ID NO: 97624 - RNA, 21 nt, Artificial Sequence
  Synthetic
uuucgcaagauuccuauggga

SEQ ID NO: 97625 - RNA, 22 nt, Artificial Sequence
  Synthetic
cuuucgcaagauuccuauggga

SEQ ID NO: 97626 - RNA, 23 nt, Artificial Sequence
  Synthetic
gcuuucgcaagauuccuauggga

SEQ ID NO: 97627 - RNA, 24 nt, Artificial Sequence
  Synthetic
ggcuuucgcaagauuccuauggga

SEQ ID NO: 97628 - RNA, 18 nt, Artificial Sequence
  Synthetic
  misc_feature (8)..(8): n is a, c, g, or u
  misc_feature (10)..(10): n is a, c, g, or u
  misc_feature (16)..(16): n is a, c, g, or u
agacugununuuuaanga

SEQ ID NO: 97629 - RNA, 19 nt, Artificial Sequence
  Synthetic
  misc_feature (9)..(9): n is a, c, g, or u
  misc_feature (11)..(11): n is a, c, g, or u
  misc_feature (17)..(17): n is a, c, g, or u
aagacugununuuuaanga

SEQ ID NO: 97630 - RNA, 20 nt, Artificial Sequence
  Synthetic
  misc_feature (10)..(10): n is a, c, g, or u
  misc_feature (12)..(12): n is a, c, g, or u
  misc_feature (18)..(18): n is a, c, g, or u
aaagacugununuuuaanga

SEQ ID NO: 97631 - RNA, 21 nt, Artificial Sequence
  Synthetic
  misc_feature (11)..(11): n is a, c, g, or u
  misc_feature (13)..(13): n is a, c, g, or u
  misc_feature (19)..(19): n is a, c, g, or u
caaagacugununuuuaanga

SEQ ID NO: 97632 - RNA, 22 nt, Artificial Sequence
  Synthetic
  misc_feature (12)..(12): n is a, c, g, or u
  misc_feature (14)..(14): n is a, c, g, or u
  misc_feature (20)..(20): n is a, c, g, or u
ucaaagacugununuuuaanga

SEQ ID NO: 97633 - RNA, 23 nt, Artificial Sequence
  Synthetic
  misc_feature (13)..(13): n is a, c, g, or u
  misc_feature (15)..(15): n is a, c, g, or u
  misc_feature (21)..(21): n is a, c, g, or u
uucaaagacugununuuuaanga

SEQ ID NO: 97634 - RNA, 24 nt, Artificial Sequence
  Synthetic
  misc_feature (14)..(14): n is a, c, g, or u
  misc_feature (16)..(16): n is a, c, g, or u
  misc_feature (22)..(22): n is a, c, g, or u
cuucaaagacugununuuuaanga

SEQ ID NO: 97635 - RNA, 18 nt, Artificial Sequence
  Synthetic
  misc_feature (2)..(2): n is a, c, g, or u
unuaaauagaccuauuga

SEQ ID NO: 97636 - RNA, 19 nt, Artificial Sequence
  Synthetic
  misc_feature (3)..(3): n is a, c, g, or u
cunuaaauagaccuauuga

SEQ ID NO: 97637 - RNA, 20 nt, Artificial Sequence
  Synthetic
  misc_feature (4)..(4): n is a, c, g, or u
ccunuaaauagaccuauuga

SEQ ID NO: 97638 - RNA, 21 nt, Artificial Sequence
  Synthetic
  misc_feature (1)..(1): n is a, c, g, or u
  misc_feature (5)..(5): n is a, c, g, or u
nccunuaaauagaccuauuga

SEQ ID NO: 97639 - RNA, 22 nt, Artificial Sequence
  Synthetic
  misc_feature (2)..(2): n is a, c, g, or u
  misc_feature (6)..(6): n is a, c, g, or u
unccunuaaauagaccuauuga

SEQ ID NO: 97640 - RNA, 23 nt, Artificial Sequence
  Synthetic
  misc_feature (3)..(3): n is a, c, g, or u
  misc_feature (7)..(7): n is a, c, g, or u
cunccunuaaauagaccuauuga

SEQ ID NO: 97641 - RNA, 24 nt, Artificial Sequence
  Synthetic
  misc_feature (4)..(4): n is a, c, g, or u
  misc_feature (8)..(8): n is a, c, g, or u
acunccunuaaauagaccuauuga

SEQ ID NO: 97642 - RNA, 18 nt, Artificial Sequence
  Synthetic
  misc_feature (17)..(17): n is a, c, g, or u
gggacccugcaccgaana

SEQ ID NO: 97643 - RNA, 19 nt, Artificial Sequence
  Synthetic
  misc_feature (18)..(18): n is a, c, g, or u
ggggacccugcaccgaana

SEQ ID NO: 97644 - RNA, 20 nt, Artificial Sequence
  Synthetic
  misc_feature (19)..(19): n is a, c, g, or u
uggggacccugcaccgaana

SEQ ID NO: 97645 - RNA, 21 nt, Artificial Sequence
  Synthetic
  misc_feature (20)..(20): n is a, c, g, or u
cuggggacccugcaccgaana

SEQ ID NO: 97646 - RNA, 22 nt, Artificial Sequence
  Synthetic
  misc_feature (21)..(21): n is a, c, g, or u
acuggggacccugcaccgaana

SEQ ID NO: 97647 - RNA, 23 nt, Artificial Sequence
  Synthetic
  misc_feature (22)..(22): n is a, c, g, or u
gacuggggacccugcaccgaana

SEQ ID NO: 97648 - RNA, 24 nt, Artificial Sequence
  Synthetic
  misc_feature (23)..(23): n is a, c, g, or u
ggacuggggacccugcaccgaana

SEQ ID NO: 97649 - RNA, 18 nt, Artificial Sequence
  Synthetic
gcuuucgcaagauuccua

SEQ ID NO: 97650 - RNA, 19 nt, Artificial Sequence
  Synthetic
ggcuuucgcaagauuccua

SEQ ID NO: 97651 - RNA, 20 nt, Artificial Sequence
  Synthetic
gggcuuucgcaagauuccua

SEQ ID NO: 97652 - RNA, 21 nt, Artificial Sequence
  Synthetic
ugggcuuucgcaagauuccua

SEQ ID NO: 97653 - RNA, 22 nt, Artificial Sequence
  Synthetic
  misc_feature (1)..(1): n is a, c, g, or u
nugggcuuucgcaagauuccua

SEQ ID NO: 97654 - RNA, 23 nt, Artificial Sequence
  Synthetic
  misc_feature (2)..(2): n is a, c, g, or u
cnugggcuuucgcaagauuccua

SEQ ID NO: 97655 - RNA, 24 nt, Artificial Sequence
  Synthetic
  misc_feature (3)..(3): n is a, c, g, or u
ucnugggcuuucgcaagauuccua

SEQ ID NO: 97656 - RNA, 18 nt, Artificial Sequence
  Synthetic
acuucucucaauuuucua

SEQ ID NO: 97657 - RNA, 19 nt, Artificial Sequence
  Synthetic
gacuucucucaauuuucua

SEQ ID NO: 97658 - RNA, 20 nt, Artificial Sequence
  Synthetic
ggacuucucucaauuuucua

SEQ ID NO: 97659 - RNA, 21 nt, Artificial Sequence
  Synthetic
uggacuucucucaauuuucua

SEQ ID NO: 97660 - RNA, 22 nt, Artificial Sequence
  Synthetic
guggacuucucucaauuuucua

SEQ ID NO: 97661 - RNA, 23 nt, Artificial Sequence
  Synthetic
gguggacuucucucaauuuucua

SEQ ID NO: 97662 - RNA, 24 nt, Artificial Sequence
  Synthetic
ugguggacuucucucaauuuucua

SEQ ID NO: 97663 - RNA, 18 nt, Artificial Sequence
  Synthetic
uauauggaugauguggua

SEQ ID NO: 97664 - RNA, 19 nt, Artificial Sequence
  Synthetic
uuauauggaugauguggua

SEQ ID NO: 97665 - RNA, 20 nt, Artificial Sequence
  Synthetic
guuauauggaugauguggua

SEQ ID NO: 97666 - RNA, 21 nt, Artificial Sequence
  Synthetic
aguuauauggaugauguggua

SEQ ID NO: 97667 - RNA, 22 nt, Artificial Sequence
  Synthetic
caguuauauggaugauguggua

SEQ ID NO: 97668 - RNA, 23 nt, Artificial Sequence
  Synthetic
ucaguuauauggaugauguggua

SEQ ID NO: 97669 - RNA, 24 nt, Artificial Sequence
  Synthetic
uucaguuauauggaugauguggua

SEQ ID NO: 97670 - RNA, 18 nt, Artificial Sequence
  Synthetic
  misc_feature (10)..(10): n is a, c, g, or u
caccgccucngcucugua

SEQ ID NO: 97671 - RNA, 19 nt, Artificial Sequence
  Synthetic
  misc_feature (11)..(11): n is a, c, g, or u
acaccgccucngcucugua

SEQ ID NO: 97672 - RNA, 20 nt, Artificial Sequence
  Synthetic
  misc_feature (12)..(12): n is a, c, g, or u
gacaccgccucngcucugua

SEQ ID NO: 97673 - RNA, 21 nt, Artificial Sequence
  Synthetic
  misc_feature (13)..(13): n is a, c, g, or u
cgacaccgccucngcucugua

SEQ ID NO: 97674 - RNA, 22 nt, Artificial Sequence
  Synthetic
  misc_feature (14)..(14): n is a, c, g, or u
ucgacaccgccucngcucugua

SEQ ID NO: 97675 - RNA, 23 nt, Artificial Sequence
  Synthetic
  misc_feature (15)..(15): n is a, c, g, or u
cucgacaccgccucngcucugua

SEQ ID NO: 97676 - RNA, 24 nt, Artificial Sequence
  Synthetic
  misc_feature (16)..(16): n is a, c, g, or u
ccucgacaccgccucngcucugua

SEQ ID NO: 97677 - RNA, 18 nt, Artificial Sequence
  Synthetic
ugggcccucuuacaguua

SEQ ID NO: 97678 - RNA, 19 nt, Artificial Sequence
  Synthetic
gugggcccucuuacaguua

SEQ ID NO: 97679 - RNA, 20 nt, Artificial Sequence
  Synthetic
ugugggcccucuuacaguua

SEQ ID NO: 97680 - RNA, 21 nt, Artificial Sequence
  Synthetic
augugggcccucuuacaguua

SEQ ID NO: 97681 - RNA, 22 nt, Artificial Sequence
  Synthetic
uaugugggcccucuuacaguua

SEQ ID NO: 97682 - RNA, 23 nt, Artificial Sequence
  Synthetic
auaugugggcccucuuacaguua

SEQ ID NO: 97683 - RNA, 24 nt, Artificial Sequence
  Synthetic
aauaugugggcccucuuacaguua

SEQ ID NO: 97684 - RNA, 18 nt, Artificial Sequence
  Synthetic
auaaggugggaaacuuua

SEQ ID NO: 97685 - RNA, 19 nt, Artificial Sequence
  Synthetic
cauaaggugggaaacuuua

SEQ ID NO: 97686 - RNA, 20 nt, Artificial Sequence
  Synthetic
ucauaaggugggaaacuuua

SEQ ID NO: 97687 - RNA, 21 nt, Artificial Sequence
  Synthetic
cucauaaggugggaaacuuua

SEQ ID NO: 97688 - RNA, 22 nt, Artificial Sequence
  Synthetic
acucauaaggugggaaacuuua

SEQ ID NO: 97689 - RNA, 23 nt, Artificial Sequence
  Synthetic
gacucauaaggugggaaacuuua

SEQ ID NO: 97690 - RNA, 24 nt, Artificial Sequence
  Synthetic
ggacucauaaggugggaaacuuua

SEQ ID NO: 97691 - RNA, 18 nt, Artificial Sequence
  Synthetic
caccauauucuugggaac

SEQ ID NO: 97692 - RNA, 19 nt, Artificial Sequence
  Synthetic
ucaccauauucuugggaac

SEQ ID NO: 97693 - RNA, 20 nt, Artificial Sequence
  Synthetic
gucaccauauucuugggaac

SEQ ID NO: 97694 - RNA, 21 nt, Artificial Sequence
  Synthetic
ggucaccauauucuugggaac

SEQ ID NO: 97695 - RNA, 22 nt, Artificial Sequence
  Synthetic
gggucaccauauucuugggaac

SEQ ID NO: 97696 - RNA, 23 nt, Artificial Sequence
  Synthetic
ugggucaccauauucuugggaac

SEQ ID NO: 97697 - RNA, 24 nt, Artificial Sequence
  Synthetic
gugggucaccauauucuugggaac

SEQ ID NO: 97698 - RNA, 18 nt, Artificial Sequence
  Synthetic
gucaaucuucucgaggac

SEQ ID NO: 97699 - RNA, 19 nt, Artificial Sequence
  Synthetic
cgucaaucuucucgaggac

SEQ ID NO: 97700 - RNA, 20 nt, Artificial Sequence
  Synthetic
ucgucaaucuucucgaggac

SEQ ID NO: 97701 - RNA, 21 nt, Artificial Sequence
  Synthetic
aucgucaaucuucucgaggac

SEQ ID NO: 97702 - RNA, 22 nt, Artificial Sequence
  Synthetic
uaucgucaaucuucucgaggac

SEQ ID NO: 97703 - RNA, 23 nt, Artificial Sequence
  Synthetic
auaucgucaaucuucucgaggac

SEQ ID NO: 97704 - RNA, 24 nt, Artificial Sequence
  Synthetic
cauaucgucaaucuucucgaggac

SEQ ID NO: 97705 - RNA, 18 nt, Artificial Sequence
  Synthetic
  misc_feature (7)..(7): n is a, c, g, or u
  misc_feature (9)..(9): n is a, c, g, or u
  misc_feature (15)..(15): n is a, c, g, or u
gacugununuuuaangac

SEQ ID NO: 97706 - RNA, 19 nt, Artificial Sequence
  Synthetic
  misc_feature (8)..(8): n is a, c, g, or u
  misc_feature (10)..(10): n is a, c, g, or u
  misc_feature (16)..(16): n is a, c, g, or u
agacugununuuuaangac

SEQ ID NO: 97707 - RNA, 20 nt, Artificial Sequence
  Synthetic
  misc_feature (9)..(9): n is a, c, g, or u
  misc_feature (11)..(11): n is a, c, g, or u
  misc_feature (17)..(17): n is a, c, g, or u
aagacugununuuuaangac

SEQ ID NO: 97708 - RNA, 21 nt, Artificial Sequence
  Synthetic
  misc_feature (10)..(10): n is a, c, g, or u
  misc_feature (12)..(12): n is a, c, g, or u
  misc_feature (18)..(18): n is a, c, g, or u
aaagacugununuuuaangac

SEQ ID NO: 97709 - RNA, 22 nt, Artificial Sequence
  Synthetic
  misc_feature (11)..(11): n is a, c, g, or u
  misc_feature (13)..(13): n is a, c, g, or u
  misc_feature (19)..(19): n is a, c, g, or u
caaagacugununuuuaangac

SEQ ID NO: 97710 - RNA, 23 nt, Artificial Sequence
  Synthetic
  misc_feature (12)..(12): n is a, c, g, or u
  misc_feature (14)..(14): n is a, c, g, or u
  misc_feature (20)..(20): n is a, c, g, or u
ucaaagacugununuuuaangac

SEQ ID NO: 97711 - RNA, 24 nt, Artificial Sequence
  Synthetic
  misc_feature (13)..(13): n is a, c, g, or u
  misc_feature (15)..(15): n is a, c, g, or u
  misc_feature (21)..(21): n is a, c, g, or u
uucaaagacugununuuuaangac

SEQ ID NO: 97712 - RNA, 18 nt, Artificial Sequence
  Synthetic
  misc_feature (7)..(7): n is a, c, g, or u
  misc_feature (9)..(9): n is a, c, g, or u
gguuaangnucuuuguac

SEQ ID NO: 97713 - RNA, 19 nt, Artificial Sequence
  Synthetic
  misc_feature (8)..(8): n is a, c, g, or u
  misc_feature (10)..(10): n is a, c, g, or u
agguuaangnucuuuguac

SEQ ID NO: 97714 - RNA, 20 nt, Artificial Sequence
  Synthetic
  misc_feature (9)..(9): n is a, c, g, or u
  misc_feature (11)..(11): n is a, c, g, or u
uagguuaangnucuuuguac

SEQ ID NO: 97715 - RNA, 21 nt, Artificial Sequence
  Synthetic
  misc_feature (1)..(1): n is a, c, g, or u
  misc_feature (10)..(10): n is a, c, g, or u
  misc_feature (12)..(12): n is a, c, g, or u
nuagguuaangnucuuuguac

SEQ ID NO: 97716 - RNA, 22 nt, Artificial Sequence
  Synthetic
  misc_feature (2)..(2): n is a, c, g, or u
  misc_feature (11)..(11): n is a, c, g, or u
  misc_feature (13)..(13): n is a, c, g, or u
anuagguuaangnucuuuguac

SEQ ID NO: 97717 - RNA, 23 nt, Artificial Sequence
  Synthetic
  misc_feature (3)..(3): n is a, c, g, or u
  misc_feature (12)..(12): n is a, c, g, or u
  misc_feature (14)..(14): n is a, c, g, or u
ganuagguuaangnucuuuguac

SEQ ID NO: 97718 - RNA, 24 nt, Artificial Sequence
  Synthetic
  misc_feature (4)..(4): n is a, c, g, or u
  misc_feature (13)..(13): n is a, c, g, or u
  misc_feature (15)..(15): n is a, c, g, or u
aganuagguuaangnucuuuguac

SEQ ID NO: 97719 - RNA, 18 nt, Artificial Sequence
  Synthetic
  misc_feature (12)..(12): n is a, c, g, or u
cgucgcaugganaccacc

SEQ ID NO: 97720 - RNA, 19 nt, Artificial Sequence
  Synthetic
  misc_feature (13)..(13): n is a, c, g, or u
acgucgcaugganaccacc

SEQ ID NO: 97721 - RNA, 20 nt, Artificial Sequence
  Synthetic
  misc_feature (14)..(14): n is a, c, g, or u
cacgucgcaugganaccacc

SEQ ID NO: 97722 - RNA, 21 nt, Artificial Sequence
  Synthetic
  misc_feature (15)..(15): n is a, c, g, or u
gcacgucgcaugganaccacc

SEQ ID NO: 97723 - RNA, 22 nt, Artificial Sequence
  Synthetic
  misc_feature (16)..(16): n is a, c, g, or u
ugcacgucgcaugganaccacc

SEQ ID NO: 97724 - RNA, 23 nt, Artificial Sequence
  Synthetic
  misc_feature (17)..(17): n is a, c, g, or u
cugcacgucgcaugganaccacc

SEQ ID NO: 97725 - RNA, 24 nt, Artificial Sequence
  Synthetic
  misc_feature (18)..(18): n is a, c, g, or u
ucugcacgucgcaugganaccacc

SEQ ID NO: 97726 - RNA, 18 nt, Artificial Sequence
  Synthetic
caaugucaacgaccgacc

SEQ ID NO: 97727 - RNA, 19 nt, Artificial Sequence
  Synthetic
gcaaugucaacgaccgacc

SEQ ID NO: 97728 - RNA, 20 nt, Artificial Sequence
  Synthetic
agcaaugucaacgaccgacc

SEQ ID NO: 97729 - RNA, 21 nt, Artificial Sequence
  Synthetic
cagcaaugucaacgaccgacc

SEQ ID NO: 97730 - RNA, 22 nt, Artificial Sequence
  Synthetic
  misc_feature (1)..(1): n is a, c, g, or u
ncagcaaugucaacgaccgacc

SEQ ID NO: 97731 - RNA, 23 nt, Artificial Sequence
  Synthetic
  misc_feature (2)..(2): n is a, c, g, or u
cncagcaaugucaacgaccgacc

SEQ ID NO: 97732 - RNA, 24 nt, Artificial Sequence
  Synthetic
  misc_feature (3)..(3): n is a, c, g, or u
ucncagcaaugucaacgaccgacc

SEQ ID NO: 97733 - RNA, 18 nt, Artificial Sequence
  Synthetic
cugccguuccggccgacc

SEQ ID NO: 97734 - RNA, 19 nt, Artificial Sequence
  Synthetic
ucugccguuccggccgacc

SEQ ID NO: 97735 - RNA, 20 nt, Artificial Sequence
  Synthetic
  misc_feature (1)..(1): n is a, c, g, or u
nucugccguuccggccgacc

SEQ ID NO: 97736 - RNA, 21 nt, Artificial Sequence
  Synthetic
  misc_feature (2)..(2): n is a, c, g, or u
cnucugccguuccggccgacc

SEQ ID NO: 97737 - RNA, 22 nt, Artificial Sequence
  Synthetic
  misc_feature (1)..(1): n is a, c, g, or u
  misc_feature (3)..(3): n is a, c, g, or u
ncnucugccguuccggccgacc

SEQ ID NO: 97738 - RNA, 23 nt, Artificial Sequence
  Synthetic
  misc_feature (2)..(2): n is a, c, g, or u
  misc_feature (4)..(4): n is a, c, g, or u
uncnucugccguuccggccgacc

SEQ ID NO: 97739 - RNA, 24 nt, Artificial Sequence
  Synthetic
  misc_feature (3)..(3): n is a, c, g, or u
  misc_feature (5)..(5): n is a, c, g, or u
cuncnucugccguuccggccgacc

SEQ ID NO: 97740 - RNA, 18 nt, Artificial Sequence
  Synthetic
acgacgaggcaggucccc

SEQ ID NO: 97741 - RNA, 19 nt, Artificial Sequence
  Synthetic
gacgacgaggcaggucccc

SEQ ID NO: 97742 - RNA, 20 nt, Artificial Sequence
  Synthetic
agacgacgaggcaggucccc

SEQ ID NO: 97743 - RNA, 21 nt, Artificial Sequence
  Synthetic
uagacgacgaggcaggucccc

SEQ ID NO: 97744 - RNA, 22 nt, Artificial Sequence
  Synthetic
uuagacgacgaggcaggucccc

SEQ ID NO: 97745 - RNA, 23 nt, Artificial Sequence
  Synthetic
guuagacgacgaggcaggucccc

SEQ ID NO: 97746 - RNA, 24 nt, Artificial Sequence
  Synthetic
uguuagacgacgaggcaggucccc

SEQ ID NO: 97747 - RNA, 18 nt, Artificial Sequence
  Synthetic
ccgucggcgcugaauccc

SEQ ID NO: 97748 - RNA, 19 nt, Artificial Sequence
  Synthetic
cccgucggcgcugaauccc

SEQ ID NO: 97749 - RNA, 20 nt, Artificial Sequence
  Synthetic
ucccgucggcgcugaauccc

SEQ ID NO: 97750 - RNA, 21 nt, Artificial Sequence
  Synthetic
gucccgucggcgcugaauccc

SEQ ID NO: 97751 - RNA, 22 nt, Artificial Sequence
  Synthetic
cgucccgucggcgcugaauccc

SEQ ID NO: 97752 - RNA, 23 nt, Artificial Sequence
  Synthetic
acgucccgucggcgcugaauccc

SEQ ID NO: 97753 - RNA, 24 nt, Artificial Sequence
  Synthetic
uacgucccgucggcgcugaauccc

SEQ ID NO: 97754 - RNA, 18 nt, Artificial Sequence
  Synthetic
ucucaauguuaguauccc

SEQ ID NO: 97755 - RNA, 19 nt, Artificial Sequence
  Synthetic
aucucaauguuaguauccc

SEQ ID NO: 97756 - RNA, 20 nt, Artificial Sequence
  Synthetic
aaucucaauguuaguauccc

SEQ ID NO: 97757 - RNA, 21 nt, Artificial Sequence
  Synthetic
gaaucucaauguuaguauccc

SEQ ID NO: 97758 - RNA, 22 nt, Artificial Sequence
  Synthetic
ggaaucucaauguuaguauccc

SEQ ID NO: 97759 - RNA, 23 nt, Artificial Sequence
  Synthetic
gggaaucucaauguuaguauccc

SEQ ID NO: 97760 - RNA, 24 nt, Artificial Sequence
  Synthetic
cgggaaucucaauguuaguauccc

SEQ ID NO: 97761 - RNA, 18 nt, Artificial Sequence
  Synthetic
  misc_feature (9)..(9): n is a, c, g, or u
uuggaaganccagcaucc

SEQ ID NO: 97762 - RNA, 19 nt, Artificial Sequence
  Synthetic
  misc_feature (10)..(10): n is a, c, g, or u
uuuggaaganccagcaucc

SEQ ID NO: 97763 - RNA, 20 nt, Artificial Sequence
  Synthetic
  misc_feature (11)..(11): n is a, c, g, or u
auuuggaaganccagcaucc

SEQ ID NO: 97764 - RNA, 21 nt, Artificial Sequence
  Synthetic
  misc_feature (12)..(12): n is a, c, g, or u
aauuuggaaganccagcaucc

SEQ ID NO: 97765 - RNA, 22 nt, Artificial Sequence
  Synthetic
  misc_feature (13)..(13): n is a, c, g, or u
uaauuuggaaganccagcaucc

SEQ ID NO: 97766 - RNA, 23 nt, Artificial Sequence
  Synthetic
  misc_feature (14)..(14): n is a, c, g, or u
guaauuuggaaganccagcaucc

SEQ ID NO: 97767 - RNA, 24 nt, Artificial Sequence
  Synthetic
  misc_feature (15)..(15): n is a, c, g, or u
aguaauuuggaaganccagcaucc

SEQ ID NO: 97768 - RNA, 18 nt, Artificial Sequence
  Synthetic
  misc_feature (1)..(1): n is a, c, g, or u
  misc_feature (5)..(5): n is a, c, g, or u
ncacnacaucaggauucc

SEQ ID NO: 97769 - RNA, 19 nt, Artificial Sequence
  Synthetic
  misc_feature (2)..(2): n is a, c, g, or u
  misc_feature (6)..(6): n is a, c, g, or u
ancacnacaucaggauucc

SEQ ID NO: 97770 - RNA, 20 nt, Artificial Sequence
  Synthetic
  misc_feature (3)..(3): n is a, c, g, or u
  misc_feature (7)..(7): n is a, c, g, or u
gancacnacaucaggauucc

SEQ ID NO: 97771 - RNA, 21 nt, Artificial Sequence
  Synthetic
  misc_feature (4)..(4): n is a, c, g, or u
  misc_feature (8)..(8): n is a, c, g, or u
agancacnacaucaggauucc

SEQ ID NO: 97772 - RNA, 22 nt, Artificial Sequence
  Synthetic
  misc_feature (5)..(5): n is a, c, g, or u
  misc_feature (9)..(9): n is a, c, g, or u
gagancacnacaucaggauucc

SEQ ID NO: 97773 - RNA, 23 nt, Artificial Sequence
  Synthetic
  misc_feature (6)..(6): n is a, c, g, or u
  misc_feature (10)..(10): n is a, c, g, or u
ggagancacnacaucaggauucc

SEQ ID NO: 97774 - RNA, 24 nt, Artificial Sequence
  Synthetic
  misc_feature (7)..(7): n is a, c, g, or u
  misc_feature (11)..(11): n is a, c, g, or u
uggagancacnacaucaggauucc

SEQ ID NO: 97775 - RNA, 18 nt, Artificial Sequence
  Synthetic
cguuuguccucuacuucc

SEQ ID NO: 97776 - RNA, 19 nt, Artificial Sequence
  Synthetic
ccguuuguccucuacuucc

SEQ ID NO: 97777 - RNA, 20 nt, Artificial Sequence
  Synthetic
cccguuuguccucuacuucc

SEQ ID NO: 97778 - RNA, 21 nt, Artificial Sequence
  Synthetic
gcccguuuguccucuacuucc

SEQ ID NO: 97779 - RNA, 22 nt, Artificial Sequence
  Synthetic
ugcccguuuguccucuacuucc

SEQ ID NO: 97780 - RNA, 23 nt, Artificial Sequence
  Synthetic
uugcccguuuguccucuacuucc

SEQ ID NO: 97781 - RNA, 24 nt, Artificial Sequence
  Synthetic
guugcccguuuguccucuacuucc

SEQ ID NO: 97782 - RNA, 18 nt, Artificial Sequence
  Synthetic
gggaacaagagcuacagc

SEQ ID NO: 97783 - RNA, 19 nt, Artificial Sequence
  Synthetic
ugggaacaagagcuacagc

SEQ ID NO: 97784 - RNA, 20 nt, Artificial Sequence
  Synthetic
uugggaacaagagcuacagc

SEQ ID NO: 97785 - RNA, 21 nt, Artificial Sequence
  Synthetic
cuugggaacaagagcuacagc

SEQ ID NO: 97786 - RNA, 22 nt, Artificial Sequence
  Synthetic
ucuugggaacaagagcuacagc

SEQ ID NO: 97787 - RNA, 23 nt, Artificial Sequence
  Synthetic
uucuugggaacaagagcuacagc

SEQ ID NO: 97788 - RNA, 24 nt, Artificial Sequence
  Synthetic
auucuugggaacaagagcuacagc

SEQ ID NO: 97789 - RNA, 18 nt, Artificial Sequence
  Synthetic
ggaacaucaacuaccagc

SEQ ID NO: 97790 - RNA, 19 nt, Artificial Sequence
  Synthetic
aggaacaucaacuaccagc

SEQ ID NO: 97791 - RNA, 20 nt, Artificial Sequence
  Synthetic
caggaacaucaacuaccagc

SEQ ID NO: 97792 - RNA, 21 nt, Artificial Sequence
  Synthetic
ccaggaacaucaacuaccagc

SEQ ID NO: 97793 - RNA, 22 nt, Artificial Sequence
  Synthetic
uccaggaacaucaacuaccagc

SEQ ID NO: 97794 - RNA, 23 nt, Artificial Sequence
  Synthetic
uuccaggaacaucaacuaccagc

SEQ ID NO: 97795 - RNA, 24 nt, Artificial Sequence
  Synthetic
cuuccaggaacaucaacuaccagc

SEQ ID NO: 97796 - RNA, 18 nt, Artificial Sequence
  Synthetic
uucaccucugcacgucgc

SEQ ID NO: 97797 - RNA, 19 nt, Artificial Sequence
  Synthetic
cuucaccucugcacgucgc

SEQ ID NO: 97798 - RNA, 20 nt, Artificial Sequence
  Synthetic
gcuucaccucugcacgucgc

SEQ ID NO: 97799 - RNA, 21 nt, Artificial Sequence
  Synthetic
cgcuucaccucugcacgucgc

SEQ ID NO: 97800 - RNA, 22 nt, Artificial Sequence
  Synthetic
ucgcuucaccucugcacgucgc

SEQ ID NO: 97801 - RNA, 23 nt, Artificial Sequence
  Synthetic
uucgcuucaccucugcacgucgc

SEQ ID NO: 97802 - RNA, 24 nt, Artificial Sequence
  Synthetic
cuucgcuucaccucugcacgucgc

SEQ ID NO: 97803 - RNA, 18 nt, Artificial Sequence
  Synthetic
uccaaaccucgacaaggc

SEQ ID NO: 97804 - RNA, 19 nt, Artificial Sequence
  Synthetic
uuccaaaccucgacaaggc

SEQ ID NO: 97805 - RNA, 20 nt, Artificial Sequence
  Synthetic
cuuccaaaccucgacaaggc

SEQ ID NO: 97806 - RNA, 21 nt, Artificial Sequence
  Synthetic
ucuuccaaaccucgacaaggc

SEQ ID NO: 97807 - RNA, 22 nt, Artificial Sequence
  Synthetic
gucuuccaaaccucgacaaggc

SEQ ID NO: 97808 - RNA, 23 nt, Artificial Sequence
  Synthetic
ggucuuccaaaccucgacaaggc

SEQ ID NO: 97809 - RNA, 24 nt, Artificial Sequence
  Synthetic
uggucuuccaaaccucgacaaggc

SEQ ID NO: 97810 - RNA, 18 nt, Artificial Sequence
  Synthetic
  misc_feature (14)..(14): n is a, c, g, or u
cuuggguggcuuungggc

SEQ ID NO: 97811 - RNA, 19 nt, Artificial Sequence
  Synthetic
  misc_feature (15)..(15): n is a, c, g, or u
ccuuggguggcuuungggc

SEQ ID NO: 97812 - RNA, 20 nt, Artificial Sequence
  Synthetic
  misc_feature (16)..(16): n is a, c, g, or u
gccuuggguggcuuungggc

SEQ ID NO: 97813 - RNA, 21 nt, Artificial Sequence
  Synthetic
  misc_feature (17)..(17): n is a, c, g, or u
ugccuuggguggcuuungggc

SEQ ID NO: 97814 - RNA, 22 nt, Artificial Sequence
  Synthetic
  misc_feature (18)..(18): n is a, c, g, or u
gugccuuggguggcuuungggc

SEQ ID NO: 97815 - RNA, 23 nt, Artificial Sequence
  Synthetic
  misc_feature (19)..(19): n is a, c, g, or u
ugugccuuggguggcuuungggc

SEQ ID NO: 97816 - RNA, 24 nt, Artificial Sequence
  Synthetic
  misc_feature (20)..(20): n is a, c, g, or u
cugugccuuggguggcuuungggc

SEQ ID NO: 97817 - RNA, 18 nt, Artificial Sequence
  Synthetic
  misc_feature (2)..(2): n is a, c, g, or u
  misc_feature (10)..(11): n is a, c, g, or u
unggccaucnncgcaugc

SEQ ID NO: 97818 - RNA, 19 nt, Artificial Sequence
  Synthetic
  misc_feature (3)..(3): n is a, c, g, or u
  misc_feature (11)..(12): n is a, c, g, or u
aunggccaucnncgcaugc

SEQ ID NO: 97819 - RNA, 20 nt, Artificial Sequence
  Synthetic
  misc_feature (1)..(1): n is a, c, g, or u
  misc_feature (4)..(4): n is a, c, g, or u
  misc_feature (12)..(13): n is a, c, g, or u
naunggccaucnncgcaugc

SEQ ID NO: 97820 - RNA, 21 nt, Artificial Sequence
  Synthetic
  misc_feature (2)..(2): n is a, c, g, or u
  misc_feature (5)..(5): n is a, c, g, or u
  misc_feature (13)..(14): n is a, c, g, or u
cnaunggccaucnncgcaugc

SEQ ID NO: 97821 - RNA, 22 nt, Artificial Sequence
  Synthetic
  misc_feature (3)..(3): n is a, c, g, or u
  misc_feature (6)..(6): n is a, c, g, or u
  misc_feature (14)..(15): n is a, c, g, or u
gcnaunggccaucnncgcaugc

SEQ ID NO: 97822 - RNA, 23 nt, Artificial Sequence
  Synthetic
  misc_feature (4)..(4): n is a, c, g, or u
  misc_feature (7)..(7): n is a, c, g, or u
  misc_feature (15)..(16): n is a, c, g, or u
ggcnaunggccaucnncgcaugc

SEQ ID NO: 97823 - RNA, 24 nt, Artificial Sequence
  Synthetic
  misc_feature (5)..(5): n is a, c, g, or u
  misc_feature (8)..(8): n is a, c, g, or u
  misc_feature (16)..(17): n is a, c, g, or u
uggcnaunggccaucnncgcaugc

SEQ ID NO: 97824 - RNA, 18 nt, Artificial Sequence
  Synthetic
cugccaacuggauccugc

SEQ ID NO: 97825 - RNA, 19 nt, Artificial Sequence
  Synthetic
gcugccaacuggauccugc

SEQ ID NO: 97826 - RNA, 20 nt, Artificial Sequence
  Synthetic
ugcugccaacuggauccugc

SEQ ID NO: 97827 - RNA, 21 nt, Artificial Sequence
  Synthetic
gugcugccaacuggauccugc

SEQ ID NO: 97828 - RNA, 22 nt, Artificial Sequence
  Synthetic
ugugcugccaacuggauccugc

SEQ ID NO: 97829 - RNA, 23 nt, Artificial Sequence
  Synthetic
  misc_feature (1)..(1): n is a, c, g, or u
nugugcugccaacuggauccugc

SEQ ID NO: 97830 - RNA, 24 nt, Artificial Sequence
  Synthetic
  misc_feature (2)..(2): n is a, c, g, or u
gnugugcugccaacuggauccugc

SEQ ID NO: 97831 - RNA, 18 nt, Artificial Sequence
  Synthetic
  misc_feature (11)..(11): n is a, c, g, or u
  misc_feature (14)..(14): n is a, c, g, or u
  misc_feature (17)..(17): n is a, c, g, or u
guugggguacnuunccnc

SEQ ID NO: 97832 - RNA, 19 nt, Artificial Sequence
  Synthetic
  misc_feature (12)..(12): n is a, c, g, or u
  misc_feature (15)..(15): n is a, c, g, or u
  misc_feature (18)..(18): n is a, c, g, or u
aguugggguacnuunccnc

SEQ ID NO: 97833 - RNA, 20 nt, Artificial Sequence
  Synthetic
  misc_feature (13)..(13): n is a, c, g, or u
  misc_feature (16)..(16): n is a, c, g, or u
  misc_feature (19)..(19): n is a, c, g, or u
aaguugggguacnuunccnc

SEQ ID NO: 97834 - RNA, 21 nt, Artificial Sequence
  Synthetic
  misc_feature (14)..(14): n is a, c, g, or u
  misc_feature (17)..(17): n is a, c, g, or u
  misc_feature (20)..(20): n is a, c, g, or u
gaaguugggguacnuunccnc

SEQ ID NO: 97835 - RNA, 22 nt, Artificial Sequence
  Synthetic
  misc_feature (15)..(15): n is a, c, g, or u
  misc_feature (18)..(18): n is a, c, g, or u
  misc_feature (21)..(21): n is a, c, g, or u
ggaaguugggguacnuunccnc

SEQ ID NO: 97836 - RNA, 23 nt, Artificial Sequence
  Synthetic
  misc_feature (16)..(16): n is a, c, g, or u
  misc_feature (19)..(19): n is a, c, g, or u
  misc_feature (22)..(22): n is a, c, g, or u
uggaaguugggguacnuunccnc

SEQ ID NO: 97837 - RNA, 24 nt, Artificial Sequence
  Synthetic
  misc_feature (17)..(17): n is a, c, g, or u
  misc_feature (20)..(20): n is a, c, g, or u
  misc_feature (23)..(23): n is a, c, g, or u
uuggaaguugggguacnuunccnc

SEQ ID NO: 97838 - RNA, 18 nt, Artificial Sequence
  Synthetic
ucgcagaagaucucaauc

SEQ ID NO: 97839 - RNA, 19 nt, Artificial Sequence
  Synthetic
gucgcagaagaucucaauc

SEQ ID NO: 97840 - RNA, 20 nt, Artificial Sequence
  Synthetic
cgucgcagaagaucucaauc

SEQ ID NO: 97841 - RNA, 21 nt, Artificial Sequence
  Synthetic
gcgucgcagaagaucucaauc

SEQ ID NO: 97842 - RNA, 22 nt, Artificial Sequence
  Synthetic
cgcgucgcagaagaucucaauc

SEQ ID NO: 97843 - RNA, 23 nt, Artificial Sequence
  Synthetic
ccgcgucgcagaagaucucaauc

SEQ ID NO: 97844 - RNA, 24 nt, Artificial Sequence
  Synthetic
gccgcgucgcagaagaucucaauc

SEQ ID NO: 97845 - RNA, 18 nt, Artificial Sequence
  Synthetic
  misc_feature (10)..(10): n is a, c, g, or u
uuuggaaganccagcauc

SEQ ID NO: 97846 - RNA, 19 nt, Artificial Sequence
  Synthetic
  misc_feature (11)..(11): n is a, c, g, or u
auuuggaaganccagcauc

SEQ ID NO: 97847 - RNA, 20 nt, Artificial Sequence
  Synthetic
  misc_feature (12)..(12): n is a, c, g, or u
aauuuggaaganccagcauc

SEQ ID NO: 97848 - RNA, 21 nt, Artificial Sequence
  Synthetic
  misc_feature (13)..(13): n is a, c, g, or u
uaauuuggaaganccagcauc

SEQ ID NO: 97849 - RNA, 22 nt, Artificial Sequence
  Synthetic
  misc_feature (14)..(14): n is a, c, g, or u
guaauuuggaaganccagcauc

SEQ ID NO: 97850 - RNA, 23 nt, Artificial Sequence
  Synthetic
  misc_feature (15)..(15): n is a, c, g, or u
aguaauuuggaaganccagcauc

SEQ ID NO: 97851 - RNA, 24 nt, Artificial Sequence
  Synthetic
  misc_feature (16)..(16): n is a, c, g, or u
aaguaauuuggaaganccagcauc

SEQ ID NO: 97852 - RNA, 18 nt, Artificial Sequence
  Synthetic
uauucccaucccaucauc

SEQ ID NO: 97853 - RNA, 19 nt, Artificial Sequence
  Synthetic
guauucccaucccaucauc

SEQ ID NO: 97854 - RNA, 20 nt, Artificial Sequence
  Synthetic
uguauucccaucccaucauc

SEQ ID NO: 97855 - RNA, 21 nt, Artificial Sequence
  Synthetic
uuguauucccaucccaucauc

SEQ ID NO: 97856 - RNA, 22 nt, Artificial Sequence
  Synthetic
cuuguauucccaucccaucauc

SEQ ID NO: 97857 - RNA, 23 nt, Artificial Sequence
  Synthetic
acuuguauucccaucccaucauc

SEQ ID NO: 97858 - RNA, 24 nt, Artificial Sequence
  Synthetic
cacuuguauucccaucccaucauc

SEQ ID NO: 97859 - RNA, 18 nt, Artificial Sequence
  Synthetic
  misc_feature (8)..(8): n is a, c, g, or u
ccgccucngcucuguauc

SEQ ID NO: 97860 - RNA, 19 nt, Artificial Sequence
  Synthetic
  misc_feature (9)..(9): n is a, c, g, or u
accgccucngcucuguauc

SEQ ID NO: 97861 - RNA, 20 nt, Artificial Sequence
  Synthetic
  misc_feature (10)..(10): n is a, c, g, or u
caccgccucngcucuguauc

SEQ ID NO: 97862 - RNA, 21 nt, Artificial Sequence
  Synthetic
  misc_feature (11)..(11): n is a, c, g, or u
acaccgccucngcucuguauc

SEQ ID NO: 97863 - RNA, 22 nt, Artificial Sequence
  Synthetic
  misc_feature (12)..(12): n is a, c, g, or u
gacaccgccucngcucuguauc

SEQ ID NO: 97864 - RNA, 23 nt, Artificial Sequence
  Synthetic
  misc_feature (13)..(13): n is a, c, g, or u
cgacaccgccucngcucuguauc

SEQ ID NO: 97865 - RNA, 24 nt, Artificial Sequence
  Synthetic
  misc_feature (14)..(14): n is a, c, g, or u
ucgacaccgccucngcucuguauc

SEQ ID NO: 97866 - RNA, 18 nt, Artificial Sequence
  Synthetic
  misc_feature (11)..(11): n is a, c, g, or u
gcauuaaaccnuauuauc

SEQ ID NO: 97867 - RNA, 19 nt, Artificial Sequence
  Synthetic
  misc_feature (12)..(12): n is a, c, g, or u
ggcauuaaaccnuauuauc

SEQ ID NO: 97868 - RNA, 20 nt, Artificial Sequence
  Synthetic
  misc_feature (13)..(13): n is a, c, g, or u
aggcauuaaaccnuauuauc

SEQ ID NO: 97869 - RNA, 21 nt, Artificial Sequence
  Synthetic
  misc_feature (14)..(14): n is a, c, g, or u
aaggcauuaaaccnuauuauc

SEQ ID NO: 97870 - RNA, 22 nt, Artificial Sequence
  Synthetic
  misc_feature (15)..(15): n is a, c, g, or u
aaaggcauuaaaccnuauuauc

SEQ ID NO: 97871 - RNA, 23 nt, Artificial Sequence
  Synthetic
  misc_feature (1)..(1): n is a, c, g, or u
  misc_feature (16)..(16): n is a, c, g, or u
naaaggcauuaaaccnuauuauc

SEQ ID NO: 97872 - RNA, 24 nt, Artificial Sequence
  Synthetic
  misc_feature (2)..(2): n is a, c, g, or u
  misc_feature (17)..(17): n is a, c, g, or u
anaaaggcauuaaaccnuauuauc

SEQ ID NO: 97873 - RNA, 18 nt, Artificial Sequence
  Synthetic
  misc_feature (6)..(6): n is a, c, g, or u
ucuuanauaagaggacuc

SEQ ID NO: 97874 - RNA, 19 nt, Artificial Sequence
  Synthetic
  misc_feature (7)..(7): n is a, c, g, or u
gucuuanauaagaggacuc

SEQ ID NO: 97875 - RNA, 20 nt, Artificial Sequence
  Synthetic
  misc_feature (8)..(8): n is a, c, g, or u
ggucuuanauaagaggacuc

SEQ ID NO: 97876 - RNA, 21 nt, Artificial Sequence
  Synthetic
  misc_feature (9)..(9): n is a, c, g, or u
aggucuuanauaagaggacuc

SEQ ID NO: 97877 - RNA, 22 nt, Artificial Sequence
  Synthetic
  misc_feature (10)..(10): n is a, c, g, or u
aaggucuuanauaagaggacuc

SEQ ID NO: 97878 - RNA, 23 nt, Artificial Sequence
  Synthetic
  misc_feature (11)..(11): n is a, c, g, or u
caaggucuuanauaagaggacuc

SEQ ID NO: 97879 - RNA, 24 nt, Artificial Sequence
  Synthetic
  misc_feature (12)..(12): n is a, c, g, or u
ccaaggucuuanauaagaggacuc

SEQ ID NO: 97880 - RNA, 18 nt, Artificial Sequence
  Synthetic
  misc_feature (10)..(10): n is a, c, g, or u
ccugcacganuccugcuc

SEQ ID NO: 97881 - RNA, 19 nt, Artificial Sequence
  Synthetic
  misc_feature (11)..(11): n is a, c, g, or u
accugcacganuccugcuc

SEQ ID NO: 97882 - RNA, 20 nt, Artificial Sequence
  Synthetic
  misc_feature (12)..(12): n is a, c, g, or u
gaccugcacganuccugcuc

SEQ ID NO: 97883 - RNA, 21 nt, Artificial Sequence
  Synthetic
  misc_feature (13)..(13): n is a, c, g, or u
agaccugcacganuccugcuc

SEQ ID NO: 97884 - RNA, 22 nt, Artificial Sequence
  Synthetic
  misc_feature (14)..(14): n is a, c, g, or u
aagaccugcacganuccugcuc

SEQ ID NO: 97885 - RNA, 23 nt, Artificial Sequence
  Synthetic
  misc_feature (15)..(15): n is a, c, g, or u
caagaccugcacganuccugcuc

SEQ ID NO: 97886 - RNA, 24 nt, Artificial Sequence
  Synthetic
  misc_feature (16)..(16): n is a, c, g, or u
gcaagaccugcacganuccugcuc

SEQ ID NO: 97887 - RNA, 18 nt, Artificial Sequence
  Synthetic
caacucuguuguccucuc

SEQ ID NO: 97888 - RNA, 19 nt, Artificial Sequence
  Synthetic
acaacucuguuguccucuc

SEQ ID NO: 97889 - RNA, 20 nt, Artificial Sequence
  Synthetic
gacaacucuguuguccucuc

SEQ ID NO: 97890 - RNA, 21 nt, Artificial Sequence
  Synthetic
  misc_feature (1)..(1): n is a, c, g, or u
ngacaacucuguuguccucuc

SEQ ID NO: 97891 - RNA, 22 nt, Artificial Sequence
  Synthetic
  misc_feature (2)..(2): n is a, c, g, or u
cngacaacucuguuguccucuc

SEQ ID NO: 97892 - RNA, 23 nt, Artificial Sequence
  Synthetic
  misc_feature (3)..(3): n is a, c, g, or u
acngacaacucuguuguccucuc

SEQ ID NO: 97893 - RNA, 24 nt, Artificial Sequence
  Synthetic
  misc_feature (1)..(1): n is a, c, g, or u
  misc_feature (4)..(4): n is a, c, g, or u
nacngacaacucuguuguccucuc

SEQ ID NO: 97894 - RNA, 18 nt, Artificial Sequence
  Synthetic
gggaggccuuagagucuc

SEQ ID NO: 97895 - RNA, 19 nt, Artificial Sequence
  Synthetic
cgggaggccuuagagucuc

SEQ ID NO: 97896 - RNA, 20 nt, Artificial Sequence
  Synthetic
ucgggaggccuuagagucuc

SEQ ID NO: 97897 - RNA, 21 nt, Artificial Sequence
  Synthetic
aucgggaggccuuagagucuc

SEQ ID NO: 97898 - RNA, 22 nt, Artificial Sequence
  Synthetic
uaucgggaggccuuagagucuc

SEQ ID NO: 97899 - RNA, 23 nt, Artificial Sequence
  Synthetic
guaucgggaggccuuagagucuc

SEQ ID NO: 97900 - RNA, 24 nt, Artificial Sequence
  Synthetic
uguaucgggaggccuuagagucuc

SEQ ID NO: 97901 - RNA, 18 nt, Artificial Sequence
  Synthetic
cauaucgucaaucuucuc

SEQ ID NO: 97902 - RNA, 19 nt, Artificial Sequence
  Synthetic
ccauaucgucaaucuucuc

SEQ ID NO: 97903 - RNA, 20 nt, Artificial Sequence
  Synthetic
cccauaucgucaaucuucuc

SEQ ID NO: 97904 - RNA, 21 nt, Artificial Sequence
  Synthetic
  misc_feature (1)..(1): n is a, c, g, or u
ncccauaucgucaaucuucuc

SEQ ID NO: 97905 - RNA, 22 nt, Artificial Sequence
  Synthetic
  misc_feature (2)..(2): n is a, c, g, or u
cncccauaucgucaaucuucuc

SEQ ID NO: 97906 - RNA, 23 nt, Artificial Sequence
  Synthetic
  misc_feature (3)..(3): n is a, c, g, or u
ucncccauaucgucaaucuucuc

SEQ ID NO: 97907 - RNA, 24 nt, Artificial Sequence
  Synthetic
  misc_feature (4)..(4): n is a, c, g, or u
cucncccauaucgucaaucuucuc

SEQ ID NO: 97908 - RNA, 18 nt, Artificial Sequence
  Synthetic
cuccaccaaucggcaguc

SEQ ID NO: 97909 - RNA, 19 nt, Artificial Sequence
  Synthetic
ccuccaccaaucggcaguc

SEQ ID NO: 97910 - RNA, 20 nt, Artificial Sequence
  Synthetic
gccuccaccaaucggcaguc

SEQ ID NO: 97911 - RNA, 21 nt, Artificial Sequence
  Synthetic
ugccuccaccaaucggcaguc

SEQ ID NO: 97912 - RNA, 22 nt, Artificial Sequence
  Synthetic
cugccuccaccaaucggcaguc

SEQ ID NO: 97913 - RNA, 23 nt, Artificial Sequence
  Synthetic
ccugccuccaccaaucggcaguc

SEQ ID NO: 97914 - RNA, 24 nt, Artificial Sequence
  Synthetic
uccugccuccaccaaucggcaguc

SEQ ID NO: 97915 - RNA, 18 nt, Artificial Sequence
  Synthetic
ucccgcggacgacccguc

SEQ ID NO: 97916 - RNA, 19 nt, Artificial Sequence
  Synthetic
aucccgcggacgacccguc

SEQ ID NO: 97917 - RNA, 20 nt, Artificial Sequence
  Synthetic
aaucccgcggacgacccguc

SEQ ID NO: 97918 - RNA, 21 nt, Artificial Sequence
  Synthetic
gaaucccgcggacgacccguc

SEQ ID NO: 97919 - RNA, 22 nt, Artificial Sequence
  Synthetic
ugaaucccgcggacgacccguc

SEQ ID NO: 97920 - RNA, 23 nt, Artificial Sequence
  Synthetic
cugaaucccgcggacgacccguc

SEQ ID NO: 97921 - RNA, 24 nt, Artificial Sequence
  Synthetic
gcugaaucccgcggacgacccguc

SEQ ID NO: 97922 - RNA, 18 nt, Artificial Sequence
  Synthetic
uuuugcucgcagccgguc

SEQ ID NO: 97923 - RNA, 19 nt, Artificial Sequence
  Synthetic
guuuugcucgcagccgguc

SEQ ID NO: 97924 - RNA, 20 nt, Artificial Sequence
  Synthetic
uguuuugcucgcagccgguc

SEQ ID NO: 97925 - RNA, 21 nt, Artificial Sequence
  Synthetic
uuguuuugcucgcagccgguc

SEQ ID NO: 97926 - RNA, 22 nt, Artificial Sequence
  Synthetic
cuuguuuugcucgcagccgguc

SEQ ID NO: 97927 - RNA, 23 nt, Artificial Sequence
  Synthetic
gcuuguuuugcucgcagccgguc

SEQ ID NO: 97928 - RNA, 24 nt, Artificial Sequence
  Synthetic
agcuuguuuugcucgcagccgguc

SEQ ID NO: 97929 - RNA, 18 nt, Artificial Sequence
  Synthetic
uugugggucaccauauuc

SEQ ID NO: 97930 - RNA, 19 nt, Artificial Sequence
  Synthetic
uuugugggucaccauauuc

SEQ ID NO: 97931 - RNA, 20 nt, Artificial Sequence
  Synthetic
uuuugugggucaccauauuc

SEQ ID NO: 97932 - RNA, 21 nt, Artificial Sequence
  Synthetic
auuuugugggucaccauauuc

SEQ ID NO: 97933 - RNA, 22 nt, Artificial Sequence
  Synthetic
cauuuugugggucaccauauuc

SEQ ID NO: 97934 - RNA, 23 nt, Artificial Sequence
  Synthetic
ucauuuugugggucaccauauuc

SEQ ID NO: 97935 - RNA, 24 nt, Artificial Sequence
  Synthetic
cucauuuugugggucaccauauuc

SEQ ID NO: 97936 - RNA, 18 nt, Artificial Sequence
  Synthetic
cuaucuuaucaacacuuc

SEQ ID NO: 97937 - RNA, 19 nt, Artificial Sequence
  Synthetic
ccuaucuuaucaacacuuc

SEQ ID NO: 97938 - RNA, 20 nt, Artificial Sequence
  Synthetic
cccuaucuuaucaacacuuc

SEQ ID NO: 97939 - RNA, 21 nt, Artificial Sequence
  Synthetic
ccccuaucuuaucaacacuuc

SEQ ID NO: 97940 - RNA, 22 nt, Artificial Sequence
  Synthetic
gccccuaucuuaucaacacuuc

SEQ ID NO: 97941 - RNA, 23 nt, Artificial Sequence
  Synthetic
ugccccuaucuuaucaacacuuc

SEQ ID NO: 97942 - RNA, 24 nt, Artificial Sequence
  Synthetic
augccccuaucuuaucaacacuuc

SEQ ID NO: 97943 - RNA, 18 nt, Artificial Sequence
  Synthetic
ccguuuguccucuacuuc

SEQ ID NO: 97944 - RNA, 19 nt, Artificial Sequence
  Synthetic
cccguuuguccucuacuuc

SEQ ID NO: 97945 - RNA, 20 nt, Artificial Sequence
  Synthetic
gcccguuuguccucuacuuc

SEQ ID NO: 97946 - RNA, 21 nt, Artificial Sequence
  Synthetic
ugcccguuuguccucuacuuc

SEQ ID NO: 97947 - RNA, 22 nt, Artificial Sequence
  Synthetic
uugcccguuuguccucuacuuc

SEQ ID NO: 97948 - RNA, 23 nt, Artificial Sequence
  Synthetic
guugcccguuuguccucuacuuc

SEQ ID NO: 97949 - RNA, 24 nt, Artificial Sequence
  Synthetic
uguugcccguuuguccucuacuuc

SEQ ID NO: 97950 - RNA, 18 nt, Artificial Sequence
  Synthetic
cccauaucgucaaucuuc

SEQ ID NO: 97951 - RNA, 19 nt, Artificial Sequence
  Synthetic
  misc_feature (1)..(1): n is a, c, g, or u
ncccauaucgucaaucuuc

SEQ ID NO: 97952 - RNA, 20 nt, Artificial Sequence
  Synthetic
  misc_feature (2)..(2): n is a, c, g, or u
cncccauaucgucaaucuuc

SEQ ID NO: 97953 - RNA, 21 nt, Artificial Sequence
  Synthetic
  misc_feature (3)..(3): n is a, c, g, or u
ucncccauaucgucaaucuuc

SEQ ID NO: 97954 - RNA, 22 nt, Artificial Sequence
  Synthetic
  misc_feature (4)..(4): n is a, c, g, or u
cucncccauaucgucaaucuuc

SEQ ID NO: 97955 - RNA, 23 nt, Artificial Sequence
  Synthetic
  misc_feature (5)..(5): n is a, c, g, or u
ccucncccauaucgucaaucuuc

SEQ ID NO: 97956 - RNA, 24 nt, Artificial Sequence
  Synthetic
  misc_feature (6)..(6): n is a, c, g, or u
gccucncccauaucgucaaucuuc

SEQ ID NO: 97957 - RNA, 18 nt, Artificial Sequence
  Synthetic
ugcugguggcuccaguuc

SEQ ID NO: 97958 - RNA, 19 nt, Artificial Sequence
  Synthetic
cugcugguggcuccaguuc

SEQ ID NO: 97959 - RNA, 20 nt, Artificial Sequence
  Synthetic
ccugcugguggcuccaguuc

SEQ ID NO: 97960 - RNA, 21 nt, Artificial Sequence
  Synthetic
uccugcugguggcuccaguuc

SEQ ID NO: 97961 - RNA, 22 nt, Artificial Sequence
  Synthetic
uuccugcugguggcuccaguuc

SEQ ID NO: 97962 - RNA, 23 nt, Artificial Sequence
  Synthetic
uuuccugcugguggcuccaguuc

SEQ ID NO: 97963 - RNA, 24 nt, Artificial Sequence
  Synthetic
  misc_feature (1)..(1): n is a, c, g, or u
nuuuccugcugguggcuccaguuc

SEQ ID NO: 97964 - RNA, 18 nt, Artificial Sequence
  Synthetic
  misc_feature (15)..(15): n is a, c, g, or u
ggcuacucccuuaanuuc

SEQ ID NO: 97965 - RNA, 19 nt, Artificial Sequence
  Synthetic
  misc_feature (16)..(16): n is a, c, g, or u
gggcuacucccuuaanuuc

SEQ ID NO: 97966 - RNA, 20 nt, Artificial Sequence
  Synthetic
  misc_feature (17)..(17): n is a, c, g, or u
ggggcuacucccuuaanuuc

SEQ ID NO: 97967 - RNA, 21 nt, Artificial Sequence
  Synthetic
  misc_feature (18)..(18): n is a, c, g, or u
uggggcuacucccuuaanuuc

SEQ ID NO: 97968 - RNA, 22 nt, Artificial Sequence
  Synthetic
  misc_feature (19)..(19): n is a, c, g, or u
uuggggcuacucccuuaanuuc

SEQ ID NO: 97969 - RNA, 23 nt, Artificial Sequence
  Synthetic
  misc_feature (20)..(20): n is a, c, g, or u
guuggggcuacucccuuaanuuc

SEQ ID NO: 97970 - RNA, 24 nt, Artificial Sequence
  Synthetic
  misc_feature (21)..(21): n is a, c, g, or u
cguuggggcuacucccuuaanuuc

SEQ ID NO: 97971 - RNA, 18 nt, Artificial Sequence
  Synthetic
ggacuucucucaauuuuc

SEQ ID NO: 97972 - RNA, 19 nt, Artificial Sequence
  Synthetic
uggacuucucucaauuuuc

SEQ ID NO: 97973 - RNA, 20 nt, Artificial Sequence
  Synthetic
guggacuucucucaauuuuc

SEQ ID NO: 97974 - RNA, 21 nt, Artificial Sequence
  Synthetic
gguggacuucucucaauuuuc

SEQ ID NO: 97975 - RNA, 22 nt, Artificial Sequence
  Synthetic
ugguggacuucucucaauuuuc

SEQ ID NO: 97976 - RNA, 23 nt, Artificial Sequence
  Synthetic
gugguggacuucucucaauuuuc

SEQ ID NO: 97977 - RNA, 24 nt, Artificial Sequence
  Synthetic
cgugguggacuucucucaauuuuc

SEQ ID NO: 97978 - RNA, 18 nt, Artificial Sequence
  Synthetic
aggcagguccccuagaag

SEQ ID NO: 97979 - RNA, 19 nt, Artificial Sequence
  Synthetic
gaggcagguccccuagaag

SEQ ID NO: 97980 - RNA, 20 nt, Artificial Sequence
  Synthetic
cgaggcagguccccuagaag

SEQ ID NO: 97981 - RNA, 21 nt, Artificial Sequence
  Synthetic
acgaggcagguccccuagaag

SEQ ID NO: 97982 - RNA, 22 nt, Artificial Sequence
  Synthetic
gacgaggcagguccccuagaag

SEQ ID NO: 97983 - RNA, 23 nt, Artificial Sequence
  Synthetic
cgacgaggcagguccccuagaag

SEQ ID NO: 97984 - RNA, 24 nt, Artificial Sequence
  Synthetic
acgacgaggcagguccccuagaag

SEQ ID NO: 97985 - RNA, 18 nt, Artificial Sequence
  Synthetic
gggauauguaauuggaag

SEQ ID NO: 97986 - RNA, 19 nt, Artificial Sequence
  Synthetic
ugggauauguaauuggaag

SEQ ID NO: 97987 - RNA, 20 nt, Artificial Sequence
  Synthetic
augggauauguaauuggaag

SEQ ID NO: 97988 - RNA, 21 nt, Artificial Sequence
  Synthetic
caugggauauguaauuggaag

SEQ ID NO: 97989 - RNA, 22 nt, Artificial Sequence
  Synthetic
ucaugggauauguaauuggaag

SEQ ID NO: 97990 - RNA, 23 nt, Artificial Sequence
  Synthetic
uucaugggauauguaauuggaag

SEQ ID NO: 97991 - RNA, 24 nt, Artificial Sequence
  Synthetic
  misc_feature (1)..(1): n is a, c, g, or u
nuucaugggauauguaauuggaag

SEQ ID NO: 97992 - RNA, 18 nt, Artificial Sequence
  Synthetic
aucccuuggacucauaag

SEQ ID NO: 97993 - RNA, 19 nt, Artificial Sequence
  Synthetic
uaucccuuggacucauaag

SEQ ID NO: 97994 - RNA, 20 nt, Artificial Sequence
  Synthetic
guaucccuuggacucauaag

SEQ ID NO: 97995 - RNA, 21 nt, Artificial Sequence
  Synthetic
aguaucccuuggacucauaag

SEQ ID NO: 97996 - RNA, 22 nt, Artificial Sequence
  Synthetic
uaguaucccuuggacucauaag

SEQ ID NO: 97997 - RNA, 23 nt, Artificial Sequence
  Synthetic
uuaguaucccuuggacucauaag

SEQ ID NO: 97998 - RNA, 24 nt, Artificial Sequence
  Synthetic
guuaguaucccuuggacucauaag

SEQ ID NO: 97999 - RNA, 18 nt, Artificial Sequence
  Synthetic
ccccugcucguguuacag

SEQ ID NO: 98000 - RNA, 19 nt, Artificial Sequence
  Synthetic
accccugcucguguuacag

SEQ ID NO: 98001 - RNA, 20 nt, Artificial Sequence
  Synthetic
gaccccugcucguguuacag

SEQ ID NO: 98002 - RNA, 21 nt, Artificial Sequence
  Synthetic
ggaccccugcucguguuacag

SEQ ID NO: 98003 - RNA, 22 nt, Artificial Sequence
  Synthetic
aggaccccugcucguguuacag

SEQ ID NO: 98004 - RNA, 23 nt, Artificial Sequence
  Synthetic
uaggaccccugcucguguuacag

SEQ ID NO: 98005 - RNA, 24 nt, Artificial Sequence
  Synthetic
cuaggaccccugcucguguuacag

SEQ ID NO: 98006 - RNA, 18 nt, Artificial Sequence
  Synthetic
uucuuucccgaucaccag

SEQ ID NO: 98007 - RNA, 19 nt, Artificial Sequence
  Synthetic
auucuuucccgaucaccag

SEQ ID NO: 98008 - RNA, 20 nt, Artificial Sequence
  Synthetic
gauucuuucccgaucaccag

SEQ ID NO: 98009 - RNA, 21 nt, Artificial Sequence
  Synthetic
ggauucuuucccgaucaccag

SEQ ID NO: 98010 - RNA, 22 nt, Artificial Sequence
  Synthetic
gggauucuuucccgaucaccag

SEQ ID NO: 98011 - RNA, 23 nt, Artificial Sequence
  Synthetic
ugggauucuuucccgaucaccag

SEQ ID NO: 98012 - RNA, 24 nt, Artificial Sequence
  Synthetic
cugggauucuuucccgaucaccag

SEQ ID NO: 98013 - RNA, 18 nt, Artificial Sequence
  Synthetic
aacucccucgccucgcag

SEQ ID NO: 98014 - RNA, 19 nt, Artificial Sequence
  Synthetic
gaacucccucgccucgcag

SEQ ID NO: 98015 - RNA, 20 nt, Artificial Sequence
  Synthetic
agaacucccucgccucgcag

SEQ ID NO: 98016 - RNA, 21 nt, Artificial Sequence
  Synthetic
aagaacucccucgccucgcag

SEQ ID NO: 98017 - RNA, 22 nt, Artificial Sequence
  Synthetic
gaagaacucccucgccucgcag

SEQ ID NO: 98018 - RNA, 23 nt, Artificial Sequence
  Synthetic
agaagaacucccucgccucgcag

SEQ ID NO: 98019 - RNA, 24 nt, Artificial Sequence
  Synthetic
aagaagaacucccucgccucgcag

SEQ ID NO: 98020 - RNA, 18 nt, Artificial Sequence
  Synthetic
cauccucaggccaugcag

SEQ ID NO: 98021 - RNA, 19 nt, Artificial Sequence
  Synthetic
ucauccucaggccaugcag

SEQ ID NO: 98022 - RNA, 20 nt, Artificial Sequence
  Synthetic
gucauccucaggccaugcag

SEQ ID NO: 98023 - RNA, 21 nt, Artificial Sequence
  Synthetic
agucauccucaggccaugcag

SEQ ID NO: 98024 - RNA, 22 nt, Artificial Sequence
  Synthetic
cagucauccucaggccaugcag

SEQ ID NO: 98025 - RNA, 23 nt, Artificial Sequence
  Synthetic
acagucauccucaggccaugcag

SEQ ID NO: 98026 - RNA, 24 nt, Artificial Sequence
  Synthetic
gacagucauccucaggccaugcag

SEQ ID NO: 98027 - RNA, 18 nt, Artificial Sequence
  Synthetic
  misc_feature (6)..(6): n is a, c, g, or u
uuuaangacugggaggag

SEQ ID NO: 98028 - RNA, 19 nt, Artificial Sequence
  Synthetic
  misc_feature (1)..(1): n is a, c, g, or u
  misc_feature (7)..(7): n is a, c, g, or u
nuuuaangacugggaggag

SEQ ID NO: 98029 - RNA, 20 nt, Artificial Sequence
  Synthetic
  misc_feature (2)..(2): n is a, c, g, or u
  misc_feature (8)..(8): n is a, c, g, or u
unuuuaangacugggaggag

SEQ ID NO: 98030 - RNA, 21 nt, Artificial Sequence
  Synthetic
  misc_feature (1)..(1): n is a, c, g, or u
  misc_feature (3)..(3): n is a, c, g, or u
  misc_feature (9)..(9): n is a, c, g, or u
nunuuuaangacugggaggag

SEQ ID NO: 98031 - RNA, 22 nt, Artificial Sequence
  Synthetic
  misc_feature (2)..(2): n is a, c, g, or u
  misc_feature (4)..(4): n is a, c, g, or u
  misc_feature (10)..(10): n is a, c, g, or u
ununuuuaangacugggaggag

SEQ ID NO: 98032 - RNA, 23 nt, Artificial Sequence
  Synthetic
  misc_feature (3)..(3): n is a, c, g, or u
  misc_feature (5)..(5): n is a, c, g, or u
  misc_feature (11)..(11): n is a, c, g, or u
gununuuuaangacugggaggag

SEQ ID NO: 98033 - RNA, 24 nt, Artificial Sequence
  Synthetic
  misc_feature (4)..(4): n is a, c, g, or u
  misc_feature (6)..(6): n is a, c, g, or u
  misc_feature (12)..(12): n is a, c, g, or u
ugununuuuaangacugggaggag

SEQ ID NO: 98034 - RNA, 18 nt, Artificial Sequence
  Synthetic
  misc_feature (1)..(1): n is a, c, g, or u
  misc_feature (8)..(8): n is a, c, g, or u
nggcaaancagguaggag

SEQ ID NO: 98035 - RNA, 19 nt, Artificial Sequence
  Synthetic
  misc_feature (2)..(2): n is a, c, g, or u
  misc_feature (9)..(9): n is a, c, g, or u
gnggcaaancagguaggag

SEQ ID NO: 98036 - RNA, 20 nt, Artificial Sequence
  Synthetic
  misc_feature (3)..(3): n is a, c, g, or u
  misc_feature (10)..(10): n is a, c, g, or u
agnggcaaancagguaggag

SEQ ID NO: 98037 - RNA, 21 nt, Artificial Sequence
  Synthetic
  misc_feature (4)..(4): n is a, c, g, or u
  misc_feature (11)..(11): n is a, c, g, or u
cagnggcaaancagguaggag

SEQ ID NO: 98038 - RNA, 22 nt, Artificial Sequence
  Synthetic
  misc_feature (5)..(5): n is a, c, g, or u
  misc_feature (12)..(12): n is a, c, g, or u
ccagnggcaaancagguaggag

SEQ ID NO: 98039 - RNA, 23 nt, Artificial Sequence
  Synthetic
  misc_feature (6)..(6): n is a, c, g, or u
  misc_feature (13)..(13): n is a, c, g, or u
gccagnggcaaancagguaggag

SEQ ID NO: 98040 - RNA, 24 nt, Artificial Sequence
  Synthetic
  misc_feature (7)..(7): n is a, c, g, or u
  misc_feature (14)..(14): n is a, c, g, or u
ggccagnggcaaancagguaggag

SEQ ID NO: 98041 - RNA, 18 nt, Artificial Sequence
  Synthetic
acgaggcagguccccuag

SEQ ID NO: 98042 - RNA, 19 nt, Artificial Sequence
  Synthetic
gacgaggcagguccccuag

SEQ ID NO: 98043 - RNA, 20 nt, Artificial Sequence
  Synthetic
cgacgaggcagguccccuag

SEQ ID NO: 98044 - RNA, 21 nt, Artificial Sequence
  Synthetic
acgacgaggcagguccccuag

SEQ ID NO: 98045 - RNA, 22 nt, Artificial Sequence
  Synthetic
gacgacgaggcagguccccuag

SEQ ID NO: 98046 - RNA, 23 nt, Artificial Sequence
  Synthetic
agacgacgaggcagguccccuag

SEQ ID NO: 98047 - RNA, 24 nt, Artificial Sequence
  Synthetic
uagacgacgaggcagguccccuag

SEQ ID NO: 98048 - RNA, 18 nt, Artificial Sequence
  Synthetic
cuucucucaauuuucuag

SEQ ID NO: 98049 - RNA, 19 nt, Artificial Sequence
  Synthetic
acuucucucaauuuucuag

SEQ ID NO: 98050 - RNA, 20 nt, Artificial Sequence
  Synthetic
gacuucucucaauuuucuag

SEQ ID NO: 98051 - RNA, 21 nt, Artificial Sequence
  Synthetic
ggacuucucucaauuuucuag

SEQ ID NO: 98052 - RNA, 22 nt, Artificial Sequence
  Synthetic
uggacuucucucaauuuucuag

SEQ ID NO: 98053 - RNA, 23 nt, Artificial Sequence
  Synthetic
guggacuucucucaauuuucuag

SEQ ID NO: 98054 - RNA, 24 nt, Artificial Sequence
  Synthetic
gguggacuucucucaauuuucuag

SEQ ID NO: 98055 - RNA, 18 nt, Artificial Sequence
  Synthetic
cccuaauaaaaccaaacg

SEQ ID NO: 98056 - RNA, 19 nt, Artificial Sequence
  Synthetic
acccuaauaaaaccaaacg

SEQ ID NO: 98057 - RNA, 20 nt, Artificial Sequence
  Synthetic
aacccuaauaaaaccaaacg

SEQ ID NO: 98058 - RNA, 21 nt, Artificial Sequence
  Synthetic
  misc_feature (1)..(1): n is a, c, g, or u
naacccuaauaaaaccaaacg

SEQ ID NO: 98059 - RNA, 22 nt, Artificial Sequence
  Synthetic
  misc_feature (2)..(2): n is a, c, g, or u
unaacccuaauaaaaccaaacg

SEQ ID NO: 98060 - RNA, 23 nt, Artificial Sequence
  Synthetic
  misc_feature (3)..(3): n is a, c, g, or u
uunaacccuaauaaaaccaaacg

SEQ ID NO: 98061 - RNA, 24 nt, Artificial Sequence
  Synthetic
  misc_feature (4)..(4): n is a, c, g, or u
uuunaacccuaauaaaaccaaacg

SEQ ID NO: 98062 - RNA, 18 nt, Artificial Sequence
  Synthetic
aacuacuguuguuagacg

SEQ ID NO: 98063 - RNA, 19 nt, Artificial Sequence
  Synthetic
aaacuacuguuguuagacg

SEQ ID NO: 98064 - RNA, 20 nt, Artificial Sequence
  Synthetic
gaaacuacuguuguuagacg

SEQ ID NO: 98065 - RNA, 21 nt, Artificial Sequence
  Synthetic
ggaaacuacuguuguuagacg

SEQ ID NO: 98066 - RNA, 22 nt, Artificial Sequence
  Synthetic
cggaaacuacuguuguuagacg

SEQ ID NO: 98067 - RNA, 23 nt, Artificial Sequence
  Synthetic
ccggaaacuacuguuguuagacg

SEQ ID NO: 98068 - RNA, 24 nt, Artificial Sequence
  Synthetic
uccggaaacuacuguuguuagacg

SEQ ID NO: 98069 - RNA, 18 nt, Artificial Sequence
  Synthetic
  misc_feature (1)..(1): n is a, c, g, or u
  misc_feature (9)..(10): n is a, c, g, or u
nggccaucnncgcaugcg

SEQ ID NO: 98070 - RNA, 19 nt, Artificial Sequence
  Synthetic
  misc_feature (2)..(2): n is a, c, g, or u
  misc_feature (10)..(11): n is a, c, g, or u
unggccaucnncgcaugcg

SEQ ID NO: 98071 - RNA, 20 nt, Artificial Sequence
  Synthetic
  misc_feature (3)..(3): n is a, c, g, or u
  misc_feature (11)..(12): n is a, c, g, or u
aunggccaucnncgcaugcg

SEQ ID NO: 98072 - RNA, 21 nt, Artificial Sequence
  Synthetic
  misc_feature (1)..(1): n is a, c, g, or u
  misc_feature (4)..(4): n is a, c, g, or u
  misc_feature (12)..(13): n is a, c, g, or u
naunggccaucnncgcaugcg

SEQ ID NO: 98073 - RNA, 22 nt, Artificial Sequence
  Synthetic
  misc_feature (2)..(2): n is a, c, g, or u
  misc_feature (5)..(5): n is a, c, g, or u
  misc_feature (13)..(14): n is a, c, g, or u
cnaunggccaucnncgcaugcg

SEQ ID NO: 98074 - RNA, 23 nt, Artificial Sequence
  Synthetic
  misc_feature (3)..(3): n is a, c, g, or u
  misc_feature (6)..(6): n is a, c, g, or u
  misc_feature (14)..(15): n is a, c, g, or u
gcnaunggccaucnncgcaugcg

SEQ ID NO: 98075 - RNA, 24 nt, Artificial Sequence
  Synthetic
  misc_feature (4)..(4): n is a, c, g, or u
  misc_feature (7)..(7): n is a, c, g, or u
  misc_feature (15)..(16): n is a, c, g, or u
ggcnaunggccaucnncgcaugcg

SEQ ID NO: 98076 - RNA, 18 nt, Artificial Sequence
  Synthetic
ugccaacuggauccugcg

SEQ ID NO: 98077 - RNA, 19 nt, Artificial Sequence
  Synthetic
cugccaacuggauccugcg

SEQ ID NO: 98078 - RNA, 20 nt, Artificial Sequence
  Synthetic
gcugccaacuggauccugcg

SEQ ID NO: 98079 - RNA, 21 nt, Artificial Sequence
  Synthetic
ugcugccaacuggauccugcg

SEQ ID NO: 98080 - RNA, 22 nt, Artificial Sequence
  Synthetic
gugcugccaacuggauccugcg

SEQ ID NO: 98081 - RNA, 23 nt, Artificial Sequence
  Synthetic
ugugcugccaacuggauccugcg

SEQ ID NO: 98082 - RNA, 24 nt, Artificial Sequence
  Synthetic
  misc_feature (1)..(1): n is a, c, g, or u
nugugcugccaacuggauccugcg

SEQ ID NO: 98083 - RNA, 18 nt, Artificial Sequence
  Synthetic
gucucaaucgccgcgucg

SEQ ID NO: 98084 - RNA, 19 nt, Artificial Sequence
  Synthetic
ggucucaaucgccgcgucg

SEQ ID NO: 98085 - RNA, 20 nt, Artificial Sequence
  Synthetic
aggucucaaucgccgcgucg

SEQ ID NO: 98086 - RNA, 21 nt, Artificial Sequence
  Synthetic
aaggucucaaucgccgcgucg

SEQ ID NO: 98087 - RNA, 22 nt, Artificial Sequence
  Synthetic
gaaggucucaaucgccgcgucg

SEQ ID NO: 98088 - RNA, 23 nt, Artificial Sequence
  Synthetic
cgaaggucucaaucgccgcgucg

SEQ ID NO: 98089 - RNA, 24 nt, Artificial Sequence
  Synthetic
acgaaggucucaaucgccgcgucg

SEQ ID NO: 98090 - RNA, 18 nt, Artificial Sequence
  Synthetic
cauuuguucagugguucg

SEQ ID NO: 98091 - RNA, 19 nt, Artificial Sequence
  Synthetic
ccauuuguucagugguucg

SEQ ID NO: 98092 - RNA, 20 nt, Artificial Sequence
  Synthetic
gccauuuguucagugguucg

SEQ ID NO: 98093 - RNA, 21 nt, Artificial Sequence
  Synthetic
ugccauuuguucagugguucg

SEQ ID NO: 98094 - RNA, 22 nt, Artificial Sequence
  Synthetic
gugccauuuguucagugguucg

SEQ ID NO: 98095 - RNA, 23 nt, Artificial Sequence
  Synthetic
agugccauuuguucagugguucg

SEQ ID NO: 98096 - RNA, 24 nt, Artificial Sequence
  Synthetic
uagugccauuuguucagugguucg

SEQ ID NO: 98097 - RNA, 18 nt, Artificial Sequence
  Synthetic
ucccuuggacucauaagg

SEQ ID NO: 98098 - RNA, 19 nt, Artificial Sequence
  Synthetic
aucccuuggacucauaagg

SEQ ID NO: 98099 - RNA, 20 nt, Artificial Sequence
  Synthetic
uaucccuuggacucauaagg

SEQ ID NO: 98100 - RNA, 21 nt, Artificial Sequence
  Synthetic
guaucccuuggacucauaagg

SEQ ID NO: 98101 - RNA, 22 nt, Artificial Sequence
  Synthetic
aguaucccuuggacucauaagg

SEQ ID NO: 98102 - RNA, 23 nt, Artificial Sequence
  Synthetic
uaguaucccuuggacucauaagg

SEQ ID NO: 98103 - RNA, 24 nt, Artificial Sequence
  Synthetic
uuaguaucccuuggacucauaagg

SEQ ID NO: 98104 - RNA, 18 nt, Artificial Sequence
  Synthetic
  misc_feature (7)..(7): n is a, c, g, or u
  misc_feature (14)..(14): n is a, c, g, or u
ggccagnggcaaancagg

SEQ ID NO: 98105 - RNA, 19 nt, Artificial Sequence
  Synthetic
  misc_feature (8)..(8): n is a, c, g, or u
  misc_feature (15)..(15): n is a, c, g, or u
uggccagnggcaaancagg

SEQ ID NO: 98106 - RNA, 20 nt, Artificial Sequence
  Synthetic
  misc_feature (1)..(1): n is a, c, g, or u
  misc_feature (9)..(9): n is a, c, g, or u
  misc_feature (16)..(16): n is a, c, g, or u
nuggccagnggcaaancagg

SEQ ID NO: 98107 - RNA, 21 nt, Artificial Sequence
  Synthetic
  misc_feature (2)..(2): n is a, c, g, or u
  misc_feature (10)..(10): n is a, c, g, or u
  misc_feature (17)..(17): n is a, c, g, or u
anuggccagnggcaaancagg

SEQ ID NO: 98108 - RNA, 22 nt, Artificial Sequence
  Synthetic
  misc_feature (3)..(3): n is a, c, g, or u
  misc_feature (11)..(11): n is a, c, g, or u
  misc_feature (18)..(18): n is a, c, g, or u
canuggccagnggcaaancagg

SEQ ID NO: 98109 - RNA, 23 nt, Artificial Sequence
  Synthetic
  misc_feature (4)..(4): n is a, c, g, or u
  misc_feature (12)..(12): n is a, c, g, or u
  misc_feature (19)..(19): n is a, c, g, or u
ucanuggccagnggcaaancagg

SEQ ID NO: 98110 - RNA, 24 nt, Artificial Sequence
  Synthetic
  misc_feature (5)..(5): n is a, c, g, or u
  misc_feature (13)..(13): n is a, c, g, or u
  misc_feature (20)..(20): n is a, c, g, or u
aucanuggccagnggcaaancagg

SEQ ID NO: 98111 - RNA, 18 nt, Artificial Sequence
  Synthetic
uucucucaauuuucuagg

SEQ ID NO: 98112 - RNA, 19 nt, Artificial Sequence
  Synthetic
cuucucucaauuuucuagg

SEQ ID NO: 98113 - RNA, 20 nt, Artificial Sequence
  Synthetic
acuucucucaauuuucuagg

SEQ ID NO: 98114 - RNA, 21 nt, Artificial Sequence
  Synthetic
gacuucucucaauuuucuagg

SEQ ID NO: 98115 - RNA, 22 nt, Artificial Sequence
  Synthetic
ggacuucucucaauuuucuagg

SEQ ID NO: 98116 - RNA, 23 nt, Artificial Sequence
  Synthetic
uggacuucucucaauuuucuagg

SEQ ID NO: 98117 - RNA, 24 nt, Artificial Sequence
  Synthetic
guggacuucucucaauuuucuagg

SEQ ID NO: 98118 - RNA, 18 nt, Artificial Sequence
  Synthetic
gcuguacaaaaccuucgg

SEQ ID NO: 98119 - RNA, 19 nt, Artificial Sequence
  Synthetic
ugcuguacaaaaccuucgg

SEQ ID NO: 98120 - RNA, 20 nt, Artificial Sequence
  Synthetic
uugcuguacaaaaccuucgg

SEQ ID NO: 98121 - RNA, 21 nt, Artificial Sequence
  Synthetic
guugcuguacaaaaccuucgg

SEQ ID NO: 98122 - RNA, 22 nt, Artificial Sequence
  Synthetic
uguugcuguacaaaaccuucgg

SEQ ID NO: 98123 - RNA, 23 nt, Artificial Sequence
  Synthetic
uuguugcuguacaaaaccuucgg

SEQ ID NO: 98124 - RNA, 24 nt, Artificial Sequence
  Synthetic
cuuguugcuguacaaaaccuucgg

SEQ ID NO: 98125 - RNA, 18 nt, Artificial Sequence
  Synthetic
acugggaggaguuggggg

SEQ ID NO: 98126 - RNA, 19 nt, Artificial Sequence
  Synthetic
gacugggaggaguuggggg

SEQ ID NO: 98127 - RNA, 20 nt, Artificial Sequence
  Synthetic
  misc_feature (1)..(1): n is a, c, g, or u
ngacugggaggaguuggggg

SEQ ID NO: 98128 - RNA, 21 nt, Artificial Sequence
  Synthetic
  misc_feature (2)..(2): n is a, c, g, or u
angacugggaggaguuggggg

SEQ ID NO: 98129 - RNA, 22 nt, Artificial Sequence
  Synthetic
  misc_feature (3)..(3): n is a, c, g, or u
aangacugggaggaguuggggg

SEQ ID NO: 98130 - RNA, 23 nt, Artificial Sequence
  Synthetic
  misc_feature (4)..(4): n is a, c, g, or u
uaangacugggaggaguuggggg

SEQ ID NO: 98131 - RNA, 24 nt, Artificial Sequence
  Synthetic
  misc_feature (5)..(5): n is a, c, g, or u
uuaangacugggaggaguuggggg

SEQ ID NO: 98132 - RNA, 18 nt, Artificial Sequence
  Synthetic
gacugggaggaguugggg

SEQ ID NO: 98133 - RNA, 19 nt, Artificial Sequence
  Synthetic
  misc_feature (1)..(1): n is a, c, g, or u
ngacugggaggaguugggg

SEQ ID NO: 98134 - RNA, 20 nt, Artificial Sequence
  Synthetic
  misc_feature (2)..(2): n is a, c, g, or u
angacugggaggaguugggg

SEQ ID NO: 98135 - RNA, 21 nt, Artificial Sequence
  Synthetic
  misc_feature (3)..(3): n is a, c, g, or u
aangacugggaggaguugggg

SEQ ID NO: 98136 - RNA, 22 nt, Artificial Sequence
  Synthetic
  misc_feature (4)..(4): n is a, c, g, or u
uaangacugggaggaguugggg

SEQ ID NO: 98137 - RNA, 23 nt, Artificial Sequence
  Synthetic
  misc_feature (5)..(5): n is a, c, g, or u
uuaangacugggaggaguugggg

SEQ ID NO: 98138 - RNA, 24 nt, Artificial Sequence
  Synthetic
  misc_feature (6)..(6): n is a, c, g, or u
uuuaangacugggaggaguugggg

SEQ ID NO: 98139 - RNA, 18 nt, Artificial Sequence
  Synthetic
  misc_feature (7)..(7): n is a, c, g, or u
cacggcngucuuuugggg

SEQ ID NO: 98140 - RNA, 19 nt, Artificial Sequence
  Synthetic
  misc_feature (8)..(8): n is a, c, g, or u
acacggcngucuuuugggg

SEQ ID NO: 98141 - RNA, 20 nt, Artificial Sequence
  Synthetic
  misc_feature (9)..(9): n is a, c, g, or u
cacacggcngucuuuugggg

SEQ ID NO: 98142 - RNA, 21 nt, Artificial Sequence
  Synthetic
  misc_feature (10)..(10): n is a, c, g, or u
ccacacggcngucuuuugggg

SEQ ID NO: 98143 - RNA, 22 nt, Artificial Sequence
  Synthetic
  misc_feature (11)..(11): n is a, c, g, or u
accacacggcngucuuuugggg

SEQ ID NO: 98144 - RNA, 23 nt, Artificial Sequence
  Synthetic
  misc_feature (12)..(12): n is a, c, g, or u
caccacacggcngucuuuugggg

SEQ ID NO: 98145 - RNA, 24 nt, Artificial Sequence
  Synthetic
  misc_feature (13)..(13): n is a, c, g, or u
ccaccacacggcngucuuuugggg

SEQ ID NO: 98146 - RNA, 18 nt, Artificial Sequence
  Synthetic
ugaaucuggccaccuggg

SEQ ID NO: 98147 - RNA, 19 nt, Artificial Sequence
  Synthetic
augaaucuggccaccuggg

SEQ ID NO: 98148 - RNA, 20 nt, Artificial Sequence
  Synthetic
gaugaaucuggccaccuggg

SEQ ID NO: 98149 - RNA, 21 nt, Artificial Sequence
  Synthetic
ugaugaaucuggccaccuggg

SEQ ID NO: 98150 - RNA, 22 nt, Artificial Sequence
  Synthetic
uugaugaaucuggccaccuggg

SEQ ID NO: 98151 - RNA, 23 nt, Artificial Sequence
  Synthetic
guugaugaaucuggccaccuggg

SEQ ID NO: 98152 - RNA, 24 nt, Artificial Sequence
  Synthetic
aguugaugaaucuggccaccuggg

SEQ ID NO: 98153 - RNA, 18 nt, Artificial Sequence
  Synthetic
  misc_feature (8)..(8): n is a, c, g, or u
acacggcngucuuuuggg

SEQ ID NO: 98154 - RNA, 19 nt, Artificial Sequence
  Synthetic
  misc_feature (9)..(9): n is a, c, g, or u
cacacggcngucuuuuggg

SEQ ID NO: 98155 - RNA, 20 nt, Artificial Sequence
  Synthetic
  misc_feature (10)..(10): n is a, c, g, or u
ccacacggcngucuuuuggg

SEQ ID NO: 98156 - RNA, 21 nt, Artificial Sequence
  Synthetic
  misc_feature (11)..(11): n is a, c, g, or u
accacacggcngucuuuuggg

SEQ ID NO: 98157 - RNA, 22 nt, Artificial Sequence
  Synthetic
  misc_feature (12)..(12): n is a, c, g, or u
caccacacggcngucuuuuggg

SEQ ID NO: 98158 - RNA, 23 nt, Artificial Sequence
  Synthetic
  misc_feature (13)..(13): n is a, c, g, or u
ccaccacacggcngucuuuuggg

SEQ ID NO: 98159 - RNA, 24 nt, Artificial Sequence
  Synthetic
  misc_feature (1)..(1): n is a, c, g, or u
  misc_feature (14)..(14): n is a, c, g, or u
nccaccacacggcngucuuuuggg

SEQ ID NO: 98160 - RNA, 18 nt, Artificial Sequence
  Synthetic
ugacgcaacccccacugg

SEQ ID NO: 98161 - RNA, 19 nt, Artificial Sequence
  Synthetic
cugacgcaacccccacugg

SEQ ID NO: 98162 - RNA, 20 nt, Artificial Sequence
  Synthetic
gcugacgcaacccccacugg

SEQ ID NO: 98163 - RNA, 21 nt, Artificial Sequence
  Synthetic
ugcugacgcaacccccacugg

SEQ ID NO: 98164 - RNA, 22 nt, Artificial Sequence
  Synthetic
uugcugacgcaacccccacugg

SEQ ID NO: 98165 - RNA, 23 nt, Artificial Sequence
  Synthetic
uuugcugacgcaacccccacugg

SEQ ID NO: 98166 - RNA, 24 nt, Artificial Sequence
  Synthetic
guuugcugacgcaacccccacugg

SEQ ID NO: 98167 - RNA, 18 nt, Artificial Sequence
  Synthetic
  misc_feature (4)..(4): n is a, c, g, or u
  misc_feature (6)..(6): n is a, c, g, or u
  misc_feature (12)..(12): n is a, c, g, or u
ugununuuuaangacugg

SEQ ID NO: 98168 - RNA, 19 nt, Artificial Sequence
  Synthetic
  misc_feature (5)..(5): n is a, c, g, or u
  misc_feature (7)..(7): n is a, c, g, or u
  misc_feature (13)..(13): n is a, c, g, or u
cugununuuuaangacugg

SEQ ID NO: 98169 - RNA, 20 nt, Artificial Sequence
  Synthetic
  misc_feature (6)..(6): n is a, c, g, or u
  misc_feature (8)..(8): n is a, c, g, or u
  misc_feature (14)..(14): n is a, c, g, or u
acugununuuuaangacugg

SEQ ID NO: 98170 - RNA, 21 nt, Artificial Sequence
  Synthetic
  misc_feature (7)..(7): n is a, c, g, or u
  misc_feature (9)..(9): n is a, c, g, or u
  misc_feature (15)..(15): n is a, c, g, or u
gacugununuuuaangacugg

SEQ ID NO: 98171 - RNA, 22 nt, Artificial Sequence
  Synthetic
  misc_feature (8)..(8): n is a, c, g, or u
  misc_feature (10)..(10): n is a, c, g, or u
  misc_feature (16)..(16): n is a, c, g, or u
agacugununuuuaangacugg

SEQ ID NO: 98172 - RNA, 23 nt, Artificial Sequence
  Synthetic
  misc_feature (9)..(9): n is a, c, g, or u
  misc_feature (11)..(11): n is a, c, g, or u
  misc_feature (17)..(17): n is a, c, g, or u
aagacugununuuuaangacugg

SEQ ID NO: 98173 - RNA, 24 nt, Artificial Sequence
  Synthetic
  misc_feature (10)..(10): n is a, c, g, or u
  misc_feature (12)..(12): n is a, c, g, or u
  misc_feature (18)..(18): n is a, c, g, or u
aaagacugununuuuaangacugg

SEQ ID NO: 98174 - RNA, 18 nt, Artificial Sequence
  Synthetic
augaaucuggccaccugg

SEQ ID NO: 98175 - RNA, 19 nt, Artificial Sequence
  Synthetic
gaugaaucuggccaccugg

SEQ ID NO: 98176 - RNA, 20 nt, Artificial Sequence
  Synthetic
ugaugaaucuggccaccugg

SEQ ID NO: 98177 - RNA, 21 nt, Artificial Sequence
  Synthetic
uugaugaaucuggccaccugg

SEQ ID NO: 98178 - RNA, 22 nt, Artificial Sequence
  Synthetic
guugaugaaucuggccaccugg

SEQ ID NO: 98179 - RNA, 23 nt, Artificial Sequence
  Synthetic
aguugaugaaucuggccaccugg

SEQ ID NO: 98180 - RNA, 24 nt, Artificial Sequence
  Synthetic
gaguugaugaaucuggccaccugg

SEQ ID NO: 98181 - RNA, 18 nt, Artificial Sequence
  Synthetic
  misc_feature (2)..(2): n is a, c, g, or u
angacugggaggaguugg

SEQ ID NO: 98182 - RNA, 19 nt, Artificial Sequence
  Synthetic
  misc_feature (3)..(3): n is a, c, g, or u
aangacugggaggaguugg

SEQ ID NO: 98183 - RNA, 20 nt, Artificial Sequence
  Synthetic
  misc_feature (4)..(4): n is a, c, g, or u
uaangacugggaggaguugg

SEQ ID NO: 98184 - RNA, 21 nt, Artificial Sequence
  Synthetic
  misc_feature (5)..(5): n is a, c, g, or u
uuaangacugggaggaguugg

SEQ ID NO: 98185 - RNA, 22 nt, Artificial Sequence
  Synthetic
  misc_feature (6)..(6): n is a, c, g, or u
uuuaangacugggaggaguugg

SEQ ID NO: 98186 - RNA, 23 nt, Artificial Sequence
  Synthetic
  misc_feature (1)..(1): n is a, c, g, or u
  misc_feature (7)..(7): n is a, c, g, or u
nuuuaangacugggaggaguugg

SEQ ID NO: 98187 - RNA, 24 nt, Artificial Sequence
  Synthetic
  misc_feature (2)..(2): n is a, c, g, or u
  misc_feature (8)..(8): n is a, c, g, or u
unuuuaangacugggaggaguugg

SEQ ID NO: 98188 - RNA, 18 nt, Artificial Sequence
  Synthetic
uuccugucuuacuuuugg

SEQ ID NO: 98189 - RNA, 19 nt, Artificial Sequence
  Synthetic
uuuccugucuuacuuuugg

SEQ ID NO: 98190 - RNA, 20 nt, Artificial Sequence
  Synthetic
auuuccugucuuacuuuugg

SEQ ID NO: 98191 - RNA, 21 nt, Artificial Sequence
  Synthetic
cauuuccugucuuacuuuugg

SEQ ID NO: 98192 - RNA, 22 nt, Artificial Sequence
  Synthetic
acauuuccugucuuacuuuugg

SEQ ID NO: 98193 - RNA, 23 nt, Artificial Sequence
  Synthetic
cacauuuccugucuuacuuuugg

SEQ ID NO: 98194 - RNA, 24 nt, Artificial Sequence
  Synthetic
ucacauuuccugucuuacuuuugg

SEQ ID NO: 98195 - RNA, 18 nt, Artificial Sequence
  Synthetic
cucugccgauccauacug

SEQ ID NO: 98196 - RNA, 19 nt, Artificial Sequence
  Synthetic
ccucugccgauccauacug

SEQ ID NO: 98197 - RNA, 20 nt, Artificial Sequence
  Synthetic
uccucugccgauccauacug

SEQ ID NO: 98198 - RNA, 21 nt, Artificial Sequence
  Synthetic
cuccucugccgauccauacug

SEQ ID NO: 98199 - RNA, 22 nt, Artificial Sequence
  Synthetic
gcuccucugccgauccauacug

SEQ ID NO: 98200 - RNA, 23 nt, Artificial Sequence
  Synthetic
ggcuccucugccgauccauacug

SEQ ID NO: 98201 - RNA, 24 nt, Artificial Sequence
  Synthetic
uggcuccucugccgauccauacug

SEQ ID NO: 98202 - RNA, 18 nt, Artificial Sequence
  Synthetic
cauuauuuacauacucug

SEQ ID NO: 98203 - RNA, 19 nt, Artificial Sequence
  Synthetic
gcauuauuuacauacucug

SEQ ID NO: 98204 - RNA, 20 nt, Artificial Sequence
  Synthetic
ggcauuauuuacauacucug

SEQ ID NO: 98205 - RNA, 21 nt, Artificial Sequence
  Synthetic
aggcauuauuuacauacucug

SEQ ID NO: 98206 - RNA, 22 nt, Artificial Sequence
  Synthetic
uaggcauuauuuacauacucug

SEQ ID NO: 98207 - RNA, 23 nt, Artificial Sequence
  Synthetic
cuaggcauuauuuacauacucug

SEQ ID NO: 98208 - RNA, 24 nt, Artificial Sequence
  Synthetic
acuaggcauuauuuacauacucug

SEQ ID NO: 98209 - RNA, 18 nt, Artificial Sequence
  Synthetic
  misc_feature (9)..(9): n is a, c, g, or u
cugcuagancccagagug

SEQ ID NO: 98210 - RNA, 19 nt, Artificial Sequence
  Synthetic
  misc_feature (10)..(10): n is a, c, g, or u
ucugcuagancccagagug

SEQ ID NO: 98211 - RNA, 20 nt, Artificial Sequence
  Synthetic
  misc_feature (11)..(11): n is a, c, g, or u
cucugcuagancccagagug

SEQ ID NO: 98212 - RNA, 21 nt, Artificial Sequence
  Synthetic
  misc_feature (12)..(12): n is a, c, g, or u
gcucugcuagancccagagug

SEQ ID NO: 98213 - RNA, 22 nt, Artificial Sequence
  Synthetic
  misc_feature (13)..(13): n is a, c, g, or u
agcucugcuagancccagagug

SEQ ID NO: 98214 - RNA, 23 nt, Artificial Sequence
  Synthetic
  misc_feature (14)..(14): n is a, c, g, or u
aagcucugcuagancccagagug

SEQ ID NO: 98215 - RNA, 24 nt, Artificial Sequence
  Synthetic
  misc_feature (15)..(15): n is a, c, g, or u
caagcucugcuagancccagagug

SEQ ID NO: 98216 - RNA, 18 nt, Artificial Sequence
  Synthetic
acagagucuagacucgug

SEQ ID NO: 98217 - RNA, 19 nt, Artificial Sequence
  Synthetic
cacagagucuagacucgug

SEQ ID NO: 98218 - RNA, 20 nt, Artificial Sequence
  Synthetic
ccacagagucuagacucgug

SEQ ID NO: 98219 - RNA, 21 nt, Artificial Sequence
  Synthetic
accacagagucuagacucgug

SEQ ID NO: 98220 - RNA, 22 nt, Artificial Sequence
  Synthetic
uaccacagagucuagacucgug

SEQ ID NO: 98221 - RNA, 23 nt, Artificial Sequence
  Synthetic
auaccacagagucuagacucgug

SEQ ID NO: 98222 - RNA, 24 nt, Artificial Sequence
  Synthetic
aauaccacagagucuagacucgug

SEQ ID NO: 98223 - RNA, 18 nt, Artificial Sequence
  Synthetic
  misc_feature (1)..(1): n is a, c, g, or u
naggcaagcuauucugug

SEQ ID NO: 98224 - RNA, 19 nt, Artificial Sequence
  Synthetic
  misc_feature (2)..(2): n is a, c, g, or u
unaggcaagcuauucugug

SEQ ID NO: 98225 - RNA, 20 nt, Artificial Sequence
  Synthetic
  misc_feature (3)..(3): n is a, c, g, or u
cunaggcaagcuauucugug

SEQ ID NO: 98226 - RNA, 21 nt, Artificial Sequence
  Synthetic
  misc_feature (4)..(4): n is a, c, g, or u
acunaggcaagcuauucugug

SEQ ID NO: 98227 - RNA, 22 nt, Artificial Sequence
  Synthetic
  misc_feature (5)..(5): n is a, c, g, or u
cacunaggcaagcuauucugug

SEQ ID NO: 98228 - RNA, 23 nt, Artificial Sequence
  Synthetic
  misc_feature (6)..(6): n is a, c, g, or u
gcacunaggcaagcuauucugug

SEQ ID NO: 98229 - RNA, 24 nt, Artificial Sequence
  Synthetic
  misc_feature (7)..(7): n is a, c, g, or u
agcacunaggcaagcuauucugug

SEQ ID NO: 98230 - RNA, 18 nt, Artificial Sequence
  Synthetic
  misc_feature (3)..(3): n is a, c, g, or u
aangacugggaggaguug

SEQ ID NO: 98231 - RNA, 19 nt, Artificial Sequence
  Synthetic
  misc_feature (4)..(4): n is a, c, g, or u
uaangacugggaggaguug

SEQ ID NO: 98232 - RNA, 20 nt, Artificial Sequence
  Synthetic
  misc_feature (5)..(5): n is a, c, g, or u
uuaangacugggaggaguug

SEQ ID NO: 98233 - RNA, 21 nt, Artificial Sequence
  Synthetic
  misc_feature (6)..(6): n is a, c, g, or u
uuuaangacugggaggaguug

SEQ ID NO: 98234 - RNA, 22 nt, Artificial Sequence
  Synthetic
  misc_feature (1)..(1): n is a, c, g, or u
  misc_feature (7)..(7): n is a, c, g, or u
nuuuaangacugggaggaguug

SEQ ID NO: 98235 - RNA, 23 nt, Artificial Sequence
  Synthetic
  misc_feature (2)..(2): n is a, c, g, or u
  misc_feature (8)..(8): n is a, c, g, or u
unuuuaangacugggaggaguug

SEQ ID NO: 98236 - RNA, 24 nt, Artificial Sequence
  Synthetic
  misc_feature (1)..(1): n is a, c, g, or u
  misc_feature (3)..(3): n is a, c, g, or u
  misc_feature (9)..(9): n is a, c, g, or u
nunuuuaangacugggaggaguug

SEQ ID NO: 98237 - RNA, 18 nt, Artificial Sequence
  Synthetic
  misc_feature (18)..(18): n is a, c, g, or u
ggggacccugcaccgaan

SEQ ID NO: 98238 - RNA, 19 nt, Artificial Sequence
  Synthetic
  misc_feature (19)..(19): n is a, c, g, or u
uggggacccugcaccgaan

SEQ ID NO: 98239 - RNA, 20 nt, Artificial Sequence
  Synthetic
  misc_feature (20)..(20): n is a, c, g, or u
cuggggacccugcaccgaan

SEQ ID NO: 98240 - RNA, 21 nt, Artificial Sequence
  Synthetic
  misc_feature (21)..(21): n is a, c, g, or u
acuggggacccugcaccgaan

SEQ ID NO: 98241 - RNA, 22 nt, Artificial Sequence
  Synthetic
  misc_feature (22)..(22): n is a, c, g, or u
gacuggggacccugcaccgaan

SEQ ID NO: 98242 - RNA, 23 nt, Artificial Sequence
  Synthetic
  misc_feature (23)..(23): n is a, c, g, or u
ggacuggggacccugcaccgaan

SEQ ID NO: 98243 - RNA, 24 nt, Artificial Sequence
  Synthetic
  misc_feature (24)..(24): n is a, c, g, or u
aggacuggggacccugcaccgaan

SEQ ID NO: 98244 - RNA, 18 nt, Artificial Sequence
  Synthetic
  misc_feature (4)..(4): n is a, c, g, or u
  misc_feature (15)..(16): n is a, c, g, or u
  misc_feature (18)..(18): n is a, c, g, or u
ccunacauucauuunnan

SEQ ID NO: 98245 - RNA, 19 nt, Artificial Sequence
  Synthetic
  misc_feature (5)..(5): n is a, c, g, or u
  misc_feature (16)..(17): n is a, c, g, or u
  misc_feature (19)..(19): n is a, c, g, or u
uccunacauucauuunnan

SEQ ID NO: 98246 - RNA, 20 nt, Artificial Sequence
  Synthetic
  misc_feature (6)..(6): n is a, c, g, or u
  misc_feature (17)..(18): n is a, c, g, or u
  misc_feature (20)..(20): n is a, c, g, or u
uuccunacauucauuunnan

SEQ ID NO: 98247 - RNA, 21 nt, Artificial Sequence
  Synthetic
  misc_feature (7)..(7): n is a, c, g, or u
  misc_feature (18)..(19): n is a, c, g, or u
  misc_feature (21)..(21): n is a, c, g, or u
uuuccunacauucauuunnan

SEQ ID NO: 98248 - RNA, 22 nt, Artificial Sequence
  Synthetic
  misc_feature (1)..(1): n is a, c, g, or u
  misc_feature (8)..(8): n is a, c, g, or u
  misc_feature (19)..(20): n is a, c, g, or u
  misc_feature (22)..(22): n is a, c, g, or u
nuuuccunacauucauuunnan

SEQ ID NO: 98249 - RNA, 23 nt, Artificial Sequence
  Synthetic
  misc_feature (2)..(2): n is a, c, g, or u
  misc_feature (9)..(9): n is a, c, g, or u
  misc_feature (20)..(21): n is a, c, g, or u
  misc_feature (23)..(23): n is a, c, g, or u
cnuuuccunacauucauuunnan

SEQ ID NO: 98250 - RNA, 24 nt, Artificial Sequence
  Synthetic
  misc_feature (3)..(3): n is a, c, g, or u
  misc_feature (10)..(10): n is a, c, g, or u
  misc_feature (21)..(22): n is a, c, g, or u
  misc_feature (24)..(24): n is a, c, g, or u
ucnuuuccunacauucauuunnan

SEQ ID NO: 98251 - RNA, 18 nt, Artificial Sequence
  Synthetic
  misc_feature (18)..(18): n is a, c, g, or u
gacgcaacccccacuggn

SEQ ID NO: 98252 - RNA, 19 nt, Artificial Sequence
  Synthetic
  misc_feature (19)..(19): n is a, c, g, or u
ugacgcaacccccacuggn

SEQ ID NO: 98253 - RNA, 20 nt, Artificial Sequence
  Synthetic
  misc_feature (20)..(20): n is a, c, g, or u
cugacgcaacccccacuggn

SEQ ID NO: 98254 - RNA, 21 nt, Artificial Sequence
  Synthetic
  misc_feature (21)..(21): n is a, c, g, or u
gcugacgcaacccccacuggn

SEQ ID NO: 98255 - RNA, 22 nt, Artificial Sequence
  Synthetic
  misc_feature (22)..(22): n is a, c, g, or u
ugcugacgcaacccccacuggn

SEQ ID NO: 98256 - RNA, 23 nt, Artificial Sequence
  Synthetic
  misc_feature (23)..(23): n is a, c, g, or u
uugcugacgcaacccccacuggn

SEQ ID NO: 98257 - RNA, 24 nt, Artificial Sequence
  Synthetic
  misc_feature (24)..(24): n is a, c, g, or u
uuugcugacgcaacccccacuggn

SEQ ID NO: 98258 - RNA, 18 nt, Artificial Sequence
  Synthetic
  misc_feature (6)..(6): n is a, c, g, or u
  misc_feature (17)..(18): n is a, c, g, or u
uuccunacauucauuunn

SEQ ID NO: 98259 - RNA, 19 nt, Artificial Sequence
  Synthetic
  misc_feature (7)..(7): n is a, c, g, or u
  misc_feature (18)..(19): n is a, c, g, or u
uuuccunacauucauuunn

SEQ ID NO: 98260 - RNA, 20 nt, Artificial Sequence
  Synthetic
  misc_feature (1)..(1): n is a, c, g, or u
  misc_feature (8)..(8): n is a, c, g, or u
  misc_feature (19)..(20): n is a, c, g, or u
nuuuccunacauucauuunn

SEQ ID NO: 98261 - RNA, 21 nt, Artificial Sequence
  Synthetic
  misc_feature (2)..(2): n is a, c, g, or u
  misc_feature (9)..(9): n is a, c, g, or u
  misc_feature (20)..(21): n is a, c, g, or u
cnuuuccunacauucauuunn

SEQ ID NO: 98262 - RNA, 22 nt, Artificial Sequence
  Synthetic
  misc_feature (3)..(3): n is a, c, g, or u
  misc_feature (10)..(10): n is a, c, g, or u
  misc_feature (21)..(22): n is a, c, g, or u
ucnuuuccunacauucauuunn

SEQ ID NO: 98263 - RNA, 23 nt, Artificial Sequence
  Synthetic
  misc_feature (4)..(4): n is a, c, g, or u
  misc_feature (11)..(11): n is a, c, g, or u
  misc_feature (22)..(23): n is a, c, g, or u
cucnuuuccunacauucauuunn

SEQ ID NO: 98264 - RNA, 24 nt, Artificial Sequence
  Synthetic
  misc_feature (5)..(5): n is a, c, g, or u
  misc_feature (12)..(12): n is a, c, g, or u
  misc_feature (23)..(24): n is a, c, g, or u
ccucnuuuccunacauucauuunn

SEQ ID NO: 98265 - RNA, 18 nt, Artificial Sequence
  Synthetic
  misc_feature (8)..(8): n is a, c, g, or u
uugacccnuauaaagaau

SEQ ID NO: 98266 - RNA, 19 nt, Artificial Sequence
  Synthetic
  misc_feature (9)..(9): n is a, c, g, or u
auugacccnuauaaagaau

SEQ ID NO: 98267 - RNA, 20 nt, Artificial Sequence
  Synthetic
  misc_feature (10)..(10): n is a, c, g, or u
cauugacccnuauaaagaau

SEQ ID NO: 98268 - RNA, 21 nt, Artificial Sequence
  Synthetic
  misc_feature (11)..(11): n is a, c, g, or u
acauugacccnuauaaagaau

SEQ ID NO: 98269 - RNA, 22 nt, Artificial Sequence
  Synthetic
  misc_feature (12)..(12): n is a, c, g, or u
gacauugacccnuauaaagaau

SEQ ID NO: 98270 - RNA, 23 nt, Artificial Sequence
  Synthetic
  misc_feature (13)..(13): n is a, c, g, or u
ggacauugacccnuauaaagaau

SEQ ID NO: 98271 - RNA, 24 nt, Artificial Sequence
  Synthetic
  misc_feature (14)..(14): n is a, c, g, or u
uggacauugacccnuauaaagaau

SEQ ID NO: 98272 - RNA, 18 nt, Artificial Sequence
  Synthetic
accugggugggaaguaau

SEQ ID NO: 98273 - RNA, 19 nt, Artificial Sequence
  Synthetic
caccugggugggaaguaau

SEQ ID NO: 98274 - RNA, 20 nt, Artificial Sequence
  Synthetic
ccaccugggugggaaguaau

SEQ ID NO: 98275 - RNA, 21 nt, Artificial Sequence
  Synthetic
gccaccugggugggaaguaau

SEQ ID NO: 98276 - RNA, 22 nt, Artificial Sequence
  Synthetic
ggccaccugggugggaaguaau

SEQ ID NO: 98277 - RNA, 23 nt, Artificial Sequence
  Synthetic
uggccaccugggugggaaguaau

SEQ ID NO: 98278 - RNA, 24 nt, Artificial Sequence
  Synthetic
cuggccaccugggugggaaguaau

SEQ ID NO: 98279 - RNA, 18 nt, Artificial Sequence
  Synthetic
  misc_feature (1)..(1): n is a, c, g, or u
nuucaugggauauguaau

SEQ ID NO: 98280 - RNA, 19 nt, Artificial Sequence
  Synthetic
  misc_feature (2)..(2): n is a, c, g, or u
anuucaugggauauguaau

SEQ ID NO: 98281 - RNA, 20 nt, Artificial Sequence
  Synthetic
  misc_feature (3)..(3): n is a, c, g, or u
aanuucaugggauauguaau

SEQ ID NO: 98282 - RNA, 21 nt, Artificial Sequence
  Synthetic
  misc_feature (4)..(4): n is a, c, g, or u
uaanuucaugggauauguaau

SEQ ID NO: 98283 - RNA, 22 nt, Artificial Sequence
  Synthetic
  misc_feature (5)..(5): n is a, c, g, or u
uuaanuucaugggauauguaau

SEQ ID NO: 98284 - RNA, 23 nt, Artificial Sequence
  Synthetic
  misc_feature (6)..(6): n is a, c, g, or u
cuuaanuucaugggauauguaau

SEQ ID NO: 98285 - RNA, 24 nt, Artificial Sequence
  Synthetic
  misc_feature (7)..(7): n is a, c, g, or u
ccuuaanuucaugggauauguaau

SEQ ID NO: 98286 - RNA, 18 nt, Artificial Sequence
  Synthetic
agcuaugucaauguuaau

SEQ ID NO: 98287 - RNA, 19 nt, Artificial Sequence
  Synthetic
  misc_feature (1)..(1): n is a, c, g, or u
nagcuaugucaauguuaau

SEQ ID NO: 98288 - RNA, 20 nt, Artificial Sequence
  Synthetic
  misc_feature (2)..(2): n is a, c, g, or u
unagcuaugucaauguuaau

SEQ ID NO: 98289 - RNA, 21 nt, Artificial Sequence
  Synthetic
  misc_feature (3)..(3): n is a, c, g, or u
gunagcuaugucaauguuaau

SEQ ID NO: 98290 - RNA, 22 nt, Artificial Sequence
  Synthetic
  misc_feature (4)..(4): n is a, c, g, or u
agunagcuaugucaauguuaau

SEQ ID NO: 98291 - RNA, 23 nt, Artificial Sequence
  Synthetic
  misc_feature (5)..(5): n is a, c, g, or u
uagunagcuaugucaauguuaau

SEQ ID NO: 98292 - RNA, 24 nt, Artificial Sequence
  Synthetic
  misc_feature (6)..(6): n is a, c, g, or u
guagunagcuaugucaauguuaau

SEQ ID NO: 98293 - RNA, 18 nt, Artificial Sequence
  Synthetic
gaacaagagcuacagcau

SEQ ID NO: 98294 - RNA, 19 nt, Artificial Sequence
  Synthetic
ggaacaagagcuacagcau

SEQ ID NO: 98295 - RNA, 20 nt, Artificial Sequence
  Synthetic
gggaacaagagcuacagcau

SEQ ID NO: 98296 - RNA, 21 nt, Artificial Sequence
  Synthetic
ugggaacaagagcuacagcau

SEQ ID NO: 98297 - RNA, 22 nt, Artificial Sequence
  Synthetic
uugggaacaagagcuacagcau

SEQ ID NO: 98298 - RNA, 23 nt, Artificial Sequence
  Synthetic
cuugggaacaagagcuacagcau

SEQ ID NO: 98299 - RNA, 24 nt, Artificial Sequence
  Synthetic
ucuugggaacaagagcuacagcau

SEQ ID NO: 98300 - RNA, 18 nt, Artificial Sequence
  Synthetic
caaaccucgacaaggcau

SEQ ID NO: 98301 - RNA, 19 nt, Artificial Sequence
  Synthetic
ccaaaccucgacaaggcau

SEQ ID NO: 98302 - RNA, 20 nt, Artificial Sequence
  Synthetic
uccaaaccucgacaaggcau

SEQ ID NO: 98303 - RNA, 21 nt, Artificial Sequence
  Synthetic
uuccaaaccucgacaaggcau

SEQ ID NO: 98304 - RNA, 22 nt, Artificial Sequence
  Synthetic
cuuccaaaccucgacaaggcau

SEQ ID NO: 98305 - RNA, 23 nt, Artificial Sequence
  Synthetic
ucuuccaaaccucgacaaggcau

SEQ ID NO: 98306 - RNA, 24 nt, Artificial Sequence
  Synthetic
gucuuccaaaccucgacaaggcau

SEQ ID NO: 98307 - RNA, 18 nt, Artificial Sequence
  Synthetic
  misc_feature (10)..(10): n is a, c, g, or u
  misc_feature (15)..(15): n is a, c, g, or u
agguaggagngggancau

SEQ ID NO: 98308 - RNA, 19 nt, Artificial Sequence
  Synthetic
  misc_feature (11)..(11): n is a, c, g, or u
  misc_feature (16)..(16): n is a, c, g, or u
cagguaggagngggancau

SEQ ID NO: 98309 - RNA, 20 nt, Artificial Sequence
  Synthetic
  misc_feature (1)..(1): n is a, c, g, or u
  misc_feature (12)..(12): n is a, c, g, or u
  misc_feature (17)..(17): n is a, c, g, or u
ncagguaggagngggancau

SEQ ID NO: 98310 - RNA, 21 nt, Artificial Sequence
  Synthetic
  misc_feature (2)..(2): n is a, c, g, or u
  misc_feature (13)..(13): n is a, c, g, or u
  misc_feature (18)..(18): n is a, c, g, or u
ancagguaggagngggancau

SEQ ID NO: 98311 - RNA, 22 nt, Artificial Sequence
  Synthetic
  misc_feature (3)..(3): n is a, c, g, or u
  misc_feature (14)..(14): n is a, c, g, or u
  misc_feature (19)..(19): n is a, c, g, or u
aancagguaggagngggancau

SEQ ID NO: 98312 - RNA, 23 nt, Artificial Sequence
  Synthetic
  misc_feature (4)..(4): n is a, c, g, or u
  misc_feature (15)..(15): n is a, c, g, or u
  misc_feature (20)..(20): n is a, c, g, or u
aaancagguaggagngggancau

SEQ ID NO: 98313 - RNA, 24 nt, Artificial Sequence
  Synthetic
  misc_feature (5)..(5): n is a, c, g, or u
  misc_feature (16)..(16): n is a, c, g, or u
  misc_feature (21)..(21): n is a, c, g, or u
caaancagguaggagngggancau

SEQ ID NO: 98314 - RNA, 18 nt, Artificial Sequence
  Synthetic
  misc_feature (3)..(3): n is a, c, g, or u
aanucaaacaauccagau

SEQ ID NO: 98315 - RNA, 19 nt, Artificial Sequence
  Synthetic
  misc_feature (4)..(4): n is a, c, g, or u
caanucaaacaauccagau

SEQ ID NO: 98316 - RNA, 20 nt, Artificial Sequence
  Synthetic
  misc_feature (5)..(5): n is a, c, g, or u
ccaanucaaacaauccagau

SEQ ID NO: 98317 - RNA, 21 nt, Artificial Sequence
  Synthetic
  misc_feature (6)..(6): n is a, c, g, or u
gccaanucaaacaauccagau

SEQ ID NO: 98318 - RNA, 22 nt, Artificial Sequence
  Synthetic
  misc_feature (7)..(7): n is a, c, g, or u
agccaanucaaacaauccagau

SEQ ID NO: 98319 - RNA, 23 nt, Artificial Sequence
  Synthetic
  misc_feature (8)..(8): n is a, c, g, or u
gagccaanucaaacaauccagau

SEQ ID NO: 98320 - RNA, 24 nt, Artificial Sequence
  Synthetic
  misc_feature (9)..(9): n is a, c, g, or u
ggagccaanucaaacaauccagau

SEQ ID NO: 98321 - RNA, 18 nt, Artificial Sequence
  Synthetic
  misc_feature (1)..(1): n is a, c, g, or u
nuaaauagaccuauugau

SEQ ID NO: 98322 - RNA, 19 nt, Artificial Sequence
  Synthetic
  misc_feature (2)..(2): n is a, c, g, or u
unuaaauagaccuauugau

SEQ ID NO: 98323 - RNA, 20 nt, Artificial Sequence
  Synthetic
  misc_feature (3)..(3): n is a, c, g, or u
cunuaaauagaccuauugau

SEQ ID NO: 98324 - RNA, 21 nt, Artificial Sequence
  Synthetic
  misc_feature (4)..(4): n is a, c, g, or u
ccunuaaauagaccuauugau

SEQ ID NO: 98325 - RNA, 22 nt, Artificial Sequence
  Synthetic
  misc_feature (1)..(1): n is a, c, g, or u
  misc_feature (5)..(5): n is a, c, g, or u
nccunuaaauagaccuauugau

SEQ ID NO: 98326 - RNA, 23 nt, Artificial Sequence
  Synthetic
  misc_feature (2)..(2): n is a, c, g, or u
  misc_feature (6)..(6): n is a, c, g, or u
unccunuaaauagaccuauugau

SEQ ID NO: 98327 - RNA, 24 nt, Artificial Sequence
  Synthetic
  misc_feature (3)..(3): n is a, c, g, or u
  misc_feature (7)..(7): n is a, c, g, or u
cunccunuaaauagaccuauugau

SEQ ID NO: 98328 - RNA, 18 nt, Artificial Sequence
  Synthetic
  misc_feature (16)..(16): n is a, c, g, or u
uugcccaaggucuuanau

SEQ ID NO: 98329 - RNA, 19 nt, Artificial Sequence
  Synthetic
  misc_feature (17)..(17): n is a, c, g, or u
cuugcccaaggucuuanau

SEQ ID NO: 98330 - RNA, 20 nt, Artificial Sequence
  Synthetic
  misc_feature (18)..(18): n is a, c, g, or u
ucuugcccaaggucuuanau

SEQ ID NO: 98331 - RNA, 21 nt, Artificial Sequence
  Synthetic
  misc_feature (19)..(19): n is a, c, g, or u
gucuugcccaaggucuuanau

SEQ ID NO: 98332 - RNA, 22 nt, Artificial Sequence
  Synthetic
  misc_feature (20)..(20): n is a, c, g, or u
ggucuugcccaaggucuuanau

SEQ ID NO: 98333 - RNA, 23 nt, Artificial Sequence
  Synthetic
  misc_feature (21)..(21): n is a, c, g, or u
aggucuugcccaaggucuuanau

SEQ ID NO: 98334 - RNA, 24 nt, Artificial Sequence
  Synthetic
  misc_feature (22)..(22): n is a, c, g, or u
caggucuugcccaaggucuuanau

SEQ ID NO: 98335 - RNA, 18 nt, Artificial Sequence
  Synthetic
uuucuguguaaacaauau

SEQ ID NO: 98336 - RNA, 19 nt, Artificial Sequence
  Synthetic
cuuucuguguaaacaauau

SEQ ID NO: 98337 - RNA, 20 nt, Artificial Sequence
  Synthetic
ccuuucuguguaaacaauau

SEQ ID NO: 98338 - RNA, 21 nt, Artificial Sequence
  Synthetic
gccuuucuguguaaacaauau

SEQ ID NO: 98339 - RNA, 22 nt, Artificial Sequence
  Synthetic
ggccuuucuguguaaacaauau

SEQ ID NO: 98340 - RNA, 23 nt, Artificial Sequence
  Synthetic
aggccuuucuguguaaacaauau

SEQ ID NO: 98341 - RNA, 24 nt, Artificial Sequence
  Synthetic
aaggccuuucuguguaaacaauau

SEQ ID NO: 98342 - RNA, 18 nt, Artificial Sequence
  Synthetic
aauagaugucaacaauau

SEQ ID NO: 98343 - RNA, 19 nt, Artificial Sequence
  Synthetic
  misc_feature (1)..(1): n is a, c, g, or u
naauagaugucaacaauau

SEQ ID NO: 98344 - RNA, 20 nt, Artificial Sequence
  Synthetic
  misc_feature (2)..(2): n is a, c, g, or u
unaauagaugucaacaauau

SEQ ID NO: 98345 - RNA, 21 nt, Artificial Sequence
  Synthetic
  misc_feature (3)..(3): n is a, c, g, or u
aunaauagaugucaacaauau

SEQ ID NO: 98346 - RNA, 22 nt, Artificial Sequence
  Synthetic
  misc_feature (4)..(4): n is a, c, g, or u
uaunaauagaugucaacaauau

SEQ ID NO: 98347 - RNA, 23 nt, Artificial Sequence
  Synthetic
  misc_feature (5)..(5): n is a, c, g, or u
uuaunaauagaugucaacaauau

SEQ ID NO: 98348 - RNA, 24 nt, Artificial Sequence
  Synthetic
  misc_feature (6)..(6): n is a, c, g, or u
auuaunaauagaugucaacaauau

SEQ ID NO: 98349 - RNA, 18 nt, Artificial Sequence
  Synthetic
  misc_feature (9)..(9): n is a, c, g, or u
  misc_feature (13)..(13): n is a, c, g, or u
aaggcuggnauunuauau

SEQ ID NO: 98350 - RNA, 19 nt, Artificial Sequence
  Synthetic
  misc_feature (10)..(10): n is a, c, g, or u
  misc_feature (14)..(14): n is a, c, g, or u
gaaggcuggnauunuauau

SEQ ID NO: 98351 - RNA, 20 nt, Artificial Sequence
  Synthetic
  misc_feature (11)..(11): n is a, c, g, or u
  misc_feature (15)..(15): n is a, c, g, or u
ggaaggcuggnauunuauau

SEQ ID NO: 98352 - RNA, 21 nt, Artificial Sequence
  Synthetic
  misc_feature (12)..(12): n is a, c, g, or u
  misc_feature (16)..(16): n is a, c, g, or u
uggaaggcuggnauunuauau

SEQ ID NO: 98353 - RNA, 22 nt, Artificial Sequence
  Synthetic
  misc_feature (13)..(13): n is a, c, g, or u
  misc_feature (17)..(17): n is a, c, g, or u
guggaaggcuggnauunuauau

SEQ ID NO: 98354 - RNA, 23 nt, Artificial Sequence
  Synthetic
  misc_feature (14)..(14): n is a, c, g, or u
  misc_feature (18)..(18): n is a, c, g, or u
uguggaaggcuggnauunuauau

SEQ ID NO: 98355 - RNA, 24 nt, Artificial Sequence
  Synthetic
  misc_feature (15)..(15): n is a, c, g, or u
  misc_feature (19)..(19): n is a, c, g, or u
cuguggaaggcuggnauunuauau

SEQ ID NO: 98356 - RNA, 18 nt, Artificial Sequence
  Synthetic
auauggaugaugugguau

SEQ ID NO: 98357 - RNA, 19 nt, Artificial Sequence
  Synthetic
uauauggaugaugugguau

SEQ ID NO: 98358 - RNA, 20 nt, Artificial Sequence
  Synthetic
uuauauggaugaugugguau

SEQ ID NO: 98359 - RNA, 21 nt, Artificial Sequence
  Synthetic
guuauauggaugaugugguau

SEQ ID NO: 98360 - RNA, 22 nt, Artificial Sequence
  Synthetic
aguuauauggaugaugugguau

SEQ ID NO: 98361 - RNA, 23 nt, Artificial Sequence
  Synthetic
caguuauauggaugaugugguau

SEQ ID NO: 98362 - RNA, 24 nt, Artificial Sequence
  Synthetic
ucaguuauauggaugaugugguau

SEQ ID NO: 98363 - RNA, 18 nt, Artificial Sequence
  Synthetic
  misc_feature (9)..(9): n is a, c, g, or u
accgccucngcucuguau

SEQ ID NO: 98364 - RNA, 19 nt, Artificial Sequence
  Synthetic
  misc_feature (10)..(10): n is a, c, g, or u
caccgccucngcucuguau

SEQ ID NO: 98365 - RNA, 20 nt, Artificial Sequence
  Synthetic
  misc_feature (11)..(11): n is a, c, g, or u
acaccgccucngcucuguau

SEQ ID NO: 98366 - RNA, 21 nt, Artificial Sequence
  Synthetic
  misc_feature (12)..(12): n is a, c, g, or u
gacaccgccucngcucuguau

SEQ ID NO: 98367 - RNA, 22 nt, Artificial Sequence
  Synthetic
  misc_feature (13)..(13): n is a, c, g, or u
cgacaccgccucngcucuguau

SEQ ID NO: 98368 - RNA, 23 nt, Artificial Sequence
  Synthetic
  misc_feature (14)..(14): n is a, c, g, or u
ucgacaccgccucngcucuguau

SEQ ID NO: 98369 - RNA, 24 nt, Artificial Sequence
  Synthetic
  misc_feature (15)..(15): n is a, c, g, or u
cucgacaccgccucngcucuguau

SEQ ID NO: 98370 - RNA, 18 nt, Artificial Sequence
  Synthetic
ucaaucuucucgaggacu

SEQ ID NO: 98371 - RNA, 19 nt, Artificial Sequence
  Synthetic
gucaaucuucucgaggacu

SEQ ID NO: 98372 - RNA, 20 nt, Artificial Sequence
  Synthetic
cgucaaucuucucgaggacu

SEQ ID NO: 98373 - RNA, 21 nt, Artificial Sequence
  Synthetic
ucgucaaucuucucgaggacu

SEQ ID NO: 98374 - RNA, 22 nt, Artificial Sequence
  Synthetic
aucgucaaucuucucgaggacu

SEQ ID NO: 98375 - RNA, 23 nt, Artificial Sequence
  Synthetic
uaucgucaaucuucucgaggacu

SEQ ID NO: 98376 - RNA, 24 nt, Artificial Sequence
  Synthetic
auaucgucaaucuucucgaggacu

SEQ ID NO: 98377 - RNA, 18 nt, Artificial Sequence
  Synthetic
  misc_feature (6)..(6): n is a, c, g, or u
  misc_feature (8)..(8): n is a, c, g, or u
  misc_feature (14)..(14): n is a, c, g, or u
acugununuuuaangacu

SEQ ID NO: 98378 - RNA, 19 nt, Artificial Sequence
  Synthetic
  misc_feature (7)..(7): n is a, c, g, or u
  misc_feature (9)..(9): n is a, c, g, or u
  misc_feature (15)..(15): n is a, c, g, or u
gacugununuuuaangacu

SEQ ID NO: 98379 - RNA, 20 nt, Artificial Sequence
  Synthetic
  misc_feature (8)..(8): n is a, c, g, or u
  misc_feature (10)..(10): n is a, c, g, or u
  misc_feature (16)..(16): n is a, c, g, or u
agacugununuuuaangacu

SEQ ID NO: 98380 - RNA, 21 nt, Artificial Sequence
  Synthetic
  misc_feature (9)..(9): n is a, c, g, or u
  misc_feature (11)..(11): n is a, c, g, or u
  misc_feature (17)..(17): n is a, c, g, or u
aagacugununuuuaangacu

SEQ ID NO: 98381 - RNA, 22 nt, Artificial Sequence
  Synthetic
  misc_feature (10)..(10): n is a, c, g, or u
  misc_feature (12)..(12): n is a, c, g, or u
  misc_feature (18)..(18): n is a, c, g, or u
aaagacugununuuuaangacu

SEQ ID NO: 98382 - RNA, 23 nt, Artificial Sequence
  Synthetic
  misc_feature (11)..(11): n is a, c, g, or u
  misc_feature (13)..(13): n is a, c, g, or u
  misc_feature (19)..(19): n is a, c, g, or u
caaagacugununuuuaangacu

SEQ ID NO: 98383 - RNA, 24 nt, Artificial Sequence
  Synthetic
  misc_feature (12)..(12): n is a, c, g, or u
  misc_feature (14)..(14): n is a, c, g, or u
  misc_feature (20)..(20): n is a, c, g, or u
ucaaagacugununuuuaangacu

SEQ ID NO: 98384 - RNA, 18 nt, Artificial Sequence
  Synthetic
ccucugccgauccauacu

SEQ ID NO: 98385 - RNA, 19 nt, Artificial Sequence
  Synthetic
uccucugccgauccauacu

SEQ ID NO: 98386 - RNA, 20 nt, Artificial Sequence
  Synthetic
cuccucugccgauccauacu

SEQ ID NO: 98387 - RNA, 21 nt, Artificial Sequence
  Synthetic
gcuccucugccgauccauacu

SEQ ID NO: 98388 - RNA, 22 nt, Artificial Sequence
  Synthetic
ggcuccucugccgauccauacu

SEQ ID NO: 98389 - RNA, 23 nt, Artificial Sequence
  Synthetic
uggcuccucugccgauccauacu

SEQ ID NO: 98390 - RNA, 24 nt, Artificial Sequence
  Synthetic
guggcuccucugccgauccauacu

SEQ ID NO: 98391 - RNA, 18 nt, Artificial Sequence
  Synthetic
  misc_feature (6)..(6): n is a, c, g, or u
  misc_feature (8)..(8): n is a, c, g, or u
guuaangnucuuuguacu

SEQ ID NO: 98392 - RNA, 19 nt, Artificial Sequence
  Synthetic
  misc_feature (7)..(7): n is a, c, g, or u
  misc_feature (9)..(9): n is a, c, g, or u
gguuaangnucuuuguacu

SEQ ID NO: 98393 - RNA, 20 nt, Artificial Sequence
  Synthetic
  misc_feature (8)..(8): n is a, c, g, or u
  misc_feature (10)..(10): n is a, c, g, or u
agguuaangnucuuuguacu

SEQ ID NO: 98394 - RNA, 21 nt, Artificial Sequence
  Synthetic
  misc_feature (9)..(9): n is a, c, g, or u
  misc_feature (11)..(11): n is a, c, g, or u
uagguuaangnucuuuguacu

SEQ ID NO: 98395 - RNA, 22 nt, Artificial Sequence
  Synthetic
  misc_feature (1)..(1): n is a, c, g, or u
  misc_feature (10)..(10): n is a, c, g, or u
  misc_feature (12)..(12): n is a, c, g, or u
nuagguuaangnucuuuguacu

SEQ ID NO: 98396 - RNA, 23 nt, Artificial Sequence
  Synthetic
  misc_feature (2)..(2): n is a, c, g, or u
  misc_feature (11)..(11): n is a, c, g, or u
  misc_feature (13)..(13): n is a, c, g, or u
anuagguuaangnucuuuguacu

SEQ ID NO: 98397 - RNA, 24 nt, Artificial Sequence
  Synthetic
  misc_feature (3)..(3): n is a, c, g, or u
  misc_feature (12)..(12): n is a, c, g, or u
  misc_feature (14)..(14): n is a, c, g, or u
ganuagguuaangnucuuuguacu

SEQ ID NO: 98398 - RNA, 18 nt, Artificial Sequence
  Synthetic
uguugcuguacaaaaccu

SEQ ID NO: 98399 - RNA, 19 nt, Artificial Sequence
  Synthetic
uuguugcuguacaaaaccu

SEQ ID NO: 98400 - RNA, 20 nt, Artificial Sequence
  Synthetic
cuuguugcuguacaaaaccu

SEQ ID NO: 98401 - RNA, 21 nt, Artificial Sequence
  Synthetic
ucuuguugcuguacaaaaccu

SEQ ID NO: 98402 - RNA, 22 nt, Artificial Sequence
  Synthetic
cucuuguugcuguacaaaaccu

SEQ ID NO: 98403 - RNA, 23 nt, Artificial Sequence
  Synthetic
ccucuuguugcuguacaaaaccu

SEQ ID NO: 98404 - RNA, 24 nt, Artificial Sequence
  Synthetic
cccucuuguugcuguacaaaaccu

SEQ ID NO: 98405 - RNA, 18 nt, Artificial Sequence
  Synthetic
cuuucuguucccaauccu

SEQ ID NO: 98406 - RNA, 19 nt, Artificial Sequence
  Synthetic
ucuuucuguucccaauccu

SEQ ID NO: 98407 - RNA, 20 nt, Artificial Sequence
  Synthetic
aucuuucuguucccaauccu

SEQ ID NO: 98408 - RNA, 21 nt, Artificial Sequence
  Synthetic
aaucuuucuguucccaauccu

SEQ ID NO: 98409 - RNA, 22 nt, Artificial Sequence
  Synthetic
  misc_feature (1)..(1): n is a, c, g, or u
naaucuuucuguucccaauccu

SEQ ID NO: 98410 - RNA, 23 nt, Artificial Sequence
  Synthetic
  misc_feature (2)..(2): n is a, c, g, or u
cnaaucuuucuguucccaauccu

SEQ ID NO: 98411 - RNA, 24 nt, Artificial Sequence
  Synthetic
  misc_feature (3)..(3): n is a, c, g, or u
acnaaucuuucuguucccaauccu

SEQ ID NO: 98412 - RNA, 18 nt, Artificial Sequence
  Synthetic
ggcuuucgcaagauuccu

SEQ ID NO: 98413 - RNA, 19 nt, Artificial Sequence
  Synthetic
gggcuuucgcaagauuccu

SEQ ID NO: 98414 - RNA, 20 nt, Artificial Sequence
  Synthetic
ugggcuuucgcaagauuccu

SEQ ID NO: 98415 - RNA, 21 nt, Artificial Sequence
  Synthetic
  misc_feature (1)..(1): n is a, c, g, or u
nugggcuuucgcaagauuccu

SEQ ID NO: 98416 - RNA, 22 nt, Artificial Sequence
  Synthetic
  misc_feature (2)..(2): n is a, c, g, or u
cnugggcuuucgcaagauuccu

SEQ ID NO: 98417 - RNA, 23 nt, Artificial Sequence
  Synthetic
  misc_feature (3)..(3): n is a, c, g, or u
ucnugggcuuucgcaagauuccu

SEQ ID NO: 98418 - RNA, 24 nt, Artificial Sequence
  Synthetic
  misc_feature (4)..(4): n is a, c, g, or u
aucnugggcuuucgcaagauuccu

SEQ ID NO: 98419 - RNA, 18 nt, Artificial Sequence
  Synthetic
ggguggagcccucaggcu

SEQ ID NO: 98420 - RNA, 19 nt, Artificial Sequence
  Synthetic
gggguggagcccucaggcu

SEQ ID NO: 98421 - RNA, 20 nt, Artificial Sequence
  Synthetic
ugggguggagcccucaggcu

SEQ ID NO: 98422 - RNA, 21 nt, Artificial Sequence
  Synthetic
uugggguggagcccucaggcu

SEQ ID NO: 98423 - RNA, 22 nt, Artificial Sequence
  Synthetic
uuugggguggagcccucaggcu

SEQ ID NO: 98424 - RNA, 23 nt, Artificial Sequence
  Synthetic
uuuugggguggagcccucaggcu

SEQ ID NO: 98425 - RNA, 24 nt, Artificial Sequence
  Synthetic
cuuuugggguggagcccucaggcu

SEQ ID NO: 98426 - RNA, 18 nt, Artificial Sequence
  Synthetic
cgcagaagaucucaaucu

SEQ ID NO: 98427 - RNA, 19 nt, Artificial Sequence
  Synthetic
ucgcagaagaucucaaucu

SEQ ID NO: 98428 - RNA, 20 nt, Artificial Sequence
  Synthetic
gucgcagaagaucucaaucu

SEQ ID NO: 98429 - RNA, 21 nt, Artificial Sequence
  Synthetic
cgucgcagaagaucucaaucu

SEQ ID NO: 98430 - RNA, 22 nt, Artificial Sequence
  Synthetic
gcgucgcagaagaucucaaucu

SEQ ID NO: 98431 - RNA, 23 nt, Artificial Sequence
  Synthetic
cgcgucgcagaagaucucaaucu

SEQ ID NO: 98432 - RNA, 24 nt, Artificial Sequence
  Synthetic
ccgcgucgcagaagaucucaaucu

SEQ ID NO: 98433 - RNA, 18 nt, Artificial Sequence
  Synthetic
gcauuauuuacauacucu

SEQ ID NO: 98434 - RNA, 19 nt, Artificial Sequence
  Synthetic
ggcauuauuuacauacucu

SEQ ID NO: 98435 - RNA, 20 nt, Artificial Sequence
  Synthetic
aggcauuauuuacauacucu

SEQ ID NO: 98436 - RNA, 21 nt, Artificial Sequence
  Synthetic
uaggcauuauuuacauacucu

SEQ ID NO: 98437 - RNA, 22 nt, Artificial Sequence
  Synthetic
cuaggcauuauuuacauacucu

SEQ ID NO: 98438 - RNA, 23 nt, Artificial Sequence
  Synthetic
acuaggcauuauuuacauacucu

SEQ ID NO: 98439 - RNA, 24 nt, Artificial Sequence
  Synthetic
aacuaggcauuauuuacauacucu

SEQ ID NO: 98440 - RNA, 18 nt, Artificial Sequence
  Synthetic
ucccaucucuccaccucu

SEQ ID NO: 98441 - RNA, 19 nt, Artificial Sequence
  Synthetic
cucccaucucuccaccucu

SEQ ID NO: 98442 - RNA, 20 nt, Artificial Sequence
  Synthetic
acucccaucucuccaccucu

SEQ ID NO: 98443 - RNA, 21 nt, Artificial Sequence
  Synthetic
uacucccaucucuccaccucu

SEQ ID NO: 98444 - RNA, 22 nt, Artificial Sequence
  Synthetic
cuacucccaucucuccaccucu

SEQ ID NO: 98445 - RNA, 23 nt, Artificial Sequence
  Synthetic
ccuacucccaucucuccaccucu

SEQ ID NO: 98446 - RNA, 24 nt, Artificial Sequence
  Synthetic
gccuacucccaucucuccaccucu

SEQ ID NO: 98447 - RNA, 18 nt, Artificial Sequence
  Synthetic
aacucuguuguccucucu

SEQ ID NO: 98448 - RNA, 19 nt, Artificial Sequence
  Synthetic
caacucuguuguccucucu

SEQ ID NO: 98449 - RNA, 20 nt, Artificial Sequence
  Synthetic
acaacucuguuguccucucu

SEQ ID NO: 98450 - RNA, 21 nt, Artificial Sequence
  Synthetic
gacaacucuguuguccucucu

SEQ ID NO: 98451 - RNA, 22 nt, Artificial Sequence
  Synthetic
  misc_feature (1)..(1): n is a, c, g, or u
ngacaacucuguuguccucucu

SEQ ID NO: 98452 - RNA, 23 nt, Artificial Sequence
  Synthetic
  misc_feature (2)..(2): n is a, c, g, or u
cngacaacucuguuguccucucu

SEQ ID NO: 98453 - RNA, 24 nt, Artificial Sequence
  Synthetic
  misc_feature (3)..(3): n is a, c, g, or u
acngacaacucuguuguccucucu

SEQ ID NO: 98454 - RNA, 18 nt, Artificial Sequence
  Synthetic
cgggaggccuuagagucu

SEQ ID NO: 98455 - RNA, 19 nt, Artificial Sequence
  Synthetic
ucgggaggccuuagagucu

SEQ ID NO: 98456 - RNA, 20 nt, Artificial Sequence
  Synthetic
aucgggaggccuuagagucu

SEQ ID NO: 98457 - RNA, 21 nt, Artificial Sequence
  Synthetic
uaucgggaggccuuagagucu

SEQ ID NO: 98458 - RNA, 22 nt, Artificial Sequence
  Synthetic
guaucgggaggccuuagagucu

SEQ ID NO: 98459 - RNA, 23 nt, Artificial Sequence
  Synthetic
uguaucgggaggccuuagagucu

SEQ ID NO: 98460 - RNA, 24 nt, Artificial Sequence
  Synthetic
cuguaucgggaggccuuagagucu

SEQ ID NO: 98461 - RNA, 18 nt, Artificial Sequence
  Synthetic
cccgcggacgacccgucu

SEQ ID NO: 98462 - RNA, 19 nt, Artificial Sequence
  Synthetic
ucccgcggacgacccgucu

SEQ ID NO: 98463 - RNA, 20 nt, Artificial Sequence
  Synthetic
aucccgcggacgacccgucu

SEQ ID NO: 98464 - RNA, 21 nt, Artificial Sequence
  Synthetic
aaucccgcggacgacccgucu

SEQ ID NO: 98465 - RNA, 22 nt, Artificial Sequence
  Synthetic
gaaucccgcggacgacccgucu

SEQ ID NO: 98466 - RNA, 23 nt, Artificial Sequence
  Synthetic
ugaaucccgcggacgacccgucu

SEQ ID NO: 98467 - RNA, 24 nt, Artificial Sequence
  Synthetic
cugaaucccgcggacgacccgucu

SEQ ID NO: 98468 - RNA, 18 nt, Artificial Sequence
  Synthetic
ugugggucaccauauucu

SEQ ID NO: 98469 - RNA, 19 nt, Artificial Sequence
  Synthetic
uugugggucaccauauucu

SEQ ID NO: 98470 - RNA, 20 nt, Artificial Sequence
  Synthetic
uuugugggucaccauauucu

SEQ ID NO: 98471 - RNA, 21 nt, Artificial Sequence
  Synthetic
uuuugugggucaccauauucu

SEQ ID NO: 98472 - RNA, 22 nt, Artificial Sequence
  Synthetic
auuuugugggucaccauauucu

SEQ ID NO: 98473 - RNA, 23 nt, Artificial Sequence
  Synthetic
cauuuugugggucaccauauucu

SEQ ID NO: 98474 - RNA, 24 nt, Artificial Sequence
  Synthetic
ucauuuugugggucaccauauucu

SEQ ID NO: 98475 - RNA, 18 nt, Artificial Sequence
  Synthetic
aaagaauuuggagcuucu

SEQ ID NO: 98476 - RNA, 19 nt, Artificial Sequence
  Synthetic
uaaagaauuuggagcuucu

SEQ ID NO: 98477 - RNA, 20 nt, Artificial Sequence
  Synthetic
auaaagaauuuggagcuucu

SEQ ID NO: 98478 - RNA, 21 nt, Artificial Sequence
  Synthetic
uauaaagaauuuggagcuucu

SEQ ID NO: 98479 - RNA, 22 nt, Artificial Sequence
  Synthetic
  misc_feature (1)..(1): n is a, c, g, or u
nuauaaagaauuuggagcuucu

SEQ ID NO: 98480 - RNA, 23 nt, Artificial Sequence
  Synthetic
  misc_feature (2)..(2): n is a, c, g, or u
cnuauaaagaauuuggagcuucu

SEQ ID NO: 98481 - RNA, 24 nt, Artificial Sequence
  Synthetic
  misc_feature (3)..(3): n is a, c, g, or u
ccnuauaaagaauuuggagcuucu

SEQ ID NO: 98482 - RNA, 18 nt, Artificial Sequence
  Synthetic
gacuucucucaauuuucu

SEQ ID NO: 98483 - RNA, 19 nt, Artificial Sequence
  Synthetic
ggacuucucucaauuuucu

SEQ ID NO: 98484 - RNA, 20 nt, Artificial Sequence
  Synthetic
uggacuucucucaauuuucu

SEQ ID NO: 98485 - RNA, 21 nt, Artificial Sequence
  Synthetic
guggacuucucucaauuuucu

SEQ ID NO: 98486 - RNA, 22 nt, Artificial Sequence
  Synthetic
gguggacuucucucaauuuucu

SEQ ID NO: 98487 - RNA, 23 nt, Artificial Sequence
  Synthetic
ugguggacuucucucaauuuucu

SEQ ID NO: 98488 - RNA, 24 nt, Artificial Sequence
  Synthetic
gugguggacuucucucaauuuucu

SEQ ID NO: 98489 - RNA, 18 nt, Artificial Sequence
  Synthetic
ccuccaccaaucggcagu

SEQ ID NO: 98490 - RNA, 19 nt, Artificial Sequence
  Synthetic
gccuccaccaaucggcagu

SEQ ID NO: 98491 - RNA, 20 nt, Artificial Sequence
  Synthetic
ugccuccaccaaucggcagu

SEQ ID NO: 98492 - RNA, 21 nt, Artificial Sequence
  Synthetic
cugccuccaccaaucggcagu

SEQ ID NO: 98493 - RNA, 22 nt, Artificial Sequence
  Synthetic
ccugccuccaccaaucggcagu

SEQ ID NO: 98494 - RNA, 23 nt, Artificial Sequence
  Synthetic
uccugccuccaccaaucggcagu

SEQ ID NO: 98495 - RNA, 24 nt, Artificial Sequence
  Synthetic
cuccugccuccaccaaucggcagu

SEQ ID NO: 98496 - RNA, 18 nt, Artificial Sequence
  Synthetic
  misc_feature (10)..(10): n is a, c, g, or u
ucugcuagancccagagu

SEQ ID NO: 98497 - RNA, 19 nt, Artificial Sequence
  Synthetic
  misc_feature (11)..(11): n is a, c, g, or u
cucugcuagancccagagu

SEQ ID NO: 98498 - RNA, 20 nt, Artificial Sequence
  Synthetic
  misc_feature (12)..(12): n is a, c, g, or u
gcucugcuagancccagagu

SEQ ID NO: 98499 - RNA, 21 nt, Artificial Sequence
  Synthetic
  misc_feature (13)..(13): n is a, c, g, or u
agcucugcuagancccagagu

SEQ ID NO: 98500 - RNA, 22 nt, Artificial Sequence
  Synthetic
  misc_feature (14)..(14): n is a, c, g, or u
aagcucugcuagancccagagu

SEQ ID NO: 98501 - RNA, 23 nt, Artificial Sequence
  Synthetic
  misc_feature (15)..(15): n is a, c, g, or u
caagcucugcuagancccagagu

SEQ ID NO: 98502 - RNA, 24 nt, Artificial Sequence
  Synthetic
  misc_feature (16)..(16): n is a, c, g, or u
ccaagcucugcuagancccagagu

SEQ ID NO: 98503 - RNA, 18 nt, Artificial Sequence
  Synthetic
  misc_feature (5)..(5): n is a, c, g, or u
uuaangacugggaggagu

SEQ ID NO: 98504 - RNA, 19 nt, Artificial Sequence
  Synthetic
  misc_feature (6)..(6): n is a, c, g, or u
uuuaangacugggaggagu

SEQ ID NO: 98505 - RNA, 20 nt, Artificial Sequence
  Synthetic
  misc_feature (1)..(1): n is a, c, g, or u
  misc_feature (7)..(7): n is a, c, g, or u
nuuuaangacugggaggagu

SEQ ID NO: 98506 - RNA, 21 nt, Artificial Sequence
  Synthetic
  misc_feature (2)..(2): n is a, c, g, or u
  misc_feature (8)..(8): n is a, c, g, or u
unuuuaangacugggaggagu

SEQ ID NO: 98507 - RNA, 22 nt, Artificial Sequence
  Synthetic
  misc_feature (1)..(1): n is a, c, g, or u
  misc_feature (3)..(3): n is a, c, g, or u
  misc_feature (9)..(9): n is a, c, g, or u
nunuuuaangacugggaggagu

SEQ ID NO: 98508 - RNA, 23 nt, Artificial Sequence
  Synthetic
  misc_feature (2)..(2): n is a, c, g, or u
  misc_feature (4)..(4): n is a, c, g, or u
  misc_feature (10)..(10): n is a, c, g, or u
ununuuuaangacugggaggagu

SEQ ID NO: 98509 - RNA, 24 nt, Artificial Sequence
  Synthetic
  misc_feature (3)..(3): n is a, c, g, or u
  misc_feature (5)..(5): n is a, c, g, or u
  misc_feature (11)..(11): n is a, c, g, or u
gununuuuaangacugggaggagu

SEQ ID NO: 98510 - RNA, 18 nt, Artificial Sequence
  Synthetic
ccuaauaaaaccaaacgu

SEQ ID NO: 98511 - RNA, 19 nt, Artificial Sequence
  Synthetic
cccuaauaaaaccaaacgu

SEQ ID NO: 98512 - RNA, 20 nt, Artificial Sequence
  Synthetic
acccuaauaaaaccaaacgu

SEQ ID NO: 98513 - RNA, 21 nt, Artificial Sequence
  Synthetic
aacccuaauaaaaccaaacgu

SEQ ID NO: 98514 - RNA, 22 nt, Artificial Sequence
  Synthetic
  misc_feature (1)..(1): n is a, c, g, or u
naacccuaauaaaaccaaacgu

SEQ ID NO: 98515 - RNA, 23 nt, Artificial Sequence
  Synthetic
  misc_feature (2)..(2): n is a, c, g, or u
unaacccuaauaaaaccaaacgu

SEQ ID NO: 98516 - RNA, 24 nt, Artificial Sequence
  Synthetic
  misc_feature (3)..(3): n is a, c, g, or u
uunaacccuaauaaaaccaaacgu

SEQ ID NO: 98517 - RNA, 18 nt, Artificial Sequence
  Synthetic
gacccgucucggggccgu

SEQ ID NO: 98518 - RNA, 19 nt, Artificial Sequence
  Synthetic
cgacccgucucggggccgu

SEQ ID NO: 98519 - RNA, 20 nt, Artificial Sequence
  Synthetic
acgacccgucucggggccgu

SEQ ID NO: 98520 - RNA, 21 nt, Artificial Sequence
  Synthetic
gacgacccgucucggggccgu

SEQ ID NO: 98521 - RNA, 22 nt, Artificial Sequence
  Synthetic
ggacgacccgucucggggccgu

SEQ ID NO: 98522 - RNA, 23 nt, Artificial Sequence
  Synthetic
cggacgacccgucucggggccgu

SEQ ID NO: 98523 - RNA, 24 nt, Artificial Sequence
  Synthetic
gcggacgacccgucucggggccgu

SEQ ID NO: 98524 - RNA, 18 nt, Artificial Sequence
  Synthetic
cccuuggacucauaaggu

SEQ ID NO: 98525 - RNA, 19 nt, Artificial Sequence
  Synthetic
ucccuuggacucauaaggu

SEQ ID NO: 98526 - RNA, 20 nt, Artificial Sequence
  Synthetic
aucccuuggacucauaaggu

SEQ ID NO: 98527 - RNA, 21 nt, Artificial Sequence
  Synthetic
uaucccuuggacucauaaggu

SEQ ID NO: 98528 - RNA, 22 nt, Artificial Sequence
  Synthetic
guaucccuuggacucauaaggu

SEQ ID NO: 98529 - RNA, 23 nt, Artificial Sequence
  Synthetic
aguaucccuuggacucauaaggu

SEQ ID NO: 98530 - RNA, 24 nt, Artificial Sequence
  Synthetic
uaguaucccuuggacucauaaggu

SEQ ID NO: 98531 - RNA, 18 nt, Artificial Sequence
  Synthetic
  misc_feature (6)..(6): n is a, c, g, or u
  misc_feature (13)..(13): n is a, c, g, or u
gccagnggcaaancaggu

SEQ ID NO: 98532 - RNA, 19 nt, Artificial Sequence
  Synthetic
  misc_feature (7)..(7): n is a, c, g, or u
  misc_feature (14)..(14): n is a, c, g, or u
ggccagnggcaaancaggu

SEQ ID NO: 98533 - RNA, 20 nt, Artificial Sequence
  Synthetic
  misc_feature (8)..(8): n is a, c, g, or u
  misc_feature (15)..(15): n is a, c, g, or u
uggccagnggcaaancaggu

SEQ ID NO: 98534 - RNA, 21 nt, Artificial Sequence
  Synthetic
  misc_feature (1)..(1): n is a, c, g, or u
  misc_feature (9)..(9): n is a, c, g, or u
  misc_feature (16)..(16): n is a, c, g, or u
nuggccagnggcaaancaggu

SEQ ID NO: 98535 - RNA, 22 nt, Artificial Sequence
  Synthetic
  misc_feature (2)..(2): n is a, c, g, or u
  misc_feature (10)..(10): n is a, c, g, or u
  misc_feature (17)..(17): n is a, c, g, or u
anuggccagnggcaaancaggu

SEQ ID NO: 98536 - RNA, 23 nt, Artificial Sequence
  Synthetic
  misc_feature (3)..(3): n is a, c, g, or u
  misc_feature (11)..(11): n is a, c, g, or u
  misc_feature (18)..(18): n is a, c, g, or u
canuggccagnggcaaancaggu

SEQ ID NO: 98537 - RNA, 24 nt, Artificial Sequence
  Synthetic
  misc_feature (4)..(4): n is a, c, g, or u
  misc_feature (12)..(12): n is a, c, g, or u
  misc_feature (19)..(19): n is a, c, g, or u
ucanuggccagnggcaaancaggu

SEQ ID NO: 98538 - RNA, 18 nt, Artificial Sequence
  Synthetic
guuuugcucgcagccggu

SEQ ID NO: 98539 - RNA, 19 nt, Artificial Sequence
  Synthetic
uguuuugcucgcagccggu

SEQ ID NO: 98540 - RNA, 20 nt, Artificial Sequence
  Synthetic
uuguuuugcucgcagccggu

SEQ ID NO: 98541 - RNA, 21 nt, Artificial Sequence
  Synthetic
cuuguuuugcucgcagccggu

SEQ ID NO: 98542 - RNA, 22 nt, Artificial Sequence
  Synthetic
gcuuguuuugcucgcagccggu

SEQ ID NO: 98543 - RNA, 23 nt, Artificial Sequence
  Synthetic
agcuuguuuugcucgcagccggu

SEQ ID NO: 98544 - RNA, 24 nt, Artificial Sequence
  Synthetic
cagcuuguuuugcucgcagccggu

SEQ ID NO: 98545 - RNA, 18 nt, Artificial Sequence
  Synthetic
gaaucuggccaccugggu

SEQ ID NO: 98546 - RNA, 19 nt, Artificial Sequence
  Synthetic
ugaaucuggccaccugggu

SEQ ID NO: 98547 - RNA, 20 nt, Artificial Sequence
  Synthetic
augaaucuggccaccugggu

SEQ ID NO: 98548 - RNA, 21 nt, Artificial Sequence
  Synthetic
gaugaaucuggccaccugggu

SEQ ID NO: 98549 - RNA, 22 nt, Artificial Sequence
  Synthetic
ugaugaaucuggccaccugggu

SEQ ID NO: 98550 - RNA, 23 nt, Artificial Sequence
  Synthetic
uugaugaaucuggccaccugggu

SEQ ID NO: 98551 - RNA, 24 nt, Artificial Sequence
  Synthetic
guugaugaaucuggccaccugggu

SEQ ID NO: 98552 - RNA, 18 nt, Artificial Sequence
  Synthetic
  misc_feature (14)..(14): n is a, c, g, or u
  misc_feature (17)..(17): n is a, c, g, or u
accaguuggacccngcnu

SEQ ID NO: 98553 - RNA, 19 nt, Artificial Sequence
  Synthetic
  misc_feature (15)..(15): n is a, c, g, or u
  misc_feature (18)..(18): n is a, c, g, or u
caccaguuggacccngcnu

SEQ ID NO: 98554 - RNA, 20 nt, Artificial Sequence
  Synthetic
  misc_feature (16)..(16): n is a, c, g, or u
  misc_feature (19)..(19): n is a, c, g, or u
ucaccaguuggacccngcnu

SEQ ID NO: 98555 - RNA, 21 nt, Artificial Sequence
  Synthetic
  misc_feature (17)..(17): n is a, c, g, or u
  misc_feature (20)..(20): n is a, c, g, or u
aucaccaguuggacccngcnu

SEQ ID NO: 98556 - RNA, 22 nt, Artificial Sequence
  Synthetic
  misc_feature (18)..(18): n is a, c, g, or u
  misc_feature (21)..(21): n is a, c, g, or u
gaucaccaguuggacccngcnu

SEQ ID NO: 98557 - RNA, 23 nt, Artificial Sequence
  Synthetic
  misc_feature (19)..(19): n is a, c, g, or u
  misc_feature (22)..(22): n is a, c, g, or u
cgaucaccaguuggacccngcnu

SEQ ID NO: 98558 - RNA, 24 nt, Artificial Sequence
  Synthetic
  misc_feature (20)..(20): n is a, c, g, or u
  misc_feature (23)..(23): n is a, c, g, or u
ccgaucaccaguuggacccngcnu

SEQ ID NO: 98559 - RNA, 18 nt, Artificial Sequence
  Synthetic
  misc_feature (7)..(7): n is a, c, g, or u
ugacccnuauaaagaauu

SEQ ID NO: 98560 - RNA, 19 nt, Artificial Sequence
  Synthetic
  misc_feature (8)..(8): n is a, c, g, or u
uugacccnuauaaagaauu

SEQ ID NO: 98561 - RNA, 20 nt, Artificial Sequence
  Synthetic
  misc_feature (9)..(9): n is a, c, g, or u
auugacccnuauaaagaauu

SEQ ID NO: 98562 - RNA, 21 nt, Artificial Sequence
  Synthetic
  misc_feature (10)..(10): n is a, c, g, or u
cauugacccnuauaaagaauu

SEQ ID NO: 98563 - RNA, 22 nt, Artificial Sequence
  Synthetic
  misc_feature (11)..(11): n is a, c, g, or u
acauugacccnuauaaagaauu

SEQ ID NO: 98564 - RNA, 23 nt, Artificial Sequence
  Synthetic
  misc_feature (12)..(12): n is a, c, g, or u
gacauugacccnuauaaagaauu

SEQ ID NO: 98565 - RNA, 24 nt, Artificial Sequence
  Synthetic
  misc_feature (13)..(13): n is a, c, g, or u
ggacauugacccnuauaaagaauu

SEQ ID NO: 98566 - RNA, 18 nt, Artificial Sequence
  Synthetic
ccugggugggaaguaauu

SEQ ID NO: 98567 - RNA, 19 nt, Artificial Sequence
  Synthetic
accugggugggaaguaauu

SEQ ID NO: 98568 - RNA, 20 nt, Artificial Sequence
  Synthetic
caccugggugggaaguaauu

SEQ ID NO: 98569 - RNA, 21 nt, Artificial Sequence
  Synthetic
ccaccugggugggaaguaauu

SEQ ID NO: 98570 - RNA, 22 nt, Artificial Sequence
  Synthetic
gccaccugggugggaaguaauu

SEQ ID NO: 98571 - RNA, 23 nt, Artificial Sequence
  Synthetic
ggccaccugggugggaaguaauu

SEQ ID NO: 98572 - RNA, 24 nt, Artificial Sequence
  Synthetic
uggccaccugggugggaaguaauu

SEQ ID NO: 98573 - RNA, 18 nt, Artificial Sequence
  Synthetic
uauggaugaugugguauu

SEQ ID NO: 98574 - RNA, 19 nt, Artificial Sequence
  Synthetic
auauggaugaugugguauu

SEQ ID NO: 98575 - RNA, 20 nt, Artificial Sequence
  Synthetic
uauauggaugaugugguauu

SEQ ID NO: 98576 - RNA, 21 nt, Artificial Sequence
  Synthetic
uuauauggaugaugugguauu

SEQ ID NO: 98577 - RNA, 22 nt, Artificial Sequence
  Synthetic
guuauauggaugaugugguauu

SEQ ID NO: 98578 - RNA, 23 nt, Artificial Sequence
  Synthetic
aguuauauggaugaugugguauu

SEQ ID NO: 98579 - RNA, 24 nt, Artificial Sequence
  Synthetic
caguuauauggaugaugugguauu

SEQ ID NO: 98580 - RNA, 18 nt, Artificial Sequence
  Synthetic
ccuaucuuaucaacacuu

SEQ ID NO: 98581 - RNA, 19 nt, Artificial Sequence
  Synthetic
cccuaucuuaucaacacuu

SEQ ID NO: 98582 - RNA, 20 nt, Artificial Sequence
  Synthetic
ccccuaucuuaucaacacuu

SEQ ID NO: 98583 - RNA, 21 nt, Artificial Sequence
  Synthetic
gccccuaucuuaucaacacuu

SEQ ID NO: 98584 - RNA, 22 nt, Artificial Sequence
  Synthetic
ugccccuaucuuaucaacacuu

SEQ ID NO: 98585 - RNA, 23 nt, Artificial Sequence
  Synthetic
augccccuaucuuaucaacacuu

SEQ ID NO: 98586 - RNA, 24 nt, Artificial Sequence
  Synthetic
aaugccccuaucuuaucaacacuu

SEQ ID NO: 98587 - RNA, 18 nt, Artificial Sequence
  Synthetic
acauuuccugucuuacuu

SEQ ID NO: 98588 - RNA, 19 nt, Artificial Sequence
  Synthetic
cacauuuccugucuuacuu

SEQ ID NO: 98589 - RNA, 20 nt, Artificial Sequence
  Synthetic
ucacauuuccugucuuacuu

SEQ ID NO: 98590 - RNA, 21 nt, Artificial Sequence
  Synthetic
uucacauuuccugucuuacuu

SEQ ID NO: 98591 - RNA, 22 nt, Artificial Sequence
  Synthetic
uuucacauuuccugucuuacuu

SEQ ID NO: 98592 - RNA, 23 nt, Artificial Sequence
  Synthetic
guuucacauuuccugucuuacuu

SEQ ID NO: 98593 - RNA, 24 nt, Artificial Sequence
  Synthetic
gguuucacauuuccugucuuacuu

SEQ ID NO: 98594 - RNA, 18 nt, Artificial Sequence
  Synthetic
cugugccuuggguggcuu

SEQ ID NO: 98595 - RNA, 19 nt, Artificial Sequence
  Synthetic
gcugugccuuggguggcuu

SEQ ID NO: 98596 - RNA, 20 nt, Artificial Sequence
  Synthetic
agcugugccuuggguggcuu

SEQ ID NO: 98597 - RNA, 21 nt, Artificial Sequence
  Synthetic
aagcugugccuuggguggcuu

SEQ ID NO: 98598 - RNA, 22 nt, Artificial Sequence
  Synthetic
caagcugugccuuggguggcuu

SEQ ID NO: 98599 - RNA, 23 nt, Artificial Sequence
  Synthetic
ccaagcugugccuuggguggcuu

SEQ ID NO: 98600 - RNA, 24 nt, Artificial Sequence
  Synthetic
uccaagcugugccuuggguggcuu

SEQ ID NO: 98601 - RNA, 18 nt, Artificial Sequence
  Synthetic
  misc_feature (3)..(3): n is a, c, g, or u
canagaauugugggucuu

SEQ ID NO: 98602 - RNA, 19 nt, Artificial Sequence
  Synthetic
  misc_feature (4)..(4): n is a, c, g, or u
ucanagaauugugggucuu

SEQ ID NO: 98603 - RNA, 20 nt, Artificial Sequence
  Synthetic
  misc_feature (5)..(5): n is a, c, g, or u
gucanagaauugugggucuu

SEQ ID NO: 98604 - RNA, 21 nt, Artificial Sequence
  Synthetic
  misc_feature (6)..(6): n is a, c, g, or u
ugucanagaauugugggucuu

SEQ ID NO: 98605 - RNA, 22 nt, Artificial Sequence
  Synthetic
  misc_feature (7)..(7): n is a, c, g, or u
augucanagaauugugggucuu

SEQ ID NO: 98606 - RNA, 23 nt, Artificial Sequence
  Synthetic
  misc_feature (8)..(8): n is a, c, g, or u
uaugucanagaauugugggucuu

SEQ ID NO: 98607 - RNA, 24 nt, Artificial Sequence
  Synthetic
  misc_feature (9)..(9): n is a, c, g, or u
guaugucanagaauugugggucuu

SEQ ID NO: 98608 - RNA, 18 nt, Artificial Sequence
  Synthetic
  misc_feature (13)..(13): n is a, c, g, or u
ccaccacacggcngucuu

SEQ ID NO: 98609 - RNA, 19 nt, Artificial Sequence
  Synthetic
  misc_feature (1)..(1): n is a, c, g, or u
  misc_feature (14)..(14): n is a, c, g, or u
nccaccacacggcngucuu

SEQ ID NO: 98610 - RNA, 20 nt, Artificial Sequence
  Synthetic
  misc_feature (2)..(2): n is a, c, g, or u
  misc_feature (15)..(15): n is a, c, g, or u
cnccaccacacggcngucuu

SEQ ID NO: 98611 - RNA, 21 nt, Artificial Sequence
  Synthetic
  misc_feature (3)..(3): n is a, c, g, or u
  misc_feature (16)..(16): n is a, c, g, or u
acnccaccacacggcngucuu

SEQ ID NO: 98612 - RNA, 22 nt, Artificial Sequence
  Synthetic
  misc_feature (4)..(4): n is a, c, g, or u
  misc_feature (17)..(17): n is a, c, g, or u
cacnccaccacacggcngucuu

SEQ ID NO: 98613 - RNA, 23 nt, Artificial Sequence
  Synthetic
  misc_feature (5)..(5): n is a, c, g, or u
  misc_feature (18)..(18): n is a, c, g, or u
ucacnccaccacacggcngucuu

SEQ ID NO: 98614 - RNA, 24 nt, Artificial Sequence
  Synthetic
  misc_feature (6)..(6): n is a, c, g, or u
  misc_feature (19)..(19): n is a, c, g, or u
uucacnccaccacacggcngucuu

SEQ ID NO: 98615 - RNA, 18 nt, Artificial Sequence
  Synthetic
uugaguauuuggugucuu

SEQ ID NO: 98616 - RNA, 19 nt, Artificial Sequence
  Synthetic
cuugaguauuuggugucuu

SEQ ID NO: 98617 - RNA, 20 nt, Artificial Sequence
  Synthetic
ucuugaguauuuggugucuu

SEQ ID NO: 98618 - RNA, 21 nt, Artificial Sequence
  Synthetic
uucuugaguauuuggugucuu

SEQ ID NO: 98619 - RNA, 22 nt, Artificial Sequence
  Synthetic
guucuugaguauuuggugucuu

SEQ ID NO: 98620 - RNA, 23 nt, Artificial Sequence
  Synthetic
uguucuugaguauuuggugucuu

SEQ ID NO: 98621 - RNA, 24 nt, Artificial Sequence
  Synthetic
cuguucuugaguauuuggugucuu

SEQ ID NO: 98622 - RNA, 18 nt, Artificial Sequence
  Synthetic
gugggucaccauauucuu

SEQ ID NO: 98623 - RNA, 19 nt, Artificial Sequence
  Synthetic
ugugggucaccauauucuu

SEQ ID NO: 98624 - RNA, 20 nt, Artificial Sequence
  Synthetic
uugugggucaccauauucuu

SEQ ID NO: 98625 - RNA, 21 nt, Artificial Sequence
  Synthetic
uuugugggucaccauauucuu

SEQ ID NO: 98626 - RNA, 22 nt, Artificial Sequence
  Synthetic
uuuugugggucaccauauucuu

SEQ ID NO: 98627 - RNA, 23 nt, Artificial Sequence
  Synthetic
auuuugugggucaccauauucuu

SEQ ID NO: 98628 - RNA, 24 nt, Artificial Sequence
  Synthetic
cauuuugugggucaccauauucuu

SEQ ID NO: 98629 - RNA, 18 nt, Artificial Sequence
  Synthetic
aucuucuuguugguucuu

SEQ ID NO: 98630 - RNA, 19 nt, Artificial Sequence
  Synthetic
caucuucuuguugguucuu

SEQ ID NO: 98631 - RNA, 20 nt, Artificial Sequence
  Synthetic
ucaucuucuuguugguucuu

SEQ ID NO: 98632 - RNA, 21 nt, Artificial Sequence
  Synthetic
cucaucuucuuguugguucuu

SEQ ID NO: 98633 - RNA, 22 nt, Artificial Sequence
  Synthetic
ccucaucuucuuguugguucuu

SEQ ID NO: 98634 - RNA, 23 nt, Artificial Sequence
  Synthetic
gccucaucuucuuguugguucuu

SEQ ID NO: 98635 - RNA, 24 nt, Artificial Sequence
  Synthetic
ugccucaucuucuuguugguucuu

SEQ ID NO: 98636 - RNA, 18 nt, Artificial Sequence
  Synthetic
cugcugguggcuccaguu

SEQ ID NO: 98637 - RNA, 19 nt, Artificial Sequence
  Synthetic
ccugcugguggcuccaguu

SEQ ID NO: 98638 - RNA, 20 nt, Artificial Sequence
  Synthetic
uccugcugguggcuccaguu

SEQ ID NO: 98639 - RNA, 21 nt, Artificial Sequence
  Synthetic
uuccugcugguggcuccaguu

SEQ ID NO: 98640 - RNA, 22 nt, Artificial Sequence
  Synthetic
uuuccugcugguggcuccaguu

SEQ ID NO: 98641 - RNA, 23 nt, Artificial Sequence
  Synthetic
  misc_feature (1)..(1): n is a, c, g, or u
nuuuccugcugguggcuccaguu

SEQ ID NO: 98642 - RNA, 24 nt, Artificial Sequence
  Synthetic
  misc_feature (2)..(2): n is a, c, g, or u
anuuuccugcugguggcuccaguu

SEQ ID NO: 98643 - RNA, 18 nt, Artificial Sequence
  Synthetic
  misc_feature (4)..(4): n is a, c, g, or u
uaangacugggaggaguu

SEQ ID NO: 98644 - RNA, 19 nt, Artificial Sequence
  Synthetic
  misc_feature (5)..(5): n is a, c, g, or u
uuaangacugggaggaguu

SEQ ID NO: 98645 - RNA, 20 nt, Artificial Sequence
  Synthetic
  misc_feature (6)..(6): n is a, c, g, or u
uuuaangacugggaggaguu

SEQ ID NO: 98646 - RNA, 21 nt, Artificial Sequence
  Synthetic
  misc_feature (1)..(1): n is a, c, g, or u
  misc_feature (7)..(7): n is a, c, g, or u
nuuuaangacugggaggaguu

SEQ ID NO: 98647 - RNA, 22 nt, Artificial Sequence
  Synthetic
  misc_feature (2)..(2): n is a, c, g, or u
  misc_feature (8)..(8): n is a, c, g, or u
unuuuaangacugggaggaguu

SEQ ID NO: 98648 - RNA, 23 nt, Artificial Sequence
  Synthetic
  misc_feature (1)..(1): n is a, c, g, or u
  misc_feature (3)..(3): n is a, c, g, or u
  misc_feature (9)..(9): n is a, c, g, or u
nunuuuaangacugggaggaguu

SEQ ID NO: 98649 - RNA, 24 nt, Artificial Sequence
  Synthetic
  misc_feature (2)..(2): n is a, c, g, or u
  misc_feature (4)..(4): n is a, c, g, or u
  misc_feature (10)..(10): n is a, c, g, or u
ununuuuaangacugggaggaguu

SEQ ID NO: 98650 - RNA, 18 nt, Artificial Sequence
  Synthetic
  misc_feature (13)..(13): n is a, c, g, or u
  misc_feature (16)..(16): n is a, c, g, or u
ccaguuggacccngcnuu

SEQ ID NO: 98651 - RNA, 19 nt, Artificial Sequence
  Synthetic
  misc_feature (14)..(14): n is a, c, g, or u
  misc_feature (17)..(17): n is a, c, g, or u
accaguuggacccngcnuu

SEQ ID NO: 98652 - RNA, 20 nt, Artificial Sequence
  Synthetic
  misc_feature (15)..(15): n is a, c, g, or u
  misc_feature (18)..(18): n is a, c, g, or u
caccaguuggacccngcnuu

SEQ ID NO: 98653 - RNA, 21 nt, Artificial Sequence
  Synthetic
  misc_feature (16)..(16): n is a, c, g, or u
  misc_feature (19)..(19): n is a, c, g, or u
ucaccaguuggacccngcnuu

SEQ ID NO: 98654 - RNA, 22 nt, Artificial Sequence
  Synthetic
  misc_feature (17)..(17): n is a, c, g, or u
  misc_feature (20)..(20): n is a, c, g, or u
aucaccaguuggacccngcnuu

SEQ ID NO: 98655 - RNA, 23 nt, Artificial Sequence
  Synthetic
  misc_feature (18)..(18): n is a, c, g, or u
  misc_feature (21)..(21): n is a, c, g, or u
gaucaccaguuggacccngcnuu

SEQ ID NO: 98656 - RNA, 24 nt, Artificial Sequence
  Synthetic
  misc_feature (19)..(19): n is a, c, g, or u
  misc_feature (22)..(22): n is a, c, g, or u
cgaucaccaguuggacccngcnuu

SEQ ID NO: 98657 - RNA, 18 nt, Artificial Sequence
  Synthetic
cauuuccugucuuacuuu

SEQ ID NO: 98658 - RNA, 19 nt, Artificial Sequence
  Synthetic
acauuuccugucuuacuuu

SEQ ID NO: 98659 - RNA, 20 nt, Artificial Sequence
  Synthetic
cacauuuccugucuuacuuu

SEQ ID NO: 98660 - RNA, 21 nt, Artificial Sequence
  Synthetic
ucacauuuccugucuuacuuu

SEQ ID NO: 98661 - RNA, 22 nt, Artificial Sequence
  Synthetic
uucacauuuccugucuuacuuu

SEQ ID NO: 98662 - RNA, 23 nt, Artificial Sequence
  Synthetic
uuucacauuuccugucuuacuuu

SEQ ID NO: 98663 - RNA, 24 nt, Artificial Sequence
  Synthetic
guuucacauuuccugucuuacuuu

SEQ ID NO: 98664 - RNA, 21 nt, Artificial Sequence
  Synthetic
guaguccagaagaaccaacaa

SEQ ID NO: 98665 - RNA, 22 nt, Artificial Sequence
  Synthetic
gguaguccagaagaaccaacaa

SEQ ID NO: 98666 - RNA, 22 nt, Artificial Sequence
  Synthetic
guguauuuccgagagaggacaa

SEQ ID NO: 98667 - RNA, 23 nt, Artificial Sequence
  Synthetic
gguguauuuccgagagaggacaa

SEQ ID NO: 98668 - RNA, 21 nt, Artificial Sequence
  Synthetic
  misc_feature (8)..(8): n is a, c, g, or u
ggagaucncgaauagaaggaa

SEQ ID NO: 98669 - RNA, 23 nt, Artificial Sequence
  Synthetic
  misc_feature (10)..(10): n is a, c, g, or u
gaggagaucncgaauagaaggaa

SEQ ID NO: 98670 - RNA, 23 nt, Artificial Sequence
  Synthetic
gcuugaacaguaggacaugaaca

SEQ ID NO: 98671 - RNA, 24 nt, Artificial Sequence
  Synthetic
ggcuugaacaguaggacaugaaca

SEQ ID NO: 98672 - RNA, 23 nt, Artificial Sequence
  Synthetic
guucccaagaauauggugaccca

SEQ ID NO: 98673 - RNA, 21 nt, Artificial Sequence
  Synthetic
ggugaucgggaaagaauccca

SEQ ID NO: 98674 - RNA, 21 nt, Artificial Sequence
  Synthetic
guuucccaccuuaugagucca

SEQ ID NO: 98675 - RNA, 22 nt, Artificial Sequence
  Synthetic
gagaccuucgucugcgaggcga

SEQ ID NO: 98676 - RNA, 18 nt, Artificial Sequence
  Synthetic
ggccuuguaaguuggcga

SEQ ID NO: 98677 - RNA, 22 nt, Artificial Sequence
  Synthetic
gaaaggccuuguaaguuggcga

SEQ ID NO: 98678 - RNA, 22 nt, Artificial Sequence
  Synthetic
gugcaggguccccaguccucga

SEQ ID NO: 98679 - RNA, 23 nt, Artificial Sequence
  Synthetic
ggugcaggguccccaguccucga

SEQ ID NO: 98680 - RNA, 19 nt, Artificial Sequence
  Synthetic
guccaacuggugaucggga

SEQ ID NO: 98681 - RNA, 20 nt, Artificial Sequence
  Synthetic
gguccaacuggugaucggga

SEQ ID NO: 98682 - RNA, 21 nt, Artificial Sequence
  Synthetic
ggguccaacuggugaucggga

SEQ ID NO: 98683 - RNA, 24 nt, Artificial Sequence
  Synthetic
  misc_feature (3)..(3): n is a, c, g, or u
gcnggguccaacuggugaucggga

SEQ ID NO: 98684 - RNA, 22 nt, Artificial Sequence
  Synthetic
gaacaguaggacaugaacauga

SEQ ID NO: 98685 - RNA, 21 nt, Artificial Sequence
  Synthetic
gaaagcccuacgaaccacuga

SEQ ID NO: 98686 - RNA, 22 nt, Artificial Sequence
  Synthetic
ggaaagcccuacgaaccacuga

SEQ ID NO: 98687 - RNA, 23 nt, Artificial Sequence
  Synthetic
gggaaagcccuacgaaccacuga

SEQ ID NO: 98688 - RNA, 24 nt, Artificial Sequence
  Synthetic
ggggaaagcccuacgaaccacuga

SEQ ID NO: 98689 - RNA, 21 nt, Artificial Sequence
  Synthetic
gagaugauuaggcagagguga

SEQ ID NO: 98690 - RNA, 21 nt, Artificial Sequence
  Synthetic
ggauagaaccuagcaggcaua

SEQ ID NO: 98691 - RNA, 21 nt, Artificial Sequence
  Synthetic
gacacgugggugcucccccua

SEQ ID NO: 98692 - RNA, 22 nt, Artificial Sequence
  Synthetic
ggacacgugggugcucccccua

SEQ ID NO: 98693 - RNA, 24 nt, Artificial Sequence
  Synthetic
gucuugcauggucccgugcuggua

SEQ ID NO: 98694 - RNA, 18 nt, Artificial Sequence
  Synthetic
gccucgucgucuaacaac

SEQ ID NO: 98695 - RNA, 23 nt, Artificial Sequence
  Synthetic
gaccugccucgucgucuaacaac

SEQ ID NO: 98696 - RNA, 24 nt, Artificial Sequence
  Synthetic
ggaccugccucgucgucuaacaac

SEQ ID NO: 98697 - RNA, 20 nt, Artificial Sequence
  Synthetic
gaccugccucgucgucuaac

SEQ ID NO: 98698 - RNA, 23 nt, Artificial Sequence
  Synthetic
guauggaucggcagaggagccac

SEQ ID NO: 98699 - RNA, 22 nt, Artificial Sequence
  Synthetic
  misc_feature (12)..(12): n is a, c, g, or u
gcaagaccuggngggcguucac

SEQ ID NO: 98700 - RNA, 23 nt, Artificial Sequence
  Synthetic
  misc_feature (13)..(13): n is a, c, g, or u
ggcaagaccuggngggcguucac

SEQ ID NO: 98701 - RNA, 24 nt, Artificial Sequence
  Synthetic
  misc_feature (14)..(14): n is a, c, g, or u
gggcaagaccuggngggcguucac

SEQ ID NO: 98702 - RNA, 21 nt, Artificial Sequence
  Synthetic
gaaaauugagagaaguccacc

SEQ ID NO: 98703 - RNA, 24 nt, Artificial Sequence
  Synthetic
gaccgcguaaagagaggugcgccc

SEQ ID NO: 98704 - RNA, 23 nt, Artificial Sequence
  Synthetic
gauaaaacgccgcagacacaucc

SEQ ID NO: 98705 - RNA, 23 nt, Artificial Sequence
  Synthetic
  misc_feature (17)..(17): n is a, c, g, or u
gucguugacauugcugngagucc

SEQ ID NO: 98706 - RNA, 24 nt, Artificial Sequence
  Synthetic
  misc_feature (18)..(18): n is a, c, g, or u
ggucguugacauugcugngagucc

SEQ ID NO: 98707 - RNA, 21 nt, Artificial Sequence
  Synthetic
  misc_feature (16)..(16): n is a, c, g, or u
gauugacgauaugggngaggc

SEQ ID NO: 98708 - RNA, 24 nt, Artificial Sequence
  Synthetic
  misc_feature (19)..(19): n is a, c, g, or u
gaagauugacgauaugggngaggc

SEQ ID NO: 98709 - RNA, 19 nt, Artificial Sequence
  Synthetic
gaaccacugaacaaauggc

SEQ ID NO: 98710 - RNA, 22 nt, Artificial Sequence
  Synthetic
  misc_feature (10)..(10): n is a, c, g, or u
gugugguggngugaacccuggc

SEQ ID NO: 98711 - RNA, 18 nt, Artificial Sequence
  Synthetic
  misc_feature (4)..(4): n is a, c, g, or u
ggunuccaugcgacgugc

SEQ ID NO: 98712 - RNA, 20 nt, Artificial Sequence
  Synthetic
  misc_feature (6)..(6): n is a, c, g, or u
guggunuccaugcgacgugc

SEQ ID NO: 98713 - RNA, 21 nt, Artificial Sequence
  Synthetic
  misc_feature (7)..(7): n is a, c, g, or u
gguggunuccaugcgacgugc

SEQ ID NO: 98714 - RNA, 23 nt, Artificial Sequence
  Synthetic
  misc_feature (3)..(3): n is a, c, g, or u
gcngaggcggugucgaggagauc

SEQ ID NO: 98715 - RNA, 20 nt, Artificial Sequence
  Synthetic
gacggggagaccgcguaaag

SEQ ID NO: 98716 - RNA, 19 nt, Artificial Sequence
  Synthetic
gcgacgugcagaggugaag

SEQ ID NO: 98717 - RNA, 23 nt, Artificial Sequence
  Synthetic
gaaucccagaggauugggaacag

SEQ ID NO: 98718 - RNA, 22 nt, Artificial Sequence
  Synthetic
guugcauggugcuggugaacag

SEQ ID NO: 98719 - RNA, 24 nt, Artificial Sequence
  Synthetic
guacaguagaagaauaaagcccag

SEQ ID NO: 98720 - RNA, 23 nt, Artificial Sequence
  Synthetic
  misc_feature (7)..(7): n is a, c, g, or u
guagagncccaaacggccccgag

SEQ ID NO: 98721 - RNA, 24 nt, Artificial Sequence
  Synthetic
  misc_feature (8)..(8): n is a, c, g, or u
gguagagncccaaacggccccgag

SEQ ID NO: 98722 - RNA, 21 nt, Artificial Sequence
  Synthetic
gauuaaagacagguacaguag

SEQ ID NO: 98723 - RNA, 22 nt, Artificial Sequence
  Synthetic
ggauuaaagacagguacaguag

SEQ ID NO: 98724 - RNA, 24 nt, Artificial Sequence
  Synthetic
  misc_feature (4)..(4): n is a, c, g, or u
gaanuuaagggaguagccccaacg

SEQ ID NO: 98725 - RNA, 23 nt, Artificial Sequence
  Synthetic
guaggcugucuuccugacugccg

SEQ ID NO: 98726 - RNA, 19 nt, Artificial Sequence
  Synthetic
  misc_feature (16)..(16): n is a, c, g, or u
gcgaagugcacacggnccg

SEQ ID NO: 98727 - RNA, 20 nt, Artificial Sequence
  Synthetic
gccccgagacgggucguccg

SEQ ID NO: 98728 - RNA, 18 nt, Artificial Sequence
  Synthetic
gacaaaggacgucccgcg

SEQ ID NO: 98729 - RNA, 23 nt, Artificial Sequence
  Synthetic
gacccacaaaaugaggcgcugcg

SEQ ID NO: 98730 - RNA, 21 nt, Artificial Sequence
  Synthetic
guuaggauagaaccuagcagg

SEQ ID NO: 98731 - RNA, 22 nt, Artificial Sequence
  Synthetic
gguuaggauagaaccuagcagg

SEQ ID NO: 98732 - RNA, 21 nt, Artificial Sequence
  Synthetic
  misc_feature (9)..(9): n is a, c, g, or u
gcuugccunagugcuguaugg

SEQ ID NO: 98733 - RNA, 22 nt, Artificial Sequence
  Synthetic
gaugacugucucuuagaggugg

SEQ ID NO: 98734 - RNA, 23 nt, Artificial Sequence
  Synthetic
ggaugacugucucuuagaggugg

SEQ ID NO: 98735 - RNA, 21 nt, Artificial Sequence
  Synthetic
gaguccaagggauacuaacau

SEQ ID NO: 98736 - RNA, 20 nt, Artificial Sequence
  Synthetic
gccccaacguuugguuuuau

SEQ ID NO: 98737 - RNA, 23 nt, Artificial Sequence
  Synthetic
guagccccaacguuugguuuuau

SEQ ID NO: 98738 - RNA, 21 nt, Artificial Sequence
  Synthetic
guuccggagacucuaaggccu

SEQ ID NO: 98739 - RNA, 20 nt, Artificial Sequence
  Synthetic
guaacacgagcagggguccu

SEQ ID NO: 98740 - RNA, 24 nt, Artificial Sequence
  Synthetic
gccuguaacacgagcagggguccu

SEQ ID NO: 98741 - RNA, 21 nt, Artificial Sequence
  Synthetic
gugcugguaguugauguuccu

SEQ ID NO: 98742 - RNA, 22 nt, Artificial Sequence
  Synthetic
gcugcgagcaaaacaagcugcu

SEQ ID NO: 98743 - RNA, 23 nt, Artificial Sequence
  Synthetic
ggcugcgagcaaaacaagcugcu

SEQ ID NO: 98744 - RNA, 20 nt, Artificial Sequence
  Synthetic
gucuugcauggucccgugcu

SEQ ID NO: 98745 - RNA, 19 nt, Artificial Sequence
  Synthetic
gucggucguugacauugcu

SEQ ID NO: 98746 - RNA, 20 nt, Artificial Sequence
  Synthetic
ggucggucguugacauugcu

SEQ ID NO: 98747 - RNA, 20 nt, Artificial Sequence
  Synthetic
gcugcuaggaguuccgcagu

SEQ ID NO: 98748 - RNA, 18 nt, Artificial Sequence
  Synthetic
ggucuugcauggucccgu

SEQ ID NO: 98749 - RNA, 18 nt, Artificial Sequence
  Synthetic
  misc_feature (2)..(2): n is a, c, g, or u
gngcaacgggguaaaggu

SEQ ID NO: 98750 - RNA, 18 nt, Artificial Sequence
  Synthetic
  misc_feature (8)..(8): n is a, c, g, or u
guugccgngcaacggggu

SEQ ID NO: 98751 - RNA, 22 nt, Artificial Sequence
  Synthetic
  misc_feature (12)..(12): n is a, c, g, or u
gaccguugccgngcaacggggu

SEQ ID NO: 98752 - RNA, 21 nt, Artificial Sequence
  Synthetic
gaggugaaaaaguugcauggu

SEQ ID NO: 98753 - RNA, 24 nt, Artificial Sequence
  Synthetic
gcagaggugaaaaaguugcauggu

SEQ ID NO: 98754 - RNA, 21 nt, Artificial Sequence
  Synthetic
gucuagacucugugguauugu

SEQ ID NO: 98755 - RNA, 23 nt, Artificial Sequence
  Synthetic
gagucuagacucugugguauugu

SEQ ID NO: 98756 - RNA, 21 nt, Artificial Sequence
  Synthetic
gccugaggaugacugucucuu

SEQ ID NO: 98757 - RNA, 22 nt, Artificial Sequence
  Synthetic
ggccugaggaugacugucucuu

SEQ ID NO: 98758 - RNA, 21 nt, Artificial Sequence
  Synthetic
  misc_feature (14)..(14): n is a, c, g, or u
gggcaagaccuggngggcguu

SEQ ID NO: 98759 - RNA, 21 nt, Artificial Sequence
  Synthetic
guugauaagauaggggcauuu

SEQ ID NO: 98760 - RNA, 23 nt, Artificial Sequence
  Synthetic
guguugauaagauaggggcauuu

SEQ ID NO: 98761 - RNA, 23 nt, Artificial Sequence
  Synthetic
  misc_feature (6)..(6): n is a, c, g, or u
guacunggaggcuguaggcauaa

SEQ ID NO: 98762 - RNA, 22 nt, Artificial Sequence
  Synthetic
gacaagaauccucacaauacca

SEQ ID NO: 98763 - RNA, 21 nt, Artificial Sequence
  Synthetic
gagacagucauccucaggcca

SEQ ID NO: 98764 - RNA, 20 nt, Artificial Sequence
  Synthetic
gucucaaucgccgcgucgca

SEQ ID NO: 98765 - RNA, 20 nt, Artificial Sequence
  Synthetic
guuaguaucccuuggacuca

SEQ ID NO: 98766 - RNA, 21 nt, Artificial Sequence
  Synthetic
ggcuuucaguuauauggauga

SEQ ID NO: 98767 - RNA, 24 nt, Artificial Sequence
  Synthetic
gcaagcuauucuguguugggguga

SEQ ID NO: 98768 - RNA, 18 nt, Artificial Sequence
  Synthetic
ggggcgcaccucucuuua

SEQ ID NO: 98769 - RNA, 24 nt, Artificial Sequence
  Synthetic
gaccacggggcgcaccucucuuua

SEQ ID NO: 98770 - RNA, 21 nt, Artificial Sequence
  Synthetic
gauugggacuucaaccccaac

SEQ ID NO: 98771 - RNA, 18 nt, Artificial Sequence
  Synthetic
guugaugaaucuggccac

SEQ ID NO: 98772 - RNA, 20 nt, Artificial Sequence
  Synthetic
gaguugaugaaucuggccac

SEQ ID NO: 98773 - RNA, 22 nt, Artificial Sequence
  Synthetic
gugaguugaugaaucuggccac

SEQ ID NO: 98774 - RNA, 23 nt, Artificial Sequence
  Synthetic
ggugaguugaugaaucuggccac

SEQ ID NO: 98775 - RNA, 24 nt, Artificial Sequence
  Synthetic
gggugaguugaugaaucuggccac

SEQ ID NO: 98776 - RNA, 21 nt, Artificial Sequence
  Synthetic
gaacucccucgccucgcagac

SEQ ID NO: 98777 - RNA, 24 nt, Artificial Sequence
  Synthetic
gaagaacucccucgccucgcagac

SEQ ID NO: 98778 - RNA, 18 nt, Artificial Sequence
  Synthetic
gggguuuuucuuguugac

SEQ ID NO: 98779 - RNA, 20 nt, Artificial Sequence
  Synthetic
gcgggguuuuucuuguugac

SEQ ID NO: 98780 - RNA, 21 nt, Artificial Sequence
  Synthetic
ggcgggguuuuucuuguugac

SEQ ID NO: 98781 - RNA, 22 nt, Artificial Sequence
  Synthetic
guucaagccuccaagcugugcc

SEQ ID NO: 98782 - RNA, 21 nt, Artificial Sequence
  Synthetic
  misc_feature (9)..(9): n is a, c, g, or u
gaacgcccnccaggucuugcc

SEQ ID NO: 98783 - RNA, 23 nt, Artificial Sequence
  Synthetic
  misc_feature (11)..(11): n is a, c, g, or u
gugaacgcccnccaggucuugcc

SEQ ID NO: 98784 - RNA, 21 nt, Artificial Sequence
  Synthetic
ggagcacccacguguccuggc

SEQ ID NO: 98785 - RNA, 22 nt, Artificial Sequence
  Synthetic
gggagcacccacguguccuggc

SEQ ID NO: 98786 - RNA, 23 nt, Artificial Sequence
  Synthetic
ggggagcacccacguguccuggc

SEQ ID NO: 98787 - RNA, 24 nt, Artificial Sequence
  Synthetic
gggggagcacccacguguccuggc

SEQ ID NO: 98788 - RNA, 23 nt, Artificial Sequence
  Synthetic
gaacaagagcuacagcaugggag

SEQ ID NO: 98789 - RNA, 24 nt, Artificial Sequence
  Synthetic
ggaacaagagcuacagcaugggag

SEQ ID NO: 98790 - RNA, 18 nt, Artificial Sequence
  Synthetic
gucuacgucccgucggcg

SEQ ID NO: 98791 - RNA, 21 nt, Artificial Sequence
  Synthetic
gaccccugcucguguuacagg

SEQ ID NO: 98792 - RNA, 22 nt, Artificial Sequence
  Synthetic
ggaccccugcucguguuacagg

SEQ ID NO: 98793 - RNA, 20 nt, Artificial Sequence
  Synthetic
gcugguggcuccaguuccgg

SEQ ID NO: 98794 - RNA, 21 nt, Artificial Sequence
  Synthetic
gccucaguccguuucuccugg

SEQ ID NO: 98795 - RNA, 22 nt, Artificial Sequence
  Synthetic
ggccucaguccguuucuccugg

SEQ ID NO: 98796 - RNA, 23 nt, Artificial Sequence
  Synthetic
gggccucaguccguuucuccugg

SEQ ID NO: 98797 - RNA, 21 nt, Artificial Sequence
  Synthetic
gggaacaagagcuacagcaug

SEQ ID NO: 98798 - RNA, 22 nt, Artificial Sequence
  Synthetic
gaugaaucuggccaccugggug

SEQ ID NO: 98799 - RNA, 18 nt, Artificial Sequence
  Synthetic
  misc_feature (16)..(16): n is a, c, g, or u
gcaacggucaggucunug

SEQ ID NO: 98800 - RNA, 19 nt, Artificial Sequence
  Synthetic
  misc_feature (17)..(17): n is a, c, g, or u
ggcaacggucaggucunug

SEQ ID NO: 98801 - RNA, 24 nt, Artificial Sequence
  Synthetic
gaucucaaucucgggaaucucaau

SEQ ID NO: 98802 - RNA, 21 nt, Artificial Sequence
  Synthetic
gaagaucucaaucucgggaau

SEQ ID NO: 98803 - RNA, 24 nt, Artificial Sequence
  Synthetic
gcagaagaucucaaucucgggaau

SEQ ID NO: 98804 - RNA, 19 nt, Artificial Sequence
  Synthetic
gcuuucgcaagauuccuau

SEQ ID NO: 98805 - RNA, 20 nt, Artificial Sequence
  Synthetic
ggcuuucgcaagauuccuau

SEQ ID NO: 98806 - RNA, 21 nt, Artificial Sequence
  Synthetic
gggcuuucgcaagauuccuau

SEQ ID NO: 98807 - RNA, 19 nt, Artificial Sequence
  Synthetic
gcucuguaucgggaggccu

SEQ ID NO: 98808 - RNA, 21 nt, Artificial Sequence
  Synthetic
gcuuucccccacuguuuggcu

SEQ ID NO: 98809 - RNA, 22 nt, Artificial Sequence
  Synthetic
ggcuuucccccacuguuuggcu

SEQ ID NO: 98810 - RNA, 23 nt, Artificial Sequence
  Synthetic
gggcuuucccccacuguuuggcu

SEQ ID NO: 98811 - RNA, 22 nt, Artificial Sequence
  Synthetic
gucaacaauaugugggcccucu

SEQ ID NO: 98812 - RNA, 18 nt, Artificial Sequence
  Synthetic
gacucgugguggacuucu

SEQ ID NO: 98813 - RNA, 23 nt, Artificial Sequence
  Synthetic
gucuagacucgugguggacuucu

SEQ ID NO: 98814 - RNA, 21 nt, Artificial Sequence
  Synthetic
gcugcuaugccucaucuucuu

SEQ ID NO: 98815 - RNA, 24 nt, Artificial Sequence
  Synthetic
guucccaauccucugggauucuuu

SEQ ID NO: 98816 - RNA, 23 nt, Artificial Sequence
  Synthetic
guccguuucuccuggcucaguuu

SEQ ID NO: 98817 - RNA, 23 nt, Artificial Sequence
  Synthetic
ugguaguccagaagaaccaacaa

SEQ ID NO: 98818 - RNA, 24 nt, Artificial Sequence
  Synthetic
uugguaguccagaagaaccaacaa

SEQ ID NO: 98819 - RNA, 21 nt, Artificial Sequence
  Synthetic
uguauuuccgagagaggacaa

SEQ ID NO: 98820 - RNA, 24 nt, Artificial Sequence
  Synthetic
agguguauuuccgagagaggacaa

SEQ ID NO: 98821 - RNA, 22 nt, Artificial Sequence
  Synthetic
  misc_feature (9)..(9): n is a, c, g, or u
aggagaucncgaauagaaggaa

SEQ ID NO: 98822 - RNA, 24 nt, Artificial Sequence
  Synthetic
  misc_feature (11)..(11): n is a, c, g, or u
cgaggagaucncgaauagaaggaa

SEQ ID NO: 98823 - RNA, 21 nt, Artificial Sequence
  Synthetic
  misc_feature (5)..(5): n is a, c, g, or u
ugggngaggcaguagucggaa

SEQ ID NO: 98824 - RNA, 22 nt, Artificial Sequence
  Synthetic
  misc_feature (6)..(6): n is a, c, g, or u
augggngaggcaguagucggaa

SEQ ID NO: 98825 - RNA, 23 nt, Artificial Sequence
  Synthetic
  misc_feature (7)..(7): n is a, c, g, or u
uaugggngaggcaguagucggaa

SEQ ID NO: 98826 - RNA, 24 nt, Artificial Sequence
  Synthetic
  misc_feature (8)..(8): n is a, c, g, or u
auaugggngaggcaguagucggaa

SEQ ID NO: 98827 - RNA, 21 nt, Artificial Sequence
  Synthetic
uugaacaguaggacaugaaca

SEQ ID NO: 98828 - RNA, 22 nt, Artificial Sequence
  Synthetic
cuugaacaguaggacaugaaca

SEQ ID NO: 98829 - RNA, 18 nt, Artificial Sequence
  Synthetic
caagaauauggugaccca

SEQ ID NO: 98830 - RNA, 19 nt, Artificial Sequence
  Synthetic
ccaagaauauggugaccca

SEQ ID NO: 98831 - RNA, 20 nt, Artificial Sequence
  Synthetic
cccaagaauauggugaccca

SEQ ID NO: 98832 - RNA, 21 nt, Artificial Sequence
  Synthetic
ucccaagaauauggugaccca

SEQ ID NO: 98833 - RNA, 22 nt, Artificial Sequence
  Synthetic
uucccaagaauauggugaccca

SEQ ID NO: 98834 - RNA, 24 nt, Artificial Sequence
  Synthetic
uguucccaagaauauggugaccca

SEQ ID NO: 98835 - RNA, 22 nt, Artificial Sequence
  Synthetic
uggugaucgggaaagaauccca

SEQ ID NO: 98836 - RNA, 23 nt, Artificial Sequence
  Synthetic
cuggugaucgggaaagaauccca

SEQ ID NO: 98837 - RNA, 24 nt, Artificial Sequence
  Synthetic
acuggugaucgggaaagaauccca

SEQ ID NO: 98838 - RNA, 21 nt, Artificial Sequence
  Synthetic
cauccauauaacugaaagcca

SEQ ID NO: 98839 - RNA, 22 nt, Artificial Sequence
  Synthetic
ucauccauauaacugaaagcca

SEQ ID NO: 98840 - RNA, 23 nt, Artificial Sequence
  Synthetic
aucauccauauaacugaaagcca

SEQ ID NO: 98841 - RNA, 24 nt, Artificial Sequence
  Synthetic
caucauccauauaacugaaagcca

SEQ ID NO: 98842 - RNA, 22 nt, Artificial Sequence
  Synthetic
aguuucccaccuuaugagucca

SEQ ID NO: 98843 - RNA, 23 nt, Artificial Sequence
  Synthetic
aaguuucccaccuuaugagucca

SEQ ID NO: 98844 - RNA, 24 nt, Artificial Sequence
  Synthetic
aaaguuucccaccuuaugagucca

SEQ ID NO: 98845 - RNA, 21 nt, Artificial Sequence
  Synthetic
agaccuucgucugcgaggcga

SEQ ID NO: 98846 - RNA, 23 nt, Artificial Sequence
  Synthetic
ugagaccuucgucugcgaggcga

SEQ ID NO: 98847 - RNA, 24 nt, Artificial Sequence
  Synthetic
uugagaccuucgucugcgaggcga

SEQ ID NO: 98848 - RNA, 19 nt, Artificial Sequence
  Synthetic
aggccuuguaaguuggcga

SEQ ID NO: 98849 - RNA, 20 nt, Artificial Sequence
  Synthetic
aaggccuuguaaguuggcga

SEQ ID NO: 98850 - RNA, 21 nt, Artificial Sequence
  Synthetic
aaaggccuuguaaguuggcga

SEQ ID NO: 98851 - RNA, 23 nt, Artificial Sequence
  Synthetic
agaaaggccuuguaaguuggcga

SEQ ID NO: 98852 - RNA, 24 nt, Artificial Sequence
  Synthetic
cagaaaggccuuguaaguuggcga

SEQ ID NO: 98853 - RNA, 21 nt, Artificial Sequence
  Synthetic
ugcaggguccccaguccucga

SEQ ID NO: 98854 - RNA, 24 nt, Artificial Sequence
  Synthetic
cggugcaggguccccaguccucga

SEQ ID NO: 98855 - RNA, 18 nt, Artificial Sequence
  Synthetic
aggacgucccgcgcagga

SEQ ID NO: 98856 - RNA, 19 nt, Artificial Sequence
  Synthetic
aaggacgucccgcgcagga

SEQ ID NO: 98857 - RNA, 20 nt, Artificial Sequence
  Synthetic
aaaggacgucccgcgcagga

SEQ ID NO: 98858 - RNA, 18 nt, Artificial Sequence
  Synthetic
uccaacuggugaucggga

SEQ ID NO: 98859 - RNA, 22 nt, Artificial Sequence
  Synthetic
  misc_feature (1)..(1): n is a, c, g, or u
nggguccaacuggugaucggga

SEQ ID NO: 98860 - RNA, 23 nt, Artificial Sequence
  Synthetic
  misc_feature (2)..(2): n is a, c, g, or u
cnggguccaacuggugaucggga

SEQ ID NO: 98861 - RNA, 21 nt, Artificial Sequence
  Synthetic
aacaguaggacaugaacauga

SEQ ID NO: 98862 - RNA, 23 nt, Artificial Sequence
  Synthetic
ugaacaguaggacaugaacauga

SEQ ID NO: 98863 - RNA, 24 nt, Artificial Sequence
  Synthetic
uugaacaguaggacaugaacauga

SEQ ID NO: 98864 - RNA, 22 nt, Artificial Sequence
  Synthetic
ugagaugauuaggcagagguga

SEQ ID NO: 98865 - RNA, 23 nt, Artificial Sequence
  Synthetic
augagaugauuaggcagagguga

SEQ ID NO: 98866 - RNA, 24 nt, Artificial Sequence
  Synthetic
caugagaugauuaggcagagguga

SEQ ID NO: 98867 - RNA, 21 nt, Artificial Sequence
  Synthetic
aguaguuuccggaaguguuga

SEQ ID NO: 98868 - RNA, 22 nt, Artificial Sequence
  Synthetic
caguaguuuccggaaguguuga

SEQ ID NO: 98869 - RNA, 23 nt, Artificial Sequence
  Synthetic
acaguaguuuccggaaguguuga

SEQ ID NO: 98870 - RNA, 24 nt, Artificial Sequence
  Synthetic
aacaguaguuuccggaaguguuga

SEQ ID NO: 98871 - RNA, 22 nt, Artificial Sequence
  Synthetic
aggauagaaccuagcaggcaua

SEQ ID NO: 98872 - RNA, 23 nt, Artificial Sequence
  Synthetic
uaggauagaaccuagcaggcaua

SEQ ID NO: 98873 - RNA, 24 nt, Artificial Sequence
  Synthetic
uuaggauagaaccuagcaggcaua

SEQ ID NO: 98874 - RNA, 23 nt, Artificial Sequence
  Synthetic
aggacacgugggugcucccccua

SEQ ID NO: 98875 - RNA, 24 nt, Artificial Sequence
  Synthetic
caggacacgugggugcucccccua

SEQ ID NO: 98876 - RNA, 21 nt, Artificial Sequence
  Synthetic
uugcauggucccgugcuggua

SEQ ID NO: 98877 - RNA, 22 nt, Artificial Sequence
  Synthetic
cuugcauggucccgugcuggua

SEQ ID NO: 98878 - RNA, 23 nt, Artificial Sequence
  Synthetic
ucuugcauggucccgugcuggua

SEQ ID NO: 98879 - RNA, 19 nt, Artificial Sequence
  Synthetic
ugccucgucgucuaacaac

SEQ ID NO: 98880 - RNA, 20 nt, Artificial Sequence
  Synthetic
cugccucgucgucuaacaac

SEQ ID NO: 98881 - RNA, 21 nt, Artificial Sequence
  Synthetic
ccugccucgucgucuaacaac

SEQ ID NO: 98882 - RNA, 22 nt, Artificial Sequence
  Synthetic
accugccucgucgucuaacaac

SEQ ID NO: 98883 - RNA, 18 nt, Artificial Sequence
  Synthetic
ccugccucgucgucuaac

SEQ ID NO: 98884 - RNA, 19 nt, Artificial Sequence
  Synthetic
accugccucgucgucuaac

SEQ ID NO: 98885 - RNA, 21 nt, Artificial Sequence
  Synthetic
auggaucggcagaggagccac

SEQ ID NO: 98886 - RNA, 22 nt, Artificial Sequence
  Synthetic
uauggaucggcagaggagccac

SEQ ID NO: 98887 - RNA, 24 nt, Artificial Sequence
  Synthetic
aguauggaucggcagaggagccac

SEQ ID NO: 98888 - RNA, 21 nt, Artificial Sequence
  Synthetic
  misc_feature (11)..(11): n is a, c, g, or u
caagaccuggngggcguucac

SEQ ID NO: 98889 - RNA, 22 nt, Artificial Sequence
  Synthetic
agaaaauugagagaaguccacc

SEQ ID NO: 98890 - RNA, 23 nt, Artificial Sequence
  Synthetic
uagaaaauugagagaaguccacc

SEQ ID NO: 98891 - RNA, 24 nt, Artificial Sequence
  Synthetic
cuagaaaauugagagaaguccacc

SEQ ID NO: 98892 - RNA, 21 nt, Artificial Sequence
  Synthetic
cgcguaaagagaggugcgccc

SEQ ID NO: 98893 - RNA, 22 nt, Artificial Sequence
  Synthetic
ccgcguaaagagaggugcgccc

SEQ ID NO: 98894 - RNA, 23 nt, Artificial Sequence
  Synthetic
accgcguaaagagaggugcgccc

SEQ ID NO: 98895 - RNA, 21 nt, Artificial Sequence
  Synthetic
caugcuguagcucuuguuccc

SEQ ID NO: 98896 - RNA, 22 nt, Artificial Sequence
  Synthetic
ccaugcuguagcucuuguuccc

SEQ ID NO: 98897 - RNA, 23 nt, Artificial Sequence
  Synthetic
cccaugcuguagcucuuguuccc

SEQ ID NO: 98898 - RNA, 24 nt, Artificial Sequence
  Synthetic
ucccaugcuguagcucuuguuccc

SEQ ID NO: 98899 - RNA, 21 nt, Artificial Sequence
  Synthetic
cauaggaaucuugcgaaagcc

SEQ ID NO: 98900 - RNA, 22 nt, Artificial Sequence
  Synthetic
ccauaggaaucuugcgaaagcc

SEQ ID NO: 98901 - RNA, 23 nt, Artificial Sequence
  Synthetic
cccauaggaaucuugcgaaagcc

SEQ ID NO: 98902 - RNA, 24 nt, Artificial Sequence
  Synthetic
ucccauaggaaucuugcgaaagcc

SEQ ID NO: 98903 - RNA, 18 nt, Artificial Sequence
  Synthetic
aacgccgcagacacaucc

SEQ ID NO: 98904 - RNA, 19 nt, Artificial Sequence
  Synthetic
aaacgccgcagacacaucc

SEQ ID NO: 98905 - RNA, 20 nt, Artificial Sequence
  Synthetic
aaaacgccgcagacacaucc

SEQ ID NO: 98906 - RNA, 21 nt, Artificial Sequence
  Synthetic
uaaaacgccgcagacacaucc

SEQ ID NO: 98907 - RNA, 22 nt, Artificial Sequence
  Synthetic
auaaaacgccgcagacacaucc

SEQ ID NO: 98908 - RNA, 24 nt, Artificial Sequence
  Synthetic
ugauaaaacgccgcagacacaucc

SEQ ID NO: 98909 - RNA, 21 nt, Artificial Sequence
  Synthetic
  misc_feature (15)..(15): n is a, c, g, or u
cguugacauugcugngagucc

SEQ ID NO: 98910 - RNA, 22 nt, Artificial Sequence
  Synthetic
  misc_feature (16)..(16): n is a, c, g, or u
ucguugacauugcugngagucc

SEQ ID NO: 98911 - RNA, 21 nt, Artificial Sequence
  Synthetic
cucaagaacaguuucucuucc

SEQ ID NO: 98912 - RNA, 22 nt, Artificial Sequence
  Synthetic
acucaagaacaguuucucuucc

SEQ ID NO: 98913 - RNA, 23 nt, Artificial Sequence
  Synthetic
uacucaagaacaguuucucuucc

SEQ ID NO: 98914 - RNA, 24 nt, Artificial Sequence
  Synthetic
auacucaagaacaguuucucuucc

SEQ ID NO: 98915 - RNA, 18 nt, Artificial Sequence
  Synthetic
cccgccuguaacacgagc

SEQ ID NO: 98916 - RNA, 19 nt, Artificial Sequence
  Synthetic
ccccgccuguaacacgagc

SEQ ID NO: 98917 - RNA, 20 nt, Artificial Sequence
  Synthetic
accccgccuguaacacgagc

SEQ ID NO: 98918 - RNA, 18 nt, Artificial Sequence
  Synthetic
ugagaucuucugcgacgc

SEQ ID NO: 98919 - RNA, 19 nt, Artificial Sequence
  Synthetic
uugagaucuucugcgacgc

SEQ ID NO: 98920 - RNA, 20 nt, Artificial Sequence
  Synthetic
auugagaucuucugcgacgc

SEQ ID NO: 98921 - RNA, 22 nt, Artificial Sequence
  Synthetic
  misc_feature (17)..(17): n is a, c, g, or u
agauugacgauaugggngaggc

SEQ ID NO: 98922 - RNA, 23 nt, Artificial Sequence
  Synthetic
  misc_feature (18)..(18): n is a, c, g, or u
aagauugacgauaugggngaggc

SEQ ID NO: 98923 - RNA, 18 nt, Artificial Sequence
  Synthetic
aaccacugaacaaauggc

SEQ ID NO: 98924 - RNA, 20 nt, Artificial Sequence
  Synthetic
cgaaccacugaacaaauggc

SEQ ID NO: 98925 - RNA, 21 nt, Artificial Sequence
  Synthetic
acgaaccacugaacaaauggc

SEQ ID NO: 98926 - RNA, 22 nt, Artificial Sequence
  Synthetic
uacgaaccacugaacaaauggc

SEQ ID NO: 98927 - RNA, 23 nt, Artificial Sequence
  Synthetic
cuacgaaccacugaacaaauggc

SEQ ID NO: 98928 - RNA, 24 nt, Artificial Sequence
  Synthetic
ccuacgaaccacugaacaaauggc

SEQ ID NO: 98929 - RNA, 21 nt, Artificial Sequence
  Synthetic
  misc_feature (9)..(9): n is a, c, g, or u
ugugguggngugaacccuggc

SEQ ID NO: 98930 - RNA, 23 nt, Artificial Sequence
  Synthetic
  misc_feature (11)..(11): n is a, c, g, or u
cgugugguggngugaacccuggc

SEQ ID NO: 98931 - RNA, 24 nt, Artificial Sequence
  Synthetic
  misc_feature (12)..(12): n is a, c, g, or u
ccgugugguggngugaacccuggc

SEQ ID NO: 98932 - RNA, 18 nt, Artificial Sequence
  Synthetic
caaagguuccacgcaugc

SEQ ID NO: 98933 - RNA, 19 nt, Artificial Sequence
  Synthetic
acaaagguuccacgcaugc

SEQ ID NO: 98934 - RNA, 20 nt, Artificial Sequence
  Synthetic
cacaaagguuccacgcaugc

SEQ ID NO: 98935 - RNA, 19 nt, Artificial Sequence
  Synthetic
  misc_feature (5)..(5): n is a, c, g, or u
uggunuccaugcgacgugc

SEQ ID NO: 98936 - RNA, 22 nt, Artificial Sequence
  Synthetic
  misc_feature (8)..(8): n is a, c, g, or u
cgguggunuccaugcgacgugc

SEQ ID NO: 98937 - RNA, 23 nt, Artificial Sequence
  Synthetic
  misc_feature (9)..(9): n is a, c, g, or u
acgguggunuccaugcgacgugc

SEQ ID NO: 98938 - RNA, 24 nt, Artificial Sequence
  Synthetic
  misc_feature (10)..(10): n is a, c, g, or u
cacgguggunuccaugcgacgugc

SEQ ID NO: 98939 - RNA, 18 nt, Artificial Sequence
  Synthetic
caacacagaauagcuugc

SEQ ID NO: 98940 - RNA, 19 nt, Artificial Sequence
  Synthetic
ccaacacagaauagcuugc

SEQ ID NO: 98941 - RNA, 20 nt, Artificial Sequence
  Synthetic
cccaacacagaauagcuugc

SEQ ID NO: 98942 - RNA, 21 nt, Artificial Sequence
  Synthetic
ccccaacacagaauagcuugc

SEQ ID NO: 98943 - RNA, 22 nt, Artificial Sequence
  Synthetic
accccaacacagaauagcuugc

SEQ ID NO: 98944 - RNA, 23 nt, Artificial Sequence
  Synthetic
caccccaacacagaauagcuugc

SEQ ID NO: 98945 - RNA, 24 nt, Artificial Sequence
  Synthetic
ucaccccaacacagaauagcuugc

SEQ ID NO: 98946 - RNA, 21 nt, Artificial Sequence
  Synthetic
  misc_feature (1)..(1): n is a, c, g, or u
ngaggcggugucgaggagauc

SEQ ID NO: 98947 - RNA, 22 nt, Artificial Sequence
  Synthetic
  misc_feature (2)..(2): n is a, c, g, or u
cngaggcggugucgaggagauc

SEQ ID NO: 98948 - RNA, 24 nt, Artificial Sequence
  Synthetic
  misc_feature (4)..(4): n is a, c, g, or u
agcngaggcggugucgaggagauc

SEQ ID NO: 98949 - RNA, 18 nt, Artificial Sequence
  Synthetic
caccacgagucuagacuc

SEQ ID NO: 98950 - RNA, 19 nt, Artificial Sequence
  Synthetic
ccaccacgagucuagacuc

SEQ ID NO: 98951 - RNA, 20 nt, Artificial Sequence
  Synthetic
uccaccacgagucuagacuc

SEQ ID NO: 98952 - RNA, 18 nt, Artificial Sequence
  Synthetic
cggggagaccgcguaaag

SEQ ID NO: 98953 - RNA, 19 nt, Artificial Sequence
  Synthetic
acggggagaccgcguaaag

SEQ ID NO: 98954 - RNA, 21 nt, Artificial Sequence
  Synthetic
agacggggagaccgcguaaag

SEQ ID NO: 98955 - RNA, 22 nt, Artificial Sequence
  Synthetic
cagacggggagaccgcguaaag

SEQ ID NO: 98956 - RNA, 23 nt, Artificial Sequence
  Synthetic
acagacggggagaccgcguaaag

SEQ ID NO: 98957 - RNA, 24 nt, Artificial Sequence
  Synthetic
cacagacggggagaccgcguaaag

SEQ ID NO: 98958 - RNA, 18 nt, Artificial Sequence
  Synthetic
cgacgugcagaggugaag

SEQ ID NO: 98959 - RNA, 20 nt, Artificial Sequence
  Synthetic
ugcgacgugcagaggugaag

SEQ ID NO: 98960 - RNA, 21 nt, Artificial Sequence
  Synthetic
augcgacgugcagaggugaag

SEQ ID NO: 98961 - RNA, 22 nt, Artificial Sequence
  Synthetic
caugcgacgugcagaggugaag

SEQ ID NO: 98962 - RNA, 23 nt, Artificial Sequence
  Synthetic
ccaugcgacgugcagaggugaag

SEQ ID NO: 98963 - RNA, 24 nt, Artificial Sequence
  Synthetic
uccaugcgacgugcagaggugaag

SEQ ID NO: 98964 - RNA, 21 nt, Artificial Sequence
  Synthetic
aucccagaggauugggaacag

SEQ ID NO: 98965 - RNA, 22 nt, Artificial Sequence
  Synthetic
aaucccagaggauugggaacag

SEQ ID NO: 98966 - RNA, 24 nt, Artificial Sequence
  Synthetic
agaaucccagaggauugggaacag

SEQ ID NO: 98967 - RNA, 21 nt, Artificial Sequence
  Synthetic
uugcauggugcuggugaacag

SEQ ID NO: 98968 - RNA, 23 nt, Artificial Sequence
  Synthetic
aguugcauggugcuggugaacag

SEQ ID NO: 98969 - RNA, 24 nt, Artificial Sequence
  Synthetic
aaguugcauggugcuggugaacag

SEQ ID NO: 98970 - RNA, 21 nt, Artificial Sequence
  Synthetic
caguagaagaauaaagcccag

SEQ ID NO: 98971 - RNA, 22 nt, Artificial Sequence
  Synthetic
acaguagaagaauaaagcccag

SEQ ID NO: 98972 - RNA, 23 nt, Artificial Sequence
  Synthetic
uacaguagaagaauaaagcccag

SEQ ID NO: 98973 - RNA, 21 nt, Artificial Sequence
  Synthetic
caagaagaugaggcauagcag

SEQ ID NO: 98974 - RNA, 22 nt, Artificial Sequence
  Synthetic
acaagaagaugaggcauagcag

SEQ ID NO: 98975 - RNA, 23 nt, Artificial Sequence
  Synthetic
aacaagaagaugaggcauagcag

SEQ ID NO: 98976 - RNA, 24 nt, Artificial Sequence
  Synthetic
caacaagaagaugaggcauagcag

SEQ ID NO: 98977 - RNA, 21 nt, Artificial Sequence
  Synthetic
  misc_feature (5)..(5): n is a, c, g, or u
agagncccaaacggccccgag

SEQ ID NO: 98978 - RNA, 22 nt, Artificial Sequence
  Synthetic
  misc_feature (6)..(6): n is a, c, g, or u
uagagncccaaacggccccgag

SEQ ID NO: 98979 - RNA, 23 nt, Artificial Sequence
  Synthetic
aggauuaaagacagguacaguag

SEQ ID NO: 98980 - RNA, 24 nt, Artificial Sequence
  Synthetic
caggauuaaagacagguacaguag

SEQ ID NO: 98981 - RNA, 18 nt, Artificial Sequence
  Synthetic
aagggaguagccccaacg

SEQ ID NO: 98982 - RNA, 19 nt, Artificial Sequence
  Synthetic
uaagggaguagccccaacg

SEQ ID NO: 98983 - RNA, 20 nt, Artificial Sequence
  Synthetic
uuaagggaguagccccaacg

SEQ ID NO: 98984 - RNA, 21 nt, Artificial Sequence
  Synthetic
  misc_feature (1)..(1): n is a, c, g, or u
nuuaagggaguagccccaacg

SEQ ID NO: 98985 - RNA, 22 nt, Artificial Sequence
  Synthetic
  misc_feature (2)..(2): n is a, c, g, or u
anuuaagggaguagccccaacg

SEQ ID NO: 98986 - RNA, 23 nt, Artificial Sequence
  Synthetic
  misc_feature (3)..(3): n is a, c, g, or u
aanuuaagggaguagccccaacg

SEQ ID NO: 98987 - RNA, 21 nt, Artificial Sequence
  Synthetic
aggcugucuuccugacugccg

SEQ ID NO: 98988 - RNA, 22 nt, Artificial Sequence
  Synthetic
uaggcugucuuccugacugccg

SEQ ID NO: 98989 - RNA, 24 nt, Artificial Sequence
  Synthetic
aguaggcugucuuccugacugccg

SEQ ID NO: 98990 - RNA, 18 nt, Artificial Sequence
  Synthetic
  misc_feature (15)..(15): n is a, c, g, or u
cgaagugcacacggnccg

SEQ ID NO: 98991 - RNA, 20 nt, Artificial Sequence
  Synthetic
  misc_feature (17)..(17): n is a, c, g, or u
agcgaagugcacacggnccg

SEQ ID NO: 98992 - RNA, 18 nt, Artificial Sequence
  Synthetic
cccgagacgggucguccg

SEQ ID NO: 98993 - RNA, 19 nt, Artificial Sequence
  Synthetic
ccccgagacgggucguccg

SEQ ID NO: 98994 - RNA, 19 nt, Artificial Sequence
  Synthetic
agacaaaggacgucccgcg

SEQ ID NO: 98995 - RNA, 20 nt, Artificial Sequence
  Synthetic
uagacaaaggacgucccgcg

SEQ ID NO: 98996 - RNA, 21 nt, Artificial Sequence
  Synthetic
cccacaaaaugaggcgcugcg

SEQ ID NO: 98997 - RNA, 22 nt, Artificial Sequence
  Synthetic
acccacaaaaugaggcgcugcg

SEQ ID NO: 98998 - RNA, 24 nt, Artificial Sequence
  Synthetic
ugacccacaaaaugaggcgcugcg

SEQ ID NO: 98999 - RNA, 23 nt, Artificial Sequence
  Synthetic
agguuaggauagaaccuagcagg

SEQ ID NO: 99000 - RNA, 24 nt, Artificial Sequence
  Synthetic
aagguuaggauagaaccuagcagg

SEQ ID NO: 99001 - RNA, 22 nt, Artificial Sequence
  Synthetic
  misc_feature (10)..(10): n is a, c, g, or u
agcuugccunagugcuguaugg

SEQ ID NO: 99002 - RNA, 23 nt, Artificial Sequence
  Synthetic
  misc_feature (11)..(11): n is a, c, g, or u
uagcuugccunagugcuguaugg

SEQ ID NO: 99003 - RNA, 24 nt, Artificial Sequence
  Synthetic
  misc_feature (12)..(12): n is a, c, g, or u
auagcuugccunagugcuguaugg

SEQ ID NO: 99004 - RNA, 21 nt, Artificial Sequence
  Synthetic
aauuacuucccacccaggugg

SEQ ID NO: 99005 - RNA, 22 nt, Artificial Sequence
  Synthetic
aaauuacuucccacccaggugg

SEQ ID NO: 99006 - RNA, 23 nt, Artificial Sequence
  Synthetic
caaauuacuucccacccaggugg

SEQ ID NO: 99007 - RNA, 24 nt, Artificial Sequence
  Synthetic
ccaaauuacuucccacccaggugg

SEQ ID NO: 99008 - RNA, 21 nt, Artificial Sequence
  Synthetic
augacugucucuuagaggugg

SEQ ID NO: 99009 - RNA, 24 nt, Artificial Sequence
  Synthetic
aggaugacugucucuuagaggugg

SEQ ID NO: 99010 - RNA, 21 nt, Artificial Sequence
  Synthetic
  misc_feature (21)..(21): n is a, c, g, or u
aggaaucuugcgaaagcccan

SEQ ID NO: 99011 - RNA, 22 nt, Artificial Sequence
  Synthetic
  misc_feature (22)..(22): n is a, c, g, or u
uaggaaucuugcgaaagcccan

SEQ ID NO: 99012 - RNA, 23 nt, Artificial Sequence
  Synthetic
  misc_feature (23)..(23): n is a, c, g, or u
auaggaaucuugcgaaagcccan

SEQ ID NO: 99013 - RNA, 24 nt, Artificial Sequence
  Synthetic
  misc_feature (24)..(24): n is a, c, g, or u
cauaggaaucuugcgaaagcccan

SEQ ID NO: 99014 - RNA, 21 nt, Artificial Sequence
  Synthetic
uguugggguugaagucccaau

SEQ ID NO: 99015 - RNA, 22 nt, Artificial Sequence
  Synthetic
uuguugggguugaagucccaau

SEQ ID NO: 99016 - RNA, 23 nt, Artificial Sequence
  Synthetic
cuuguugggguugaagucccaau

SEQ ID NO: 99017 - RNA, 24 nt, Artificial Sequence
  Synthetic
ccuuguugggguugaagucccaau

SEQ ID NO: 99018 - RNA, 21 nt, Artificial Sequence
  Synthetic
acgagcagggguccuaggaau

SEQ ID NO: 99019 - RNA, 22 nt, Artificial Sequence
  Synthetic
cacgagcagggguccuaggaau

SEQ ID NO: 99020 - RNA, 23 nt, Artificial Sequence
  Synthetic
acacgagcagggguccuaggaau

SEQ ID NO: 99021 - RNA, 24 nt, Artificial Sequence
  Synthetic
aacacgagcagggguccuaggaau

SEQ ID NO: 99022 - RNA, 22 nt, Artificial Sequence
  Synthetic
ugaguccaagggauacuaacau

SEQ ID NO: 99023 - RNA, 23 nt, Artificial Sequence
  Synthetic
augaguccaagggauacuaacau

SEQ ID NO: 99024 - RNA, 24 nt, Artificial Sequence
  Synthetic
uaugaguccaagggauacuaacau

SEQ ID NO: 99025 - RNA, 21 nt, Artificial Sequence
  Synthetic
cggacugaggcccacucccau

SEQ ID NO: 99026 - RNA, 22 nt, Artificial Sequence
  Synthetic
acggacugaggcccacucccau

SEQ ID NO: 99027 - RNA, 23 nt, Artificial Sequence
  Synthetic
aacggacugaggcccacucccau

SEQ ID NO: 99028 - RNA, 24 nt, Artificial Sequence
  Synthetic
aaacggacugaggcccacucccau

SEQ ID NO: 99029 - RNA, 21 nt, Artificial Sequence
  Synthetic
uaacauugagauucccgagau

SEQ ID NO: 99030 - RNA, 22 nt, Artificial Sequence
  Synthetic
cuaacauugagauucccgagau

SEQ ID NO: 99031 - RNA, 23 nt, Artificial Sequence
  Synthetic
acuaacauugagauucccgagau

SEQ ID NO: 99032 - RNA, 24 nt, Artificial Sequence
  Synthetic
uacuaacauugagauucccgagau

SEQ ID NO: 99033 - RNA, 21 nt, Artificial Sequence
  Synthetic
cagaagcuccaaauucuuuau

SEQ ID NO: 99034 - RNA, 22 nt, Artificial Sequence
  Synthetic
acagaagcuccaaauucuuuau

SEQ ID NO: 99035 - RNA, 23 nt, Artificial Sequence
  Synthetic
cacagaagcuccaaauucuuuau

SEQ ID NO: 99036 - RNA, 24 nt, Artificial Sequence
  Synthetic
ccacagaagcuccaaauucuuuau

SEQ ID NO: 99037 - RNA, 18 nt, Artificial Sequence
  Synthetic
cccaacguuugguuuuau

SEQ ID NO: 99038 - RNA, 19 nt, Artificial Sequence
  Synthetic
ccccaacguuugguuuuau

SEQ ID NO: 99039 - RNA, 21 nt, Artificial Sequence
  Synthetic
agccccaacguuugguuuuau

SEQ ID NO: 99040 - RNA, 22 nt, Artificial Sequence
  Synthetic
uagccccaacguuugguuuuau

SEQ ID NO: 99041 - RNA, 24 nt, Artificial Sequence
  Synthetic
aguagccccaacguuugguuuuau

SEQ ID NO: 99042 - RNA, 18 nt, Artificial Sequence
  Synthetic
aauuuaugccuacagccu

SEQ ID NO: 99043 - RNA, 19 nt, Artificial Sequence
  Synthetic
caauuuaugccuacagccu

SEQ ID NO: 99044 - RNA, 20 nt, Artificial Sequence
  Synthetic
ccaauuuaugccuacagccu

SEQ ID NO: 99045 - RNA, 18 nt, Artificial Sequence
  Synthetic
ccggagacucuaaggccu

SEQ ID NO: 99046 - RNA, 19 nt, Artificial Sequence
  Synthetic
uccggagacucuaaggccu

SEQ ID NO: 99047 - RNA, 20 nt, Artificial Sequence
  Synthetic
uuccggagacucuaaggccu

SEQ ID NO: 99048 - RNA, 22 nt, Artificial Sequence
  Synthetic
uguuccggagacucuaaggccu

SEQ ID NO: 99049 - RNA, 23 nt, Artificial Sequence
  Synthetic
auguuccggagacucuaaggccu

SEQ ID NO: 99050 - RNA, 24 nt, Artificial Sequence
  Synthetic
aauguuccggagacucuaaggccu

SEQ ID NO: 99051 - RNA, 18 nt, Artificial Sequence
  Synthetic
aacacgagcagggguccu

SEQ ID NO: 99052 - RNA, 19 nt, Artificial Sequence
  Synthetic
uaacacgagcagggguccu

SEQ ID NO: 99053 - RNA, 21 nt, Artificial Sequence
  Synthetic
uguaacacgagcagggguccu

SEQ ID NO: 99054 - RNA, 22 nt, Artificial Sequence
  Synthetic
cuguaacacgagcagggguccu

SEQ ID NO: 99055 - RNA, 23 nt, Artificial Sequence
  Synthetic
ccuguaacacgagcagggguccu

SEQ ID NO: 99056 - RNA, 22 nt, Artificial Sequence
  Synthetic
cgugcugguaguugauguuccu

SEQ ID NO: 99057 - RNA, 23 nt, Artificial Sequence
  Synthetic
ccgugcugguaguugauguuccu

SEQ ID NO: 99058 - RNA, 24 nt, Artificial Sequence
  Synthetic
cccgugcugguaguugauguuccu

SEQ ID NO: 99059 - RNA, 21 nt, Artificial Sequence
  Synthetic
cugcgagcaaaacaagcugcu

SEQ ID NO: 99060 - RNA, 24 nt, Artificial Sequence
  Synthetic
cggcugcgagcaaaacaagcugcu

SEQ ID NO: 99061 - RNA, 18 nt, Artificial Sequence
  Synthetic
cuugcauggucccgugcu

SEQ ID NO: 99062 - RNA, 19 nt, Artificial Sequence
  Synthetic
ucuugcauggucccgugcu

SEQ ID NO: 99063 - RNA, 18 nt, Artificial Sequence
  Synthetic
ucggucguugacauugcu

SEQ ID NO: 99064 - RNA, 21 nt, Artificial Sequence
  Synthetic
aggucggucguugacauugcu

SEQ ID NO: 99065 - RNA, 22 nt, Artificial Sequence
  Synthetic
aaggucggucguugacauugcu

SEQ ID NO: 99066 - RNA, 23 nt, Artificial Sequence
  Synthetic
caaggucggucguugacauugcu

SEQ ID NO: 99067 - RNA, 24 nt, Artificial Sequence
  Synthetic
ucaaggucggucguugacauugcu

SEQ ID NO: 99068 - RNA, 18 nt, Artificial Sequence
  Synthetic
acaguaguuuccggaagu

SEQ ID NO: 99069 - RNA, 19 nt, Artificial Sequence
  Synthetic
aacaguaguuuccggaagu

SEQ ID NO: 99070 - RNA, 20 nt, Artificial Sequence
  Synthetic
caacaguaguuuccggaagu

SEQ ID NO: 99071 - RNA, 21 nt, Artificial Sequence
  Synthetic
acaacaguaguuuccggaagu

SEQ ID NO: 99072 - RNA, 22 nt, Artificial Sequence
  Synthetic
aacaacaguaguuuccggaagu

SEQ ID NO: 99073 - RNA, 23 nt, Artificial Sequence
  Synthetic
uaacaacaguaguuuccggaagu

SEQ ID NO: 99074 - RNA, 24 nt, Artificial Sequence
  Synthetic
cuaacaacaguaguuuccggaagu

SEQ ID NO: 99075 - RNA, 18 nt, Artificial Sequence
  Synthetic
ugcuaggaguuccgcagu

SEQ ID NO: 99076 - RNA, 19 nt, Artificial Sequence
  Synthetic
cugcuaggaguuccgcagu

SEQ ID NO: 99077 - RNA, 19 nt, Artificial Sequence
  Synthetic
aggucuugcauggucccgu

SEQ ID NO: 99078 - RNA, 20 nt, Artificial Sequence
  Synthetic
caggucuugcauggucccgu

SEQ ID NO: 99079 - RNA, 19 nt, Artificial Sequence
  Synthetic
  misc_feature (3)..(3): n is a, c, g, or u
cgngcaacgggguaaaggu

SEQ ID NO: 99080 - RNA, 20 nt, Artificial Sequence
  Synthetic
  misc_feature (4)..(4): n is a, c, g, or u
ccgngcaacgggguaaaggu

SEQ ID NO: 99081 - RNA, 21 nt, Artificial Sequence
  Synthetic
aacguuugguuuuauuagggu

SEQ ID NO: 99082 - RNA, 22 nt, Artificial Sequence
  Synthetic
caacguuugguuuuauuagggu

SEQ ID NO: 99083 - RNA, 23 nt, Artificial Sequence
  Synthetic
ccaacguuugguuuuauuagggu

SEQ ID NO: 99084 - RNA, 24 nt, Artificial Sequence
  Synthetic
cccaacguuugguuuuauuagggu

SEQ ID NO: 99085 - RNA, 19 nt, Artificial Sequence
  Synthetic
  misc_feature (9)..(9): n is a, c, g, or u
cguugccgngcaacggggu

SEQ ID NO: 99086 - RNA, 20 nt, Artificial Sequence
  Synthetic
  misc_feature (10)..(10): n is a, c, g, or u
ccguugccgngcaacggggu

SEQ ID NO: 99087 - RNA, 21 nt, Artificial Sequence
  Synthetic
  misc_feature (11)..(11): n is a, c, g, or u
accguugccgngcaacggggu

SEQ ID NO: 99088 - RNA, 23 nt, Artificial Sequence
  Synthetic
  misc_feature (13)..(13): n is a, c, g, or u
ugaccguugccgngcaacggggu

SEQ ID NO: 99089 - RNA, 24 nt, Artificial Sequence
  Synthetic
  misc_feature (14)..(14): n is a, c, g, or u
cugaccguugccgngcaacggggu

SEQ ID NO: 99090 - RNA, 22 nt, Artificial Sequence
  Synthetic
agaggugaaaaaguugcauggu

SEQ ID NO: 99091 - RNA, 23 nt, Artificial Sequence
  Synthetic
cagaggugaaaaaguugcauggu

SEQ ID NO: 99092 - RNA, 22 nt, Artificial Sequence
  Synthetic
agucuagacucugugguauugu

SEQ ID NO: 99093 - RNA, 24 nt, Artificial Sequence
  Synthetic
cgagucuagacucugugguauugu

SEQ ID NO: 99094 - RNA, 18 nt, Artificial Sequence
  Synthetic
aaacgggcaacauaccuu

SEQ ID NO: 99095 - RNA, 19 nt, Artificial Sequence
  Synthetic
caaacgggcaacauaccuu

SEQ ID NO: 99096 - RNA, 20 nt, Artificial Sequence
  Synthetic
acaaacgggcaacauaccuu

SEQ ID NO: 99097 - RNA, 23 nt, Artificial Sequence
  Synthetic
uggccugaggaugacugucucuu

SEQ ID NO: 99098 - RNA, 24 nt, Artificial Sequence
  Synthetic
auggccugaggaugacugucucuu

SEQ ID NO: 99099 - RNA, 22 nt, Artificial Sequence
  Synthetic
  misc_feature (15)..(15): n is a, c, g, or u
ugggcaagaccuggngggcguu

SEQ ID NO: 99100 - RNA, 23 nt, Artificial Sequence
  Synthetic
  misc_feature (16)..(16): n is a, c, g, or u
uugggcaagaccuggngggcguu

SEQ ID NO: 99101 - RNA, 24 nt, Artificial Sequence
  Synthetic
  misc_feature (17)..(17): n is a, c, g, or u
cuugggcaagaccuggngggcguu

SEQ ID NO: 99102 - RNA, 22 nt, Artificial Sequence
  Synthetic
uguugauaagauaggggcauuu

SEQ ID NO: 99103 - RNA, 24 nt, Artificial Sequence
  Synthetic
aguguugauaagauaggggcauuu

SEQ ID NO: 99104 - RNA, 21 nt, Artificial Sequence
  Synthetic
  misc_feature (4)..(4): n is a, c, g, or u
acunggaggcuguaggcauaa

SEQ ID NO: 99105 - RNA, 22 nt, Artificial Sequence
  Synthetic
  misc_feature (5)..(5): n is a, c, g, or u
uacunggaggcuguaggcauaa

SEQ ID NO: 99106 - RNA, 24 nt, Artificial Sequence
  Synthetic
  misc_feature (7)..(7): n is a, c, g, or u
uguacunggaggcuguaggcauaa

SEQ ID NO: 99107 - RNA, 21 nt, Artificial Sequence
  Synthetic
acaagaauccucacaauacca

SEQ ID NO: 99108 - RNA, 23 nt, Artificial Sequence
  Synthetic
ugacaagaauccucacaauacca

SEQ ID NO: 99109 - RNA, 24 nt, Artificial Sequence
  Synthetic
uugacaagaauccucacaauacca

SEQ ID NO: 99110 - RNA, 22 nt, Artificial Sequence
  Synthetic
agagacagucauccucaggcca

SEQ ID NO: 99111 - RNA, 23 nt, Artificial Sequence
  Synthetic
aagagacagucauccucaggcca

SEQ ID NO: 99112 - RNA, 24 nt, Artificial Sequence
  Synthetic
uaagagacagucauccucaggcca

SEQ ID NO: 99113 - RNA, 21 nt, Artificial Sequence
  Synthetic
uagcagcuuguuuugcucgca

SEQ ID NO: 99114 - RNA, 22 nt, Artificial Sequence
  Synthetic
cuagcagcuuguuuugcucgca

SEQ ID NO: 99115 - RNA, 23 nt, Artificial Sequence
  Synthetic
ccuagcagcuuguuuugcucgca

SEQ ID NO: 99116 - RNA, 24 nt, Artificial Sequence
  Synthetic
uccuagcagcuuguuuugcucgca

SEQ ID NO: 99117 - RNA, 18 nt, Artificial Sequence
  Synthetic
cucaaucgccgcgucgca

SEQ ID NO: 99118 - RNA, 19 nt, Artificial Sequence
  Synthetic
ucucaaucgccgcgucgca

SEQ ID NO: 99119 - RNA, 18 nt, Artificial Sequence
  Synthetic
uaguaucccuuggacuca

SEQ ID NO: 99120 - RNA, 19 nt, Artificial Sequence
  Synthetic
uuaguaucccuuggacuca

SEQ ID NO: 99121 - RNA, 22 nt, Artificial Sequence
  Synthetic
uggcuuucaguuauauggauga

SEQ ID NO: 99122 - RNA, 23 nt, Artificial Sequence
  Synthetic
uuggcuuucaguuauauggauga

SEQ ID NO: 99123 - RNA, 24 nt, Artificial Sequence
  Synthetic
uuuggcuuucaguuauauggauga

SEQ ID NO: 99124 - RNA, 21 nt, Artificial Sequence
  Synthetic
agcuauucuguguugggguga

SEQ ID NO: 99125 - RNA, 22 nt, Artificial Sequence
  Synthetic
aagcuauucuguguugggguga

SEQ ID NO: 99126 - RNA, 23 nt, Artificial Sequence
  Synthetic
caagcuauucuguguugggguga

SEQ ID NO: 99127 - RNA, 19 nt, Artificial Sequence
  Synthetic
cggggcgcaccucucuuua

SEQ ID NO: 99128 - RNA, 20 nt, Artificial Sequence
  Synthetic
acggggcgcaccucucuuua

SEQ ID NO: 99129 - RNA, 21 nt, Artificial Sequence
  Synthetic
cacggggcgcaccucucuuua

SEQ ID NO: 99130 - RNA, 22 nt, Artificial Sequence
  Synthetic
ccacggggcgcaccucucuuua

SEQ ID NO: 99131 - RNA, 23 nt, Artificial Sequence
  Synthetic
accacggggcgcaccucucuuua

SEQ ID NO: 99132 - RNA, 22 nt, Artificial Sequence
  Synthetic
agauugggacuucaaccccaac

SEQ ID NO: 99133 - RNA, 23 nt, Artificial Sequence
  Synthetic
cagauugggacuucaaccccaac

SEQ ID NO: 99134 - RNA, 24 nt, Artificial Sequence
  Synthetic
ccagauugggacuucaaccccaac

SEQ ID NO: 99135 - RNA, 19 nt, Artificial Sequence
  Synthetic
aguugaugaaucuggccac

SEQ ID NO: 99136 - RNA, 21 nt, Artificial Sequence
  Synthetic
ugaguugaugaaucuggccac

SEQ ID NO: 99137 - RNA, 18 nt, Artificial Sequence
  Synthetic
cucccucgccucgcagac

SEQ ID NO: 99138 - RNA, 19 nt, Artificial Sequence
  Synthetic
acucccucgccucgcagac

SEQ ID NO: 99139 - RNA, 20 nt, Artificial Sequence
  Synthetic
aacucccucgccucgcagac

SEQ ID NO: 99140 - RNA, 22 nt, Artificial Sequence
  Synthetic
agaacucccucgccucgcagac

SEQ ID NO: 99141 - RNA, 23 nt, Artificial Sequence
  Synthetic
aagaacucccucgccucgcagac

SEQ ID NO: 99142 - RNA, 21 nt, Artificial Sequence
  Synthetic
ucaggcucagggcauauugac

SEQ ID NO: 99143 - RNA, 22 nt, Artificial Sequence
  Synthetic
cucaggcucagggcauauugac

SEQ ID NO: 99144 - RNA, 23 nt, Artificial Sequence
  Synthetic
ccucaggcucagggcauauugac

SEQ ID NO: 99145 - RNA, 24 nt, Artificial Sequence
  Synthetic
cccucaggcucagggcauauugac

SEQ ID NO: 99146 - RNA, 19 nt, Artificial Sequence
  Synthetic
cgggguuuuucuuguugac

SEQ ID NO: 99147 - RNA, 22 nt, Artificial Sequence
  Synthetic
aggcgggguuuuucuuguugac

SEQ ID NO: 99148 - RNA, 23 nt, Artificial Sequence
  Synthetic
caggcgggguuuuucuuguugac

SEQ ID NO: 99149 - RNA, 24 nt, Artificial Sequence
  Synthetic
acaggcgggguuuuucuuguugac

SEQ ID NO: 99150 - RNA, 21 nt, Artificial Sequence
  Synthetic
uucaagccuccaagcugugcc

SEQ ID NO: 99151 - RNA, 23 nt, Artificial Sequence
  Synthetic
uguucaagccuccaagcugugcc

SEQ ID NO: 99152 - RNA, 24 nt, Artificial Sequence
  Synthetic
cuguucaagccuccaagcugugcc

SEQ ID NO: 99153 - RNA, 22 nt, Artificial Sequence
  Synthetic
  misc_feature (10)..(10): n is a, c, g, or u
ugaacgcccnccaggucuugcc

SEQ ID NO: 99154 - RNA, 24 nt, Artificial Sequence
  Synthetic
  misc_feature (12)..(12): n is a, c, g, or u
cgugaacgcccnccaggucuugcc

SEQ ID NO: 99155 - RNA, 18 nt, Artificial Sequence
  Synthetic
  misc_feature (14)..(14): n is a, c, g, or u
uuuaccccguugcncggc

SEQ ID NO: 99156 - RNA, 19 nt, Artificial Sequence
  Synthetic
  misc_feature (15)..(15): n is a, c, g, or u
cuuuaccccguugcncggc

SEQ ID NO: 99157 - RNA, 20 nt, Artificial Sequence
  Synthetic
  misc_feature (16)..(16): n is a, c, g, or u
ccuuuaccccguugcncggc

SEQ ID NO: 99158 - RNA, 18 nt, Artificial Sequence
  Synthetic
cuguuguuagacgacgag

SEQ ID NO: 99159 - RNA, 19 nt, Artificial Sequence
  Synthetic
acuguuguuagacgacgag

SEQ ID NO: 99160 - RNA, 20 nt, Artificial Sequence
  Synthetic
uacuguuguuagacgacgag

SEQ ID NO: 99161 - RNA, 21 nt, Artificial Sequence
  Synthetic
cuacuguuguuagacgacgag

SEQ ID NO: 99162 - RNA, 22 nt, Artificial Sequence
  Synthetic
acuacuguuguuagacgacgag

SEQ ID NO: 99163 - RNA, 23 nt, Artificial Sequence
  Synthetic
aacuacuguuguuagacgacgag

SEQ ID NO: 99164 - RNA, 24 nt, Artificial Sequence
  Synthetic
aaacuacuguuguuagacgacgag

SEQ ID NO: 99165 - RNA, 21 nt, Artificial Sequence
  Synthetic
acaagagcuacagcaugggag

SEQ ID NO: 99166 - RNA, 22 nt, Artificial Sequence
  Synthetic
aacaagagcuacagcaugggag

SEQ ID NO: 99167 - RNA, 19 nt, Artificial Sequence
  Synthetic
ugucuacgucccgucggcg

SEQ ID NO: 99168 - RNA, 20 nt, Artificial Sequence
  Synthetic
uugucuacgucccgucggcg

SEQ ID NO: 99169 - RNA, 21 nt, Artificial Sequence
  Synthetic
  misc_feature (11)..(11): n is a, c, g, or u
ucccaucaucnugggcuuucg

SEQ ID NO: 99170 - RNA, 22 nt, Artificial Sequence
  Synthetic
  misc_feature (12)..(12): n is a, c, g, or u
aucccaucaucnugggcuuucg

SEQ ID NO: 99171 - RNA, 23 nt, Artificial Sequence
  Synthetic
  misc_feature (13)..(13): n is a, c, g, or u
caucccaucaucnugggcuuucg

SEQ ID NO: 99172 - RNA, 24 nt, Artificial Sequence
  Synthetic
  misc_feature (14)..(14): n is a, c, g, or u
ccaucccaucaucnugggcuuucg

SEQ ID NO: 99173 - RNA, 23 nt, Artificial Sequence
  Synthetic
aggaccccugcucguguuacagg

SEQ ID NO: 99174 - RNA, 24 nt, Artificial Sequence
  Synthetic
uaggaccccugcucguguuacagg

SEQ ID NO: 99175 - RNA, 21 nt, Artificial Sequence
  Synthetic
  misc_feature (12)..(12): n is a, c, g, or u
uaccccguugcncggcaacgg

SEQ ID NO: 99176 - RNA, 22 nt, Artificial Sequence
  Synthetic
  misc_feature (13)..(13): n is a, c, g, or u
uuaccccguugcncggcaacgg

SEQ ID NO: 99177 - RNA, 23 nt, Artificial Sequence
  Synthetic
  misc_feature (14)..(14): n is a, c, g, or u
uuuaccccguugcncggcaacgg

SEQ ID NO: 99178 - RNA, 24 nt, Artificial Sequence
  Synthetic
  misc_feature (15)..(15): n is a, c, g, or u
cuuuaccccguugcncggcaacgg

SEQ ID NO: 99179 - RNA, 18 nt, Artificial Sequence
  Synthetic
ugguggcuccaguuccgg

SEQ ID NO: 99180 - RNA, 19 nt, Artificial Sequence
  Synthetic
cugguggcuccaguuccgg

SEQ ID NO: 99181 - RNA, 21 nt, Artificial Sequence
  Synthetic
ugcugguggcuccaguuccgg

SEQ ID NO: 99182 - RNA, 22 nt, Artificial Sequence
  Synthetic
cugcugguggcuccaguuccgg

SEQ ID NO: 99183 - RNA, 23 nt, Artificial Sequence
  Synthetic
ccugcugguggcuccaguuccgg

SEQ ID NO: 99184 - RNA, 24 nt, Artificial Sequence
  Synthetic
uccugcugguggcuccaguuccgg

SEQ ID NO: 99185 - RNA, 21 nt, Artificial Sequence
  Synthetic
uggaugaugugguauuggggg

SEQ ID NO: 99186 - RNA, 22 nt, Artificial Sequence
  Synthetic
auggaugaugugguauuggggg

SEQ ID NO: 99187 - RNA, 23 nt, Artificial Sequence
  Synthetic
uauggaugaugugguauuggggg

SEQ ID NO: 99188 - RNA, 24 nt, Artificial Sequence
  Synthetic
auauggaugaugugguauuggggg

SEQ ID NO: 99189 - RNA, 18 nt, Artificial Sequence
  Synthetic
ccucgacaaggcaugggg

SEQ ID NO: 99190 - RNA, 19 nt, Artificial Sequence
  Synthetic
accucgacaaggcaugggg

SEQ ID NO: 99191 - RNA, 20 nt, Artificial Sequence
  Synthetic
aaccucgacaaggcaugggg

SEQ ID NO: 99192 - RNA, 21 nt, Artificial Sequence
  Synthetic
aaaccucgacaaggcaugggg

SEQ ID NO: 99193 - RNA, 22 nt, Artificial Sequence
  Synthetic
caaaccucgacaaggcaugggg

SEQ ID NO: 99194 - RNA, 23 nt, Artificial Sequence
  Synthetic
ccaaaccucgacaaggcaugggg

SEQ ID NO: 99195 - RNA, 24 nt, Artificial Sequence
  Synthetic
uccaaaccucgacaaggcaugggg

SEQ ID NO: 99196 - RNA, 24 nt, Artificial Sequence
  Synthetic
ugggccucaguccguuucuccugg

SEQ ID NO: 99197 - RNA, 22 nt, Artificial Sequence
  Synthetic
ugggaacaagagcuacagcaug

SEQ ID NO: 99198 - RNA, 23 nt, Artificial Sequence
  Synthetic
uugggaacaagagcuacagcaug

SEQ ID NO: 99199 - RNA, 24 nt, Artificial Sequence
  Synthetic
cuugggaacaagagcuacagcaug

SEQ ID NO: 99200 - RNA, 21 nt, Artificial Sequence
  Synthetic
caugcaacuuuuucaccucug

SEQ ID NO: 99201 - RNA, 22 nt, Artificial Sequence
  Synthetic
ccaugcaacuuuuucaccucug

SEQ ID NO: 99202 - RNA, 23 nt, Artificial Sequence
  Synthetic
accaugcaacuuuuucaccucug

SEQ ID NO: 99203 - RNA, 24 nt, Artificial Sequence
  Synthetic
caccaugcaacuuuuucaccucug

SEQ ID NO: 99204 - RNA, 21 nt, Artificial Sequence
  Synthetic
augaaucuggccaccugggug

SEQ ID NO: 99205 - RNA, 23 nt, Artificial Sequence
  Synthetic
ugaugaaucuggccaccugggug

SEQ ID NO: 99206 - RNA, 24 nt, Artificial Sequence
  Synthetic
uugaugaaucuggccaccugggug

SEQ ID NO: 99207 - RNA, 20 nt, Artificial Sequence
  Synthetic
  misc_feature (18)..(18): n is a, c, g, or u
cggcaacggucaggucunug

SEQ ID NO: 99208 - RNA, 18 nt, Artificial Sequence
  Synthetic
aaucucgggaaucucaau

SEQ ID NO: 99209 - RNA, 19 nt, Artificial Sequence
  Synthetic
caaucucgggaaucucaau

SEQ ID NO: 99210 - RNA, 20 nt, Artificial Sequence
  Synthetic
ucaaucucgggaaucucaau

SEQ ID NO: 99211 - RNA, 21 nt, Artificial Sequence
  Synthetic
cucaaucucgggaaucucaau

SEQ ID NO: 99212 - RNA, 22 nt, Artificial Sequence
  Synthetic
ucucaaucucgggaaucucaau

SEQ ID NO: 99213 - RNA, 23 nt, Artificial Sequence
  Synthetic
aucucaaucucgggaaucucaau

SEQ ID NO: 99214 - RNA, 22 nt, Artificial Sequence
  Synthetic
agaagaucucaaucucgggaau

SEQ ID NO: 99215 - RNA, 23 nt, Artificial Sequence
  Synthetic
cagaagaucucaaucucgggaau

SEQ ID NO: 99216 - RNA, 18 nt, Artificial Sequence
  Synthetic
cgccgcgucgcagaagau

SEQ ID NO: 99217 - RNA, 19 nt, Artificial Sequence
  Synthetic
ucgccgcgucgcagaagau

SEQ ID NO: 99218 - RNA, 20 nt, Artificial Sequence
  Synthetic
aucgccgcgucgcagaagau

SEQ ID NO: 99219 - RNA, 18 nt, Artificial Sequence
  Synthetic
cuuucgcaagauuccuau

SEQ ID NO: 99220 - RNA, 22 nt, Artificial Sequence
  Synthetic
ugggcuuucgcaagauuccuau

SEQ ID NO: 99221 - RNA, 23 nt, Artificial Sequence
  Synthetic
  misc_feature (1)..(1): n is a, c, g, or u
nugggcuuucgcaagauuccuau

SEQ ID NO: 99222 - RNA, 24 nt, Artificial Sequence
  Synthetic
  misc_feature (2)..(2): n is a, c, g, or u
cnugggcuuucgcaagauuccuau

SEQ ID NO: 99223 - RNA, 21 nt, Artificial Sequence
  Synthetic
  misc_feature (15)..(15): n is a, c, g, or u
agggaauuaguagunagcuau

SEQ ID NO: 99224 - RNA, 22 nt, Artificial Sequence
  Synthetic
  misc_feature (16)..(16): n is a, c, g, or u
cagggaauuaguagunagcuau

SEQ ID NO: 99225 - RNA, 23 nt, Artificial Sequence
  Synthetic
  misc_feature (17)..(17): n is a, c, g, or u
ccagggaauuaguagunagcuau

SEQ ID NO: 99226 - RNA, 24 nt, Artificial Sequence
  Synthetic
  misc_feature (18)..(18): n is a, c, g, or u
uccagggaauuaguagunagcuau

SEQ ID NO: 99227 - RNA, 21 nt, Artificial Sequence
  Synthetic
caauaccacagagucuagacu

SEQ ID NO: 99228 - RNA, 22 nt, Artificial Sequence
  Synthetic
acaauaccacagagucuagacu

SEQ ID NO: 99229 - RNA, 23 nt, Artificial Sequence
  Synthetic
cacaauaccacagagucuagacu

SEQ ID NO: 99230 - RNA, 24 nt, Artificial Sequence
  Synthetic
ucacaauaccacagagucuagacu

SEQ ID NO: 99231 - RNA, 18 nt, Artificial Sequence
  Synthetic
cucuguaucgggaggccu

SEQ ID NO: 99232 - RNA, 20 nt, Artificial Sequence
  Synthetic
  misc_feature (1)..(1): n is a, c, g, or u
ngcucuguaucgggaggccu

SEQ ID NO: 99233 - RNA, 21 nt, Artificial Sequence
  Synthetic
  misc_feature (2)..(2): n is a, c, g, or u
cngcucuguaucgggaggccu

SEQ ID NO: 99234 - RNA, 22 nt, Artificial Sequence
  Synthetic
  misc_feature (3)..(3): n is a, c, g, or u
ucngcucuguaucgggaggccu

SEQ ID NO: 99235 - RNA, 23 nt, Artificial Sequence
  Synthetic
  misc_feature (4)..(4): n is a, c, g, or u
cucngcucuguaucgggaggccu

SEQ ID NO: 99236 - RNA, 24 nt, Artificial Sequence
  Synthetic
  misc_feature (5)..(5): n is a, c, g, or u
ccucngcucuguaucgggaggccu

SEQ ID NO: 99237 - RNA, 24 nt, Artificial Sequence
  Synthetic
agggcuuucccccacuguuuggcu

SEQ ID NO: 99238 - RNA, 21 nt, Artificial Sequence
  Synthetic
ucaacaauaugugggcccucu

SEQ ID NO: 99239 - RNA, 23 nt, Artificial Sequence
  Synthetic
ugucaacaauaugugggcccucu

SEQ ID NO: 99240 - RNA, 24 nt, Artificial Sequence
  Synthetic
augucaacaauaugugggcccucu

SEQ ID NO: 99241 - RNA, 19 nt, Artificial Sequence
  Synthetic
agacucgugguggacuucu

SEQ ID NO: 99242 - RNA, 20 nt, Artificial Sequence
  Synthetic
uagacucgugguggacuucu

SEQ ID NO: 99243 - RNA, 21 nt, Artificial Sequence
  Synthetic
cuagacucgugguggacuucu

SEQ ID NO: 99244 - RNA, 22 nt, Artificial Sequence
  Synthetic
ucuagacucgugguggacuucu

SEQ ID NO: 99245 - RNA, 24 nt, Artificial Sequence
  Synthetic
agucuagacucgugguggacuucu

SEQ ID NO: 99246 - RNA, 21 nt, Artificial Sequence
  Synthetic
augggauauguaauuggaagu

SEQ ID NO: 99247 - RNA, 22 nt, Artificial Sequence
  Synthetic
caugggauauguaauuggaagu

SEQ ID NO: 99248 - RNA, 23 nt, Artificial Sequence
  Synthetic
ucaugggauauguaauuggaagu

SEQ ID NO: 99249 - RNA, 24 nt, Artificial Sequence
  Synthetic
uucaugggauauguaauuggaagu

SEQ ID NO: 99250 - RNA, 18 nt, Artificial Sequence
  Synthetic
cgccucgcagacgaaggu

SEQ ID NO: 99251 - RNA, 19 nt, Artificial Sequence
  Synthetic
ucgccucgcagacgaaggu

SEQ ID NO: 99252 - RNA, 20 nt, Artificial Sequence
  Synthetic
cucgccucgcagacgaaggu

SEQ ID NO: 99253 - RNA, 22 nt, Artificial Sequence
  Synthetic
ugcugcuaugccucaucuucuu

SEQ ID NO: 99254 - RNA, 23 nt, Artificial Sequence
  Synthetic
cugcugcuaugccucaucuucuu

SEQ ID NO: 99255 - RNA, 24 nt, Artificial Sequence
  Synthetic
ccugcugcuaugccucaucuucuu

SEQ ID NO: 99256 - RNA, 21 nt, Artificial Sequence
  Synthetic
cccaauccucugggauucuuu

SEQ ID NO: 99257 - RNA, 22 nt, Artificial Sequence
  Synthetic
ucccaauccucugggauucuuu

SEQ ID NO: 99258 - RNA, 23 nt, Artificial Sequence
  Synthetic
uucccaauccucugggauucuuu

SEQ ID NO: 99259 - RNA, 21 nt, Artificial Sequence
  Synthetic
ccguuucuccuggcucaguuu

SEQ ID NO: 99260 - RNA, 22 nt, Artificial Sequence
  Synthetic
uccguuucuccuggcucaguuu

SEQ ID NO: 99261 - RNA, 24 nt, Artificial Sequence
  Synthetic
aguccguuucuccuggcucaguuu

SEQ ID NO: 99262 - RNA, 21 nt, Artificial Sequence
  Synthetic
cuacacgcagcgccucauuuu

SEQ ID NO: 99263 - RNA, 22 nt, Artificial Sequence
  Synthetic
acuacacgcagcgccucauuuu

SEQ ID NO: 99264 - RNA, 23 nt, Artificial Sequence
  Synthetic
aacuacacgcagcgccucauuuu

SEQ ID NO: 99265 - RNA, 24 nt, Artificial Sequence
  Synthetic
aaacuacacgcagcgccucauuuu

SEQ ID NO: 99266 - RNA, 19 nt, Artificial Sequence
  Synthetic
gaagucagaaggcaaaaaa

SEQ ID NO: 99267 - RNA, 23 nt, Artificial Sequence
  Synthetic
gaaagaagucagaaggcaaaaaa

SEQ ID NO: 99268 - RNA, 24 nt, Artificial Sequence
  Synthetic
ggaaagaagucagaaggcaaaaaa

SEQ ID NO: 99269 - RNA, 18 nt, Artificial Sequence
  Synthetic
guauacccaaagacaaaa

SEQ ID NO: 99270 - RNA, 22 nt, Artificial Sequence
  Synthetic
guauacccaaagacaaaagaaa

SEQ ID NO: 99271 - RNA, 23 nt, Artificial Sequence
  Synthetic
  misc_feature (6)..(6): n is a, c, g, or u
  misc_feature (9)..(9): n is a, c, g, or u
gcacanccnagcagccauggaaa

SEQ ID NO: 99272 - RNA, 18 nt, Artificial Sequence
  Synthetic
guccagaagaaccaacaa

SEQ ID NO: 99273 - RNA, 20 nt, Artificial Sequence
  Synthetic
guauuuccgagagaggacaa

SEQ ID NO: 99274 - RNA, 21 nt, Artificial Sequence
  Synthetic
  misc_feature (17)..(17): n is a, c, g, or u
gaccugaccguugccgngcaa

SEQ ID NO: 99275 - RNA, 20 nt, Artificial Sequence
  Synthetic
guagcucuuguucccaagaa

SEQ ID NO: 99276 - RNA, 23 nt, Artificial Sequence
  Synthetic
gcuguagcucuuguucccaagaa

SEQ ID NO: 99277 - RNA, 18 nt, Artificial Sequence
  Synthetic
  misc_feature (5)..(5): n is a, c, g, or u
gaucncgaauagaaggaa

SEQ ID NO: 99278 - RNA, 20 nt, Artificial Sequence
  Synthetic
  misc_feature (7)..(7): n is a, c, g, or u
gagaucncgaauagaaggaa

SEQ ID NO: 99279 - RNA, 19 nt, Artificial Sequence
  Synthetic
gcagcaggaugaagaggaa

SEQ ID NO: 99280 - RNA, 24 nt, Artificial Sequence
  Synthetic
gcauagcagcaggaugaagaggaa

SEQ ID NO: 99281 - RNA, 18 nt, Artificial Sequence
  Synthetic
  misc_feature (2)..(2): n is a, c, g, or u
gngaggcaguagucggaa

SEQ ID NO: 99282 - RNA, 19 nt, Artificial Sequence
  Synthetic
  misc_feature (3)..(3): n is a, c, g, or u
ggngaggcaguagucggaa

SEQ ID NO: 99283 - RNA, 20 nt, Artificial Sequence
  Synthetic
  misc_feature (4)..(4): n is a, c, g, or u
gggngaggcaguagucggaa

SEQ ID NO: 99284 - RNA, 23 nt, Artificial Sequence
  Synthetic
  misc_feature (10)..(10): n is a, c, g, or u
gauuaacugnauguucaggauaa

SEQ ID NO: 99285 - RNA, 22 nt, Artificial Sequence
  Synthetic
gauucaucaacucaccccaaca

SEQ ID NO: 99286 - RNA, 19 nt, Artificial Sequence
  Synthetic
gaacaguaggacaugaaca

SEQ ID NO: 99287 - RNA, 23 nt, Artificial Sequence
  Synthetic
guuucucuuccaaaaguaagaca

SEQ ID NO: 99288 - RNA, 18 nt, Artificial Sequence
  Synthetic
  misc_feature (4)..(4): n is a, c, g, or u
  misc_feature (7)..(7): n is a, c, g, or u
gccnaungccaagcccca

SEQ ID NO: 99289 - RNA, 19 nt, Artificial Sequence
  Synthetic
  misc_feature (5)..(5): n is a, c, g, or u
  misc_feature (8)..(8): n is a, c, g, or u
ggccnaungccaagcccca

SEQ ID NO: 99290 - RNA, 22 nt, Artificial Sequence
  Synthetic
  misc_feature (8)..(8): n is a, c, g, or u
  misc_feature (11)..(11): n is a, c, g, or u
gauggccnaungccaagcccca

SEQ ID NO: 99291 - RNA, 18 nt, Artificial Sequence
  Synthetic
gaucgggaaagaauccca

SEQ ID NO: 99292 - RNA, 20 nt, Artificial Sequence
  Synthetic
gugaucgggaaagaauccca

SEQ ID NO: 99293 - RNA, 19 nt, Artificial Sequence
  Synthetic
  misc_feature (9)..(9): n is a, c, g, or u
  misc_feature (12)..(12): n is a, c, g, or u
gcuccgaangcngggucca

SEQ ID NO: 99294 - RNA, 20 nt, Artificial Sequence
  Synthetic
  misc_feature (10)..(10): n is a, c, g, or u
  misc_feature (13)..(13): n is a, c, g, or u
ggcuccgaangcngggucca

SEQ ID NO: 99295 - RNA, 18 nt, Artificial Sequence
  Synthetic
guugauaagauaggggca

SEQ ID NO: 99296 - RNA, 20 nt, Artificial Sequence
  Synthetic
guguugauaagauaggggca

SEQ ID NO: 99297 - RNA, 23 nt, Artificial Sequence
  Synthetic
gaaguguugauaagauaggggca

SEQ ID NO: 99298 - RNA, 24 nt, Artificial Sequence
  Synthetic
ggaaguguugauaagauaggggca

SEQ ID NO: 99299 - RNA, 20 nt, Artificial Sequence
  Synthetic
gaccuucgucugcgaggcga

SEQ ID NO: 99300 - RNA, 20 nt, Artificial Sequence
  Synthetic
gcaggguccccaguccucga

SEQ ID NO: 99301 - RNA, 18 nt, Artificial Sequence
  Synthetic
  misc_feature (5)..(5): n is a, c, g, or u
gagcngaggcggugucga

SEQ ID NO: 99302 - RNA, 24 nt, Artificial Sequence
  Synthetic
  misc_feature (11)..(11): n is a, c, g, or u
gauacagagcngaggcggugucga

SEQ ID NO: 99303 - RNA, 20 nt, Artificial Sequence
  Synthetic
  misc_feature (18)..(18): n is a, c, g, or u
gccucccgauacagagcnga

SEQ ID NO: 99304 - RNA, 21 nt, Artificial Sequence
  Synthetic
  misc_feature (19)..(19): n is a, c, g, or u
ggccucccgauacagagcnga

SEQ ID NO: 99305 - RNA, 18 nt, Artificial Sequence
  Synthetic
  misc_feature (16)..(16): n is a, c, g, or u
gauugacgauaugggnga

SEQ ID NO: 99306 - RNA, 21 nt, Artificial Sequence
  Synthetic
  misc_feature (19)..(19): n is a, c, g, or u
gaagauugacgauaugggnga

SEQ ID NO: 99307 - RNA, 23 nt, Artificial Sequence
  Synthetic
  misc_feature (21)..(21): n is a, c, g, or u
gagaagauugacgauaugggnga

SEQ ID NO: 99308 - RNA, 21 nt, Artificial Sequence
  Synthetic
  misc_feature (19)..(19): n is a, c, g, or u
guaaauaaugccuaguuunga

SEQ ID NO: 99309 - RNA, 24 nt, Artificial Sequence
  Synthetic
  misc_feature (19)..(19): n is a, c, g, or u
gaaucuugcgaaagcccangauga

SEQ ID NO: 99310 - RNA, 19 nt, Artificial Sequence
  Synthetic
gaugauuaggcagagguga

SEQ ID NO: 99311 - RNA, 20 nt, Artificial Sequence
  Synthetic
guaguuuccggaaguguuga

SEQ ID NO: 99312 - RNA, 21 nt, Artificial Sequence
  Synthetic
  misc_feature (7)..(7): n is a, c, g, or u
  misc_feature (10)..(10): n is a, c, g, or u
gccuuunucnaagggcaaaua

SEQ ID NO: 99313 - RNA, 20 nt, Artificial Sequence
  Synthetic
gauagaaccuagcaggcaua

SEQ ID NO: 99314 - RNA, 19 nt, Artificial Sequence
  Synthetic
guguaguuucucucuuaua

SEQ ID NO: 99315 - RNA, 19 nt, Artificial Sequence
  Synthetic
gcauggucccgugcuggua

SEQ ID NO: 99316 - RNA, 19 nt, Artificial Sequence
  Synthetic
gccuuccacagaguaugua

SEQ ID NO: 99317 - RNA, 20 nt, Artificial Sequence
  Synthetic
  misc_feature (3)..(3): n is a, c, g, or u
gcnaauuuuggccaggacac

SEQ ID NO: 99318 - RNA, 24 nt, Artificial Sequence
  Synthetic
  misc_feature (7)..(7): n is a, c, g, or u
gacugcnaauuuuggccaggacac

SEQ ID NO: 99319 - RNA, 20 nt, Artificial Sequence
  Synthetic
gacaggaaaugugaaaccac

SEQ ID NO: 99320 - RNA, 24 nt, Artificial Sequence
  Synthetic
guaagacaggaaaugugaaaccac

SEQ ID NO: 99321 - RNA, 22 nt, Artificial Sequence
  Synthetic
  misc_feature (2)..(2): n is a, c, g, or u
gnucuuccaaauuacuucccac

SEQ ID NO: 99322 - RNA, 23 nt, Artificial Sequence
  Synthetic
  misc_feature (3)..(3): n is a, c, g, or u
ggnucuuccaaauuacuucccac

SEQ ID NO: 99323 - RNA, 18 nt, Artificial Sequence
  Synthetic
gaucggcagaggagccac

SEQ ID NO: 99324 - RNA, 19 nt, Artificial Sequence
  Synthetic
ggaucggcagaggagccac

SEQ ID NO: 99325 - RNA, 18 nt, Artificial Sequence
  Synthetic
  misc_feature (8)..(8): n is a, c, g, or u
gaccuggngggcguucac

SEQ ID NO: 99326 - RNA, 18 nt, Artificial Sequence
  Synthetic
gacaaacgggcaacauac

SEQ ID NO: 99327 - RNA, 19 nt, Artificial Sequence
  Synthetic
ggacaaacgggcaacauac

SEQ ID NO: 99328 - RNA, 21 nt, Artificial Sequence
  Synthetic
gaggacaaacgggcaacauac

SEQ ID NO: 99329 - RNA, 24 nt, Artificial Sequence
  Synthetic
guagaggacaaacgggcaacauac

SEQ ID NO: 99330 - RNA, 20 nt, Artificial Sequence
  Synthetic
  misc_feature (3)..(3): n is a, c, g, or u
  misc_feature (14)..(14): n is a, c, g, or u
gcngcaaagcccanaagacc

SEQ ID NO: 99331 - RNA, 21 nt, Artificial Sequence
  Synthetic
  misc_feature (4)..(4): n is a, c, g, or u
  misc_feature (15)..(15): n is a, c, g, or u
ggcngcaaagcccanaagacc

SEQ ID NO: 99332 - RNA, 22 nt, Artificial Sequence
  Synthetic
  misc_feature (5)..(5): n is a, c, g, or u
  misc_feature (16)..(16): n is a, c, g, or u
gggcngcaaagcccanaagacc

SEQ ID NO: 99333 - RNA, 23 nt, Artificial Sequence
  Synthetic
  misc_feature (6)..(6): n is a, c, g, or u
  misc_feature (17)..(17): n is a, c, g, or u
ggggcngcaaagcccanaagacc

SEQ ID NO: 99334 - RNA, 18 nt, Artificial Sequence
  Synthetic
guaaagagaggugcgccc

SEQ ID NO: 99335 - RNA, 20 nt, Artificial Sequence
  Synthetic
gcguaaagagaggugcgccc

SEQ ID NO: 99336 - RNA, 18 nt, Artificial Sequence
  Synthetic
gcuguagcucuuguuccc

SEQ ID NO: 99337 - RNA, 20 nt, Artificial Sequence
  Synthetic
gauguuguacagacuuggcc

SEQ ID NO: 99338 - RNA, 20 nt, Artificial Sequence
  Synthetic
  misc_feature (14)..(14): n is a, c, g, or u
guugacauugcugngagucc

SEQ ID NO: 99339 - RNA, 23 nt, Artificial Sequence
  Synthetic
  misc_feature (14)..(14): n is a, c, g, or u
gaauacaagugcanuuuccgucc

SEQ ID NO: 99340 - RNA, 24 nt, Artificial Sequence
  Synthetic
  misc_feature (15)..(15): n is a, c, g, or u
ggaauacaagugcanuuuccgucc

SEQ ID NO: 99341 - RNA, 22 nt, Artificial Sequence
  Synthetic
  misc_feature (10)..(10): n is a, c, g, or u
gacauagcunacuacuaauucc

SEQ ID NO: 99342 - RNA, 20 nt, Artificial Sequence
  Synthetic
gauacuaacauugagauucc

SEQ ID NO: 99343 - RNA, 21 nt, Artificial Sequence
  Synthetic
ggauacuaacauugagauucc

SEQ ID NO: 99344 - RNA, 22 nt, Artificial Sequence
  Synthetic
gggauacuaacauugagauucc

SEQ ID NO: 99345 - RNA, 20 nt, Artificial Sequence
  Synthetic
gucuaacaacaguaguuucc

SEQ ID NO: 99346 - RNA, 19 nt, Artificial Sequence
  Synthetic
gaacaugagaugauuaggc

SEQ ID NO: 99347 - RNA, 24 nt, Artificial Sequence
  Synthetic
gacaugaacaugagaugauuaggc

SEQ ID NO: 99348 - RNA, 18 nt, Artificial Sequence
  Synthetic
  misc_feature (6)..(6): n is a, c, g, or u
gguggngugaacccuggc

SEQ ID NO: 99349 - RNA, 20 nt, Artificial Sequence
  Synthetic
  misc_feature (8)..(8): n is a, c, g, or u
gugguggngugaacccuggc

SEQ ID NO: 99350 - RNA, 18 nt, Artificial Sequence
  Synthetic
ggcggugucgaggagauc

SEQ ID NO: 99351 - RNA, 20 nt, Artificial Sequence
  Synthetic
gaggcggugucgaggagauc

SEQ ID NO: 99352 - RNA, 24 nt, Artificial Sequence
  Synthetic
  misc_feature (2)..(2): n is a, c, g, or u
  misc_feature (10)..(10): n is a, c, g, or u
gnucuccaunuucggugcaggguc

SEQ ID NO: 99353 - RNA, 23 nt, Artificial Sequence
  Synthetic
gcaaaacaagcugcuaggaguuc

SEQ ID NO: 99354 - RNA, 19 nt, Artificial Sequence
  Synthetic
guacaguagaagaauaaag

SEQ ID NO: 99355 - RNA, 20 nt, Artificial Sequence
  Synthetic
gguacaguagaagaauaaag

SEQ ID NO: 99356 - RNA, 24 nt, Artificial Sequence
  Synthetic
gacagguacaguagaagaauaaag

SEQ ID NO: 99357 - RNA, 21 nt, Artificial Sequence
  Synthetic
  misc_feature (9)..(9): n is a, c, g, or u
guuugccanucaggauuaaag

SEQ ID NO: 99358 - RNA, 23 nt, Artificial Sequence
  Synthetic
  misc_feature (11)..(11): n is a, c, g, or u
gaguuugccanucaggauuaaag

SEQ ID NO: 99359 - RNA, 24 nt, Artificial Sequence
  Synthetic
  misc_feature (12)..(12): n is a, c, g, or u
ggaguuugccanucaggauuaaag

SEQ ID NO: 99360 - RNA, 21 nt, Artificial Sequence
  Synthetic
gucuuugaaguaugccucaag

SEQ ID NO: 99361 - RNA, 19 nt, Artificial Sequence
  Synthetic
gcauggugcuggugaacag

SEQ ID NO: 99362 - RNA, 19 nt, Artificial Sequence
  Synthetic
guagaagaauaaagcccag

SEQ ID NO: 99363 - RNA, 18 nt, Artificial Sequence
  Synthetic
gaagaugaggcauagcag

SEQ ID NO: 99364 - RNA, 18 nt, Artificial Sequence
  Synthetic
  misc_feature (10)..(10): n is a, c, g, or u
gauuaacugnauguucag

SEQ ID NO: 99365 - RNA, 23 nt, Artificial Sequence
  Synthetic
  misc_feature (15)..(15): n is a, c, g, or u
guaaugauuaacugnauguucag

SEQ ID NO: 99366 - RNA, 20 nt, Artificial Sequence
  Synthetic
  misc_feature (6)..(6): n is a, c, g, or u
gacaanuuggaggacaagag

SEQ ID NO: 99367 - RNA, 21 nt, Artificial Sequence
  Synthetic
  misc_feature (7)..(7): n is a, c, g, or u
ggacaanuuggaggacaagag

SEQ ID NO: 99368 - RNA, 18 nt, Artificial Sequence
  Synthetic
  misc_feature (2)..(2): n is a, c, g, or u
gncccaaacggccccgag

SEQ ID NO: 99369 - RNA, 20 nt, Artificial Sequence
  Synthetic
  misc_feature (4)..(4): n is a, c, g, or u
gagncccaaacggccccgag

SEQ ID NO: 99370 - RNA, 20 nt, Artificial Sequence
  Synthetic
gcucccccuagaaaauugag

SEQ ID NO: 99371 - RNA, 22 nt, Artificial Sequence
  Synthetic
gugcucccccuagaaaauugag

SEQ ID NO: 99372 - RNA, 23 nt, Artificial Sequence
  Synthetic
ggugcucccccuagaaaauugag

SEQ ID NO: 99373 - RNA, 24 nt, Artificial Sequence
  Synthetic
gggugcucccccuagaaaauugag

SEQ ID NO: 99374 - RNA, 22 nt, Artificial Sequence
  Synthetic
  misc_feature (18)..(18): n is a, c, g, or u
gcuccaccccaaaagacngccg

SEQ ID NO: 99375 - RNA, 23 nt, Artificial Sequence
  Synthetic
  misc_feature (19)..(19): n is a, c, g, or u
ggcuccaccccaaaagacngccg

SEQ ID NO: 99376 - RNA, 24 nt, Artificial Sequence
  Synthetic
  misc_feature (20)..(20): n is a, c, g, or u
gggcuccaccccaaaagacngccg

SEQ ID NO: 99377 - RNA, 19 nt, Artificial Sequence
  Synthetic
gcugucuuccugacugccg

SEQ ID NO: 99378 - RNA, 20 nt, Artificial Sequence
  Synthetic
ggcugucuuccugacugccg

SEQ ID NO: 99379 - RNA, 22 nt, Artificial Sequence
  Synthetic
  misc_feature (19)..(19): n is a, c, g, or u
gaagcgaagugcacacggnccg

SEQ ID NO: 99380 - RNA, 24 nt, Artificial Sequence
  Synthetic
  misc_feature (21)..(21): n is a, c, g, or u
gugaagcgaagugcacacggnccg

SEQ ID NO: 99381 - RNA, 22 nt, Artificial Sequence
  Synthetic
  misc_feature (16)..(16): n is a, c, g, or u
  misc_feature (19)..(19): n is a, c, g, or u
gacaacagaguugucngunccg

SEQ ID NO: 99382 - RNA, 23 nt, Artificial Sequence
  Synthetic
  misc_feature (17)..(17): n is a, c, g, or u
  misc_feature (20)..(20): n is a, c, g, or u
ggacaacagaguugucngunccg

SEQ ID NO: 99383 - RNA, 21 nt, Artificial Sequence
  Synthetic
  misc_feature (14)..(14): n is a, c, g, or u
  misc_feature (17)..(17): n is a, c, g, or u
guuuaaugccuuunucnaagg

SEQ ID NO: 99384 - RNA, 22 nt, Artificial Sequence
  Synthetic
  misc_feature (15)..(15): n is a, c, g, or u
  misc_feature (18)..(18): n is a, c, g, or u
gguuuaaugccuuunucnaagg

SEQ ID NO: 99385 - RNA, 22 nt, Artificial Sequence
  Synthetic
  misc_feature (5)..(5): n is a, c, g, or u
gccanucaggauuaaagacagg

SEQ ID NO: 99386 - RNA, 20 nt, Artificial Sequence
  Synthetic
  misc_feature (11)..(11): n is a, c, g, or u
  misc_feature (13)..(13): n is a, c, g, or u
gaacggcagangnagaaggg

SEQ ID NO: 99387 - RNA, 21 nt, Artificial Sequence
  Synthetic
  misc_feature (12)..(12): n is a, c, g, or u
  misc_feature (14)..(14): n is a, c, g, or u
ggaacggcagangnagaaggg

SEQ ID NO: 99388 - RNA, 24 nt, Artificial Sequence
  Synthetic
  misc_feature (15)..(15): n is a, c, g, or u
  misc_feature (17)..(17): n is a, c, g, or u
gccggaacggcagangnagaaggg

SEQ ID NO: 99389 - RNA, 20 nt, Artificial Sequence
  Synthetic
  misc_feature (2)..(2): n is a, c, g, or u
  misc_feature (18)..(18): n is a, c, g, or u
gnauguucaggauaauangg

SEQ ID NO: 99390 - RNA, 20 nt, Artificial Sequence
  Synthetic
  misc_feature (18)..(18): n is a, c, g, or u
gcuccaaauucuuuauangg

SEQ ID NO: 99391 - RNA, 23 nt, Artificial Sequence
  Synthetic
  misc_feature (21)..(21): n is a, c, g, or u
gaagcuccaaauucuuuauangg

SEQ ID NO: 99392 - RNA, 19 nt, Artificial Sequence
  Synthetic
gacugucucuuagaggugg

SEQ ID NO: 99393 - RNA, 18 nt, Artificial Sequence
  Synthetic
  misc_feature (3)..(3): n is a, c, g, or u
ggnucuagcagagcuugg

SEQ ID NO: 99394 - RNA, 19 nt, Artificial Sequence
  Synthetic
  misc_feature (4)..(4): n is a, c, g, or u
gggnucuagcagagcuugg

SEQ ID NO: 99395 - RNA, 20 nt, Artificial Sequence
  Synthetic
  misc_feature (7)..(7): n is a, c, g, or u
  misc_feature (19)..(19): n is a, c, g, or u
guuuganuuggcuccgaang

SEQ ID NO: 99396 - RNA, 24 nt, Artificial Sequence
  Synthetic
  misc_feature (11)..(11): n is a, c, g, or u
  misc_feature (23)..(23): n is a, c, g, or u
gauuguuuganuuggcuccgaang

SEQ ID NO: 99397 - RNA, 22 nt, Artificial Sequence
  Synthetic
  misc_feature (11)..(11): n is a, c, g, or u
  misc_feature (14)..(14): n is a, c, g, or u
  misc_feature (16)..(16): n is a, c, g, or u
  misc_feature (20)..(21): n is a, c, g, or u
gaaaacauugnuunanuuunng

SEQ ID NO: 99398 - RNA, 21 nt, Artificial Sequence
  Synthetic
  misc_feature (14)..(14): n is a, c, g, or u
gaauagcuugccunagugcug

SEQ ID NO: 99399 - RNA, 18 nt, Artificial Sequence
  Synthetic
gugcuguauggugaggug

SEQ ID NO: 99400 - RNA, 24 nt, Artificial Sequence
  Synthetic
  misc_feature (5)..(5): n is a, c, g, or u
gccunagugcuguauggugaggug

SEQ ID NO: 99401 - RNA, 19 nt, Artificial Sequence
  Synthetic
  misc_feature (4)..(4): n is a, c, g, or u
  misc_feature (12)..(12): n is a, c, g, or u
gugnucuccaunuucggug

SEQ ID NO: 99402 - RNA, 22 nt, Artificial Sequence
  Synthetic
  misc_feature (3)..(3): n is a, c, g, or u
  misc_feature (7)..(7): n is a, c, g, or u
  misc_feature (15)..(15): n is a, c, g, or u
gungugnucuccaunuucggug

SEQ ID NO: 99403 - RNA, 18 nt, Artificial Sequence
  Synthetic
gaggacaagagguuggug

SEQ ID NO: 99404 - RNA, 19 nt, Artificial Sequence
  Synthetic
ggaggacaagagguuggug

SEQ ID NO: 99405 - RNA, 18 nt, Artificial Sequence
  Synthetic
gcacagcuuggaggcuug

SEQ ID NO: 99406 - RNA, 19 nt, Artificial Sequence
  Synthetic
ggcacagcuuggaggcuug

SEQ ID NO: 99407 - RNA, 18 nt, Artificial Sequence
  Synthetic
  misc_feature (4)..(4): n is a, c, g, or u
gganucgugcaggucuug

SEQ ID NO: 99408 - RNA, 21 nt, Artificial Sequence
  Synthetic
  misc_feature (7)..(7): n is a, c, g, or u
gcagganucgugcaggucuug

SEQ ID NO: 99409 - RNA, 23 nt, Artificial Sequence
  Synthetic
  misc_feature (9)..(9): n is a, c, g, or u
gagcagganucgugcaggucuug

SEQ ID NO: 99410 - RNA, 18 nt, Artificial Sequence
  Synthetic
gcagaggugaaaaaguug

SEQ ID NO: 99411 - RNA, 19 nt, Artificial Sequence
  Synthetic
ggcagaggugaaaaaguug

SEQ ID NO: 99412 - RNA, 24 nt, Artificial Sequence
  Synthetic
gauuaggcagaggugaaaaaguug

SEQ ID NO: 99413 - RNA, 24 nt, Artificial Sequence
  Synthetic
  misc_feature (6)..(6): n is a, c, g, or u
gacaanuuggaggacaagagguug

SEQ ID NO: 99414 - RNA, 19 nt, Artificial Sequence
  Synthetic
  misc_feature (19)..(19): n is a, c, g, or u
gaaucuugcgaaagcccan

SEQ ID NO: 99415 - RNA, 20 nt, Artificial Sequence
  Synthetic
  misc_feature (20)..(20): n is a, c, g, or u
ggaaucuugcgaaagcccan

SEQ ID NO: 99416 - RNA, 23 nt, Artificial Sequence
  Synthetic
  misc_feature (21)..(21): n is a, c, g, or u
  misc_feature (23)..(23): n is a, c, g, or u
gcauuugguggucuguaagcngn

SEQ ID NO: 99417 - RNA, 24 nt, Artificial Sequence
  Synthetic
  misc_feature (22)..(22): n is a, c, g, or u
  misc_feature (24)..(24): n is a, c, g, or u
ggcauuugguggucuguaagcngn

SEQ ID NO: 99418 - RNA, 18 nt, Artificial Sequence
  Synthetic
  misc_feature (6)..(6): n is a, c, g, or u
  misc_feature (10)..(10): n is a, c, g, or u
  misc_feature (18)..(18): n is a, c, g, or u
gaugungugnucuccaun

SEQ ID NO: 99419 - RNA, 20 nt, Artificial Sequence
  Synthetic
guugggguugaagucccaau

SEQ ID NO: 99420 - RNA, 19 nt, Artificial Sequence
  Synthetic
gagcagggguccuaggaau

SEQ ID NO: 99421 - RNA, 23 nt, Artificial Sequence
  Synthetic
  misc_feature (6)..(6): n is a, c, g, or u
gcccangaugaugggaugggaau

SEQ ID NO: 99422 - RNA, 22 nt, Artificial Sequence
  Synthetic
  misc_feature (19)..(19): n is a, c, g, or u
gaaccuagcaggcauaaunaau

SEQ ID NO: 99423 - RNA, 20 nt, Artificial Sequence
  Synthetic
gacaaaagaaaauugguaau

SEQ ID NO: 99424 - RNA, 18 nt, Artificial Sequence
  Synthetic
gcaacaagagggaaacau

SEQ ID NO: 99425 - RNA, 23 nt, Artificial Sequence
  Synthetic
guacagcaacaagagggaaacau

SEQ ID NO: 99426 - RNA, 19 nt, Artificial Sequence
  Synthetic
guccaagggauacuaacau

SEQ ID NO: 99427 - RNA, 19 nt, Artificial Sequence
  Synthetic
gacugaggcccacucccau

SEQ ID NO: 99428 - RNA, 20 nt, Artificial Sequence
  Synthetic
ggacugaggcccacucccau

SEQ ID NO: 99429 - RNA, 21 nt, Artificial Sequence
  Synthetic
gucucuuagagguggagagau

SEQ ID NO: 99430 - RNA, 21 nt, Artificial Sequence
  Synthetic
  misc_feature (10)..(10): n is a, c, g, or u
gaaagcccangaugaugggau

SEQ ID NO: 99431 - RNA, 23 nt, Artificial Sequence
  Synthetic
  misc_feature (12)..(12): n is a, c, g, or u
gcgaaagcccangaugaugggau

SEQ ID NO: 99432 - RNA, 19 nt, Artificial Sequence
  Synthetic
gaagcuccaaauucuuuau

SEQ ID NO: 99433 - RNA, 19 nt, Artificial Sequence
  Synthetic
  misc_feature (2)..(2): n is a, c, g, or u
  misc_feature (5)..(5): n is a, c, g, or u
  misc_feature (8)..(8): n is a, c, g, or u
gnggnaanguaccccaacu

SEQ ID NO: 99434 - RNA, 22 nt, Artificial Sequence
  Synthetic
  misc_feature (9)..(9): n is a, c, g, or u
  misc_feature (12)..(12): n is a, c, g, or u
gcuccgaangcnggguccaacu

SEQ ID NO: 99435 - RNA, 23 nt, Artificial Sequence
  Synthetic
  misc_feature (10)..(10): n is a, c, g, or u
  misc_feature (13)..(13): n is a, c, g, or u
ggcuccgaangcnggguccaacu

SEQ ID NO: 99436 - RNA, 18 nt, Artificial Sequence
  Synthetic
gauuggagguuggggacu

SEQ ID NO: 99437 - RNA, 20 nt, Artificial Sequence
  Synthetic
gugauuggagguuggggacu

SEQ ID NO: 99438 - RNA, 22 nt, Artificial Sequence
  Synthetic
gagugauuggagguuggggacu

SEQ ID NO: 99439 - RNA, 24 nt, Artificial Sequence
  Synthetic
gugagugauuggagguuggggacu

SEQ ID NO: 99440 - RNA, 19 nt, Artificial Sequence
  Synthetic
guaggcugucuuccugacu

SEQ ID NO: 99441 - RNA, 21 nt, Artificial Sequence
  Synthetic
gaguaggcugucuuccugacu

SEQ ID NO: 99442 - RNA, 22 nt, Artificial Sequence
  Synthetic
ggaguaggcugucuuccugacu

SEQ ID NO: 99443 - RNA, 23 nt, Artificial Sequence
  Synthetic
gggaguaggcugucuuccugacu

SEQ ID NO: 99444 - RNA, 22 nt, Artificial Sequence
  Synthetic
gaccaauuuaugccuacagccu

SEQ ID NO: 99445 - RNA, 19 nt, Artificial Sequence
  Synthetic
gucuuccacugcauggccu

SEQ ID NO: 99446 - RNA, 19 nt, Artificial Sequence
  Synthetic
gcugguaguugauguuccu

SEQ ID NO: 99447 - RNA, 19 nt, Artificial Sequence
  Synthetic
gaguaacuccacagaagcu

SEQ ID NO: 99448 - RNA, 21 nt, Artificial Sequence
  Synthetic
gagaguaacuccacagaagcu

SEQ ID NO: 99449 - RNA, 19 nt, Artificial Sequence
  Synthetic
gcgagcaaaacaagcugcu

SEQ ID NO: 99450 - RNA, 24 nt, Artificial Sequence
  Synthetic
  misc_feature (19)..(19): n is a, c, g, or u
guaaauaaugccuaguuungaagu

SEQ ID NO: 99451 - RNA, 21 nt, Artificial Sequence
  Synthetic
gauccuuguugggguugaagu

SEQ ID NO: 99452 - RNA, 24 nt, Artificial Sequence
  Synthetic
  misc_feature (4)..(4): n is a, c, g, or u
  misc_feature (7)..(7): n is a, c, g, or u
  misc_feature (19)..(19): n is a, c, g, or u
gccnaungccaagccccanccagu

SEQ ID NO: 99453 - RNA, 19 nt, Artificial Sequence
  Synthetic
  misc_feature (11)..(11): n is a, c, g, or u
  misc_feature (13)..(13): n is a, c, g, or u
gucuguaagcngnaggagu

SEQ ID NO: 99454 - RNA, 20 nt, Artificial Sequence
  Synthetic
  misc_feature (12)..(12): n is a, c, g, or u
  misc_feature (14)..(14): n is a, c, g, or u
ggucuguaagcngnaggagu

SEQ ID NO: 99455 - RNA, 22 nt, Artificial Sequence
  Synthetic
  misc_feature (14)..(14): n is a, c, g, or u
  misc_feature (16)..(16): n is a, c, g, or u
guggucuguaagcngnaggagu

SEQ ID NO: 99456 - RNA, 23 nt, Artificial Sequence
  Synthetic
  misc_feature (15)..(15): n is a, c, g, or u
  misc_feature (17)..(17): n is a, c, g, or u
gguggucuguaagcngnaggagu

SEQ ID NO: 99457 - RNA, 20 nt, Artificial Sequence
  Synthetic
  misc_feature (16)..(16): n is a, c, g, or u
guuccuugagcagganucgu

SEQ ID NO: 99458 - RNA, 21 nt, Artificial Sequence
  Synthetic
  misc_feature (17)..(17): n is a, c, g, or u
gguuccuugagcagganucgu

SEQ ID NO: 99459 - RNA, 23 nt, Artificial Sequence
  Synthetic
  misc_feature (19)..(19): n is a, c, g, or u
gagguuccuugagcagganucgu

SEQ ID NO: 99460 - RNA, 21 nt, Artificial Sequence
  Synthetic
  misc_feature (5)..(5): n is a, c, g, or u
gccgngcaacgggguaaaggu

SEQ ID NO: 99461 - RNA, 24 nt, Artificial Sequence
  Synthetic
  misc_feature (8)..(8): n is a, c, g, or u
guugccgngcaacgggguaaaggu

SEQ ID NO: 99462 - RNA, 18 nt, Artificial Sequence
  Synthetic
gcaaauauuugguaaggu

SEQ ID NO: 99463 - RNA, 19 nt, Artificial Sequence
  Synthetic
ggcaaauauuugguaaggu

SEQ ID NO: 99464 - RNA, 20 nt, Artificial Sequence
  Synthetic
gggcaaauauuugguaaggu

SEQ ID NO: 99465 - RNA, 18 nt, Artificial Sequence
  Synthetic
guuugguuuuauuagggu

SEQ ID NO: 99466 - RNA, 21 nt, Artificial Sequence
  Synthetic
  misc_feature (5)..(5): n is a, c, g, or u
gccanugauccuuguuggggu

SEQ ID NO: 99467 - RNA, 22 nt, Artificial Sequence
  Synthetic
  misc_feature (6)..(6): n is a, c, g, or u
ggccanugauccuuguuggggu

SEQ ID NO: 99468 - RNA, 18 nt, Artificial Sequence
  Synthetic
gugaaaaaguugcauggu

SEQ ID NO: 99469 - RNA, 19 nt, Artificial Sequence
  Synthetic
ggugaaaaaguugcauggu

SEQ ID NO: 99470 - RNA, 18 nt, Artificial Sequence
  Synthetic
  misc_feature (16)..(16): n is a, c, g, or u
gacaacagaguugucngu

SEQ ID NO: 99471 - RNA, 19 nt, Artificial Sequence
  Synthetic
  misc_feature (17)..(17): n is a, c, g, or u
ggacaacagaguugucngu

SEQ ID NO: 99472 - RNA, 21 nt, Artificial Sequence
  Synthetic
  misc_feature (19)..(19): n is a, c, g, or u
gaggacaacagaguugucngu

SEQ ID NO: 99473 - RNA, 23 nt, Artificial Sequence
  Synthetic
  misc_feature (21)..(21): n is a, c, g, or u
gagaggacaacagaguugucngu

SEQ ID NO: 99474 - RNA, 20 nt, Artificial Sequence
  Synthetic
  misc_feature (5)..(5): n is a, c, g, or u
gauunguccccaugccuugu

SEQ ID NO: 99475 - RNA, 24 nt, Artificial Sequence
  Synthetic
  misc_feature (9)..(9): n is a, c, g, or u
gaaagauunguccccaugccuugu

SEQ ID NO: 99476 - RNA, 22 nt, Artificial Sequence
  Synthetic
  misc_feature (4)..(4): n is a, c, g, or u
  misc_feature (12)..(12): n is a, c, g, or u
gccncuggccanugauccuugu

SEQ ID NO: 99477 - RNA, 21 nt, Artificial Sequence
  Synthetic
  misc_feature (5)..(5): n is a, c, g, or u
  misc_feature (20)..(20): n is a, c, g, or u
gaaangagggaguuugccanu

SEQ ID NO: 99478 - RNA, 22 nt, Artificial Sequence
  Synthetic
  misc_feature (6)..(6): n is a, c, g, or u
  misc_feature (21)..(21): n is a, c, g, or u
ggaaangagggaguuugccanu

SEQ ID NO: 99479 - RNA, 22 nt, Artificial Sequence
  Synthetic
  misc_feature (8)..(8): n is a, c, g, or u
  misc_feature (21)..(21): n is a, c, g, or u
guaauagngguaaaaaggganu

SEQ ID NO: 99480 - RNA, 23 nt, Artificial Sequence
  Synthetic
  misc_feature (9)..(9): n is a, c, g, or u
  misc_feature (22)..(22): n is a, c, g, or u
gguaauagngguaaaaaggganu

SEQ ID NO: 99481 - RNA, 24 nt, Artificial Sequence
  Synthetic
  misc_feature (11)..(11): n is a, c, g, or u
  misc_feature (17)..(17): n is a, c, g, or u
  misc_feature (23)..(23): n is a, c, g, or u
gacaucuauunauaaunuccucnu

SEQ ID NO: 99482 - RNA, 22 nt, Artificial Sequence
  Synthetic
gacaagagguuggugagugauu

SEQ ID NO: 99483 - RNA, 23 nt, Artificial Sequence
  Synthetic
ggacaagagguuggugagugauu

SEQ ID NO: 99484 - RNA, 24 nt, Artificial Sequence
  Synthetic
gcccacauauuguugacaucuauu

SEQ ID NO: 99485 - RNA, 24 nt, Artificial Sequence
  Synthetic
  misc_feature (14)..(14): n is a, c, g, or u
gacccacaauucunugacauacuu

SEQ ID NO: 99486 - RNA, 22 nt, Artificial Sequence
  Synthetic
gcccaguaaaguuucccaccuu

SEQ ID NO: 99487 - RNA, 21 nt, Artificial Sequence
  Synthetic
gacaaacgggcaacauaccuu

SEQ ID NO: 99488 - RNA, 22 nt, Artificial Sequence
  Synthetic
ggacaaacgggcaacauaccuu

SEQ ID NO: 99489 - RNA, 24 nt, Artificial Sequence
  Synthetic
gaggacaaacgggcaacauaccuu

SEQ ID NO: 99490 - RNA, 19 nt, Artificial Sequence
  Synthetic
guuuacacagaaaggccuu

SEQ ID NO: 99491 - RNA, 20 nt, Artificial Sequence
  Synthetic
  misc_feature (4)..(4): n is a, c, g, or u
  misc_feature (10)..(10): n is a, c, g, or u
  misc_feature (12)..(12): n is a, c, g, or u
gucnuuaaananacagucuu

SEQ ID NO: 99492 - RNA, 19 nt, Artificial Sequence
  Synthetic
  misc_feature (12)..(12): n is a, c, g, or u
gcaagaccuggngggcguu

SEQ ID NO: 99493 - RNA, 20 nt, Artificial Sequence
  Synthetic
  misc_feature (13)..(13): n is a, c, g, or u
ggcaagaccuggngggcguu

SEQ ID NO: 99494 - RNA, 20 nt, Artificial Sequence
  Synthetic
  misc_feature (15)..(15): n is a, c, g, or u
guaaugauuaacugnauguu

SEQ ID NO: 99495 - RNA, 23 nt, Artificial Sequence
  Synthetic
  misc_feature (18)..(18): n is a, c, g, or u
gaaguaaugauuaacugnauguu

SEQ ID NO: 99496 - RNA, 18 nt, Artificial Sequence
  Synthetic
  misc_feature (3)..(3): n is a, c, g, or u
  misc_feature (7)..(7): n is a, c, g, or u
ggngcuncuggcacuguu

SEQ ID NO: 99497 - RNA, 20 nt, Artificial Sequence
  Synthetic
  misc_feature (5)..(5): n is a, c, g, or u
  misc_feature (9)..(9): n is a, c, g, or u
gaggngcuncuggcacuguu

SEQ ID NO: 99498 - RNA, 21 nt, Artificial Sequence
  Synthetic
  misc_feature (6)..(6): n is a, c, g, or u
  misc_feature (10)..(10): n is a, c, g, or u
ggaggngcuncuggcacuguu

SEQ ID NO: 99499 - RNA, 23 nt, Artificial Sequence
  Synthetic
  misc_feature (8)..(8): n is a, c, g, or u
  misc_feature (12)..(12): n is a, c, g, or u
gaggaggngcuncuggcacuguu

SEQ ID NO: 99500 - RNA, 24 nt, Artificial Sequence
  Synthetic
  misc_feature (9)..(9): n is a, c, g, or u
  misc_feature (13)..(13): n is a, c, g, or u
ggaggaggngcuncuggcacuguu

SEQ ID NO: 99501 - RNA, 18 nt, Artificial Sequence
  Synthetic
gauaagauaggggcauuu

SEQ ID NO: 99502 - RNA, 18 nt, Artificial Sequence
  Synthetic
guaaauaaugccuaguuu

SEQ ID NO: 99503 - RNA, 22 nt, Artificial Sequence
  Synthetic
guauguaaauaaugccuaguuu

SEQ ID NO: 99504 - RNA, 24 nt, Artificial Sequence
  Synthetic
gaguauguaaauaaugccuaguuu

SEQ ID NO: 99505 - RNA, 24 nt, Artificial Sequence
  Synthetic
gcccucuuacaguuaaugaaaaaa

SEQ ID NO: 99506 - RNA, 20 nt, Artificial Sequence
  Synthetic
  misc_feature (6)..(6): n is a, c, g, or u
  misc_feature (14)..(14): n is a, c, g, or u
gaucanuggccagnggcaaa

SEQ ID NO: 99507 - RNA, 21 nt, Artificial Sequence
  Synthetic
  misc_feature (7)..(7): n is a, c, g, or u
  misc_feature (15)..(15): n is a, c, g, or u
ggaucanuggccagnggcaaa

SEQ ID NO: 99508 - RNA, 18 nt, Artificial Sequence
  Synthetic
  misc_feature (4)..(4): n is a, c, g, or u
  misc_feature (7)..(7): n is a, c, g, or u
gcunggnugugcugccaa

SEQ ID NO: 99509 - RNA, 21 nt, Artificial Sequence
  Synthetic
  misc_feature (7)..(7): n is a, c, g, or u
  misc_feature (10)..(10): n is a, c, g, or u
gcugcunggnugugcugccaa

SEQ ID NO: 99510 - RNA, 22 nt, Artificial Sequence
  Synthetic
  misc_feature (8)..(8): n is a, c, g, or u
  misc_feature (11)..(11): n is a, c, g, or u
ggcugcunggnugugcugccaa

SEQ ID NO: 99511 - RNA, 23 nt, Artificial Sequence
  Synthetic
  misc_feature (9)..(9): n is a, c, g, or u
  misc_feature (11)..(11): n is a, c, g, or u
gcacuccuncngcuuacagacca

SEQ ID NO: 99512 - RNA, 19 nt, Artificial Sequence
  Synthetic
gacagucauccucaggcca

SEQ ID NO: 99513 - RNA, 24 nt, Artificial Sequence
  Synthetic
  misc_feature (14)..(14): n is a, c, g, or u
guaauuuggaaganccagcaucca

SEQ ID NO: 99514 - RNA, 19 nt, Artificial Sequence
  Synthetic
gcagcuuguuuugcucgca

SEQ ID NO: 99515 - RNA, 18 nt, Artificial Sequence
  Synthetic
  misc_feature (3)..(3): n is a, c, g, or u
  misc_feature (15)..(15): n is a, c, g, or u
gcnuucggagccaanuca

SEQ ID NO: 99516 - RNA, 24 nt, Artificial Sequence
  Synthetic
  misc_feature (6)..(6): n is a, c, g, or u
  misc_feature (9)..(9): n is a, c, g, or u
  misc_feature (21)..(21): n is a, c, g, or u
gacccngcnuucggagccaanuca

SEQ ID NO: 99517 - RNA, 18 nt, Artificial Sequence
  Synthetic
  misc_feature (14)..(14): n is a, c, g, or u
gcuacucccuuaanuuca

SEQ ID NO: 99518 - RNA, 19 nt, Artificial Sequence
  Synthetic
  misc_feature (15)..(15): n is a, c, g, or u
ggcuacucccuuaanuuca

SEQ ID NO: 99519 - RNA, 20 nt, Artificial Sequence
  Synthetic
  misc_feature (16)..(16): n is a, c, g, or u
gggcuacucccuuaanuuca

SEQ ID NO: 99520 - RNA, 21 nt, Artificial Sequence
  Synthetic
  misc_feature (17)..(17): n is a, c, g, or u
ggggcuacucccuuaanuuca

SEQ ID NO: 99521 - RNA, 24 nt, Artificial Sequence
  Synthetic
  misc_feature (20)..(20): n is a, c, g, or u
guuggggcuacucccuuaanuuca

SEQ ID NO: 99522 - RNA, 19 nt, Artificial Sequence
  Synthetic
gaggaguugggggaggaga

SEQ ID NO: 99523 - RNA, 20 nt, Artificial Sequence
  Synthetic
ggaggaguugggggaggaga

SEQ ID NO: 99524 - RNA, 21 nt, Artificial Sequence
  Synthetic
gggaggaguugggggaggaga

SEQ ID NO: 99525 - RNA, 20 nt, Artificial Sequence
  Synthetic
  misc_feature (6)..(6): n is a, c, g, or u
gaaganccagcauccaggga

SEQ ID NO: 99526 - RNA, 21 nt, Artificial Sequence
  Synthetic
  misc_feature (7)..(7): n is a, c, g, or u
ggaaganccagcauccaggga

SEQ ID NO: 99527 - RNA, 22 nt, Artificial Sequence
  Synthetic
gaaucuggccaccuggguggga

SEQ ID NO: 99528 - RNA, 20 nt, Artificial Sequence
  Synthetic
gcuuucaguuauauggauga

SEQ ID NO: 99529 - RNA, 20 nt, Artificial Sequence
  Synthetic
gcuauucuguguugggguga

SEQ ID NO: 99530 - RNA, 22 nt, Artificial Sequence
  Synthetic
  misc_feature (14)..(15): n is a, c, g, or u
  misc_feature (19)..(19): n is a, c, g, or u
  misc_feature (21)..(21): n is a, c, g, or u
gaacauauuguacnnaaanuna

SEQ ID NO: 99531 - RNA, 21 nt, Artificial Sequence
  Synthetic
  misc_feature (17)..(17): n is a, c, g, or u
gcauggacauugacccnuaua

SEQ ID NO: 99532 - RNA, 22 nt, Artificial Sequence
  Synthetic
  misc_feature (18)..(18): n is a, c, g, or u
ggcauggacauugacccnuaua

SEQ ID NO: 99533 - RNA, 23 nt, Artificial Sequence
  Synthetic
  misc_feature (19)..(19): n is a, c, g, or u
gggcauggacauugacccnuaua

SEQ ID NO: 99534 - RNA, 19 nt, Artificial Sequence
  Synthetic
gagaaacuguucuugagua

SEQ ID NO: 99535 - RNA, 22 nt, Artificial Sequence
  Synthetic
gaagagaaacuguucuugagua

SEQ ID NO: 99536 - RNA, 23 nt, Artificial Sequence
  Synthetic
ggaagagaaacuguucuugagua

SEQ ID NO: 99537 - RNA, 18 nt, Artificial Sequence
  Synthetic
gguucuauccuaaccuua

SEQ ID NO: 99538 - RNA, 22 nt, Artificial Sequence
  Synthetic
gcuagguucuauccuaaccuua

SEQ ID NO: 99539 - RNA, 18 nt, Artificial Sequence
  Synthetic
  misc_feature (8)..(8): n is a, c, g, or u
gcuuugcngccccuuuua

SEQ ID NO: 99540 - RNA, 19 nt, Artificial Sequence
  Synthetic
  misc_feature (9)..(9): n is a, c, g, or u
ggcuuugcngccccuuuua

SEQ ID NO: 99541 - RNA, 20 nt, Artificial Sequence
  Synthetic
  misc_feature (10)..(10): n is a, c, g, or u
gggcuuugcngccccuuuua

SEQ ID NO: 99542 - RNA, 22 nt, Artificial Sequence
  Synthetic
  misc_feature (19)..(19): n is a, c, g, or u
gucuuuggguauacauuunaac

SEQ ID NO: 99543 - RNA, 18 nt, Artificial Sequence
  Synthetic
ggcucagggcauauugac

SEQ ID NO: 99544 - RNA, 19 nt, Artificial Sequence
  Synthetic
guugguucuucuggacuac

SEQ ID NO: 99545 - RNA, 23 nt, Artificial Sequence
  Synthetic
  misc_feature (10)..(10): n is a, c, g, or u
gccaaaauungcaguccccaacc

SEQ ID NO: 99546 - RNA, 24 nt, Artificial Sequence
  Synthetic
  misc_feature (11)..(11): n is a, c, g, or u
ggccaaaauungcaguccccaacc

SEQ ID NO: 99547 - RNA, 18 nt, Artificial Sequence
  Synthetic
  misc_feature (3)..(3): n is a, c, g, or u
gcnccuccuccugccucc

SEQ ID NO: 99548 - RNA, 21 nt, Artificial Sequence
  Synthetic
  misc_feature (2)..(2): n is a, c, g, or u
  misc_feature (6)..(6): n is a, c, g, or u
gnagcnccuccuccugccucc

SEQ ID NO: 99549 - RNA, 19 nt, Artificial Sequence
  Synthetic
  misc_feature (6)..(6): n is a, c, g, or u
guacunggaggcuguaggc

SEQ ID NO: 99550 - RNA, 18 nt, Artificial Sequence
  Synthetic
  misc_feature (4)..(4): n is a, c, g, or u
  misc_feature (9)..(9): n is a, c, g, or u
gagngggancauucgggc

SEQ ID NO: 99551 - RNA, 19 nt, Artificial Sequence
  Synthetic
  misc_feature (5)..(5): n is a, c, g, or u
  misc_feature (10)..(10): n is a, c, g, or u
ggagngggancauucgggc

SEQ ID NO: 99552 - RNA, 22 nt, Artificial Sequence
  Synthetic
  misc_feature (8)..(8): n is a, c, g, or u
  misc_feature (13)..(13): n is a, c, g, or u
guaggagngggancauucgggc

SEQ ID NO: 99553 - RNA, 23 nt, Artificial Sequence
  Synthetic
  misc_feature (9)..(9): n is a, c, g, or u
  misc_feature (14)..(14): n is a, c, g, or u
gguaggagngggancauucgggc

SEQ ID NO: 99554 - RNA, 19 nt, Artificial Sequence
  Synthetic
gauuccuaugggagugggc

SEQ ID NO: 99555 - RNA, 18 nt, Artificial Sequence
  Synthetic
gcacccacguguccuggc

SEQ ID NO: 99556 - RNA, 20 nt, Artificial Sequence
  Synthetic
gagcacccacguguccuggc

SEQ ID NO: 99557 - RNA, 23 nt, Artificial Sequence
  Synthetic
  misc_feature (8)..(8): n is a, c, g, or u
gccuauanuuuccugcugguggc

SEQ ID NO: 99558 - RNA, 24 nt, Artificial Sequence
  Synthetic
  misc_feature (9)..(9): n is a, c, g, or u
ggccuauanuuuccugcugguggc

SEQ ID NO: 99559 - RNA, 18 nt, Artificial Sequence
  Synthetic
  misc_feature (17)..(17): n is a, c, g, or u
gaggacucuuggacucnc

SEQ ID NO: 99560 - RNA, 21 nt, Artificial Sequence
  Synthetic
  misc_feature (13)..(13): n is a, c, g, or u
gacuacugccucncccauauc

SEQ ID NO: 99561 - RNA, 18 nt, Artificial Sequence
  Synthetic
gcagaagaucucaaucuc

SEQ ID NO: 99562 - RNA, 22 nt, Artificial Sequence
  Synthetic
gacaacucuguuguccucucuc

SEQ ID NO: 99563 - RNA, 19 nt, Artificial Sequence
  Synthetic
  misc_feature (3)..(3): n is a, c, g, or u
  misc_feature (9)..(9): n is a, c, g, or u
ganauuaunaauagauguc

SEQ ID NO: 99564 - RNA, 20 nt, Artificial Sequence
  Synthetic
  misc_feature (4)..(4): n is a, c, g, or u
  misc_feature (10)..(10): n is a, c, g, or u
gganauuaunaauagauguc

SEQ ID NO: 99565 - RNA, 22 nt, Artificial Sequence
  Synthetic
  misc_feature (6)..(6): n is a, c, g, or u
  misc_feature (12)..(12): n is a, c, g, or u
gagganauuaunaauagauguc

SEQ ID NO: 99566 - RNA, 21 nt, Artificial Sequence
  Synthetic
guuuacuagugccauuuguuc

SEQ ID NO: 99567 - RNA, 19 nt, Artificial Sequence
  Synthetic
gaugaugugguauuggggg

SEQ ID NO: 99568 - RNA, 20 nt, Artificial Sequence
  Synthetic
ggaugaugugguauuggggg

SEQ ID NO: 99569 - RNA, 18 nt, Artificial Sequence
  Synthetic
  misc_feature (3)..(3): n is a, c, g, or u
  misc_feature (5)..(5): n is a, c, g, or u
  misc_feature (11)..(11): n is a, c, g, or u
gununuuuaangacuggg

SEQ ID NO: 99570 - RNA, 22 nt, Artificial Sequence
  Synthetic
  misc_feature (7)..(7): n is a, c, g, or u
  misc_feature (9)..(9): n is a, c, g, or u
  misc_feature (15)..(15): n is a, c, g, or u
gacugununuuuaangacuggg

SEQ ID NO: 99571 - RNA, 20 nt, Artificial Sequence
  Synthetic
gcaagcuauucuguguuggg

SEQ ID NO: 99572 - RNA, 21 nt, Artificial Sequence
  Synthetic
ggcaagcuauucuguguuggg

SEQ ID NO: 99573 - RNA, 19 nt, Artificial Sequence
  Synthetic
gaacaagagcuacagcaug

SEQ ID NO: 99574 - RNA, 20 nt, Artificial Sequence
  Synthetic
ggaacaagagcuacagcaug

SEQ ID NO: 99575 - RNA, 20 nt, Artificial Sequence
  Synthetic
guuuggcuuucaguuauaug

SEQ ID NO: 99576 - RNA, 21 nt, Artificial Sequence
  Synthetic
  misc_feature (11)..(11): n is a, c, g, or u
gauuaaaauunauuaugccug

SEQ ID NO: 99577 - RNA, 23 nt, Artificial Sequence
  Synthetic
  misc_feature (13)..(13): n is a, c, g, or u
gagauuaaaauunauuaugccug

SEQ ID NO: 99578 - RNA, 24 nt, Artificial Sequence
  Synthetic
  misc_feature (14)..(14): n is a, c, g, or u
ggagauuaaaauunauuaugccug

SEQ ID NO: 99579 - RNA, 18 nt, Artificial Sequence
  Synthetic
gcaacuuuuucaccucug

SEQ ID NO: 99580 - RNA, 19 nt, Artificial Sequence
  Synthetic
gaaucuggccaccugggug

SEQ ID NO: 99581 - RNA, 23 nt, Artificial Sequence
  Synthetic
  misc_feature (3)..(3): n is a, c, g, or u
  misc_feature (21)..(21): n is a, c, g, or u
gcncggcaacggucaggucunug

SEQ ID NO: 99582 - RNA, 24 nt, Artificial Sequence
  Synthetic
gcuauucuguguuggggugaguug

SEQ ID NO: 99583 - RNA, 18 nt, Artificial Sequence
  Synthetic
guuuacuagugccauuug

SEQ ID NO: 99584 - RNA, 23 nt, Artificial Sequence
  Synthetic
gcucaguuuacuagugccauuug

SEQ ID NO: 99585 - RNA, 24 nt, Artificial Sequence
  Synthetic
ggcucaguuuacuagugccauuug

SEQ ID NO: 99586 - RNA, 21 nt, Artificial Sequence
  Synthetic
  misc_feature (9)..(9): n is a, c, g, or u
  misc_feature (21)..(21): n is a, c, g, or u
gccuaaaanucagacaacuan

SEQ ID NO: 99587 - RNA, 22 nt, Artificial Sequence
  Synthetic
  misc_feature (10)..(10): n is a, c, g, or u
  misc_feature (22)..(22): n is a, c, g, or u
ggccuaaaanucagacaacuan

SEQ ID NO: 99588 - RNA, 23 nt, Artificial Sequence
  Synthetic
  misc_feature (11)..(11): n is a, c, g, or u
  misc_feature (23)..(23): n is a, c, g, or u
gggccuaaaanucagacaacuan

SEQ ID NO: 99589 - RNA, 20 nt, Artificial Sequence
  Synthetic
  misc_feature (3)..(3): n is a, c, g, or u
  misc_feature (20)..(20): n is a, c, g, or u
ganaccaccgugaacgcccn

SEQ ID NO: 99590 - RNA, 21 nt, Artificial Sequence
  Synthetic
  misc_feature (4)..(4): n is a, c, g, or u
  misc_feature (21)..(21): n is a, c, g, or u
gganaccaccgugaacgcccn

SEQ ID NO: 99591 - RNA, 18 nt, Artificial Sequence
  Synthetic
  misc_feature (9)..(9): n is a, c, g, or u
ggagccaanucaaacaau

SEQ ID NO: 99592 - RNA, 24 nt, Artificial Sequence
  Synthetic
  misc_feature (3)..(3): n is a, c, g, or u
  misc_feature (15)..(15): n is a, c, g, or u
gcnuucggagccaanucaaacaau

SEQ ID NO: 99593 - RNA, 18 nt, Artificial Sequence
  Synthetic
  misc_feature (6)..(6): n is a, c, g, or u
guagunagcuaugucaau

SEQ ID NO: 99594 - RNA, 24 nt, Artificial Sequence
  Synthetic
  misc_feature (12)..(12): n is a, c, g, or u
gaauuaguagunagcuaugucaau

SEQ ID NO: 99595 - RNA, 18 nt, Artificial Sequence
  Synthetic
gaucucaaucucgggaau

SEQ ID NO: 99596 - RNA, 20 nt, Artificial Sequence
  Synthetic
  misc_feature (4)..(4): n is a, c, g, or u
  misc_feature (12)..(12): n is a, c, g, or u
  misc_feature (16)..(16): n is a, c, g, or u
gaanauggagancacnacau

SEQ ID NO: 99597 - RNA, 19 nt, Artificial Sequence
  Synthetic
guuaaugaaaaaaggagau

SEQ ID NO: 99598 - RNA, 18 nt, Artificial Sequence
  Synthetic
  misc_feature (12)..(12): n is a, c, g, or u
gaauuaguagunagcuau

SEQ ID NO: 99599 - RNA, 19 nt, Artificial Sequence
  Synthetic
  misc_feature (13)..(13): n is a, c, g, or u
ggaauuaguagunagcuau

SEQ ID NO: 99600 - RNA, 20 nt, Artificial Sequence
  Synthetic
  misc_feature (14)..(14): n is a, c, g, or u
gggaauuaguagunagcuau

SEQ ID NO: 99601 - RNA, 23 nt, Artificial Sequence
  Synthetic
  misc_feature (2)..(2): n is a, c, g, or u
  misc_feature (8)..(8): n is a, c, g, or u
  misc_feature (12)..(12): n is a, c, g, or u
gnaaacunccunuaaauagaccu

SEQ ID NO: 99602 - RNA, 24 nt, Artificial Sequence
  Synthetic
guuuuucuuguugacaagaauccu

SEQ ID NO: 99603 - RNA, 19 nt, Artificial Sequence
  Synthetic
  misc_feature (13)..(13): n is a, c, g, or u
gaggggccuauanuuuccu

SEQ ID NO: 99604 - RNA, 21 nt, Artificial Sequence
  Synthetic
  misc_feature (15)..(15): n is a, c, g, or u
gugaggggccuauanuuuccu

SEQ ID NO: 99605 - RNA, 23 nt, Artificial Sequence
  Synthetic
  misc_feature (17)..(17): n is a, c, g, or u
gagugaggggccuauanuuuccu

SEQ ID NO: 99606 - RNA, 19 nt, Artificial Sequence
  Synthetic
gaaccuuuguggcuccucu

SEQ ID NO: 99607 - RNA, 20 nt, Artificial Sequence
  Synthetic
ggaaccuuuguggcuccucu

SEQ ID NO: 99608 - RNA, 22 nt, Artificial Sequence
  Synthetic
guggaaccuuuguggcuccucu

SEQ ID NO: 99609 - RNA, 24 nt, Artificial Sequence
  Synthetic
gcguggaaccuuuguggcuccucu

SEQ ID NO: 99610 - RNA, 18 nt, Artificial Sequence
  Synthetic
ggauauguaauuggaagu

SEQ ID NO: 99611 - RNA, 19 nt, Artificial Sequence
  Synthetic
gggauauguaauuggaagu

SEQ ID NO: 99612 - RNA, 21 nt, Artificial Sequence
  Synthetic
guauuuggugucuuuuggagu

SEQ ID NO: 99613 - RNA, 23 nt, Artificial Sequence
  Synthetic
gaguauuuggugucuuuuggagu

SEQ ID NO: 99614 - RNA, 24 nt, Artificial Sequence
  Synthetic
  misc_feature (6)..(6): n is a, c, g, or u
gcacunaggcaagcuauucugugu

SEQ ID NO: 99615 - RNA, 19 nt, Artificial Sequence
  Synthetic
  misc_feature (13)..(13): n is a, c, g, or u
gaaaguaugucanagaauu

SEQ ID NO: 99616 - RNA, 20 nt, Artificial Sequence
  Synthetic
  misc_feature (14)..(14): n is a, c, g, or u
ggaaaguaugucanagaauu

SEQ ID NO: 99617 - RNA, 24 nt, Artificial Sequence
  Synthetic
  misc_feature (18)..(18): n is a, c, g, or u
gauuggaaaguaugucanagaauu

SEQ ID NO: 99618 - RNA, 20 nt, Artificial Sequence
  Synthetic
  misc_feature (3)..(3): n is a, c, g, or u
ganccagcauccagggaauu

SEQ ID NO: 99619 - RNA, 23 nt, Artificial Sequence
  Synthetic
  misc_feature (6)..(6): n is a, c, g, or u
gaaganccagcauccagggaauu

SEQ ID NO: 99620 - RNA, 24 nt, Artificial Sequence
  Synthetic
  misc_feature (7)..(7): n is a, c, g, or u
ggaaganccagcauccagggaauu

SEQ ID NO: 99621 - RNA, 21 nt, Artificial Sequence
  Synthetic
  misc_feature (3)..(3): n is a, c, g, or u
  misc_feature (16)..(16): n is a, c, g, or u
ganucccuuuuuaccncuauu

SEQ ID NO: 99622 - RNA, 18 nt, Artificial Sequence
  Synthetic
gacuucuuuccuucuauu

SEQ ID NO: 99623 - RNA, 18 nt, Artificial Sequence
  Synthetic
gcuaugccucaucuucuu

SEQ ID NO: 99624 - RNA, 18 nt, Artificial Sequence
  Synthetic
  misc_feature (6)..(6): n is a, c, g, or u
gggacnaaucuuucuguu

SEQ ID NO: 99625 - RNA, 19 nt, Artificial Sequence
  Synthetic
  misc_feature (7)..(7): n is a, c, g, or u
ggggacnaaucuuucuguu

SEQ ID NO: 99626 - RNA, 23 nt, Artificial Sequence
  Synthetic
  misc_feature (11)..(11): n is a, c, g, or u
gcauggggacnaaucuuucuguu

SEQ ID NO: 99627 - RNA, 24 nt, Artificial Sequence
  Synthetic
  misc_feature (12)..(12): n is a, c, g, or u
ggcauggggacnaaucuuucuguu

SEQ ID NO: 99628 - RNA, 23 nt, Artificial Sequence
  Synthetic
guucuugaguauuuggugucuuu

SEQ ID NO: 99629 - RNA, 19 nt, Artificial Sequence
  Synthetic
guuucuccuggcucaguuu

SEQ ID NO: 99630 - RNA, 18 nt, Artificial Sequence
  Synthetic
aagucagaaggcaaaaaa

SEQ ID NO: 99631 - RNA, 20 nt, Artificial Sequence
  Synthetic
agaagucagaaggcaaaaaa

SEQ ID NO: 99632 - RNA, 21 nt, Artificial Sequence
  Synthetic
aagaagucagaaggcaaaaaa

SEQ ID NO: 99633 - RNA, 22 nt, Artificial Sequence
  Synthetic
aaagaagucagaaggcaaaaaa

SEQ ID NO: 99634 - RNA, 19 nt, Artificial Sequence
  Synthetic
uguauacccaaagacaaaa

SEQ ID NO: 99635 - RNA, 20 nt, Artificial Sequence
  Synthetic
auguauacccaaagacaaaa

SEQ ID NO: 99636 - RNA, 21 nt, Artificial Sequence
  Synthetic
aauguauacccaaagacaaaa

SEQ ID NO: 99637 - RNA, 22 nt, Artificial Sequence
  Synthetic
aaauguauacccaaagacaaaa

SEQ ID NO: 99638 - RNA, 23 nt, Artificial Sequence
  Synthetic
  misc_feature (1)..(1): n is a, c, g, or u
naaauguauacccaaagacaaaa

SEQ ID NO: 99639 - RNA, 24 nt, Artificial Sequence
  Synthetic
  misc_feature (2)..(2): n is a, c, g, or u
unaaauguauacccaaagacaaaa

SEQ ID NO: 99640 - RNA, 18 nt, Artificial Sequence
  Synthetic
acccaaagacaaaagaaa

SEQ ID NO: 99641 - RNA, 19 nt, Artificial Sequence
  Synthetic
uacccaaagacaaaagaaa

SEQ ID NO: 99642 - RNA, 20 nt, Artificial Sequence
  Synthetic
auacccaaagacaaaagaaa

SEQ ID NO: 99643 - RNA, 21 nt, Artificial Sequence
  Synthetic
uauacccaaagacaaaagaaa

SEQ ID NO: 99644 - RNA, 23 nt, Artificial Sequence
  Synthetic
uguauacccaaagacaaaagaaa

SEQ ID NO: 99645 - RNA, 24 nt, Artificial Sequence
  Synthetic
auguauacccaaagacaaaagaaa

SEQ ID NO: 99646 - RNA, 18 nt, Artificial Sequence
  Synthetic
  misc_feature (1)..(1): n is a, c, g, or u
  misc_feature (4)..(4): n is a, c, g, or u
nccnagcagccauggaaa

SEQ ID NO: 99647 - RNA, 19 nt, Artificial Sequence
  Synthetic
  misc_feature (2)..(2): n is a, c, g, or u
  misc_feature (5)..(5): n is a, c, g, or u
anccnagcagccauggaaa

SEQ ID NO: 99648 - RNA, 20 nt, Artificial Sequence
  Synthetic
  misc_feature (3)..(3): n is a, c, g, or u
  misc_feature (6)..(6): n is a, c, g, or u
canccnagcagccauggaaa

SEQ ID NO: 99649 - RNA, 21 nt, Artificial Sequence
  Synthetic
  misc_feature (4)..(4): n is a, c, g, or u
  misc_feature (7)..(7): n is a, c, g, or u
acanccnagcagccauggaaa

SEQ ID NO: 99650 - RNA, 22 nt, Artificial Sequence
  Synthetic
  misc_feature (5)..(5): n is a, c, g, or u
  misc_feature (8)..(8): n is a, c, g, or u
cacanccnagcagccauggaaa

SEQ ID NO: 99651 - RNA, 24 nt, Artificial Sequence
  Synthetic
  misc_feature (7)..(7): n is a, c, g, or u
  misc_feature (10)..(10): n is a, c, g, or u
agcacanccnagcagccauggaaa

SEQ ID NO: 99652 - RNA, 19 nt, Artificial Sequence
  Synthetic
aguccagaagaaccaacaa

SEQ ID NO: 99653 - RNA, 20 nt, Artificial Sequence
  Synthetic
uaguccagaagaaccaacaa

SEQ ID NO: 99654 - RNA, 18 nt, Artificial Sequence
  Synthetic
auuuccgagagaggacaa

SEQ ID NO: 99655 - RNA, 19 nt, Artificial Sequence
  Synthetic
uauuuccgagagaggacaa

SEQ ID NO: 99656 - RNA, 18 nt, Artificial Sequence
  Synthetic
  misc_feature (14)..(14): n is a, c, g, or u
cugaccguugccgngcaa

SEQ ID NO: 99657 - RNA, 19 nt, Artificial Sequence
  Synthetic
  misc_feature (15)..(15): n is a, c, g, or u
ccugaccguugccgngcaa

SEQ ID NO: 99658 - RNA, 20 nt, Artificial Sequence
  Synthetic
  misc_feature (16)..(16): n is a, c, g, or u
accugaccguugccgngcaa

SEQ ID NO: 99659 - RNA, 22 nt, Artificial Sequence
  Synthetic
  misc_feature (18)..(18): n is a, c, g, or u
agaccugaccguugccgngcaa

SEQ ID NO: 99660 - RNA, 23 nt, Artificial Sequence
  Synthetic
  misc_feature (1)..(1): n is a, c, g, or u
  misc_feature (19)..(19): n is a, c, g, or u
nagaccugaccguugccgngcaa

SEQ ID NO: 99661 - RNA, 24 nt, Artificial Sequence
  Synthetic
  misc_feature (2)..(2): n is a, c, g, or u
  misc_feature (20)..(20): n is a, c, g, or u
anagaccugaccguugccgngcaa

SEQ ID NO: 99662 - RNA, 18 nt, Artificial Sequence
  Synthetic
agcucuuguucccaagaa

SEQ ID NO: 99663 - RNA, 19 nt, Artificial Sequence
  Synthetic
uagcucuuguucccaagaa

SEQ ID NO: 99664 - RNA, 21 nt, Artificial Sequence
  Synthetic
uguagcucuuguucccaagaa

SEQ ID NO: 99665 - RNA, 22 nt, Artificial Sequence
  Synthetic
cuguagcucuuguucccaagaa

SEQ ID NO: 99666 - RNA, 24 nt, Artificial Sequence
  Synthetic
ugcuguagcucuuguucccaagaa

SEQ ID NO: 99667 - RNA, 19 nt, Artificial Sequence
  Synthetic
  misc_feature (6)..(6): n is a, c, g, or u
agaucncgaauagaaggaa

SEQ ID NO: 99668 - RNA, 18 nt, Artificial Sequence
  Synthetic
cagcaggaugaagaggaa

SEQ ID NO: 99669 - RNA, 20 nt, Artificial Sequence
  Synthetic
agcagcaggaugaagaggaa

SEQ ID NO: 99670 - RNA, 21 nt, Artificial Sequence
  Synthetic
uagcagcaggaugaagaggaa

SEQ ID NO: 99671 - RNA, 22 nt, Artificial Sequence
  Synthetic
auagcagcaggaugaagaggaa

SEQ ID NO: 99672 - RNA, 23 nt, Artificial Sequence
  Synthetic
cauagcagcaggaugaagaggaa

SEQ ID NO: 99673 - RNA, 18 nt, Artificial Sequence
  Synthetic
  misc_feature (1)..(1): n is a, c, g, or u
  misc_feature (7)..(7): n is a, c, g, or u
  misc_feature (13)..(13): n is a, c, g, or u
  misc_feature (15)..(16): n is a, c, g, or u
nauaaunuccucnunnaa

SEQ ID NO: 99674 - RNA, 19 nt, Artificial Sequence
  Synthetic
  misc_feature (2)..(2): n is a, c, g, or u
  misc_feature (8)..(8): n is a, c, g, or u
  misc_feature (14)..(14): n is a, c, g, or u
  misc_feature (16)..(17): n is a, c, g, or u
unauaaunuccucnunnaa

SEQ ID NO: 99675 - RNA, 20 nt, Artificial Sequence
  Synthetic
  misc_feature (3)..(3): n is a, c, g, or u
  misc_feature (9)..(9): n is a, c, g, or u
  misc_feature (15)..(15): n is a, c, g, or u
  misc_feature (17)..(18): n is a, c, g, or u
uunauaaunuccucnunnaa

SEQ ID NO: 99676 - RNA, 21 nt, Artificial Sequence
  Synthetic
  misc_feature (4)..(4): n is a, c, g, or u
  misc_feature (10)..(10): n is a, c, g, or u
  misc_feature (16)..(16): n is a, c, g, or u
  misc_feature (18)..(19): n is a, c, g, or u
auunauaaunuccucnunnaa

SEQ ID NO: 99677 - RNA, 22 nt, Artificial Sequence
  Synthetic
  misc_feature (5)..(5): n is a, c, g, or u
  misc_feature (11)..(11): n is a, c, g, or u
  misc_feature (17)..(17): n is a, c, g, or u
  misc_feature (19)..(20): n is a, c, g, or u
uauunauaaunuccucnunnaa

SEQ ID NO: 99678 - RNA, 23 nt, Artificial Sequence
  Synthetic
  misc_feature (6)..(6): n is a, c, g, or u
  misc_feature (12)..(12): n is a, c, g, or u
  misc_feature (18)..(18): n is a, c, g, or u
  misc_feature (20)..(21): n is a, c, g, or u
cuauunauaaunuccucnunnaa

SEQ ID NO: 99679 - RNA, 24 nt, Artificial Sequence
  Synthetic
  misc_feature (7)..(7): n is a, c, g, or u
  misc_feature (13)..(13): n is a, c, g, or u
  misc_feature (19)..(19): n is a, c, g, or u
  misc_feature (21)..(22): n is a, c, g, or u
ucuauunauaaunuccucnunnaa

SEQ ID NO: 99680 - RNA, 18 nt, Artificial Sequence
  Synthetic
  misc_feature (5)..(5): n is a, c, g, or u
acugnauguucaggauaa

SEQ ID NO: 99681 - RNA, 19 nt, Artificial Sequence
  Synthetic
  misc_feature (6)..(6): n is a, c, g, or u
aacugnauguucaggauaa

SEQ ID NO: 99682 - RNA, 20 nt, Artificial Sequence
  Synthetic
  misc_feature (7)..(7): n is a, c, g, or u
uaacugnauguucaggauaa

SEQ ID NO: 99683 - RNA, 21 nt, Artificial Sequence
  Synthetic
  misc_feature (8)..(8): n is a, c, g, or u
uuaacugnauguucaggauaa

SEQ ID NO: 99684 - RNA, 22 nt, Artificial Sequence
  Synthetic
  misc_feature (9)..(9): n is a, c, g, or u
auuaacugnauguucaggauaa

SEQ ID NO: 99685 - RNA, 24 nt, Artificial Sequence
  Synthetic
  misc_feature (11)..(11): n is a, c, g, or u
ugauuaacugnauguucaggauaa

SEQ ID NO: 99686 - RNA, 18 nt, Artificial Sequence
  Synthetic
  misc_feature (14)..(14): n is a, c, g, or u
cauaucccaugaanuuaa

SEQ ID NO: 99687 - RNA, 19 nt, Artificial Sequence
  Synthetic
  misc_feature (15)..(15): n is a, c, g, or u
acauaucccaugaanuuaa

SEQ ID NO: 99688 - RNA, 20 nt, Artificial Sequence
  Synthetic
  misc_feature (16)..(16): n is a, c, g, or u
uacauaucccaugaanuuaa

SEQ ID NO: 99689 - RNA, 21 nt, Artificial Sequence
  Synthetic
  misc_feature (17)..(17): n is a, c, g, or u
uuacauaucccaugaanuuaa

SEQ ID NO: 99690 - RNA, 22 nt, Artificial Sequence
  Synthetic
  misc_feature (18)..(18): n is a, c, g, or u
auuacauaucccaugaanuuaa

SEQ ID NO: 99691 - RNA, 23 nt, Artificial Sequence
  Synthetic
  misc_feature (19)..(19): n is a, c, g, or u
aauuacauaucccaugaanuuaa

SEQ ID NO: 99692 - RNA, 24 nt, Artificial Sequence
  Synthetic
  misc_feature (20)..(20): n is a, c, g, or u
caauuacauaucccaugaanuuaa

SEQ ID NO: 99693 - RNA, 18 nt, Artificial Sequence
  Synthetic
caucaacucaccccaaca

SEQ ID NO: 99694 - RNA, 19 nt, Artificial Sequence
  Synthetic
ucaucaacucaccccaaca

SEQ ID NO: 99695 - RNA, 20 nt, Artificial Sequence
  Synthetic
uucaucaacucaccccaaca

SEQ ID NO: 99696 - RNA, 21 nt, Artificial Sequence
  Synthetic
auucaucaacucaccccaaca

SEQ ID NO: 99697 - RNA, 23 nt, Artificial Sequence
  Synthetic
agauucaucaacucaccccaaca

SEQ ID NO: 99698 - RNA, 24 nt, Artificial Sequence
  Synthetic
cagauucaucaacucaccccaaca

SEQ ID NO: 99699 - RNA, 18 nt, Artificial Sequence
  Synthetic
aacaguaggacaugaaca

SEQ ID NO: 99700 - RNA, 20 nt, Artificial Sequence
  Synthetic
ugaacaguaggacaugaaca

SEQ ID NO: 99701 - RNA, 18 nt, Artificial Sequence
  Synthetic
uccacacuccaaaagaca

SEQ ID NO: 99702 - RNA, 19 nt, Artificial Sequence
  Synthetic
auccacacuccaaaagaca

SEQ ID NO: 99703 - RNA, 20 nt, Artificial Sequence
  Synthetic
aauccacacuccaaaagaca

SEQ ID NO: 99704 - RNA, 18 nt, Artificial Sequence
  Synthetic
ucuuccaaaaguaagaca

SEQ ID NO: 99705 - RNA, 19 nt, Artificial Sequence
  Synthetic
cucuuccaaaaguaagaca

SEQ ID NO: 99706 - RNA, 20 nt, Artificial Sequence
  Synthetic
ucucuuccaaaaguaagaca

SEQ ID NO: 99707 - RNA, 21 nt, Artificial Sequence
  Synthetic
uucucuuccaaaaguaagaca

SEQ ID NO: 99708 - RNA, 22 nt, Artificial Sequence
  Synthetic
uuucucuuccaaaaguaagaca

SEQ ID NO: 99709 - RNA, 24 nt, Artificial Sequence
  Synthetic
aguuucucuuccaaaaguaagaca

SEQ ID NO: 99710 - RNA, 18 nt, Artificial Sequence
  Synthetic
  misc_feature (8)..(8): n is a, c, g, or u
aggacaanuuggaggaca

SEQ ID NO: 99711 - RNA, 19 nt, Artificial Sequence
  Synthetic
  misc_feature (9)..(9): n is a, c, g, or u
caggacaanuuggaggaca

SEQ ID NO: 99712 - RNA, 20 nt, Artificial Sequence
  Synthetic
  misc_feature (10)..(10): n is a, c, g, or u
ccaggacaanuuggaggaca

SEQ ID NO: 99713 - RNA, 21 nt, Artificial Sequence
  Synthetic
  misc_feature (1)..(1): n is a, c, g, or u
  misc_feature (11)..(11): n is a, c, g, or u
nccaggacaanuuggaggaca

SEQ ID NO: 99714 - RNA, 22 nt, Artificial Sequence
  Synthetic
  misc_feature (2)..(2): n is a, c, g, or u
  misc_feature (12)..(12): n is a, c, g, or u
anccaggacaanuuggaggaca

SEQ ID NO: 99715 - RNA, 23 nt, Artificial Sequence
  Synthetic
  misc_feature (3)..(3): n is a, c, g, or u
  misc_feature (13)..(13): n is a, c, g, or u
uanccaggacaanuuggaggaca

SEQ ID NO: 99716 - RNA, 24 nt, Artificial Sequence
  Synthetic
  misc_feature (4)..(4): n is a, c, g, or u
  misc_feature (14)..(14): n is a, c, g, or u
auanccaggacaanuuggaggaca

SEQ ID NO: 99717 - RNA, 20 nt, Artificial Sequence
  Synthetic
  misc_feature (6)..(6): n is a, c, g, or u
  misc_feature (9)..(9): n is a, c, g, or u
uggccnaungccaagcccca

SEQ ID NO: 99718 - RNA, 21 nt, Artificial Sequence
  Synthetic
  misc_feature (7)..(7): n is a, c, g, or u
  misc_feature (10)..(10): n is a, c, g, or u
auggccnaungccaagcccca

SEQ ID NO: 99719 - RNA, 23 nt, Artificial Sequence
  Synthetic
  misc_feature (1)..(1): n is a, c, g, or u
  misc_feature (9)..(9): n is a, c, g, or u
  misc_feature (12)..(12): n is a, c, g, or u
ngauggccnaungccaagcccca

SEQ ID NO: 99720 - RNA, 24 nt, Artificial Sequence
  Synthetic
  misc_feature (1)..(2): n is a, c, g, or u
  misc_feature (10)..(10): n is a, c, g, or u
  misc_feature (13)..(13): n is a, c, g, or u
nngauggccnaungccaagcccca

SEQ ID NO: 99721 - RNA, 19 nt, Artificial Sequence
  Synthetic
ugaucgggaaagaauccca

SEQ ID NO: 99722 - RNA, 18 nt, Artificial Sequence
  Synthetic
ccauauaacugaaagcca

SEQ ID NO: 99723 - RNA, 19 nt, Artificial Sequence
  Synthetic
uccauauaacugaaagcca

SEQ ID NO: 99724 - RNA, 20 nt, Artificial Sequence
  Synthetic
auccauauaacugaaagcca

SEQ ID NO: 99725 - RNA, 18 nt, Artificial Sequence
  Synthetic
ucccaccuuaugagucca

SEQ ID NO: 99726 - RNA, 19 nt, Artificial Sequence
  Synthetic
uucccaccuuaugagucca

SEQ ID NO: 99727 - RNA, 20 nt, Artificial Sequence
  Synthetic
uuucccaccuuaugagucca

SEQ ID NO: 99728 - RNA, 18 nt, Artificial Sequence
  Synthetic
  misc_feature (8)..(8): n is a, c, g, or u
  misc_feature (11)..(11): n is a, c, g, or u
cuccgaangcngggucca

SEQ ID NO: 99729 - RNA, 21 nt, Artificial Sequence
  Synthetic
  misc_feature (11)..(11): n is a, c, g, or u
  misc_feature (14)..(14): n is a, c, g, or u
uggcuccgaangcngggucca

SEQ ID NO: 99730 - RNA, 22 nt, Artificial Sequence
  Synthetic
  misc_feature (12)..(12): n is a, c, g, or u
  misc_feature (15)..(15): n is a, c, g, or u
uuggcuccgaangcngggucca

SEQ ID NO: 99731 - RNA, 23 nt, Artificial Sequence
  Synthetic
  misc_feature (1)..(1): n is a, c, g, or u
  misc_feature (13)..(13): n is a, c, g, or u
  misc_feature (16)..(16): n is a, c, g, or u
nuuggcuccgaangcngggucca

SEQ ID NO: 99732 - RNA, 24 nt, Artificial Sequence
  Synthetic
  misc_feature (2)..(2): n is a, c, g, or u
  misc_feature (14)..(14): n is a, c, g, or u
  misc_feature (17)..(17): n is a, c, g, or u
anuuggcuccgaangcngggucca

SEQ ID NO: 99733 - RNA, 18 nt, Artificial Sequence
  Synthetic
  misc_feature (3)..(3): n is a, c, g, or u
  misc_feature (7)..(7): n is a, c, g, or u
uanaaunccagccuucca

SEQ ID NO: 99734 - RNA, 19 nt, Artificial Sequence
  Synthetic
  misc_feature (4)..(4): n is a, c, g, or u
  misc_feature (8)..(8): n is a, c, g, or u
auanaaunccagccuucca

SEQ ID NO: 99735 - RNA, 20 nt, Artificial Sequence
  Synthetic
  misc_feature (5)..(5): n is a, c, g, or u
  misc_feature (9)..(9): n is a, c, g, or u
uauanaaunccagccuucca

SEQ ID NO: 99736 - RNA, 21 nt, Artificial Sequence
  Synthetic
  misc_feature (6)..(6): n is a, c, g, or u
  misc_feature (10)..(10): n is a, c, g, or u
auauanaaunccagccuucca

SEQ ID NO: 99737 - RNA, 22 nt, Artificial Sequence
  Synthetic
  misc_feature (7)..(7): n is a, c, g, or u
  misc_feature (11)..(11): n is a, c, g, or u
uauauanaaunccagccuucca

SEQ ID NO: 99738 - RNA, 23 nt, Artificial Sequence
  Synthetic
  misc_feature (8)..(8): n is a, c, g, or u
  misc_feature (12)..(12): n is a, c, g, or u
uuauauanaaunccagccuucca

SEQ ID NO: 99739 - RNA, 24 nt, Artificial Sequence
  Synthetic
  misc_feature (9)..(9): n is a, c, g, or u
  misc_feature (13)..(13): n is a, c, g, or u
cuuauauanaaunccagccuucca

SEQ ID NO: 99740 - RNA, 18 nt, Artificial Sequence
  Synthetic
  misc_feature (4)..(4): n is a, c, g, or u
ucunugacauacuuucca

SEQ ID NO: 99741 - RNA, 19 nt, Artificial Sequence
  Synthetic
  misc_feature (5)..(5): n is a, c, g, or u
uucunugacauacuuucca

SEQ ID NO: 99742 - RNA, 20 nt, Artificial Sequence
  Synthetic
  misc_feature (6)..(6): n is a, c, g, or u
auucunugacauacuuucca

SEQ ID NO: 99743 - RNA, 21 nt, Artificial Sequence
  Synthetic
  misc_feature (7)..(7): n is a, c, g, or u
aauucunugacauacuuucca

SEQ ID NO: 99744 - RNA, 22 nt, Artificial Sequence
  Synthetic
  misc_feature (8)..(8): n is a, c, g, or u
caauucunugacauacuuucca

SEQ ID NO: 99745 - RNA, 23 nt, Artificial Sequence
  Synthetic
  misc_feature (9)..(9): n is a, c, g, or u
acaauucunugacauacuuucca

SEQ ID NO: 99746 - RNA, 24 nt, Artificial Sequence
  Synthetic
  misc_feature (10)..(10): n is a, c, g, or u
cacaauucunugacauacuuucca

SEQ ID NO: 99747 - RNA, 19 nt, Artificial Sequence
  Synthetic
uguugauaagauaggggca

SEQ ID NO: 99748 - RNA, 21 nt, Artificial Sequence
  Synthetic
aguguugauaagauaggggca

SEQ ID NO: 99749 - RNA, 22 nt, Artificial Sequence
  Synthetic
aaguguugauaagauaggggca

SEQ ID NO: 99750 - RNA, 18 nt, Artificial Sequence
  Synthetic
ugacauacuuuccaauca

SEQ ID NO: 99751 - RNA, 19 nt, Artificial Sequence
  Synthetic
  misc_feature (1)..(1): n is a, c, g, or u
nugacauacuuuccaauca

SEQ ID NO: 99752 - RNA, 20 nt, Artificial Sequence
  Synthetic
  misc_feature (2)..(2): n is a, c, g, or u
unugacauacuuuccaauca

SEQ ID NO: 99753 - RNA, 21 nt, Artificial Sequence
  Synthetic
  misc_feature (3)..(3): n is a, c, g, or u
cunugacauacuuuccaauca

SEQ ID NO: 99754 - RNA, 22 nt, Artificial Sequence
  Synthetic
  misc_feature (4)..(4): n is a, c, g, or u
ucunugacauacuuuccaauca

SEQ ID NO: 99755 - RNA, 23 nt, Artificial Sequence
  Synthetic
  misc_feature (5)..(5): n is a, c, g, or u
uucunugacauacuuuccaauca

SEQ ID NO: 99756 - RNA, 24 nt, Artificial Sequence
  Synthetic
  misc_feature (6)..(6): n is a, c, g, or u
auucunugacauacuuuccaauca

SEQ ID NO: 99757 - RNA, 18 nt, Artificial Sequence
  Synthetic
ccuucgucugcgaggcga

SEQ ID NO: 99758 - RNA, 19 nt, Artificial Sequence
  Synthetic
accuucgucugcgaggcga

SEQ ID NO: 99759 - RNA, 18 nt, Artificial Sequence
  Synthetic
aggguccccaguccucga

SEQ ID NO: 99760 - RNA, 19 nt, Artificial Sequence
  Synthetic
caggguccccaguccucga

SEQ ID NO: 99761 - RNA, 19 nt, Artificial Sequence
  Synthetic
  misc_feature (6)..(6): n is a, c, g, or u
agagcngaggcggugucga

SEQ ID NO: 99762 - RNA, 20 nt, Artificial Sequence
  Synthetic
  misc_feature (7)..(7): n is a, c, g, or u
cagagcngaggcggugucga

SEQ ID NO: 99763 - RNA, 21 nt, Artificial Sequence
  Synthetic
  misc_feature (8)..(8): n is a, c, g, or u
acagagcngaggcggugucga

SEQ ID NO: 99764 - RNA, 22 nt, Artificial Sequence
  Synthetic
  misc_feature (9)..(9): n is a, c, g, or u
uacagagcngaggcggugucga

SEQ ID NO: 99765 - RNA, 23 nt, Artificial Sequence
  Synthetic
  misc_feature (10)..(10): n is a, c, g, or u
auacagagcngaggcggugucga

SEQ ID NO: 99766 - RNA, 18 nt, Artificial Sequence
  Synthetic
  misc_feature (9)..(9): n is a, c, g, or u
  misc_feature (16)..(16): n is a, c, g, or u
augaaugunaggaaanga

SEQ ID NO: 99767 - RNA, 19 nt, Artificial Sequence
  Synthetic
  misc_feature (10)..(10): n is a, c, g, or u
  misc_feature (17)..(17): n is a, c, g, or u
aaugaaugunaggaaanga

SEQ ID NO: 99768 - RNA, 20 nt, Artificial Sequence
  Synthetic
  misc_feature (11)..(11): n is a, c, g, or u
  misc_feature (18)..(18): n is a, c, g, or u
aaaugaaugunaggaaanga

SEQ ID NO: 99769 - RNA, 21 nt, Artificial Sequence
  Synthetic
  misc_feature (1)..(1): n is a, c, g, or u
  misc_feature (12)..(12): n is a, c, g, or u
  misc_feature (19)..(19): n is a, c, g, or u
naaaugaaugunaggaaanga

SEQ ID NO: 99770 - RNA, 22 nt, Artificial Sequence
  Synthetic
  misc_feature (1)..(2): n is a, c, g, or u
  misc_feature (13)..(13): n is a, c, g, or u
  misc_feature (20)..(20): n is a, c, g, or u
nnaaaugaaugunaggaaanga

SEQ ID NO: 99771 - RNA, 23 nt, Artificial Sequence
  Synthetic
  misc_feature (2)..(3): n is a, c, g, or u
  misc_feature (14)..(14): n is a, c, g, or u
  misc_feature (21)..(21): n is a, c, g, or u
unnaaaugaaugunaggaaanga

SEQ ID NO: 99772 - RNA, 24 nt, Artificial Sequence
  Synthetic
  misc_feature (1)..(1): n is a, c, g, or u
  misc_feature (3)..(4): n is a, c, g, or u
  misc_feature (15)..(15): n is a, c, g, or u
  misc_feature (22)..(22): n is a, c, g, or u
nunnaaaugaaugunaggaaanga

SEQ ID NO: 99773 - RNA, 18 nt, Artificial Sequence
  Synthetic
  misc_feature (16)..(16): n is a, c, g, or u
cucccgauacagagcnga

SEQ ID NO: 99774 - RNA, 19 nt, Artificial Sequence
  Synthetic
  misc_feature (17)..(17): n is a, c, g, or u
ccucccgauacagagcnga

SEQ ID NO: 99775 - RNA, 22 nt, Artificial Sequence
  Synthetic
  misc_feature (20)..(20): n is a, c, g, or u
aggccucccgauacagagcnga

SEQ ID NO: 99776 - RNA, 23 nt, Artificial Sequence
  Synthetic
  misc_feature (21)..(21): n is a, c, g, or u
aaggccucccgauacagagcnga

SEQ ID NO: 99777 - RNA, 24 nt, Artificial Sequence
  Synthetic
  misc_feature (22)..(22): n is a, c, g, or u
uaaggccucccgauacagagcnga

SEQ ID NO: 99778 - RNA, 19 nt, Artificial Sequence
  Synthetic
  misc_feature (17)..(17): n is a, c, g, or u
agauugacgauaugggnga

SEQ ID NO: 99779 - RNA, 20 nt, Artificial Sequence
  Synthetic
  misc_feature (18)..(18): n is a, c, g, or u
aagauugacgauaugggnga

SEQ ID NO: 99780 - RNA, 22 nt, Artificial Sequence
  Synthetic
  misc_feature (20)..(20): n is a, c, g, or u
agaagauugacgauaugggnga

SEQ ID NO: 99781 - RNA, 24 nt, Artificial Sequence
  Synthetic
  misc_feature (22)..(22): n is a, c, g, or u
cgagaagauugacgauaugggnga

SEQ ID NO: 99782 - RNA, 18 nt, Artificial Sequence
  Synthetic
  misc_feature (16)..(16): n is a, c, g, or u
aauaaugccuaguuunga

SEQ ID NO: 99783 - RNA, 19 nt, Artificial Sequence
  Synthetic
  misc_feature (17)..(17): n is a, c, g, or u
aaauaaugccuaguuunga

SEQ ID NO: 99784 - RNA, 20 nt, Artificial Sequence
  Synthetic
  misc_feature (18)..(18): n is a, c, g, or u
uaaauaaugccuaguuunga

SEQ ID NO: 99785 - RNA, 22 nt, Artificial Sequence
  Synthetic
  misc_feature (20)..(20): n is a, c, g, or u
uguaaauaaugccuaguuunga

SEQ ID NO: 99786 - RNA, 23 nt, Artificial Sequence
  Synthetic
  misc_feature (21)..(21): n is a, c, g, or u
auguaaauaaugccuaguuunga

SEQ ID NO: 99787 - RNA, 24 nt, Artificial Sequence
  Synthetic
  misc_feature (22)..(22): n is a, c, g, or u
uauguaaauaaugccuaguuunga

SEQ ID NO: 99788 - RNA, 18 nt, Artificial Sequence
  Synthetic
aguaggacaugaacauga

SEQ ID NO: 99789 - RNA, 19 nt, Artificial Sequence
  Synthetic
caguaggacaugaacauga

SEQ ID NO: 99790 - RNA, 20 nt, Artificial Sequence
  Synthetic
acaguaggacaugaacauga

SEQ ID NO: 99791 - RNA, 18 nt, Artificial Sequence
  Synthetic
  misc_feature (13)..(13): n is a, c, g, or u
ugcgaaagcccangauga

SEQ ID NO: 99792 - RNA, 19 nt, Artificial Sequence
  Synthetic
  misc_feature (14)..(14): n is a, c, g, or u
uugcgaaagcccangauga

SEQ ID NO: 99793 - RNA, 20 nt, Artificial Sequence
  Synthetic
  misc_feature (15)..(15): n is a, c, g, or u
cuugcgaaagcccangauga

SEQ ID NO: 99794 - RNA, 21 nt, Artificial Sequence
  Synthetic
  misc_feature (16)..(16): n is a, c, g, or u
ucuugcgaaagcccangauga

SEQ ID NO: 99795 - RNA, 22 nt, Artificial Sequence
  Synthetic
  misc_feature (17)..(17): n is a, c, g, or u
aucuugcgaaagcccangauga

SEQ ID NO: 99796 - RNA, 23 nt, Artificial Sequence
  Synthetic
  misc_feature (18)..(18): n is a, c, g, or u
aaucuugcgaaagcccangauga

SEQ ID NO: 99797 - RNA, 18 nt, Artificial Sequence
  Synthetic
agcccuacgaaccacuga

SEQ ID NO: 99798 - RNA, 19 nt, Artificial Sequence
  Synthetic
aagcccuacgaaccacuga

SEQ ID NO: 99799 - RNA, 20 nt, Artificial Sequence
  Synthetic
aaagcccuacgaaccacuga

SEQ ID NO: 99800 - RNA, 18 nt, Artificial Sequence
  Synthetic
augauuaggcagagguga

SEQ ID NO: 99801 - RNA, 20 nt, Artificial Sequence
  Synthetic
agaugauuaggcagagguga

SEQ ID NO: 99802 - RNA, 18 nt, Artificial Sequence
  Synthetic
aguuuccggaaguguuga

SEQ ID NO: 99803 - RNA, 19 nt, Artificial Sequence
  Synthetic
uaguuuccggaaguguuga

SEQ ID NO: 99804 - RNA, 18 nt, Artificial Sequence
  Synthetic
  misc_feature (11)..(11): n is a, c, g, or u
  misc_feature (17)..(17): n is a, c, g, or u
ccucccagucnuuaaana

SEQ ID NO: 99805 - RNA, 19 nt, Artificial Sequence
  Synthetic
  misc_feature (12)..(12): n is a, c, g, or u
  misc_feature (18)..(18): n is a, c, g, or u
uccucccagucnuuaaana

SEQ ID NO: 99806 - RNA, 20 nt, Artificial Sequence
  Synthetic
  misc_feature (13)..(13): n is a, c, g, or u
  misc_feature (19)..(19): n is a, c, g, or u
cuccucccagucnuuaaana

SEQ ID NO: 99807 - RNA, 21 nt, Artificial Sequence
  Synthetic
  misc_feature (14)..(14): n is a, c, g, or u
  misc_feature (20)..(20): n is a, c, g, or u
acuccucccagucnuuaaana

SEQ ID NO: 99808 - RNA, 22 nt, Artificial Sequence
  Synthetic
  misc_feature (15)..(15): n is a, c, g, or u
  misc_feature (21)..(21): n is a, c, g, or u
aacuccucccagucnuuaaana

SEQ ID NO: 99809 - RNA, 23 nt, Artificial Sequence
  Synthetic
  misc_feature (16)..(16): n is a, c, g, or u
  misc_feature (22)..(22): n is a, c, g, or u
caacuccucccagucnuuaaana

SEQ ID NO: 99810 - RNA, 24 nt, Artificial Sequence
  Synthetic
  misc_feature (17)..(17): n is a, c, g, or u
  misc_feature (23)..(23): n is a, c, g, or u
ccaacuccucccagucnuuaaana

SEQ ID NO: 99811 - RNA, 18 nt, Artificial Sequence
  Synthetic
  misc_feature (17)..(17): n is a, c, g, or u
ucaauaggucuauuuana

SEQ ID NO: 99812 - RNA, 19 nt, Artificial Sequence
  Synthetic
  misc_feature (18)..(18): n is a, c, g, or u
aucaauaggucuauuuana

SEQ ID NO: 99813 - RNA, 20 nt, Artificial Sequence
  Synthetic
  misc_feature (19)..(19): n is a, c, g, or u
aaucaauaggucuauuuana

SEQ ID NO: 99814 - RNA, 21 nt, Artificial Sequence
  Synthetic
  misc_feature (20)..(20): n is a, c, g, or u
caaucaauaggucuauuuana

SEQ ID NO: 99815 - RNA, 22 nt, Artificial Sequence
  Synthetic
  misc_feature (21)..(21): n is a, c, g, or u
ccaaucaauaggucuauuuana

SEQ ID NO: 99816 - RNA, 23 nt, Artificial Sequence
  Synthetic
  misc_feature (22)..(22): n is a, c, g, or u
uccaaucaauaggucuauuuana

SEQ ID NO: 99817 - RNA, 24 nt, Artificial Sequence
  Synthetic
  misc_feature (23)..(23): n is a, c, g, or u
uuccaaucaauaggucuauuuana

SEQ ID NO: 99818 - RNA, 18 nt, Artificial Sequence
  Synthetic
  misc_feature (4)..(4): n is a, c, g, or u
  misc_feature (7)..(7): n is a, c, g, or u
uuunucnaagggcaaaua

SEQ ID NO: 99819 - RNA, 19 nt, Artificial Sequence
  Synthetic
  misc_feature (5)..(5): n is a, c, g, or u
  misc_feature (8)..(8): n is a, c, g, or u
cuuunucnaagggcaaaua

SEQ ID NO: 99820 - RNA, 20 nt, Artificial Sequence
  Synthetic
  misc_feature (6)..(6): n is a, c, g, or u
  misc_feature (9)..(9): n is a, c, g, or u
ccuuunucnaagggcaaaua

SEQ ID NO: 99821 - RNA, 22 nt, Artificial Sequence
  Synthetic
  misc_feature (8)..(8): n is a, c, g, or u
  misc_feature (11)..(11): n is a, c, g, or u
ugccuuunucnaagggcaaaua

SEQ ID NO: 99822 - RNA, 23 nt, Artificial Sequence
  Synthetic
  misc_feature (9)..(9): n is a, c, g, or u
  misc_feature (12)..(12): n is a, c, g, or u
augccuuunucnaagggcaaaua

SEQ ID NO: 99823 - RNA, 24 nt, Artificial Sequence
  Synthetic
  misc_feature (10)..(10): n is a, c, g, or u
  misc_feature (13)..(13): n is a, c, g, or u
aaugccuuunucnaagggcaaaua

SEQ ID NO: 99824 - RNA, 18 nt, Artificial Sequence
  Synthetic
uagaaccuagcaggcaua

SEQ ID NO: 99825 - RNA, 19 nt, Artificial Sequence
  Synthetic
auagaaccuagcaggcaua

SEQ ID NO: 99826 - RNA, 18 nt, Artificial Sequence
  Synthetic
uguaguuucucucuuaua

SEQ ID NO: 99827 - RNA, 20 nt, Artificial Sequence
  Synthetic
cguguaguuucucucuuaua

SEQ ID NO: 99828 - RNA, 18 nt, Artificial Sequence
  Synthetic
acgugggugcucccccua

SEQ ID NO: 99829 - RNA, 19 nt, Artificial Sequence
  Synthetic
cacgugggugcucccccua

SEQ ID NO: 99830 - RNA, 20 nt, Artificial Sequence
  Synthetic
acacgugggugcucccccua

SEQ ID NO: 99831 - RNA, 18 nt, Artificial Sequence
  Synthetic
cauggucccgugcuggua

SEQ ID NO: 99832 - RNA, 20 nt, Artificial Sequence
  Synthetic
ugcauggucccgugcuggua

SEQ ID NO: 99833 - RNA, 18 nt, Artificial Sequence
  Synthetic
ccuuccacagaguaugua

SEQ ID NO: 99834 - RNA, 20 nt, Artificial Sequence
  Synthetic
agccuuccacagaguaugua

SEQ ID NO: 99835 - RNA, 21 nt, Artificial Sequence
  Synthetic
cagccuuccacagaguaugua

SEQ ID NO: 99836 - RNA, 22 nt, Artificial Sequence
  Synthetic
ccagccuuccacagaguaugua

SEQ ID NO: 99837 - RNA, 23 nt, Artificial Sequence
  Synthetic
  misc_feature (1)..(1): n is a, c, g, or u
nccagccuuccacagaguaugua

SEQ ID NO: 99838 - RNA, 24 nt, Artificial Sequence
  Synthetic
  misc_feature (2)..(2): n is a, c, g, or u
unccagccuuccacagaguaugua

SEQ ID NO: 99839 - RNA, 18 nt, Artificial Sequence
  Synthetic
  misc_feature (1)..(1): n is a, c, g, or u
naauuuuggccaggacac

SEQ ID NO: 99840 - RNA, 19 nt, Artificial Sequence
  Synthetic
  misc_feature (2)..(2): n is a, c, g, or u
cnaauuuuggccaggacac

SEQ ID NO: 99841 - RNA, 21 nt, Artificial Sequence
  Synthetic
  misc_feature (4)..(4): n is a, c, g, or u
ugcnaauuuuggccaggacac

SEQ ID NO: 99842 - RNA, 22 nt, Artificial Sequence
  Synthetic
  misc_feature (5)..(5): n is a, c, g, or u
cugcnaauuuuggccaggacac

SEQ ID NO: 99843 - RNA, 23 nt, Artificial Sequence
  Synthetic
  misc_feature (6)..(6): n is a, c, g, or u
acugcnaauuuuggccaggacac

SEQ ID NO: 99844 - RNA, 18 nt, Artificial Sequence
  Synthetic
caggaaaugugaaaccac

SEQ ID NO: 99845 - RNA, 19 nt, Artificial Sequence
  Synthetic
acaggaaaugugaaaccac

SEQ ID NO: 99846 - RNA, 21 nt, Artificial Sequence
  Synthetic
agacaggaaaugugaaaccac

SEQ ID NO: 99847 - RNA, 22 nt, Artificial Sequence
  Synthetic
aagacaggaaaugugaaaccac

SEQ ID NO: 99848 - RNA, 23 nt, Artificial Sequence
  Synthetic
uaagacaggaaaugugaaaccac

SEQ ID NO: 99849 - RNA, 18 nt, Artificial Sequence
  Synthetic
uuccaaauuacuucccac

SEQ ID NO: 99850 - RNA, 19 nt, Artificial Sequence
  Synthetic
cuuccaaauuacuucccac

SEQ ID NO: 99851 - RNA, 20 nt, Artificial Sequence
  Synthetic
ucuuccaaauuacuucccac

SEQ ID NO: 99852 - RNA, 21 nt, Artificial Sequence
  Synthetic
  misc_feature (1)..(1): n is a, c, g, or u
nucuuccaaauuacuucccac

SEQ ID NO: 99853 - RNA, 24 nt, Artificial Sequence
  Synthetic
  misc_feature (4)..(4): n is a, c, g, or u
uggnucuuccaaauuacuucccac

SEQ ID NO: 99854 - RNA, 20 nt, Artificial Sequence
  Synthetic
uggaucggcagaggagccac

SEQ ID NO: 99855 - RNA, 19 nt, Artificial Sequence
  Synthetic
  misc_feature (9)..(9): n is a, c, g, or u
agaccuggngggcguucac

SEQ ID NO: 99856 - RNA, 20 nt, Artificial Sequence
  Synthetic
  misc_feature (10)..(10): n is a, c, g, or u
aagaccuggngggcguucac

SEQ ID NO: 99857 - RNA, 20 nt, Artificial Sequence
  Synthetic
aggacaaacgggcaacauac

SEQ ID NO: 99858 - RNA, 22 nt, Artificial Sequence
  Synthetic
agaggacaaacgggcaacauac

SEQ ID NO: 99859 - RNA, 23 nt, Artificial Sequence
  Synthetic
uagaggacaaacgggcaacauac

SEQ ID NO: 99860 - RNA, 18 nt, Artificial Sequence
  Synthetic
aauugagagaaguccacc

SEQ ID NO: 99861 - RNA, 19 nt, Artificial Sequence
  Synthetic
aaauugagagaaguccacc

SEQ ID NO: 99862 - RNA, 20 nt, Artificial Sequence
  Synthetic
aaaauugagagaaguccacc

SEQ ID NO: 99863 - RNA, 18 nt, Artificial Sequence
  Synthetic
  misc_feature (1)..(1): n is a, c, g, or u
  misc_feature (12)..(12): n is a, c, g, or u
ngcaaagcccanaagacc

SEQ ID NO: 99864 - RNA, 19 nt, Artificial Sequence
  Synthetic
  misc_feature (2)..(2): n is a, c, g, or u
  misc_feature (13)..(13): n is a, c, g, or u
cngcaaagcccanaagacc

SEQ ID NO: 99865 - RNA, 24 nt, Artificial Sequence
  Synthetic
  misc_feature (7)..(7): n is a, c, g, or u
  misc_feature (18)..(18): n is a, c, g, or u
aggggcngcaaagcccanaagacc

SEQ ID NO: 99866 - RNA, 19 nt, Artificial Sequence
  Synthetic
cguaaagagaggugcgccc

SEQ ID NO: 99867 - RNA, 19 nt, Artificial Sequence
  Synthetic
ugcuguagcucuuguuccc

SEQ ID NO: 99868 - RNA, 20 nt, Artificial Sequence
  Synthetic
augcuguagcucuuguuccc

SEQ ID NO: 99869 - RNA, 18 nt, Artificial Sequence
  Synthetic
aggaaucuugcgaaagcc

SEQ ID NO: 99870 - RNA, 19 nt, Artificial Sequence
  Synthetic
uaggaaucuugcgaaagcc

SEQ ID NO: 99871 - RNA, 20 nt, Artificial Sequence
  Synthetic
auaggaaucuugcgaaagcc

SEQ ID NO: 99872 - RNA, 18 nt, Artificial Sequence
  Synthetic
  misc_feature (5)..(5): n is a, c, g, or u
  misc_feature (12)..(12): n is a, c, g, or u
ccugnuuugccncuggcc

SEQ ID NO: 99873 - RNA, 19 nt, Artificial Sequence
  Synthetic
  misc_feature (6)..(6): n is a, c, g, or u
  misc_feature (13)..(13): n is a, c, g, or u
accugnuuugccncuggcc

SEQ ID NO: 99874 - RNA, 20 nt, Artificial Sequence
  Synthetic
  misc_feature (7)..(7): n is a, c, g, or u
  misc_feature (14)..(14): n is a, c, g, or u
uaccugnuuugccncuggcc

SEQ ID NO: 99875 - RNA, 21 nt, Artificial Sequence
  Synthetic
  misc_feature (8)..(8): n is a, c, g, or u
  misc_feature (15)..(15): n is a, c, g, or u
cuaccugnuuugccncuggcc

SEQ ID NO: 99876 - RNA, 22 nt, Artificial Sequence
  Synthetic
  misc_feature (9)..(9): n is a, c, g, or u
  misc_feature (16)..(16): n is a, c, g, or u
ccuaccugnuuugccncuggcc

SEQ ID NO: 99877 - RNA, 23 nt, Artificial Sequence
  Synthetic
  misc_feature (10)..(10): n is a, c, g, or u
  misc_feature (17)..(17): n is a, c, g, or u
uccuaccugnuuugccncuggcc

SEQ ID NO: 99878 - RNA, 24 nt, Artificial Sequence
  Synthetic
  misc_feature (11)..(11): n is a, c, g, or u
  misc_feature (18)..(18): n is a, c, g, or u
cuccuaccugnuuugccncuggcc

SEQ ID NO: 99879 - RNA, 18 nt, Artificial Sequence
  Synthetic
uguuguacagacuuggcc

SEQ ID NO: 99880 - RNA, 19 nt, Artificial Sequence
  Synthetic
auguuguacagacuuggcc

SEQ ID NO: 99881 - RNA, 21 nt, Artificial Sequence
  Synthetic
agauguuguacagacuuggcc

SEQ ID NO: 99882 - RNA, 22 nt, Artificial Sequence
  Synthetic
aagauguuguacagacuuggcc

SEQ ID NO: 99883 - RNA, 23 nt, Artificial Sequence
  Synthetic
caagauguuguacagacuuggcc

SEQ ID NO: 99884 - RNA, 24 nt, Artificial Sequence
  Synthetic
ucaagauguuguacagacuuggcc

SEQ ID NO: 99885 - RNA, 18 nt, Artificial Sequence
  Synthetic
  misc_feature (12)..(12): n is a, c, g, or u
ugacauugcugngagucc

SEQ ID NO: 99886 - RNA, 19 nt, Artificial Sequence
  Synthetic
  misc_feature (13)..(13): n is a, c, g, or u
uugacauugcugngagucc

SEQ ID NO: 99887 - RNA, 18 nt, Artificial Sequence
  Synthetic
  misc_feature (9)..(9): n is a, c, g, or u
caagugcanuuuccgucc

SEQ ID NO: 99888 - RNA, 19 nt, Artificial Sequence
  Synthetic
  misc_feature (10)..(10): n is a, c, g, or u
acaagugcanuuuccgucc

SEQ ID NO: 99889 - RNA, 20 nt, Artificial Sequence
  Synthetic
  misc_feature (11)..(11): n is a, c, g, or u
uacaagugcanuuuccgucc

SEQ ID NO: 99890 - RNA, 21 nt, Artificial Sequence
  Synthetic
  misc_feature (12)..(12): n is a, c, g, or u
auacaagugcanuuuccgucc

SEQ ID NO: 99891 - RNA, 22 nt, Artificial Sequence
  Synthetic
  misc_feature (13)..(13): n is a, c, g, or u
aauacaagugcanuuuccgucc

SEQ ID NO: 99892 - RNA, 18 nt, Artificial Sequence
  Synthetic
  misc_feature (6)..(6): n is a, c, g, or u
uagcunacuacuaauucc

SEQ ID NO: 99893 - RNA, 19 nt, Artificial Sequence
  Synthetic
  misc_feature (7)..(7): n is a, c, g, or u
auagcunacuacuaauucc

SEQ ID NO: 99894 - RNA, 20 nt, Artificial Sequence
  Synthetic
  misc_feature (8)..(8): n is a, c, g, or u
cauagcunacuacuaauucc

SEQ ID NO: 99895 - RNA, 21 nt, Artificial Sequence
  Synthetic
  misc_feature (9)..(9): n is a, c, g, or u
acauagcunacuacuaauucc

SEQ ID NO: 99896 - RNA, 23 nt, Artificial Sequence
  Synthetic
  misc_feature (11)..(11): n is a, c, g, or u
ugacauagcunacuacuaauucc

SEQ ID NO: 99897 - RNA, 24 nt, Artificial Sequence
  Synthetic
  misc_feature (12)..(12): n is a, c, g, or u
uugacauagcunacuacuaauucc

SEQ ID NO: 99898 - RNA, 18 nt, Artificial Sequence
  Synthetic
uacuaacauugagauucc

SEQ ID NO: 99899 - RNA, 19 nt, Artificial Sequence
  Synthetic
auacuaacauugagauucc

SEQ ID NO: 99900 - RNA, 23 nt, Artificial Sequence
  Synthetic
agggauacuaacauugagauucc

SEQ ID NO: 99901 - RNA, 24 nt, Artificial Sequence
  Synthetic
aagggauacuaacauugagauucc

SEQ ID NO: 99902 - RNA, 18 nt, Artificial Sequence
  Synthetic
aagaacaguuucucuucc

SEQ ID NO: 99903 - RNA, 19 nt, Artificial Sequence
  Synthetic
caagaacaguuucucuucc

SEQ ID NO: 99904 - RNA, 20 nt, Artificial Sequence
  Synthetic
ucaagaacaguuucucuucc

SEQ ID NO: 99905 - RNA, 18 nt, Artificial Sequence
  Synthetic
cuaacaacaguaguuucc

SEQ ID NO: 99906 - RNA, 19 nt, Artificial Sequence
  Synthetic
ucuaacaacaguaguuucc

SEQ ID NO: 99907 - RNA, 18 nt, Artificial Sequence
  Synthetic
  misc_feature (13)..(13): n is a, c, g, or u
ugacgauaugggngaggc

SEQ ID NO: 99908 - RNA, 19 nt, Artificial Sequence
  Synthetic
  misc_feature (14)..(14): n is a, c, g, or u
uugacgauaugggngaggc

SEQ ID NO: 99909 - RNA, 20 nt, Artificial Sequence
  Synthetic
  misc_feature (15)..(15): n is a, c, g, or u
auugacgauaugggngaggc

SEQ ID NO: 99910 - RNA, 18 nt, Artificial Sequence
  Synthetic
aacaugagaugauuaggc

SEQ ID NO: 99911 - RNA, 20 nt, Artificial Sequence
  Synthetic
ugaacaugagaugauuaggc

SEQ ID NO: 99912 - RNA, 21 nt, Artificial Sequence
  Synthetic
augaacaugagaugauuaggc

SEQ ID NO: 99913 - RNA, 22 nt, Artificial Sequence
  Synthetic
caugaacaugagaugauuaggc

SEQ ID NO: 99914 - RNA, 23 nt, Artificial Sequence
  Synthetic
acaugaacaugagaugauuaggc

SEQ ID NO: 99915 - RNA, 19 nt, Artificial Sequence
  Synthetic
  misc_feature (7)..(7): n is a, c, g, or u
ugguggngugaacccuggc

SEQ ID NO: 99916 - RNA, 19 nt, Artificial Sequence
  Synthetic
aggcggugucgaggagauc

SEQ ID NO: 99917 - RNA, 18 nt, Artificial Sequence
  Synthetic
  misc_feature (4)..(4): n is a, c, g, or u
caunuucggugcaggguc

SEQ ID NO: 99918 - RNA, 19 nt, Artificial Sequence
  Synthetic
  misc_feature (5)..(5): n is a, c, g, or u
ccaunuucggugcaggguc

SEQ ID NO: 99919 - RNA, 20 nt, Artificial Sequence
  Synthetic
  misc_feature (6)..(6): n is a, c, g, or u
uccaunuucggugcaggguc

SEQ ID NO: 99920 - RNA, 21 nt, Artificial Sequence
  Synthetic
  misc_feature (7)..(7): n is a, c, g, or u
cuccaunuucggugcaggguc

SEQ ID NO: 99921 - RNA, 22 nt, Artificial Sequence
  Synthetic
  misc_feature (8)..(8): n is a, c, g, or u
ucuccaunuucggugcaggguc

SEQ ID NO: 99922 - RNA, 23 nt, Artificial Sequence
  Synthetic
  misc_feature (1)..(1): n is a, c, g, or u
  misc_feature (9)..(9): n is a, c, g, or u
nucuccaunuucggugcaggguc

SEQ ID NO: 99923 - RNA, 18 nt, Artificial Sequence
  Synthetic
acaagcugcuaggaguuc

SEQ ID NO: 99924 - RNA, 19 nt, Artificial Sequence
  Synthetic
aacaagcugcuaggaguuc

SEQ ID NO: 99925 - RNA, 20 nt, Artificial Sequence
  Synthetic
aaacaagcugcuaggaguuc

SEQ ID NO: 99926 - RNA, 21 nt, Artificial Sequence
  Synthetic
aaaacaagcugcuaggaguuc

SEQ ID NO: 99927 - RNA, 22 nt, Artificial Sequence
  Synthetic
caaaacaagcugcuaggaguuc

SEQ ID NO: 99928 - RNA, 24 nt, Artificial Sequence
  Synthetic
agcaaaacaagcugcuaggaguuc

SEQ ID NO: 99929 - RNA, 18 nt, Artificial Sequence
  Synthetic
uacaguagaagaauaaag

SEQ ID NO: 99930 - RNA, 21 nt, Artificial Sequence
  Synthetic
agguacaguagaagaauaaag

SEQ ID NO: 99931 - RNA, 22 nt, Artificial Sequence
  Synthetic
cagguacaguagaagaauaaag

SEQ ID NO: 99932 - RNA, 23 nt, Artificial Sequence
  Synthetic
acagguacaguagaagaauaaag

SEQ ID NO: 99933 - RNA, 18 nt, Artificial Sequence
  Synthetic
  misc_feature (6)..(6): n is a, c, g, or u
ugccanucaggauuaaag

SEQ ID NO: 99934 - RNA, 19 nt, Artificial Sequence
  Synthetic
  misc_feature (7)..(7): n is a, c, g, or u
uugccanucaggauuaaag

SEQ ID NO: 99935 - RNA, 20 nt, Artificial Sequence
  Synthetic
  misc_feature (8)..(8): n is a, c, g, or u
uuugccanucaggauuaaag

SEQ ID NO: 99936 - RNA, 22 nt, Artificial Sequence
  Synthetic
  misc_feature (10)..(10): n is a, c, g, or u
aguuugccanucaggauuaaag

SEQ ID NO: 99937 - RNA, 18 nt, Artificial Sequence
  Synthetic
agacaccaaauacucaag

SEQ ID NO: 99938 - RNA, 19 nt, Artificial Sequence
  Synthetic
aagacaccaaauacucaag

SEQ ID NO: 99939 - RNA, 20 nt, Artificial Sequence
  Synthetic
aaagacaccaaauacucaag

SEQ ID NO: 99940 - RNA, 21 nt, Artificial Sequence
  Synthetic
aaaagacaccaaauacucaag

SEQ ID NO: 99941 - RNA, 22 nt, Artificial Sequence
  Synthetic
caaaagacaccaaauacucaag

SEQ ID NO: 99942 - RNA, 23 nt, Artificial Sequence
  Synthetic
ccaaaagacaccaaauacucaag

SEQ ID NO: 99943 - RNA, 24 nt, Artificial Sequence
  Synthetic
uccaaaagacaccaaauacucaag

SEQ ID NO: 99944 - RNA, 18 nt, Artificial Sequence
  Synthetic
uuugaaguaugccucaag

SEQ ID NO: 99945 - RNA, 19 nt, Artificial Sequence
  Synthetic
cuuugaaguaugccucaag

SEQ ID NO: 99946 - RNA, 20 nt, Artificial Sequence
  Synthetic
ucuuugaaguaugccucaag

SEQ ID NO: 99947 - RNA, 22 nt, Artificial Sequence
  Synthetic
agucuuugaaguaugccucaag

SEQ ID NO: 99948 - RNA, 23 nt, Artificial Sequence
  Synthetic
cagucuuugaaguaugccucaag

SEQ ID NO: 99949 - RNA, 24 nt, Artificial Sequence
  Synthetic
acagucuuugaaguaugccucaag

SEQ ID NO: 99950 - RNA, 18 nt, Artificial Sequence
  Synthetic
ccagaggauugggaacag

SEQ ID NO: 99951 - RNA, 19 nt, Artificial Sequence
  Synthetic
cccagaggauugggaacag

SEQ ID NO: 99952 - RNA, 20 nt, Artificial Sequence
  Synthetic
ucccagaggauugggaacag

SEQ ID NO: 99953 - RNA, 18 nt, Artificial Sequence
  Synthetic
cauggugcuggugaacag

SEQ ID NO: 99954 - RNA, 20 nt, Artificial Sequence
  Synthetic
ugcauggugcuggugaacag

SEQ ID NO: 99955 - RNA, 18 nt, Artificial Sequence
  Synthetic
uagaagaauaaagcccag

SEQ ID NO: 99956 - RNA, 20 nt, Artificial Sequence
  Synthetic
aguagaagaauaaagcccag

SEQ ID NO: 99957 - RNA, 19 nt, Artificial Sequence
  Synthetic
agaagaugaggcauagcag

SEQ ID NO: 99958 - RNA, 20 nt, Artificial Sequence
  Synthetic
aagaagaugaggcauagcag

SEQ ID NO: 99959 - RNA, 19 nt, Artificial Sequence
  Synthetic
  misc_feature (11)..(11): n is a, c, g, or u
ugauuaacugnauguucag

SEQ ID NO: 99960 - RNA, 20 nt, Artificial Sequence
  Synthetic
  misc_feature (12)..(12): n is a, c, g, or u
augauuaacugnauguucag

SEQ ID NO: 99961 - RNA, 21 nt, Artificial Sequence
  Synthetic
  misc_feature (13)..(13): n is a, c, g, or u
aaugauuaacugnauguucag

SEQ ID NO: 99962 - RNA, 22 nt, Artificial Sequence
  Synthetic
  misc_feature (14)..(14): n is a, c, g, or u
uaaugauuaacugnauguucag

SEQ ID NO: 99963 - RNA, 24 nt, Artificial Sequence
  Synthetic
  misc_feature (16)..(16): n is a, c, g, or u
aguaaugauuaacugnauguucag

SEQ ID NO: 99964 - RNA, 18 nt, Artificial Sequence
  Synthetic
  misc_feature (4)..(4): n is a, c, g, or u
caanuuggaggacaagag

SEQ ID NO: 99965 - RNA, 19 nt, Artificial Sequence
  Synthetic
  misc_feature (5)..(5): n is a, c, g, or u
acaanuuggaggacaagag

SEQ ID NO: 99966 - RNA, 22 nt, Artificial Sequence
  Synthetic
  misc_feature (8)..(8): n is a, c, g, or u
aggacaanuuggaggacaagag

SEQ ID NO: 99967 - RNA, 23 nt, Artificial Sequence
  Synthetic
  misc_feature (9)..(9): n is a, c, g, or u
caggacaanuuggaggacaagag

SEQ ID NO: 99968 - RNA, 24 nt, Artificial Sequence
  Synthetic
  misc_feature (10)..(10): n is a, c, g, or u
ccaggacaanuuggaggacaagag

SEQ ID NO: 99969 - RNA, 18 nt, Artificial Sequence
  Synthetic
  misc_feature (8)..(8): n is a, c, g, or u
cucugggnucuagcagag

SEQ ID NO: 99970 - RNA, 19 nt, Artificial Sequence
  Synthetic
  misc_feature (9)..(9): n is a, c, g, or u
acucugggnucuagcagag

SEQ ID NO: 99971 - RNA, 20 nt, Artificial Sequence
  Synthetic
  misc_feature (10)..(10): n is a, c, g, or u
cacucugggnucuagcagag

SEQ ID NO: 99972 - RNA, 21 nt, Artificial Sequence
  Synthetic
  misc_feature (11)..(11): n is a, c, g, or u
ucacucugggnucuagcagag

SEQ ID NO: 99973 - RNA, 22 nt, Artificial Sequence
  Synthetic
  misc_feature (12)..(12): n is a, c, g, or u
cucacucugggnucuagcagag

SEQ ID NO: 99974 - RNA, 23 nt, Artificial Sequence
  Synthetic
  misc_feature (13)..(13): n is a, c, g, or u
ccucacucugggnucuagcagag

SEQ ID NO: 99975 - RNA, 24 nt, Artificial Sequence
  Synthetic
  misc_feature (14)..(14): n is a, c, g, or u
cccucacucugggnucuagcagag

SEQ ID NO: 99976 - RNA, 19 nt, Artificial Sequence
  Synthetic
  misc_feature (3)..(3): n is a, c, g, or u
agncccaaacggccccgag

SEQ ID NO: 99977 - RNA, 18 nt, Artificial Sequence
  Synthetic
ucccccuagaaaauugag

SEQ ID NO: 99978 - RNA, 19 nt, Artificial Sequence
  Synthetic
cucccccuagaaaauugag

SEQ ID NO: 99979 - RNA, 21 nt, Artificial Sequence
  Synthetic
ugcucccccuagaaaauugag

SEQ ID NO: 99980 - RNA, 18 nt, Artificial Sequence
  Synthetic
uaaagacagguacaguag

SEQ ID NO: 99981 - RNA, 19 nt, Artificial Sequence
  Synthetic
uuaaagacagguacaguag

SEQ ID NO: 99982 - RNA, 20 nt, Artificial Sequence
  Synthetic
auuaaagacagguacaguag

SEQ ID NO: 99983 - RNA, 18 nt, Artificial Sequence
  Synthetic
  misc_feature (14)..(14): n is a, c, g, or u
caccccaaaagacngccg

SEQ ID NO: 99984 - RNA, 19 nt, Artificial Sequence
  Synthetic
  misc_feature (15)..(15): n is a, c, g, or u
ccaccccaaaagacngccg

SEQ ID NO: 99985 - RNA, 20 nt, Artificial Sequence
  Synthetic
  misc_feature (16)..(16): n is a, c, g, or u
uccaccccaaaagacngccg

SEQ ID NO: 99986 - RNA, 21 nt, Artificial Sequence
  Synthetic
  misc_feature (17)..(17): n is a, c, g, or u
cuccaccccaaaagacngccg

SEQ ID NO: 99987 - RNA, 18 nt, Artificial Sequence
  Synthetic
cugucuuccugacugccg

SEQ ID NO: 99988 - RNA, 21 nt, Artificial Sequence
  Synthetic
  misc_feature (18)..(18): n is a, c, g, or u
aagcgaagugcacacggnccg

SEQ ID NO: 99989 - RNA, 23 nt, Artificial Sequence
  Synthetic
  misc_feature (20)..(20): n is a, c, g, or u
ugaagcgaagugcacacggnccg

SEQ ID NO: 99990 - RNA, 18 nt, Artificial Sequence
  Synthetic
  misc_feature (12)..(12): n is a, c, g, or u
  misc_feature (15)..(15): n is a, c, g, or u
acagaguugucngunccg

SEQ ID NO: 99991 - RNA, 19 nt, Artificial Sequence
  Synthetic
  misc_feature (13)..(13): n is a, c, g, or u
  misc_feature (16)..(16): n is a, c, g, or u
aacagaguugucngunccg

SEQ ID NO: 99992 - RNA, 20 nt, Artificial Sequence
  Synthetic
  misc_feature (14)..(14): n is a, c, g, or u
  misc_feature (17)..(17): n is a, c, g, or u
caacagaguugucngunccg

SEQ ID NO: 99993 - RNA, 21 nt, Artificial Sequence
  Synthetic
  misc_feature (15)..(15): n is a, c, g, or u
  misc_feature (18)..(18): n is a, c, g, or u
acaacagaguugucngunccg

SEQ ID NO: 99994 - RNA, 24 nt, Artificial Sequence
  Synthetic
  misc_feature (18)..(18): n is a, c, g, or u
  misc_feature (21)..(21): n is a, c, g, or u
aggacaacagaguugucngunccg

SEQ ID NO: 99995 - RNA, 18 nt, Artificial Sequence
  Synthetic
acaaaaugaggcgcugcg

SEQ ID NO: 99996 - RNA, 19 nt, Artificial Sequence
  Synthetic
cacaaaaugaggcgcugcg

SEQ ID NO: 99997 - RNA, 20 nt, Artificial Sequence
  Synthetic
ccacaaaaugaggcgcugcg

SEQ ID NO: 99998 - RNA, 18 nt, Artificial Sequence
  Synthetic
  misc_feature (11)..(11): n is a, c, g, or u
  misc_feature (14)..(14): n is a, c, g, or u
uaaugccuuunucnaagg

SEQ ID NO: 99999 - RNA, 19 nt, Artificial Sequence
  Synthetic
  misc_feature (12)..(12): n is a, c, g, or u
  misc_feature (15)..(15): n is a, c, g, or u
uuaaugccuuunucnaagg

SEQ ID NO: 100000 - RNA, 20 nt, Artificial Sequence
  Synthetic
  misc_feature (13)..(13): n is a, c, g, or u
  misc_feature (16)..(16): n is a, c, g, or u
uuuaaugccuuunucnaagg

SEQ ID NO: 100001 - RNA, 23 nt, Artificial Sequence
  Synthetic
  misc_feature (1)..(1): n is a, c, g, or u
  misc_feature (16)..(16): n is a, c, g, or u
  misc_feature (19)..(19): n is a, c, g, or u
ngguuuaaugccuuunucnaagg

SEQ ID NO: 100002 - RNA, 24 nt, Artificial Sequence
  Synthetic
  misc_feature (2)..(2): n is a, c, g, or u
  misc_feature (17)..(17): n is a, c, g, or u
  misc_feature (20)..(20): n is a, c, g, or u
angguuuaaugccuuunucnaagg

SEQ ID NO: 100003 - RNA, 18 nt, Artificial Sequence
  Synthetic
  misc_feature (1)..(1): n is a, c, g, or u
nucaggauuaaagacagg

SEQ ID NO: 100004 - RNA, 19 nt, Artificial Sequence
  Synthetic
  misc_feature (2)..(2): n is a, c, g, or u
anucaggauuaaagacagg

SEQ ID NO: 100005 - RNA, 20 nt, Artificial Sequence
  Synthetic
  misc_feature (3)..(3): n is a, c, g, or u
canucaggauuaaagacagg

SEQ ID NO: 100006 - RNA, 21 nt, Artificial Sequence
  Synthetic
  misc_feature (4)..(4): n is a, c, g, or u
ccanucaggauuaaagacagg

SEQ ID NO: 100007 - RNA, 23 nt, Artificial Sequence
  Synthetic
  misc_feature (6)..(6): n is a, c, g, or u
ugccanucaggauuaaagacagg

SEQ ID NO: 100008 - RNA, 24 nt, Artificial Sequence
  Synthetic
  misc_feature (7)..(7): n is a, c, g, or u
uugccanucaggauuaaagacagg

SEQ ID NO: 100009 - RNA, 18 nt, Artificial Sequence
  Synthetic
aggauagaaccuagcagg

SEQ ID NO: 100010 - RNA, 19 nt, Artificial Sequence
  Synthetic
uaggauagaaccuagcagg

SEQ ID NO: 100011 - RNA, 20 nt, Artificial Sequence
  Synthetic
uuaggauagaaccuagcagg

SEQ ID NO: 100012 - RNA, 18 nt, Artificial Sequence
  Synthetic
  misc_feature (9)..(9): n is a, c, g, or u
  misc_feature (11)..(11): n is a, c, g, or u
acggcagangnagaaggg

SEQ ID NO: 100013 - RNA, 19 nt, Artificial Sequence
  Synthetic
  misc_feature (10)..(10): n is a, c, g, or u
  misc_feature (12)..(12): n is a, c, g, or u
aacggcagangnagaaggg

SEQ ID NO: 100014 - RNA, 22 nt, Artificial Sequence
  Synthetic
  misc_feature (13)..(13): n is a, c, g, or u
  misc_feature (15)..(15): n is a, c, g, or u
cggaacggcagangnagaaggg

SEQ ID NO: 100015 - RNA, 23 nt, Artificial Sequence
  Synthetic
  misc_feature (14)..(14): n is a, c, g, or u
  misc_feature (16)..(16): n is a, c, g, or u
ccggaacggcagangnagaaggg

SEQ ID NO: 100016 - RNA, 18 nt, Artificial Sequence
  Synthetic
  misc_feature (16)..(16): n is a, c, g, or u
auguucaggauaauangg

SEQ ID NO: 100017 - RNA, 19 nt, Artificial Sequence
  Synthetic
  misc_feature (1)..(1): n is a, c, g, or u
  misc_feature (17)..(17): n is a, c, g, or u
nauguucaggauaauangg

SEQ ID NO: 100018 - RNA, 21 nt, Artificial Sequence
  Synthetic
  misc_feature (3)..(3): n is a, c, g, or u
  misc_feature (19)..(19): n is a, c, g, or u
ugnauguucaggauaauangg

SEQ ID NO: 100019 - RNA, 22 nt, Artificial Sequence
  Synthetic
  misc_feature (4)..(4): n is a, c, g, or u
  misc_feature (20)..(20): n is a, c, g, or u
cugnauguucaggauaauangg

SEQ ID NO: 100020 - RNA, 23 nt, Artificial Sequence
  Synthetic
  misc_feature (5)..(5): n is a, c, g, or u
  misc_feature (21)..(21): n is a, c, g, or u
acugnauguucaggauaauangg

SEQ ID NO: 100021 - RNA, 24 nt, Artificial Sequence
  Synthetic
  misc_feature (6)..(6): n is a, c, g, or u
  misc_feature (22)..(22): n is a, c, g, or u
aacugnauguucaggauaauangg

SEQ ID NO: 100022 - RNA, 18 nt, Artificial Sequence
  Synthetic
  misc_feature (16)..(16): n is a, c, g, or u
uccaaauucuuuauangg

SEQ ID NO: 100023 - RNA, 19 nt, Artificial Sequence
  Synthetic
  misc_feature (17)..(17): n is a, c, g, or u
cuccaaauucuuuauangg

SEQ ID NO: 100024 - RNA, 21 nt, Artificial Sequence
  Synthetic
  misc_feature (19)..(19): n is a, c, g, or u
agcuccaaauucuuuauangg

SEQ ID NO: 100025 - RNA, 22 nt, Artificial Sequence
  Synthetic
  misc_feature (20)..(20): n is a, c, g, or u
aagcuccaaauucuuuauangg

SEQ ID NO: 100026 - RNA, 24 nt, Artificial Sequence
  Synthetic
  misc_feature (22)..(22): n is a, c, g, or u
agaagcuccaaauucuuuauangg

SEQ ID NO: 100027 - RNA, 18 nt, Artificial Sequence
  Synthetic
  misc_feature (6)..(6): n is a, c, g, or u
ugccunagugcuguaugg

SEQ ID NO: 100028 - RNA, 19 nt, Artificial Sequence
  Synthetic
  misc_feature (7)..(7): n is a, c, g, or u
uugccunagugcuguaugg

SEQ ID NO: 100029 - RNA, 20 nt, Artificial Sequence
  Synthetic
  misc_feature (8)..(8): n is a, c, g, or u
cuugccunagugcuguaugg

SEQ ID NO: 100030 - RNA, 18 nt, Artificial Sequence
  Synthetic
uacuucccacccaggugg

SEQ ID NO: 100031 - RNA, 19 nt, Artificial Sequence
  Synthetic
uuacuucccacccaggugg

SEQ ID NO: 100032 - RNA, 20 nt, Artificial Sequence
  Synthetic
auuacuucccacccaggugg

SEQ ID NO: 100033 - RNA, 18 nt, Artificial Sequence
  Synthetic
acugucucuuagaggugg

SEQ ID NO: 100034 - RNA, 20 nt, Artificial Sequence
  Synthetic
ugacugucucuuagaggugg

SEQ ID NO: 100035 - RNA, 20 nt, Artificial Sequence
  Synthetic
  misc_feature (5)..(5): n is a, c, g, or u
ugggnucuagcagagcuugg

SEQ ID NO: 100036 - RNA, 21 nt, Artificial Sequence
  Synthetic
  misc_feature (6)..(6): n is a, c, g, or u
cugggnucuagcagagcuugg

SEQ ID NO: 100037 - RNA, 22 nt, Artificial Sequence
  Synthetic
  misc_feature (7)..(7): n is a, c, g, or u
ucugggnucuagcagagcuugg

SEQ ID NO: 100038 - RNA, 23 nt, Artificial Sequence
  Synthetic
  misc_feature (8)..(8): n is a, c, g, or u
cucugggnucuagcagagcuugg

SEQ ID NO: 100039 - RNA, 24 nt, Artificial Sequence
  Synthetic
  misc_feature (9)..(9): n is a, c, g, or u
acucugggnucuagcagagcuugg

SEQ ID NO: 100040 - RNA, 18 nt, Artificial Sequence
  Synthetic
  misc_feature (2)..(2): n is a, c, g, or u
cnaagggcaaauauuugg

SEQ ID NO: 100041 - RNA, 19 nt, Artificial Sequence
  Synthetic
  misc_feature (3)..(3): n is a, c, g, or u
ucnaagggcaaauauuugg

SEQ ID NO: 100042 - RNA, 20 nt, Artificial Sequence
  Synthetic
  misc_feature (1)..(1): n is a, c, g, or u
  misc_feature (4)..(4): n is a, c, g, or u
nucnaagggcaaauauuugg

SEQ ID NO: 100043 - RNA, 21 nt, Artificial Sequence
  Synthetic
  misc_feature (2)..(2): n is a, c, g, or u
  misc_feature (5)..(5): n is a, c, g, or u
unucnaagggcaaauauuugg

SEQ ID NO: 100044 - RNA, 22 nt, Artificial Sequence
  Synthetic
  misc_feature (3)..(3): n is a, c, g, or u
  misc_feature (6)..(6): n is a, c, g, or u
uunucnaagggcaaauauuugg

SEQ ID NO: 100045 - RNA, 23 nt, Artificial Sequence
  Synthetic
  misc_feature (4)..(4): n is a, c, g, or u
  misc_feature (7)..(7): n is a, c, g, or u
uuunucnaagggcaaauauuugg

SEQ ID NO: 100046 - RNA, 24 nt, Artificial Sequence
  Synthetic
  misc_feature (5)..(5): n is a, c, g, or u
  misc_feature (8)..(8): n is a, c, g, or u
cuuunucnaagggcaaauauuugg

SEQ ID NO: 100047 - RNA, 18 nt, Artificial Sequence
  Synthetic
  misc_feature (5)..(5): n is a, c, g, or u
  misc_feature (17)..(17): n is a, c, g, or u
uuganuuggcuccgaang

SEQ ID NO: 100048 - RNA, 19 nt, Artificial Sequence
  Synthetic
  misc_feature (6)..(6): n is a, c, g, or u
  misc_feature (18)..(18): n is a, c, g, or u
uuuganuuggcuccgaang

SEQ ID NO: 100049 - RNA, 21 nt, Artificial Sequence
  Synthetic
  misc_feature (8)..(8): n is a, c, g, or u
  misc_feature (20)..(20): n is a, c, g, or u
uguuuganuuggcuccgaang

SEQ ID NO: 100050 - RNA, 22 nt, Artificial Sequence
  Synthetic
  misc_feature (9)..(9): n is a, c, g, or u
  misc_feature (21)..(21): n is a, c, g, or u
uuguuuganuuggcuccgaang

SEQ ID NO: 100051 - RNA, 23 nt, Artificial Sequence
  Synthetic
  misc_feature (10)..(10): n is a, c, g, or u
  misc_feature (22)..(22): n is a, c, g, or u
auuguuuganuuggcuccgaang

SEQ ID NO: 100052 - RNA, 18 nt, Artificial Sequence
  Synthetic
  misc_feature (7)..(7): n is a, c, g, or u
  misc_feature (10)..(10): n is a, c, g, or u
  misc_feature (12)..(12): n is a, c, g, or u
  misc_feature (16)..(17): n is a, c, g, or u
acauugnuunanuuunng

SEQ ID NO: 100053 - RNA, 19 nt, Artificial Sequence
  Synthetic
  misc_feature (8)..(8): n is a, c, g, or u
  misc_feature (11)..(11): n is a, c, g, or u
  misc_feature (13)..(13): n is a, c, g, or u
  misc_feature (17)..(18): n is a, c, g, or u
aacauugnuunanuuunng

SEQ ID NO: 100054 - RNA, 20 nt, Artificial Sequence
  Synthetic
  misc_feature (9)..(9): n is a, c, g, or u
  misc_feature (12)..(12): n is a, c, g, or u
  misc_feature (14)..(14): n is a, c, g, or u
  misc_feature (18)..(19): n is a, c, g, or u
aaacauugnuunanuuunng

SEQ ID NO: 100055 - RNA, 21 nt, Artificial Sequence
  Synthetic
  misc_feature (10)..(10): n is a, c, g, or u
  misc_feature (13)..(13): n is a, c, g, or u
  misc_feature (15)..(15): n is a, c, g, or u
  misc_feature (19)..(20): n is a, c, g, or u
aaaacauugnuunanuuunng

SEQ ID NO: 100056 - RNA, 23 nt, Artificial Sequence
  Synthetic
  misc_feature (12)..(12): n is a, c, g, or u
  misc_feature (15)..(15): n is a, c, g, or u
  misc_feature (17)..(17): n is a, c, g, or u
  misc_feature (21)..(22): n is a, c, g, or u
cgaaaacauugnuunanuuunng

SEQ ID NO: 100057 - RNA, 24 nt, Artificial Sequence
  Synthetic
  misc_feature (1)..(1): n is a, c, g, or u
  misc_feature (13)..(13): n is a, c, g, or u
  misc_feature (16)..(16): n is a, c, g, or u
  misc_feature (18)..(18): n is a, c, g, or u
  misc_feature (22)..(23): n is a, c, g, or u
ncgaaaacauugnuunanuuunng

SEQ ID NO: 100058 - RNA, 18 nt, Artificial Sequence
  Synthetic
cagaguauguaaauaaug

SEQ ID NO: 100059 - RNA, 19 nt, Artificial Sequence
  Synthetic
acagaguauguaaauaaug

SEQ ID NO: 100060 - RNA, 20 nt, Artificial Sequence
  Synthetic
cacagaguauguaaauaaug

SEQ ID NO: 100061 - RNA, 21 nt, Artificial Sequence
  Synthetic
ccacagaguauguaaauaaug

SEQ ID NO: 100062 - RNA, 22 nt, Artificial Sequence
  Synthetic
uccacagaguauguaaauaaug

SEQ ID NO: 100063 - RNA, 23 nt, Artificial Sequence
  Synthetic
uuccacagaguauguaaauaaug

SEQ ID NO: 100064 - RNA, 24 nt, Artificial Sequence
  Synthetic
cuuccacagaguauguaaauaaug

SEQ ID NO: 100065 - RNA, 18 nt, Artificial Sequence
  Synthetic
  misc_feature (11)..(11): n is a, c, g, or u
uagcuugccunagugcug

SEQ ID NO: 100066 - RNA, 19 nt, Artificial Sequence
  Synthetic
  misc_feature (12)..(12): n is a, c, g, or u
auagcuugccunagugcug

SEQ ID NO: 100067 - RNA, 20 nt, Artificial Sequence
  Synthetic
  misc_feature (13)..(13): n is a, c, g, or u
aauagcuugccunagugcug

SEQ ID NO: 100068 - RNA, 22 nt, Artificial Sequence
  Synthetic
  misc_feature (15)..(15): n is a, c, g, or u
agaauagcuugccunagugcug

SEQ ID NO: 100069 - RNA, 23 nt, Artificial Sequence
  Synthetic
  misc_feature (16)..(16): n is a, c, g, or u
cagaauagcuugccunagugcug

SEQ ID NO: 100070 - RNA, 24 nt, Artificial Sequence
  Synthetic
  misc_feature (17)..(17): n is a, c, g, or u
acagaauagcuugccunagugcug

SEQ ID NO: 100071 - RNA, 19 nt, Artificial Sequence
  Synthetic
agugcuguauggugaggug

SEQ ID NO: 100072 - RNA, 20 nt, Artificial Sequence
  Synthetic
  misc_feature (1)..(1): n is a, c, g, or u
nagugcuguauggugaggug

SEQ ID NO: 100073 - RNA, 21 nt, Artificial Sequence
  Synthetic
  misc_feature (2)..(2): n is a, c, g, or u
unagugcuguauggugaggug

SEQ ID NO: 100074 - RNA, 22 nt, Artificial Sequence
  Synthetic
  misc_feature (3)..(3): n is a, c, g, or u
cunagugcuguauggugaggug

SEQ ID NO: 100075 - RNA, 23 nt, Artificial Sequence
  Synthetic
  misc_feature (4)..(4): n is a, c, g, or u
ccunagugcuguauggugaggug

SEQ ID NO: 100076 - RNA, 18 nt, Artificial Sequence
  Synthetic
  misc_feature (3)..(3): n is a, c, g, or u
  misc_feature (11)..(11): n is a, c, g, or u
ugnucuccaunuucggug

SEQ ID NO: 100077 - RNA, 20 nt, Artificial Sequence
  Synthetic
  misc_feature (1)..(1): n is a, c, g, or u
  misc_feature (5)..(5): n is a, c, g, or u
  misc_feature (13)..(13): n is a, c, g, or u
ngugnucuccaunuucggug

SEQ ID NO: 100078 - RNA, 21 nt, Artificial Sequence
  Synthetic
  misc_feature (2)..(2): n is a, c, g, or u
  misc_feature (6)..(6): n is a, c, g, or u
  misc_feature (14)..(14): n is a, c, g, or u
ungugnucuccaunuucggug

SEQ ID NO: 100079 - RNA, 23 nt, Artificial Sequence
  Synthetic
  misc_feature (4)..(4): n is a, c, g, or u
  misc_feature (8)..(8): n is a, c, g, or u
  misc_feature (16)..(16): n is a, c, g, or u
ugungugnucuccaunuucggug

SEQ ID NO: 100080 - RNA, 24 nt, Artificial Sequence
  Synthetic
  misc_feature (5)..(5): n is a, c, g, or u
  misc_feature (9)..(9): n is a, c, g, or u
  misc_feature (17)..(17): n is a, c, g, or u
augungugnucuccaunuucggug

SEQ ID NO: 100081 - RNA, 20 nt, Artificial Sequence
  Synthetic
uggaggacaagagguuggug

SEQ ID NO: 100082 - RNA, 21 nt, Artificial Sequence
  Synthetic
uuggaggacaagagguuggug

SEQ ID NO: 100083 - RNA, 22 nt, Artificial Sequence
  Synthetic
  misc_feature (1)..(1): n is a, c, g, or u
nuuggaggacaagagguuggug

SEQ ID NO: 100084 - RNA, 23 nt, Artificial Sequence
  Synthetic
  misc_feature (2)..(2): n is a, c, g, or u
anuuggaggacaagagguuggug

SEQ ID NO: 100085 - RNA, 24 nt, Artificial Sequence
  Synthetic
  misc_feature (3)..(3): n is a, c, g, or u
aanuuggaggacaagagguuggug

SEQ ID NO: 100086 - RNA, 20 nt, Artificial Sequence
  Synthetic
aggcacagcuuggaggcuug

SEQ ID NO: 100087 - RNA, 21 nt, Artificial Sequence
  Synthetic
aaggcacagcuuggaggcuug

SEQ ID NO: 100088 - RNA, 22 nt, Artificial Sequence
  Synthetic
caaggcacagcuuggaggcuug

SEQ ID NO: 100089 - RNA, 23 nt, Artificial Sequence
  Synthetic
ccaaggcacagcuuggaggcuug

SEQ ID NO: 100090 - RNA, 24 nt, Artificial Sequence
  Synthetic
cccaaggcacagcuuggaggcuug

SEQ ID NO: 100091 - RNA, 19 nt, Artificial Sequence
  Synthetic
  misc_feature (5)..(5): n is a, c, g, or u
agganucgugcaggucuug

SEQ ID NO: 100092 - RNA, 20 nt, Artificial Sequence
  Synthetic
  misc_feature (6)..(6): n is a, c, g, or u
cagganucgugcaggucuug

SEQ ID NO: 100093 - RNA, 22 nt, Artificial Sequence
  Synthetic
  misc_feature (8)..(8): n is a, c, g, or u
agcagganucgugcaggucuug

SEQ ID NO: 100094 - RNA, 24 nt, Artificial Sequence
  Synthetic
  misc_feature (10)..(10): n is a, c, g, or u
ugagcagganucgugcaggucuug

SEQ ID NO: 100095 - RNA, 20 nt, Artificial Sequence
  Synthetic
aggcagaggugaaaaaguug

SEQ ID NO: 100096 - RNA, 21 nt, Artificial Sequence
  Synthetic
uaggcagaggugaaaaaguug

SEQ ID NO: 100097 - RNA, 22 nt, Artificial Sequence
  Synthetic
uuaggcagaggugaaaaaguug

SEQ ID NO: 100098 - RNA, 23 nt, Artificial Sequence
  Synthetic
auuaggcagaggugaaaaaguug

SEQ ID NO: 100099 - RNA, 18 nt, Artificial Sequence
  Synthetic
uuggaggacaagagguug

SEQ ID NO: 100100 - RNA, 19 nt, Artificial Sequence
  Synthetic
  misc_feature (1)..(1): n is a, c, g, or u
nuuggaggacaagagguug

SEQ ID NO: 100101 - RNA, 20 nt, Artificial Sequence
  Synthetic
  misc_feature (2)..(2): n is a, c, g, or u
anuuggaggacaagagguug

SEQ ID NO: 100102 - RNA, 21 nt, Artificial Sequence
  Synthetic
  misc_feature (3)..(3): n is a, c, g, or u
aanuuggaggacaagagguug

SEQ ID NO: 100103 - RNA, 22 nt, Artificial Sequence
  Synthetic
  misc_feature (4)..(4): n is a, c, g, or u
caanuuggaggacaagagguug

SEQ ID NO: 100104 - RNA, 23 nt, Artificial Sequence
  Synthetic
  misc_feature (5)..(5): n is a, c, g, or u
acaanuuggaggacaagagguug

SEQ ID NO: 100105 - RNA, 18 nt, Artificial Sequence
  Synthetic
  misc_feature (18)..(18): n is a, c, g, or u
aaucuugcgaaagcccan

SEQ ID NO: 100106 - RNA, 18 nt, Artificial Sequence
  Synthetic
  misc_feature (16)..(16): n is a, c, g, or u
  misc_feature (18)..(18): n is a, c, g, or u
ugguggucuguaagcngn

SEQ ID NO: 100107 - RNA, 19 nt, Artificial Sequence
  Synthetic
  misc_feature (17)..(17): n is a, c, g, or u
  misc_feature (19)..(19): n is a, c, g, or u
uugguggucuguaagcngn

SEQ ID NO: 100108 - RNA, 20 nt, Artificial Sequence
  Synthetic
  misc_feature (18)..(18): n is a, c, g, or u
  misc_feature (20)..(20): n is a, c, g, or u
uuugguggucuguaagcngn

SEQ ID NO: 100109 - RNA, 21 nt, Artificial Sequence
  Synthetic
  misc_feature (19)..(19): n is a, c, g, or u
  misc_feature (21)..(21): n is a, c, g, or u
auuugguggucuguaagcngn

SEQ ID NO: 100110 - RNA, 22 nt, Artificial Sequence
  Synthetic
  misc_feature (20)..(20): n is a, c, g, or u
  misc_feature (22)..(22): n is a, c, g, or u
cauuugguggucuguaagcngn

SEQ ID NO: 100111 - RNA, 19 nt, Artificial Sequence
  Synthetic
  misc_feature (7)..(7): n is a, c, g, or u
  misc_feature (11)..(11): n is a, c, g, or u
  misc_feature (19)..(19): n is a, c, g, or u
ugaugungugnucuccaun

SEQ ID NO: 100112 - RNA, 20 nt, Artificial Sequence
  Synthetic
  misc_feature (8)..(8): n is a, c, g, or u
  misc_feature (12)..(12): n is a, c, g, or u
  misc_feature (20)..(20): n is a, c, g, or u
cugaugungugnucuccaun

SEQ ID NO: 100113 - RNA, 21 nt, Artificial Sequence
  Synthetic
  misc_feature (9)..(9): n is a, c, g, or u
  misc_feature (13)..(13): n is a, c, g, or u
  misc_feature (21)..(21): n is a, c, g, or u
ccugaugungugnucuccaun

SEQ ID NO: 100114 - RNA, 22 nt, Artificial Sequence
  Synthetic
  misc_feature (10)..(10): n is a, c, g, or u
  misc_feature (14)..(14): n is a, c, g, or u
  misc_feature (22)..(22): n is a, c, g, or u
uccugaugungugnucuccaun

SEQ ID NO: 100115 - RNA, 23 nt, Artificial Sequence
  Synthetic
  misc_feature (11)..(11): n is a, c, g, or u
  misc_feature (15)..(15): n is a, c, g, or u
  misc_feature (23)..(23): n is a, c, g, or u
auccugaugungugnucuccaun

SEQ ID NO: 100116 - RNA, 24 nt, Artificial Sequence
  Synthetic
  misc_feature (12)..(12): n is a, c, g, or u
  misc_feature (16)..(16): n is a, c, g, or u
  misc_feature (24)..(24): n is a, c, g, or u
aauccugaugungugnucuccaun

SEQ ID NO: 100117 - RNA, 18 nt, Artificial Sequence
  Synthetic
ugggguugaagucccaau

SEQ ID NO: 100118 - RNA, 19 nt, Artificial Sequence
  Synthetic
uugggguugaagucccaau

SEQ ID NO: 100119 - RNA, 18 nt, Artificial Sequence
  Synthetic
agcagggguccuaggaau

SEQ ID NO: 100120 - RNA, 20 nt, Artificial Sequence
  Synthetic
cgagcagggguccuaggaau

SEQ ID NO: 100121 - RNA, 18 nt, Artificial Sequence
  Synthetic
  misc_feature (1)..(1): n is a, c, g, or u
ngaugaugggaugggaau

SEQ ID NO: 100122 - RNA, 19 nt, Artificial Sequence
  Synthetic
  misc_feature (2)..(2): n is a, c, g, or u
angaugaugggaugggaau

SEQ ID NO: 100123 - RNA, 20 nt, Artificial Sequence
  Synthetic
  misc_feature (3)..(3): n is a, c, g, or u
cangaugaugggaugggaau

SEQ ID NO: 100124 - RNA, 21 nt, Artificial Sequence
  Synthetic
  misc_feature (4)..(4): n is a, c, g, or u
ccangaugaugggaugggaau

SEQ ID NO: 100125 - RNA, 22 nt, Artificial Sequence
  Synthetic
  misc_feature (5)..(5): n is a, c, g, or u
cccangaugaugggaugggaau

SEQ ID NO: 100126 - RNA, 24 nt, Artificial Sequence
  Synthetic
  misc_feature (7)..(7): n is a, c, g, or u
agcccangaugaugggaugggaau

SEQ ID NO: 100127 - RNA, 18 nt, Artificial Sequence
  Synthetic
  misc_feature (15)..(15): n is a, c, g, or u
cuagcaggcauaaunaau

SEQ ID NO: 100128 - RNA, 19 nt, Artificial Sequence
  Synthetic
  misc_feature (16)..(16): n is a, c, g, or u
ccuagcaggcauaaunaau

SEQ ID NO: 100129 - RNA, 20 nt, Artificial Sequence
  Synthetic
  misc_feature (17)..(17): n is a, c, g, or u
accuagcaggcauaaunaau

SEQ ID NO: 100130 - RNA, 21 nt, Artificial Sequence
  Synthetic
  misc_feature (18)..(18): n is a, c, g, or u
aaccuagcaggcauaaunaau

SEQ ID NO: 100131 - RNA, 23 nt, Artificial Sequence
  Synthetic
  misc_feature (20)..(20): n is a, c, g, or u
agaaccuagcaggcauaaunaau

SEQ ID NO: 100132 - RNA, 24 nt, Artificial Sequence
  Synthetic
  misc_feature (21)..(21): n is a, c, g, or u
uagaaccuagcaggcauaaunaau

SEQ ID NO: 100133 - RNA, 18 nt, Artificial Sequence
  Synthetic
caaaagaaaauugguaau

SEQ ID NO: 100134 - RNA, 19 nt, Artificial Sequence
  Synthetic
acaaaagaaaauugguaau

SEQ ID NO: 100135 - RNA, 21 nt, Artificial Sequence
  Synthetic
agacaaaagaaaauugguaau

SEQ ID NO: 100136 - RNA, 22 nt, Artificial Sequence
  Synthetic
aagacaaaagaaaauugguaau

SEQ ID NO: 100137 - RNA, 23 nt, Artificial Sequence
  Synthetic
aaagacaaaagaaaauugguaau

SEQ ID NO: 100138 - RNA, 24 nt, Artificial Sequence
  Synthetic
caaagacaaaagaaaauugguaau

SEQ ID NO: 100139 - RNA, 19 nt, Artificial Sequence
  Synthetic
agcaacaagagggaaacau

SEQ ID NO: 100140 - RNA, 20 nt, Artificial Sequence
  Synthetic
cagcaacaagagggaaacau

SEQ ID NO: 100141 - RNA, 21 nt, Artificial Sequence
  Synthetic
acagcaacaagagggaaacau

SEQ ID NO: 100142 - RNA, 22 nt, Artificial Sequence
  Synthetic
uacagcaacaagagggaaacau

SEQ ID NO: 100143 - RNA, 24 nt, Artificial Sequence
  Synthetic
uguacagcaacaagagggaaacau

SEQ ID NO: 100144 - RNA, 18 nt, Artificial Sequence
  Synthetic
uccaagggauacuaacau

SEQ ID NO: 100145 - RNA, 20 nt, Artificial Sequence
  Synthetic
aguccaagggauacuaacau

SEQ ID NO: 100146 - RNA, 18 nt, Artificial Sequence
  Synthetic
acugaggcccacucccau

SEQ ID NO: 100147 - RNA, 18 nt, Artificial Sequence
  Synthetic
ucuuagagguggagagau

SEQ ID NO: 100148 - RNA, 19 nt, Artificial Sequence
  Synthetic
cucuuagagguggagagau

SEQ ID NO: 100149 - RNA, 20 nt, Artificial Sequence
  Synthetic
ucucuuagagguggagagau

SEQ ID NO: 100150 - RNA, 22 nt, Artificial Sequence
  Synthetic
ugucucuuagagguggagagau

SEQ ID NO: 100151 - RNA, 23 nt, Artificial Sequence
  Synthetic
cugucucuuagagguggagagau

SEQ ID NO: 100152 - RNA, 24 nt, Artificial Sequence
  Synthetic
acugucucuuagagguggagagau

SEQ ID NO: 100153 - RNA, 18 nt, Artificial Sequence
  Synthetic
cauugagauucccgagau

SEQ ID NO: 100154 - RNA, 19 nt, Artificial Sequence
  Synthetic
acauugagauucccgagau

SEQ ID NO: 100155 - RNA, 20 nt, Artificial Sequence
  Synthetic
aacauugagauucccgagau

SEQ ID NO: 100156 - RNA, 18 nt, Artificial Sequence
  Synthetic
  misc_feature (7)..(7): n is a, c, g, or u
agcccangaugaugggau

SEQ ID NO: 100157 - RNA, 19 nt, Artificial Sequence
  Synthetic
  misc_feature (8)..(8): n is a, c, g, or u
aagcccangaugaugggau

SEQ ID NO: 100158 - RNA, 20 nt, Artificial Sequence
  Synthetic
  misc_feature (9)..(9): n is a, c, g, or u
aaagcccangaugaugggau

SEQ ID NO: 100159 - RNA, 22 nt, Artificial Sequence
  Synthetic
  misc_feature (11)..(11): n is a, c, g, or u
cgaaagcccangaugaugggau

SEQ ID NO: 100160 - RNA, 24 nt, Artificial Sequence
  Synthetic
  misc_feature (13)..(13): n is a, c, g, or u
ugcgaaagcccangaugaugggau

SEQ ID NO: 100161 - RNA, 18 nt, Artificial Sequence
  Synthetic
cagccuuccacagaguau

SEQ ID NO: 100162 - RNA, 19 nt, Artificial Sequence
  Synthetic
ccagccuuccacagaguau

SEQ ID NO: 100163 - RNA, 20 nt, Artificial Sequence
  Synthetic
  misc_feature (1)..(1): n is a, c, g, or u
nccagccuuccacagaguau

SEQ ID NO: 100164 - RNA, 21 nt, Artificial Sequence
  Synthetic
  misc_feature (2)..(2): n is a, c, g, or u
unccagccuuccacagaguau

SEQ ID NO: 100165 - RNA, 22 nt, Artificial Sequence
  Synthetic
  misc_feature (3)..(3): n is a, c, g, or u
aunccagccuuccacagaguau

SEQ ID NO: 100166 - RNA, 23 nt, Artificial Sequence
  Synthetic
  misc_feature (4)..(4): n is a, c, g, or u
aaunccagccuuccacagaguau

SEQ ID NO: 100167 - RNA, 24 nt, Artificial Sequence
  Synthetic
  misc_feature (1)..(1): n is a, c, g, or u
  misc_feature (5)..(5): n is a, c, g, or u
naaunccagccuuccacagaguau

SEQ ID NO: 100168 - RNA, 18 nt, Artificial Sequence
  Synthetic
aagcuccaaauucuuuau

SEQ ID NO: 100169 - RNA, 20 nt, Artificial Sequence
  Synthetic
agaagcuccaaauucuuuau

SEQ ID NO: 100170 - RNA, 18 nt, Artificial Sequence
  Synthetic
  misc_feature (1)..(1): n is a, c, g, or u
  misc_feature (4)..(4): n is a, c, g, or u
  misc_feature (7)..(7): n is a, c, g, or u
nggnaanguaccccaacu

SEQ ID NO: 100171 - RNA, 20 nt, Artificial Sequence
  Synthetic
  misc_feature (3)..(3): n is a, c, g, or u
  misc_feature (6)..(6): n is a, c, g, or u
  misc_feature (9)..(9): n is a, c, g, or u
ugnggnaanguaccccaacu

SEQ ID NO: 100172 - RNA, 21 nt, Artificial Sequence
  Synthetic
  misc_feature (1)..(1): n is a, c, g, or u
  misc_feature (4)..(4): n is a, c, g, or u
  misc_feature (7)..(7): n is a, c, g, or u
  misc_feature (10)..(10): n is a, c, g, or u
nugnggnaanguaccccaacu

SEQ ID NO: 100173 - RNA, 22 nt, Artificial Sequence
  Synthetic
  misc_feature (2)..(2): n is a, c, g, or u
  misc_feature (5)..(5): n is a, c, g, or u
  misc_feature (8)..(8): n is a, c, g, or u
  misc_feature (11)..(11): n is a, c, g, or u
cnugnggnaanguaccccaacu

SEQ ID NO: 100174 - RNA, 23 nt, Artificial Sequence
  Synthetic
  misc_feature (3)..(3): n is a, c, g, or u
  misc_feature (6)..(6): n is a, c, g, or u
  misc_feature (9)..(9): n is a, c, g, or u
  misc_feature (12)..(12): n is a, c, g, or u
ucnugnggnaanguaccccaacu

SEQ ID NO: 100175 - RNA, 24 nt, Artificial Sequence
  Synthetic
  misc_feature (4)..(4): n is a, c, g, or u
  misc_feature (7)..(7): n is a, c, g, or u
  misc_feature (10)..(10): n is a, c, g, or u
  misc_feature (13)..(13): n is a, c, g, or u
uucnugnggnaanguaccccaacu

SEQ ID NO: 100176 - RNA, 18 nt, Artificial Sequence
  Synthetic
  misc_feature (5)..(5): n is a, c, g, or u
  misc_feature (8)..(8): n is a, c, g, or u
cgaangcnggguccaacu

SEQ ID NO: 100177 - RNA, 19 nt, Artificial Sequence
  Synthetic
  misc_feature (6)..(6): n is a, c, g, or u
  misc_feature (9)..(9): n is a, c, g, or u
ccgaangcnggguccaacu

SEQ ID NO: 100178 - RNA, 20 nt, Artificial Sequence
  Synthetic
  misc_feature (7)..(7): n is a, c, g, or u
  misc_feature (10)..(10): n is a, c, g, or u
uccgaangcnggguccaacu

SEQ ID NO: 100179 - RNA, 21 nt, Artificial Sequence
  Synthetic
  misc_feature (8)..(8): n is a, c, g, or u
  misc_feature (11)..(11): n is a, c, g, or u
cuccgaangcnggguccaacu

SEQ ID NO: 100180 - RNA, 24 nt, Artificial Sequence
  Synthetic
  misc_feature (11)..(11): n is a, c, g, or u
  misc_feature (14)..(14): n is a, c, g, or u
uggcuccgaangcnggguccaacu

SEQ ID NO: 100181 - RNA, 19 nt, Artificial Sequence
  Synthetic
ugauuggagguuggggacu

SEQ ID NO: 100182 - RNA, 21 nt, Artificial Sequence
  Synthetic
agugauuggagguuggggacu

SEQ ID NO: 100183 - RNA, 23 nt, Artificial Sequence
  Synthetic
ugagugauuggagguuggggacu

SEQ ID NO: 100184 - RNA, 18 nt, Artificial Sequence
  Synthetic
uaggcugucuuccugacu

SEQ ID NO: 100185 - RNA, 20 nt, Artificial Sequence
  Synthetic
aguaggcugucuuccugacu

SEQ ID NO: 100186 - RNA, 24 nt, Artificial Sequence
  Synthetic
ugggaguaggcugucuuccugacu

SEQ ID NO: 100187 - RNA, 18 nt, Artificial Sequence
  Synthetic
  misc_feature (15)..(15): n is a, c, g, or u
acauugacauagcunacu

SEQ ID NO: 100188 - RNA, 19 nt, Artificial Sequence
  Synthetic
  misc_feature (16)..(16): n is a, c, g, or u
aacauugacauagcunacu

SEQ ID NO: 100189 - RNA, 20 nt, Artificial Sequence
  Synthetic
  misc_feature (17)..(17): n is a, c, g, or u
uaacauugacauagcunacu

SEQ ID NO: 100190 - RNA, 21 nt, Artificial Sequence
  Synthetic
  misc_feature (18)..(18): n is a, c, g, or u
uuaacauugacauagcunacu

SEQ ID NO: 100191 - RNA, 22 nt, Artificial Sequence
  Synthetic
  misc_feature (19)..(19): n is a, c, g, or u
auuaacauugacauagcunacu

SEQ ID NO: 100192 - RNA, 23 nt, Artificial Sequence
  Synthetic
  misc_feature (20)..(20): n is a, c, g, or u
uauuaacauugacauagcunacu

SEQ ID NO: 100193 - RNA, 24 nt, Artificial Sequence
  Synthetic
  misc_feature (21)..(21): n is a, c, g, or u
auauuaacauugacauagcunacu

SEQ ID NO: 100194 - RNA, 21 nt, Artificial Sequence
  Synthetic
accaauuuaugccuacagccu

SEQ ID NO: 100195 - RNA, 23 nt, Artificial Sequence
  Synthetic
agaccaauuuaugccuacagccu

SEQ ID NO: 100196 - RNA, 24 nt, Artificial Sequence
  Synthetic
cagaccaauuuaugccuacagccu

SEQ ID NO: 100197 - RNA, 18 nt, Artificial Sequence
  Synthetic
ucuuccacugcauggccu

SEQ ID NO: 100198 - RNA, 20 nt, Artificial Sequence
  Synthetic
ugucuuccacugcauggccu

SEQ ID NO: 100199 - RNA, 18 nt, Artificial Sequence
  Synthetic
agucuuugaaguaugccu

SEQ ID NO: 100200 - RNA, 19 nt, Artificial Sequence
  Synthetic
cagucuuugaaguaugccu

SEQ ID NO: 100201 - RNA, 20 nt, Artificial Sequence
  Synthetic
acagucuuugaaguaugccu

SEQ ID NO: 100202 - RNA, 21 nt, Artificial Sequence
  Synthetic
  misc_feature (1)..(1): n is a, c, g, or u
nacagucuuugaaguaugccu

SEQ ID NO: 100203 - RNA, 22 nt, Artificial Sequence
  Synthetic
  misc_feature (2)..(2): n is a, c, g, or u
anacagucuuugaaguaugccu

SEQ ID NO: 100204 - RNA, 23 nt, Artificial Sequence
  Synthetic
  misc_feature (1)..(1): n is a, c, g, or u
  misc_feature (3)..(3): n is a, c, g, or u
nanacagucuuugaaguaugccu

SEQ ID NO: 100205 - RNA, 24 nt, Artificial Sequence
  Synthetic
  misc_feature (2)..(2): n is a, c, g, or u
  misc_feature (4)..(4): n is a, c, g, or u
ananacagucuuugaaguaugccu

SEQ ID NO: 100206 - RNA, 18 nt, Artificial Sequence
  Synthetic
ucuccucccccaacuccu

SEQ ID NO: 100207 - RNA, 19 nt, Artificial Sequence
  Synthetic
  misc_feature (1)..(1): n is a, c, g, or u
nucuccucccccaacuccu

SEQ ID NO: 100208 - RNA, 20 nt, Artificial Sequence
  Synthetic
  misc_feature (2)..(2): n is a, c, g, or u
anucuccucccccaacuccu

SEQ ID NO: 100209 - RNA, 21 nt, Artificial Sequence
  Synthetic
  misc_feature (3)..(3): n is a, c, g, or u
uanucuccucccccaacuccu

SEQ ID NO: 100210 - RNA, 22 nt, Artificial Sequence
  Synthetic
  misc_feature (4)..(4): n is a, c, g, or u
cuanucuccucccccaacuccu

SEQ ID NO: 100211 - RNA, 23 nt, Artificial Sequence
  Synthetic
  misc_feature (5)..(5): n is a, c, g, or u
ccuanucuccucccccaacuccu

SEQ ID NO: 100212 - RNA, 24 nt, Artificial Sequence
  Synthetic
  misc_feature (6)..(6): n is a, c, g, or u
accuanucuccucccccaacuccu

SEQ ID NO: 100213 - RNA, 18 nt, Artificial Sequence
  Synthetic
cugguaguugauguuccu

SEQ ID NO: 100214 - RNA, 20 nt, Artificial Sequence
  Synthetic
ugcugguaguugauguuccu

SEQ ID NO: 100215 - RNA, 18 nt, Artificial Sequence
  Synthetic
aguaacuccacagaagcu

SEQ ID NO: 100216 - RNA, 20 nt, Artificial Sequence
  Synthetic
agaguaacuccacagaagcu

SEQ ID NO: 100217 - RNA, 22 nt, Artificial Sequence
  Synthetic
agagaguaacuccacagaagcu

SEQ ID NO: 100218 - RNA, 23 nt, Artificial Sequence
  Synthetic
aagagaguaacuccacagaagcu

SEQ ID NO: 100219 - RNA, 24 nt, Artificial Sequence
  Synthetic
aaagagaguaacuccacagaagcu

SEQ ID NO: 100220 - RNA, 18 nt, Artificial Sequence
  Synthetic
cgagcaaaacaagcugcu

SEQ ID NO: 100221 - RNA, 20 nt, Artificial Sequence
  Synthetic
ugcgagcaaaacaagcugcu

SEQ ID NO: 100222 - RNA, 18 nt, Artificial Sequence
  Synthetic
  misc_feature (13)..(13): n is a, c, g, or u
aaugccuaguuungaagu

SEQ ID NO: 100223 - RNA, 19 nt, Artificial Sequence
  Synthetic
  misc_feature (14)..(14): n is a, c, g, or u
uaaugccuaguuungaagu

SEQ ID NO: 100224 - RNA, 20 nt, Artificial Sequence
  Synthetic
  misc_feature (15)..(15): n is a, c, g, or u
auaaugccuaguuungaagu

SEQ ID NO: 100225 - RNA, 21 nt, Artificial Sequence
  Synthetic
  misc_feature (16)..(16): n is a, c, g, or u
aauaaugccuaguuungaagu

SEQ ID NO: 100226 - RNA, 22 nt, Artificial Sequence
  Synthetic
  misc_feature (17)..(17): n is a, c, g, or u
aaauaaugccuaguuungaagu

SEQ ID NO: 100227 - RNA, 23 nt, Artificial Sequence
  Synthetic
  misc_feature (18)..(18): n is a, c, g, or u
uaaauaaugccuaguuungaagu

SEQ ID NO: 100228 - RNA, 18 nt, Artificial Sequence
  Synthetic
ccuuguugggguugaagu

SEQ ID NO: 100229 - RNA, 19 nt, Artificial Sequence
  Synthetic
uccuuguugggguugaagu

SEQ ID NO: 100230 - RNA, 20 nt, Artificial Sequence
  Synthetic
auccuuguugggguugaagu

SEQ ID NO: 100231 - RNA, 22 nt, Artificial Sequence
  Synthetic
ugauccuuguugggguugaagu

SEQ ID NO: 100232 - RNA, 23 nt, Artificial Sequence
  Synthetic
  misc_feature (1)..(1): n is a, c, g, or u
nugauccuuguugggguugaagu

SEQ ID NO: 100233 - RNA, 24 nt, Artificial Sequence
  Synthetic
  misc_feature (2)..(2): n is a, c, g, or u
anugauccuuguugggguugaagu

SEQ ID NO: 100234 - RNA, 18 nt, Artificial Sequence
  Synthetic
  misc_feature (1)..(1): n is a, c, g, or u
  misc_feature (13)..(13): n is a, c, g, or u
ngccaagccccanccagu

SEQ ID NO: 100235 - RNA, 19 nt, Artificial Sequence
  Synthetic
  misc_feature (2)..(2): n is a, c, g, or u
  misc_feature (14)..(14): n is a, c, g, or u
ungccaagccccanccagu

SEQ ID NO: 100236 - RNA, 20 nt, Artificial Sequence
  Synthetic
  misc_feature (3)..(3): n is a, c, g, or u
  misc_feature (15)..(15): n is a, c, g, or u
aungccaagccccanccagu

SEQ ID NO: 100237 - RNA, 21 nt, Artificial Sequence
  Synthetic
  misc_feature (1)..(1): n is a, c, g, or u
  misc_feature (4)..(4): n is a, c, g, or u
  misc_feature (16)..(16): n is a, c, g, or u
naungccaagccccanccagu

SEQ ID NO: 100238 - RNA, 22 nt, Artificial Sequence
  Synthetic
  misc_feature (2)..(2): n is a, c, g, or u
  misc_feature (5)..(5): n is a, c, g, or u
  misc_feature (17)..(17): n is a, c, g, or u
cnaungccaagccccanccagu

SEQ ID NO: 100239 - RNA, 23 nt, Artificial Sequence
  Synthetic
  misc_feature (3)..(3): n is a, c, g, or u
  misc_feature (6)..(6): n is a, c, g, or u
  misc_feature (18)..(18): n is a, c, g, or u
ccnaungccaagccccanccagu

SEQ ID NO: 100240 - RNA, 18 nt, Artificial Sequence
  Synthetic
  misc_feature (10)..(10): n is a, c, g, or u
  misc_feature (12)..(12): n is a, c, g, or u
ucuguaagcngnaggagu

SEQ ID NO: 100241 - RNA, 21 nt, Artificial Sequence
  Synthetic
  misc_feature (13)..(13): n is a, c, g, or u
  misc_feature (15)..(15): n is a, c, g, or u
uggucuguaagcngnaggagu

SEQ ID NO: 100242 - RNA, 24 nt, Artificial Sequence
  Synthetic
  misc_feature (16)..(16): n is a, c, g, or u
  misc_feature (18)..(18): n is a, c, g, or u
ugguggucuguaagcngnaggagu

SEQ ID NO: 100243 - RNA, 18 nt, Artificial Sequence
  Synthetic
  misc_feature (14)..(14): n is a, c, g, or u
uccuugagcagganucgu

SEQ ID NO: 100244 - RNA, 19 nt, Artificial Sequence
  Synthetic
  misc_feature (15)..(15): n is a, c, g, or u
uuccuugagcagganucgu

SEQ ID NO: 100245 - RNA, 22 nt, Artificial Sequence
  Synthetic
  misc_feature (18)..(18): n is a, c, g, or u
agguuccuugagcagganucgu

SEQ ID NO: 100246 - RNA, 24 nt, Artificial Sequence
  Synthetic
  misc_feature (20)..(20): n is a, c, g, or u
agagguuccuugagcagganucgu

SEQ ID NO: 100247 - RNA, 22 nt, Artificial Sequence
  Synthetic
  misc_feature (6)..(6): n is a, c, g, or u
ugccgngcaacgggguaaaggu

SEQ ID NO: 100248 - RNA, 23 nt, Artificial Sequence
  Synthetic
  misc_feature (7)..(7): n is a, c, g, or u
uugccgngcaacgggguaaaggu

SEQ ID NO: 100249 - RNA, 21 nt, Artificial Sequence
  Synthetic
agggcaaauauuugguaaggu

SEQ ID NO: 100250 - RNA, 22 nt, Artificial Sequence
  Synthetic
aagggcaaauauuugguaaggu

SEQ ID NO: 100251 - RNA, 23 nt, Artificial Sequence
  Synthetic
  misc_feature (1)..(1): n is a, c, g, or u
naagggcaaauauuugguaaggu

SEQ ID NO: 100252 - RNA, 24 nt, Artificial Sequence
  Synthetic
  misc_feature (2)..(2): n is a, c, g, or u
cnaagggcaaauauuugguaaggu

SEQ ID NO: 100253 - RNA, 19 nt, Artificial Sequence
  Synthetic
cguuugguuuuauuagggu

SEQ ID NO: 100254 - RNA, 20 nt, Artificial Sequence
  Synthetic
acguuugguuuuauuagggu

SEQ ID NO: 100255 - RNA, 18 nt, Artificial Sequence
  Synthetic
  misc_feature (2)..(2): n is a, c, g, or u
anugauccuuguuggggu

SEQ ID NO: 100256 - RNA, 19 nt, Artificial Sequence
  Synthetic
  misc_feature (3)..(3): n is a, c, g, or u
canugauccuuguuggggu

SEQ ID NO: 100257 - RNA, 20 nt, Artificial Sequence
  Synthetic
  misc_feature (4)..(4): n is a, c, g, or u
ccanugauccuuguuggggu

SEQ ID NO: 100258 - RNA, 23 nt, Artificial Sequence
  Synthetic
  misc_feature (7)..(7): n is a, c, g, or u
uggccanugauccuuguuggggu

SEQ ID NO: 100259 - RNA, 24 nt, Artificial Sequence
  Synthetic
  misc_feature (8)..(8): n is a, c, g, or u
cuggccanugauccuuguuggggu

SEQ ID NO: 100260 - RNA, 20 nt, Artificial Sequence
  Synthetic
aggugaaaaaguugcauggu

SEQ ID NO: 100261 - RNA, 20 nt, Artificial Sequence
  Synthetic
  misc_feature (18)..(18): n is a, c, g, or u
aggacaacagaguugucngu

SEQ ID NO: 100262 - RNA, 22 nt, Artificial Sequence
  Synthetic
  misc_feature (20)..(20): n is a, c, g, or u
agaggacaacagaguugucngu

SEQ ID NO: 100263 - RNA, 24 nt, Artificial Sequence
  Synthetic
  misc_feature (22)..(22): n is a, c, g, or u
agagaggacaacagaguugucngu

SEQ ID NO: 100264 - RNA, 18 nt, Artificial Sequence
  Synthetic
uagacucugugguauugu

SEQ ID NO: 100265 - RNA, 19 nt, Artificial Sequence
  Synthetic
cuagacucugugguauugu

SEQ ID NO: 100266 - RNA, 20 nt, Artificial Sequence
  Synthetic
ucuagacucugugguauugu

SEQ ID NO: 100267 - RNA, 18 nt, Artificial Sequence
  Synthetic
  misc_feature (3)..(3): n is a, c, g, or u
uunguccccaugccuugu

SEQ ID NO: 100268 - RNA, 19 nt, Artificial Sequence
  Synthetic
  misc_feature (4)..(4): n is a, c, g, or u
auunguccccaugccuugu

SEQ ID NO: 100269 - RNA, 21 nt, Artificial Sequence
  Synthetic
  misc_feature (6)..(6): n is a, c, g, or u
agauunguccccaugccuugu

SEQ ID NO: 100270 - RNA, 22 nt, Artificial Sequence
  Synthetic
  misc_feature (7)..(7): n is a, c, g, or u
aagauunguccccaugccuugu

SEQ ID NO: 100271 - RNA, 23 nt, Artificial Sequence
  Synthetic
  misc_feature (8)..(8): n is a, c, g, or u
aaagauunguccccaugccuugu

SEQ ID NO: 100272 - RNA, 18 nt, Artificial Sequence
  Synthetic
  misc_feature (8)..(8): n is a, c, g, or u
cuggccanugauccuugu

SEQ ID NO: 100273 - RNA, 19 nt, Artificial Sequence
  Synthetic
  misc_feature (1)..(1): n is a, c, g, or u
  misc_feature (9)..(9): n is a, c, g, or u
ncuggccanugauccuugu

SEQ ID NO: 100274 - RNA, 20 nt, Artificial Sequence
  Synthetic
  misc_feature (2)..(2): n is a, c, g, or u
  misc_feature (10)..(10): n is a, c, g, or u
cncuggccanugauccuugu

SEQ ID NO: 100275 - RNA, 21 nt, Artificial Sequence
  Synthetic
  misc_feature (3)..(3): n is a, c, g, or u
  misc_feature (11)..(11): n is a, c, g, or u
ccncuggccanugauccuugu

SEQ ID NO: 100276 - RNA, 23 nt, Artificial Sequence
  Synthetic
  misc_feature (5)..(5): n is a, c, g, or u
  misc_feature (13)..(13): n is a, c, g, or u
ugccncuggccanugauccuugu

SEQ ID NO: 100277 - RNA, 24 nt, Artificial Sequence
  Synthetic
  misc_feature (6)..(6): n is a, c, g, or u
  misc_feature (14)..(14): n is a, c, g, or u
uugccncuggccanugauccuugu

SEQ ID NO: 100278 - RNA, 18 nt, Artificial Sequence
  Synthetic
  misc_feature (2)..(2): n is a, c, g, or u
  misc_feature (17)..(17): n is a, c, g, or u
angagggaguuugccanu

SEQ ID NO: 100279 - RNA, 19 nt, Artificial Sequence
  Synthetic
  misc_feature (3)..(3): n is a, c, g, or u
  misc_feature (18)..(18): n is a, c, g, or u
aangagggaguuugccanu

SEQ ID NO: 100280 - RNA, 20 nt, Artificial Sequence
  Synthetic
  misc_feature (4)..(4): n is a, c, g, or u
  misc_feature (19)..(19): n is a, c, g, or u
aaangagggaguuugccanu

SEQ ID NO: 100281 - RNA, 23 nt, Artificial Sequence
  Synthetic
  misc_feature (7)..(7): n is a, c, g, or u
  misc_feature (22)..(22): n is a, c, g, or u
aggaaangagggaguuugccanu

SEQ ID NO: 100282 - RNA, 24 nt, Artificial Sequence
  Synthetic
  misc_feature (1)..(1): n is a, c, g, or u
  misc_feature (8)..(8): n is a, c, g, or u
  misc_feature (23)..(23): n is a, c, g, or u
naggaaangagggaguuugccanu

SEQ ID NO: 100283 - RNA, 18 nt, Artificial Sequence
  Synthetic
  misc_feature (4)..(4): n is a, c, g, or u
  misc_feature (17)..(17): n is a, c, g, or u
uagngguaaaaaggganu

SEQ ID NO: 100284 - RNA, 19 nt, Artificial Sequence
  Synthetic
  misc_feature (5)..(5): n is a, c, g, or u
  misc_feature (18)..(18): n is a, c, g, or u
auagngguaaaaaggganu

SEQ ID NO: 100285 - RNA, 20 nt, Artificial Sequence
  Synthetic
  misc_feature (6)..(6): n is a, c, g, or u
  misc_feature (19)..(19): n is a, c, g, or u
aauagngguaaaaaggganu

SEQ ID NO: 100286 - RNA, 21 nt, Artificial Sequence
  Synthetic
  misc_feature (7)..(7): n is a, c, g, or u
  misc_feature (20)..(20): n is a, c, g, or u
uaauagngguaaaaaggganu

SEQ ID NO: 100287 - RNA, 24 nt, Artificial Sequence
  Synthetic
  misc_feature (10)..(10): n is a, c, g, or u
  misc_feature (23)..(23): n is a, c, g, or u
ugguaauagngguaaaaaggganu

SEQ ID NO: 100288 - RNA, 18 nt, Artificial Sequence
  Synthetic
  misc_feature (5)..(5): n is a, c, g, or u
  misc_feature (11)..(11): n is a, c, g, or u
  misc_feature (17)..(17): n is a, c, g, or u
uauunauaaunuccucnu

SEQ ID NO: 100289 - RNA, 19 nt, Artificial Sequence
  Synthetic
  misc_feature (6)..(6): n is a, c, g, or u
  misc_feature (12)..(12): n is a, c, g, or u
  misc_feature (18)..(18): n is a, c, g, or u
cuauunauaaunuccucnu

SEQ ID NO: 100290 - RNA, 20 nt, Artificial Sequence
  Synthetic
  misc_feature (7)..(7): n is a, c, g, or u
  misc_feature (13)..(13): n is a, c, g, or u
  misc_feature (19)..(19): n is a, c, g, or u
ucuauunauaaunuccucnu

SEQ ID NO: 100291 - RNA, 21 nt, Artificial Sequence
  Synthetic
  misc_feature (8)..(8): n is a, c, g, or u
  misc_feature (14)..(14): n is a, c, g, or u
  misc_feature (20)..(20): n is a, c, g, or u
aucuauunauaaunuccucnu

SEQ ID NO: 100292 - RNA, 22 nt, Artificial Sequence
  Synthetic
  misc_feature (9)..(9): n is a, c, g, or u
  misc_feature (15)..(15): n is a, c, g, or u
  misc_feature (21)..(21): n is a, c, g, or u
caucuauunauaaunuccucnu

SEQ ID NO: 100293 - RNA, 23 nt, Artificial Sequence
  Synthetic
  misc_feature (10)..(10): n is a, c, g, or u
  misc_feature (16)..(16): n is a, c, g, or u
  misc_feature (22)..(22): n is a, c, g, or u
acaucuauunauaaunuccucnu

SEQ ID NO: 100294 - RNA, 18 nt, Artificial Sequence
  Synthetic
caaagacaaaagaaaauu

SEQ ID NO: 100295 - RNA, 19 nt, Artificial Sequence
  Synthetic
ccaaagacaaaagaaaauu

SEQ ID NO: 100296 - RNA, 20 nt, Artificial Sequence
  Synthetic
cccaaagacaaaagaaaauu

SEQ ID NO: 100297 - RNA, 21 nt, Artificial Sequence
  Synthetic
acccaaagacaaaagaaaauu

SEQ ID NO: 100298 - RNA, 22 nt, Artificial Sequence
  Synthetic
uacccaaagacaaaagaaaauu

SEQ ID NO: 100299 - RNA, 23 nt, Artificial Sequence
  Synthetic
auacccaaagacaaaagaaaauu

SEQ ID NO: 100300 - RNA, 24 nt, Artificial Sequence
  Synthetic
uauacccaaagacaaaagaaaauu

SEQ ID NO: 100301 - RNA, 18 nt, Artificial Sequence
  Synthetic
ccaguccucgagaagauu

SEQ ID NO: 100302 - RNA, 19 nt, Artificial Sequence
  Synthetic
cccaguccucgagaagauu

SEQ ID NO: 100303 - RNA, 20 nt, Artificial Sequence
  Synthetic
ccccaguccucgagaagauu

SEQ ID NO: 100304 - RNA, 18 nt, Artificial Sequence
  Synthetic
agagguuggugagugauu

SEQ ID NO: 100305 - RNA, 19 nt, Artificial Sequence
  Synthetic
aagagguuggugagugauu

SEQ ID NO: 100306 - RNA, 20 nt, Artificial Sequence
  Synthetic
caagagguuggugagugauu

SEQ ID NO: 100307 - RNA, 21 nt, Artificial Sequence
  Synthetic
acaagagguuggugagugauu

SEQ ID NO: 100308 - RNA, 24 nt, Artificial Sequence
  Synthetic
aggacaagagguuggugagugauu

SEQ ID NO: 100309 - RNA, 18 nt, Artificial Sequence
  Synthetic
auauuguugacaucuauu

SEQ ID NO: 100310 - RNA, 19 nt, Artificial Sequence
  Synthetic
cauauuguugacaucuauu

SEQ ID NO: 100311 - RNA, 20 nt, Artificial Sequence
  Synthetic
acauauuguugacaucuauu

SEQ ID NO: 100312 - RNA, 21 nt, Artificial Sequence
  Synthetic
cacauauuguugacaucuauu

SEQ ID NO: 100313 - RNA, 22 nt, Artificial Sequence
  Synthetic
ccacauauuguugacaucuauu

SEQ ID NO: 100314 - RNA, 23 nt, Artificial Sequence
  Synthetic
cccacauauuguugacaucuauu

SEQ ID NO: 100315 - RNA, 18 nt, Artificial Sequence
  Synthetic
  misc_feature (8)..(8): n is a, c, g, or u
caauucunugacauacuu

SEQ ID NO: 100316 - RNA, 19 nt, Artificial Sequence
  Synthetic
  misc_feature (9)..(9): n is a, c, g, or u
acaauucunugacauacuu

SEQ ID NO: 100317 - RNA, 20 nt, Artificial Sequence
  Synthetic
  misc_feature (10)..(10): n is a, c, g, or u
cacaauucunugacauacuu

SEQ ID NO: 100318 - RNA, 21 nt, Artificial Sequence
  Synthetic
  misc_feature (11)..(11): n is a, c, g, or u
ccacaauucunugacauacuu

SEQ ID NO: 100319 - RNA, 22 nt, Artificial Sequence
  Synthetic
  misc_feature (12)..(12): n is a, c, g, or u
cccacaauucunugacauacuu

SEQ ID NO: 100320 - RNA, 23 nt, Artificial Sequence
  Synthetic
  misc_feature (13)..(13): n is a, c, g, or u
acccacaauucunugacauacuu

SEQ ID NO: 100321 - RNA, 18 nt, Artificial Sequence
  Synthetic
aguaaaguuucccaccuu

SEQ ID NO: 100322 - RNA, 19 nt, Artificial Sequence
  Synthetic
caguaaaguuucccaccuu

SEQ ID NO: 100323 - RNA, 20 nt, Artificial Sequence
  Synthetic
ccaguaaaguuucccaccuu

SEQ ID NO: 100324 - RNA, 21 nt, Artificial Sequence
  Synthetic
cccaguaaaguuucccaccuu

SEQ ID NO: 100325 - RNA, 23 nt, Artificial Sequence
  Synthetic
agcccaguaaaguuucccaccuu

SEQ ID NO: 100326 - RNA, 24 nt, Artificial Sequence
  Synthetic
aagcccaguaaaguuucccaccuu

SEQ ID NO: 100327 - RNA, 23 nt, Artificial Sequence
  Synthetic
aggacaaacgggcaacauaccuu

SEQ ID NO: 100328 - RNA, 18 nt, Artificial Sequence
  Synthetic
uuuacacagaaaggccuu

SEQ ID NO: 100329 - RNA, 20 nt, Artificial Sequence
  Synthetic
uguuuacacagaaaggccuu

SEQ ID NO: 100330 - RNA, 21 nt, Artificial Sequence
  Synthetic
uuguuuacacagaaaggccuu

SEQ ID NO: 100331 - RNA, 22 nt, Artificial Sequence
  Synthetic
auuguuuacacagaaaggccuu

SEQ ID NO: 100332 - RNA, 23 nt, Artificial Sequence
  Synthetic
uauuguuuacacagaaaggccuu

SEQ ID NO: 100333 - RNA, 24 nt, Artificial Sequence
  Synthetic
auauuguuuacacagaaaggccuu

SEQ ID NO: 100334 - RNA, 18 nt, Artificial Sequence
  Synthetic
ugaggaugacugucucuu

SEQ ID NO: 100335 - RNA, 19 nt, Artificial Sequence
  Synthetic
cugaggaugacugucucuu

SEQ ID NO: 100336 - RNA, 20 nt, Artificial Sequence
  Synthetic
ccugaggaugacugucucuu

SEQ ID NO: 100337 - RNA, 18 nt, Artificial Sequence
  Synthetic
  misc_feature (2)..(2): n is a, c, g, or u
  misc_feature (8)..(8): n is a, c, g, or u
  misc_feature (10)..(10): n is a, c, g, or u
cnuuaaananacagucuu

SEQ ID NO: 100338 - RNA, 19 nt, Artificial Sequence
  Synthetic
  misc_feature (3)..(3): n is a, c, g, or u
  misc_feature (9)..(9): n is a, c, g, or u
  misc_feature (11)..(11): n is a, c, g, or u
ucnuuaaananacagucuu

SEQ ID NO: 100339 - RNA, 21 nt, Artificial Sequence
  Synthetic
  misc_feature (5)..(5): n is a, c, g, or u
  misc_feature (11)..(11): n is a, c, g, or u
  misc_feature (13)..(13): n is a, c, g, or u
agucnuuaaananacagucuu

SEQ ID NO: 100340 - RNA, 22 nt, Artificial Sequence
  Synthetic
  misc_feature (6)..(6): n is a, c, g, or u
  misc_feature (12)..(12): n is a, c, g, or u
  misc_feature (14)..(14): n is a, c, g, or u
cagucnuuaaananacagucuu

SEQ ID NO: 100341 - RNA, 23 nt, Artificial Sequence
  Synthetic
  misc_feature (7)..(7): n is a, c, g, or u
  misc_feature (13)..(13): n is a, c, g, or u
  misc_feature (15)..(15): n is a, c, g, or u
ccagucnuuaaananacagucuu

SEQ ID NO: 100342 - RNA, 24 nt, Artificial Sequence
  Synthetic
  misc_feature (8)..(8): n is a, c, g, or u
  misc_feature (14)..(14): n is a, c, g, or u
  misc_feature (16)..(16): n is a, c, g, or u
cccagucnuuaaananacagucuu

SEQ ID NO: 100343 - RNA, 18 nt, Artificial Sequence
  Synthetic
  misc_feature (14)..(14): n is a, c, g, or u
cccuggaugcuggnucuu

SEQ ID NO: 100344 - RNA, 19 nt, Artificial Sequence
  Synthetic
  misc_feature (15)..(15): n is a, c, g, or u
ucccuggaugcuggnucuu

SEQ ID NO: 100345 - RNA, 20 nt, Artificial Sequence
  Synthetic
  misc_feature (16)..(16): n is a, c, g, or u
uucccuggaugcuggnucuu

SEQ ID NO: 100346 - RNA, 21 nt, Artificial Sequence
  Synthetic
  misc_feature (17)..(17): n is a, c, g, or u
auucccuggaugcuggnucuu

SEQ ID NO: 100347 - RNA, 22 nt, Artificial Sequence
  Synthetic
  misc_feature (18)..(18): n is a, c, g, or u
aauucccuggaugcuggnucuu

SEQ ID NO: 100348 - RNA, 23 nt, Artificial Sequence
  Synthetic
  misc_feature (19)..(19): n is a, c, g, or u
uaauucccuggaugcuggnucuu

SEQ ID NO: 100349 - RNA, 24 nt, Artificial Sequence
  Synthetic
  misc_feature (20)..(20): n is a, c, g, or u
cuaauucccuggaugcuggnucuu

SEQ ID NO: 100350 - RNA, 18 nt, Artificial Sequence
  Synthetic
  misc_feature (11)..(11): n is a, c, g, or u
caagaccuggngggcguu

SEQ ID NO: 100351 - RNA, 18 nt, Artificial Sequence
  Synthetic
  misc_feature (13)..(13): n is a, c, g, or u
aaugauuaacugnauguu

SEQ ID NO: 100352 - RNA, 19 nt, Artificial Sequence
  Synthetic
  misc_feature (14)..(14): n is a, c, g, or u
uaaugauuaacugnauguu

SEQ ID NO: 100353 - RNA, 21 nt, Artificial Sequence
  Synthetic
  misc_feature (16)..(16): n is a, c, g, or u
aguaaugauuaacugnauguu

SEQ ID NO: 100354 - RNA, 22 nt, Artificial Sequence
  Synthetic
  misc_feature (17)..(17): n is a, c, g, or u
aaguaaugauuaacugnauguu

SEQ ID NO: 100355 - RNA, 24 nt, Artificial Sequence
  Synthetic
  misc_feature (1)..(1): n is a, c, g, or u
  misc_feature (19)..(19): n is a, c, g, or u
ngaaguaaugauuaacugnauguu

SEQ ID NO: 100356 - RNA, 19 nt, Artificial Sequence
  Synthetic
  misc_feature (4)..(4): n is a, c, g, or u
  misc_feature (8)..(8): n is a, c, g, or u
aggngcuncuggcacuguu

SEQ ID NO: 100357 - RNA, 22 nt, Artificial Sequence
  Synthetic
  misc_feature (7)..(7): n is a, c, g, or u
  misc_feature (11)..(11): n is a, c, g, or u
aggaggngcuncuggcacuguu

SEQ ID NO: 100358 - RNA, 19 nt, Artificial Sequence
  Synthetic
ugauaagauaggggcauuu

SEQ ID NO: 100359 - RNA, 20 nt, Artificial Sequence
  Synthetic
uugauaagauaggggcauuu

SEQ ID NO: 100360 - RNA, 19 nt, Artificial Sequence
  Synthetic
uguaaauaaugccuaguuu

SEQ ID NO: 100361 - RNA, 20 nt, Artificial Sequence
  Synthetic
auguaaauaaugccuaguuu

SEQ ID NO: 100362 - RNA, 21 nt, Artificial Sequence
  Synthetic
uauguaaauaaugccuaguuu

SEQ ID NO: 100363 - RNA, 23 nt, Artificial Sequence
  Synthetic
aguauguaaauaaugccuaguuu

SEQ ID NO: 100364 - RNA, 18 nt, Artificial Sequence
  Synthetic
uuacaguuaaugaaaaaa

SEQ ID NO: 100365 - RNA, 19 nt, Artificial Sequence
  Synthetic
cuuacaguuaaugaaaaaa

SEQ ID NO: 100366 - RNA, 20 nt, Artificial Sequence
  Synthetic
ucuuacaguuaaugaaaaaa

SEQ ID NO: 100367 - RNA, 21 nt, Artificial Sequence
  Synthetic
cucuuacaguuaaugaaaaaa

SEQ ID NO: 100368 - RNA, 22 nt, Artificial Sequence
  Synthetic
ccucuuacaguuaaugaaaaaa

SEQ ID NO: 100369 - RNA, 23 nt, Artificial Sequence
  Synthetic
cccucuuacaguuaaugaaaaaa

SEQ ID NO: 100370 - RNA, 18 nt, Artificial Sequence
  Synthetic
  misc_feature (4)..(4): n is a, c, g, or u
  misc_feature (12)..(12): n is a, c, g, or u
ucanuggccagnggcaaa

SEQ ID NO: 100371 - RNA, 19 nt, Artificial Sequence
  Synthetic
  misc_feature (5)..(5): n is a, c, g, or u
  misc_feature (13)..(13): n is a, c, g, or u
aucanuggccagnggcaaa

SEQ ID NO: 100372 - RNA, 22 nt, Artificial Sequence
  Synthetic
  misc_feature (8)..(8): n is a, c, g, or u
  misc_feature (16)..(16): n is a, c, g, or u
aggaucanuggccagnggcaaa

SEQ ID NO: 100373 - RNA, 23 nt, Artificial Sequence
  Synthetic
  misc_feature (9)..(9): n is a, c, g, or u
  misc_feature (17)..(17): n is a, c, g, or u
aaggaucanuggccagnggcaaa

SEQ ID NO: 100374 - RNA, 24 nt, Artificial Sequence
  Synthetic
  misc_feature (10)..(10): n is a, c, g, or u
  misc_feature (18)..(18): n is a, c, g, or u
caaggaucanuggccagnggcaaa

SEQ ID NO: 100375 - RNA, 19 nt, Artificial Sequence
  Synthetic
  misc_feature (5)..(5): n is a, c, g, or u
  misc_feature (8)..(8): n is a, c, g, or u
ugcunggnugugcugccaa

SEQ ID NO: 100376 - RNA, 20 nt, Artificial Sequence
  Synthetic
  misc_feature (6)..(6): n is a, c, g, or u
  misc_feature (9)..(9): n is a, c, g, or u
cugcunggnugugcugccaa

SEQ ID NO: 100377 - RNA, 23 nt, Artificial Sequence
  Synthetic
  misc_feature (9)..(9): n is a, c, g, or u
  misc_feature (12)..(12): n is a, c, g, or u
uggcugcunggnugugcugccaa

SEQ ID NO: 100378 - RNA, 24 nt, Artificial Sequence
  Synthetic
  misc_feature (10)..(10): n is a, c, g, or u
  misc_feature (13)..(13): n is a, c, g, or u
auggcugcunggnugugcugccaa

SEQ ID NO: 100379 - RNA, 18 nt, Artificial Sequence
  Synthetic
  misc_feature (1)..(1): n is a, c, g, or u
nggaggcuguaggcauaa

SEQ ID NO: 100380 - RNA, 19 nt, Artificial Sequence
  Synthetic
  misc_feature (2)..(2): n is a, c, g, or u
unggaggcuguaggcauaa

SEQ ID NO: 100381 - RNA, 20 nt, Artificial Sequence
  Synthetic
  misc_feature (3)..(3): n is a, c, g, or u
cunggaggcuguaggcauaa

SEQ ID NO: 100382 - RNA, 18 nt, Artificial Sequence
  Synthetic
  misc_feature (4)..(4): n is a, c, g, or u
accnuauuauccugaaca

SEQ ID NO: 100383 - RNA, 19 nt, Artificial Sequence
  Synthetic
  misc_feature (5)..(5): n is a, c, g, or u
aaccnuauuauccugaaca

SEQ ID NO: 100384 - RNA, 20 nt, Artificial Sequence
  Synthetic
  misc_feature (6)..(6): n is a, c, g, or u
aaaccnuauuauccugaaca

SEQ ID NO: 100385 - RNA, 21 nt, Artificial Sequence
  Synthetic
  misc_feature (7)..(7): n is a, c, g, or u
uaaaccnuauuauccugaaca

SEQ ID NO: 100386 - RNA, 22 nt, Artificial Sequence
  Synthetic
  misc_feature (8)..(8): n is a, c, g, or u
uuaaaccnuauuauccugaaca

SEQ ID NO: 100387 - RNA, 23 nt, Artificial Sequence
  Synthetic
  misc_feature (9)..(9): n is a, c, g, or u
auuaaaccnuauuauccugaaca

SEQ ID NO: 100388 - RNA, 24 nt, Artificial Sequence
  Synthetic
  misc_feature (10)..(10): n is a, c, g, or u
cauuaaaccnuauuauccugaaca

SEQ ID NO: 100389 - RNA, 18 nt, Artificial Sequence
  Synthetic
uaugugggcccucuuaca

SEQ ID NO: 100390 - RNA, 19 nt, Artificial Sequence
  Synthetic
auaugugggcccucuuaca

SEQ ID NO: 100391 - RNA, 20 nt, Artificial Sequence
  Synthetic
aauaugugggcccucuuaca

SEQ ID NO: 100392 - RNA, 21 nt, Artificial Sequence
  Synthetic
caauaugugggcccucuuaca

SEQ ID NO: 100393 - RNA, 22 nt, Artificial Sequence
  Synthetic
acaauaugugggcccucuuaca

SEQ ID NO: 100394 - RNA, 23 nt, Artificial Sequence
  Synthetic
aacaauaugugggcccucuuaca

SEQ ID NO: 100395 - RNA, 24 nt, Artificial Sequence
  Synthetic
caacaauaugugggcccucuuaca

SEQ ID NO: 100396 - RNA, 18 nt, Artificial Sequence
  Synthetic
  misc_feature (4)..(4): n is a, c, g, or u
  misc_feature (6)..(6): n is a, c, g, or u
ccuncngcuuacagacca

SEQ ID NO: 100397 - RNA, 19 nt, Artificial Sequence
  Synthetic
  misc_feature (5)..(5): n is a, c, g, or u
  misc_feature (7)..(7): n is a, c, g, or u
uccuncngcuuacagacca

SEQ ID NO: 100398 - RNA, 20 nt, Artificial Sequence
  Synthetic
  misc_feature (6)..(6): n is a, c, g, or u
  misc_feature (8)..(8): n is a, c, g, or u
cuccuncngcuuacagacca

SEQ ID NO: 100399 - RNA, 21 nt, Artificial Sequence
  Synthetic
  misc_feature (7)..(7): n is a, c, g, or u
  misc_feature (9)..(9): n is a, c, g, or u
acuccuncngcuuacagacca

SEQ ID NO: 100400 - RNA, 22 nt, Artificial Sequence
  Synthetic
  misc_feature (8)..(8): n is a, c, g, or u
  misc_feature (10)..(10): n is a, c, g, or u
cacuccuncngcuuacagacca

SEQ ID NO: 100401 - RNA, 24 nt, Artificial Sequence
  Synthetic
  misc_feature (10)..(10): n is a, c, g, or u
  misc_feature (12)..(12): n is a, c, g, or u
cgcacuccuncngcuuacagacca

SEQ ID NO: 100402 - RNA, 18 nt, Artificial Sequence
  Synthetic
agaauccucacaauacca

SEQ ID NO: 100403 - RNA, 19 nt, Artificial Sequence
  Synthetic
aagaauccucacaauacca

SEQ ID NO: 100404 - RNA, 20 nt, Artificial Sequence
  Synthetic
caagaauccucacaauacca

SEQ ID NO: 100405 - RNA, 18 nt, Artificial Sequence
  Synthetic
acagucauccucaggcca

SEQ ID NO: 100406 - RNA, 20 nt, Artificial Sequence
  Synthetic
agacagucauccucaggcca

SEQ ID NO: 100407 - RNA, 18 nt, Artificial Sequence
  Synthetic
  misc_feature (8)..(8): n is a, c, g, or u
uggaaganccagcaucca

SEQ ID NO: 100408 - RNA, 19 nt, Artificial Sequence
  Synthetic
  misc_feature (9)..(9): n is a, c, g, or u
uuggaaganccagcaucca

SEQ ID NO: 100409 - RNA, 20 nt, Artificial Sequence
  Synthetic
  misc_feature (10)..(10): n is a, c, g, or u
uuuggaaganccagcaucca

SEQ ID NO: 100410 - RNA, 21 nt, Artificial Sequence
  Synthetic
  misc_feature (11)..(11): n is a, c, g, or u
auuuggaaganccagcaucca

SEQ ID NO: 100411 - RNA, 22 nt, Artificial Sequence
  Synthetic
  misc_feature (12)..(12): n is a, c, g, or u
aauuuggaaganccagcaucca

SEQ ID NO: 100412 - RNA, 23 nt, Artificial Sequence
  Synthetic
  misc_feature (13)..(13): n is a, c, g, or u
uaauuuggaaganccagcaucca

SEQ ID NO: 100413 - RNA, 18 nt, Artificial Sequence
  Synthetic
cagcuuguuuugcucgca

SEQ ID NO: 100414 - RNA, 20 nt, Artificial Sequence
  Synthetic
agcagcuuguuuugcucgca

SEQ ID NO: 100415 - RNA, 18 nt, Artificial Sequence
  Synthetic
  misc_feature (16)..(16): n is a, c, g, or u
uauuauccugaacaunca

SEQ ID NO: 100416 - RNA, 19 nt, Artificial Sequence
  Synthetic
  misc_feature (1)..(1): n is a, c, g, or u
  misc_feature (17)..(17): n is a, c, g, or u
nuauuauccugaacaunca

SEQ ID NO: 100417 - RNA, 20 nt, Artificial Sequence
  Synthetic
  misc_feature (2)..(2): n is a, c, g, or u
  misc_feature (18)..(18): n is a, c, g, or u
cnuauuauccugaacaunca

SEQ ID NO: 100418 - RNA, 21 nt, Artificial Sequence
  Synthetic
  misc_feature (3)..(3): n is a, c, g, or u
  misc_feature (19)..(19): n is a, c, g, or u
ccnuauuauccugaacaunca

SEQ ID NO: 100419 - RNA, 22 nt, Artificial Sequence
  Synthetic
  misc_feature (4)..(4): n is a, c, g, or u
  misc_feature (20)..(20): n is a, c, g, or u
accnuauuauccugaacaunca

SEQ ID NO: 100420 - RNA, 23 nt, Artificial Sequence
  Synthetic
  misc_feature (5)..(5): n is a, c, g, or u
  misc_feature (21)..(21): n is a, c, g, or u
aaccnuauuauccugaacaunca

SEQ ID NO: 100421 - RNA, 24 nt, Artificial Sequence
  Synthetic
  misc_feature (6)..(6): n is a, c, g, or u
  misc_feature (22)..(22): n is a, c, g, or u
aaaccnuauuauccugaacaunca

SEQ ID NO: 100422 - RNA, 21 nt, Artificial Sequence
  Synthetic
uguuaguaucccuuggacuca

SEQ ID NO: 100423 - RNA, 22 nt, Artificial Sequence
  Synthetic
auguuaguaucccuuggacuca

SEQ ID NO: 100424 - RNA, 23 nt, Artificial Sequence
  Synthetic
aauguuaguaucccuuggacuca

SEQ ID NO: 100425 - RNA, 24 nt, Artificial Sequence
  Synthetic
caauguuaguaucccuuggacuca

SEQ ID NO: 100426 - RNA, 18 nt, Artificial Sequence
  Synthetic
ugauuggaaaguauguca

SEQ ID NO: 100427 - RNA, 19 nt, Artificial Sequence
  Synthetic
uugauuggaaaguauguca

SEQ ID NO: 100428 - RNA, 20 nt, Artificial Sequence
  Synthetic
auugauuggaaaguauguca

SEQ ID NO: 100429 - RNA, 21 nt, Artificial Sequence
  Synthetic
uauugauuggaaaguauguca

SEQ ID NO: 100430 - RNA, 22 nt, Artificial Sequence
  Synthetic
cuauugauuggaaaguauguca

SEQ ID NO: 100431 - RNA, 23 nt, Artificial Sequence
  Synthetic
ccuauugauuggaaaguauguca

SEQ ID NO: 100432 - RNA, 24 nt, Artificial Sequence
  Synthetic
accuauugauuggaaaguauguca

SEQ ID NO: 100433 - RNA, 19 nt, Artificial Sequence
  Synthetic
  misc_feature (1)..(1): n is a, c, g, or u
  misc_feature (4)..(4): n is a, c, g, or u
  misc_feature (16)..(16): n is a, c, g, or u
ngcnuucggagccaanuca

SEQ ID NO: 100434 - RNA, 20 nt, Artificial Sequence
  Synthetic
  misc_feature (2)..(2): n is a, c, g, or u
  misc_feature (5)..(5): n is a, c, g, or u
  misc_feature (17)..(17): n is a, c, g, or u
cngcnuucggagccaanuca

SEQ ID NO: 100435 - RNA, 21 nt, Artificial Sequence
  Synthetic
  misc_feature (3)..(3): n is a, c, g, or u
  misc_feature (6)..(6): n is a, c, g, or u
  misc_feature (18)..(18): n is a, c, g, or u
ccngcnuucggagccaanuca

SEQ ID NO: 100436 - RNA, 22 nt, Artificial Sequence
  Synthetic
  misc_feature (4)..(4): n is a, c, g, or u
  misc_feature (7)..(7): n is a, c, g, or u
  misc_feature (19)..(19): n is a, c, g, or u
cccngcnuucggagccaanuca

SEQ ID NO: 100437 - RNA, 23 nt, Artificial Sequence
  Synthetic
  misc_feature (5)..(5): n is a, c, g, or u
  misc_feature (8)..(8): n is a, c, g, or u
  misc_feature (20)..(20): n is a, c, g, or u
acccngcnuucggagccaanuca

SEQ ID NO: 100438 - RNA, 22 nt, Artificial Sequence
  Synthetic
  misc_feature (18)..(18): n is a, c, g, or u
uggggcuacucccuuaanuuca

SEQ ID NO: 100439 - RNA, 23 nt, Artificial Sequence
  Synthetic
  misc_feature (19)..(19): n is a, c, g, or u
uuggggcuacucccuuaanuuca

SEQ ID NO: 100440 - RNA, 18 nt, Artificial Sequence
  Synthetic
aucucuccaccucuaaga

SEQ ID NO: 100441 - RNA, 19 nt, Artificial Sequence
  Synthetic
caucucuccaccucuaaga

SEQ ID NO: 100442 - RNA, 20 nt, Artificial Sequence
  Synthetic
ccaucucuccaccucuaaga

SEQ ID NO: 100443 - RNA, 21 nt, Artificial Sequence
  Synthetic
cccaucucuccaccucuaaga

SEQ ID NO: 100444 - RNA, 22 nt, Artificial Sequence
  Synthetic
ucccaucucuccaccucuaaga

SEQ ID NO: 100445 - RNA, 23 nt, Artificial Sequence
  Synthetic
cucccaucucuccaccucuaaga

SEQ ID NO: 100446 - RNA, 24 nt, Artificial Sequence
  Synthetic
acucccaucucuccaccucuaaga

SEQ ID NO: 100447 - RNA, 18 nt, Artificial Sequence
  Synthetic
aggaguugggggaggaga

SEQ ID NO: 100448 - RNA, 22 nt, Artificial Sequence
  Synthetic
ugggaggaguugggggaggaga

SEQ ID NO: 100449 - RNA, 23 nt, Artificial Sequence
  Synthetic
cugggaggaguugggggaggaga

SEQ ID NO: 100450 - RNA, 24 nt, Artificial Sequence
  Synthetic
acugggaggaguugggggaggaga

SEQ ID NO: 100451 - RNA, 18 nt, Artificial Sequence
  Synthetic
  misc_feature (4)..(4): n is a, c, g, or u
aganccagcauccaggga

SEQ ID NO: 100452 - RNA, 19 nt, Artificial Sequence
  Synthetic
  misc_feature (5)..(5): n is a, c, g, or u
aaganccagcauccaggga

SEQ ID NO: 100453 - RNA, 22 nt, Artificial Sequence
  Synthetic
  misc_feature (8)..(8): n is a, c, g, or u
uggaaganccagcauccaggga

SEQ ID NO: 100454 - RNA, 23 nt, Artificial Sequence
  Synthetic
  misc_feature (9)..(9): n is a, c, g, or u
uuggaaganccagcauccaggga

SEQ ID NO: 100455 - RNA, 24 nt, Artificial Sequence
  Synthetic
  misc_feature (10)..(10): n is a, c, g, or u
uuuggaaganccagcauccaggga

SEQ ID NO: 100456 - RNA, 18 nt, Artificial Sequence
  Synthetic
cuggccaccuggguggga

SEQ ID NO: 100457 - RNA, 19 nt, Artificial Sequence
  Synthetic
ucuggccaccuggguggga

SEQ ID NO: 100458 - RNA, 20 nt, Artificial Sequence
  Synthetic
aucuggccaccuggguggga

SEQ ID NO: 100459 - RNA, 21 nt, Artificial Sequence
  Synthetic
aaucuggccaccuggguggga

SEQ ID NO: 100460 - RNA, 23 nt, Artificial Sequence
  Synthetic
ugaaucuggccaccuggguggga

SEQ ID NO: 100461 - RNA, 24 nt, Artificial Sequence
  Synthetic
augaaucuggccaccuggguggga

SEQ ID NO: 100462 - RNA, 18 nt, Artificial Sequence
  Synthetic
uuucaguuauauggauga

SEQ ID NO: 100463 - RNA, 19 nt, Artificial Sequence
  Synthetic
cuuucaguuauauggauga

SEQ ID NO: 100464 - RNA, 18 nt, Artificial Sequence
  Synthetic
uauucuguguugggguga

SEQ ID NO: 100465 - RNA, 19 nt, Artificial Sequence
  Synthetic
cuauucuguguugggguga

SEQ ID NO: 100466 - RNA, 18 nt, Artificial Sequence
  Synthetic
  misc_feature (2)..(3): n is a, c, g, or u
  misc_feature (5)..(5): n is a, c, g, or u
  misc_feature (11)..(11): n is a, c, g, or u
  misc_feature (17)..(17): n is a, c, g, or u
unnangagganauuauna

SEQ ID NO: 100467 - RNA, 19 nt, Artificial Sequence
  Synthetic
  misc_feature (3)..(4): n is a, c, g, or u
  misc_feature (6)..(6): n is a, c, g, or u
  misc_feature (12)..(12): n is a, c, g, or u
  misc_feature (18)..(18): n is a, c, g, or u
uunnangagganauuauna

SEQ ID NO: 100468 - RNA, 20 nt, Artificial Sequence
  Synthetic
  misc_feature (4)..(5): n is a, c, g, or u
  misc_feature (7)..(7): n is a, c, g, or u
  misc_feature (13)..(13): n is a, c, g, or u
  misc_feature (19)..(19): n is a, c, g, or u
uuunnangagganauuauna

SEQ ID NO: 100469 - RNA, 21 nt, Artificial Sequence
  Synthetic
  misc_feature (5)..(6): n is a, c, g, or u
  misc_feature (8)..(8): n is a, c, g, or u
  misc_feature (14)..(14): n is a, c, g, or u
  misc_feature (20)..(20): n is a, c, g, or u
auuunnangagganauuauna

SEQ ID NO: 100470 - RNA, 22 nt, Artificial Sequence
  Synthetic
  misc_feature (6)..(7): n is a, c, g, or u
  misc_feature (9)..(9): n is a, c, g, or u
  misc_feature (15)..(15): n is a, c, g, or u
  misc_feature (21)..(21): n is a, c, g, or u
cauuunnangagganauuauna

SEQ ID NO: 100471 - RNA, 23 nt, Artificial Sequence
  Synthetic
  misc_feature (7)..(8): n is a, c, g, or u
  misc_feature (10)..(10): n is a, c, g, or u
  misc_feature (16)..(16): n is a, c, g, or u
  misc_feature (22)..(22): n is a, c, g, or u
ucauuunnangagganauuauna

SEQ ID NO: 100472 - RNA, 24 nt, Artificial Sequence
  Synthetic
  misc_feature (8)..(9): n is a, c, g, or u
  misc_feature (11)..(11): n is a, c, g, or u
  misc_feature (17)..(17): n is a, c, g, or u
  misc_feature (23)..(23): n is a, c, g, or u
uucauuunnangagganauuauna

SEQ ID NO: 100473 - RNA, 18 nt, Artificial Sequence
  Synthetic
  misc_feature (10)..(11): n is a, c, g, or u
  misc_feature (15)..(15): n is a, c, g, or u
  misc_feature (17)..(17): n is a, c, g, or u
auauuguacnnaaanuna

SEQ ID NO: 100474 - RNA, 19 nt, Artificial Sequence
  Synthetic
  misc_feature (11)..(12): n is a, c, g, or u
  misc_feature (16)..(16): n is a, c, g, or u
  misc_feature (18)..(18): n is a, c, g, or u
cauauuguacnnaaanuna

SEQ ID NO: 100475 - RNA, 20 nt, Artificial Sequence
  Synthetic
  misc_feature (12)..(13): n is a, c, g, or u
  misc_feature (17)..(17): n is a, c, g, or u
  misc_feature (19)..(19): n is a, c, g, or u
acauauuguacnnaaanuna

SEQ ID NO: 100476 - RNA, 21 nt, Artificial Sequence
  Synthetic
  misc_feature (13)..(14): n is a, c, g, or u
  misc_feature (18)..(18): n is a, c, g, or u
  misc_feature (20)..(20): n is a, c, g, or u
aacauauuguacnnaaanuna

SEQ ID NO: 100477 - RNA, 23 nt, Artificial Sequence
  Synthetic
  misc_feature (1)..(1): n is a, c, g, or u
  misc_feature (15)..(16): n is a, c, g, or u
  misc_feature (20)..(20): n is a, c, g, or u
  misc_feature (22)..(22): n is a, c, g, or u
ngaacauauuguacnnaaanuna

SEQ ID NO: 100478 - RNA, 24 nt, Artificial Sequence
  Synthetic
  misc_feature (2)..(2): n is a, c, g, or u
  misc_feature (16)..(17): n is a, c, g, or u
  misc_feature (21)..(21): n is a, c, g, or u
  misc_feature (23)..(23): n is a, c, g, or u
angaacauauuguacnnaaanuna

SEQ ID NO: 100479 - RNA, 18 nt, Artificial Sequence
  Synthetic
  misc_feature (7)..(7): n is a, c, g, or u
ccuuaanuucaugggaua

SEQ ID NO: 100480 - RNA, 19 nt, Artificial Sequence
  Synthetic
  misc_feature (8)..(8): n is a, c, g, or u
cccuuaanuucaugggaua

SEQ ID NO: 100481 - RNA, 20 nt, Artificial Sequence
  Synthetic
  misc_feature (9)..(9): n is a, c, g, or u
ucccuuaanuucaugggaua

SEQ ID NO: 100482 - RNA, 21 nt, Artificial Sequence
  Synthetic
  misc_feature (10)..(10): n is a, c, g, or u
cucccuuaanuucaugggaua

SEQ ID NO: 100483 - RNA, 22 nt, Artificial Sequence
  Synthetic
  misc_feature (11)..(11): n is a, c, g, or u
acucccuuaanuucaugggaua

SEQ ID NO: 100484 - RNA, 23 nt, Artificial Sequence
  Synthetic
  misc_feature (12)..(12): n is a, c, g, or u
uacucccuuaanuucaugggaua

SEQ ID NO: 100485 - RNA, 24 nt, Artificial Sequence
  Synthetic
  misc_feature (13)..(13): n is a, c, g, or u
cuacucccuuaanuucaugggaua

SEQ ID NO: 100486 - RNA, 18 nt, Artificial Sequence
  Synthetic
  misc_feature (14)..(14): n is a, c, g, or u
uggacauugacccnuaua

SEQ ID NO: 100487 - RNA, 19 nt, Artificial Sequence
  Synthetic
  misc_feature (15)..(15): n is a, c, g, or u
auggacauugacccnuaua

SEQ ID NO: 100488 - RNA, 20 nt, Artificial Sequence
  Synthetic
  misc_feature (16)..(16): n is a, c, g, or u
cauggacauugacccnuaua

SEQ ID NO: 100489 - RNA, 24 nt, Artificial Sequence
  Synthetic
  misc_feature (1)..(1): n is a, c, g, or u
  misc_feature (20)..(20): n is a, c, g, or u
ngggcauggacauugacccnuaua

SEQ ID NO: 100490 - RNA, 18 nt, Artificial Sequence
  Synthetic
agaaacuguucuugagua

SEQ ID NO: 100491 - RNA, 20 nt, Artificial Sequence
  Synthetic
agagaaacuguucuugagua

SEQ ID NO: 100492 - RNA, 21 nt, Artificial Sequence
  Synthetic
aagagaaacuguucuugagua

SEQ ID NO: 100493 - RNA, 24 nt, Artificial Sequence
  Synthetic
uggaagagaaacuguucuugagua

SEQ ID NO: 100494 - RNA, 18 nt, Artificial Sequence
  Synthetic
acaaggccuuucugugua

SEQ ID NO: 100495 - RNA, 19 nt, Artificial Sequence
  Synthetic
uacaaggccuuucugugua

SEQ ID NO: 100496 - RNA, 20 nt, Artificial Sequence
  Synthetic
uuacaaggccuuucugugua

SEQ ID NO: 100497 - RNA, 21 nt, Artificial Sequence
  Synthetic
cuuacaaggccuuucugugua

SEQ ID NO: 100498 - RNA, 22 nt, Artificial Sequence
  Synthetic
acuuacaaggccuuucugugua

SEQ ID NO: 100499 - RNA, 23 nt, Artificial Sequence
  Synthetic
aacuuacaaggccuuucugugua

SEQ ID NO: 100500 - RNA, 24 nt, Artificial Sequence
  Synthetic
caacuuacaaggccuuucugugua

SEQ ID NO: 100501 - RNA, 19 nt, Artificial Sequence
  Synthetic
agguucuauccuaaccuua

SEQ ID NO: 100502 - RNA, 20 nt, Artificial Sequence
  Synthetic
uagguucuauccuaaccuua

SEQ ID NO: 100503 - RNA, 21 nt, Artificial Sequence
  Synthetic
cuagguucuauccuaaccuua

SEQ ID NO: 100504 - RNA, 23 nt, Artificial Sequence
  Synthetic
ugcuagguucuauccuaaccuua

SEQ ID NO: 100505 - RNA, 24 nt, Artificial Sequence
  Synthetic
cugcuagguucuauccuaaccuua

SEQ ID NO: 100506 - RNA, 21 nt, Artificial Sequence
  Synthetic
  misc_feature (11)..(11): n is a, c, g, or u
ugggcuuugcngccccuuuua

SEQ ID NO: 100507 - RNA, 22 nt, Artificial Sequence
  Synthetic
  misc_feature (1)..(1): n is a, c, g, or u
  misc_feature (12)..(12): n is a, c, g, or u
nugggcuuugcngccccuuuua

SEQ ID NO: 100508 - RNA, 23 nt, Artificial Sequence
  Synthetic
  misc_feature (2)..(2): n is a, c, g, or u
  misc_feature (13)..(13): n is a, c, g, or u
unugggcuuugcngccccuuuua

SEQ ID NO: 100509 - RNA, 24 nt, Artificial Sequence
  Synthetic
  misc_feature (3)..(3): n is a, c, g, or u
  misc_feature (14)..(14): n is a, c, g, or u
uunugggcuuugcngccccuuuua

SEQ ID NO: 100510 - RNA, 18 nt, Artificial Sequence
  Synthetic
ugggacuucaaccccaac

SEQ ID NO: 100511 - RNA, 19 nt, Artificial Sequence
  Synthetic
uugggacuucaaccccaac

SEQ ID NO: 100512 - RNA, 20 nt, Artificial Sequence
  Synthetic
auugggacuucaaccccaac

SEQ ID NO: 100513 - RNA, 18 nt, Artificial Sequence
  Synthetic
  misc_feature (15)..(15): n is a, c, g, or u
uuggguauacauuunaac

SEQ ID NO: 100514 - RNA, 19 nt, Artificial Sequence
  Synthetic
  misc_feature (16)..(16): n is a, c, g, or u
uuuggguauacauuunaac

SEQ ID NO: 100515 - RNA, 20 nt, Artificial Sequence
  Synthetic
  misc_feature (17)..(17): n is a, c, g, or u
cuuuggguauacauuunaac

SEQ ID NO: 100516 - RNA, 21 nt, Artificial Sequence
  Synthetic
  misc_feature (18)..(18): n is a, c, g, or u
ucuuuggguauacauuunaac

SEQ ID NO: 100517 - RNA, 23 nt, Artificial Sequence
  Synthetic
  misc_feature (20)..(20): n is a, c, g, or u
ugucuuuggguauacauuunaac

SEQ ID NO: 100518 - RNA, 24 nt, Artificial Sequence
  Synthetic
  misc_feature (21)..(21): n is a, c, g, or u
uugucuuuggguauacauuunaac

SEQ ID NO: 100519 - RNA, 19 nt, Artificial Sequence
  Synthetic
aggcucagggcauauugac

SEQ ID NO: 100520 - RNA, 20 nt, Artificial Sequence
  Synthetic
caggcucagggcauauugac

SEQ ID NO: 100521 - RNA, 18 nt, Artificial Sequence
  Synthetic
uugguucuucuggacuac

SEQ ID NO: 100522 - RNA, 20 nt, Artificial Sequence
  Synthetic
uguugguucuucuggacuac

SEQ ID NO: 100523 - RNA, 21 nt, Artificial Sequence
  Synthetic
uuguugguucuucuggacuac

SEQ ID NO: 100524 - RNA, 22 nt, Artificial Sequence
  Synthetic
cuuguugguucuucuggacuac

SEQ ID NO: 100525 - RNA, 23 nt, Artificial Sequence
  Synthetic
ucuuguugguucuucuggacuac

SEQ ID NO: 100526 - RNA, 24 nt, Artificial Sequence
  Synthetic
uucuuguugguucuucuggacuac

SEQ ID NO: 100527 - RNA, 18 nt, Artificial Sequence
  Synthetic
  misc_feature (5)..(5): n is a, c, g, or u
aauungcaguccccaacc

SEQ ID NO: 100528 - RNA, 19 nt, Artificial Sequence
  Synthetic
  misc_feature (6)..(6): n is a, c, g, or u
aaauungcaguccccaacc

SEQ ID NO: 100529 - RNA, 20 nt, Artificial Sequence
  Synthetic
  misc_feature (7)..(7): n is a, c, g, or u
aaaauungcaguccccaacc

SEQ ID NO: 100530 - RNA, 21 nt, Artificial Sequence
  Synthetic
  misc_feature (8)..(8): n is a, c, g, or u
caaaauungcaguccccaacc

SEQ ID NO: 100531 - RNA, 22 nt, Artificial Sequence
  Synthetic
  misc_feature (9)..(9): n is a, c, g, or u
ccaaaauungcaguccccaacc

SEQ ID NO: 100532 - RNA, 18 nt, Artificial Sequence
  Synthetic
aagccuccaagcugugcc

SEQ ID NO: 100533 - RNA, 19 nt, Artificial Sequence
  Synthetic
caagccuccaagcugugcc

SEQ ID NO: 100534 - RNA, 20 nt, Artificial Sequence
  Synthetic
ucaagccuccaagcugugcc

SEQ ID NO: 100535 - RNA, 18 nt, Artificial Sequence
  Synthetic
  misc_feature (6)..(6): n is a, c, g, or u
cgcccnccaggucuugcc

SEQ ID NO: 100536 - RNA, 19 nt, Artificial Sequence
  Synthetic
  misc_feature (7)..(7): n is a, c, g, or u
acgcccnccaggucuugcc

SEQ ID NO: 100537 - RNA, 20 nt, Artificial Sequence
  Synthetic
  misc_feature (8)..(8): n is a, c, g, or u
aacgcccnccaggucuugcc

SEQ ID NO: 100538 - RNA, 18 nt, Artificial Sequence
  Synthetic
  misc_feature (16)..(16): n is a, c, g, or u
ccaagcucugcuagancc

SEQ ID NO: 100539 - RNA, 19 nt, Artificial Sequence
  Synthetic
  misc_feature (17)..(17): n is a, c, g, or u
accaagcucugcuagancc

SEQ ID NO: 100540 - RNA, 20 nt, Artificial Sequence
  Synthetic
  misc_feature (18)..(18): n is a, c, g, or u
caccaagcucugcuagancc

SEQ ID NO: 100541 - RNA, 21 nt, Artificial Sequence
  Synthetic
  misc_feature (19)..(19): n is a, c, g, or u
ccaccaagcucugcuagancc

SEQ ID NO: 100542 - RNA, 22 nt, Artificial Sequence
  Synthetic
  misc_feature (20)..(20): n is a, c, g, or u
uccaccaagcucugcuagancc

SEQ ID NO: 100543 - RNA, 23 nt, Artificial Sequence
  Synthetic
  misc_feature (21)..(21): n is a, c, g, or u
uuccaccaagcucugcuagancc

SEQ ID NO: 100544 - RNA, 24 nt, Artificial Sequence
  Synthetic
  misc_feature (22)..(22): n is a, c, g, or u
auuccaccaagcucugcuagancc

SEQ ID NO: 100545 - RNA, 19 nt, Artificial Sequence
  Synthetic
  misc_feature (4)..(4): n is a, c, g, or u
agcnccuccuccugccucc

SEQ ID NO: 100546 - RNA, 20 nt, Artificial Sequence
  Synthetic
  misc_feature (1)..(1): n is a, c, g, or u
  misc_feature (5)..(5): n is a, c, g, or u
nagcnccuccuccugccucc

SEQ ID NO: 100547 - RNA, 22 nt, Artificial Sequence
  Synthetic
  misc_feature (3)..(3): n is a, c, g, or u
  misc_feature (7)..(7): n is a, c, g, or u
agnagcnccuccuccugccucc

SEQ ID NO: 100548 - RNA, 23 nt, Artificial Sequence
  Synthetic
  misc_feature (4)..(4): n is a, c, g, or u
  misc_feature (8)..(8): n is a, c, g, or u
cagnagcnccuccuccugccucc

SEQ ID NO: 100549 - RNA, 24 nt, Artificial Sequence
  Synthetic
  misc_feature (5)..(5): n is a, c, g, or u
  misc_feature (9)..(9): n is a, c, g, or u
ccagnagcnccuccuccugccucc

SEQ ID NO: 100550 - RNA, 18 nt, Artificial Sequence
  Synthetic
  misc_feature (5)..(5): n is a, c, g, or u
uacunggaggcuguaggc

SEQ ID NO: 100551 - RNA, 20 nt, Artificial Sequence
  Synthetic
  misc_feature (7)..(7): n is a, c, g, or u
uguacunggaggcuguaggc

SEQ ID NO: 100552 - RNA, 21 nt, Artificial Sequence
  Synthetic
  misc_feature (8)..(8): n is a, c, g, or u
uuguacunggaggcuguaggc

SEQ ID NO: 100553 - RNA, 22 nt, Artificial Sequence
  Synthetic
  misc_feature (9)..(9): n is a, c, g, or u
uuuguacunggaggcuguaggc

SEQ ID NO: 100554 - RNA, 23 nt, Artificial Sequence
  Synthetic
  misc_feature (10)..(10): n is a, c, g, or u
cuuuguacunggaggcuguaggc

SEQ ID NO: 100555 - RNA, 24 nt, Artificial Sequence
  Synthetic
  misc_feature (11)..(11): n is a, c, g, or u
ucuuuguacunggaggcuguaggc

SEQ ID NO: 100556 - RNA, 20 nt, Artificial Sequence
  Synthetic
  misc_feature (6)..(6): n is a, c, g, or u
  misc_feature (11)..(11): n is a, c, g, or u
aggagngggancauucgggc

SEQ ID NO: 100557 - RNA, 21 nt, Artificial Sequence
  Synthetic
  misc_feature (7)..(7): n is a, c, g, or u
  misc_feature (12)..(12): n is a, c, g, or u
uaggagngggancauucgggc

SEQ ID NO: 100558 - RNA, 24 nt, Artificial Sequence
  Synthetic
  misc_feature (10)..(10): n is a, c, g, or u
  misc_feature (15)..(15): n is a, c, g, or u
agguaggagngggancauucgggc

SEQ ID NO: 100559 - RNA, 18 nt, Artificial Sequence
  Synthetic
auuccuaugggagugggc

SEQ ID NO: 100560 - RNA, 20 nt, Artificial Sequence
  Synthetic
agauuccuaugggagugggc

SEQ ID NO: 100561 - RNA, 19 nt, Artificial Sequence
  Synthetic
agcacccacguguccuggc

SEQ ID NO: 100562 - RNA, 18 nt, Artificial Sequence
  Synthetic
  misc_feature (3)..(3): n is a, c, g, or u
uanuuuccugcugguggc

SEQ ID NO: 100563 - RNA, 19 nt, Artificial Sequence
  Synthetic
  misc_feature (4)..(4): n is a, c, g, or u
auanuuuccugcugguggc

SEQ ID NO: 100564 - RNA, 20 nt, Artificial Sequence
  Synthetic
  misc_feature (5)..(5): n is a, c, g, or u
uauanuuuccugcugguggc

SEQ ID NO: 100565 - RNA, 21 nt, Artificial Sequence
  Synthetic
  misc_feature (6)..(6): n is a, c, g, or u
cuauanuuuccugcugguggc

SEQ ID NO: 100566 - RNA, 22 nt, Artificial Sequence
  Synthetic
  misc_feature (7)..(7): n is a, c, g, or u
ccuauanuuuccugcugguggc

SEQ ID NO: 100567 - RNA, 19 nt, Artificial Sequence
  Synthetic
  misc_feature (18)..(18): n is a, c, g, or u
agaggacucuuggacucnc

SEQ ID NO: 100568 - RNA, 20 nt, Artificial Sequence
  Synthetic
  misc_feature (19)..(19): n is a, c, g, or u
aagaggacucuuggacucnc

SEQ ID NO: 100569 - RNA, 21 nt, Artificial Sequence
  Synthetic
  misc_feature (20)..(20): n is a, c, g, or u
uaagaggacucuuggacucnc

SEQ ID NO: 100570 - RNA, 22 nt, Artificial Sequence
  Synthetic
  misc_feature (21)..(21): n is a, c, g, or u
auaagaggacucuuggacucnc

SEQ ID NO: 100571 - RNA, 23 nt, Artificial Sequence
  Synthetic
  misc_feature (1)..(1): n is a, c, g, or u
  misc_feature (22)..(22): n is a, c, g, or u
nauaagaggacucuuggacucnc

SEQ ID NO: 100572 - RNA, 24 nt, Artificial Sequence
  Synthetic
  misc_feature (2)..(2): n is a, c, g, or u
  misc_feature (23)..(23): n is a, c, g, or u
anauaagaggacucuuggacucnc

SEQ ID NO: 100573 - RNA, 18 nt, Artificial Sequence
  Synthetic
cuccugccuccaccaauc

SEQ ID NO: 100574 - RNA, 19 nt, Artificial Sequence
  Synthetic
ccuccugccuccaccaauc

SEQ ID NO: 100575 - RNA, 20 nt, Artificial Sequence
  Synthetic
uccuccugccuccaccaauc

SEQ ID NO: 100576 - RNA, 21 nt, Artificial Sequence
  Synthetic
cuccuccugccuccaccaauc

SEQ ID NO: 100577 - RNA, 22 nt, Artificial Sequence
  Synthetic
ccuccuccugccuccaccaauc

SEQ ID NO: 100578 - RNA, 23 nt, Artificial Sequence
  Synthetic
  misc_feature (1)..(1): n is a, c, g, or u
nccuccuccugccuccaccaauc

SEQ ID NO: 100579 - RNA, 24 nt, Artificial Sequence
  Synthetic
  misc_feature (2)..(2): n is a, c, g, or u
cnccuccuccugccuccaccaauc

SEQ ID NO: 100580 - RNA, 18 nt, Artificial Sequence
  Synthetic
ugggauucuuucccgauc

SEQ ID NO: 100581 - RNA, 19 nt, Artificial Sequence
  Synthetic
cugggauucuuucccgauc

SEQ ID NO: 100582 - RNA, 20 nt, Artificial Sequence
  Synthetic
ucugggauucuuucccgauc

SEQ ID NO: 100583 - RNA, 21 nt, Artificial Sequence
  Synthetic
cucugggauucuuucccgauc

SEQ ID NO: 100584 - RNA, 22 nt, Artificial Sequence
  Synthetic
ccucugggauucuuucccgauc

SEQ ID NO: 100585 - RNA, 23 nt, Artificial Sequence
  Synthetic
uccucugggauucuuucccgauc

SEQ ID NO: 100586 - RNA, 24 nt, Artificial Sequence
  Synthetic
auccucugggauucuuucccgauc

SEQ ID NO: 100587 - RNA, 18 nt, Artificial Sequence
  Synthetic
  misc_feature (10)..(10): n is a, c, g, or u
uacugccucncccauauc

SEQ ID NO: 100588 - RNA, 19 nt, Artificial Sequence
  Synthetic
  misc_feature (11)..(11): n is a, c, g, or u
cuacugccucncccauauc

SEQ ID NO: 100589 - RNA, 20 nt, Artificial Sequence
  Synthetic
  misc_feature (12)..(12): n is a, c, g, or u
acuacugccucncccauauc

SEQ ID NO: 100590 - RNA, 22 nt, Artificial Sequence
  Synthetic
  misc_feature (14)..(14): n is a, c, g, or u
cgacuacugccucncccauauc

SEQ ID NO: 100591 - RNA, 23 nt, Artificial Sequence
  Synthetic
  misc_feature (15)..(15): n is a, c, g, or u
ccgacuacugccucncccauauc

SEQ ID NO: 100592 - RNA, 24 nt, Artificial Sequence
  Synthetic
  misc_feature (16)..(16): n is a, c, g, or u
uccgacuacugccucncccauauc

SEQ ID NO: 100593 - RNA, 18 nt, Artificial Sequence
  Synthetic
uuucuguucccaauccuc

SEQ ID NO: 100594 - RNA, 19 nt, Artificial Sequence
  Synthetic
cuuucuguucccaauccuc

SEQ ID NO: 100595 - RNA, 20 nt, Artificial Sequence
  Synthetic
ucuuucuguucccaauccuc

SEQ ID NO: 100596 - RNA, 21 nt, Artificial Sequence
  Synthetic
aucuuucuguucccaauccuc

SEQ ID NO: 100597 - RNA, 22 nt, Artificial Sequence
  Synthetic
aaucuuucuguucccaauccuc

SEQ ID NO: 100598 - RNA, 23 nt, Artificial Sequence
  Synthetic
  misc_feature (1)..(1): n is a, c, g, or u
naaucuuucuguucccaauccuc

SEQ ID NO: 100599 - RNA, 24 nt, Artificial Sequence
  Synthetic
  misc_feature (2)..(2): n is a, c, g, or u
cnaaucuuucuguucccaauccuc

SEQ ID NO: 100600 - RNA, 19 nt, Artificial Sequence
  Synthetic
cgcagaagaucucaaucuc

SEQ ID NO: 100601 - RNA, 20 nt, Artificial Sequence
  Synthetic
ucgcagaagaucucaaucuc

SEQ ID NO: 100602 - RNA, 18 nt, Artificial Sequence
  Synthetic
acucuguuguccucucuc

SEQ ID NO: 100603 - RNA, 19 nt, Artificial Sequence
  Synthetic
aacucuguuguccucucuc

SEQ ID NO: 100604 - RNA, 20 nt, Artificial Sequence
  Synthetic
caacucuguuguccucucuc

SEQ ID NO: 100605 - RNA, 21 nt, Artificial Sequence
  Synthetic
acaacucuguuguccucucuc

SEQ ID NO: 100606 - RNA, 23 nt, Artificial Sequence
  Synthetic
  misc_feature (1)..(1): n is a, c, g, or u
ngacaacucuguuguccucucuc

SEQ ID NO: 100607 - RNA, 24 nt, Artificial Sequence
  Synthetic
  misc_feature (2)..(2): n is a, c, g, or u
cngacaacucuguuguccucucuc

SEQ ID NO: 100608 - RNA, 18 nt, Artificial Sequence
  Synthetic
  misc_feature (2)..(2): n is a, c, g, or u
  misc_feature (8)..(8): n is a, c, g, or u
anauuaunaauagauguc

SEQ ID NO: 100609 - RNA, 21 nt, Artificial Sequence
  Synthetic
  misc_feature (5)..(5): n is a, c, g, or u
  misc_feature (11)..(11): n is a, c, g, or u
agganauuaunaauagauguc

SEQ ID NO: 100610 - RNA, 23 nt, Artificial Sequence
  Synthetic
  misc_feature (1)..(1): n is a, c, g, or u
  misc_feature (7)..(7): n is a, c, g, or u
  misc_feature (13)..(13): n is a, c, g, or u
ngagganauuaunaauagauguc

SEQ ID NO: 100611 - RNA, 24 nt, Artificial Sequence
  Synthetic
  misc_feature (2)..(2): n is a, c, g, or u
  misc_feature (8)..(8): n is a, c, g, or u
  misc_feature (14)..(14): n is a, c, g, or u
angagganauuaunaauagauguc

SEQ ID NO: 100612 - RNA, 18 nt, Artificial Sequence
  Synthetic
ucuucuacuguaccuguc

SEQ ID NO: 100613 - RNA, 19 nt, Artificial Sequence
  Synthetic
uucuucuacuguaccuguc

SEQ ID NO: 100614 - RNA, 20 nt, Artificial Sequence
  Synthetic
auucuucuacuguaccuguc

SEQ ID NO: 100615 - RNA, 21 nt, Artificial Sequence
  Synthetic
uauucuucuacuguaccuguc

SEQ ID NO: 100616 - RNA, 22 nt, Artificial Sequence
  Synthetic
uuauucuucuacuguaccuguc

SEQ ID NO: 100617 - RNA, 23 nt, Artificial Sequence
  Synthetic
uuuauucuucuacuguaccuguc

SEQ ID NO: 100618 - RNA, 24 nt, Artificial Sequence
  Synthetic
cuuuauucuucuacuguaccuguc

SEQ ID NO: 100619 - RNA, 18 nt, Artificial Sequence
  Synthetic
uuggaagagaaacuguuc

SEQ ID NO: 100620 - RNA, 19 nt, Artificial Sequence
  Synthetic
uuuggaagagaaacuguuc

SEQ ID NO: 100621 - RNA, 20 nt, Artificial Sequence
  Synthetic
uuuuggaagagaaacuguuc

SEQ ID NO: 100622 - RNA, 21 nt, Artificial Sequence
  Synthetic
cuuuuggaagagaaacuguuc

SEQ ID NO: 100623 - RNA, 22 nt, Artificial Sequence
  Synthetic
acuuuuggaagagaaacuguuc

SEQ ID NO: 100624 - RNA, 23 nt, Artificial Sequence
  Synthetic
uacuuuuggaagagaaacuguuc

SEQ ID NO: 100625 - RNA, 24 nt, Artificial Sequence
  Synthetic
uuacuuuuggaagagaaacuguuc

SEQ ID NO: 100626 - RNA, 18 nt, Artificial Sequence
  Synthetic
uacuagugccauuuguuc

SEQ ID NO: 100627 - RNA, 19 nt, Artificial Sequence
  Synthetic
uuacuagugccauuuguuc

SEQ ID NO: 100628 - RNA, 20 nt, Artificial Sequence
  Synthetic
uuuacuagugccauuuguuc

SEQ ID NO: 100629 - RNA, 22 nt, Artificial Sequence
  Synthetic
aguuuacuagugccauuuguuc

SEQ ID NO: 100630 - RNA, 23 nt, Artificial Sequence
  Synthetic
caguuuacuagugccauuuguuc

SEQ ID NO: 100631 - RNA, 24 nt, Artificial Sequence
  Synthetic
ucaguuuacuagugccauuuguuc

SEQ ID NO: 100632 - RNA, 18 nt, Artificial Sequence
  Synthetic
agagcuacagcaugggag

SEQ ID NO: 100633 - RNA, 19 nt, Artificial Sequence
  Synthetic
aagagcuacagcaugggag

SEQ ID NO: 100634 - RNA, 20 nt, Artificial Sequence
  Synthetic
caagagcuacagcaugggag

SEQ ID NO: 100635 - RNA, 18 nt, Artificial Sequence
  Synthetic
  misc_feature (3)..(3): n is a, c, g, or u
  misc_feature (13)..(13): n is a, c, g, or u
aanuuguccuggnuaucg

SEQ ID NO: 100636 - RNA, 19 nt, Artificial Sequence
  Synthetic
  misc_feature (4)..(4): n is a, c, g, or u
  misc_feature (14)..(14): n is a, c, g, or u
caanuuguccuggnuaucg

SEQ ID NO: 100637 - RNA, 20 nt, Artificial Sequence
  Synthetic
  misc_feature (5)..(5): n is a, c, g, or u
  misc_feature (15)..(15): n is a, c, g, or u
ccaanuuguccuggnuaucg

SEQ ID NO: 100638 - RNA, 21 nt, Artificial Sequence
  Synthetic
  misc_feature (6)..(6): n is a, c, g, or u
  misc_feature (16)..(16): n is a, c, g, or u
uccaanuuguccuggnuaucg

SEQ ID NO: 100639 - RNA, 22 nt, Artificial Sequence
  Synthetic
  misc_feature (7)..(7): n is a, c, g, or u
  misc_feature (17)..(17): n is a, c, g, or u
cuccaanuuguccuggnuaucg

SEQ ID NO: 100640 - RNA, 23 nt, Artificial Sequence
  Synthetic
  misc_feature (8)..(8): n is a, c, g, or u
  misc_feature (18)..(18): n is a, c, g, or u
ccuccaanuuguccuggnuaucg

SEQ ID NO: 100641 - RNA, 24 nt, Artificial Sequence
  Synthetic
  misc_feature (9)..(9): n is a, c, g, or u
  misc_feature (19)..(19): n is a, c, g, or u
uccuccaanuuguccuggnuaucg

SEQ ID NO: 100642 - RNA, 18 nt, Artificial Sequence
  Synthetic
  misc_feature (8)..(8): n is a, c, g, or u
caucaucnugggcuuucg

SEQ ID NO: 100643 - RNA, 19 nt, Artificial Sequence
  Synthetic
  misc_feature (9)..(9): n is a, c, g, or u
ccaucaucnugggcuuucg

SEQ ID NO: 100644 - RNA, 20 nt, Artificial Sequence
  Synthetic
  misc_feature (10)..(10): n is a, c, g, or u
cccaucaucnugggcuuucg

SEQ ID NO: 100645 - RNA, 18 nt, Artificial Sequence
  Synthetic
cccugcucguguuacagg

SEQ ID NO: 100646 - RNA, 19 nt, Artificial Sequence
  Synthetic
ccccugcucguguuacagg

SEQ ID NO: 100647 - RNA, 20 nt, Artificial Sequence
  Synthetic
accccugcucguguuacagg

SEQ ID NO: 100648 - RNA, 18 nt, Artificial Sequence
  Synthetic
  misc_feature (9)..(9): n is a, c, g, or u
cccguugcncggcaacgg

SEQ ID NO: 100649 - RNA, 19 nt, Artificial Sequence
  Synthetic
  misc_feature (10)..(10): n is a, c, g, or u
ccccguugcncggcaacgg

SEQ ID NO: 100650 - RNA, 20 nt, Artificial Sequence
  Synthetic
  misc_feature (11)..(11): n is a, c, g, or u
accccguugcncggcaacgg

SEQ ID NO: 100651 - RNA, 18 nt, Artificial Sequence
  Synthetic
augaugugguauuggggg

SEQ ID NO: 100652 - RNA, 19 nt, Artificial Sequence
  Synthetic
  misc_feature (4)..(4): n is a, c, g, or u
  misc_feature (6)..(6): n is a, c, g, or u
  misc_feature (12)..(12): n is a, c, g, or u
ugununuuuaangacuggg

SEQ ID NO: 100653 - RNA, 20 nt, Artificial Sequence
  Synthetic
  misc_feature (5)..(5): n is a, c, g, or u
  misc_feature (7)..(7): n is a, c, g, or u
  misc_feature (13)..(13): n is a, c, g, or u
cugununuuuaangacuggg

SEQ ID NO: 100654 - RNA, 21 nt, Artificial Sequence
  Synthetic
  misc_feature (6)..(6): n is a, c, g, or u
  misc_feature (8)..(8): n is a, c, g, or u
  misc_feature (14)..(14): n is a, c, g, or u
acugununuuuaangacuggg

SEQ ID NO: 100655 - RNA, 23 nt, Artificial Sequence
  Synthetic
  misc_feature (8)..(8): n is a, c, g, or u
  misc_feature (10)..(10): n is a, c, g, or u
  misc_feature (16)..(16): n is a, c, g, or u
agacugununuuuaangacuggg

SEQ ID NO: 100656 - RNA, 24 nt, Artificial Sequence
  Synthetic
  misc_feature (9)..(9): n is a, c, g, or u
  misc_feature (11)..(11): n is a, c, g, or u
  misc_feature (17)..(17): n is a, c, g, or u
aagacugununuuuaangacuggg

SEQ ID NO: 100657 - RNA, 18 nt, Artificial Sequence
  Synthetic
aagcuauucuguguuggg

SEQ ID NO: 100658 - RNA, 19 nt, Artificial Sequence
  Synthetic
caagcuauucuguguuggg

SEQ ID NO: 100659 - RNA, 22 nt, Artificial Sequence
  Synthetic
aggcaagcuauucuguguuggg

SEQ ID NO: 100660 - RNA, 23 nt, Artificial Sequence
  Synthetic
  misc_feature (1)..(1): n is a, c, g, or u
naggcaagcuauucuguguuggg

SEQ ID NO: 100661 - RNA, 24 nt, Artificial Sequence
  Synthetic
  misc_feature (2)..(2): n is a, c, g, or u
unaggcaagcuauucuguguuggg

SEQ ID NO: 100662 - RNA, 18 nt, Artificial Sequence
  Synthetic
ucaguccguuucuccugg

SEQ ID NO: 100663 - RNA, 19 nt, Artificial Sequence
  Synthetic
cucaguccguuucuccugg

SEQ ID NO: 100664 - RNA, 20 nt, Artificial Sequence
  Synthetic
ccucaguccguuucuccugg

SEQ ID NO: 100665 - RNA, 18 nt, Artificial Sequence
  Synthetic
aacaagagcuacagcaug

SEQ ID NO: 100666 - RNA, 18 nt, Artificial Sequence
  Synthetic
uuggcuuucaguuauaug

SEQ ID NO: 100667 - RNA, 19 nt, Artificial Sequence
  Synthetic
uuuggcuuucaguuauaug

SEQ ID NO: 100668 - RNA, 21 nt, Artificial Sequence
  Synthetic
uguuuggcuuucaguuauaug

SEQ ID NO: 100669 - RNA, 22 nt, Artificial Sequence
  Synthetic
cuguuuggcuuucaguuauaug

SEQ ID NO: 100670 - RNA, 23 nt, Artificial Sequence
  Synthetic
acuguuuggcuuucaguuauaug

SEQ ID NO: 100671 - RNA, 24 nt, Artificial Sequence
  Synthetic
cacuguuuggcuuucaguuauaug

SEQ ID NO: 100672 - RNA, 18 nt, Artificial Sequence
  Synthetic
  misc_feature (8)..(8): n is a, c, g, or u
uaaaauunauuaugccug

SEQ ID NO: 100673 - RNA, 19 nt, Artificial Sequence
  Synthetic
  misc_feature (9)..(9): n is a, c, g, or u
uuaaaauunauuaugccug

SEQ ID NO: 100674 - RNA, 20 nt, Artificial Sequence
  Synthetic
  misc_feature (10)..(10): n is a, c, g, or u
auuaaaauunauuaugccug

SEQ ID NO: 100675 - RNA, 22 nt, Artificial Sequence
  Synthetic
  misc_feature (12)..(12): n is a, c, g, or u
agauuaaaauunauuaugccug

SEQ ID NO: 100676 - RNA, 19 nt, Artificial Sequence
  Synthetic
ugcaacuuuuucaccucug

SEQ ID NO: 100677 - RNA, 20 nt, Artificial Sequence
  Synthetic
augcaacuuuuucaccucug

SEQ ID NO: 100678 - RNA, 18 nt, Artificial Sequence
  Synthetic
aagaauuuggagcuucug

SEQ ID NO: 100679 - RNA, 19 nt, Artificial Sequence
  Synthetic
aaagaauuuggagcuucug

SEQ ID NO: 100680 - RNA, 20 nt, Artificial Sequence
  Synthetic
uaaagaauuuggagcuucug

SEQ ID NO: 100681 - RNA, 21 nt, Artificial Sequence
  Synthetic
auaaagaauuuggagcuucug

SEQ ID NO: 100682 - RNA, 22 nt, Artificial Sequence
  Synthetic
uauaaagaauuuggagcuucug

SEQ ID NO: 100683 - RNA, 23 nt, Artificial Sequence
  Synthetic
  misc_feature (1)..(1): n is a, c, g, or u
nuauaaagaauuuggagcuucug

SEQ ID NO: 100684 - RNA, 24 nt, Artificial Sequence
  Synthetic
  misc_feature (2)..(2): n is a, c, g, or u
cnuauaaagaauuuggagcuucug

SEQ ID NO: 100685 - RNA, 18 nt, Artificial Sequence
  Synthetic
aaucuggccaccugggug

SEQ ID NO: 100686 - RNA, 20 nt, Artificial Sequence
  Synthetic
ugaaucuggccaccugggug

SEQ ID NO: 100687 - RNA, 21 nt, Artificial Sequence
  Synthetic
  misc_feature (1)..(1): n is a, c, g, or u
  misc_feature (19)..(19): n is a, c, g, or u
ncggcaacggucaggucunug

SEQ ID NO: 100688 - RNA, 22 nt, Artificial Sequence
  Synthetic
  misc_feature (2)..(2): n is a, c, g, or u
  misc_feature (20)..(20): n is a, c, g, or u
cncggcaacggucaggucunug

SEQ ID NO: 100689 - RNA, 24 nt, Artificial Sequence
  Synthetic
  misc_feature (4)..(4): n is a, c, g, or u
  misc_feature (22)..(22): n is a, c, g, or u
ugcncggcaacggucaggucunug

SEQ ID NO: 100690 - RNA, 18 nt, Artificial Sequence
  Synthetic
aaauagaccuauugauug

SEQ ID NO: 100691 - RNA, 19 nt, Artificial Sequence
  Synthetic
uaaauagaccuauugauug

SEQ ID NO: 100692 - RNA, 20 nt, Artificial Sequence
  Synthetic
  misc_feature (1)..(1): n is a, c, g, or u
nuaaauagaccuauugauug

SEQ ID NO: 100693 - RNA, 21 nt, Artificial Sequence
  Synthetic
  misc_feature (2)..(2): n is a, c, g, or u
unuaaauagaccuauugauug

SEQ ID NO: 100694 - RNA, 22 nt, Artificial Sequence
  Synthetic
  misc_feature (3)..(3): n is a, c, g, or u
cunuaaauagaccuauugauug

SEQ ID NO: 100695 - RNA, 23 nt, Artificial Sequence
  Synthetic
  misc_feature (4)..(4): n is a, c, g, or u
ccunuaaauagaccuauugauug

SEQ ID NO: 100696 - RNA, 24 nt, Artificial Sequence
  Synthetic
  misc_feature (1)..(1): n is a, c, g, or u
  misc_feature (5)..(5): n is a, c, g, or u
nccunuaaauagaccuauugauug

SEQ ID NO: 100697 - RNA, 18 nt, Artificial Sequence
  Synthetic
cuguguuggggugaguug

SEQ ID NO: 100698 - RNA, 19 nt, Artificial Sequence
  Synthetic
ucuguguuggggugaguug

SEQ ID NO: 100699 - RNA, 20 nt, Artificial Sequence
  Synthetic
uucuguguuggggugaguug

SEQ ID NO: 100700 - RNA, 21 nt, Artificial Sequence
  Synthetic
auucuguguuggggugaguug

SEQ ID NO: 100701 - RNA, 22 nt, Artificial Sequence
  Synthetic
uauucuguguuggggugaguug

SEQ ID NO: 100702 - RNA, 23 nt, Artificial Sequence
  Synthetic
cuauucuguguuggggugaguug

SEQ ID NO: 100703 - RNA, 19 nt, Artificial Sequence
  Synthetic
aguuuacuagugccauuug

SEQ ID NO: 100704 - RNA, 20 nt, Artificial Sequence
  Synthetic
caguuuacuagugccauuug

SEQ ID NO: 100705 - RNA, 21 nt, Artificial Sequence
  Synthetic
ucaguuuacuagugccauuug

SEQ ID NO: 100706 - RNA, 22 nt, Artificial Sequence
  Synthetic
cucaguuuacuagugccauuug

SEQ ID NO: 100707 - RNA, 18 nt, Artificial Sequence
  Synthetic
  misc_feature (6)..(6): n is a, c, g, or u
  misc_feature (18)..(18): n is a, c, g, or u
uaaaanucagacaacuan

SEQ ID NO: 100708 - RNA, 19 nt, Artificial Sequence
  Synthetic
  misc_feature (7)..(7): n is a, c, g, or u
  misc_feature (19)..(19): n is a, c, g, or u
cuaaaanucagacaacuan

SEQ ID NO: 100709 - RNA, 20 nt, Artificial Sequence
  Synthetic
  misc_feature (8)..(8): n is a, c, g, or u
  misc_feature (20)..(20): n is a, c, g, or u
ccuaaaanucagacaacuan

SEQ ID NO: 100710 - RNA, 24 nt, Artificial Sequence
  Synthetic
  misc_feature (12)..(12): n is a, c, g, or u
  misc_feature (24)..(24): n is a, c, g, or u
ugggccuaaaanucagacaacuan

SEQ ID NO: 100711 - RNA, 18 nt, Artificial Sequence
  Synthetic
  misc_feature (1)..(1): n is a, c, g, or u
  misc_feature (18)..(18): n is a, c, g, or u
naccaccgugaacgcccn

SEQ ID NO: 100712 - RNA, 19 nt, Artificial Sequence
  Synthetic
  misc_feature (2)..(2): n is a, c, g, or u
  misc_feature (19)..(19): n is a, c, g, or u
anaccaccgugaacgcccn

SEQ ID NO: 100713 - RNA, 22 nt, Artificial Sequence
  Synthetic
  misc_feature (5)..(5): n is a, c, g, or u
  misc_feature (22)..(22): n is a, c, g, or u
ugganaccaccgugaacgcccn

SEQ ID NO: 100714 - RNA, 23 nt, Artificial Sequence
  Synthetic
  misc_feature (6)..(6): n is a, c, g, or u
  misc_feature (23)..(23): n is a, c, g, or u
augganaccaccgugaacgcccn

SEQ ID NO: 100715 - RNA, 24 nt, Artificial Sequence
  Synthetic
  misc_feature (7)..(7): n is a, c, g, or u
  misc_feature (24)..(24): n is a, c, g, or u
caugganaccaccgugaacgcccn

SEQ ID NO: 100716 - RNA, 19 nt, Artificial Sequence
  Synthetic
  misc_feature (10)..(10): n is a, c, g, or u
cggagccaanucaaacaau

SEQ ID NO: 100717 - RNA, 20 nt, Artificial Sequence
  Synthetic
  misc_feature (11)..(11): n is a, c, g, or u
ucggagccaanucaaacaau

SEQ ID NO: 100718 - RNA, 21 nt, Artificial Sequence
  Synthetic
  misc_feature (12)..(12): n is a, c, g, or u
uucggagccaanucaaacaau

SEQ ID NO: 100719 - RNA, 22 nt, Artificial Sequence
  Synthetic
  misc_feature (1)..(1): n is a, c, g, or u
  misc_feature (13)..(13): n is a, c, g, or u
nuucggagccaanucaaacaau

SEQ ID NO: 100720 - RNA, 23 nt, Artificial Sequence
  Synthetic
  misc_feature (2)..(2): n is a, c, g, or u
  misc_feature (14)..(14): n is a, c, g, or u
cnuucggagccaanucaaacaau

SEQ ID NO: 100721 - RNA, 19 nt, Artificial Sequence
  Synthetic
  misc_feature (7)..(7): n is a, c, g, or u
aguagunagcuaugucaau

SEQ ID NO: 100722 - RNA, 20 nt, Artificial Sequence
  Synthetic
  misc_feature (8)..(8): n is a, c, g, or u
uaguagunagcuaugucaau

SEQ ID NO: 100723 - RNA, 21 nt, Artificial Sequence
  Synthetic
  misc_feature (9)..(9): n is a, c, g, or u
uuaguagunagcuaugucaau

SEQ ID NO: 100724 - RNA, 22 nt, Artificial Sequence
  Synthetic
  misc_feature (10)..(10): n is a, c, g, or u
auuaguagunagcuaugucaau

SEQ ID NO: 100725 - RNA, 23 nt, Artificial Sequence
  Synthetic
  misc_feature (11)..(11): n is a, c, g, or u
aauuaguagunagcuaugucaau

SEQ ID NO: 100726 - RNA, 19 nt, Artificial Sequence
  Synthetic
agaucucaaucucgggaau

SEQ ID NO: 100727 - RNA, 20 nt, Artificial Sequence
  Synthetic
aagaucucaaucucgggaau

SEQ ID NO: 100728 - RNA, 18 nt, Artificial Sequence
  Synthetic
  misc_feature (2)..(2): n is a, c, g, or u
  misc_feature (10)..(10): n is a, c, g, or u
  misc_feature (14)..(14): n is a, c, g, or u
anauggagancacnacau

SEQ ID NO: 100729 - RNA, 19 nt, Artificial Sequence
  Synthetic
  misc_feature (3)..(3): n is a, c, g, or u
  misc_feature (11)..(11): n is a, c, g, or u
  misc_feature (15)..(15): n is a, c, g, or u
aanauggagancacnacau

SEQ ID NO: 100730 - RNA, 21 nt, Artificial Sequence
  Synthetic
  misc_feature (5)..(5): n is a, c, g, or u
  misc_feature (13)..(13): n is a, c, g, or u
  misc_feature (17)..(17): n is a, c, g, or u
cgaanauggagancacnacau

SEQ ID NO: 100731 - RNA, 22 nt, Artificial Sequence
  Synthetic
  misc_feature (6)..(6): n is a, c, g, or u
  misc_feature (14)..(14): n is a, c, g, or u
  misc_feature (18)..(18): n is a, c, g, or u
ccgaanauggagancacnacau

SEQ ID NO: 100732 - RNA, 23 nt, Artificial Sequence
  Synthetic
  misc_feature (7)..(7): n is a, c, g, or u
  misc_feature (15)..(15): n is a, c, g, or u
  misc_feature (19)..(19): n is a, c, g, or u
accgaanauggagancacnacau

SEQ ID NO: 100733 - RNA, 24 nt, Artificial Sequence
  Synthetic
  misc_feature (8)..(8): n is a, c, g, or u
  misc_feature (16)..(16): n is a, c, g, or u
  misc_feature (20)..(20): n is a, c, g, or u
caccgaanauggagancacnacau

SEQ ID NO: 100734 - RNA, 18 nt, Artificial Sequence
  Synthetic
uuaaugaaaaaaggagau

SEQ ID NO: 100735 - RNA, 20 nt, Artificial Sequence
  Synthetic
aguuaaugaaaaaaggagau

SEQ ID NO: 100736 - RNA, 21 nt, Artificial Sequence
  Synthetic
caguuaaugaaaaaaggagau

SEQ ID NO: 100737 - RNA, 22 nt, Artificial Sequence
  Synthetic
acaguuaaugaaaaaaggagau

SEQ ID NO: 100738 - RNA, 23 nt, Artificial Sequence
  Synthetic
uacaguuaaugaaaaaaggagau

SEQ ID NO: 100739 - RNA, 24 nt, Artificial Sequence
  Synthetic
uuacaguuaaugaaaaaaggagau

SEQ ID NO: 100740 - RNA, 18 nt, Artificial Sequence
  Synthetic
uguuuggcuuucaguuau

SEQ ID NO: 100741 - RNA, 19 nt, Artificial Sequence
  Synthetic
cuguuuggcuuucaguuau

SEQ ID NO: 100742 - RNA, 20 nt, Artificial Sequence
  Synthetic
acuguuuggcuuucaguuau

SEQ ID NO: 100743 - RNA, 21 nt, Artificial Sequence
  Synthetic
cacuguuuggcuuucaguuau

SEQ ID NO: 100744 - RNA, 22 nt, Artificial Sequence
  Synthetic
ccacuguuuggcuuucaguuau

SEQ ID NO: 100745 - RNA, 23 nt, Artificial Sequence
  Synthetic
cccacuguuuggcuuucaguuau

SEQ ID NO: 100746 - RNA, 24 nt, Artificial Sequence
  Synthetic
ccccacuguuuggcuuucaguuau

SEQ ID NO: 100747 - RNA, 18 nt, Artificial Sequence
  Synthetic
uaccacagagucuagacu

SEQ ID NO: 100748 - RNA, 19 nt, Artificial Sequence
  Synthetic
auaccacagagucuagacu

SEQ ID NO: 100749 - RNA, 20 nt, Artificial Sequence
  Synthetic
aauaccacagagucuagacu

SEQ ID NO: 100750 - RNA, 18 nt, Artificial Sequence
  Synthetic
  misc_feature (3)..(3): n is a, c, g, or u
  misc_feature (7)..(7): n is a, c, g, or u
cunccunuaaauagaccu

SEQ ID NO: 100751 - RNA, 19 nt, Artificial Sequence
  Synthetic
  misc_feature (4)..(4): n is a, c, g, or u
  misc_feature (8)..(8): n is a, c, g, or u
acunccunuaaauagaccu

SEQ ID NO: 100752 - RNA, 20 nt, Artificial Sequence
  Synthetic
  misc_feature (5)..(5): n is a, c, g, or u
  misc_feature (9)..(9): n is a, c, g, or u
aacunccunuaaauagaccu

SEQ ID NO: 100753 - RNA, 21 nt, Artificial Sequence
  Synthetic
  misc_feature (6)..(6): n is a, c, g, or u
  misc_feature (10)..(10): n is a, c, g, or u
aaacunccunuaaauagaccu

SEQ ID NO: 100754 - RNA, 22 nt, Artificial Sequence
  Synthetic
  misc_feature (1)..(1): n is a, c, g, or u
  misc_feature (7)..(7): n is a, c, g, or u
  misc_feature (11)..(11): n is a, c, g, or u
naaacunccunuaaauagaccu

SEQ ID NO: 100755 - RNA, 24 nt, Artificial Sequence
  Synthetic
  misc_feature (3)..(3): n is a, c, g, or u
  misc_feature (9)..(9): n is a, c, g, or u
  misc_feature (13)..(13): n is a, c, g, or u
cgnaaacunccunuaaauagaccu

SEQ ID NO: 100756 - RNA, 18 nt, Artificial Sequence
  Synthetic
  misc_feature (9)..(9): n is a, c, g, or u
  misc_feature (15)..(15): n is a, c, g, or u
uguuuucgnaaacunccu

SEQ ID NO: 100757 - RNA, 19 nt, Artificial Sequence
  Synthetic
  misc_feature (10)..(10): n is a, c, g, or u
  misc_feature (16)..(16): n is a, c, g, or u
auguuuucgnaaacunccu

SEQ ID NO: 100758 - RNA, 20 nt, Artificial Sequence
  Synthetic
  misc_feature (11)..(11): n is a, c, g, or u
  misc_feature (17)..(17): n is a, c, g, or u
aauguuuucgnaaacunccu

SEQ ID NO: 100759 - RNA, 21 nt, Artificial Sequence
  Synthetic
  misc_feature (12)..(12): n is a, c, g, or u
  misc_feature (18)..(18): n is a, c, g, or u
caauguuuucgnaaacunccu

SEQ ID NO: 100760 - RNA, 22 nt, Artificial Sequence
  Synthetic
  misc_feature (1)..(1): n is a, c, g, or u
  misc_feature (13)..(13): n is a, c, g, or u
  misc_feature (19)..(19): n is a, c, g, or u
ncaauguuuucgnaaacunccu

SEQ ID NO: 100761 - RNA, 23 nt, Artificial Sequence
  Synthetic
  misc_feature (2)..(2): n is a, c, g, or u
  misc_feature (14)..(14): n is a, c, g, or u
  misc_feature (20)..(20): n is a, c, g, or u
ancaauguuuucgnaaacunccu

SEQ ID NO: 100762 - RNA, 24 nt, Artificial Sequence
  Synthetic
  misc_feature (3)..(3): n is a, c, g, or u
  misc_feature (15)..(15): n is a, c, g, or u
  misc_feature (21)..(21): n is a, c, g, or u
aancaauguuuucgnaaacunccu

SEQ ID NO: 100763 - RNA, 18 nt, Artificial Sequence
  Synthetic
cuuguugacaagaauccu

SEQ ID NO: 100764 - RNA, 19 nt, Artificial Sequence
  Synthetic
ucuuguugacaagaauccu

SEQ ID NO: 100765 - RNA, 20 nt, Artificial Sequence
  Synthetic
uucuuguugacaagaauccu

SEQ ID NO: 100766 - RNA, 21 nt, Artificial Sequence
  Synthetic
uuucuuguugacaagaauccu

SEQ ID NO: 100767 - RNA, 22 nt, Artificial Sequence
  Synthetic
uuuucuuguugacaagaauccu

SEQ ID NO: 100768 - RNA, 23 nt, Artificial Sequence
  Synthetic
uuuuucuuguugacaagaauccu

SEQ ID NO: 100769 - RNA, 18 nt, Artificial Sequence
  Synthetic
  misc_feature (12)..(12): n is a, c, g, or u
aggggccuauanuuuccu

SEQ ID NO: 100770 - RNA, 20 nt, Artificial Sequence
  Synthetic
  misc_feature (14)..(14): n is a, c, g, or u
ugaggggccuauanuuuccu

SEQ ID NO: 100771 - RNA, 22 nt, Artificial Sequence
  Synthetic
  misc_feature (16)..(16): n is a, c, g, or u
agugaggggccuauanuuuccu

SEQ ID NO: 100772 - RNA, 24 nt, Artificial Sequence
  Synthetic
  misc_feature (18)..(18): n is a, c, g, or u
agagugaggggccuauanuuuccu

SEQ ID NO: 100773 - RNA, 18 nt, Artificial Sequence
  Synthetic
uucccccacuguuuggcu

SEQ ID NO: 100774 - RNA, 19 nt, Artificial Sequence
  Synthetic
uuucccccacuguuuggcu

SEQ ID NO: 100775 - RNA, 20 nt, Artificial Sequence
  Synthetic
cuuucccccacuguuuggcu

SEQ ID NO: 100776 - RNA, 18 nt, Artificial Sequence
  Synthetic
acaauaugugggcccucu

SEQ ID NO: 100777 - RNA, 19 nt, Artificial Sequence
  Synthetic
aacaauaugugggcccucu

SEQ ID NO: 100778 - RNA, 20 nt, Artificial Sequence
  Synthetic
caacaauaugugggcccucu

SEQ ID NO: 100779 - RNA, 18 nt, Artificial Sequence
  Synthetic
aaccuuuguggcuccucu

SEQ ID NO: 100780 - RNA, 21 nt, Artificial Sequence
  Synthetic
uggaaccuuuguggcuccucu

SEQ ID NO: 100781 - RNA, 23 nt, Artificial Sequence
  Synthetic
cguggaaccuuuguggcuccucu

SEQ ID NO: 100782 - RNA, 18 nt, Artificial Sequence
  Synthetic
accaauuuucuuuugucu

SEQ ID NO: 100783 - RNA, 19 nt, Artificial Sequence
  Synthetic
uaccaauuuucuuuugucu

SEQ ID NO: 100784 - RNA, 20 nt, Artificial Sequence
  Synthetic
uuaccaauuuucuuuugucu

SEQ ID NO: 100785 - RNA, 21 nt, Artificial Sequence
  Synthetic
auuaccaauuuucuuuugucu

SEQ ID NO: 100786 - RNA, 22 nt, Artificial Sequence
  Synthetic
uauuaccaauuuucuuuugucu

SEQ ID NO: 100787 - RNA, 23 nt, Artificial Sequence
  Synthetic
cuauuaccaauuuucuuuugucu

SEQ ID NO: 100788 - RNA, 24 nt, Artificial Sequence
  Synthetic
  misc_feature (1)..(1): n is a, c, g, or u
ncuauuaccaauuuucuuuugucu

SEQ ID NO: 100789 - RNA, 20 nt, Artificial Sequence
  Synthetic
ugggauauguaauuggaagu

SEQ ID NO: 100790 - RNA, 18 nt, Artificial Sequence
  Synthetic
uuuggugucuuuuggagu

SEQ ID NO: 100791 - RNA, 19 nt, Artificial Sequence
  Synthetic
auuuggugucuuuuggagu

SEQ ID NO: 100792 - RNA, 20 nt, Artificial Sequence
  Synthetic
uauuuggugucuuuuggagu

SEQ ID NO: 100793 - RNA, 22 nt, Artificial Sequence
  Synthetic
aguauuuggugucuuuuggagu

SEQ ID NO: 100794 - RNA, 24 nt, Artificial Sequence
  Synthetic
ugaguauuuggugucuuuuggagu

SEQ ID NO: 100795 - RNA, 18 nt, Artificial Sequence
  Synthetic
aggcaagcuauucugugu

SEQ ID NO: 100796 - RNA, 19 nt, Artificial Sequence
  Synthetic
  misc_feature (1)..(1): n is a, c, g, or u
naggcaagcuauucugugu

SEQ ID NO: 100797 - RNA, 20 nt, Artificial Sequence
  Synthetic
  misc_feature (2)..(2): n is a, c, g, or u
unaggcaagcuauucugugu

SEQ ID NO: 100798 - RNA, 21 nt, Artificial Sequence
  Synthetic
  misc_feature (3)..(3): n is a, c, g, or u
cunaggcaagcuauucugugu

SEQ ID NO: 100799 - RNA, 22 nt, Artificial Sequence
  Synthetic
  misc_feature (4)..(4): n is a, c, g, or u
acunaggcaagcuauucugugu

SEQ ID NO: 100800 - RNA, 23 nt, Artificial Sequence
  Synthetic
  misc_feature (5)..(5): n is a, c, g, or u
cacunaggcaagcuauucugugu

SEQ ID NO: 100801 - RNA, 18 nt, Artificial Sequence
  Synthetic
cguguccuggccaaaauu

SEQ ID NO: 100802 - RNA, 19 nt, Artificial Sequence
  Synthetic
acguguccuggccaaaauu

SEQ ID NO: 100803 - RNA, 20 nt, Artificial Sequence
  Synthetic
cacguguccuggccaaaauu

SEQ ID NO: 100804 - RNA, 21 nt, Artificial Sequence
  Synthetic
ccacguguccuggccaaaauu

SEQ ID NO: 100805 - RNA, 22 nt, Artificial Sequence
  Synthetic
cccacguguccuggccaaaauu

SEQ ID NO: 100806 - RNA, 23 nt, Artificial Sequence
  Synthetic
acccacguguccuggccaaaauu

SEQ ID NO: 100807 - RNA, 24 nt, Artificial Sequence
  Synthetic
cacccacguguccuggccaaaauu

SEQ ID NO: 100808 - RNA, 18 nt, Artificial Sequence
  Synthetic
  misc_feature (12)..(12): n is a, c, g, or u
aaaguaugucanagaauu

SEQ ID NO: 100809 - RNA, 21 nt, Artificial Sequence
  Synthetic
  misc_feature (15)..(15): n is a, c, g, or u
uggaaaguaugucanagaauu

SEQ ID NO: 100810 - RNA, 22 nt, Artificial Sequence
  Synthetic
  misc_feature (16)..(16): n is a, c, g, or u
uuggaaaguaugucanagaauu

SEQ ID NO: 100811 - RNA, 23 nt, Artificial Sequence
  Synthetic
  misc_feature (17)..(17): n is a, c, g, or u
auuggaaaguaugucanagaauu

SEQ ID NO: 100812 - RNA, 18 nt, Artificial Sequence
  Synthetic
  misc_feature (1)..(1): n is a, c, g, or u
nccagcauccagggaauu

SEQ ID NO: 100813 - RNA, 19 nt, Artificial Sequence
  Synthetic
  misc_feature (2)..(2): n is a, c, g, or u
anccagcauccagggaauu

SEQ ID NO: 100814 - RNA, 21 nt, Artificial Sequence
  Synthetic
  misc_feature (4)..(4): n is a, c, g, or u
aganccagcauccagggaauu

SEQ ID NO: 100815 - RNA, 22 nt, Artificial Sequence
  Synthetic
  misc_feature (5)..(5): n is a, c, g, or u
aaganccagcauccagggaauu

SEQ ID NO: 100816 - RNA, 18 nt, Artificial Sequence
  Synthetic
uucaugggauauguaauu

SEQ ID NO: 100817 - RNA, 19 nt, Artificial Sequence
  Synthetic
  misc_feature (1)..(1): n is a, c, g, or u
nuucaugggauauguaauu

SEQ ID NO: 100818 - RNA, 20 nt, Artificial Sequence
  Synthetic
  misc_feature (2)..(2): n is a, c, g, or u
anuucaugggauauguaauu

SEQ ID NO: 100819 - RNA, 21 nt, Artificial Sequence
  Synthetic
  misc_feature (3)..(3): n is a, c, g, or u
aanuucaugggauauguaauu

SEQ ID NO: 100820 - RNA, 22 nt, Artificial Sequence
  Synthetic
  misc_feature (4)..(4): n is a, c, g, or u
uaanuucaugggauauguaauu

SEQ ID NO: 100821 - RNA, 23 nt, Artificial Sequence
  Synthetic
  misc_feature (5)..(5): n is a, c, g, or u
uuaanuucaugggauauguaauu

SEQ ID NO: 100822 - RNA, 24 nt, Artificial Sequence
  Synthetic
  misc_feature (6)..(6): n is a, c, g, or u
cuuaanuucaugggauauguaauu

SEQ ID NO: 100823 - RNA, 18 nt, Artificial Sequence
  Synthetic
  misc_feature (6)..(7): n is a, c, g, or u
  misc_feature (9)..(9): n is a, c, g, or u
  misc_feature (15)..(15): n is a, c, g, or u
cauuunnangagganauu

SEQ ID NO: 100824 - RNA, 19 nt, Artificial Sequence
  Synthetic
  misc_feature (7)..(8): n is a, c, g, or u
  misc_feature (10)..(10): n is a, c, g, or u
  misc_feature (16)..(16): n is a, c, g, or u
ucauuunnangagganauu

SEQ ID NO: 100825 - RNA, 20 nt, Artificial Sequence
  Synthetic
  misc_feature (8)..(9): n is a, c, g, or u
  misc_feature (11)..(11): n is a, c, g, or u
  misc_feature (17)..(17): n is a, c, g, or u
uucauuunnangagganauu

SEQ ID NO: 100826 - RNA, 21 nt, Artificial Sequence
  Synthetic
  misc_feature (9)..(10): n is a, c, g, or u
  misc_feature (12)..(12): n is a, c, g, or u
  misc_feature (18)..(18): n is a, c, g, or u
auucauuunnangagganauu

SEQ ID NO: 100827 - RNA, 22 nt, Artificial Sequence
  Synthetic
  misc_feature (10)..(11): n is a, c, g, or u
  misc_feature (13)..(13): n is a, c, g, or u
  misc_feature (19)..(19): n is a, c, g, or u
cauucauuunnangagganauu

SEQ ID NO: 100828 - RNA, 23 nt, Artificial Sequence
  Synthetic
  misc_feature (11)..(12): n is a, c, g, or u
  misc_feature (14)..(14): n is a, c, g, or u
  misc_feature (20)..(20): n is a, c, g, or u
acauucauuunnangagganauu

SEQ ID NO: 100829 - RNA, 24 nt, Artificial Sequence
  Synthetic
  misc_feature (1)..(1): n is a, c, g, or u
  misc_feature (12)..(13): n is a, c, g, or u
  misc_feature (15)..(15): n is a, c, g, or u
  misc_feature (21)..(21): n is a, c, g, or u
nacauucauuunnangagganauu

SEQ ID NO: 100830 - RNA, 18 nt, Artificial Sequence
  Synthetic
  misc_feature (13)..(13): n is a, c, g, or u
ucccuuuuuaccncuauu

SEQ ID NO: 100831 - RNA, 19 nt, Artificial Sequence
  Synthetic
  misc_feature (1)..(1): n is a, c, g, or u
  misc_feature (14)..(14): n is a, c, g, or u
nucccuuuuuaccncuauu

SEQ ID NO: 100832 - RNA, 20 nt, Artificial Sequence
  Synthetic
  misc_feature (2)..(2): n is a, c, g, or u
  misc_feature (15)..(15): n is a, c, g, or u
anucccuuuuuaccncuauu

SEQ ID NO: 100833 - RNA, 22 nt, Artificial Sequence
  Synthetic
  misc_feature (4)..(4): n is a, c, g, or u
  misc_feature (17)..(17): n is a, c, g, or u
uganucccuuuuuaccncuauu

SEQ ID NO: 100834 - RNA, 23 nt, Artificial Sequence
  Synthetic
  misc_feature (5)..(5): n is a, c, g, or u
  misc_feature (18)..(18): n is a, c, g, or u
uuganucccuuuuuaccncuauu

SEQ ID NO: 100835 - RNA, 24 nt, Artificial Sequence
  Synthetic
  misc_feature (6)..(6): n is a, c, g, or u
  misc_feature (19)..(19): n is a, c, g, or u
cuuganucccuuuuuaccncuauu

SEQ ID NO: 100836 - RNA, 19 nt, Artificial Sequence
  Synthetic
ugacuucuuuccuucuauu

SEQ ID NO: 100837 - RNA, 20 nt, Artificial Sequence
  Synthetic
cugacuucuuuccuucuauu

SEQ ID NO: 100838 - RNA, 21 nt, Artificial Sequence
  Synthetic
ucugacuucuuuccuucuauu

SEQ ID NO: 100839 - RNA, 22 nt, Artificial Sequence
  Synthetic
uucugacuucuuuccuucuauu

SEQ ID NO: 100840 - RNA, 23 nt, Artificial Sequence
  Synthetic
cuucugacuucuuuccuucuauu

SEQ ID NO: 100841 - RNA, 24 nt, Artificial Sequence
  Synthetic
ccuucugacuucuuuccuucuauu

SEQ ID NO: 100842 - RNA, 19 nt, Artificial Sequence
  Synthetic
ugcuaugccucaucuucuu

SEQ ID NO: 100843 - RNA, 20 nt, Artificial Sequence
  Synthetic
cugcuaugccucaucuucuu

SEQ ID NO: 100844 - RNA, 20 nt, Artificial Sequence
  Synthetic
  misc_feature (8)..(8): n is a, c, g, or u
uggggacnaaucuuucuguu

SEQ ID NO: 100845 - RNA, 21 nt, Artificial Sequence
  Synthetic
  misc_feature (9)..(9): n is a, c, g, or u
auggggacnaaucuuucuguu

SEQ ID NO: 100846 - RNA, 22 nt, Artificial Sequence
  Synthetic
  misc_feature (10)..(10): n is a, c, g, or u
cauggggacnaaucuuucuguu

SEQ ID NO: 100847 - RNA, 18 nt, Artificial Sequence
  Synthetic
  misc_feature (12)..(12): n is a, c, g, or u
caccacacggcngucuuu

SEQ ID NO: 100848 - RNA, 19 nt, Artificial Sequence
  Synthetic
  misc_feature (13)..(13): n is a, c, g, or u
ccaccacacggcngucuuu

SEQ ID NO: 100849 - RNA, 20 nt, Artificial Sequence
  Synthetic
  misc_feature (1)..(1): n is a, c, g, or u
  misc_feature (14)..(14): n is a, c, g, or u
nccaccacacggcngucuuu

SEQ ID NO: 100850 - RNA, 21 nt, Artificial Sequence
  Synthetic
  misc_feature (2)..(2): n is a, c, g, or u
  misc_feature (15)..(15): n is a, c, g, or u
cnccaccacacggcngucuuu

SEQ ID NO: 100851 - RNA, 22 nt, Artificial Sequence
  Synthetic
  misc_feature (3)..(3): n is a, c, g, or u
  misc_feature (16)..(16): n is a, c, g, or u
acnccaccacacggcngucuuu

SEQ ID NO: 100852 - RNA, 23 nt, Artificial Sequence
  Synthetic
  misc_feature (4)..(4): n is a, c, g, or u
  misc_feature (17)..(17): n is a, c, g, or u
cacnccaccacacggcngucuuu

SEQ ID NO: 100853 - RNA, 24 nt, Artificial Sequence
  Synthetic
  misc_feature (5)..(5): n is a, c, g, or u
  misc_feature (18)..(18): n is a, c, g, or u
ucacnccaccacacggcngucuuu

SEQ ID NO: 100854 - RNA, 18 nt, Artificial Sequence
  Synthetic
ugaguauuuggugucuuu

SEQ ID NO: 100855 - RNA, 19 nt, Artificial Sequence
  Synthetic
uugaguauuuggugucuuu

SEQ ID NO: 100856 - RNA, 20 nt, Artificial Sequence
  Synthetic
cuugaguauuuggugucuuu

SEQ ID NO: 100857 - RNA, 21 nt, Artificial Sequence
  Synthetic
ucuugaguauuuggugucuuu

SEQ ID NO: 100858 - RNA, 22 nt, Artificial Sequence
  Synthetic
uucuugaguauuuggugucuuu

SEQ ID NO: 100859 - RNA, 24 nt, Artificial Sequence
  Synthetic
uguucuugaguauuuggugucuuu

SEQ ID NO: 100860 - RNA, 18 nt, Artificial Sequence
  Synthetic
aauccucugggauucuuu

SEQ ID NO: 100861 - RNA, 19 nt, Artificial Sequence
  Synthetic
caauccucugggauucuuu

SEQ ID NO: 100862 - RNA, 20 nt, Artificial Sequence
  Synthetic
ccaauccucugggauucuuu

SEQ ID NO: 100863 - RNA, 18 nt, Artificial Sequence
  Synthetic
uuucuccuggcucaguuu

SEQ ID NO: 100864 - RNA, 20 nt, Artificial Sequence
  Synthetic
cguuucuccuggcucaguuu

SEQ ID NO: 100865 - RNA, 18 nt, Artificial Sequence
  Synthetic
cacgcagcgccucauuuu

SEQ ID NO: 100866 - RNA, 19 nt, Artificial Sequence
  Synthetic
acacgcagcgccucauuuu

SEQ ID NO: 100867 - RNA, 20 nt, Artificial Sequence
  Synthetic
uacacgcagcgccucauuuu

SEQ ID NO: 100868 - RNA, 18 nt, Artificial Sequence
  Synthetic
gaagucagaaggcaaaaa

SEQ ID NO: 100869 - RNA, 19 nt, Artificial Sequence
  Synthetic
agaagucagaaggcaaaaa

SEQ ID NO: 100870 - RNA, 20 nt, Artificial Sequence
  Synthetic
aagaagucagaaggcaaaaa

SEQ ID NO: 100871 - RNA, 21 nt, Artificial Sequence
  Synthetic
aaagaagucagaaggcaaaaa

SEQ ID NO: 100872 - RNA, 22 nt, Artificial Sequence
  Synthetic
gaaagaagucagaaggcaaaaa

SEQ ID NO: 100873 - RNA, 23 nt, Artificial Sequence
  Synthetic
ggaaagaagucagaaggcaaaaa

SEQ ID NO: 100874 - RNA, 24 nt, Artificial Sequence
  Synthetic
aggaaagaagucagaaggcaaaaa

SEQ ID NO: 100875 - RNA, 18 nt, Artificial Sequence
  Synthetic
auauggugacccacaaaa

SEQ ID NO: 100876 - RNA, 19 nt, Artificial Sequence
  Synthetic
aauauggugacccacaaaa

SEQ ID NO: 100877 - RNA, 20 nt, Artificial Sequence
  Synthetic
gaauauggugacccacaaaa

SEQ ID NO: 100878 - RNA, 21 nt, Artificial Sequence
  Synthetic
agaauauggugacccacaaaa

SEQ ID NO: 100879 - RNA, 22 nt, Artificial Sequence
  Synthetic
aagaauauggugacccacaaaa

SEQ ID NO: 100880 - RNA, 23 nt, Artificial Sequence
  Synthetic
caagaauauggugacccacaaaa

SEQ ID NO: 100881 - RNA, 24 nt, Artificial Sequence
  Synthetic
ccaagaauauggugacccacaaaa

SEQ ID NO: 100882 - RNA, 18 nt, Artificial Sequence
  Synthetic
acaguuucucuuccaaaa

SEQ ID NO: 100883 - RNA, 19 nt, Artificial Sequence
  Synthetic
aacaguuucucuuccaaaa

SEQ ID NO: 100884 - RNA, 20 nt, Artificial Sequence
  Synthetic
gaacaguuucucuuccaaaa

SEQ ID NO: 100885 - RNA, 21 nt, Artificial Sequence
  Synthetic
agaacaguuucucuuccaaaa

SEQ ID NO: 100886 - RNA, 22 nt, Artificial Sequence
  Synthetic
aagaacaguuucucuuccaaaa

SEQ ID NO: 100887 - RNA, 23 nt, Artificial Sequence
  Synthetic
caagaacaguuucucuuccaaaa

SEQ ID NO: 100888 - RNA, 24 nt, Artificial Sequence
  Synthetic
ucaagaacaguuucucuuccaaaa

SEQ ID NO: 100889 - RNA, 18 nt, Artificial Sequence
  Synthetic
agaagucagaaggcaaaa

SEQ ID NO: 100890 - RNA, 19 nt, Artificial Sequence
  Synthetic
aagaagucagaaggcaaaa

SEQ ID NO: 100891 - RNA, 20 nt, Artificial Sequence
  Synthetic
aaagaagucagaaggcaaaa

SEQ ID NO: 100892 - RNA, 21 nt, Artificial Sequence
  Synthetic
gaaagaagucagaaggcaaaa

SEQ ID NO: 100893 - RNA, 22 nt, Artificial Sequence
  Synthetic
ggaaagaagucagaaggcaaaa

SEQ ID NO: 100894 - RNA, 23 nt, Artificial Sequence
  Synthetic
aggaaagaagucagaaggcaaaa

SEQ ID NO: 100895 - RNA, 24 nt, Artificial Sequence
  Synthetic
aaggaaagaagucagaaggcaaaa

SEQ ID NO: 100896 - RNA, 18 nt, Artificial Sequence
  Synthetic
ggugcucccccuagaaaa

SEQ ID NO: 100897 - RNA, 19 nt, Artificial Sequence
  Synthetic
gggugcucccccuagaaaa

SEQ ID NO: 100898 - RNA, 20 nt, Artificial Sequence
  Synthetic
ugggugcucccccuagaaaa

SEQ ID NO: 100899 - RNA, 21 nt, Artificial Sequence
  Synthetic
gugggugcucccccuagaaaa

SEQ ID NO: 100900 - RNA, 22 nt, Artificial Sequence
  Synthetic
cgugggugcucccccuagaaaa

SEQ ID NO: 100901 - RNA, 23 nt, Artificial Sequence
  Synthetic
acgugggugcucccccuagaaaa

SEQ ID NO: 100902 - RNA, 24 nt, Artificial Sequence
  Synthetic
cacgugggugcucccccuagaaaa

SEQ ID NO: 100903 - RNA, 18 nt, Artificial Sequence
  Synthetic
  misc_feature (11)..(11): n is a, c, g, or u
uugguaauagngguaaaa

SEQ ID NO: 100904 - RNA, 19 nt, Artificial Sequence
  Synthetic
  misc_feature (12)..(12): n is a, c, g, or u
auugguaauagngguaaaa

SEQ ID NO: 100905 - RNA, 20 nt, Artificial Sequence
  Synthetic
  misc_feature (13)..(13): n is a, c, g, or u
aauugguaauagngguaaaa

SEQ ID NO: 100906 - RNA, 21 nt, Artificial Sequence
  Synthetic
  misc_feature (14)..(14): n is a, c, g, or u
aaauugguaauagngguaaaa

SEQ ID NO: 100907 - RNA, 22 nt, Artificial Sequence
  Synthetic
  misc_feature (15)..(15): n is a, c, g, or u
aaaauugguaauagngguaaaa

SEQ ID NO: 100908 - RNA, 23 nt, Artificial Sequence
  Synthetic
  misc_feature (16)..(16): n is a, c, g, or u
gaaaauugguaauagngguaaaa

SEQ ID NO: 100909 - RNA, 24 nt, Artificial Sequence
  Synthetic
  misc_feature (17)..(17): n is a, c, g, or u
agaaaauugguaauagngguaaaa

SEQ ID NO: 100910 - RNA, 18 nt, Artificial Sequence
  Synthetic
aauauggugacccacaaa

SEQ ID NO: 100911 - RNA, 19 nt, Artificial Sequence
  Synthetic
gaauauggugacccacaaa

SEQ ID NO: 100912 - RNA, 20 nt, Artificial Sequence
  Synthetic
agaauauggugacccacaaa

SEQ ID NO: 100913 - RNA, 21 nt, Artificial Sequence
  Synthetic
aagaauauggugacccacaaa

SEQ ID NO: 100914 - RNA, 22 nt, Artificial Sequence
  Synthetic
caagaauauggugacccacaaa

SEQ ID NO: 100915 - RNA, 23 nt, Artificial Sequence
  Synthetic
ccaagaauauggugacccacaaa

SEQ ID NO: 100916 - RNA, 24 nt, Artificial Sequence
  Synthetic
cccaagaauauggugacccacaaa

SEQ ID NO: 100917 - RNA, 18 nt, Artificial Sequence
  Synthetic
uguauacccaaagacaaa

SEQ ID NO: 100918 - RNA, 19 nt, Artificial Sequence
  Synthetic
auguauacccaaagacaaa

SEQ ID NO: 100919 - RNA, 20 nt, Artificial Sequence
  Synthetic
aauguauacccaaagacaaa

SEQ ID NO: 100920 - RNA, 21 nt, Artificial Sequence
  Synthetic
aaauguauacccaaagacaaa

SEQ ID NO: 100921 - RNA, 22 nt, Artificial Sequence
  Synthetic
  misc_feature (1)..(1): n is a, c, g, or u
naaauguauacccaaagacaaa

SEQ ID NO: 100922 - RNA, 23 nt, Artificial Sequence
  Synthetic
  misc_feature (2)..(2): n is a, c, g, or u
unaaauguauacccaaagacaaa

SEQ ID NO: 100923 - RNA, 24 nt, Artificial Sequence
  Synthetic
  misc_feature (3)..(3): n is a, c, g, or u
uunaaauguauacccaaagacaaa

SEQ ID NO: 100924 - RNA, 18 nt, Artificial Sequence
  Synthetic
  misc_feature (3)..(3): n is a, c, g, or u
uunaaauguauacccaaa

SEQ ID NO: 100925 - RNA, 19 nt, Artificial Sequence
  Synthetic
  misc_feature (4)..(4): n is a, c, g, or u
guunaaauguauacccaaa

SEQ ID NO: 100926 - RNA, 20 nt, Artificial Sequence
  Synthetic
  misc_feature (5)..(5): n is a, c, g, or u
gguunaaauguauacccaaa

SEQ ID NO: 100927 - RNA, 21 nt, Artificial Sequence
  Synthetic
  misc_feature (6)..(6): n is a, c, g, or u
ggguunaaauguauacccaaa

SEQ ID NO: 100928 - RNA, 22 nt, Artificial Sequence
  Synthetic
  misc_feature (7)..(7): n is a, c, g, or u
aggguunaaauguauacccaaa

SEQ ID NO: 100929 - RNA, 23 nt, Artificial Sequence
  Synthetic
  misc_feature (8)..(8): n is a, c, g, or u
uaggguunaaauguauacccaaa

SEQ ID NO: 100930 - RNA, 24 nt, Artificial Sequence
  Synthetic
  misc_feature (9)..(9): n is a, c, g, or u
uuaggguunaaauguauacccaaa

SEQ ID NO: 100931 - RNA, 18 nt, Artificial Sequence
  Synthetic
aacaguuucucuuccaaa

SEQ ID NO: 100932 - RNA, 19 nt, Artificial Sequence
  Synthetic
gaacaguuucucuuccaaa

SEQ ID NO: 100933 - RNA, 20 nt, Artificial Sequence
  Synthetic
agaacaguuucucuuccaaa

SEQ ID NO: 100934 - RNA, 21 nt, Artificial Sequence
  Synthetic
aagaacaguuucucuuccaaa

SEQ ID NO: 100935 - RNA, 22 nt, Artificial Sequence
  Synthetic
caagaacaguuucucuuccaaa

SEQ ID NO: 100936 - RNA, 23 nt, Artificial Sequence
  Synthetic
ucaagaacaguuucucuuccaaa

SEQ ID NO: 100937 - RNA, 24 nt, Artificial Sequence
  Synthetic
cucaagaacaguuucucuuccaaa

SEQ ID NO: 100938 - RNA, 18 nt, Artificial Sequence
  Synthetic
agaccggcugcgagcaaa

SEQ ID NO: 100939 - RNA, 19 nt, Artificial Sequence
  Synthetic
cagaccggcugcgagcaaa

SEQ ID NO: 100940 - RNA, 20 nt, Artificial Sequence
  Synthetic
ccagaccggcugcgagcaaa

SEQ ID NO: 100941 - RNA, 21 nt, Artificial Sequence
  Synthetic
uccagaccggcugcgagcaaa

SEQ ID NO: 100942 - RNA, 22 nt, Artificial Sequence
  Synthetic
cuccagaccggcugcgagcaaa

SEQ ID NO: 100943 - RNA, 23 nt, Artificial Sequence
  Synthetic
gcuccagaccggcugcgagcaaa

SEQ ID NO: 100944 - RNA, 24 nt, Artificial Sequence
  Synthetic
  misc_feature (1)..(1): n is a, c, g, or u
ngcuccagaccggcugcgagcaaa

SEQ ID NO: 100945 - RNA, 18 nt, Artificial Sequence
  Synthetic
aagaagucagaaggcaaa

SEQ ID NO: 100946 - RNA, 19 nt, Artificial Sequence
  Synthetic
aaagaagucagaaggcaaa

SEQ ID NO: 100947 - RNA, 20 nt, Artificial Sequence
  Synthetic
gaaagaagucagaaggcaaa

SEQ ID NO: 100948 - RNA, 21 nt, Artificial Sequence
  Synthetic
ggaaagaagucagaaggcaaa

SEQ ID NO: 100949 - RNA, 22 nt, Artificial Sequence
  Synthetic
aggaaagaagucagaaggcaaa

SEQ ID NO: 100950 - RNA, 23 nt, Artificial Sequence
  Synthetic
aaggaaagaagucagaaggcaaa

SEQ ID NO: 100951 - RNA, 24 nt, Artificial Sequence
  Synthetic
gaaggaaagaagucagaaggcaaa

SEQ ID NO: 100952 - RNA, 18 nt, Artificial Sequence
  Synthetic
uuguaaguuggcgagaaa

SEQ ID NO: 100953 - RNA, 19 nt, Artificial Sequence
  Synthetic
cuuguaaguuggcgagaaa

SEQ ID NO: 100954 - RNA, 20 nt, Artificial Sequence
  Synthetic
ccuuguaaguuggcgagaaa

SEQ ID NO: 100955 - RNA, 21 nt, Artificial Sequence
  Synthetic
gccuuguaaguuggcgagaaa

SEQ ID NO: 100956 - RNA, 22 nt, Artificial Sequence
  Synthetic
ggccuuguaaguuggcgagaaa

SEQ ID NO: 100957 - RNA, 23 nt, Artificial Sequence
  Synthetic
aggccuuguaaguuggcgagaaa

SEQ ID NO: 100958 - RNA, 24 nt, Artificial Sequence
  Synthetic
aaggccuuguaaguuggcgagaaa

SEQ ID NO: 100959 - RNA, 18 nt, Artificial Sequence
  Synthetic
gggugcucccccuagaaa

SEQ ID NO: 100960 - RNA, 19 nt, Artificial Sequence
  Synthetic
ugggugcucccccuagaaa

SEQ ID NO: 100961 - RNA, 20 nt, Artificial Sequence
  Synthetic
gugggugcucccccuagaaa

SEQ ID NO: 100962 - RNA, 21 nt, Artificial Sequence
  Synthetic
cgugggugcucccccuagaaa

SEQ ID NO: 100963 - RNA, 22 nt, Artificial Sequence
  Synthetic
acgugggugcucccccuagaaa

SEQ ID NO: 100964 - RNA, 23 nt, Artificial Sequence
  Synthetic
cacgugggugcucccccuagaaa

SEQ ID NO: 100965 - RNA, 24 nt, Artificial Sequence
  Synthetic
acacgugggugcucccccuagaaa

SEQ ID NO: 100966 - RNA, 18 nt, Artificial Sequence
  Synthetic
caaaaguaagacaggaaa

SEQ ID NO: 100967 - RNA, 19 nt, Artificial Sequence
  Synthetic
ccaaaaguaagacaggaaa

SEQ ID NO: 100968 - RNA, 20 nt, Artificial Sequence
  Synthetic
uccaaaaguaagacaggaaa

SEQ ID NO: 100969 - RNA, 21 nt, Artificial Sequence
  Synthetic
uuccaaaaguaagacaggaaa

SEQ ID NO: 100970 - RNA, 22 nt, Artificial Sequence
  Synthetic
cuuccaaaaguaagacaggaaa

SEQ ID NO: 100971 - RNA, 23 nt, Artificial Sequence
  Synthetic
ucuuccaaaaguaagacaggaaa

SEQ ID NO: 100972 - RNA, 24 nt, Artificial Sequence
  Synthetic
cucuuccaaaaguaagacaggaaa

SEQ ID NO: 100973 - RNA, 18 nt, Artificial Sequence
  Synthetic
  misc_feature (1)..(1): n is a, c, g, or u
  misc_feature (12)..(12): n is a, c, g, or u
naaaugaaugunaggaaa

SEQ ID NO: 100974 - RNA, 19 nt, Artificial Sequence
  Synthetic
  misc_feature (1)..(2): n is a, c, g, or u
  misc_feature (13)..(13): n is a, c, g, or u
nnaaaugaaugunaggaaa

SEQ ID NO: 100975 - RNA, 20 nt, Artificial Sequence
  Synthetic
  misc_feature (2)..(3): n is a, c, g, or u
  misc_feature (14)..(14): n is a, c, g, or u
unnaaaugaaugunaggaaa

SEQ ID NO: 100976 - RNA, 21 nt, Artificial Sequence
  Synthetic
  misc_feature (1)..(1): n is a, c, g, or u
  misc_feature (3)..(4): n is a, c, g, or u
  misc_feature (15)..(15): n is a, c, g, or u
nunnaaaugaaugunaggaaa

SEQ ID NO: 100977 - RNA, 22 nt, Artificial Sequence
  Synthetic
  misc_feature (2)..(2): n is a, c, g, or u
  misc_feature (4)..(5): n is a, c, g, or u
  misc_feature (16)..(16): n is a, c, g, or u
cnunnaaaugaaugunaggaaa

SEQ ID NO: 100978 - RNA, 23 nt, Artificial Sequence
  Synthetic
  misc_feature (3)..(3): n is a, c, g, or u
  misc_feature (5)..(6): n is a, c, g, or u
  misc_feature (17)..(17): n is a, c, g, or u
ucnunnaaaugaaugunaggaaa

SEQ ID NO: 100979 - RNA, 24 nt, Artificial Sequence
  Synthetic
  misc_feature (4)..(4): n is a, c, g, or u
  misc_feature (6)..(7): n is a, c, g, or u
  misc_feature (18)..(18): n is a, c, g, or u
cucnunnaaaugaaugunaggaaa

SEQ ID NO: 100980 - RNA, 18 nt, Artificial Sequence
  Synthetic
acagcaacaagagggaaa

SEQ ID NO: 100981 - RNA, 19 nt, Artificial Sequence
  Synthetic
uacagcaacaagagggaaa

SEQ ID NO: 100982 - RNA, 20 nt, Artificial Sequence
  Synthetic
guacagcaacaagagggaaa

SEQ ID NO: 100983 - RNA, 21 nt, Artificial Sequence
  Synthetic
uguacagcaacaagagggaaa

SEQ ID NO: 100984 - RNA, 22 nt, Artificial Sequence
  Synthetic
uuguacagcaacaagagggaaa

SEQ ID NO: 100985 - RNA, 23 nt, Artificial Sequence
  Synthetic
uuuguacagcaacaagagggaaa

SEQ ID NO: 100986 - RNA, 24 nt, Artificial Sequence
  Synthetic
uuuuguacagcaacaagagggaaa

SEQ ID NO: 100987 - RNA, 18 nt, Artificial Sequence
  Synthetic
ucauccauauaacugaaa

SEQ ID NO: 100988 - RNA, 19 nt, Artificial Sequence
  Synthetic
aucauccauauaacugaaa

SEQ ID NO: 100989 - RNA, 20 nt, Artificial Sequence
  Synthetic
caucauccauauaacugaaa

SEQ ID NO: 100990 - RNA, 21 nt, Artificial Sequence
  Synthetic
acaucauccauauaacugaaa

SEQ ID NO: 100991 - RNA, 22 nt, Artificial Sequence
  Synthetic
cacaucauccauauaacugaaa

SEQ ID NO: 100992 - RNA, 23 nt, Artificial Sequence
  Synthetic
ccacaucauccauauaacugaaa

SEQ ID NO: 100993 - RNA, 24 nt, Artificial Sequence
  Synthetic
accacaucauccauauaacugaaa

SEQ ID NO: 100994 - RNA, 18 nt, Artificial Sequence
  Synthetic
acaaauggcacuaguaaa

SEQ ID NO: 100995 - RNA, 19 nt, Artificial Sequence
  Synthetic
aacaaauggcacuaguaaa

SEQ ID NO: 100996 - RNA, 20 nt, Artificial Sequence
  Synthetic
gaacaaauggcacuaguaaa

SEQ ID NO: 100997 - RNA, 21 nt, Artificial Sequence
  Synthetic
ugaacaaauggcacuaguaaa

SEQ ID NO: 100998 - RNA, 22 nt, Artificial Sequence
  Synthetic
cugaacaaauggcacuaguaaa

SEQ ID NO: 100999 - RNA, 23 nt, Artificial Sequence
  Synthetic
acugaacaaauggcacuaguaaa

SEQ ID NO: 101000 - RNA, 24 nt, Artificial Sequence
  Synthetic
cacugaacaaauggcacuaguaaa

SEQ ID NO: 101001 - RNA, 18 nt, Artificial Sequence
  Synthetic
acggggagaccgcguaaa

SEQ ID NO: 101002 - RNA, 19 nt, Artificial Sequence
  Synthetic
gacggggagaccgcguaaa

SEQ ID NO: 101003 - RNA, 20 nt, Artificial Sequence
  Synthetic
agacggggagaccgcguaaa

SEQ ID NO: 101004 - RNA, 21 nt, Artificial Sequence
  Synthetic
cagacggggagaccgcguaaa

SEQ ID NO: 101005 - RNA, 22 nt, Artificial Sequence
  Synthetic
acagacggggagaccgcguaaa

SEQ ID NO: 101006 - RNA, 23 nt, Artificial Sequence
  Synthetic
cacagacggggagaccgcguaaa

SEQ ID NO: 101007 - RNA, 24 nt, Artificial Sequence
  Synthetic
gcacagacggggagaccgcguaaa

SEQ ID NO: 101008 - RNA, 18 nt, Artificial Sequence
  Synthetic
  misc_feature (12)..(12): n is a, c, g, or u
auugguaauagngguaaa

SEQ ID NO: 101009 - RNA, 19 nt, Artificial Sequence
  Synthetic
  misc_feature (13)..(13): n is a, c, g, or u
aauugguaauagngguaaa

SEQ ID NO: 101010 - RNA, 20 nt, Artificial Sequence
  Synthetic
  misc_feature (14)..(14): n is a, c, g, or u
aaauugguaauagngguaaa

SEQ ID NO: 101011 - RNA, 21 nt, Artificial Sequence
  Synthetic
  misc_feature (15)..(15): n is a, c, g, or u
aaaauugguaauagngguaaa

SEQ ID NO: 101012 - RNA, 22 nt, Artificial Sequence
  Synthetic
  misc_feature (16)..(16): n is a, c, g, or u
gaaaauugguaauagngguaaa

SEQ ID NO: 101013 - RNA, 23 nt, Artificial Sequence
  Synthetic
  misc_feature (17)..(17): n is a, c, g, or u
agaaaauugguaauagngguaaa

SEQ ID NO: 101014 - RNA, 24 nt, Artificial Sequence
  Synthetic
  misc_feature (18)..(18): n is a, c, g, or u
aagaaaauugguaauagngguaaa

SEQ ID NO: 101015 - RNA, 18 nt, Artificial Sequence
  Synthetic
  misc_feature (1)..(1): n is a, c, g, or u
  misc_feature (4)..(4): n is a, c, g, or u
nuanccacauuguguaaa

SEQ ID NO: 101016 - RNA, 19 nt, Artificial Sequence
  Synthetic
  misc_feature (2)..(2): n is a, c, g, or u
  misc_feature (5)..(5): n is a, c, g, or u
gnuanccacauuguguaaa

SEQ ID NO: 101017 - RNA, 20 nt, Artificial Sequence
  Synthetic
  misc_feature (3)..(3): n is a, c, g, or u
  misc_feature (6)..(6): n is a, c, g, or u
ggnuanccacauuguguaaa

SEQ ID NO: 101018 - RNA, 21 nt, Artificial Sequence
  Synthetic
  misc_feature (1)..(1): n is a, c, g, or u
  misc_feature (4)..(4): n is a, c, g, or u
  misc_feature (7)..(7): n is a, c, g, or u
nggnuanccacauuguguaaa

SEQ ID NO: 101019 - RNA, 22 nt, Artificial Sequence
  Synthetic
  misc_feature (2)..(2): n is a, c, g, or u
  misc_feature (5)..(5): n is a, c, g, or u
  misc_feature (8)..(8): n is a, c, g, or u
cnggnuanccacauuguguaaa

SEQ ID NO: 101020 - RNA, 23 nt, Artificial Sequence
  Synthetic
  misc_feature (3)..(3): n is a, c, g, or u
  misc_feature (6)..(6): n is a, c, g, or u
  misc_feature (9)..(9): n is a, c, g, or u
gcnggnuanccacauuguguaaa

SEQ ID NO: 101021 - RNA, 24 nt, Artificial Sequence
  Synthetic
  misc_feature (1)..(1): n is a, c, g, or u
  misc_feature (4)..(4): n is a, c, g, or u
  misc_feature (7)..(7): n is a, c, g, or u
  misc_feature (10)..(10): n is a, c, g, or u
ngcnggnuanccacauuguguaaa

SEQ ID NO: 101022 - RNA, 18 nt, Artificial Sequence
  Synthetic
  misc_feature (7)..(7): n is a, c, g, or u
uugccanucaggauuaaa

SEQ ID NO: 101023 - RNA, 19 nt, Artificial Sequence
  Synthetic
  misc_feature (8)..(8): n is a, c, g, or u
uuugccanucaggauuaaa

SEQ ID NO: 101024 - RNA, 20 nt, Artificial Sequence
  Synthetic
  misc_feature (9)..(9): n is a, c, g, or u
guuugccanucaggauuaaa

SEQ ID NO: 101025 - RNA, 21 nt, Artificial Sequence
  Synthetic
  misc_feature (10)..(10): n is a, c, g, or u
aguuugccanucaggauuaaa

SEQ ID NO: 101026 - RNA, 22 nt, Artificial Sequence
  Synthetic
  misc_feature (11)..(11): n is a, c, g, or u
gaguuugccanucaggauuaaa

SEQ ID NO: 101027 - RNA, 23 nt, Artificial Sequence
  Synthetic
  misc_feature (12)..(12): n is a, c, g, or u
ggaguuugccanucaggauuaaa

SEQ ID NO: 101028 - RNA, 24 nt, Artificial Sequence
  Synthetic
  misc_feature (13)..(13): n is a, c, g, or u
gggaguuugccanucaggauuaaa

SEQ ID NO: 101029 - RNA, 18 nt, Artificial Sequence
  Synthetic
gguuuuguacagcaacaa

SEQ ID NO: 101030 - RNA, 19 nt, Artificial Sequence
  Synthetic
agguuuuguacagcaacaa

SEQ ID NO: 101031 - RNA, 20 nt, Artificial Sequence
  Synthetic
aagguuuuguacagcaacaa

SEQ ID NO: 101032 - RNA, 18 nt, Artificial Sequence
  Synthetic
gaggauucuugucaacaa

SEQ ID NO: 101033 - RNA, 19 nt, Artificial Sequence
  Synthetic
ugaggauucuugucaacaa

SEQ ID NO: 101034 - RNA, 20 nt, Artificial Sequence
  Synthetic
gugaggauucuugucaacaa

SEQ ID NO: 101035 - RNA, 21 nt, Artificial Sequence
  Synthetic
ugugaggauucuugucaacaa

SEQ ID NO: 101036 - RNA, 22 nt, Artificial Sequence
  Synthetic
uugugaggauucuugucaacaa

SEQ ID NO: 101037 - RNA, 23 nt, Artificial Sequence
  Synthetic
auugugaggauucuugucaacaa

SEQ ID NO: 101038 - RNA, 24 nt, Artificial Sequence
  Synthetic
uauugugaggauucuugucaacaa

SEQ ID NO: 101039 - RNA, 18 nt, Artificial Sequence
  Synthetic
gaauauggugacccacaa

SEQ ID NO: 101040 - RNA, 19 nt, Artificial Sequence
  Synthetic
agaauauggugacccacaa

SEQ ID NO: 101041 - RNA, 20 nt, Artificial Sequence
  Synthetic
aagaauauggugacccacaa

SEQ ID NO: 101042 - RNA, 21 nt, Artificial Sequence
  Synthetic
caagaauauggugacccacaa

SEQ ID NO: 101043 - RNA, 22 nt, Artificial Sequence
  Synthetic
ccaagaauauggugacccacaa

SEQ ID NO: 101044 - RNA, 23 nt, Artificial Sequence
  Synthetic
cccaagaauauggugacccacaa

SEQ ID NO: 101045 - RNA, 24 nt, Artificial Sequence
  Synthetic
ucccaagaauauggugacccacaa

SEQ ID NO: 101046 - RNA, 18 nt, Artificial Sequence
  Synthetic
auguauacccaaagacaa

SEQ ID NO: 101047 - RNA, 19 nt, Artificial Sequence
  Synthetic
aauguauacccaaagacaa

SEQ ID NO: 101048 - RNA, 20 nt, Artificial Sequence
  Synthetic
aaauguauacccaaagacaa

SEQ ID NO: 101049 - RNA, 21 nt, Artificial Sequence
  Synthetic
  misc_feature (1)..(1): n is a, c, g, or u
naaauguauacccaaagacaa

SEQ ID NO: 101050 - RNA, 22 nt, Artificial Sequence
  Synthetic
  misc_feature (2)..(2): n is a, c, g, or u
unaaauguauacccaaagacaa

SEQ ID NO: 101051 - RNA, 23 nt, Artificial Sequence
  Synthetic
  misc_feature (3)..(3): n is a, c, g, or u
uunaaauguauacccaaagacaa

SEQ ID NO: 101052 - RNA, 24 nt, Artificial Sequence
  Synthetic
  misc_feature (4)..(4): n is a, c, g, or u
guunaaauguauacccaaagacaa

SEQ ID NO: 101053 - RNA, 18 nt, Artificial Sequence
  Synthetic
  misc_feature (9)..(9): n is a, c, g, or u
cagcgauanccaggacaa

SEQ ID NO: 101054 - RNA, 19 nt, Artificial Sequence
  Synthetic
  misc_feature (10)..(10): n is a, c, g, or u
ccagcgauanccaggacaa

SEQ ID NO: 101055 - RNA, 20 nt, Artificial Sequence
  Synthetic
  misc_feature (11)..(11): n is a, c, g, or u
uccagcgauanccaggacaa

SEQ ID NO: 101056 - RNA, 21 nt, Artificial Sequence
  Synthetic
  misc_feature (12)..(12): n is a, c, g, or u
auccagcgauanccaggacaa

SEQ ID NO: 101057 - RNA, 22 nt, Artificial Sequence
  Synthetic
  misc_feature (13)..(13): n is a, c, g, or u
cauccagcgauanccaggacaa

SEQ ID NO: 101058 - RNA, 23 nt, Artificial Sequence
  Synthetic
  misc_feature (14)..(14): n is a, c, g, or u
acauccagcgauanccaggacaa

SEQ ID NO: 101059 - RNA, 24 nt, Artificial Sequence
  Synthetic
  misc_feature (15)..(15): n is a, c, g, or u
cacauccagcgauanccaggacaa

SEQ ID NO: 101060 - RNA, 18 nt, Artificial Sequence
  Synthetic
ccuggaaguagaggacaa

SEQ ID NO: 101061 - RNA, 19 nt, Artificial Sequence
  Synthetic
uccuggaaguagaggacaa

SEQ ID NO: 101062 - RNA, 20 nt, Artificial Sequence
  Synthetic
uuccuggaaguagaggacaa

SEQ ID NO: 101063 - RNA, 21 nt, Artificial Sequence
  Synthetic
guuccuggaaguagaggacaa

SEQ ID NO: 101064 - RNA, 22 nt, Artificial Sequence
  Synthetic
uguuccuggaaguagaggacaa

SEQ ID NO: 101065 - RNA, 23 nt, Artificial Sequence
  Synthetic
auguuccuggaaguagaggacaa

SEQ ID NO: 101066 - RNA, 24 nt, Artificial Sequence
  Synthetic
gauguuccuggaaguagaggacaa

SEQ ID NO: 101067 - RNA, 18 nt, Artificial Sequence
  Synthetic
guaguccagaagaaccaa

SEQ ID NO: 101068 - RNA, 19 nt, Artificial Sequence
  Synthetic
gguaguccagaagaaccaa

SEQ ID NO: 101069 - RNA, 20 nt, Artificial Sequence
  Synthetic
ugguaguccagaagaaccaa

SEQ ID NO: 101070 - RNA, 21 nt, Artificial Sequence
  Synthetic
uugguaguccagaagaaccaa

SEQ ID NO: 101071 - RNA, 22 nt, Artificial Sequence
  Synthetic
cuugguaguccagaagaaccaa

SEQ ID NO: 101072 - RNA, 23 nt, Artificial Sequence
  Synthetic
ccuugguaguccagaagaaccaa

SEQ ID NO: 101073 - RNA, 24 nt, Artificial Sequence
  Synthetic
accuugguaguccagaagaaccaa

SEQ ID NO: 101074 - RNA, 18 nt, Artificial Sequence
  Synthetic
uucaucaacucaccccaa

SEQ ID NO: 101075 - RNA, 19 nt, Artificial Sequence
  Synthetic
auucaucaacucaccccaa

SEQ ID NO: 101076 - RNA, 20 nt, Artificial Sequence
  Synthetic
gauucaucaacucaccccaa

SEQ ID NO: 101077 - RNA, 21 nt, Artificial Sequence
  Synthetic
agauucaucaacucaccccaa

SEQ ID NO: 101078 - RNA, 22 nt, Artificial Sequence
  Synthetic
cagauucaucaacucaccccaa

SEQ ID NO: 101079 - RNA, 23 nt, Artificial Sequence
  Synthetic
ccagauucaucaacucaccccaa

SEQ ID NO: 101080 - RNA, 24 nt, Artificial Sequence
  Synthetic
gccagauucaucaacucaccccaa

SEQ ID NO: 101081 - RNA, 18 nt, Artificial Sequence
  Synthetic
uugggguugaagucccaa

SEQ ID NO: 101082 - RNA, 19 nt, Artificial Sequence
  Synthetic
guugggguugaagucccaa

SEQ ID NO: 101083 - RNA, 20 nt, Artificial Sequence
  Synthetic
uguugggguugaagucccaa

SEQ ID NO: 101084 - RNA, 21 nt, Artificial Sequence
  Synthetic
uuguugggguugaagucccaa

SEQ ID NO: 101085 - RNA, 22 nt, Artificial Sequence
  Synthetic
cuuguugggguugaagucccaa

SEQ ID NO: 101086 - RNA, 23 nt, Artificial Sequence
  Synthetic
ccuuguugggguugaagucccaa

SEQ ID NO: 101087 - RNA, 24 nt, Artificial Sequence
  Synthetic
uccuuguugggguugaagucccaa

SEQ ID NO: 101088 - RNA, 18 nt, Artificial Sequence
  Synthetic
gaagguuuuguacagcaa

SEQ ID NO: 101089 - RNA, 19 nt, Artificial Sequence
  Synthetic
cgaagguuuuguacagcaa

SEQ ID NO: 101090 - RNA, 20 nt, Artificial Sequence
  Synthetic
ccgaagguuuuguacagcaa

SEQ ID NO: 101091 - RNA, 18 nt, Artificial Sequence
  Synthetic
cagaccggcugcgagcaa

SEQ ID NO: 101092 - RNA, 19 nt, Artificial Sequence
  Synthetic
ccagaccggcugcgagcaa

SEQ ID NO: 101093 - RNA, 20 nt, Artificial Sequence
  Synthetic
uccagaccggcugcgagcaa

SEQ ID NO: 101094 - RNA, 21 nt, Artificial Sequence
  Synthetic
cuccagaccggcugcgagcaa

SEQ ID NO: 101095 - RNA, 22 nt, Artificial Sequence
  Synthetic
gcuccagaccggcugcgagcaa

SEQ ID NO: 101096 - RNA, 23 nt, Artificial Sequence
  Synthetic
  misc_feature (1)..(1): n is a, c, g, or u
ngcuccagaccggcugcgagcaa

SEQ ID NO: 101097 - RNA, 24 nt, Artificial Sequence
  Synthetic
  misc_feature (2)..(2): n is a, c, g, or u
ungcuccagaccggcugcgagcaa

SEQ ID NO: 101098 - RNA, 18 nt, Artificial Sequence
  Synthetic
aaagaagucagaaggcaa

SEQ ID NO: 101099 - RNA, 19 nt, Artificial Sequence
  Synthetic
gaaagaagucagaaggcaa

SEQ ID NO: 101100 - RNA, 20 nt, Artificial Sequence
  Synthetic
ggaaagaagucagaaggcaa

SEQ ID NO: 101101 - RNA, 21 nt, Artificial Sequence
  Synthetic
aggaaagaagucagaaggcaa

SEQ ID NO: 101102 - RNA, 22 nt, Artificial Sequence
  Synthetic
aaggaaagaagucagaaggcaa

SEQ ID NO: 101103 - RNA, 23 nt, Artificial Sequence
  Synthetic
gaaggaaagaagucagaaggcaa

SEQ ID NO: 101104 - RNA, 24 nt, Artificial Sequence
  Synthetic
agaaggaaagaagucagaaggcaa

SEQ ID NO: 101105 - RNA, 18 nt, Artificial Sequence
  Synthetic
ugugaggauucuugucaa

SEQ ID NO: 101106 - RNA, 19 nt, Artificial Sequence
  Synthetic
uugugaggauucuugucaa

SEQ ID NO: 101107 - RNA, 20 nt, Artificial Sequence
  Synthetic
auugugaggauucuugucaa

SEQ ID NO: 101108 - RNA, 21 nt, Artificial Sequence
  Synthetic
uauugugaggauucuugucaa

SEQ ID NO: 101109 - RNA, 22 nt, Artificial Sequence
  Synthetic
guauugugaggauucuugucaa

SEQ ID NO: 101110 - RNA, 23 nt, Artificial Sequence
  Synthetic
gguauugugaggauucuugucaa

SEQ ID NO: 101111 - RNA, 24 nt, Artificial Sequence
  Synthetic
ugguauugugaggauucuugucaa

SEQ ID NO: 101112 - RNA, 18 nt, Artificial Sequence
  Synthetic
  misc_feature (1)..(1): n is a, c, g, or u
ncgaauagaaggaaagaa

SEQ ID NO: 101113 - RNA, 19 nt, Artificial Sequence
  Synthetic
  misc_feature (2)..(2): n is a, c, g, or u
cncgaauagaaggaaagaa

SEQ ID NO: 101114 - RNA, 20 nt, Artificial Sequence
  Synthetic
  misc_feature (3)..(3): n is a, c, g, or u
ucncgaauagaaggaaagaa

SEQ ID NO: 101115 - RNA, 21 nt, Artificial Sequence
  Synthetic
  misc_feature (4)..(4): n is a, c, g, or u
aucncgaauagaaggaaagaa

SEQ ID NO: 101116 - RNA, 22 nt, Artificial Sequence
  Synthetic
  misc_feature (5)..(5): n is a, c, g, or u
gaucncgaauagaaggaaagaa

SEQ ID NO: 101117 - RNA, 23 nt, Artificial Sequence
  Synthetic
  misc_feature (6)..(6): n is a, c, g, or u
agaucncgaauagaaggaaagaa

SEQ ID NO: 101118 - RNA, 24 nt, Artificial Sequence
  Synthetic
  misc_feature (7)..(7): n is a, c, g, or u
gagaucncgaauagaaggaaagaa

SEQ ID NO: 101119 - RNA, 18 nt, Artificial Sequence
  Synthetic
cagaagaaccaacaagaa

SEQ ID NO: 101120 - RNA, 19 nt, Artificial Sequence
  Synthetic
ccagaagaaccaacaagaa

SEQ ID NO: 101121 - RNA, 20 nt, Artificial Sequence
  Synthetic
uccagaagaaccaacaagaa

SEQ ID NO: 101122 - RNA, 21 nt, Artificial Sequence
  Synthetic
guccagaagaaccaacaagaa

SEQ ID NO: 101123 - RNA, 22 nt, Artificial Sequence
  Synthetic
aguccagaagaaccaacaagaa

SEQ ID NO: 101124 - RNA, 23 nt, Artificial Sequence
  Synthetic
uaguccagaagaaccaacaagaa

SEQ ID NO: 101125 - RNA, 24 nt, Artificial Sequence
  Synthetic
guaguccagaagaaccaacaagaa

SEQ ID NO: 101126 - RNA, 18 nt, Artificial Sequence
  Synthetic
acagguacaguagaagaa

SEQ ID NO: 101127 - RNA, 19 nt, Artificial Sequence
  Synthetic
gacagguacaguagaagaa

SEQ ID NO: 101128 - RNA, 20 nt, Artificial Sequence
  Synthetic
agacagguacaguagaagaa

SEQ ID NO: 101129 - RNA, 21 nt, Artificial Sequence
  Synthetic
aagacagguacaguagaagaa

SEQ ID NO: 101130 - RNA, 22 nt, Artificial Sequence
  Synthetic
aaagacagguacaguagaagaa

SEQ ID NO: 101131 - RNA, 23 nt, Artificial Sequence
  Synthetic
uaaagacagguacaguagaagaa

SEQ ID NO: 101132 - RNA, 24 nt, Artificial Sequence
  Synthetic
uuaaagacagguacaguagaagaa

SEQ ID NO: 101133 - RNA, 18 nt, Artificial Sequence
  Synthetic
gaaggaaagaagucagaa

SEQ ID NO: 101134 - RNA, 19 nt, Artificial Sequence
  Synthetic
agaaggaaagaagucagaa

SEQ ID NO: 101135 - RNA, 20 nt, Artificial Sequence
  Synthetic
uagaaggaaagaagucagaa

SEQ ID NO: 101136 - RNA, 21 nt, Artificial Sequence
  Synthetic
auagaaggaaagaagucagaa

SEQ ID NO: 101137 - RNA, 22 nt, Artificial Sequence
  Synthetic
aauagaaggaaagaagucagaa

SEQ ID NO: 101138 - RNA, 23 nt, Artificial Sequence
  Synthetic
gaauagaaggaaagaagucagaa

SEQ ID NO: 101139 - RNA, 24 nt, Artificial Sequence
  Synthetic
cgaauagaaggaaagaagucagaa

SEQ ID NO: 101140 - RNA, 18 nt, Artificial Sequence
  Synthetic
cuuguaaguuggcgagaa

SEQ ID NO: 101141 - RNA, 19 nt, Artificial Sequence
  Synthetic
ccuuguaaguuggcgagaa

SEQ ID NO: 101142 - RNA, 20 nt, Artificial Sequence
  Synthetic
gccuuguaaguuggcgagaa

SEQ ID NO: 101143 - RNA, 21 nt, Artificial Sequence
  Synthetic
ggccuuguaaguuggcgagaa

SEQ ID NO: 101144 - RNA, 22 nt, Artificial Sequence
  Synthetic
aggccuuguaaguuggcgagaa

SEQ ID NO: 101145 - RNA, 23 nt, Artificial Sequence
  Synthetic
aaggccuuguaaguuggcgagaa

SEQ ID NO: 101146 - RNA, 24 nt, Artificial Sequence
  Synthetic
aaaggccuuguaaguuggcgagaa

SEQ ID NO: 101147 - RNA, 18 nt, Artificial Sequence
  Synthetic
uaaacugagccaggagaa

SEQ ID NO: 101148 - RNA, 19 nt, Artificial Sequence
  Synthetic
guaaacugagccaggagaa

SEQ ID NO: 101149 - RNA, 20 nt, Artificial Sequence
  Synthetic
aguaaacugagccaggagaa

SEQ ID NO: 101150 - RNA, 21 nt, Artificial Sequence
  Synthetic
uaguaaacugagccaggagaa

SEQ ID NO: 101151 - RNA, 22 nt, Artificial Sequence
  Synthetic
cuaguaaacugagccaggagaa

SEQ ID NO: 101152 - RNA, 23 nt, Artificial Sequence
  Synthetic
acuaguaaacugagccaggagaa

SEQ ID NO: 101153 - RNA, 24 nt, Artificial Sequence
  Synthetic
cacuaguaaacugagccaggagaa

SEQ ID NO: 101154 - RNA, 18 nt, Artificial Sequence
  Synthetic
  misc_feature (12)..(12): n is a, c, g, or u
  misc_feature (14)..(14): n is a, c, g, or u
ggaacggcagangnagaa

SEQ ID NO: 101155 - RNA, 19 nt, Artificial Sequence
  Synthetic
  misc_feature (13)..(13): n is a, c, g, or u
  misc_feature (15)..(15): n is a, c, g, or u
cggaacggcagangnagaa

SEQ ID NO: 101156 - RNA, 20 nt, Artificial Sequence
  Synthetic
  misc_feature (14)..(14): n is a, c, g, or u
  misc_feature (16)..(16): n is a, c, g, or u
ccggaacggcagangnagaa

SEQ ID NO: 101157 - RNA, 21 nt, Artificial Sequence
  Synthetic
  misc_feature (15)..(15): n is a, c, g, or u
  misc_feature (17)..(17): n is a, c, g, or u
gccggaacggcagangnagaa

SEQ ID NO: 101158 - RNA, 22 nt, Artificial Sequence
  Synthetic
  misc_feature (16)..(16): n is a, c, g, or u
  misc_feature (18)..(18): n is a, c, g, or u
ggccggaacggcagangnagaa

SEQ ID NO: 101159 - RNA, 23 nt, Artificial Sequence
  Synthetic
  misc_feature (17)..(17): n is a, c, g, or u
  misc_feature (19)..(19): n is a, c, g, or u
cggccggaacggcagangnagaa

SEQ ID NO: 101160 - RNA, 24 nt, Artificial Sequence
  Synthetic
  misc_feature (18)..(18): n is a, c, g, or u
  misc_feature (20)..(20): n is a, c, g, or u
ucggccggaacggcagangnagaa

SEQ ID NO: 101161 - RNA, 18 nt, Artificial Sequence
  Synthetic
  misc_feature (9)..(9): n is a, c, g, or u
aggagaucncgaauagaa

SEQ ID NO: 101162 - RNA, 19 nt, Artificial Sequence
  Synthetic
  misc_feature (10)..(10): n is a, c, g, or u
gaggagaucncgaauagaa

SEQ ID NO: 101163 - RNA, 20 nt, Artificial Sequence
  Synthetic
  misc_feature (11)..(11): n is a, c, g, or u
cgaggagaucncgaauagaa

SEQ ID NO: 101164 - RNA, 21 nt, Artificial Sequence
  Synthetic
  misc_feature (12)..(12): n is a, c, g, or u
ucgaggagaucncgaauagaa

SEQ ID NO: 101165 - RNA, 22 nt, Artificial Sequence
  Synthetic
  misc_feature (13)..(13): n is a, c, g, or u
gucgaggagaucncgaauagaa

SEQ ID NO: 101166 - RNA, 23 nt, Artificial Sequence
  Synthetic
  misc_feature (14)..(14): n is a, c, g, or u
ugucgaggagaucncgaauagaa

SEQ ID NO: 101167 - RNA, 24 nt, Artificial Sequence
  Synthetic
  misc_feature (15)..(15): n is a, c, g, or u
gugucgaggagaucncgaauagaa

SEQ ID NO: 101168 - RNA, 18 nt, Artificial Sequence
  Synthetic
gguaagguuaggauagaa

SEQ ID NO: 101169 - RNA, 19 nt, Artificial Sequence
  Synthetic
ugguaagguuaggauagaa

SEQ ID NO: 101170 - RNA, 20 nt, Artificial Sequence
  Synthetic
uugguaagguuaggauagaa

SEQ ID NO: 101171 - RNA, 21 nt, Artificial Sequence
  Synthetic
uuugguaagguuaggauagaa

SEQ ID NO: 101172 - RNA, 22 nt, Artificial Sequence
  Synthetic
auuugguaagguuaggauagaa

SEQ ID NO: 101173 - RNA, 23 nt, Artificial Sequence
  Synthetic
uauuugguaagguuaggauagaa

SEQ ID NO: 101174 - RNA, 24 nt, Artificial Sequence
  Synthetic
auauuugguaagguuaggauagaa

SEQ ID NO: 101175 - RNA, 18 nt, Artificial Sequence
  Synthetic
  misc_feature (14)..(14): n is a, c, g, or u
ugucgaggagaucncgaa

SEQ ID NO: 101176 - RNA, 19 nt, Artificial Sequence
  Synthetic
  misc_feature (15)..(15): n is a, c, g, or u
gugucgaggagaucncgaa

SEQ ID NO: 101177 - RNA, 20 nt, Artificial Sequence
  Synthetic
  misc_feature (16)..(16): n is a, c, g, or u
ggugucgaggagaucncgaa

SEQ ID NO: 101178 - RNA, 21 nt, Artificial Sequence
  Synthetic
  misc_feature (17)..(17): n is a, c, g, or u
cggugucgaggagaucncgaa

SEQ ID NO: 101179 - RNA, 22 nt, Artificial Sequence
  Synthetic
  misc_feature (18)..(18): n is a, c, g, or u
gcggugucgaggagaucncgaa

SEQ ID NO: 101180 - RNA, 23 nt, Artificial Sequence
  Synthetic
  misc_feature (19)..(19): n is a, c, g, or u
ggcggugucgaggagaucncgaa

SEQ ID NO: 101181 - RNA, 24 nt, Artificial Sequence
  Synthetic
  misc_feature (20)..(20): n is a, c, g, or u
aggcggugucgaggagaucncgaa

SEQ ID NO: 101182 - RNA, 18 nt, Artificial Sequence
  Synthetic
  misc_feature (1)..(2): n is a, c, g, or u
  misc_feature (13)..(13): n is a, c, g, or u
nnaaaugaaugunaggaa

SEQ ID NO: 101183 - RNA, 19 nt, Artificial Sequence
  Synthetic
  misc_feature (2)..(3): n is a, c, g, or u
  misc_feature (14)..(14): n is a, c, g, or u
unnaaaugaaugunaggaa

SEQ ID NO: 101184 - RNA, 20 nt, Artificial Sequence
  Synthetic
  misc_feature (1)..(1): n is a, c, g, or u
  misc_feature (3)..(4): n is a, c, g, or u
  misc_feature (15)..(15): n is a, c, g, or u
nunnaaaugaaugunaggaa

SEQ ID NO: 101185 - RNA, 21 nt, Artificial Sequence
  Synthetic
  misc_feature (2)..(2): n is a, c, g, or u
  misc_feature (4)..(5): n is a, c, g, or u
  misc_feature (16)..(16): n is a, c, g, or u
cnunnaaaugaaugunaggaa

SEQ ID NO: 101186 - RNA, 22 nt, Artificial Sequence
  Synthetic
  misc_feature (3)..(3): n is a, c, g, or u
  misc_feature (5)..(6): n is a, c, g, or u
  misc_feature (17)..(17): n is a, c, g, or u
ucnunnaaaugaaugunaggaa

SEQ ID NO: 101187 - RNA, 23 nt, Artificial Sequence
  Synthetic
  misc_feature (4)..(4): n is a, c, g, or u
  misc_feature (6)..(7): n is a, c, g, or u
  misc_feature (18)..(18): n is a, c, g, or u
cucnunnaaaugaaugunaggaa

SEQ ID NO: 101188 - RNA, 24 nt, Artificial Sequence
  Synthetic
  misc_feature (5)..(5): n is a, c, g, or u
  misc_feature (7)..(8): n is a, c, g, or u
  misc_feature (19)..(19): n is a, c, g, or u
ccucnunnaaaugaaugunaggaa

SEQ ID NO: 101189 - RNA, 18 nt, Artificial Sequence
  Synthetic
ggguuuacuguuccggaa

SEQ ID NO: 101190 - RNA, 19 nt, Artificial Sequence
  Synthetic
aggguuuacuguuccggaa

SEQ ID NO: 101191 - RNA, 20 nt, Artificial Sequence
  Synthetic
caggguuuacuguuccggaa

SEQ ID NO: 101192 - RNA, 21 nt, Artificial Sequence
  Synthetic
acaggguuuacuguuccggaa

SEQ ID NO: 101193 - RNA, 22 nt, Artificial Sequence
  Synthetic
aacaggguuuacuguuccggaa

SEQ ID NO: 101194 - RNA, 23 nt, Artificial Sequence
  Synthetic
gaacaggguuuacuguuccggaa

SEQ ID NO: 101195 - RNA, 24 nt, Artificial Sequence
  Synthetic
ggaacaggguuuacuguuccggaa

SEQ ID NO: 101196 - RNA, 18 nt, Artificial Sequence
  Synthetic
  misc_feature (2)..(2): n is a, c, g, or u
angaugaugggaugggaa

SEQ ID NO: 101197 - RNA, 19 nt, Artificial Sequence
  Synthetic
  misc_feature (3)..(3): n is a, c, g, or u
cangaugaugggaugggaa

SEQ ID NO: 101198 - RNA, 20 nt, Artificial Sequence
  Synthetic
  misc_feature (4)..(4): n is a, c, g, or u
ccangaugaugggaugggaa

SEQ ID NO: 101199 - RNA, 21 nt, Artificial Sequence
  Synthetic
  misc_feature (5)..(5): n is a, c, g, or u
cccangaugaugggaugggaa

SEQ ID NO: 101200 - RNA, 22 nt, Artificial Sequence
  Synthetic
  misc_feature (6)..(6): n is a, c, g, or u
gcccangaugaugggaugggaa

SEQ ID NO: 101201 - RNA, 23 nt, Artificial Sequence
  Synthetic
  misc_feature (7)..(7): n is a, c, g, or u
agcccangaugaugggaugggaa

SEQ ID NO: 101202 - RNA, 24 nt, Artificial Sequence
  Synthetic
  misc_feature (8)..(8): n is a, c, g, or u
aagcccangaugaugggaugggaa

SEQ ID NO: 101203 - RNA, 18 nt, Artificial Sequence
  Synthetic
aucccagaggauugggaa

SEQ ID NO: 101204 - RNA, 19 nt, Artificial Sequence
  Synthetic
aaucccagaggauugggaa

SEQ ID NO: 101205 - RNA, 20 nt, Artificial Sequence
  Synthetic
gaaucccagaggauugggaa

SEQ ID NO: 101206 - RNA, 21 nt, Artificial Sequence
  Synthetic
agaaucccagaggauugggaa

SEQ ID NO: 101207 - RNA, 22 nt, Artificial Sequence
  Synthetic
aagaaucccagaggauugggaa

SEQ ID NO: 101208 - RNA, 23 nt, Artificial Sequence
  Synthetic
aaagaaucccagaggauugggaa

SEQ ID NO: 101209 - RNA, 24 nt, Artificial Sequence
  Synthetic
gaaagaaucccagaggauugggaa

SEQ ID NO: 101210 - RNA, 18 nt, Artificial Sequence
  Synthetic
  misc_feature (2)..(2): n is a, c, g, or u
  misc_feature (5)..(5): n is a, c, g, or u
anccnagcagccauggaa

SEQ ID NO: 101211 - RNA, 19 nt, Artificial Sequence
  Synthetic
  misc_feature (3)..(3): n is a, c, g, or u
  misc_feature (6)..(6): n is a, c, g, or u
canccnagcagccauggaa

SEQ ID NO: 101212 - RNA, 20 nt, Artificial Sequence
  Synthetic
  misc_feature (4)..(4): n is a, c, g, or u
  misc_feature (7)..(7): n is a, c, g, or u
acanccnagcagccauggaa

SEQ ID NO: 101213 - RNA, 21 nt, Artificial Sequence
  Synthetic
  misc_feature (5)..(5): n is a, c, g, or u
  misc_feature (8)..(8): n is a, c, g, or u
cacanccnagcagccauggaa

SEQ ID NO: 101214 - RNA, 22 nt, Artificial Sequence
  Synthetic
  misc_feature (6)..(6): n is a, c, g, or u
  misc_feature (9)..(9): n is a, c, g, or u
gcacanccnagcagccauggaa

SEQ ID NO: 101215 - RNA, 23 nt, Artificial Sequence
  Synthetic
  misc_feature (7)..(7): n is a, c, g, or u
  misc_feature (10)..(10): n is a, c, g, or u
agcacanccnagcagccauggaa

SEQ ID NO: 101216 - RNA, 24 nt, Artificial Sequence
  Synthetic
  misc_feature (8)..(8): n is a, c, g, or u
  misc_feature (11)..(11): n is a, c, g, or u
cagcacanccnagcagccauggaa

SEQ ID NO: 101217 - RNA, 18 nt, Artificial Sequence
  Synthetic
uaguugauguuccuggaa

SEQ ID NO: 101218 - RNA, 19 nt, Artificial Sequence
  Synthetic
guaguugauguuccuggaa

SEQ ID NO: 101219 - RNA, 20 nt, Artificial Sequence
  Synthetic
gguaguugauguuccuggaa

SEQ ID NO: 101220 - RNA, 21 nt, Artificial Sequence
  Synthetic
ugguaguugauguuccuggaa

SEQ ID NO: 101221 - RNA, 22 nt, Artificial Sequence
  Synthetic
cugguaguugauguuccuggaa

SEQ ID NO: 101222 - RNA, 23 nt, Artificial Sequence
  Synthetic
gcugguaguugauguuccuggaa

SEQ ID NO: 101223 - RNA, 24 nt, Artificial Sequence
  Synthetic
ugcugguaguugauguuccuggaa

SEQ ID NO: 101224 - RNA, 18 nt, Artificial Sequence
  Synthetic
ugaacaguaggacaugaa

SEQ ID NO: 101225 - RNA, 19 nt, Artificial Sequence
  Synthetic
uugaacaguaggacaugaa

SEQ ID NO: 101226 - RNA, 20 nt, Artificial Sequence
  Synthetic
cuugaacaguaggacaugaa

SEQ ID NO: 101227 - RNA, 21 nt, Artificial Sequence
  Synthetic
gcuugaacaguaggacaugaa

SEQ ID NO: 101228 - RNA, 22 nt, Artificial Sequence
  Synthetic
ggcuugaacaguaggacaugaa

SEQ ID NO: 101229 - RNA, 23 nt, Artificial Sequence
  Synthetic
aggcuugaacaguaggacaugaa

SEQ ID NO: 101230 - RNA, 24 nt, Artificial Sequence
  Synthetic
gaggcuugaacaguaggacaugaa

SEQ ID NO: 101231 - RNA, 18 nt, Artificial Sequence
  Synthetic
aauuacauaucccaugaa

SEQ ID NO: 101232 - RNA, 19 nt, Artificial Sequence
  Synthetic
caauuacauaucccaugaa

SEQ ID NO: 101233 - RNA, 20 nt, Artificial Sequence
  Synthetic
ccaauuacauaucccaugaa

SEQ ID NO: 101234 - RNA, 21 nt, Artificial Sequence
  Synthetic
uccaauuacauaucccaugaa

SEQ ID NO: 101235 - RNA, 22 nt, Artificial Sequence
  Synthetic
uuccaauuacauaucccaugaa

SEQ ID NO: 101236 - RNA, 23 nt, Artificial Sequence
  Synthetic
cuuccaauuacauaucccaugaa

SEQ ID NO: 101237 - RNA, 24 nt, Artificial Sequence
  Synthetic
acuuccaauuacauaucccaugaa

SEQ ID NO: 101238 - RNA, 18 nt, Artificial Sequence
  Synthetic
gcauagcagcaggaugaa

SEQ ID NO: 101239 - RNA, 19 nt, Artificial Sequence
  Synthetic
ggcauagcagcaggaugaa

SEQ ID NO: 101240 - RNA, 20 nt, Artificial Sequence
  Synthetic
aggcauagcagcaggaugaa

SEQ ID NO: 101241 - RNA, 21 nt, Artificial Sequence
  Synthetic
gaggcauagcagcaggaugaa

SEQ ID NO: 101242 - RNA, 22 nt, Artificial Sequence
  Synthetic
ugaggcauagcagcaggaugaa

SEQ ID NO: 101243 - RNA, 23 nt, Artificial Sequence
  Synthetic
augaggcauagcagcaggaugaa

SEQ ID NO: 101244 - RNA, 24 nt, Artificial Sequence
  Synthetic
gaugaggcauagcagcaggaugaa

SEQ ID NO: 101245 - RNA, 18 nt, Artificial Sequence
  Synthetic
gcgacgugcagaggugaa

SEQ ID NO: 101246 - RNA, 19 nt, Artificial Sequence
  Synthetic
ugcgacgugcagaggugaa

SEQ ID NO: 101247 - RNA, 20 nt, Artificial Sequence
  Synthetic
augcgacgugcagaggugaa

SEQ ID NO: 101248 - RNA, 21 nt, Artificial Sequence
  Synthetic
caugcgacgugcagaggugaa

SEQ ID NO: 101249 - RNA, 22 nt, Artificial Sequence
  Synthetic
ccaugcgacgugcagaggugaa

SEQ ID NO: 101250 - RNA, 23 nt, Artificial Sequence
  Synthetic
uccaugcgacgugcagaggugaa

SEQ ID NO: 101251 - RNA, 24 nt, Artificial Sequence
  Synthetic
  misc_feature (1)..(1): n is a, c, g, or u
nuccaugcgacgugcagaggugaa

SEQ ID NO: 101252 - RNA, 18 nt, Artificial Sequence
  Synthetic
uuccggaaguguugauaa

SEQ ID NO: 101253 - RNA, 19 nt, Artificial Sequence
  Synthetic
uuuccggaaguguugauaa

SEQ ID NO: 101254 - RNA, 20 nt, Artificial Sequence
  Synthetic
guuuccggaaguguugauaa

SEQ ID NO: 101255 - RNA, 21 nt, Artificial Sequence
  Synthetic
aguuuccggaaguguugauaa

SEQ ID NO: 101256 - RNA, 22 nt, Artificial Sequence
  Synthetic
uaguuuccggaaguguugauaa

SEQ ID NO: 101257 - RNA, 23 nt, Artificial Sequence
  Synthetic
guaguuuccggaaguguugauaa

SEQ ID NO: 101258 - RNA, 24 nt, Artificial Sequence
  Synthetic
aguaguuuccggaaguguugauaa

SEQ ID NO: 101259 - RNA, 18 nt, Artificial Sequence
  Synthetic
accacaucauccauauaa

SEQ ID NO: 101260 - RNA, 19 nt, Artificial Sequence
  Synthetic
uaccacaucauccauauaa

SEQ ID NO: 101261 - RNA, 20 nt, Artificial Sequence
  Synthetic
auaccacaucauccauauaa

SEQ ID NO: 101262 - RNA, 21 nt, Artificial Sequence
  Synthetic
aauaccacaucauccauauaa

SEQ ID NO: 101263 - RNA, 22 nt, Artificial Sequence
  Synthetic
caauaccacaucauccauauaa

SEQ ID NO: 101264 - RNA, 23 nt, Artificial Sequence
  Synthetic
ccaauaccacaucauccauauaa

SEQ ID NO: 101265 - RNA, 24 nt, Artificial Sequence
  Synthetic
cccaauaccacaucauccauauaa

SEQ ID NO: 101266 - RNA, 18 nt, Artificial Sequence
  Synthetic
uuucucuuccaaaaguaa

SEQ ID NO: 101267 - RNA, 19 nt, Artificial Sequence
  Synthetic
guuucucuuccaaaaguaa

SEQ ID NO: 101268 - RNA, 20 nt, Artificial Sequence
  Synthetic
aguuucucuuccaaaaguaa

SEQ ID NO: 101269 - RNA, 21 nt, Artificial Sequence
  Synthetic
caguuucucuuccaaaaguaa

SEQ ID NO: 101270 - RNA, 22 nt, Artificial Sequence
  Synthetic
acaguuucucuuccaaaaguaa

SEQ ID NO: 101271 - RNA, 23 nt, Artificial Sequence
  Synthetic
aacaguuucucuuccaaaaguaa

SEQ ID NO: 101272 - RNA, 24 nt, Artificial Sequence
  Synthetic
gaacaguuucucuuccaaaaguaa

SEQ ID NO: 101273 - RNA, 18 nt, Artificial Sequence
  Synthetic
aacaaauggcacuaguaa

SEQ ID NO: 101274 - RNA, 19 nt, Artificial Sequence
  Synthetic
gaacaaauggcacuaguaa

SEQ ID NO: 101275 - RNA, 20 nt, Artificial Sequence
  Synthetic
ugaacaaauggcacuaguaa

SEQ ID NO: 101276 - RNA, 21 nt, Artificial Sequence
  Synthetic
cugaacaaauggcacuaguaa

SEQ ID NO: 101277 - RNA, 22 nt, Artificial Sequence
  Synthetic
acugaacaaauggcacuaguaa

SEQ ID NO: 101278 - RNA, 23 nt, Artificial Sequence
  Synthetic
cacugaacaaauggcacuaguaa

SEQ ID NO: 101279 - RNA, 24 nt, Artificial Sequence
  Synthetic
ccacugaacaaauggcacuaguaa

SEQ ID NO: 101280 - RNA, 18 nt, Artificial Sequence
  Synthetic
gacggggagaccgcguaa

SEQ ID NO: 101281 - RNA, 19 nt, Artificial Sequence
  Synthetic
agacggggagaccgcguaa

SEQ ID NO: 101282 - RNA, 20 nt, Artificial Sequence
  Synthetic
cagacggggagaccgcguaa

SEQ ID NO: 101283 - RNA, 21 nt, Artificial Sequence
  Synthetic
acagacggggagaccgcguaa

SEQ ID NO: 101284 - RNA, 22 nt, Artificial Sequence
  Synthetic
cacagacggggagaccgcguaa

SEQ ID NO: 101285 - RNA, 23 nt, Artificial Sequence
  Synthetic
gcacagacggggagaccgcguaa

SEQ ID NO: 101286 - RNA, 24 nt, Artificial Sequence
  Synthetic
ggcacagacggggagaccgcguaa

SEQ ID NO: 101287 - RNA, 18 nt, Artificial Sequence
  Synthetic
  misc_feature (13)..(13): n is a, c, g, or u
aauugguaauagngguaa

SEQ ID NO: 101288 - RNA, 19 nt, Artificial Sequence
  Synthetic
  misc_feature (14)..(14): n is a, c, g, or u
aaauugguaauagngguaa

SEQ ID NO: 101289 - RNA, 20 nt, Artificial Sequence
  Synthetic
  misc_feature (15)..(15): n is a, c, g, or u
aaaauugguaauagngguaa

SEQ ID NO: 101290 - RNA, 21 nt, Artificial Sequence
  Synthetic
  misc_feature (16)..(16): n is a, c, g, or u
gaaaauugguaauagngguaa

SEQ ID NO: 101291 - RNA, 22 nt, Artificial Sequence
  Synthetic
  misc_feature (17)..(17): n is a, c, g, or u
agaaaauugguaauagngguaa

SEQ ID NO: 101292 - RNA, 23 nt, Artificial Sequence
  Synthetic
  misc_feature (18)..(18): n is a, c, g, or u
aagaaaauugguaauagngguaa

SEQ ID NO: 101293 - RNA, 24 nt, Artificial Sequence
  Synthetic
  misc_feature (19)..(19): n is a, c, g, or u
aaagaaaauugguaauagngguaa

SEQ ID NO: 101294 - RNA, 18 nt, Artificial Sequence
  Synthetic
uuuuuucauuaacuguaa

SEQ ID NO: 101295 - RNA, 19 nt, Artificial Sequence
  Synthetic
cuuuuuucauuaacuguaa

SEQ ID NO: 101296 - RNA, 20 nt, Artificial Sequence
  Synthetic
ccuuuuuucauuaacuguaa

SEQ ID NO: 101297 - RNA, 21 nt, Artificial Sequence
  Synthetic
uccuuuuuucauuaacuguaa

SEQ ID NO: 101298 - RNA, 22 nt, Artificial Sequence
  Synthetic
cuccuuuuuucauuaacuguaa

SEQ ID NO: 101299 - RNA, 23 nt, Artificial Sequence
  Synthetic
ucuccuuuuuucauuaacuguaa

SEQ ID NO: 101300 - RNA, 24 nt, Artificial Sequence
  Synthetic
aucuccuuuuuucauuaacuguaa

SEQ ID NO: 101301 - RNA, 18 nt, Artificial Sequence
  Synthetic
gaaaaaccccgccuguaa

SEQ ID NO: 101302 - RNA, 19 nt, Artificial Sequence
  Synthetic
agaaaaaccccgccuguaa

SEQ ID NO: 101303 - RNA, 20 nt, Artificial Sequence
  Synthetic
aagaaaaaccccgccuguaa

SEQ ID NO: 101304 - RNA, 21 nt, Artificial Sequence
  Synthetic
caagaaaaaccccgccuguaa

SEQ ID NO: 101305 - RNA, 22 nt, Artificial Sequence
  Synthetic
acaagaaaaaccccgccuguaa

SEQ ID NO: 101306 - RNA, 23 nt, Artificial Sequence
  Synthetic
aacaagaaaaaccccgccuguaa

SEQ ID NO: 101307 - RNA, 24 nt, Artificial Sequence
  Synthetic
caacaagaaaaaccccgccuguaa

SEQ ID NO: 101308 - RNA, 18 nt, Artificial Sequence
  Synthetic
  misc_feature (2)..(2): n is a, c, g, or u
  misc_feature (5)..(5): n is a, c, g, or u
gnuanccacauuguguaa

SEQ ID NO: 101309 - RNA, 19 nt, Artificial Sequence
  Synthetic
  misc_feature (3)..(3): n is a, c, g, or u
  misc_feature (6)..(6): n is a, c, g, or u
ggnuanccacauuguguaa

SEQ ID NO: 101310 - RNA, 20 nt, Artificial Sequence
  Synthetic
  misc_feature (1)..(1): n is a, c, g, or u
  misc_feature (4)..(4): n is a, c, g, or u
  misc_feature (7)..(7): n is a, c, g, or u
nggnuanccacauuguguaa

SEQ ID NO: 101311 - RNA, 21 nt, Artificial Sequence
  Synthetic
  misc_feature (2)..(2): n is a, c, g, or u
  misc_feature (5)..(5): n is a, c, g, or u
  misc_feature (8)..(8): n is a, c, g, or u
cnggnuanccacauuguguaa

SEQ ID NO: 101312 - RNA, 22 nt, Artificial Sequence
  Synthetic
  misc_feature (3)..(3): n is a, c, g, or u
  misc_feature (6)..(6): n is a, c, g, or u
  misc_feature (9)..(9): n is a, c, g, or u
gcnggnuanccacauuguguaa

SEQ ID NO: 101313 - RNA, 23 nt, Artificial Sequence
  Synthetic
  misc_feature (1)..(1): n is a, c, g, or u
  misc_feature (4)..(4): n is a, c, g, or u
  misc_feature (7)..(7): n is a, c, g, or u
  misc_feature (10)..(10): n is a, c, g, or u
ngcnggnuanccacauuguguaa

SEQ ID NO: 101314 - RNA, 24 nt, Artificial Sequence
  Synthetic
  misc_feature (2)..(2): n is a, c, g, or u
  misc_feature (5)..(5): n is a, c, g, or u
  misc_feature (8)..(8): n is a, c, g, or u
  misc_feature (11)..(11): n is a, c, g, or u
angcnggnuanccacauuguguaa

SEQ ID NO: 101315 - RNA, 18 nt, Artificial Sequence
  Synthetic
cacagaaaggccuuguaa

SEQ ID NO: 101316 - RNA, 19 nt, Artificial Sequence
  Synthetic
acacagaaaggccuuguaa

SEQ ID NO: 101317 - RNA, 20 nt, Artificial Sequence
  Synthetic
uacacagaaaggccuuguaa

SEQ ID NO: 101318 - RNA, 21 nt, Artificial Sequence
  Synthetic
uuacacagaaaggccuuguaa

SEQ ID NO: 101319 - RNA, 22 nt, Artificial Sequence
  Synthetic
uuuacacagaaaggccuuguaa

SEQ ID NO: 101320 - RNA, 23 nt, Artificial Sequence
  Synthetic
guuuacacagaaaggccuuguaa

SEQ ID NO: 101321 - RNA, 24 nt, Artificial Sequence
  Synthetic
uguuuacacagaaaggccuuguaa

SEQ ID NO: 101322 - RNA, 18 nt, Artificial Sequence
  Synthetic
auaacugaaagccaaaca

SEQ ID NO: 101323 - RNA, 19 nt, Artificial Sequence
  Synthetic
uauaacugaaagccaaaca

SEQ ID NO: 101324 - RNA, 20 nt, Artificial Sequence
  Synthetic
auauaacugaaagccaaaca

SEQ ID NO: 101325 - RNA, 21 nt, Artificial Sequence
  Synthetic
cauauaacugaaagccaaaca

SEQ ID NO: 101326 - RNA, 22 nt, Artificial Sequence
  Synthetic
ccauauaacugaaagccaaaca

SEQ ID NO: 101327 - RNA, 23 nt, Artificial Sequence
  Synthetic
uccauauaacugaaagccaaaca

SEQ ID NO: 101328 - RNA, 24 nt, Artificial Sequence
  Synthetic
auccauauaacugaaagccaaaca

SEQ ID NO: 101329 - RNA, 18 nt, Artificial Sequence
  Synthetic
ggguugcgucagcaaaca

SEQ ID NO: 101330 - RNA, 19 nt, Artificial Sequence
  Synthetic
gggguugcgucagcaaaca

SEQ ID NO: 101331 - RNA, 20 nt, Artificial Sequence
  Synthetic
ggggguugcgucagcaaaca

SEQ ID NO: 101332 - RNA, 21 nt, Artificial Sequence
  Synthetic
uggggguugcgucagcaaaca

SEQ ID NO: 101333 - RNA, 22 nt, Artificial Sequence
  Synthetic
guggggguugcgucagcaaaca

SEQ ID NO: 101334 - RNA, 23 nt, Artificial Sequence
  Synthetic
aguggggguugcgucagcaaaca

SEQ ID NO: 101335 - RNA, 24 nt, Artificial Sequence
  Synthetic
caguggggguugcgucagcaaaca

SEQ ID NO: 101336 - RNA, 18 nt, Artificial Sequence
  Synthetic
agcaacaagagggaaaca

SEQ ID NO: 101337 - RNA, 19 nt, Artificial Sequence
  Synthetic
cagcaacaagagggaaaca

SEQ ID NO: 101338 - RNA, 20 nt, Artificial Sequence
  Synthetic
acagcaacaagagggaaaca

SEQ ID NO: 101339 - RNA, 21 nt, Artificial Sequence
  Synthetic
uacagcaacaagagggaaaca

SEQ ID NO: 101340 - RNA, 22 nt, Artificial Sequence
  Synthetic
guacagcaacaagagggaaaca

SEQ ID NO: 101341 - RNA, 23 nt, Artificial Sequence
  Synthetic
uguacagcaacaagagggaaaca

SEQ ID NO: 101342 - RNA, 24 nt, Artificial Sequence
  Synthetic
uuguacagcaacaagagggaaaca

SEQ ID NO: 101343 - RNA, 18 nt, Artificial Sequence
  Synthetic
aguccagaagaaccaaca

SEQ ID NO: 101344 - RNA, 19 nt, Artificial Sequence
  Synthetic
uaguccagaagaaccaaca

SEQ ID NO: 101345 - RNA, 20 nt, Artificial Sequence
  Synthetic
guaguccagaagaaccaaca

SEQ ID NO: 101346 - RNA, 21 nt, Artificial Sequence
  Synthetic
gguaguccagaagaaccaaca

SEQ ID NO: 101347 - RNA, 22 nt, Artificial Sequence
  Synthetic
ugguaguccagaagaaccaaca

SEQ ID NO: 101348 - RNA, 23 nt, Artificial Sequence
  Synthetic
uugguaguccagaagaaccaaca

SEQ ID NO: 101349 - RNA, 24 nt, Artificial Sequence
  Synthetic
cuugguaguccagaagaaccaaca

SEQ ID NO: 101350 - RNA, 18 nt, Artificial Sequence
  Synthetic
agguuuuguacagcaaca

SEQ ID NO: 101351 - RNA, 19 nt, Artificial Sequence
  Synthetic
aagguuuuguacagcaaca

SEQ ID NO: 101352 - RNA, 20 nt, Artificial Sequence
  Synthetic
gaagguuuuguacagcaaca

SEQ ID NO: 101353 - RNA, 21 nt, Artificial Sequence
  Synthetic
cgaagguuuuguacagcaaca

SEQ ID NO: 101354 - RNA, 22 nt, Artificial Sequence
  Synthetic
ccgaagguuuuguacagcaaca

SEQ ID NO: 101355 - RNA, 23 nt, Artificial Sequence
  Synthetic
uccgaagguuuuguacagcaaca

SEQ ID NO: 101356 - RNA, 24 nt, Artificial Sequence
  Synthetic
guccgaagguuuuguacagcaaca

SEQ ID NO: 101357 - RNA, 18 nt, Artificial Sequence
  Synthetic
ugaggauucuugucaaca

SEQ ID NO: 101358 - RNA, 19 nt, Artificial Sequence
  Synthetic
gugaggauucuugucaaca

SEQ ID NO: 101359 - RNA, 20 nt, Artificial Sequence
  Synthetic
ugugaggauucuugucaaca

SEQ ID NO: 101360 - RNA, 21 nt, Artificial Sequence
  Synthetic
uugugaggauucuugucaaca

SEQ ID NO: 101361 - RNA, 22 nt, Artificial Sequence
  Synthetic
auugugaggauucuugucaaca

SEQ ID NO: 101362 - RNA, 23 nt, Artificial Sequence
  Synthetic
uauugugaggauucuugucaaca

SEQ ID NO: 101363 - RNA, 24 nt, Artificial Sequence
  Synthetic
guauugugaggauucuugucaaca

SEQ ID NO: 101364 - RNA, 18 nt, Artificial Sequence
  Synthetic
cccagaggauugggaaca

SEQ ID NO: 101365 - RNA, 19 nt, Artificial Sequence
  Synthetic
ucccagaggauugggaaca

SEQ ID NO: 101366 - RNA, 20 nt, Artificial Sequence
  Synthetic
aucccagaggauugggaaca

SEQ ID NO: 101367 - RNA, 21 nt, Artificial Sequence
  Synthetic
aaucccagaggauugggaaca

SEQ ID NO: 101368 - RNA, 22 nt, Artificial Sequence
  Synthetic
gaaucccagaggauugggaaca

SEQ ID NO: 101369 - RNA, 23 nt, Artificial Sequence
  Synthetic
agaaucccagaggauugggaaca

SEQ ID NO: 101370 - RNA, 24 nt, Artificial Sequence
  Synthetic
aagaaucccagaggauugggaaca

SEQ ID NO: 101371 - RNA, 18 nt, Artificial Sequence
  Synthetic
ccuacgaaccacugaaca

SEQ ID NO: 101372 - RNA, 19 nt, Artificial Sequence
  Synthetic
cccuacgaaccacugaaca

SEQ ID NO: 101373 - RNA, 20 nt, Artificial Sequence
  Synthetic
gcccuacgaaccacugaaca

SEQ ID NO: 101374 - RNA, 18 nt, Artificial Sequence
  Synthetic
agcuuggaggcuugaaca

SEQ ID NO: 101375 - RNA, 19 nt, Artificial Sequence
  Synthetic
cagcuuggaggcuugaaca

SEQ ID NO: 101376 - RNA, 20 nt, Artificial Sequence
  Synthetic
acagcuuggaggcuugaaca

SEQ ID NO: 101377 - RNA, 21 nt, Artificial Sequence
  Synthetic
cacagcuuggaggcuugaaca

SEQ ID NO: 101378 - RNA, 22 nt, Artificial Sequence
  Synthetic
gcacagcuuggaggcuugaaca

SEQ ID NO: 101379 - RNA, 23 nt, Artificial Sequence
  Synthetic
ggcacagcuuggaggcuugaaca

SEQ ID NO: 101380 - RNA, 24 nt, Artificial Sequence
  Synthetic
aggcacagcuuggaggcuugaaca

SEQ ID NO: 101381 - RNA, 18 nt, Artificial Sequence
  Synthetic
guccaagggauacuaaca

SEQ ID NO: 101382 - RNA, 19 nt, Artificial Sequence
  Synthetic
aguccaagggauacuaaca

SEQ ID NO: 101383 - RNA, 20 nt, Artificial Sequence
  Synthetic
gaguccaagggauacuaaca

SEQ ID NO: 101384 - RNA, 21 nt, Artificial Sequence
  Synthetic
ugaguccaagggauacuaaca

SEQ ID NO: 101385 - RNA, 22 nt, Artificial Sequence
  Synthetic
augaguccaagggauacuaaca

SEQ ID NO: 101386 - RNA, 23 nt, Artificial Sequence
  Synthetic
uaugaguccaagggauacuaaca

SEQ ID NO: 101387 - RNA, 24 nt, Artificial Sequence
  Synthetic
uuaugaguccaagggauacuaaca

SEQ ID NO: 101388 - RNA, 18 nt, Artificial Sequence
  Synthetic
uaaaacgccgcagacaca

SEQ ID NO: 101389 - RNA, 19 nt, Artificial Sequence
  Synthetic
auaaaacgccgcagacaca

SEQ ID NO: 101390 - RNA, 20 nt, Artificial Sequence
  Synthetic
gauaaaacgccgcagacaca

SEQ ID NO: 101391 - RNA, 21 nt, Artificial Sequence
  Synthetic
ugauaaaacgccgcagacaca

SEQ ID NO: 101392 - RNA, 22 nt, Artificial Sequence
  Synthetic
augauaaaacgccgcagacaca

SEQ ID NO: 101393 - RNA, 23 nt, Artificial Sequence
  Synthetic
  misc_feature (1)..(1): n is a, c, g, or u
naugauaaaacgccgcagacaca

SEQ ID NO: 101394 - RNA, 24 nt, Artificial Sequence
  Synthetic
  misc_feature (2)..(2): n is a, c, g, or u
anaugauaaaacgccgcagacaca

SEQ ID NO: 101395 - RNA, 18 nt, Artificial Sequence
  Synthetic
ucagauauuguuuacaca

SEQ ID NO: 101396 - RNA, 19 nt, Artificial Sequence
  Synthetic
uucagauauuguuuacaca

SEQ ID NO: 101397 - RNA, 20 nt, Artificial Sequence
  Synthetic
guucagauauuguuuacaca

SEQ ID NO: 101398 - RNA, 21 nt, Artificial Sequence
  Synthetic
gguucagauauuguuuacaca

SEQ ID NO: 101399 - RNA, 22 nt, Artificial Sequence
  Synthetic
agguucagauauuguuuacaca

SEQ ID NO: 101400 - RNA, 23 nt, Artificial Sequence
  Synthetic
aagguucagauauuguuuacaca

SEQ ID NO: 101401 - RNA, 24 nt, Artificial Sequence
  Synthetic
aaagguucagauauuguuuacaca

SEQ ID NO: 101402 - RNA, 18 nt, Artificial Sequence
  Synthetic
ggcagaugagaaggcaca

SEQ ID NO: 101403 - RNA, 19 nt, Artificial Sequence
  Synthetic
cggcagaugagaaggcaca

SEQ ID NO: 101404 - RNA, 20 nt, Artificial Sequence
  Synthetic
ccggcagaugagaaggcaca

SEQ ID NO: 101405 - RNA, 21 nt, Artificial Sequence
  Synthetic
  misc_feature (1)..(1): n is a, c, g, or u
nccggcagaugagaaggcaca

SEQ ID NO: 101406 - RNA, 22 nt, Artificial Sequence
  Synthetic
  misc_feature (2)..(2): n is a, c, g, or u
gnccggcagaugagaaggcaca

SEQ ID NO: 101407 - RNA, 23 nt, Artificial Sequence
  Synthetic
  misc_feature (3)..(3): n is a, c, g, or u
ggnccggcagaugagaaggcaca

SEQ ID NO: 101408 - RNA, 24 nt, Artificial Sequence
  Synthetic
  misc_feature (4)..(4): n is a, c, g, or u
cggnccggcagaugagaaggcaca

SEQ ID NO: 101409 - RNA, 18 nt, Artificial Sequence
  Synthetic
aauguauacccaaagaca

SEQ ID NO: 101410 - RNA, 19 nt, Artificial Sequence
  Synthetic
aaauguauacccaaagaca

SEQ ID NO: 101411 - RNA, 20 nt, Artificial Sequence
  Synthetic
  misc_feature (1)..(1): n is a, c, g, or u
naaauguauacccaaagaca

SEQ ID NO: 101412 - RNA, 21 nt, Artificial Sequence
  Synthetic
  misc_feature (2)..(2): n is a, c, g, or u
unaaauguauacccaaagaca

SEQ ID NO: 101413 - RNA, 22 nt, Artificial Sequence
  Synthetic
  misc_feature (3)..(3): n is a, c, g, or u
uunaaauguauacccaaagaca

SEQ ID NO: 101414 - RNA, 23 nt, Artificial Sequence
  Synthetic
  misc_feature (4)..(4): n is a, c, g, or u
guunaaauguauacccaaagaca

SEQ ID NO: 101415 - RNA, 24 nt, Artificial Sequence
  Synthetic
  misc_feature (5)..(5): n is a, c, g, or u
gguunaaauguauacccaaagaca

SEQ ID NO: 101416 - RNA, 18 nt, Artificial Sequence
  Synthetic
gccgacgggacguagaca

SEQ ID NO: 101417 - RNA, 19 nt, Artificial Sequence
  Synthetic
cgccgacgggacguagaca

SEQ ID NO: 101418 - RNA, 20 nt, Artificial Sequence
  Synthetic
gcgccgacgggacguagaca

SEQ ID NO: 101419 - RNA, 18 nt, Artificial Sequence
  Synthetic
  misc_feature (2)..(2): n is a, c, g, or u
cnaauuuuggccaggaca

SEQ ID NO: 101420 - RNA, 19 nt, Artificial Sequence
  Synthetic
  misc_feature (3)..(3): n is a, c, g, or u
gcnaauuuuggccaggaca

SEQ ID NO: 101421 - RNA, 20 nt, Artificial Sequence
  Synthetic
  misc_feature (4)..(4): n is a, c, g, or u
ugcnaauuuuggccaggaca

SEQ ID NO: 101422 - RNA, 21 nt, Artificial Sequence
  Synthetic
  misc_feature (5)..(5): n is a, c, g, or u
cugcnaauuuuggccaggaca

SEQ ID NO: 101423 - RNA, 22 nt, Artificial Sequence
  Synthetic
  misc_feature (6)..(6): n is a, c, g, or u
acugcnaauuuuggccaggaca

SEQ ID NO: 101424 - RNA, 23 nt, Artificial Sequence
  Synthetic
  misc_feature (7)..(7): n is a, c, g, or u
gacugcnaauuuuggccaggaca

SEQ ID NO: 101425 - RNA, 24 nt, Artificial Sequence
  Synthetic
  misc_feature (8)..(8): n is a, c, g, or u
ggacugcnaauuuuggccaggaca

SEQ ID NO: 101426 - RNA, 18 nt, Artificial Sequence
  Synthetic
uauuuccgagagaggaca

SEQ ID NO: 101427 - RNA, 19 nt, Artificial Sequence
  Synthetic
guauuuccgagagaggaca

SEQ ID NO: 101428 - RNA, 20 nt, Artificial Sequence
  Synthetic
uguauuuccgagagaggaca

SEQ ID NO: 101429 - RNA, 21 nt, Artificial Sequence
  Synthetic
guguauuuccgagagaggaca

SEQ ID NO: 101430 - RNA, 22 nt, Artificial Sequence
  Synthetic
gguguauuuccgagagaggaca

SEQ ID NO: 101431 - RNA, 23 nt, Artificial Sequence
  Synthetic
agguguauuuccgagagaggaca

SEQ ID NO: 101432 - RNA, 24 nt, Artificial Sequence
  Synthetic
gagguguauuuccgagagaggaca

SEQ ID NO: 101433 - RNA, 18 nt, Artificial Sequence
  Synthetic
uccuggaaguagaggaca

SEQ ID NO: 101434 - RNA, 19 nt, Artificial Sequence
  Synthetic
uuccuggaaguagaggaca

SEQ ID NO: 101435 - RNA, 20 nt, Artificial Sequence
  Synthetic
guuccuggaaguagaggaca

SEQ ID NO: 101436 - RNA, 21 nt, Artificial Sequence
  Synthetic
uguuccuggaaguagaggaca

SEQ ID NO: 101437 - RNA, 22 nt, Artificial Sequence
  Synthetic
auguuccuggaaguagaggaca

SEQ ID NO: 101438 - RNA, 23 nt, Artificial Sequence
  Synthetic
gauguuccuggaaguagaggaca

SEQ ID NO: 101439 - RNA, 24 nt, Artificial Sequence
  Synthetic
ugauguuccuggaaguagaggaca

SEQ ID NO: 101440 - RNA, 18 nt, Artificial Sequence
  Synthetic
ggauuaaagacagguaca

SEQ ID NO: 101441 - RNA, 19 nt, Artificial Sequence
  Synthetic
aggauuaaagacagguaca

SEQ ID NO: 101442 - RNA, 20 nt, Artificial Sequence
  Synthetic
caggauuaaagacagguaca

SEQ ID NO: 101443 - RNA, 21 nt, Artificial Sequence
  Synthetic
ucaggauuaaagacagguaca

SEQ ID NO: 101444 - RNA, 22 nt, Artificial Sequence
  Synthetic
  misc_feature (1)..(1): n is a, c, g, or u
nucaggauuaaagacagguaca

SEQ ID NO: 101445 - RNA, 23 nt, Artificial Sequence
  Synthetic
  misc_feature (2)..(2): n is a, c, g, or u
anucaggauuaaagacagguaca

SEQ ID NO: 101446 - RNA, 24 nt, Artificial Sequence
  Synthetic
  misc_feature (3)..(3): n is a, c, g, or u
canucaggauuaaagacagguaca

SEQ ID NO: 101447 - RNA, 18 nt, Artificial Sequence
  Synthetic
guucagauauuguuuaca

SEQ ID NO: 101448 - RNA, 19 nt, Artificial Sequence
  Synthetic
gguucagauauuguuuaca

SEQ ID NO: 101449 - RNA, 20 nt, Artificial Sequence
  Synthetic
agguucagauauuguuuaca

SEQ ID NO: 101450 - RNA, 21 nt, Artificial Sequence
  Synthetic
aagguucagauauuguuuaca

SEQ ID NO: 101451 - RNA, 22 nt, Artificial Sequence
  Synthetic
aaagguucagauauuguuuaca

SEQ ID NO: 101452 - RNA, 23 nt, Artificial Sequence
  Synthetic
uaaagguucagauauuguuuaca

SEQ ID NO: 101453 - RNA, 24 nt, Artificial Sequence
  Synthetic
guaaagguucagauauuguuuaca

SEQ ID NO: 101454 - RNA, 18 nt, Artificial Sequence
  Synthetic
gguaguccagaagaacca

SEQ ID NO: 101455 - RNA, 19 nt, Artificial Sequence
  Synthetic
ugguaguccagaagaacca

SEQ ID NO: 101456 - RNA, 20 nt, Artificial Sequence
  Synthetic
uugguaguccagaagaacca

SEQ ID NO: 101457 - RNA, 21 nt, Artificial Sequence
  Synthetic
cuugguaguccagaagaacca

SEQ ID NO: 101458 - RNA, 22 nt, Artificial Sequence
  Synthetic
ccuugguaguccagaagaacca

SEQ ID NO: 101459 - RNA, 23 nt, Artificial Sequence
  Synthetic
accuugguaguccagaagaacca

SEQ ID NO: 101460 - RNA, 24 nt, Artificial Sequence
  Synthetic
uaccuugguaguccagaagaacca

SEQ ID NO: 101461 - RNA, 18 nt, Artificial Sequence
  Synthetic
ggaaagcccuacgaacca

SEQ ID NO: 101462 - RNA, 19 nt, Artificial Sequence
  Synthetic
gggaaagcccuacgaacca

SEQ ID NO: 101463 - RNA, 20 nt, Artificial Sequence
  Synthetic
ggggaaagcccuacgaacca

SEQ ID NO: 101464 - RNA, 21 nt, Artificial Sequence
  Synthetic
gggggaaagcccuacgaacca

SEQ ID NO: 101465 - RNA, 22 nt, Artificial Sequence
  Synthetic
ugggggaaagcccuacgaacca

SEQ ID NO: 101466 - RNA, 23 nt, Artificial Sequence
  Synthetic
gugggggaaagcccuacgaacca

SEQ ID NO: 101467 - RNA, 24 nt, Artificial Sequence
  Synthetic
agugggggaaagcccuacgaacca

SEQ ID NO: 101468 - RNA, 18 nt, Artificial Sequence
  Synthetic
ccggaacuggagccacca

SEQ ID NO: 101469 - RNA, 19 nt, Artificial Sequence
  Synthetic
uccggaacuggagccacca

SEQ ID NO: 101470 - RNA, 20 nt, Artificial Sequence
  Synthetic
uuccggaacuggagccacca

SEQ ID NO: 101471 - RNA, 21 nt, Artificial Sequence
  Synthetic
guuccggaacuggagccacca

SEQ ID NO: 101472 - RNA, 22 nt, Artificial Sequence
  Synthetic
uguuccggaacuggagccacca

SEQ ID NO: 101473 - RNA, 23 nt, Artificial Sequence
  Synthetic
cuguuccggaacuggagccacca

SEQ ID NO: 101474 - RNA, 24 nt, Artificial Sequence
  Synthetic
acuguuccggaacuggagccacca

SEQ ID NO: 101475 - RNA, 18 nt, Artificial Sequence
  Synthetic
caaauuacuucccaccca

SEQ ID NO: 101476 - RNA, 19 nt, Artificial Sequence
  Synthetic
ccaaauuacuucccaccca

SEQ ID NO: 101477 - RNA, 20 nt, Artificial Sequence
  Synthetic
uccaaauuacuucccaccca

SEQ ID NO: 101478 - RNA, 21 nt, Artificial Sequence
  Synthetic
uuccaaauuacuucccaccca

SEQ ID NO: 101479 - RNA, 22 nt, Artificial Sequence
  Synthetic
cuuccaaauuacuucccaccca

SEQ ID NO: 101480 - RNA, 23 nt, Artificial Sequence
  Synthetic
ucuuccaaauuacuucccaccca

SEQ ID NO: 101481 - RNA, 24 nt, Artificial Sequence
  Synthetic
  misc_feature (1)..(1): n is a, c, g, or u
nucuuccaaauuacuucccaccca

SEQ ID NO: 101482 - RNA, 18 nt, Artificial Sequence
  Synthetic
ccugagggcuccacccca

SEQ ID NO: 101483 - RNA, 19 nt, Artificial Sequence
  Synthetic
gccugagggcuccacccca

SEQ ID NO: 101484 - RNA, 20 nt, Artificial Sequence
  Synthetic
agccugagggcuccacccca

SEQ ID NO: 101485 - RNA, 21 nt, Artificial Sequence
  Synthetic
gagccugagggcuccacccca

SEQ ID NO: 101486 - RNA, 22 nt, Artificial Sequence
  Synthetic
ugagccugagggcuccacccca

SEQ ID NO: 101487 - RNA, 23 nt, Artificial Sequence
  Synthetic
cugagccugagggcuccacccca

SEQ ID NO: 101488 - RNA, 24 nt, Artificial Sequence
  Synthetic
ccugagccugagggcuccacccca

SEQ ID NO: 101489 - RNA, 18 nt, Artificial Sequence
  Synthetic
  misc_feature (8)..(8): n is a, c, g, or u
aaggggcngcaaagccca

SEQ ID NO: 101490 - RNA, 19 nt, Artificial Sequence
  Synthetic
  misc_feature (9)..(9): n is a, c, g, or u
aaaggggcngcaaagccca

SEQ ID NO: 101491 - RNA, 20 nt, Artificial Sequence
  Synthetic
  misc_feature (10)..(10): n is a, c, g, or u
aaaaggggcngcaaagccca

SEQ ID NO: 101492 - RNA, 21 nt, Artificial Sequence
  Synthetic
  misc_feature (11)..(11): n is a, c, g, or u
uaaaaggggcngcaaagccca

SEQ ID NO: 101493 - RNA, 22 nt, Artificial Sequence
  Synthetic
  misc_feature (12)..(12): n is a, c, g, or u
guaaaaggggcngcaaagccca

SEQ ID NO: 101494 - RNA, 23 nt, Artificial Sequence
  Synthetic
  misc_feature (13)..(13): n is a, c, g, or u
uguaaaaggggcngcaaagccca

SEQ ID NO: 101495 - RNA, 24 nt, Artificial Sequence
  Synthetic
  misc_feature (14)..(14): n is a, c, g, or u
guguaaaaggggcngcaaagccca

SEQ ID NO: 101496 - RNA, 18 nt, Artificial Sequence
  Synthetic
guagaagaauaaagccca

SEQ ID NO: 101497 - RNA, 19 nt, Artificial Sequence
  Synthetic
aguagaagaauaaagccca

SEQ ID NO: 101498 - RNA, 20 nt, Artificial Sequence
  Synthetic
caguagaagaauaaagccca

SEQ ID NO: 101499 - RNA, 21 nt, Artificial Sequence
  Synthetic
acaguagaagaauaaagccca

SEQ ID NO: 101500 - RNA, 22 nt, Artificial Sequence
  Synthetic
uacaguagaagaauaaagccca

SEQ ID NO: 101501 - RNA, 23 nt, Artificial Sequence
  Synthetic
guacaguagaagaauaaagccca

SEQ ID NO: 101502 - RNA, 24 nt, Artificial Sequence
  Synthetic
gguacaguagaagaauaaagccca

SEQ ID NO: 101503 - RNA, 18 nt, Artificial Sequence
  Synthetic
  misc_feature (14)..(14): n is a, c, g, or u
ggggacgguagagnccca

SEQ ID NO: 101504 - RNA, 19 nt, Artificial Sequence
  Synthetic
  misc_feature (15)..(15): n is a, c, g, or u
aggggacgguagagnccca

SEQ ID NO: 101505 - RNA, 20 nt, Artificial Sequence
  Synthetic
  misc_feature (16)..(16): n is a, c, g, or u
aaggggacgguagagnccca

SEQ ID NO: 101506 - RNA, 21 nt, Artificial Sequence
  Synthetic
  misc_feature (17)..(17): n is a, c, g, or u
gaaggggacgguagagnccca

SEQ ID NO: 101507 - RNA, 22 nt, Artificial Sequence
  Synthetic
  misc_feature (18)..(18): n is a, c, g, or u
agaaggggacgguagagnccca

SEQ ID NO: 101508 - RNA, 23 nt, Artificial Sequence
  Synthetic
  misc_feature (1)..(1): n is a, c, g, or u
  misc_feature (19)..(19): n is a, c, g, or u
nagaaggggacgguagagnccca

SEQ ID NO: 101509 - RNA, 24 nt, Artificial Sequence
  Synthetic
  misc_feature (2)..(2): n is a, c, g, or u
  misc_feature (20)..(20): n is a, c, g, or u
gnagaaggggacgguagagnccca

SEQ ID NO: 101510 - RNA, 18 nt, Artificial Sequence
  Synthetic
gacugaggcccacuccca

SEQ ID NO: 101511 - RNA, 19 nt, Artificial Sequence
  Synthetic
ggacugaggcccacuccca

SEQ ID NO: 101512 - RNA, 20 nt, Artificial Sequence
  Synthetic
cggacugaggcccacuccca

SEQ ID NO: 101513 - RNA, 21 nt, Artificial Sequence
  Synthetic
acggacugaggcccacuccca

SEQ ID NO: 101514 - RNA, 22 nt, Artificial Sequence
  Synthetic
aacggacugaggcccacuccca

SEQ ID NO: 101515 - RNA, 23 nt, Artificial Sequence
  Synthetic
aaacggacugaggcccacuccca

SEQ ID NO: 101516 - RNA, 24 nt, Artificial Sequence
  Synthetic
gaaacggacugaggcccacuccca

SEQ ID NO: 101517 - RNA, 18 nt, Artificial Sequence
  Synthetic
cuuccaaauuacuuccca

SEQ ID NO: 101518 - RNA, 19 nt, Artificial Sequence
  Synthetic
ucuuccaaauuacuuccca

SEQ ID NO: 101519 - RNA, 20 nt, Artificial Sequence
  Synthetic
  misc_feature (1)..(1): n is a, c, g, or u
nucuuccaaauuacuuccca

SEQ ID NO: 101520 - RNA, 21 nt, Artificial Sequence
  Synthetic
  misc_feature (2)..(2): n is a, c, g, or u
gnucuuccaaauuacuuccca

SEQ ID NO: 101521 - RNA, 22 nt, Artificial Sequence
  Synthetic
  misc_feature (3)..(3): n is a, c, g, or u
ggnucuuccaaauuacuuccca

SEQ ID NO: 101522 - RNA, 23 nt, Artificial Sequence
  Synthetic
  misc_feature (4)..(4): n is a, c, g, or u
uggnucuuccaaauuacuuccca

SEQ ID NO: 101523 - RNA, 24 nt, Artificial Sequence
  Synthetic
  misc_feature (5)..(5): n is a, c, g, or u
cuggnucuuccaaauuacuuccca

SEQ ID NO: 101524 - RNA, 18 nt, Artificial Sequence
  Synthetic
  misc_feature (11)..(11): n is a, c, g, or u
guccaugcccnaaagcca

SEQ ID NO: 101525 - RNA, 19 nt, Artificial Sequence
  Synthetic
  misc_feature (12)..(12): n is a, c, g, or u
uguccaugcccnaaagcca

SEQ ID NO: 101526 - RNA, 20 nt, Artificial Sequence
  Synthetic
  misc_feature (13)..(13): n is a, c, g, or u
auguccaugcccnaaagcca

SEQ ID NO: 101527 - RNA, 21 nt, Artificial Sequence
  Synthetic
  misc_feature (14)..(14): n is a, c, g, or u
aauguccaugcccnaaagcca

SEQ ID NO: 101528 - RNA, 22 nt, Artificial Sequence
  Synthetic
  misc_feature (15)..(15): n is a, c, g, or u
caauguccaugcccnaaagcca

SEQ ID NO: 101529 - RNA, 23 nt, Artificial Sequence
  Synthetic
  misc_feature (16)..(16): n is a, c, g, or u
ucaauguccaugcccnaaagcca

SEQ ID NO: 101530 - RNA, 24 nt, Artificial Sequence
  Synthetic
  misc_feature (17)..(17): n is a, c, g, or u
gucaauguccaugcccnaaagcca

SEQ ID NO: 101531 - RNA, 18 nt, Artificial Sequence
  Synthetic
  misc_feature (7)..(7): n is a, c, g, or u
  misc_feature (10)..(10): n is a, c, g, or u
agcacanccnagcagcca

SEQ ID NO: 101532 - RNA, 19 nt, Artificial Sequence
  Synthetic
  misc_feature (8)..(8): n is a, c, g, or u
  misc_feature (11)..(11): n is a, c, g, or u
cagcacanccnagcagcca

SEQ ID NO: 101533 - RNA, 20 nt, Artificial Sequence
  Synthetic
  misc_feature (9)..(9): n is a, c, g, or u
  misc_feature (12)..(12): n is a, c, g, or u
gcagcacanccnagcagcca

SEQ ID NO: 101534 - RNA, 21 nt, Artificial Sequence
  Synthetic
  misc_feature (10)..(10): n is a, c, g, or u
  misc_feature (13)..(13): n is a, c, g, or u
ggcagcacanccnagcagcca

SEQ ID NO: 101535 - RNA, 22 nt, Artificial Sequence
  Synthetic
  misc_feature (11)..(11): n is a, c, g, or u
  misc_feature (14)..(14): n is a, c, g, or u
uggcagcacanccnagcagcca

SEQ ID NO: 101536 - RNA, 23 nt, Artificial Sequence
  Synthetic
  misc_feature (12)..(12): n is a, c, g, or u
  misc_feature (15)..(15): n is a, c, g, or u
uuggcagcacanccnagcagcca

SEQ ID NO: 101537 - RNA, 24 nt, Artificial Sequence
  Synthetic
  misc_feature (13)..(13): n is a, c, g, or u
  misc_feature (16)..(16): n is a, c, g, or u
guuggcagcacanccnagcagcca

SEQ ID NO: 101538 - RNA, 18 nt, Artificial Sequence
  Synthetic
ggaucggcagaggagcca

SEQ ID NO: 101539 - RNA, 19 nt, Artificial Sequence
  Synthetic
uggaucggcagaggagcca

SEQ ID NO: 101540 - RNA, 20 nt, Artificial Sequence
  Synthetic
auggaucggcagaggagcca

SEQ ID NO: 101541 - RNA, 21 nt, Artificial Sequence
  Synthetic
uauggaucggcagaggagcca

SEQ ID NO: 101542 - RNA, 22 nt, Artificial Sequence
  Synthetic
guauggaucggcagaggagcca

SEQ ID NO: 101543 - RNA, 23 nt, Artificial Sequence
  Synthetic
aguauggaucggcagaggagcca

SEQ ID NO: 101544 - RNA, 24 nt, Artificial Sequence
  Synthetic
caguauggaucggcagaggagcca

SEQ ID NO: 101545 - RNA, 18 nt, Artificial Sequence
  Synthetic
cacuaguaaacugagcca

SEQ ID NO: 101546 - RNA, 19 nt, Artificial Sequence
  Synthetic
gcacuaguaaacugagcca

SEQ ID NO: 101547 - RNA, 20 nt, Artificial Sequence
  Synthetic
ggcacuaguaaacugagcca

SEQ ID NO: 101548 - RNA, 21 nt, Artificial Sequence
  Synthetic
uggcacuaguaaacugagcca

SEQ ID NO: 101549 - RNA, 22 nt, Artificial Sequence
  Synthetic
auggcacuaguaaacugagcca

SEQ ID NO: 101550 - RNA, 23 nt, Artificial Sequence
  Synthetic
aauggcacuaguaaacugagcca

SEQ ID NO: 101551 - RNA, 24 nt, Artificial Sequence
  Synthetic
aaauggcacuaguaaacugagcca

SEQ ID NO: 101552 - RNA, 18 nt, Artificial Sequence
  Synthetic
  misc_feature (4)..(4): n is a, c, g, or u
aaangagggaguuugcca

SEQ ID NO: 101553 - RNA, 19 nt, Artificial Sequence
  Synthetic
  misc_feature (5)..(5): n is a, c, g, or u
gaaangagggaguuugcca

SEQ ID NO: 101554 - RNA, 20 nt, Artificial Sequence
  Synthetic
  misc_feature (6)..(6): n is a, c, g, or u
ggaaangagggaguuugcca

SEQ ID NO: 101555 - RNA, 21 nt, Artificial Sequence
  Synthetic
  misc_feature (7)..(7): n is a, c, g, or u
aggaaangagggaguuugcca

SEQ ID NO: 101556 - RNA, 22 nt, Artificial Sequence
  Synthetic
  misc_feature (1)..(1): n is a, c, g, or u
  misc_feature (8)..(8): n is a, c, g, or u
naggaaangagggaguuugcca

SEQ ID NO: 101557 - RNA, 23 nt, Artificial Sequence
  Synthetic
  misc_feature (2)..(2): n is a, c, g, or u
  misc_feature (9)..(9): n is a, c, g, or u
unaggaaangagggaguuugcca

SEQ ID NO: 101558 - RNA, 24 nt, Artificial Sequence
  Synthetic
  misc_feature (3)..(3): n is a, c, g, or u
  misc_feature (10)..(10): n is a, c, g, or u
gunaggaaangagggaguuugcca

SEQ ID NO: 101559 - RNA, 18 nt, Artificial Sequence
  Synthetic
  misc_feature (3)..(3): n is a, c, g, or u
  misc_feature (15)..(15): n is a, c, g, or u
aungccaagccccancca

SEQ ID NO: 101560 - RNA, 19 nt, Artificial Sequence
  Synthetic
  misc_feature (1)..(1): n is a, c, g, or u
  misc_feature (4)..(4): n is a, c, g, or u
  misc_feature (16)..(16): n is a, c, g, or u
naungccaagccccancca

SEQ ID NO: 101561 - RNA, 20 nt, Artificial Sequence
  Synthetic
  misc_feature (2)..(2): n is a, c, g, or u
  misc_feature (5)..(5): n is a, c, g, or u
  misc_feature (17)..(17): n is a, c, g, or u
cnaungccaagccccancca

SEQ ID NO: 101562 - RNA, 21 nt, Artificial Sequence
  Synthetic
  misc_feature (3)..(3): n is a, c, g, or u
  misc_feature (6)..(6): n is a, c, g, or u
  misc_feature (18)..(18): n is a, c, g, or u
ccnaungccaagccccancca

SEQ ID NO: 101563 - RNA, 22 nt, Artificial Sequence
  Synthetic
  misc_feature (4)..(4): n is a, c, g, or u
  misc_feature (7)..(7): n is a, c, g, or u
  misc_feature (19)..(19): n is a, c, g, or u
gccnaungccaagccccancca

SEQ ID NO: 101564 - RNA, 23 nt, Artificial Sequence
  Synthetic
  misc_feature (5)..(5): n is a, c, g, or u
  misc_feature (8)..(8): n is a, c, g, or u
  misc_feature (20)..(20): n is a, c, g, or u
ggccnaungccaagccccancca

SEQ ID NO: 101565 - RNA, 24 nt, Artificial Sequence
  Synthetic
  misc_feature (6)..(6): n is a, c, g, or u
  misc_feature (9)..(9): n is a, c, g, or u
  misc_feature (21)..(21): n is a, c, g, or u
uggccnaungccaagccccancca

SEQ ID NO: 101566 - RNA, 18 nt, Artificial Sequence
  Synthetic
ccaauaccacaucaucca

SEQ ID NO: 101567 - RNA, 19 nt, Artificial Sequence
  Synthetic
cccaauaccacaucaucca

SEQ ID NO: 101568 - RNA, 20 nt, Artificial Sequence
  Synthetic
ccccaauaccacaucaucca

SEQ ID NO: 101569 - RNA, 21 nt, Artificial Sequence
  Synthetic
cccccaauaccacaucaucca

SEQ ID NO: 101570 - RNA, 22 nt, Artificial Sequence
  Synthetic
gcccccaauaccacaucaucca

SEQ ID NO: 101571 - RNA, 23 nt, Artificial Sequence
  Synthetic
ggcccccaauaccacaucaucca

SEQ ID NO: 101572 - RNA, 24 nt, Artificial Sequence
  Synthetic
uggcccccaauaccacaucaucca

SEQ ID NO: 101573 - RNA, 18 nt, Artificial Sequence
  Synthetic
cgucccgcgcaggaucca

SEQ ID NO: 101574 - RNA, 19 nt, Artificial Sequence
  Synthetic
acgucccgcgcaggaucca

SEQ ID NO: 101575 - RNA, 20 nt, Artificial Sequence
  Synthetic
gacgucccgcgcaggaucca

SEQ ID NO: 101576 - RNA, 18 nt, Artificial Sequence
  Synthetic
aaaaagagaguaacucca

SEQ ID NO: 101577 - RNA, 19 nt, Artificial Sequence
  Synthetic
aaaaaagagaguaacucca

SEQ ID NO: 101578 - RNA, 20 nt, Artificial Sequence
  Synthetic
caaaaaagagaguaacucca

SEQ ID NO: 101579 - RNA, 21 nt, Artificial Sequence
  Synthetic
gcaaaaaagagaguaacucca

SEQ ID NO: 101580 - RNA, 22 nt, Artificial Sequence
  Synthetic
ggcaaaaaagagaguaacucca

SEQ ID NO: 101581 - RNA, 23 nt, Artificial Sequence
  Synthetic
aggcaaaaaagagaguaacucca

SEQ ID NO: 101582 - RNA, 24 nt, Artificial Sequence
  Synthetic
aaggcaaaaaagagaguaacucca

SEQ ID NO: 101583 - RNA, 18 nt, Artificial Sequence
  Synthetic
gugcgaauccacacucca

SEQ ID NO: 101584 - RNA, 19 nt, Artificial Sequence
  Synthetic
agugcgaauccacacucca

SEQ ID NO: 101585 - RNA, 20 nt, Artificial Sequence
  Synthetic
gagugcgaauccacacucca

SEQ ID NO: 101586 - RNA, 21 nt, Artificial Sequence
  Synthetic
ggagugcgaauccacacucca

SEQ ID NO: 101587 - RNA, 22 nt, Artificial Sequence
  Synthetic
aggagugcgaauccacacucca

SEQ ID NO: 101588 - RNA, 23 nt, Artificial Sequence
  Synthetic
  misc_feature (1)..(1): n is a, c, g, or u
naggagugcgaauccacacucca

SEQ ID NO: 101589 - RNA, 24 nt, Artificial Sequence
  Synthetic
  misc_feature (2)..(2): n is a, c, g, or u
gnaggagugcgaauccacacucca

SEQ ID NO: 101590 - RNA, 18 nt, Artificial Sequence
  Synthetic
acauaccuugguagucca

SEQ ID NO: 101591 - RNA, 19 nt, Artificial Sequence
  Synthetic
aacauaccuugguagucca

SEQ ID NO: 101592 - RNA, 20 nt, Artificial Sequence
  Synthetic
caacauaccuugguagucca

SEQ ID NO: 101593 - RNA, 21 nt, Artificial Sequence
  Synthetic
gcaacauaccuugguagucca

SEQ ID NO: 101594 - RNA, 22 nt, Artificial Sequence
  Synthetic
ggcaacauaccuugguagucca

SEQ ID NO: 101595 - RNA, 23 nt, Artificial Sequence
  Synthetic
gggcaacauaccuugguagucca

SEQ ID NO: 101596 - RNA, 24 nt, Artificial Sequence
  Synthetic
cgggcaacauaccuugguagucca

SEQ ID NO: 101597 - RNA, 18 nt, Artificial Sequence
  Synthetic
  misc_feature (14)..(14): n is a, c, g, or u
cguucacgguggunucca

SEQ ID NO: 101598 - RNA, 19 nt, Artificial Sequence
  Synthetic
  misc_feature (15)..(15): n is a, c, g, or u
gcguucacgguggunucca

SEQ ID NO: 101599 - RNA, 20 nt, Artificial Sequence
  Synthetic
  misc_feature (16)..(16): n is a, c, g, or u
ggcguucacgguggunucca

SEQ ID NO: 101600 - RNA, 21 nt, Artificial Sequence
  Synthetic
  misc_feature (17)..(17): n is a, c, g, or u
gggcguucacgguggunucca

SEQ ID NO: 101601 - RNA, 22 nt, Artificial Sequence
  Synthetic
  misc_feature (1)..(1): n is a, c, g, or u
  misc_feature (18)..(18): n is a, c, g, or u
ngggcguucacgguggunucca

SEQ ID NO: 101602 - RNA, 23 nt, Artificial Sequence
  Synthetic
  misc_feature (2)..(2): n is a, c, g, or u
  misc_feature (19)..(19): n is a, c, g, or u
gngggcguucacgguggunucca

SEQ ID NO: 101603 - RNA, 24 nt, Artificial Sequence
  Synthetic
  misc_feature (3)..(3): n is a, c, g, or u
  misc_feature (20)..(20): n is a, c, g, or u
ggngggcguucacgguggunucca

SEQ ID NO: 101604 - RNA, 18 nt, Artificial Sequence
  Synthetic
cgaagguuuuguacagca

SEQ ID NO: 101605 - RNA, 19 nt, Artificial Sequence
  Synthetic
ccgaagguuuuguacagca

SEQ ID NO: 101606 - RNA, 20 nt, Artificial Sequence
  Synthetic
uccgaagguuuuguacagca

SEQ ID NO: 101607 - RNA, 18 nt, Artificial Sequence
  Synthetic
gaacuggagccaccagca

SEQ ID NO: 101608 - RNA, 19 nt, Artificial Sequence
  Synthetic
ggaacuggagccaccagca

SEQ ID NO: 101609 - RNA, 20 nt, Artificial Sequence
  Synthetic
cggaacuggagccaccagca

SEQ ID NO: 101610 - RNA, 21 nt, Artificial Sequence
  Synthetic
ccggaacuggagccaccagca

SEQ ID NO: 101611 - RNA, 22 nt, Artificial Sequence
  Synthetic
uccggaacuggagccaccagca

SEQ ID NO: 101612 - RNA, 23 nt, Artificial Sequence
  Synthetic
uuccggaacuggagccaccagca

SEQ ID NO: 101613 - RNA, 24 nt, Artificial Sequence
  Synthetic
guuccggaacuggagccaccagca

SEQ ID NO: 101614 - RNA, 18 nt, Artificial Sequence
  Synthetic
agaagaugaggcauagca

SEQ ID NO: 101615 - RNA, 19 nt, Artificial Sequence
  Synthetic
aagaagaugaggcauagca

SEQ ID NO: 101616 - RNA, 20 nt, Artificial Sequence
  Synthetic
caagaagaugaggcauagca

SEQ ID NO: 101617 - RNA, 21 nt, Artificial Sequence
  Synthetic
acaagaagaugaggcauagca

SEQ ID NO: 101618 - RNA, 22 nt, Artificial Sequence
  Synthetic
aacaagaagaugaggcauagca

SEQ ID NO: 101619 - RNA, 23 nt, Artificial Sequence
  Synthetic
caacaagaagaugaggcauagca

SEQ ID NO: 101620 - RNA, 24 nt, Artificial Sequence
  Synthetic
ccaacaagaagaugaggcauagca

SEQ ID NO: 101621 - RNA, 18 nt, Artificial Sequence
  Synthetic
gaaagaagucagaaggca

SEQ ID NO: 101622 - RNA, 19 nt, Artificial Sequence
  Synthetic
ggaaagaagucagaaggca

SEQ ID NO: 101623 - RNA, 20 nt, Artificial Sequence
  Synthetic
aggaaagaagucagaaggca

SEQ ID NO: 101624 - RNA, 21 nt, Artificial Sequence
  Synthetic
aaggaaagaagucagaaggca

SEQ ID NO: 101625 - RNA, 22 nt, Artificial Sequence
  Synthetic
gaaggaaagaagucagaaggca

SEQ ID NO: 101626 - RNA, 23 nt, Artificial Sequence
  Synthetic
agaaggaaagaagucagaaggca

SEQ ID NO: 101627 - RNA, 24 nt, Artificial Sequence
  Synthetic
uagaaggaaagaagucagaaggca

SEQ ID NO: 101628 - RNA, 18 nt, Artificial Sequence
  Synthetic
ugccgauugguggaggca

SEQ ID NO: 101629 - RNA, 19 nt, Artificial Sequence
  Synthetic
cugccgauugguggaggca

SEQ ID NO: 101630 - RNA, 20 nt, Artificial Sequence
  Synthetic
acugccgauugguggaggca

SEQ ID NO: 101631 - RNA, 21 nt, Artificial Sequence
  Synthetic
gacugccgauugguggaggca

SEQ ID NO: 101632 - RNA, 22 nt, Artificial Sequence
  Synthetic
ugacugccgauugguggaggca

SEQ ID NO: 101633 - RNA, 23 nt, Artificial Sequence
  Synthetic
cugacugccgauugguggaggca

SEQ ID NO: 101634 - RNA, 24 nt, Artificial Sequence
  Synthetic
ccugacugccgauugguggaggca

SEQ ID NO: 101635 - RNA, 18 nt, Artificial Sequence
  Synthetic
  misc_feature (12)..(12): n is a, c, g, or u
agugcacacggnccggca

SEQ ID NO: 101636 - RNA, 19 nt, Artificial Sequence
  Synthetic
  misc_feature (13)..(13): n is a, c, g, or u
aagugcacacggnccggca

SEQ ID NO: 101637 - RNA, 20 nt, Artificial Sequence
  Synthetic
  misc_feature (14)..(14): n is a, c, g, or u
gaagugcacacggnccggca

SEQ ID NO: 101638 - RNA, 21 nt, Artificial Sequence
  Synthetic
  misc_feature (15)..(15): n is a, c, g, or u
cgaagugcacacggnccggca

SEQ ID NO: 101639 - RNA, 22 nt, Artificial Sequence
  Synthetic
  misc_feature (16)..(16): n is a, c, g, or u
gcgaagugcacacggnccggca

SEQ ID NO: 101640 - RNA, 23 nt, Artificial Sequence
  Synthetic
  misc_feature (17)..(17): n is a, c, g, or u
agcgaagugcacacggnccggca

SEQ ID NO: 101641 - RNA, 24 nt, Artificial Sequence
  Synthetic
  misc_feature (18)..(18): n is a, c, g, or u
aagcgaagugcacacggnccggca

SEQ ID NO: 101642 - RNA, 18 nt, Artificial Sequence
  Synthetic
ccgcaguauggaucggca

SEQ ID NO: 101643 - RNA, 19 nt, Artificial Sequence
  Synthetic
uccgcaguauggaucggca

SEQ ID NO: 101644 - RNA, 20 nt, Artificial Sequence
  Synthetic
uuccgcaguauggaucggca

SEQ ID NO: 101645 - RNA, 21 nt, Artificial Sequence
  Synthetic
guuccgcaguauggaucggca

SEQ ID NO: 101646 - RNA, 22 nt, Artificial Sequence
  Synthetic
aguuccgcaguauggaucggca

SEQ ID NO: 101647 - RNA, 23 nt, Artificial Sequence
  Synthetic
gaguuccgcaguauggaucggca

SEQ ID NO: 101648 - RNA, 24 nt, Artificial Sequence
  Synthetic
ggaguuccgcaguauggaucggca

SEQ ID NO: 101649 - RNA, 18 nt, Artificial Sequence
  Synthetic
  misc_feature (15)..(15): n is a, c, g, or u
ccugaccguugccgngca

SEQ ID NO: 101650 - RNA, 19 nt, Artificial Sequence
  Synthetic
  misc_feature (16)..(16): n is a, c, g, or u
accugaccguugccgngca

SEQ ID NO: 101651 - RNA, 20 nt, Artificial Sequence
  Synthetic
  misc_feature (17)..(17): n is a, c, g, or u
gaccugaccguugccgngca

SEQ ID NO: 101652 - RNA, 21 nt, Artificial Sequence
  Synthetic
  misc_feature (18)..(18): n is a, c, g, or u
agaccugaccguugccgngca

SEQ ID NO: 101653 - RNA, 22 nt, Artificial Sequence
  Synthetic
  misc_feature (1)..(1): n is a, c, g, or u
  misc_feature (19)..(19): n is a, c, g, or u
nagaccugaccguugccgngca

SEQ ID NO: 101654 - RNA, 23 nt, Artificial Sequence
  Synthetic
  misc_feature (2)..(2): n is a, c, g, or u
  misc_feature (20)..(20): n is a, c, g, or u
anagaccugaccguugccgngca

SEQ ID NO: 101655 - RNA, 24 nt, Artificial Sequence
  Synthetic
  misc_feature (3)..(3): n is a, c, g, or u
  misc_feature (21)..(21): n is a, c, g, or u
canagaccugaccguugccgngca

SEQ ID NO: 101656 - RNA, 18 nt, Artificial Sequence
  Synthetic
  misc_feature (5)..(5): n is a, c, g, or u
uuagnuuguauacaugca

SEQ ID NO: 101657 - RNA, 19 nt, Artificial Sequence
  Synthetic
  misc_feature (6)..(6): n is a, c, g, or u
cuuagnuuguauacaugca

SEQ ID NO: 101658 - RNA, 20 nt, Artificial Sequence
  Synthetic
  misc_feature (7)..(7): n is a, c, g, or u
gcuuagnuuguauacaugca

SEQ ID NO: 101659 - RNA, 21 nt, Artificial Sequence
  Synthetic
  misc_feature (8)..(8): n is a, c, g, or u
ugcuuagnuuguauacaugca

SEQ ID NO: 101660 - RNA, 22 nt, Artificial Sequence
  Synthetic
  misc_feature (9)..(9): n is a, c, g, or u
cugcuuagnuuguauacaugca

SEQ ID NO: 101661 - RNA, 23 nt, Artificial Sequence
  Synthetic
  misc_feature (10)..(10): n is a, c, g, or u
ccugcuuagnuuguauacaugca

SEQ ID NO: 101662 - RNA, 24 nt, Artificial Sequence
  Synthetic
  misc_feature (11)..(11): n is a, c, g, or u
gccugcuuagnuuguauacaugca

SEQ ID NO: 101663 - RNA, 18 nt, Artificial Sequence
  Synthetic
gaggugaagcgaagugca

SEQ ID NO: 101664 - RNA, 19 nt, Artificial Sequence
  Synthetic
agaggugaagcgaagugca

SEQ ID NO: 101665 - RNA, 20 nt, Artificial Sequence
  Synthetic
cagaggugaagcgaagugca

SEQ ID NO: 101666 - RNA, 21 nt, Artificial Sequence
  Synthetic
gcagaggugaagcgaagugca

SEQ ID NO: 101667 - RNA, 22 nt, Artificial Sequence
  Synthetic
ugcagaggugaagcgaagugca

SEQ ID NO: 101668 - RNA, 23 nt, Artificial Sequence
  Synthetic
gugcagaggugaagcgaagugca

SEQ ID NO: 101669 - RNA, 24 nt, Artificial Sequence
  Synthetic
cgugcagaggugaagcgaagugca

SEQ ID NO: 101670 - RNA, 18 nt, Artificial Sequence
  Synthetic
auagaaggaaagaaguca

SEQ ID NO: 101671 - RNA, 19 nt, Artificial Sequence
  Synthetic
aauagaaggaaagaaguca

SEQ ID NO: 101672 - RNA, 20 nt, Artificial Sequence
  Synthetic
gaauagaaggaaagaaguca

SEQ ID NO: 101673 - RNA, 21 nt, Artificial Sequence
  Synthetic
cgaauagaaggaaagaaguca

SEQ ID NO: 101674 - RNA, 22 nt, Artificial Sequence
  Synthetic
  misc_feature (1)..(1): n is a, c, g, or u
ncgaauagaaggaaagaaguca

SEQ ID NO: 101675 - RNA, 23 nt, Artificial Sequence
  Synthetic
  misc_feature (2)..(2): n is a, c, g, or u
cncgaauagaaggaaagaaguca

SEQ ID NO: 101676 - RNA, 24 nt, Artificial Sequence
  Synthetic
  misc_feature (3)..(3): n is a, c, g, or u
ucncgaauagaaggaaagaaguca

SEQ ID NO: 101677 - RNA, 18 nt, Artificial Sequence
  Synthetic
ccaguggggguugcguca

SEQ ID NO: 101678 - RNA, 19 nt, Artificial Sequence
  Synthetic
  misc_feature (1)..(1): n is a, c, g, or u
nccaguggggguugcguca

SEQ ID NO: 101679 - RNA, 20 nt, Artificial Sequence
  Synthetic
  misc_feature (2)..(2): n is a, c, g, or u
anccaguggggguugcguca

SEQ ID NO: 101680 - RNA, 21 nt, Artificial Sequence
  Synthetic
  misc_feature (3)..(3): n is a, c, g, or u
canccaguggggguugcguca

SEQ ID NO: 101681 - RNA, 22 nt, Artificial Sequence
  Synthetic
  misc_feature (4)..(4): n is a, c, g, or u
ccanccaguggggguugcguca

SEQ ID NO: 101682 - RNA, 23 nt, Artificial Sequence
  Synthetic
  misc_feature (5)..(5): n is a, c, g, or u
cccanccaguggggguugcguca

SEQ ID NO: 101683 - RNA, 24 nt, Artificial Sequence
  Synthetic
  misc_feature (6)..(6): n is a, c, g, or u
ccccanccaguggggguugcguca

SEQ ID NO: 101684 - RNA, 18 nt, Artificial Sequence
  Synthetic
uugugaggauucuuguca

SEQ ID NO: 101685 - RNA, 19 nt, Artificial Sequence
  Synthetic
auugugaggauucuuguca

SEQ ID NO: 101686 - RNA, 20 nt, Artificial Sequence
  Synthetic
uauugugaggauucuuguca

SEQ ID NO: 101687 - RNA, 21 nt, Artificial Sequence
  Synthetic
guauugugaggauucuuguca

SEQ ID NO: 101688 - RNA, 22 nt, Artificial Sequence
  Synthetic
gguauugugaggauucuuguca

SEQ ID NO: 101689 - RNA, 23 nt, Artificial Sequence
  Synthetic
ugguauugugaggauucuuguca

SEQ ID NO: 101690 - RNA, 24 nt, Artificial Sequence
  Synthetic
gugguauugugaggauucuuguca

SEQ ID NO: 101691 - RNA, 18 nt, Artificial Sequence
  Synthetic
  misc_feature (1)..(1): n is a, c, g, or u
naaauguauacccaaaga

SEQ ID NO: 101692 - RNA, 19 nt, Artificial Sequence
  Synthetic
  misc_feature (2)..(2): n is a, c, g, or u
unaaauguauacccaaaga

SEQ ID NO: 101693 - RNA, 20 nt, Artificial Sequence
  Synthetic
  misc_feature (3)..(3): n is a, c, g, or u
uunaaauguauacccaaaga

SEQ ID NO: 101694 - RNA, 21 nt, Artificial Sequence
  Synthetic
  misc_feature (4)..(4): n is a, c, g, or u
guunaaauguauacccaaaga

SEQ ID NO: 101695 - RNA, 22 nt, Artificial Sequence
  Synthetic
  misc_feature (5)..(5): n is a, c, g, or u
gguunaaauguauacccaaaga

SEQ ID NO: 101696 - RNA, 23 nt, Artificial Sequence
  Synthetic
  misc_feature (6)..(6): n is a, c, g, or u
ggguunaaauguauacccaaaga

SEQ ID NO: 101697 - RNA, 24 nt, Artificial Sequence
  Synthetic
  misc_feature (7)..(7): n is a, c, g, or u
aggguunaaauguauacccaaaga

SEQ ID NO: 101698 - RNA, 18 nt, Artificial Sequence
  Synthetic
uuuuguacagcaacaaga

SEQ ID NO: 101699 - RNA, 19 nt, Artificial Sequence
  Synthetic
guuuuguacagcaacaaga

SEQ ID NO: 101700 - RNA, 20 nt, Artificial Sequence
  Synthetic
gguuuuguacagcaacaaga

SEQ ID NO: 101701 - RNA, 21 nt, Artificial Sequence
  Synthetic
agguuuuguacagcaacaaga

SEQ ID NO: 101702 - RNA, 22 nt, Artificial Sequence
  Synthetic
aagguuuuguacagcaacaaga

SEQ ID NO: 101703 - RNA, 23 nt, Artificial Sequence
  Synthetic
gaagguuuuguacagcaacaaga

SEQ ID NO: 101704 - RNA, 24 nt, Artificial Sequence
  Synthetic
cgaagguuuuguacagcaacaaga

SEQ ID NO: 101705 - RNA, 18 nt, Artificial Sequence
  Synthetic
  misc_feature (1)..(1): n is a, c, g, or u
nuaagaccuugggcaaga

SEQ ID NO: 101706 - RNA, 19 nt, Artificial Sequence
  Synthetic
  misc_feature (2)..(2): n is a, c, g, or u
unuaagaccuugggcaaga

SEQ ID NO: 101707 - RNA, 20 nt, Artificial Sequence
  Synthetic
  misc_feature (3)..(3): n is a, c, g, or u
aunuaagaccuugggcaaga

SEQ ID NO: 101708 - RNA, 21 nt, Artificial Sequence
  Synthetic
  misc_feature (4)..(4): n is a, c, g, or u
uaunuaagaccuugggcaaga

SEQ ID NO: 101709 - RNA, 22 nt, Artificial Sequence
  Synthetic
  misc_feature (5)..(5): n is a, c, g, or u
uuaunuaagaccuugggcaaga

SEQ ID NO: 101710 - RNA, 23 nt, Artificial Sequence
  Synthetic
  misc_feature (6)..(6): n is a, c, g, or u
cuuaunuaagaccuugggcaaga

SEQ ID NO: 101711 - RNA, 24 nt, Artificial Sequence
  Synthetic
  misc_feature (7)..(7): n is a, c, g, or u
ucuuaunuaagaccuugggcaaga

SEQ ID NO: 101712 - RNA, 18 nt, Artificial Sequence
  Synthetic
gaagaaccaacaagaaga

SEQ ID NO: 101713 - RNA, 19 nt, Artificial Sequence
  Synthetic
agaagaaccaacaagaaga

SEQ ID NO: 101714 - RNA, 20 nt, Artificial Sequence
  Synthetic
cagaagaaccaacaagaaga

SEQ ID NO: 101715 - RNA, 21 nt, Artificial Sequence
  Synthetic
ccagaagaaccaacaagaaga

SEQ ID NO: 101716 - RNA, 22 nt, Artificial Sequence
  Synthetic
uccagaagaaccaacaagaaga

SEQ ID NO: 101717 - RNA, 23 nt, Artificial Sequence
  Synthetic
guccagaagaaccaacaagaaga

SEQ ID NO: 101718 - RNA, 24 nt, Artificial Sequence
  Synthetic
aguccagaagaaccaacaagaaga

SEQ ID NO: 101719 - RNA, 18 nt, Artificial Sequence
  Synthetic
ccuugguaguccagaaga

SEQ ID NO: 101720 - RNA, 19 nt, Artificial Sequence
  Synthetic
accuugguaguccagaaga

SEQ ID NO: 101721 - RNA, 20 nt, Artificial Sequence
  Synthetic
uaccuugguaguccagaaga

SEQ ID NO: 101722 - RNA, 21 nt, Artificial Sequence
  Synthetic
auaccuugguaguccagaaga

SEQ ID NO: 101723 - RNA, 22 nt, Artificial Sequence
  Synthetic
cauaccuugguaguccagaaga

SEQ ID NO: 101724 - RNA, 23 nt, Artificial Sequence
  Synthetic
acauaccuugguaguccagaaga

SEQ ID NO: 101725 - RNA, 24 nt, Artificial Sequence
  Synthetic
aacauaccuugguaguccagaaga

SEQ ID NO: 101726 - RNA, 18 nt, Artificial Sequence
  Synthetic
gacagguacaguagaaga

SEQ ID NO: 101727 - RNA, 19 nt, Artificial Sequence
  Synthetic
agacagguacaguagaaga

SEQ ID NO: 101728 - RNA, 20 nt, Artificial Sequence
  Synthetic
aagacagguacaguagaaga

SEQ ID NO: 101729 - RNA, 21 nt, Artificial Sequence
  Synthetic
aaagacagguacaguagaaga

SEQ ID NO: 101730 - RNA, 22 nt, Artificial Sequence
  Synthetic
uaaagacagguacaguagaaga

SEQ ID NO: 101731 - RNA, 23 nt, Artificial Sequence
  Synthetic
uuaaagacagguacaguagaaga

SEQ ID NO: 101732 - RNA, 24 nt, Artificial Sequence
  Synthetic
auuaaagacagguacaguagaaga

SEQ ID NO: 101733 - RNA, 18 nt, Artificial Sequence
  Synthetic
ccggaaguguugauaaga

SEQ ID NO: 101734 - RNA, 19 nt, Artificial Sequence
  Synthetic
uccggaaguguugauaaga

SEQ ID NO: 101735 - RNA, 20 nt, Artificial Sequence
  Synthetic
uuccggaaguguugauaaga

SEQ ID NO: 101736 - RNA, 21 nt, Artificial Sequence
  Synthetic
uuuccggaaguguugauaaga

SEQ ID NO: 101737 - RNA, 22 nt, Artificial Sequence
  Synthetic
guuuccggaaguguugauaaga

SEQ ID NO: 101738 - RNA, 23 nt, Artificial Sequence
  Synthetic
aguuuccggaaguguugauaaga

SEQ ID NO: 101739 - RNA, 24 nt, Artificial Sequence
  Synthetic
uaguuuccggaaguguugauaaga

SEQ ID NO: 101740 - RNA, 18 nt, Artificial Sequence
  Synthetic
ucucuuccaaaaguaaga

SEQ ID NO: 101741 - RNA, 19 nt, Artificial Sequence
  Synthetic
uucucuuccaaaaguaaga

SEQ ID NO: 101742 - RNA, 20 nt, Artificial Sequence
  Synthetic
uuucucuuccaaaaguaaga

SEQ ID NO: 101743 - RNA, 21 nt, Artificial Sequence
  Synthetic
guuucucuuccaaaaguaaga

SEQ ID NO: 101744 - RNA, 22 nt, Artificial Sequence
  Synthetic
aguuucucuuccaaaaguaaga

SEQ ID NO: 101745 - RNA, 23 nt, Artificial Sequence
  Synthetic
caguuucucuuccaaaaguaaga

SEQ ID NO: 101746 - RNA, 24 nt, Artificial Sequence
  Synthetic
acaguuucucuuccaaaaguaaga

SEQ ID NO: 101747 - RNA, 18 nt, Artificial Sequence
  Synthetic
cagaugagaaggcacaga

SEQ ID NO: 101748 - RNA, 19 nt, Artificial Sequence
  Synthetic
gcagaugagaaggcacaga

SEQ ID NO: 101749 - RNA, 20 nt, Artificial Sequence
  Synthetic
ggcagaugagaaggcacaga

SEQ ID NO: 101750 - RNA, 21 nt, Artificial Sequence
  Synthetic
cggcagaugagaaggcacaga

SEQ ID NO: 101751 - RNA, 22 nt, Artificial Sequence
  Synthetic
ccggcagaugagaaggcacaga

SEQ ID NO: 101752 - RNA, 23 nt, Artificial Sequence
  Synthetic
  misc_feature (1)..(1): n is a, c, g, or u
nccggcagaugagaaggcacaga

SEQ ID NO: 101753 - RNA, 24 nt, Artificial Sequence
  Synthetic
  misc_feature (2)..(2): n is a, c, g, or u
gnccggcagaugagaaggcacaga

SEQ ID NO: 101754 - RNA, 18 nt, Artificial Sequence
  Synthetic
aaggccucccgauacaga

SEQ ID NO: 101755 - RNA, 19 nt, Artificial Sequence
  Synthetic
uaaggccucccgauacaga

SEQ ID NO: 101756 - RNA, 20 nt, Artificial Sequence
  Synthetic
cuaaggccucccgauacaga

SEQ ID NO: 101757 - RNA, 21 nt, Artificial Sequence
  Synthetic
ucuaaggccucccgauacaga

SEQ ID NO: 101758 - RNA, 22 nt, Artificial Sequence
  Synthetic
cucuaaggccucccgauacaga

SEQ ID NO: 101759 - RNA, 23 nt, Artificial Sequence
  Synthetic
acucuaaggccucccgauacaga

SEQ ID NO: 101760 - RNA, 24 nt, Artificial Sequence
  Synthetic
gacucuaaggccucccgauacaga

SEQ ID NO: 101761 - RNA, 18 nt, Artificial Sequence
  Synthetic
  misc_feature (1)..(1): n is a, c, g, or u
nucaagauguuguacaga

SEQ ID NO: 101762 - RNA, 19 nt, Artificial Sequence
  Synthetic
  misc_feature (2)..(2): n is a, c, g, or u
anucaagauguuguacaga

SEQ ID NO: 101763 - RNA, 20 nt, Artificial Sequence
  Synthetic
  misc_feature (3)..(3): n is a, c, g, or u
ganucaagauguuguacaga

SEQ ID NO: 101764 - RNA, 21 nt, Artificial Sequence
  Synthetic
  misc_feature (4)..(4): n is a, c, g, or u
gganucaagauguuguacaga

SEQ ID NO: 101765 - RNA, 22 nt, Artificial Sequence
  Synthetic
  misc_feature (5)..(5): n is a, c, g, or u
ggganucaagauguuguacaga

SEQ ID NO: 101766 - RNA, 23 nt, Artificial Sequence
  Synthetic
  misc_feature (6)..(6): n is a, c, g, or u
aggganucaagauguuguacaga

SEQ ID NO: 101767 - RNA, 24 nt, Artificial Sequence
  Synthetic
  misc_feature (7)..(7): n is a, c, g, or u
aaggganucaagauguuguacaga

SEQ ID NO: 101768 - RNA, 18 nt, Artificial Sequence
  Synthetic
augagaugauuaggcaga

SEQ ID NO: 101769 - RNA, 19 nt, Artificial Sequence
  Synthetic
caugagaugauuaggcaga

SEQ ID NO: 101770 - RNA, 20 nt, Artificial Sequence
  Synthetic
acaugagaugauuaggcaga

SEQ ID NO: 101771 - RNA, 21 nt, Artificial Sequence
  Synthetic
aacaugagaugauuaggcaga

SEQ ID NO: 101772 - RNA, 22 nt, Artificial Sequence
  Synthetic
gaacaugagaugauuaggcaga

SEQ ID NO: 101773 - RNA, 23 nt, Artificial Sequence
  Synthetic
ugaacaugagaugauuaggcaga

SEQ ID NO: 101774 - RNA, 24 nt, Artificial Sequence
  Synthetic
augaacaugagaugauuaggcaga

SEQ ID NO: 101775 - RNA, 18 nt, Artificial Sequence
  Synthetic
gucggccggaacggcaga

SEQ ID NO: 101776 - RNA, 19 nt, Artificial Sequence
  Synthetic
ggucggccggaacggcaga

SEQ ID NO: 101777 - RNA, 20 nt, Artificial Sequence
  Synthetic
uggucggccggaacggcaga

SEQ ID NO: 101778 - RNA, 21 nt, Artificial Sequence
  Synthetic
guggucggccggaacggcaga

SEQ ID NO: 101779 - RNA, 22 nt, Artificial Sequence
  Synthetic
cguggucggccggaacggcaga

SEQ ID NO: 101780 - RNA, 23 nt, Artificial Sequence
  Synthetic
ccguggucggccggaacggcaga

SEQ ID NO: 101781 - RNA, 24 nt, Artificial Sequence
  Synthetic
cccguggucggccggaacggcaga

SEQ ID NO: 101782 - RNA, 18 nt, Artificial Sequence
  Synthetic
  misc_feature (10)..(10): n is a, c, g, or u
ugcacacggnccggcaga

SEQ ID NO: 101783 - RNA, 19 nt, Artificial Sequence
  Synthetic
  misc_feature (11)..(11): n is a, c, g, or u
gugcacacggnccggcaga

SEQ ID NO: 101784 - RNA, 20 nt, Artificial Sequence
  Synthetic
  misc_feature (12)..(12): n is a, c, g, or u
agugcacacggnccggcaga

SEQ ID NO: 101785 - RNA, 21 nt, Artificial Sequence
  Synthetic
  misc_feature (13)..(13): n is a, c, g, or u
aagugcacacggnccggcaga

SEQ ID NO: 101786 - RNA, 22 nt, Artificial Sequence
  Synthetic
  misc_feature (14)..(14): n is a, c, g, or u
gaagugcacacggnccggcaga

SEQ ID NO: 101787 - RNA, 23 nt, Artificial Sequence
  Synthetic
  misc_feature (15)..(15): n is a, c, g, or u
cgaagugcacacggnccggcaga

SEQ ID NO: 101788 - RNA, 24 nt, Artificial Sequence
  Synthetic
  misc_feature (16)..(16): n is a, c, g, or u
gcgaagugcacacggnccggcaga

SEQ ID NO: 101789 - RNA, 18 nt, Artificial Sequence
  Synthetic
  misc_feature (1)..(1): n is a, c, g, or u
nuccaugcgacgugcaga

SEQ ID NO: 101790 - RNA, 19 nt, Artificial Sequence
  Synthetic
  misc_feature (2)..(2): n is a, c, g, or u
unuccaugcgacgugcaga

SEQ ID NO: 101791 - RNA, 20 nt, Artificial Sequence
  Synthetic
  misc_feature (3)..(3): n is a, c, g, or u
gunuccaugcgacgugcaga

SEQ ID NO: 101792 - RNA, 21 nt, Artificial Sequence
  Synthetic
  misc_feature (4)..(4): n is a, c, g, or u
ggunuccaugcgacgugcaga

SEQ ID NO: 101793 - RNA, 22 nt, Artificial Sequence
  Synthetic
  misc_feature (5)..(5): n is a, c, g, or u
uggunuccaugcgacgugcaga

SEQ ID NO: 101794 - RNA, 23 nt, Artificial Sequence
  Synthetic
  misc_feature (6)..(6): n is a, c, g, or u
guggunuccaugcgacgugcaga

SEQ ID NO: 101795 - RNA, 24 nt, Artificial Sequence
  Synthetic
  misc_feature (7)..(7): n is a, c, g, or u
gguggunuccaugcgacgugcaga

SEQ ID NO: 101796 - RNA, 18 nt, Artificial Sequence
  Synthetic
cucuuagagguggagaga

SEQ ID NO: 101797 - RNA, 19 nt, Artificial Sequence
  Synthetic
ucucuuagagguggagaga

SEQ ID NO: 101798 - RNA, 20 nt, Artificial Sequence
  Synthetic
gucucuuagagguggagaga

SEQ ID NO: 101799 - RNA, 21 nt, Artificial Sequence
  Synthetic
ugucucuuagagguggagaga

SEQ ID NO: 101800 - RNA, 22 nt, Artificial Sequence
  Synthetic
cugucucuuagagguggagaga

SEQ ID NO: 101801 - RNA, 23 nt, Artificial Sequence
  Synthetic
acugucucuuagagguggagaga

SEQ ID NO: 101802 - RNA, 24 nt, Artificial Sequence
  Synthetic
gacugucucuuagagguggagaga

SEQ ID NO: 101803 - RNA, 18 nt, Artificial Sequence
  Synthetic
acauugagauucccgaga

SEQ ID NO: 101804 - RNA, 19 nt, Artificial Sequence
  Synthetic
aacauugagauucccgaga

SEQ ID NO: 101805 - RNA, 20 nt, Artificial Sequence
  Synthetic
uaacauugagauucccgaga

SEQ ID NO: 101806 - RNA, 21 nt, Artificial Sequence
  Synthetic
cuaacauugagauucccgaga

SEQ ID NO: 101807 - RNA, 22 nt, Artificial Sequence
  Synthetic
acuaacauugagauucccgaga

SEQ ID NO: 101808 - RNA, 23 nt, Artificial Sequence
  Synthetic
uacuaacauugagauucccgaga

SEQ ID NO: 101809 - RNA, 24 nt, Artificial Sequence
  Synthetic
auacuaacauugagauucccgaga

SEQ ID NO: 101810 - RNA, 18 nt, Artificial Sequence
  Synthetic
ggagguguauuuccgaga

SEQ ID NO: 101811 - RNA, 19 nt, Artificial Sequence
  Synthetic
aggagguguauuuccgaga

SEQ ID NO: 101812 - RNA, 20 nt, Artificial Sequence
  Synthetic
aaggagguguauuuccgaga

SEQ ID NO: 101813 - RNA, 21 nt, Artificial Sequence
  Synthetic
aaaggagguguauuuccgaga

SEQ ID NO: 101814 - RNA, 22 nt, Artificial Sequence
  Synthetic
gaaaggagguguauuuccgaga

SEQ ID NO: 101815 - RNA, 23 nt, Artificial Sequence
  Synthetic
ggaaaggagguguauuuccgaga

SEQ ID NO: 101816 - RNA, 24 nt, Artificial Sequence
  Synthetic
uggaaaggagguguauuuccgaga

SEQ ID NO: 101817 - RNA, 18 nt, Artificial Sequence
  Synthetic
guaaacugagccaggaga

SEQ ID NO: 101818 - RNA, 19 nt, Artificial Sequence
  Synthetic
aguaaacugagccaggaga

SEQ ID NO: 101819 - RNA, 20 nt, Artificial Sequence
  Synthetic
uaguaaacugagccaggaga

SEQ ID NO: 101820 - RNA, 21 nt, Artificial Sequence
  Synthetic
cuaguaaacugagccaggaga

SEQ ID NO: 101821 - RNA, 22 nt, Artificial Sequence
  Synthetic
acuaguaaacugagccaggaga

SEQ ID NO: 101822 - RNA, 23 nt, Artificial Sequence
  Synthetic
cacuaguaaacugagccaggaga

SEQ ID NO: 101823 - RNA, 24 nt, Artificial Sequence
  Synthetic
gcacuaguaaacugagccaggaga

SEQ ID NO: 101824 - RNA, 18 nt, Artificial Sequence
  Synthetic
gucucuuagagguggaga

SEQ ID NO: 101825 - RNA, 19 nt, Artificial Sequence
  Synthetic
ugucucuuagagguggaga

SEQ ID NO: 101826 - RNA, 20 nt, Artificial Sequence
  Synthetic
cugucucuuagagguggaga

SEQ ID NO: 101827 - RNA, 21 nt, Artificial Sequence
  Synthetic
acugucucuuagagguggaga

SEQ ID NO: 101828 - RNA, 22 nt, Artificial Sequence
  Synthetic
gacugucucuuagagguggaga

SEQ ID NO: 101829 - RNA, 23 nt, Artificial Sequence
  Synthetic
ugacugucucuuagagguggaga

SEQ ID NO: 101830 - RNA, 24 nt, Artificial Sequence
  Synthetic
augacugucucuuagagguggaga

SEQ ID NO: 101831 - RNA, 18 nt, Artificial Sequence
  Synthetic
  misc_feature (15)..(15): n is a, c, g, or u
gcaaacacuuggcanaga

SEQ ID NO: 101832 - RNA, 19 nt, Artificial Sequence
  Synthetic
  misc_feature (16)..(16): n is a, c, g, or u
agcaaacacuuggcanaga

SEQ ID NO: 101833 - RNA, 20 nt, Artificial Sequence
  Synthetic
  misc_feature (17)..(17): n is a, c, g, or u
cagcaaacacuuggcanaga

SEQ ID NO: 101834 - RNA, 21 nt, Artificial Sequence
  Synthetic
  misc_feature (18)..(18): n is a, c, g, or u
ucagcaaacacuuggcanaga

SEQ ID NO: 101835 - RNA, 22 nt, Artificial Sequence
  Synthetic
  misc_feature (19)..(19): n is a, c, g, or u
gucagcaaacacuuggcanaga

SEQ ID NO: 101836 - RNA, 23 nt, Artificial Sequence
  Synthetic
  misc_feature (20)..(20): n is a, c, g, or u
cgucagcaaacacuuggcanaga

SEQ ID NO: 101837 - RNA, 24 nt, Artificial Sequence
  Synthetic
  misc_feature (21)..(21): n is a, c, g, or u
gcgucagcaaacacuuggcanaga

SEQ ID NO: 101838 - RNA, 18 nt, Artificial Sequence
  Synthetic
  misc_feature (13)..(13): n is a, c, g, or u
  misc_feature (15)..(15): n is a, c, g, or u
cggaacggcagangnaga

SEQ ID NO: 101839 - RNA, 19 nt, Artificial Sequence
  Synthetic
  misc_feature (14)..(14): n is a, c, g, or u
  misc_feature (16)..(16): n is a, c, g, or u
ccggaacggcagangnaga

SEQ ID NO: 101840 - RNA, 20 nt, Artificial Sequence
  Synthetic
  misc_feature (15)..(15): n is a, c, g, or u
  misc_feature (17)..(17): n is a, c, g, or u
gccggaacggcagangnaga

SEQ ID NO: 101841 - RNA, 21 nt, Artificial Sequence
  Synthetic
  misc_feature (16)..(16): n is a, c, g, or u
  misc_feature (18)..(18): n is a, c, g, or u
ggccggaacggcagangnaga

SEQ ID NO: 101842 - RNA, 22 nt, Artificial Sequence
  Synthetic
  misc_feature (17)..(17): n is a, c, g, or u
  misc_feature (19)..(19): n is a, c, g, or u
cggccggaacggcagangnaga

SEQ ID NO: 101843 - RNA, 23 nt, Artificial Sequence
  Synthetic
  misc_feature (18)..(18): n is a, c, g, or u
  misc_feature (20)..(20): n is a, c, g, or u
ucggccggaacggcagangnaga

SEQ ID NO: 101844 - RNA, 24 nt, Artificial Sequence
  Synthetic
  misc_feature (19)..(19): n is a, c, g, or u
  misc_feature (21)..(21): n is a, c, g, or u
gucggccggaacggcagangnaga

SEQ ID NO: 101845 - RNA, 18 nt, Artificial Sequence
  Synthetic
  misc_feature (10)..(10): n is a, c, g, or u
gaggagaucncgaauaga

SEQ ID NO: 101846 - RNA, 19 nt, Artificial Sequence
  Synthetic
  misc_feature (11)..(11): n is a, c, g, or u
cgaggagaucncgaauaga

SEQ ID NO: 101847 - RNA, 20 nt, Artificial Sequence
  Synthetic
  misc_feature (12)..(12): n is a, c, g, or u
ucgaggagaucncgaauaga

SEQ ID NO: 101848 - RNA, 21 nt, Artificial Sequence
  Synthetic
  misc_feature (13)..(13): n is a, c, g, or u
gucgaggagaucncgaauaga

SEQ ID NO: 101849 - RNA, 22 nt, Artificial Sequence
  Synthetic
  misc_feature (14)..(14): n is a, c, g, or u
ugucgaggagaucncgaauaga

SEQ ID NO: 101850 - RNA, 23 nt, Artificial Sequence
  Synthetic
  misc_feature (15)..(15): n is a, c, g, or u
gugucgaggagaucncgaauaga

SEQ ID NO: 101851 - RNA, 24 nt, Artificial Sequence
  Synthetic
  misc_feature (16)..(16): n is a, c, g, or u
ggugucgaggagaucncgaauaga

SEQ ID NO: 101852 - RNA, 18 nt, Artificial Sequence
  Synthetic
gcgccgacgggacguaga

SEQ ID NO: 101853 - RNA, 19 nt, Artificial Sequence
  Synthetic
agcgccgacgggacguaga

SEQ ID NO: 101854 - RNA, 20 nt, Artificial Sequence
  Synthetic
cagcgccgacgggacguaga

SEQ ID NO: 101855 - RNA, 18 nt, Artificial Sequence
  Synthetic
ggaugacugucucuuaga

SEQ ID NO: 101856 - RNA, 19 nt, Artificial Sequence
  Synthetic
aggaugacugucucuuaga

SEQ ID NO: 101857 - RNA, 20 nt, Artificial Sequence
  Synthetic
gaggaugacugucucuuaga

SEQ ID NO: 101858 - RNA, 21 nt, Artificial Sequence
  Synthetic
ugaggaugacugucucuuaga

SEQ ID NO: 101859 - RNA, 22 nt, Artificial Sequence
  Synthetic
cugaggaugacugucucuuaga

SEQ ID NO: 101860 - RNA, 23 nt, Artificial Sequence
  Synthetic
ccugaggaugacugucucuuaga

SEQ ID NO: 101861 - RNA, 24 nt, Artificial Sequence
  Synthetic
gccugaggaugacugucucuuaga

SEQ ID NO: 101862 - RNA, 18 nt, Artificial Sequence
  Synthetic
accccgccuguaacacga

SEQ ID NO: 101863 - RNA, 19 nt, Artificial Sequence
  Synthetic
aaccccgccuguaacacga

SEQ ID NO: 101864 - RNA, 20 nt, Artificial Sequence
  Synthetic
aaaccccgccuguaacacga

SEQ ID NO: 101865 - RNA, 21 nt, Artificial Sequence
  Synthetic
aaaaccccgccuguaacacga

SEQ ID NO: 101866 - RNA, 22 nt, Artificial Sequence
  Synthetic
aaaaaccccgccuguaacacga

SEQ ID NO: 101867 - RNA, 23 nt, Artificial Sequence
  Synthetic
gaaaaaccccgccuguaacacga

SEQ ID NO: 101868 - RNA, 24 nt, Artificial Sequence
  Synthetic
agaaaaaccccgccuguaacacga

SEQ ID NO: 101869 - RNA, 18 nt, Artificial Sequence
  Synthetic
ccucgagaagauugacga

SEQ ID NO: 101870 - RNA, 19 nt, Artificial Sequence
  Synthetic
uccucgagaagauugacga

SEQ ID NO: 101871 - RNA, 20 nt, Artificial Sequence
  Synthetic
guccucgagaagauugacga

SEQ ID NO: 101872 - RNA, 21 nt, Artificial Sequence
  Synthetic
aguccucgagaagauugacga

SEQ ID NO: 101873 - RNA, 22 nt, Artificial Sequence
  Synthetic
caguccucgagaagauugacga

SEQ ID NO: 101874 - RNA, 23 nt, Artificial Sequence
  Synthetic
ccaguccucgagaagauugacga

SEQ ID NO: 101875 - RNA, 24 nt, Artificial Sequence
  Synthetic
cccaguccucgagaagauugacga

SEQ ID NO: 101876 - RNA, 18 nt, Artificial Sequence
  Synthetic
  misc_feature (3)..(3): n is a, c, g, or u
agncccaaacggccccga

SEQ ID NO: 101877 - RNA, 19 nt, Artificial Sequence
  Synthetic
  misc_feature (4)..(4): n is a, c, g, or u
gagncccaaacggccccga

SEQ ID NO: 101878 - RNA, 20 nt, Artificial Sequence
  Synthetic
  misc_feature (5)..(5): n is a, c, g, or u
agagncccaaacggccccga

SEQ ID NO: 101879 - RNA, 21 nt, Artificial Sequence
  Synthetic
  misc_feature (6)..(6): n is a, c, g, or u
uagagncccaaacggccccga

SEQ ID NO: 101880 - RNA, 22 nt, Artificial Sequence
  Synthetic
  misc_feature (7)..(7): n is a, c, g, or u
guagagncccaaacggccccga

SEQ ID NO: 101881 - RNA, 23 nt, Artificial Sequence
  Synthetic
  misc_feature (8)..(8): n is a, c, g, or u
gguagagncccaaacggccccga

SEQ ID NO: 101882 - RNA, 24 nt, Artificial Sequence
  Synthetic
  misc_feature (9)..(9): n is a, c, g, or u
cgguagagncccaaacggccccga

SEQ ID NO: 101883 - RNA, 18 nt, Artificial Sequence
  Synthetic
gacucuaaggccucccga

SEQ ID NO: 101884 - RNA, 19 nt, Artificial Sequence
  Synthetic
agacucuaaggccucccga

SEQ ID NO: 101885 - RNA, 20 nt, Artificial Sequence
  Synthetic
gagacucuaaggccucccga

SEQ ID NO: 101886 - RNA, 18 nt, Artificial Sequence
  Synthetic
cgcgggauucagcgccga

SEQ ID NO: 101887 - RNA, 19 nt, Artificial Sequence
  Synthetic
ccgcgggauucagcgccga

SEQ ID NO: 101888 - RNA, 20 nt, Artificial Sequence
  Synthetic
uccgcgggauucagcgccga

SEQ ID NO: 101889 - RNA, 18 nt, Artificial Sequence
  Synthetic
aaggagguguauuuccga

SEQ ID NO: 101890 - RNA, 19 nt, Artificial Sequence
  Synthetic
aaaggagguguauuuccga

SEQ ID NO: 101891 - RNA, 20 nt, Artificial Sequence
  Synthetic
gaaaggagguguauuuccga

SEQ ID NO: 101892 - RNA, 21 nt, Artificial Sequence
  Synthetic
ggaaaggagguguauuuccga

SEQ ID NO: 101893 - RNA, 22 nt, Artificial Sequence
  Synthetic
uggaaaggagguguauuuccga

SEQ ID NO: 101894 - RNA, 23 nt, Artificial Sequence
  Synthetic
auggaaaggagguguauuuccga

SEQ ID NO: 101895 - RNA, 24 nt, Artificial Sequence
  Synthetic
cauggaaaggagguguauuuccga

SEQ ID NO: 101896 - RNA, 18 nt, Artificial Sequence
  Synthetic
ucuucugcgacgcggcga

SEQ ID NO: 101897 - RNA, 19 nt, Artificial Sequence
  Synthetic
aucuucugcgacgcggcga

SEQ ID NO: 101898 - RNA, 20 nt, Artificial Sequence
  Synthetic
gaucuucugcgacgcggcga

SEQ ID NO: 101899 - RNA, 18 nt, Artificial Sequence
  Synthetic
gcuccagaccggcugcga

SEQ ID NO: 101900 - RNA, 19 nt, Artificial Sequence
  Synthetic
  misc_feature (1)..(1): n is a, c, g, or u
ngcuccagaccggcugcga

SEQ ID NO: 101901 - RNA, 20 nt, Artificial Sequence
  Synthetic
  misc_feature (2)..(2): n is a, c, g, or u
ungcuccagaccggcugcga

SEQ ID NO: 101902 - RNA, 21 nt, Artificial Sequence
  Synthetic
  misc_feature (3)..(3): n is a, c, g, or u
uungcuccagaccggcugcga

SEQ ID NO: 101903 - RNA, 22 nt, Artificial Sequence
  Synthetic
  misc_feature (4)..(4): n is a, c, g, or u
uuungcuccagaccggcugcga

SEQ ID NO: 101904 - RNA, 23 nt, Artificial Sequence
  Synthetic
  misc_feature (5)..(5): n is a, c, g, or u
guuungcuccagaccggcugcga

SEQ ID NO: 101905 - RNA, 24 nt, Artificial Sequence
  Synthetic
  misc_feature (6)..(6): n is a, c, g, or u
aguuungcuccagaccggcugcga

SEQ ID NO: 101906 - RNA, 18 nt, Artificial Sequence
  Synthetic
ugagaccuucgucugcga

SEQ ID NO: 101907 - RNA, 19 nt, Artificial Sequence
  Synthetic
uugagaccuucgucugcga

SEQ ID NO: 101908 - RNA, 20 nt, Artificial Sequence
  Synthetic
auugagaccuucgucugcga

SEQ ID NO: 101909 - RNA, 18 nt, Artificial Sequence
  Synthetic
gauugagaucuucugcga

SEQ ID NO: 101910 - RNA, 19 nt, Artificial Sequence
  Synthetic
agauugagaucuucugcga

SEQ ID NO: 101911 - RNA, 20 nt, Artificial Sequence
  Synthetic
gagauugagaucuucugcga

SEQ ID NO: 101912 - RNA, 21 nt, Artificial Sequence
  Synthetic
cgagauugagaucuucugcga

SEQ ID NO: 101913 - RNA, 22 nt, Artificial Sequence
  Synthetic
ccgagauugagaucuucugcga

SEQ ID NO: 101914 - RNA, 23 nt, Artificial Sequence
  Synthetic
cccgagauugagaucuucugcga

SEQ ID NO: 101915 - RNA, 24 nt, Artificial Sequence
  Synthetic
ucccgagauugagaucuucugcga

SEQ ID NO: 101916 - RNA, 18 nt, Artificial Sequence
  Synthetic
  misc_feature (15)..(15): n is a, c, g, or u
gugucgaggagaucncga

SEQ ID NO: 101917 - RNA, 19 nt, Artificial Sequence
  Synthetic
  misc_feature (16)..(16): n is a, c, g, or u
ggugucgaggagaucncga

SEQ ID NO: 101918 - RNA, 20 nt, Artificial Sequence
  Synthetic
  misc_feature (17)..(17): n is a, c, g, or u
cggugucgaggagaucncga

SEQ ID NO: 101919 - RNA, 21 nt, Artificial Sequence
  Synthetic
  misc_feature (18)..(18): n is a, c, g, or u
gcggugucgaggagaucncga

SEQ ID NO: 101920 - RNA, 22 nt, Artificial Sequence
  Synthetic
  misc_feature (19)..(19): n is a, c, g, or u
ggcggugucgaggagaucncga

SEQ ID NO: 101921 - RNA, 23 nt, Artificial Sequence
  Synthetic
  misc_feature (20)..(20): n is a, c, g, or u
aggcggugucgaggagaucncga

SEQ ID NO: 101922 - RNA, 24 nt, Artificial Sequence
  Synthetic
  misc_feature (21)..(21): n is a, c, g, or u
gaggcggugucgaggagaucncga

SEQ ID NO: 101923 - RNA, 18 nt, Artificial Sequence
  Synthetic
  misc_feature (6)..(6): n is a, c, g, or u
agaucncgaauagaagga

SEQ ID NO: 101924 - RNA, 19 nt, Artificial Sequence
  Synthetic
  misc_feature (7)..(7): n is a, c, g, or u
gagaucncgaauagaagga

SEQ ID NO: 101925 - RNA, 20 nt, Artificial Sequence
  Synthetic
  misc_feature (8)..(8): n is a, c, g, or u
ggagaucncgaauagaagga

SEQ ID NO: 101926 - RNA, 21 nt, Artificial Sequence
  Synthetic
  misc_feature (9)..(9): n is a, c, g, or u
aggagaucncgaauagaagga

SEQ ID NO: 101927 - RNA, 22 nt, Artificial Sequence
  Synthetic
  misc_feature (10)..(10): n is a, c, g, or u
gaggagaucncgaauagaagga

SEQ ID NO: 101928 - RNA, 23 nt, Artificial Sequence
  Synthetic
  misc_feature (11)..(11): n is a, c, g, or u
cgaggagaucncgaauagaagga

SEQ ID NO: 101929 - RNA, 24 nt, Artificial Sequence
  Synthetic
  misc_feature (12)..(12): n is a, c, g, or u
ucgaggagaucncgaauagaagga

SEQ ID NO: 101930 - RNA, 18 nt, Artificial Sequence
  Synthetic
ugaggcauagcagcagga

SEQ ID NO: 101931 - RNA, 19 nt, Artificial Sequence
  Synthetic
augaggcauagcagcagga

SEQ ID NO: 101932 - RNA, 20 nt, Artificial Sequence
  Synthetic
gaugaggcauagcagcagga

SEQ ID NO: 101933 - RNA, 21 nt, Artificial Sequence
  Synthetic
agaugaggcauagcagcagga

SEQ ID NO: 101934 - RNA, 22 nt, Artificial Sequence
  Synthetic
aagaugaggcauagcagcagga

SEQ ID NO: 101935 - RNA, 23 nt, Artificial Sequence
  Synthetic
gaagaugaggcauagcagcagga

SEQ ID NO: 101936 - RNA, 24 nt, Artificial Sequence
  Synthetic
agaagaugaggcauagcagcagga

SEQ ID NO: 101937 - RNA, 18 nt, Artificial Sequence
  Synthetic
cgauugguggaggcagga

SEQ ID NO: 101938 - RNA, 19 nt, Artificial Sequence
  Synthetic
ccgauugguggaggcagga

SEQ ID NO: 101939 - RNA, 20 nt, Artificial Sequence
  Synthetic
gccgauugguggaggcagga

SEQ ID NO: 101940 - RNA, 21 nt, Artificial Sequence
  Synthetic
ugccgauugguggaggcagga

SEQ ID NO: 101941 - RNA, 22 nt, Artificial Sequence
  Synthetic
cugccgauugguggaggcagga

SEQ ID NO: 101942 - RNA, 23 nt, Artificial Sequence
  Synthetic
acugccgauugguggaggcagga

SEQ ID NO: 101943 - RNA, 24 nt, Artificial Sequence
  Synthetic
gacugccgauugguggaggcagga

SEQ ID NO: 101944 - RNA, 18 nt, Artificial Sequence
  Synthetic
  misc_feature (12)..(12): n is a, c, g, or u
ggaguuugccanucagga

SEQ ID NO: 101945 - RNA, 19 nt, Artificial Sequence
  Synthetic
  misc_feature (13)..(13): n is a, c, g, or u
gggaguuugccanucagga

SEQ ID NO: 101946 - RNA, 20 nt, Artificial Sequence
  Synthetic
  misc_feature (14)..(14): n is a, c, g, or u
agggaguuugccanucagga

SEQ ID NO: 101947 - RNA, 21 nt, Artificial Sequence
  Synthetic
  misc_feature (15)..(15): n is a, c, g, or u
gagggaguuugccanucagga

SEQ ID NO: 101948 - RNA, 22 nt, Artificial Sequence
  Synthetic
  misc_feature (1)..(1): n is a, c, g, or u
  misc_feature (16)..(16): n is a, c, g, or u
ngagggaguuugccanucagga

SEQ ID NO: 101949 - RNA, 23 nt, Artificial Sequence
  Synthetic
  misc_feature (2)..(2): n is a, c, g, or u
  misc_feature (17)..(17): n is a, c, g, or u
angagggaguuugccanucagga

SEQ ID NO: 101950 - RNA, 24 nt, Artificial Sequence
  Synthetic
  misc_feature (3)..(3): n is a, c, g, or u
  misc_feature (18)..(18): n is a, c, g, or u
aangagggaguuugccanucagga

SEQ ID NO: 101951 - RNA, 18 nt, Artificial Sequence
  Synthetic
ggaaagaaucccagagga

SEQ ID NO: 101952 - RNA, 19 nt, Artificial Sequence
  Synthetic
gggaaagaaucccagagga

SEQ ID NO: 101953 - RNA, 20 nt, Artificial Sequence
  Synthetic
cgggaaagaaucccagagga

SEQ ID NO: 101954 - RNA, 21 nt, Artificial Sequence
  Synthetic
ucgggaaagaaucccagagga

SEQ ID NO: 101955 - RNA, 22 nt, Artificial Sequence
  Synthetic
aucgggaaagaaucccagagga

SEQ ID NO: 101956 - RNA, 23 nt, Artificial Sequence
  Synthetic
gaucgggaaagaaucccagagga

SEQ ID NO: 101957 - RNA, 24 nt, Artificial Sequence
  Synthetic
ugaucgggaaagaaucccagagga

SEQ ID NO: 101958 - RNA, 18 nt, Artificial Sequence
  Synthetic
  misc_feature (10)..(10): n is a, c, g, or u
ccaggacaanuuggagga

SEQ ID NO: 101959 - RNA, 19 nt, Artificial Sequence
  Synthetic
  misc_feature (1)..(1): n is a, c, g, or u
  misc_feature (11)..(11): n is a, c, g, or u
nccaggacaanuuggagga

SEQ ID NO: 101960 - RNA, 20 nt, Artificial Sequence
  Synthetic
  misc_feature (2)..(2): n is a, c, g, or u
  misc_feature (12)..(12): n is a, c, g, or u
anccaggacaanuuggagga

SEQ ID NO: 101961 - RNA, 21 nt, Artificial Sequence
  Synthetic
  misc_feature (3)..(3): n is a, c, g, or u
  misc_feature (13)..(13): n is a, c, g, or u
uanccaggacaanuuggagga

SEQ ID NO: 101962 - RNA, 22 nt, Artificial Sequence
  Synthetic
  misc_feature (4)..(4): n is a, c, g, or u
  misc_feature (14)..(14): n is a, c, g, or u
auanccaggacaanuuggagga

SEQ ID NO: 101963 - RNA, 23 nt, Artificial Sequence
  Synthetic
  misc_feature (5)..(5): n is a, c, g, or u
  misc_feature (15)..(15): n is a, c, g, or u
gauanccaggacaanuuggagga

SEQ ID NO: 101964 - RNA, 24 nt, Artificial Sequence
  Synthetic
  misc_feature (6)..(6): n is a, c, g, or u
  misc_feature (16)..(16): n is a, c, g, or u
cgauanccaggacaanuuggagga

SEQ ID NO: 101965 - RNA, 18 nt, Artificial Sequence
  Synthetic
  misc_feature (2)..(3): n is a, c, g, or u
  misc_feature (14)..(14): n is a, c, g, or u
unnaaaugaaugunagga

SEQ ID NO: 101966 - RNA, 19 nt, Artificial Sequence
  Synthetic
  misc_feature (1)..(1): n is a, c, g, or u
  misc_feature (3)..(4): n is a, c, g, or u
  misc_feature (15)..(15): n is a, c, g, or u
nunnaaaugaaugunagga

SEQ ID NO: 101967 - RNA, 20 nt, Artificial Sequence
  Synthetic
  misc_feature (2)..(2): n is a, c, g, or u
  misc_feature (4)..(5): n is a, c, g, or u
  misc_feature (16)..(16): n is a, c, g, or u
cnunnaaaugaaugunagga

SEQ ID NO: 101968 - RNA, 21 nt, Artificial Sequence
  Synthetic
  misc_feature (3)..(3): n is a, c, g, or u
  misc_feature (5)..(6): n is a, c, g, or u
  misc_feature (17)..(17): n is a, c, g, or u
ucnunnaaaugaaugunagga

SEQ ID NO: 101969 - RNA, 22 nt, Artificial Sequence
  Synthetic
  misc_feature (4)..(4): n is a, c, g, or u
  misc_feature (6)..(7): n is a, c, g, or u
  misc_feature (18)..(18): n is a, c, g, or u
cucnunnaaaugaaugunagga

SEQ ID NO: 101970 - RNA, 23 nt, Artificial Sequence
  Synthetic
  misc_feature (5)..(5): n is a, c, g, or u
  misc_feature (7)..(8): n is a, c, g, or u
  misc_feature (19)..(19): n is a, c, g, or u
ccucnunnaaaugaaugunagga

SEQ ID NO: 101971 - RNA, 24 nt, Artificial Sequence
  Synthetic
  misc_feature (6)..(6): n is a, c, g, or u
  misc_feature (8)..(9): n is a, c, g, or u
  misc_feature (20)..(20): n is a, c, g, or u
uccucnunnaaaugaaugunagga

SEQ ID NO: 101972 - RNA, 18 nt, Artificial Sequence
  Synthetic
gaggcuugaacaguagga

SEQ ID NO: 101973 - RNA, 19 nt, Artificial Sequence
  Synthetic
ggaggcuugaacaguagga

SEQ ID NO: 101974 - RNA, 20 nt, Artificial Sequence
  Synthetic
uggaggcuugaacaguagga

SEQ ID NO: 101975 - RNA, 21 nt, Artificial Sequence
  Synthetic
uuggaggcuugaacaguagga

SEQ ID NO: 101976 - RNA, 22 nt, Artificial Sequence
  Synthetic
cuuggaggcuugaacaguagga

SEQ ID NO: 101977 - RNA, 23 nt, Artificial Sequence
  Synthetic
gcuuggaggcuugaacaguagga

SEQ ID NO: 101978 - RNA, 24 nt, Artificial Sequence
  Synthetic
agcuuggaggcuugaacaguagga

SEQ ID NO: 101979 - RNA, 18 nt, Artificial Sequence
  Synthetic
uauuugguaagguuagga

SEQ ID NO: 101980 - RNA, 19 nt, Artificial Sequence
  Synthetic
auauuugguaagguuagga

SEQ ID NO: 101981 - RNA, 20 nt, Artificial Sequence
  Synthetic
aauauuugguaagguuagga

SEQ ID NO: 101982 - RNA, 21 nt, Artificial Sequence
  Synthetic
aaauauuugguaagguuagga

SEQ ID NO: 101983 - RNA, 22 nt, Artificial Sequence
  Synthetic
caaauauuugguaagguuagga

SEQ ID NO: 101984 - RNA, 23 nt, Artificial Sequence
  Synthetic
gcaaauauuugguaagguuagga

SEQ ID NO: 101985 - RNA, 24 nt, Artificial Sequence
  Synthetic
ggcaaauauuugguaagguuagga

SEQ ID NO: 101986 - RNA, 18 nt, Artificial Sequence
  Synthetic
ugagccaggagaaacgga

SEQ ID NO: 101987 - RNA, 19 nt, Artificial Sequence
  Synthetic
cugagccaggagaaacgga

SEQ ID NO: 101988 - RNA, 20 nt, Artificial Sequence
  Synthetic
acugagccaggagaaacgga

SEQ ID NO: 101989 - RNA, 21 nt, Artificial Sequence
  Synthetic
aacugagccaggagaaacgga

SEQ ID NO: 101990 - RNA, 22 nt, Artificial Sequence
  Synthetic
aaacugagccaggagaaacgga

SEQ ID NO: 101991 - RNA, 23 nt, Artificial Sequence
  Synthetic
uaaacugagccaggagaaacgga

SEQ ID NO: 101992 - RNA, 24 nt, Artificial Sequence
  Synthetic
guaaacugagccaggagaaacgga

SEQ ID NO: 101993 - RNA, 18 nt, Artificial Sequence
  Synthetic
aggguuuacuguuccgga

SEQ ID NO: 101994 - RNA, 19 nt, Artificial Sequence
  Synthetic
caggguuuacuguuccgga

SEQ ID NO: 101995 - RNA, 20 nt, Artificial Sequence
  Synthetic
acaggguuuacuguuccgga

SEQ ID NO: 101996 - RNA, 21 nt, Artificial Sequence
  Synthetic
aacaggguuuacuguuccgga

SEQ ID NO: 101997 - RNA, 22 nt, Artificial Sequence
  Synthetic
gaacaggguuuacuguuccgga

SEQ ID NO: 101998 - RNA, 23 nt, Artificial Sequence
  Synthetic
ggaacaggguuuacuguuccgga

SEQ ID NO: 101999 - RNA, 24 nt, Artificial Sequence
  Synthetic
cggaacaggguuuacuguuccgga

SEQ ID NO: 102000 - RNA, 18 nt, Artificial Sequence
  Synthetic
  misc_feature (3)..(3): n is a, c, g, or u
ggngaggcaguagucgga

SEQ ID NO: 102001 - RNA, 19 nt, Artificial Sequence
  Synthetic
  misc_feature (4)..(4): n is a, c, g, or u
gggngaggcaguagucgga

SEQ ID NO: 102002 - RNA, 20 nt, Artificial Sequence
  Synthetic
  misc_feature (5)..(5): n is a, c, g, or u
ugggngaggcaguagucgga

SEQ ID NO: 102003 - RNA, 21 nt, Artificial Sequence
  Synthetic
  misc_feature (6)..(6): n is a, c, g, or u
augggngaggcaguagucgga

SEQ ID NO: 102004 - RNA, 22 nt, Artificial Sequence
  Synthetic
  misc_feature (7)..(7): n is a, c, g, or u
uaugggngaggcaguagucgga

SEQ ID NO: 102005 - RNA, 23 nt, Artificial Sequence
  Synthetic
  misc_feature (8)..(8): n is a, c, g, or u
auaugggngaggcaguagucgga

SEQ ID NO: 102006 - RNA, 24 nt, Artificial Sequence
  Synthetic
  misc_feature (9)..(9): n is a, c, g, or u
gauaugggngaggcaguagucgga

SEQ ID NO: 102007 - RNA, 18 nt, Artificial Sequence
  Synthetic
  misc_feature (6)..(6): n is a, c, g, or u
aauagngguaaaaaggga

SEQ ID NO: 102008 - RNA, 19 nt, Artificial Sequence
  Synthetic
  misc_feature (7)..(7): n is a, c, g, or u
uaauagngguaaaaaggga

SEQ ID NO: 102009 - RNA, 20 nt, Artificial Sequence
  Synthetic
  misc_feature (8)..(8): n is a, c, g, or u
guaauagngguaaaaaggga

SEQ ID NO: 102010 - RNA, 21 nt, Artificial Sequence
  Synthetic
  misc_feature (9)..(9): n is a, c, g, or u
gguaauagngguaaaaaggga

SEQ ID NO: 102011 - RNA, 22 nt, Artificial Sequence
  Synthetic
  misc_feature (10)..(10): n is a, c, g, or u
ugguaauagngguaaaaaggga

SEQ ID NO: 102012 - RNA, 23 nt, Artificial Sequence
  Synthetic
  misc_feature (11)..(11): n is a, c, g, or u
uugguaauagngguaaaaaggga

SEQ ID NO: 102013 - RNA, 24 nt, Artificial Sequence
  Synthetic
  misc_feature (12)..(12): n is a, c, g, or u
auugguaauagngguaaaaaggga

SEQ ID NO: 102014 - RNA, 18 nt, Artificial Sequence
  Synthetic
gauucagcgccgacggga

SEQ ID NO: 102015 - RNA, 19 nt, Artificial Sequence
  Synthetic
ggauucagcgccgacggga

SEQ ID NO: 102016 - RNA, 20 nt, Artificial Sequence
  Synthetic
gggauucagcgccgacggga

SEQ ID NO: 102017 - RNA, 18 nt, Artificial Sequence
  Synthetic
gacgggucguccgcggga

SEQ ID NO: 102018 - RNA, 19 nt, Artificial Sequence
  Synthetic
agacgggucguccgcggga

SEQ ID NO: 102019 - RNA, 20 nt, Artificial Sequence
  Synthetic
gagacgggucguccgcggga

SEQ ID NO: 102020 - RNA, 21 nt, Artificial Sequence
  Synthetic
cgagacgggucguccgcggga

SEQ ID NO: 102021 - RNA, 22 nt, Artificial Sequence
  Synthetic
ccgagacgggucguccgcggga

SEQ ID NO: 102022 - RNA, 23 nt, Artificial Sequence
  Synthetic
cccgagacgggucguccgcggga

SEQ ID NO: 102023 - RNA, 24 nt, Artificial Sequence
  Synthetic
ccccgagacgggucguccgcggga

SEQ ID NO: 102024 - RNA, 18 nt, Artificial Sequence
  Synthetic
agagguggagagauggga

SEQ ID NO: 102025 - RNA, 19 nt, Artificial Sequence
  Synthetic
uagagguggagagauggga

SEQ ID NO: 102026 - RNA, 20 nt, Artificial Sequence
  Synthetic
uuagagguggagagauggga

SEQ ID NO: 102027 - RNA, 21 nt, Artificial Sequence
  Synthetic
cuuagagguggagagauggga

SEQ ID NO: 102028 - RNA, 22 nt, Artificial Sequence
  Synthetic
ucuuagagguggagagauggga

SEQ ID NO: 102029 - RNA, 23 nt, Artificial Sequence
  Synthetic
cucuuagagguggagagauggga

SEQ ID NO: 102030 - RNA, 24 nt, Artificial Sequence
  Synthetic
ucucuuagagguggagagauggga

SEQ ID NO: 102031 - RNA, 18 nt, Artificial Sequence
  Synthetic
  misc_feature (8)..(8): n is a, c, g, or u
aagcccangaugauggga

SEQ ID NO: 102032 - RNA, 19 nt, Artificial Sequence
  Synthetic
  misc_feature (9)..(9): n is a, c, g, or u
aaagcccangaugauggga

SEQ ID NO: 102033 - RNA, 20 nt, Artificial Sequence
  Synthetic
  misc_feature (10)..(10): n is a, c, g, or u
gaaagcccangaugauggga

SEQ ID NO: 102034 - RNA, 21 nt, Artificial Sequence
  Synthetic
  misc_feature (11)..(11): n is a, c, g, or u
cgaaagcccangaugauggga

SEQ ID NO: 102035 - RNA, 22 nt, Artificial Sequence
  Synthetic
  misc_feature (12)..(12): n is a, c, g, or u
gcgaaagcccangaugauggga

SEQ ID NO: 102036 - RNA, 23 nt, Artificial Sequence
  Synthetic
  misc_feature (13)..(13): n is a, c, g, or u
ugcgaaagcccangaugauggga

SEQ ID NO: 102037 - RNA, 24 nt, Artificial Sequence
  Synthetic
  misc_feature (14)..(14): n is a, c, g, or u
uugcgaaagcccangaugauggga

SEQ ID NO: 102038 - RNA, 18 nt, Artificial Sequence
  Synthetic
aaucccagaggauuggga

SEQ ID NO: 102039 - RNA, 19 nt, Artificial Sequence
  Synthetic
gaaucccagaggauuggga

SEQ ID NO: 102040 - RNA, 20 nt, Artificial Sequence
  Synthetic
agaaucccagaggauuggga

SEQ ID NO: 102041 - RNA, 21 nt, Artificial Sequence
  Synthetic
aagaaucccagaggauuggga

SEQ ID NO: 102042 - RNA, 22 nt, Artificial Sequence
  Synthetic
aaagaaucccagaggauuggga

SEQ ID NO: 102043 - RNA, 23 nt, Artificial Sequence
  Synthetic
gaaagaaucccagaggauuggga

SEQ ID NO: 102044 - RNA, 24 nt, Artificial Sequence
  Synthetic
ggaaagaaucccagaggauuggga

SEQ ID NO: 102045 - RNA, 18 nt, Artificial Sequence
  Synthetic
  misc_feature (3)..(3): n is a, c, g, or u
  misc_feature (6)..(6): n is a, c, g, or u
canccnagcagccaugga

SEQ ID NO: 102046 - RNA, 19 nt, Artificial Sequence
  Synthetic
  misc_feature (4)..(4): n is a, c, g, or u
  misc_feature (7)..(7): n is a, c, g, or u
acanccnagcagccaugga

SEQ ID NO: 102047 - RNA, 20 nt, Artificial Sequence
  Synthetic
  misc_feature (5)..(5): n is a, c, g, or u
  misc_feature (8)..(8): n is a, c, g, or u
cacanccnagcagccaugga

SEQ ID NO: 102048 - RNA, 21 nt, Artificial Sequence
  Synthetic
  misc_feature (6)..(6): n is a, c, g, or u
  misc_feature (9)..(9): n is a, c, g, or u
gcacanccnagcagccaugga

SEQ ID NO: 102049 - RNA, 22 nt, Artificial Sequence
  Synthetic
  misc_feature (7)..(7): n is a, c, g, or u
  misc_feature (10)..(10): n is a, c, g, or u
agcacanccnagcagccaugga

SEQ ID NO: 102050 - RNA, 23 nt, Artificial Sequence
  Synthetic
  misc_feature (8)..(8): n is a, c, g, or u
  misc_feature (11)..(11): n is a, c, g, or u
cagcacanccnagcagccaugga

SEQ ID NO: 102051 - RNA, 24 nt, Artificial Sequence
  Synthetic
  misc_feature (9)..(9): n is a, c, g, or u
  misc_feature (12)..(12): n is a, c, g, or u
gcagcacanccnagcagccaugga

SEQ ID NO: 102052 - RNA, 18 nt, Artificial Sequence
  Synthetic
guaguugauguuccugga

SEQ ID NO: 102053 - RNA, 19 nt, Artificial Sequence
  Synthetic
gguaguugauguuccugga

SEQ ID NO: 102054 - RNA, 20 nt, Artificial Sequence
  Synthetic
ugguaguugauguuccugga

SEQ ID NO: 102055 - RNA, 21 nt, Artificial Sequence
  Synthetic
cugguaguugauguuccugga

SEQ ID NO: 102056 - RNA, 22 nt, Artificial Sequence
  Synthetic
gcugguaguugauguuccugga

SEQ ID NO: 102057 - RNA, 23 nt, Artificial Sequence
  Synthetic
ugcugguaguugauguuccugga

SEQ ID NO: 102058 - RNA, 24 nt, Artificial Sequence
  Synthetic
gugcugguaguugauguuccugga

SEQ ID NO: 102059 - RNA, 18 nt, Artificial Sequence
  Synthetic
ugacugccgauuggugga

SEQ ID NO: 102060 - RNA, 19 nt, Artificial Sequence
  Synthetic
cugacugccgauuggugga

SEQ ID NO: 102061 - RNA, 20 nt, Artificial Sequence
  Synthetic
ccugacugccgauuggugga

SEQ ID NO: 102062 - RNA, 21 nt, Artificial Sequence
  Synthetic
uccugacugccgauuggugga

SEQ ID NO: 102063 - RNA, 22 nt, Artificial Sequence
  Synthetic
uuccugacugccgauuggugga

SEQ ID NO: 102064 - RNA, 23 nt, Artificial Sequence
  Synthetic
cuuccugacugccgauuggugga

SEQ ID NO: 102065 - RNA, 24 nt, Artificial Sequence
  Synthetic
ucuuccugacugccgauuggugga

SEQ ID NO: 102066 - RNA, 18 nt, Artificial Sequence
  Synthetic
  misc_feature (7)..(7): n is a, c, g, or u
acacggnccggcagauga

SEQ ID NO: 102067 - RNA, 19 nt, Artificial Sequence
  Synthetic
  misc_feature (8)..(8): n is a, c, g, or u
cacacggnccggcagauga

SEQ ID NO: 102068 - RNA, 20 nt, Artificial Sequence
  Synthetic
  misc_feature (9)..(9): n is a, c, g, or u
gcacacggnccggcagauga

SEQ ID NO: 102069 - RNA, 21 nt, Artificial Sequence
  Synthetic
  misc_feature (10)..(10): n is a, c, g, or u
ugcacacggnccggcagauga

SEQ ID NO: 102070 - RNA, 22 nt, Artificial Sequence
  Synthetic
  misc_feature (11)..(11): n is a, c, g, or u
gugcacacggnccggcagauga

SEQ ID NO: 102071 - RNA, 23 nt, Artificial Sequence
  Synthetic
  misc_feature (12)..(12): n is a, c, g, or u
agugcacacggnccggcagauga

SEQ ID NO: 102072 - RNA, 24 nt, Artificial Sequence
  Synthetic
  misc_feature (13)..(13): n is a, c, g, or u
aagugcacacggnccggcagauga

SEQ ID NO: 102073 - RNA, 18 nt, Artificial Sequence
  Synthetic
gacaugaacaugagauga

SEQ ID NO: 102074 - RNA, 19 nt, Artificial Sequence
  Synthetic
ggacaugaacaugagauga

SEQ ID NO: 102075 - RNA, 20 nt, Artificial Sequence
  Synthetic
aggacaugaacaugagauga

SEQ ID NO: 102076 - RNA, 21 nt, Artificial Sequence
  Synthetic
uaggacaugaacaugagauga

SEQ ID NO: 102077 - RNA, 22 nt, Artificial Sequence
  Synthetic
guaggacaugaacaugagauga

SEQ ID NO: 102078 - RNA, 23 nt, Artificial Sequence
  Synthetic
aguaggacaugaacaugagauga

SEQ ID NO: 102079 - RNA, 24 nt, Artificial Sequence
  Synthetic
caguaggacaugaacaugagauga

SEQ ID NO: 102080 - RNA, 18 nt, Artificial Sequence
  Synthetic
ggcauagcagcaggauga

SEQ ID NO: 102081 - RNA, 19 nt, Artificial Sequence
  Synthetic
aggcauagcagcaggauga

SEQ ID NO: 102082 - RNA, 20 nt, Artificial Sequence
  Synthetic
gaggcauagcagcaggauga

SEQ ID NO: 102083 - RNA, 21 nt, Artificial Sequence
  Synthetic
ugaggcauagcagcaggauga

SEQ ID NO: 102084 - RNA, 22 nt, Artificial Sequence
  Synthetic
augaggcauagcagcaggauga

SEQ ID NO: 102085 - RNA, 23 nt, Artificial Sequence
  Synthetic
gaugaggcauagcagcaggauga

SEQ ID NO: 102086 - RNA, 24 nt, Artificial Sequence
  Synthetic
agaugaggcauagcagcaggauga

SEQ ID NO: 102087 - RNA, 18 nt, Artificial Sequence
  Synthetic
  misc_feature (14)..(14): n is a, c, g, or u
ggaugaagaggaanauga

SEQ ID NO: 102088 - RNA, 19 nt, Artificial Sequence
  Synthetic
  misc_feature (15)..(15): n is a, c, g, or u
aggaugaagaggaanauga

SEQ ID NO: 102089 - RNA, 20 nt, Artificial Sequence
  Synthetic
  misc_feature (16)..(16): n is a, c, g, or u
caggaugaagaggaanauga

SEQ ID NO: 102090 - RNA, 21 nt, Artificial Sequence
  Synthetic
  misc_feature (17)..(17): n is a, c, g, or u
gcaggaugaagaggaanauga

SEQ ID NO: 102091 - RNA, 22 nt, Artificial Sequence
  Synthetic
  misc_feature (18)..(18): n is a, c, g, or u
agcaggaugaagaggaanauga

SEQ ID NO: 102092 - RNA, 23 nt, Artificial Sequence
  Synthetic
  misc_feature (19)..(19): n is a, c, g, or u
cagcaggaugaagaggaanauga

SEQ ID NO: 102093 - RNA, 24 nt, Artificial Sequence
  Synthetic
  misc_feature (20)..(20): n is a, c, g, or u
gcagcaggaugaagaggaanauga

SEQ ID NO: 102094 - RNA, 18 nt, Artificial Sequence
  Synthetic
auggcacuaguaaacuga

SEQ ID NO: 102095 - RNA, 19 nt, Artificial Sequence
  Synthetic
aauggcacuaguaaacuga

SEQ ID NO: 102096 - RNA, 20 nt, Artificial Sequence
  Synthetic
aaauggcacuaguaaacuga

SEQ ID NO: 102097 - RNA, 21 nt, Artificial Sequence
  Synthetic
caaauggcacuaguaaacuga

SEQ ID NO: 102098 - RNA, 22 nt, Artificial Sequence
  Synthetic
acaaauggcacuaguaaacuga

SEQ ID NO: 102099 - RNA, 23 nt, Artificial Sequence
  Synthetic
aacaaauggcacuaguaaacuga

SEQ ID NO: 102100 - RNA, 24 nt, Artificial Sequence
  Synthetic
gaacaaauggcacuaguaaacuga

SEQ ID NO: 102101 - RNA, 18 nt, Artificial Sequence
  Synthetic
caagagguuggugaguga

SEQ ID NO: 102102 - RNA, 19 nt, Artificial Sequence
  Synthetic
acaagagguuggugaguga

SEQ ID NO: 102103 - RNA, 20 nt, Artificial Sequence
  Synthetic
gacaagagguuggugaguga

SEQ ID NO: 102104 - RNA, 21 nt, Artificial Sequence
  Synthetic
ggacaagagguuggugaguga

SEQ ID NO: 102105 - RNA, 22 nt, Artificial Sequence
  Synthetic
aggacaagagguuggugaguga

SEQ ID NO: 102106 - RNA, 23 nt, Artificial Sequence
  Synthetic
gaggacaagagguuggugaguga

SEQ ID NO: 102107 - RNA, 24 nt, Artificial Sequence
  Synthetic
ggaggacaagagguuggugaguga

SEQ ID NO: 102108 - RNA, 18 nt, Artificial Sequence
  Synthetic
ugcgacgugcagagguga

SEQ ID NO: 102109 - RNA, 19 nt, Artificial Sequence
  Synthetic
augcgacgugcagagguga

SEQ ID NO: 102110 - RNA, 20 nt, Artificial Sequence
  Synthetic
caugcgacgugcagagguga

SEQ ID NO: 102111 - RNA, 21 nt, Artificial Sequence
  Synthetic
ccaugcgacgugcagagguga

SEQ ID NO: 102112 - RNA, 22 nt, Artificial Sequence
  Synthetic
uccaugcgacgugcagagguga

SEQ ID NO: 102113 - RNA, 23 nt, Artificial Sequence
  Synthetic
  misc_feature (1)..(1): n is a, c, g, or u
nuccaugcgacgugcagagguga

SEQ ID NO: 102114 - RNA, 24 nt, Artificial Sequence
  Synthetic
  misc_feature (2)..(2): n is a, c, g, or u
unuccaugcgacgugcagagguga

SEQ ID NO: 102115 - RNA, 18 nt, Artificial Sequence
  Synthetic
  misc_feature (3)..(3): n is a, c, g, or u
cunagugcuguaugguga

SEQ ID NO: 102116 - RNA, 19 nt, Artificial Sequence
  Synthetic
  misc_feature (4)..(4): n is a, c, g, or u
ccunagugcuguaugguga

SEQ ID NO: 102117 - RNA, 20 nt, Artificial Sequence
  Synthetic
  misc_feature (5)..(5): n is a, c, g, or u
gccunagugcuguaugguga

SEQ ID NO: 102118 - RNA, 21 nt, Artificial Sequence
  Synthetic
  misc_feature (6)..(6): n is a, c, g, or u
ugccunagugcuguaugguga

SEQ ID NO: 102119 - RNA, 22 nt, Artificial Sequence
  Synthetic
  misc_feature (7)..(7): n is a, c, g, or u
uugccunagugcuguaugguga

SEQ ID NO: 102120 - RNA, 23 nt, Artificial Sequence
  Synthetic
  misc_feature (8)..(8): n is a, c, g, or u
cuugccunagugcuguaugguga

SEQ ID NO: 102121 - RNA, 24 nt, Artificial Sequence
  Synthetic
  misc_feature (9)..(9): n is a, c, g, or u
gcuugccunagugcuguaugguga

SEQ ID NO: 102122 - RNA, 18 nt, Artificial Sequence
  Synthetic
  misc_feature (3)..(3): n is a, c, g, or u
gcnggguccaacugguga

SEQ ID NO: 102123 - RNA, 19 nt, Artificial Sequence
  Synthetic
  misc_feature (1)..(1): n is a, c, g, or u
  misc_feature (4)..(4): n is a, c, g, or u
ngcnggguccaacugguga

SEQ ID NO: 102124 - RNA, 20 nt, Artificial Sequence
  Synthetic
  misc_feature (2)..(2): n is a, c, g, or u
  misc_feature (5)..(5): n is a, c, g, or u
angcnggguccaacugguga

SEQ ID NO: 102125 - RNA, 21 nt, Artificial Sequence
  Synthetic
  misc_feature (3)..(3): n is a, c, g, or u
  misc_feature (6)..(6): n is a, c, g, or u
aangcnggguccaacugguga

SEQ ID NO: 102126 - RNA, 22 nt, Artificial Sequence
  Synthetic
  misc_feature (4)..(4): n is a, c, g, or u
  misc_feature (7)..(7): n is a, c, g, or u
gaangcnggguccaacugguga

SEQ ID NO: 102127 - RNA, 23 nt, Artificial Sequence
  Synthetic
  misc_feature (5)..(5): n is a, c, g, or u
  misc_feature (8)..(8): n is a, c, g, or u
cgaangcnggguccaacugguga

SEQ ID NO: 102128 - RNA, 24 nt, Artificial Sequence
  Synthetic
  misc_feature (6)..(6): n is a, c, g, or u
  misc_feature (9)..(9): n is a, c, g, or u
ccgaangcnggguccaacugguga

SEQ ID NO: 102129 - RNA, 18 nt, Artificial Sequence
  Synthetic
guugcauggugcugguga

SEQ ID NO: 102130 - RNA, 19 nt, Artificial Sequence
  Synthetic
aguugcauggugcugguga

SEQ ID NO: 102131 - RNA, 20 nt, Artificial Sequence
  Synthetic
aaguugcauggugcugguga

SEQ ID NO: 102132 - RNA, 21 nt, Artificial Sequence
  Synthetic
aaaguugcauggugcugguga

SEQ ID NO: 102133 - RNA, 22 nt, Artificial Sequence
  Synthetic
aaaaguugcauggugcugguga

SEQ ID NO: 102134 - RNA, 23 nt, Artificial Sequence
  Synthetic
aaaaaguugcauggugcugguga

SEQ ID NO: 102135 - RNA, 24 nt, Artificial Sequence
  Synthetic
gaaaaaguugcauggugcugguga

SEQ ID NO: 102136 - RNA, 18 nt, Artificial Sequence
  Synthetic
cucccccuagaaaauuga

SEQ ID NO: 102137 - RNA, 19 nt, Artificial Sequence
  Synthetic
gcucccccuagaaaauuga

SEQ ID NO: 102138 - RNA, 20 nt, Artificial Sequence
  Synthetic
ugcucccccuagaaaauuga

SEQ ID NO: 102139 - RNA, 21 nt, Artificial Sequence
  Synthetic
gugcucccccuagaaaauuga

SEQ ID NO: 102140 - RNA, 22 nt, Artificial Sequence
  Synthetic
ggugcucccccuagaaaauuga

SEQ ID NO: 102141 - RNA, 23 nt, Artificial Sequence
  Synthetic
gggugcucccccuagaaaauuga

SEQ ID NO: 102142 - RNA, 24 nt, Artificial Sequence
  Synthetic
ugggugcucccccuagaaaauuga

SEQ ID NO: 102143 - RNA, 18 nt, Artificial Sequence
  Synthetic
ggcccauauuaacauuga

SEQ ID NO: 102144 - RNA, 19 nt, Artificial Sequence
  Synthetic
aggcccauauuaacauuga

SEQ ID NO: 102145 - RNA, 20 nt, Artificial Sequence
  Synthetic
uaggcccauauuaacauuga

SEQ ID NO: 102146 - RNA, 21 nt, Artificial Sequence
  Synthetic
uuaggcccauauuaacauuga

SEQ ID NO: 102147 - RNA, 22 nt, Artificial Sequence
  Synthetic
uuuaggcccauauuaacauuga

SEQ ID NO: 102148 - RNA, 23 nt, Artificial Sequence
  Synthetic
uuuuaggcccauauuaacauuga

SEQ ID NO: 102149 - RNA, 24 nt, Artificial Sequence
  Synthetic
  misc_feature (1)..(1): n is a, c, g, or u
nuuuuaggcccauauuaacauuga

SEQ ID NO: 102150 - RNA, 18 nt, Artificial Sequence
  Synthetic
aacauagagguuccuuga

SEQ ID NO: 102151 - RNA, 19 nt, Artificial Sequence
  Synthetic
aaacauagagguuccuuga

SEQ ID NO: 102152 - RNA, 20 nt, Artificial Sequence
  Synthetic
gaaacauagagguuccuuga

SEQ ID NO: 102153 - RNA, 21 nt, Artificial Sequence
  Synthetic
ggaaacauagagguuccuuga

SEQ ID NO: 102154 - RNA, 22 nt, Artificial Sequence
  Synthetic
gggaaacauagagguuccuuga

SEQ ID NO: 102155 - RNA, 23 nt, Artificial Sequence
  Synthetic
agggaaacauagagguuccuuga

SEQ ID NO: 102156 - RNA, 24 nt, Artificial Sequence
  Synthetic
gagggaaacauagagguuccuuga

SEQ ID NO: 102157 - RNA, 18 nt, Artificial Sequence
  Synthetic
ccaaucuggauuguuuga

SEQ ID NO: 102158 - RNA, 19 nt, Artificial Sequence
  Synthetic
cccaaucuggauuguuuga

SEQ ID NO: 102159 - RNA, 20 nt, Artificial Sequence
  Synthetic
ucccaaucuggauuguuuga

SEQ ID NO: 102160 - RNA, 21 nt, Artificial Sequence
  Synthetic
gucccaaucuggauuguuuga

SEQ ID NO: 102161 - RNA, 22 nt, Artificial Sequence
  Synthetic
agucccaaucuggauuguuuga

SEQ ID NO: 102162 - RNA, 23 nt, Artificial Sequence
  Synthetic
aagucccaaucuggauuguuuga

SEQ ID NO: 102163 - RNA, 24 nt, Artificial Sequence
  Synthetic
gaagucccaaucuggauuguuuga

SEQ ID NO: 102164 - RNA, 18 nt, Artificial Sequence
  Synthetic
  misc_feature (15)..(15): n is a, c, g, or u
  misc_feature (17)..(17): n is a, c, g, or u
gccggaacggcagangna

SEQ ID NO: 102165 - RNA, 19 nt, Artificial Sequence
  Synthetic
  misc_feature (16)..(16): n is a, c, g, or u
  misc_feature (18)..(18): n is a, c, g, or u
ggccggaacggcagangna

SEQ ID NO: 102166 - RNA, 20 nt, Artificial Sequence
  Synthetic
  misc_feature (17)..(17): n is a, c, g, or u
  misc_feature (19)..(19): n is a, c, g, or u
cggccggaacggcagangna

SEQ ID NO: 102167 - RNA, 21 nt, Artificial Sequence
  Synthetic
  misc_feature (18)..(18): n is a, c, g, or u
  misc_feature (20)..(20): n is a, c, g, or u
ucggccggaacggcagangna

SEQ ID NO: 102168 - RNA, 22 nt, Artificial Sequence
  Synthetic
  misc_feature (19)..(19): n is a, c, g, or u
  misc_feature (21)..(21): n is a, c, g, or u
gucggccggaacggcagangna

SEQ ID NO: 102169 - RNA, 23 nt, Artificial Sequence
  Synthetic
  misc_feature (20)..(20): n is a, c, g, or u
  misc_feature (22)..(22): n is a, c, g, or u
ggucggccggaacggcagangna

SEQ ID NO: 102170 - RNA, 24 nt, Artificial Sequence
  Synthetic
  misc_feature (21)..(21): n is a, c, g, or u
  misc_feature (23)..(23): n is a, c, g, or u
uggucggccggaacggcagangna

SEQ ID NO: 102171 - RNA, 18 nt, Artificial Sequence
  Synthetic
  misc_feature (2)..(2): n is a, c, g, or u
  misc_feature (8)..(8): n is a, c, g, or u
  misc_feature (14)..(14): n is a, c, g, or u
  misc_feature (16)..(17): n is a, c, g, or u
unauaaunuccucnunna

SEQ ID NO: 102172 - RNA, 19 nt, Artificial Sequence
  Synthetic
  misc_feature (3)..(3): n is a, c, g, or u
  misc_feature (9)..(9): n is a, c, g, or u
  misc_feature (15)..(15): n is a, c, g, or u
  misc_feature (17)..(18): n is a, c, g, or u
uunauaaunuccucnunna

SEQ ID NO: 102173 - RNA, 20 nt, Artificial Sequence
  Synthetic
  misc_feature (4)..(4): n is a, c, g, or u
  misc_feature (10)..(10): n is a, c, g, or u
  misc_feature (16)..(16): n is a, c, g, or u
  misc_feature (18)..(19): n is a, c, g, or u
auunauaaunuccucnunna

SEQ ID NO: 102174 - RNA, 21 nt, Artificial Sequence
  Synthetic
  misc_feature (5)..(5): n is a, c, g, or u
  misc_feature (11)..(11): n is a, c, g, or u
  misc_feature (17)..(17): n is a, c, g, or u
  misc_feature (19)..(20): n is a, c, g, or u
uauunauaaunuccucnunna

SEQ ID NO: 102175 - RNA, 22 nt, Artificial Sequence
  Synthetic
  misc_feature (6)..(6): n is a, c, g, or u
  misc_feature (12)..(12): n is a, c, g, or u
  misc_feature (18)..(18): n is a, c, g, or u
  misc_feature (20)..(21): n is a, c, g, or u
cuauunauaaunuccucnunna

SEQ ID NO: 102176 - RNA, 23 nt, Artificial Sequence
  Synthetic
  misc_feature (7)..(7): n is a, c, g, or u
  misc_feature (13)..(13): n is a, c, g, or u
  misc_feature (19)..(19): n is a, c, g, or u
  misc_feature (21)..(22): n is a, c, g, or u
ucuauunauaaunuccucnunna

SEQ ID NO: 102177 - RNA, 24 nt, Artificial Sequence
  Synthetic
  misc_feature (8)..(8): n is a, c, g, or u
  misc_feature (14)..(14): n is a, c, g, or u
  misc_feature (20)..(20): n is a, c, g, or u
  misc_feature (22)..(23): n is a, c, g, or u
aucuauunauaaunuccucnunna

SEQ ID NO: 102178 - RNA, 18 nt, Artificial Sequence
  Synthetic
  misc_feature (3)..(3): n is a, c, g, or u
  misc_feature (5)..(6): n is a, c, g, or u
  misc_feature (17)..(17): n is a, c, g, or u
ucnunnaaaugaauguna

SEQ ID NO: 102179 - RNA, 19 nt, Artificial Sequence
  Synthetic
  misc_feature (4)..(4): n is a, c, g, or u
  misc_feature (6)..(7): n is a, c, g, or u
  misc_feature (18)..(18): n is a, c, g, or u
cucnunnaaaugaauguna

SEQ ID NO: 102180 - RNA, 20 nt, Artificial Sequence
  Synthetic
  misc_feature (5)..(5): n is a, c, g, or u
  misc_feature (7)..(8): n is a, c, g, or u
  misc_feature (19)..(19): n is a, c, g, or u
ccucnunnaaaugaauguna

SEQ ID NO: 102181 - RNA, 21 nt, Artificial Sequence
  Synthetic
  misc_feature (6)..(6): n is a, c, g, or u
  misc_feature (8)..(9): n is a, c, g, or u
  misc_feature (20)..(20): n is a, c, g, or u
uccucnunnaaaugaauguna

SEQ ID NO: 102182 - RNA, 22 nt, Artificial Sequence
  Synthetic
  misc_feature (1)..(1): n is a, c, g, or u
  misc_feature (7)..(7): n is a, c, g, or u
  misc_feature (9)..(10): n is a, c, g, or u
  misc_feature (21)..(21): n is a, c, g, or u
nuccucnunnaaaugaauguna

SEQ ID NO: 102183 - RNA, 23 nt, Artificial Sequence
  Synthetic
  misc_feature (2)..(2): n is a, c, g, or u
  misc_feature (8)..(8): n is a, c, g, or u
  misc_feature (10)..(11): n is a, c, g, or u
  misc_feature (22)..(22): n is a, c, g, or u
unuccucnunnaaaugaauguna

SEQ ID NO: 102184 - RNA, 24 nt, Artificial Sequence
  Synthetic
  misc_feature (3)..(3): n is a, c, g, or u
  misc_feature (9)..(9): n is a, c, g, or u
  misc_feature (11)..(12): n is a, c, g, or u
  misc_feature (23)..(23): n is a, c, g, or u
aunuccucnunnaaaugaauguna

SEQ ID NO: 102185 - RNA, 18 nt, Artificial Sequence
  Synthetic
uccaaaagacaccaaaua

SEQ ID NO: 102186 - RNA, 19 nt, Artificial Sequence
  Synthetic
cuccaaaagacaccaaaua

SEQ ID NO: 102187 - RNA, 20 nt, Artificial Sequence
  Synthetic
acuccaaaagacaccaaaua

SEQ ID NO: 102188 - RNA, 21 nt, Artificial Sequence
  Synthetic
cacuccaaaagacaccaaaua

SEQ ID NO: 102189 - RNA, 22 nt, Artificial Sequence
  Synthetic
acacuccaaaagacaccaaaua

SEQ ID NO: 102190 - RNA, 23 nt, Artificial Sequence
  Synthetic
cacacuccaaaagacaccaaaua

SEQ ID NO: 102191 - RNA, 24 nt, Artificial Sequence
  Synthetic
ccacacuccaaaagacaccaaaua

SEQ ID NO: 102192 - RNA, 18 nt, Artificial Sequence
  Synthetic
  misc_feature (12)..(12): n is a, c, g, or u
ucgaggagaucncgaaua

SEQ ID NO: 102193 - RNA, 19 nt, Artificial Sequence
  Synthetic
  misc_feature (13)..(13): n is a, c, g, or u
gucgaggagaucncgaaua

SEQ ID NO: 102194 - RNA, 20 nt, Artificial Sequence
  Synthetic
  misc_feature (14)..(14): n is a, c, g, or u
ugucgaggagaucncgaaua

SEQ ID NO: 102195 - RNA, 21 nt, Artificial Sequence
  Synthetic
  misc_feature (15)..(15): n is a, c, g, or u
gugucgaggagaucncgaaua

SEQ ID NO: 102196 - RNA, 22 nt, Artificial Sequence
  Synthetic
  misc_feature (16)..(16): n is a, c, g, or u
ggugucgaggagaucncgaaua

SEQ ID NO: 102197 - RNA, 23 nt, Artificial Sequence
  Synthetic
  misc_feature (17)..(17): n is a, c, g, or u
cggugucgaggagaucncgaaua

SEQ ID NO: 102198 - RNA, 24 nt, Artificial Sequence
  Synthetic
  misc_feature (18)..(18): n is a, c, g, or u
gcggugucgaggagaucncgaaua

SEQ ID NO: 102199 - RNA, 18 nt, Artificial Sequence
  Synthetic
  misc_feature (3)..(3): n is a, c, g, or u
agnuuguauacaugcaua

SEQ ID NO: 102200 - RNA, 19 nt, Artificial Sequence
  Synthetic
  misc_feature (4)..(4): n is a, c, g, or u
uagnuuguauacaugcaua

SEQ ID NO: 102201 - RNA, 20 nt, Artificial Sequence
  Synthetic
  misc_feature (5)..(5): n is a, c, g, or u
uuagnuuguauacaugcaua

SEQ ID NO: 102202 - RNA, 21 nt, Artificial Sequence
  Synthetic
  misc_feature (6)..(6): n is a, c, g, or u
cuuagnuuguauacaugcaua

SEQ ID NO: 102203 - RNA, 22 nt, Artificial Sequence
  Synthetic
  misc_feature (7)..(7): n is a, c, g, or u
gcuuagnuuguauacaugcaua

SEQ ID NO: 102204 - RNA, 23 nt, Artificial Sequence
  Synthetic
  misc_feature (8)..(8): n is a, c, g, or u
ugcuuagnuuguauacaugcaua

SEQ ID NO: 102205 - RNA, 24 nt, Artificial Sequence
  Synthetic
  misc_feature (9)..(9): n is a, c, g, or u
cugcuuagnuuguauacaugcaua

SEQ ID NO: 102206 - RNA, 18 nt, Artificial Sequence
  Synthetic
cucuaaggccucccgaua

SEQ ID NO: 102207 - RNA, 19 nt, Artificial Sequence
  Synthetic
acucuaaggccucccgaua

SEQ ID NO: 102208 - RNA, 20 nt, Artificial Sequence
  Synthetic
gacucuaaggccucccgaua

SEQ ID NO: 102209 - RNA, 21 nt, Artificial Sequence
  Synthetic
agacucuaaggccucccgaua

SEQ ID NO: 102210 - RNA, 22 nt, Artificial Sequence
  Synthetic
gagacucuaaggccucccgaua

SEQ ID NO: 102211 - RNA, 23 nt, Artificial Sequence
  Synthetic
ggagacucuaaggccucccgaua

SEQ ID NO: 102212 - RNA, 24 nt, Artificial Sequence
  Synthetic
cggagacucuaaggccucccgaua

SEQ ID NO: 102213 - RNA, 18 nt, Artificial Sequence
  Synthetic
cagacacauccagcgaua

SEQ ID NO: 102214 - RNA, 19 nt, Artificial Sequence
  Synthetic
gcagacacauccagcgaua

SEQ ID NO: 102215 - RNA, 20 nt, Artificial Sequence
  Synthetic
cgcagacacauccagcgaua

SEQ ID NO: 102216 - RNA, 21 nt, Artificial Sequence
  Synthetic
ccgcagacacauccagcgaua

SEQ ID NO: 102217 - RNA, 22 nt, Artificial Sequence
  Synthetic
gccgcagacacauccagcgaua

SEQ ID NO: 102218 - RNA, 23 nt, Artificial Sequence
  Synthetic
cgccgcagacacauccagcgaua

SEQ ID NO: 102219 - RNA, 24 nt, Artificial Sequence
  Synthetic
acgccgcagacacauccagcgaua

SEQ ID NO: 102220 - RNA, 18 nt, Artificial Sequence
  Synthetic
uaccacaucauccauaua

SEQ ID NO: 102221 - RNA, 19 nt, Artificial Sequence
  Synthetic
auaccacaucauccauaua

SEQ ID NO: 102222 - RNA, 20 nt, Artificial Sequence
  Synthetic
aauaccacaucauccauaua

SEQ ID NO: 102223 - RNA, 21 nt, Artificial Sequence
  Synthetic
caauaccacaucauccauaua

SEQ ID NO: 102224 - RNA, 22 nt, Artificial Sequence
  Synthetic
ccaauaccacaucauccauaua

SEQ ID NO: 102225 - RNA, 23 nt, Artificial Sequence
  Synthetic
cccaauaccacaucauccauaua

SEQ ID NO: 102226 - RNA, 24 nt, Artificial Sequence
  Synthetic
ccccaauaccacaucauccauaua

SEQ ID NO: 102227 - RNA, 18 nt, Artificial Sequence
  Synthetic
  misc_feature (9)..(9): n is a, c, g, or u
uuaggguunaaauguaua

SEQ ID NO: 102228 - RNA, 19 nt, Artificial Sequence
  Synthetic
  misc_feature (10)..(10): n is a, c, g, or u
auuaggguunaaauguaua

SEQ ID NO: 102229 - RNA, 20 nt, Artificial Sequence
  Synthetic
  misc_feature (11)..(11): n is a, c, g, or u
uauuaggguunaaauguaua

SEQ ID NO: 102230 - RNA, 21 nt, Artificial Sequence
  Synthetic
  misc_feature (12)..(12): n is a, c, g, or u
uuauuaggguunaaauguaua

SEQ ID NO: 102231 - RNA, 22 nt, Artificial Sequence
  Synthetic
  misc_feature (13)..(13): n is a, c, g, or u
uuuauuaggguunaaauguaua

SEQ ID NO: 102232 - RNA, 23 nt, Artificial Sequence
  Synthetic
  misc_feature (14)..(14): n is a, c, g, or u
uuuuauuaggguunaaauguaua

SEQ ID NO: 102233 - RNA, 24 nt, Artificial Sequence
  Synthetic
  misc_feature (15)..(15): n is a, c, g, or u
guuuuauuaggguunaaauguaua

SEQ ID NO: 102234 - RNA, 18 nt, Artificial Sequence
  Synthetic
acugaacaaauggcacua

SEQ ID NO: 102235 - RNA, 19 nt, Artificial Sequence
  Synthetic
cacugaacaaauggcacua

SEQ ID NO: 102236 - RNA, 20 nt, Artificial Sequence
  Synthetic
ccacugaacaaauggcacua

SEQ ID NO: 102237 - RNA, 21 nt, Artificial Sequence
  Synthetic
accacugaacaaauggcacua

SEQ ID NO: 102238 - RNA, 22 nt, Artificial Sequence
  Synthetic
aaccacugaacaaauggcacua

SEQ ID NO: 102239 - RNA, 23 nt, Artificial Sequence
  Synthetic
gaaccacugaacaaauggcacua

SEQ ID NO: 102240 - RNA, 24 nt, Artificial Sequence
  Synthetic
cgaaccacugaacaaauggcacua

SEQ ID NO: 102241 - RNA, 18 nt, Artificial Sequence
  Synthetic
agguuaggauagaaccua

SEQ ID NO: 102242 - RNA, 19 nt, Artificial Sequence
  Synthetic
aagguuaggauagaaccua

SEQ ID NO: 102243 - RNA, 20 nt, Artificial Sequence
  Synthetic
uaagguuaggauagaaccua

SEQ ID NO: 102244 - RNA, 21 nt, Artificial Sequence
  Synthetic
guaagguuaggauagaaccua

SEQ ID NO: 102245 - RNA, 22 nt, Artificial Sequence
  Synthetic
gguaagguuaggauagaaccua

SEQ ID NO: 102246 - RNA, 23 nt, Artificial Sequence
  Synthetic
ugguaagguuaggauagaaccua

SEQ ID NO: 102247 - RNA, 24 nt, Artificial Sequence
  Synthetic
uugguaagguuaggauagaaccua

SEQ ID NO: 102248 - RNA, 18 nt, Artificial Sequence
  Synthetic
  misc_feature (14)..(14): n is a, c, g, or u
cccucacucugggnucua

SEQ ID NO: 102249 - RNA, 19 nt, Artificial Sequence
  Synthetic
  misc_feature (15)..(15): n is a, c, g, or u
ccccucacucugggnucua

SEQ ID NO: 102250 - RNA, 20 nt, Artificial Sequence
  Synthetic
  misc_feature (16)..(16): n is a, c, g, or u
gccccucacucugggnucua

SEQ ID NO: 102251 - RNA, 21 nt, Artificial Sequence
  Synthetic
  misc_feature (17)..(17): n is a, c, g, or u
ggccccucacucugggnucua

SEQ ID NO: 102252 - RNA, 22 nt, Artificial Sequence
  Synthetic
  misc_feature (18)..(18): n is a, c, g, or u
aggccccucacucugggnucua

SEQ ID NO: 102253 - RNA, 23 nt, Artificial Sequence
  Synthetic
  misc_feature (19)..(19): n is a, c, g, or u
uaggccccucacucugggnucua

SEQ ID NO: 102254 - RNA, 24 nt, Artificial Sequence
  Synthetic
  misc_feature (20)..(20): n is a, c, g, or u
auaggccccucacucugggnucua

SEQ ID NO: 102255 - RNA, 18 nt, Artificial Sequence
  Synthetic
gagggaguucuucuucua

SEQ ID NO: 102256 - RNA, 19 nt, Artificial Sequence
  Synthetic
cgagggaguucuucuucua

SEQ ID NO: 102257 - RNA, 20 nt, Artificial Sequence
  Synthetic
gcgagggaguucuucuucua

SEQ ID NO: 102258 - RNA, 18 nt, Artificial Sequence
  Synthetic
uugauguuccuggaagua

SEQ ID NO: 102259 - RNA, 19 nt, Artificial Sequence
  Synthetic
guugauguuccuggaagua

SEQ ID NO: 102260 - RNA, 20 nt, Artificial Sequence
  Synthetic
aguugauguuccuggaagua

SEQ ID NO: 102261 - RNA, 21 nt, Artificial Sequence
  Synthetic
uaguugauguuccuggaagua

SEQ ID NO: 102262 - RNA, 22 nt, Artificial Sequence
  Synthetic
guaguugauguuccuggaagua

SEQ ID NO: 102263 - RNA, 23 nt, Artificial Sequence
  Synthetic
gguaguugauguuccuggaagua

SEQ ID NO: 102264 - RNA, 24 nt, Artificial Sequence
  Synthetic
ugguaguugauguuccuggaagua

SEQ ID NO: 102265 - RNA, 18 nt, Artificial Sequence
  Synthetic
uuaaagacagguacagua

SEQ ID NO: 102266 - RNA, 19 nt, Artificial Sequence
  Synthetic
auuaaagacagguacagua

SEQ ID NO: 102267 - RNA, 20 nt, Artificial Sequence
  Synthetic
gauuaaagacagguacagua

SEQ ID NO: 102268 - RNA, 21 nt, Artificial Sequence
  Synthetic
ggauuaaagacagguacagua

SEQ ID NO: 102269 - RNA, 22 nt, Artificial Sequence
  Synthetic
aggauuaaagacagguacagua

SEQ ID NO: 102270 - RNA, 23 nt, Artificial Sequence
  Synthetic
caggauuaaagacagguacagua

SEQ ID NO: 102271 - RNA, 24 nt, Artificial Sequence
  Synthetic
ucaggauuaaagacagguacagua

SEQ ID NO: 102272 - RNA, 18 nt, Artificial Sequence
  Synthetic
  misc_feature (9)..(9): n is a, c, g, or u
gauaugggngaggcagua

SEQ ID NO: 102273 - RNA, 19 nt, Artificial Sequence
  Synthetic
  misc_feature (10)..(10): n is a, c, g, or u
cgauaugggngaggcagua

SEQ ID NO: 102274 - RNA, 20 nt, Artificial Sequence
  Synthetic
  misc_feature (11)..(11): n is a, c, g, or u
acgauaugggngaggcagua

SEQ ID NO: 102275 - RNA, 21 nt, Artificial Sequence
  Synthetic
  misc_feature (12)..(12): n is a, c, g, or u
gacgauaugggngaggcagua

SEQ ID NO: 102276 - RNA, 22 nt, Artificial Sequence
  Synthetic
  misc_feature (13)..(13): n is a, c, g, or u
ugacgauaugggngaggcagua

SEQ ID NO: 102277 - RNA, 23 nt, Artificial Sequence
  Synthetic
  misc_feature (14)..(14): n is a, c, g, or u
uugacgauaugggngaggcagua

SEQ ID NO: 102278 - RNA, 24 nt, Artificial Sequence
  Synthetic
  misc_feature (15)..(15): n is a, c, g, or u
auugacgauaugggngaggcagua

SEQ ID NO: 102279 - RNA, 18 nt, Artificial Sequence
  Synthetic
ccagccuuccacagagua

SEQ ID NO: 102280 - RNA, 19 nt, Artificial Sequence
  Synthetic
  misc_feature (1)..(1): n is a, c, g, or u
nccagccuuccacagagua

SEQ ID NO: 102281 - RNA, 20 nt, Artificial Sequence
  Synthetic
  misc_feature (2)..(2): n is a, c, g, or u
unccagccuuccacagagua

SEQ ID NO: 102282 - RNA, 21 nt, Artificial Sequence
  Synthetic
  misc_feature (3)..(3): n is a, c, g, or u
aunccagccuuccacagagua

SEQ ID NO: 102283 - RNA, 22 nt, Artificial Sequence
  Synthetic
  misc_feature (4)..(4): n is a, c, g, or u
aaunccagccuuccacagagua

SEQ ID NO: 102284 - RNA, 23 nt, Artificial Sequence
  Synthetic
  misc_feature (1)..(1): n is a, c, g, or u
  misc_feature (5)..(5): n is a, c, g, or u
naaunccagccuuccacagagua

SEQ ID NO: 102285 - RNA, 24 nt, Artificial Sequence
  Synthetic
  misc_feature (2)..(2): n is a, c, g, or u
  misc_feature (6)..(6): n is a, c, g, or u
anaaunccagccuuccacagagua

SEQ ID NO: 102286 - RNA, 18 nt, Artificial Sequence
  Synthetic
  misc_feature (14)..(14): n is a, c, g, or u
gccuacagccuccnagua

SEQ ID NO: 102287 - RNA, 19 nt, Artificial Sequence
  Synthetic
  misc_feature (15)..(15): n is a, c, g, or u
ugccuacagccuccnagua

SEQ ID NO: 102288 - RNA, 20 nt, Artificial Sequence
  Synthetic
  misc_feature (16)..(16): n is a, c, g, or u
augccuacagccuccnagua

SEQ ID NO: 102289 - RNA, 21 nt, Artificial Sequence
  Synthetic
  misc_feature (17)..(17): n is a, c, g, or u
uaugccuacagccuccnagua

SEQ ID NO: 102290 - RNA, 22 nt, Artificial Sequence
  Synthetic
  misc_feature (18)..(18): n is a, c, g, or u
uuaugccuacagccuccnagua

SEQ ID NO: 102291 - RNA, 23 nt, Artificial Sequence
  Synthetic
  misc_feature (19)..(19): n is a, c, g, or u
uuuaugccuacagccuccnagua

SEQ ID NO: 102292 - RNA, 24 nt, Artificial Sequence
  Synthetic
  misc_feature (20)..(20): n is a, c, g, or u
auuuaugccuacagccuccnagua

SEQ ID NO: 102293 - RNA, 18 nt, Artificial Sequence
  Synthetic
cagcgccgacgggacgua

SEQ ID NO: 102294 - RNA, 19 nt, Artificial Sequence
  Synthetic
ucagcgccgacgggacgua

SEQ ID NO: 102295 - RNA, 20 nt, Artificial Sequence
  Synthetic
uucagcgccgacgggacgua

SEQ ID NO: 102296 - RNA, 18 nt, Artificial Sequence
  Synthetic
agacggggagaccgcgua

SEQ ID NO: 102297 - RNA, 19 nt, Artificial Sequence
  Synthetic
cagacggggagaccgcgua

SEQ ID NO: 102298 - RNA, 20 nt, Artificial Sequence
  Synthetic
acagacggggagaccgcgua

SEQ ID NO: 102299 - RNA, 18 nt, Artificial Sequence
  Synthetic
  misc_feature (14)..(14): n is a, c, g, or u
aaauugguaauagnggua

SEQ ID NO: 102300 - RNA, 19 nt, Artificial Sequence
  Synthetic
  misc_feature (15)..(15): n is a, c, g, or u
aaaauugguaauagnggua

SEQ ID NO: 102301 - RNA, 20 nt, Artificial Sequence
  Synthetic
  misc_feature (16)..(16): n is a, c, g, or u
gaaaauugguaauagnggua

SEQ ID NO: 102302 - RNA, 21 nt, Artificial Sequence
  Synthetic
  misc_feature (17)..(17): n is a, c, g, or u
agaaaauugguaauagnggua

SEQ ID NO: 102303 - RNA, 22 nt, Artificial Sequence
  Synthetic
  misc_feature (18)..(18): n is a, c, g, or u
aagaaaauugguaauagnggua

SEQ ID NO: 102304 - RNA, 23 nt, Artificial Sequence
  Synthetic
  misc_feature (19)..(19): n is a, c, g, or u
aaagaaaauugguaauagnggua

SEQ ID NO: 102305 - RNA, 24 nt, Artificial Sequence
  Synthetic
  misc_feature (20)..(20): n is a, c, g, or u
aaaagaaaauugguaauagnggua

SEQ ID NO: 102306 - RNA, 18 nt, Artificial Sequence
  Synthetic
cuuuuuucauuaacugua

SEQ ID NO: 102307 - RNA, 19 nt, Artificial Sequence
  Synthetic
ccuuuuuucauuaacugua

SEQ ID NO: 102308 - RNA, 20 nt, Artificial Sequence
  Synthetic
uccuuuuuucauuaacugua

SEQ ID NO: 102309 - RNA, 21 nt, Artificial Sequence
  Synthetic
cuccuuuuuucauuaacugua

SEQ ID NO: 102310 - RNA, 22 nt, Artificial Sequence
  Synthetic
ucuccuuuuuucauuaacugua

SEQ ID NO: 102311 - RNA, 23 nt, Artificial Sequence
  Synthetic
aucuccuuuuuucauuaacugua

SEQ ID NO: 102312 - RNA, 24 nt, Artificial Sequence
  Synthetic
aaucuccuuuuuucauuaacugua

SEQ ID NO: 102313 - RNA, 18 nt, Artificial Sequence
  Synthetic
  misc_feature (3)..(3): n is a, c, g, or u
  misc_feature (6)..(6): n is a, c, g, or u
ggnuanccacauugugua

SEQ ID NO: 102314 - RNA, 19 nt, Artificial Sequence
  Synthetic
  misc_feature (1)..(1): n is a, c, g, or u
  misc_feature (4)..(4): n is a, c, g, or u
  misc_feature (7)..(7): n is a, c, g, or u
nggnuanccacauugugua

SEQ ID NO: 102315 - RNA, 20 nt, Artificial Sequence
  Synthetic
  misc_feature (2)..(2): n is a, c, g, or u
  misc_feature (5)..(5): n is a, c, g, or u
  misc_feature (8)..(8): n is a, c, g, or u
cnggnuanccacauugugua

SEQ ID NO: 102316 - RNA, 21 nt, Artificial Sequence
  Synthetic
  misc_feature (3)..(3): n is a, c, g, or u
  misc_feature (6)..(6): n is a, c, g, or u
  misc_feature (9)..(9): n is a, c, g, or u
gcnggnuanccacauugugua

SEQ ID NO: 102317 - RNA, 22 nt, Artificial Sequence
  Synthetic
  misc_feature (1)..(1): n is a, c, g, or u
  misc_feature (4)..(4): n is a, c, g, or u
  misc_feature (7)..(7): n is a, c, g, or u
  misc_feature (10)..(10): n is a, c, g, or u
ngcnggnuanccacauugugua

SEQ ID NO: 102318 - RNA, 23 nt, Artificial Sequence
  Synthetic
  misc_feature (2)..(2): n is a, c, g, or u
  misc_feature (5)..(5): n is a, c, g, or u
  misc_feature (8)..(8): n is a, c, g, or u
  misc_feature (11)..(11): n is a, c, g, or u
angcnggnuanccacauugugua

SEQ ID NO: 102319 - RNA, 24 nt, Artificial Sequence
  Synthetic
  misc_feature (3)..(3): n is a, c, g, or u
  misc_feature (6)..(6): n is a, c, g, or u
  misc_feature (9)..(9): n is a, c, g, or u
  misc_feature (12)..(12): n is a, c, g, or u
aangcnggnuanccacauugugua

SEQ ID NO: 102320 - RNA, 18 nt, Artificial Sequence
  Synthetic
augaacaugagaugauua

SEQ ID NO: 102321 - RNA, 19 nt, Artificial Sequence
  Synthetic
caugaacaugagaugauua

SEQ ID NO: 102322 - RNA, 20 nt, Artificial Sequence
  Synthetic
acaugaacaugagaugauua

SEQ ID NO: 102323 - RNA, 21 nt, Artificial Sequence
  Synthetic
gacaugaacaugagaugauua

SEQ ID NO: 102324 - RNA, 22 nt, Artificial Sequence
  Synthetic
ggacaugaacaugagaugauua

SEQ ID NO: 102325 - RNA, 23 nt, Artificial Sequence
  Synthetic
aggacaugaacaugagaugauua

SEQ ID NO: 102326 - RNA, 24 nt, Artificial Sequence
  Synthetic
uaggacaugaacaugagaugauua

SEQ ID NO: 102327 - RNA, 18 nt, Artificial Sequence
  Synthetic
aguccaagaguccucuua

SEQ ID NO: 102328 - RNA, 19 nt, Artificial Sequence
  Synthetic
gaguccaagaguccucuua

SEQ ID NO: 102329 - RNA, 20 nt, Artificial Sequence
  Synthetic
  misc_feature (1)..(1): n is a, c, g, or u
ngaguccaagaguccucuua

SEQ ID NO: 102330 - RNA, 21 nt, Artificial Sequence
  Synthetic
  misc_feature (2)..(2): n is a, c, g, or u
gngaguccaagaguccucuua

SEQ ID NO: 102331 - RNA, 22 nt, Artificial Sequence
  Synthetic
  misc_feature (3)..(3): n is a, c, g, or u
ugngaguccaagaguccucuua

SEQ ID NO: 102332 - RNA, 23 nt, Artificial Sequence
  Synthetic
  misc_feature (4)..(4): n is a, c, g, or u
cugngaguccaagaguccucuua

SEQ ID NO: 102333 - RNA, 24 nt, Artificial Sequence
  Synthetic
  misc_feature (5)..(5): n is a, c, g, or u
gcugngaguccaagaguccucuua

SEQ ID NO: 102334 - RNA, 18 nt, Artificial Sequence
  Synthetic
  misc_feature (15)..(15): n is a, c, g, or u
acauaucccaugaanuua

SEQ ID NO: 102335 - RNA, 19 nt, Artificial Sequence
  Synthetic
  misc_feature (16)..(16): n is a, c, g, or u
uacauaucccaugaanuua

SEQ ID NO: 102336 - RNA, 20 nt, Artificial Sequence
  Synthetic
  misc_feature (17)..(17): n is a, c, g, or u
uuacauaucccaugaanuua

SEQ ID NO: 102337 - RNA, 21 nt, Artificial Sequence
  Synthetic
  misc_feature (18)..(18): n is a, c, g, or u
auuacauaucccaugaanuua

SEQ ID NO: 102338 - RNA, 22 nt, Artificial Sequence
  Synthetic
  misc_feature (19)..(19): n is a, c, g, or u
aauuacauaucccaugaanuua

SEQ ID NO: 102339 - RNA, 23 nt, Artificial Sequence
  Synthetic
  misc_feature (20)..(20): n is a, c, g, or u
caauuacauaucccaugaanuua

SEQ ID NO: 102340 - RNA, 24 nt, Artificial Sequence
  Synthetic
  misc_feature (21)..(21): n is a, c, g, or u
ccaauuacauaucccaugaanuua

SEQ ID NO: 102341 - RNA, 18 nt, Artificial Sequence
  Synthetic
gaagcuccaaauucuuua

SEQ ID NO: 102342 - RNA, 19 nt, Artificial Sequence
  Synthetic
agaagcuccaaauucuuua

SEQ ID NO: 102343 - RNA, 20 nt, Artificial Sequence
  Synthetic
cagaagcuccaaauucuuua

SEQ ID NO: 102344 - RNA, 21 nt, Artificial Sequence
  Synthetic
acagaagcuccaaauucuuua

SEQ ID NO: 102345 - RNA, 22 nt, Artificial Sequence
  Synthetic
cacagaagcuccaaauucuuua

SEQ ID NO: 102346 - RNA, 23 nt, Artificial Sequence
  Synthetic
ccacagaagcuccaaauucuuua

SEQ ID NO: 102347 - RNA, 24 nt, Artificial Sequence
  Synthetic
uccacagaagcuccaaauucuuua

SEQ ID NO: 102348 - RNA, 18 nt, Artificial Sequence
  Synthetic
agguucagauauuguuua

SEQ ID NO: 102349 - RNA, 19 nt, Artificial Sequence
  Synthetic
aagguucagauauuguuua

SEQ ID NO: 102350 - RNA, 20 nt, Artificial Sequence
  Synthetic
aaagguucagauauuguuua

SEQ ID NO: 102351 - RNA, 21 nt, Artificial Sequence
  Synthetic
uaaagguucagauauuguuua

SEQ ID NO: 102352 - RNA, 22 nt, Artificial Sequence
  Synthetic
guaaagguucagauauuguuua

SEQ ID NO: 102353 - RNA, 23 nt, Artificial Sequence
  Synthetic
gguaaagguucagauauuguuua

SEQ ID NO: 102354 - RNA, 24 nt, Artificial Sequence
  Synthetic
ggguaaagguucagauauuguuua

SEQ ID NO: 102355 - RNA, 18 nt, Artificial Sequence
  Synthetic
ccccaacguuugguuuua

SEQ ID NO: 102356 - RNA, 19 nt, Artificial Sequence
  Synthetic
gccccaacguuugguuuua

SEQ ID NO: 102357 - RNA, 20 nt, Artificial Sequence
  Synthetic
agccccaacguuugguuuua

SEQ ID NO: 102358 - RNA, 21 nt, Artificial Sequence
  Synthetic
uagccccaacguuugguuuua

SEQ ID NO: 102359 - RNA, 22 nt, Artificial Sequence
  Synthetic
guagccccaacguuugguuuua

SEQ ID NO: 102360 - RNA, 23 nt, Artificial Sequence
  Synthetic
aguagccccaacguuugguuuua

SEQ ID NO: 102361 - RNA, 24 nt, Artificial Sequence
  Synthetic
gaguagccccaacguuugguuuua

SEQ ID NO: 102362 - RNA, 18 nt, Artificial Sequence
  Synthetic
uauaacugaaagccaaac

SEQ ID NO: 102363 - RNA, 19 nt, Artificial Sequence
  Synthetic
auauaacugaaagccaaac

SEQ ID NO: 102364 - RNA, 20 nt, Artificial Sequence
  Synthetic
cauauaacugaaagccaaac

SEQ ID NO: 102365 - RNA, 21 nt, Artificial Sequence
  Synthetic
ccauauaacugaaagccaaac

SEQ ID NO: 102366 - RNA, 22 nt, Artificial Sequence
  Synthetic
uccauauaacugaaagccaaac

SEQ ID NO: 102367 - RNA, 23 nt, Artificial Sequence
  Synthetic
auccauauaacugaaagccaaac

SEQ ID NO: 102368 - RNA, 24 nt, Artificial Sequence
  Synthetic
cauccauauaacugaaagccaaac

SEQ ID NO: 102369 - RNA, 18 nt, Artificial Sequence
  Synthetic
cagcaacaagagggaaac

SEQ ID NO: 102370 - RNA, 19 nt, Artificial Sequence
  Synthetic
acagcaacaagagggaaac

SEQ ID NO: 102371 - RNA, 20 nt, Artificial Sequence
  Synthetic
uacagcaacaagagggaaac

SEQ ID NO: 102372 - RNA, 21 nt, Artificial Sequence
  Synthetic
guacagcaacaagagggaaac

SEQ ID NO: 102373 - RNA, 22 nt, Artificial Sequence
  Synthetic
uguacagcaacaagagggaaac

SEQ ID NO: 102374 - RNA, 23 nt, Artificial Sequence
  Synthetic
uuguacagcaacaagagggaaac

SEQ ID NO: 102375 - RNA, 24 nt, Artificial Sequence
  Synthetic
uuuguacagcaacaagagggaaac

SEQ ID NO: 102376 - RNA, 18 nt, Artificial Sequence
  Synthetic
uaguccagaagaaccaac

SEQ ID NO: 102377 - RNA, 19 nt, Artificial Sequence
  Synthetic
guaguccagaagaaccaac

SEQ ID NO: 102378 - RNA, 20 nt, Artificial Sequence
  Synthetic
gguaguccagaagaaccaac

SEQ ID NO: 102379 - RNA, 21 nt, Artificial Sequence
  Synthetic
ugguaguccagaagaaccaac

SEQ ID NO: 102380 - RNA, 22 nt, Artificial Sequence
  Synthetic
uugguaguccagaagaaccaac

SEQ ID NO: 102381 - RNA, 23 nt, Artificial Sequence
  Synthetic
cuugguaguccagaagaaccaac

SEQ ID NO: 102382 - RNA, 24 nt, Artificial Sequence
  Synthetic
ccuugguaguccagaagaaccaac

SEQ ID NO: 102383 - RNA, 18 nt, Artificial Sequence
  Synthetic
ucaucaacucaccccaac

SEQ ID NO: 102384 - RNA, 19 nt, Artificial Sequence
  Synthetic
uucaucaacucaccccaac

SEQ ID NO: 102385 - RNA, 20 nt, Artificial Sequence
  Synthetic
auucaucaacucaccccaac

SEQ ID NO: 102386 - RNA, 21 nt, Artificial Sequence
  Synthetic
gauucaucaacucaccccaac

SEQ ID NO: 102387 - RNA, 22 nt, Artificial Sequence
  Synthetic
agauucaucaacucaccccaac

SEQ ID NO: 102388 - RNA, 23 nt, Artificial Sequence
  Synthetic
cagauucaucaacucaccccaac

SEQ ID NO: 102389 - RNA, 24 nt, Artificial Sequence
  Synthetic
ccagauucaucaacucaccccaac

SEQ ID NO: 102390 - RNA, 18 nt, Artificial Sequence
  Synthetic
aagguuuuguacagcaac

SEQ ID NO: 102391 - RNA, 19 nt, Artificial Sequence
  Synthetic
gaagguuuuguacagcaac

SEQ ID NO: 102392 - RNA, 20 nt, Artificial Sequence
  Synthetic
cgaagguuuuguacagcaac

SEQ ID NO: 102393 - RNA, 21 nt, Artificial Sequence
  Synthetic
ccgaagguuuuguacagcaac

SEQ ID NO: 102394 - RNA, 22 nt, Artificial Sequence
  Synthetic
uccgaagguuuuguacagcaac

SEQ ID NO: 102395 - RNA, 23 nt, Artificial Sequence
  Synthetic
guccgaagguuuuguacagcaac

SEQ ID NO: 102396 - RNA, 24 nt, Artificial Sequence
  Synthetic
cguccgaagguuuuguacagcaac

SEQ ID NO: 102397 - RNA, 18 nt, Artificial Sequence
  Synthetic
gugaggauucuugucaac

SEQ ID NO: 102398 - RNA, 19 nt, Artificial Sequence
  Synthetic
ugugaggauucuugucaac

SEQ ID NO: 102399 - RNA, 20 nt, Artificial Sequence
  Synthetic
uugugaggauucuugucaac

SEQ ID NO: 102400 - RNA, 21 nt, Artificial Sequence
  Synthetic
auugugaggauucuugucaac

SEQ ID NO: 102401 - RNA, 22 nt, Artificial Sequence
  Synthetic
uauugugaggauucuugucaac

SEQ ID NO: 102402 - RNA, 23 nt, Artificial Sequence
  Synthetic
guauugugaggauucuugucaac

SEQ ID NO: 102403 - RNA, 24 nt, Artificial Sequence
  Synthetic
gguauugugaggauucuugucaac

SEQ ID NO: 102404 - RNA, 18 nt, Artificial Sequence
  Synthetic
cccguggucggccggaac

SEQ ID NO: 102405 - RNA, 19 nt, Artificial Sequence
  Synthetic
ccccguggucggccggaac

SEQ ID NO: 102406 - RNA, 20 nt, Artificial Sequence
  Synthetic
gccccguggucggccggaac

SEQ ID NO: 102407 - RNA, 18 nt, Artificial Sequence
  Synthetic
gguuuacuguuccggaac

SEQ ID NO: 102408 - RNA, 19 nt, Artificial Sequence
  Synthetic
ggguuuacuguuccggaac

SEQ ID NO: 102409 - RNA, 20 nt, Artificial Sequence
  Synthetic
aggguuuacuguuccggaac

SEQ ID NO: 102410 - RNA, 18 nt, Artificial Sequence
  Synthetic
ucccagaggauugggaac

SEQ ID NO: 102411 - RNA, 19 nt, Artificial Sequence
  Synthetic
aucccagaggauugggaac

SEQ ID NO: 102412 - RNA, 20 nt, Artificial Sequence
  Synthetic
aaucccagaggauugggaac

SEQ ID NO: 102413 - RNA, 21 nt, Artificial Sequence
  Synthetic
gaaucccagaggauugggaac

SEQ ID NO: 102414 - RNA, 22 nt, Artificial Sequence
  Synthetic
agaaucccagaggauugggaac

SEQ ID NO: 102415 - RNA, 23 nt, Artificial Sequence
  Synthetic
aagaaucccagaggauugggaac

SEQ ID NO: 102416 - RNA, 24 nt, Artificial Sequence
  Synthetic
aaagaaucccagaggauugggaac

SEQ ID NO: 102417 - RNA, 18 nt, Artificial Sequence
  Synthetic
gaacaguaggacaugaac

SEQ ID NO: 102418 - RNA, 19 nt, Artificial Sequence
  Synthetic
ugaacaguaggacaugaac

SEQ ID NO: 102419 - RNA, 20 nt, Artificial Sequence
  Synthetic
uugaacaguaggacaugaac

SEQ ID NO: 102420 - RNA, 21 nt, Artificial Sequence
  Synthetic
cuugaacaguaggacaugaac

SEQ ID NO: 102421 - RNA, 22 nt, Artificial Sequence
  Synthetic
gcuugaacaguaggacaugaac

SEQ ID NO: 102422 - RNA, 23 nt, Artificial Sequence
  Synthetic
ggcuugaacaguaggacaugaac

SEQ ID NO: 102423 - RNA, 24 nt, Artificial Sequence
  Synthetic
aggcuugaacaguaggacaugaac

SEQ ID NO: 102424 - RNA, 18 nt, Artificial Sequence
  Synthetic
  misc_feature (12)..(12): n is a, c, g, or u
ccgugugguggngugaac

SEQ ID NO: 102425 - RNA, 19 nt, Artificial Sequence
  Synthetic
  misc_feature (13)..(13): n is a, c, g, or u
gccgugugguggngugaac

SEQ ID NO: 102426 - RNA, 20 nt, Artificial Sequence
  Synthetic
  misc_feature (1)..(1): n is a, c, g, or u
  misc_feature (14)..(14): n is a, c, g, or u
ngccgugugguggngugaac

SEQ ID NO: 102427 - RNA, 21 nt, Artificial Sequence
  Synthetic
  misc_feature (2)..(2): n is a, c, g, or u
  misc_feature (15)..(15): n is a, c, g, or u
cngccgugugguggngugaac

SEQ ID NO: 102428 - RNA, 22 nt, Artificial Sequence
  Synthetic
  misc_feature (3)..(3): n is a, c, g, or u
  misc_feature (16)..(16): n is a, c, g, or u
acngccgugugguggngugaac

SEQ ID NO: 102429 - RNA, 23 nt, Artificial Sequence
  Synthetic
  misc_feature (4)..(4): n is a, c, g, or u
  misc_feature (17)..(17): n is a, c, g, or u
gacngccgugugguggngugaac

SEQ ID NO: 102430 - RNA, 24 nt, Artificial Sequence
  Synthetic
  misc_feature (5)..(5): n is a, c, g, or u
  misc_feature (18)..(18): n is a, c, g, or u
agacngccgugugguggngugaac

SEQ ID NO: 102431 - RNA, 18 nt, Artificial Sequence
  Synthetic
cagcuuggaggcuugaac

SEQ ID NO: 102432 - RNA, 19 nt, Artificial Sequence
  Synthetic
acagcuuggaggcuugaac

SEQ ID NO: 102433 - RNA, 20 nt, Artificial Sequence
  Synthetic
cacagcuuggaggcuugaac

SEQ ID NO: 102434 - RNA, 21 nt, Artificial Sequence
  Synthetic
gcacagcuuggaggcuugaac

SEQ ID NO: 102435 - RNA, 22 nt, Artificial Sequence
  Synthetic
ggcacagcuuggaggcuugaac

SEQ ID NO: 102436 - RNA, 23 nt, Artificial Sequence
  Synthetic
aggcacagcuuggaggcuugaac

SEQ ID NO: 102437 - RNA, 24 nt, Artificial Sequence
  Synthetic
aaggcacagcuuggaggcuugaac

SEQ ID NO: 102438 - RNA, 18 nt, Artificial Sequence
  Synthetic
ccacaucauccauauaac

SEQ ID NO: 102439 - RNA, 19 nt, Artificial Sequence
  Synthetic
accacaucauccauauaac

SEQ ID NO: 102440 - RNA, 20 nt, Artificial Sequence
  Synthetic
uaccacaucauccauauaac

SEQ ID NO: 102441 - RNA, 21 nt, Artificial Sequence
  Synthetic
auaccacaucauccauauaac

SEQ ID NO: 102442 - RNA, 22 nt, Artificial Sequence
  Synthetic
aauaccacaucauccauauaac

SEQ ID NO: 102443 - RNA, 23 nt, Artificial Sequence
  Synthetic
caauaccacaucauccauauaac

SEQ ID NO: 102444 - RNA, 24 nt, Artificial Sequence
  Synthetic
ccaauaccacaucauccauauaac

SEQ ID NO: 102445 - RNA, 18 nt, Artificial Sequence
  Synthetic
aguccaagggauacuaac

SEQ ID NO: 102446 - RNA, 19 nt, Artificial Sequence
  Synthetic
gaguccaagggauacuaac

SEQ ID NO: 102447 - RNA, 20 nt, Artificial Sequence
  Synthetic
ugaguccaagggauacuaac

SEQ ID NO: 102448 - RNA, 21 nt, Artificial Sequence
  Synthetic
augaguccaagggauacuaac

SEQ ID NO: 102449 - RNA, 22 nt, Artificial Sequence
  Synthetic
uaugaguccaagggauacuaac

SEQ ID NO: 102450 - RNA, 23 nt, Artificial Sequence
  Synthetic
uuaugaguccaagggauacuaac

SEQ ID NO: 102451 - RNA, 24 nt, Artificial Sequence
  Synthetic
cuuaugaguccaagggauacuaac

SEQ ID NO: 102452 - RNA, 18 nt, Artificial Sequence
  Synthetic
aaaaaccccgccuguaac

SEQ ID NO: 102453 - RNA, 19 nt, Artificial Sequence
  Synthetic
gaaaaaccccgccuguaac

SEQ ID NO: 102454 - RNA, 20 nt, Artificial Sequence
  Synthetic
agaaaaaccccgccuguaac

SEQ ID NO: 102455 - RNA, 21 nt, Artificial Sequence
  Synthetic
aagaaaaaccccgccuguaac

SEQ ID NO: 102456 - RNA, 22 nt, Artificial Sequence
  Synthetic
caagaaaaaccccgccuguaac

SEQ ID NO: 102457 - RNA, 23 nt, Artificial Sequence
  Synthetic
acaagaaaaaccccgccuguaac

SEQ ID NO: 102458 - RNA, 24 nt, Artificial Sequence
  Synthetic
aacaagaaaaaccccgccuguaac

SEQ ID NO: 102459 - RNA, 18 nt, Artificial Sequence
  Synthetic
ucuccuuuuuucauuaac

SEQ ID NO: 102460 - RNA, 19 nt, Artificial Sequence
  Synthetic
aucuccuuuuuucauuaac

SEQ ID NO: 102461 - RNA, 20 nt, Artificial Sequence
  Synthetic
aaucuccuuuuuucauuaac

SEQ ID NO: 102462 - RNA, 21 nt, Artificial Sequence
  Synthetic
uaaucuccuuuuuucauuaac

SEQ ID NO: 102463 - RNA, 22 nt, Artificial Sequence
  Synthetic
uuaaucuccuuuuuucauuaac

SEQ ID NO: 102464 - RNA, 23 nt, Artificial Sequence
  Synthetic
uuuaaucuccuuuuuucauuaac

SEQ ID NO: 102465 - RNA, 24 nt, Artificial Sequence
  Synthetic
uuuuaaucuccuuuuuucauuaac

SEQ ID NO: 102466 - RNA, 18 nt, Artificial Sequence
  Synthetic
uuuuaggcccauauuaac

SEQ ID NO: 102467 - RNA, 19 nt, Artificial Sequence
  Synthetic
  misc_feature (1)..(1): n is a, c, g, or u
nuuuuaggcccauauuaac

SEQ ID NO: 102468 - RNA, 20 nt, Artificial Sequence
  Synthetic
  misc_feature (2)..(2): n is a, c, g, or u
anuuuuaggcccauauuaac

SEQ ID NO: 102469 - RNA, 21 nt, Artificial Sequence
  Synthetic
  misc_feature (3)..(3): n is a, c, g, or u
ganuuuuaggcccauauuaac

SEQ ID NO: 102470 - RNA, 22 nt, Artificial Sequence
  Synthetic
  misc_feature (4)..(4): n is a, c, g, or u
uganuuuuaggcccauauuaac

SEQ ID NO: 102471 - RNA, 23 nt, Artificial Sequence
  Synthetic
  misc_feature (5)..(5): n is a, c, g, or u
cuganuuuuaggcccauauuaac

SEQ ID NO: 102472 - RNA, 24 nt, Artificial Sequence
  Synthetic
  misc_feature (6)..(6): n is a, c, g, or u
ucuganuuuuaggcccauauuaac

SEQ ID NO: 102473 - RNA, 18 nt, Artificial Sequence
  Synthetic
aggagugcgaauccacac

SEQ ID NO: 102474 - RNA, 19 nt, Artificial Sequence
  Synthetic
  misc_feature (1)..(1): n is a, c, g, or u
naggagugcgaauccacac

SEQ ID NO: 102475 - RNA, 20 nt, Artificial Sequence
  Synthetic
  misc_feature (2)..(2): n is a, c, g, or u
gnaggagugcgaauccacac

SEQ ID NO: 102476 - RNA, 21 nt, Artificial Sequence
  Synthetic
  misc_feature (1)..(1): n is a, c, g, or u
  misc_feature (3)..(3): n is a, c, g, or u
ngnaggagugcgaauccacac

SEQ ID NO: 102477 - RNA, 22 nt, Artificial Sequence
  Synthetic
  misc_feature (2)..(2): n is a, c, g, or u
  misc_feature (4)..(4): n is a, c, g, or u
cngnaggagugcgaauccacac

SEQ ID NO: 102478 - RNA, 23 nt, Artificial Sequence
  Synthetic
  misc_feature (3)..(3): n is a, c, g, or u
  misc_feature (5)..(5): n is a, c, g, or u
gcngnaggagugcgaauccacac

SEQ ID NO: 102479 - RNA, 24 nt, Artificial Sequence
  Synthetic
  misc_feature (4)..(4): n is a, c, g, or u
  misc_feature (6)..(6): n is a, c, g, or u
agcngnaggagugcgaauccacac

SEQ ID NO: 102480 - RNA, 18 nt, Artificial Sequence
  Synthetic
uucagauauuguuuacac

SEQ ID NO: 102481 - RNA, 19 nt, Artificial Sequence
  Synthetic
guucagauauuguuuacac

SEQ ID NO: 102482 - RNA, 20 nt, Artificial Sequence
  Synthetic
gguucagauauuguuuacac

SEQ ID NO: 102483 - RNA, 21 nt, Artificial Sequence
  Synthetic
agguucagauauuguuuacac

SEQ ID NO: 102484 - RNA, 22 nt, Artificial Sequence
  Synthetic
aagguucagauauuguuuacac

SEQ ID NO: 102485 - RNA, 23 nt, Artificial Sequence
  Synthetic
aaagguucagauauuguuuacac

SEQ ID NO: 102486 - RNA, 24 nt, Artificial Sequence
  Synthetic
uaaagguucagauauuguuuacac

SEQ ID NO: 102487 - RNA, 18 nt, Artificial Sequence
  Synthetic
  misc_feature (10)..(10): n is a, c, g, or u
uccaugcccnaaagccac

SEQ ID NO: 102488 - RNA, 19 nt, Artificial Sequence
  Synthetic
  misc_feature (11)..(11): n is a, c, g, or u
guccaugcccnaaagccac

SEQ ID NO: 102489 - RNA, 20 nt, Artificial Sequence
  Synthetic
  misc_feature (12)..(12): n is a, c, g, or u
uguccaugcccnaaagccac

SEQ ID NO: 102490 - RNA, 21 nt, Artificial Sequence
  Synthetic
  misc_feature (13)..(13): n is a, c, g, or u
auguccaugcccnaaagccac

SEQ ID NO: 102491 - RNA, 22 nt, Artificial Sequence
  Synthetic
  misc_feature (14)..(14): n is a, c, g, or u
aauguccaugcccnaaagccac

SEQ ID NO: 102492 - RNA, 23 nt, Artificial Sequence
  Synthetic
  misc_feature (15)..(15): n is a, c, g, or u
caauguccaugcccnaaagccac

SEQ ID NO: 102493 - RNA, 24 nt, Artificial Sequence
  Synthetic
  misc_feature (16)..(16): n is a, c, g, or u
ucaauguccaugcccnaaagccac

SEQ ID NO: 102494 - RNA, 18 nt, Artificial Sequence
  Synthetic
aaaagagaguaacuccac

SEQ ID NO: 102495 - RNA, 19 nt, Artificial Sequence
  Synthetic
aaaaagagaguaacuccac

SEQ ID NO: 102496 - RNA, 20 nt, Artificial Sequence
  Synthetic
aaaaaagagaguaacuccac

SEQ ID NO: 102497 - RNA, 21 nt, Artificial Sequence
  Synthetic
caaaaaagagaguaacuccac

SEQ ID NO: 102498 - RNA, 22 nt, Artificial Sequence
  Synthetic
gcaaaaaagagaguaacuccac

SEQ ID NO: 102499 - RNA, 23 nt, Artificial Sequence
  Synthetic
ggcaaaaaagagaguaacuccac

SEQ ID NO: 102500 - RNA, 24 nt, Artificial Sequence
  Synthetic
aggcaaaaaagagaguaacuccac

SEQ ID NO: 102501 - RNA, 18 nt, Artificial Sequence
  Synthetic
ugagccugagggcuccac

SEQ ID NO: 102502 - RNA, 19 nt, Artificial Sequence
  Synthetic
cugagccugagggcuccac

SEQ ID NO: 102503 - RNA, 20 nt, Artificial Sequence
  Synthetic
ccugagccugagggcuccac

SEQ ID NO: 102504 - RNA, 21 nt, Artificial Sequence
  Synthetic
cccugagccugagggcuccac

SEQ ID NO: 102505 - RNA, 22 nt, Artificial Sequence
  Synthetic
gcccugagccugagggcuccac

SEQ ID NO: 102506 - RNA, 23 nt, Artificial Sequence
  Synthetic
ugcccugagccugagggcuccac

SEQ ID NO: 102507 - RNA, 24 nt, Artificial Sequence
  Synthetic
augcccugagccugagggcuccac

SEQ ID NO: 102508 - RNA, 18 nt, Artificial Sequence
  Synthetic
aaauugagagaaguccac

SEQ ID NO: 102509 - RNA, 19 nt, Artificial Sequence
  Synthetic
aaaauugagagaaguccac

SEQ ID NO: 102510 - RNA, 20 nt, Artificial Sequence
  Synthetic
gaaaauugagagaaguccac

SEQ ID NO: 102511 - RNA, 21 nt, Artificial Sequence
  Synthetic
agaaaauugagagaaguccac

SEQ ID NO: 102512 - RNA, 22 nt, Artificial Sequence
  Synthetic
uagaaaauugagagaaguccac

SEQ ID NO: 102513 - RNA, 23 nt, Artificial Sequence
  Synthetic
cuagaaaauugagagaaguccac

SEQ ID NO: 102514 - RNA, 24 nt, Artificial Sequence
  Synthetic
ccuagaaaauugagagaaguccac

SEQ ID NO: 102515 - RNA, 18 nt, Artificial Sequence
  Synthetic
ccagauucaucaacucac

SEQ ID NO: 102516 - RNA, 19 nt, Artificial Sequence
  Synthetic
gccagauucaucaacucac

SEQ ID NO: 102517 - RNA, 20 nt, Artificial Sequence
  Synthetic
ggccagauucaucaacucac

SEQ ID NO: 102518 - RNA, 21 nt, Artificial Sequence
  Synthetic
uggccagauucaucaacucac

SEQ ID NO: 102519 - RNA, 22 nt, Artificial Sequence
  Synthetic
guggccagauucaucaacucac

SEQ ID NO: 102520 - RNA, 23 nt, Artificial Sequence
  Synthetic
gguggccagauucaucaacucac

SEQ ID NO: 102521 - RNA, 24 nt, Artificial Sequence
  Synthetic
agguggccagauucaucaacucac

SEQ ID NO: 102522 - RNA, 18 nt, Artificial Sequence
  Synthetic
  misc_feature (4)..(4): n is a, c, g, or u
aaanuauaggccccucac

SEQ ID NO: 102523 - RNA, 19 nt, Artificial Sequence
  Synthetic
  misc_feature (5)..(5): n is a, c, g, or u
gaaanuauaggccccucac

SEQ ID NO: 102524 - RNA, 20 nt, Artificial Sequence
  Synthetic
  misc_feature (6)..(6): n is a, c, g, or u
ggaaanuauaggccccucac

SEQ ID NO: 102525 - RNA, 21 nt, Artificial Sequence
  Synthetic
  misc_feature (7)..(7): n is a, c, g, or u
aggaaanuauaggccccucac

SEQ ID NO: 102526 - RNA, 22 nt, Artificial Sequence
  Synthetic
  misc_feature (8)..(8): n is a, c, g, or u
caggaaanuauaggccccucac

SEQ ID NO: 102527 - RNA, 23 nt, Artificial Sequence
  Synthetic
  misc_feature (9)..(9): n is a, c, g, or u
gcaggaaanuauaggccccucac

SEQ ID NO: 102528 - RNA, 24 nt, Artificial Sequence
  Synthetic
  misc_feature (10)..(10): n is a, c, g, or u
agcaggaaanuauaggccccucac

SEQ ID NO: 102529 - RNA, 18 nt, Artificial Sequence
  Synthetic
auccacacuccaaaagac

SEQ ID NO: 102530 - RNA, 19 nt, Artificial Sequence
  Synthetic
aauccacacuccaaaagac

SEQ ID NO: 102531 - RNA, 20 nt, Artificial Sequence
  Synthetic
gaauccacacuccaaaagac

SEQ ID NO: 102532 - RNA, 21 nt, Artificial Sequence
  Synthetic
cgaauccacacuccaaaagac

SEQ ID NO: 102533 - RNA, 22 nt, Artificial Sequence
  Synthetic
gcgaauccacacuccaaaagac

SEQ ID NO: 102534 - RNA, 23 nt, Artificial Sequence
  Synthetic
ugcgaauccacacuccaaaagac

SEQ ID NO: 102535 - RNA, 24 nt, Artificial Sequence
  Synthetic
gugcgaauccacacuccaaaagac

SEQ ID NO: 102536 - RNA, 18 nt, Artificial Sequence
  Synthetic
aaauguauacccaaagac

SEQ ID NO: 102537 - RNA, 19 nt, Artificial Sequence
  Synthetic
  misc_feature (1)..(1): n is a, c, g, or u
naaauguauacccaaagac

SEQ ID NO: 102538 - RNA, 20 nt, Artificial Sequence
  Synthetic
  misc_feature (2)..(2): n is a, c, g, or u
unaaauguauacccaaagac

SEQ ID NO: 102539 - RNA, 21 nt, Artificial Sequence
  Synthetic
  misc_feature (3)..(3): n is a, c, g, or u
uunaaauguauacccaaagac

SEQ ID NO: 102540 - RNA, 22 nt, Artificial Sequence
  Synthetic
  misc_feature (4)..(4): n is a, c, g, or u
guunaaauguauacccaaagac

SEQ ID NO: 102541 - RNA, 23 nt, Artificial Sequence
  Synthetic
  misc_feature (5)..(5): n is a, c, g, or u
gguunaaauguauacccaaagac

SEQ ID NO: 102542 - RNA, 24 nt, Artificial Sequence
  Synthetic
  misc_feature (6)..(6): n is a, c, g, or u
ggguunaaauguauacccaaagac

SEQ ID NO: 102543 - RNA, 18 nt, Artificial Sequence
  Synthetic
cucuuccaaaaguaagac

SEQ ID NO: 102544 - RNA, 19 nt, Artificial Sequence
  Synthetic
ucucuuccaaaaguaagac

SEQ ID NO: 102545 - RNA, 20 nt, Artificial Sequence
  Synthetic
uucucuuccaaaaguaagac

SEQ ID NO: 102546 - RNA, 21 nt, Artificial Sequence
  Synthetic
uuucucuuccaaaaguaagac

SEQ ID NO: 102547 - RNA, 22 nt, Artificial Sequence
  Synthetic
guuucucuuccaaaaguaagac

SEQ ID NO: 102548 - RNA, 23 nt, Artificial Sequence
  Synthetic
aguuucucuuccaaaaguaagac

SEQ ID NO: 102549 - RNA, 24 nt, Artificial Sequence
  Synthetic
caguuucucuuccaaaaguaagac

SEQ ID NO: 102550 - RNA, 18 nt, Artificial Sequence
  Synthetic
  misc_feature (12)..(12): n is a, c, g, or u
aguccucuuaunuaagac

SEQ ID NO: 102551 - RNA, 19 nt, Artificial Sequence
  Synthetic
  misc_feature (13)..(13): n is a, c, g, or u
gaguccucuuaunuaagac

SEQ ID NO: 102552 - RNA, 20 nt, Artificial Sequence
  Synthetic
  misc_feature (14)..(14): n is a, c, g, or u
agaguccucuuaunuaagac

SEQ ID NO: 102553 - RNA, 21 nt, Artificial Sequence
  Synthetic
  misc_feature (15)..(15): n is a, c, g, or u
aagaguccucuuaunuaagac

SEQ ID NO: 102554 - RNA, 22 nt, Artificial Sequence
  Synthetic
  misc_feature (16)..(16): n is a, c, g, or u
caagaguccucuuaunuaagac

SEQ ID NO: 102555 - RNA, 23 nt, Artificial Sequence
  Synthetic
  misc_feature (17)..(17): n is a, c, g, or u
ccaagaguccucuuaunuaagac

SEQ ID NO: 102556 - RNA, 24 nt, Artificial Sequence
  Synthetic
  misc_feature (18)..(18): n is a, c, g, or u
uccaagaguccucuuaunuaagac

SEQ ID NO: 102557 - RNA, 18 nt, Artificial Sequence
  Synthetic
agaugagaaggcacagac

SEQ ID NO: 102558 - RNA, 19 nt, Artificial Sequence
  Synthetic
cagaugagaaggcacagac

SEQ ID NO: 102559 - RNA, 20 nt, Artificial Sequence
  Synthetic
gcagaugagaaggcacagac

SEQ ID NO: 102560 - RNA, 21 nt, Artificial Sequence
  Synthetic
ggcagaugagaaggcacagac

SEQ ID NO: 102561 - RNA, 22 nt, Artificial Sequence
  Synthetic
cggcagaugagaaggcacagac

SEQ ID NO: 102562 - RNA, 23 nt, Artificial Sequence
  Synthetic
ccggcagaugagaaggcacagac

SEQ ID NO: 102563 - RNA, 24 nt, Artificial Sequence
  Synthetic
  misc_feature (1)..(1): n is a, c, g, or u
nccggcagaugagaaggcacagac

SEQ ID NO: 102564 - RNA, 18 nt, Artificial Sequence
  Synthetic
gaacaauguuccggagac

SEQ ID NO: 102565 - RNA, 19 nt, Artificial Sequence
  Synthetic
ugaacaauguuccggagac

SEQ ID NO: 102566 - RNA, 20 nt, Artificial Sequence
  Synthetic
gugaacaauguuccggagac

SEQ ID NO: 102567 - RNA, 21 nt, Artificial Sequence
  Synthetic
ggugaacaauguuccggagac

SEQ ID NO: 102568 - RNA, 22 nt, Artificial Sequence
  Synthetic
aggugaacaauguuccggagac

SEQ ID NO: 102569 - RNA, 23 nt, Artificial Sequence
  Synthetic
gaggugaacaauguuccggagac

SEQ ID NO: 102570 - RNA, 24 nt, Artificial Sequence
  Synthetic
ugaggugaacaauguuccggagac

SEQ ID NO: 102571 - RNA, 18 nt, Artificial Sequence
  Synthetic
cgccgacgggacguagac

SEQ ID NO: 102572 - RNA, 19 nt, Artificial Sequence
  Synthetic
gcgccgacgggacguagac

SEQ ID NO: 102573 - RNA, 20 nt, Artificial Sequence
  Synthetic
agcgccgacgggacguagac

SEQ ID NO: 102574 - RNA, 18 nt, Artificial Sequence
  Synthetic
guauuuccgagagaggac

SEQ ID NO: 102575 - RNA, 19 nt, Artificial Sequence
  Synthetic
uguauuuccgagagaggac

SEQ ID NO: 102576 - RNA, 20 nt, Artificial Sequence
  Synthetic
guguauuuccgagagaggac

SEQ ID NO: 102577 - RNA, 21 nt, Artificial Sequence
  Synthetic
gguguauuuccgagagaggac

SEQ ID NO: 102578 - RNA, 22 nt, Artificial Sequence
  Synthetic
agguguauuuccgagagaggac

SEQ ID NO: 102579 - RNA, 23 nt, Artificial Sequence
  Synthetic
gagguguauuuccgagagaggac

SEQ ID NO: 102580 - RNA, 24 nt, Artificial Sequence
  Synthetic
ggagguguauuuccgagagaggac

SEQ ID NO: 102581 - RNA, 18 nt, Artificial Sequence
  Synthetic
  misc_feature (9)..(9): n is a, c, g, or u
caggacaanuuggaggac

SEQ ID NO: 102582 - RNA, 19 nt, Artificial Sequence
  Synthetic
  misc_feature (10)..(10): n is a, c, g, or u
ccaggacaanuuggaggac

SEQ ID NO: 102583 - RNA, 20 nt, Artificial Sequence
  Synthetic
  misc_feature (1)..(1): n is a, c, g, or u
  misc_feature (11)..(11): n is a, c, g, or u
nccaggacaanuuggaggac

SEQ ID NO: 102584 - RNA, 21 nt, Artificial Sequence
  Synthetic
  misc_feature (2)..(2): n is a, c, g, or u
  misc_feature (12)..(12): n is a, c, g, or u
anccaggacaanuuggaggac

SEQ ID NO: 102585 - RNA, 22 nt, Artificial Sequence
  Synthetic
  misc_feature (3)..(3): n is a, c, g, or u
  misc_feature (13)..(13): n is a, c, g, or u
uanccaggacaanuuggaggac

SEQ ID NO: 102586 - RNA, 23 nt, Artificial Sequence
  Synthetic
  misc_feature (4)..(4): n is a, c, g, or u
  misc_feature (14)..(14): n is a, c, g, or u
auanccaggacaanuuggaggac

SEQ ID NO: 102587 - RNA, 24 nt, Artificial Sequence
  Synthetic
  misc_feature (5)..(5): n is a, c, g, or u
  misc_feature (15)..(15): n is a, c, g, or u
gauanccaggacaanuuggaggac

SEQ ID NO: 102588 - RNA, 18 nt, Artificial Sequence
  Synthetic
aggcuugaacaguaggac

SEQ ID NO: 102589 - RNA, 19 nt, Artificial Sequence
  Synthetic
gaggcuugaacaguaggac

SEQ ID NO: 102590 - RNA, 20 nt, Artificial Sequence
  Synthetic
ggaggcuugaacaguaggac

SEQ ID NO: 102591 - RNA, 21 nt, Artificial Sequence
  Synthetic
uggaggcuugaacaguaggac

SEQ ID NO: 102592 - RNA, 22 nt, Artificial Sequence
  Synthetic
uuggaggcuugaacaguaggac

SEQ ID NO: 102593 - RNA, 23 nt, Artificial Sequence
  Synthetic
cuuggaggcuugaacaguaggac

SEQ ID NO: 102594 - RNA, 24 nt, Artificial Sequence
  Synthetic
gcuuggaggcuugaacaguaggac

SEQ ID NO: 102595 - RNA, 18 nt, Artificial Sequence
  Synthetic
gagccaggagaaacggac

SEQ ID NO: 102596 - RNA, 19 nt, Artificial Sequence
  Synthetic
ugagccaggagaaacggac

SEQ ID NO: 102597 - RNA, 20 nt, Artificial Sequence
  Synthetic
cugagccaggagaaacggac

SEQ ID NO: 102598 - RNA, 21 nt, Artificial Sequence
  Synthetic
acugagccaggagaaacggac

SEQ ID NO: 102599 - RNA, 22 nt, Artificial Sequence
  Synthetic
aacugagccaggagaaacggac

SEQ ID NO: 102600 - RNA, 23 nt, Artificial Sequence
  Synthetic
aaacugagccaggagaaacggac

SEQ ID NO: 102601 - RNA, 24 nt, Artificial Sequence
  Synthetic
uaaacugagccaggagaaacggac

SEQ ID NO: 102602 - RNA, 18 nt, Artificial Sequence
  Synthetic
auucagcgccgacgggac

SEQ ID NO: 102603 - RNA, 19 nt, Artificial Sequence
  Synthetic
gauucagcgccgacgggac

SEQ ID NO: 102604 - RNA, 20 nt, Artificial Sequence
  Synthetic
ggauucagcgccgacgggac

SEQ ID NO: 102605 - RNA, 18 nt, Artificial Sequence
  Synthetic
  misc_feature (6)..(6): n is a, c, g, or u
  misc_feature (8)..(8): n is a, c, g, or u
gcagangnagaaggggac

SEQ ID NO: 102606 - RNA, 19 nt, Artificial Sequence
  Synthetic
  misc_feature (7)..(7): n is a, c, g, or u
  misc_feature (9)..(9): n is a, c, g, or u
ggcagangnagaaggggac

SEQ ID NO: 102607 - RNA, 20 nt, Artificial Sequence
  Synthetic
  misc_feature (8)..(8): n is a, c, g, or u
  misc_feature (10)..(10): n is a, c, g, or u
cggcagangnagaaggggac

SEQ ID NO: 102608 - RNA, 21 nt, Artificial Sequence
  Synthetic
  misc_feature (9)..(9): n is a, c, g, or u
  misc_feature (11)..(11): n is a, c, g, or u
acggcagangnagaaggggac

SEQ ID NO: 102609 - RNA, 22 nt, Artificial Sequence
  Synthetic
  misc_feature (10)..(10): n is a, c, g, or u
  misc_feature (12)..(12): n is a, c, g, or u
aacggcagangnagaaggggac

SEQ ID NO: 102610 - RNA, 23 nt, Artificial Sequence
  Synthetic
  misc_feature (11)..(11): n is a, c, g, or u
  misc_feature (13)..(13): n is a, c, g, or u
gaacggcagangnagaaggggac

SEQ ID NO: 102611 - RNA, 24 nt, Artificial Sequence
  Synthetic
  misc_feature (12)..(12): n is a, c, g, or u
  misc_feature (14)..(14): n is a, c, g, or u
ggaacggcagangnagaaggggac

SEQ ID NO: 102612 - RNA, 18 nt, Artificial Sequence
  Synthetic
ccaaaagacaccaaauac

SEQ ID NO: 102613 - RNA, 19 nt, Artificial Sequence
  Synthetic
uccaaaagacaccaaauac

SEQ ID NO: 102614 - RNA, 20 nt, Artificial Sequence
  Synthetic
cuccaaaagacaccaaauac

SEQ ID NO: 102615 - RNA, 21 nt, Artificial Sequence
  Synthetic
acuccaaaagacaccaaauac

SEQ ID NO: 102616 - RNA, 22 nt, Artificial Sequence
  Synthetic
cacuccaaaagacaccaaauac

SEQ ID NO: 102617 - RNA, 23 nt, Artificial Sequence
  Synthetic
acacuccaaaagacaccaaauac

SEQ ID NO: 102618 - RNA, 24 nt, Artificial Sequence
  Synthetic
cacacuccaaaagacaccaaauac

SEQ ID NO: 102619 - RNA, 18 nt, Artificial Sequence
  Synthetic
  misc_feature (8)..(8): n is a, c, g, or u
uaggguunaaauguauac

SEQ ID NO: 102620 - RNA, 19 nt, Artificial Sequence
  Synthetic
  misc_feature (9)..(9): n is a, c, g, or u
uuaggguunaaauguauac

SEQ ID NO: 102621 - RNA, 20 nt, Artificial Sequence
  Synthetic
  misc_feature (10)..(10): n is a, c, g, or u
auuaggguunaaauguauac

SEQ ID NO: 102622 - RNA, 21 nt, Artificial Sequence
  Synthetic
  misc_feature (11)..(11): n is a, c, g, or u
uauuaggguunaaauguauac

SEQ ID NO: 102623 - RNA, 22 nt, Artificial Sequence
  Synthetic
  misc_feature (12)..(12): n is a, c, g, or u
uuauuaggguunaaauguauac

SEQ ID NO: 102624 - RNA, 23 nt, Artificial Sequence
  Synthetic
  misc_feature (13)..(13): n is a, c, g, or u
uuuauuaggguunaaauguauac

SEQ ID NO: 102625 - RNA, 24 nt, Artificial Sequence
  Synthetic
  misc_feature (14)..(14): n is a, c, g, or u
uuuuauuaggguunaaauguauac

SEQ ID NO: 102626 - RNA, 18 nt, Artificial Sequence
  Synthetic
  misc_feature (13)..(13): n is a, c, g, or u
ccuacagccuccnaguac

SEQ ID NO: 102627 - RNA, 19 nt, Artificial Sequence
  Synthetic
  misc_feature (14)..(14): n is a, c, g, or u
gccuacagccuccnaguac

SEQ ID NO: 102628 - RNA, 20 nt, Artificial Sequence
  Synthetic
  misc_feature (15)..(15): n is a, c, g, or u
ugccuacagccuccnaguac

SEQ ID NO: 102629 - RNA, 21 nt, Artificial Sequence
  Synthetic
  misc_feature (16)..(16): n is a, c, g, or u
augccuacagccuccnaguac

SEQ ID NO: 102630 - RNA, 22 nt, Artificial Sequence
  Synthetic
  misc_feature (17)..(17): n is a, c, g, or u
uaugccuacagccuccnaguac

SEQ ID NO: 102631 - RNA, 23 nt, Artificial Sequence
  Synthetic
  misc_feature (18)..(18): n is a, c, g, or u
uuaugccuacagccuccnaguac

SEQ ID NO: 102632 - RNA, 24 nt, Artificial Sequence
  Synthetic
  misc_feature (19)..(19): n is a, c, g, or u
uuuaugccuacagccuccnaguac

SEQ ID NO: 102633 - RNA, 18 nt, Artificial Sequence
  Synthetic
aggauuaaagacagguac

SEQ ID NO: 102634 - RNA, 19 nt, Artificial Sequence
  Synthetic
caggauuaaagacagguac

SEQ ID NO: 102635 - RNA, 20 nt, Artificial Sequence
  Synthetic
ucaggauuaaagacagguac

SEQ ID NO: 102636 - RNA, 21 nt, Artificial Sequence
  Synthetic
  misc_feature (1)..(1): n is a, c, g, or u
nucaggauuaaagacagguac

SEQ ID NO: 102637 - RNA, 22 nt, Artificial Sequence
  Synthetic
  misc_feature (2)..(2): n is a, c, g, or u
anucaggauuaaagacagguac

SEQ ID NO: 102638 - RNA, 23 nt, Artificial Sequence
  Synthetic
  misc_feature (3)..(3): n is a, c, g, or u
canucaggauuaaagacagguac

SEQ ID NO: 102639 - RNA, 24 nt, Artificial Sequence
  Synthetic
  misc_feature (4)..(4): n is a, c, g, or u
ccanucaggauuaaagacagguac

SEQ ID NO: 102640 - RNA, 18 nt, Artificial Sequence
  Synthetic
  misc_feature (5)..(5): n is a, c, g, or u
  misc_feature (8)..(8): n is a, c, g, or u
  misc_feature (11)..(11): n is a, c, g, or u
  misc_feature (14)..(14): n is a, c, g, or u
guucnugnggnaanguac

SEQ ID NO: 102641 - RNA, 19 nt, Artificial Sequence
  Synthetic
  misc_feature (6)..(6): n is a, c, g, or u
  misc_feature (9)..(9): n is a, c, g, or u
  misc_feature (12)..(12): n is a, c, g, or u
  misc_feature (15)..(15): n is a, c, g, or u
uguucnugnggnaanguac

SEQ ID NO: 102642 - RNA, 20 nt, Artificial Sequence
  Synthetic
  misc_feature (7)..(7): n is a, c, g, or u
  misc_feature (10)..(10): n is a, c, g, or u
  misc_feature (13)..(13): n is a, c, g, or u
  misc_feature (16)..(16): n is a, c, g, or u
auguucnugnggnaanguac

SEQ ID NO: 102643 - RNA, 21 nt, Artificial Sequence
  Synthetic
  misc_feature (8)..(8): n is a, c, g, or u
  misc_feature (11)..(11): n is a, c, g, or u
  misc_feature (14)..(14): n is a, c, g, or u
  misc_feature (17)..(17): n is a, c, g, or u
uauguucnugnggnaanguac

SEQ ID NO: 102644 - RNA, 22 nt, Artificial Sequence
  Synthetic
  misc_feature (9)..(9): n is a, c, g, or u
  misc_feature (12)..(12): n is a, c, g, or u
  misc_feature (15)..(15): n is a, c, g, or u
  misc_feature (18)..(18): n is a, c, g, or u
auauguucnugnggnaanguac

SEQ ID NO: 102645 - RNA, 23 nt, Artificial Sequence
  Synthetic
  misc_feature (10)..(10): n is a, c, g, or u
  misc_feature (13)..(13): n is a, c, g, or u
  misc_feature (16)..(16): n is a, c, g, or u
  misc_feature (19)..(19): n is a, c, g, or u
aauauguucnugnggnaanguac

SEQ ID NO: 102646 - RNA, 24 nt, Artificial Sequence
  Synthetic
  misc_feature (11)..(11): n is a, c, g, or u
  misc_feature (14)..(14): n is a, c, g, or u
  misc_feature (17)..(17): n is a, c, g, or u
  misc_feature (20)..(20): n is a, c, g, or u
caauauguucnugnggnaanguac

SEQ ID NO: 102647 - RNA, 18 nt, Artificial Sequence
  Synthetic
cguccgaagguuuuguac

SEQ ID NO: 102648 - RNA, 19 nt, Artificial Sequence
  Synthetic
ccguccgaagguuuuguac

SEQ ID NO: 102649 - RNA, 20 nt, Artificial Sequence
  Synthetic
uccguccgaagguuuuguac

SEQ ID NO: 102650 - RNA, 21 nt, Artificial Sequence
  Synthetic
uuccguccgaagguuuuguac

SEQ ID NO: 102651 - RNA, 22 nt, Artificial Sequence
  Synthetic
uuuccguccgaagguuuuguac

SEQ ID NO: 102652 - RNA, 23 nt, Artificial Sequence
  Synthetic
  misc_feature (1)..(1): n is a, c, g, or u
nuuuccguccgaagguuuuguac

SEQ ID NO: 102653 - RNA, 24 nt, Artificial Sequence
  Synthetic
  misc_feature (2)..(2): n is a, c, g, or u
anuuuccguccgaagguuuuguac

SEQ ID NO: 102654 - RNA, 18 nt, Artificial Sequence
  Synthetic
gguucagauauuguuuac

SEQ ID NO: 102655 - RNA, 19 nt, Artificial Sequence
  Synthetic
agguucagauauuguuuac

SEQ ID NO: 102656 - RNA, 20 nt, Artificial Sequence
  Synthetic
aagguucagauauuguuuac

SEQ ID NO: 102657 - RNA, 21 nt, Artificial Sequence
  Synthetic
aaagguucagauauuguuuac

SEQ ID NO: 102658 - RNA, 22 nt, Artificial Sequence
  Synthetic
uaaagguucagauauuguuuac

SEQ ID NO: 102659 - RNA, 23 nt, Artificial Sequence
  Synthetic
guaaagguucagauauuguuuac

SEQ ID NO: 102660 - RNA, 24 nt, Artificial Sequence
  Synthetic
gguaaagguucagauauuguuuac

SEQ ID NO: 102661 - RNA, 18 nt, Artificial Sequence
  Synthetic
ugguaguccagaagaacc

SEQ ID NO: 102662 - RNA, 19 nt, Artificial Sequence
  Synthetic
uugguaguccagaagaacc

SEQ ID NO: 102663 - RNA, 20 nt, Artificial Sequence
  Synthetic
cuugguaguccagaagaacc

SEQ ID NO: 102664 - RNA, 21 nt, Artificial Sequence
  Synthetic
ccuugguaguccagaagaacc

SEQ ID NO: 102665 - RNA, 22 nt, Artificial Sequence
  Synthetic
accuugguaguccagaagaacc

SEQ ID NO: 102666 - RNA, 23 nt, Artificial Sequence
  Synthetic
uaccuugguaguccagaagaacc

SEQ ID NO: 102667 - RNA, 24 nt, Artificial Sequence
  Synthetic
auaccuugguaguccagaagaacc

SEQ ID NO: 102668 - RNA, 18 nt, Artificial Sequence
  Synthetic
gggaaagcccuacgaacc

SEQ ID NO: 102669 - RNA, 19 nt, Artificial Sequence
  Synthetic
ggggaaagcccuacgaacc

SEQ ID NO: 102670 - RNA, 20 nt, Artificial Sequence
  Synthetic
gggggaaagcccuacgaacc

SEQ ID NO: 102671 - RNA, 21 nt, Artificial Sequence
  Synthetic
ugggggaaagcccuacgaacc

SEQ ID NO: 102672 - RNA, 22 nt, Artificial Sequence
  Synthetic
gugggggaaagcccuacgaacc

SEQ ID NO: 102673 - RNA, 23 nt, Artificial Sequence
  Synthetic
agugggggaaagcccuacgaacc

SEQ ID NO: 102674 - RNA, 24 nt, Artificial Sequence
  Synthetic
cagugggggaaagcccuacgaacc

SEQ ID NO: 102675 - RNA, 18 nt, Artificial Sequence
  Synthetic
  misc_feature (9)..(9): n is a, c, g, or u
ccaugcccnaaagccacc

SEQ ID NO: 102676 - RNA, 19 nt, Artificial Sequence
  Synthetic
  misc_feature (10)..(10): n is a, c, g, or u
uccaugcccnaaagccacc

SEQ ID NO: 102677 - RNA, 20 nt, Artificial Sequence
  Synthetic
  misc_feature (11)..(11): n is a, c, g, or u
guccaugcccnaaagccacc

SEQ ID NO: 102678 - RNA, 21 nt, Artificial Sequence
  Synthetic
  misc_feature (12)..(12): n is a, c, g, or u
uguccaugcccnaaagccacc

SEQ ID NO: 102679 - RNA, 22 nt, Artificial Sequence
  Synthetic
  misc_feature (13)..(13): n is a, c, g, or u
auguccaugcccnaaagccacc

SEQ ID NO: 102680 - RNA, 23 nt, Artificial Sequence
  Synthetic
  misc_feature (14)..(14): n is a, c, g, or u
aauguccaugcccnaaagccacc

SEQ ID NO: 102681 - RNA, 24 nt, Artificial Sequence
  Synthetic
  misc_feature (15)..(15): n is a, c, g, or u
caauguccaugcccnaaagccacc

SEQ ID NO: 102682 - RNA, 18 nt, Artificial Sequence
  Synthetic
uccggaacuggagccacc

SEQ ID NO: 102683 - RNA, 19 nt, Artificial Sequence
  Synthetic
uuccggaacuggagccacc

SEQ ID NO: 102684 - RNA, 20 nt, Artificial Sequence
  Synthetic
guuccggaacuggagccacc

SEQ ID NO: 102685 - RNA, 21 nt, Artificial Sequence
  Synthetic
uguuccggaacuggagccacc

SEQ ID NO: 102686 - RNA, 22 nt, Artificial Sequence
  Synthetic
cuguuccggaacuggagccacc

SEQ ID NO: 102687 - RNA, 23 nt, Artificial Sequence
  Synthetic
acuguuccggaacuggagccacc

SEQ ID NO: 102688 - RNA, 24 nt, Artificial Sequence
  Synthetic
uacuguuccggaacuggagccacc

SEQ ID NO: 102689 - RNA, 18 nt, Artificial Sequence
  Synthetic
gagccugagggcuccacc

SEQ ID NO: 102690 - RNA, 19 nt, Artificial Sequence
  Synthetic
ugagccugagggcuccacc

SEQ ID NO: 102691 - RNA, 20 nt, Artificial Sequence
  Synthetic
cugagccugagggcuccacc

SEQ ID NO: 102692 - RNA, 21 nt, Artificial Sequence
  Synthetic
ccugagccugagggcuccacc

SEQ ID NO: 102693 - RNA, 22 nt, Artificial Sequence
  Synthetic
cccugagccugagggcuccacc

SEQ ID NO: 102694 - RNA, 23 nt, Artificial Sequence
  Synthetic
gcccugagccugagggcuccacc

SEQ ID NO: 102695 - RNA, 24 nt, Artificial Sequence
  Synthetic
ugcccugagccugagggcuccacc

SEQ ID NO: 102696 - RNA, 18 nt, Artificial Sequence
  Synthetic
  misc_feature (11)..(11): n is a, c, g, or u
guccucuuaunuaagacc

SEQ ID NO: 102697 - RNA, 19 nt, Artificial Sequence
  Synthetic
  misc_feature (12)..(12): n is a, c, g, or u
aguccucuuaunuaagacc

SEQ ID NO: 102698 - RNA, 20 nt, Artificial Sequence
  Synthetic
  misc_feature (13)..(13): n is a, c, g, or u
gaguccucuuaunuaagacc

SEQ ID NO: 102699 - RNA, 21 nt, Artificial Sequence
  Synthetic
  misc_feature (14)..(14): n is a, c, g, or u
agaguccucuuaunuaagacc

SEQ ID NO: 102700 - RNA, 22 nt, Artificial Sequence
  Synthetic
  misc_feature (15)..(15): n is a, c, g, or u
aagaguccucuuaunuaagacc

SEQ ID NO: 102701 - RNA, 23 nt, Artificial Sequence
  Synthetic
  misc_feature (16)..(16): n is a, c, g, or u
caagaguccucuuaunuaagacc

SEQ ID NO: 102702 - RNA, 24 nt, Artificial Sequence
  Synthetic
  misc_feature (17)..(17): n is a, c, g, or u
ccaagaguccucuuaunuaagacc

SEQ ID NO: 102703 - RNA, 18 nt, Artificial Sequence
  Synthetic
cccaagaauauggugacc

SEQ ID NO: 102704 - RNA, 19 nt, Artificial Sequence
  Synthetic
ucccaagaauauggugacc

SEQ ID NO: 102705 - RNA, 20 nt, Artificial Sequence
  Synthetic
uucccaagaauauggugacc

SEQ ID NO: 102706 - RNA, 21 nt, Artificial Sequence
  Synthetic
guucccaagaauauggugacc

SEQ ID NO: 102707 - RNA, 22 nt, Artificial Sequence
  Synthetic
uguucccaagaauauggugacc

SEQ ID NO: 102708 - RNA, 23 nt, Artificial Sequence
  Synthetic
uuguucccaagaauauggugacc

SEQ ID NO: 102709 - RNA, 24 nt, Artificial Sequence
  Synthetic
cuuguucccaagaauauggugacc

SEQ ID NO: 102710 - RNA, 18 nt, Artificial Sequence
  Synthetic
  misc_feature (7)..(7): n is a, c, g, or u
aggguunaaauguauacc

SEQ ID NO: 102711 - RNA, 19 nt, Artificial Sequence
  Synthetic
  misc_feature (8)..(8): n is a, c, g, or u
uaggguunaaauguauacc

SEQ ID NO: 102712 - RNA, 20 nt, Artificial Sequence
  Synthetic
  misc_feature (9)..(9): n is a, c, g, or u
uuaggguunaaauguauacc

SEQ ID NO: 102713 - RNA, 21 nt, Artificial Sequence
  Synthetic
  misc_feature (10)..(10): n is a, c, g, or u
auuaggguunaaauguauacc

SEQ ID NO: 102714 - RNA, 22 nt, Artificial Sequence
  Synthetic
  misc_feature (11)..(11): n is a, c, g, or u
uauuaggguunaaauguauacc

SEQ ID NO: 102715 - RNA, 23 nt, Artificial Sequence
  Synthetic
  misc_feature (12)..(12): n is a, c, g, or u
uuauuaggguunaaauguauacc

SEQ ID NO: 102716 - RNA, 24 nt, Artificial Sequence
  Synthetic
  misc_feature (13)..(13): n is a, c, g, or u
uuuauuaggguunaaauguauacc

SEQ ID NO: 102717 - RNA, 18 nt, Artificial Sequence
  Synthetic
agccugagggcuccaccc

SEQ ID NO: 102718 - RNA, 19 nt, Artificial Sequence
  Synthetic
gagccugagggcuccaccc

SEQ ID NO: 102719 - RNA, 20 nt, Artificial Sequence
  Synthetic
ugagccugagggcuccaccc

SEQ ID NO: 102720 - RNA, 21 nt, Artificial Sequence
  Synthetic
cugagccugagggcuccaccc

SEQ ID NO: 102721 - RNA, 22 nt, Artificial Sequence
  Synthetic
ccugagccugagggcuccaccc

SEQ ID NO: 102722 - RNA, 23 nt, Artificial Sequence
  Synthetic
cccugagccugagggcuccaccc

SEQ ID NO: 102723 - RNA, 24 nt, Artificial Sequence
  Synthetic
gcccugagccugagggcuccaccc

SEQ ID NO: 102724 - RNA, 18 nt, Artificial Sequence
  Synthetic
ccaagaauauggugaccc

SEQ ID NO: 102725 - RNA, 19 nt, Artificial Sequence
  Synthetic
cccaagaauauggugaccc

SEQ ID NO: 102726 - RNA, 20 nt, Artificial Sequence
  Synthetic
ucccaagaauauggugaccc

SEQ ID NO: 102727 - RNA, 21 nt, Artificial Sequence
  Synthetic
uucccaagaauauggugaccc

SEQ ID NO: 102728 - RNA, 22 nt, Artificial Sequence
  Synthetic
guucccaagaauauggugaccc

SEQ ID NO: 102729 - RNA, 23 nt, Artificial Sequence
  Synthetic
uguucccaagaauauggugaccc

SEQ ID NO: 102730 - RNA, 24 nt, Artificial Sequence
  Synthetic
uuguucccaagaauauggugaccc

SEQ ID NO: 102731 - RNA, 18 nt, Artificial Sequence
  Synthetic
  misc_feature (6)..(6): n is a, c, g, or u
ggguunaaauguauaccc

SEQ ID NO: 102732 - RNA, 19 nt, Artificial Sequence
  Synthetic
  misc_feature (7)..(7): n is a, c, g, or u
aggguunaaauguauaccc

SEQ ID NO: 102733 - RNA, 20 nt, Artificial Sequence
  Synthetic
  misc_feature (8)..(8): n is a, c, g, or u
uaggguunaaauguauaccc

SEQ ID NO: 102734 - RNA, 21 nt, Artificial Sequence
  Synthetic
  misc_feature (9)..(9): n is a, c, g, or u
uuaggguunaaauguauaccc

SEQ ID NO: 102735 - RNA, 22 nt, Artificial Sequence
  Synthetic
  misc_feature (10)..(10): n is a, c, g, or u
auuaggguunaaauguauaccc

SEQ ID NO: 102736 - RNA, 23 nt, Artificial Sequence
  Synthetic
  misc_feature (11)..(11): n is a, c, g, or u
uauuaggguunaaauguauaccc

SEQ ID NO: 102737 - RNA, 24 nt, Artificial Sequence
  Synthetic
  misc_feature (12)..(12): n is a, c, g, or u
uuauuaggguunaaauguauaccc

SEQ ID NO: 102738 - RNA, 18 nt, Artificial Sequence
  Synthetic
gccugagggcuccacccc

SEQ ID NO: 102739 - RNA, 19 nt, Artificial Sequence
  Synthetic
agccugagggcuccacccc

SEQ ID NO: 102740 - RNA, 20 nt, Artificial Sequence
  Synthetic
gagccugagggcuccacccc

SEQ ID NO: 102741 - RNA, 21 nt, Artificial Sequence
  Synthetic
ugagccugagggcuccacccc

SEQ ID NO: 102742 - RNA, 22 nt, Artificial Sequence
  Synthetic
cugagccugagggcuccacccc

SEQ ID NO: 102743 - RNA, 23 nt, Artificial Sequence
  Synthetic
ccugagccugagggcuccacccc

SEQ ID NO: 102744 - RNA, 24 nt, Artificial Sequence
  Synthetic
cccugagccugagggcuccacccc

SEQ ID NO: 102745 - RNA, 18 nt, Artificial Sequence
  Synthetic
acacgugggugcuccccc

SEQ ID NO: 102746 - RNA, 19 nt, Artificial Sequence
  Synthetic
gacacgugggugcuccccc

SEQ ID NO: 102747 - RNA, 20 nt, Artificial Sequence
  Synthetic
ggacacgugggugcuccccc

SEQ ID NO: 102748 - RNA, 21 nt, Artificial Sequence
  Synthetic
aggacacgugggugcuccccc

SEQ ID NO: 102749 - RNA, 22 nt, Artificial Sequence
  Synthetic
caggacacgugggugcuccccc

SEQ ID NO: 102750 - RNA, 23 nt, Artificial Sequence
  Synthetic
ccaggacacgugggugcuccccc

SEQ ID NO: 102751 - RNA, 24 nt, Artificial Sequence
  Synthetic
gccaggacacgugggugcuccccc

SEQ ID NO: 102752 - RNA, 18 nt, Artificial Sequence
  Synthetic
gacacgugggugcucccc

SEQ ID NO: 102753 - RNA, 19 nt, Artificial Sequence
  Synthetic
ggacacgugggugcucccc

SEQ ID NO: 102754 - RNA, 20 nt, Artificial Sequence
  Synthetic
aggacacgugggugcucccc

SEQ ID NO: 102755 - RNA, 21 nt, Artificial Sequence
  Synthetic
caggacacgugggugcucccc

SEQ ID NO: 102756 - RNA, 22 nt, Artificial Sequence
  Synthetic
ccaggacacgugggugcucccc

SEQ ID NO: 102757 - RNA, 23 nt, Artificial Sequence
  Synthetic
gccaggacacgugggugcucccc

SEQ ID NO: 102758 - RNA, 24 nt, Artificial Sequence
  Synthetic
ggccaggacacgugggugcucccc

SEQ ID NO: 102759 - RNA, 18 nt, Artificial Sequence
  Synthetic
  misc_feature (9)..(9): n is a, c, g, or u
aaaggggcngcaaagccc

SEQ ID NO: 102760 - RNA, 19 nt, Artificial Sequence
  Synthetic
  misc_feature (10)..(10): n is a, c, g, or u
aaaaggggcngcaaagccc

SEQ ID NO: 102761 - RNA, 20 nt, Artificial Sequence
  Synthetic
  misc_feature (11)..(11): n is a, c, g, or u
uaaaaggggcngcaaagccc

SEQ ID NO: 102762 - RNA, 21 nt, Artificial Sequence
  Synthetic
  misc_feature (12)..(12): n is a, c, g, or u
guaaaaggggcngcaaagccc

SEQ ID NO: 102763 - RNA, 22 nt, Artificial Sequence
  Synthetic
  misc_feature (13)..(13): n is a, c, g, or u
uguaaaaggggcngcaaagccc

SEQ ID NO: 102764 - RNA, 23 nt, Artificial Sequence
  Synthetic
  misc_feature (14)..(14): n is a, c, g, or u
guguaaaaggggcngcaaagccc

SEQ ID NO: 102765 - RNA, 24 nt, Artificial Sequence
  Synthetic
  misc_feature (15)..(15): n is a, c, g, or u
uguguaaaaggggcngcaaagccc

SEQ ID NO: 102766 - RNA, 18 nt, Artificial Sequence
  Synthetic
aacagugggggaaagccc

SEQ ID NO: 102767 - RNA, 19 nt, Artificial Sequence
  Synthetic
aaacagugggggaaagccc

SEQ ID NO: 102768 - RNA, 20 nt, Artificial Sequence
  Synthetic
caaacagugggggaaagccc

SEQ ID NO: 102769 - RNA, 21 nt, Artificial Sequence
  Synthetic
ccaaacagugggggaaagccc

SEQ ID NO: 102770 - RNA, 22 nt, Artificial Sequence
  Synthetic
gccaaacagugggggaaagccc

SEQ ID NO: 102771 - RNA, 23 nt, Artificial Sequence
  Synthetic
agccaaacagugggggaaagccc

SEQ ID NO: 102772 - RNA, 24 nt, Artificial Sequence
  Synthetic
aagccaaacagugggggaaagccc

SEQ ID NO: 102773 - RNA, 18 nt, Artificial Sequence
  Synthetic
aguagaagaauaaagccc

SEQ ID NO: 102774 - RNA, 19 nt, Artificial Sequence
  Synthetic
caguagaagaauaaagccc

SEQ ID NO: 102775 - RNA, 20 nt, Artificial Sequence
  Synthetic
acaguagaagaauaaagccc

SEQ ID NO: 102776 - RNA, 21 nt, Artificial Sequence
  Synthetic
uacaguagaagaauaaagccc

SEQ ID NO: 102777 - RNA, 22 nt, Artificial Sequence
  Synthetic
guacaguagaagaauaaagccc

SEQ ID NO: 102778 - RNA, 23 nt, Artificial Sequence
  Synthetic
gguacaguagaagaauaaagccc

SEQ ID NO: 102779 - RNA, 24 nt, Artificial Sequence
  Synthetic
agguacaguagaagaauaaagccc

SEQ ID NO: 102780 - RNA, 18 nt, Artificial Sequence
  Synthetic
  misc_feature (6)..(6): n is a, c, g, or u
uagagncccaaacggccc

SEQ ID NO: 102781 - RNA, 19 nt, Artificial Sequence
  Synthetic
  misc_feature (7)..(7): n is a, c, g, or u
guagagncccaaacggccc

SEQ ID NO: 102782 - RNA, 20 nt, Artificial Sequence
  Synthetic
  misc_feature (8)..(8): n is a, c, g, or u
gguagagncccaaacggccc

SEQ ID NO: 102783 - RNA, 21 nt, Artificial Sequence
  Synthetic
  misc_feature (9)..(9): n is a, c, g, or u
cgguagagncccaaacggccc

SEQ ID NO: 102784 - RNA, 22 nt, Artificial Sequence
  Synthetic
  misc_feature (10)..(10): n is a, c, g, or u
acgguagagncccaaacggccc

SEQ ID NO: 102785 - RNA, 23 nt, Artificial Sequence
  Synthetic
  misc_feature (11)..(11): n is a, c, g, or u
gacgguagagncccaaacggccc

SEQ ID NO: 102786 - RNA, 24 nt, Artificial Sequence
  Synthetic
  misc_feature (12)..(12): n is a, c, g, or u
ggacgguagagncccaaacggccc

SEQ ID NO: 102787 - RNA, 18 nt, Artificial Sequence
  Synthetic
gggucaauguccaugccc

SEQ ID NO: 102788 - RNA, 19 nt, Artificial Sequence
  Synthetic
  misc_feature (1)..(1): n is a, c, g, or u
ngggucaauguccaugccc

SEQ ID NO: 102789 - RNA, 20 nt, Artificial Sequence
  Synthetic
  misc_feature (2)..(2): n is a, c, g, or u
angggucaauguccaugccc

SEQ ID NO: 102790 - RNA, 21 nt, Artificial Sequence
  Synthetic
  misc_feature (3)..(3): n is a, c, g, or u
uangggucaauguccaugccc

SEQ ID NO: 102791 - RNA, 22 nt, Artificial Sequence
  Synthetic
  misc_feature (4)..(4): n is a, c, g, or u
auangggucaauguccaugccc

SEQ ID NO: 102792 - RNA, 23 nt, Artificial Sequence
  Synthetic
  misc_feature (5)..(5): n is a, c, g, or u
uauangggucaauguccaugccc

SEQ ID NO: 102793 - RNA, 24 nt, Artificial Sequence
  Synthetic
  misc_feature (6)..(6): n is a, c, g, or u
uuauangggucaauguccaugccc

SEQ ID NO: 102794 - RNA, 18 nt, Artificial Sequence
  Synthetic
ugaucgggaaagaauccc

SEQ ID NO: 102795 - RNA, 19 nt, Artificial Sequence
  Synthetic
gugaucgggaaagaauccc

SEQ ID NO: 102796 - RNA, 20 nt, Artificial Sequence
  Synthetic
ggugaucgggaaagaauccc

SEQ ID NO: 102797 - RNA, 21 nt, Artificial Sequence
  Synthetic
uggugaucgggaaagaauccc

SEQ ID NO: 102798 - RNA, 22 nt, Artificial Sequence
  Synthetic
cuggugaucgggaaagaauccc

SEQ ID NO: 102799 - RNA, 23 nt, Artificial Sequence
  Synthetic
acuggugaucgggaaagaauccc

SEQ ID NO: 102800 - RNA, 24 nt, Artificial Sequence
  Synthetic
aacuggugaucgggaaagaauccc

SEQ ID NO: 102801 - RNA, 18 nt, Artificial Sequence
  Synthetic
cuuccaauuacauauccc

SEQ ID NO: 102802 - RNA, 19 nt, Artificial Sequence
  Synthetic
acuuccaauuacauauccc

SEQ ID NO: 102803 - RNA, 20 nt, Artificial Sequence
  Synthetic
aacuuccaauuacauauccc

SEQ ID NO: 102804 - RNA, 21 nt, Artificial Sequence
  Synthetic
caacuuccaauuacauauccc

SEQ ID NO: 102805 - RNA, 22 nt, Artificial Sequence
  Synthetic
ccaacuuccaauuacauauccc

SEQ ID NO: 102806 - RNA, 23 nt, Artificial Sequence
  Synthetic
cccaacuuccaauuacauauccc

SEQ ID NO: 102807 - RNA, 24 nt, Artificial Sequence
  Synthetic
ccccaacuuccaauuacauauccc

SEQ ID NO: 102808 - RNA, 18 nt, Artificial Sequence
  Synthetic
ggacugaggcccacuccc

SEQ ID NO: 102809 - RNA, 19 nt, Artificial Sequence
  Synthetic
cggacugaggcccacuccc

SEQ ID NO: 102810 - RNA, 20 nt, Artificial Sequence
  Synthetic
acggacugaggcccacuccc

SEQ ID NO: 102811 - RNA, 21 nt, Artificial Sequence
  Synthetic
aacggacugaggcccacuccc

SEQ ID NO: 102812 - RNA, 22 nt, Artificial Sequence
  Synthetic
aaacggacugaggcccacuccc

SEQ ID NO: 102813 - RNA, 23 nt, Artificial Sequence
  Synthetic
gaaacggacugaggcccacuccc

SEQ ID NO: 102814 - RNA, 24 nt, Artificial Sequence
  Synthetic
agaaacggacugaggcccacuccc

SEQ ID NO: 102815 - RNA, 18 nt, Artificial Sequence
  Synthetic
ggacacgugggugcuccc

SEQ ID NO: 102816 - RNA, 19 nt, Artificial Sequence
  Synthetic
aggacacgugggugcuccc

SEQ ID NO: 102817 - RNA, 20 nt, Artificial Sequence
  Synthetic
caggacacgugggugcuccc

SEQ ID NO: 102818 - RNA, 21 nt, Artificial Sequence
  Synthetic
ccaggacacgugggugcuccc

SEQ ID NO: 102819 - RNA, 22 nt, Artificial Sequence
  Synthetic
gccaggacacgugggugcuccc

SEQ ID NO: 102820 - RNA, 23 nt, Artificial Sequence
  Synthetic
ggccaggacacgugggugcuccc

SEQ ID NO: 102821 - RNA, 24 nt, Artificial Sequence
  Synthetic
uggccaggacacgugggugcuccc

SEQ ID NO: 102822 - RNA, 18 nt, Artificial Sequence
  Synthetic
  misc_feature (10)..(10): n is a, c, g, or u
aaaaggggcngcaaagcc

SEQ ID NO: 102823 - RNA, 19 nt, Artificial Sequence
  Synthetic
  misc_feature (11)..(11): n is a, c, g, or u
uaaaaggggcngcaaagcc

SEQ ID NO: 102824 - RNA, 20 nt, Artificial Sequence
  Synthetic
  misc_feature (12)..(12): n is a, c, g, or u
guaaaaggggcngcaaagcc

SEQ ID NO: 102825 - RNA, 21 nt, Artificial Sequence
  Synthetic
  misc_feature (13)..(13): n is a, c, g, or u
uguaaaaggggcngcaaagcc

SEQ ID NO: 102826 - RNA, 22 nt, Artificial Sequence
  Synthetic
  misc_feature (14)..(14): n is a, c, g, or u
guguaaaaggggcngcaaagcc

SEQ ID NO: 102827 - RNA, 23 nt, Artificial Sequence
  Synthetic
  misc_feature (15)..(15): n is a, c, g, or u
uguguaaaaggggcngcaaagcc

SEQ ID NO: 102828 - RNA, 24 nt, Artificial Sequence
  Synthetic
  misc_feature (16)..(16): n is a, c, g, or u
uuguguaaaaggggcngcaaagcc

SEQ ID NO: 102829 - RNA, 18 nt, Artificial Sequence
  Synthetic
  misc_feature (8)..(8): n is a, c, g, or u
  misc_feature (11)..(11): n is a, c, g, or u
cagcacanccnagcagcc

SEQ ID NO: 102830 - RNA, 19 nt, Artificial Sequence
  Synthetic
  misc_feature (9)..(9): n is a, c, g, or u
  misc_feature (12)..(12): n is a, c, g, or u
gcagcacanccnagcagcc

SEQ ID NO: 102831 - RNA, 20 nt, Artificial Sequence
  Synthetic
  misc_feature (10)..(10): n is a, c, g, or u
  misc_feature (13)..(13): n is a, c, g, or u
ggcagcacanccnagcagcc

SEQ ID NO: 102832 - RNA, 21 nt, Artificial Sequence
  Synthetic
  misc_feature (11)..(11): n is a, c, g, or u
  misc_feature (14)..(14): n is a, c, g, or u
uggcagcacanccnagcagcc

SEQ ID NO: 102833 - RNA, 22 nt, Artificial Sequence
  Synthetic
  misc_feature (12)..(12): n is a, c, g, or u
  misc_feature (15)..(15): n is a, c, g, or u
uuggcagcacanccnagcagcc

SEQ ID NO: 102834 - RNA, 23 nt, Artificial Sequence
  Synthetic
  misc_feature (13)..(13): n is a, c, g, or u
  misc_feature (16)..(16): n is a, c, g, or u
guuggcagcacanccnagcagcc

SEQ ID NO: 102835 - RNA, 24 nt, Artificial Sequence
  Synthetic
  misc_feature (14)..(14): n is a, c, g, or u
  misc_feature (17)..(17): n is a, c, g, or u
aguuggcagcacanccnagcagcc

SEQ ID NO: 102836 - RNA, 18 nt, Artificial Sequence
  Synthetic
uggaucggcagaggagcc

SEQ ID NO: 102837 - RNA, 19 nt, Artificial Sequence
  Synthetic
auggaucggcagaggagcc

SEQ ID NO: 102838 - RNA, 20 nt, Artificial Sequence
  Synthetic
uauggaucggcagaggagcc

SEQ ID NO: 102839 - RNA, 21 nt, Artificial Sequence
  Synthetic
guauggaucggcagaggagcc

SEQ ID NO: 102840 - RNA, 22 nt, Artificial Sequence
  Synthetic
aguauggaucggcagaggagcc

SEQ ID NO: 102841 - RNA, 23 nt, Artificial Sequence
  Synthetic
caguauggaucggcagaggagcc

SEQ ID NO: 102842 - RNA, 24 nt, Artificial Sequence
  Synthetic
gcaguauggaucggcagaggagcc

SEQ ID NO: 102843 - RNA, 18 nt, Artificial Sequence
  Synthetic
uguuccggaacuggagcc

SEQ ID NO: 102844 - RNA, 19 nt, Artificial Sequence
  Synthetic
cuguuccggaacuggagcc

SEQ ID NO: 102845 - RNA, 20 nt, Artificial Sequence
  Synthetic
acuguuccggaacuggagcc

SEQ ID NO: 102846 - RNA, 21 nt, Artificial Sequence
  Synthetic
uacuguuccggaacuggagcc

SEQ ID NO: 102847 - RNA, 22 nt, Artificial Sequence
  Synthetic
uuacuguuccggaacuggagcc

SEQ ID NO: 102848 - RNA, 23 nt, Artificial Sequence
  Synthetic
uuuacuguuccggaacuggagcc

SEQ ID NO: 102849 - RNA, 24 nt, Artificial Sequence
  Synthetic
guuuacuguuccggaacuggagcc

SEQ ID NO: 102850 - RNA, 18 nt, Artificial Sequence
  Synthetic
gcacuaguaaacugagcc

SEQ ID NO: 102851 - RNA, 19 nt, Artificial Sequence
  Synthetic
ggcacuaguaaacugagcc

SEQ ID NO: 102852 - RNA, 20 nt, Artificial Sequence
  Synthetic
uggcacuaguaaacugagcc

SEQ ID NO: 102853 - RNA, 21 nt, Artificial Sequence
  Synthetic
auggcacuaguaaacugagcc

SEQ ID NO: 102854 - RNA, 22 nt, Artificial Sequence
  Synthetic
aauggcacuaguaaacugagcc

SEQ ID NO: 102855 - RNA, 23 nt, Artificial Sequence
  Synthetic
aaauggcacuaguaaacugagcc

SEQ ID NO: 102856 - RNA, 24 nt, Artificial Sequence
  Synthetic
caaauggcacuaguaaacugagcc

SEQ ID NO: 102857 - RNA, 18 nt, Artificial Sequence
  Synthetic
gucaauaugcccugagcc

SEQ ID NO: 102858 - RNA, 19 nt, Artificial Sequence
  Synthetic
ugucaauaugcccugagcc

SEQ ID NO: 102859 - RNA, 20 nt, Artificial Sequence
  Synthetic
uugucaauaugcccugagcc

SEQ ID NO: 102860 - RNA, 21 nt, Artificial Sequence
  Synthetic
guugucaauaugcccugagcc

SEQ ID NO: 102861 - RNA, 22 nt, Artificial Sequence
  Synthetic
uguugucaauaugcccugagcc

SEQ ID NO: 102862 - RNA, 23 nt, Artificial Sequence
  Synthetic
cuguugucaauaugcccugagcc

SEQ ID NO: 102863 - RNA, 24 nt, Artificial Sequence
  Synthetic
acuguugucaauaugcccugagcc

SEQ ID NO: 102864 - RNA, 18 nt, Artificial Sequence
  Synthetic
  misc_feature (5)..(5): n is a, c, g, or u
ggaanaugauaaaacgcc

SEQ ID NO: 102865 - RNA, 19 nt, Artificial Sequence
  Synthetic
  misc_feature (6)..(6): n is a, c, g, or u
aggaanaugauaaaacgcc

SEQ ID NO: 102866 - RNA, 20 nt, Artificial Sequence
  Synthetic
  misc_feature (7)..(7): n is a, c, g, or u
gaggaanaugauaaaacgcc

SEQ ID NO: 102867 - RNA, 21 nt, Artificial Sequence
  Synthetic
  misc_feature (8)..(8): n is a, c, g, or u
agaggaanaugauaaaacgcc

SEQ ID NO: 102868 - RNA, 22 nt, Artificial Sequence
  Synthetic
  misc_feature (9)..(9): n is a, c, g, or u
aagaggaanaugauaaaacgcc

SEQ ID NO: 102869 - RNA, 23 nt, Artificial Sequence
  Synthetic
  misc_feature (10)..(10): n is a, c, g, or u
gaagaggaanaugauaaaacgcc

SEQ ID NO: 102870 - RNA, 24 nt, Artificial Sequence
  Synthetic
  misc_feature (11)..(11): n is a, c, g, or u
ugaagaggaanaugauaaaacgcc

SEQ ID NO: 102871 - RNA, 18 nt, Artificial Sequence
  Synthetic
aacaagaaaaaccccgcc

SEQ ID NO: 102872 - RNA, 19 nt, Artificial Sequence
  Synthetic
caacaagaaaaaccccgcc

SEQ ID NO: 102873 - RNA, 20 nt, Artificial Sequence
  Synthetic
ucaacaagaaaaaccccgcc

SEQ ID NO: 102874 - RNA, 21 nt, Artificial Sequence
  Synthetic
gucaacaagaaaaaccccgcc

SEQ ID NO: 102875 - RNA, 22 nt, Artificial Sequence
  Synthetic
ugucaacaagaaaaaccccgcc

SEQ ID NO: 102876 - RNA, 23 nt, Artificial Sequence
  Synthetic
uugucaacaagaaaaaccccgcc

SEQ ID NO: 102877 - RNA, 24 nt, Artificial Sequence
  Synthetic
cuugucaacaagaaaaaccccgcc

SEQ ID NO: 102878 - RNA, 18 nt, Artificial Sequence
  Synthetic
uccgcgggauucagcgcc

SEQ ID NO: 102879 - RNA, 19 nt, Artificial Sequence
  Synthetic
guccgcgggauucagcgcc

SEQ ID NO: 102880 - RNA, 20 nt, Artificial Sequence
  Synthetic
cguccgcgggauucagcgcc

SEQ ID NO: 102881 - RNA, 21 nt, Artificial Sequence
  Synthetic
ucguccgcgggauucagcgcc

SEQ ID NO: 102882 - RNA, 22 nt, Artificial Sequence
  Synthetic
gucguccgcgggauucagcgcc

SEQ ID NO: 102883 - RNA, 23 nt, Artificial Sequence
  Synthetic
ggucguccgcgggauucagcgcc

SEQ ID NO: 102884 - RNA, 24 nt, Artificial Sequence
  Synthetic
gggucguccgcgggauucagcgcc

SEQ ID NO: 102885 - RNA, 18 nt, Artificial Sequence
  Synthetic
  misc_feature (7)..(7): n is a, c, g, or u
guagagncccaaacggcc

SEQ ID NO: 102886 - RNA, 19 nt, Artificial Sequence
  Synthetic
  misc_feature (8)..(8): n is a, c, g, or u
gguagagncccaaacggcc

SEQ ID NO: 102887 - RNA, 20 nt, Artificial Sequence
  Synthetic
  misc_feature (9)..(9): n is a, c, g, or u
cgguagagncccaaacggcc

SEQ ID NO: 102888 - RNA, 21 nt, Artificial Sequence
  Synthetic
  misc_feature (10)..(10): n is a, c, g, or u
acgguagagncccaaacggcc

SEQ ID NO: 102889 - RNA, 22 nt, Artificial Sequence
  Synthetic
  misc_feature (11)..(11): n is a, c, g, or u
gacgguagagncccaaacggcc

SEQ ID NO: 102890 - RNA, 23 nt, Artificial Sequence
  Synthetic
  misc_feature (12)..(12): n is a, c, g, or u
ggacgguagagncccaaacggcc

SEQ ID NO: 102891 - RNA, 24 nt, Artificial Sequence
  Synthetic
  misc_feature (13)..(13): n is a, c, g, or u
gggacgguagagncccaaacggcc

SEQ ID NO: 102892 - RNA, 18 nt, Artificial Sequence
  Synthetic
  misc_feature (1)..(1): n is a, c, g, or u
ngggucaauguccaugcc

SEQ ID NO: 102893 - RNA, 19 nt, Artificial Sequence
  Synthetic
  misc_feature (2)..(2): n is a, c, g, or u
angggucaauguccaugcc

SEQ ID NO: 102894 - RNA, 20 nt, Artificial Sequence
  Synthetic
  misc_feature (3)..(3): n is a, c, g, or u
uangggucaauguccaugcc

SEQ ID NO: 102895 - RNA, 21 nt, Artificial Sequence
  Synthetic
  misc_feature (4)..(4): n is a, c, g, or u
auangggucaauguccaugcc

SEQ ID NO: 102896 - RNA, 22 nt, Artificial Sequence
  Synthetic
  misc_feature (5)..(5): n is a, c, g, or u
uauangggucaauguccaugcc

SEQ ID NO: 102897 - RNA, 23 nt, Artificial Sequence
  Synthetic
  misc_feature (6)..(6): n is a, c, g, or u
uuauangggucaauguccaugcc

SEQ ID NO: 102898 - RNA, 24 nt, Artificial Sequence
  Synthetic
  misc_feature (7)..(7): n is a, c, g, or u
uuuauangggucaauguccaugcc

SEQ ID NO: 102899 - RNA, 18 nt, Artificial Sequence
  Synthetic
cacuguugucaauaugcc

SEQ ID NO: 102900 - RNA, 19 nt, Artificial Sequence
  Synthetic
gcacuguugucaauaugcc

SEQ ID NO: 102901 - RNA, 20 nt, Artificial Sequence
  Synthetic
ggcacuguugucaauaugcc

SEQ ID NO: 102902 - RNA, 21 nt, Artificial Sequence
  Synthetic
uggcacuguugucaauaugcc

SEQ ID NO: 102903 - RNA, 22 nt, Artificial Sequence
  Synthetic
cuggcacuguugucaauaugcc

SEQ ID NO: 102904 - RNA, 23 nt, Artificial Sequence
  Synthetic
  misc_feature (1)..(1): n is a, c, g, or u
ncuggcacuguugucaauaugcc

SEQ ID NO: 102905 - RNA, 24 nt, Artificial Sequence
  Synthetic
  misc_feature (2)..(2): n is a, c, g, or u
uncuggcacuguugucaauaugcc

SEQ ID NO: 102906 - RNA, 18 nt, Artificial Sequence
  Synthetic
cagucuuugaaguaugcc

SEQ ID NO: 102907 - RNA, 19 nt, Artificial Sequence
  Synthetic
acagucuuugaaguaugcc

SEQ ID NO: 102908 - RNA, 20 nt, Artificial Sequence
  Synthetic
  misc_feature (1)..(1): n is a, c, g, or u
nacagucuuugaaguaugcc

SEQ ID NO: 102909 - RNA, 21 nt, Artificial Sequence
  Synthetic
  misc_feature (2)..(2): n is a, c, g, or u
anacagucuuugaaguaugcc

SEQ ID NO: 102910 - RNA, 22 nt, Artificial Sequence
  Synthetic
  misc_feature (1)..(1): n is a, c, g, or u
  misc_feature (3)..(3): n is a, c, g, or u
nanacagucuuugaaguaugcc

SEQ ID NO: 102911 - RNA, 23 nt, Artificial Sequence
  Synthetic
  misc_feature (2)..(2): n is a, c, g, or u
  misc_feature (4)..(4): n is a, c, g, or u
ananacagucuuugaaguaugcc

SEQ ID NO: 102912 - RNA, 24 nt, Artificial Sequence
  Synthetic
  misc_feature (3)..(3): n is a, c, g, or u
  misc_feature (5)..(5): n is a, c, g, or u
aananacagucuuugaaguaugcc

SEQ ID NO: 102913 - RNA, 18 nt, Artificial Sequence
  Synthetic
aacagaccaauuuaugcc

SEQ ID NO: 102914 - RNA, 19 nt, Artificial Sequence
  Synthetic
gaacagaccaauuuaugcc

SEQ ID NO: 102915 - RNA, 20 nt, Artificial Sequence
  Synthetic
ugaacagaccaauuuaugcc

SEQ ID NO: 102916 - RNA, 21 nt, Artificial Sequence
  Synthetic
gugaacagaccaauuuaugcc

SEQ ID NO: 102917 - RNA, 22 nt, Artificial Sequence
  Synthetic
ggugaacagaccaauuuaugcc

SEQ ID NO: 102918 - RNA, 23 nt, Artificial Sequence
  Synthetic
uggugaacagaccaauuuaugcc

SEQ ID NO: 102919 - RNA, 24 nt, Artificial Sequence
  Synthetic
cuggugaacagaccaauuuaugcc

SEQ ID NO: 102920 - RNA, 18 nt, Artificial Sequence
  Synthetic
  misc_feature (1)..(1): n is a, c, g, or u
  misc_feature (12)..(12): n is a, c, g, or u
ncuccuaccugnuuugcc

SEQ ID NO: 102921 - RNA, 19 nt, Artificial Sequence
  Synthetic
  misc_feature (2)..(2): n is a, c, g, or u
  misc_feature (13)..(13): n is a, c, g, or u
cncuccuaccugnuuugcc

SEQ ID NO: 102922 - RNA, 20 nt, Artificial Sequence
  Synthetic
  misc_feature (3)..(3): n is a, c, g, or u
  misc_feature (14)..(14): n is a, c, g, or u
ccncuccuaccugnuuugcc

SEQ ID NO: 102923 - RNA, 21 nt, Artificial Sequence
  Synthetic
  misc_feature (4)..(4): n is a, c, g, or u
  misc_feature (15)..(15): n is a, c, g, or u
cccncuccuaccugnuuugcc

SEQ ID NO: 102924 - RNA, 22 nt, Artificial Sequence
  Synthetic
  misc_feature (5)..(5): n is a, c, g, or u
  misc_feature (16)..(16): n is a, c, g, or u
ucccncuccuaccugnuuugcc

SEQ ID NO: 102925 - RNA, 23 nt, Artificial Sequence
  Synthetic
  misc_feature (1)..(1): n is a, c, g, or u
  misc_feature (6)..(6): n is a, c, g, or u
  misc_feature (17)..(17): n is a, c, g, or u
nucccncuccuaccugnuuugcc

SEQ ID NO: 102926 - RNA, 24 nt, Artificial Sequence
  Synthetic
  misc_feature (2)..(2): n is a, c, g, or u
  misc_feature (7)..(7): n is a, c, g, or u
  misc_feature (18)..(18): n is a, c, g, or u
gnucccncuccuaccugnuuugcc

SEQ ID NO: 102927 - RNA, 18 nt, Artificial Sequence
  Synthetic
  misc_feature (1)..(1): n is a, c, g, or u
  misc_feature (4)..(4): n is a, c, g, or u
  misc_feature (16)..(16): n is a, c, g, or u
naungccaagccccancc

SEQ ID NO: 102928 - RNA, 19 nt, Artificial Sequence
  Synthetic
  misc_feature (2)..(2): n is a, c, g, or u
  misc_feature (5)..(5): n is a, c, g, or u
  misc_feature (17)..(17): n is a, c, g, or u
cnaungccaagccccancc

SEQ ID NO: 102929 - RNA, 20 nt, Artificial Sequence
  Synthetic
  misc_feature (3)..(3): n is a, c, g, or u
  misc_feature (6)..(6): n is a, c, g, or u
  misc_feature (18)..(18): n is a, c, g, or u
ccnaungccaagccccancc

SEQ ID NO: 102930 - RNA, 21 nt, Artificial Sequence
  Synthetic
  misc_feature (4)..(4): n is a, c, g, or u
  misc_feature (7)..(7): n is a, c, g, or u
  misc_feature (19)..(19): n is a, c, g, or u
gccnaungccaagccccancc

SEQ ID NO: 102931 - RNA, 22 nt, Artificial Sequence
  Synthetic
  misc_feature (5)..(5): n is a, c, g, or u
  misc_feature (8)..(8): n is a, c, g, or u
  misc_feature (20)..(20): n is a, c, g, or u
ggccnaungccaagccccancc

SEQ ID NO: 102932 - RNA, 23 nt, Artificial Sequence
  Synthetic
  misc_feature (6)..(6): n is a, c, g, or u
  misc_feature (9)..(9): n is a, c, g, or u
  misc_feature (21)..(21): n is a, c, g, or u
uggccnaungccaagccccancc

SEQ ID NO: 102933 - RNA, 24 nt, Artificial Sequence
  Synthetic
  misc_feature (7)..(7): n is a, c, g, or u
  misc_feature (10)..(10): n is a, c, g, or u
  misc_feature (22)..(22): n is a, c, g, or u
auggccnaungccaagccccancc

SEQ ID NO: 102934 - RNA, 18 nt, Artificial Sequence
  Synthetic
  misc_feature (16)..(16): n is a, c, g, or u
gcgaagugcacacggncc

SEQ ID NO: 102935 - RNA, 19 nt, Artificial Sequence
  Synthetic
  misc_feature (17)..(17): n is a, c, g, or u
agcgaagugcacacggncc

SEQ ID NO: 102936 - RNA, 20 nt, Artificial Sequence
  Synthetic
  misc_feature (18)..(18): n is a, c, g, or u
aagcgaagugcacacggncc

SEQ ID NO: 102937 - RNA, 21 nt, Artificial Sequence
  Synthetic
  misc_feature (19)..(19): n is a, c, g, or u
gaagcgaagugcacacggncc

SEQ ID NO: 102938 - RNA, 22 nt, Artificial Sequence
  Synthetic
  misc_feature (20)..(20): n is a, c, g, or u
ugaagcgaagugcacacggncc

SEQ ID NO: 102939 - RNA, 23 nt, Artificial Sequence
  Synthetic
  misc_feature (21)..(21): n is a, c, g, or u
gugaagcgaagugcacacggncc

SEQ ID NO: 102940 - RNA, 24 nt, Artificial Sequence
  Synthetic
  misc_feature (22)..(22): n is a, c, g, or u
ggugaagcgaagugcacacggncc

SEQ ID NO: 102941 - RNA, 18 nt, Artificial Sequence
  Synthetic
gugaucgggaaagaaucc

SEQ ID NO: 102942 - RNA, 19 nt, Artificial Sequence
  Synthetic
ggugaucgggaaagaaucc

SEQ ID NO: 102943 - RNA, 20 nt, Artificial Sequence
  Synthetic
uggugaucgggaaagaaucc

SEQ ID NO: 102944 - RNA, 21 nt, Artificial Sequence
  Synthetic
cuggugaucgggaaagaaucc

SEQ ID NO: 102945 - RNA, 22 nt, Artificial Sequence
  Synthetic
acuggugaucgggaaagaaucc

SEQ ID NO: 102946 - RNA, 23 nt, Artificial Sequence
  Synthetic
aacuggugaucgggaaagaaucc

SEQ ID NO: 102947 - RNA, 24 nt, Artificial Sequence
  Synthetic
caacuggugaucgggaaagaaucc

SEQ ID NO: 102948 - RNA, 18 nt, Artificial Sequence
  Synthetic
acuuccaauuacauaucc

SEQ ID NO: 102949 - RNA, 19 nt, Artificial Sequence
  Synthetic
aacuuccaauuacauaucc

SEQ ID NO: 102950 - RNA, 20 nt, Artificial Sequence
  Synthetic
caacuuccaauuacauaucc

SEQ ID NO: 102951 - RNA, 21 nt, Artificial Sequence
  Synthetic
ccaacuuccaauuacauaucc

SEQ ID NO: 102952 - RNA, 22 nt, Artificial Sequence
  Synthetic
cccaacuuccaauuacauaucc

SEQ ID NO: 102953 - RNA, 23 nt, Artificial Sequence
  Synthetic
ccccaacuuccaauuacauaucc

SEQ ID NO: 102954 - RNA, 24 nt, Artificial Sequence
  Synthetic
accccaacuuccaauuacauaucc

SEQ ID NO: 102955 - RNA, 18 nt, Artificial Sequence
  Synthetic
aaaaaagagaguaacucc

SEQ ID NO: 102956 - RNA, 19 nt, Artificial Sequence
  Synthetic
caaaaaagagaguaacucc

SEQ ID NO: 102957 - RNA, 20 nt, Artificial Sequence
  Synthetic
gcaaaaaagagaguaacucc

SEQ ID NO: 102958 - RNA, 21 nt, Artificial Sequence
  Synthetic
ggcaaaaaagagaguaacucc

SEQ ID NO: 102959 - RNA, 22 nt, Artificial Sequence
  Synthetic
aggcaaaaaagagaguaacucc

SEQ ID NO: 102960 - RNA, 23 nt, Artificial Sequence
  Synthetic
aaggcaaaaaagagaguaacucc

SEQ ID NO: 102961 - RNA, 24 nt, Artificial Sequence
  Synthetic
gaaggcaaaaaagagaguaacucc

SEQ ID NO: 102962 - RNA, 18 nt, Artificial Sequence
  Synthetic
agugcgaauccacacucc

SEQ ID NO: 102963 - RNA, 19 nt, Artificial Sequence
  Synthetic
gagugcgaauccacacucc

SEQ ID NO: 102964 - RNA, 20 nt, Artificial Sequence
  Synthetic
ggagugcgaauccacacucc

SEQ ID NO: 102965 - RNA, 21 nt, Artificial Sequence
  Synthetic
aggagugcgaauccacacucc

SEQ ID NO: 102966 - RNA, 22 nt, Artificial Sequence
  Synthetic
  misc_feature (1)..(1): n is a, c, g, or u
naggagugcgaauccacacucc

SEQ ID NO: 102967 - RNA, 23 nt, Artificial Sequence
  Synthetic
  misc_feature (2)..(2): n is a, c, g, or u
gnaggagugcgaauccacacucc

SEQ ID NO: 102968 - RNA, 24 nt, Artificial Sequence
  Synthetic
  misc_feature (1)..(1): n is a, c, g, or u
  misc_feature (3)..(3): n is a, c, g, or u
ngnaggagugcgaauccacacucc

SEQ ID NO: 102969 - RNA, 18 nt, Artificial Sequence
  Synthetic
cggacugaggcccacucc

SEQ ID NO: 102970 - RNA, 19 nt, Artificial Sequence
  Synthetic
acggacugaggcccacucc

SEQ ID NO: 102971 - RNA, 20 nt, Artificial Sequence
  Synthetic
aacggacugaggcccacucc

SEQ ID NO: 102972 - RNA, 21 nt, Artificial Sequence
  Synthetic
aaacggacugaggcccacucc

SEQ ID NO: 102973 - RNA, 22 nt, Artificial Sequence
  Synthetic
gaaacggacugaggcccacucc

SEQ ID NO: 102974 - RNA, 23 nt, Artificial Sequence
  Synthetic
agaaacggacugaggcccacucc

SEQ ID NO: 102975 - RNA, 24 nt, Artificial Sequence
  Synthetic
gagaaacggacugaggcccacucc

SEQ ID NO: 102976 - RNA, 18 nt, Artificial Sequence
  Synthetic
  misc_feature (1)..(1): n is a, c, g, or u
  misc_feature (10)..(10): n is a, c, g, or u
nuuaaccuanucuccucc

SEQ ID NO: 102977 - RNA, 19 nt, Artificial Sequence
  Synthetic
  misc_feature (2)..(2): n is a, c, g, or u
  misc_feature (11)..(11): n is a, c, g, or u
cnuuaaccuanucuccucc

SEQ ID NO: 102978 - RNA, 20 nt, Artificial Sequence
  Synthetic
  misc_feature (1)..(1): n is a, c, g, or u
  misc_feature (3)..(3): n is a, c, g, or u
  misc_feature (12)..(12): n is a, c, g, or u
ncnuuaaccuanucuccucc

SEQ ID NO: 102979 - RNA, 21 nt, Artificial Sequence
  Synthetic
  misc_feature (2)..(2): n is a, c, g, or u
  misc_feature (4)..(4): n is a, c, g, or u
  misc_feature (13)..(13): n is a, c, g, or u
ancnuuaaccuanucuccucc

SEQ ID NO: 102980 - RNA, 22 nt, Artificial Sequence
  Synthetic
  misc_feature (3)..(3): n is a, c, g, or u
  misc_feature (5)..(5): n is a, c, g, or u
  misc_feature (14)..(14): n is a, c, g, or u
gancnuuaaccuanucuccucc

SEQ ID NO: 102981 - RNA, 23 nt, Artificial Sequence
  Synthetic
  misc_feature (4)..(4): n is a, c, g, or u
  misc_feature (6)..(6): n is a, c, g, or u
  misc_feature (15)..(15): n is a, c, g, or u
agancnuuaaccuanucuccucc

SEQ ID NO: 102982 - RNA, 24 nt, Artificial Sequence
  Synthetic
  misc_feature (5)..(5): n is a, c, g, or u
  misc_feature (7)..(7): n is a, c, g, or u
  misc_feature (16)..(16): n is a, c, g, or u
aagancnuuaaccuanucuccucc

SEQ ID NO: 102983 - RNA, 18 nt, Artificial Sequence
  Synthetic
gugcaggguccccagucc

SEQ ID NO: 102984 - RNA, 19 nt, Artificial Sequence
  Synthetic
ggugcaggguccccagucc

SEQ ID NO: 102985 - RNA, 20 nt, Artificial Sequence
  Synthetic
cggugcaggguccccagucc

SEQ ID NO: 102986 - RNA, 21 nt, Artificial Sequence
  Synthetic
ucggugcaggguccccagucc

SEQ ID NO: 102987 - RNA, 22 nt, Artificial Sequence
  Synthetic
uucggugcaggguccccagucc

SEQ ID NO: 102988 - RNA, 23 nt, Artificial Sequence
  Synthetic
  misc_feature (1)..(1): n is a, c, g, or u
nuucggugcaggguccccagucc

SEQ ID NO: 102989 - RNA, 24 nt, Artificial Sequence
  Synthetic
  misc_feature (2)..(2): n is a, c, g, or u
unuucggugcaggguccccagucc

SEQ ID NO: 102990 - RNA, 18 nt, Artificial Sequence
  Synthetic
uucccaccuuaugagucc

SEQ ID NO: 102991 - RNA, 19 nt, Artificial Sequence
  Synthetic
uuucccaccuuaugagucc

SEQ ID NO: 102992 - RNA, 20 nt, Artificial Sequence
  Synthetic
guuucccaccuuaugagucc

SEQ ID NO: 102993 - RNA, 21 nt, Artificial Sequence
  Synthetic
aguuucccaccuuaugagucc

SEQ ID NO: 102994 - RNA, 22 nt, Artificial Sequence
  Synthetic
aaguuucccaccuuaugagucc

SEQ ID NO: 102995 - RNA, 23 nt, Artificial Sequence
  Synthetic
aaaguuucccaccuuaugagucc

SEQ ID NO: 102996 - RNA, 24 nt, Artificial Sequence
  Synthetic
uaaaguuucccaccuuaugagucc

SEQ ID NO: 102997 - RNA, 18 nt, Artificial Sequence
  Synthetic
aacauaccuugguagucc

SEQ ID NO: 102998 - RNA, 19 nt, Artificial Sequence
  Synthetic
caacauaccuugguagucc

SEQ ID NO: 102999 - RNA, 20 nt, Artificial Sequence
  Synthetic
gcaacauaccuugguagucc

SEQ ID NO: 103000 - RNA, 21 nt, Artificial Sequence
  Synthetic
ggcaacauaccuugguagucc

SEQ ID NO: 103001 - RNA, 22 nt, Artificial Sequence
  Synthetic
gggcaacauaccuugguagucc

SEQ ID NO: 103002 - RNA, 23 nt, Artificial Sequence
  Synthetic
cgggcaacauaccuugguagucc

SEQ ID NO: 103003 - RNA, 24 nt, Artificial Sequence
  Synthetic
acgggcaacauaccuugguagucc

SEQ ID NO: 103004 - RNA, 18 nt, Artificial Sequence
  Synthetic
ccccgagacgggucgucc

SEQ ID NO: 103005 - RNA, 19 nt, Artificial Sequence
  Synthetic
gccccgagacgggucgucc

SEQ ID NO: 103006 - RNA, 20 nt, Artificial Sequence
  Synthetic
ggccccgagacgggucgucc

SEQ ID NO: 103007 - RNA, 21 nt, Artificial Sequence
  Synthetic
cggccccgagacgggucgucc

SEQ ID NO: 103008 - RNA, 22 nt, Artificial Sequence
  Synthetic
acggccccgagacgggucgucc

SEQ ID NO: 103009 - RNA, 23 nt, Artificial Sequence
  Synthetic
aacggccccgagacgggucgucc

SEQ ID NO: 103010 - RNA, 24 nt, Artificial Sequence
  Synthetic
aaacggccccgagacgggucgucc

SEQ ID NO: 103011 - RNA, 18 nt, Artificial Sequence
  Synthetic
uaacacgagcaggggucc

SEQ ID NO: 103012 - RNA, 19 nt, Artificial Sequence
  Synthetic
guaacacgagcaggggucc

SEQ ID NO: 103013 - RNA, 20 nt, Artificial Sequence
  Synthetic
uguaacacgagcaggggucc

SEQ ID NO: 103014 - RNA, 21 nt, Artificial Sequence
  Synthetic
cuguaacacgagcaggggucc

SEQ ID NO: 103015 - RNA, 22 nt, Artificial Sequence
  Synthetic
ccuguaacacgagcaggggucc

SEQ ID NO: 103016 - RNA, 23 nt, Artificial Sequence
  Synthetic
gccuguaacacgagcaggggucc

SEQ ID NO: 103017 - RNA, 24 nt, Artificial Sequence
  Synthetic
cgccuguaacacgagcaggggucc

SEQ ID NO: 103018 - RNA, 18 nt, Artificial Sequence
  Synthetic
  misc_feature (4)..(4): n is a, c, g, or u
  misc_feature (8)..(8): n is a, c, g, or u
auanaaunccagccuucc

SEQ ID NO: 103019 - RNA, 19 nt, Artificial Sequence
  Synthetic
  misc_feature (5)..(5): n is a, c, g, or u
  misc_feature (9)..(9): n is a, c, g, or u
uauanaaunccagccuucc

SEQ ID NO: 103020 - RNA, 20 nt, Artificial Sequence
  Synthetic
  misc_feature (6)..(6): n is a, c, g, or u
  misc_feature (10)..(10): n is a, c, g, or u
auauanaaunccagccuucc

SEQ ID NO: 103021 - RNA, 21 nt, Artificial Sequence
  Synthetic
  misc_feature (7)..(7): n is a, c, g, or u
  misc_feature (11)..(11): n is a, c, g, or u
uauauanaaunccagccuucc

SEQ ID NO: 103022 - RNA, 22 nt, Artificial Sequence
  Synthetic
  misc_feature (8)..(8): n is a, c, g, or u
  misc_feature (12)..(12): n is a, c, g, or u
uuauauanaaunccagccuucc

SEQ ID NO: 103023 - RNA, 23 nt, Artificial Sequence
  Synthetic
  misc_feature (9)..(9): n is a, c, g, or u
  misc_feature (13)..(13): n is a, c, g, or u
cuuauauanaaunccagccuucc

SEQ ID NO: 103024 - RNA, 24 nt, Artificial Sequence
  Synthetic
  misc_feature (10)..(10): n is a, c, g, or u
  misc_feature (14)..(14): n is a, c, g, or u
ucuuauauanaaunccagccuucc

SEQ ID NO: 103025 - RNA, 18 nt, Artificial Sequence
  Synthetic
gggaaacauagagguucc

SEQ ID NO: 103026 - RNA, 19 nt, Artificial Sequence
  Synthetic
agggaaacauagagguucc

SEQ ID NO: 103027 - RNA, 20 nt, Artificial Sequence
  Synthetic
gagggaaacauagagguucc

SEQ ID NO: 103028 - RNA, 21 nt, Artificial Sequence
  Synthetic
agagggaaacauagagguucc

SEQ ID NO: 103029 - RNA, 22 nt, Artificial Sequence
  Synthetic
aagagggaaacauagagguucc

SEQ ID NO: 103030 - RNA, 23 nt, Artificial Sequence
  Synthetic
caagagggaaacauagagguucc

SEQ ID NO: 103031 - RNA, 24 nt, Artificial Sequence
  Synthetic
acaagagggaaacauagagguucc

SEQ ID NO: 103032 - RNA, 18 nt, Artificial Sequence
  Synthetic
ugaggugaacaauguucc

SEQ ID NO: 103033 - RNA, 19 nt, Artificial Sequence
  Synthetic
gugaggugaacaauguucc

SEQ ID NO: 103034 - RNA, 20 nt, Artificial Sequence
  Synthetic
ggugaggugaacaauguucc

SEQ ID NO: 103035 - RNA, 21 nt, Artificial Sequence
  Synthetic
uggugaggugaacaauguucc

SEQ ID NO: 103036 - RNA, 22 nt, Artificial Sequence
  Synthetic
auggugaggugaacaauguucc

SEQ ID NO: 103037 - RNA, 23 nt, Artificial Sequence
  Synthetic
uauggugaggugaacaauguucc

SEQ ID NO: 103038 - RNA, 24 nt, Artificial Sequence
  Synthetic
guauggugaggugaacaauguucc

SEQ ID NO: 103039 - RNA, 18 nt, Artificial Sequence
  Synthetic
gcugguaguugauguucc

SEQ ID NO: 103040 - RNA, 19 nt, Artificial Sequence
  Synthetic
ugcugguaguugauguucc

SEQ ID NO: 103041 - RNA, 20 nt, Artificial Sequence
  Synthetic
gugcugguaguugauguucc

SEQ ID NO: 103042 - RNA, 21 nt, Artificial Sequence
  Synthetic
cgugcugguaguugauguucc

SEQ ID NO: 103043 - RNA, 22 nt, Artificial Sequence
  Synthetic
ccgugcugguaguugauguucc

SEQ ID NO: 103044 - RNA, 23 nt, Artificial Sequence
  Synthetic
cccgugcugguaguugauguucc

SEQ ID NO: 103045 - RNA, 24 nt, Artificial Sequence
  Synthetic
ucccgugcugguaguugauguucc

SEQ ID NO: 103046 - RNA, 18 nt, Artificial Sequence
  Synthetic
ugcuguagcucuuguucc

SEQ ID NO: 103047 - RNA, 19 nt, Artificial Sequence
  Synthetic
augcuguagcucuuguucc

SEQ ID NO: 103048 - RNA, 20 nt, Artificial Sequence
  Synthetic
caugcuguagcucuuguucc

SEQ ID NO: 103049 - RNA, 21 nt, Artificial Sequence
  Synthetic
ccaugcuguagcucuuguucc

SEQ ID NO: 103050 - RNA, 22 nt, Artificial Sequence
  Synthetic
cccaugcuguagcucuuguucc

SEQ ID NO: 103051 - RNA, 23 nt, Artificial Sequence
  Synthetic
ucccaugcuguagcucuuguucc

SEQ ID NO: 103052 - RNA, 24 nt, Artificial Sequence
  Synthetic
cucccaugcuguagcucuuguucc

SEQ ID NO: 103053 - RNA, 18 nt, Artificial Sequence
  Synthetic
gaaaggagguguauuucc

SEQ ID NO: 103054 - RNA, 19 nt, Artificial Sequence
  Synthetic
ggaaaggagguguauuucc

SEQ ID NO: 103055 - RNA, 20 nt, Artificial Sequence
  Synthetic
uggaaaggagguguauuucc

SEQ ID NO: 103056 - RNA, 21 nt, Artificial Sequence
  Synthetic
auggaaaggagguguauuucc

SEQ ID NO: 103057 - RNA, 22 nt, Artificial Sequence
  Synthetic
cauggaaaggagguguauuucc

SEQ ID NO: 103058 - RNA, 23 nt, Artificial Sequence
  Synthetic
ccauggaaaggagguguauuucc

SEQ ID NO: 103059 - RNA, 24 nt, Artificial Sequence
  Synthetic
gccauggaaaggagguguauuucc

SEQ ID NO: 103060 - RNA, 18 nt, Artificial Sequence
  Synthetic
gaguaacuccacagaagc

SEQ ID NO: 103061 - RNA, 19 nt, Artificial Sequence
  Synthetic
agaguaacuccacagaagc

SEQ ID NO: 103062 - RNA, 20 nt, Artificial Sequence
  Synthetic
gagaguaacuccacagaagc

SEQ ID NO: 103063 - RNA, 21 nt, Artificial Sequence
  Synthetic
agagaguaacuccacagaagc

SEQ ID NO: 103064 - RNA, 22 nt, Artificial Sequence
  Synthetic
aagagaguaacuccacagaagc

SEQ ID NO: 103065 - RNA, 23 nt, Artificial Sequence
  Synthetic
aaagagaguaacuccacagaagc

SEQ ID NO: 103066 - RNA, 24 nt, Artificial Sequence
  Synthetic
aaaagagaguaacuccacagaagc

SEQ ID NO: 103067 - RNA, 18 nt, Artificial Sequence
  Synthetic
auuugguggucuguaagc

SEQ ID NO: 103068 - RNA, 19 nt, Artificial Sequence
  Synthetic
cauuugguggucuguaagc

SEQ ID NO: 103069 - RNA, 20 nt, Artificial Sequence
  Synthetic
gcauuugguggucuguaagc

SEQ ID NO: 103070 - RNA, 21 nt, Artificial Sequence
  Synthetic
ggcauuugguggucuguaagc

SEQ ID NO: 103071 - RNA, 22 nt, Artificial Sequence
  Synthetic
gggcauuugguggucuguaagc

SEQ ID NO: 103072 - RNA, 23 nt, Artificial Sequence
  Synthetic
ggggcauuugguggucuguaagc

SEQ ID NO: 103073 - RNA, 24 nt, Artificial Sequence
  Synthetic
aggggcauuugguggucuguaagc

SEQ ID NO: 103074 - RNA, 18 nt, Artificial Sequence
  Synthetic
agccacccaaggcacagc

SEQ ID NO: 103075 - RNA, 19 nt, Artificial Sequence
  Synthetic
aagccacccaaggcacagc

SEQ ID NO: 103076 - RNA, 20 nt, Artificial Sequence
  Synthetic
aaagccacccaaggcacagc

SEQ ID NO: 103077 - RNA, 21 nt, Artificial Sequence
  Synthetic
  misc_feature (1)..(1): n is a, c, g, or u
naaagccacccaaggcacagc

SEQ ID NO: 103078 - RNA, 22 nt, Artificial Sequence
  Synthetic
  misc_feature (2)..(2): n is a, c, g, or u
cnaaagccacccaaggcacagc

SEQ ID NO: 103079 - RNA, 23 nt, Artificial Sequence
  Synthetic
  misc_feature (3)..(3): n is a, c, g, or u
ccnaaagccacccaaggcacagc

SEQ ID NO: 103080 - RNA, 24 nt, Artificial Sequence
  Synthetic
  misc_feature (4)..(4): n is a, c, g, or u
cccnaaagccacccaaggcacagc

SEQ ID NO: 103081 - RNA, 18 nt, Artificial Sequence
  Synthetic
ccgaagguuuuguacagc

SEQ ID NO: 103082 - RNA, 19 nt, Artificial Sequence
  Synthetic
uccgaagguuuuguacagc

SEQ ID NO: 103083 - RNA, 20 nt, Artificial Sequence
  Synthetic
guccgaagguuuuguacagc

SEQ ID NO: 103084 - RNA, 21 nt, Artificial Sequence
  Synthetic
cguccgaagguuuuguacagc

SEQ ID NO: 103085 - RNA, 22 nt, Artificial Sequence
  Synthetic
ccguccgaagguuuuguacagc

SEQ ID NO: 103086 - RNA, 23 nt, Artificial Sequence
  Synthetic
uccguccgaagguuuuguacagc

SEQ ID NO: 103087 - RNA, 24 nt, Artificial Sequence
  Synthetic
uuccguccgaagguuuuguacagc

SEQ ID NO: 103088 - RNA, 18 nt, Artificial Sequence
  Synthetic
ggaacuggagccaccagc

SEQ ID NO: 103089 - RNA, 19 nt, Artificial Sequence
  Synthetic
cggaacuggagccaccagc

SEQ ID NO: 103090 - RNA, 20 nt, Artificial Sequence
  Synthetic
ccggaacuggagccaccagc

SEQ ID NO: 103091 - RNA, 21 nt, Artificial Sequence
  Synthetic
uccggaacuggagccaccagc

SEQ ID NO: 103092 - RNA, 22 nt, Artificial Sequence
  Synthetic
uuccggaacuggagccaccagc

SEQ ID NO: 103093 - RNA, 23 nt, Artificial Sequence
  Synthetic
guuccggaacuggagccaccagc

SEQ ID NO: 103094 - RNA, 24 nt, Artificial Sequence
  Synthetic
uguuccggaacuggagccaccagc

SEQ ID NO: 103095 - RNA, 18 nt, Artificial Sequence
  Synthetic
  misc_feature (9)..(9): n is a, c, g, or u
  misc_feature (12)..(12): n is a, c, g, or u
gcagcacanccnagcagc

SEQ ID NO: 103096 - RNA, 19 nt, Artificial Sequence
  Synthetic
  misc_feature (10)..(10): n is a, c, g, or u
  misc_feature (13)..(13): n is a, c, g, or u
ggcagcacanccnagcagc

SEQ ID NO: 103097 - RNA, 20 nt, Artificial Sequence
  Synthetic
  misc_feature (11)..(11): n is a, c, g, or u
  misc_feature (14)..(14): n is a, c, g, or u
uggcagcacanccnagcagc

SEQ ID NO: 103098 - RNA, 21 nt, Artificial Sequence
  Synthetic
  misc_feature (12)..(12): n is a, c, g, or u
  misc_feature (15)..(15): n is a, c, g, or u
uuggcagcacanccnagcagc

SEQ ID NO: 103099 - RNA, 22 nt, Artificial Sequence
  Synthetic
  misc_feature (13)..(13): n is a, c, g, or u
  misc_feature (16)..(16): n is a, c, g, or u
guuggcagcacanccnagcagc

SEQ ID NO: 103100 - RNA, 23 nt, Artificial Sequence
  Synthetic
  misc_feature (14)..(14): n is a, c, g, or u
  misc_feature (17)..(17): n is a, c, g, or u
aguuggcagcacanccnagcagc

SEQ ID NO: 103101 - RNA, 24 nt, Artificial Sequence
  Synthetic
  misc_feature (15)..(15): n is a, c, g, or u
  misc_feature (18)..(18): n is a, c, g, or u
caguuggcagcacanccnagcagc

SEQ ID NO: 103102 - RNA, 18 nt, Artificial Sequence
  Synthetic
ucguccgcgggauucagc

SEQ ID NO: 103103 - RNA, 19 nt, Artificial Sequence
  Synthetic
gucguccgcgggauucagc

SEQ ID NO: 103104 - RNA, 20 nt, Artificial Sequence
  Synthetic
ggucguccgcgggauucagc

SEQ ID NO: 103105 - RNA, 18 nt, Artificial Sequence
  Synthetic
ggccucccgauacagagc

SEQ ID NO: 103106 - RNA, 19 nt, Artificial Sequence
  Synthetic
aggccucccgauacagagc

SEQ ID NO: 103107 - RNA, 20 nt, Artificial Sequence
  Synthetic
aaggccucccgauacagagc

SEQ ID NO: 103108 - RNA, 21 nt, Artificial Sequence
  Synthetic
uaaggccucccgauacagagc

SEQ ID NO: 103109 - RNA, 22 nt, Artificial Sequence
  Synthetic
cuaaggccucccgauacagagc

SEQ ID NO: 103110 - RNA, 23 nt, Artificial Sequence
  Synthetic
ucuaaggccucccgauacagagc

SEQ ID NO: 103111 - RNA, 24 nt, Artificial Sequence
  Synthetic
cucuaaggccucccgauacagagc

SEQ ID NO: 103112 - RNA, 18 nt, Artificial Sequence
  Synthetic
auggaucggcagaggagc

SEQ ID NO: 103113 - RNA, 19 nt, Artificial Sequence
  Synthetic
uauggaucggcagaggagc

SEQ ID NO: 103114 - RNA, 20 nt, Artificial Sequence
  Synthetic
guauggaucggcagaggagc

SEQ ID NO: 103115 - RNA, 21 nt, Artificial Sequence
  Synthetic
aguauggaucggcagaggagc

SEQ ID NO: 103116 - RNA, 22 nt, Artificial Sequence
  Synthetic
caguauggaucggcagaggagc

SEQ ID NO: 103117 - RNA, 23 nt, Artificial Sequence
  Synthetic
gcaguauggaucggcagaggagc

SEQ ID NO: 103118 - RNA, 24 nt, Artificial Sequence
  Synthetic
cgcaguauggaucggcagaggagc

SEQ ID NO: 103119 - RNA, 18 nt, Artificial Sequence
  Synthetic
ggcacuaguaaacugagc

SEQ ID NO: 103120 - RNA, 19 nt, Artificial Sequence
  Synthetic
uggcacuaguaaacugagc

SEQ ID NO: 103121 - RNA, 20 nt, Artificial Sequence
  Synthetic
auggcacuaguaaacugagc

SEQ ID NO: 103122 - RNA, 21 nt, Artificial Sequence
  Synthetic
aauggcacuaguaaacugagc

SEQ ID NO: 103123 - RNA, 22 nt, Artificial Sequence
  Synthetic
aaauggcacuaguaaacugagc

SEQ ID NO: 103124 - RNA, 23 nt, Artificial Sequence
  Synthetic
caaauggcacuaguaaacugagc

SEQ ID NO: 103125 - RNA, 24 nt, Artificial Sequence
  Synthetic
acaaauggcacuaguaaacugagc

SEQ ID NO: 103126 - RNA, 18 nt, Artificial Sequence
  Synthetic
ugucaauaugcccugagc

SEQ ID NO: 103127 - RNA, 19 nt, Artificial Sequence
  Synthetic
uugucaauaugcccugagc

SEQ ID NO: 103128 - RNA, 20 nt, Artificial Sequence
  Synthetic
guugucaauaugcccugagc

SEQ ID NO: 103129 - RNA, 21 nt, Artificial Sequence
  Synthetic
uguugucaauaugcccugagc

SEQ ID NO: 103130 - RNA, 22 nt, Artificial Sequence
  Synthetic
cuguugucaauaugcccugagc

SEQ ID NO: 103131 - RNA, 23 nt, Artificial Sequence
  Synthetic
acuguugucaauaugcccugagc

SEQ ID NO: 103132 - RNA, 24 nt, Artificial Sequence
  Synthetic
cacuguugucaauaugcccugagc

SEQ ID NO: 103133 - RNA, 18 nt, Artificial Sequence
  Synthetic
aagaagaugaggcauagc

SEQ ID NO: 103134 - RNA, 19 nt, Artificial Sequence
  Synthetic
caagaagaugaggcauagc

SEQ ID NO: 103135 - RNA, 20 nt, Artificial Sequence
  Synthetic
acaagaagaugaggcauagc

SEQ ID NO: 103136 - RNA, 21 nt, Artificial Sequence
  Synthetic
aacaagaagaugaggcauagc

SEQ ID NO: 103137 - RNA, 22 nt, Artificial Sequence
  Synthetic
caacaagaagaugaggcauagc

SEQ ID NO: 103138 - RNA, 23 nt, Artificial Sequence
  Synthetic
ccaacaagaagaugaggcauagc

SEQ ID NO: 103139 - RNA, 24 nt, Artificial Sequence
  Synthetic
accaacaagaagaugaggcauagc

SEQ ID NO: 103140 - RNA, 18 nt, Artificial Sequence
  Synthetic
  misc_feature (5)..(5): n is a, c, g, or u
ugaanuuaagggaguagc

SEQ ID NO: 103141 - RNA, 19 nt, Artificial Sequence
  Synthetic
  misc_feature (6)..(6): n is a, c, g, or u
augaanuuaagggaguagc

SEQ ID NO: 103142 - RNA, 20 nt, Artificial Sequence
  Synthetic
  misc_feature (7)..(7): n is a, c, g, or u
caugaanuuaagggaguagc

SEQ ID NO: 103143 - RNA, 21 nt, Artificial Sequence
  Synthetic
  misc_feature (8)..(8): n is a, c, g, or u
ccaugaanuuaagggaguagc

SEQ ID NO: 103144 - RNA, 22 nt, Artificial Sequence
  Synthetic
  misc_feature (9)..(9): n is a, c, g, or u
cccaugaanuuaagggaguagc

SEQ ID NO: 103145 - RNA, 23 nt, Artificial Sequence
  Synthetic
  misc_feature (10)..(10): n is a, c, g, or u
ucccaugaanuuaagggaguagc

SEQ ID NO: 103146 - RNA, 24 nt, Artificial Sequence
  Synthetic
  misc_feature (11)..(11): n is a, c, g, or u
aucccaugaanuuaagggaguagc

SEQ ID NO: 103147 - RNA, 18 nt, Artificial Sequence
  Synthetic
  misc_feature (6)..(6): n is a, c, g, or u
aggaanaugauaaaacgc

SEQ ID NO: 103148 - RNA, 19 nt, Artificial Sequence
  Synthetic
  misc_feature (7)..(7): n is a, c, g, or u
gaggaanaugauaaaacgc

SEQ ID NO: 103149 - RNA, 20 nt, Artificial Sequence
  Synthetic
  misc_feature (8)..(8): n is a, c, g, or u
agaggaanaugauaaaacgc

SEQ ID NO: 103150 - RNA, 21 nt, Artificial Sequence
  Synthetic
  misc_feature (9)..(9): n is a, c, g, or u
aagaggaanaugauaaaacgc

SEQ ID NO: 103151 - RNA, 22 nt, Artificial Sequence
  Synthetic
  misc_feature (10)..(10): n is a, c, g, or u
gaagaggaanaugauaaaacgc

SEQ ID NO: 103152 - RNA, 23 nt, Artificial Sequence
  Synthetic
  misc_feature (11)..(11): n is a, c, g, or u
ugaagaggaanaugauaaaacgc

SEQ ID NO: 103153 - RNA, 24 nt, Artificial Sequence
  Synthetic
  misc_feature (12)..(12): n is a, c, g, or u
augaagaggaanaugauaaaacgc

SEQ ID NO: 103154 - RNA, 18 nt, Artificial Sequence
  Synthetic
cacagacggggagaccgc

SEQ ID NO: 103155 - RNA, 19 nt, Artificial Sequence
  Synthetic
gcacagacggggagaccgc

SEQ ID NO: 103156 - RNA, 20 nt, Artificial Sequence
  Synthetic
ggcacagacggggagaccgc

SEQ ID NO: 103157 - RNA, 21 nt, Artificial Sequence
  Synthetic
aggcacagacggggagaccgc

SEQ ID NO: 103158 - RNA, 22 nt, Artificial Sequence
  Synthetic
aaggcacagacggggagaccgc

SEQ ID NO: 103159 - RNA, 23 nt, Artificial Sequence
  Synthetic
gaaggcacagacggggagaccgc

SEQ ID NO: 103160 - RNA, 24 nt, Artificial Sequence
  Synthetic
agaaggcacagacggggagaccgc

SEQ ID NO: 103161 - RNA, 18 nt, Artificial Sequence
  Synthetic
agacaaaggacgucccgc

SEQ ID NO: 103162 - RNA, 19 nt, Artificial Sequence
  Synthetic
uagacaaaggacgucccgc

SEQ ID NO: 103163 - RNA, 20 nt, Artificial Sequence
  Synthetic
guagacaaaggacgucccgc

SEQ ID NO: 103164 - RNA, 18 nt, Artificial Sequence
  Synthetic
  misc_feature (12)..(12): n is a, c, g, or u
auacaugcauanaaaggc

SEQ ID NO: 103165 - RNA, 19 nt, Artificial Sequence
  Synthetic
  misc_feature (13)..(13): n is a, c, g, or u
uauacaugcauanaaaggc

SEQ ID NO: 103166 - RNA, 20 nt, Artificial Sequence
  Synthetic
  misc_feature (14)..(14): n is a, c, g, or u
guauacaugcauanaaaggc

SEQ ID NO: 103167 - RNA, 21 nt, Artificial Sequence
  Synthetic
  misc_feature (15)..(15): n is a, c, g, or u
uguauacaugcauanaaaggc

SEQ ID NO: 103168 - RNA, 22 nt, Artificial Sequence
  Synthetic
  misc_feature (16)..(16): n is a, c, g, or u
uuguauacaugcauanaaaggc

SEQ ID NO: 103169 - RNA, 23 nt, Artificial Sequence
  Synthetic
  misc_feature (1)..(1): n is a, c, g, or u
  misc_feature (17)..(17): n is a, c, g, or u
nuuguauacaugcauanaaaggc

SEQ ID NO: 103170 - RNA, 24 nt, Artificial Sequence
  Synthetic
  misc_feature (2)..(2): n is a, c, g, or u
  misc_feature (18)..(18): n is a, c, g, or u
gnuuguauacaugcauanaaaggc

SEQ ID NO: 103171 - RNA, 18 nt, Artificial Sequence
  Synthetic
ggaaagaagucagaaggc

SEQ ID NO: 103172 - RNA, 19 nt, Artificial Sequence
  Synthetic
aggaaagaagucagaaggc

SEQ ID NO: 103173 - RNA, 20 nt, Artificial Sequence
  Synthetic
aaggaaagaagucagaaggc

SEQ ID NO: 103174 - RNA, 21 nt, Artificial Sequence
  Synthetic
gaaggaaagaagucagaaggc

SEQ ID NO: 103175 - RNA, 22 nt, Artificial Sequence
  Synthetic
agaaggaaagaagucagaaggc

SEQ ID NO: 103176 - RNA, 23 nt, Artificial Sequence
  Synthetic
uagaaggaaagaagucagaaggc

SEQ ID NO: 103177 - RNA, 24 nt, Artificial Sequence
  Synthetic
auagaaggaaagaagucagaaggc

SEQ ID NO: 103178 - RNA, 18 nt, Artificial Sequence
  Synthetic
  misc_feature (1)..(1): n is a, c, g, or u
nccggcagaugagaaggc

SEQ ID NO: 103179 - RNA, 19 nt, Artificial Sequence
  Synthetic
  misc_feature (2)..(2): n is a, c, g, or u
gnccggcagaugagaaggc

SEQ ID NO: 103180 - RNA, 20 nt, Artificial Sequence
  Synthetic
  misc_feature (3)..(3): n is a, c, g, or u
ggnccggcagaugagaaggc

SEQ ID NO: 103181 - RNA, 21 nt, Artificial Sequence
  Synthetic
  misc_feature (4)..(4): n is a, c, g, or u
cggnccggcagaugagaaggc

SEQ ID NO: 103182 - RNA, 22 nt, Artificial Sequence
  Synthetic
  misc_feature (5)..(5): n is a, c, g, or u
acggnccggcagaugagaaggc

SEQ ID NO: 103183 - RNA, 23 nt, Artificial Sequence
  Synthetic
  misc_feature (6)..(6): n is a, c, g, or u
cacggnccggcagaugagaaggc

SEQ ID NO: 103184 - RNA, 24 nt, Artificial Sequence
  Synthetic
  misc_feature (7)..(7): n is a, c, g, or u
acacggnccggcagaugagaaggc

SEQ ID NO: 103185 - RNA, 18 nt, Artificial Sequence
  Synthetic
gaccuucgucugcgaggc

SEQ ID NO: 103186 - RNA, 19 nt, Artificial Sequence
  Synthetic
agaccuucgucugcgaggc

SEQ ID NO: 103187 - RNA, 20 nt, Artificial Sequence
  Synthetic
gagaccuucgucugcgaggc

SEQ ID NO: 103188 - RNA, 18 nt, Artificial Sequence
  Synthetic
cugccgauugguggaggc

SEQ ID NO: 103189 - RNA, 19 nt, Artificial Sequence
  Synthetic
acugccgauugguggaggc

SEQ ID NO: 103190 - RNA, 20 nt, Artificial Sequence
  Synthetic
gacugccgauugguggaggc

SEQ ID NO: 103191 - RNA, 21 nt, Artificial Sequence
  Synthetic
ugacugccgauugguggaggc

SEQ ID NO: 103192 - RNA, 22 nt, Artificial Sequence
  Synthetic
cugacugccgauugguggaggc

SEQ ID NO: 103193 - RNA, 23 nt, Artificial Sequence
  Synthetic
ccugacugccgauugguggaggc

SEQ ID NO: 103194 - RNA, 24 nt, Artificial Sequence
  Synthetic
uccugacugccgauugguggaggc

SEQ ID NO: 103195 - RNA, 18 nt, Artificial Sequence
  Synthetic
aaggcacagcuuggaggc

SEQ ID NO: 103196 - RNA, 19 nt, Artificial Sequence
  Synthetic
caaggcacagcuuggaggc

SEQ ID NO: 103197 - RNA, 20 nt, Artificial Sequence
  Synthetic
ccaaggcacagcuuggaggc

SEQ ID NO: 103198 - RNA, 21 nt, Artificial Sequence
  Synthetic
cccaaggcacagcuuggaggc

SEQ ID NO: 103199 - RNA, 22 nt, Artificial Sequence
  Synthetic
acccaaggcacagcuuggaggc

SEQ ID NO: 103200 - RNA, 23 nt, Artificial Sequence
  Synthetic
cacccaaggcacagcuuggaggc

SEQ ID NO: 103201 - RNA, 24 nt, Artificial Sequence
  Synthetic
ccacccaaggcacagcuuggaggc

SEQ ID NO: 103202 - RNA, 18 nt, Artificial Sequence
  Synthetic
  misc_feature (8)..(8): n is a, c, g, or u
gguagagncccaaacggc

SEQ ID NO: 103203 - RNA, 19 nt, Artificial Sequence
  Synthetic
  misc_feature (9)..(9): n is a, c, g, or u
cgguagagncccaaacggc

SEQ ID NO: 103204 - RNA, 20 nt, Artificial Sequence
  Synthetic
  misc_feature (10)..(10): n is a, c, g, or u
acgguagagncccaaacggc

SEQ ID NO: 103205 - RNA, 21 nt, Artificial Sequence
  Synthetic
  misc_feature (11)..(11): n is a, c, g, or u
gacgguagagncccaaacggc

SEQ ID NO: 103206 - RNA, 22 nt, Artificial Sequence
  Synthetic
  misc_feature (12)..(12): n is a, c, g, or u
ggacgguagagncccaaacggc

SEQ ID NO: 103207 - RNA, 23 nt, Artificial Sequence
  Synthetic
  misc_feature (13)..(13): n is a, c, g, or u
gggacgguagagncccaaacggc

SEQ ID NO: 103208 - RNA, 24 nt, Artificial Sequence
  Synthetic
  misc_feature (14)..(14): n is a, c, g, or u
ggggacgguagagncccaaacggc

SEQ ID NO: 103209 - RNA, 18 nt, Artificial Sequence
  Synthetic
  misc_feature (5)..(5): n is a, c, g, or u
guuungcuccagaccggc

SEQ ID NO: 103210 - RNA, 19 nt, Artificial Sequence
  Synthetic
  misc_feature (6)..(6): n is a, c, g, or u
aguuungcuccagaccggc

SEQ ID NO: 103211 - RNA, 20 nt, Artificial Sequence
  Synthetic
  misc_feature (1)..(1): n is a, c, g, or u
  misc_feature (7)..(7): n is a, c, g, or u
naguuungcuccagaccggc

SEQ ID NO: 103212 - RNA, 21 nt, Artificial Sequence
  Synthetic
  misc_feature (2)..(2): n is a, c, g, or u
  misc_feature (8)..(8): n is a, c, g, or u
unaguuungcuccagaccggc

SEQ ID NO: 103213 - RNA, 22 nt, Artificial Sequence
  Synthetic
  misc_feature (3)..(3): n is a, c, g, or u
  misc_feature (9)..(9): n is a, c, g, or u
aunaguuungcuccagaccggc

SEQ ID NO: 103214 - RNA, 23 nt, Artificial Sequence
  Synthetic
  misc_feature (4)..(4): n is a, c, g, or u
  misc_feature (10)..(10): n is a, c, g, or u
gaunaguuungcuccagaccggc

SEQ ID NO: 103215 - RNA, 24 nt, Artificial Sequence
  Synthetic
  misc_feature (5)..(5): n is a, c, g, or u
  misc_feature (11)..(11): n is a, c, g, or u
cgaunaguuungcuccagaccggc

SEQ ID NO: 103216 - RNA, 18 nt, Artificial Sequence
  Synthetic
uccgcaguauggaucggc

SEQ ID NO: 103217 - RNA, 19 nt, Artificial Sequence
  Synthetic
uuccgcaguauggaucggc

SEQ ID NO: 103218 - RNA, 20 nt, Artificial Sequence
  Synthetic
guuccgcaguauggaucggc

SEQ ID NO: 103219 - RNA, 21 nt, Artificial Sequence
  Synthetic
aguuccgcaguauggaucggc

SEQ ID NO: 103220 - RNA, 22 nt, Artificial Sequence
  Synthetic
gaguuccgcaguauggaucggc

SEQ ID NO: 103221 - RNA, 23 nt, Artificial Sequence
  Synthetic
ggaguuccgcaguauggaucggc

SEQ ID NO: 103222 - RNA, 24 nt, Artificial Sequence
  Synthetic
aggaguuccgcaguauggaucggc

SEQ ID NO: 103223 - RNA, 18 nt, Artificial Sequence
  Synthetic
gugcgccccguggucggc

SEQ ID NO: 103224 - RNA, 19 nt, Artificial Sequence
  Synthetic
ggugcgccccguggucggc

SEQ ID NO: 103225 - RNA, 20 nt, Artificial Sequence
  Synthetic
aggugcgccccguggucggc

SEQ ID NO: 103226 - RNA, 21 nt, Artificial Sequence
  Synthetic
gaggugcgccccguggucggc

SEQ ID NO: 103227 - RNA, 22 nt, Artificial Sequence
  Synthetic
agaggugcgccccguggucggc

SEQ ID NO: 103228 - RNA, 23 nt, Artificial Sequence
  Synthetic
gagaggugcgccccguggucggc

SEQ ID NO: 103229 - RNA, 24 nt, Artificial Sequence
  Synthetic
agagaggugcgccccguggucggc

SEQ ID NO: 103230 - RNA, 18 nt, Artificial Sequence
  Synthetic
acauuguguaaaaggggc

SEQ ID NO: 103231 - RNA, 19 nt, Artificial Sequence
  Synthetic
cacauuguguaaaaggggc

SEQ ID NO: 103232 - RNA, 20 nt, Artificial Sequence
  Synthetic
ccacauuguguaaaaggggc

SEQ ID NO: 103233 - RNA, 21 nt, Artificial Sequence
  Synthetic
  misc_feature (1)..(1): n is a, c, g, or u
nccacauuguguaaaaggggc

SEQ ID NO: 103234 - RNA, 22 nt, Artificial Sequence
  Synthetic
  misc_feature (2)..(2): n is a, c, g, or u
anccacauuguguaaaaggggc

SEQ ID NO: 103235 - RNA, 23 nt, Artificial Sequence
  Synthetic
  misc_feature (3)..(3): n is a, c, g, or u
uanccacauuguguaaaaggggc

SEQ ID NO: 103236 - RNA, 24 nt, Artificial Sequence
  Synthetic
  misc_feature (1)..(1): n is a, c, g, or u
  misc_feature (4)..(4): n is a, c, g, or u
nuanccacauuguguaaaaggggc

SEQ ID NO: 103237 - RNA, 18 nt, Artificial Sequence
  Synthetic
cgucagcaaacacuuggc

SEQ ID NO: 103238 - RNA, 19 nt, Artificial Sequence
  Synthetic
gcgucagcaaacacuuggc

SEQ ID NO: 103239 - RNA, 20 nt, Artificial Sequence
  Synthetic
ugcgucagcaaacacuuggc

SEQ ID NO: 103240 - RNA, 21 nt, Artificial Sequence
  Synthetic
uugcgucagcaaacacuuggc

SEQ ID NO: 103241 - RNA, 22 nt, Artificial Sequence
  Synthetic
guugcgucagcaaacacuuggc

SEQ ID NO: 103242 - RNA, 23 nt, Artificial Sequence
  Synthetic
gguugcgucagcaaacacuuggc

SEQ ID NO: 103243 - RNA, 24 nt, Artificial Sequence
  Synthetic
ggguugcgucagcaaacacuuggc

SEQ ID NO: 103244 - RNA, 18 nt, Artificial Sequence
  Synthetic
aaggccuuguaaguuggc

SEQ ID NO: 103245 - RNA, 19 nt, Artificial Sequence
  Synthetic
aaaggccuuguaaguuggc

SEQ ID NO: 103246 - RNA, 20 nt, Artificial Sequence
  Synthetic
gaaaggccuuguaaguuggc

SEQ ID NO: 103247 - RNA, 21 nt, Artificial Sequence
  Synthetic
agaaaggccuuguaaguuggc

SEQ ID NO: 103248 - RNA, 22 nt, Artificial Sequence
  Synthetic
cagaaaggccuuguaaguuggc

SEQ ID NO: 103249 - RNA, 23 nt, Artificial Sequence
  Synthetic
acagaaaggccuuguaaguuggc

SEQ ID NO: 103250 - RNA, 24 nt, Artificial Sequence
  Synthetic
cacagaaaggccuuguaaguuggc

SEQ ID NO: 103251 - RNA, 18 nt, Artificial Sequence
  Synthetic
  misc_feature (13)..(13): n is a, c, g, or u
uggauuguuuganuuggc

SEQ ID NO: 103252 - RNA, 19 nt, Artificial Sequence
  Synthetic
  misc_feature (14)..(14): n is a, c, g, or u
cuggauuguuuganuuggc

SEQ ID NO: 103253 - RNA, 20 nt, Artificial Sequence
  Synthetic
  misc_feature (15)..(15): n is a, c, g, or u
ucuggauuguuuganuuggc

SEQ ID NO: 103254 - RNA, 21 nt, Artificial Sequence
  Synthetic
  misc_feature (16)..(16): n is a, c, g, or u
aucuggauuguuuganuuggc

SEQ ID NO: 103255 - RNA, 22 nt, Artificial Sequence
  Synthetic
  misc_feature (17)..(17): n is a, c, g, or u
aaucuggauuguuuganuuggc

SEQ ID NO: 103256 - RNA, 23 nt, Artificial Sequence
  Synthetic
  misc_feature (18)..(18): n is a, c, g, or u
caaucuggauuguuuganuuggc

SEQ ID NO: 103257 - RNA, 24 nt, Artificial Sequence
  Synthetic
  misc_feature (19)..(19): n is a, c, g, or u
ccaaucuggauuguuuganuuggc

SEQ ID NO: 103258 - RNA, 18 nt, Artificial Sequence
  Synthetic
  misc_feature (9)..(9): n is a, c, g, or u
gggacugcnaauuuuggc

SEQ ID NO: 103259 - RNA, 19 nt, Artificial Sequence
  Synthetic
  misc_feature (10)..(10): n is a, c, g, or u
ggggacugcnaauuuuggc

SEQ ID NO: 103260 - RNA, 20 nt, Artificial Sequence
  Synthetic
  misc_feature (11)..(11): n is a, c, g, or u
uggggacugcnaauuuuggc

SEQ ID NO: 103261 - RNA, 21 nt, Artificial Sequence
  Synthetic
  misc_feature (12)..(12): n is a, c, g, or u
uuggggacugcnaauuuuggc

SEQ ID NO: 103262 - RNA, 22 nt, Artificial Sequence
  Synthetic
  misc_feature (13)..(13): n is a, c, g, or u
guuggggacugcnaauuuuggc

SEQ ID NO: 103263 - RNA, 23 nt, Artificial Sequence
  Synthetic
  misc_feature (14)..(14): n is a, c, g, or u
gguuggggacugcnaauuuuggc

SEQ ID NO: 103264 - RNA, 24 nt, Artificial Sequence
  Synthetic
  misc_feature (15)..(15): n is a, c, g, or u
agguuggggacugcnaauuuuggc

SEQ ID NO: 103265 - RNA, 18 nt, Artificial Sequence
  Synthetic
  misc_feature (16)..(16): n is a, c, g, or u
accugaccguugccgngc

SEQ ID NO: 103266 - RNA, 19 nt, Artificial Sequence
  Synthetic
  misc_feature (17)..(17): n is a, c, g, or u
gaccugaccguugccgngc

SEQ ID NO: 103267 - RNA, 20 nt, Artificial Sequence
  Synthetic
  misc_feature (18)..(18): n is a, c, g, or u
agaccugaccguugccgngc

SEQ ID NO: 103268 - RNA, 21 nt, Artificial Sequence
  Synthetic
  misc_feature (1)..(1): n is a, c, g, or u
  misc_feature (19)..(19): n is a, c, g, or u
nagaccugaccguugccgngc

SEQ ID NO: 103269 - RNA, 22 nt, Artificial Sequence
  Synthetic
  misc_feature (2)..(2): n is a, c, g, or u
  misc_feature (20)..(20): n is a, c, g, or u
anagaccugaccguugccgngc

SEQ ID NO: 103270 - RNA, 23 nt, Artificial Sequence
  Synthetic
  misc_feature (3)..(3): n is a, c, g, or u
  misc_feature (21)..(21): n is a, c, g, or u
canagaccugaccguugccgngc

SEQ ID NO: 103271 - RNA, 24 nt, Artificial Sequence
  Synthetic
  misc_feature (4)..(4): n is a, c, g, or u
  misc_feature (22)..(22): n is a, c, g, or u
gcanagaccugaccguugccgngc

SEQ ID NO: 103272 - RNA, 18 nt, Artificial Sequence
  Synthetic
  misc_feature (1)..(1): n is a, c, g, or u
  misc_feature (4)..(4): n is a, c, g, or u
  misc_feature (10)..(10): n is a, c, g, or u
  misc_feature (16)..(16): n is a, c, g, or u
ngunccgaunaguuungc

SEQ ID NO: 103273 - RNA, 19 nt, Artificial Sequence
  Synthetic
  misc_feature (2)..(2): n is a, c, g, or u
  misc_feature (5)..(5): n is a, c, g, or u
  misc_feature (11)..(11): n is a, c, g, or u
  misc_feature (17)..(17): n is a, c, g, or u
cngunccgaunaguuungc

SEQ ID NO: 103274 - RNA, 20 nt, Artificial Sequence
  Synthetic
  misc_feature (3)..(3): n is a, c, g, or u
  misc_feature (6)..(6): n is a, c, g, or u
  misc_feature (12)..(12): n is a, c, g, or u
  misc_feature (18)..(18): n is a, c, g, or u
ucngunccgaunaguuungc

SEQ ID NO: 103275 - RNA, 21 nt, Artificial Sequence
  Synthetic
  misc_feature (4)..(4): n is a, c, g, or u
  misc_feature (7)..(7): n is a, c, g, or u
  misc_feature (13)..(13): n is a, c, g, or u
  misc_feature (19)..(19): n is a, c, g, or u
gucngunccgaunaguuungc

SEQ ID NO: 103276 - RNA, 22 nt, Artificial Sequence
  Synthetic
  misc_feature (5)..(5): n is a, c, g, or u
  misc_feature (8)..(8): n is a, c, g, or u
  misc_feature (14)..(14): n is a, c, g, or u
  misc_feature (20)..(20): n is a, c, g, or u
ugucngunccgaunaguuungc

SEQ ID NO: 103277 - RNA, 23 nt, Artificial Sequence
  Synthetic
  misc_feature (6)..(6): n is a, c, g, or u
  misc_feature (9)..(9): n is a, c, g, or u
  misc_feature (15)..(15): n is a, c, g, or u
  misc_feature (21)..(21): n is a, c, g, or u
uugucngunccgaunaguuungc

SEQ ID NO: 103278 - RNA, 24 nt, Artificial Sequence
  Synthetic
  misc_feature (7)..(7): n is a, c, g, or u
  misc_feature (10)..(10): n is a, c, g, or u
  misc_feature (16)..(16): n is a, c, g, or u
  misc_feature (22)..(22): n is a, c, g, or u
guugucngunccgaunaguuungc

SEQ ID NO: 103279 - RNA, 18 nt, Artificial Sequence
  Synthetic
aagaccaaccucccaugc

SEQ ID NO: 103280 - RNA, 19 nt, Artificial Sequence
  Synthetic
gaagaccaaccucccaugc

SEQ ID NO: 103281 - RNA, 20 nt, Artificial Sequence
  Synthetic
ggaagaccaaccucccaugc

SEQ ID NO: 103282 - RNA, 21 nt, Artificial Sequence
  Synthetic
uggaagaccaaccucccaugc

SEQ ID NO: 103283 - RNA, 22 nt, Artificial Sequence
  Synthetic
uuggaagaccaaccucccaugc

SEQ ID NO: 103284 - RNA, 23 nt, Artificial Sequence
  Synthetic
uuuggaagaccaaccucccaugc

SEQ ID NO: 103285 - RNA, 24 nt, Artificial Sequence
  Synthetic
guuuggaagaccaaccucccaugc

SEQ ID NO: 103286 - RNA, 18 nt, Artificial Sequence
  Synthetic
  misc_feature (2)..(2): n is a, c, g, or u
angggucaauguccaugc

SEQ ID NO: 103287 - RNA, 19 nt, Artificial Sequence
  Synthetic
  misc_feature (3)..(3): n is a, c, g, or u
uangggucaauguccaugc

SEQ ID NO: 103288 - RNA, 20 nt, Artificial Sequence
  Synthetic
  misc_feature (4)..(4): n is a, c, g, or u
auangggucaauguccaugc

SEQ ID NO: 103289 - RNA, 21 nt, Artificial Sequence
  Synthetic
  misc_feature (5)..(5): n is a, c, g, or u
uauangggucaauguccaugc

SEQ ID NO: 103290 - RNA, 22 nt, Artificial Sequence
  Synthetic
  misc_feature (6)..(6): n is a, c, g, or u
uuauangggucaauguccaugc

SEQ ID NO: 103291 - RNA, 23 nt, Artificial Sequence
  Synthetic
  misc_feature (7)..(7): n is a, c, g, or u
uuuauangggucaauguccaugc

SEQ ID NO: 103292 - RNA, 24 nt, Artificial Sequence
  Synthetic
  misc_feature (8)..(8): n is a, c, g, or u
cuuuauangggucaauguccaugc

SEQ ID NO: 103293 - RNA, 18 nt, Artificial Sequence
  Synthetic
gcacuguugucaauaugc

SEQ ID NO: 103294 - RNA, 19 nt, Artificial Sequence
  Synthetic
ggcacuguugucaauaugc

SEQ ID NO: 103295 - RNA, 20 nt, Artificial Sequence
  Synthetic
uggcacuguugucaauaugc

SEQ ID NO: 103296 - RNA, 21 nt, Artificial Sequence
  Synthetic
cuggcacuguugucaauaugc

SEQ ID NO: 103297 - RNA, 22 nt, Artificial Sequence
  Synthetic
  misc_feature (1)..(1): n is a, c, g, or u
ncuggcacuguugucaauaugc

SEQ ID NO: 103298 - RNA, 23 nt, Artificial Sequence
  Synthetic
  misc_feature (2)..(2): n is a, c, g, or u
uncuggcacuguugucaauaugc

SEQ ID NO: 103299 - RNA, 24 nt, Artificial Sequence
  Synthetic
  misc_feature (3)..(3): n is a, c, g, or u
cuncuggcacuguugucaauaugc

SEQ ID NO: 103300 - RNA, 18 nt, Artificial Sequence
  Synthetic
acagucuuugaaguaugc

SEQ ID NO: 103301 - RNA, 19 nt, Artificial Sequence
  Synthetic
  misc_feature (1)..(1): n is a, c, g, or u
nacagucuuugaaguaugc

SEQ ID NO: 103302 - RNA, 20 nt, Artificial Sequence
  Synthetic
  misc_feature (2)..(2): n is a, c, g, or u
anacagucuuugaaguaugc

SEQ ID NO: 103303 - RNA, 21 nt, Artificial Sequence
  Synthetic
  misc_feature (1)..(1): n is a, c, g, or u
  misc_feature (3)..(3): n is a, c, g, or u
nanacagucuuugaaguaugc

SEQ ID NO: 103304 - RNA, 22 nt, Artificial Sequence
  Synthetic
  misc_feature (2)..(2): n is a, c, g, or u
  misc_feature (4)..(4): n is a, c, g, or u
ananacagucuuugaaguaugc

SEQ ID NO: 103305 - RNA, 23 nt, Artificial Sequence
  Synthetic
  misc_feature (3)..(3): n is a, c, g, or u
  misc_feature (5)..(5): n is a, c, g, or u
aananacagucuuugaaguaugc

SEQ ID NO: 103306 - RNA, 24 nt, Artificial Sequence
  Synthetic
  misc_feature (4)..(4): n is a, c, g, or u
  misc_feature (6)..(6): n is a, c, g, or u
aaananacagucuuugaaguaugc

SEQ ID NO: 103307 - RNA, 18 nt, Artificial Sequence
  Synthetic
gcgagcaaaacaagcugc

SEQ ID NO: 103308 - RNA, 19 nt, Artificial Sequence
  Synthetic
ugcgagcaaaacaagcugc

SEQ ID NO: 103309 - RNA, 20 nt, Artificial Sequence
  Synthetic
cugcgagcaaaacaagcugc

SEQ ID NO: 103310 - RNA, 21 nt, Artificial Sequence
  Synthetic
gcugcgagcaaaacaagcugc

SEQ ID NO: 103311 - RNA, 22 nt, Artificial Sequence
  Synthetic
ggcugcgagcaaaacaagcugc

SEQ ID NO: 103312 - RNA, 23 nt, Artificial Sequence
  Synthetic
cggcugcgagcaaaacaagcugc

SEQ ID NO: 103313 - RNA, 24 nt, Artificial Sequence
  Synthetic
ccggcugcgagcaaaacaagcugc

SEQ ID NO: 103314 - RNA, 18 nt, Artificial Sequence
  Synthetic
gucggucguugacauugc

SEQ ID NO: 103315 - RNA, 19 nt, Artificial Sequence
  Synthetic
ggucggucguugacauugc

SEQ ID NO: 103316 - RNA, 20 nt, Artificial Sequence
  Synthetic
aggucggucguugacauugc

SEQ ID NO: 103317 - RNA, 18 nt, Artificial Sequence
  Synthetic
cucccauaggaaucuugc

SEQ ID NO: 103318 - RNA, 19 nt, Artificial Sequence
  Synthetic
acucccauaggaaucuugc

SEQ ID NO: 103319 - RNA, 20 nt, Artificial Sequence
  Synthetic
cacucccauaggaaucuugc

SEQ ID NO: 103320 - RNA, 21 nt, Artificial Sequence
  Synthetic
ccacucccauaggaaucuugc

SEQ ID NO: 103321 - RNA, 22 nt, Artificial Sequence
  Synthetic
cccacucccauaggaaucuugc

SEQ ID NO: 103322 - RNA, 23 nt, Artificial Sequence
  Synthetic
gcccacucccauaggaaucuugc

SEQ ID NO: 103323 - RNA, 24 nt, Artificial Sequence
  Synthetic
ggcccacucccauaggaaucuugc

SEQ ID NO: 103324 - RNA, 18 nt, Artificial Sequence
  Synthetic
  misc_feature (4)..(4): n is a, c, g, or u
ccanccaguggggguugc

SEQ ID NO: 103325 - RNA, 19 nt, Artificial Sequence
  Synthetic
  misc_feature (5)..(5): n is a, c, g, or u
cccanccaguggggguugc

SEQ ID NO: 103326 - RNA, 20 nt, Artificial Sequence
  Synthetic
  misc_feature (6)..(6): n is a, c, g, or u
ccccanccaguggggguugc

SEQ ID NO: 103327 - RNA, 21 nt, Artificial Sequence
  Synthetic
  misc_feature (7)..(7): n is a, c, g, or u
gccccanccaguggggguugc

SEQ ID NO: 103328 - RNA, 22 nt, Artificial Sequence
  Synthetic
  misc_feature (8)..(8): n is a, c, g, or u
agccccanccaguggggguugc

SEQ ID NO: 103329 - RNA, 23 nt, Artificial Sequence
  Synthetic
  misc_feature (9)..(9): n is a, c, g, or u
aagccccanccaguggggguugc

SEQ ID NO: 103330 - RNA, 24 nt, Artificial Sequence
  Synthetic
  misc_feature (10)..(10): n is a, c, g, or u
caagccccanccaguggggguugc

SEQ ID NO: 103331 - RNA, 18 nt, Artificial Sequence
  Synthetic
  misc_feature (6)..(6): n is a, c, g, or u
  misc_feature (17)..(17): n is a, c, g, or u
ccuccnaguacaaaganc

SEQ ID NO: 103332 - RNA, 19 nt, Artificial Sequence
  Synthetic
  misc_feature (7)..(7): n is a, c, g, or u
  misc_feature (18)..(18): n is a, c, g, or u
gccuccnaguacaaaganc

SEQ ID NO: 103333 - RNA, 20 nt, Artificial Sequence
  Synthetic
  misc_feature (8)..(8): n is a, c, g, or u
  misc_feature (19)..(19): n is a, c, g, or u
agccuccnaguacaaaganc

SEQ ID NO: 103334 - RNA, 21 nt, Artificial Sequence
  Synthetic
  misc_feature (9)..(9): n is a, c, g, or u
  misc_feature (20)..(20): n is a, c, g, or u
cagccuccnaguacaaaganc

SEQ ID NO: 103335 - RNA, 22 nt, Artificial Sequence
  Synthetic
  misc_feature (10)..(10): n is a, c, g, or u
  misc_feature (21)..(21): n is a, c, g, or u
acagccuccnaguacaaaganc

SEQ ID NO: 103336 - RNA, 23 nt, Artificial Sequence
  Synthetic
  misc_feature (11)..(11): n is a, c, g, or u
  misc_feature (22)..(22): n is a, c, g, or u
uacagccuccnaguacaaaganc

SEQ ID NO: 103337 - RNA, 24 nt, Artificial Sequence
  Synthetic
  misc_feature (12)..(12): n is a, c, g, or u
  misc_feature (23)..(23): n is a, c, g, or u
cuacagccuccnaguacaaaganc

SEQ ID NO: 103338 - RNA, 18 nt, Artificial Sequence
  Synthetic
  misc_feature (17)..(17): n is a, c, g, or u
gacacauccagcgauanc

SEQ ID NO: 103339 - RNA, 19 nt, Artificial Sequence
  Synthetic
  misc_feature (18)..(18): n is a, c, g, or u
agacacauccagcgauanc

SEQ ID NO: 103340 - RNA, 20 nt, Artificial Sequence
  Synthetic
  misc_feature (19)..(19): n is a, c, g, or u
cagacacauccagcgauanc

SEQ ID NO: 103341 - RNA, 21 nt, Artificial Sequence
  Synthetic
  misc_feature (20)..(20): n is a, c, g, or u
gcagacacauccagcgauanc

SEQ ID NO: 103342 - RNA, 22 nt, Artificial Sequence
  Synthetic
  misc_feature (21)..(21): n is a, c, g, or u
cgcagacacauccagcgauanc

SEQ ID NO: 103343 - RNA, 23 nt, Artificial Sequence
  Synthetic
  misc_feature (22)..(22): n is a, c, g, or u
ccgcagacacauccagcgauanc

SEQ ID NO: 103344 - RNA, 24 nt, Artificial Sequence
  Synthetic
  misc_feature (23)..(23): n is a, c, g, or u
gccgcagacacauccagcgauanc

SEQ ID NO: 103345 - RNA, 18 nt, Artificial Sequence
  Synthetic
  misc_feature (17)..(17): n is a, c, g, or u
gaaggggacgguagagnc

SEQ ID NO: 103346 - RNA, 19 nt, Artificial Sequence
  Synthetic
  misc_feature (18)..(18): n is a, c, g, or u
agaaggggacgguagagnc

SEQ ID NO: 103347 - RNA, 20 nt, Artificial Sequence
  Synthetic
  misc_feature (1)..(1): n is a, c, g, or u
  misc_feature (19)..(19): n is a, c, g, or u
nagaaggggacgguagagnc

SEQ ID NO: 103348 - RNA, 21 nt, Artificial Sequence
  Synthetic
  misc_feature (2)..(2): n is a, c, g, or u
  misc_feature (20)..(20): n is a, c, g, or u
gnagaaggggacgguagagnc

SEQ ID NO: 103349 - RNA, 22 nt, Artificial Sequence
  Synthetic
  misc_feature (1)..(1): n is a, c, g, or u
  misc_feature (3)..(3): n is a, c, g, or u
  misc_feature (21)..(21): n is a, c, g, or u
ngnagaaggggacgguagagnc

SEQ ID NO: 103350 - RNA, 23 nt, Artificial Sequence
  Synthetic
  misc_feature (2)..(2): n is a, c, g, or u
  misc_feature (4)..(4): n is a, c, g, or u
  misc_feature (22)..(22): n is a, c, g, or u
angnagaaggggacgguagagnc

SEQ ID NO: 103351 - RNA, 24 nt, Artificial Sequence
  Synthetic
  misc_feature (3)..(3): n is a, c, g, or u
  misc_feature (5)..(5): n is a, c, g, or u
  misc_feature (23)..(23): n is a, c, g, or u
gangnagaaggggacgguagagnc

SEQ ID NO: 103352 - RNA, 18 nt, Artificial Sequence
  Synthetic
  misc_feature (7)..(7): n is a, c, g, or u
  misc_feature (11)..(11): n is a, c, g, or u
  misc_feature (17)..(17): n is a, c, g, or u
uauuuanaggnaguuunc

SEQ ID NO: 103353 - RNA, 19 nt, Artificial Sequence
  Synthetic
  misc_feature (8)..(8): n is a, c, g, or u
  misc_feature (12)..(12): n is a, c, g, or u
  misc_feature (18)..(18): n is a, c, g, or u
cuauuuanaggnaguuunc

SEQ ID NO: 103354 - RNA, 20 nt, Artificial Sequence
  Synthetic
  misc_feature (9)..(9): n is a, c, g, or u
  misc_feature (13)..(13): n is a, c, g, or u
  misc_feature (19)..(19): n is a, c, g, or u
ucuauuuanaggnaguuunc

SEQ ID NO: 103355 - RNA, 21 nt, Artificial Sequence
  Synthetic
  misc_feature (10)..(10): n is a, c, g, or u
  misc_feature (14)..(14): n is a, c, g, or u
  misc_feature (20)..(20): n is a, c, g, or u
gucuauuuanaggnaguuunc

SEQ ID NO: 103356 - RNA, 22 nt, Artificial Sequence
  Synthetic
  misc_feature (11)..(11): n is a, c, g, or u
  misc_feature (15)..(15): n is a, c, g, or u
  misc_feature (21)..(21): n is a, c, g, or u
ggucuauuuanaggnaguuunc

SEQ ID NO: 103357 - RNA, 23 nt, Artificial Sequence
  Synthetic
  misc_feature (12)..(12): n is a, c, g, or u
  misc_feature (16)..(16): n is a, c, g, or u
  misc_feature (22)..(22): n is a, c, g, or u
aggucuauuuanaggnaguuunc

SEQ ID NO: 103358 - RNA, 24 nt, Artificial Sequence
  Synthetic
  misc_feature (13)..(13): n is a, c, g, or u
  misc_feature (17)..(17): n is a, c, g, or u
  misc_feature (23)..(23): n is a, c, g, or u
uaggucuauuuanaggnaguuunc

SEQ ID NO: 103359 - RNA, 18 nt, Artificial Sequence
  Synthetic
  misc_feature (1)..(1): n is a, c, g, or u
nugacauacuuuccaauc

SEQ ID NO: 103360 - RNA, 19 nt, Artificial Sequence
  Synthetic
  misc_feature (2)..(2): n is a, c, g, or u
unugacauacuuuccaauc

SEQ ID NO: 103361 - RNA, 20 nt, Artificial Sequence
  Synthetic
  misc_feature (3)..(3): n is a, c, g, or u
cunugacauacuuuccaauc

SEQ ID NO: 103362 - RNA, 21 nt, Artificial Sequence
  Synthetic
  misc_feature (4)..(4): n is a, c, g, or u
ucunugacauacuuuccaauc

SEQ ID NO: 103363 - RNA, 22 nt, Artificial Sequence
  Synthetic
  misc_feature (5)..(5): n is a, c, g, or u
uucunugacauacuuuccaauc

SEQ ID NO: 103364 - RNA, 23 nt, Artificial Sequence
  Synthetic
  misc_feature (6)..(6): n is a, c, g, or u
auucunugacauacuuuccaauc

SEQ ID NO: 103365 - RNA, 24 nt, Artificial Sequence
  Synthetic
  misc_feature (7)..(7): n is a, c, g, or u
aauucunugacauacuuuccaauc

SEQ ID NO: 103366 - RNA, 18 nt, Artificial Sequence
  Synthetic
ggugaucgggaaagaauc

SEQ ID NO: 103367 - RNA, 19 nt, Artificial Sequence
  Synthetic
uggugaucgggaaagaauc

SEQ ID NO: 103368 - RNA, 20 nt, Artificial Sequence
  Synthetic
cuggugaucgggaaagaauc

SEQ ID NO: 103369 - RNA, 21 nt, Artificial Sequence
  Synthetic
acuggugaucgggaaagaauc

SEQ ID NO: 103370 - RNA, 22 nt, Artificial Sequence
  Synthetic
aacuggugaucgggaaagaauc

SEQ ID NO: 103371 - RNA, 23 nt, Artificial Sequence
  Synthetic
caacuggugaucgggaaagaauc

SEQ ID NO: 103372 - RNA, 24 nt, Artificial Sequence
  Synthetic
ccaacuggugaucgggaaagaauc

SEQ ID NO: 103373 - RNA, 18 nt, Artificial Sequence
  Synthetic
aguuccgcaguauggauc

SEQ ID NO: 103374 - RNA, 19 nt, Artificial Sequence
  Synthetic
gaguuccgcaguauggauc

SEQ ID NO: 103375 - RNA, 20 nt, Artificial Sequence
  Synthetic
ggaguuccgcaguauggauc

SEQ ID NO: 103376 - RNA, 21 nt, Artificial Sequence
  Synthetic
aggaguuccgcaguauggauc

SEQ ID NO: 103377 - RNA, 22 nt, Artificial Sequence
  Synthetic
uaggaguuccgcaguauggauc

SEQ ID NO: 103378 - RNA, 23 nt, Artificial Sequence
  Synthetic
cuaggaguuccgcaguauggauc

SEQ ID NO: 103379 - RNA, 24 nt, Artificial Sequence
  Synthetic
gcuaggaguuccgcaguauggauc

SEQ ID NO: 103380 - RNA, 18 nt, Artificial Sequence
  Synthetic
  misc_feature (1)..(1): n is a, c, g, or u
nggguccaacuggugauc

SEQ ID NO: 103381 - RNA, 19 nt, Artificial Sequence
  Synthetic
  misc_feature (2)..(2): n is a, c, g, or u
cnggguccaacuggugauc

SEQ ID NO: 103382 - RNA, 20 nt, Artificial Sequence
  Synthetic
  misc_feature (3)..(3): n is a, c, g, or u
gcnggguccaacuggugauc

SEQ ID NO: 103383 - RNA, 21 nt, Artificial Sequence
  Synthetic
  misc_feature (1)..(1): n is a, c, g, or u
  misc_feature (4)..(4): n is a, c, g, or u
ngcnggguccaacuggugauc

SEQ ID NO: 103384 - RNA, 22 nt, Artificial Sequence
  Synthetic
  misc_feature (2)..(2): n is a, c, g, or u
  misc_feature (5)..(5): n is a, c, g, or u
angcnggguccaacuggugauc

SEQ ID NO: 103385 - RNA, 23 nt, Artificial Sequence
  Synthetic
  misc_feature (3)..(3): n is a, c, g, or u
  misc_feature (6)..(6): n is a, c, g, or u
aangcnggguccaacuggugauc

SEQ ID NO: 103386 - RNA, 24 nt, Artificial Sequence
  Synthetic
  misc_feature (4)..(4): n is a, c, g, or u
  misc_feature (7)..(7): n is a, c, g, or u
gaangcnggguccaacuggugauc

SEQ ID NO: 103387 - RNA, 18 nt, Artificial Sequence
  Synthetic
caaaaaagagaguaacuc

SEQ ID NO: 103388 - RNA, 19 nt, Artificial Sequence
  Synthetic
gcaaaaaagagaguaacuc

SEQ ID NO: 103389 - RNA, 20 nt, Artificial Sequence
  Synthetic
ggcaaaaaagagaguaacuc

SEQ ID NO: 103390 - RNA, 21 nt, Artificial Sequence
  Synthetic
aggcaaaaaagagaguaacuc

SEQ ID NO: 103391 - RNA, 22 nt, Artificial Sequence
  Synthetic
aaggcaaaaaagagaguaacuc

SEQ ID NO: 103392 - RNA, 23 nt, Artificial Sequence
  Synthetic
gaaggcaaaaaagagaguaacuc

SEQ ID NO: 103393 - RNA, 24 nt, Artificial Sequence
  Synthetic
agaaggcaaaaaagagaguaacuc

SEQ ID NO: 103394 - RNA, 18 nt, Artificial Sequence
  Synthetic
gagugcgaauccacacuc

SEQ ID NO: 103395 - RNA, 19 nt, Artificial Sequence
  Synthetic
ggagugcgaauccacacuc

SEQ ID NO: 103396 - RNA, 20 nt, Artificial Sequence
  Synthetic
aggagugcgaauccacacuc

SEQ ID NO: 103397 - RNA, 21 nt, Artificial Sequence
  Synthetic
  misc_feature (1)..(1): n is a, c, g, or u
naggagugcgaauccacacuc

SEQ ID NO: 103398 - RNA, 22 nt, Artificial Sequence
  Synthetic
  misc_feature (2)..(2): n is a, c, g, or u
gnaggagugcgaauccacacuc

SEQ ID NO: 103399 - RNA, 23 nt, Artificial Sequence
  Synthetic
  misc_feature (1)..(1): n is a, c, g, or u
  misc_feature (3)..(3): n is a, c, g, or u
ngnaggagugcgaauccacacuc

SEQ ID NO: 103400 - RNA, 24 nt, Artificial Sequence
  Synthetic
  misc_feature (2)..(2): n is a, c, g, or u
  misc_feature (4)..(4): n is a, c, g, or u
cngnaggagugcgaauccacacuc

SEQ ID NO: 103401 - RNA, 18 nt, Artificial Sequence
  Synthetic
acaauguuccggagacuc

SEQ ID NO: 103402 - RNA, 19 nt, Artificial Sequence
  Synthetic
aacaauguuccggagacuc

SEQ ID NO: 103403 - RNA, 20 nt, Artificial Sequence
  Synthetic
gaacaauguuccggagacuc

SEQ ID NO: 103404 - RNA, 21 nt, Artificial Sequence
  Synthetic
ugaacaauguuccggagacuc

SEQ ID NO: 103405 - RNA, 22 nt, Artificial Sequence
  Synthetic
gugaacaauguuccggagacuc

SEQ ID NO: 103406 - RNA, 23 nt, Artificial Sequence
  Synthetic
ggugaacaauguuccggagacuc

SEQ ID NO: 103407 - RNA, 24 nt, Artificial Sequence
  Synthetic
aggugaacaauguuccggagacuc

SEQ ID NO: 103408 - RNA, 18 nt, Artificial Sequence
  Synthetic
aaaagacaccaaauacuc

SEQ ID NO: 103409 - RNA, 19 nt, Artificial Sequence
  Synthetic
caaaagacaccaaauacuc

SEQ ID NO: 103410 - RNA, 20 nt, Artificial Sequence
  Synthetic
ccaaaagacaccaaauacuc

SEQ ID NO: 103411 - RNA, 21 nt, Artificial Sequence
  Synthetic
uccaaaagacaccaaauacuc

SEQ ID NO: 103412 - RNA, 22 nt, Artificial Sequence
  Synthetic
cuccaaaagacaccaaauacuc

SEQ ID NO: 103413 - RNA, 23 nt, Artificial Sequence
  Synthetic
acuccaaaagacaccaaauacuc

SEQ ID NO: 103414 - RNA, 24 nt, Artificial Sequence
  Synthetic
cacuccaaaagacaccaaauacuc

SEQ ID NO: 103415 - RNA, 18 nt, Artificial Sequence
  Synthetic
gcaggguccccaguccuc

SEQ ID NO: 103416 - RNA, 19 nt, Artificial Sequence
  Synthetic
ugcaggguccccaguccuc

SEQ ID NO: 103417 - RNA, 20 nt, Artificial Sequence
  Synthetic
gugcaggguccccaguccuc

SEQ ID NO: 103418 - RNA, 21 nt, Artificial Sequence
  Synthetic
ggugcaggguccccaguccuc

SEQ ID NO: 103419 - RNA, 22 nt, Artificial Sequence
  Synthetic
cggugcaggguccccaguccuc

SEQ ID NO: 103420 - RNA, 23 nt, Artificial Sequence
  Synthetic
ucggugcaggguccccaguccuc

SEQ ID NO: 103421 - RNA, 24 nt, Artificial Sequence
  Synthetic
uucggugcaggguccccaguccuc

SEQ ID NO: 103422 - RNA, 18 nt, Artificial Sequence
  Synthetic
ccugaggaugacugucuc

SEQ ID NO: 103423 - RNA, 19 nt, Artificial Sequence
  Synthetic
gccugaggaugacugucuc

SEQ ID NO: 103424 - RNA, 20 nt, Artificial Sequence
  Synthetic
ggccugaggaugacugucuc

SEQ ID NO: 103425 - RNA, 21 nt, Artificial Sequence
  Synthetic
uggccugaggaugacugucuc

SEQ ID NO: 103426 - RNA, 22 nt, Artificial Sequence
  Synthetic
auggccugaggaugacugucuc

SEQ ID NO: 103427 - RNA, 23 nt, Artificial Sequence
  Synthetic
cauggccugaggaugacugucuc

SEQ ID NO: 103428 - RNA, 24 nt, Artificial Sequence
  Synthetic
gcauggccugaggaugacugucuc

SEQ ID NO: 103429 - RNA, 18 nt, Artificial Sequence
  Synthetic
aauagaaggaaagaaguc

SEQ ID NO: 103430 - RNA, 19 nt, Artificial Sequence
  Synthetic
gaauagaaggaaagaaguc

SEQ ID NO: 103431 - RNA, 20 nt, Artificial Sequence
  Synthetic
cgaauagaaggaaagaaguc

SEQ ID NO: 103432 - RNA, 21 nt, Artificial Sequence
  Synthetic
  misc_feature (1)..(1): n is a, c, g, or u
ncgaauagaaggaaagaaguc

SEQ ID NO: 103433 - RNA, 22 nt, Artificial Sequence
  Synthetic
  misc_feature (2)..(2): n is a, c, g, or u
cncgaauagaaggaaagaaguc

SEQ ID NO: 103434 - RNA, 23 nt, Artificial Sequence
  Synthetic
  misc_feature (3)..(3): n is a, c, g, or u
ucncgaauagaaggaaagaaguc

SEQ ID NO: 103435 - RNA, 24 nt, Artificial Sequence
  Synthetic
  misc_feature (4)..(4): n is a, c, g, or u
aucncgaauagaaggaaagaaguc

SEQ ID NO: 103436 - RNA, 18 nt, Artificial Sequence
  Synthetic
  misc_feature (4)..(4): n is a, c, g, or u
  misc_feature (10)..(10): n is a, c, g, or u
  misc_feature (12)..(12): n is a, c, g, or u
gucnuuaaananacaguc

SEQ ID NO: 103437 - RNA, 19 nt, Artificial Sequence
  Synthetic
  misc_feature (5)..(5): n is a, c, g, or u
  misc_feature (11)..(11): n is a, c, g, or u
  misc_feature (13)..(13): n is a, c, g, or u
agucnuuaaananacaguc

SEQ ID NO: 103438 - RNA, 20 nt, Artificial Sequence
  Synthetic
  misc_feature (6)..(6): n is a, c, g, or u
  misc_feature (12)..(12): n is a, c, g, or u
  misc_feature (14)..(14): n is a, c, g, or u
cagucnuuaaananacaguc

SEQ ID NO: 103439 - RNA, 21 nt, Artificial Sequence
  Synthetic
  misc_feature (7)..(7): n is a, c, g, or u
  misc_feature (13)..(13): n is a, c, g, or u
  misc_feature (15)..(15): n is a, c, g, or u
ccagucnuuaaananacaguc

SEQ ID NO: 103440 - RNA, 22 nt, Artificial Sequence
  Synthetic
  misc_feature (8)..(8): n is a, c, g, or u
  misc_feature (14)..(14): n is a, c, g, or u
  misc_feature (16)..(16): n is a, c, g, or u
cccagucnuuaaananacaguc

SEQ ID NO: 103441 - RNA, 23 nt, Artificial Sequence
  Synthetic
  misc_feature (9)..(9): n is a, c, g, or u
  misc_feature (15)..(15): n is a, c, g, or u
  misc_feature (17)..(17): n is a, c, g, or u
ucccagucnuuaaananacaguc

SEQ ID NO: 103442 - RNA, 24 nt, Artificial Sequence
  Synthetic
  misc_feature (10)..(10): n is a, c, g, or u
  misc_feature (16)..(16): n is a, c, g, or u
  misc_feature (18)..(18): n is a, c, g, or u
cucccagucnuuaaananacaguc

SEQ ID NO: 103443 - RNA, 18 nt, Artificial Sequence
  Synthetic
ggugcaggguccccaguc

SEQ ID NO: 103444 - RNA, 19 nt, Artificial Sequence
  Synthetic
cggugcaggguccccaguc

SEQ ID NO: 103445 - RNA, 20 nt, Artificial Sequence
  Synthetic
ucggugcaggguccccaguc

SEQ ID NO: 103446 - RNA, 21 nt, Artificial Sequence
  Synthetic
uucggugcaggguccccaguc

SEQ ID NO: 103447 - RNA, 22 nt, Artificial Sequence
  Synthetic
  misc_feature (1)..(1): n is a, c, g, or u
nuucggugcaggguccccaguc

SEQ ID NO: 103448 - RNA, 23 nt, Artificial Sequence
  Synthetic
  misc_feature (2)..(2): n is a, c, g, or u
unuucggugcaggguccccaguc

SEQ ID NO: 103449 - RNA, 24 nt, Artificial Sequence
  Synthetic
  misc_feature (3)..(3): n is a, c, g, or u
aunuucggugcaggguccccaguc

SEQ ID NO: 103450 - RNA, 18 nt, Artificial Sequence
  Synthetic
ccccaacuccucccaguc

SEQ ID NO: 103451 - RNA, 19 nt, Artificial Sequence
  Synthetic
cccccaacuccucccaguc

SEQ ID NO: 103452 - RNA, 20 nt, Artificial Sequence
  Synthetic
ucccccaacuccucccaguc

SEQ ID NO: 103453 - RNA, 21 nt, Artificial Sequence
  Synthetic
cucccccaacuccucccaguc

SEQ ID NO: 103454 - RNA, 22 nt, Artificial Sequence
  Synthetic
ccucccccaacuccucccaguc

SEQ ID NO: 103455 - RNA, 23 nt, Artificial Sequence
  Synthetic
uccucccccaacuccucccaguc

SEQ ID NO: 103456 - RNA, 24 nt, Artificial Sequence
  Synthetic
cuccucccccaacuccucccaguc

SEQ ID NO: 103457 - RNA, 18 nt, Artificial Sequence
  Synthetic
  misc_feature (13)..(13): n is a, c, g, or u
uugacauugcugngaguc

SEQ ID NO: 103458 - RNA, 19 nt, Artificial Sequence
  Synthetic
  misc_feature (14)..(14): n is a, c, g, or u
guugacauugcugngaguc

SEQ ID NO: 103459 - RNA, 20 nt, Artificial Sequence
  Synthetic
  misc_feature (15)..(15): n is a, c, g, or u
cguugacauugcugngaguc

SEQ ID NO: 103460 - RNA, 21 nt, Artificial Sequence
  Synthetic
  misc_feature (16)..(16): n is a, c, g, or u
ucguugacauugcugngaguc

SEQ ID NO: 103461 - RNA, 22 nt, Artificial Sequence
  Synthetic
  misc_feature (17)..(17): n is a, c, g, or u
gucguugacauugcugngaguc

SEQ ID NO: 103462 - RNA, 23 nt, Artificial Sequence
  Synthetic
  misc_feature (18)..(18): n is a, c, g, or u
ggucguugacauugcugngaguc

SEQ ID NO: 103463 - RNA, 24 nt, Artificial Sequence
  Synthetic
  misc_feature (19)..(19): n is a, c, g, or u
cggucguugacauugcugngaguc

SEQ ID NO: 103464 - RNA, 18 nt, Artificial Sequence
  Synthetic
uuucccaccuuaugaguc

SEQ ID NO: 103465 - RNA, 19 nt, Artificial Sequence
  Synthetic
guuucccaccuuaugaguc

SEQ ID NO: 103466 - RNA, 20 nt, Artificial Sequence
  Synthetic
aguuucccaccuuaugaguc

SEQ ID NO: 103467 - RNA, 21 nt, Artificial Sequence
  Synthetic
aaguuucccaccuuaugaguc

SEQ ID NO: 103468 - RNA, 22 nt, Artificial Sequence
  Synthetic
aaaguuucccaccuuaugaguc

SEQ ID NO: 103469 - RNA, 23 nt, Artificial Sequence
  Synthetic
uaaaguuucccaccuuaugaguc

SEQ ID NO: 103470 - RNA, 24 nt, Artificial Sequence
  Synthetic
guaaaguuucccaccuuaugaguc

SEQ ID NO: 103471 - RNA, 18 nt, Artificial Sequence
  Synthetic
caacauaccuugguaguc

SEQ ID NO: 103472 - RNA, 19 nt, Artificial Sequence
  Synthetic
gcaacauaccuugguaguc

SEQ ID NO: 103473 - RNA, 20 nt, Artificial Sequence
  Synthetic
ggcaacauaccuugguaguc

SEQ ID NO: 103474 - RNA, 18 nt, Artificial Sequence
  Synthetic
  misc_feature (10)..(10): n is a, c, g, or u
acaagugcanuuuccguc

SEQ ID NO: 103475 - RNA, 19 nt, Artificial Sequence
  Synthetic
  misc_feature (11)..(11): n is a, c, g, or u
uacaagugcanuuuccguc

SEQ ID NO: 103476 - RNA, 20 nt, Artificial Sequence
  Synthetic
  misc_feature (12)..(12): n is a, c, g, or u
auacaagugcanuuuccguc

SEQ ID NO: 103477 - RNA, 21 nt, Artificial Sequence
  Synthetic
  misc_feature (13)..(13): n is a, c, g, or u
aauacaagugcanuuuccguc

SEQ ID NO: 103478 - RNA, 22 nt, Artificial Sequence
  Synthetic
  misc_feature (14)..(14): n is a, c, g, or u
gaauacaagugcanuuuccguc

SEQ ID NO: 103479 - RNA, 23 nt, Artificial Sequence
  Synthetic
  misc_feature (15)..(15): n is a, c, g, or u
ggaauacaagugcanuuuccguc

SEQ ID NO: 103480 - RNA, 24 nt, Artificial Sequence
  Synthetic
  misc_feature (16)..(16): n is a, c, g, or u
gggaauacaagugcanuuuccguc

SEQ ID NO: 103481 - RNA, 18 nt, Artificial Sequence
  Synthetic
  misc_feature (1)..(1): n is a, c, g, or u
nccaguggggguugcguc

SEQ ID NO: 103482 - RNA, 19 nt, Artificial Sequence
  Synthetic
  misc_feature (2)..(2): n is a, c, g, or u
anccaguggggguugcguc

SEQ ID NO: 103483 - RNA, 20 nt, Artificial Sequence
  Synthetic
  misc_feature (3)..(3): n is a, c, g, or u
canccaguggggguugcguc

SEQ ID NO: 103484 - RNA, 21 nt, Artificial Sequence
  Synthetic
  misc_feature (4)..(4): n is a, c, g, or u
ccanccaguggggguugcguc

SEQ ID NO: 103485 - RNA, 22 nt, Artificial Sequence
  Synthetic
  misc_feature (5)..(5): n is a, c, g, or u
cccanccaguggggguugcguc

SEQ ID NO: 103486 - RNA, 23 nt, Artificial Sequence
  Synthetic
  misc_feature (6)..(6): n is a, c, g, or u
ccccanccaguggggguugcguc

SEQ ID NO: 103487 - RNA, 24 nt, Artificial Sequence
  Synthetic
  misc_feature (7)..(7): n is a, c, g, or u
gccccanccaguggggguugcguc

SEQ ID NO: 103488 - RNA, 18 nt, Artificial Sequence
  Synthetic
gccccgagacgggucguc

SEQ ID NO: 103489 - RNA, 19 nt, Artificial Sequence
  Synthetic
ggccccgagacgggucguc

SEQ ID NO: 103490 - RNA, 20 nt, Artificial Sequence
  Synthetic
cggccccgagacgggucguc

SEQ ID NO: 103491 - RNA, 18 nt, Artificial Sequence
  Synthetic
gcgauugagaccuucguc

SEQ ID NO: 103492 - RNA, 19 nt, Artificial Sequence
  Synthetic
ggcgauugagaccuucguc

SEQ ID NO: 103493 - RNA, 20 nt, Artificial Sequence
  Synthetic
cggcgauugagaccuucguc

SEQ ID NO: 103494 - RNA, 21 nt, Artificial Sequence
  Synthetic
gcggcgauugagaccuucguc

SEQ ID NO: 103495 - RNA, 22 nt, Artificial Sequence
  Synthetic
cgcggcgauugagaccuucguc

SEQ ID NO: 103496 - RNA, 23 nt, Artificial Sequence
  Synthetic
acgcggcgauugagaccuucguc

SEQ ID NO: 103497 - RNA, 24 nt, Artificial Sequence
  Synthetic
gacgcggcgauugagaccuucguc

SEQ ID NO: 103498 - RNA, 18 nt, Artificial Sequence
  Synthetic
uaugccucaaggucgguc

SEQ ID NO: 103499 - RNA, 19 nt, Artificial Sequence
  Synthetic
guaugccucaaggucgguc

SEQ ID NO: 103500 - RNA, 20 nt, Artificial Sequence
  Synthetic
aguaugccucaaggucgguc

SEQ ID NO: 103501 - RNA, 21 nt, Artificial Sequence
  Synthetic
aaguaugccucaaggucgguc

SEQ ID NO: 103502 - RNA, 22 nt, Artificial Sequence
  Synthetic
gaaguaugccucaaggucgguc

SEQ ID NO: 103503 - RNA, 23 nt, Artificial Sequence
  Synthetic
ugaaguaugccucaaggucgguc

SEQ ID NO: 103504 - RNA, 24 nt, Artificial Sequence
  Synthetic
uugaaguaugccucaaggucgguc

SEQ ID NO: 103505 - RNA, 18 nt, Artificial Sequence
  Synthetic
guaacacgagcagggguc

SEQ ID NO: 103506 - RNA, 19 nt, Artificial Sequence
  Synthetic
uguaacacgagcagggguc

SEQ ID NO: 103507 - RNA, 20 nt, Artificial Sequence
  Synthetic
cuguaacacgagcagggguc

SEQ ID NO: 103508 - RNA, 21 nt, Artificial Sequence
  Synthetic
ccuguaacacgagcagggguc

SEQ ID NO: 103509 - RNA, 22 nt, Artificial Sequence
  Synthetic
gccuguaacacgagcagggguc

SEQ ID NO: 103510 - RNA, 23 nt, Artificial Sequence
  Synthetic
cgccuguaacacgagcagggguc

SEQ ID NO: 103511 - RNA, 24 nt, Artificial Sequence
  Synthetic
ccgccuguaacacgagcagggguc

SEQ ID NO: 103512 - RNA, 18 nt, Artificial Sequence
  Synthetic
uaggggcauuuggugguc

SEQ ID NO: 103513 - RNA, 19 nt, Artificial Sequence
  Synthetic
auaggggcauuuggugguc

SEQ ID NO: 103514 - RNA, 20 nt, Artificial Sequence
  Synthetic
gauaggggcauuuggugguc

SEQ ID NO: 103515 - RNA, 21 nt, Artificial Sequence
  Synthetic
agauaggggcauuuggugguc

SEQ ID NO: 103516 - RNA, 22 nt, Artificial Sequence
  Synthetic
aagauaggggcauuuggugguc

SEQ ID NO: 103517 - RNA, 23 nt, Artificial Sequence
  Synthetic
uaagauaggggcauuuggugguc

SEQ ID NO: 103518 - RNA, 24 nt, Artificial Sequence
  Synthetic
auaagauaggggcauuuggugguc

SEQ ID NO: 103519 - RNA, 18 nt, Artificial Sequence
  Synthetic
  misc_feature (7)..(7): n is a, c, g, or u
cagagcngaggcgguguc

SEQ ID NO: 103520 - RNA, 19 nt, Artificial Sequence
  Synthetic
  misc_feature (8)..(8): n is a, c, g, or u
acagagcngaggcgguguc

SEQ ID NO: 103521 - RNA, 20 nt, Artificial Sequence
  Synthetic
  misc_feature (9)..(9): n is a, c, g, or u
uacagagcngaggcgguguc

SEQ ID NO: 103522 - RNA, 21 nt, Artificial Sequence
  Synthetic
  misc_feature (10)..(10): n is a, c, g, or u
auacagagcngaggcgguguc

SEQ ID NO: 103523 - RNA, 22 nt, Artificial Sequence
  Synthetic
  misc_feature (11)..(11): n is a, c, g, or u
gauacagagcngaggcgguguc

SEQ ID NO: 103524 - RNA, 23 nt, Artificial Sequence
  Synthetic
  misc_feature (12)..(12): n is a, c, g, or u
cgauacagagcngaggcgguguc

SEQ ID NO: 103525 - RNA, 24 nt, Artificial Sequence
  Synthetic
  misc_feature (13)..(13): n is a, c, g, or u
ccgauacagagcngaggcgguguc

SEQ ID NO: 103526 - RNA, 18 nt, Artificial Sequence
  Synthetic
auugugaggauucuuguc

SEQ ID NO: 103527 - RNA, 19 nt, Artificial Sequence
  Synthetic
uauugugaggauucuuguc

SEQ ID NO: 103528 - RNA, 20 nt, Artificial Sequence
  Synthetic
guauugugaggauucuuguc

SEQ ID NO: 103529 - RNA, 21 nt, Artificial Sequence
  Synthetic
gguauugugaggauucuuguc

SEQ ID NO: 103530 - RNA, 22 nt, Artificial Sequence
  Synthetic
ugguauugugaggauucuuguc

SEQ ID NO: 103531 - RNA, 23 nt, Artificial Sequence
  Synthetic
gugguauugugaggauucuuguc

SEQ ID NO: 103532 - RNA, 24 nt, Artificial Sequence
  Synthetic
ugugguauugugaggauucuuguc

SEQ ID NO: 103533 - RNA, 18 nt, Artificial Sequence
  Synthetic
  misc_feature (1)..(1): n is a, c, g, or u
  misc_feature (16)..(16): n is a, c, g, or u
ngguuuaaugccuuunuc

SEQ ID NO: 103534 - RNA, 19 nt, Artificial Sequence
  Synthetic
  misc_feature (2)..(2): n is a, c, g, or u
  misc_feature (17)..(17): n is a, c, g, or u
angguuuaaugccuuunuc

SEQ ID NO: 103535 - RNA, 20 nt, Artificial Sequence
  Synthetic
  misc_feature (3)..(3): n is a, c, g, or u
  misc_feature (18)..(18): n is a, c, g, or u
uangguuuaaugccuuunuc

SEQ ID NO: 103536 - RNA, 21 nt, Artificial Sequence
  Synthetic
  misc_feature (4)..(4): n is a, c, g, or u
  misc_feature (19)..(19): n is a, c, g, or u
auangguuuaaugccuuunuc

SEQ ID NO: 103537 - RNA, 22 nt, Artificial Sequence
  Synthetic
  misc_feature (5)..(5): n is a, c, g, or u
  misc_feature (20)..(20): n is a, c, g, or u
aauangguuuaaugccuuunuc

SEQ ID NO: 103538 - RNA, 23 nt, Artificial Sequence
  Synthetic
  misc_feature (6)..(6): n is a, c, g, or u
  misc_feature (21)..(21): n is a, c, g, or u
uaauangguuuaaugccuuunuc

SEQ ID NO: 103539 - RNA, 24 nt, Artificial Sequence
  Synthetic
  misc_feature (7)..(7): n is a, c, g, or u
  misc_feature (22)..(22): n is a, c, g, or u
auaauangguuuaaugccuuunuc

SEQ ID NO: 103540 - RNA, 18 nt, Artificial Sequence
  Synthetic
  misc_feature (4)..(4): n is a, c, g, or u
ccanaagacccacaauuc

SEQ ID NO: 103541 - RNA, 19 nt, Artificial Sequence
  Synthetic
  misc_feature (5)..(5): n is a, c, g, or u
cccanaagacccacaauuc

SEQ ID NO: 103542 - RNA, 20 nt, Artificial Sequence
  Synthetic
  misc_feature (6)..(6): n is a, c, g, or u
gcccanaagacccacaauuc

SEQ ID NO: 103543 - RNA, 21 nt, Artificial Sequence
  Synthetic
  misc_feature (7)..(7): n is a, c, g, or u
agcccanaagacccacaauuc

SEQ ID NO: 103544 - RNA, 22 nt, Artificial Sequence
  Synthetic
  misc_feature (8)..(8): n is a, c, g, or u
aagcccanaagacccacaauuc

SEQ ID NO: 103545 - RNA, 23 nt, Artificial Sequence
  Synthetic
  misc_feature (9)..(9): n is a, c, g, or u
aaagcccanaagacccacaauuc

SEQ ID NO: 103546 - RNA, 24 nt, Artificial Sequence
  Synthetic
  misc_feature (10)..(10): n is a, c, g, or u
caaagcccanaagacccacaauuc

SEQ ID NO: 103547 - RNA, 18 nt, Artificial Sequence
  Synthetic
  misc_feature (7)..(7): n is a, c, g, or u
auagcunacuacuaauuc

SEQ ID NO: 103548 - RNA, 19 nt, Artificial Sequence
  Synthetic
  misc_feature (8)..(8): n is a, c, g, or u
cauagcunacuacuaauuc

SEQ ID NO: 103549 - RNA, 20 nt, Artificial Sequence
  Synthetic
  misc_feature (9)..(9): n is a, c, g, or u
acauagcunacuacuaauuc

SEQ ID NO: 103550 - RNA, 21 nt, Artificial Sequence
  Synthetic
  misc_feature (10)..(10): n is a, c, g, or u
gacauagcunacuacuaauuc

SEQ ID NO: 103551 - RNA, 22 nt, Artificial Sequence
  Synthetic
  misc_feature (11)..(11): n is a, c, g, or u
ugacauagcunacuacuaauuc

SEQ ID NO: 103552 - RNA, 23 nt, Artificial Sequence
  Synthetic
  misc_feature (12)..(12): n is a, c, g, or u
uugacauagcunacuacuaauuc

SEQ ID NO: 103553 - RNA, 24 nt, Artificial Sequence
  Synthetic
  misc_feature (13)..(13): n is a, c, g, or u
auugacauagcunacuacuaauuc

SEQ ID NO: 103554 - RNA, 18 nt, Artificial Sequence
  Synthetic
acccagguggccagauuc

SEQ ID NO: 103555 - RNA, 19 nt, Artificial Sequence
  Synthetic
cacccagguggccagauuc

SEQ ID NO: 103556 - RNA, 20 nt, Artificial Sequence
  Synthetic
ccacccagguggccagauuc

SEQ ID NO: 103557 - RNA, 21 nt, Artificial Sequence
  Synthetic
cccacccagguggccagauuc

SEQ ID NO: 103558 - RNA, 22 nt, Artificial Sequence
  Synthetic
ucccacccagguggccagauuc

SEQ ID NO: 103559 - RNA, 23 nt, Artificial Sequence
  Synthetic
uucccacccagguggccagauuc

SEQ ID NO: 103560 - RNA, 24 nt, Artificial Sequence
  Synthetic
cuucccacccagguggccagauuc

SEQ ID NO: 103561 - RNA, 18 nt, Artificial Sequence
  Synthetic
auacuaacauugagauuc

SEQ ID NO: 103562 - RNA, 19 nt, Artificial Sequence
  Synthetic
gauacuaacauugagauuc

SEQ ID NO: 103563 - RNA, 20 nt, Artificial Sequence
  Synthetic
ggauacuaacauugagauuc

SEQ ID NO: 103564 - RNA, 21 nt, Artificial Sequence
  Synthetic
gggauacuaacauugagauuc

SEQ ID NO: 103565 - RNA, 22 nt, Artificial Sequence
  Synthetic
agggauacuaacauugagauuc

SEQ ID NO: 103566 - RNA, 23 nt, Artificial Sequence
  Synthetic
aagggauacuaacauugagauuc

SEQ ID NO: 103567 - RNA, 24 nt, Artificial Sequence
  Synthetic
caagggauacuaacauugagauuc

SEQ ID NO: 103568 - RNA, 18 nt, Artificial Sequence
  Synthetic
  misc_feature (5)..(5): n is a, c, g, or u
  misc_feature (9)..(9): n is a, c, g, or u
uauanaaunccagccuuc

SEQ ID NO: 103569 - RNA, 19 nt, Artificial Sequence
  Synthetic
  misc_feature (6)..(6): n is a, c, g, or u
  misc_feature (10)..(10): n is a, c, g, or u
auauanaaunccagccuuc

SEQ ID NO: 103570 - RNA, 20 nt, Artificial Sequence
  Synthetic
  misc_feature (7)..(7): n is a, c, g, or u
  misc_feature (11)..(11): n is a, c, g, or u
uauauanaaunccagccuuc

SEQ ID NO: 103571 - RNA, 21 nt, Artificial Sequence
  Synthetic
  misc_feature (8)..(8): n is a, c, g, or u
  misc_feature (12)..(12): n is a, c, g, or u
uuauauanaaunccagccuuc

SEQ ID NO: 103572 - RNA, 22 nt, Artificial Sequence
  Synthetic
  misc_feature (9)..(9): n is a, c, g, or u
  misc_feature (13)..(13): n is a, c, g, or u
cuuauauanaaunccagccuuc

SEQ ID NO: 103573 - RNA, 23 nt, Artificial Sequence
  Synthetic
  misc_feature (10)..(10): n is a, c, g, or u
  misc_feature (14)..(14): n is a, c, g, or u
ucuuauauanaaunccagccuuc

SEQ ID NO: 103574 - RNA, 24 nt, Artificial Sequence
  Synthetic
  misc_feature (11)..(11): n is a, c, g, or u
  misc_feature (15)..(15): n is a, c, g, or u
cucuuauauanaaunccagccuuc

SEQ ID NO: 103575 - RNA, 18 nt, Artificial Sequence
  Synthetic
cccgagauugagaucuuc

SEQ ID NO: 103576 - RNA, 19 nt, Artificial Sequence
  Synthetic
ucccgagauugagaucuuc

SEQ ID NO: 103577 - RNA, 20 nt, Artificial Sequence
  Synthetic
uucccgagauugagaucuuc

SEQ ID NO: 103578 - RNA, 21 nt, Artificial Sequence
  Synthetic
auucccgagauugagaucuuc

SEQ ID NO: 103579 - RNA, 22 nt, Artificial Sequence
  Synthetic
gauucccgagauugagaucuuc

SEQ ID NO: 103580 - RNA, 23 nt, Artificial Sequence
  Synthetic
agauucccgagauugagaucuuc

SEQ ID NO: 103581 - RNA, 24 nt, Artificial Sequence
  Synthetic
gagauucccgagauugagaucuuc

SEQ ID NO: 103582 - RNA, 18 nt, Artificial Sequence
  Synthetic
caagaacaguuucucuuc

SEQ ID NO: 103583 - RNA, 19 nt, Artificial Sequence
  Synthetic
ucaagaacaguuucucuuc

SEQ ID NO: 103584 - RNA, 20 nt, Artificial Sequence
  Synthetic
cucaagaacaguuucucuuc

SEQ ID NO: 103585 - RNA, 21 nt, Artificial Sequence
  Synthetic
acucaagaacaguuucucuuc

SEQ ID NO: 103586 - RNA, 22 nt, Artificial Sequence
  Synthetic
uacucaagaacaguuucucuuc

SEQ ID NO: 103587 - RNA, 23 nt, Artificial Sequence
  Synthetic
auacucaagaacaguuucucuuc

SEQ ID NO: 103588 - RNA, 24 nt, Artificial Sequence
  Synthetic
aauacucaagaacaguuucucuuc

SEQ ID NO: 103589 - RNA, 18 nt, Artificial Sequence
  Synthetic
gcgagggaguucuucuuc

SEQ ID NO: 103590 - RNA, 19 nt, Artificial Sequence
  Synthetic
ggcgagggaguucuucuuc

SEQ ID NO: 103591 - RNA, 20 nt, Artificial Sequence
  Synthetic
aggcgagggaguucuucuuc

SEQ ID NO: 103592 - RNA, 21 nt, Artificial Sequence
  Synthetic
gaggcgagggaguucuucuuc

SEQ ID NO: 103593 - RNA, 22 nt, Artificial Sequence
  Synthetic
cgaggcgagggaguucuucuuc

SEQ ID NO: 103594 - RNA, 23 nt, Artificial Sequence
  Synthetic
gcgaggcgagggaguucuucuuc

SEQ ID NO: 103595 - RNA, 24 nt, Artificial Sequence
  Synthetic
ugcgaggcgagggaguucuucuuc

SEQ ID NO: 103596 - RNA, 18 nt, Artificial Sequence
  Synthetic
agggaaacauagagguuc

SEQ ID NO: 103597 - RNA, 19 nt, Artificial Sequence
  Synthetic
gagggaaacauagagguuc

SEQ ID NO: 103598 - RNA, 20 nt, Artificial Sequence
  Synthetic
agagggaaacauagagguuc

SEQ ID NO: 103599 - RNA, 21 nt, Artificial Sequence
  Synthetic
aagagggaaacauagagguuc

SEQ ID NO: 103600 - RNA, 22 nt, Artificial Sequence
  Synthetic
caagagggaaacauagagguuc

SEQ ID NO: 103601 - RNA, 23 nt, Artificial Sequence
  Synthetic
acaagagggaaacauagagguuc

SEQ ID NO: 103602 - RNA, 24 nt, Artificial Sequence
  Synthetic
aacaagagggaaacauagagguuc

SEQ ID NO: 103603 - RNA, 18 nt, Artificial Sequence
  Synthetic
gugaggugaacaauguuc

SEQ ID NO: 103604 - RNA, 19 nt, Artificial Sequence
  Synthetic
ggugaggugaacaauguuc

SEQ ID NO: 103605 - RNA, 20 nt, Artificial Sequence
  Synthetic
uggugaggugaacaauguuc

SEQ ID NO: 103606 - RNA, 21 nt, Artificial Sequence
  Synthetic
auggugaggugaacaauguuc

SEQ ID NO: 103607 - RNA, 22 nt, Artificial Sequence
  Synthetic
uauggugaggugaacaauguuc

SEQ ID NO: 103608 - RNA, 23 nt, Artificial Sequence
  Synthetic
guauggugaggugaacaauguuc

SEQ ID NO: 103609 - RNA, 24 nt, Artificial Sequence
  Synthetic
uguauggugaggugaacaauguuc

SEQ ID NO: 103610 - RNA, 18 nt, Artificial Sequence
  Synthetic
ugcugguaguugauguuc

SEQ ID NO: 103611 - RNA, 19 nt, Artificial Sequence
  Synthetic
gugcugguaguugauguuc

SEQ ID NO: 103612 - RNA, 20 nt, Artificial Sequence
  Synthetic
cgugcugguaguugauguuc

SEQ ID NO: 103613 - RNA, 18 nt, Artificial Sequence
  Synthetic
gaacaggguuuacuguuc

SEQ ID NO: 103614 - RNA, 19 nt, Artificial Sequence
  Synthetic
ggaacaggguuuacuguuc

SEQ ID NO: 103615 - RNA, 20 nt, Artificial Sequence
  Synthetic
cggaacaggguuuacuguuc

SEQ ID NO: 103616 - RNA, 21 nt, Artificial Sequence
  Synthetic
ucggaacaggguuuacuguuc

SEQ ID NO: 103617 - RNA, 22 nt, Artificial Sequence
  Synthetic
gucggaacaggguuuacuguuc

SEQ ID NO: 103618 - RNA, 23 nt, Artificial Sequence
  Synthetic
agucggaacaggguuuacuguuc

SEQ ID NO: 103619 - RNA, 24 nt, Artificial Sequence
  Synthetic
uagucggaacaggguuuacuguuc

SEQ ID NO: 103620 - RNA, 18 nt, Artificial Sequence
  Synthetic
augcuguagcucuuguuc

SEQ ID NO: 103621 - RNA, 19 nt, Artificial Sequence
  Synthetic
caugcuguagcucuuguuc

SEQ ID NO: 103622 - RNA, 20 nt, Artificial Sequence
  Synthetic
ccaugcuguagcucuuguuc

SEQ ID NO: 103623 - RNA, 21 nt, Artificial Sequence
  Synthetic
cccaugcuguagcucuuguuc

SEQ ID NO: 103624 - RNA, 22 nt, Artificial Sequence
  Synthetic
ucccaugcuguagcucuuguuc

SEQ ID NO: 103625 - RNA, 23 nt, Artificial Sequence
  Synthetic
cucccaugcuguagcucuuguuc

SEQ ID NO: 103626 - RNA, 24 nt, Artificial Sequence
  Synthetic
ccucccaugcuguagcucuuguuc

SEQ ID NO: 103627 - RNA, 18 nt, Artificial Sequence
  Synthetic
ggaaaggagguguauuuc

SEQ ID NO: 103628 - RNA, 19 nt, Artificial Sequence
  Synthetic
uggaaaggagguguauuuc

SEQ ID NO: 103629 - RNA, 20 nt, Artificial Sequence
  Synthetic
auggaaaggagguguauuuc

SEQ ID NO: 103630 - RNA, 21 nt, Artificial Sequence
  Synthetic
cauggaaaggagguguauuuc

SEQ ID NO: 103631 - RNA, 22 nt, Artificial Sequence
  Synthetic
ccauggaaaggagguguauuuc

SEQ ID NO: 103632 - RNA, 23 nt, Artificial Sequence
  Synthetic
gccauggaaaggagguguauuuc

SEQ ID NO: 103633 - RNA, 24 nt, Artificial Sequence
  Synthetic
agccauggaaaggagguguauuuc

SEQ ID NO: 103634 - RNA, 18 nt, Artificial Sequence
  Synthetic
ucuaacaacaguaguuuc

SEQ ID NO: 103635 - RNA, 19 nt, Artificial Sequence
  Synthetic
gucuaacaacaguaguuuc

SEQ ID NO: 103636 - RNA, 20 nt, Artificial Sequence
  Synthetic
cgucuaacaacaguaguuuc

SEQ ID NO: 103637 - RNA, 21 nt, Artificial Sequence
  Synthetic
ucgucuaacaacaguaguuuc

SEQ ID NO: 103638 - RNA, 22 nt, Artificial Sequence
  Synthetic
gucgucuaacaacaguaguuuc

SEQ ID NO: 103639 - RNA, 23 nt, Artificial Sequence
  Synthetic
cgucgucuaacaacaguaguuuc

SEQ ID NO: 103640 - RNA, 24 nt, Artificial Sequence
  Synthetic
ucgucgucuaacaacaguaguuuc

SEQ ID NO: 103641 - RNA, 18 nt, Artificial Sequence
  Synthetic
uuuuaaucuccuuuuuuc

SEQ ID NO: 103642 - RNA, 19 nt, Artificial Sequence
  Synthetic
auuuuaaucuccuuuuuuc

SEQ ID NO: 103643 - RNA, 20 nt, Artificial Sequence
  Synthetic
aauuuuaaucuccuuuuuuc

SEQ ID NO: 103644 - RNA, 21 nt, Artificial Sequence
  Synthetic
  misc_feature (1)..(1): n is a, c, g, or u
naauuuuaaucuccuuuuuuc

SEQ ID NO: 103645 - RNA, 22 nt, Artificial Sequence
  Synthetic
  misc_feature (2)..(2): n is a, c, g, or u
unaauuuuaaucuccuuuuuuc

SEQ ID NO: 103646 - RNA, 23 nt, Artificial Sequence
  Synthetic
  misc_feature (3)..(3): n is a, c, g, or u
aunaauuuuaaucuccuuuuuuc

SEQ ID NO: 103647 - RNA, 24 nt, Artificial Sequence
  Synthetic
  misc_feature (4)..(4): n is a, c, g, or u
aaunaauuuuaaucuccuuuuuuc

SEQ ID NO: 103648 - RNA, 18 nt, Artificial Sequence
  Synthetic
caguuucucuuccaaaag

SEQ ID NO: 103649 - RNA, 19 nt, Artificial Sequence
  Synthetic
acaguuucucuuccaaaag

SEQ ID NO: 103650 - RNA, 20 nt, Artificial Sequence
  Synthetic
aacaguuucucuuccaaaag

SEQ ID NO: 103651 - RNA, 21 nt, Artificial Sequence
  Synthetic
gaacaguuucucuuccaaaag

SEQ ID NO: 103652 - RNA, 22 nt, Artificial Sequence
  Synthetic
agaacaguuucucuuccaaaag

SEQ ID NO: 103653 - RNA, 23 nt, Artificial Sequence
  Synthetic
aagaacaguuucucuuccaaaag

SEQ ID NO: 103654 - RNA, 24 nt, Artificial Sequence
  Synthetic
caagaacaguuucucuuccaaaag

SEQ ID NO: 103655 - RNA, 18 nt, Artificial Sequence
  Synthetic
  misc_feature (2)..(2): n is a, c, g, or u
unaaauguauacccaaag

SEQ ID NO: 103656 - RNA, 19 nt, Artificial Sequence
  Synthetic
  misc_feature (3)..(3): n is a, c, g, or u
uunaaauguauacccaaag

SEQ ID NO: 103657 - RNA, 20 nt, Artificial Sequence
  Synthetic
  misc_feature (4)..(4): n is a, c, g, or u
guunaaauguauacccaaag

SEQ ID NO: 103658 - RNA, 21 nt, Artificial Sequence
  Synthetic
  misc_feature (5)..(5): n is a, c, g, or u
gguunaaauguauacccaaag

SEQ ID NO: 103659 - RNA, 22 nt, Artificial Sequence
  Synthetic
  misc_feature (6)..(6): n is a, c, g, or u
ggguunaaauguauacccaaag

SEQ ID NO: 103660 - RNA, 23 nt, Artificial Sequence
  Synthetic
  misc_feature (7)..(7): n is a, c, g, or u
aggguunaaauguauacccaaag

SEQ ID NO: 103661 - RNA, 24 nt, Artificial Sequence
  Synthetic
  misc_feature (8)..(8): n is a, c, g, or u
uaggguunaaauguauacccaaag

SEQ ID NO: 103662 - RNA, 18 nt, Artificial Sequence
  Synthetic
uguaaguuggcgagaaag

SEQ ID NO: 103663 - RNA, 19 nt, Artificial Sequence
  Synthetic
uuguaaguuggcgagaaag

SEQ ID NO: 103664 - RNA, 20 nt, Artificial Sequence
  Synthetic
cuuguaaguuggcgagaaag

SEQ ID NO: 103665 - RNA, 21 nt, Artificial Sequence
  Synthetic
ccuuguaaguuggcgagaaag

SEQ ID NO: 103666 - RNA, 22 nt, Artificial Sequence
  Synthetic
gccuuguaaguuggcgagaaag

SEQ ID NO: 103667 - RNA, 23 nt, Artificial Sequence
  Synthetic
ggccuuguaaguuggcgagaaag

SEQ ID NO: 103668 - RNA, 24 nt, Artificial Sequence
  Synthetic
aggccuuguaaguuggcgagaaag

SEQ ID NO: 103669 - RNA, 18 nt, Artificial Sequence
  Synthetic
cauccauauaacugaaag

SEQ ID NO: 103670 - RNA, 19 nt, Artificial Sequence
  Synthetic
ucauccauauaacugaaag

SEQ ID NO: 103671 - RNA, 20 nt, Artificial Sequence
  Synthetic
aucauccauauaacugaaag

SEQ ID NO: 103672 - RNA, 21 nt, Artificial Sequence
  Synthetic
caucauccauauaacugaaag

SEQ ID NO: 103673 - RNA, 22 nt, Artificial Sequence
  Synthetic
acaucauccauauaacugaaag

SEQ ID NO: 103674 - RNA, 23 nt, Artificial Sequence
  Synthetic
cacaucauccauauaacugaaag

SEQ ID NO: 103675 - RNA, 24 nt, Artificial Sequence
  Synthetic
ccacaucauccauauaacugaaag

SEQ ID NO: 103676 - RNA, 18 nt, Artificial Sequence
  Synthetic
guuuuguacagcaacaag

SEQ ID NO: 103677 - RNA, 19 nt, Artificial Sequence
  Synthetic
gguuuuguacagcaacaag

SEQ ID NO: 103678 - RNA, 20 nt, Artificial Sequence
  Synthetic
agguuuuguacagcaacaag

SEQ ID NO: 103679 - RNA, 21 nt, Artificial Sequence
  Synthetic
aagguuuuguacagcaacaag

SEQ ID NO: 103680 - RNA, 22 nt, Artificial Sequence
  Synthetic
gaagguuuuguacagcaacaag

SEQ ID NO: 103681 - RNA, 23 nt, Artificial Sequence
  Synthetic
cgaagguuuuguacagcaacaag

SEQ ID NO: 103682 - RNA, 24 nt, Artificial Sequence
  Synthetic
ccgaagguuuuguacagcaacaag

SEQ ID NO: 103683 - RNA, 18 nt, Artificial Sequence
  Synthetic
aggauucuugucaacaag

SEQ ID NO: 103684 - RNA, 19 nt, Artificial Sequence
  Synthetic
gaggauucuugucaacaag

SEQ ID NO: 103685 - RNA, 20 nt, Artificial Sequence
  Synthetic
ugaggauucuugucaacaag

SEQ ID NO: 103686 - RNA, 21 nt, Artificial Sequence
  Synthetic
gugaggauucuugucaacaag

SEQ ID NO: 103687 - RNA, 22 nt, Artificial Sequence
  Synthetic
ugugaggauucuugucaacaag

SEQ ID NO: 103688 - RNA, 23 nt, Artificial Sequence
  Synthetic
uugugaggauucuugucaacaag

SEQ ID NO: 103689 - RNA, 24 nt, Artificial Sequence
  Synthetic
auugugaggauucuugucaacaag

SEQ ID NO: 103690 - RNA, 18 nt, Artificial Sequence
  Synthetic
cgaauagaaggaaagaag

SEQ ID NO: 103691 - RNA, 19 nt, Artificial Sequence
  Synthetic
  misc_feature (1)..(1): n is a, c, g, or u
ncgaauagaaggaaagaag

SEQ ID NO: 103692 - RNA, 20 nt, Artificial Sequence
  Synthetic
  misc_feature (2)..(2): n is a, c, g, or u
cncgaauagaaggaaagaag

SEQ ID NO: 103693 - RNA, 21 nt, Artificial Sequence
  Synthetic
  misc_feature (3)..(3): n is a, c, g, or u
ucncgaauagaaggaaagaag

SEQ ID NO: 103694 - RNA, 22 nt, Artificial Sequence
  Synthetic
  misc_feature (4)..(4): n is a, c, g, or u
aucncgaauagaaggaaagaag

SEQ ID NO: 103695 - RNA, 23 nt, Artificial Sequence
  Synthetic
  misc_feature (5)..(5): n is a, c, g, or u
gaucncgaauagaaggaaagaag

SEQ ID NO: 103696 - RNA, 24 nt, Artificial Sequence
  Synthetic
  misc_feature (6)..(6): n is a, c, g, or u
agaucncgaauagaaggaaagaag

SEQ ID NO: 103697 - RNA, 18 nt, Artificial Sequence
  Synthetic
agaagaaccaacaagaag

SEQ ID NO: 103698 - RNA, 19 nt, Artificial Sequence
  Synthetic
cagaagaaccaacaagaag

SEQ ID NO: 103699 - RNA, 20 nt, Artificial Sequence
  Synthetic
ccagaagaaccaacaagaag

SEQ ID NO: 103700 - RNA, 21 nt, Artificial Sequence
  Synthetic
uccagaagaaccaacaagaag

SEQ ID NO: 103701 - RNA, 22 nt, Artificial Sequence
  Synthetic
guccagaagaaccaacaagaag

SEQ ID NO: 103702 - RNA, 23 nt, Artificial Sequence
  Synthetic
aguccagaagaaccaacaagaag

SEQ ID NO: 103703 - RNA, 24 nt, Artificial Sequence
  Synthetic
uaguccagaagaaccaacaagaag

SEQ ID NO: 103704 - RNA, 18 nt, Artificial Sequence
  Synthetic
aaggaaagaagucagaag

SEQ ID NO: 103705 - RNA, 19 nt, Artificial Sequence
  Synthetic
gaaggaaagaagucagaag

SEQ ID NO: 103706 - RNA, 20 nt, Artificial Sequence
  Synthetic
agaaggaaagaagucagaag

SEQ ID NO: 103707 - RNA, 21 nt, Artificial Sequence
  Synthetic
uagaaggaaagaagucagaag

SEQ ID NO: 103708 - RNA, 22 nt, Artificial Sequence
  Synthetic
auagaaggaaagaagucagaag

SEQ ID NO: 103709 - RNA, 23 nt, Artificial Sequence
  Synthetic
aauagaaggaaagaagucagaag

SEQ ID NO: 103710 - RNA, 24 nt, Artificial Sequence
  Synthetic
gaauagaaggaaagaagucagaag

SEQ ID NO: 103711 - RNA, 18 nt, Artificial Sequence
  Synthetic
uccccaguccucgagaag

SEQ ID NO: 103712 - RNA, 19 nt, Artificial Sequence
  Synthetic
guccccaguccucgagaag

SEQ ID NO: 103713 - RNA, 20 nt, Artificial Sequence
  Synthetic
gguccccaguccucgagaag

SEQ ID NO: 103714 - RNA, 21 nt, Artificial Sequence
  Synthetic
ggguccccaguccucgagaag

SEQ ID NO: 103715 - RNA, 22 nt, Artificial Sequence
  Synthetic
aggguccccaguccucgagaag

SEQ ID NO: 103716 - RNA, 23 nt, Artificial Sequence
  Synthetic
caggguccccaguccucgagaag

SEQ ID NO: 103717 - RNA, 24 nt, Artificial Sequence
  Synthetic
gcaggguccccaguccucgagaag

SEQ ID NO: 103718 - RNA, 18 nt, Artificial Sequence
  Synthetic
  misc_feature (8)..(8): n is a, c, g, or u
ggagaucncgaauagaag

SEQ ID NO: 103719 - RNA, 19 nt, Artificial Sequence
  Synthetic
  misc_feature (9)..(9): n is a, c, g, or u
aggagaucncgaauagaag

SEQ ID NO: 103720 - RNA, 20 nt, Artificial Sequence
  Synthetic
  misc_feature (10)..(10): n is a, c, g, or u
gaggagaucncgaauagaag

SEQ ID NO: 103721 - RNA, 21 nt, Artificial Sequence
  Synthetic
  misc_feature (11)..(11): n is a, c, g, or u
cgaggagaucncgaauagaag

SEQ ID NO: 103722 - RNA, 22 nt, Artificial Sequence
  Synthetic
  misc_feature (12)..(12): n is a, c, g, or u
ucgaggagaucncgaauagaag

SEQ ID NO: 103723 - RNA, 23 nt, Artificial Sequence
  Synthetic
  misc_feature (13)..(13): n is a, c, g, or u
gucgaggagaucncgaauagaag

SEQ ID NO: 103724 - RNA, 24 nt, Artificial Sequence
  Synthetic
  misc_feature (14)..(14): n is a, c, g, or u
ugucgaggagaucncgaauagaag

SEQ ID NO: 103725 - RNA, 18 nt, Artificial Sequence
  Synthetic
agacagguacaguagaag

SEQ ID NO: 103726 - RNA, 19 nt, Artificial Sequence
  Synthetic
aagacagguacaguagaag

SEQ ID NO: 103727 - RNA, 20 nt, Artificial Sequence
  Synthetic
aaagacagguacaguagaag

SEQ ID NO: 103728 - RNA, 21 nt, Artificial Sequence
  Synthetic
uaaagacagguacaguagaag

SEQ ID NO: 103729 - RNA, 22 nt, Artificial Sequence
  Synthetic
uuaaagacagguacaguagaag

SEQ ID NO: 103730 - RNA, 23 nt, Artificial Sequence
  Synthetic
auuaaagacagguacaguagaag

SEQ ID NO: 103731 - RNA, 24 nt, Artificial Sequence
  Synthetic
gauuaaagacagguacaguagaag

SEQ ID NO: 103732 - RNA, 18 nt, Artificial Sequence
  Synthetic
aguugauguuccuggaag

SEQ ID NO: 103733 - RNA, 19 nt, Artificial Sequence
  Synthetic
uaguugauguuccuggaag

SEQ ID NO: 103734 - RNA, 20 nt, Artificial Sequence
  Synthetic
guaguugauguuccuggaag

SEQ ID NO: 103735 - RNA, 21 nt, Artificial Sequence
  Synthetic
gguaguugauguuccuggaag

SEQ ID NO: 103736 - RNA, 22 nt, Artificial Sequence
  Synthetic
ugguaguugauguuccuggaag

SEQ ID NO: 103737 - RNA, 23 nt, Artificial Sequence
  Synthetic
cugguaguugauguuccuggaag

SEQ ID NO: 103738 - RNA, 24 nt, Artificial Sequence
  Synthetic
gcugguaguugauguuccuggaag

SEQ ID NO: 103739 - RNA, 18 nt, Artificial Sequence
  Synthetic
cuugucgagguuuggaag

SEQ ID NO: 103740 - RNA, 19 nt, Artificial Sequence
  Synthetic
ccuugucgagguuuggaag

SEQ ID NO: 103741 - RNA, 20 nt, Artificial Sequence
  Synthetic
gccuugucgagguuuggaag

SEQ ID NO: 103742 - RNA, 21 nt, Artificial Sequence
  Synthetic
ugccuugucgagguuuggaag

SEQ ID NO: 103743 - RNA, 22 nt, Artificial Sequence
  Synthetic
augccuugucgagguuuggaag

SEQ ID NO: 103744 - RNA, 23 nt, Artificial Sequence
  Synthetic
caugccuugucgagguuuggaag

SEQ ID NO: 103745 - RNA, 24 nt, Artificial Sequence
  Synthetic
ccaugccuugucgagguuuggaag

SEQ ID NO: 103746 - RNA, 18 nt, Artificial Sequence
  Synthetic
cauagcagcaggaugaag

SEQ ID NO: 103747 - RNA, 19 nt, Artificial Sequence
  Synthetic
gcauagcagcaggaugaag

SEQ ID NO: 103748 - RNA, 20 nt, Artificial Sequence
  Synthetic
ggcauagcagcaggaugaag

SEQ ID NO: 103749 - RNA, 21 nt, Artificial Sequence
  Synthetic
aggcauagcagcaggaugaag

SEQ ID NO: 103750 - RNA, 22 nt, Artificial Sequence
  Synthetic
gaggcauagcagcaggaugaag

SEQ ID NO: 103751 - RNA, 23 nt, Artificial Sequence
  Synthetic
ugaggcauagcagcaggaugaag

SEQ ID NO: 103752 - RNA, 24 nt, Artificial Sequence
  Synthetic
augaggcauagcagcaggaugaag

SEQ ID NO: 103753 - RNA, 18 nt, Artificial Sequence
  Synthetic
  misc_feature (12)..(12): n is a, c, g, or u
  misc_feature (15)..(15): n is a, c, g, or u
uuaaugccuuunucnaag

SEQ ID NO: 103754 - RNA, 19 nt, Artificial Sequence
  Synthetic
  misc_feature (13)..(13): n is a, c, g, or u
  misc_feature (16)..(16): n is a, c, g, or u
uuuaaugccuuunucnaag

SEQ ID NO: 103755 - RNA, 20 nt, Artificial Sequence
  Synthetic
  misc_feature (14)..(14): n is a, c, g, or u
  misc_feature (17)..(17): n is a, c, g, or u
guuuaaugccuuunucnaag

SEQ ID NO: 103756 - RNA, 21 nt, Artificial Sequence
  Synthetic
  misc_feature (15)..(15): n is a, c, g, or u
  misc_feature (18)..(18): n is a, c, g, or u
gguuuaaugccuuunucnaag

SEQ ID NO: 103757 - RNA, 22 nt, Artificial Sequence
  Synthetic
  misc_feature (1)..(1): n is a, c, g, or u
  misc_feature (16)..(16): n is a, c, g, or u
  misc_feature (19)..(19): n is a, c, g, or u
ngguuuaaugccuuunucnaag

SEQ ID NO: 103758 - RNA, 23 nt, Artificial Sequence
  Synthetic
  misc_feature (2)..(2): n is a, c, g, or u
  misc_feature (17)..(17): n is a, c, g, or u
  misc_feature (20)..(20): n is a, c, g, or u
angguuuaaugccuuunucnaag

SEQ ID NO: 103759 - RNA, 24 nt, Artificial Sequence
  Synthetic
  misc_feature (3)..(3): n is a, c, g, or u
  misc_feature (18)..(18): n is a, c, g, or u
  misc_feature (21)..(21): n is a, c, g, or u
uangguuuaaugccuuunucnaag

SEQ ID NO: 103760 - RNA, 18 nt, Artificial Sequence
  Synthetic
uccggaaguguugauaag

SEQ ID NO: 103761 - RNA, 19 nt, Artificial Sequence
  Synthetic
uuccggaaguguugauaag

SEQ ID NO: 103762 - RNA, 20 nt, Artificial Sequence
  Synthetic
uuuccggaaguguugauaag

SEQ ID NO: 103763 - RNA, 21 nt, Artificial Sequence
  Synthetic
guuuccggaaguguugauaag

SEQ ID NO: 103764 - RNA, 22 nt, Artificial Sequence
  Synthetic
aguuuccggaaguguugauaag

SEQ ID NO: 103765 - RNA, 23 nt, Artificial Sequence
  Synthetic
uaguuuccggaaguguugauaag

SEQ ID NO: 103766 - RNA, 24 nt, Artificial Sequence
  Synthetic
guaguuuccggaaguguugauaag

SEQ ID NO: 103767 - RNA, 18 nt, Artificial Sequence
  Synthetic
uucucuuccaaaaguaag

SEQ ID NO: 103768 - RNA, 19 nt, Artificial Sequence
  Synthetic
uuucucuuccaaaaguaag

SEQ ID NO: 103769 - RNA, 20 nt, Artificial Sequence
  Synthetic
guuucucuuccaaaaguaag

SEQ ID NO: 103770 - RNA, 21 nt, Artificial Sequence
  Synthetic
aguuucucuuccaaaaguaag

SEQ ID NO: 103771 - RNA, 22 nt, Artificial Sequence
  Synthetic
caguuucucuuccaaaaguaag

SEQ ID NO: 103772 - RNA, 23 nt, Artificial Sequence
  Synthetic
acaguuucucuuccaaaaguaag

SEQ ID NO: 103773 - RNA, 24 nt, Artificial Sequence
  Synthetic
aacaguuucucuuccaaaaguaag

SEQ ID NO: 103774 - RNA, 18 nt, Artificial Sequence
  Synthetic
gggcaaauauuugguaag

SEQ ID NO: 103775 - RNA, 19 nt, Artificial Sequence
  Synthetic
agggcaaauauuugguaag

SEQ ID NO: 103776 - RNA, 20 nt, Artificial Sequence
  Synthetic
aagggcaaauauuugguaag

SEQ ID NO: 103777 - RNA, 21 nt, Artificial Sequence
  Synthetic
  misc_feature (1)..(1): n is a, c, g, or u
naagggcaaauauuugguaag

SEQ ID NO: 103778 - RNA, 22 nt, Artificial Sequence
  Synthetic
  misc_feature (2)..(2): n is a, c, g, or u
cnaagggcaaauauuugguaag

SEQ ID NO: 103779 - RNA, 23 nt, Artificial Sequence
  Synthetic
  misc_feature (3)..(3): n is a, c, g, or u
ucnaagggcaaauauuugguaag

SEQ ID NO: 103780 - RNA, 24 nt, Artificial Sequence
  Synthetic
  misc_feature (1)..(1): n is a, c, g, or u
  misc_feature (4)..(4): n is a, c, g, or u
nucnaagggcaaauauuugguaag

SEQ ID NO: 103781 - RNA, 18 nt, Artificial Sequence
  Synthetic
uaacugaaagccaaacag

SEQ ID NO: 103782 - RNA, 19 nt, Artificial Sequence
  Synthetic
auaacugaaagccaaacag

SEQ ID NO: 103783 - RNA, 20 nt, Artificial Sequence
  Synthetic
uauaacugaaagccaaacag

SEQ ID NO: 103784 - RNA, 21 nt, Artificial Sequence
  Synthetic
auauaacugaaagccaaacag

SEQ ID NO: 103785 - RNA, 22 nt, Artificial Sequence
  Synthetic
cauauaacugaaagccaaacag

SEQ ID NO: 103786 - RNA, 23 nt, Artificial Sequence
  Synthetic
ccauauaacugaaagccaaacag

SEQ ID NO: 103787 - RNA, 24 nt, Artificial Sequence
  Synthetic
uccauauaacugaaagccaaacag

SEQ ID NO: 103788 - RNA, 18 nt, Artificial Sequence
  Synthetic
gcuuggaggcuugaacag

SEQ ID NO: 103789 - RNA, 19 nt, Artificial Sequence
  Synthetic
agcuuggaggcuugaacag

SEQ ID NO: 103790 - RNA, 20 nt, Artificial Sequence
  Synthetic
cagcuuggaggcuugaacag

SEQ ID NO: 103791 - RNA, 21 nt, Artificial Sequence
  Synthetic
acagcuuggaggcuugaacag

SEQ ID NO: 103792 - RNA, 22 nt, Artificial Sequence
  Synthetic
cacagcuuggaggcuugaacag

SEQ ID NO: 103793 - RNA, 23 nt, Artificial Sequence
  Synthetic
gcacagcuuggaggcuugaacag

SEQ ID NO: 103794 - RNA, 24 nt, Artificial Sequence
  Synthetic
ggcacagcuuggaggcuugaacag

SEQ ID NO: 103795 - RNA, 18 nt, Artificial Sequence
  Synthetic
caacucaccccaacacag

SEQ ID NO: 103796 - RNA, 19 nt, Artificial Sequence
  Synthetic
ucaacucaccccaacacag

SEQ ID NO: 103797 - RNA, 20 nt, Artificial Sequence
  Synthetic
aucaacucaccccaacacag

SEQ ID NO: 103798 - RNA, 21 nt, Artificial Sequence
  Synthetic
caucaacucaccccaacacag

SEQ ID NO: 103799 - RNA, 22 nt, Artificial Sequence
  Synthetic
ucaucaacucaccccaacacag

SEQ ID NO: 103800 - RNA, 23 nt, Artificial Sequence
  Synthetic
uucaucaacucaccccaacacag

SEQ ID NO: 103801 - RNA, 24 nt, Artificial Sequence
  Synthetic
auucaucaacucaccccaacacag

SEQ ID NO: 103802 - RNA, 18 nt, Artificial Sequence
  Synthetic
cagauauuguuuacacag

SEQ ID NO: 103803 - RNA, 19 nt, Artificial Sequence
  Synthetic
ucagauauuguuuacacag

SEQ ID NO: 103804 - RNA, 20 nt, Artificial Sequence
  Synthetic
uucagauauuguuuacacag

SEQ ID NO: 103805 - RNA, 21 nt, Artificial Sequence
  Synthetic
guucagauauuguuuacacag

SEQ ID NO: 103806 - RNA, 22 nt, Artificial Sequence
  Synthetic
gguucagauauuguuuacacag

SEQ ID NO: 103807 - RNA, 23 nt, Artificial Sequence
  Synthetic
agguucagauauuguuuacacag

SEQ ID NO: 103808 - RNA, 24 nt, Artificial Sequence
  Synthetic
aagguucagauauuguuuacacag

SEQ ID NO: 103809 - RNA, 18 nt, Artificial Sequence
  Synthetic
aagccacccaaggcacag

SEQ ID NO: 103810 - RNA, 19 nt, Artificial Sequence
  Synthetic
aaagccacccaaggcacag

SEQ ID NO: 103811 - RNA, 20 nt, Artificial Sequence
  Synthetic
  misc_feature (1)..(1): n is a, c, g, or u
naaagccacccaaggcacag

SEQ ID NO: 103812 - RNA, 21 nt, Artificial Sequence
  Synthetic
  misc_feature (2)..(2): n is a, c, g, or u
cnaaagccacccaaggcacag

SEQ ID NO: 103813 - RNA, 22 nt, Artificial Sequence
  Synthetic
  misc_feature (3)..(3): n is a, c, g, or u
ccnaaagccacccaaggcacag

SEQ ID NO: 103814 - RNA, 23 nt, Artificial Sequence
  Synthetic
  misc_feature (4)..(4): n is a, c, g, or u
cccnaaagccacccaaggcacag

SEQ ID NO: 103815 - RNA, 24 nt, Artificial Sequence
  Synthetic
  misc_feature (5)..(5): n is a, c, g, or u
gcccnaaagccacccaaggcacag

SEQ ID NO: 103816 - RNA, 18 nt, Artificial Sequence
  Synthetic
gcagaugagaaggcacag

SEQ ID NO: 103817 - RNA, 19 nt, Artificial Sequence
  Synthetic
ggcagaugagaaggcacag

SEQ ID NO: 103818 - RNA, 20 nt, Artificial Sequence
  Synthetic
cggcagaugagaaggcacag

SEQ ID NO: 103819 - RNA, 21 nt, Artificial Sequence
  Synthetic
ccggcagaugagaaggcacag

SEQ ID NO: 103820 - RNA, 22 nt, Artificial Sequence
  Synthetic
  misc_feature (1)..(1): n is a, c, g, or u
nccggcagaugagaaggcacag

SEQ ID NO: 103821 - RNA, 23 nt, Artificial Sequence
  Synthetic
  misc_feature (2)..(2): n is a, c, g, or u
gnccggcagaugagaaggcacag

SEQ ID NO: 103822 - RNA, 24 nt, Artificial Sequence
  Synthetic
  misc_feature (3)..(3): n is a, c, g, or u
ggnccggcagaugagaaggcacag

SEQ ID NO: 103823 - RNA, 18 nt, Artificial Sequence
  Synthetic
gauuaaagacagguacag

SEQ ID NO: 103824 - RNA, 19 nt, Artificial Sequence
  Synthetic
ggauuaaagacagguacag

SEQ ID NO: 103825 - RNA, 20 nt, Artificial Sequence
  Synthetic
aggauuaaagacagguacag

SEQ ID NO: 103826 - RNA, 21 nt, Artificial Sequence
  Synthetic
caggauuaaagacagguacag

SEQ ID NO: 103827 - RNA, 22 nt, Artificial Sequence
  Synthetic
ucaggauuaaagacagguacag

SEQ ID NO: 103828 - RNA, 23 nt, Artificial Sequence
  Synthetic
  misc_feature (1)..(1): n is a, c, g, or u
nucaggauuaaagacagguacag

SEQ ID NO: 103829 - RNA, 24 nt, Artificial Sequence
  Synthetic
  misc_feature (2)..(2): n is a, c, g, or u
anucaggauuaaagacagguacag

SEQ ID NO: 103830 - RNA, 18 nt, Artificial Sequence
  Synthetic
cggaacuggagccaccag

SEQ ID NO: 103831 - RNA, 19 nt, Artificial Sequence
  Synthetic
ccggaacuggagccaccag

SEQ ID NO: 103832 - RNA, 20 nt, Artificial Sequence
  Synthetic
uccggaacuggagccaccag

SEQ ID NO: 103833 - RNA, 21 nt, Artificial Sequence
  Synthetic
uuccggaacuggagccaccag

SEQ ID NO: 103834 - RNA, 22 nt, Artificial Sequence
  Synthetic
guuccggaacuggagccaccag

SEQ ID NO: 103835 - RNA, 23 nt, Artificial Sequence
  Synthetic
uguuccggaacuggagccaccag

SEQ ID NO: 103836 - RNA, 24 nt, Artificial Sequence
  Synthetic
cuguuccggaacuggagccaccag

SEQ ID NO: 103837 - RNA, 18 nt, Artificial Sequence
  Synthetic
acuaguaaacugagccag

SEQ ID NO: 103838 - RNA, 19 nt, Artificial Sequence
  Synthetic
cacuaguaaacugagccag

SEQ ID NO: 103839 - RNA, 20 nt, Artificial Sequence
  Synthetic
gcacuaguaaacugagccag

SEQ ID NO: 103840 - RNA, 21 nt, Artificial Sequence
  Synthetic
ggcacuaguaaacugagccag

SEQ ID NO: 103841 - RNA, 22 nt, Artificial Sequence
  Synthetic
uggcacuaguaaacugagccag

SEQ ID NO: 103842 - RNA, 23 nt, Artificial Sequence
  Synthetic
auggcacuaguaaacugagccag

SEQ ID NO: 103843 - RNA, 24 nt, Artificial Sequence
  Synthetic
aauggcacuaguaaacugagccag

SEQ ID NO: 103844 - RNA, 18 nt, Artificial Sequence
  Synthetic
  misc_feature (2)..(2): n is a, c, g, or u
  misc_feature (14)..(14): n is a, c, g, or u
ungccaagccccanccag

SEQ ID NO: 103845 - RNA, 19 nt, Artificial Sequence
  Synthetic
  misc_feature (3)..(3): n is a, c, g, or u
  misc_feature (15)..(15): n is a, c, g, or u
aungccaagccccanccag

SEQ ID NO: 103846 - RNA, 20 nt, Artificial Sequence
  Synthetic
  misc_feature (1)..(1): n is a, c, g, or u
  misc_feature (4)..(4): n is a, c, g, or u
  misc_feature (16)..(16): n is a, c, g, or u
naungccaagccccanccag

SEQ ID NO: 103847 - RNA, 21 nt, Artificial Sequence
  Synthetic
  misc_feature (2)..(2): n is a, c, g, or u
  misc_feature (5)..(5): n is a, c, g, or u
  misc_feature (17)..(17): n is a, c, g, or u
cnaungccaagccccanccag

SEQ ID NO: 103848 - RNA, 22 nt, Artificial Sequence
  Synthetic
  misc_feature (3)..(3): n is a, c, g, or u
  misc_feature (6)..(6): n is a, c, g, or u
  misc_feature (18)..(18): n is a, c, g, or u
ccnaungccaagccccanccag

SEQ ID NO: 103849 - RNA, 23 nt, Artificial Sequence
  Synthetic
  misc_feature (4)..(4): n is a, c, g, or u
  misc_feature (7)..(7): n is a, c, g, or u
  misc_feature (19)..(19): n is a, c, g, or u
gccnaungccaagccccanccag

SEQ ID NO: 103850 - RNA, 24 nt, Artificial Sequence
  Synthetic
  misc_feature (5)..(5): n is a, c, g, or u
  misc_feature (8)..(8): n is a, c, g, or u
  misc_feature (20)..(20): n is a, c, g, or u
ggccnaungccaagccccanccag

SEQ ID NO: 103851 - RNA, 18 nt, Artificial Sequence
  Synthetic
  misc_feature (14)..(14): n is a, c, g, or u
acauccagcgauanccag

SEQ ID NO: 103852 - RNA, 19 nt, Artificial Sequence
  Synthetic
  misc_feature (15)..(15): n is a, c, g, or u
cacauccagcgauanccag

SEQ ID NO: 103853 - RNA, 20 nt, Artificial Sequence
  Synthetic
  misc_feature (16)..(16): n is a, c, g, or u
acacauccagcgauanccag

SEQ ID NO: 103854 - RNA, 21 nt, Artificial Sequence
  Synthetic
  misc_feature (17)..(17): n is a, c, g, or u
gacacauccagcgauanccag

SEQ ID NO: 103855 - RNA, 22 nt, Artificial Sequence
  Synthetic
  misc_feature (18)..(18): n is a, c, g, or u
agacacauccagcgauanccag

SEQ ID NO: 103856 - RNA, 23 nt, Artificial Sequence
  Synthetic
  misc_feature (19)..(19): n is a, c, g, or u
cagacacauccagcgauanccag

SEQ ID NO: 103857 - RNA, 24 nt, Artificial Sequence
  Synthetic
  misc_feature (20)..(20): n is a, c, g, or u
gcagacacauccagcgauanccag

SEQ ID NO: 103858 - RNA, 18 nt, Artificial Sequence
  Synthetic
  misc_feature (5)..(5): n is a, c, g, or u
  misc_feature (11)..(11): n is a, c, g, or u
cgaunaguuungcuccag

SEQ ID NO: 103859 - RNA, 19 nt, Artificial Sequence
  Synthetic
  misc_feature (6)..(6): n is a, c, g, or u
  misc_feature (12)..(12): n is a, c, g, or u
ccgaunaguuungcuccag

SEQ ID NO: 103860 - RNA, 20 nt, Artificial Sequence
  Synthetic
  misc_feature (1)..(1): n is a, c, g, or u
  misc_feature (7)..(7): n is a, c, g, or u
  misc_feature (13)..(13): n is a, c, g, or u
nccgaunaguuungcuccag

SEQ ID NO: 103861 - RNA, 21 nt, Artificial Sequence
  Synthetic
  misc_feature (2)..(2): n is a, c, g, or u
  misc_feature (8)..(8): n is a, c, g, or u
  misc_feature (14)..(14): n is a, c, g, or u
unccgaunaguuungcuccag

SEQ ID NO: 103862 - RNA, 22 nt, Artificial Sequence
  Synthetic
  misc_feature (3)..(3): n is a, c, g, or u
  misc_feature (9)..(9): n is a, c, g, or u
  misc_feature (15)..(15): n is a, c, g, or u
gunccgaunaguuungcuccag

SEQ ID NO: 103863 - RNA, 23 nt, Artificial Sequence
  Synthetic
  misc_feature (1)..(1): n is a, c, g, or u
  misc_feature (4)..(4): n is a, c, g, or u
  misc_feature (10)..(10): n is a, c, g, or u
  misc_feature (16)..(16): n is a, c, g, or u
ngunccgaunaguuungcuccag

SEQ ID NO: 103864 - RNA, 24 nt, Artificial Sequence
  Synthetic
  misc_feature (2)..(2): n is a, c, g, or u
  misc_feature (5)..(5): n is a, c, g, or u
  misc_feature (11)..(11): n is a, c, g, or u
  misc_feature (17)..(17): n is a, c, g, or u
cngunccgaunaguuungcuccag

SEQ ID NO: 103865 - RNA, 18 nt, Artificial Sequence
  Synthetic
cauaccuugguaguccag

SEQ ID NO: 103866 - RNA, 19 nt, Artificial Sequence
  Synthetic
acauaccuugguaguccag

SEQ ID NO: 103867 - RNA, 20 nt, Artificial Sequence
  Synthetic
aacauaccuugguaguccag

SEQ ID NO: 103868 - RNA, 21 nt, Artificial Sequence
  Synthetic
caacauaccuugguaguccag

SEQ ID NO: 103869 - RNA, 22 nt, Artificial Sequence
  Synthetic
gcaacauaccuugguaguccag

SEQ ID NO: 103870 - RNA, 23 nt, Artificial Sequence
  Synthetic
ggcaacauaccuugguaguccag

SEQ ID NO: 103871 - RNA, 24 nt, Artificial Sequence
  Synthetic
gggcaacauaccuugguaguccag

SEQ ID NO: 103872 - RNA, 18 nt, Artificial Sequence
  Synthetic
gaugaggcauagcagcag

SEQ ID NO: 103873 - RNA, 19 nt, Artificial Sequence
  Synthetic
agaugaggcauagcagcag

SEQ ID NO: 103874 - RNA, 20 nt, Artificial Sequence
  Synthetic
aagaugaggcauagcagcag

SEQ ID NO: 103875 - RNA, 21 nt, Artificial Sequence
  Synthetic
gaagaugaggcauagcagcag

SEQ ID NO: 103876 - RNA, 22 nt, Artificial Sequence
  Synthetic
agaagaugaggcauagcagcag

SEQ ID NO: 103877 - RNA, 23 nt, Artificial Sequence
  Synthetic
aagaagaugaggcauagcagcag

SEQ ID NO: 103878 - RNA, 24 nt, Artificial Sequence
  Synthetic
caagaagaugaggcauagcagcag

SEQ ID NO: 103879 - RNA, 18 nt, Artificial Sequence
  Synthetic
cugcuaggaguuccgcag

SEQ ID NO: 103880 - RNA, 19 nt, Artificial Sequence
  Synthetic
gcugcuaggaguuccgcag

SEQ ID NO: 103881 - RNA, 20 nt, Artificial Sequence
  Synthetic
agcugcuaggaguuccgcag

SEQ ID NO: 103882 - RNA, 18 nt, Artificial Sequence
  Synthetic
gccgauugguggaggcag

SEQ ID NO: 103883 - RNA, 19 nt, Artificial Sequence
  Synthetic
ugccgauugguggaggcag

SEQ ID NO: 103884 - RNA, 20 nt, Artificial Sequence
  Synthetic
cugccgauugguggaggcag

SEQ ID NO: 103885 - RNA, 21 nt, Artificial Sequence
  Synthetic
acugccgauugguggaggcag

SEQ ID NO: 103886 - RNA, 22 nt, Artificial Sequence
  Synthetic
gacugccgauugguggaggcag

SEQ ID NO: 103887 - RNA, 23 nt, Artificial Sequence
  Synthetic
ugacugccgauugguggaggcag

SEQ ID NO: 103888 - RNA, 24 nt, Artificial Sequence
  Synthetic
cugacugccgauugguggaggcag

SEQ ID NO: 103889 - RNA, 18 nt, Artificial Sequence
  Synthetic
  misc_feature (11)..(11): n is a, c, g, or u
gugcacacggnccggcag

SEQ ID NO: 103890 - RNA, 19 nt, Artificial Sequence
  Synthetic
  misc_feature (12)..(12): n is a, c, g, or u
agugcacacggnccggcag

SEQ ID NO: 103891 - RNA, 20 nt, Artificial Sequence
  Synthetic
  misc_feature (13)..(13): n is a, c, g, or u
aagugcacacggnccggcag

SEQ ID NO: 103892 - RNA, 21 nt, Artificial Sequence
  Synthetic
  misc_feature (14)..(14): n is a, c, g, or u
gaagugcacacggnccggcag

SEQ ID NO: 103893 - RNA, 22 nt, Artificial Sequence
  Synthetic
  misc_feature (15)..(15): n is a, c, g, or u
cgaagugcacacggnccggcag

SEQ ID NO: 103894 - RNA, 23 nt, Artificial Sequence
  Synthetic
  misc_feature (16)..(16): n is a, c, g, or u
gcgaagugcacacggnccggcag

SEQ ID NO: 103895 - RNA, 24 nt, Artificial Sequence
  Synthetic
  misc_feature (17)..(17): n is a, c, g, or u
agcgaagugcacacggnccggcag

SEQ ID NO: 103896 - RNA, 18 nt, Artificial Sequence
  Synthetic
cgcaguauggaucggcag

SEQ ID NO: 103897 - RNA, 19 nt, Artificial Sequence
  Synthetic
ccgcaguauggaucggcag

SEQ ID NO: 103898 - RNA, 20 nt, Artificial Sequence
  Synthetic
uccgcaguauggaucggcag

SEQ ID NO: 103899 - RNA, 21 nt, Artificial Sequence
  Synthetic
uuccgcaguauggaucggcag

SEQ ID NO: 103900 - RNA, 22 nt, Artificial Sequence
  Synthetic
guuccgcaguauggaucggcag

SEQ ID NO: 103901 - RNA, 23 nt, Artificial Sequence
  Synthetic
aguuccgcaguauggaucggcag

SEQ ID NO: 103902 - RNA, 24 nt, Artificial Sequence
  Synthetic
gaguuccgcaguauggaucggcag

SEQ ID NO: 103903 - RNA, 18 nt, Artificial Sequence
  Synthetic
ucagaaggcaaaaaagag

SEQ ID NO: 103904 - RNA, 19 nt, Artificial Sequence
  Synthetic
gucagaaggcaaaaaagag

SEQ ID NO: 103905 - RNA, 20 nt, Artificial Sequence
  Synthetic
agucagaaggcaaaaaagag

SEQ ID NO: 103906 - RNA, 21 nt, Artificial Sequence
  Synthetic
aagucagaaggcaaaaaagag

SEQ ID NO: 103907 - RNA, 22 nt, Artificial Sequence
  Synthetic
gaagucagaaggcaaaaaagag

SEQ ID NO: 103908 - RNA, 23 nt, Artificial Sequence
  Synthetic
agaagucagaaggcaaaaaagag

SEQ ID NO: 103909 - RNA, 24 nt, Artificial Sequence
  Synthetic
aagaagucagaaggcaaaaaagag

SEQ ID NO: 103910 - RNA, 18 nt, Artificial Sequence
  Synthetic
uuuguacagcaacaagag

SEQ ID NO: 103911 - RNA, 19 nt, Artificial Sequence
  Synthetic
uuuuguacagcaacaagag

SEQ ID NO: 103912 - RNA, 20 nt, Artificial Sequence
  Synthetic
guuuuguacagcaacaagag

SEQ ID NO: 103913 - RNA, 21 nt, Artificial Sequence
  Synthetic
gguuuuguacagcaacaagag

SEQ ID NO: 103914 - RNA, 22 nt, Artificial Sequence
  Synthetic
agguuuuguacagcaacaagag

SEQ ID NO: 103915 - RNA, 23 nt, Artificial Sequence
  Synthetic
aagguuuuguacagcaacaagag

SEQ ID NO: 103916 - RNA, 24 nt, Artificial Sequence
  Synthetic
gaagguuuuguacagcaacaagag

SEQ ID NO: 103917 - RNA, 18 nt, Artificial Sequence
  Synthetic
aggccucccgauacagag

SEQ ID NO: 103918 - RNA, 19 nt, Artificial Sequence
  Synthetic
aaggccucccgauacagag

SEQ ID NO: 103919 - RNA, 20 nt, Artificial Sequence
  Synthetic
uaaggccucccgauacagag

SEQ ID NO: 103920 - RNA, 21 nt, Artificial Sequence
  Synthetic
cuaaggccucccgauacagag

SEQ ID NO: 103921 - RNA, 22 nt, Artificial Sequence
  Synthetic
ucuaaggccucccgauacagag

SEQ ID NO: 103922 - RNA, 23 nt, Artificial Sequence
  Synthetic
cucuaaggccucccgauacagag

SEQ ID NO: 103923 - RNA, 24 nt, Artificial Sequence
  Synthetic
acucuaaggccucccgauacagag

SEQ ID NO: 103924 - RNA, 18 nt, Artificial Sequence
  Synthetic
ugagaugauuaggcagag

SEQ ID NO: 103925 - RNA, 19 nt, Artificial Sequence
  Synthetic
augagaugauuaggcagag

SEQ ID NO: 103926 - RNA, 20 nt, Artificial Sequence
  Synthetic
caugagaugauuaggcagag

SEQ ID NO: 103927 - RNA, 21 nt, Artificial Sequence
  Synthetic
acaugagaugauuaggcagag

SEQ ID NO: 103928 - RNA, 22 nt, Artificial Sequence
  Synthetic
aacaugagaugauuaggcagag

SEQ ID NO: 103929 - RNA, 23 nt, Artificial Sequence
  Synthetic
gaacaugagaugauuaggcagag

SEQ ID NO: 103930 - RNA, 24 nt, Artificial Sequence
  Synthetic
ugaacaugagaugauuaggcagag

SEQ ID NO: 103931 - RNA, 18 nt, Artificial Sequence
  Synthetic
uccaugcgacgugcagag

SEQ ID NO: 103932 - RNA, 19 nt, Artificial Sequence
  Synthetic
  misc_feature (1)..(1): n is a, c, g, or u
nuccaugcgacgugcagag

SEQ ID NO: 103933 - RNA, 20 nt, Artificial Sequence
  Synthetic
  misc_feature (2)..(2): n is a, c, g, or u
unuccaugcgacgugcagag

SEQ ID NO: 103934 - RNA, 21 nt, Artificial Sequence
  Synthetic
  misc_feature (3)..(3): n is a, c, g, or u
gunuccaugcgacgugcagag

SEQ ID NO: 103935 - RNA, 22 nt, Artificial Sequence
  Synthetic
  misc_feature (4)..(4): n is a, c, g, or u
ggunuccaugcgacgugcagag

SEQ ID NO: 103936 - RNA, 23 nt, Artificial Sequence
  Synthetic
  misc_feature (5)..(5): n is a, c, g, or u
uggunuccaugcgacgugcagag

SEQ ID NO: 103937 - RNA, 24 nt, Artificial Sequence
  Synthetic
  misc_feature (6)..(6): n is a, c, g, or u
guggunuccaugcgacgugcagag

SEQ ID NO: 103938 - RNA, 18 nt, Artificial Sequence
  Synthetic
gguguauuuccgagagag

SEQ ID NO: 103939 - RNA, 19 nt, Artificial Sequence
  Synthetic
agguguauuuccgagagag

SEQ ID NO: 103940 - RNA, 20 nt, Artificial Sequence
  Synthetic
gagguguauuuccgagagag

SEQ ID NO: 103941 - RNA, 21 nt, Artificial Sequence
  Synthetic
ggagguguauuuccgagagag

SEQ ID NO: 103942 - RNA, 22 nt, Artificial Sequence
  Synthetic
aggagguguauuuccgagagag

SEQ ID NO: 103943 - RNA, 23 nt, Artificial Sequence
  Synthetic
aaggagguguauuuccgagagag

SEQ ID NO: 103944 - RNA, 24 nt, Artificial Sequence
  Synthetic
aaaggagguguauuuccgagagag

SEQ ID NO: 103945 - RNA, 18 nt, Artificial Sequence
  Synthetic
ucucuuagagguggagag

SEQ ID NO: 103946 - RNA, 19 nt, Artificial Sequence
  Synthetic
gucucuuagagguggagag

SEQ ID NO: 103947 - RNA, 20 nt, Artificial Sequence
  Synthetic
ugucucuuagagguggagag

SEQ ID NO: 103948 - RNA, 21 nt, Artificial Sequence
  Synthetic
cugucucuuagagguggagag

SEQ ID NO: 103949 - RNA, 22 nt, Artificial Sequence
  Synthetic
acugucucuuagagguggagag

SEQ ID NO: 103950 - RNA, 23 nt, Artificial Sequence
  Synthetic
gacugucucuuagagguggagag

SEQ ID NO: 103951 - RNA, 24 nt, Artificial Sequence
  Synthetic
ugacugucucuuagagguggagag

SEQ ID NO: 103952 - RNA, 18 nt, Artificial Sequence
  Synthetic
auguuccuggaaguagag

SEQ ID NO: 103953 - RNA, 19 nt, Artificial Sequence
  Synthetic
gauguuccuggaaguagag

SEQ ID NO: 103954 - RNA, 20 nt, Artificial Sequence
  Synthetic
ugauguuccuggaaguagag

SEQ ID NO: 103955 - RNA, 21 nt, Artificial Sequence
  Synthetic
uugauguuccuggaaguagag

SEQ ID NO: 103956 - RNA, 22 nt, Artificial Sequence
  Synthetic
guugauguuccuggaaguagag

SEQ ID NO: 103957 - RNA, 23 nt, Artificial Sequence
  Synthetic
aguugauguuccuggaaguagag

SEQ ID NO: 103958 - RNA, 24 nt, Artificial Sequence
  Synthetic
uaguugauguuccuggaaguagag

SEQ ID NO: 103959 - RNA, 18 nt, Artificial Sequence
  Synthetic
gaugacugucucuuagag

SEQ ID NO: 103960 - RNA, 19 nt, Artificial Sequence
  Synthetic
ggaugacugucucuuagag

SEQ ID NO: 103961 - RNA, 20 nt, Artificial Sequence
  Synthetic
aggaugacugucucuuagag

SEQ ID NO: 103962 - RNA, 21 nt, Artificial Sequence
  Synthetic
gaggaugacugucucuuagag

SEQ ID NO: 103963 - RNA, 22 nt, Artificial Sequence
  Synthetic
ugaggaugacugucucuuagag

SEQ ID NO: 103964 - RNA, 23 nt, Artificial Sequence
  Synthetic
cugaggaugacugucucuuagag

SEQ ID NO: 103965 - RNA, 24 nt, Artificial Sequence
  Synthetic
ccugaggaugacugucucuuagag

SEQ ID NO: 103966 - RNA, 18 nt, Artificial Sequence
  Synthetic
ccccgccuguaacacgag

SEQ ID NO: 103967 - RNA, 19 nt, Artificial Sequence
  Synthetic
accccgccuguaacacgag

SEQ ID NO: 103968 - RNA, 20 nt, Artificial Sequence
  Synthetic
aaccccgccuguaacacgag

SEQ ID NO: 103969 - RNA, 18 nt, Artificial Sequence
  Synthetic
agagaaguccaccacgag

SEQ ID NO: 103970 - RNA, 19 nt, Artificial Sequence
  Synthetic
gagagaaguccaccacgag

SEQ ID NO: 103971 - RNA, 20 nt, Artificial Sequence
  Synthetic
ugagagaaguccaccacgag

SEQ ID NO: 103972 - RNA, 21 nt, Artificial Sequence
  Synthetic
uugagagaaguccaccacgag

SEQ ID NO: 103973 - RNA, 22 nt, Artificial Sequence
  Synthetic
auugagagaaguccaccacgag

SEQ ID NO: 103974 - RNA, 23 nt, Artificial Sequence
  Synthetic
aauugagagaaguccaccacgag

SEQ ID NO: 103975 - RNA, 24 nt, Artificial Sequence
  Synthetic
aaauugagagaaguccaccacgag

SEQ ID NO: 103976 - RNA, 18 nt, Artificial Sequence
  Synthetic
aacauugagauucccgag

SEQ ID NO: 103977 - RNA, 19 nt, Artificial Sequence
  Synthetic
uaacauugagauucccgag

SEQ ID NO: 103978 - RNA, 20 nt, Artificial Sequence
  Synthetic
cuaacauugagauucccgag

SEQ ID NO: 103979 - RNA, 21 nt, Artificial Sequence
  Synthetic
acuaacauugagauucccgag

SEQ ID NO: 103980 - RNA, 22 nt, Artificial Sequence
  Synthetic
uacuaacauugagauucccgag

SEQ ID NO: 103981 - RNA, 23 nt, Artificial Sequence
  Synthetic
auacuaacauugagauucccgag

SEQ ID NO: 103982 - RNA, 24 nt, Artificial Sequence
  Synthetic
gauacuaacauugagauucccgag

SEQ ID NO: 103983 - RNA, 18 nt, Artificial Sequence
  Synthetic
aggagguguauuuccgag

SEQ ID NO: 103984 - RNA, 19 nt, Artificial Sequence
  Synthetic
aaggagguguauuuccgag

SEQ ID NO: 103985 - RNA, 20 nt, Artificial Sequence
  Synthetic
aaaggagguguauuuccgag

SEQ ID NO: 103986 - RNA, 21 nt, Artificial Sequence
  Synthetic
gaaaggagguguauuuccgag

SEQ ID NO: 103987 - RNA, 22 nt, Artificial Sequence
  Synthetic
ggaaaggagguguauuuccgag

SEQ ID NO: 103988 - RNA, 23 nt, Artificial Sequence
  Synthetic
uggaaaggagguguauuuccgag

SEQ ID NO: 103989 - RNA, 24 nt, Artificial Sequence
  Synthetic
auggaaaggagguguauuuccgag

SEQ ID NO: 103990 - RNA, 18 nt, Artificial Sequence
  Synthetic
cuccagaccggcugcgag

SEQ ID NO: 103991 - RNA, 19 nt, Artificial Sequence
  Synthetic
gcuccagaccggcugcgag

SEQ ID NO: 103992 - RNA, 20 nt, Artificial Sequence
  Synthetic
  misc_feature (1)..(1): n is a, c, g, or u
ngcuccagaccggcugcgag

SEQ ID NO: 103993 - RNA, 21 nt, Artificial Sequence
  Synthetic
  misc_feature (2)..(2): n is a, c, g, or u
ungcuccagaccggcugcgag

SEQ ID NO: 103994 - RNA, 22 nt, Artificial Sequence
  Synthetic
  misc_feature (3)..(3): n is a, c, g, or u
uungcuccagaccggcugcgag

SEQ ID NO: 103995 - RNA, 23 nt, Artificial Sequence
  Synthetic
  misc_feature (4)..(4): n is a, c, g, or u
uuungcuccagaccggcugcgag

SEQ ID NO: 103996 - RNA, 24 nt, Artificial Sequence
  Synthetic
  misc_feature (5)..(5): n is a, c, g, or u
guuungcuccagaccggcugcgag

SEQ ID NO: 103997 - RNA, 18 nt, Artificial Sequence
  Synthetic
gagaccuucgucugcgag

SEQ ID NO: 103998 - RNA, 19 nt, Artificial Sequence
  Synthetic
ugagaccuucgucugcgag

SEQ ID NO: 103999 - RNA, 20 nt, Artificial Sequence
  Synthetic
uugagaccuucgucugcgag

SEQ ID NO: 104000 - RNA, 18 nt, Artificial Sequence
  Synthetic
  misc_feature (11)..(11): n is a, c, g, or u
  misc_feature (13)..(13): n is a, c, g, or u
gucuguaagcngnaggag

SEQ ID NO: 104001 - RNA, 19 nt, Artificial Sequence
  Synthetic
  misc_feature (12)..(12): n is a, c, g, or u
  misc_feature (14)..(14): n is a, c, g, or u
ggucuguaagcngnaggag

SEQ ID NO: 104002 - RNA, 20 nt, Artificial Sequence
  Synthetic
  misc_feature (13)..(13): n is a, c, g, or u
  misc_feature (15)..(15): n is a, c, g, or u
uggucuguaagcngnaggag

SEQ ID NO: 104003 - RNA, 21 nt, Artificial Sequence
  Synthetic
  misc_feature (14)..(14): n is a, c, g, or u
  misc_feature (16)..(16): n is a, c, g, or u
guggucuguaagcngnaggag

SEQ ID NO: 104004 - RNA, 22 nt, Artificial Sequence
  Synthetic
  misc_feature (15)..(15): n is a, c, g, or u
  misc_feature (17)..(17): n is a, c, g, or u
gguggucuguaagcngnaggag

SEQ ID NO: 104005 - RNA, 23 nt, Artificial Sequence
  Synthetic
  misc_feature (16)..(16): n is a, c, g, or u
  misc_feature (18)..(18): n is a, c, g, or u
ugguggucuguaagcngnaggag

SEQ ID NO: 104006 - RNA, 24 nt, Artificial Sequence
  Synthetic
  misc_feature (17)..(17): n is a, c, g, or u
  misc_feature (19)..(19): n is a, c, g, or u
uugguggucuguaagcngnaggag

SEQ ID NO: 104007 - RNA, 18 nt, Artificial Sequence
  Synthetic
gacugccgauugguggag

SEQ ID NO: 104008 - RNA, 19 nt, Artificial Sequence
  Synthetic
ugacugccgauugguggag

SEQ ID NO: 104009 - RNA, 20 nt, Artificial Sequence
  Synthetic
cugacugccgauugguggag

SEQ ID NO: 104010 - RNA, 21 nt, Artificial Sequence
  Synthetic
ccugacugccgauugguggag

SEQ ID NO: 104011 - RNA, 22 nt, Artificial Sequence
  Synthetic
uccugacugccgauugguggag

SEQ ID NO: 104012 - RNA, 23 nt, Artificial Sequence
  Synthetic
uuccugacugccgauugguggag

SEQ ID NO: 104013 - RNA, 24 nt, Artificial Sequence
  Synthetic
cuuccugacugccgauugguggag

SEQ ID NO: 104014 - RNA, 18 nt, Artificial Sequence
  Synthetic
guuggugagugauuggag

SEQ ID NO: 104015 - RNA, 19 nt, Artificial Sequence
  Synthetic
gguuggugagugauuggag

SEQ ID NO: 104016 - RNA, 20 nt, Artificial Sequence
  Synthetic
agguuggugagugauuggag

SEQ ID NO: 104017 - RNA, 21 nt, Artificial Sequence
  Synthetic
gagguuggugagugauuggag

SEQ ID NO: 104018 - RNA, 22 nt, Artificial Sequence
  Synthetic
agagguuggugagugauuggag

SEQ ID NO: 104019 - RNA, 23 nt, Artificial Sequence
  Synthetic
aagagguuggugagugauuggag

SEQ ID NO: 104020 - RNA, 24 nt, Artificial Sequence
  Synthetic
caagagguuggugagugauuggag

SEQ ID NO: 104021 - RNA, 18 nt, Artificial Sequence
  Synthetic
  misc_feature (2)..(2): n is a, c, g, or u
  misc_feature (12)..(12): n is a, c, g, or u
anccaggacaanuuggag

SEQ ID NO: 104022 - RNA, 19 nt, Artificial Sequence
  Synthetic
  misc_feature (3)..(3): n is a, c, g, or u
  misc_feature (13)..(13): n is a, c, g, or u
uanccaggacaanuuggag

SEQ ID NO: 104023 - RNA, 20 nt, Artificial Sequence
  Synthetic
  misc_feature (4)..(4): n is a, c, g, or u
  misc_feature (14)..(14): n is a, c, g, or u
auanccaggacaanuuggag

SEQ ID NO: 104024 - RNA, 21 nt, Artificial Sequence
  Synthetic
  misc_feature (5)..(5): n is a, c, g, or u
  misc_feature (15)..(15): n is a, c, g, or u
gauanccaggacaanuuggag

SEQ ID NO: 104025 - RNA, 22 nt, Artificial Sequence
  Synthetic
  misc_feature (6)..(6): n is a, c, g, or u
  misc_feature (16)..(16): n is a, c, g, or u
cgauanccaggacaanuuggag

SEQ ID NO: 104026 - RNA, 23 nt, Artificial Sequence
  Synthetic
  misc_feature (7)..(7): n is a, c, g, or u
  misc_feature (17)..(17): n is a, c, g, or u
gcgauanccaggacaanuuggag

SEQ ID NO: 104027 - RNA, 24 nt, Artificial Sequence
  Synthetic
  misc_feature (8)..(8): n is a, c, g, or u
  misc_feature (18)..(18): n is a, c, g, or u
agcgauanccaggacaanuuggag

SEQ ID NO: 104028 - RNA, 18 nt, Artificial Sequence
  Synthetic
  misc_feature (15)..(15): n is a, c, g, or u
cguugacauugcugngag

SEQ ID NO: 104029 - RNA, 19 nt, Artificial Sequence
  Synthetic
  misc_feature (16)..(16): n is a, c, g, or u
ucguugacauugcugngag

SEQ ID NO: 104030 - RNA, 20 nt, Artificial Sequence
  Synthetic
  misc_feature (17)..(17): n is a, c, g, or u
gucguugacauugcugngag

SEQ ID NO: 104031 - RNA, 21 nt, Artificial Sequence
  Synthetic
  misc_feature (18)..(18): n is a, c, g, or u
ggucguugacauugcugngag

SEQ ID NO: 104032 - RNA, 22 nt, Artificial Sequence
  Synthetic
  misc_feature (19)..(19): n is a, c, g, or u
cggucguugacauugcugngag

SEQ ID NO: 104033 - RNA, 23 nt, Artificial Sequence
  Synthetic
  misc_feature (20)..(20): n is a, c, g, or u
ucggucguugacauugcugngag

SEQ ID NO: 104034 - RNA, 24 nt, Artificial Sequence
  Synthetic
  misc_feature (21)..(21): n is a, c, g, or u
gucggucguugacauugcugngag

SEQ ID NO: 104035 - RNA, 18 nt, Artificial Sequence
  Synthetic
aguuucccaccuuaugag

SEQ ID NO: 104036 - RNA, 19 nt, Artificial Sequence
  Synthetic
aaguuucccaccuuaugag

SEQ ID NO: 104037 - RNA, 20 nt, Artificial Sequence
  Synthetic
aaaguuucccaccuuaugag

SEQ ID NO: 104038 - RNA, 21 nt, Artificial Sequence
  Synthetic
uaaaguuucccaccuuaugag

SEQ ID NO: 104039 - RNA, 22 nt, Artificial Sequence
  Synthetic
guaaaguuucccaccuuaugag

SEQ ID NO: 104040 - RNA, 23 nt, Artificial Sequence
  Synthetic
aguaaaguuucccaccuuaugag

SEQ ID NO: 104041 - RNA, 24 nt, Artificial Sequence
  Synthetic
caguaaaguuucccaccuuaugag

SEQ ID NO: 104042 - RNA, 18 nt, Artificial Sequence
  Synthetic
uggcacuaguaaacugag

SEQ ID NO: 104043 - RNA, 19 nt, Artificial Sequence
  Synthetic
auggcacuaguaaacugag

SEQ ID NO: 104044 - RNA, 20 nt, Artificial Sequence
  Synthetic
aauggcacuaguaaacugag

SEQ ID NO: 104045 - RNA, 21 nt, Artificial Sequence
  Synthetic
aaauggcacuaguaaacugag

SEQ ID NO: 104046 - RNA, 22 nt, Artificial Sequence
  Synthetic
caaauggcacuaguaaacugag

SEQ ID NO: 104047 - RNA, 23 nt, Artificial Sequence
  Synthetic
acaaauggcacuaguaaacugag

SEQ ID NO: 104048 - RNA, 24 nt, Artificial Sequence
  Synthetic
aacaaauggcacuaguaaacugag

SEQ ID NO: 104049 - RNA, 18 nt, Artificial Sequence
  Synthetic
uugucaauaugcccugag

SEQ ID NO: 104050 - RNA, 19 nt, Artificial Sequence
  Synthetic
guugucaauaugcccugag

SEQ ID NO: 104051 - RNA, 20 nt, Artificial Sequence
  Synthetic
uguugucaauaugcccugag

SEQ ID NO: 104052 - RNA, 21 nt, Artificial Sequence
  Synthetic
cuguugucaauaugcccugag

SEQ ID NO: 104053 - RNA, 22 nt, Artificial Sequence
  Synthetic
acuguugucaauaugcccugag

SEQ ID NO: 104054 - RNA, 23 nt, Artificial Sequence
  Synthetic
cacuguugucaauaugcccugag

SEQ ID NO: 104055 - RNA, 24 nt, Artificial Sequence
  Synthetic
gcacuguugucaauaugcccugag

SEQ ID NO: 104056 - RNA, 18 nt, Artificial Sequence
  Synthetic
uccacugcauggccugag

SEQ ID NO: 104057 - RNA, 19 nt, Artificial Sequence
  Synthetic
uuccacugcauggccugag

SEQ ID NO: 104058 - RNA, 20 nt, Artificial Sequence
  Synthetic
cuuccacugcauggccugag

SEQ ID NO: 104059 - RNA, 18 nt, Artificial Sequence
  Synthetic
  misc_feature (2)..(2): n is a, c, g, or u
unagugcuguauggugag

SEQ ID NO: 104060 - RNA, 19 nt, Artificial Sequence
  Synthetic
  misc_feature (3)..(3): n is a, c, g, or u
cunagugcuguauggugag

SEQ ID NO: 104061 - RNA, 20 nt, Artificial Sequence
  Synthetic
  misc_feature (4)..(4): n is a, c, g, or u
ccunagugcuguauggugag

SEQ ID NO: 104062 - RNA, 21 nt, Artificial Sequence
  Synthetic
  misc_feature (5)..(5): n is a, c, g, or u
gccunagugcuguauggugag

SEQ ID NO: 104063 - RNA, 22 nt, Artificial Sequence
  Synthetic
  misc_feature (6)..(6): n is a, c, g, or u
ugccunagugcuguauggugag

SEQ ID NO: 104064 - RNA, 23 nt, Artificial Sequence
  Synthetic
  misc_feature (7)..(7): n is a, c, g, or u
uugccunagugcuguauggugag

SEQ ID NO: 104065 - RNA, 24 nt, Artificial Sequence
  Synthetic
  misc_feature (8)..(8): n is a, c, g, or u
cuugccunagugcuguauggugag

SEQ ID NO: 104066 - RNA, 18 nt, Artificial Sequence
  Synthetic
acauagagguuccuugag

SEQ ID NO: 104067 - RNA, 19 nt, Artificial Sequence
  Synthetic
aacauagagguuccuugag

SEQ ID NO: 104068 - RNA, 20 nt, Artificial Sequence
  Synthetic
aaacauagagguuccuugag

SEQ ID NO: 104069 - RNA, 21 nt, Artificial Sequence
  Synthetic
gaaacauagagguuccuugag

SEQ ID NO: 104070 - RNA, 22 nt, Artificial Sequence
  Synthetic
ggaaacauagagguuccuugag

SEQ ID NO: 104071 - RNA, 23 nt, Artificial Sequence
  Synthetic
gggaaacauagagguuccuugag

SEQ ID NO: 104072 - RNA, 24 nt, Artificial Sequence
  Synthetic
agggaaacauagagguuccuugag

SEQ ID NO: 104073 - RNA, 18 nt, Artificial Sequence
  Synthetic
  misc_feature (16)..(16): n is a, c, g, or u
augccuacagccuccnag

SEQ ID NO: 104074 - RNA, 19 nt, Artificial Sequence
  Synthetic
  misc_feature (17)..(17): n is a, c, g, or u
uaugccuacagccuccnag

SEQ ID NO: 104075 - RNA, 20 nt, Artificial Sequence
  Synthetic
  misc_feature (18)..(18): n is a, c, g, or u
uuaugccuacagccuccnag

SEQ ID NO: 104076 - RNA, 21 nt, Artificial Sequence
  Synthetic
  misc_feature (19)..(19): n is a, c, g, or u
uuuaugccuacagccuccnag

SEQ ID NO: 104077 - RNA, 22 nt, Artificial Sequence
  Synthetic
  misc_feature (20)..(20): n is a, c, g, or u
auuuaugccuacagccuccnag

SEQ ID NO: 104078 - RNA, 23 nt, Artificial Sequence
  Synthetic
  misc_feature (21)..(21): n is a, c, g, or u
aauuuaugccuacagccuccnag

SEQ ID NO: 104079 - RNA, 24 nt, Artificial Sequence
  Synthetic
  misc_feature (22)..(22): n is a, c, g, or u
caauuuaugccuacagccuccnag

SEQ ID NO: 104080 - RNA, 18 nt, Artificial Sequence
  Synthetic
  misc_feature (14)..(14): n is a, c, g, or u
  misc_feature (16)..(16): n is a, c, g, or u
ccggaacggcagangnag

SEQ ID NO: 104081 - RNA, 19 nt, Artificial Sequence
  Synthetic
  misc_feature (15)..(15): n is a, c, g, or u
  misc_feature (17)..(17): n is a, c, g, or u
gccggaacggcagangnag

SEQ ID NO: 104082 - RNA, 20 nt, Artificial Sequence
  Synthetic
  misc_feature (16)..(16): n is a, c, g, or u
  misc_feature (18)..(18): n is a, c, g, or u
ggccggaacggcagangnag

SEQ ID NO: 104083 - RNA, 21 nt, Artificial Sequence
  Synthetic
  misc_feature (17)..(17): n is a, c, g, or u
  misc_feature (19)..(19): n is a, c, g, or u
cggccggaacggcagangnag

SEQ ID NO: 104084 - RNA, 22 nt, Artificial Sequence
  Synthetic
  misc_feature (18)..(18): n is a, c, g, or u
  misc_feature (20)..(20): n is a, c, g, or u
ucggccggaacggcagangnag

SEQ ID NO: 104085 - RNA, 23 nt, Artificial Sequence
  Synthetic
  misc_feature (19)..(19): n is a, c, g, or u
  misc_feature (21)..(21): n is a, c, g, or u
gucggccggaacggcagangnag

SEQ ID NO: 104086 - RNA, 24 nt, Artificial Sequence
  Synthetic
  misc_feature (20)..(20): n is a, c, g, or u
  misc_feature (22)..(22): n is a, c, g, or u
ggucggccggaacggcagangnag

SEQ ID NO: 104087 - RNA, 18 nt, Artificial Sequence
  Synthetic
  misc_feature (11)..(11): n is a, c, g, or u
cgaggagaucncgaauag

SEQ ID NO: 104088 - RNA, 19 nt, Artificial Sequence
  Synthetic
  misc_feature (12)..(12): n is a, c, g, or u
ucgaggagaucncgaauag

SEQ ID NO: 104089 - RNA, 20 nt, Artificial Sequence
  Synthetic
  misc_feature (13)..(13): n is a, c, g, or u
gucgaggagaucncgaauag

SEQ ID NO: 104090 - RNA, 21 nt, Artificial Sequence
  Synthetic
  misc_feature (14)..(14): n is a, c, g, or u
ugucgaggagaucncgaauag

SEQ ID NO: 104091 - RNA, 22 nt, Artificial Sequence
  Synthetic
  misc_feature (15)..(15): n is a, c, g, or u
gugucgaggagaucncgaauag

SEQ ID NO: 104092 - RNA, 23 nt, Artificial Sequence
  Synthetic
  misc_feature (16)..(16): n is a, c, g, or u
ggugucgaggagaucncgaauag

SEQ ID NO: 104093 - RNA, 24 nt, Artificial Sequence
  Synthetic
  misc_feature (17)..(17): n is a, c, g, or u
cggugucgaggagaucncgaauag

SEQ ID NO: 104094 - RNA, 18 nt, Artificial Sequence
  Synthetic
  misc_feature (13)..(13): n is a, c, g, or u
ccucacucugggnucuag

SEQ ID NO: 104095 - RNA, 19 nt, Artificial Sequence
  Synthetic
  misc_feature (14)..(14): n is a, c, g, or u
cccucacucugggnucuag

SEQ ID NO: 104096 - RNA, 20 nt, Artificial Sequence
  Synthetic
  misc_feature (15)..(15): n is a, c, g, or u
ccccucacucugggnucuag

SEQ ID NO: 104097 - RNA, 21 nt, Artificial Sequence
  Synthetic
  misc_feature (16)..(16): n is a, c, g, or u
gccccucacucugggnucuag

SEQ ID NO: 104098 - RNA, 22 nt, Artificial Sequence
  Synthetic
  misc_feature (17)..(17): n is a, c, g, or u
ggccccucacucugggnucuag

SEQ ID NO: 104099 - RNA, 23 nt, Artificial Sequence
  Synthetic
  misc_feature (18)..(18): n is a, c, g, or u
aggccccucacucugggnucuag

SEQ ID NO: 104100 - RNA, 24 nt, Artificial Sequence
  Synthetic
  misc_feature (19)..(19): n is a, c, g, or u
uaggccccucacucugggnucuag

SEQ ID NO: 104101 - RNA, 18 nt, Artificial Sequence
  Synthetic
  misc_feature (8)..(8): n is a, c, g, or u
auaugggngaggcaguag

SEQ ID NO: 104102 - RNA, 19 nt, Artificial Sequence
  Synthetic
  misc_feature (9)..(9): n is a, c, g, or u
gauaugggngaggcaguag

SEQ ID NO: 104103 - RNA, 20 nt, Artificial Sequence
  Synthetic
  misc_feature (10)..(10): n is a, c, g, or u
cgauaugggngaggcaguag

SEQ ID NO: 104104 - RNA, 21 nt, Artificial Sequence
  Synthetic
  misc_feature (11)..(11): n is a, c, g, or u
acgauaugggngaggcaguag

SEQ ID NO: 104105 - RNA, 22 nt, Artificial Sequence
  Synthetic
  misc_feature (12)..(12): n is a, c, g, or u
gacgauaugggngaggcaguag

SEQ ID NO: 104106 - RNA, 23 nt, Artificial Sequence
  Synthetic
  misc_feature (13)..(13): n is a, c, g, or u
ugacgauaugggngaggcaguag

SEQ ID NO: 104107 - RNA, 24 nt, Artificial Sequence
  Synthetic
  misc_feature (14)..(14): n is a, c, g, or u
uugacgauaugggngaggcaguag

SEQ ID NO: 104108 - RNA, 18 nt, Artificial Sequence
  Synthetic
agcgccgacgggacguag

SEQ ID NO: 104109 - RNA, 19 nt, Artificial Sequence
  Synthetic
cagcgccgacgggacguag

SEQ ID NO: 104110 - RNA, 20 nt, Artificial Sequence
  Synthetic
ucagcgccgacgggacguag

SEQ ID NO: 104111 - RNA, 18 nt, Artificial Sequence
  Synthetic
ggcaacauaccuugguag

SEQ ID NO: 104112 - RNA, 19 nt, Artificial Sequence
  Synthetic
gggcaacauaccuugguag

SEQ ID NO: 104113 - RNA, 20 nt, Artificial Sequence
  Synthetic
cgggcaacauaccuugguag

SEQ ID NO: 104114 - RNA, 21 nt, Artificial Sequence
  Synthetic
acgggcaacauaccuugguag

SEQ ID NO: 104115 - RNA, 22 nt, Artificial Sequence
  Synthetic
aacgggcaacauaccuugguag

SEQ ID NO: 104116 - RNA, 23 nt, Artificial Sequence
  Synthetic
aaacgggcaacauaccuugguag

SEQ ID NO: 104117 - RNA, 24 nt, Artificial Sequence
  Synthetic
caaacgggcaacauaccuugguag

SEQ ID NO: 104118 - RNA, 18 nt, Artificial Sequence
  Synthetic
ugaacaugagaugauuag

SEQ ID NO: 104119 - RNA, 19 nt, Artificial Sequence
  Synthetic
augaacaugagaugauuag

SEQ ID NO: 104120 - RNA, 20 nt, Artificial Sequence
  Synthetic
caugaacaugagaugauuag

SEQ ID NO: 104121 - RNA, 21 nt, Artificial Sequence
  Synthetic
acaugaacaugagaugauuag

SEQ ID NO: 104122 - RNA, 22 nt, Artificial Sequence
  Synthetic
gacaugaacaugagaugauuag

SEQ ID NO: 104123 - RNA, 23 nt, Artificial Sequence
  Synthetic
ggacaugaacaugagaugauuag

SEQ ID NO: 104124 - RNA, 24 nt, Artificial Sequence
  Synthetic
aggacaugaacaugagaugauuag

SEQ ID NO: 104125 - RNA, 18 nt, Artificial Sequence
  Synthetic
aauauuugguaagguuag

SEQ ID NO: 104126 - RNA, 19 nt, Artificial Sequence
  Synthetic
aaauauuugguaagguuag

SEQ ID NO: 104127 - RNA, 20 nt, Artificial Sequence
  Synthetic
caaauauuugguaagguuag

SEQ ID NO: 104128 - RNA, 21 nt, Artificial Sequence
  Synthetic
gcaaauauuugguaagguuag

SEQ ID NO: 104129 - RNA, 22 nt, Artificial Sequence
  Synthetic
ggcaaauauuugguaagguuag

SEQ ID NO: 104130 - RNA, 23 nt, Artificial Sequence
  Synthetic
gggcaaauauuugguaagguuag

SEQ ID NO: 104131 - RNA, 24 nt, Artificial Sequence
  Synthetic
agggcaaauauuugguaagguuag

SEQ ID NO: 104132 - RNA, 18 nt, Artificial Sequence
  Synthetic
ggaaguagaggacaaacg

SEQ ID NO: 104133 - RNA, 19 nt, Artificial Sequence
  Synthetic
uggaaguagaggacaaacg

SEQ ID NO: 104134 - RNA, 20 nt, Artificial Sequence
  Synthetic
cuggaaguagaggacaaacg

SEQ ID NO: 104135 - RNA, 21 nt, Artificial Sequence
  Synthetic
ccuggaaguagaggacaaacg

SEQ ID NO: 104136 - RNA, 22 nt, Artificial Sequence
  Synthetic
uccuggaaguagaggacaaacg

SEQ ID NO: 104137 - RNA, 23 nt, Artificial Sequence
  Synthetic
uuccuggaaguagaggacaaacg

SEQ ID NO: 104138 - RNA, 24 nt, Artificial Sequence
  Synthetic
guuccuggaaguagaggacaaacg

SEQ ID NO: 104139 - RNA, 18 nt, Artificial Sequence
  Synthetic
ccguggucggccggaacg

SEQ ID NO: 104140 - RNA, 19 nt, Artificial Sequence
  Synthetic
cccguggucggccggaacg

SEQ ID NO: 104141 - RNA, 20 nt, Artificial Sequence
  Synthetic
ccccguggucggccggaacg

SEQ ID NO: 104142 - RNA, 18 nt, Artificial Sequence
  Synthetic
aaccccgccuguaacacg

SEQ ID NO: 104143 - RNA, 19 nt, Artificial Sequence
  Synthetic
aaaccccgccuguaacacg

SEQ ID NO: 104144 - RNA, 20 nt, Artificial Sequence
  Synthetic
aaaaccccgccuguaacacg

SEQ ID NO: 104145 - RNA, 21 nt, Artificial Sequence
  Synthetic
aaaaaccccgccuguaacacg

SEQ ID NO: 104146 - RNA, 22 nt, Artificial Sequence
  Synthetic
gaaaaaccccgccuguaacacg

SEQ ID NO: 104147 - RNA, 23 nt, Artificial Sequence
  Synthetic
agaaaaaccccgccuguaacacg

SEQ ID NO: 104148 - RNA, 24 nt, Artificial Sequence
  Synthetic
aagaaaaaccccgccuguaacacg

SEQ ID NO: 104149 - RNA, 18 nt, Artificial Sequence
  Synthetic
gaugagaaggcacagacg

SEQ ID NO: 104150 - RNA, 19 nt, Artificial Sequence
  Synthetic
agaugagaaggcacagacg

SEQ ID NO: 104151 - RNA, 20 nt, Artificial Sequence
  Synthetic
cagaugagaaggcacagacg

SEQ ID NO: 104152 - RNA, 21 nt, Artificial Sequence
  Synthetic
gcagaugagaaggcacagacg

SEQ ID NO: 104153 - RNA, 22 nt, Artificial Sequence
  Synthetic
ggcagaugagaaggcacagacg

SEQ ID NO: 104154 - RNA, 23 nt, Artificial Sequence
  Synthetic
cggcagaugagaaggcacagacg

SEQ ID NO: 104155 - RNA, 24 nt, Artificial Sequence
  Synthetic
ccggcagaugagaaggcacagacg

SEQ ID NO: 104156 - RNA, 18 nt, Artificial Sequence
  Synthetic
  misc_feature (7)..(7): n is a, c, g, or u
gguggunuccaugcgacg

SEQ ID NO: 104157 - RNA, 19 nt, Artificial Sequence
  Synthetic
  misc_feature (8)..(8): n is a, c, g, or u
cgguggunuccaugcgacg

SEQ ID NO: 104158 - RNA, 20 nt, Artificial Sequence
  Synthetic
  misc_feature (9)..(9): n is a, c, g, or u
acgguggunuccaugcgacg

SEQ ID NO: 104159 - RNA, 21 nt, Artificial Sequence
  Synthetic
  misc_feature (10)..(10): n is a, c, g, or u
cacgguggunuccaugcgacg

SEQ ID NO: 104160 - RNA, 22 nt, Artificial Sequence
  Synthetic
  misc_feature (11)..(11): n is a, c, g, or u
ucacgguggunuccaugcgacg

SEQ ID NO: 104161 - RNA, 23 nt, Artificial Sequence
  Synthetic
  misc_feature (12)..(12): n is a, c, g, or u
uucacgguggunuccaugcgacg

SEQ ID NO: 104162 - RNA, 24 nt, Artificial Sequence
  Synthetic
  misc_feature (13)..(13): n is a, c, g, or u
guucacgguggunuccaugcgacg

SEQ ID NO: 104163 - RNA, 18 nt, Artificial Sequence
  Synthetic
  misc_feature (5)..(5): n is a, c, g, or u
  misc_feature (7)..(7): n is a, c, g, or u
cagangnagaaggggacg

SEQ ID NO: 104164 - RNA, 19 nt, Artificial Sequence
  Synthetic
  misc_feature (6)..(6): n is a, c, g, or u
  misc_feature (8)..(8): n is a, c, g, or u
gcagangnagaaggggacg

SEQ ID NO: 104165 - RNA, 20 nt, Artificial Sequence
  Synthetic
  misc_feature (7)..(7): n is a, c, g, or u
  misc_feature (9)..(9): n is a, c, g, or u
ggcagangnagaaggggacg

SEQ ID NO: 104166 - RNA, 21 nt, Artificial Sequence
  Synthetic
  misc_feature (8)..(8): n is a, c, g, or u
  misc_feature (10)..(10): n is a, c, g, or u
cggcagangnagaaggggacg

SEQ ID NO: 104167 - RNA, 22 nt, Artificial Sequence
  Synthetic
  misc_feature (9)..(9): n is a, c, g, or u
  misc_feature (11)..(11): n is a, c, g, or u
acggcagangnagaaggggacg

SEQ ID NO: 104168 - RNA, 23 nt, Artificial Sequence
  Synthetic
  misc_feature (10)..(10): n is a, c, g, or u
  misc_feature (12)..(12): n is a, c, g, or u
aacggcagangnagaaggggacg

SEQ ID NO: 104169 - RNA, 24 nt, Artificial Sequence
  Synthetic
  misc_feature (11)..(11): n is a, c, g, or u
  misc_feature (13)..(13): n is a, c, g, or u
gaacggcagangnagaaggggacg

SEQ ID NO: 104170 - RNA, 18 nt, Artificial Sequence
  Synthetic
gcacagacggggagaccg

SEQ ID NO: 104171 - RNA, 19 nt, Artificial Sequence
  Synthetic
ggcacagacggggagaccg

SEQ ID NO: 104172 - RNA, 20 nt, Artificial Sequence
  Synthetic
aggcacagacggggagaccg

SEQ ID NO: 104173 - RNA, 21 nt, Artificial Sequence
  Synthetic
aaggcacagacggggagaccg

SEQ ID NO: 104174 - RNA, 22 nt, Artificial Sequence
  Synthetic
gaaggcacagacggggagaccg

SEQ ID NO: 104175 - RNA, 23 nt, Artificial Sequence
  Synthetic
agaaggcacagacggggagaccg

SEQ ID NO: 104176 - RNA, 24 nt, Artificial Sequence
  Synthetic
gagaaggcacagacggggagaccg

SEQ ID NO: 104177 - RNA, 18 nt, Artificial Sequence
  Synthetic
uagacaaaggacgucccg

SEQ ID NO: 104178 - RNA, 19 nt, Artificial Sequence
  Synthetic
guagacaaaggacgucccg

SEQ ID NO: 104179 - RNA, 20 nt, Artificial Sequence
  Synthetic
cguagacaaaggacgucccg

SEQ ID NO: 104180 - RNA, 21 nt, Artificial Sequence
  Synthetic
acguagacaaaggacgucccg

SEQ ID NO: 104181 - RNA, 22 nt, Artificial Sequence
  Synthetic
gacguagacaaaggacgucccg

SEQ ID NO: 104182 - RNA, 23 nt, Artificial Sequence
  Synthetic
ggacguagacaaaggacgucccg

SEQ ID NO: 104183 - RNA, 24 nt, Artificial Sequence
  Synthetic
gggacguagacaaaggacgucccg

SEQ ID NO: 104184 - RNA, 18 nt, Artificial Sequence
  Synthetic
ccgcgggauucagcgccg

SEQ ID NO: 104185 - RNA, 19 nt, Artificial Sequence
  Synthetic
uccgcgggauucagcgccg

SEQ ID NO: 104186 - RNA, 20 nt, Artificial Sequence
  Synthetic
guccgcgggauucagcgccg

SEQ ID NO: 104187 - RNA, 21 nt, Artificial Sequence
  Synthetic
cguccgcgggauucagcgccg

SEQ ID NO: 104188 - RNA, 22 nt, Artificial Sequence
  Synthetic
ucguccgcgggauucagcgccg

SEQ ID NO: 104189 - RNA, 23 nt, Artificial Sequence
  Synthetic
gucguccgcgggauucagcgccg

SEQ ID NO: 104190 - RNA, 24 nt, Artificial Sequence
  Synthetic
ggucguccgcgggauucagcgccg

SEQ ID NO: 104191 - RNA, 18 nt, Artificial Sequence
  Synthetic
  misc_feature (1)..(1): n is a, c, g, or u
nagaccugaccguugccg

SEQ ID NO: 104192 - RNA, 19 nt, Artificial Sequence
  Synthetic
  misc_feature (2)..(2): n is a, c, g, or u
anagaccugaccguugccg

SEQ ID NO: 104193 - RNA, 20 nt, Artificial Sequence
  Synthetic
  misc_feature (3)..(3): n is a, c, g, or u
canagaccugaccguugccg

SEQ ID NO: 104194 - RNA, 21 nt, Artificial Sequence
  Synthetic
  misc_feature (4)..(4): n is a, c, g, or u
gcanagaccugaccguugccg

SEQ ID NO: 104195 - RNA, 22 nt, Artificial Sequence
  Synthetic
  misc_feature (5)..(5): n is a, c, g, or u
ggcanagaccugaccguugccg

SEQ ID NO: 104196 - RNA, 23 nt, Artificial Sequence
  Synthetic
  misc_feature (6)..(6): n is a, c, g, or u
uggcanagaccugaccguugccg

SEQ ID NO: 104197 - RNA, 24 nt, Artificial Sequence
  Synthetic
  misc_feature (7)..(7): n is a, c, g, or u
uuggcanagaccugaccguugccg

SEQ ID NO: 104198 - RNA, 18 nt, Artificial Sequence
  Synthetic
aaaggagguguauuuccg

SEQ ID NO: 104199 - RNA, 19 nt, Artificial Sequence
  Synthetic
gaaaggagguguauuuccg

SEQ ID NO: 104200 - RNA, 20 nt, Artificial Sequence
  Synthetic
ggaaaggagguguauuuccg

SEQ ID NO: 104201 - RNA, 21 nt, Artificial Sequence
  Synthetic
uggaaaggagguguauuuccg

SEQ ID NO: 104202 - RNA, 22 nt, Artificial Sequence
  Synthetic
auggaaaggagguguauuuccg

SEQ ID NO: 104203 - RNA, 23 nt, Artificial Sequence
  Synthetic
cauggaaaggagguguauuuccg

SEQ ID NO: 104204 - RNA, 24 nt, Artificial Sequence
  Synthetic
ccauggaaaggagguguauuuccg

SEQ ID NO: 104205 - RNA, 18 nt, Artificial Sequence
  Synthetic
  misc_feature (12)..(12): n is a, c, g, or u
auacaagugcanuuuccg

SEQ ID NO: 104206 - RNA, 19 nt, Artificial Sequence
  Synthetic
  misc_feature (13)..(13): n is a, c, g, or u
aauacaagugcanuuuccg

SEQ ID NO: 104207 - RNA, 20 nt, Artificial Sequence
  Synthetic
  misc_feature (14)..(14): n is a, c, g, or u
gaauacaagugcanuuuccg

SEQ ID NO: 104208 - RNA, 21 nt, Artificial Sequence
  Synthetic
  misc_feature (15)..(15): n is a, c, g, or u
ggaauacaagugcanuuuccg

SEQ ID NO: 104209 - RNA, 22 nt, Artificial Sequence
  Synthetic
  misc_feature (16)..(16): n is a, c, g, or u
gggaauacaagugcanuuuccg

SEQ ID NO: 104210 - RNA, 23 nt, Artificial Sequence
  Synthetic
  misc_feature (17)..(17): n is a, c, g, or u
ugggaauacaagugcanuuuccg

SEQ ID NO: 104211 - RNA, 24 nt, Artificial Sequence
  Synthetic
  misc_feature (18)..(18): n is a, c, g, or u
augggaauacaagugcanuuuccg

SEQ ID NO: 104212 - RNA, 18 nt, Artificial Sequence
  Synthetic
acagacggggagaccgcg

SEQ ID NO: 104213 - RNA, 19 nt, Artificial Sequence
  Synthetic
cacagacggggagaccgcg

SEQ ID NO: 104214 - RNA, 20 nt, Artificial Sequence
  Synthetic
gcacagacggggagaccgcg

SEQ ID NO: 104215 - RNA, 21 nt, Artificial Sequence
  Synthetic
ggcacagacggggagaccgcg

SEQ ID NO: 104216 - RNA, 22 nt, Artificial Sequence
  Synthetic
aggcacagacggggagaccgcg

SEQ ID NO: 104217 - RNA, 23 nt, Artificial Sequence
  Synthetic
aaggcacagacggggagaccgcg

SEQ ID NO: 104218 - RNA, 24 nt, Artificial Sequence
  Synthetic
gaaggcacagacggggagaccgcg

SEQ ID NO: 104219 - RNA, 18 nt, Artificial Sequence
  Synthetic
accuucgucugcgaggcg

SEQ ID NO: 104220 - RNA, 19 nt, Artificial Sequence
  Synthetic
gaccuucgucugcgaggcg

SEQ ID NO: 104221 - RNA, 20 nt, Artificial Sequence
  Synthetic
agaccuucgucugcgaggcg

SEQ ID NO: 104222 - RNA, 18 nt, Artificial Sequence
  Synthetic
aucuucugcgacgcggcg

SEQ ID NO: 104223 - RNA, 19 nt, Artificial Sequence
  Synthetic
gaucuucugcgacgcggcg

SEQ ID NO: 104224 - RNA, 20 nt, Artificial Sequence
  Synthetic
agaucuucugcgacgcggcg

SEQ ID NO: 104225 - RNA, 18 nt, Artificial Sequence
  Synthetic
aggccuuguaaguuggcg

SEQ ID NO: 104226 - RNA, 19 nt, Artificial Sequence
  Synthetic
aaggccuuguaaguuggcg

SEQ ID NO: 104227 - RNA, 20 nt, Artificial Sequence
  Synthetic
aaaggccuuguaaguuggcg

SEQ ID NO: 104228 - RNA, 21 nt, Artificial Sequence
  Synthetic
gaaaggccuuguaaguuggcg

SEQ ID NO: 104229 - RNA, 22 nt, Artificial Sequence
  Synthetic
agaaaggccuuguaaguuggcg

SEQ ID NO: 104230 - RNA, 23 nt, Artificial Sequence
  Synthetic
cagaaaggccuuguaaguuggcg

SEQ ID NO: 104231 - RNA, 24 nt, Artificial Sequence
  Synthetic
acagaaaggccuuguaaguuggcg

SEQ ID NO: 104232 - RNA, 18 nt, Artificial Sequence
  Synthetic
  misc_feature (1)..(1): n is a, c, g, or u
ngcuccagaccggcugcg

SEQ ID NO: 104233 - RNA, 19 nt, Artificial Sequence
  Synthetic
  misc_feature (2)..(2): n is a, c, g, or u
ungcuccagaccggcugcg

SEQ ID NO: 104234 - RNA, 20 nt, Artificial Sequence
  Synthetic
  misc_feature (3)..(3): n is a, c, g, or u
uungcuccagaccggcugcg

SEQ ID NO: 104235 - RNA, 21 nt, Artificial Sequence
  Synthetic
  misc_feature (4)..(4): n is a, c, g, or u
uuungcuccagaccggcugcg

SEQ ID NO: 104236 - RNA, 22 nt, Artificial Sequence
  Synthetic
  misc_feature (5)..(5): n is a, c, g, or u
guuungcuccagaccggcugcg

SEQ ID NO: 104237 - RNA, 23 nt, Artificial Sequence
  Synthetic
  misc_feature (6)..(6): n is a, c, g, or u
aguuungcuccagaccggcugcg

SEQ ID NO: 104238 - RNA, 24 nt, Artificial Sequence
  Synthetic
  misc_feature (1)..(1): n is a, c, g, or u
  misc_feature (7)..(7): n is a, c, g, or u
naguuungcuccagaccggcugcg

SEQ ID NO: 104239 - RNA, 18 nt, Artificial Sequence
  Synthetic
  misc_feature (16)..(16): n is a, c, g, or u
ggugucgaggagaucncg

SEQ ID NO: 104240 - RNA, 19 nt, Artificial Sequence
  Synthetic
  misc_feature (17)..(17): n is a, c, g, or u
cggugucgaggagaucncg

SEQ ID NO: 104241 - RNA, 20 nt, Artificial Sequence
  Synthetic
  misc_feature (18)..(18): n is a, c, g, or u
gcggugucgaggagaucncg

SEQ ID NO: 104242 - RNA, 21 nt, Artificial Sequence
  Synthetic
  misc_feature (19)..(19): n is a, c, g, or u
ggcggugucgaggagaucncg

SEQ ID NO: 104243 - RNA, 22 nt, Artificial Sequence
  Synthetic
  misc_feature (20)..(20): n is a, c, g, or u
aggcggugucgaggagaucncg

SEQ ID NO: 104244 - RNA, 23 nt, Artificial Sequence
  Synthetic
  misc_feature (21)..(21): n is a, c, g, or u
gaggcggugucgaggagaucncg

SEQ ID NO: 104245 - RNA, 24 nt, Artificial Sequence
  Synthetic
  misc_feature (1)..(1): n is a, c, g, or u
  misc_feature (22)..(22): n is a, c, g, or u
ngaggcggugucgaggagaucncg

SEQ ID NO: 104246 - RNA, 18 nt, Artificial Sequence
  Synthetic
guuccgcaguauggaucg

SEQ ID NO: 104247 - RNA, 19 nt, Artificial Sequence
  Synthetic
aguuccgcaguauggaucg

SEQ ID NO: 104248 - RNA, 20 nt, Artificial Sequence
  Synthetic
gaguuccgcaguauggaucg

SEQ ID NO: 104249 - RNA, 21 nt, Artificial Sequence
  Synthetic
ggaguuccgcaguauggaucg

SEQ ID NO: 104250 - RNA, 22 nt, Artificial Sequence
  Synthetic
aggaguuccgcaguauggaucg

SEQ ID NO: 104251 - RNA, 23 nt, Artificial Sequence
  Synthetic
uaggaguuccgcaguauggaucg

SEQ ID NO: 104252 - RNA, 24 nt, Artificial Sequence
  Synthetic
cuaggaguuccgcaguauggaucg

SEQ ID NO: 104253 - RNA, 18 nt, Artificial Sequence
  Synthetic
ggguccaacuggugaucg

SEQ ID NO: 104254 - RNA, 19 nt, Artificial Sequence
  Synthetic
  misc_feature (1)..(1): n is a, c, g, or u
nggguccaacuggugaucg

SEQ ID NO: 104255 - RNA, 20 nt, Artificial Sequence
  Synthetic
  misc_feature (2)..(2): n is a, c, g, or u
cnggguccaacuggugaucg

SEQ ID NO: 104256 - RNA, 21 nt, Artificial Sequence
  Synthetic
  misc_feature (3)..(3): n is a, c, g, or u
gcnggguccaacuggugaucg

SEQ ID NO: 104257 - RNA, 22 nt, Artificial Sequence
  Synthetic
  misc_feature (1)..(1): n is a, c, g, or u
  misc_feature (4)..(4): n is a, c, g, or u
ngcnggguccaacuggugaucg

SEQ ID NO: 104258 - RNA, 23 nt, Artificial Sequence
  Synthetic
  misc_feature (2)..(2): n is a, c, g, or u
  misc_feature (5)..(5): n is a, c, g, or u
angcnggguccaacuggugaucg

SEQ ID NO: 104259 - RNA, 24 nt, Artificial Sequence
  Synthetic
  misc_feature (3)..(3): n is a, c, g, or u
  misc_feature (6)..(6): n is a, c, g, or u
aangcnggguccaacuggugaucg

SEQ ID NO: 104260 - RNA, 18 nt, Artificial Sequence
  Synthetic
caggguccccaguccucg

SEQ ID NO: 104261 - RNA, 19 nt, Artificial Sequence
  Synthetic
gcaggguccccaguccucg

SEQ ID NO: 104262 - RNA, 20 nt, Artificial Sequence
  Synthetic
ugcaggguccccaguccucg

SEQ ID NO: 104263 - RNA, 21 nt, Artificial Sequence
  Synthetic
gugcaggguccccaguccucg

SEQ ID NO: 104264 - RNA, 22 nt, Artificial Sequence
  Synthetic
ggugcaggguccccaguccucg

SEQ ID NO: 104265 - RNA, 23 nt, Artificial Sequence
  Synthetic
cggugcaggguccccaguccucg

SEQ ID NO: 104266 - RNA, 24 nt, Artificial Sequence
  Synthetic
ucggugcaggguccccaguccucg

SEQ ID NO: 104267 - RNA, 18 nt, Artificial Sequence
  Synthetic
aggggaccugccucgucg

SEQ ID NO: 104268 - RNA, 19 nt, Artificial Sequence
  Synthetic
uaggggaccugccucgucg

SEQ ID NO: 104269 - RNA, 20 nt, Artificial Sequence
  Synthetic
cuaggggaccugccucgucg

SEQ ID NO: 104270 - RNA, 18 nt, Artificial Sequence
  Synthetic
aggugcgccccguggucg

SEQ ID NO: 104271 - RNA, 19 nt, Artificial Sequence
  Synthetic
gaggugcgccccguggucg

SEQ ID NO: 104272 - RNA, 20 nt, Artificial Sequence
  Synthetic
agaggugcgccccguggucg

SEQ ID NO: 104273 - RNA, 21 nt, Artificial Sequence
  Synthetic
gagaggugcgccccguggucg

SEQ ID NO: 104274 - RNA, 22 nt, Artificial Sequence
  Synthetic
agagaggugcgccccguggucg

SEQ ID NO: 104275 - RNA, 23 nt, Artificial Sequence
  Synthetic
aagagaggugcgccccguggucg

SEQ ID NO: 104276 - RNA, 24 nt, Artificial Sequence
  Synthetic
aaagagaggugcgccccguggucg

SEQ ID NO: 104277 - RNA, 18 nt, Artificial Sequence
  Synthetic
  misc_feature (6)..(6): n is a, c, g, or u
agagcngaggcggugucg

SEQ ID NO: 104278 - RNA, 19 nt, Artificial Sequence
  Synthetic
  misc_feature (7)..(7): n is a, c, g, or u
cagagcngaggcggugucg

SEQ ID NO: 104279 - RNA, 20 nt, Artificial Sequence
  Synthetic
  misc_feature (8)..(8): n is a, c, g, or u
acagagcngaggcggugucg

SEQ ID NO: 104280 - RNA, 21 nt, Artificial Sequence
  Synthetic
  misc_feature (9)..(9): n is a, c, g, or u
uacagagcngaggcggugucg

SEQ ID NO: 104281 - RNA, 22 nt, Artificial Sequence
  Synthetic
  misc_feature (10)..(10): n is a, c, g, or u
auacagagcngaggcggugucg

SEQ ID NO: 104282 - RNA, 23 nt, Artificial Sequence
  Synthetic
  misc_feature (11)..(11): n is a, c, g, or u
gauacagagcngaggcggugucg

SEQ ID NO: 104283 - RNA, 24 nt, Artificial Sequence
  Synthetic
  misc_feature (12)..(12): n is a, c, g, or u
cgauacagagcngaggcggugucg

SEQ ID NO: 104284 - RNA, 18 nt, Artificial Sequence
  Synthetic
  misc_feature (15)..(15): n is a, c, g, or u
uuccuugagcagganucg

SEQ ID NO: 104285 - RNA, 19 nt, Artificial Sequence
  Synthetic
  misc_feature (16)..(16): n is a, c, g, or u
guuccuugagcagganucg

SEQ ID NO: 104286 - RNA, 20 nt, Artificial Sequence
  Synthetic
  misc_feature (17)..(17): n is a, c, g, or u
gguuccuugagcagganucg

SEQ ID NO: 104287 - RNA, 21 nt, Artificial Sequence
  Synthetic
  misc_feature (18)..(18): n is a, c, g, or u
agguuccuugagcagganucg

SEQ ID NO: 104288 - RNA, 22 nt, Artificial Sequence
  Synthetic
  misc_feature (19)..(19): n is a, c, g, or u
gagguuccuugagcagganucg

SEQ ID NO: 104289 - RNA, 23 nt, Artificial Sequence
  Synthetic
  misc_feature (20)..(20): n is a, c, g, or u
agagguuccuugagcagganucg

SEQ ID NO: 104290 - RNA, 24 nt, Artificial Sequence
  Synthetic
  misc_feature (21)..(21): n is a, c, g, or u
uagagguuccuugagcagganucg

SEQ ID NO: 104291 - RNA, 18 nt, Artificial Sequence
  Synthetic
  misc_feature (3)..(3): n is a, c, g, or u
cgngcaacgggguaaagg

SEQ ID NO: 104292 - RNA, 19 nt, Artificial Sequence
  Synthetic
  misc_feature (4)..(4): n is a, c, g, or u
ccgngcaacgggguaaagg

SEQ ID NO: 104293 - RNA, 20 nt, Artificial Sequence
  Synthetic
  misc_feature (5)..(5): n is a, c, g, or u
gccgngcaacgggguaaagg

SEQ ID NO: 104294 - RNA, 21 nt, Artificial Sequence
  Synthetic
  misc_feature (6)..(6): n is a, c, g, or u
ugccgngcaacgggguaaagg

SEQ ID NO: 104295 - RNA, 22 nt, Artificial Sequence
  Synthetic
  misc_feature (7)..(7): n is a, c, g, or u
uugccgngcaacgggguaaagg

SEQ ID NO: 104296 - RNA, 23 nt, Artificial Sequence
  Synthetic
  misc_feature (8)..(8): n is a, c, g, or u
guugccgngcaacgggguaaagg

SEQ ID NO: 104297 - RNA, 24 nt, Artificial Sequence
  Synthetic
  misc_feature (9)..(9): n is a, c, g, or u
cguugccgngcaacgggguaaagg

SEQ ID NO: 104298 - RNA, 18 nt, Artificial Sequence
  Synthetic
  misc_feature (4)..(4): n is a, c, g, or u
cccnaaagccacccaagg

SEQ ID NO: 104299 - RNA, 19 nt, Artificial Sequence
  Synthetic
  misc_feature (5)..(5): n is a, c, g, or u
gcccnaaagccacccaagg

SEQ ID NO: 104300 - RNA, 20 nt, Artificial Sequence
  Synthetic
  misc_feature (6)..(6): n is a, c, g, or u
ugcccnaaagccacccaagg

SEQ ID NO: 104301 - RNA, 21 nt, Artificial Sequence
  Synthetic
  misc_feature (7)..(7): n is a, c, g, or u
augcccnaaagccacccaagg

SEQ ID NO: 104302 - RNA, 22 nt, Artificial Sequence
  Synthetic
  misc_feature (8)..(8): n is a, c, g, or u
caugcccnaaagccacccaagg

SEQ ID NO: 104303 - RNA, 23 nt, Artificial Sequence
  Synthetic
  misc_feature (9)..(9): n is a, c, g, or u
ccaugcccnaaagccacccaagg

SEQ ID NO: 104304 - RNA, 24 nt, Artificial Sequence
  Synthetic
  misc_feature (10)..(10): n is a, c, g, or u
uccaugcccnaaagccacccaagg

SEQ ID NO: 104305 - RNA, 18 nt, Artificial Sequence
  Synthetic
aggaaagaagucagaagg

SEQ ID NO: 104306 - RNA, 19 nt, Artificial Sequence
  Synthetic
aaggaaagaagucagaagg

SEQ ID NO: 104307 - RNA, 20 nt, Artificial Sequence
  Synthetic
gaaggaaagaagucagaagg

SEQ ID NO: 104308 - RNA, 21 nt, Artificial Sequence
  Synthetic
agaaggaaagaagucagaagg

SEQ ID NO: 104309 - RNA, 22 nt, Artificial Sequence
  Synthetic
uagaaggaaagaagucagaagg

SEQ ID NO: 104310 - RNA, 23 nt, Artificial Sequence
  Synthetic
auagaaggaaagaagucagaagg

SEQ ID NO: 104311 - RNA, 24 nt, Artificial Sequence
  Synthetic
aauagaaggaaagaagucagaagg

SEQ ID NO: 104312 - RNA, 18 nt, Artificial Sequence
  Synthetic
  misc_feature (2)..(2): n is a, c, g, or u
gnccggcagaugagaagg

SEQ ID NO: 104313 - RNA, 19 nt, Artificial Sequence
  Synthetic
  misc_feature (3)..(3): n is a, c, g, or u
ggnccggcagaugagaagg

SEQ ID NO: 104314 - RNA, 20 nt, Artificial Sequence
  Synthetic
  misc_feature (4)..(4): n is a, c, g, or u
cggnccggcagaugagaagg

SEQ ID NO: 104315 - RNA, 21 nt, Artificial Sequence
  Synthetic
  misc_feature (5)..(5): n is a, c, g, or u
acggnccggcagaugagaagg

SEQ ID NO: 104316 - RNA, 22 nt, Artificial Sequence
  Synthetic
  misc_feature (6)..(6): n is a, c, g, or u
cacggnccggcagaugagaagg

SEQ ID NO: 104317 - RNA, 23 nt, Artificial Sequence
  Synthetic
  misc_feature (7)..(7): n is a, c, g, or u
acacggnccggcagaugagaagg

SEQ ID NO: 104318 - RNA, 24 nt, Artificial Sequence
  Synthetic
  misc_feature (8)..(8): n is a, c, g, or u
cacacggnccggcagaugagaagg

SEQ ID NO: 104319 - RNA, 18 nt, Artificial Sequence
  Synthetic
  misc_feature (7)..(7): n is a, c, g, or u
gagaucncgaauagaagg

SEQ ID NO: 104320 - RNA, 19 nt, Artificial Sequence
  Synthetic
  misc_feature (8)..(8): n is a, c, g, or u
ggagaucncgaauagaagg

SEQ ID NO: 104321 - RNA, 20 nt, Artificial Sequence
  Synthetic
  misc_feature (9)..(9): n is a, c, g, or u
aggagaucncgaauagaagg

SEQ ID NO: 104322 - RNA, 21 nt, Artificial Sequence
  Synthetic
  misc_feature (10)..(10): n is a, c, g, or u
gaggagaucncgaauagaagg

SEQ ID NO: 104323 - RNA, 22 nt, Artificial Sequence
  Synthetic
  misc_feature (11)..(11): n is a, c, g, or u
cgaggagaucncgaauagaagg

SEQ ID NO: 104324 - RNA, 23 nt, Artificial Sequence
  Synthetic
  misc_feature (12)..(12): n is a, c, g, or u
ucgaggagaucncgaauagaagg

SEQ ID NO: 104325 - RNA, 24 nt, Artificial Sequence
  Synthetic
  misc_feature (13)..(13): n is a, c, g, or u
gucgaggagaucncgaauagaagg

SEQ ID NO: 104326 - RNA, 18 nt, Artificial Sequence
  Synthetic
ggcaaauauuugguaagg

SEQ ID NO: 104327 - RNA, 19 nt, Artificial Sequence
  Synthetic
gggcaaauauuugguaagg

SEQ ID NO: 104328 - RNA, 20 nt, Artificial Sequence
  Synthetic
agggcaaauauuugguaagg

SEQ ID NO: 104329 - RNA, 21 nt, Artificial Sequence
  Synthetic
aagggcaaauauuugguaagg

SEQ ID NO: 104330 - RNA, 22 nt, Artificial Sequence
  Synthetic
  misc_feature (1)..(1): n is a, c, g, or u
naagggcaaauauuugguaagg

SEQ ID NO: 104331 - RNA, 23 nt, Artificial Sequence
  Synthetic
  misc_feature (2)..(2): n is a, c, g, or u
cnaagggcaaauauuugguaagg

SEQ ID NO: 104332 - RNA, 24 nt, Artificial Sequence
  Synthetic
  misc_feature (3)..(3): n is a, c, g, or u
ucnaagggcaaauauuugguaagg

SEQ ID NO: 104333 - RNA, 18 nt, Artificial Sequence
  Synthetic
cuaguaaacugagccagg

SEQ ID NO: 104334 - RNA, 19 nt, Artificial Sequence
  Synthetic
acuaguaaacugagccagg

SEQ ID NO: 104335 - RNA, 20 nt, Artificial Sequence
  Synthetic
cacuaguaaacugagccagg

SEQ ID NO: 104336 - RNA, 21 nt, Artificial Sequence
  Synthetic
gcacuaguaaacugagccagg

SEQ ID NO: 104337 - RNA, 22 nt, Artificial Sequence
  Synthetic
ggcacuaguaaacugagccagg

SEQ ID NO: 104338 - RNA, 23 nt, Artificial Sequence
  Synthetic
uggcacuaguaaacugagccagg

SEQ ID NO: 104339 - RNA, 24 nt, Artificial Sequence
  Synthetic
auggcacuaguaaacugagccagg

SEQ ID NO: 104340 - RNA, 18 nt, Artificial Sequence
  Synthetic
augaggcauagcagcagg

SEQ ID NO: 104341 - RNA, 19 nt, Artificial Sequence
  Synthetic
gaugaggcauagcagcagg

SEQ ID NO: 104342 - RNA, 20 nt, Artificial Sequence
  Synthetic
agaugaggcauagcagcagg

SEQ ID NO: 104343 - RNA, 21 nt, Artificial Sequence
  Synthetic
aagaugaggcauagcagcagg

SEQ ID NO: 104344 - RNA, 22 nt, Artificial Sequence
  Synthetic
gaagaugaggcauagcagcagg

SEQ ID NO: 104345 - RNA, 23 nt, Artificial Sequence
  Synthetic
agaagaugaggcauagcagcagg

SEQ ID NO: 104346 - RNA, 24 nt, Artificial Sequence
  Synthetic
aagaagaugaggcauagcagcagg

SEQ ID NO: 104347 - RNA, 18 nt, Artificial Sequence
  Synthetic
ccgauugguggaggcagg

SEQ ID NO: 104348 - RNA, 19 nt, Artificial Sequence
  Synthetic
gccgauugguggaggcagg

SEQ ID NO: 104349 - RNA, 20 nt, Artificial Sequence
  Synthetic
ugccgauugguggaggcagg

SEQ ID NO: 104350 - RNA, 21 nt, Artificial Sequence
  Synthetic
cugccgauugguggaggcagg

SEQ ID NO: 104351 - RNA, 22 nt, Artificial Sequence
  Synthetic
acugccgauugguggaggcagg

SEQ ID NO: 104352 - RNA, 23 nt, Artificial Sequence
  Synthetic
gacugccgauugguggaggcagg

SEQ ID NO: 104353 - RNA, 24 nt, Artificial Sequence
  Synthetic
ugacugccgauugguggaggcagg

SEQ ID NO: 104354 - RNA, 18 nt, Artificial Sequence
  Synthetic
  misc_feature (13)..(13): n is a, c, g, or u
gggaguuugccanucagg

SEQ ID NO: 104355 - RNA, 19 nt, Artificial Sequence
  Synthetic
  misc_feature (14)..(14): n is a, c, g, or u
agggaguuugccanucagg

SEQ ID NO: 104356 - RNA, 20 nt, Artificial Sequence
  Synthetic
  misc_feature (15)..(15): n is a, c, g, or u
gagggaguuugccanucagg

SEQ ID NO: 104357 - RNA, 21 nt, Artificial Sequence
  Synthetic
  misc_feature (1)..(1): n is a, c, g, or u
  misc_feature (16)..(16): n is a, c, g, or u
ngagggaguuugccanucagg

SEQ ID NO: 104358 - RNA, 22 nt, Artificial Sequence
  Synthetic
  misc_feature (2)..(2): n is a, c, g, or u
  misc_feature (17)..(17): n is a, c, g, or u
angagggaguuugccanucagg

SEQ ID NO: 104359 - RNA, 23 nt, Artificial Sequence
  Synthetic
  misc_feature (3)..(3): n is a, c, g, or u
  misc_feature (18)..(18): n is a, c, g, or u
aangagggaguuugccanucagg

SEQ ID NO: 104360 - RNA, 24 nt, Artificial Sequence
  Synthetic
  misc_feature (4)..(4): n is a, c, g, or u
  misc_feature (19)..(19): n is a, c, g, or u
aaangagggaguuugccanucagg

SEQ ID NO: 104361 - RNA, 18 nt, Artificial Sequence
  Synthetic
gggaaagaaucccagagg

SEQ ID NO: 104362 - RNA, 19 nt, Artificial Sequence
  Synthetic
cgggaaagaaucccagagg

SEQ ID NO: 104363 - RNA, 20 nt, Artificial Sequence
  Synthetic
ucgggaaagaaucccagagg

SEQ ID NO: 104364 - RNA, 21 nt, Artificial Sequence
  Synthetic
aucgggaaagaaucccagagg

SEQ ID NO: 104365 - RNA, 22 nt, Artificial Sequence
  Synthetic
gaucgggaaagaaucccagagg

SEQ ID NO: 104366 - RNA, 23 nt, Artificial Sequence
  Synthetic
ugaucgggaaagaaucccagagg

SEQ ID NO: 104367 - RNA, 24 nt, Artificial Sequence
  Synthetic
gugaucgggaaagaaucccagagg

SEQ ID NO: 104368 - RNA, 18 nt, Artificial Sequence
  Synthetic
gagaugauuaggcagagg

SEQ ID NO: 104369 - RNA, 19 nt, Artificial Sequence
  Synthetic
ugagaugauuaggcagagg

SEQ ID NO: 104370 - RNA, 20 nt, Artificial Sequence
  Synthetic
augagaugauuaggcagagg

SEQ ID NO: 104371 - RNA, 21 nt, Artificial Sequence
  Synthetic
caugagaugauuaggcagagg

SEQ ID NO: 104372 - RNA, 22 nt, Artificial Sequence
  Synthetic
acaugagaugauuaggcagagg

SEQ ID NO: 104373 - RNA, 23 nt, Artificial Sequence
  Synthetic
aacaugagaugauuaggcagagg

SEQ ID NO: 104374 - RNA, 24 nt, Artificial Sequence
  Synthetic
gaacaugagaugauuaggcagagg

SEQ ID NO: 104375 - RNA, 18 nt, Artificial Sequence
  Synthetic
ccaugcgacgugcagagg

SEQ ID NO: 104376 - RNA, 19 nt, Artificial Sequence
  Synthetic
uccaugcgacgugcagagg

SEQ ID NO: 104377 - RNA, 20 nt, Artificial Sequence
  Synthetic
  misc_feature (1)..(1): n is a, c, g, or u
nuccaugcgacgugcagagg

SEQ ID NO: 104378 - RNA, 21 nt, Artificial Sequence
  Synthetic
  misc_feature (2)..(2): n is a, c, g, or u
unuccaugcgacgugcagagg

SEQ ID NO: 104379 - RNA, 22 nt, Artificial Sequence
  Synthetic
  misc_feature (3)..(3): n is a, c, g, or u
gunuccaugcgacgugcagagg

SEQ ID NO: 104380 - RNA, 23 nt, Artificial Sequence
  Synthetic
  misc_feature (4)..(4): n is a, c, g, or u
ggunuccaugcgacgugcagagg

SEQ ID NO: 104381 - RNA, 24 nt, Artificial Sequence
  Synthetic
  misc_feature (5)..(5): n is a, c, g, or u
uggunuccaugcgacgugcagagg

SEQ ID NO: 104382 - RNA, 18 nt, Artificial Sequence
  Synthetic
uguuccuggaaguagagg

SEQ ID NO: 104383 - RNA, 19 nt, Artificial Sequence
  Synthetic
auguuccuggaaguagagg

SEQ ID NO: 104384 - RNA, 20 nt, Artificial Sequence
  Synthetic
gauguuccuggaaguagagg

SEQ ID NO: 104385 - RNA, 21 nt, Artificial Sequence
  Synthetic
ugauguuccuggaaguagagg

SEQ ID NO: 104386 - RNA, 22 nt, Artificial Sequence
  Synthetic
uugauguuccuggaaguagagg

SEQ ID NO: 104387 - RNA, 23 nt, Artificial Sequence
  Synthetic
guugauguuccuggaaguagagg

SEQ ID NO: 104388 - RNA, 24 nt, Artificial Sequence
  Synthetic
aguugauguuccuggaaguagagg

SEQ ID NO: 104389 - RNA, 18 nt, Artificial Sequence
  Synthetic
augacugucucuuagagg

SEQ ID NO: 104390 - RNA, 19 nt, Artificial Sequence
  Synthetic
gaugacugucucuuagagg

SEQ ID NO: 104391 - RNA, 20 nt, Artificial Sequence
  Synthetic
ggaugacugucucuuagagg

SEQ ID NO: 104392 - RNA, 21 nt, Artificial Sequence
  Synthetic
aggaugacugucucuuagagg

SEQ ID NO: 104393 - RNA, 22 nt, Artificial Sequence
  Synthetic
gaggaugacugucucuuagagg

SEQ ID NO: 104394 - RNA, 23 nt, Artificial Sequence
  Synthetic
ugaggaugacugucucuuagagg

SEQ ID NO: 104395 - RNA, 24 nt, Artificial Sequence
  Synthetic
cugaggaugacugucucuuagagg

SEQ ID NO: 104396 - RNA, 18 nt, Artificial Sequence
  Synthetic
agaccuucgucugcgagg

SEQ ID NO: 104397 - RNA, 19 nt, Artificial Sequence
  Synthetic
gagaccuucgucugcgagg

SEQ ID NO: 104398 - RNA, 20 nt, Artificial Sequence
  Synthetic
ugagaccuucgucugcgagg

SEQ ID NO: 104399 - RNA, 18 nt, Artificial Sequence
  Synthetic
ccccaugccuugucgagg

SEQ ID NO: 104400 - RNA, 19 nt, Artificial Sequence
  Synthetic
uccccaugccuugucgagg

SEQ ID NO: 104401 - RNA, 20 nt, Artificial Sequence
  Synthetic
guccccaugccuugucgagg

SEQ ID NO: 104402 - RNA, 21 nt, Artificial Sequence
  Synthetic
  misc_feature (1)..(1): n is a, c, g, or u
nguccccaugccuugucgagg

SEQ ID NO: 104403 - RNA, 22 nt, Artificial Sequence
  Synthetic
  misc_feature (2)..(2): n is a, c, g, or u
unguccccaugccuugucgagg

SEQ ID NO: 104404 - RNA, 23 nt, Artificial Sequence
  Synthetic
  misc_feature (3)..(3): n is a, c, g, or u
uunguccccaugccuugucgagg

SEQ ID NO: 104405 - RNA, 24 nt, Artificial Sequence
  Synthetic
  misc_feature (4)..(4): n is a, c, g, or u
auunguccccaugccuugucgagg

SEQ ID NO: 104406 - RNA, 18 nt, Artificial Sequence
  Synthetic
acugccgauugguggagg

SEQ ID NO: 104407 - RNA, 19 nt, Artificial Sequence
  Synthetic
gacugccgauugguggagg

SEQ ID NO: 104408 - RNA, 20 nt, Artificial Sequence
  Synthetic
ugacugccgauugguggagg

SEQ ID NO: 104409 - RNA, 21 nt, Artificial Sequence
  Synthetic
cugacugccgauugguggagg

SEQ ID NO: 104410 - RNA, 22 nt, Artificial Sequence
  Synthetic
ccugacugccgauugguggagg

SEQ ID NO: 104411 - RNA, 23 nt, Artificial Sequence
  Synthetic
uccugacugccgauugguggagg

SEQ ID NO: 104412 - RNA, 24 nt, Artificial Sequence
  Synthetic
uuccugacugccgauugguggagg

SEQ ID NO: 104413 - RNA, 18 nt, Artificial Sequence
  Synthetic
uuggugagugauuggagg

SEQ ID NO: 104414 - RNA, 19 nt, Artificial Sequence
  Synthetic
guuggugagugauuggagg

SEQ ID NO: 104415 - RNA, 20 nt, Artificial Sequence
  Synthetic
gguuggugagugauuggagg

SEQ ID NO: 104416 - RNA, 21 nt, Artificial Sequence
  Synthetic
agguuggugagugauuggagg

SEQ ID NO: 104417 - RNA, 22 nt, Artificial Sequence
  Synthetic
gagguuggugagugauuggagg

SEQ ID NO: 104418 - RNA, 23 nt, Artificial Sequence
  Synthetic
agagguuggugagugauuggagg

SEQ ID NO: 104419 - RNA, 24 nt, Artificial Sequence
  Synthetic
aagagguuggugagugauuggagg

SEQ ID NO: 104420 - RNA, 18 nt, Artificial Sequence
  Synthetic
caaggcacagcuuggagg

SEQ ID NO: 104421 - RNA, 19 nt, Artificial Sequence
  Synthetic
ccaaggcacagcuuggagg

SEQ ID NO: 104422 - RNA, 20 nt, Artificial Sequence
  Synthetic
cccaaggcacagcuuggagg

SEQ ID NO: 104423 - RNA, 21 nt, Artificial Sequence
  Synthetic
acccaaggcacagcuuggagg

SEQ ID NO: 104424 - RNA, 22 nt, Artificial Sequence
  Synthetic
cacccaaggcacagcuuggagg

SEQ ID NO: 104425 - RNA, 23 nt, Artificial Sequence
  Synthetic
ccacccaaggcacagcuuggagg

SEQ ID NO: 104426 - RNA, 24 nt, Artificial Sequence
  Synthetic
gccacccaaggcacagcuuggagg

SEQ ID NO: 104427 - RNA, 18 nt, Artificial Sequence
  Synthetic
  misc_feature (1)..(1): n is a, c, g, or u
  misc_feature (11)..(11): n is a, c, g, or u
nccaggacaanuuggagg

SEQ ID NO: 104428 - RNA, 19 nt, Artificial Sequence
  Synthetic
  misc_feature (2)..(2): n is a, c, g, or u
  misc_feature (12)..(12): n is a, c, g, or u
anccaggacaanuuggagg

SEQ ID NO: 104429 - RNA, 20 nt, Artificial Sequence
  Synthetic
  misc_feature (3)..(3): n is a, c, g, or u
  misc_feature (13)..(13): n is a, c, g, or u
uanccaggacaanuuggagg

SEQ ID NO: 104430 - RNA, 21 nt, Artificial Sequence
  Synthetic
  misc_feature (4)..(4): n is a, c, g, or u
  misc_feature (14)..(14): n is a, c, g, or u
auanccaggacaanuuggagg

SEQ ID NO: 104431 - RNA, 22 nt, Artificial Sequence
  Synthetic
  misc_feature (5)..(5): n is a, c, g, or u
  misc_feature (15)..(15): n is a, c, g, or u
gauanccaggacaanuuggagg

SEQ ID NO: 104432 - RNA, 23 nt, Artificial Sequence
  Synthetic
  misc_feature (6)..(6): n is a, c, g, or u
  misc_feature (16)..(16): n is a, c, g, or u
cgauanccaggacaanuuggagg

SEQ ID NO: 104433 - RNA, 24 nt, Artificial Sequence
  Synthetic
  misc_feature (7)..(7): n is a, c, g, or u
  misc_feature (17)..(17): n is a, c, g, or u
gcgauanccaggacaanuuggagg

SEQ ID NO: 104434 - RNA, 18 nt, Artificial Sequence
  Synthetic
accaacaagaagaugagg

SEQ ID NO: 104435 - RNA, 19 nt, Artificial Sequence
  Synthetic
aaccaacaagaagaugagg

SEQ ID NO: 104436 - RNA, 20 nt, Artificial Sequence
  Synthetic
gaaccaacaagaagaugagg

SEQ ID NO: 104437 - RNA, 21 nt, Artificial Sequence
  Synthetic
agaaccaacaagaagaugagg

SEQ ID NO: 104438 - RNA, 22 nt, Artificial Sequence
  Synthetic
aagaaccaacaagaagaugagg

SEQ ID NO: 104439 - RNA, 23 nt, Artificial Sequence
  Synthetic
gaagaaccaacaagaagaugagg

SEQ ID NO: 104440 - RNA, 24 nt, Artificial Sequence
  Synthetic
agaagaaccaacaagaagaugagg

SEQ ID NO: 104441 - RNA, 18 nt, Artificial Sequence
  Synthetic
gaacaugagaugauuagg

SEQ ID NO: 104442 - RNA, 19 nt, Artificial Sequence
  Synthetic
ugaacaugagaugauuagg

SEQ ID NO: 104443 - RNA, 20 nt, Artificial Sequence
  Synthetic
augaacaugagaugauuagg

SEQ ID NO: 104444 - RNA, 21 nt, Artificial Sequence
  Synthetic
caugaacaugagaugauuagg

SEQ ID NO: 104445 - RNA, 22 nt, Artificial Sequence
  Synthetic
acaugaacaugagaugauuagg

SEQ ID NO: 104446 - RNA, 23 nt, Artificial Sequence
  Synthetic
gacaugaacaugagaugauuagg

SEQ ID NO: 104447 - RNA, 24 nt, Artificial Sequence
  Synthetic
ggacaugaacaugagaugauuagg

SEQ ID NO: 104448 - RNA, 18 nt, Artificial Sequence
  Synthetic
auauuugguaagguuagg

SEQ ID NO: 104449 - RNA, 19 nt, Artificial Sequence
  Synthetic
aauauuugguaagguuagg

SEQ ID NO: 104450 - RNA, 20 nt, Artificial Sequence
  Synthetic
aaauauuugguaagguuagg

SEQ ID NO: 104451 - RNA, 21 nt, Artificial Sequence
  Synthetic
caaauauuugguaagguuagg

SEQ ID NO: 104452 - RNA, 22 nt, Artificial Sequence
  Synthetic
gcaaauauuugguaagguuagg

SEQ ID NO: 104453 - RNA, 23 nt, Artificial Sequence
  Synthetic
ggcaaauauuugguaagguuagg

SEQ ID NO: 104454 - RNA, 24 nt, Artificial Sequence
  Synthetic
gggcaaauauuugguaagguuagg

SEQ ID NO: 104455 - RNA, 18 nt, Artificial Sequence
  Synthetic
cugagccaggagaaacgg

SEQ ID NO: 104456 - RNA, 19 nt, Artificial Sequence
  Synthetic
acugagccaggagaaacgg

SEQ ID NO: 104457 - RNA, 20 nt, Artificial Sequence
  Synthetic
aacugagccaggagaaacgg

SEQ ID NO: 104458 - RNA, 21 nt, Artificial Sequence
  Synthetic
aaacugagccaggagaaacgg

SEQ ID NO: 104459 - RNA, 22 nt, Artificial Sequence
  Synthetic
uaaacugagccaggagaaacgg

SEQ ID NO: 104460 - RNA, 23 nt, Artificial Sequence
  Synthetic
guaaacugagccaggagaaacgg

SEQ ID NO: 104461 - RNA, 24 nt, Artificial Sequence
  Synthetic
aguaaacugagccaggagaaacgg

SEQ ID NO: 104462 - RNA, 18 nt, Artificial Sequence
  Synthetic
  misc_feature (11)..(11): n is a, c, g, or u
accguugccgngcaacgg

SEQ ID NO: 104463 - RNA, 19 nt, Artificial Sequence
  Synthetic
  misc_feature (12)..(12): n is a, c, g, or u
gaccguugccgngcaacgg

SEQ ID NO: 104464 - RNA, 20 nt, Artificial Sequence
  Synthetic
  misc_feature (13)..(13): n is a, c, g, or u
ugaccguugccgngcaacgg

SEQ ID NO: 104465 - RNA, 18 nt, Artificial Sequence
  Synthetic
gaagcgaagugcacacgg

SEQ ID NO: 104466 - RNA, 19 nt, Artificial Sequence
  Synthetic
ugaagcgaagugcacacgg

SEQ ID NO: 104467 - RNA, 20 nt, Artificial Sequence
  Synthetic
gugaagcgaagugcacacgg

SEQ ID NO: 104468 - RNA, 21 nt, Artificial Sequence
  Synthetic
ggugaagcgaagugcacacgg

SEQ ID NO: 104469 - RNA, 22 nt, Artificial Sequence
  Synthetic
aggugaagcgaagugcacacgg

SEQ ID NO: 104470 - RNA, 23 nt, Artificial Sequence
  Synthetic
gaggugaagcgaagugcacacgg

SEQ ID NO: 104471 - RNA, 24 nt, Artificial Sequence
  Synthetic
agaggugaagcgaagugcacacgg

SEQ ID NO: 104472 - RNA, 18 nt, Artificial Sequence
  Synthetic
augagaaggcacagacgg

SEQ ID NO: 104473 - RNA, 19 nt, Artificial Sequence
  Synthetic
gaugagaaggcacagacgg

SEQ ID NO: 104474 - RNA, 20 nt, Artificial Sequence
  Synthetic
agaugagaaggcacagacgg

SEQ ID NO: 104475 - RNA, 21 nt, Artificial Sequence
  Synthetic
cagaugagaaggcacagacgg

SEQ ID NO: 104476 - RNA, 22 nt, Artificial Sequence
  Synthetic
gcagaugagaaggcacagacgg

SEQ ID NO: 104477 - RNA, 23 nt, Artificial Sequence
  Synthetic
ggcagaugagaaggcacagacgg

SEQ ID NO: 104478 - RNA, 24 nt, Artificial Sequence
  Synthetic
cggcagaugagaaggcacagacgg

SEQ ID NO: 104479 - RNA, 18 nt, Artificial Sequence
  Synthetic
  misc_feature (4)..(4): n is a, c, g, or u
  misc_feature (6)..(6): n is a, c, g, or u
agangnagaaggggacgg

SEQ ID NO: 104480 - RNA, 19 nt, Artificial Sequence
  Synthetic
  misc_feature (5)..(5): n is a, c, g, or u
  misc_feature (7)..(7): n is a, c, g, or u
cagangnagaaggggacgg

SEQ ID NO: 104481 - RNA, 20 nt, Artificial Sequence
  Synthetic
  misc_feature (6)..(6): n is a, c, g, or u
  misc_feature (8)..(8): n is a, c, g, or u
gcagangnagaaggggacgg

SEQ ID NO: 104482 - RNA, 21 nt, Artificial Sequence
  Synthetic
  misc_feature (7)..(7): n is a, c, g, or u
  misc_feature (9)..(9): n is a, c, g, or u
ggcagangnagaaggggacgg

SEQ ID NO: 104483 - RNA, 22 nt, Artificial Sequence
  Synthetic
  misc_feature (8)..(8): n is a, c, g, or u
  misc_feature (10)..(10): n is a, c, g, or u
cggcagangnagaaggggacgg

SEQ ID NO: 104484 - RNA, 23 nt, Artificial Sequence
  Synthetic
  misc_feature (9)..(9): n is a, c, g, or u
  misc_feature (11)..(11): n is a, c, g, or u
acggcagangnagaaggggacgg

SEQ ID NO: 104485 - RNA, 24 nt, Artificial Sequence
  Synthetic
  misc_feature (10)..(10): n is a, c, g, or u
  misc_feature (12)..(12): n is a, c, g, or u
aacggcagangnagaaggggacgg

SEQ ID NO: 104486 - RNA, 18 nt, Artificial Sequence
  Synthetic
cgccccguggucggccgg

SEQ ID NO: 104487 - RNA, 19 nt, Artificial Sequence
  Synthetic
gcgccccguggucggccgg

SEQ ID NO: 104488 - RNA, 20 nt, Artificial Sequence
  Synthetic
ugcgccccguggucggccgg

SEQ ID NO: 104489 - RNA, 18 nt, Artificial Sequence
  Synthetic
uuccgcaguauggaucgg

SEQ ID NO: 104490 - RNA, 19 nt, Artificial Sequence
  Synthetic
guuccgcaguauggaucgg

SEQ ID NO: 104491 - RNA, 20 nt, Artificial Sequence
  Synthetic
aguuccgcaguauggaucgg

SEQ ID NO: 104492 - RNA, 18 nt, Artificial Sequence
  Synthetic
gguccaacuggugaucgg

SEQ ID NO: 104493 - RNA, 19 nt, Artificial Sequence
  Synthetic
ggguccaacuggugaucgg

SEQ ID NO: 104494 - RNA, 20 nt, Artificial Sequence
  Synthetic
  misc_feature (1)..(1): n is a, c, g, or u
nggguccaacuggugaucgg

SEQ ID NO: 104495 - RNA, 21 nt, Artificial Sequence
  Synthetic
  misc_feature (2)..(2): n is a, c, g, or u
cnggguccaacuggugaucgg

SEQ ID NO: 104496 - RNA, 22 nt, Artificial Sequence
  Synthetic
  misc_feature (3)..(3): n is a, c, g, or u
gcnggguccaacuggugaucgg

SEQ ID NO: 104497 - RNA, 23 nt, Artificial Sequence
  Synthetic
  misc_feature (1)..(1): n is a, c, g, or u
  misc_feature (4)..(4): n is a, c, g, or u
ngcnggguccaacuggugaucgg

SEQ ID NO: 104498 - RNA, 24 nt, Artificial Sequence
  Synthetic
  misc_feature (2)..(2): n is a, c, g, or u
  misc_feature (5)..(5): n is a, c, g, or u
angcnggguccaacuggugaucgg

SEQ ID NO: 104499 - RNA, 18 nt, Artificial Sequence
  Synthetic
  misc_feature (4)..(4): n is a, c, g, or u
gggngaggcaguagucgg

SEQ ID NO: 104500 - RNA, 19 nt, Artificial Sequence
  Synthetic
  misc_feature (5)..(5): n is a, c, g, or u
ugggngaggcaguagucgg

SEQ ID NO: 104501 - RNA, 20 nt, Artificial Sequence
  Synthetic
  misc_feature (6)..(6): n is a, c, g, or u
augggngaggcaguagucgg

SEQ ID NO: 104502 - RNA, 21 nt, Artificial Sequence
  Synthetic
  misc_feature (7)..(7): n is a, c, g, or u
uaugggngaggcaguagucgg

SEQ ID NO: 104503 - RNA, 22 nt, Artificial Sequence
  Synthetic
  misc_feature (8)..(8): n is a, c, g, or u
auaugggngaggcaguagucgg

SEQ ID NO: 104504 - RNA, 23 nt, Artificial Sequence
  Synthetic
  misc_feature (9)..(9): n is a, c, g, or u
gauaugggngaggcaguagucgg

SEQ ID NO: 104505 - RNA, 24 nt, Artificial Sequence
  Synthetic
  misc_feature (10)..(10): n is a, c, g, or u
cgauaugggngaggcaguagucgg

SEQ ID NO: 104506 - RNA, 18 nt, Artificial Sequence
  Synthetic
ggugcgccccguggucgg

SEQ ID NO: 104507 - RNA, 19 nt, Artificial Sequence
  Synthetic
aggugcgccccguggucgg

SEQ ID NO: 104508 - RNA, 20 nt, Artificial Sequence
  Synthetic
gaggugcgccccguggucgg

SEQ ID NO: 104509 - RNA, 21 nt, Artificial Sequence
  Synthetic
agaggugcgccccguggucgg

SEQ ID NO: 104510 - RNA, 22 nt, Artificial Sequence
  Synthetic
gagaggugcgccccguggucgg

SEQ ID NO: 104511 - RNA, 23 nt, Artificial Sequence
  Synthetic
agagaggugcgccccguggucgg

SEQ ID NO: 104512 - RNA, 24 nt, Artificial Sequence
  Synthetic
aagagaggugcgccccguggucgg

SEQ ID NO: 104513 - RNA, 18 nt, Artificial Sequence
  Synthetic
  misc_feature (1)..(1): n is a, c, g, or u
  misc_feature (5)..(5): n is a, c, g, or u
  misc_feature (13)..(13): n is a, c, g, or u
ngugnucuccaunuucgg

SEQ ID NO: 104514 - RNA, 19 nt, Artificial Sequence
  Synthetic
  misc_feature (2)..(2): n is a, c, g, or u
  misc_feature (6)..(6): n is a, c, g, or u
  misc_feature (14)..(14): n is a, c, g, or u
ungugnucuccaunuucgg

SEQ ID NO: 104515 - RNA, 20 nt, Artificial Sequence
  Synthetic
  misc_feature (3)..(3): n is a, c, g, or u
  misc_feature (7)..(7): n is a, c, g, or u
  misc_feature (15)..(15): n is a, c, g, or u
gungugnucuccaunuucgg

SEQ ID NO: 104516 - RNA, 21 nt, Artificial Sequence
  Synthetic
  misc_feature (4)..(4): n is a, c, g, or u
  misc_feature (8)..(8): n is a, c, g, or u
  misc_feature (16)..(16): n is a, c, g, or u
ugungugnucuccaunuucgg

SEQ ID NO: 104517 - RNA, 22 nt, Artificial Sequence
  Synthetic
  misc_feature (5)..(5): n is a, c, g, or u
  misc_feature (9)..(9): n is a, c, g, or u
  misc_feature (17)..(17): n is a, c, g, or u
augungugnucuccaunuucgg

SEQ ID NO: 104518 - RNA, 23 nt, Artificial Sequence
  Synthetic
  misc_feature (6)..(6): n is a, c, g, or u
  misc_feature (10)..(10): n is a, c, g, or u
  misc_feature (18)..(18): n is a, c, g, or u
gaugungugnucuccaunuucgg

SEQ ID NO: 104519 - RNA, 24 nt, Artificial Sequence
  Synthetic
  misc_feature (7)..(7): n is a, c, g, or u
  misc_feature (11)..(11): n is a, c, g, or u
  misc_feature (19)..(19): n is a, c, g, or u
ugaugungugnucuccaunuucgg

SEQ ID NO: 104520 - RNA, 18 nt, Artificial Sequence
  Synthetic
  misc_feature (11)..(11): n is a, c, g, or u
aucccaugaanuuaaggg

SEQ ID NO: 104521 - RNA, 19 nt, Artificial Sequence
  Synthetic
  misc_feature (12)..(12): n is a, c, g, or u
uaucccaugaanuuaaggg

SEQ ID NO: 104522 - RNA, 20 nt, Artificial Sequence
  Synthetic
  misc_feature (13)..(13): n is a, c, g, or u
auaucccaugaanuuaaggg

SEQ ID NO: 104523 - RNA, 21 nt, Artificial Sequence
  Synthetic
  misc_feature (14)..(14): n is a, c, g, or u
cauaucccaugaanuuaaggg

SEQ ID NO: 104524 - RNA, 22 nt, Artificial Sequence
  Synthetic
  misc_feature (15)..(15): n is a, c, g, or u
acauaucccaugaanuuaaggg

SEQ ID NO: 104525 - RNA, 23 nt, Artificial Sequence
  Synthetic
  misc_feature (16)..(16): n is a, c, g, or u
uacauaucccaugaanuuaaggg

SEQ ID NO: 104526 - RNA, 24 nt, Artificial Sequence
  Synthetic
  misc_feature (17)..(17): n is a, c, g, or u
uuacauaucccaugaanuuaaggg

SEQ ID NO: 104527 - RNA, 18 nt, Artificial Sequence
  Synthetic
cguuugguuuuauuaggg

SEQ ID NO: 104528 - RNA, 19 nt, Artificial Sequence
  Synthetic
acguuugguuuuauuaggg

SEQ ID NO: 104529 - RNA, 20 nt, Artificial Sequence
  Synthetic
aacguuugguuuuauuaggg

SEQ ID NO: 104530 - RNA, 21 nt, Artificial Sequence
  Synthetic
caacguuugguuuuauuaggg

SEQ ID NO: 104531 - RNA, 22 nt, Artificial Sequence
  Synthetic
ccaacguuugguuuuauuaggg

SEQ ID NO: 104532 - RNA, 23 nt, Artificial Sequence
  Synthetic
cccaacguuugguuuuauuaggg

SEQ ID NO: 104533 - RNA, 24 nt, Artificial Sequence
  Synthetic
ccccaacguuugguuuuauuaggg

SEQ ID NO: 104534 - RNA, 18 nt, Artificial Sequence
  Synthetic
  misc_feature (10)..(10): n is a, c, g, or u
ccguugccgngcaacggg

SEQ ID NO: 104535 - RNA, 19 nt, Artificial Sequence
  Synthetic
  misc_feature (11)..(11): n is a, c, g, or u
accguugccgngcaacggg

SEQ ID NO: 104536 - RNA, 20 nt, Artificial Sequence
  Synthetic
  misc_feature (12)..(12): n is a, c, g, or u
gaccguugccgngcaacggg

SEQ ID NO: 104537 - RNA, 18 nt, Artificial Sequence
  Synthetic
guccaacuggugaucggg

SEQ ID NO: 104538 - RNA, 19 nt, Artificial Sequence
  Synthetic
gguccaacuggugaucggg

SEQ ID NO: 104539 - RNA, 20 nt, Artificial Sequence
  Synthetic
ggguccaacuggugaucggg

SEQ ID NO: 104540 - RNA, 21 nt, Artificial Sequence
  Synthetic
  misc_feature (1)..(1): n is a, c, g, or u
nggguccaacuggugaucggg

SEQ ID NO: 104541 - RNA, 22 nt, Artificial Sequence
  Synthetic
  misc_feature (2)..(2): n is a, c, g, or u
cnggguccaacuggugaucggg

SEQ ID NO: 104542 - RNA, 23 nt, Artificial Sequence
  Synthetic
  misc_feature (3)..(3): n is a, c, g, or u
gcnggguccaacuggugaucggg

SEQ ID NO: 104543 - RNA, 24 nt, Artificial Sequence
  Synthetic
  misc_feature (1)..(1): n is a, c, g, or u
  misc_feature (4)..(4): n is a, c, g, or u
ngcnggguccaacuggugaucggg

SEQ ID NO: 104544 - RNA, 18 nt, Artificial Sequence
  Synthetic
  misc_feature (9)..(9): n is a, c, g, or u
cguugccgngcaacgggg

SEQ ID NO: 104545 - RNA, 19 nt, Artificial Sequence
  Synthetic
  misc_feature (10)..(10): n is a, c, g, or u
ccguugccgngcaacgggg

SEQ ID NO: 104546 - RNA, 20 nt, Artificial Sequence
  Synthetic
  misc_feature (11)..(11): n is a, c, g, or u
accguugccgngcaacgggg

SEQ ID NO: 104547 - RNA, 21 nt, Artificial Sequence
  Synthetic
  misc_feature (12)..(12): n is a, c, g, or u
gaccguugccgngcaacgggg

SEQ ID NO: 104548 - RNA, 22 nt, Artificial Sequence
  Synthetic
  misc_feature (13)..(13): n is a, c, g, or u
ugaccguugccgngcaacgggg

SEQ ID NO: 104549 - RNA, 23 nt, Artificial Sequence
  Synthetic
  misc_feature (14)..(14): n is a, c, g, or u
cugaccguugccgngcaacgggg

SEQ ID NO: 104550 - RNA, 24 nt, Artificial Sequence
  Synthetic
  misc_feature (15)..(15): n is a, c, g, or u
ccugaccguugccgngcaacgggg

SEQ ID NO: 104551 - RNA, 18 nt, Artificial Sequence
  Synthetic
gaaagccaaacagugggg

SEQ ID NO: 104552 - RNA, 19 nt, Artificial Sequence
  Synthetic
ugaaagccaaacagugggg

SEQ ID NO: 104553 - RNA, 20 nt, Artificial Sequence
  Synthetic
cugaaagccaaacagugggg

SEQ ID NO: 104554 - RNA, 21 nt, Artificial Sequence
  Synthetic
acugaaagccaaacagugggg

SEQ ID NO: 104555 - RNA, 22 nt, Artificial Sequence
  Synthetic
aacugaaagccaaacagugggg

SEQ ID NO: 104556 - RNA, 23 nt, Artificial Sequence
  Synthetic
uaacugaaagccaaacagugggg

SEQ ID NO: 104557 - RNA, 24 nt, Artificial Sequence
  Synthetic
auaacugaaagccaaacagugggg

SEQ ID NO: 104558 - RNA, 18 nt, Artificial Sequence
  Synthetic
  misc_feature (3)..(3): n is a, c, g, or u
canugauccuuguugggg

SEQ ID NO: 104559 - RNA, 19 nt, Artificial Sequence
  Synthetic
  misc_feature (4)..(4): n is a, c, g, or u
ccanugauccuuguugggg

SEQ ID NO: 104560 - RNA, 20 nt, Artificial Sequence
  Synthetic
  misc_feature (5)..(5): n is a, c, g, or u
gccanugauccuuguugggg

SEQ ID NO: 104561 - RNA, 21 nt, Artificial Sequence
  Synthetic
  misc_feature (6)..(6): n is a, c, g, or u
ggccanugauccuuguugggg

SEQ ID NO: 104562 - RNA, 22 nt, Artificial Sequence
  Synthetic
  misc_feature (7)..(7): n is a, c, g, or u
uggccanugauccuuguugggg

SEQ ID NO: 104563 - RNA, 23 nt, Artificial Sequence
  Synthetic
  misc_feature (8)..(8): n is a, c, g, or u
cuggccanugauccuuguugggg

SEQ ID NO: 104564 - RNA, 24 nt, Artificial Sequence
  Synthetic
  misc_feature (1)..(1): n is a, c, g, or u
  misc_feature (9)..(9): n is a, c, g, or u
ncuggccanugauccuuguugggg

SEQ ID NO: 104565 - RNA, 18 nt, Artificial Sequence
  Synthetic
  misc_feature (12)..(12): n is a, c, g, or u
  misc_feature (15)..(15): n is a, c, g, or u
uuggcuccgaangcnggg

SEQ ID NO: 104566 - RNA, 19 nt, Artificial Sequence
  Synthetic
  misc_feature (1)..(1): n is a, c, g, or u
  misc_feature (13)..(13): n is a, c, g, or u
  misc_feature (16)..(16): n is a, c, g, or u
nuuggcuccgaangcnggg

SEQ ID NO: 104567 - RNA, 20 nt, Artificial Sequence
  Synthetic
  misc_feature (2)..(2): n is a, c, g, or u
  misc_feature (14)..(14): n is a, c, g, or u
  misc_feature (17)..(17): n is a, c, g, or u
anuuggcuccgaangcnggg

SEQ ID NO: 104568 - RNA, 21 nt, Artificial Sequence
  Synthetic
  misc_feature (3)..(3): n is a, c, g, or u
  misc_feature (15)..(15): n is a, c, g, or u
  misc_feature (18)..(18): n is a, c, g, or u
ganuuggcuccgaangcnggg

SEQ ID NO: 104569 - RNA, 22 nt, Artificial Sequence
  Synthetic
  misc_feature (4)..(4): n is a, c, g, or u
  misc_feature (16)..(16): n is a, c, g, or u
  misc_feature (19)..(19): n is a, c, g, or u
uganuuggcuccgaangcnggg

SEQ ID NO: 104570 - RNA, 23 nt, Artificial Sequence
  Synthetic
  misc_feature (5)..(5): n is a, c, g, or u
  misc_feature (17)..(17): n is a, c, g, or u
  misc_feature (20)..(20): n is a, c, g, or u
uuganuuggcuccgaangcnggg

SEQ ID NO: 104571 - RNA, 24 nt, Artificial Sequence
  Synthetic
  misc_feature (6)..(6): n is a, c, g, or u
  misc_feature (18)..(18): n is a, c, g, or u
  misc_feature (21)..(21): n is a, c, g, or u
uuuganuuggcuccgaangcnggg

SEQ ID NO: 104572 - RNA, 18 nt, Artificial Sequence
  Synthetic
uagagguggagagauggg

SEQ ID NO: 104573 - RNA, 19 nt, Artificial Sequence
  Synthetic
uuagagguggagagauggg

SEQ ID NO: 104574 - RNA, 20 nt, Artificial Sequence
  Synthetic
cuuagagguggagagauggg

SEQ ID NO: 104575 - RNA, 21 nt, Artificial Sequence
  Synthetic
ucuuagagguggagagauggg

SEQ ID NO: 104576 - RNA, 22 nt, Artificial Sequence
  Synthetic
cucuuagagguggagagauggg

SEQ ID NO: 104577 - RNA, 23 nt, Artificial Sequence
  Synthetic
ucucuuagagguggagagauggg

SEQ ID NO: 104578 - RNA, 24 nt, Artificial Sequence
  Synthetic
gucucuuagagguggagagauggg

SEQ ID NO: 104579 - RNA, 18 nt, Artificial Sequence
  Synthetic
  misc_feature (9)..(9): n is a, c, g, or u
aaagcccangaugauggg

SEQ ID NO: 104580 - RNA, 19 nt, Artificial Sequence
  Synthetic
  misc_feature (10)..(10): n is a, c, g, or u
gaaagcccangaugauggg

SEQ ID NO: 104581 - RNA, 20 nt, Artificial Sequence
  Synthetic
  misc_feature (11)..(11): n is a, c, g, or u
cgaaagcccangaugauggg

SEQ ID NO: 104582 - RNA, 21 nt, Artificial Sequence
  Synthetic
  misc_feature (12)..(12): n is a, c, g, or u
gcgaaagcccangaugauggg

SEQ ID NO: 104583 - RNA, 22 nt, Artificial Sequence
  Synthetic
  misc_feature (13)..(13): n is a, c, g, or u
ugcgaaagcccangaugauggg

SEQ ID NO: 104584 - RNA, 23 nt, Artificial Sequence
  Synthetic
  misc_feature (14)..(14): n is a, c, g, or u
uugcgaaagcccangaugauggg

SEQ ID NO: 104585 - RNA, 24 nt, Artificial Sequence
  Synthetic
  misc_feature (15)..(15): n is a, c, g, or u
cuugcgaaagcccangaugauggg

SEQ ID NO: 104586 - RNA, 18 nt, Artificial Sequence
  Synthetic
gaagauugacgauauggg

SEQ ID NO: 104587 - RNA, 19 nt, Artificial Sequence
  Synthetic
agaagauugacgauauggg

SEQ ID NO: 104588 - RNA, 20 nt, Artificial Sequence
  Synthetic
gagaagauugacgauauggg

SEQ ID NO: 104589 - RNA, 21 nt, Artificial Sequence
  Synthetic
cgagaagauugacgauauggg

SEQ ID NO: 104590 - RNA, 22 nt, Artificial Sequence
  Synthetic
ucgagaagauugacgauauggg

SEQ ID NO: 104591 - RNA, 23 nt, Artificial Sequence
  Synthetic
cucgagaagauugacgauauggg

SEQ ID NO: 104592 - RNA, 24 nt, Artificial Sequence
  Synthetic
ccucgagaagauugacgauauggg

SEQ ID NO: 104593 - RNA, 18 nt, Artificial Sequence
  Synthetic
ugaaagccaaacaguggg

SEQ ID NO: 104594 - RNA, 19 nt, Artificial Sequence
  Synthetic
cugaaagccaaacaguggg

SEQ ID NO: 104595 - RNA, 20 nt, Artificial Sequence
  Synthetic
acugaaagccaaacaguggg

SEQ ID NO: 104596 - RNA, 21 nt, Artificial Sequence
  Synthetic
aacugaaagccaaacaguggg

SEQ ID NO: 104597 - RNA, 22 nt, Artificial Sequence
  Synthetic
uaacugaaagccaaacaguggg

SEQ ID NO: 104598 - RNA, 23 nt, Artificial Sequence
  Synthetic
auaacugaaagccaaacaguggg

SEQ ID NO: 104599 - RNA, 24 nt, Artificial Sequence
  Synthetic
uauaacugaaagccaaacaguggg

SEQ ID NO: 104600 - RNA, 18 nt, Artificial Sequence
  Synthetic
gaaucccagaggauuggg

SEQ ID NO: 104601 - RNA, 19 nt, Artificial Sequence
  Synthetic
agaaucccagaggauuggg

SEQ ID NO: 104602 - RNA, 20 nt, Artificial Sequence
  Synthetic
aagaaucccagaggauuggg

SEQ ID NO: 104603 - RNA, 21 nt, Artificial Sequence
  Synthetic
aaagaaucccagaggauuggg

SEQ ID NO: 104604 - RNA, 22 nt, Artificial Sequence
  Synthetic
gaaagaaucccagaggauuggg

SEQ ID NO: 104605 - RNA, 23 nt, Artificial Sequence
  Synthetic
ggaaagaaucccagaggauuggg

SEQ ID NO: 104606 - RNA, 24 nt, Artificial Sequence
  Synthetic
gggaaagaaucccagaggauuggg

SEQ ID NO: 104607 - RNA, 18 nt, Artificial Sequence
  Synthetic
  misc_feature (6)..(6): n is a, c, g, or u
cuuaunuaagaccuuggg

SEQ ID NO: 104608 - RNA, 19 nt, Artificial Sequence
  Synthetic
  misc_feature (7)..(7): n is a, c, g, or u
ucuuaunuaagaccuuggg

SEQ ID NO: 104609 - RNA, 20 nt, Artificial Sequence
  Synthetic
  misc_feature (8)..(8): n is a, c, g, or u
cucuuaunuaagaccuuggg

SEQ ID NO: 104610 - RNA, 21 nt, Artificial Sequence
  Synthetic
  misc_feature (9)..(9): n is a, c, g, or u
ccucuuaunuaagaccuuggg

SEQ ID NO: 104611 - RNA, 22 nt, Artificial Sequence
  Synthetic
  misc_feature (10)..(10): n is a, c, g, or u
uccucuuaunuaagaccuuggg

SEQ ID NO: 104612 - RNA, 23 nt, Artificial Sequence
  Synthetic
  misc_feature (11)..(11): n is a, c, g, or u
guccucuuaunuaagaccuuggg

SEQ ID NO: 104613 - RNA, 24 nt, Artificial Sequence
  Synthetic
  misc_feature (12)..(12): n is a, c, g, or u
aguccucuuaunuaagaccuuggg

SEQ ID NO: 104614 - RNA, 18 nt, Artificial Sequence
  Synthetic
  misc_feature (4)..(4): n is a, c, g, or u
ccanugauccuuguuggg

SEQ ID NO: 104615 - RNA, 19 nt, Artificial Sequence
  Synthetic
  misc_feature (5)..(5): n is a, c, g, or u
gccanugauccuuguuggg

SEQ ID NO: 104616 - RNA, 20 nt, Artificial Sequence
  Synthetic
  misc_feature (6)..(6): n is a, c, g, or u
ggccanugauccuuguuggg

SEQ ID NO: 104617 - RNA, 21 nt, Artificial Sequence
  Synthetic
  misc_feature (7)..(7): n is a, c, g, or u
uggccanugauccuuguuggg

SEQ ID NO: 104618 - RNA, 22 nt, Artificial Sequence
  Synthetic
  misc_feature (8)..(8): n is a, c, g, or u
cuggccanugauccuuguuggg

SEQ ID NO: 104619 - RNA, 23 nt, Artificial Sequence
  Synthetic
  misc_feature (1)..(1): n is a, c, g, or u
  misc_feature (9)..(9): n is a, c, g, or u
ncuggccanugauccuuguuggg

SEQ ID NO: 104620 - RNA, 24 nt, Artificial Sequence
  Synthetic
  misc_feature (2)..(2): n is a, c, g, or u
  misc_feature (10)..(10): n is a, c, g, or u
cncuggccanugauccuuguuggg

SEQ ID NO: 104621 - RNA, 18 nt, Artificial Sequence
  Synthetic
  misc_feature (16)..(16): n is a, c, g, or u
gaaaauugguaauagngg

SEQ ID NO: 104622 - RNA, 19 nt, Artificial Sequence
  Synthetic
  misc_feature (17)..(17): n is a, c, g, or u
agaaaauugguaauagngg

SEQ ID NO: 104623 - RNA, 20 nt, Artificial Sequence
  Synthetic
  misc_feature (18)..(18): n is a, c, g, or u
aagaaaauugguaauagngg

SEQ ID NO: 104624 - RNA, 21 nt, Artificial Sequence
  Synthetic
  misc_feature (19)..(19): n is a, c, g, or u
aaagaaaauugguaauagngg

SEQ ID NO: 104625 - RNA, 22 nt, Artificial Sequence
  Synthetic
  misc_feature (20)..(20): n is a, c, g, or u
aaaagaaaauugguaauagngg

SEQ ID NO: 104626 - RNA, 23 nt, Artificial Sequence
  Synthetic
  misc_feature (21)..(21): n is a, c, g, or u
caaaagaaaauugguaauagngg

SEQ ID NO: 104627 - RNA, 24 nt, Artificial Sequence
  Synthetic
  misc_feature (22)..(22): n is a, c, g, or u
acaaaagaaaauugguaauagngg

SEQ ID NO: 104628 - RNA, 18 nt, Artificial Sequence
  Synthetic
  misc_feature (4)..(4): n is a, c, g, or u
  misc_feature (7)..(7): n is a, c, g, or u
acanccnagcagccaugg

SEQ ID NO: 104629 - RNA, 19 nt, Artificial Sequence
  Synthetic
  misc_feature (5)..(5): n is a, c, g, or u
  misc_feature (8)..(8): n is a, c, g, or u
cacanccnagcagccaugg

SEQ ID NO: 104630 - RNA, 20 nt, Artificial Sequence
  Synthetic
  misc_feature (6)..(6): n is a, c, g, or u
  misc_feature (9)..(9): n is a, c, g, or u
gcacanccnagcagccaugg

SEQ ID NO: 104631 - RNA, 21 nt, Artificial Sequence
  Synthetic
  misc_feature (7)..(7): n is a, c, g, or u
  misc_feature (10)..(10): n is a, c, g, or u
agcacanccnagcagccaugg

SEQ ID NO: 104632 - RNA, 22 nt, Artificial Sequence
  Synthetic
  misc_feature (8)..(8): n is a, c, g, or u
  misc_feature (11)..(11): n is a, c, g, or u
cagcacanccnagcagccaugg

SEQ ID NO: 104633 - RNA, 23 nt, Artificial Sequence
  Synthetic
  misc_feature (9)..(9): n is a, c, g, or u
  misc_feature (12)..(12): n is a, c, g, or u
gcagcacanccnagcagccaugg

SEQ ID NO: 104634 - RNA, 24 nt, Artificial Sequence
  Synthetic
  misc_feature (10)..(10): n is a, c, g, or u
  misc_feature (13)..(13): n is a, c, g, or u
ggcagcacanccnagcagccaugg

SEQ ID NO: 104635 - RNA, 18 nt, Artificial Sequence
  Synthetic
  misc_feature (10)..(10): n is a, c, g, or u
gaaagcccangaugaugg

SEQ ID NO: 104636 - RNA, 19 nt, Artificial Sequence
  Synthetic
  misc_feature (11)..(11): n is a, c, g, or u
cgaaagcccangaugaugg

SEQ ID NO: 104637 - RNA, 20 nt, Artificial Sequence
  Synthetic
  misc_feature (12)..(12): n is a, c, g, or u
gcgaaagcccangaugaugg

SEQ ID NO: 104638 - RNA, 21 nt, Artificial Sequence
  Synthetic
  misc_feature (13)..(13): n is a, c, g, or u
ugcgaaagcccangaugaugg

SEQ ID NO: 104639 - RNA, 22 nt, Artificial Sequence
  Synthetic
  misc_feature (14)..(14): n is a, c, g, or u
uugcgaaagcccangaugaugg

SEQ ID NO: 104640 - RNA, 23 nt, Artificial Sequence
  Synthetic
  misc_feature (15)..(15): n is a, c, g, or u
cuugcgaaagcccangaugaugg

SEQ ID NO: 104641 - RNA, 24 nt, Artificial Sequence
  Synthetic
  misc_feature (16)..(16): n is a, c, g, or u
ucuugcgaaagcccangaugaugg

SEQ ID NO: 104642 - RNA, 18 nt, Artificial Sequence
  Synthetic
agaagauugacgauaugg

SEQ ID NO: 104643 - RNA, 19 nt, Artificial Sequence
  Synthetic
gagaagauugacgauaugg

SEQ ID NO: 104644 - RNA, 20 nt, Artificial Sequence
  Synthetic
cgagaagauugacgauaugg

SEQ ID NO: 104645 - RNA, 21 nt, Artificial Sequence
  Synthetic
ucgagaagauugacgauaugg

SEQ ID NO: 104646 - RNA, 22 nt, Artificial Sequence
  Synthetic
cucgagaagauugacgauaugg

SEQ ID NO: 104647 - RNA, 23 nt, Artificial Sequence
  Synthetic
ccucgagaagauugacgauaugg

SEQ ID NO: 104648 - RNA, 24 nt, Artificial Sequence
  Synthetic
uccucgagaagauugacgauaugg

SEQ ID NO: 104649 - RNA, 18 nt, Artificial Sequence
  Synthetic
aggaguuccgcaguaugg

SEQ ID NO: 104650 - RNA, 19 nt, Artificial Sequence
  Synthetic
uaggaguuccgcaguaugg

SEQ ID NO: 104651 - RNA, 20 nt, Artificial Sequence
  Synthetic
cuaggaguuccgcaguaugg

SEQ ID NO: 104652 - RNA, 21 nt, Artificial Sequence
  Synthetic
gcuaggaguuccgcaguaugg

SEQ ID NO: 104653 - RNA, 22 nt, Artificial Sequence
  Synthetic
ugcuaggaguuccgcaguaugg

SEQ ID NO: 104654 - RNA, 23 nt, Artificial Sequence
  Synthetic
cugcuaggaguuccgcaguaugg

SEQ ID NO: 104655 - RNA, 24 nt, Artificial Sequence
  Synthetic
gcugcuaggaguuccgcaguaugg

SEQ ID NO: 104656 - RNA, 18 nt, Artificial Sequence
  Synthetic
  misc_feature (7)..(7): n is a, c, g, or u
ugguggngugaacccugg

SEQ ID NO: 104657 - RNA, 19 nt, Artificial Sequence
  Synthetic
  misc_feature (8)..(8): n is a, c, g, or u
gugguggngugaacccugg

SEQ ID NO: 104658 - RNA, 20 nt, Artificial Sequence
  Synthetic
  misc_feature (9)..(9): n is a, c, g, or u
ugugguggngugaacccugg

SEQ ID NO: 104659 - RNA, 21 nt, Artificial Sequence
  Synthetic
  misc_feature (10)..(10): n is a, c, g, or u
gugugguggngugaacccugg

SEQ ID NO: 104660 - RNA, 22 nt, Artificial Sequence
  Synthetic
  misc_feature (11)..(11): n is a, c, g, or u
cgugugguggngugaacccugg

SEQ ID NO: 104661 - RNA, 23 nt, Artificial Sequence
  Synthetic
  misc_feature (12)..(12): n is a, c, g, or u
ccgugugguggngugaacccugg

SEQ ID NO: 104662 - RNA, 24 nt, Artificial Sequence
  Synthetic
  misc_feature (13)..(13): n is a, c, g, or u
gccgugugguggngugaacccugg

SEQ ID NO: 104663 - RNA, 18 nt, Artificial Sequence
  Synthetic
cugaaagccaaacagugg

SEQ ID NO: 104664 - RNA, 19 nt, Artificial Sequence
  Synthetic
acugaaagccaaacagugg

SEQ ID NO: 104665 - RNA, 20 nt, Artificial Sequence
  Synthetic
aacugaaagccaaacagugg

SEQ ID NO: 104666 - RNA, 21 nt, Artificial Sequence
  Synthetic
uaacugaaagccaaacagugg

SEQ ID NO: 104667 - RNA, 22 nt, Artificial Sequence
  Synthetic
auaacugaaagccaaacagugg

SEQ ID NO: 104668 - RNA, 23 nt, Artificial Sequence
  Synthetic
uauaacugaaagccaaacagugg

SEQ ID NO: 104669 - RNA, 24 nt, Artificial Sequence
  Synthetic
auauaacugaaagccaaacagugg

SEQ ID NO: 104670 - RNA, 18 nt, Artificial Sequence
  Synthetic
  misc_feature (6)..(6): n is a, c, g, or u
aagacngccguguggugg

SEQ ID NO: 104671 - RNA, 19 nt, Artificial Sequence
  Synthetic
  misc_feature (7)..(7): n is a, c, g, or u
aaagacngccguguggugg

SEQ ID NO: 104672 - RNA, 20 nt, Artificial Sequence
  Synthetic
  misc_feature (8)..(8): n is a, c, g, or u
aaaagacngccguguggugg

SEQ ID NO: 104673 - RNA, 21 nt, Artificial Sequence
  Synthetic
  misc_feature (9)..(9): n is a, c, g, or u
caaaagacngccguguggugg

SEQ ID NO: 104674 - RNA, 22 nt, Artificial Sequence
  Synthetic
  misc_feature (10)..(10): n is a, c, g, or u
ccaaaagacngccguguggugg

SEQ ID NO: 104675 - RNA, 23 nt, Artificial Sequence
  Synthetic
  misc_feature (11)..(11): n is a, c, g, or u
cccaaaagacngccguguggugg

SEQ ID NO: 104676 - RNA, 24 nt, Artificial Sequence
  Synthetic
  misc_feature (12)..(12): n is a, c, g, or u
ccccaaaagacngccguguggugg

SEQ ID NO: 104677 - RNA, 18 nt, Artificial Sequence
  Synthetic
uuccugacugccgauugg

SEQ ID NO: 104678 - RNA, 19 nt, Artificial Sequence
  Synthetic
cuuccugacugccgauugg

SEQ ID NO: 104679 - RNA, 20 nt, Artificial Sequence
  Synthetic
ucuuccugacugccgauugg

SEQ ID NO: 104680 - RNA, 21 nt, Artificial Sequence
  Synthetic
gucuuccugacugccgauugg

SEQ ID NO: 104681 - RNA, 22 nt, Artificial Sequence
  Synthetic
ugucuuccugacugccgauugg

SEQ ID NO: 104682 - RNA, 23 nt, Artificial Sequence
  Synthetic
cugucuuccugacugccgauugg

SEQ ID NO: 104683 - RNA, 24 nt, Artificial Sequence
  Synthetic
gcugucuuccugacugccgauugg

SEQ ID NO: 104684 - RNA, 18 nt, Artificial Sequence
  Synthetic
gcgucagcaaacacuugg

SEQ ID NO: 104685 - RNA, 19 nt, Artificial Sequence
  Synthetic
ugcgucagcaaacacuugg

SEQ ID NO: 104686 - RNA, 20 nt, Artificial Sequence
  Synthetic
uugcgucagcaaacacuugg

SEQ ID NO: 104687 - RNA, 21 nt, Artificial Sequence
  Synthetic
guugcgucagcaaacacuugg

SEQ ID NO: 104688 - RNA, 22 nt, Artificial Sequence
  Synthetic
gguugcgucagcaaacacuugg

SEQ ID NO: 104689 - RNA, 23 nt, Artificial Sequence
  Synthetic
ggguugcgucagcaaacacuugg

SEQ ID NO: 104690 - RNA, 24 nt, Artificial Sequence
  Synthetic
gggguugcgucagcaaacacuugg

SEQ ID NO: 104691 - RNA, 18 nt, Artificial Sequence
  Synthetic
  misc_feature (7)..(7): n is a, c, g, or u
ucuuaunuaagaccuugg

SEQ ID NO: 104692 - RNA, 19 nt, Artificial Sequence
  Synthetic
  misc_feature (8)..(8): n is a, c, g, or u
cucuuaunuaagaccuugg

SEQ ID NO: 104693 - RNA, 20 nt, Artificial Sequence
  Synthetic
  misc_feature (9)..(9): n is a, c, g, or u
ccucuuaunuaagaccuugg

SEQ ID NO: 104694 - RNA, 21 nt, Artificial Sequence
  Synthetic
  misc_feature (10)..(10): n is a, c, g, or u
uccucuuaunuaagaccuugg

SEQ ID NO: 104695 - RNA, 22 nt, Artificial Sequence
  Synthetic
  misc_feature (11)..(11): n is a, c, g, or u
guccucuuaunuaagaccuugg

SEQ ID NO: 104696 - RNA, 23 nt, Artificial Sequence
  Synthetic
  misc_feature (12)..(12): n is a, c, g, or u
aguccucuuaunuaagaccuugg

SEQ ID NO: 104697 - RNA, 24 nt, Artificial Sequence
  Synthetic
  misc_feature (13)..(13): n is a, c, g, or u
gaguccucuuaunuaagaccuugg

SEQ ID NO: 104698 - RNA, 18 nt, Artificial Sequence
  Synthetic
aaaggccuuguaaguugg

SEQ ID NO: 104699 - RNA, 19 nt, Artificial Sequence
  Synthetic
gaaaggccuuguaaguugg

SEQ ID NO: 104700 - RNA, 20 nt, Artificial Sequence
  Synthetic
agaaaggccuuguaaguugg

SEQ ID NO: 104701 - RNA, 21 nt, Artificial Sequence
  Synthetic
cagaaaggccuuguaaguugg

SEQ ID NO: 104702 - RNA, 22 nt, Artificial Sequence
  Synthetic
acagaaaggccuuguaaguugg

SEQ ID NO: 104703 - RNA, 23 nt, Artificial Sequence
  Synthetic
cacagaaaggccuuguaaguugg

SEQ ID NO: 104704 - RNA, 24 nt, Artificial Sequence
  Synthetic
acacagaaaggccuuguaaguugg

SEQ ID NO: 104705 - RNA, 18 nt, Artificial Sequence
  Synthetic
  misc_feature (10)..(10): n is a, c, g, or u
ggggacugcnaauuuugg

SEQ ID NO: 104706 - RNA, 19 nt, Artificial Sequence
  Synthetic
  misc_feature (11)..(11): n is a, c, g, or u
uggggacugcnaauuuugg

SEQ ID NO: 104707 - RNA, 20 nt, Artificial Sequence
  Synthetic
  misc_feature (12)..(12): n is a, c, g, or u
uuggggacugcnaauuuugg

SEQ ID NO: 104708 - RNA, 21 nt, Artificial Sequence
  Synthetic
  misc_feature (13)..(13): n is a, c, g, or u
guuggggacugcnaauuuugg

SEQ ID NO: 104709 - RNA, 22 nt, Artificial Sequence
  Synthetic
  misc_feature (14)..(14): n is a, c, g, or u
gguuggggacugcnaauuuugg

SEQ ID NO: 104710 - RNA, 23 nt, Artificial Sequence
  Synthetic
  misc_feature (15)..(15): n is a, c, g, or u
agguuggggacugcnaauuuugg

SEQ ID NO: 104711 - RNA, 24 nt, Artificial Sequence
  Synthetic
  misc_feature (16)..(16): n is a, c, g, or u
gagguuggggacugcnaauuuugg

SEQ ID NO: 104712 - RNA, 18 nt, Artificial Sequence
  Synthetic
  misc_feature (10)..(10): n is a, c, g, or u
  misc_feature (17)..(17): n is a, c, g, or u
aaugaaugunaggaaang

SEQ ID NO: 104713 - RNA, 19 nt, Artificial Sequence
  Synthetic
  misc_feature (11)..(11): n is a, c, g, or u
  misc_feature (18)..(18): n is a, c, g, or u
aaaugaaugunaggaaang

SEQ ID NO: 104714 - RNA, 20 nt, Artificial Sequence
  Synthetic
  misc_feature (1)..(1): n is a, c, g, or u
  misc_feature (12)..(12): n is a, c, g, or u
  misc_feature (19)..(19): n is a, c, g, or u
naaaugaaugunaggaaang

SEQ ID NO: 104715 - RNA, 21 nt, Artificial Sequence
  Synthetic
  misc_feature (1)..(2): n is a, c, g, or u
  misc_feature (13)..(13): n is a, c, g, or u
  misc_feature (20)..(20): n is a, c, g, or u
nnaaaugaaugunaggaaang

SEQ ID NO: 104716 - RNA, 22 nt, Artificial Sequence
  Synthetic
  misc_feature (2)..(3): n is a, c, g, or u
  misc_feature (14)..(14): n is a, c, g, or u
  misc_feature (21)..(21): n is a, c, g, or u
unnaaaugaaugunaggaaang

SEQ ID NO: 104717 - RNA, 23 nt, Artificial Sequence
  Synthetic
  misc_feature (1)..(1): n is a, c, g, or u
  misc_feature (3)..(4): n is a, c, g, or u
  misc_feature (15)..(15): n is a, c, g, or u
  misc_feature (22)..(22): n is a, c, g, or u
nunnaaaugaaugunaggaaang

SEQ ID NO: 104718 - RNA, 24 nt, Artificial Sequence
  Synthetic
  misc_feature (2)..(2): n is a, c, g, or u
  misc_feature (4)..(5): n is a, c, g, or u
  misc_feature (16)..(16): n is a, c, g, or u
  misc_feature (23)..(23): n is a, c, g, or u
cnunnaaaugaaugunaggaaang

SEQ ID NO: 104719 - RNA, 18 nt, Artificial Sequence
  Synthetic
  misc_feature (17)..(17): n is a, c, g, or u
cggccggaacggcagang

SEQ ID NO: 104720 - RNA, 19 nt, Artificial Sequence
  Synthetic
  misc_feature (18)..(18): n is a, c, g, or u
ucggccggaacggcagang

SEQ ID NO: 104721 - RNA, 20 nt, Artificial Sequence
  Synthetic
  misc_feature (19)..(19): n is a, c, g, or u
gucggccggaacggcagang

SEQ ID NO: 104722 - RNA, 21 nt, Artificial Sequence
  Synthetic
  misc_feature (20)..(20): n is a, c, g, or u
ggucggccggaacggcagang

SEQ ID NO: 104723 - RNA, 22 nt, Artificial Sequence
  Synthetic
  misc_feature (21)..(21): n is a, c, g, or u
uggucggccggaacggcagang

SEQ ID NO: 104724 - RNA, 23 nt, Artificial Sequence
  Synthetic
  misc_feature (22)..(22): n is a, c, g, or u
guggucggccggaacggcagang

SEQ ID NO: 104725 - RNA, 24 nt, Artificial Sequence
  Synthetic
  misc_feature (23)..(23): n is a, c, g, or u
cguggucggccggaacggcagang

SEQ ID NO: 104726 - RNA, 18 nt, Artificial Sequence
  Synthetic
  misc_feature (17)..(17): n is a, c, g, or u
uugguggucuguaagcng

SEQ ID NO: 104727 - RNA, 19 nt, Artificial Sequence
  Synthetic
  misc_feature (18)..(18): n is a, c, g, or u
uuugguggucuguaagcng

SEQ ID NO: 104728 - RNA, 20 nt, Artificial Sequence
  Synthetic
  misc_feature (19)..(19): n is a, c, g, or u
auuugguggucuguaagcng

SEQ ID NO: 104729 - RNA, 21 nt, Artificial Sequence
  Synthetic
  misc_feature (20)..(20): n is a, c, g, or u
cauuugguggucuguaagcng

SEQ ID NO: 104730 - RNA, 22 nt, Artificial Sequence
  Synthetic
  misc_feature (21)..(21): n is a, c, g, or u
gcauuugguggucuguaagcng

SEQ ID NO: 104731 - RNA, 23 nt, Artificial Sequence
  Synthetic
  misc_feature (22)..(22): n is a, c, g, or u
ggcauuugguggucuguaagcng

SEQ ID NO: 104732 - RNA, 24 nt, Artificial Sequence
  Synthetic
  misc_feature (23)..(23): n is a, c, g, or u
gggcauuugguggucuguaagcng

SEQ ID NO: 104733 - RNA, 18 nt, Artificial Sequence
  Synthetic
  misc_feature (17)..(17): n is a, c, g, or u
auuguguaaaaggggcng

SEQ ID NO: 104734 - RNA, 19 nt, Artificial Sequence
  Synthetic
  misc_feature (18)..(18): n is a, c, g, or u
cauuguguaaaaggggcng

SEQ ID NO: 104735 - RNA, 20 nt, Artificial Sequence
  Synthetic
  misc_feature (19)..(19): n is a, c, g, or u
acauuguguaaaaggggcng

SEQ ID NO: 104736 - RNA, 21 nt, Artificial Sequence
  Synthetic
  misc_feature (20)..(20): n is a, c, g, or u
cacauuguguaaaaggggcng

SEQ ID NO: 104737 - RNA, 22 nt, Artificial Sequence
  Synthetic
  misc_feature (21)..(21): n is a, c, g, or u
ccacauuguguaaaaggggcng

SEQ ID NO: 104738 - RNA, 23 nt, Artificial Sequence
  Synthetic
  misc_feature (1)..(1): n is a, c, g, or u
  misc_feature (22)..(22): n is a, c, g, or u
nccacauuguguaaaaggggcng

SEQ ID NO: 104739 - RNA, 24 nt, Artificial Sequence
  Synthetic
  misc_feature (2)..(2): n is a, c, g, or u
  misc_feature (23)..(23): n is a, c, g, or u
anccacauuguguaaaaggggcng

SEQ ID NO: 104740 - RNA, 18 nt, Artificial Sequence
  Synthetic
  misc_feature (17)..(17): n is a, c, g, or u
agaaaauugguaauagng

SEQ ID NO: 104741 - RNA, 19 nt, Artificial Sequence
  Synthetic
  misc_feature (18)..(18): n is a, c, g, or u
aagaaaauugguaauagng

SEQ ID NO: 104742 - RNA, 20 nt, Artificial Sequence
  Synthetic
  misc_feature (19)..(19): n is a, c, g, or u
aaagaaaauugguaauagng

SEQ ID NO: 104743 - RNA, 21 nt, Artificial Sequence
  Synthetic
  misc_feature (20)..(20): n is a, c, g, or u
aaaagaaaauugguaauagng

SEQ ID NO: 104744 - RNA, 22 nt, Artificial Sequence
  Synthetic
  misc_feature (21)..(21): n is a, c, g, or u
caaaagaaaauugguaauagng

SEQ ID NO: 104745 - RNA, 23 nt, Artificial Sequence
  Synthetic
  misc_feature (22)..(22): n is a, c, g, or u
acaaaagaaaauugguaauagng

SEQ ID NO: 104746 - RNA, 24 nt, Artificial Sequence
  Synthetic
  misc_feature (23)..(23): n is a, c, g, or u
gacaaaagaaaauugguaauagng

SEQ ID NO: 104747 - RNA, 18 nt, Artificial Sequence
  Synthetic
  misc_feature (5)..(6): n is a, c, g, or u
  misc_feature (14)..(14): n is a, c, g, or u
  misc_feature (17)..(17): n is a, c, g, or u
ugcgnngauggccnaung

SEQ ID NO: 104748 - RNA, 19 nt, Artificial Sequence
  Synthetic
  misc_feature (6)..(7): n is a, c, g, or u
  misc_feature (15)..(15): n is a, c, g, or u
  misc_feature (18)..(18): n is a, c, g, or u
augcgnngauggccnaung

SEQ ID NO: 104749 - RNA, 20 nt, Artificial Sequence
  Synthetic
  misc_feature (7)..(8): n is a, c, g, or u
  misc_feature (16)..(16): n is a, c, g, or u
  misc_feature (19)..(19): n is a, c, g, or u
caugcgnngauggccnaung

SEQ ID NO: 104750 - RNA, 21 nt, Artificial Sequence
  Synthetic
  misc_feature (8)..(9): n is a, c, g, or u
  misc_feature (17)..(17): n is a, c, g, or u
  misc_feature (20)..(20): n is a, c, g, or u
gcaugcgnngauggccnaung

SEQ ID NO: 104751 - RNA, 22 nt, Artificial Sequence
  Synthetic
  misc_feature (9)..(10): n is a, c, g, or u
  misc_feature (18)..(18): n is a, c, g, or u
  misc_feature (21)..(21): n is a, c, g, or u
cgcaugcgnngauggccnaung

SEQ ID NO: 104752 - RNA, 23 nt, Artificial Sequence
  Synthetic
  misc_feature (10)..(11): n is a, c, g, or u
  misc_feature (19)..(19): n is a, c, g, or u
  misc_feature (22)..(22): n is a, c, g, or u
acgcaugcgnngauggccnaung

SEQ ID NO: 104753 - RNA, 24 nt, Artificial Sequence
  Synthetic
  misc_feature (11)..(12): n is a, c, g, or u
  misc_feature (20)..(20): n is a, c, g, or u
  misc_feature (23)..(23): n is a, c, g, or u
cacgcaugcgnngauggccnaung

SEQ ID NO: 104754 - RNA, 18 nt, Artificial Sequence
  Synthetic
aaaguaagacaggaaaug

SEQ ID NO: 104755 - RNA, 19 nt, Artificial Sequence
  Synthetic
aaaaguaagacaggaaaug

SEQ ID NO: 104756 - RNA, 20 nt, Artificial Sequence
  Synthetic
caaaaguaagacaggaaaug

SEQ ID NO: 104757 - RNA, 21 nt, Artificial Sequence
  Synthetic
ccaaaaguaagacaggaaaug

SEQ ID NO: 104758 - RNA, 22 nt, Artificial Sequence
  Synthetic
uccaaaaguaagacaggaaaug

SEQ ID NO: 104759 - RNA, 23 nt, Artificial Sequence
  Synthetic
uuccaaaaguaagacaggaaaug

SEQ ID NO: 104760 - RNA, 24 nt, Artificial Sequence
  Synthetic
cuuccaaaaguaagacaggaaaug

SEQ ID NO: 104761 - RNA, 18 nt, Artificial Sequence
  Synthetic
  misc_feature (6)..(6): n is a, c, g, or u
  misc_feature (8)..(9): n is a, c, g, or u
uccucnunnaaaugaaug

SEQ ID NO: 104762 - RNA, 19 nt, Artificial Sequence
  Synthetic
  misc_feature (1)..(1): n is a, c, g, or u
  misc_feature (7)..(7): n is a, c, g, or u
  misc_feature (9)..(10): n is a, c, g, or u
nuccucnunnaaaugaaug

SEQ ID NO: 104763 - RNA, 20 nt, Artificial Sequence
  Synthetic
  misc_feature (2)..(2): n is a, c, g, or u
  misc_feature (8)..(8): n is a, c, g, or u
  misc_feature (10)..(11): n is a, c, g, or u
unuccucnunnaaaugaaug

SEQ ID NO: 104764 - RNA, 21 nt, Artificial Sequence
  Synthetic
  misc_feature (3)..(3): n is a, c, g, or u
  misc_feature (9)..(9): n is a, c, g, or u
  misc_feature (11)..(12): n is a, c, g, or u
aunuccucnunnaaaugaaug

SEQ ID NO: 104765 - RNA, 22 nt, Artificial Sequence
  Synthetic
  misc_feature (4)..(4): n is a, c, g, or u
  misc_feature (10)..(10): n is a, c, g, or u
  misc_feature (12)..(13): n is a, c, g, or u
aaunuccucnunnaaaugaaug

SEQ ID NO: 104766 - RNA, 23 nt, Artificial Sequence
  Synthetic
  misc_feature (5)..(5): n is a, c, g, or u
  misc_feature (11)..(11): n is a, c, g, or u
  misc_feature (13)..(14): n is a, c, g, or u
uaaunuccucnunnaaaugaaug

SEQ ID NO: 104767 - RNA, 24 nt, Artificial Sequence
  Synthetic
  misc_feature (6)..(6): n is a, c, g, or u
  misc_feature (12)..(12): n is a, c, g, or u
  misc_feature (14)..(15): n is a, c, g, or u
auaaunuccucnunnaaaugaaug

SEQ ID NO: 104768 - RNA, 18 nt, Artificial Sequence
  Synthetic
  misc_feature (9)..(9): n is a, c, g, or u
ccuaguuungaaguaaug

SEQ ID NO: 104769 - RNA, 19 nt, Artificial Sequence
  Synthetic
  misc_feature (10)..(10): n is a, c, g, or u
gccuaguuungaaguaaug

SEQ ID NO: 104770 - RNA, 20 nt, Artificial Sequence
  Synthetic
  misc_feature (11)..(11): n is a, c, g, or u
ugccuaguuungaaguaaug

SEQ ID NO: 104771 - RNA, 21 nt, Artificial Sequence
  Synthetic
  misc_feature (12)..(12): n is a, c, g, or u
augccuaguuungaaguaaug

SEQ ID NO: 104772 - RNA, 22 nt, Artificial Sequence
  Synthetic
  misc_feature (13)..(13): n is a, c, g, or u
aaugccuaguuungaaguaaug

SEQ ID NO: 104773 - RNA, 23 nt, Artificial Sequence
  Synthetic
  misc_feature (14)..(14): n is a, c, g, or u
uaaugccuaguuungaaguaaug

SEQ ID NO: 104774 - RNA, 24 nt, Artificial Sequence
  Synthetic
  misc_feature (15)..(15): n is a, c, g, or u
auaaugccuaguuungaaguaaug

SEQ ID NO: 104775 - RNA, 18 nt, Artificial Sequence
  Synthetic
  misc_feature (5)..(5): n is a, c, g, or u
  misc_feature (8)..(8): n is a, c, g, or u
cacanccnagcagccaug

SEQ ID NO: 104776 - RNA, 19 nt, Artificial Sequence
  Synthetic
  misc_feature (6)..(6): n is a, c, g, or u
  misc_feature (9)..(9): n is a, c, g, or u
gcacanccnagcagccaug

SEQ ID NO: 104777 - RNA, 20 nt, Artificial Sequence
  Synthetic
  misc_feature (7)..(7): n is a, c, g, or u
  misc_feature (10)..(10): n is a, c, g, or u
agcacanccnagcagccaug

SEQ ID NO: 104778 - RNA, 21 nt, Artificial Sequence
  Synthetic
  misc_feature (8)..(8): n is a, c, g, or u
  misc_feature (11)..(11): n is a, c, g, or u
cagcacanccnagcagccaug

SEQ ID NO: 104779 - RNA, 22 nt, Artificial Sequence
  Synthetic
  misc_feature (9)..(9): n is a, c, g, or u
  misc_feature (12)..(12): n is a, c, g, or u
gcagcacanccnagcagccaug

SEQ ID NO: 104780 - RNA, 23 nt, Artificial Sequence
  Synthetic
  misc_feature (10)..(10): n is a, c, g, or u
  misc_feature (13)..(13): n is a, c, g, or u
ggcagcacanccnagcagccaug

SEQ ID NO: 104781 - RNA, 24 nt, Artificial Sequence
  Synthetic
  misc_feature (11)..(11): n is a, c, g, or u
  misc_feature (14)..(14): n is a, c, g, or u
uggcagcacanccnagcagccaug

SEQ ID NO: 104782 - RNA, 18 nt, Artificial Sequence
  Synthetic
  misc_feature (8)..(8): n is a, c, g, or u
cacacggnccggcagaug

SEQ ID NO: 104783 - RNA, 19 nt, Artificial Sequence
  Synthetic
  misc_feature (9)..(9): n is a, c, g, or u
gcacacggnccggcagaug

SEQ ID NO: 104784 - RNA, 20 nt, Artificial Sequence
  Synthetic
  misc_feature (10)..(10): n is a, c, g, or u
ugcacacggnccggcagaug

SEQ ID NO: 104785 - RNA, 21 nt, Artificial Sequence
  Synthetic
  misc_feature (11)..(11): n is a, c, g, or u
gugcacacggnccggcagaug

SEQ ID NO: 104786 - RNA, 22 nt, Artificial Sequence
  Synthetic
  misc_feature (12)..(12): n is a, c, g, or u
agugcacacggnccggcagaug

SEQ ID NO: 104787 - RNA, 23 nt, Artificial Sequence
  Synthetic
  misc_feature (13)..(13): n is a, c, g, or u
aagugcacacggnccggcagaug

SEQ ID NO: 104788 - RNA, 24 nt, Artificial Sequence
  Synthetic
  misc_feature (14)..(14): n is a, c, g, or u
gaagugcacacggnccggcagaug

SEQ ID NO: 104789 - RNA, 18 nt, Artificial Sequence
  Synthetic
ggacaugaacaugagaug

SEQ ID NO: 104790 - RNA, 19 nt, Artificial Sequence
  Synthetic
aggacaugaacaugagaug

SEQ ID NO: 104791 - RNA, 20 nt, Artificial Sequence
  Synthetic
uaggacaugaacaugagaug

SEQ ID NO: 104792 - RNA, 21 nt, Artificial Sequence
  Synthetic
guaggacaugaacaugagaug

SEQ ID NO: 104793 - RNA, 22 nt, Artificial Sequence
  Synthetic
aguaggacaugaacaugagaug

SEQ ID NO: 104794 - RNA, 23 nt, Artificial Sequence
  Synthetic
caguaggacaugaacaugagaug

SEQ ID NO: 104795 - RNA, 24 nt, Artificial Sequence
  Synthetic
acaguaggacaugaacaugagaug

SEQ ID NO: 104796 - RNA, 18 nt, Artificial Sequence
  Synthetic
aggcauagcagcaggaug

SEQ ID NO: 104797 - RNA, 19 nt, Artificial Sequence
  Synthetic
gaggcauagcagcaggaug

SEQ ID NO: 104798 - RNA, 20 nt, Artificial Sequence
  Synthetic
ugaggcauagcagcaggaug

SEQ ID NO: 104799 - RNA, 21 nt, Artificial Sequence
  Synthetic
augaggcauagcagcaggaug

SEQ ID NO: 104800 - RNA, 22 nt, Artificial Sequence
  Synthetic
gaugaggcauagcagcaggaug

SEQ ID NO: 104801 - RNA, 23 nt, Artificial Sequence
  Synthetic
agaugaggcauagcagcaggaug

SEQ ID NO: 104802 - RNA, 24 nt, Artificial Sequence
  Synthetic
aagaugaggcauagcagcaggaug

SEQ ID NO: 104803 - RNA, 18 nt, Artificial Sequence
  Synthetic
  misc_feature (14)..(14): n is a, c, g, or u
uugcgaaagcccangaug

SEQ ID NO: 104804 - RNA, 19 nt, Artificial Sequence
  Synthetic
  misc_feature (15)..(15): n is a, c, g, or u
cuugcgaaagcccangaug

SEQ ID NO: 104805 - RNA, 20 nt, Artificial Sequence
  Synthetic
  misc_feature (16)..(16): n is a, c, g, or u
ucuugcgaaagcccangaug

SEQ ID NO: 104806 - RNA, 21 nt, Artificial Sequence
  Synthetic
  misc_feature (17)..(17): n is a, c, g, or u
aucuugcgaaagcccangaug

SEQ ID NO: 104807 - RNA, 22 nt, Artificial Sequence
  Synthetic
  misc_feature (18)..(18): n is a, c, g, or u
aaucuugcgaaagcccangaug

SEQ ID NO: 104808 - RNA, 23 nt, Artificial Sequence
  Synthetic
  misc_feature (19)..(19): n is a, c, g, or u
gaaucuugcgaaagcccangaug

SEQ ID NO: 104809 - RNA, 24 nt, Artificial Sequence
  Synthetic
  misc_feature (20)..(20): n is a, c, g, or u
ggaaucuugcgaaagcccangaug

SEQ ID NO: 104810 - RNA, 18 nt, Artificial Sequence
  Synthetic
  misc_feature (15)..(15): n is a, c, g, or u
aggaugaagaggaanaug

SEQ ID NO: 104811 - RNA, 19 nt, Artificial Sequence
  Synthetic
  misc_feature (16)..(16): n is a, c, g, or u
caggaugaagaggaanaug

SEQ ID NO: 104812 - RNA, 20 nt, Artificial Sequence
  Synthetic
  misc_feature (17)..(17): n is a, c, g, or u
gcaggaugaagaggaanaug

SEQ ID NO: 104813 - RNA, 21 nt, Artificial Sequence
  Synthetic
  misc_feature (18)..(18): n is a, c, g, or u
agcaggaugaagaggaanaug

SEQ ID NO: 104814 - RNA, 22 nt, Artificial Sequence
  Synthetic
  misc_feature (19)..(19): n is a, c, g, or u
cagcaggaugaagaggaanaug

SEQ ID NO: 104815 - RNA, 23 nt, Artificial Sequence
  Synthetic
  misc_feature (20)..(20): n is a, c, g, or u
gcagcaggaugaagaggaanaug

SEQ ID NO: 104816 - RNA, 24 nt, Artificial Sequence
  Synthetic
  misc_feature (21)..(21): n is a, c, g, or u
agcagcaggaugaagaggaanaug

SEQ ID NO: 104817 - RNA, 18 nt, Artificial Sequence
  Synthetic
  misc_feature (15)..(15): n is a, c, g, or u
guaaugauuaacugnaug

SEQ ID NO: 104818 - RNA, 19 nt, Artificial Sequence
  Synthetic
  misc_feature (16)..(16): n is a, c, g, or u
aguaaugauuaacugnaug

SEQ ID NO: 104819 - RNA, 20 nt, Artificial Sequence
  Synthetic
  misc_feature (17)..(17): n is a, c, g, or u
aaguaaugauuaacugnaug

SEQ ID NO: 104820 - RNA, 21 nt, Artificial Sequence
  Synthetic
  misc_feature (18)..(18): n is a, c, g, or u
gaaguaaugauuaacugnaug

SEQ ID NO: 104821 - RNA, 22 nt, Artificial Sequence
  Synthetic
  misc_feature (1)..(1): n is a, c, g, or u
  misc_feature (19)..(19): n is a, c, g, or u
ngaaguaaugauuaacugnaug

SEQ ID NO: 104822 - RNA, 23 nt, Artificial Sequence
  Synthetic
  misc_feature (2)..(2): n is a, c, g, or u
  misc_feature (20)..(20): n is a, c, g, or u
ungaaguaaugauuaacugnaug

SEQ ID NO: 104823 - RNA, 24 nt, Artificial Sequence
  Synthetic
  misc_feature (3)..(3): n is a, c, g, or u
  misc_feature (21)..(21): n is a, c, g, or u
uungaaguaaugauuaacugnaug

SEQ ID NO: 104824 - RNA, 18 nt, Artificial Sequence
  Synthetic
gagaagauugacgauaug

SEQ ID NO: 104825 - RNA, 19 nt, Artificial Sequence
  Synthetic
cgagaagauugacgauaug

SEQ ID NO: 104826 - RNA, 20 nt, Artificial Sequence
  Synthetic
ucgagaagauugacgauaug

SEQ ID NO: 104827 - RNA, 21 nt, Artificial Sequence
  Synthetic
cucgagaagauugacgauaug

SEQ ID NO: 104828 - RNA, 22 nt, Artificial Sequence
  Synthetic
ccucgagaagauugacgauaug

SEQ ID NO: 104829 - RNA, 23 nt, Artificial Sequence
  Synthetic
uccucgagaagauugacgauaug

SEQ ID NO: 104830 - RNA, 24 nt, Artificial Sequence
  Synthetic
guccucgagaagauugacgauaug

SEQ ID NO: 104831 - RNA, 18 nt, Artificial Sequence
  Synthetic
  misc_feature (7)..(7): n is a, c, g, or u
uugccunagugcuguaug

SEQ ID NO: 104832 - RNA, 19 nt, Artificial Sequence
  Synthetic
  misc_feature (8)..(8): n is a, c, g, or u
cuugccunagugcuguaug

SEQ ID NO: 104833 - RNA, 20 nt, Artificial Sequence
  Synthetic
  misc_feature (9)..(9): n is a, c, g, or u
gcuugccunagugcuguaug

SEQ ID NO: 104834 - RNA, 21 nt, Artificial Sequence
  Synthetic
  misc_feature (10)..(10): n is a, c, g, or u
agcuugccunagugcuguaug

SEQ ID NO: 104835 - RNA, 22 nt, Artificial Sequence
  Synthetic
  misc_feature (11)..(11): n is a, c, g, or u
uagcuugccunagugcuguaug

SEQ ID NO: 104836 - RNA, 23 nt, Artificial Sequence
  Synthetic
  misc_feature (12)..(12): n is a, c, g, or u
auagcuugccunagugcuguaug

SEQ ID NO: 104837 - RNA, 24 nt, Artificial Sequence
  Synthetic
  misc_feature (13)..(13): n is a, c, g, or u
aauagcuugccunagugcuguaug

SEQ ID NO: 104838 - RNA, 18 nt, Artificial Sequence
  Synthetic
uccuuuuuucauuaacug

SEQ ID NO: 104839 - RNA, 19 nt, Artificial Sequence
  Synthetic
cuccuuuuuucauuaacug

SEQ ID NO: 104840 - RNA, 20 nt, Artificial Sequence
  Synthetic
ucuccuuuuuucauuaacug

SEQ ID NO: 104841 - RNA, 21 nt, Artificial Sequence
  Synthetic
aucuccuuuuuucauuaacug

SEQ ID NO: 104842 - RNA, 22 nt, Artificial Sequence
  Synthetic
aaucuccuuuuuucauuaacug

SEQ ID NO: 104843 - RNA, 23 nt, Artificial Sequence
  Synthetic
uaaucuccuuuuuucauuaacug

SEQ ID NO: 104844 - RNA, 24 nt, Artificial Sequence
  Synthetic
uuaaucuccuuuuuucauuaacug

SEQ ID NO: 104845 - RNA, 18 nt, Artificial Sequence
  Synthetic
aagcccuacgaaccacug

SEQ ID NO: 104846 - RNA, 19 nt, Artificial Sequence
  Synthetic
aaagcccuacgaaccacug

SEQ ID NO: 104847 - RNA, 20 nt, Artificial Sequence
  Synthetic
gaaagcccuacgaaccacug

SEQ ID NO: 104848 - RNA, 21 nt, Artificial Sequence
  Synthetic
ggaaagcccuacgaaccacug

SEQ ID NO: 104849 - RNA, 22 nt, Artificial Sequence
  Synthetic
gggaaagcccuacgaaccacug

SEQ ID NO: 104850 - RNA, 23 nt, Artificial Sequence
  Synthetic
ggggaaagcccuacgaaccacug

SEQ ID NO: 104851 - RNA, 24 nt, Artificial Sequence
  Synthetic
gggggaaagcccuacgaaccacug

SEQ ID NO: 104852 - RNA, 18 nt, Artificial Sequence
  Synthetic
gaccuugggcaagaccug

SEQ ID NO: 104853 - RNA, 19 nt, Artificial Sequence
  Synthetic
agaccuugggcaagaccug

SEQ ID NO: 104854 - RNA, 20 nt, Artificial Sequence
  Synthetic
aagaccuugggcaagaccug

SEQ ID NO: 104855 - RNA, 21 nt, Artificial Sequence
  Synthetic
uaagaccuugggcaagaccug

SEQ ID NO: 104856 - RNA, 22 nt, Artificial Sequence
  Synthetic
  misc_feature (1)..(1): n is a, c, g, or u
nuaagaccuugggcaagaccug

SEQ ID NO: 104857 - RNA, 23 nt, Artificial Sequence
  Synthetic
  misc_feature (2)..(2): n is a, c, g, or u
unuaagaccuugggcaagaccug

SEQ ID NO: 104858 - RNA, 24 nt, Artificial Sequence
  Synthetic
  misc_feature (3)..(3): n is a, c, g, or u
aunuaagaccuugggcaagaccug

SEQ ID NO: 104859 - RNA, 18 nt, Artificial Sequence
  Synthetic
cgagaaagugaaagccug

SEQ ID NO: 104860 - RNA, 19 nt, Artificial Sequence
  Synthetic
gcgagaaagugaaagccug

SEQ ID NO: 104861 - RNA, 20 nt, Artificial Sequence
  Synthetic
ggcgagaaagugaaagccug

SEQ ID NO: 104862 - RNA, 21 nt, Artificial Sequence
  Synthetic
uggcgagaaagugaaagccug

SEQ ID NO: 104863 - RNA, 22 nt, Artificial Sequence
  Synthetic
uuggcgagaaagugaaagccug

SEQ ID NO: 104864 - RNA, 23 nt, Artificial Sequence
  Synthetic
guuggcgagaaagugaaagccug

SEQ ID NO: 104865 - RNA, 24 nt, Artificial Sequence
  Synthetic
aguuggcgagaaagugaaagccug

SEQ ID NO: 104866 - RNA, 18 nt, Artificial Sequence
  Synthetic
ugcgagcaaaacaagcug

SEQ ID NO: 104867 - RNA, 19 nt, Artificial Sequence
  Synthetic
cugcgagcaaaacaagcug

SEQ ID NO: 104868 - RNA, 20 nt, Artificial Sequence
  Synthetic
gcugcgagcaaaacaagcug

SEQ ID NO: 104869 - RNA, 21 nt, Artificial Sequence
  Synthetic
ggcugcgagcaaaacaagcug

SEQ ID NO: 104870 - RNA, 22 nt, Artificial Sequence
  Synthetic
cggcugcgagcaaaacaagcug

SEQ ID NO: 104871 - RNA, 23 nt, Artificial Sequence
  Synthetic
ccggcugcgagcaaaacaagcug

SEQ ID NO: 104872 - RNA, 24 nt, Artificial Sequence
  Synthetic
accggcugcgagcaaaacaagcug

SEQ ID NO: 104873 - RNA, 18 nt, Artificial Sequence
  Synthetic
aaaaguugcauggugcug

SEQ ID NO: 104874 - RNA, 19 nt, Artificial Sequence
  Synthetic
aaaaaguugcauggugcug

SEQ ID NO: 104875 - RNA, 20 nt, Artificial Sequence
  Synthetic
gaaaaaguugcauggugcug

SEQ ID NO: 104876 - RNA, 21 nt, Artificial Sequence
  Synthetic
ugaaaaaguugcauggugcug

SEQ ID NO: 104877 - RNA, 22 nt, Artificial Sequence
  Synthetic
gugaaaaaguugcauggugcug

SEQ ID NO: 104878 - RNA, 23 nt, Artificial Sequence
  Synthetic
ggugaaaaaguugcauggugcug

SEQ ID NO: 104879 - RNA, 24 nt, Artificial Sequence
  Synthetic
aggugaaaaaguugcauggugcug

SEQ ID NO: 104880 - RNA, 18 nt, Artificial Sequence
  Synthetic
gauugagaccuucgucug

SEQ ID NO: 104881 - RNA, 19 nt, Artificial Sequence
  Synthetic
cgauugagaccuucgucug

SEQ ID NO: 104882 - RNA, 20 nt, Artificial Sequence
  Synthetic
gcgauugagaccuucgucug

SEQ ID NO: 104883 - RNA, 18 nt, Artificial Sequence
  Synthetic
acugaaagccaaacagug

SEQ ID NO: 104884 - RNA, 19 nt, Artificial Sequence
  Synthetic
aacugaaagccaaacagug

SEQ ID NO: 104885 - RNA, 20 nt, Artificial Sequence
  Synthetic
uaacugaaagccaaacagug

SEQ ID NO: 104886 - RNA, 21 nt, Artificial Sequence
  Synthetic
auaacugaaagccaaacagug

SEQ ID NO: 104887 - RNA, 22 nt, Artificial Sequence
  Synthetic
uauaacugaaagccaaacagug

SEQ ID NO: 104888 - RNA, 23 nt, Artificial Sequence
  Synthetic
auauaacugaaagccaaacagug

SEQ ID NO: 104889 - RNA, 24 nt, Artificial Sequence
  Synthetic
cauauaacugaaagccaaacagug

SEQ ID NO: 104890 - RNA, 18 nt, Artificial Sequence
  Synthetic
acaagagguuggugagug

SEQ ID NO: 104891 - RNA, 19 nt, Artificial Sequence
  Synthetic
gacaagagguuggugagug

SEQ ID NO: 104892 - RNA, 20 nt, Artificial Sequence
  Synthetic
ggacaagagguuggugagug

SEQ ID NO: 104893 - RNA, 21 nt, Artificial Sequence
  Synthetic
aggacaagagguuggugagug

SEQ ID NO: 104894 - RNA, 22 nt, Artificial Sequence
  Synthetic
gaggacaagagguuggugagug

SEQ ID NO: 104895 - RNA, 23 nt, Artificial Sequence
  Synthetic
ggaggacaagagguuggugagug

SEQ ID NO: 104896 - RNA, 24 nt, Artificial Sequence
  Synthetic
uggaggacaagagguuggugagug

SEQ ID NO: 104897 - RNA, 18 nt, Artificial Sequence
  Synthetic
  misc_feature (5)..(5): n is a, c, g, or u
uggunuccaugcgacgug

SEQ ID NO: 104898 - RNA, 19 nt, Artificial Sequence
  Synthetic
  misc_feature (6)..(6): n is a, c, g, or u
guggunuccaugcgacgug

SEQ ID NO: 104899 - RNA, 20 nt, Artificial Sequence
  Synthetic
  misc_feature (7)..(7): n is a, c, g, or u
gguggunuccaugcgacgug

SEQ ID NO: 104900 - RNA, 21 nt, Artificial Sequence
  Synthetic
  misc_feature (8)..(8): n is a, c, g, or u
cgguggunuccaugcgacgug

SEQ ID NO: 104901 - RNA, 22 nt, Artificial Sequence
  Synthetic
  misc_feature (9)..(9): n is a, c, g, or u
acgguggunuccaugcgacgug

SEQ ID NO: 104902 - RNA, 23 nt, Artificial Sequence
  Synthetic
  misc_feature (10)..(10): n is a, c, g, or u
cacgguggunuccaugcgacgug

SEQ ID NO: 104903 - RNA, 24 nt, Artificial Sequence
  Synthetic
  misc_feature (11)..(11): n is a, c, g, or u
ucacgguggunuccaugcgacgug

SEQ ID NO: 104904 - RNA, 18 nt, Artificial Sequence
  Synthetic
agagaggugcgccccgug

SEQ ID NO: 104905 - RNA, 19 nt, Artificial Sequence
  Synthetic
aagagaggugcgccccgug

SEQ ID NO: 104906 - RNA, 20 nt, Artificial Sequence
  Synthetic
aaagagaggugcgccccgug

SEQ ID NO: 104907 - RNA, 18 nt, Artificial Sequence
  Synthetic
uuacuucccacccaggug

SEQ ID NO: 104908 - RNA, 19 nt, Artificial Sequence
  Synthetic
auuacuucccacccaggug

SEQ ID NO: 104909 - RNA, 20 nt, Artificial Sequence
  Synthetic
aauuacuucccacccaggug

SEQ ID NO: 104910 - RNA, 21 nt, Artificial Sequence
  Synthetic
aaauuacuucccacccaggug

SEQ ID NO: 104911 - RNA, 22 nt, Artificial Sequence
  Synthetic
caaauuacuucccacccaggug

SEQ ID NO: 104912 - RNA, 23 nt, Artificial Sequence
  Synthetic
ccaaauuacuucccacccaggug

SEQ ID NO: 104913 - RNA, 24 nt, Artificial Sequence
  Synthetic
uccaaauuacuucccacccaggug

SEQ ID NO: 104914 - RNA, 18 nt, Artificial Sequence
  Synthetic
gaugauuaggcagaggug

SEQ ID NO: 104915 - RNA, 19 nt, Artificial Sequence
  Synthetic
agaugauuaggcagaggug

SEQ ID NO: 104916 - RNA, 20 nt, Artificial Sequence
  Synthetic
gagaugauuaggcagaggug

SEQ ID NO: 104917 - RNA, 21 nt, Artificial Sequence
  Synthetic
ugagaugauuaggcagaggug

SEQ ID NO: 104918 - RNA, 22 nt, Artificial Sequence
  Synthetic
augagaugauuaggcagaggug

SEQ ID NO: 104919 - RNA, 23 nt, Artificial Sequence
  Synthetic
caugagaugauuaggcagaggug

SEQ ID NO: 104920 - RNA, 24 nt, Artificial Sequence
  Synthetic
acaugagaugauuaggcagaggug

SEQ ID NO: 104921 - RNA, 18 nt, Artificial Sequence
  Synthetic
gacugucucuuagaggug

SEQ ID NO: 104922 - RNA, 19 nt, Artificial Sequence
  Synthetic
ugacugucucuuagaggug

SEQ ID NO: 104923 - RNA, 20 nt, Artificial Sequence
  Synthetic
augacugucucuuagaggug

SEQ ID NO: 104924 - RNA, 21 nt, Artificial Sequence
  Synthetic
gaugacugucucuuagaggug

SEQ ID NO: 104925 - RNA, 22 nt, Artificial Sequence
  Synthetic
ggaugacugucucuuagaggug

SEQ ID NO: 104926 - RNA, 23 nt, Artificial Sequence
  Synthetic
aggaugacugucucuuagaggug

SEQ ID NO: 104927 - RNA, 24 nt, Artificial Sequence
  Synthetic
gaggaugacugucucuuagaggug

SEQ ID NO: 104928 - RNA, 18 nt, Artificial Sequence
  Synthetic
  misc_feature (9)..(9): n is a, c, g, or u
uacagagcngaggcggug

SEQ ID NO: 104929 - RNA, 19 nt, Artificial Sequence
  Synthetic
  misc_feature (10)..(10): n is a, c, g, or u
auacagagcngaggcggug

SEQ ID NO: 104930 - RNA, 20 nt, Artificial Sequence
  Synthetic
  misc_feature (11)..(11): n is a, c, g, or u
gauacagagcngaggcggug

SEQ ID NO: 104931 - RNA, 21 nt, Artificial Sequence
  Synthetic
  misc_feature (12)..(12): n is a, c, g, or u
cgauacagagcngaggcggug

SEQ ID NO: 104932 - RNA, 22 nt, Artificial Sequence
  Synthetic
  misc_feature (13)..(13): n is a, c, g, or u
ccgauacagagcngaggcggug

SEQ ID NO: 104933 - RNA, 23 nt, Artificial Sequence
  Synthetic
  misc_feature (14)..(14): n is a, c, g, or u
cccgauacagagcngaggcggug

SEQ ID NO: 104934 - RNA, 24 nt, Artificial Sequence
  Synthetic
  misc_feature (15)..(15): n is a, c, g, or u
ucccgauacagagcngaggcggug

SEQ ID NO: 104935 - RNA, 18 nt, Artificial Sequence
  Synthetic
  misc_feature (1)..(1): n is a, c, g, or u
  misc_feature (4)..(4): n is a, c, g, or u
ngcnggguccaacuggug

SEQ ID NO: 104936 - RNA, 19 nt, Artificial Sequence
  Synthetic
  misc_feature (2)..(2): n is a, c, g, or u
  misc_feature (5)..(5): n is a, c, g, or u
angcnggguccaacuggug

SEQ ID NO: 104937 - RNA, 20 nt, Artificial Sequence
  Synthetic
  misc_feature (3)..(3): n is a, c, g, or u
  misc_feature (6)..(6): n is a, c, g, or u
aangcnggguccaacuggug

SEQ ID NO: 104938 - RNA, 21 nt, Artificial Sequence
  Synthetic
  misc_feature (4)..(4): n is a, c, g, or u
  misc_feature (7)..(7): n is a, c, g, or u
gaangcnggguccaacuggug

SEQ ID NO: 104939 - RNA, 22 nt, Artificial Sequence
  Synthetic
  misc_feature (5)..(5): n is a, c, g, or u
  misc_feature (8)..(8): n is a, c, g, or u
cgaangcnggguccaacuggug

SEQ ID NO: 104940 - RNA, 23 nt, Artificial Sequence
  Synthetic
  misc_feature (6)..(6): n is a, c, g, or u
  misc_feature (9)..(9): n is a, c, g, or u
ccgaangcnggguccaacuggug

SEQ ID NO: 104941 - RNA, 24 nt, Artificial Sequence
  Synthetic
  misc_feature (7)..(7): n is a, c, g, or u
  misc_feature (10)..(10): n is a, c, g, or u
uccgaangcnggguccaacuggug

SEQ ID NO: 104942 - RNA, 18 nt, Artificial Sequence
  Synthetic
aguugcauggugcuggug

SEQ ID NO: 104943 - RNA, 19 nt, Artificial Sequence
  Synthetic
aaguugcauggugcuggug

SEQ ID NO: 104944 - RNA, 20 nt, Artificial Sequence
  Synthetic
aaaguugcauggugcuggug

SEQ ID NO: 104945 - RNA, 21 nt, Artificial Sequence
  Synthetic
aaaaguugcauggugcuggug

SEQ ID NO: 104946 - RNA, 22 nt, Artificial Sequence
  Synthetic
aaaaaguugcauggugcuggug

SEQ ID NO: 104947 - RNA, 23 nt, Artificial Sequence
  Synthetic
gaaaaaguugcauggugcuggug

SEQ ID NO: 104948 - RNA, 24 nt, Artificial Sequence
  Synthetic
ugaaaaaguugcauggugcuggug

SEQ ID NO: 104949 - RNA, 18 nt, Artificial Sequence
  Synthetic
  misc_feature (2)..(2): n is a, c, g, or u
  misc_feature (5)..(5): n is a, c, g, or u
  misc_feature (8)..(8): n is a, c, g, or u
cnggnuanccacauugug

SEQ ID NO: 104950 - RNA, 19 nt, Artificial Sequence
  Synthetic
  misc_feature (3)..(3): n is a, c, g, or u
  misc_feature (6)..(6): n is a, c, g, or u
  misc_feature (9)..(9): n is a, c, g, or u
gcnggnuanccacauugug

SEQ ID NO: 104951 - RNA, 20 nt, Artificial Sequence
  Synthetic
  misc_feature (1)..(1): n is a, c, g, or u
  misc_feature (4)..(4): n is a, c, g, or u
  misc_feature (7)..(7): n is a, c, g, or u
  misc_feature (10)..(10): n is a, c, g, or u
ngcnggnuanccacauugug

SEQ ID NO: 104952 - RNA, 21 nt, Artificial Sequence
  Synthetic
  misc_feature (2)..(2): n is a, c, g, or u
  misc_feature (5)..(5): n is a, c, g, or u
  misc_feature (8)..(8): n is a, c, g, or u
  misc_feature (11)..(11): n is a, c, g, or u
angcnggnuanccacauugug

SEQ ID NO: 104953 - RNA, 22 nt, Artificial Sequence
  Synthetic
  misc_feature (3)..(3): n is a, c, g, or u
  misc_feature (6)..(6): n is a, c, g, or u
  misc_feature (9)..(9): n is a, c, g, or u
  misc_feature (12)..(12): n is a, c, g, or u
aangcnggnuanccacauugug

SEQ ID NO: 104954 - RNA, 23 nt, Artificial Sequence
  Synthetic
  misc_feature (1)..(1): n is a, c, g, or u
  misc_feature (4)..(4): n is a, c, g, or u
  misc_feature (7)..(7): n is a, c, g, or u
  misc_feature (10)..(10): n is a, c, g, or u
  misc_feature (13)..(13): n is a, c, g, or u
naangcnggnuanccacauugug

SEQ ID NO: 104955 - RNA, 24 nt, Artificial Sequence
  Synthetic
  misc_feature (2)..(2): n is a, c, g, or u
  misc_feature (5)..(5): n is a, c, g, or u
  misc_feature (8)..(8): n is a, c, g, or u
  misc_feature (11)..(11): n is a, c, g, or u
  misc_feature (14)..(14): n is a, c, g, or u
unaangcnggnuanccacauugug

SEQ ID NO: 104956 - RNA, 18 nt, Artificial Sequence
  Synthetic
gcucccccuagaaaauug

SEQ ID NO: 104957 - RNA, 19 nt, Artificial Sequence
  Synthetic
ugcucccccuagaaaauug

SEQ ID NO: 104958 - RNA, 20 nt, Artificial Sequence
  Synthetic
gugcucccccuagaaaauug

SEQ ID NO: 104959 - RNA, 21 nt, Artificial Sequence
  Synthetic
ggugcucccccuagaaaauug

SEQ ID NO: 104960 - RNA, 22 nt, Artificial Sequence
  Synthetic
gggugcucccccuagaaaauug

SEQ ID NO: 104961 - RNA, 23 nt, Artificial Sequence
  Synthetic
ugggugcucccccuagaaaauug

SEQ ID NO: 104962 - RNA, 24 nt, Artificial Sequence
  Synthetic
gugggugcucccccuagaaaauug

SEQ ID NO: 104963 - RNA, 18 nt, Artificial Sequence
  Synthetic
  misc_feature (1)..(1): n is a, c, g, or u
  misc_feature (4)..(4): n is a, c, g, or u
  misc_feature (7)..(7): n is a, c, g, or u
  misc_feature (10)..(10): n is a, c, g, or u
ngcnggnuanccacauug

SEQ ID NO: 104964 - RNA, 19 nt, Artificial Sequence
  Synthetic
  misc_feature (2)..(2): n is a, c, g, or u
  misc_feature (5)..(5): n is a, c, g, or u
  misc_feature (8)..(8): n is a, c, g, or u
  misc_feature (11)..(11): n is a, c, g, or u
angcnggnuanccacauug

SEQ ID NO: 104965 - RNA, 20 nt, Artificial Sequence
  Synthetic
  misc_feature (3)..(3): n is a, c, g, or u
  misc_feature (6)..(6): n is a, c, g, or u
  misc_feature (9)..(9): n is a, c, g, or u
  misc_feature (12)..(12): n is a, c, g, or u
aangcnggnuanccacauug

SEQ ID NO: 104966 - RNA, 21 nt, Artificial Sequence
  Synthetic
  misc_feature (1)..(1): n is a, c, g, or u
  misc_feature (4)..(4): n is a, c, g, or u
  misc_feature (7)..(7): n is a, c, g, or u
  misc_feature (10)..(10): n is a, c, g, or u
  misc_feature (13)..(13): n is a, c, g, or u
naangcnggnuanccacauug

SEQ ID NO: 104967 - RNA, 22 nt, Artificial Sequence
  Synthetic
  misc_feature (2)..(2): n is a, c, g, or u
  misc_feature (5)..(5): n is a, c, g, or u
  misc_feature (8)..(8): n is a, c, g, or u
  misc_feature (11)..(11): n is a, c, g, or u
  misc_feature (14)..(14): n is a, c, g, or u
unaangcnggnuanccacauug

SEQ ID NO: 104968 - RNA, 23 nt, Artificial Sequence
  Synthetic
  misc_feature (3)..(3): n is a, c, g, or u
  misc_feature (6)..(6): n is a, c, g, or u
  misc_feature (9)..(9): n is a, c, g, or u
  misc_feature (12)..(12): n is a, c, g, or u
  misc_feature (15)..(15): n is a, c, g, or u
aunaangcnggnuanccacauug

SEQ ID NO: 104969 - RNA, 24 nt, Artificial Sequence
  Synthetic
  misc_feature (4)..(4): n is a, c, g, or u
  misc_feature (7)..(7): n is a, c, g, or u
  misc_feature (10)..(10): n is a, c, g, or u
  misc_feature (13)..(13): n is a, c, g, or u
  misc_feature (16)..(16): n is a, c, g, or u
caunaangcnggnuanccacauug

SEQ ID NO: 104970 - RNA, 18 nt, Artificial Sequence
  Synthetic
cuuccugacugccgauug

SEQ ID NO: 104971 - RNA, 19 nt, Artificial Sequence
  Synthetic
ucuuccugacugccgauug

SEQ ID NO: 104972 - RNA, 20 nt, Artificial Sequence
  Synthetic
gucuuccugacugccgauug

SEQ ID NO: 104973 - RNA, 21 nt, Artificial Sequence
  Synthetic
ugucuuccugacugccgauug

SEQ ID NO: 104974 - RNA, 22 nt, Artificial Sequence
  Synthetic
cugucuuccugacugccgauug

SEQ ID NO: 104975 - RNA, 23 nt, Artificial Sequence
  Synthetic
gcugucuuccugacugccgauug

SEQ ID NO: 104976 - RNA, 24 nt, Artificial Sequence
  Synthetic
ggcugucuuccugacugccgauug

SEQ ID NO: 104977 - RNA, 18 nt, Artificial Sequence
  Synthetic
aagucccaaucuggauug

SEQ ID NO: 104978 - RNA, 19 nt, Artificial Sequence
  Synthetic
gaagucccaaucuggauug

SEQ ID NO: 104979 - RNA, 20 nt, Artificial Sequence
  Synthetic
ugaagucccaaucuggauug

SEQ ID NO: 104980 - RNA, 21 nt, Artificial Sequence
  Synthetic
uugaagucccaaucuggauug

SEQ ID NO: 104981 - RNA, 22 nt, Artificial Sequence
  Synthetic
guugaagucccaaucuggauug

SEQ ID NO: 104982 - RNA, 23 nt, Artificial Sequence
  Synthetic
gguugaagucccaaucuggauug

SEQ ID NO: 104983 - RNA, 24 nt, Artificial Sequence
  Synthetic
ggguugaagucccaaucuggauug

SEQ ID NO: 104984 - RNA, 18 nt, Artificial Sequence
  Synthetic
cuagacucugugguauug

SEQ ID NO: 104985 - RNA, 19 nt, Artificial Sequence
  Synthetic
ucuagacucugugguauug

SEQ ID NO: 104986 - RNA, 20 nt, Artificial Sequence
  Synthetic
gucuagacucugugguauug

SEQ ID NO: 104987 - RNA, 21 nt, Artificial Sequence
  Synthetic
agucuagacucugugguauug

SEQ ID NO: 104988 - RNA, 22 nt, Artificial Sequence
  Synthetic
gagucuagacucugugguauug

SEQ ID NO: 104989 - RNA, 23 nt, Artificial Sequence
  Synthetic
cgagucuagacucugugguauug

SEQ ID NO: 104990 - RNA, 24 nt, Artificial Sequence
  Synthetic
acgagucuagacucugugguauug

SEQ ID NO: 104991 - RNA, 18 nt, Artificial Sequence
  Synthetic
  misc_feature (8)..(8): n is a, c, g, or u
cucuuaunuaagaccuug

SEQ ID NO: 104992 - RNA, 19 nt, Artificial Sequence
  Synthetic
  misc_feature (9)..(9): n is a, c, g, or u
ccucuuaunuaagaccuug

SEQ ID NO: 104993 - RNA, 20 nt, Artificial Sequence
  Synthetic
  misc_feature (10)..(10): n is a, c, g, or u
uccucuuaunuaagaccuug

SEQ ID NO: 104994 - RNA, 21 nt, Artificial Sequence
  Synthetic
  misc_feature (11)..(11): n is a, c, g, or u
guccucuuaunuaagaccuug

SEQ ID NO: 104995 - RNA, 22 nt, Artificial Sequence
  Synthetic
  misc_feature (12)..(12): n is a, c, g, or u
aguccucuuaunuaagaccuug

SEQ ID NO: 104996 - RNA, 23 nt, Artificial Sequence
  Synthetic
  misc_feature (13)..(13): n is a, c, g, or u
gaguccucuuaunuaagaccuug

SEQ ID NO: 104997 - RNA, 24 nt, Artificial Sequence
  Synthetic
  misc_feature (14)..(14): n is a, c, g, or u
agaguccucuuaunuaagaccuug

SEQ ID NO: 104998 - RNA, 18 nt, Artificial Sequence
  Synthetic
  misc_feature (4)..(4): n is a, c, g, or u
auunguccccaugccuug

SEQ ID NO: 104999 - RNA, 19 nt, Artificial Sequence
  Synthetic
  misc_feature (5)..(5): n is a, c, g, or u
gauunguccccaugccuug

SEQ ID NO: 105000 - RNA, 20 nt, Artificial Sequence
  Synthetic
  misc_feature (6)..(6): n is a, c, g, or u
agauunguccccaugccuug

SEQ ID NO: 105001 - RNA, 21 nt, Artificial Sequence
  Synthetic
  misc_feature (7)..(7): n is a, c, g, or u
aagauunguccccaugccuug

SEQ ID NO: 105002 - RNA, 22 nt, Artificial Sequence
  Synthetic
  misc_feature (8)..(8): n is a, c, g, or u
aaagauunguccccaugccuug

SEQ ID NO: 105003 - RNA, 23 nt, Artificial Sequence
  Synthetic
  misc_feature (9)..(9): n is a, c, g, or u
gaaagauunguccccaugccuug

SEQ ID NO: 105004 - RNA, 24 nt, Artificial Sequence
  Synthetic
  misc_feature (10)..(10): n is a, c, g, or u
agaaagauunguccccaugccuug

SEQ ID NO: 105005 - RNA, 18 nt, Artificial Sequence
  Synthetic
  misc_feature (1)..(1): n is a, c, g, or u
  misc_feature (9)..(9): n is a, c, g, or u
ncuggccanugauccuug

SEQ ID NO: 105006 - RNA, 19 nt, Artificial Sequence
  Synthetic
  misc_feature (2)..(2): n is a, c, g, or u
  misc_feature (10)..(10): n is a, c, g, or u
cncuggccanugauccuug

SEQ ID NO: 105007 - RNA, 20 nt, Artificial Sequence
  Synthetic
  misc_feature (3)..(3): n is a, c, g, or u
  misc_feature (11)..(11): n is a, c, g, or u
ccncuggccanugauccuug

SEQ ID NO: 105008 - RNA, 21 nt, Artificial Sequence
  Synthetic
  misc_feature (4)..(4): n is a, c, g, or u
  misc_feature (12)..(12): n is a, c, g, or u
gccncuggccanugauccuug

SEQ ID NO: 105009 - RNA, 22 nt, Artificial Sequence
  Synthetic
  misc_feature (5)..(5): n is a, c, g, or u
  misc_feature (13)..(13): n is a, c, g, or u
ugccncuggccanugauccuug

SEQ ID NO: 105010 - RNA, 23 nt, Artificial Sequence
  Synthetic
  misc_feature (6)..(6): n is a, c, g, or u
  misc_feature (14)..(14): n is a, c, g, or u
uugccncuggccanugauccuug

SEQ ID NO: 105011 - RNA, 24 nt, Artificial Sequence
  Synthetic
  misc_feature (7)..(7): n is a, c, g, or u
  misc_feature (15)..(15): n is a, c, g, or u
uuugccncuggccanugauccuug

SEQ ID NO: 105012 - RNA, 18 nt, Artificial Sequence
  Synthetic
aaacauagagguuccuug

SEQ ID NO: 105013 - RNA, 19 nt, Artificial Sequence
  Synthetic
gaaacauagagguuccuug

SEQ ID NO: 105014 - RNA, 20 nt, Artificial Sequence
  Synthetic
ggaaacauagagguuccuug

SEQ ID NO: 105015 - RNA, 21 nt, Artificial Sequence
  Synthetic
gggaaacauagagguuccuug

SEQ ID NO: 105016 - RNA, 22 nt, Artificial Sequence
  Synthetic
agggaaacauagagguuccuug

SEQ ID NO: 105017 - RNA, 23 nt, Artificial Sequence
  Synthetic
gagggaaacauagagguuccuug

SEQ ID NO: 105018 - RNA, 24 nt, Artificial Sequence
  Synthetic
agagggaaacauagagguuccuug

SEQ ID NO: 105019 - RNA, 18 nt, Artificial Sequence
  Synthetic
  misc_feature (4)..(4): n is a, c, g, or u
gggnucuagcagagcuug

SEQ ID NO: 105020 - RNA, 19 nt, Artificial Sequence
  Synthetic
  misc_feature (5)..(5): n is a, c, g, or u
ugggnucuagcagagcuug

SEQ ID NO: 105021 - RNA, 20 nt, Artificial Sequence
  Synthetic
  misc_feature (6)..(6): n is a, c, g, or u
cugggnucuagcagagcuug

SEQ ID NO: 105022 - RNA, 21 nt, Artificial Sequence
  Synthetic
  misc_feature (7)..(7): n is a, c, g, or u
ucugggnucuagcagagcuug

SEQ ID NO: 105023 - RNA, 22 nt, Artificial Sequence
  Synthetic
  misc_feature (8)..(8): n is a, c, g, or u
cucugggnucuagcagagcuug

SEQ ID NO: 105024 - RNA, 23 nt, Artificial Sequence
  Synthetic
  misc_feature (9)..(9): n is a, c, g, or u
acucugggnucuagcagagcuug

SEQ ID NO: 105025 - RNA, 24 nt, Artificial Sequence
  Synthetic
  misc_feature (10)..(10): n is a, c, g, or u
cacucugggnucuagcagagcuug

SEQ ID NO: 105026 - RNA, 18 nt, Artificial Sequence
  Synthetic
acucccauaggaaucuug

SEQ ID NO: 105027 - RNA, 19 nt, Artificial Sequence
  Synthetic
cacucccauaggaaucuug

SEQ ID NO: 105028 - RNA, 20 nt, Artificial Sequence
  Synthetic
ccacucccauaggaaucuug

SEQ ID NO: 105029 - RNA, 21 nt, Artificial Sequence
  Synthetic
cccacucccauaggaaucuug

SEQ ID NO: 105030 - RNA, 22 nt, Artificial Sequence
  Synthetic
gcccacucccauaggaaucuug

SEQ ID NO: 105031 - RNA, 23 nt, Artificial Sequence
  Synthetic
ggcccacucccauaggaaucuug

SEQ ID NO: 105032 - RNA, 24 nt, Artificial Sequence
  Synthetic
aggcccacucccauaggaaucuug

SEQ ID NO: 105033 - RNA, 18 nt, Artificial Sequence
  Synthetic
gaaaggccuuguaaguug

SEQ ID NO: 105034 - RNA, 19 nt, Artificial Sequence
  Synthetic
agaaaggccuuguaaguug

SEQ ID NO: 105035 - RNA, 20 nt, Artificial Sequence
  Synthetic
cagaaaggccuuguaaguug

SEQ ID NO: 105036 - RNA, 21 nt, Artificial Sequence
  Synthetic
acagaaaggccuuguaaguug

SEQ ID NO: 105037 - RNA, 22 nt, Artificial Sequence
  Synthetic
cacagaaaggccuuguaaguug

SEQ ID NO: 105038 - RNA, 23 nt, Artificial Sequence
  Synthetic
acacagaaaggccuuguaaguug

SEQ ID NO: 105039 - RNA, 24 nt, Artificial Sequence
  Synthetic
uacacagaaaggccuuguaaguug

SEQ ID NO: 105040 - RNA, 18 nt, Artificial Sequence
  Synthetic
  misc_feature (12)..(12): n is a, c, g, or u
gugaaaccacanuaguug

SEQ ID NO: 105041 - RNA, 19 nt, Artificial Sequence
  Synthetic
  misc_feature (13)..(13): n is a, c, g, or u
ugugaaaccacanuaguug

SEQ ID NO: 105042 - RNA, 20 nt, Artificial Sequence
  Synthetic
  misc_feature (14)..(14): n is a, c, g, or u
augugaaaccacanuaguug

SEQ ID NO: 105043 - RNA, 21 nt, Artificial Sequence
  Synthetic
  misc_feature (15)..(15): n is a, c, g, or u
aaugugaaaccacanuaguug

SEQ ID NO: 105044 - RNA, 22 nt, Artificial Sequence
  Synthetic
  misc_feature (16)..(16): n is a, c, g, or u
aaaugugaaaccacanuaguug

SEQ ID NO: 105045 - RNA, 23 nt, Artificial Sequence
  Synthetic
  misc_feature (17)..(17): n is a, c, g, or u
gaaaugugaaaccacanuaguug

SEQ ID NO: 105046 - RNA, 24 nt, Artificial Sequence
  Synthetic
  misc_feature (18)..(18): n is a, c, g, or u
ggaaaugugaaaccacanuaguug

SEQ ID NO: 105047 - RNA, 18 nt, Artificial Sequence
  Synthetic
  misc_feature (7)..(7): n is a, c, g, or u
aaggganucaagauguug

SEQ ID NO: 105048 - RNA, 19 nt, Artificial Sequence
  Synthetic
  misc_feature (8)..(8): n is a, c, g, or u
aaaggganucaagauguug

SEQ ID NO: 105049 - RNA, 20 nt, Artificial Sequence
  Synthetic
  misc_feature (9)..(9): n is a, c, g, or u
aaaaggganucaagauguug

SEQ ID NO: 105050 - RNA, 21 nt, Artificial Sequence
  Synthetic
  misc_feature (10)..(10): n is a, c, g, or u
aaaaaggganucaagauguug

SEQ ID NO: 105051 - RNA, 22 nt, Artificial Sequence
  Synthetic
  misc_feature (11)..(11): n is a, c, g, or u
uaaaaaggganucaagauguug

SEQ ID NO: 105052 - RNA, 23 nt, Artificial Sequence
  Synthetic
  misc_feature (12)..(12): n is a, c, g, or u
guaaaaaggganucaagauguug

SEQ ID NO: 105053 - RNA, 24 nt, Artificial Sequence
  Synthetic
  misc_feature (13)..(13): n is a, c, g, or u
gguaaaaaggganucaagauguug

SEQ ID NO: 105054 - RNA, 18 nt, Artificial Sequence
  Synthetic
uaguuuccggaaguguug

SEQ ID NO: 105055 - RNA, 19 nt, Artificial Sequence
  Synthetic
guaguuuccggaaguguug

SEQ ID NO: 105056 - RNA, 20 nt, Artificial Sequence
  Synthetic
aguaguuuccggaaguguug

SEQ ID NO: 105057 - RNA, 21 nt, Artificial Sequence
  Synthetic
caguaguuuccggaaguguug

SEQ ID NO: 105058 - RNA, 22 nt, Artificial Sequence
  Synthetic
acaguaguuuccggaaguguug

SEQ ID NO: 105059 - RNA, 23 nt, Artificial Sequence
  Synthetic
aacaguaguuuccggaaguguug

SEQ ID NO: 105060 - RNA, 24 nt, Artificial Sequence
  Synthetic
caacaguaguuuccggaaguguug

SEQ ID NO: 105061 - RNA, 18 nt, Artificial Sequence
  Synthetic
  misc_feature (5)..(5): n is a, c, g, or u
  misc_feature (15)..(15): n is a, c, g, or u
gauanccaggacaanuug

SEQ ID NO: 105062 - RNA, 19 nt, Artificial Sequence
  Synthetic
  misc_feature (6)..(6): n is a, c, g, or u
  misc_feature (16)..(16): n is a, c, g, or u
cgauanccaggacaanuug

SEQ ID NO: 105063 - RNA, 20 nt, Artificial Sequence
  Synthetic
  misc_feature (7)..(7): n is a, c, g, or u
  misc_feature (17)..(17): n is a, c, g, or u
gcgauanccaggacaanuug

SEQ ID NO: 105064 - RNA, 21 nt, Artificial Sequence
  Synthetic
  misc_feature (8)..(8): n is a, c, g, or u
  misc_feature (18)..(18): n is a, c, g, or u
agcgauanccaggacaanuug

SEQ ID NO: 105065 - RNA, 22 nt, Artificial Sequence
  Synthetic
  misc_feature (9)..(9): n is a, c, g, or u
  misc_feature (19)..(19): n is a, c, g, or u
cagcgauanccaggacaanuug

SEQ ID NO: 105066 - RNA, 23 nt, Artificial Sequence
  Synthetic
  misc_feature (10)..(10): n is a, c, g, or u
  misc_feature (20)..(20): n is a, c, g, or u
ccagcgauanccaggacaanuug

SEQ ID NO: 105067 - RNA, 24 nt, Artificial Sequence
  Synthetic
  misc_feature (11)..(11): n is a, c, g, or u
  misc_feature (21)..(21): n is a, c, g, or u
uccagcgauanccaggacaanuug

SEQ ID NO: 105068 - RNA, 18 nt, Artificial Sequence
  Synthetic
  misc_feature (3)..(3): n is a, c, g, or u
ucnaagggcaaauauuug

SEQ ID NO: 105069 - RNA, 19 nt, Artificial Sequence
  Synthetic
  misc_feature (1)..(1): n is a, c, g, or u
  misc_feature (4)..(4): n is a, c, g, or u
nucnaagggcaaauauuug

SEQ ID NO: 105070 - RNA, 20 nt, Artificial Sequence
  Synthetic
  misc_feature (2)..(2): n is a, c, g, or u
  misc_feature (5)..(5): n is a, c, g, or u
unucnaagggcaaauauuug

SEQ ID NO: 105071 - RNA, 21 nt, Artificial Sequence
  Synthetic
  misc_feature (3)..(3): n is a, c, g, or u
  misc_feature (6)..(6): n is a, c, g, or u
uunucnaagggcaaauauuug

SEQ ID NO: 105072 - RNA, 22 nt, Artificial Sequence
  Synthetic
  misc_feature (4)..(4): n is a, c, g, or u
  misc_feature (7)..(7): n is a, c, g, or u
uuunucnaagggcaaauauuug

SEQ ID NO: 105073 - RNA, 23 nt, Artificial Sequence
  Synthetic
  misc_feature (5)..(5): n is a, c, g, or u
  misc_feature (8)..(8): n is a, c, g, or u
cuuunucnaagggcaaauauuug

SEQ ID NO: 105074 - RNA, 24 nt, Artificial Sequence
  Synthetic
  misc_feature (6)..(6): n is a, c, g, or u
  misc_feature (9)..(9): n is a, c, g, or u
ccuuunucnaagggcaaauauuug

SEQ ID NO: 105075 - RNA, 18 nt, Artificial Sequence
  Synthetic
augccuugucgagguuug

SEQ ID NO: 105076 - RNA, 19 nt, Artificial Sequence
  Synthetic
caugccuugucgagguuug

SEQ ID NO: 105077 - RNA, 20 nt, Artificial Sequence
  Synthetic
ccaugccuugucgagguuug

SEQ ID NO: 105078 - RNA, 21 nt, Artificial Sequence
  Synthetic
cccaugccuugucgagguuug

SEQ ID NO: 105079 - RNA, 22 nt, Artificial Sequence
  Synthetic
ccccaugccuugucgagguuug

SEQ ID NO: 105080 - RNA, 23 nt, Artificial Sequence
  Synthetic
uccccaugccuugucgagguuug

SEQ ID NO: 105081 - RNA, 24 nt, Artificial Sequence
  Synthetic
guccccaugccuugucgagguuug

SEQ ID NO: 105082 - RNA, 18 nt, Artificial Sequence
  Synthetic
  misc_feature (11)..(11): n is a, c, g, or u
uggggacugcnaauuuug

SEQ ID NO: 105083 - RNA, 19 nt, Artificial Sequence
  Synthetic
  misc_feature (12)..(12): n is a, c, g, or u
uuggggacugcnaauuuug

SEQ ID NO: 105084 - RNA, 20 nt, Artificial Sequence
  Synthetic
  misc_feature (13)..(13): n is a, c, g, or u
guuggggacugcnaauuuug

SEQ ID NO: 105085 - RNA, 21 nt, Artificial Sequence
  Synthetic
  misc_feature (14)..(14): n is a, c, g, or u
gguuggggacugcnaauuuug

SEQ ID NO: 105086 - RNA, 22 nt, Artificial Sequence
  Synthetic
  misc_feature (15)..(15): n is a, c, g, or u
agguuggggacugcnaauuuug

SEQ ID NO: 105087 - RNA, 23 nt, Artificial Sequence
  Synthetic
  misc_feature (16)..(16): n is a, c, g, or u
gagguuggggacugcnaauuuug

SEQ ID NO: 105088 - RNA, 24 nt, Artificial Sequence
  Synthetic
  misc_feature (17)..(17): n is a, c, g, or u
ggagguuggggacugcnaauuuug

SEQ ID NO: 105089 - RNA, 18 nt, Artificial Sequence
  Synthetic
uuccguccgaagguuuug

SEQ ID NO: 105090 - RNA, 19 nt, Artificial Sequence
  Synthetic
uuuccguccgaagguuuug

SEQ ID NO: 105091 - RNA, 20 nt, Artificial Sequence
  Synthetic
  misc_feature (1)..(1): n is a, c, g, or u
nuuuccguccgaagguuuug

SEQ ID NO: 105092 - RNA, 21 nt, Artificial Sequence
  Synthetic
  misc_feature (2)..(2): n is a, c, g, or u
anuuuccguccgaagguuuug

SEQ ID NO: 105093 - RNA, 22 nt, Artificial Sequence
  Synthetic
  misc_feature (3)..(3): n is a, c, g, or u
canuuuccguccgaagguuuug

SEQ ID NO: 105094 - RNA, 23 nt, Artificial Sequence
  Synthetic
  misc_feature (4)..(4): n is a, c, g, or u
gcanuuuccguccgaagguuuug

SEQ ID NO: 105095 - RNA, 24 nt, Artificial Sequence
  Synthetic
  misc_feature (5)..(5): n is a, c, g, or u
ugcanuuuccguccgaagguuuug

SEQ ID NO: 105096 - RNA, 18 nt, Artificial Sequence
  Synthetic
  misc_feature (18)..(18): n is a, c, g, or u
gagccaccagcaggaaan

SEQ ID NO: 105097 - RNA, 19 nt, Artificial Sequence
  Synthetic
  misc_feature (19)..(19): n is a, c, g, or u
ggagccaccagcaggaaan

SEQ ID NO: 105098 - RNA, 20 nt, Artificial Sequence
  Synthetic
  misc_feature (20)..(20): n is a, c, g, or u
uggagccaccagcaggaaan

SEQ ID NO: 105099 - RNA, 21 nt, Artificial Sequence
  Synthetic
  misc_feature (21)..(21): n is a, c, g, or u
cuggagccaccagcaggaaan

SEQ ID NO: 105100 - RNA, 22 nt, Artificial Sequence
  Synthetic
  misc_feature (22)..(22): n is a, c, g, or u
acuggagccaccagcaggaaan

SEQ ID NO: 105101 - RNA, 23 nt, Artificial Sequence
  Synthetic
  misc_feature (23)..(23): n is a, c, g, or u
aacuggagccaccagcaggaaan

SEQ ID NO: 105102 - RNA, 24 nt, Artificial Sequence
  Synthetic
  misc_feature (24)..(24): n is a, c, g, or u
gaacuggagccaccagcaggaaan

SEQ ID NO: 105103 - RNA, 18 nt, Artificial Sequence
  Synthetic
  misc_feature (11)..(11): n is a, c, g, or u
  misc_feature (18)..(18): n is a, c, g, or u
aaaugaaugunaggaaan

SEQ ID NO: 105104 - RNA, 19 nt, Artificial Sequence
  Synthetic
  misc_feature (1)..(1): n is a, c, g, or u
  misc_feature (12)..(12): n is a, c, g, or u
  misc_feature (19)..(19): n is a, c, g, or u
naaaugaaugunaggaaan

SEQ ID NO: 105105 - RNA, 20 nt, Artificial Sequence
  Synthetic
  misc_feature (1)..(2): n is a, c, g, or u
  misc_feature (13)..(13): n is a, c, g, or u
  misc_feature (20)..(20): n is a, c, g, or u
nnaaaugaaugunaggaaan

SEQ ID NO: 105106 - RNA, 21 nt, Artificial Sequence
  Synthetic
  misc_feature (2)..(3): n is a, c, g, or u
  misc_feature (14)..(14): n is a, c, g, or u
  misc_feature (21)..(21): n is a, c, g, or u
unnaaaugaaugunaggaaan

SEQ ID NO: 105107 - RNA, 22 nt, Artificial Sequence
  Synthetic
  misc_feature (1)..(1): n is a, c, g, or u
  misc_feature (3)..(4): n is a, c, g, or u
  misc_feature (15)..(15): n is a, c, g, or u
  misc_feature (22)..(22): n is a, c, g, or u
nunnaaaugaaugunaggaaan

SEQ ID NO: 105108 - RNA, 23 nt, Artificial Sequence
  Synthetic
  misc_feature (2)..(2): n is a, c, g, or u
  misc_feature (4)..(5): n is a, c, g, or u
  misc_feature (16)..(16): n is a, c, g, or u
  misc_feature (23)..(23): n is a, c, g, or u
cnunnaaaugaaugunaggaaan

SEQ ID NO: 105109 - RNA, 24 nt, Artificial Sequence
  Synthetic
  misc_feature (3)..(3): n is a, c, g, or u
  misc_feature (5)..(6): n is a, c, g, or u
  misc_feature (17)..(17): n is a, c, g, or u
  misc_feature (24)..(24): n is a, c, g, or u
ucnunnaaaugaaugunaggaaan

SEQ ID NO: 105110 - RNA, 18 nt, Artificial Sequence
  Synthetic
  misc_feature (8)..(8): n is a, c, g, or u
  misc_feature (18)..(18): n is a, c, g, or u
agcgauanccaggacaan

SEQ ID NO: 105111 - RNA, 19 nt, Artificial Sequence
  Synthetic
  misc_feature (9)..(9): n is a, c, g, or u
  misc_feature (19)..(19): n is a, c, g, or u
cagcgauanccaggacaan

SEQ ID NO: 105112 - RNA, 20 nt, Artificial Sequence
  Synthetic
  misc_feature (10)..(10): n is a, c, g, or u
  misc_feature (20)..(20): n is a, c, g, or u
ccagcgauanccaggacaan

SEQ ID NO: 105113 - RNA, 21 nt, Artificial Sequence
  Synthetic
  misc_feature (11)..(11): n is a, c, g, or u
  misc_feature (21)..(21): n is a, c, g, or u
uccagcgauanccaggacaan

SEQ ID NO: 105114 - RNA, 22 nt, Artificial Sequence
  Synthetic
  misc_feature (12)..(12): n is a, c, g, or u
  misc_feature (22)..(22): n is a, c, g, or u
auccagcgauanccaggacaan

SEQ ID NO: 105115 - RNA, 23 nt, Artificial Sequence
  Synthetic
  misc_feature (13)..(13): n is a, c, g, or u
  misc_feature (23)..(23): n is a, c, g, or u
cauccagcgauanccaggacaan

SEQ ID NO: 105116 - RNA, 24 nt, Artificial Sequence
  Synthetic
  misc_feature (14)..(14): n is a, c, g, or u
  misc_feature (24)..(24): n is a, c, g, or u
acauccagcgauanccaggacaan

SEQ ID NO: 105117 - RNA, 18 nt, Artificial Sequence
  Synthetic
  misc_feature (6)..(6): n is a, c, g, or u
  misc_feature (18)..(18): n is a, c, g, or u
uuuganuuggcuccgaan

SEQ ID NO: 105118 - RNA, 19 nt, Artificial Sequence
  Synthetic
  misc_feature (7)..(7): n is a, c, g, or u
  misc_feature (19)..(19): n is a, c, g, or u
guuuganuuggcuccgaan

SEQ ID NO: 105119 - RNA, 20 nt, Artificial Sequence
  Synthetic
  misc_feature (8)..(8): n is a, c, g, or u
  misc_feature (20)..(20): n is a, c, g, or u
uguuuganuuggcuccgaan

SEQ ID NO: 105120 - RNA, 21 nt, Artificial Sequence
  Synthetic
  misc_feature (9)..(9): n is a, c, g, or u
  misc_feature (21)..(21): n is a, c, g, or u
uuguuuganuuggcuccgaan

SEQ ID NO: 105121 - RNA, 22 nt, Artificial Sequence
  Synthetic
  misc_feature (10)..(10): n is a, c, g, or u
  misc_feature (22)..(22): n is a, c, g, or u
auuguuuganuuggcuccgaan

SEQ ID NO: 105122 - RNA, 23 nt, Artificial Sequence
  Synthetic
  misc_feature (11)..(11): n is a, c, g, or u
  misc_feature (23)..(23): n is a, c, g, or u
gauuguuuganuuggcuccgaan

SEQ ID NO: 105123 - RNA, 24 nt, Artificial Sequence
  Synthetic
  misc_feature (12)..(12): n is a, c, g, or u
  misc_feature (24)..(24): n is a, c, g, or u
ggauuguuuganuuggcuccgaan

SEQ ID NO: 105124 - RNA, 18 nt, Artificial Sequence
  Synthetic
  misc_feature (18)..(18): n is a, c, g, or u
auuacauaucccaugaan

SEQ ID NO: 105125 - RNA, 19 nt, Artificial Sequence
  Synthetic
  misc_feature (19)..(19): n is a, c, g, or u
aauuacauaucccaugaan

SEQ ID NO: 105126 - RNA, 20 nt, Artificial Sequence
  Synthetic
  misc_feature (20)..(20): n is a, c, g, or u
caauuacauaucccaugaan

SEQ ID NO: 105127 - RNA, 21 nt, Artificial Sequence
  Synthetic
  misc_feature (21)..(21): n is a, c, g, or u
ccaauuacauaucccaugaan

SEQ ID NO: 105128 - RNA, 22 nt, Artificial Sequence
  Synthetic
  misc_feature (22)..(22): n is a, c, g, or u
uccaauuacauaucccaugaan

SEQ ID NO: 105129 - RNA, 23 nt, Artificial Sequence
  Synthetic
  misc_feature (23)..(23): n is a, c, g, or u
uuccaauuacauaucccaugaan

SEQ ID NO: 105130 - RNA, 24 nt, Artificial Sequence
  Synthetic
  misc_feature (24)..(24): n is a, c, g, or u
cuuccaauuacauaucccaugaan

SEQ ID NO: 105131 - RNA, 18 nt, Artificial Sequence
  Synthetic
  misc_feature (6)..(6): n is a, c, g, or u
  misc_feature (15)..(15): n is a, c, g, or u
  misc_feature (18)..(18): n is a, c, g, or u
gcauanaaaggcaunaan

SEQ ID NO: 105132 - RNA, 19 nt, Artificial Sequence
  Synthetic
  misc_feature (7)..(7): n is a, c, g, or u
  misc_feature (16)..(16): n is a, c, g, or u
  misc_feature (19)..(19): n is a, c, g, or u
ugcauanaaaggcaunaan

SEQ ID NO: 105133 - RNA, 20 nt, Artificial Sequence
  Synthetic
  misc_feature (8)..(8): n is a, c, g, or u
  misc_feature (17)..(17): n is a, c, g, or u
  misc_feature (20)..(20): n is a, c, g, or u
augcauanaaaggcaunaan

SEQ ID NO: 105134 - RNA, 21 nt, Artificial Sequence
  Synthetic
  misc_feature (9)..(9): n is a, c, g, or u
  misc_feature (18)..(18): n is a, c, g, or u
  misc_feature (21)..(21): n is a, c, g, or u
caugcauanaaaggcaunaan

SEQ ID NO: 105135 - RNA, 22 nt, Artificial Sequence
  Synthetic
  misc_feature (10)..(10): n is a, c, g, or u
  misc_feature (19)..(19): n is a, c, g, or u
  misc_feature (22)..(22): n is a, c, g, or u
acaugcauanaaaggcaunaan

SEQ ID NO: 105136 - RNA, 23 nt, Artificial Sequence
  Synthetic
  misc_feature (11)..(11): n is a, c, g, or u
  misc_feature (20)..(20): n is a, c, g, or u
  misc_feature (23)..(23): n is a, c, g, or u
uacaugcauanaaaggcaunaan

SEQ ID NO: 105137 - RNA, 24 nt, Artificial Sequence
  Synthetic
  misc_feature (12)..(12): n is a, c, g, or u
  misc_feature (21)..(21): n is a, c, g, or u
  misc_feature (24)..(24): n is a, c, g, or u
auacaugcauanaaaggcaunaan

SEQ ID NO: 105138 - RNA, 18 nt, Artificial Sequence
  Synthetic
  misc_feature (18)..(18): n is a, c, g, or u
auccaguuggcagcacan

SEQ ID NO: 105139 - RNA, 19 nt, Artificial Sequence
  Synthetic
  misc_feature (19)..(19): n is a, c, g, or u
gauccaguuggcagcacan

SEQ ID NO: 105140 - RNA, 20 nt, Artificial Sequence
  Synthetic
  misc_feature (20)..(20): n is a, c, g, or u
ggauccaguuggcagcacan

SEQ ID NO: 105141 - RNA, 21 nt, Artificial Sequence
  Synthetic
  misc_feature (21)..(21): n is a, c, g, or u
aggauccaguuggcagcacan

SEQ ID NO: 105142 - RNA, 22 nt, Artificial Sequence
  Synthetic
  misc_feature (22)..(22): n is a, c, g, or u
caggauccaguuggcagcacan

SEQ ID NO: 105143 - RNA, 23 nt, Artificial Sequence
  Synthetic
  misc_feature (23)..(23): n is a, c, g, or u
gcaggauccaguuggcagcacan

SEQ ID NO: 105144 - RNA, 24 nt, Artificial Sequence
  Synthetic
  misc_feature (24)..(24): n is a, c, g, or u
cgcaggauccaguuggcagcacan

SEQ ID NO: 105145 - RNA, 18 nt, Artificial Sequence
  Synthetic
  misc_feature (3)..(3): n is a, c, g, or u
  misc_feature (18)..(18): n is a, c, g, or u
aangagggaguuugccan

SEQ ID NO: 105146 - RNA, 19 nt, Artificial Sequence
  Synthetic
  misc_feature (4)..(4): n is a, c, g, or u
  misc_feature (19)..(19): n is a, c, g, or u
aaangagggaguuugccan

SEQ ID NO: 105147 - RNA, 20 nt, Artificial Sequence
  Synthetic
  misc_feature (5)..(5): n is a, c, g, or u
  misc_feature (20)..(20): n is a, c, g, or u
gaaangagggaguuugccan

SEQ ID NO: 105148 - RNA, 21 nt, Artificial Sequence
  Synthetic
  misc_feature (6)..(6): n is a, c, g, or u
  misc_feature (21)..(21): n is a, c, g, or u
ggaaangagggaguuugccan

SEQ ID NO: 105149 - RNA, 22 nt, Artificial Sequence
  Synthetic
  misc_feature (7)..(7): n is a, c, g, or u
  misc_feature (22)..(22): n is a, c, g, or u
aggaaangagggaguuugccan

SEQ ID NO: 105150 - RNA, 23 nt, Artificial Sequence
  Synthetic
  misc_feature (1)..(1): n is a, c, g, or u
  misc_feature (8)..(8): n is a, c, g, or u
  misc_feature (23)..(23): n is a, c, g, or u
naggaaangagggaguuugccan

SEQ ID NO: 105151 - RNA, 24 nt, Artificial Sequence
  Synthetic
  misc_feature (2)..(2): n is a, c, g, or u
  misc_feature (9)..(9): n is a, c, g, or u
  misc_feature (24)..(24): n is a, c, g, or u
unaggaaangagggaguuugccan

SEQ ID NO: 105152 - RNA, 18 nt, Artificial Sequence
  Synthetic
  misc_feature (18)..(18): n is a, c, g, or u
ucggccggaacggcagan

SEQ ID NO: 105153 - RNA, 19 nt, Artificial Sequence
  Synthetic
  misc_feature (19)..(19): n is a, c, g, or u
gucggccggaacggcagan

SEQ ID NO: 105154 - RNA, 20 nt, Artificial Sequence
  Synthetic
  misc_feature (20)..(20): n is a, c, g, or u
ggucggccggaacggcagan

SEQ ID NO: 105155 - RNA, 21 nt, Artificial Sequence
  Synthetic
  misc_feature (21)..(21): n is a, c, g, or u
uggucggccggaacggcagan

SEQ ID NO: 105156 - RNA, 22 nt, Artificial Sequence
  Synthetic
  misc_feature (22)..(22): n is a, c, g, or u
guggucggccggaacggcagan

SEQ ID NO: 105157 - RNA, 23 nt, Artificial Sequence
  Synthetic
  misc_feature (23)..(23): n is a, c, g, or u
cguggucggccggaacggcagan

SEQ ID NO: 105158 - RNA, 24 nt, Artificial Sequence
  Synthetic
  misc_feature (24)..(24): n is a, c, g, or u
ccguggucggccggaacggcagan

SEQ ID NO: 105159 - RNA, 18 nt, Artificial Sequence
  Synthetic
  misc_feature (5)..(5): n is a, c, g, or u
  misc_feature (18)..(18): n is a, c, g, or u
auagngguaaaaagggan

SEQ ID NO: 105160 - RNA, 19 nt, Artificial Sequence
  Synthetic
  misc_feature (6)..(6): n is a, c, g, or u
  misc_feature (19)..(19): n is a, c, g, or u
aauagngguaaaaagggan

SEQ ID NO: 105161 - RNA, 20 nt, Artificial Sequence
  Synthetic
  misc_feature (7)..(7): n is a, c, g, or u
  misc_feature (20)..(20): n is a, c, g, or u
uaauagngguaaaaagggan

SEQ ID NO: 105162 - RNA, 21 nt, Artificial Sequence
  Synthetic
  misc_feature (8)..(8): n is a, c, g, or u
  misc_feature (21)..(21): n is a, c, g, or u
guaauagngguaaaaagggan

SEQ ID NO: 105163 - RNA, 22 nt, Artificial Sequence
  Synthetic
  misc_feature (9)..(9): n is a, c, g, or u
  misc_feature (22)..(22): n is a, c, g, or u
gguaauagngguaaaaagggan

SEQ ID NO: 105164 - RNA, 23 nt, Artificial Sequence
  Synthetic
  misc_feature (10)..(10): n is a, c, g, or u
  misc_feature (23)..(23): n is a, c, g, or u
ugguaauagngguaaaaagggan

SEQ ID NO: 105165 - RNA, 24 nt, Artificial Sequence
  Synthetic
  misc_feature (11)..(11): n is a, c, g, or u
  misc_feature (24)..(24): n is a, c, g, or u
uugguaauagngguaaaaagggan

SEQ ID NO: 105166 - RNA, 18 nt, Artificial Sequence
  Synthetic
  misc_feature (2)..(2): n is a, c, g, or u
  misc_feature (18)..(18): n is a, c, g, or u
gnuuguauacaugcauan

SEQ ID NO: 105167 - RNA, 19 nt, Artificial Sequence
  Synthetic
  misc_feature (3)..(3): n is a, c, g, or u
  misc_feature (19)..(19): n is a, c, g, or u
agnuuguauacaugcauan

SEQ ID NO: 105168 - RNA, 20 nt, Artificial Sequence
  Synthetic
  misc_feature (4)..(4): n is a, c, g, or u
  misc_feature (20)..(20): n is a, c, g, or u
uagnuuguauacaugcauan

SEQ ID NO: 105169 - RNA, 21 nt, Artificial Sequence
  Synthetic
  misc_feature (5)..(5): n is a, c, g, or u
  misc_feature (21)..(21): n is a, c, g, or u
uuagnuuguauacaugcauan

SEQ ID NO: 105170 - RNA, 22 nt, Artificial Sequence
  Synthetic
  misc_feature (6)..(6): n is a, c, g, or u
  misc_feature (22)..(22): n is a, c, g, or u
cuuagnuuguauacaugcauan

SEQ ID NO: 105171 - RNA, 23 nt, Artificial Sequence
  Synthetic
  misc_feature (7)..(7): n is a, c, g, or u
  misc_feature (23)..(23): n is a, c, g, or u
gcuuagnuuguauacaugcauan

SEQ ID NO: 105172 - RNA, 24 nt, Artificial Sequence
  Synthetic
  misc_feature (8)..(8): n is a, c, g, or u
  misc_feature (24)..(24): n is a, c, g, or u
ugcuuagnuuguauacaugcauan

SEQ ID NO: 105173 - RNA, 18 nt, Artificial Sequence
  Synthetic
  misc_feature (18)..(18): n is a, c, g, or u
agacacauccagcgauan

SEQ ID NO: 105174 - RNA, 19 nt, Artificial Sequence
  Synthetic
  misc_feature (19)..(19): n is a, c, g, or u
cagacacauccagcgauan

SEQ ID NO: 105175 - RNA, 20 nt, Artificial Sequence
  Synthetic
  misc_feature (20)..(20): n is a, c, g, or u
gcagacacauccagcgauan

SEQ ID NO: 105176 - RNA, 21 nt, Artificial Sequence
  Synthetic
  misc_feature (21)..(21): n is a, c, g, or u
cgcagacacauccagcgauan

SEQ ID NO: 105177 - RNA, 22 nt, Artificial Sequence
  Synthetic
  misc_feature (22)..(22): n is a, c, g, or u
ccgcagacacauccagcgauan

SEQ ID NO: 105178 - RNA, 23 nt, Artificial Sequence
  Synthetic
  misc_feature (23)..(23): n is a, c, g, or u
gccgcagacacauccagcgauan

SEQ ID NO: 105179 - RNA, 24 nt, Artificial Sequence
  Synthetic
  misc_feature (24)..(24): n is a, c, g, or u
cgccgcagacacauccagcgauan

SEQ ID NO: 105180 - RNA, 18 nt, Artificial Sequence
  Synthetic
  misc_feature (15)..(15): n is a, c, g, or u
  misc_feature (18)..(18): n is a, c, g, or u
caguuggcagcacanccn

SEQ ID NO: 105181 - RNA, 19 nt, Artificial Sequence
  Synthetic
  misc_feature (16)..(16): n is a, c, g, or u
  misc_feature (19)..(19): n is a, c, g, or u
ccaguuggcagcacanccn

SEQ ID NO: 105182 - RNA, 20 nt, Artificial Sequence
  Synthetic
  misc_feature (17)..(17): n is a, c, g, or u
  misc_feature (20)..(20): n is a, c, g, or u
uccaguuggcagcacanccn

SEQ ID NO: 105183 - RNA, 21 nt, Artificial Sequence
  Synthetic
  misc_feature (18)..(18): n is a, c, g, or u
  misc_feature (21)..(21): n is a, c, g, or u
auccaguuggcagcacanccn

SEQ ID NO: 105184 - RNA, 22 nt, Artificial Sequence
  Synthetic
  misc_feature (19)..(19): n is a, c, g, or u
  misc_feature (22)..(22): n is a, c, g, or u
gauccaguuggcagcacanccn

SEQ ID NO: 105185 - RNA, 23 nt, Artificial Sequence
  Synthetic
  misc_feature (20)..(20): n is a, c, g, or u
  misc_feature (23)..(23): n is a, c, g, or u
ggauccaguuggcagcacanccn

SEQ ID NO: 105186 - RNA, 24 nt, Artificial Sequence
  Synthetic
  misc_feature (21)..(21): n is a, c, g, or u
  misc_feature (24)..(24): n is a, c, g, or u
aggauccaguuggcagcacanccn

SEQ ID NO: 105187 - RNA, 18 nt, Artificial Sequence
  Synthetic
  misc_feature (18)..(18): n is a, c, g, or u
uuugguggucuguaagcn

SEQ ID NO: 105188 - RNA, 19 nt, Artificial Sequence
  Synthetic
  misc_feature (19)..(19): n is a, c, g, or u
auuugguggucuguaagcn

SEQ ID NO: 105189 - RNA, 20 nt, Artificial Sequence
  Synthetic
  misc_feature (20)..(20): n is a, c, g, or u
cauuugguggucuguaagcn

SEQ ID NO: 105190 - RNA, 21 nt, Artificial Sequence
  Synthetic
  misc_feature (21)..(21): n is a, c, g, or u
gcauuugguggucuguaagcn

SEQ ID NO: 105191 - RNA, 22 nt, Artificial Sequence
  Synthetic
  misc_feature (22)..(22): n is a, c, g, or u
ggcauuugguggucuguaagcn

SEQ ID NO: 105192 - RNA, 23 nt, Artificial Sequence
  Synthetic
  misc_feature (23)..(23): n is a, c, g, or u
gggcauuugguggucuguaagcn

SEQ ID NO: 105193 - RNA, 24 nt, Artificial Sequence
  Synthetic
  misc_feature (24)..(24): n is a, c, g, or u
ggggcauuugguggucuguaagcn

SEQ ID NO: 105194 - RNA, 18 nt, Artificial Sequence
  Synthetic
  misc_feature (18)..(18): n is a, c, g, or u
cauuguguaaaaggggcn

SEQ ID NO: 105195 - RNA, 19 nt, Artificial Sequence
  Synthetic
  misc_feature (19)..(19): n is a, c, g, or u
acauuguguaaaaggggcn

SEQ ID NO: 105196 - RNA, 20 nt, Artificial Sequence
  Synthetic
  misc_feature (20)..(20): n is a, c, g, or u
cacauuguguaaaaggggcn

SEQ ID NO: 105197 - RNA, 21 nt, Artificial Sequence
  Synthetic
  misc_feature (21)..(21): n is a, c, g, or u
ccacauuguguaaaaggggcn

SEQ ID NO: 105198 - RNA, 22 nt, Artificial Sequence
  Synthetic
  misc_feature (1)..(1): n is a, c, g, or u
  misc_feature (22)..(22): n is a, c, g, or u
nccacauuguguaaaaggggcn

SEQ ID NO: 105199 - RNA, 23 nt, Artificial Sequence
  Synthetic
  misc_feature (2)..(2): n is a, c, g, or u
  misc_feature (23)..(23): n is a, c, g, or u
anccacauuguguaaaaggggcn

SEQ ID NO: 105200 - RNA, 24 nt, Artificial Sequence
  Synthetic
  misc_feature (3)..(3): n is a, c, g, or u
  misc_feature (24)..(24): n is a, c, g, or u
uanccacauuguguaaaaggggcn

SEQ ID NO: 105201 - RNA, 18 nt, Artificial Sequence
  Synthetic
  misc_feature (6)..(6): n is a, c, g, or u
  misc_feature (12)..(12): n is a, c, g, or u
  misc_feature (18)..(18): n is a, c, g, or u
cuauunauaaunuccucn

SEQ ID NO: 105202 - RNA, 19 nt, Artificial Sequence
  Synthetic
  misc_feature (7)..(7): n is a, c, g, or u
  misc_feature (13)..(13): n is a, c, g, or u
  misc_feature (19)..(19): n is a, c, g, or u
ucuauunauaaunuccucn

SEQ ID NO: 105203 - RNA, 20 nt, Artificial Sequence
  Synthetic
  misc_feature (8)..(8): n is a, c, g, or u
  misc_feature (14)..(14): n is a, c, g, or u
  misc_feature (20)..(20): n is a, c, g, or u
aucuauunauaaunuccucn

SEQ ID NO: 105204 - RNA, 21 nt, Artificial Sequence
  Synthetic
  misc_feature (9)..(9): n is a, c, g, or u
  misc_feature (15)..(15): n is a, c, g, or u
  misc_feature (21)..(21): n is a, c, g, or u
caucuauunauaaunuccucn

SEQ ID NO: 105205 - RNA, 22 nt, Artificial Sequence
  Synthetic
  misc_feature (10)..(10): n is a, c, g, or u
  misc_feature (16)..(16): n is a, c, g, or u
  misc_feature (22)..(22): n is a, c, g, or u
acaucuauunauaaunuccucn

SEQ ID NO: 105206 - RNA, 23 nt, Artificial Sequence
  Synthetic
  misc_feature (11)..(11): n is a, c, g, or u
  misc_feature (17)..(17): n is a, c, g, or u
  misc_feature (23)..(23): n is a, c, g, or u
gacaucuauunauaaunuccucn

SEQ ID NO: 105207 - RNA, 24 nt, Artificial Sequence
  Synthetic
  misc_feature (12)..(12): n is a, c, g, or u
  misc_feature (18)..(18): n is a, c, g, or u
  misc_feature (24)..(24): n is a, c, g, or u
ugacaucuauunauaaunuccucn

SEQ ID NO: 105208 - RNA, 18 nt, Artificial Sequence
  Synthetic
  misc_feature (18)..(18): n is a, c, g, or u
cccaacuccucccagucn

SEQ ID NO: 105209 - RNA, 19 nt, Artificial Sequence
  Synthetic
  misc_feature (19)..(19): n is a, c, g, or u
ccccaacuccucccagucn

SEQ ID NO: 105210 - RNA, 20 nt, Artificial Sequence
  Synthetic
  misc_feature (20)..(20): n is a, c, g, or u
cccccaacuccucccagucn

SEQ ID NO: 105211 - RNA, 21 nt, Artificial Sequence
  Synthetic
  misc_feature (21)..(21): n is a, c, g, or u
ucccccaacuccucccagucn

SEQ ID NO: 105212 - RNA, 22 nt, Artificial Sequence
  Synthetic
  misc_feature (22)..(22): n is a, c, g, or u
cucccccaacuccucccagucn

SEQ ID NO: 105213 - RNA, 23 nt, Artificial Sequence
  Synthetic
  misc_feature (23)..(23): n is a, c, g, or u
ccucccccaacuccucccagucn

SEQ ID NO: 105214 - RNA, 24 nt, Artificial Sequence
  Synthetic
  misc_feature (24)..(24): n is a, c, g, or u
uccucccccaacuccucccagucn

SEQ ID NO: 105215 - RNA, 18 nt, Artificial Sequence
  Synthetic
  misc_feature (15)..(15): n is a, c, g, or u
  misc_feature (18)..(18): n is a, c, g, or u
gguuuaaugccuuunucn

SEQ ID NO: 105216 - RNA, 19 nt, Artificial Sequence
  Synthetic
  misc_feature (1)..(1): n is a, c, g, or u
  misc_feature (16)..(16): n is a, c, g, or u
  misc_feature (19)..(19): n is a, c, g, or u
ngguuuaaugccuuunucn

SEQ ID NO: 105217 - RNA, 20 nt, Artificial Sequence
  Synthetic
  misc_feature (2)..(2): n is a, c, g, or u
  misc_feature (17)..(17): n is a, c, g, or u
  misc_feature (20)..(20): n is a, c, g, or u
angguuuaaugccuuunucn

SEQ ID NO: 105218 - RNA, 21 nt, Artificial Sequence
  Synthetic
  misc_feature (3)..(3): n is a, c, g, or u
  misc_feature (18)..(18): n is a, c, g, or u
  misc_feature (21)..(21): n is a, c, g, or u
uangguuuaaugccuuunucn

SEQ ID NO: 105219 - RNA, 22 nt, Artificial Sequence
  Synthetic
  misc_feature (4)..(4): n is a, c, g, or u
  misc_feature (19)..(19): n is a, c, g, or u
  misc_feature (22)..(22): n is a, c, g, or u
auangguuuaaugccuuunucn

SEQ ID NO: 105220 - RNA, 23 nt, Artificial Sequence
  Synthetic
  misc_feature (5)..(5): n is a, c, g, or u
  misc_feature (20)..(20): n is a, c, g, or u
  misc_feature (23)..(23): n is a, c, g, or u
aauangguuuaaugccuuunucn

SEQ ID NO: 105221 - RNA, 24 nt, Artificial Sequence
  Synthetic
  misc_feature (6)..(6): n is a, c, g, or u
  misc_feature (21)..(21): n is a, c, g, or u
  misc_feature (24)..(24): n is a, c, g, or u
uaauangguuuaaugccuuunucn

SEQ ID NO: 105222 - RNA, 18 nt, Artificial Sequence
  Synthetic
  misc_feature (3)..(4): n is a, c, g, or u
  misc_feature (18)..(18): n is a, c, g, or u
uunnguacaauauguucn

SEQ ID NO: 105223 - RNA, 19 nt, Artificial Sequence
  Synthetic
  misc_feature (4)..(5): n is a, c, g, or u
  misc_feature (19)..(19): n is a, c, g, or u
uuunnguacaauauguucn

SEQ ID NO: 105224 - RNA, 20 nt, Artificial Sequence
  Synthetic
  misc_feature (1)..(1): n is a, c, g, or u
  misc_feature (5)..(6): n is a, c, g, or u
  misc_feature (20)..(20): n is a, c, g, or u
nuuunnguacaauauguucn

SEQ ID NO: 105225 - RNA, 21 nt, Artificial Sequence
  Synthetic
  misc_feature (2)..(2): n is a, c, g, or u
  misc_feature (6)..(7): n is a, c, g, or u
  misc_feature (21)..(21): n is a, c, g, or u
anuuunnguacaauauguucn

SEQ ID NO: 105226 - RNA, 22 nt, Artificial Sequence
  Synthetic
  misc_feature (1)..(1): n is a, c, g, or u
  misc_feature (3)..(3): n is a, c, g, or u
  misc_feature (7)..(8): n is a, c, g, or u
  misc_feature (22)..(22): n is a, c, g, or u
nanuuunnguacaauauguucn

SEQ ID NO: 105227 - RNA, 23 nt, Artificial Sequence
  Synthetic
  misc_feature (2)..(2): n is a, c, g, or u
  misc_feature (4)..(4): n is a, c, g, or u
  misc_feature (8)..(9): n is a, c, g, or u
  misc_feature (23)..(23): n is a, c, g, or u
unanuuunnguacaauauguucn

SEQ ID NO: 105228 - RNA, 24 nt, Artificial Sequence
  Synthetic
  misc_feature (3)..(3): n is a, c, g, or u
  misc_feature (5)..(5): n is a, c, g, or u
  misc_feature (9)..(10): n is a, c, g, or u
  misc_feature (24)..(24): n is a, c, g, or u
uunanuuunnguacaauauguucn

SEQ ID NO: 105229 - RNA, 18 nt, Artificial Sequence
  Synthetic
  misc_feature (18)..(18): n is a, c, g, or u
agaaggggacgguagagn

SEQ ID NO: 105230 - RNA, 19 nt, Artificial Sequence
  Synthetic
  misc_feature (1)..(1): n is a, c, g, or u
  misc_feature (19)..(19): n is a, c, g, or u
nagaaggggacgguagagn

SEQ ID NO: 105231 - RNA, 20 nt, Artificial Sequence
  Synthetic
  misc_feature (2)..(2): n is a, c, g, or u
  misc_feature (20)..(20): n is a, c, g, or u
gnagaaggggacgguagagn

SEQ ID NO: 105232 - RNA, 21 nt, Artificial Sequence
  Synthetic
  misc_feature (1)..(1): n is a, c, g, or u
  misc_feature (3)..(3): n is a, c, g, or u
  misc_feature (21)..(21): n is a, c, g, or u
ngnagaaggggacgguagagn

SEQ ID NO: 105233 - RNA, 22 nt, Artificial Sequence
  Synthetic
  misc_feature (2)..(2): n is a, c, g, or u
  misc_feature (4)..(4): n is a, c, g, or u
  misc_feature (22)..(22): n is a, c, g, or u
angnagaaggggacgguagagn

SEQ ID NO: 105234 - RNA, 23 nt, Artificial Sequence
  Synthetic
  misc_feature (3)..(3): n is a, c, g, or u
  misc_feature (5)..(5): n is a, c, g, or u
  misc_feature (23)..(23): n is a, c, g, or u
gangnagaaggggacgguagagn

SEQ ID NO: 105235 - RNA, 24 nt, Artificial Sequence
  Synthetic
  misc_feature (4)..(4): n is a, c, g, or u
  misc_feature (6)..(6): n is a, c, g, or u
  misc_feature (24)..(24): n is a, c, g, or u
agangnagaaggggacgguagagn

SEQ ID NO: 105236 - RNA, 18 nt, Artificial Sequence
  Synthetic
  misc_feature (18)..(18): n is a, c, g, or u
aagaaaauugguaauagn

SEQ ID NO: 105237 - RNA, 19 nt, Artificial Sequence
  Synthetic
  misc_feature (19)..(19): n is a, c, g, or u
aaagaaaauugguaauagn

SEQ ID NO: 105238 - RNA, 20 nt, Artificial Sequence
  Synthetic
  misc_feature (20)..(20): n is a, c, g, or u
aaaagaaaauugguaauagn

SEQ ID NO: 105239 - RNA, 21 nt, Artificial Sequence
  Synthetic
  misc_feature (21)..(21): n is a, c, g, or u
caaaagaaaauugguaauagn

SEQ ID NO: 105240 - RNA, 22 nt, Artificial Sequence
  Synthetic
  misc_feature (22)..(22): n is a, c, g, or u
acaaaagaaaauugguaauagn

SEQ ID NO: 105241 - RNA, 23 nt, Artificial Sequence
  Synthetic
  misc_feature (23)..(23): n is a, c, g, or u
gacaaaagaaaauugguaauagn

SEQ ID NO: 105242 - RNA, 24 nt, Artificial Sequence
  Synthetic
  misc_feature (24)..(24): n is a, c, g, or u
agacaaaagaaaauugguaauagn

SEQ ID NO: 105243 - RNA, 18 nt, Artificial Sequence
  Synthetic
  misc_feature (18)..(18): n is a, c, g, or u
aggccccucacucugggn

SEQ ID NO: 105244 - RNA, 19 nt, Artificial Sequence
  Synthetic
  misc_feature (19)..(19): n is a, c, g, or u
uaggccccucacucugggn

SEQ ID NO: 105245 - RNA, 20 nt, Artificial Sequence
  Synthetic
  misc_feature (20)..(20): n is a, c, g, or u
auaggccccucacucugggn

SEQ ID NO: 105246 - RNA, 21 nt, Artificial Sequence
  Synthetic
  misc_feature (21)..(21): n is a, c, g, or u
uauaggccccucacucugggn

SEQ ID NO: 105247 - RNA, 22 nt, Artificial Sequence
  Synthetic
  misc_feature (1)..(1): n is a, c, g, or u
  misc_feature (22)..(22): n is a, c, g, or u
nuauaggccccucacucugggn

SEQ ID NO: 105248 - RNA, 23 nt, Artificial Sequence
  Synthetic
  misc_feature (2)..(2): n is a, c, g, or u
  misc_feature (23)..(23): n is a, c, g, or u
anuauaggccccucacucugggn

SEQ ID NO: 105249 - RNA, 24 nt, Artificial Sequence
  Synthetic
  misc_feature (3)..(3): n is a, c, g, or u
  misc_feature (24)..(24): n is a, c, g, or u
aanuauaggccccucacucugggn

SEQ ID NO: 105250 - RNA, 18 nt, Artificial Sequence
  Synthetic
  misc_feature (5)..(5): n is a, c, g, or u
  misc_feature (18)..(18): n is a, c, g, or u
agacngccgugugguggn

SEQ ID NO: 105251 - RNA, 19 nt, Artificial Sequence
  Synthetic
  misc_feature (6)..(6): n is a, c, g, or u
  misc_feature (19)..(19): n is a, c, g, or u
aagacngccgugugguggn

SEQ ID NO: 105252 - RNA, 20 nt, Artificial Sequence
  Synthetic
  misc_feature (7)..(7): n is a, c, g, or u
  misc_feature (20)..(20): n is a, c, g, or u
aaagacngccgugugguggn

SEQ ID NO: 105253 - RNA, 21 nt, Artificial Sequence
  Synthetic
  misc_feature (8)..(8): n is a, c, g, or u
  misc_feature (21)..(21): n is a, c, g, or u
aaaagacngccgugugguggn

SEQ ID NO: 105254 - RNA, 22 nt, Artificial Sequence
  Synthetic
  misc_feature (9)..(9): n is a, c, g, or u
  misc_feature (22)..(22): n is a, c, g, or u
caaaagacngccgugugguggn

SEQ ID NO: 105255 - RNA, 23 nt, Artificial Sequence
  Synthetic
  misc_feature (10)..(10): n is a, c, g, or u
  misc_feature (23)..(23): n is a, c, g, or u
ccaaaagacngccgugugguggn

SEQ ID NO: 105256 - RNA, 24 nt, Artificial Sequence
  Synthetic
  misc_feature (11)..(11): n is a, c, g, or u
  misc_feature (24)..(24): n is a, c, g, or u
cccaaaagacngccgugugguggn

SEQ ID NO: 105257 - RNA, 18 nt, Artificial Sequence
  Synthetic
  misc_feature (16)..(16): n is a, c, g, or u
  misc_feature (18)..(18): n is a, c, g, or u
ggccggaacggcagangn

SEQ ID NO: 105258 - RNA, 19 nt, Artificial Sequence
  Synthetic
  misc_feature (17)..(17): n is a, c, g, or u
  misc_feature (19)..(19): n is a, c, g, or u
cggccggaacggcagangn

SEQ ID NO: 105259 - RNA, 20 nt, Artificial Sequence
  Synthetic
  misc_feature (18)..(18): n is a, c, g, or u
  misc_feature (20)..(20): n is a, c, g, or u
ucggccggaacggcagangn

SEQ ID NO: 105260 - RNA, 21 nt, Artificial Sequence
  Synthetic
  misc_feature (19)..(19): n is a, c, g, or u
  misc_feature (21)..(21): n is a, c, g, or u
gucggccggaacggcagangn

SEQ ID NO: 105261 - RNA, 22 nt, Artificial Sequence
  Synthetic
  misc_feature (20)..(20): n is a, c, g, or u
  misc_feature (22)..(22): n is a, c, g, or u
ggucggccggaacggcagangn

SEQ ID NO: 105262 - RNA, 23 nt, Artificial Sequence
  Synthetic
  misc_feature (21)..(21): n is a, c, g, or u
  misc_feature (23)..(23): n is a, c, g, or u
uggucggccggaacggcagangn

SEQ ID NO: 105263 - RNA, 24 nt, Artificial Sequence
  Synthetic
  misc_feature (22)..(22): n is a, c, g, or u
  misc_feature (24)..(24): n is a, c, g, or u
guggucggccggaacggcagangn

SEQ ID NO: 105264 - RNA, 18 nt, Artificial Sequence
  Synthetic
  misc_feature (1)..(1): n is a, c, g, or u
  misc_feature (15)..(15): n is a, c, g, or u
  misc_feature (18)..(18): n is a, c, g, or u
nguacaauauguucnugn

SEQ ID NO: 105265 - RNA, 19 nt, Artificial Sequence
  Synthetic
  misc_feature (1)..(2): n is a, c, g, or u
  misc_feature (16)..(16): n is a, c, g, or u
  misc_feature (19)..(19): n is a, c, g, or u
nnguacaauauguucnugn

SEQ ID NO: 105266 - RNA, 20 nt, Artificial Sequence
  Synthetic
  misc_feature (2)..(3): n is a, c, g, or u
  misc_feature (17)..(17): n is a, c, g, or u
  misc_feature (20)..(20): n is a, c, g, or u
unnguacaauauguucnugn

SEQ ID NO: 105267 - RNA, 21 nt, Artificial Sequence
  Synthetic
  misc_feature (3)..(4): n is a, c, g, or u
  misc_feature (18)..(18): n is a, c, g, or u
  misc_feature (21)..(21): n is a, c, g, or u
uunnguacaauauguucnugn

SEQ ID NO: 105268 - RNA, 22 nt, Artificial Sequence
  Synthetic
  misc_feature (4)..(5): n is a, c, g, or u
  misc_feature (19)..(19): n is a, c, g, or u
  misc_feature (22)..(22): n is a, c, g, or u
uuunnguacaauauguucnugn

SEQ ID NO: 105269 - RNA, 23 nt, Artificial Sequence
  Synthetic
  misc_feature (1)..(1): n is a, c, g, or u
  misc_feature (5)..(6): n is a, c, g, or u
  misc_feature (20)..(20): n is a, c, g, or u
  misc_feature (23)..(23): n is a, c, g, or u
nuuunnguacaauauguucnugn

SEQ ID NO: 105270 - RNA, 24 nt, Artificial Sequence
  Synthetic
  misc_feature (2)..(2): n is a, c, g, or u
  misc_feature (6)..(7): n is a, c, g, or u
  misc_feature (21)..(21): n is a, c, g, or u
  misc_feature (24)..(24): n is a, c, g, or u
anuuunnguacaauauguucnugn

SEQ ID NO: 105271 - RNA, 18 nt, Artificial Sequence
  Synthetic
  misc_feature (17)..(18): n is a, c, g, or u
agguuccacgcaugcgnn

SEQ ID NO: 105272 - RNA, 19 nt, Artificial Sequence
  Synthetic
  misc_feature (18)..(19): n is a, c, g, or u
aagguuccacgcaugcgnn

SEQ ID NO: 105273 - RNA, 20 nt, Artificial Sequence
  Synthetic
  misc_feature (19)..(20): n is a, c, g, or u
aaagguuccacgcaugcgnn

SEQ ID NO: 105274 - RNA, 21 nt, Artificial Sequence
  Synthetic
  misc_feature (20)..(21): n is a, c, g, or u
caaagguuccacgcaugcgnn

SEQ ID NO: 105275 - RNA, 22 nt, Artificial Sequence
  Synthetic
  misc_feature (21)..(22): n is a, c, g, or u
acaaagguuccacgcaugcgnn

SEQ ID NO: 105276 - RNA, 23 nt, Artificial Sequence
  Synthetic
  misc_feature (22)..(23): n is a, c, g, or u
cacaaagguuccacgcaugcgnn

SEQ ID NO: 105277 - RNA, 24 nt, Artificial Sequence
  Synthetic
  misc_feature (23)..(24): n is a, c, g, or u
ccacaaagguuccacgcaugcgnn

SEQ ID NO: 105278 - RNA, 18 nt, Artificial Sequence
  Synthetic
  misc_feature (17)..(18): n is a, c, g, or u
gagcuugguggaaugunn

SEQ ID NO: 105279 - RNA, 19 nt, Artificial Sequence
  Synthetic
  misc_feature (18)..(19): n is a, c, g, or u
agagcuugguggaaugunn

SEQ ID NO: 105280 - RNA, 20 nt, Artificial Sequence
  Synthetic
  misc_feature (19)..(20): n is a, c, g, or u
cagagcuugguggaaugunn

SEQ ID NO: 105281 - RNA, 21 nt, Artificial Sequence
  Synthetic
  misc_feature (20)..(21): n is a, c, g, or u
gcagagcuugguggaaugunn

SEQ ID NO: 105282 - RNA, 22 nt, Artificial Sequence
  Synthetic
  misc_feature (21)..(22): n is a, c, g, or u
agcagagcuugguggaaugunn

SEQ ID NO: 105283 - RNA, 23 nt, Artificial Sequence
  Synthetic
  misc_feature (22)..(23): n is a, c, g, or u
uagcagagcuugguggaaugunn

SEQ ID NO: 105284 - RNA, 24 nt, Artificial Sequence
  Synthetic
  misc_feature (23)..(24): n is a, c, g, or u
cuagcagagcuugguggaaugunn

SEQ ID NO: 105285 - RNA, 18 nt, Artificial Sequence
  Synthetic
  misc_feature (6)..(7): n is a, c, g, or u
  misc_feature (15)..(15): n is a, c, g, or u
  misc_feature (18)..(18): n is a, c, g, or u
augcgnngauggccnaun

SEQ ID NO: 105286 - RNA, 19 nt, Artificial Sequence
  Synthetic
  misc_feature (7)..(8): n is a, c, g, or u
  misc_feature (16)..(16): n is a, c, g, or u
  misc_feature (19)..(19): n is a, c, g, or u
caugcgnngauggccnaun

SEQ ID NO: 105287 - RNA, 20 nt, Artificial Sequence
  Synthetic
  misc_feature (8)..(9): n is a, c, g, or u
  misc_feature (17)..(17): n is a, c, g, or u
  misc_feature (20)..(20): n is a, c, g, or u
gcaugcgnngauggccnaun

SEQ ID NO: 105288 - RNA, 21 nt, Artificial Sequence
  Synthetic
  misc_feature (9)..(10): n is a, c, g, or u
  misc_feature (18)..(18): n is a, c, g, or u
  misc_feature (21)..(21): n is a, c, g, or u
cgcaugcgnngauggccnaun

SEQ ID NO: 105289 - RNA, 22 nt, Artificial Sequence
  Synthetic
  misc_feature (10)..(11): n is a, c, g, or u
  misc_feature (19)..(19): n is a, c, g, or u
  misc_feature (22)..(22): n is a, c, g, or u
acgcaugcgnngauggccnaun

SEQ ID NO: 105290 - RNA, 23 nt, Artificial Sequence
  Synthetic
  misc_feature (11)..(12): n is a, c, g, or u
  misc_feature (20)..(20): n is a, c, g, or u
  misc_feature (23)..(23): n is a, c, g, or u
cacgcaugcgnngauggccnaun

SEQ ID NO: 105291 - RNA, 24 nt, Artificial Sequence
  Synthetic
  misc_feature (12)..(13): n is a, c, g, or u
  misc_feature (21)..(21): n is a, c, g, or u
  misc_feature (24)..(24): n is a, c, g, or u
ccacgcaugcgnngauggccnaun

SEQ ID NO: 105292 - RNA, 18 nt, Artificial Sequence
  Synthetic
  misc_feature (18)..(18): n is a, c, g, or u
uccaagaguccucuuaun

SEQ ID NO: 105293 - RNA, 19 nt, Artificial Sequence
  Synthetic
  misc_feature (19)..(19): n is a, c, g, or u
guccaagaguccucuuaun

SEQ ID NO: 105294 - RNA, 20 nt, Artificial Sequence
  Synthetic
  misc_feature (20)..(20): n is a, c, g, or u
aguccaagaguccucuuaun

SEQ ID NO: 105295 - RNA, 21 nt, Artificial Sequence
  Synthetic
  misc_feature (21)..(21): n is a, c, g, or u
gaguccaagaguccucuuaun

SEQ ID NO: 105296 - RNA, 22 nt, Artificial Sequence
  Synthetic
  misc_feature (1)..(1): n is a, c, g, or u
  misc_feature (22)..(22): n is a, c, g, or u
ngaguccaagaguccucuuaun

SEQ ID NO: 105297 - RNA, 23 nt, Artificial Sequence
  Synthetic
  misc_feature (2)..(2): n is a, c, g, or u
  misc_feature (23)..(23): n is a, c, g, or u
gngaguccaagaguccucuuaun

SEQ ID NO: 105298 - RNA, 24 nt, Artificial Sequence
  Synthetic
  misc_feature (3)..(3): n is a, c, g, or u
  misc_feature (24)..(24): n is a, c, g, or u
ugngaguccaagaguccucuuaun

SEQ ID NO: 105299 - RNA, 18 nt, Artificial Sequence
  Synthetic
  misc_feature (18)..(18): n is a, c, g, or u
agagcuugguggaaugun

SEQ ID NO: 105300 - RNA, 19 nt, Artificial Sequence
  Synthetic
  misc_feature (19)..(19): n is a, c, g, or u
cagagcuugguggaaugun

SEQ ID NO: 105301 - RNA, 20 nt, Artificial Sequence
  Synthetic
  misc_feature (20)..(20): n is a, c, g, or u
gcagagcuugguggaaugun

SEQ ID NO: 105302 - RNA, 21 nt, Artificial Sequence
  Synthetic
  misc_feature (21)..(21): n is a, c, g, or u
agcagagcuugguggaaugun

SEQ ID NO: 105303 - RNA, 22 nt, Artificial Sequence
  Synthetic
  misc_feature (22)..(22): n is a, c, g, or u
uagcagagcuugguggaaugun

SEQ ID NO: 105304 - RNA, 23 nt, Artificial Sequence
  Synthetic
  misc_feature (23)..(23): n is a, c, g, or u
cuagcagagcuugguggaaugun

SEQ ID NO: 105305 - RNA, 24 nt, Artificial Sequence
  Synthetic
  misc_feature (24)..(24): n is a, c, g, or u
ucuagcagagcuugguggaaugun

SEQ ID NO: 105306 - RNA, 18 nt, Artificial Sequence
  Synthetic
  misc_feature (4)..(4): n is a, c, g, or u
  misc_feature (6)..(7): n is a, c, g, or u
  misc_feature (18)..(18): n is a, c, g, or u
cucnunnaaaugaaugun

SEQ ID NO: 105307 - RNA, 19 nt, Artificial Sequence
  Synthetic
  misc_feature (5)..(5): n is a, c, g, or u
  misc_feature (7)..(8): n is a, c, g, or u
  misc_feature (19)..(19): n is a, c, g, or u
ccucnunnaaaugaaugun

SEQ ID NO: 105308 - RNA, 20 nt, Artificial Sequence
  Synthetic
  misc_feature (6)..(6): n is a, c, g, or u
  misc_feature (8)..(9): n is a, c, g, or u
  misc_feature (20)..(20): n is a, c, g, or u
uccucnunnaaaugaaugun

SEQ ID NO: 105309 - RNA, 21 nt, Artificial Sequence
  Synthetic
  misc_feature (1)..(1): n is a, c, g, or u
  misc_feature (7)..(7): n is a, c, g, or u
  misc_feature (9)..(10): n is a, c, g, or u
  misc_feature (21)..(21): n is a, c, g, or u
nuccucnunnaaaugaaugun

SEQ ID NO: 105310 - RNA, 22 nt, Artificial Sequence
  Synthetic
  misc_feature (2)..(2): n is a, c, g, or u
  misc_feature (8)..(8): n is a, c, g, or u
  misc_feature (10)..(11): n is a, c, g, or u
  misc_feature (22)..(22): n is a, c, g, or u
unuccucnunnaaaugaaugun

SEQ ID NO: 105311 - RNA, 23 nt, Artificial Sequence
  Synthetic
  misc_feature (3)..(3): n is a, c, g, or u
  misc_feature (9)..(9): n is a, c, g, or u
  misc_feature (11)..(12): n is a, c, g, or u
  misc_feature (23)..(23): n is a, c, g, or u
aunuccucnunnaaaugaaugun

SEQ ID NO: 105312 - RNA, 24 nt, Artificial Sequence
  Synthetic
  misc_feature (4)..(4): n is a, c, g, or u
  misc_feature (10)..(10): n is a, c, g, or u
  misc_feature (12)..(13): n is a, c, g, or u
  misc_feature (24)..(24): n is a, c, g, or u
aaunuccucnunnaaaugaaugun

SEQ ID NO: 105313 - RNA, 18 nt, Artificial Sequence
  Synthetic
  misc_feature (3)..(3): n is a, c, g, or u
  misc_feature (18)..(18): n is a, c, g, or u
uangguuuaaugccuuun

SEQ ID NO: 105314 - RNA, 19 nt, Artificial Sequence
  Synthetic
  misc_feature (4)..(4): n is a, c, g, or u
  misc_feature (19)..(19): n is a, c, g, or u
auangguuuaaugccuuun

SEQ ID NO: 105315 - RNA, 20 nt, Artificial Sequence
  Synthetic
  misc_feature (5)..(5): n is a, c, g, or u
  misc_feature (20)..(20): n is a, c, g, or u
aauangguuuaaugccuuun

SEQ ID NO: 105316 - RNA, 21 nt, Artificial Sequence
  Synthetic
  misc_feature (6)..(6): n is a, c, g, or u
  misc_feature (21)..(21): n is a, c, g, or u
uaauangguuuaaugccuuun

SEQ ID NO: 105317 - RNA, 22 nt, Artificial Sequence
  Synthetic
  misc_feature (7)..(7): n is a, c, g, or u
  misc_feature (22)..(22): n is a, c, g, or u
auaauangguuuaaugccuuun

SEQ ID NO: 105318 - RNA, 23 nt, Artificial Sequence
  Synthetic
  misc_feature (8)..(8): n is a, c, g, or u
  misc_feature (23)..(23): n is a, c, g, or u
gauaauangguuuaaugccuuun

SEQ ID NO: 105319 - RNA, 24 nt, Artificial Sequence
  Synthetic
  misc_feature (9)..(9): n is a, c, g, or u
  misc_feature (24)..(24): n is a, c, g, or u
ggauaauangguuuaaugccuuun

SEQ ID NO: 105320 - RNA, 18 nt, Artificial Sequence
  Synthetic
  misc_feature (8)..(8): n is a, c, g, or u
  misc_feature (12)..(12): n is a, c, g, or u
  misc_feature (18)..(18): n is a, c, g, or u
cuauuuanaggnaguuun

SEQ ID NO: 105321 - RNA, 19 nt, Artificial Sequence
  Synthetic
  misc_feature (9)..(9): n is a, c, g, or u
  misc_feature (13)..(13): n is a, c, g, or u
  misc_feature (19)..(19): n is a, c, g, or u
ucuauuuanaggnaguuun

SEQ ID NO: 105322 - RNA, 20 nt, Artificial Sequence
  Synthetic
  misc_feature (10)..(10): n is a, c, g, or u
  misc_feature (14)..(14): n is a, c, g, or u
  misc_feature (20)..(20): n is a, c, g, or u
gucuauuuanaggnaguuun

SEQ ID NO: 105323 - RNA, 21 nt, Artificial Sequence
  Synthetic
  misc_feature (11)..(11): n is a, c, g, or u
  misc_feature (15)..(15): n is a, c, g, or u
  misc_feature (21)..(21): n is a, c, g, or u
ggucuauuuanaggnaguuun

SEQ ID NO: 105324 - RNA, 22 nt, Artificial Sequence
  Synthetic
  misc_feature (12)..(12): n is a, c, g, or u
  misc_feature (16)..(16): n is a, c, g, or u
  misc_feature (22)..(22): n is a, c, g, or u
aggucuauuuanaggnaguuun

SEQ ID NO: 105325 - RNA, 23 nt, Artificial Sequence
  Synthetic
  misc_feature (13)..(13): n is a, c, g, or u
  misc_feature (17)..(17): n is a, c, g, or u
  misc_feature (23)..(23): n is a, c, g, or u
uaggucuauuuanaggnaguuun

SEQ ID NO: 105326 - RNA, 24 nt, Artificial Sequence
  Synthetic
  misc_feature (14)..(14): n is a, c, g, or u
  misc_feature (18)..(18): n is a, c, g, or u
  misc_feature (24)..(24): n is a, c, g, or u
auaggucuauuuanaggnaguuun

SEQ ID NO: 105327 - RNA, 18 nt, Artificial Sequence
  Synthetic
gugcucccccuagaaaau

SEQ ID NO: 105328 - RNA, 19 nt, Artificial Sequence
  Synthetic
ggugcucccccuagaaaau

SEQ ID NO: 105329 - RNA, 20 nt, Artificial Sequence
  Synthetic
gggugcucccccuagaaaau

SEQ ID NO: 105330 - RNA, 18 nt, Artificial Sequence
  Synthetic
aaaaguaagacaggaaau

SEQ ID NO: 105331 - RNA, 19 nt, Artificial Sequence
  Synthetic
caaaaguaagacaggaaau

SEQ ID NO: 105332 - RNA, 20 nt, Artificial Sequence
  Synthetic
ccaaaaguaagacaggaaau

SEQ ID NO: 105333 - RNA, 21 nt, Artificial Sequence
  Synthetic
uccaaaaguaagacaggaaau

SEQ ID NO: 105334 - RNA, 22 nt, Artificial Sequence
  Synthetic
uuccaaaaguaagacaggaaau

SEQ ID NO: 105335 - RNA, 23 nt, Artificial Sequence
  Synthetic
cuuccaaaaguaagacaggaaau

SEQ ID NO: 105336 - RNA, 24 nt, Artificial Sequence
  Synthetic
ucuuccaaaaguaagacaggaaau

SEQ ID NO: 105337 - RNA, 18 nt, Artificial Sequence
  Synthetic
uggugaucgggaaagaau

SEQ ID NO: 105338 - RNA, 19 nt, Artificial Sequence
  Synthetic
cuggugaucgggaaagaau

SEQ ID NO: 105339 - RNA, 20 nt, Artificial Sequence
  Synthetic
acuggugaucgggaaagaau

SEQ ID NO: 105340 - RNA, 21 nt, Artificial Sequence
  Synthetic
aacuggugaucgggaaagaau

SEQ ID NO: 105341 - RNA, 22 nt, Artificial Sequence
  Synthetic
caacuggugaucgggaaagaau

SEQ ID NO: 105342 - RNA, 23 nt, Artificial Sequence
  Synthetic
ccaacuggugaucgggaaagaau

SEQ ID NO: 105343 - RNA, 24 nt, Artificial Sequence
  Synthetic
uccaacuggugaucgggaaagaau

SEQ ID NO: 105344 - RNA, 18 nt, Artificial Sequence
  Synthetic
  misc_feature (13)..(13): n is a, c, g, or u
gucgaggagaucncgaau

SEQ ID NO: 105345 - RNA, 19 nt, Artificial Sequence
  Synthetic
  misc_feature (14)..(14): n is a, c, g, or u
ugucgaggagaucncgaau

SEQ ID NO: 105346 - RNA, 20 nt, Artificial Sequence
  Synthetic
  misc_feature (15)..(15): n is a, c, g, or u
gugucgaggagaucncgaau

SEQ ID NO: 105347 - RNA, 21 nt, Artificial Sequence
  Synthetic
  misc_feature (16)..(16): n is a, c, g, or u
ggugucgaggagaucncgaau

SEQ ID NO: 105348 - RNA, 22 nt, Artificial Sequence
  Synthetic
  misc_feature (17)..(17): n is a, c, g, or u
cggugucgaggagaucncgaau

SEQ ID NO: 105349 - RNA, 23 nt, Artificial Sequence
  Synthetic
  misc_feature (18)..(18): n is a, c, g, or u
gcggugucgaggagaucncgaau

SEQ ID NO: 105350 - RNA, 24 nt, Artificial Sequence
  Synthetic
  misc_feature (19)..(19): n is a, c, g, or u
ggcggugucgaggagaucncgaau

SEQ ID NO: 105351 - RNA, 18 nt, Artificial Sequence
  Synthetic
  misc_feature (1)..(1): n is a, c, g, or u
  misc_feature (7)..(7): n is a, c, g, or u
  misc_feature (9)..(10): n is a, c, g, or u
nuccucnunnaaaugaau

SEQ ID NO: 105352 - RNA, 19 nt, Artificial Sequence
  Synthetic
  misc_feature (2)..(2): n is a, c, g, or u
  misc_feature (8)..(8): n is a, c, g, or u
  misc_feature (10)..(11): n is a, c, g, or u
unuccucnunnaaaugaau

SEQ ID NO: 105353 - RNA, 20 nt, Artificial Sequence
  Synthetic
  misc_feature (3)..(3): n is a, c, g, or u
  misc_feature (9)..(9): n is a, c, g, or u
  misc_feature (11)..(12): n is a, c, g, or u
aunuccucnunnaaaugaau

SEQ ID NO: 105354 - RNA, 21 nt, Artificial Sequence
  Synthetic
  misc_feature (4)..(4): n is a, c, g, or u
  misc_feature (10)..(10): n is a, c, g, or u
  misc_feature (12)..(13): n is a, c, g, or u
aaunuccucnunnaaaugaau

SEQ ID NO: 105355 - RNA, 22 nt, Artificial Sequence
  Synthetic
  misc_feature (5)..(5): n is a, c, g, or u
  misc_feature (11)..(11): n is a, c, g, or u
  misc_feature (13)..(14): n is a, c, g, or u
uaaunuccucnunnaaaugaau

SEQ ID NO: 105356 - RNA, 23 nt, Artificial Sequence
  Synthetic
  misc_feature (6)..(6): n is a, c, g, or u
  misc_feature (12)..(12): n is a, c, g, or u
  misc_feature (14)..(15): n is a, c, g, or u
auaaunuccucnunnaaaugaau

SEQ ID NO: 105357 - RNA, 24 nt, Artificial Sequence
  Synthetic
  misc_feature (1)..(1): n is a, c, g, or u
  misc_feature (7)..(7): n is a, c, g, or u
  misc_feature (13)..(13): n is a, c, g, or u
  misc_feature (15)..(16): n is a, c, g, or u
nauaaunuccucnunnaaaugaau

SEQ ID NO: 105358 - RNA, 18 nt, Artificial Sequence
  Synthetic
  misc_feature (15)..(15): n is a, c, g, or u
uucucucuuauauanaau

SEQ ID NO: 105359 - RNA, 19 nt, Artificial Sequence
  Synthetic
  misc_feature (16)..(16): n is a, c, g, or u
uuucucucuuauauanaau

SEQ ID NO: 105360 - RNA, 20 nt, Artificial Sequence
  Synthetic
  misc_feature (17)..(17): n is a, c, g, or u
guuucucucuuauauanaau

SEQ ID NO: 105361 - RNA, 21 nt, Artificial Sequence
  Synthetic
  misc_feature (18)..(18): n is a, c, g, or u
aguuucucucuuauauanaau

SEQ ID NO: 105362 - RNA, 22 nt, Artificial Sequence
  Synthetic
  misc_feature (19)..(19): n is a, c, g, or u
uaguuucucucuuauauanaau

SEQ ID NO: 105363 - RNA, 23 nt, Artificial Sequence
  Synthetic
  misc_feature (20)..(20): n is a, c, g, or u
guaguuucucucuuauauanaau

SEQ ID NO: 105364 - RNA, 24 nt, Artificial Sequence
  Synthetic
  misc_feature (21)..(21): n is a, c, g, or u
uguaguuucucucuuauauanaau

SEQ ID NO: 105365 - RNA, 18 nt, Artificial Sequence
  Synthetic
  misc_feature (15)..(15): n is a, c, g, or u
agguuggggacugcnaau

SEQ ID NO: 105366 - RNA, 19 nt, Artificial Sequence
  Synthetic
  misc_feature (16)..(16): n is a, c, g, or u
gagguuggggacugcnaau

SEQ ID NO: 105367 - RNA, 20 nt, Artificial Sequence
  Synthetic
  misc_feature (17)..(17): n is a, c, g, or u
ggagguuggggacugcnaau

SEQ ID NO: 105368 - RNA, 21 nt, Artificial Sequence
  Synthetic
  misc_feature (18)..(18): n is a, c, g, or u
uggagguuggggacugcnaau

SEQ ID NO: 105369 - RNA, 22 nt, Artificial Sequence
  Synthetic
  misc_feature (19)..(19): n is a, c, g, or u
uuggagguuggggacugcnaau

SEQ ID NO: 105370 - RNA, 23 nt, Artificial Sequence
  Synthetic
  misc_feature (20)..(20): n is a, c, g, or u
auuggagguuggggacugcnaau

SEQ ID NO: 105371 - RNA, 24 nt, Artificial Sequence
  Synthetic
  misc_feature (21)..(21): n is a, c, g, or u
gauuggagguuggggacugcnaau

SEQ ID NO: 105372 - RNA, 18 nt, Artificial Sequence
  Synthetic
  misc_feature (6)..(6): n is a, c, g, or u
ucuganuuuuaggcccau

SEQ ID NO: 105373 - RNA, 19 nt, Artificial Sequence
  Synthetic
  misc_feature (7)..(7): n is a, c, g, or u
gucuganuuuuaggcccau

SEQ ID NO: 105374 - RNA, 20 nt, Artificial Sequence
  Synthetic
  misc_feature (8)..(8): n is a, c, g, or u
ugucuganuuuuaggcccau

SEQ ID NO: 105375 - RNA, 21 nt, Artificial Sequence
  Synthetic
  misc_feature (9)..(9): n is a, c, g, or u
uugucuganuuuuaggcccau

SEQ ID NO: 105376 - RNA, 22 nt, Artificial Sequence
  Synthetic
  misc_feature (10)..(10): n is a, c, g, or u
guugucuganuuuuaggcccau

SEQ ID NO: 105377 - RNA, 23 nt, Artificial Sequence
  Synthetic
  misc_feature (11)..(11): n is a, c, g, or u
aguugucuganuuuuaggcccau

SEQ ID NO: 105378 - RNA, 24 nt, Artificial Sequence
  Synthetic
  misc_feature (12)..(12): n is a, c, g, or u
uaguugucuganuuuuaggcccau

SEQ ID NO: 105379 - RNA, 18 nt, Artificial Sequence
  Synthetic
  misc_feature (6)..(6): n is a, c, g, or u
  misc_feature (9)..(9): n is a, c, g, or u
gcacanccnagcagccau

SEQ ID NO: 105380 - RNA, 19 nt, Artificial Sequence
  Synthetic
  misc_feature (7)..(7): n is a, c, g, or u
  misc_feature (10)..(10): n is a, c, g, or u
agcacanccnagcagccau

SEQ ID NO: 105381 - RNA, 20 nt, Artificial Sequence
  Synthetic
  misc_feature (8)..(8): n is a, c, g, or u
  misc_feature (11)..(11): n is a, c, g, or u
cagcacanccnagcagccau

SEQ ID NO: 105382 - RNA, 21 nt, Artificial Sequence
  Synthetic
  misc_feature (9)..(9): n is a, c, g, or u
  misc_feature (12)..(12): n is a, c, g, or u
gcagcacanccnagcagccau

SEQ ID NO: 105383 - RNA, 22 nt, Artificial Sequence
  Synthetic
  misc_feature (10)..(10): n is a, c, g, or u
  misc_feature (13)..(13): n is a, c, g, or u
ggcagcacanccnagcagccau

SEQ ID NO: 105384 - RNA, 23 nt, Artificial Sequence
  Synthetic
  misc_feature (11)..(11): n is a, c, g, or u
  misc_feature (14)..(14): n is a, c, g, or u
uggcagcacanccnagcagccau

SEQ ID NO: 105385 - RNA, 24 nt, Artificial Sequence
  Synthetic
  misc_feature (12)..(12): n is a, c, g, or u
  misc_feature (15)..(15): n is a, c, g, or u
uuggcagcacanccnagcagccau

SEQ ID NO: 105386 - RNA, 18 nt, Artificial Sequence
  Synthetic
aacaagaagaugaggcau

SEQ ID NO: 105387 - RNA, 19 nt, Artificial Sequence
  Synthetic
caacaagaagaugaggcau

SEQ ID NO: 105388 - RNA, 20 nt, Artificial Sequence
  Synthetic
ccaacaagaagaugaggcau

SEQ ID NO: 105389 - RNA, 21 nt, Artificial Sequence
  Synthetic
accaacaagaagaugaggcau

SEQ ID NO: 105390 - RNA, 22 nt, Artificial Sequence
  Synthetic
aaccaacaagaagaugaggcau

SEQ ID NO: 105391 - RNA, 23 nt, Artificial Sequence
  Synthetic
gaaccaacaagaagaugaggcau

SEQ ID NO: 105392 - RNA, 24 nt, Artificial Sequence
  Synthetic
agaaccaacaagaagaugaggcau

SEQ ID NO: 105393 - RNA, 18 nt, Artificial Sequence
  Synthetic
  misc_feature (4)..(4): n is a, c, g, or u
uagnuuguauacaugcau

SEQ ID NO: 105394 - RNA, 19 nt, Artificial Sequence
  Synthetic
  misc_feature (5)..(5): n is a, c, g, or u
uuagnuuguauacaugcau

SEQ ID NO: 105395 - RNA, 20 nt, Artificial Sequence
  Synthetic
  misc_feature (6)..(6): n is a, c, g, or u
cuuagnuuguauacaugcau

SEQ ID NO: 105396 - RNA, 21 nt, Artificial Sequence
  Synthetic
  misc_feature (7)..(7): n is a, c, g, or u
gcuuagnuuguauacaugcau

SEQ ID NO: 105397 - RNA, 22 nt, Artificial Sequence
  Synthetic
  misc_feature (8)..(8): n is a, c, g, or u
ugcuuagnuuguauacaugcau

SEQ ID NO: 105398 - RNA, 23 nt, Artificial Sequence
  Synthetic
  misc_feature (9)..(9): n is a, c, g, or u
cugcuuagnuuguauacaugcau

SEQ ID NO: 105399 - RNA, 24 nt, Artificial Sequence
  Synthetic
  misc_feature (10)..(10): n is a, c, g, or u
ccugcuuagnuuguauacaugcau

SEQ ID NO: 105400 - RNA, 18 nt, Artificial Sequence
  Synthetic
cggaaguguugauaagau

SEQ ID NO: 105401 - RNA, 19 nt, Artificial Sequence
  Synthetic
ccggaaguguugauaagau

SEQ ID NO: 105402 - RNA, 20 nt, Artificial Sequence
  Synthetic
uccggaaguguugauaagau

SEQ ID NO: 105403 - RNA, 21 nt, Artificial Sequence
  Synthetic
uuccggaaguguugauaagau

SEQ ID NO: 105404 - RNA, 22 nt, Artificial Sequence
  Synthetic
uuuccggaaguguugauaagau

SEQ ID NO: 105405 - RNA, 23 nt, Artificial Sequence
  Synthetic
guuuccggaaguguugauaagau

SEQ ID NO: 105406 - RNA, 24 nt, Artificial Sequence
  Synthetic
aguuuccggaaguguugauaagau

SEQ ID NO: 105407 - RNA, 18 nt, Artificial Sequence
  Synthetic
  misc_feature (9)..(9): n is a, c, g, or u
gcacacggnccggcagau

SEQ ID NO: 105408 - RNA, 19 nt, Artificial Sequence
  Synthetic
  misc_feature (10)..(10): n is a, c, g, or u
ugcacacggnccggcagau

SEQ ID NO: 105409 - RNA, 20 nt, Artificial Sequence
  Synthetic
  misc_feature (11)..(11): n is a, c, g, or u
gugcacacggnccggcagau

SEQ ID NO: 105410 - RNA, 21 nt, Artificial Sequence
  Synthetic
  misc_feature (12)..(12): n is a, c, g, or u
agugcacacggnccggcagau

SEQ ID NO: 105411 - RNA, 22 nt, Artificial Sequence
  Synthetic
  misc_feature (13)..(13): n is a, c, g, or u
aagugcacacggnccggcagau

SEQ ID NO: 105412 - RNA, 23 nt, Artificial Sequence
  Synthetic
  misc_feature (14)..(14): n is a, c, g, or u
gaagugcacacggnccggcagau

SEQ ID NO: 105413 - RNA, 24 nt, Artificial Sequence
  Synthetic
  misc_feature (15)..(15): n is a, c, g, or u
cgaagugcacacggnccggcagau

SEQ ID NO: 105414 - RNA, 18 nt, Artificial Sequence
  Synthetic
aggcggugucgaggagau

SEQ ID NO: 105415 - RNA, 19 nt, Artificial Sequence
  Synthetic
gaggcggugucgaggagau

SEQ ID NO: 105416 - RNA, 20 nt, Artificial Sequence
  Synthetic
  misc_feature (1)..(1): n is a, c, g, or u
ngaggcggugucgaggagau

SEQ ID NO: 105417 - RNA, 21 nt, Artificial Sequence
  Synthetic
  misc_feature (2)..(2): n is a, c, g, or u
cngaggcggugucgaggagau

SEQ ID NO: 105418 - RNA, 22 nt, Artificial Sequence
  Synthetic
  misc_feature (3)..(3): n is a, c, g, or u
gcngaggcggugucgaggagau

SEQ ID NO: 105419 - RNA, 23 nt, Artificial Sequence
  Synthetic
  misc_feature (4)..(4): n is a, c, g, or u
agcngaggcggugucgaggagau

SEQ ID NO: 105420 - RNA, 24 nt, Artificial Sequence
  Synthetic
  misc_feature (5)..(5): n is a, c, g, or u
gagcngaggcggugucgaggagau

SEQ ID NO: 105421 - RNA, 18 nt, Artificial Sequence
  Synthetic
cucgagaagauugacgau

SEQ ID NO: 105422 - RNA, 19 nt, Artificial Sequence
  Synthetic
ccucgagaagauugacgau

SEQ ID NO: 105423 - RNA, 20 nt, Artificial Sequence
  Synthetic
uccucgagaagauugacgau

SEQ ID NO: 105424 - RNA, 18 nt, Artificial Sequence
  Synthetic
acucuaaggccucccgau

SEQ ID NO: 105425 - RNA, 19 nt, Artificial Sequence
  Synthetic
gacucuaaggccucccgau

SEQ ID NO: 105426 - RNA, 20 nt, Artificial Sequence
  Synthetic
agacucuaaggccucccgau

SEQ ID NO: 105427 - RNA, 21 nt, Artificial Sequence
  Synthetic
gagacucuaaggccucccgau

SEQ ID NO: 105428 - RNA, 22 nt, Artificial Sequence
  Synthetic
ggagacucuaaggccucccgau

SEQ ID NO: 105429 - RNA, 23 nt, Artificial Sequence
  Synthetic
cggagacucuaaggccucccgau

SEQ ID NO: 105430 - RNA, 24 nt, Artificial Sequence
  Synthetic
ccggagacucuaaggccucccgau

SEQ ID NO: 105431 - RNA, 18 nt, Artificial Sequence
  Synthetic
cuucugcgacgcggcgau

SEQ ID NO: 105432 - RNA, 19 nt, Artificial Sequence
  Synthetic
ucuucugcgacgcggcgau

SEQ ID NO: 105433 - RNA, 20 nt, Artificial Sequence
  Synthetic
aucuucugcgacgcggcgau

SEQ ID NO: 105434 - RNA, 18 nt, Artificial Sequence
  Synthetic
gaggcauagcagcaggau

SEQ ID NO: 105435 - RNA, 19 nt, Artificial Sequence
  Synthetic
ugaggcauagcagcaggau

SEQ ID NO: 105436 - RNA, 20 nt, Artificial Sequence
  Synthetic
augaggcauagcagcaggau

SEQ ID NO: 105437 - RNA, 21 nt, Artificial Sequence
  Synthetic
gaugaggcauagcagcaggau

SEQ ID NO: 105438 - RNA, 22 nt, Artificial Sequence
  Synthetic
agaugaggcauagcagcaggau

SEQ ID NO: 105439 - RNA, 23 nt, Artificial Sequence
  Synthetic
aagaugaggcauagcagcaggau

SEQ ID NO: 105440 - RNA, 24 nt, Artificial Sequence
  Synthetic
gaagaugaggcauagcagcaggau

SEQ ID NO: 105441 - RNA, 18 nt, Artificial Sequence
  Synthetic
  misc_feature (11)..(11): n is a, c, g, or u
gaguuugccanucaggau

SEQ ID NO: 105442 - RNA, 19 nt, Artificial Sequence
  Synthetic
  misc_feature (12)..(12): n is a, c, g, or u
ggaguuugccanucaggau

SEQ ID NO: 105443 - RNA, 20 nt, Artificial Sequence
  Synthetic
  misc_feature (13)..(13): n is a, c, g, or u
gggaguuugccanucaggau

SEQ ID NO: 105444 - RNA, 21 nt, Artificial Sequence
  Synthetic
  misc_feature (14)..(14): n is a, c, g, or u
agggaguuugccanucaggau

SEQ ID NO: 105445 - RNA, 22 nt, Artificial Sequence
  Synthetic
  misc_feature (15)..(15): n is a, c, g, or u
gagggaguuugccanucaggau

SEQ ID NO: 105446 - RNA, 23 nt, Artificial Sequence
  Synthetic
  misc_feature (1)..(1): n is a, c, g, or u
  misc_feature (16)..(16): n is a, c, g, or u
ngagggaguuugccanucaggau

SEQ ID NO: 105447 - RNA, 24 nt, Artificial Sequence
  Synthetic
  misc_feature (2)..(2): n is a, c, g, or u
  misc_feature (17)..(17): n is a, c, g, or u
angagggaguuugccanucaggau

SEQ ID NO: 105448 - RNA, 18 nt, Artificial Sequence
  Synthetic
gaaagaaucccagaggau

SEQ ID NO: 105449 - RNA, 19 nt, Artificial Sequence
  Synthetic
ggaaagaaucccagaggau

SEQ ID NO: 105450 - RNA, 20 nt, Artificial Sequence
  Synthetic
gggaaagaaucccagaggau

SEQ ID NO: 105451 - RNA, 21 nt, Artificial Sequence
  Synthetic
cgggaaagaaucccagaggau

SEQ ID NO: 105452 - RNA, 22 nt, Artificial Sequence
  Synthetic
ucgggaaagaaucccagaggau

SEQ ID NO: 105453 - RNA, 23 nt, Artificial Sequence
  Synthetic
aucgggaaagaaucccagaggau

SEQ ID NO: 105454 - RNA, 24 nt, Artificial Sequence
  Synthetic
gaucgggaaagaaucccagaggau

SEQ ID NO: 105455 - RNA, 18 nt, Artificial Sequence
  Synthetic
cuuaugaguccaagggau

SEQ ID NO: 105456 - RNA, 19 nt, Artificial Sequence
  Synthetic
ccuuaugaguccaagggau

SEQ ID NO: 105457 - RNA, 20 nt, Artificial Sequence
  Synthetic
accuuaugaguccaagggau

SEQ ID NO: 105458 - RNA, 21 nt, Artificial Sequence
  Synthetic
caccuuaugaguccaagggau

SEQ ID NO: 105459 - RNA, 22 nt, Artificial Sequence
  Synthetic
ccaccuuaugaguccaagggau

SEQ ID NO: 105460 - RNA, 23 nt, Artificial Sequence
  Synthetic
cccaccuuaugaguccaagggau

SEQ ID NO: 105461 - RNA, 24 nt, Artificial Sequence
  Synthetic
ucccaccuuaugaguccaagggau

SEQ ID NO: 105462 - RNA, 18 nt, Artificial Sequence
  Synthetic
acuacuaauucccuggau

SEQ ID NO: 105463 - RNA, 19 nt, Artificial Sequence
  Synthetic
  misc_feature (1)..(1): n is a, c, g, or u
nacuacuaauucccuggau

SEQ ID NO: 105464 - RNA, 20 nt, Artificial Sequence
  Synthetic
  misc_feature (2)..(2): n is a, c, g, or u
unacuacuaauucccuggau

SEQ ID NO: 105465 - RNA, 21 nt, Artificial Sequence
  Synthetic
  misc_feature (3)..(3): n is a, c, g, or u
cunacuacuaauucccuggau

SEQ ID NO: 105466 - RNA, 22 nt, Artificial Sequence
  Synthetic
  misc_feature (4)..(4): n is a, c, g, or u
gcunacuacuaauucccuggau

SEQ ID NO: 105467 - RNA, 23 nt, Artificial Sequence
  Synthetic
  misc_feature (5)..(5): n is a, c, g, or u
agcunacuacuaauucccuggau

SEQ ID NO: 105468 - RNA, 24 nt, Artificial Sequence
  Synthetic
  misc_feature (6)..(6): n is a, c, g, or u
uagcunacuacuaauucccuggau

SEQ ID NO: 105469 - RNA, 18 nt, Artificial Sequence
  Synthetic
  misc_feature (15)..(15): n is a, c, g, or u
cuugcgaaagcccangau

SEQ ID NO: 105470 - RNA, 19 nt, Artificial Sequence
  Synthetic
  misc_feature (16)..(16): n is a, c, g, or u
ucuugcgaaagcccangau

SEQ ID NO: 105471 - RNA, 20 nt, Artificial Sequence
  Synthetic
  misc_feature (17)..(17): n is a, c, g, or u
aucuugcgaaagcccangau

SEQ ID NO: 105472 - RNA, 21 nt, Artificial Sequence
  Synthetic
  misc_feature (18)..(18): n is a, c, g, or u
aaucuugcgaaagcccangau

SEQ ID NO: 105473 - RNA, 22 nt, Artificial Sequence
  Synthetic
  misc_feature (19)..(19): n is a, c, g, or u
gaaucuugcgaaagcccangau

SEQ ID NO: 105474 - RNA, 23 nt, Artificial Sequence
  Synthetic
  misc_feature (20)..(20): n is a, c, g, or u
ggaaucuugcgaaagcccangau

SEQ ID NO: 105475 - RNA, 24 nt, Artificial Sequence
  Synthetic
  misc_feature (21)..(21): n is a, c, g, or u
aggaaucuugcgaaagcccangau

SEQ ID NO: 105476 - RNA, 18 nt, Artificial Sequence
  Synthetic
aagagguuggugagugau

SEQ ID NO: 105477 - RNA, 19 nt, Artificial Sequence
  Synthetic
caagagguuggugagugau

SEQ ID NO: 105478 - RNA, 20 nt, Artificial Sequence
  Synthetic
acaagagguuggugagugau

SEQ ID NO: 105479 - RNA, 21 nt, Artificial Sequence
  Synthetic
gacaagagguuggugagugau

SEQ ID NO: 105480 - RNA, 22 nt, Artificial Sequence
  Synthetic
ggacaagagguuggugagugau

SEQ ID NO: 105481 - RNA, 23 nt, Artificial Sequence
  Synthetic
aggacaagagguuggugagugau

SEQ ID NO: 105482 - RNA, 24 nt, Artificial Sequence
  Synthetic
gaggacaagagguuggugagugau

SEQ ID NO: 105483 - RNA, 18 nt, Artificial Sequence
  Synthetic
  misc_feature (2)..(2): n is a, c, g, or u
cnggguccaacuggugau

SEQ ID NO: 105484 - RNA, 19 nt, Artificial Sequence
  Synthetic
  misc_feature (3)..(3): n is a, c, g, or u
gcnggguccaacuggugau

SEQ ID NO: 105485 - RNA, 20 nt, Artificial Sequence
  Synthetic
  misc_feature (1)..(1): n is a, c, g, or u
  misc_feature (4)..(4): n is a, c, g, or u
ngcnggguccaacuggugau

SEQ ID NO: 105486 - RNA, 21 nt, Artificial Sequence
  Synthetic
  misc_feature (2)..(2): n is a, c, g, or u
  misc_feature (5)..(5): n is a, c, g, or u
angcnggguccaacuggugau

SEQ ID NO: 105487 - RNA, 22 nt, Artificial Sequence
  Synthetic
  misc_feature (3)..(3): n is a, c, g, or u
  misc_feature (6)..(6): n is a, c, g, or u
aangcnggguccaacuggugau

SEQ ID NO: 105488 - RNA, 23 nt, Artificial Sequence
  Synthetic
  misc_feature (4)..(4): n is a, c, g, or u
  misc_feature (7)..(7): n is a, c, g, or u
gaangcnggguccaacuggugau

SEQ ID NO: 105489 - RNA, 24 nt, Artificial Sequence
  Synthetic
  misc_feature (5)..(5): n is a, c, g, or u
  misc_feature (8)..(8): n is a, c, g, or u
cgaangcnggguccaacuggugau

SEQ ID NO: 105490 - RNA, 18 nt, Artificial Sequence
  Synthetic
  misc_feature (16)..(16): n is a, c, g, or u
caggaugaagaggaanau

SEQ ID NO: 105491 - RNA, 19 nt, Artificial Sequence
  Synthetic
  misc_feature (17)..(17): n is a, c, g, or u
gcaggaugaagaggaanau

SEQ ID NO: 105492 - RNA, 20 nt, Artificial Sequence
  Synthetic
  misc_feature (18)..(18): n is a, c, g, or u
agcaggaugaagaggaanau

SEQ ID NO: 105493 - RNA, 21 nt, Artificial Sequence
  Synthetic
  misc_feature (19)..(19): n is a, c, g, or u
cagcaggaugaagaggaanau

SEQ ID NO: 105494 - RNA, 22 nt, Artificial Sequence
  Synthetic
  misc_feature (20)..(20): n is a, c, g, or u
gcagcaggaugaagaggaanau

SEQ ID NO: 105495 - RNA, 23 nt, Artificial Sequence
  Synthetic
  misc_feature (21)..(21): n is a, c, g, or u
agcagcaggaugaagaggaanau

SEQ ID NO: 105496 - RNA, 24 nt, Artificial Sequence
  Synthetic
  misc_feature (22)..(22): n is a, c, g, or u
uagcagcaggaugaagaggaanau

SEQ ID NO: 105497 - RNA, 18 nt, Artificial Sequence
  Synthetic
ucuuguucccaagaauau

SEQ ID NO: 105498 - RNA, 19 nt, Artificial Sequence
  Synthetic
cucuuguucccaagaauau

SEQ ID NO: 105499 - RNA, 20 nt, Artificial Sequence
  Synthetic
gcucuuguucccaagaauau

SEQ ID NO: 105500 - RNA, 21 nt, Artificial Sequence
  Synthetic
agcucuuguucccaagaauau

SEQ ID NO: 105501 - RNA, 22 nt, Artificial Sequence
  Synthetic
uagcucuuguucccaagaauau

SEQ ID NO: 105502 - RNA, 23 nt, Artificial Sequence
  Synthetic
guagcucuuguucccaagaauau

SEQ ID NO: 105503 - RNA, 24 nt, Artificial Sequence
  Synthetic
uguagcucuuguucccaagaauau

SEQ ID NO: 105504 - RNA, 18 nt, Artificial Sequence
  Synthetic
gucuagacucugugguau

SEQ ID NO: 105505 - RNA, 19 nt, Artificial Sequence
  Synthetic
agucuagacucugugguau

SEQ ID NO: 105506 - RNA, 20 nt, Artificial Sequence
  Synthetic
gagucuagacucugugguau

SEQ ID NO: 105507 - RNA, 21 nt, Artificial Sequence
  Synthetic
cgagucuagacucugugguau

SEQ ID NO: 105508 - RNA, 22 nt, Artificial Sequence
  Synthetic
acgagucuagacucugugguau

SEQ ID NO: 105509 - RNA, 23 nt, Artificial Sequence
  Synthetic
cacgagucuagacucugugguau

SEQ ID NO: 105510 - RNA, 24 nt, Artificial Sequence
  Synthetic
ccacgagucuagacucugugguau

SEQ ID NO: 105511 - RNA, 18 nt, Artificial Sequence
  Synthetic
  misc_feature (8)..(8): n is a, c, g, or u
cuugccunagugcuguau

SEQ ID NO: 105512 - RNA, 19 nt, Artificial Sequence
  Synthetic
  misc_feature (9)..(9): n is a, c, g, or u
gcuugccunagugcuguau

SEQ ID NO: 105513 - RNA, 20 nt, Artificial Sequence
  Synthetic
  misc_feature (10)..(10): n is a, c, g, or u
agcuugccunagugcuguau

SEQ ID NO: 105514 - RNA, 21 nt, Artificial Sequence
  Synthetic
  misc_feature (11)..(11): n is a, c, g, or u
uagcuugccunagugcuguau

SEQ ID NO: 105515 - RNA, 22 nt, Artificial Sequence
  Synthetic
  misc_feature (12)..(12): n is a, c, g, or u
auagcuugccunagugcuguau

SEQ ID NO: 105516 - RNA, 23 nt, Artificial Sequence
  Synthetic
  misc_feature (13)..(13): n is a, c, g, or u
aauagcuugccunagugcuguau

SEQ ID NO: 105517 - RNA, 24 nt, Artificial Sequence
  Synthetic
  misc_feature (14)..(14): n is a, c, g, or u
gaauagcuugccunagugcuguau

SEQ ID NO: 105518 - RNA, 18 nt, Artificial Sequence
  Synthetic
guccaagaguccucuuau

SEQ ID NO: 105519 - RNA, 19 nt, Artificial Sequence
  Synthetic
aguccaagaguccucuuau

SEQ ID NO: 105520 - RNA, 20 nt, Artificial Sequence
  Synthetic
gaguccaagaguccucuuau

SEQ ID NO: 105521 - RNA, 21 nt, Artificial Sequence
  Synthetic
  misc_feature (1)..(1): n is a, c, g, or u
ngaguccaagaguccucuuau

SEQ ID NO: 105522 - RNA, 22 nt, Artificial Sequence
  Synthetic
  misc_feature (2)..(2): n is a, c, g, or u
gngaguccaagaguccucuuau

SEQ ID NO: 105523 - RNA, 23 nt, Artificial Sequence
  Synthetic
  misc_feature (3)..(3): n is a, c, g, or u
ugngaguccaagaguccucuuau

SEQ ID NO: 105524 - RNA, 24 nt, Artificial Sequence
  Synthetic
  misc_feature (4)..(4): n is a, c, g, or u
cugngaguccaagaguccucuuau

SEQ ID NO: 105525 - RNA, 18 nt, Artificial Sequence
  Synthetic
cacaucauccauauaacu

SEQ ID NO: 105526 - RNA, 19 nt, Artificial Sequence
  Synthetic
ccacaucauccauauaacu

SEQ ID NO: 105527 - RNA, 20 nt, Artificial Sequence
  Synthetic
accacaucauccauauaacu

SEQ ID NO: 105528 - RNA, 21 nt, Artificial Sequence
  Synthetic
uaccacaucauccauauaacu

SEQ ID NO: 105529 - RNA, 22 nt, Artificial Sequence
  Synthetic
auaccacaucauccauauaacu

SEQ ID NO: 105530 - RNA, 23 nt, Artificial Sequence
  Synthetic
aauaccacaucauccauauaacu

SEQ ID NO: 105531 - RNA, 24 nt, Artificial Sequence
  Synthetic
caauaccacaucauccauauaacu

SEQ ID NO: 105532 - RNA, 18 nt, Artificial Sequence
  Synthetic
cuccuuuuuucauuaacu

SEQ ID NO: 105533 - RNA, 19 nt, Artificial Sequence
  Synthetic
ucuccuuuuuucauuaacu

SEQ ID NO: 105534 - RNA, 20 nt, Artificial Sequence
  Synthetic
aucuccuuuuuucauuaacu

SEQ ID NO: 105535 - RNA, 21 nt, Artificial Sequence
  Synthetic
aaucuccuuuuuucauuaacu

SEQ ID NO: 105536 - RNA, 22 nt, Artificial Sequence
  Synthetic
uaaucuccuuuuuucauuaacu

SEQ ID NO: 105537 - RNA, 23 nt, Artificial Sequence
  Synthetic
uuaaucuccuuuuuucauuaacu

SEQ ID NO: 105538 - RNA, 24 nt, Artificial Sequence
  Synthetic
uuuaaucuccuuuuuucauuaacu

SEQ ID NO: 105539 - RNA, 18 nt, Artificial Sequence
  Synthetic
ggagugcgaauccacacu

SEQ ID NO: 105540 - RNA, 19 nt, Artificial Sequence
  Synthetic
aggagugcgaauccacacu

SEQ ID NO: 105541 - RNA, 20 nt, Artificial Sequence
  Synthetic
  misc_feature (1)..(1): n is a, c, g, or u
naggagugcgaauccacacu

SEQ ID NO: 105542 - RNA, 21 nt, Artificial Sequence
  Synthetic
  misc_feature (2)..(2): n is a, c, g, or u
gnaggagugcgaauccacacu

SEQ ID NO: 105543 - RNA, 22 nt, Artificial Sequence
  Synthetic
  misc_feature (1)..(1): n is a, c, g, or u
  misc_feature (3)..(3): n is a, c, g, or u
ngnaggagugcgaauccacacu

SEQ ID NO: 105544 - RNA, 23 nt, Artificial Sequence
  Synthetic
  misc_feature (2)..(2): n is a, c, g, or u
  misc_feature (4)..(4): n is a, c, g, or u
cngnaggagugcgaauccacacu

SEQ ID NO: 105545 - RNA, 24 nt, Artificial Sequence
  Synthetic
  misc_feature (3)..(3): n is a, c, g, or u
  misc_feature (5)..(5): n is a, c, g, or u
gcngnaggagugcgaauccacacu

SEQ ID NO: 105546 - RNA, 18 nt, Artificial Sequence
  Synthetic
cacugaacaaauggcacu

SEQ ID NO: 105547 - RNA, 19 nt, Artificial Sequence
  Synthetic
ccacugaacaaauggcacu

SEQ ID NO: 105548 - RNA, 20 nt, Artificial Sequence
  Synthetic
accacugaacaaauggcacu

SEQ ID NO: 105549 - RNA, 21 nt, Artificial Sequence
  Synthetic
aaccacugaacaaauggcacu

SEQ ID NO: 105550 - RNA, 22 nt, Artificial Sequence
  Synthetic
gaaccacugaacaaauggcacu

SEQ ID NO: 105551 - RNA, 23 nt, Artificial Sequence
  Synthetic
cgaaccacugaacaaauggcacu

SEQ ID NO: 105552 - RNA, 24 nt, Artificial Sequence
  Synthetic
acgaaccacugaacaaauggcacu

SEQ ID NO: 105553 - RNA, 18 nt, Artificial Sequence
  Synthetic
  misc_feature (3)..(3): n is a, c, g, or u
aanuauaggccccucacu

SEQ ID NO: 105554 - RNA, 19 nt, Artificial Sequence
  Synthetic
  misc_feature (4)..(4): n is a, c, g, or u
aaanuauaggccccucacu

SEQ ID NO: 105555 - RNA, 20 nt, Artificial Sequence
  Synthetic
  misc_feature (5)..(5): n is a, c, g, or u
gaaanuauaggccccucacu

SEQ ID NO: 105556 - RNA, 21 nt, Artificial Sequence
  Synthetic
  misc_feature (6)..(6): n is a, c, g, or u
ggaaanuauaggccccucacu

SEQ ID NO: 105557 - RNA, 22 nt, Artificial Sequence
  Synthetic
  misc_feature (7)..(7): n is a, c, g, or u
aggaaanuauaggccccucacu

SEQ ID NO: 105558 - RNA, 23 nt, Artificial Sequence
  Synthetic
  misc_feature (8)..(8): n is a, c, g, or u
caggaaanuauaggccccucacu

SEQ ID NO: 105559 - RNA, 24 nt, Artificial Sequence
  Synthetic
  misc_feature (9)..(9): n is a, c, g, or u
gcaggaaanuauaggccccucacu

SEQ ID NO: 105560 - RNA, 18 nt, Artificial Sequence
  Synthetic
aacaauguuccggagacu

SEQ ID NO: 105561 - RNA, 19 nt, Artificial Sequence
  Synthetic
gaacaauguuccggagacu

SEQ ID NO: 105562 - RNA, 20 nt, Artificial Sequence
  Synthetic
ugaacaauguuccggagacu

SEQ ID NO: 105563 - RNA, 21 nt, Artificial Sequence
  Synthetic
gugaacaauguuccggagacu

SEQ ID NO: 105564 - RNA, 22 nt, Artificial Sequence
  Synthetic
ggugaacaauguuccggagacu

SEQ ID NO: 105565 - RNA, 23 nt, Artificial Sequence
  Synthetic
aggugaacaauguuccggagacu

SEQ ID NO: 105566 - RNA, 24 nt, Artificial Sequence
  Synthetic
gaggugaacaauguuccggagacu

SEQ ID NO: 105567 - RNA, 18 nt, Artificial Sequence
  Synthetic
caaaagacaccaaauacu

SEQ ID NO: 105568 - RNA, 19 nt, Artificial Sequence
  Synthetic
ccaaaagacaccaaauacu

SEQ ID NO: 105569 - RNA, 20 nt, Artificial Sequence
  Synthetic
uccaaaagacaccaaauacu

SEQ ID NO: 105570 - RNA, 21 nt, Artificial Sequence
  Synthetic
cuccaaaagacaccaaauacu

SEQ ID NO: 105571 - RNA, 22 nt, Artificial Sequence
  Synthetic
acuccaaaagacaccaaauacu

SEQ ID NO: 105572 - RNA, 23 nt, Artificial Sequence
  Synthetic
cacuccaaaagacaccaaauacu

SEQ ID NO: 105573 - RNA, 24 nt, Artificial Sequence
  Synthetic
acacuccaaaagacaccaaauacu

SEQ ID NO: 105574 - RNA, 18 nt, Artificial Sequence
  Synthetic
aagguuaggauagaaccu

SEQ ID NO: 105575 - RNA, 19 nt, Artificial Sequence
  Synthetic
uaagguuaggauagaaccu

SEQ ID NO: 105576 - RNA, 20 nt, Artificial Sequence
  Synthetic
guaagguuaggauagaaccu

SEQ ID NO: 105577 - RNA, 21 nt, Artificial Sequence
  Synthetic
gguaagguuaggauagaaccu

SEQ ID NO: 105578 - RNA, 22 nt, Artificial Sequence
  Synthetic
ugguaagguuaggauagaaccu

SEQ ID NO: 105579 - RNA, 23 nt, Artificial Sequence
  Synthetic
uugguaagguuaggauagaaccu

SEQ ID NO: 105580 - RNA, 24 nt, Artificial Sequence
  Synthetic
uuugguaagguuaggauagaaccu

SEQ ID NO: 105581 - RNA, 18 nt, Artificial Sequence
  Synthetic
caguaaaguuucccaccu

SEQ ID NO: 105582 - RNA, 19 nt, Artificial Sequence
  Synthetic
ccaguaaaguuucccaccu

SEQ ID NO: 105583 - RNA, 20 nt, Artificial Sequence
  Synthetic
cccaguaaaguuucccaccu

SEQ ID NO: 105584 - RNA, 21 nt, Artificial Sequence
  Synthetic
gcccaguaaaguuucccaccu

SEQ ID NO: 105585 - RNA, 22 nt, Artificial Sequence
  Synthetic
agcccaguaaaguuucccaccu

SEQ ID NO: 105586 - RNA, 23 nt, Artificial Sequence
  Synthetic
aagcccaguaaaguuucccaccu

SEQ ID NO: 105587 - RNA, 24 nt, Artificial Sequence
  Synthetic
aaagcccaguaaaguuucccaccu

SEQ ID NO: 105588 - RNA, 18 nt, Artificial Sequence
  Synthetic
agaccuugggcaagaccu

SEQ ID NO: 105589 - RNA, 19 nt, Artificial Sequence
  Synthetic
aagaccuugggcaagaccu

SEQ ID NO: 105590 - RNA, 20 nt, Artificial Sequence
  Synthetic
uaagaccuugggcaagaccu

SEQ ID NO: 105591 - RNA, 21 nt, Artificial Sequence
  Synthetic
  misc_feature (1)..(1): n is a, c, g, or u
nuaagaccuugggcaagaccu

SEQ ID NO: 105592 - RNA, 22 nt, Artificial Sequence
  Synthetic
  misc_feature (2)..(2): n is a, c, g, or u
unuaagaccuugggcaagaccu

SEQ ID NO: 105593 - RNA, 23 nt, Artificial Sequence
  Synthetic
  misc_feature (3)..(3): n is a, c, g, or u
aunuaagaccuugggcaagaccu

SEQ ID NO: 105594 - RNA, 24 nt, Artificial Sequence
  Synthetic
  misc_feature (4)..(4): n is a, c, g, or u
uaunuaagaccuugggcaagaccu

SEQ ID NO: 105595 - RNA, 18 nt, Artificial Sequence
  Synthetic
cacgugggugcucccccu

SEQ ID NO: 105596 - RNA, 19 nt, Artificial Sequence
  Synthetic
acacgugggugcucccccu

SEQ ID NO: 105597 - RNA, 20 nt, Artificial Sequence
  Synthetic
gacacgugggugcucccccu

SEQ ID NO: 105598 - RNA, 21 nt, Artificial Sequence
  Synthetic
ggacacgugggugcucccccu

SEQ ID NO: 105599 - RNA, 22 nt, Artificial Sequence
  Synthetic
aggacacgugggugcucccccu

SEQ ID NO: 105600 - RNA, 23 nt, Artificial Sequence
  Synthetic
caggacacgugggugcucccccu

SEQ ID NO: 105601 - RNA, 24 nt, Artificial Sequence
  Synthetic
ccaggacacgugggugcucccccu

SEQ ID NO: 105602 - RNA, 18 nt, Artificial Sequence
  Synthetic
acagugggggaaagcccu

SEQ ID NO: 105603 - RNA, 19 nt, Artificial Sequence
  Synthetic
aacagugggggaaagcccu

SEQ ID NO: 105604 - RNA, 20 nt, Artificial Sequence
  Synthetic
aaacagugggggaaagcccu

SEQ ID NO: 105605 - RNA, 21 nt, Artificial Sequence
  Synthetic
caaacagugggggaaagcccu

SEQ ID NO: 105606 - RNA, 22 nt, Artificial Sequence
  Synthetic
ccaaacagugggggaaagcccu

SEQ ID NO: 105607 - RNA, 23 nt, Artificial Sequence
  Synthetic
gccaaacagugggggaaagcccu

SEQ ID NO: 105608 - RNA, 24 nt, Artificial Sequence
  Synthetic
agccaaacagugggggaaagcccu

SEQ ID NO: 105609 - RNA, 18 nt, Artificial Sequence
  Synthetic
ucaauaugcccugagccu

SEQ ID NO: 105610 - RNA, 19 nt, Artificial Sequence
  Synthetic
gucaauaugcccugagccu

SEQ ID NO: 105611 - RNA, 20 nt, Artificial Sequence
  Synthetic
ugucaauaugcccugagccu

SEQ ID NO: 105612 - RNA, 21 nt, Artificial Sequence
  Synthetic
uugucaauaugcccugagccu

SEQ ID NO: 105613 - RNA, 22 nt, Artificial Sequence
  Synthetic
guugucaauaugcccugagccu

SEQ ID NO: 105614 - RNA, 23 nt, Artificial Sequence
  Synthetic
uguugucaauaugcccugagccu

SEQ ID NO: 105615 - RNA, 24 nt, Artificial Sequence
  Synthetic
cuguugucaauaugcccugagccu

SEQ ID NO: 105616 - RNA, 18 nt, Artificial Sequence
  Synthetic
guuuacacagaaaggccu

SEQ ID NO: 105617 - RNA, 19 nt, Artificial Sequence
  Synthetic
uguuuacacagaaaggccu

SEQ ID NO: 105618 - RNA, 20 nt, Artificial Sequence
  Synthetic
uuguuuacacagaaaggccu

SEQ ID NO: 105619 - RNA, 21 nt, Artificial Sequence
  Synthetic
auuguuuacacagaaaggccu

SEQ ID NO: 105620 - RNA, 22 nt, Artificial Sequence
  Synthetic
uauuguuuacacagaaaggccu

SEQ ID NO: 105621 - RNA, 23 nt, Artificial Sequence
  Synthetic
auauuguuuacacagaaaggccu

SEQ ID NO: 105622 - RNA, 24 nt, Artificial Sequence
  Synthetic
gauauuguuuacacagaaaggccu

SEQ ID NO: 105623 - RNA, 18 nt, Artificial Sequence
  Synthetic
ugcaggguccccaguccu

SEQ ID NO: 105624 - RNA, 19 nt, Artificial Sequence
  Synthetic
gugcaggguccccaguccu

SEQ ID NO: 105625 - RNA, 20 nt, Artificial Sequence
  Synthetic
ggugcaggguccccaguccu

SEQ ID NO: 105626 - RNA, 21 nt, Artificial Sequence
  Synthetic
cggugcaggguccccaguccu

SEQ ID NO: 105627 - RNA, 22 nt, Artificial Sequence
  Synthetic
ucggugcaggguccccaguccu

SEQ ID NO: 105628 - RNA, 23 nt, Artificial Sequence
  Synthetic
uucggugcaggguccccaguccu

SEQ ID NO: 105629 - RNA, 24 nt, Artificial Sequence
  Synthetic
  misc_feature (1)..(1): n is a, c, g, or u
nuucggugcaggguccccaguccu

SEQ ID NO: 105630 - RNA, 18 nt, Artificial Sequence
  Synthetic
cugcgagcaaaacaagcu

SEQ ID NO: 105631 - RNA, 19 nt, Artificial Sequence
  Synthetic
gcugcgagcaaaacaagcu

SEQ ID NO: 105632 - RNA, 20 nt, Artificial Sequence
  Synthetic
ggcugcgagcaaaacaagcu

SEQ ID NO: 105633 - RNA, 21 nt, Artificial Sequence
  Synthetic
cggcugcgagcaaaacaagcu

SEQ ID NO: 105634 - RNA, 22 nt, Artificial Sequence
  Synthetic
ccggcugcgagcaaaacaagcu

SEQ ID NO: 105635 - RNA, 23 nt, Artificial Sequence
  Synthetic
accggcugcgagcaaaacaagcu

SEQ ID NO: 105636 - RNA, 24 nt, Artificial Sequence
  Synthetic
gaccggcugcgagcaaaacaagcu

SEQ ID NO: 105637 - RNA, 18 nt, Artificial Sequence
  Synthetic
gccacccaaggcacagcu

SEQ ID NO: 105638 - RNA, 19 nt, Artificial Sequence
  Synthetic
agccacccaaggcacagcu

SEQ ID NO: 105639 - RNA, 20 nt, Artificial Sequence
  Synthetic
aagccacccaaggcacagcu

SEQ ID NO: 105640 - RNA, 21 nt, Artificial Sequence
  Synthetic
aaagccacccaaggcacagcu

SEQ ID NO: 105641 - RNA, 22 nt, Artificial Sequence
  Synthetic
  misc_feature (1)..(1): n is a, c, g, or u
naaagccacccaaggcacagcu

SEQ ID NO: 105642 - RNA, 23 nt, Artificial Sequence
  Synthetic
  misc_feature (2)..(2): n is a, c, g, or u
cnaaagccacccaaggcacagcu

SEQ ID NO: 105643 - RNA, 24 nt, Artificial Sequence
  Synthetic
  misc_feature (3)..(3): n is a, c, g, or u
ccnaaagccacccaaggcacagcu

SEQ ID NO: 105644 - RNA, 18 nt, Artificial Sequence
  Synthetic
  misc_feature (4)..(4): n is a, c, g, or u
uuungcuccagaccggcu

SEQ ID NO: 105645 - RNA, 19 nt, Artificial Sequence
  Synthetic
  misc_feature (5)..(5): n is a, c, g, or u
guuungcuccagaccggcu

SEQ ID NO: 105646 - RNA, 20 nt, Artificial Sequence
  Synthetic
  misc_feature (6)..(6): n is a, c, g, or u
aguuungcuccagaccggcu

SEQ ID NO: 105647 - RNA, 21 nt, Artificial Sequence
  Synthetic
  misc_feature (1)..(1): n is a, c, g, or u
  misc_feature (7)..(7): n is a, c, g, or u
naguuungcuccagaccggcu

SEQ ID NO: 105648 - RNA, 22 nt, Artificial Sequence
  Synthetic
  misc_feature (2)..(2): n is a, c, g, or u
  misc_feature (8)..(8): n is a, c, g, or u
unaguuungcuccagaccggcu

SEQ ID NO: 105649 - RNA, 23 nt, Artificial Sequence
  Synthetic
  misc_feature (3)..(3): n is a, c, g, or u
  misc_feature (9)..(9): n is a, c, g, or u
aunaguuungcuccagaccggcu

SEQ ID NO: 105650 - RNA, 24 nt, Artificial Sequence
  Synthetic
  misc_feature (4)..(4): n is a, c, g, or u
  misc_feature (10)..(10): n is a, c, g, or u
gaunaguuungcuccagaccggcu

SEQ ID NO: 105651 - RNA, 18 nt, Artificial Sequence
  Synthetic
  misc_feature (12)..(12): n is a, c, g, or u
ggauuguuuganuuggcu

SEQ ID NO: 105652 - RNA, 19 nt, Artificial Sequence
  Synthetic
  misc_feature (13)..(13): n is a, c, g, or u
uggauuguuuganuuggcu

SEQ ID NO: 105653 - RNA, 20 nt, Artificial Sequence
  Synthetic
  misc_feature (14)..(14): n is a, c, g, or u
cuggauuguuuganuuggcu

SEQ ID NO: 105654 - RNA, 21 nt, Artificial Sequence
  Synthetic
  misc_feature (15)..(15): n is a, c, g, or u
ucuggauuguuuganuuggcu

SEQ ID NO: 105655 - RNA, 22 nt, Artificial Sequence
  Synthetic
  misc_feature (16)..(16): n is a, c, g, or u
aucuggauuguuuganuuggcu

SEQ ID NO: 105656 - RNA, 23 nt, Artificial Sequence
  Synthetic
  misc_feature (17)..(17): n is a, c, g, or u
aaucuggauuguuuganuuggcu

SEQ ID NO: 105657 - RNA, 24 nt, Artificial Sequence
  Synthetic
  misc_feature (18)..(18): n is a, c, g, or u
caaucuggauuguuuganuuggcu

SEQ ID NO: 105658 - RNA, 18 nt, Artificial Sequence
  Synthetic
  misc_feature (15)..(15): n is a, c, g, or u
gaggcaggaggaggngcu

SEQ ID NO: 105659 - RNA, 19 nt, Artificial Sequence
  Synthetic
  misc_feature (16)..(16): n is a, c, g, or u
ggaggcaggaggaggngcu

SEQ ID NO: 105660 - RNA, 20 nt, Artificial Sequence
  Synthetic
  misc_feature (17)..(17): n is a, c, g, or u
uggaggcaggaggaggngcu

SEQ ID NO: 105661 - RNA, 21 nt, Artificial Sequence
  Synthetic
  misc_feature (18)..(18): n is a, c, g, or u
guggaggcaggaggaggngcu

SEQ ID NO: 105662 - RNA, 22 nt, Artificial Sequence
  Synthetic
  misc_feature (19)..(19): n is a, c, g, or u
gguggaggcaggaggaggngcu

SEQ ID NO: 105663 - RNA, 23 nt, Artificial Sequence
  Synthetic
  misc_feature (20)..(20): n is a, c, g, or u
ugguggaggcaggaggaggngcu

SEQ ID NO: 105664 - RNA, 24 nt, Artificial Sequence
  Synthetic
  misc_feature (21)..(21): n is a, c, g, or u
uugguggaggcaggaggaggngcu

SEQ ID NO: 105665 - RNA, 18 nt, Artificial Sequence
  Synthetic
  misc_feature (3)..(3): n is a, c, g, or u
  misc_feature (9)..(9): n is a, c, g, or u
  misc_feature (15)..(15): n is a, c, g, or u
gunccgaunaguuungcu

SEQ ID NO: 105666 - RNA, 19 nt, Artificial Sequence
  Synthetic
  misc_feature (1)..(1): n is a, c, g, or u
  misc_feature (4)..(4): n is a, c, g, or u
  misc_feature (10)..(10): n is a, c, g, or u
  misc_feature (16)..(16): n is a, c, g, or u
ngunccgaunaguuungcu

SEQ ID NO: 105667 - RNA, 20 nt, Artificial Sequence
  Synthetic
  misc_feature (2)..(2): n is a, c, g, or u
  misc_feature (5)..(5): n is a, c, g, or u
  misc_feature (11)..(11): n is a, c, g, or u
  misc_feature (17)..(17): n is a, c, g, or u
cngunccgaunaguuungcu

SEQ ID NO: 105668 - RNA, 21 nt, Artificial Sequence
  Synthetic
  misc_feature (3)..(3): n is a, c, g, or u
  misc_feature (6)..(6): n is a, c, g, or u
  misc_feature (12)..(12): n is a, c, g, or u
  misc_feature (18)..(18): n is a, c, g, or u
ucngunccgaunaguuungcu

SEQ ID NO: 105669 - RNA, 22 nt, Artificial Sequence
  Synthetic
  misc_feature (4)..(4): n is a, c, g, or u
  misc_feature (7)..(7): n is a, c, g, or u
  misc_feature (13)..(13): n is a, c, g, or u
  misc_feature (19)..(19): n is a, c, g, or u
gucngunccgaunaguuungcu

SEQ ID NO: 105670 - RNA, 23 nt, Artificial Sequence
  Synthetic
  misc_feature (5)..(5): n is a, c, g, or u
  misc_feature (8)..(8): n is a, c, g, or u
  misc_feature (14)..(14): n is a, c, g, or u
  misc_feature (20)..(20): n is a, c, g, or u
ugucngunccgaunaguuungcu

SEQ ID NO: 105671 - RNA, 24 nt, Artificial Sequence
  Synthetic
  misc_feature (6)..(6): n is a, c, g, or u
  misc_feature (9)..(9): n is a, c, g, or u
  misc_feature (15)..(15): n is a, c, g, or u
  misc_feature (21)..(21): n is a, c, g, or u
uugucngunccgaunaguuungcu

SEQ ID NO: 105672 - RNA, 18 nt, Artificial Sequence
  Synthetic
aaaaaguugcauggugcu

SEQ ID NO: 105673 - RNA, 19 nt, Artificial Sequence
  Synthetic
gaaaaaguugcauggugcu

SEQ ID NO: 105674 - RNA, 20 nt, Artificial Sequence
  Synthetic
ugaaaaaguugcauggugcu

SEQ ID NO: 105675 - RNA, 21 nt, Artificial Sequence
  Synthetic
gugaaaaaguugcauggugcu

SEQ ID NO: 105676 - RNA, 22 nt, Artificial Sequence
  Synthetic
ggugaaaaaguugcauggugcu

SEQ ID NO: 105677 - RNA, 23 nt, Artificial Sequence
  Synthetic
aggugaaaaaguugcauggugcu

SEQ ID NO: 105678 - RNA, 24 nt, Artificial Sequence
  Synthetic
gaggugaaaaaguugcauggugcu

SEQ ID NO: 105679 - RNA, 18 nt, Artificial Sequence
  Synthetic
ccacucccauaggaaucu

SEQ ID NO: 105680 - RNA, 19 nt, Artificial Sequence
  Synthetic
cccacucccauaggaaucu

SEQ ID NO: 105681 - RNA, 20 nt, Artificial Sequence
  Synthetic
gcccacucccauaggaaucu

SEQ ID NO: 105682 - RNA, 21 nt, Artificial Sequence
  Synthetic
ggcccacucccauaggaaucu

SEQ ID NO: 105683 - RNA, 22 nt, Artificial Sequence
  Synthetic
aggcccacucccauaggaaucu

SEQ ID NO: 105684 - RNA, 23 nt, Artificial Sequence
  Synthetic
gaggcccacucccauaggaaucu

SEQ ID NO: 105685 - RNA, 24 nt, Artificial Sequence
  Synthetic
ugaggcccacucccauaggaaucu

SEQ ID NO: 105686 - RNA, 18 nt, Artificial Sequence
  Synthetic
cugaggaugacugucucu

SEQ ID NO: 105687 - RNA, 19 nt, Artificial Sequence
  Synthetic
ccugaggaugacugucucu

SEQ ID NO: 105688 - RNA, 20 nt, Artificial Sequence
  Synthetic
gccugaggaugacugucucu

SEQ ID NO: 105689 - RNA, 21 nt, Artificial Sequence
  Synthetic
ggccugaggaugacugucucu

SEQ ID NO: 105690 - RNA, 22 nt, Artificial Sequence
  Synthetic
uggccugaggaugacugucucu

SEQ ID NO: 105691 - RNA, 23 nt, Artificial Sequence
  Synthetic
auggccugaggaugacugucucu

SEQ ID NO: 105692 - RNA, 24 nt, Artificial Sequence
  Synthetic
cauggccugaggaugacugucucu

SEQ ID NO: 105693 - RNA, 18 nt, Artificial Sequence
  Synthetic
cucaagaacaguuucucu

SEQ ID NO: 105694 - RNA, 19 nt, Artificial Sequence
  Synthetic
acucaagaacaguuucucu

SEQ ID NO: 105695 - RNA, 20 nt, Artificial Sequence
  Synthetic
uacucaagaacaguuucucu

SEQ ID NO: 105696 - RNA, 21 nt, Artificial Sequence
  Synthetic
auacucaagaacaguuucucu

SEQ ID NO: 105697 - RNA, 22 nt, Artificial Sequence
  Synthetic
aauacucaagaacaguuucucu

SEQ ID NO: 105698 - RNA, 23 nt, Artificial Sequence
  Synthetic
aaauacucaagaacaguuucucu

SEQ ID NO: 105699 - RNA, 24 nt, Artificial Sequence
  Synthetic
caaauacucaagaacaguuucucu

SEQ ID NO: 105700 - RNA, 18 nt, Artificial Sequence
  Synthetic
  misc_feature (3)..(3): n is a, c, g, or u
  misc_feature (9)..(9): n is a, c, g, or u
  misc_feature (11)..(11): n is a, c, g, or u
ucnuuaaananacagucu

SEQ ID NO: 105701 - RNA, 19 nt, Artificial Sequence
  Synthetic
  misc_feature (4)..(4): n is a, c, g, or u
  misc_feature (10)..(10): n is a, c, g, or u
  misc_feature (12)..(12): n is a, c, g, or u
gucnuuaaananacagucu

SEQ ID NO: 105702 - RNA, 20 nt, Artificial Sequence
  Synthetic
  misc_feature (5)..(5): n is a, c, g, or u
  misc_feature (11)..(11): n is a, c, g, or u
  misc_feature (13)..(13): n is a, c, g, or u
agucnuuaaananacagucu

SEQ ID NO: 105703 - RNA, 21 nt, Artificial Sequence
  Synthetic
  misc_feature (6)..(6): n is a, c, g, or u
  misc_feature (12)..(12): n is a, c, g, or u
  misc_feature (14)..(14): n is a, c, g, or u
cagucnuuaaananacagucu

SEQ ID NO: 105704 - RNA, 22 nt, Artificial Sequence
  Synthetic
  misc_feature (7)..(7): n is a, c, g, or u
  misc_feature (13)..(13): n is a, c, g, or u
  misc_feature (15)..(15): n is a, c, g, or u
ccagucnuuaaananacagucu

SEQ ID NO: 105705 - RNA, 23 nt, Artificial Sequence
  Synthetic
  misc_feature (8)..(8): n is a, c, g, or u
  misc_feature (14)..(14): n is a, c, g, or u
  misc_feature (16)..(16): n is a, c, g, or u
cccagucnuuaaananacagucu

SEQ ID NO: 105706 - RNA, 24 nt, Artificial Sequence
  Synthetic
  misc_feature (9)..(9): n is a, c, g, or u
  misc_feature (15)..(15): n is a, c, g, or u
  misc_feature (17)..(17): n is a, c, g, or u
ucccagucnuuaaananacagucu

SEQ ID NO: 105707 - RNA, 18 nt, Artificial Sequence
  Synthetic
ggaccugccucgucgucu

SEQ ID NO: 105708 - RNA, 19 nt, Artificial Sequence
  Synthetic
gggaccugccucgucgucu

SEQ ID NO: 105709 - RNA, 20 nt, Artificial Sequence
  Synthetic
ggggaccugccucgucgucu

SEQ ID NO: 105710 - RNA, 21 nt, Artificial Sequence
  Synthetic
aggggaccugccucgucgucu

SEQ ID NO: 105711 - RNA, 22 nt, Artificial Sequence
  Synthetic
uaggggaccugccucgucgucu

SEQ ID NO: 105712 - RNA, 23 nt, Artificial Sequence
  Synthetic
cuaggggaccugccucgucgucu

SEQ ID NO: 105713 - RNA, 24 nt, Artificial Sequence
  Synthetic
ucuaggggaccugccucgucgucu

SEQ ID NO: 105714 - RNA, 18 nt, Artificial Sequence
  Synthetic
cgauugagaccuucgucu

SEQ ID NO: 105715 - RNA, 19 nt, Artificial Sequence
  Synthetic
gcgauugagaccuucgucu

SEQ ID NO: 105716 - RNA, 20 nt, Artificial Sequence
  Synthetic
ggcgauugagaccuucgucu

SEQ ID NO: 105717 - RNA, 18 nt, Artificial Sequence
  Synthetic
aggggcauuugguggucu

SEQ ID NO: 105718 - RNA, 19 nt, Artificial Sequence
  Synthetic
uaggggcauuugguggucu

SEQ ID NO: 105719 - RNA, 20 nt, Artificial Sequence
  Synthetic
auaggggcauuugguggucu

SEQ ID NO: 105720 - RNA, 21 nt, Artificial Sequence
  Synthetic
gauaggggcauuugguggucu

SEQ ID NO: 105721 - RNA, 22 nt, Artificial Sequence
  Synthetic
agauaggggcauuugguggucu

SEQ ID NO: 105722 - RNA, 23 nt, Artificial Sequence
  Synthetic
aagauaggggcauuugguggucu

SEQ ID NO: 105723 - RNA, 24 nt, Artificial Sequence
  Synthetic
uaagauaggggcauuugguggucu

SEQ ID NO: 105724 - RNA, 18 nt, Artificial Sequence
  Synthetic
gccugaggaugacugucu

SEQ ID NO: 105725 - RNA, 19 nt, Artificial Sequence
  Synthetic
ggccugaggaugacugucu

SEQ ID NO: 105726 - RNA, 20 nt, Artificial Sequence
  Synthetic
uggccugaggaugacugucu

SEQ ID NO: 105727 - RNA, 21 nt, Artificial Sequence
  Synthetic
auggccugaggaugacugucu

SEQ ID NO: 105728 - RNA, 22 nt, Artificial Sequence
  Synthetic
cauggccugaggaugacugucu

SEQ ID NO: 105729 - RNA, 23 nt, Artificial Sequence
  Synthetic
gcauggccugaggaugacugucu

SEQ ID NO: 105730 - RNA, 24 nt, Artificial Sequence
  Synthetic
ugcauggccugaggaugacugucu

SEQ ID NO: 105731 - RNA, 18 nt, Artificial Sequence
  Synthetic
  misc_feature (15)..(15): n is a, c, g, or u
ccccucacucugggnucu

SEQ ID NO: 105732 - RNA, 19 nt, Artificial Sequence
  Synthetic
  misc_feature (16)..(16): n is a, c, g, or u
gccccucacucugggnucu

SEQ ID NO: 105733 - RNA, 20 nt, Artificial Sequence
  Synthetic
  misc_feature (17)..(17): n is a, c, g, or u
ggccccucacucugggnucu

SEQ ID NO: 105734 - RNA, 21 nt, Artificial Sequence
  Synthetic
  misc_feature (18)..(18): n is a, c, g, or u
aggccccucacucugggnucu

SEQ ID NO: 105735 - RNA, 22 nt, Artificial Sequence
  Synthetic
  misc_feature (19)..(19): n is a, c, g, or u
uaggccccucacucugggnucu

SEQ ID NO: 105736 - RNA, 23 nt, Artificial Sequence
  Synthetic
  misc_feature (20)..(20): n is a, c, g, or u
auaggccccucacucugggnucu

SEQ ID NO: 105737 - RNA, 24 nt, Artificial Sequence
  Synthetic
  misc_feature (21)..(21): n is a, c, g, or u
uauaggccccucacucugggnucu

SEQ ID NO: 105738 - RNA, 18 nt, Artificial Sequence
  Synthetic
  misc_feature (15)..(15): n is a, c, g, or u
ucccuggaugcuggnucu

SEQ ID NO: 105739 - RNA, 19 nt, Artificial Sequence
  Synthetic
  misc_feature (16)..(16): n is a, c, g, or u
uucccuggaugcuggnucu

SEQ ID NO: 105740 - RNA, 20 nt, Artificial Sequence
  Synthetic
  misc_feature (17)..(17): n is a, c, g, or u
auucccuggaugcuggnucu

SEQ ID NO: 105741 - RNA, 21 nt, Artificial Sequence
  Synthetic
  misc_feature (18)..(18): n is a, c, g, or u
aauucccuggaugcuggnucu

SEQ ID NO: 105742 - RNA, 22 nt, Artificial Sequence
  Synthetic
  misc_feature (19)..(19): n is a, c, g, or u
uaauucccuggaugcuggnucu

SEQ ID NO: 105743 - RNA, 23 nt, Artificial Sequence
  Synthetic
  misc_feature (20)..(20): n is a, c, g, or u
cuaauucccuggaugcuggnucu

SEQ ID NO: 105744 - RNA, 24 nt, Artificial Sequence
  Synthetic
  misc_feature (21)..(21): n is a, c, g, or u
acuaauucccuggaugcuggnucu

SEQ ID NO: 105745 - RNA, 18 nt, Artificial Sequence
  Synthetic
cgagggaguucuucuucu

SEQ ID NO: 105746 - RNA, 19 nt, Artificial Sequence
  Synthetic
gcgagggaguucuucuucu

SEQ ID NO: 105747 - RNA, 20 nt, Artificial Sequence
  Synthetic
ggcgagggaguucuucuucu

SEQ ID NO: 105748 - RNA, 21 nt, Artificial Sequence
  Synthetic
aggcgagggaguucuucuucu

SEQ ID NO: 105749 - RNA, 22 nt, Artificial Sequence
  Synthetic
gaggcgagggaguucuucuucu

SEQ ID NO: 105750 - RNA, 23 nt, Artificial Sequence
  Synthetic
cgaggcgagggaguucuucuucu

SEQ ID NO: 105751 - RNA, 24 nt, Artificial Sequence
  Synthetic
gcgaggcgagggaguucuucuucu

SEQ ID NO: 105752 - RNA, 18 nt, Artificial Sequence
  Synthetic
aggcgagggaguucuucu

SEQ ID NO: 105753 - RNA, 19 nt, Artificial Sequence
  Synthetic
gaggcgagggaguucuucu

SEQ ID NO: 105754 - RNA, 20 nt, Artificial Sequence
  Synthetic
cgaggcgagggaguucuucu

SEQ ID NO: 105755 - RNA, 21 nt, Artificial Sequence
  Synthetic
gcgaggcgagggaguucuucu

SEQ ID NO: 105756 - RNA, 22 nt, Artificial Sequence
  Synthetic
ugcgaggcgagggaguucuucu

SEQ ID NO: 105757 - RNA, 23 nt, Artificial Sequence
  Synthetic
cugcgaggcgagggaguucuucu

SEQ ID NO: 105758 - RNA, 24 nt, Artificial Sequence
  Synthetic
ucugcgaggcgagggaguucuucu

SEQ ID NO: 105759 - RNA, 18 nt, Artificial Sequence
  Synthetic
guaaguuggcgagaaagu

SEQ ID NO: 105760 - RNA, 19 nt, Artificial Sequence
  Synthetic
uguaaguuggcgagaaagu

SEQ ID NO: 105761 - RNA, 20 nt, Artificial Sequence
  Synthetic
uuguaaguuggcgagaaagu

SEQ ID NO: 105762 - RNA, 21 nt, Artificial Sequence
  Synthetic
cuuguaaguuggcgagaaagu

SEQ ID NO: 105763 - RNA, 22 nt, Artificial Sequence
  Synthetic
ccuuguaaguuggcgagaaagu

SEQ ID NO: 105764 - RNA, 23 nt, Artificial Sequence
  Synthetic
gccuuguaaguuggcgagaaagu

SEQ ID NO: 105765 - RNA, 24 nt, Artificial Sequence
  Synthetic
ggccuuguaaguuggcgagaaagu

SEQ ID NO: 105766 - RNA, 18 nt, Artificial Sequence
  Synthetic
gaauagaaggaaagaagu

SEQ ID NO: 105767 - RNA, 19 nt, Artificial Sequence
  Synthetic
cgaauagaaggaaagaagu

SEQ ID NO: 105768 - RNA, 20 nt, Artificial Sequence
  Synthetic
  misc_feature (1)..(1): n is a, c, g, or u
ncgaauagaaggaaagaagu

SEQ ID NO: 105769 - RNA, 21 nt, Artificial Sequence
  Synthetic
  misc_feature (2)..(2): n is a, c, g, or u
cncgaauagaaggaaagaagu

SEQ ID NO: 105770 - RNA, 22 nt, Artificial Sequence
  Synthetic
  misc_feature (3)..(3): n is a, c, g, or u
ucncgaauagaaggaaagaagu

SEQ ID NO: 105771 - RNA, 23 nt, Artificial Sequence
  Synthetic
  misc_feature (4)..(4): n is a, c, g, or u
aucncgaauagaaggaaagaagu

SEQ ID NO: 105772 - RNA, 24 nt, Artificial Sequence
  Synthetic
  misc_feature (5)..(5): n is a, c, g, or u
gaucncgaauagaaggaaagaagu

SEQ ID NO: 105773 - RNA, 18 nt, Artificial Sequence
  Synthetic
guugauguuccuggaagu

SEQ ID NO: 105774 - RNA, 19 nt, Artificial Sequence
  Synthetic
aguugauguuccuggaagu

SEQ ID NO: 105775 - RNA, 20 nt, Artificial Sequence
  Synthetic
uaguugauguuccuggaagu

SEQ ID NO: 105776 - RNA, 21 nt, Artificial Sequence
  Synthetic
guaguugauguuccuggaagu

SEQ ID NO: 105777 - RNA, 22 nt, Artificial Sequence
  Synthetic
gguaguugauguuccuggaagu

SEQ ID NO: 105778 - RNA, 23 nt, Artificial Sequence
  Synthetic
ugguaguugauguuccuggaagu

SEQ ID NO: 105779 - RNA, 24 nt, Artificial Sequence
  Synthetic
cugguaguugauguuccuggaagu

SEQ ID NO: 105780 - RNA, 18 nt, Artificial Sequence
  Synthetic
aacugaaagccaaacagu

SEQ ID NO: 105781 - RNA, 19 nt, Artificial Sequence
  Synthetic
uaacugaaagccaaacagu

SEQ ID NO: 105782 - RNA, 20 nt, Artificial Sequence
  Synthetic
auaacugaaagccaaacagu

SEQ ID NO: 105783 - RNA, 21 nt, Artificial Sequence
  Synthetic
uauaacugaaagccaaacagu

SEQ ID NO: 105784 - RNA, 22 nt, Artificial Sequence
  Synthetic
auauaacugaaagccaaacagu

SEQ ID NO: 105785 - RNA, 23 nt, Artificial Sequence
  Synthetic
cauauaacugaaagccaaacagu

SEQ ID NO: 105786 - RNA, 24 nt, Artificial Sequence
  Synthetic
ccauauaacugaaagccaaacagu

SEQ ID NO: 105787 - RNA, 18 nt, Artificial Sequence
  Synthetic
auuaaagacagguacagu

SEQ ID NO: 105788 - RNA, 19 nt, Artificial Sequence
  Synthetic
gauuaaagacagguacagu

SEQ ID NO: 105789 - RNA, 20 nt, Artificial Sequence
  Synthetic
ggauuaaagacagguacagu

SEQ ID NO: 105790 - RNA, 21 nt, Artificial Sequence
  Synthetic
aggauuaaagacagguacagu

SEQ ID NO: 105791 - RNA, 22 nt, Artificial Sequence
  Synthetic
caggauuaaagacagguacagu

SEQ ID NO: 105792 - RNA, 23 nt, Artificial Sequence
  Synthetic
ucaggauuaaagacagguacagu

SEQ ID NO: 105793 - RNA, 24 nt, Artificial Sequence
  Synthetic
  misc_feature (1)..(1): n is a, c, g, or u
nucaggauuaaagacagguacagu

SEQ ID NO: 105794 - RNA, 18 nt, Artificial Sequence
  Synthetic
gagaaguccaccacgagu

SEQ ID NO: 105795 - RNA, 19 nt, Artificial Sequence
  Synthetic
agagaaguccaccacgagu

SEQ ID NO: 105796 - RNA, 20 nt, Artificial Sequence
  Synthetic
gagagaaguccaccacgagu

SEQ ID NO: 105797 - RNA, 21 nt, Artificial Sequence
  Synthetic
ugagagaaguccaccacgagu

SEQ ID NO: 105798 - RNA, 22 nt, Artificial Sequence
  Synthetic
uugagagaaguccaccacgagu

SEQ ID NO: 105799 - RNA, 23 nt, Artificial Sequence
  Synthetic
auugagagaaguccaccacgagu

SEQ ID NO: 105800 - RNA, 24 nt, Artificial Sequence
  Synthetic
aauugagagaaguccaccacgagu

SEQ ID NO: 105801 - RNA, 18 nt, Artificial Sequence
  Synthetic
  misc_feature (14)..(14): n is a, c, g, or u
guugacauugcugngagu

SEQ ID NO: 105802 - RNA, 19 nt, Artificial Sequence
  Synthetic
  misc_feature (15)..(15): n is a, c, g, or u
cguugacauugcugngagu

SEQ ID NO: 105803 - RNA, 20 nt, Artificial Sequence
  Synthetic
  misc_feature (16)..(16): n is a, c, g, or u
ucguugacauugcugngagu

SEQ ID NO: 105804 - RNA, 21 nt, Artificial Sequence
  Synthetic
  misc_feature (17)..(17): n is a, c, g, or u
gucguugacauugcugngagu

SEQ ID NO: 105805 - RNA, 22 nt, Artificial Sequence
  Synthetic
  misc_feature (18)..(18): n is a, c, g, or u
ggucguugacauugcugngagu

SEQ ID NO: 105806 - RNA, 23 nt, Artificial Sequence
  Synthetic
  misc_feature (19)..(19): n is a, c, g, or u
cggucguugacauugcugngagu

SEQ ID NO: 105807 - RNA, 24 nt, Artificial Sequence
  Synthetic
  misc_feature (20)..(20): n is a, c, g, or u
ucggucguugacauugcugngagu

SEQ ID NO: 105808 - RNA, 18 nt, Artificial Sequence
  Synthetic
guuucccaccuuaugagu

SEQ ID NO: 105809 - RNA, 19 nt, Artificial Sequence
  Synthetic
aguuucccaccuuaugagu

SEQ ID NO: 105810 - RNA, 20 nt, Artificial Sequence
  Synthetic
aaguuucccaccuuaugagu

SEQ ID NO: 105811 - RNA, 21 nt, Artificial Sequence
  Synthetic
aaaguuucccaccuuaugagu

SEQ ID NO: 105812 - RNA, 22 nt, Artificial Sequence
  Synthetic
uaaaguuucccaccuuaugagu

SEQ ID NO: 105813 - RNA, 23 nt, Artificial Sequence
  Synthetic
guaaaguuucccaccuuaugagu

SEQ ID NO: 105814 - RNA, 24 nt, Artificial Sequence
  Synthetic
aguaaaguuucccaccuuaugagu

SEQ ID NO: 105815 - RNA, 18 nt, Artificial Sequence
  Synthetic
  misc_feature (15)..(15): n is a, c, g, or u
ugccuacagccuccnagu

SEQ ID NO: 105816 - RNA, 19 nt, Artificial Sequence
  Synthetic
  misc_feature (16)..(16): n is a, c, g, or u
augccuacagccuccnagu

SEQ ID NO: 105817 - RNA, 20 nt, Artificial Sequence
  Synthetic
  misc_feature (17)..(17): n is a, c, g, or u
uaugccuacagccuccnagu

SEQ ID NO: 105818 - RNA, 21 nt, Artificial Sequence
  Synthetic
  misc_feature (18)..(18): n is a, c, g, or u
uuaugccuacagccuccnagu

SEQ ID NO: 105819 - RNA, 22 nt, Artificial Sequence
  Synthetic
  misc_feature (19)..(19): n is a, c, g, or u
uuuaugccuacagccuccnagu

SEQ ID NO: 105820 - RNA, 23 nt, Artificial Sequence
  Synthetic
  misc_feature (20)..(20): n is a, c, g, or u
auuuaugccuacagccuccnagu

SEQ ID NO: 105821 - RNA, 24 nt, Artificial Sequence
  Synthetic
  misc_feature (21)..(21): n is a, c, g, or u
aauuuaugccuacagccuccnagu

SEQ ID NO: 105822 - RNA, 18 nt, Artificial Sequence
  Synthetic
auguaaauaaugccuagu

SEQ ID NO: 105823 - RNA, 19 nt, Artificial Sequence
  Synthetic
uauguaaauaaugccuagu

SEQ ID NO: 105824 - RNA, 20 nt, Artificial Sequence
  Synthetic
guauguaaauaaugccuagu

SEQ ID NO: 105825 - RNA, 21 nt, Artificial Sequence
  Synthetic
aguauguaaauaaugccuagu

SEQ ID NO: 105826 - RNA, 22 nt, Artificial Sequence
  Synthetic
gaguauguaaauaaugccuagu

SEQ ID NO: 105827 - RNA, 23 nt, Artificial Sequence
  Synthetic
agaguauguaaauaaugccuagu

SEQ ID NO: 105828 - RNA, 24 nt, Artificial Sequence
  Synthetic
cagaguauguaaauaaugccuagu

SEQ ID NO: 105829 - RNA, 18 nt, Artificial Sequence
  Synthetic
  misc_feature (7)..(7): n is a, c, g, or u
uaugggngaggcaguagu

SEQ ID NO: 105830 - RNA, 19 nt, Artificial Sequence
  Synthetic
  misc_feature (8)..(8): n is a, c, g, or u
auaugggngaggcaguagu

SEQ ID NO: 105831 - RNA, 20 nt, Artificial Sequence
  Synthetic
  misc_feature (9)..(9): n is a, c, g, or u
gauaugggngaggcaguagu

SEQ ID NO: 105832 - RNA, 21 nt, Artificial Sequence
  Synthetic
  misc_feature (10)..(10): n is a, c, g, or u
cgauaugggngaggcaguagu

SEQ ID NO: 105833 - RNA, 22 nt, Artificial Sequence
  Synthetic
  misc_feature (11)..(11): n is a, c, g, or u
acgauaugggngaggcaguagu

SEQ ID NO: 105834 - RNA, 23 nt, Artificial Sequence
  Synthetic
  misc_feature (12)..(12): n is a, c, g, or u
gacgauaugggngaggcaguagu

SEQ ID NO: 105835 - RNA, 24 nt, Artificial Sequence
  Synthetic
  misc_feature (13)..(13): n is a, c, g, or u
ugacgauaugggngaggcaguagu

SEQ ID NO: 105836 - RNA, 18 nt, Artificial Sequence
  Synthetic
gcaacauaccuugguagu

SEQ ID NO: 105837 - RNA, 19 nt, Artificial Sequence
  Synthetic
ggcaacauaccuugguagu

SEQ ID NO: 105838 - RNA, 20 nt, Artificial Sequence
  Synthetic
gggcaacauaccuugguagu

SEQ ID NO: 105839 - RNA, 21 nt, Artificial Sequence
  Synthetic
cgggcaacauaccuugguagu

SEQ ID NO: 105840 - RNA, 22 nt, Artificial Sequence
  Synthetic
acgggcaacauaccuugguagu

SEQ ID NO: 105841 - RNA, 23 nt, Artificial Sequence
  Synthetic
aacgggcaacauaccuugguagu

SEQ ID NO: 105842 - RNA, 24 nt, Artificial Sequence
  Synthetic
aaacgggcaacauaccuugguagu

SEQ ID NO: 105843 - RNA, 18 nt, Artificial Sequence
  Synthetic
  misc_feature (6)..(6): n is a, c, g, or u
guggunuccaugcgacgu

SEQ ID NO: 105844 - RNA, 19 nt, Artificial Sequence
  Synthetic
  misc_feature (7)..(7): n is a, c, g, or u
gguggunuccaugcgacgu

SEQ ID NO: 105845 - RNA, 20 nt, Artificial Sequence
  Synthetic
  misc_feature (8)..(8): n is a, c, g, or u
cgguggunuccaugcgacgu

SEQ ID NO: 105846 - RNA, 21 nt, Artificial Sequence
  Synthetic
  misc_feature (9)..(9): n is a, c, g, or u
acgguggunuccaugcgacgu

SEQ ID NO: 105847 - RNA, 22 nt, Artificial Sequence
  Synthetic
  misc_feature (10)..(10): n is a, c, g, or u
cacgguggunuccaugcgacgu

SEQ ID NO: 105848 - RNA, 23 nt, Artificial Sequence
  Synthetic
  misc_feature (11)..(11): n is a, c, g, or u
ucacgguggunuccaugcgacgu

SEQ ID NO: 105849 - RNA, 24 nt, Artificial Sequence
  Synthetic
  misc_feature (12)..(12): n is a, c, g, or u
uucacgguggunuccaugcgacgu

SEQ ID NO: 105850 - RNA, 18 nt, Artificial Sequence
  Synthetic
  misc_feature (11)..(11): n is a, c, g, or u
uacaagugcanuuuccgu

SEQ ID NO: 105851 - RNA, 19 nt, Artificial Sequence
  Synthetic
  misc_feature (12)..(12): n is a, c, g, or u
auacaagugcanuuuccgu

SEQ ID NO: 105852 - RNA, 20 nt, Artificial Sequence
  Synthetic
  misc_feature (13)..(13): n is a, c, g, or u
aauacaagugcanuuuccgu

SEQ ID NO: 105853 - RNA, 21 nt, Artificial Sequence
  Synthetic
  misc_feature (14)..(14): n is a, c, g, or u
gaauacaagugcanuuuccgu

SEQ ID NO: 105854 - RNA, 22 nt, Artificial Sequence
  Synthetic
  misc_feature (15)..(15): n is a, c, g, or u
ggaauacaagugcanuuuccgu

SEQ ID NO: 105855 - RNA, 23 nt, Artificial Sequence
  Synthetic
  misc_feature (16)..(16): n is a, c, g, or u
gggaauacaagugcanuuuccgu

SEQ ID NO: 105856 - RNA, 24 nt, Artificial Sequence
  Synthetic
  misc_feature (17)..(17): n is a, c, g, or u
ugggaauacaagugcanuuuccgu

SEQ ID NO: 105857 - RNA, 18 nt, Artificial Sequence
  Synthetic
cagacggggagaccgcgu

SEQ ID NO: 105858 - RNA, 19 nt, Artificial Sequence
  Synthetic
acagacggggagaccgcgu

SEQ ID NO: 105859 - RNA, 20 nt, Artificial Sequence
  Synthetic
cacagacggggagaccgcgu

SEQ ID NO: 105860 - RNA, 21 nt, Artificial Sequence
  Synthetic
gcacagacggggagaccgcgu

SEQ ID NO: 105861 - RNA, 22 nt, Artificial Sequence
  Synthetic
ggcacagacggggagaccgcgu

SEQ ID NO: 105862 - RNA, 23 nt, Artificial Sequence
  Synthetic
aggcacagacggggagaccgcgu

SEQ ID NO: 105863 - RNA, 24 nt, Artificial Sequence
  Synthetic
aaggcacagacggggagaccgcgu

SEQ ID NO: 105864 - RNA, 18 nt, Artificial Sequence
  Synthetic
agaugauuaggcagaggu

SEQ ID NO: 105865 - RNA, 19 nt, Artificial Sequence
  Synthetic
gagaugauuaggcagaggu

SEQ ID NO: 105866 - RNA, 20 nt, Artificial Sequence
  Synthetic
ugagaugauuaggcagaggu

SEQ ID NO: 105867 - RNA, 21 nt, Artificial Sequence
  Synthetic
augagaugauuaggcagaggu

SEQ ID NO: 105868 - RNA, 22 nt, Artificial Sequence
  Synthetic
caugagaugauuaggcagaggu

SEQ ID NO: 105869 - RNA, 23 nt, Artificial Sequence
  Synthetic
acaugagaugauuaggcagaggu

SEQ ID NO: 105870 - RNA, 24 nt, Artificial Sequence
  Synthetic
aacaugagaugauuaggcagaggu

SEQ ID NO: 105871 - RNA, 18 nt, Artificial Sequence
  Synthetic
ugacugucucuuagaggu

SEQ ID NO: 105872 - RNA, 19 nt, Artificial Sequence
  Synthetic
augacugucucuuagaggu

SEQ ID NO: 105873 - RNA, 20 nt, Artificial Sequence
  Synthetic
gaugacugucucuuagaggu

SEQ ID NO: 105874 - RNA, 21 nt, Artificial Sequence
  Synthetic
ggaugacugucucuuagaggu

SEQ ID NO: 105875 - RNA, 22 nt, Artificial Sequence
  Synthetic
aggaugacugucucuuagaggu

SEQ ID NO: 105876 - RNA, 23 nt, Artificial Sequence
  Synthetic
gaggaugacugucucuuagaggu

SEQ ID NO: 105877 - RNA, 24 nt, Artificial Sequence
  Synthetic
ugaggaugacugucucuuagaggu

SEQ ID NO: 105878 - RNA, 18 nt, Artificial Sequence
  Synthetic
cccaugccuugucgaggu

SEQ ID NO: 105879 - RNA, 19 nt, Artificial Sequence
  Synthetic
ccccaugccuugucgaggu

SEQ ID NO: 105880 - RNA, 20 nt, Artificial Sequence
  Synthetic
uccccaugccuugucgaggu

SEQ ID NO: 105881 - RNA, 21 nt, Artificial Sequence
  Synthetic
guccccaugccuugucgaggu

SEQ ID NO: 105882 - RNA, 22 nt, Artificial Sequence
  Synthetic
  misc_feature (1)..(1): n is a, c, g, or u
nguccccaugccuugucgaggu

SEQ ID NO: 105883 - RNA, 23 nt, Artificial Sequence
  Synthetic
  misc_feature (2)..(2): n is a, c, g, or u
unguccccaugccuugucgaggu

SEQ ID NO: 105884 - RNA, 24 nt, Artificial Sequence
  Synthetic
  misc_feature (3)..(3): n is a, c, g, or u
uunguccccaugccuugucgaggu

SEQ ID NO: 105885 - RNA, 18 nt, Artificial Sequence
  Synthetic
uggugagugauuggaggu

SEQ ID NO: 105886 - RNA, 19 nt, Artificial Sequence
  Synthetic
uuggugagugauuggaggu

SEQ ID NO: 105887 - RNA, 20 nt, Artificial Sequence
  Synthetic
guuggugagugauuggaggu

SEQ ID NO: 105888 - RNA, 21 nt, Artificial Sequence
  Synthetic
gguuggugagugauuggaggu

SEQ ID NO: 105889 - RNA, 22 nt, Artificial Sequence
  Synthetic
agguuggugagugauuggaggu

SEQ ID NO: 105890 - RNA, 23 nt, Artificial Sequence
  Synthetic
gagguuggugagugauuggaggu

SEQ ID NO: 105891 - RNA, 24 nt, Artificial Sequence
  Synthetic
agagguuggugagugauuggaggu

SEQ ID NO: 105892 - RNA, 18 nt, Artificial Sequence
  Synthetic
  misc_feature (10)..(10): n is a, c, g, or u
auacagagcngaggcggu

SEQ ID NO: 105893 - RNA, 19 nt, Artificial Sequence
  Synthetic
  misc_feature (11)..(11): n is a, c, g, or u
gauacagagcngaggcggu

SEQ ID NO: 105894 - RNA, 20 nt, Artificial Sequence
  Synthetic
  misc_feature (12)..(12): n is a, c, g, or u
cgauacagagcngaggcggu

SEQ ID NO: 105895 - RNA, 21 nt, Artificial Sequence
  Synthetic
  misc_feature (13)..(13): n is a, c, g, or u
ccgauacagagcngaggcggu

SEQ ID NO: 105896 - RNA, 22 nt, Artificial Sequence
  Synthetic
  misc_feature (14)..(14): n is a, c, g, or u
cccgauacagagcngaggcggu

SEQ ID NO: 105897 - RNA, 23 nt, Artificial Sequence
  Synthetic
  misc_feature (15)..(15): n is a, c, g, or u
ucccgauacagagcngaggcggu

SEQ ID NO: 105898 - RNA, 24 nt, Artificial Sequence
  Synthetic
  misc_feature (16)..(16): n is a, c, g, or u
cucccgauacagagcngaggcggu

SEQ ID NO: 105899 - RNA, 18 nt, Artificial Sequence
  Synthetic
  misc_feature (4)..(4): n is a, c, g, or u
  misc_feature (12)..(12): n is a, c, g, or u
gugnucuccaunuucggu

SEQ ID NO: 105900 - RNA, 19 nt, Artificial Sequence
  Synthetic
  misc_feature (1)..(1): n is a, c, g, or u
  misc_feature (5)..(5): n is a, c, g, or u
  misc_feature (13)..(13): n is a, c, g, or u
ngugnucuccaunuucggu

SEQ ID NO: 105901 - RNA, 20 nt, Artificial Sequence
  Synthetic
  misc_feature (2)..(2): n is a, c, g, or u
  misc_feature (6)..(6): n is a, c, g, or u
  misc_feature (14)..(14): n is a, c, g, or u
ungugnucuccaunuucggu

SEQ ID NO: 105902 - RNA, 21 nt, Artificial Sequence
  Synthetic
  misc_feature (3)..(3): n is a, c, g, or u
  misc_feature (7)..(7): n is a, c, g, or u
  misc_feature (15)..(15): n is a, c, g, or u
gungugnucuccaunuucggu

SEQ ID NO: 105903 - RNA, 22 nt, Artificial Sequence
  Synthetic
  misc_feature (4)..(4): n is a, c, g, or u
  misc_feature (8)..(8): n is a, c, g, or u
  misc_feature (16)..(16): n is a, c, g, or u
ugungugnucuccaunuucggu

SEQ ID NO: 105904 - RNA, 23 nt, Artificial Sequence
  Synthetic
  misc_feature (5)..(5): n is a, c, g, or u
  misc_feature (9)..(9): n is a, c, g, or u
  misc_feature (17)..(17): n is a, c, g, or u
augungugnucuccaunuucggu

SEQ ID NO: 105905 - RNA, 24 nt, Artificial Sequence
  Synthetic
  misc_feature (6)..(6): n is a, c, g, or u
  misc_feature (10)..(10): n is a, c, g, or u
  misc_feature (18)..(18): n is a, c, g, or u
gaugungugnucuccaunuucggu

SEQ ID NO: 105906 - RNA, 18 nt, Artificial Sequence
  Synthetic
uguaacacgagcaggggu

SEQ ID NO: 105907 - RNA, 19 nt, Artificial Sequence
  Synthetic
cuguaacacgagcaggggu

SEQ ID NO: 105908 - RNA, 20 nt, Artificial Sequence
  Synthetic
ccuguaacacgagcaggggu

SEQ ID NO: 105909 - RNA, 21 nt, Artificial Sequence
  Synthetic
gccuguaacacgagcaggggu

SEQ ID NO: 105910 - RNA, 22 nt, Artificial Sequence
  Synthetic
cgccuguaacacgagcaggggu

SEQ ID NO: 105911 - RNA, 23 nt, Artificial Sequence
  Synthetic
ccgccuguaacacgagcaggggu

SEQ ID NO: 105912 - RNA, 24 nt, Artificial Sequence
  Synthetic
cccgccuguaacacgagcaggggu

SEQ ID NO: 105913 - RNA, 18 nt, Artificial Sequence
  Synthetic
  misc_feature (15)..(15): n is a, c, g, or u
aaaauugguaauagnggu

SEQ ID NO: 105914 - RNA, 19 nt, Artificial Sequence
  Synthetic
  misc_feature (16)..(16): n is a, c, g, or u
gaaaauugguaauagnggu

SEQ ID NO: 105915 - RNA, 20 nt, Artificial Sequence
  Synthetic
  misc_feature (17)..(17): n is a, c, g, or u
agaaaauugguaauagnggu

SEQ ID NO: 105916 - RNA, 21 nt, Artificial Sequence
  Synthetic
  misc_feature (18)..(18): n is a, c, g, or u
aagaaaauugguaauagnggu

SEQ ID NO: 105917 - RNA, 22 nt, Artificial Sequence
  Synthetic
  misc_feature (19)..(19): n is a, c, g, or u
aaagaaaauugguaauagnggu

SEQ ID NO: 105918 - RNA, 23 nt, Artificial Sequence
  Synthetic
  misc_feature (20)..(20): n is a, c, g, or u
aaaagaaaauugguaauagnggu

SEQ ID NO: 105919 - RNA, 24 nt, Artificial Sequence
  Synthetic
  misc_feature (21)..(21): n is a, c, g, or u
caaaagaaaauugguaauagnggu

SEQ ID NO: 105920 - RNA, 18 nt, Artificial Sequence
  Synthetic
agacaaaagaaaauuggu

SEQ ID NO: 105921 - RNA, 19 nt, Artificial Sequence
  Synthetic
aagacaaaagaaaauuggu

SEQ ID NO: 105922 - RNA, 20 nt, Artificial Sequence
  Synthetic
aaagacaaaagaaaauuggu

SEQ ID NO: 105923 - RNA, 21 nt, Artificial Sequence
  Synthetic
caaagacaaaagaaaauuggu

SEQ ID NO: 105924 - RNA, 22 nt, Artificial Sequence
  Synthetic
ccaaagacaaaagaaaauuggu

SEQ ID NO: 105925 - RNA, 23 nt, Artificial Sequence
  Synthetic
cccaaagacaaaagaaaauuggu

SEQ ID NO: 105926 - RNA, 24 nt, Artificial Sequence
  Synthetic
acccaaagacaaaagaaaauuggu

SEQ ID NO: 105927 - RNA, 18 nt, Artificial Sequence
  Synthetic
uccugacugccgauuggu

SEQ ID NO: 105928 - RNA, 19 nt, Artificial Sequence
  Synthetic
uuccugacugccgauuggu

SEQ ID NO: 105929 - RNA, 20 nt, Artificial Sequence
  Synthetic
cuuccugacugccgauuggu

SEQ ID NO: 105930 - RNA, 21 nt, Artificial Sequence
  Synthetic
ucuuccugacugccgauuggu

SEQ ID NO: 105931 - RNA, 22 nt, Artificial Sequence
  Synthetic
gucuuccugacugccgauuggu

SEQ ID NO: 105932 - RNA, 23 nt, Artificial Sequence
  Synthetic
ugucuuccugacugccgauuggu

SEQ ID NO: 105933 - RNA, 24 nt, Artificial Sequence
  Synthetic
cugucuuccugacugccgauuggu

SEQ ID NO: 105934 - RNA, 18 nt, Artificial Sequence
  Synthetic
uggugaggugaacaaugu

SEQ ID NO: 105935 - RNA, 19 nt, Artificial Sequence
  Synthetic
auggugaggugaacaaugu

SEQ ID NO: 105936 - RNA, 20 nt, Artificial Sequence
  Synthetic
uauggugaggugaacaaugu

SEQ ID NO: 105937 - RNA, 21 nt, Artificial Sequence
  Synthetic
guauggugaggugaacaaugu

SEQ ID NO: 105938 - RNA, 22 nt, Artificial Sequence
  Synthetic
uguauggugaggugaacaaugu

SEQ ID NO: 105939 - RNA, 23 nt, Artificial Sequence
  Synthetic
cuguauggugaggugaacaaugu

SEQ ID NO: 105940 - RNA, 24 nt, Artificial Sequence
  Synthetic
gcuguauggugaggugaacaaugu

SEQ ID NO: 105941 - RNA, 18 nt, Artificial Sequence
  Synthetic
cagagcuugguggaaugu

SEQ ID NO: 105942 - RNA, 19 nt, Artificial Sequence
  Synthetic
gcagagcuugguggaaugu

SEQ ID NO: 105943 - RNA, 20 nt, Artificial Sequence
  Synthetic
agcagagcuugguggaaugu

SEQ ID NO: 105944 - RNA, 21 nt, Artificial Sequence
  Synthetic
uagcagagcuugguggaaugu

SEQ ID NO: 105945 - RNA, 22 nt, Artificial Sequence
  Synthetic
cuagcagagcuugguggaaugu

SEQ ID NO: 105946 - RNA, 23 nt, Artificial Sequence
  Synthetic
ucuagcagagcuugguggaaugu

SEQ ID NO: 105947 - RNA, 24 nt, Artificial Sequence
  Synthetic
  misc_feature (1)..(1): n is a, c, g, or u
nucuagcagagcuugguggaaugu

SEQ ID NO: 105948 - RNA, 18 nt, Artificial Sequence
  Synthetic
  misc_feature (5)..(5): n is a, c, g, or u
  misc_feature (7)..(8): n is a, c, g, or u
ccucnunnaaaugaaugu

SEQ ID NO: 105949 - RNA, 19 nt, Artificial Sequence
  Synthetic
  misc_feature (6)..(6): n is a, c, g, or u
  misc_feature (8)..(9): n is a, c, g, or u
uccucnunnaaaugaaugu

SEQ ID NO: 105950 - RNA, 20 nt, Artificial Sequence
  Synthetic
  misc_feature (1)..(1): n is a, c, g, or u
  misc_feature (7)..(7): n is a, c, g, or u
  misc_feature (9)..(10): n is a, c, g, or u
nuccucnunnaaaugaaugu

SEQ ID NO: 105951 - RNA, 21 nt, Artificial Sequence
  Synthetic
  misc_feature (2)..(2): n is a, c, g, or u
  misc_feature (8)..(8): n is a, c, g, or u
  misc_feature (10)..(11): n is a, c, g, or u
unuccucnunnaaaugaaugu

SEQ ID NO: 105952 - RNA, 22 nt, Artificial Sequence
  Synthetic
  misc_feature (3)..(3): n is a, c, g, or u
  misc_feature (9)..(9): n is a, c, g, or u
  misc_feature (11)..(12): n is a, c, g, or u
aunuccucnunnaaaugaaugu

SEQ ID NO: 105953 - RNA, 23 nt, Artificial Sequence
  Synthetic
  misc_feature (4)..(4): n is a, c, g, or u
  misc_feature (10)..(10): n is a, c, g, or u
  misc_feature (12)..(13): n is a, c, g, or u
aaunuccucnunnaaaugaaugu

SEQ ID NO: 105954 - RNA, 24 nt, Artificial Sequence
  Synthetic
  misc_feature (5)..(5): n is a, c, g, or u
  misc_feature (11)..(11): n is a, c, g, or u
  misc_feature (13)..(14): n is a, c, g, or u
uaaunuccucnunnaaaugaaugu

SEQ ID NO: 105955 - RNA, 18 nt, Artificial Sequence
  Synthetic
  misc_feature (14)..(14): n is a, c, g, or u
uaaugauuaacugnaugu

SEQ ID NO: 105956 - RNA, 19 nt, Artificial Sequence
  Synthetic
  misc_feature (15)..(15): n is a, c, g, or u
guaaugauuaacugnaugu

SEQ ID NO: 105957 - RNA, 20 nt, Artificial Sequence
  Synthetic
  misc_feature (16)..(16): n is a, c, g, or u
aguaaugauuaacugnaugu

SEQ ID NO: 105958 - RNA, 21 nt, Artificial Sequence
  Synthetic
  misc_feature (17)..(17): n is a, c, g, or u
aaguaaugauuaacugnaugu

SEQ ID NO: 105959 - RNA, 22 nt, Artificial Sequence
  Synthetic
  misc_feature (18)..(18): n is a, c, g, or u
gaaguaaugauuaacugnaugu

SEQ ID NO: 105960 - RNA, 23 nt, Artificial Sequence
  Synthetic
  misc_feature (1)..(1): n is a, c, g, or u
  misc_feature (19)..(19): n is a, c, g, or u
ngaaguaaugauuaacugnaugu

SEQ ID NO: 105961 - RNA, 24 nt, Artificial Sequence
  Synthetic
  misc_feature (2)..(2): n is a, c, g, or u
  misc_feature (20)..(20): n is a, c, g, or u
ungaaguaaugauuaacugnaugu

SEQ ID NO: 105962 - RNA, 18 nt, Artificial Sequence
  Synthetic
ccuuuuuucauuaacugu

SEQ ID NO: 105963 - RNA, 19 nt, Artificial Sequence
  Synthetic
uccuuuuuucauuaacugu

SEQ ID NO: 105964 - RNA, 20 nt, Artificial Sequence
  Synthetic
cuccuuuuuucauuaacugu

SEQ ID NO: 105965 - RNA, 21 nt, Artificial Sequence
  Synthetic
ucuccuuuuuucauuaacugu

SEQ ID NO: 105966 - RNA, 22 nt, Artificial Sequence
  Synthetic
aucuccuuuuuucauuaacugu

SEQ ID NO: 105967 - RNA, 23 nt, Artificial Sequence
  Synthetic
aaucuccuuuuuucauuaacugu

SEQ ID NO: 105968 - RNA, 24 nt, Artificial Sequence
  Synthetic
uaaucuccuuuuuucauuaacugu

SEQ ID NO: 105969 - RNA, 18 nt, Artificial Sequence
  Synthetic
cggaacaggguuuacugu

SEQ ID NO: 105970 - RNA, 19 nt, Artificial Sequence
  Synthetic
ucggaacaggguuuacugu

SEQ ID NO: 105971 - RNA, 20 nt, Artificial Sequence
  Synthetic
gucggaacaggguuuacugu

SEQ ID NO: 105972 - RNA, 21 nt, Artificial Sequence
  Synthetic
agucggaacaggguuuacugu

SEQ ID NO: 105973 - RNA, 22 nt, Artificial Sequence
  Synthetic
uagucggaacaggguuuacugu

SEQ ID NO: 105974 - RNA, 23 nt, Artificial Sequence
  Synthetic
guagucggaacaggguuuacugu

SEQ ID NO: 105975 - RNA, 24 nt, Artificial Sequence
  Synthetic
aguagucggaacaggguuuacugu

SEQ ID NO: 105976 - RNA, 18 nt, Artificial Sequence
  Synthetic
  misc_feature (11)..(11): n is a, c, g, or u
cccaaaagacngccgugu

SEQ ID NO: 105977 - RNA, 19 nt, Artificial Sequence
  Synthetic
  misc_feature (12)..(12): n is a, c, g, or u
ccccaaaagacngccgugu

SEQ ID NO: 105978 - RNA, 20 nt, Artificial Sequence
  Synthetic
  misc_feature (13)..(13): n is a, c, g, or u
accccaaaagacngccgugu

SEQ ID NO: 105979 - RNA, 21 nt, Artificial Sequence
  Synthetic
  misc_feature (14)..(14): n is a, c, g, or u
caccccaaaagacngccgugu

SEQ ID NO: 105980 - RNA, 22 nt, Artificial Sequence
  Synthetic
  misc_feature (15)..(15): n is a, c, g, or u
ccaccccaaaagacngccgugu

SEQ ID NO: 105981 - RNA, 23 nt, Artificial Sequence
  Synthetic
  misc_feature (16)..(16): n is a, c, g, or u
uccaccccaaaagacngccgugu

SEQ ID NO: 105982 - RNA, 24 nt, Artificial Sequence
  Synthetic
  misc_feature (17)..(17): n is a, c, g, or u
cuccaccccaaaagacngccgugu

SEQ ID NO: 105983 - RNA, 18 nt, Artificial Sequence
  Synthetic
  misc_feature (8)..(8): n is a, c, g, or u
acagagcngaggcggugu

SEQ ID NO: 105984 - RNA, 19 nt, Artificial Sequence
  Synthetic
  misc_feature (9)..(9): n is a, c, g, or u
uacagagcngaggcggugu

SEQ ID NO: 105985 - RNA, 20 nt, Artificial Sequence
  Synthetic
  misc_feature (10)..(10): n is a, c, g, or u
auacagagcngaggcggugu

SEQ ID NO: 105986 - RNA, 21 nt, Artificial Sequence
  Synthetic
  misc_feature (11)..(11): n is a, c, g, or u
gauacagagcngaggcggugu

SEQ ID NO: 105987 - RNA, 22 nt, Artificial Sequence
  Synthetic
  misc_feature (12)..(12): n is a, c, g, or u
cgauacagagcngaggcggugu

SEQ ID NO: 105988 - RNA, 23 nt, Artificial Sequence
  Synthetic
  misc_feature (13)..(13): n is a, c, g, or u
ccgauacagagcngaggcggugu

SEQ ID NO: 105989 - RNA, 24 nt, Artificial Sequence
  Synthetic
  misc_feature (14)..(14): n is a, c, g, or u
cccgauacagagcngaggcggugu

SEQ ID NO: 105990 - RNA, 18 nt, Artificial Sequence
  Synthetic
  misc_feature (1)..(1): n is a, c, g, or u
  misc_feature (4)..(4): n is a, c, g, or u
  misc_feature (7)..(7): n is a, c, g, or u
nggnuanccacauugugu

SEQ ID NO: 105991 - RNA, 19 nt, Artificial Sequence
  Synthetic
  misc_feature (2)..(2): n is a, c, g, or u
  misc_feature (5)..(5): n is a, c, g, or u
  misc_feature (8)..(8): n is a, c, g, or u
cnggnuanccacauugugu

SEQ ID NO: 105992 - RNA, 20 nt, Artificial Sequence
  Synthetic
  misc_feature (3)..(3): n is a, c, g, or u
  misc_feature (6)..(6): n is a, c, g, or u
  misc_feature (9)..(9): n is a, c, g, or u
gcnggnuanccacauugugu

SEQ ID NO: 105993 - RNA, 21 nt, Artificial Sequence
  Synthetic
  misc_feature (1)..(1): n is a, c, g, or u
  misc_feature (4)..(4): n is a, c, g, or u
  misc_feature (7)..(7): n is a, c, g, or u
  misc_feature (10)..(10): n is a, c, g, or u
ngcnggnuanccacauugugu

SEQ ID NO: 105994 - RNA, 22 nt, Artificial Sequence
  Synthetic
  misc_feature (2)..(2): n is a, c, g, or u
  misc_feature (5)..(5): n is a, c, g, or u
  misc_feature (8)..(8): n is a, c, g, or u
  misc_feature (11)..(11): n is a, c, g, or u
angcnggnuanccacauugugu

SEQ ID NO: 105995 - RNA, 23 nt, Artificial Sequence
  Synthetic
  misc_feature (3)..(3): n is a, c, g, or u
  misc_feature (6)..(6): n is a, c, g, or u
  misc_feature (9)..(9): n is a, c, g, or u
  misc_feature (12)..(12): n is a, c, g, or u
aangcnggnuanccacauugugu

SEQ ID NO: 105996 - RNA, 24 nt, Artificial Sequence
  Synthetic
  misc_feature (1)..(1): n is a, c, g, or u
  misc_feature (4)..(4): n is a, c, g, or u
  misc_feature (7)..(7): n is a, c, g, or u
  misc_feature (10)..(10): n is a, c, g, or u
  misc_feature (13)..(13): n is a, c, g, or u
naangcnggnuanccacauugugu

SEQ ID NO: 105997 - RNA, 18 nt, Artificial Sequence
  Synthetic
  misc_feature (3)..(3): n is a, c, g, or u
  misc_feature (6)..(6): n is a, c, g, or u
  misc_feature (9)..(9): n is a, c, g, or u
gcnggnuanccacauugu

SEQ ID NO: 105998 - RNA, 19 nt, Artificial Sequence
  Synthetic
  misc_feature (1)..(1): n is a, c, g, or u
  misc_feature (4)..(4): n is a, c, g, or u
  misc_feature (7)..(7): n is a, c, g, or u
  misc_feature (10)..(10): n is a, c, g, or u
ngcnggnuanccacauugu

SEQ ID NO: 105999 - RNA, 20 nt, Artificial Sequence
  Synthetic
  misc_feature (2)..(2): n is a, c, g, or u
  misc_feature (5)..(5): n is a, c, g, or u
  misc_feature (8)..(8): n is a, c, g, or u
  misc_feature (11)..(11): n is a, c, g, or u
angcnggnuanccacauugu

SEQ ID NO: 106000 - RNA, 21 nt, Artificial Sequence
  Synthetic
  misc_feature (3)..(3): n is a, c, g, or u
  misc_feature (6)..(6): n is a, c, g, or u
  misc_feature (9)..(9): n is a, c, g, or u
  misc_feature (12)..(12): n is a, c, g, or u
aangcnggnuanccacauugu

SEQ ID NO: 106001 - RNA, 22 nt, Artificial Sequence
  Synthetic
  misc_feature (1)..(1): n is a, c, g, or u
  misc_feature (4)..(4): n is a, c, g, or u
  misc_feature (7)..(7): n is a, c, g, or u
  misc_feature (10)..(10): n is a, c, g, or u
  misc_feature (13)..(13): n is a, c, g, or u
naangcnggnuanccacauugu

SEQ ID NO: 106002 - RNA, 23 nt, Artificial Sequence
  Synthetic
  misc_feature (2)..(2): n is a, c, g, or u
  misc_feature (5)..(5): n is a, c, g, or u
  misc_feature (8)..(8): n is a, c, g, or u
  misc_feature (11)..(11): n is a, c, g, or u
  misc_feature (14)..(14): n is a, c, g, or u
unaangcnggnuanccacauugu

SEQ ID NO: 106003 - RNA, 24 nt, Artificial Sequence
  Synthetic
  misc_feature (3)..(3): n is a, c, g, or u
  misc_feature (6)..(6): n is a, c, g, or u
  misc_feature (9)..(9): n is a, c, g, or u
  misc_feature (12)..(12): n is a, c, g, or u
  misc_feature (15)..(15): n is a, c, g, or u
aunaangcnggnuanccacauugu

SEQ ID NO: 106004 - RNA, 18 nt, Artificial Sequence
  Synthetic
  misc_feature (6)..(6): n is a, c, g, or u
aggganucaagauguugu

SEQ ID NO: 106005 - RNA, 19 nt, Artificial Sequence
  Synthetic
  misc_feature (7)..(7): n is a, c, g, or u
aaggganucaagauguugu

SEQ ID NO: 106006 - RNA, 20 nt, Artificial Sequence
  Synthetic
  misc_feature (8)..(8): n is a, c, g, or u
aaaggganucaagauguugu

SEQ ID NO: 106007 - RNA, 21 nt, Artificial Sequence
  Synthetic
  misc_feature (9)..(9): n is a, c, g, or u
aaaaggganucaagauguugu

SEQ ID NO: 106008 - RNA, 22 nt, Artificial Sequence
  Synthetic
  misc_feature (10)..(10): n is a, c, g, or u
aaaaaggganucaagauguugu

SEQ ID NO: 106009 - RNA, 23 nt, Artificial Sequence
  Synthetic
  misc_feature (11)..(11): n is a, c, g, or u
uaaaaaggganucaagauguugu

SEQ ID NO: 106010 - RNA, 24 nt, Artificial Sequence
  Synthetic
  misc_feature (12)..(12): n is a, c, g, or u
guaaaaaggganucaagauguugu

SEQ ID NO: 106011 - RNA, 18 nt, Artificial Sequence
  Synthetic
  misc_feature (17)..(17): n is a, c, g, or u
agccaccagcaggaaanu

SEQ ID NO: 106012 - RNA, 19 nt, Artificial Sequence
  Synthetic
  misc_feature (18)..(18): n is a, c, g, or u
gagccaccagcaggaaanu

SEQ ID NO: 106013 - RNA, 20 nt, Artificial Sequence
  Synthetic
  misc_feature (19)..(19): n is a, c, g, or u
ggagccaccagcaggaaanu

SEQ ID NO: 106014 - RNA, 21 nt, Artificial Sequence
  Synthetic
  misc_feature (20)..(20): n is a, c, g, or u
uggagccaccagcaggaaanu

SEQ ID NO: 106015 - RNA, 22 nt, Artificial Sequence
  Synthetic
  misc_feature (21)..(21): n is a, c, g, or u
cuggagccaccagcaggaaanu

SEQ ID NO: 106016 - RNA, 23 nt, Artificial Sequence
  Synthetic
  misc_feature (22)..(22): n is a, c, g, or u
acuggagccaccagcaggaaanu

SEQ ID NO: 106017 - RNA, 24 nt, Artificial Sequence
  Synthetic
  misc_feature (23)..(23): n is a, c, g, or u
aacuggagccaccagcaggaaanu

SEQ ID NO: 106018 - RNA, 18 nt, Artificial Sequence
  Synthetic
  misc_feature (7)..(7): n is a, c, g, or u
  misc_feature (17)..(17): n is a, c, g, or u
gcgauanccaggacaanu

SEQ ID NO: 106019 - RNA, 19 nt, Artificial Sequence
  Synthetic
  misc_feature (8)..(8): n is a, c, g, or u
  misc_feature (18)..(18): n is a, c, g, or u
agcgauanccaggacaanu

SEQ ID NO: 106020 - RNA, 20 nt, Artificial Sequence
  Synthetic
  misc_feature (9)..(9): n is a, c, g, or u
  misc_feature (19)..(19): n is a, c, g, or u
cagcgauanccaggacaanu

SEQ ID NO: 106021 - RNA, 21 nt, Artificial Sequence
  Synthetic
  misc_feature (10)..(10): n is a, c, g, or u
  misc_feature (20)..(20): n is a, c, g, or u
ccagcgauanccaggacaanu

SEQ ID NO: 106022 - RNA, 22 nt, Artificial Sequence
  Synthetic
  misc_feature (11)..(11): n is a, c, g, or u
  misc_feature (21)..(21): n is a, c, g, or u
uccagcgauanccaggacaanu

SEQ ID NO: 106023 - RNA, 23 nt, Artificial Sequence
  Synthetic
  misc_feature (12)..(12): n is a, c, g, or u
  misc_feature (22)..(22): n is a, c, g, or u
auccagcgauanccaggacaanu

SEQ ID NO: 106024 - RNA, 24 nt, Artificial Sequence
  Synthetic
  misc_feature (13)..(13): n is a, c, g, or u
  misc_feature (23)..(23): n is a, c, g, or u
cauccagcgauanccaggacaanu

SEQ ID NO: 106025 - RNA, 18 nt, Artificial Sequence
  Synthetic
  misc_feature (17)..(17): n is a, c, g, or u
uuacauaucccaugaanu

SEQ ID NO: 106026 - RNA, 19 nt, Artificial Sequence
  Synthetic
  misc_feature (18)..(18): n is a, c, g, or u
auuacauaucccaugaanu

SEQ ID NO: 106027 - RNA, 20 nt, Artificial Sequence
  Synthetic
  misc_feature (19)..(19): n is a, c, g, or u
aauuacauaucccaugaanu

SEQ ID NO: 106028 - RNA, 21 nt, Artificial Sequence
  Synthetic
  misc_feature (20)..(20): n is a, c, g, or u
caauuacauaucccaugaanu

SEQ ID NO: 106029 - RNA, 22 nt, Artificial Sequence
  Synthetic
  misc_feature (21)..(21): n is a, c, g, or u
ccaauuacauaucccaugaanu

SEQ ID NO: 106030 - RNA, 23 nt, Artificial Sequence
  Synthetic
  misc_feature (22)..(22): n is a, c, g, or u
uccaauuacauaucccaugaanu

SEQ ID NO: 106031 - RNA, 24 nt, Artificial Sequence
  Synthetic
  misc_feature (23)..(23): n is a, c, g, or u
uuccaauuacauaucccaugaanu

SEQ ID NO: 106032 - RNA, 18 nt, Artificial Sequence
  Synthetic
  misc_feature (5)..(5): n is a, c, g, or u
  misc_feature (17)..(17): n is a, c, g, or u
cacanuaguugucuganu

SEQ ID NO: 106033 - RNA, 19 nt, Artificial Sequence
  Synthetic
  misc_feature (6)..(6): n is a, c, g, or u
  misc_feature (18)..(18): n is a, c, g, or u
ccacanuaguugucuganu

SEQ ID NO: 106034 - RNA, 20 nt, Artificial Sequence
  Synthetic
  misc_feature (7)..(7): n is a, c, g, or u
  misc_feature (19)..(19): n is a, c, g, or u
accacanuaguugucuganu

SEQ ID NO: 106035 - RNA, 21 nt, Artificial Sequence
  Synthetic
  misc_feature (8)..(8): n is a, c, g, or u
  misc_feature (20)..(20): n is a, c, g, or u
aaccacanuaguugucuganu

SEQ ID NO: 106036 - RNA, 22 nt, Artificial Sequence
  Synthetic
  misc_feature (9)..(9): n is a, c, g, or u
  misc_feature (21)..(21): n is a, c, g, or u
aaaccacanuaguugucuganu

SEQ ID NO: 106037 - RNA, 23 nt, Artificial Sequence
  Synthetic
  misc_feature (10)..(10): n is a, c, g, or u
  misc_feature (22)..(22): n is a, c, g, or u
gaaaccacanuaguugucuganu

SEQ ID NO: 106038 - RNA, 24 nt, Artificial Sequence
  Synthetic
  misc_feature (11)..(11): n is a, c, g, or u
  misc_feature (23)..(23): n is a, c, g, or u
ugaaaccacanuaguugucuganu

SEQ ID NO: 106039 - RNA, 18 nt, Artificial Sequence
  Synthetic
  misc_feature (2)..(2): n is a, c, g, or u
  misc_feature (17)..(17): n is a, c, g, or u
angguuuaaugccuuunu

SEQ ID NO: 106040 - RNA, 19 nt, Artificial Sequence
  Synthetic
  misc_feature (3)..(3): n is a, c, g, or u
  misc_feature (18)..(18): n is a, c, g, or u
uangguuuaaugccuuunu

SEQ ID NO: 106041 - RNA, 20 nt, Artificial Sequence
  Synthetic
  misc_feature (4)..(4): n is a, c, g, or u
  misc_feature (19)..(19): n is a, c, g, or u
auangguuuaaugccuuunu

SEQ ID NO: 106042 - RNA, 21 nt, Artificial Sequence
  Synthetic
  misc_feature (5)..(5): n is a, c, g, or u
  misc_feature (20)..(20): n is a, c, g, or u
aauangguuuaaugccuuunu

SEQ ID NO: 106043 - RNA, 22 nt, Artificial Sequence
  Synthetic
  misc_feature (6)..(6): n is a, c, g, or u
  misc_feature (21)..(21): n is a, c, g, or u
uaauangguuuaaugccuuunu

SEQ ID NO: 106044 - RNA, 23 nt, Artificial Sequence
  Synthetic
  misc_feature (7)..(7): n is a, c, g, or u
  misc_feature (22)..(22): n is a, c, g, or u
auaauangguuuaaugccuuunu

SEQ ID NO: 106045 - RNA, 24 nt, Artificial Sequence
  Synthetic
  misc_feature (8)..(8): n is a, c, g, or u
  misc_feature (23)..(23): n is a, c, g, or u
gauaauangguuuaaugccuuunu

SEQ ID NO: 106046 - RNA, 18 nt, Artificial Sequence
  Synthetic
ugcucccccuagaaaauu

SEQ ID NO: 106047 - RNA, 19 nt, Artificial Sequence
  Synthetic
gugcucccccuagaaaauu

SEQ ID NO: 106048 - RNA, 20 nt, Artificial Sequence
  Synthetic
ggugcucccccuagaaaauu

SEQ ID NO: 106049 - RNA, 18 nt, Artificial Sequence
  Synthetic
gauacuaacauugagauu

SEQ ID NO: 106050 - RNA, 19 nt, Artificial Sequence
  Synthetic
ggauacuaacauugagauu

SEQ ID NO: 106051 - RNA, 20 nt, Artificial Sequence
  Synthetic
gggauacuaacauugagauu

SEQ ID NO: 106052 - RNA, 21 nt, Artificial Sequence
  Synthetic
agggauacuaacauugagauu

SEQ ID NO: 106053 - RNA, 22 nt, Artificial Sequence
  Synthetic
aagggauacuaacauugagauu

SEQ ID NO: 106054 - RNA, 23 nt, Artificial Sequence
  Synthetic
caagggauacuaacauugagauu

SEQ ID NO: 106055 - RNA, 24 nt, Artificial Sequence
  Synthetic
ccaagggauacuaacauugagauu

SEQ ID NO: 106056 - RNA, 18 nt, Artificial Sequence
  Synthetic
ucuuccugacugccgauu

SEQ ID NO: 106057 - RNA, 19 nt, Artificial Sequence
  Synthetic
gucuuccugacugccgauu

SEQ ID NO: 106058 - RNA, 20 nt, Artificial Sequence
  Synthetic
ugucuuccugacugccgauu

SEQ ID NO: 106059 - RNA, 21 nt, Artificial Sequence
  Synthetic
cugucuuccugacugccgauu

SEQ ID NO: 106060 - RNA, 22 nt, Artificial Sequence
  Synthetic
gcugucuuccugacugccgauu

SEQ ID NO: 106061 - RNA, 23 nt, Artificial Sequence
  Synthetic
ggcugucuuccugacugccgauu

SEQ ID NO: 106062 - RNA, 24 nt, Artificial Sequence
  Synthetic
aggcugucuuccugacugccgauu

SEQ ID NO: 106063 - RNA, 18 nt, Artificial Sequence
  Synthetic
  misc_feature (10)..(10): n is a, c, g, or u
aguuugccanucaggauu

SEQ ID NO: 106064 - RNA, 19 nt, Artificial Sequence
  Synthetic
  misc_feature (11)..(11): n is a, c, g, or u
gaguuugccanucaggauu

SEQ ID NO: 106065 - RNA, 20 nt, Artificial Sequence
  Synthetic
  misc_feature (12)..(12): n is a, c, g, or u
ggaguuugccanucaggauu

SEQ ID NO: 106066 - RNA, 21 nt, Artificial Sequence
  Synthetic
  misc_feature (13)..(13): n is a, c, g, or u
gggaguuugccanucaggauu

SEQ ID NO: 106067 - RNA, 22 nt, Artificial Sequence
  Synthetic
  misc_feature (14)..(14): n is a, c, g, or u
agggaguuugccanucaggauu

SEQ ID NO: 106068 - RNA, 23 nt, Artificial Sequence
  Synthetic
  misc_feature (15)..(15): n is a, c, g, or u
gagggaguuugccanucaggauu

SEQ ID NO: 106069 - RNA, 24 nt, Artificial Sequence
  Synthetic
  misc_feature (1)..(1): n is a, c, g, or u
  misc_feature (16)..(16): n is a, c, g, or u
ngagggaguuugccanucaggauu

SEQ ID NO: 106070 - RNA, 18 nt, Artificial Sequence
  Synthetic
aaagaaucccagaggauu

SEQ ID NO: 106071 - RNA, 19 nt, Artificial Sequence
  Synthetic
gaaagaaucccagaggauu

SEQ ID NO: 106072 - RNA, 20 nt, Artificial Sequence
  Synthetic
ggaaagaaucccagaggauu

SEQ ID NO: 106073 - RNA, 21 nt, Artificial Sequence
  Synthetic
gggaaagaaucccagaggauu

SEQ ID NO: 106074 - RNA, 22 nt, Artificial Sequence
  Synthetic
cgggaaagaaucccagaggauu

SEQ ID NO: 106075 - RNA, 23 nt, Artificial Sequence
  Synthetic
ucgggaaagaaucccagaggauu

SEQ ID NO: 106076 - RNA, 24 nt, Artificial Sequence
  Synthetic
aucgggaaagaaucccagaggauu

SEQ ID NO: 106077 - RNA, 18 nt, Artificial Sequence
  Synthetic
uaagagggcccacauauu

SEQ ID NO: 106078 - RNA, 19 nt, Artificial Sequence
  Synthetic
guaagagggcccacauauu

SEQ ID NO: 106079 - RNA, 20 nt, Artificial Sequence
  Synthetic
uguaagagggcccacauauu

SEQ ID NO: 106080 - RNA, 21 nt, Artificial Sequence
  Synthetic
cuguaagagggcccacauauu

SEQ ID NO: 106081 - RNA, 22 nt, Artificial Sequence
  Synthetic
acuguaagagggcccacauauu

SEQ ID NO: 106082 - RNA, 23 nt, Artificial Sequence
  Synthetic
aacuguaagagggcccacauauu

SEQ ID NO: 106083 - RNA, 24 nt, Artificial Sequence
  Synthetic
uaacuguaagagggcccacauauu

SEQ ID NO: 106084 - RNA, 18 nt, Artificial Sequence
  Synthetic
ccaaucaauaggucuauu

SEQ ID NO: 106085 - RNA, 19 nt, Artificial Sequence
  Synthetic
uccaaucaauaggucuauu

SEQ ID NO: 106086 - RNA, 20 nt, Artificial Sequence
  Synthetic
uuccaaucaauaggucuauu

SEQ ID NO: 106087 - RNA, 21 nt, Artificial Sequence
  Synthetic
uuuccaaucaauaggucuauu

SEQ ID NO: 106088 - RNA, 22 nt, Artificial Sequence
  Synthetic
cuuuccaaucaauaggucuauu

SEQ ID NO: 106089 - RNA, 23 nt, Artificial Sequence
  Synthetic
acuuuccaaucaauaggucuauu

SEQ ID NO: 106090 - RNA, 24 nt, Artificial Sequence
  Synthetic
uacuuuccaaucaauaggucuauu

SEQ ID NO: 106091 - RNA, 18 nt, Artificial Sequence
  Synthetic
ucuagacucugugguauu

SEQ ID NO: 106092 - RNA, 19 nt, Artificial Sequence
  Synthetic
gucuagacucugugguauu

SEQ ID NO: 106093 - RNA, 20 nt, Artificial Sequence
  Synthetic
agucuagacucugugguauu

SEQ ID NO: 106094 - RNA, 21 nt, Artificial Sequence
  Synthetic
gagucuagacucugugguauu

SEQ ID NO: 106095 - RNA, 22 nt, Artificial Sequence
  Synthetic
cgagucuagacucugugguauu

SEQ ID NO: 106096 - RNA, 23 nt, Artificial Sequence
  Synthetic
acgagucuagacucugugguauu

SEQ ID NO: 106097 - RNA, 24 nt, Artificial Sequence
  Synthetic
cacgagucuagacucugugguauu

SEQ ID NO: 106098 - RNA, 18 nt, Artificial Sequence
  Synthetic
auggaaaggagguguauu

SEQ ID NO: 106099 - RNA, 19 nt, Artificial Sequence
  Synthetic
cauggaaaggagguguauu

SEQ ID NO: 106100 - RNA, 20 nt, Artificial Sequence
  Synthetic
ccauggaaaggagguguauu

SEQ ID NO: 106101 - RNA, 21 nt, Artificial Sequence
  Synthetic
gccauggaaaggagguguauu

SEQ ID NO: 106102 - RNA, 22 nt, Artificial Sequence
  Synthetic
agccauggaaaggagguguauu

SEQ ID NO: 106103 - RNA, 23 nt, Artificial Sequence
  Synthetic
cagccauggaaaggagguguauu

SEQ ID NO: 106104 - RNA, 24 nt, Artificial Sequence
  Synthetic
gcagccauggaaaggagguguauu

SEQ ID NO: 106105 - RNA, 18 nt, Artificial Sequence
  Synthetic
  misc_feature (5)..(5): n is a, c, g, or u
gauunguccccaugccuu

SEQ ID NO: 106106 - RNA, 19 nt, Artificial Sequence
  Synthetic
  misc_feature (6)..(6): n is a, c, g, or u
agauunguccccaugccuu

SEQ ID NO: 106107 - RNA, 20 nt, Artificial Sequence
  Synthetic
  misc_feature (7)..(7): n is a, c, g, or u
aagauunguccccaugccuu

SEQ ID NO: 106108 - RNA, 21 nt, Artificial Sequence
  Synthetic
  misc_feature (8)..(8): n is a, c, g, or u
aaagauunguccccaugccuu

SEQ ID NO: 106109 - RNA, 22 nt, Artificial Sequence
  Synthetic
  misc_feature (9)..(9): n is a, c, g, or u
gaaagauunguccccaugccuu

SEQ ID NO: 106110 - RNA, 23 nt, Artificial Sequence
  Synthetic
  misc_feature (10)..(10): n is a, c, g, or u
agaaagauunguccccaugccuu

SEQ ID NO: 106111 - RNA, 24 nt, Artificial Sequence
  Synthetic
  misc_feature (11)..(11): n is a, c, g, or u
cagaaagauunguccccaugccuu

SEQ ID NO: 106112 - RNA, 18 nt, Artificial Sequence
  Synthetic
  misc_feature (2)..(2): n is a, c, g, or u
  misc_feature (10)..(10): n is a, c, g, or u
cncuggccanugauccuu

SEQ ID NO: 106113 - RNA, 19 nt, Artificial Sequence
  Synthetic
  misc_feature (3)..(3): n is a, c, g, or u
  misc_feature (11)..(11): n is a, c, g, or u
ccncuggccanugauccuu

SEQ ID NO: 106114 - RNA, 20 nt, Artificial Sequence
  Synthetic
  misc_feature (4)..(4): n is a, c, g, or u
  misc_feature (12)..(12): n is a, c, g, or u
gccncuggccanugauccuu

SEQ ID NO: 106115 - RNA, 21 nt, Artificial Sequence
  Synthetic
  misc_feature (5)..(5): n is a, c, g, or u
  misc_feature (13)..(13): n is a, c, g, or u
ugccncuggccanugauccuu

SEQ ID NO: 106116 - RNA, 22 nt, Artificial Sequence
  Synthetic
  misc_feature (6)..(6): n is a, c, g, or u
  misc_feature (14)..(14): n is a, c, g, or u
uugccncuggccanugauccuu

SEQ ID NO: 106117 - RNA, 23 nt, Artificial Sequence
  Synthetic
  misc_feature (7)..(7): n is a, c, g, or u
  misc_feature (15)..(15): n is a, c, g, or u
uuugccncuggccanugauccuu

SEQ ID NO: 106118 - RNA, 24 nt, Artificial Sequence
  Synthetic
  misc_feature (1)..(1): n is a, c, g, or u
  misc_feature (8)..(8): n is a, c, g, or u
  misc_feature (16)..(16): n is a, c, g, or u
nuuugccncuggccanugauccuu

SEQ ID NO: 106119 - RNA, 18 nt, Artificial Sequence
  Synthetic
ccacccaaggcacagcuu

SEQ ID NO: 106120 - RNA, 19 nt, Artificial Sequence
  Synthetic
gccacccaaggcacagcuu

SEQ ID NO: 106121 - RNA, 20 nt, Artificial Sequence
  Synthetic
agccacccaaggcacagcuu

SEQ ID NO: 106122 - RNA, 21 nt, Artificial Sequence
  Synthetic
aagccacccaaggcacagcuu

SEQ ID NO: 106123 - RNA, 22 nt, Artificial Sequence
  Synthetic
aaagccacccaaggcacagcuu

SEQ ID NO: 106124 - RNA, 23 nt, Artificial Sequence
  Synthetic
  misc_feature (1)..(1): n is a, c, g, or u
naaagccacccaaggcacagcuu

SEQ ID NO: 106125 - RNA, 24 nt, Artificial Sequence
  Synthetic
  misc_feature (2)..(2): n is a, c, g, or u
cnaaagccacccaaggcacagcuu

SEQ ID NO: 106126 - RNA, 18 nt, Artificial Sequence
  Synthetic
  misc_feature (5)..(5): n is a, c, g, or u
ugggnucuagcagagcuu

SEQ ID NO: 106127 - RNA, 19 nt, Artificial Sequence
  Synthetic
  misc_feature (6)..(6): n is a, c, g, or u
cugggnucuagcagagcuu

SEQ ID NO: 106128 - RNA, 20 nt, Artificial Sequence
  Synthetic
  misc_feature (7)..(7): n is a, c, g, or u
ucugggnucuagcagagcuu

SEQ ID NO: 106129 - RNA, 21 nt, Artificial Sequence
  Synthetic
  misc_feature (8)..(8): n is a, c, g, or u
cucugggnucuagcagagcuu

SEQ ID NO: 106130 - RNA, 22 nt, Artificial Sequence
  Synthetic
  misc_feature (9)..(9): n is a, c, g, or u
acucugggnucuagcagagcuu

SEQ ID NO: 106131 - RNA, 23 nt, Artificial Sequence
  Synthetic
  misc_feature (10)..(10): n is a, c, g, or u
cacucugggnucuagcagagcuu

SEQ ID NO: 106132 - RNA, 24 nt, Artificial Sequence
  Synthetic
  misc_feature (11)..(11): n is a, c, g, or u
ucacucugggnucuagcagagcuu

SEQ ID NO: 106133 - RNA, 18 nt, Artificial Sequence
  Synthetic
cacucccauaggaaucuu

SEQ ID NO: 106134 - RNA, 19 nt, Artificial Sequence
  Synthetic
ccacucccauaggaaucuu

SEQ ID NO: 106135 - RNA, 20 nt, Artificial Sequence
  Synthetic
cccacucccauaggaaucuu

SEQ ID NO: 106136 - RNA, 21 nt, Artificial Sequence
  Synthetic
gcccacucccauaggaaucuu

SEQ ID NO: 106137 - RNA, 22 nt, Artificial Sequence
  Synthetic
ggcccacucccauaggaaucuu

SEQ ID NO: 106138 - RNA, 23 nt, Artificial Sequence
  Synthetic
aggcccacucccauaggaaucuu

SEQ ID NO: 106139 - RNA, 24 nt, Artificial Sequence
  Synthetic
gaggcccacucccauaggaaucuu

SEQ ID NO: 106140 - RNA, 18 nt, Artificial Sequence
  Synthetic
ucaagaacaguuucucuu

SEQ ID NO: 106141 - RNA, 19 nt, Artificial Sequence
  Synthetic
cucaagaacaguuucucuu

SEQ ID NO: 106142 - RNA, 20 nt, Artificial Sequence
  Synthetic
acucaagaacaguuucucuu

SEQ ID NO: 106143 - RNA, 21 nt, Artificial Sequence
  Synthetic
uacucaagaacaguuucucuu

SEQ ID NO: 106144 - RNA, 22 nt, Artificial Sequence
  Synthetic
auacucaagaacaguuucucuu

SEQ ID NO: 106145 - RNA, 23 nt, Artificial Sequence
  Synthetic
aauacucaagaacaguuucucuu

SEQ ID NO: 106146 - RNA, 24 nt, Artificial Sequence
  Synthetic
aaauacucaagaacaguuucucuu

SEQ ID NO: 106147 - RNA, 18 nt, Artificial Sequence
  Synthetic
augggaguaggcugucuu

SEQ ID NO: 106148 - RNA, 19 nt, Artificial Sequence
  Synthetic
gaugggaguaggcugucuu

SEQ ID NO: 106149 - RNA, 20 nt, Artificial Sequence
  Synthetic
agaugggaguaggcugucuu

SEQ ID NO: 106150 - RNA, 21 nt, Artificial Sequence
  Synthetic
gagaugggaguaggcugucuu

SEQ ID NO: 106151 - RNA, 22 nt, Artificial Sequence
  Synthetic
agagaugggaguaggcugucuu

SEQ ID NO: 106152 - RNA, 23 nt, Artificial Sequence
  Synthetic
gagagaugggaguaggcugucuu

SEQ ID NO: 106153 - RNA, 24 nt, Artificial Sequence
  Synthetic
ggagagaugggaguaggcugucuu

SEQ ID NO: 106154 - RNA, 18 nt, Artificial Sequence
  Synthetic
gguauugugaggauucuu

SEQ ID NO: 106155 - RNA, 19 nt, Artificial Sequence
  Synthetic
ugguauugugaggauucuu

SEQ ID NO: 106156 - RNA, 20 nt, Artificial Sequence
  Synthetic
gugguauugugaggauucuu

SEQ ID NO: 106157 - RNA, 21 nt, Artificial Sequence
  Synthetic
ugugguauugugaggauucuu

SEQ ID NO: 106158 - RNA, 22 nt, Artificial Sequence
  Synthetic
cugugguauugugaggauucuu

SEQ ID NO: 106159 - RNA, 23 nt, Artificial Sequence
  Synthetic
ucugugguauugugaggauucuu

SEQ ID NO: 106160 - RNA, 24 nt, Artificial Sequence
  Synthetic
cucugugguauugugaggauucuu

SEQ ID NO: 106161 - RNA, 18 nt, Artificial Sequence
  Synthetic
ggcgagggaguucuucuu

SEQ ID NO: 106162 - RNA, 19 nt, Artificial Sequence
  Synthetic
aggcgagggaguucuucuu

SEQ ID NO: 106163 - RNA, 20 nt, Artificial Sequence
  Synthetic
gaggcgagggaguucuucuu

SEQ ID NO: 106164 - RNA, 21 nt, Artificial Sequence
  Synthetic
cgaggcgagggaguucuucuu

SEQ ID NO: 106165 - RNA, 22 nt, Artificial Sequence
  Synthetic
gcgaggcgagggaguucuucuu

SEQ ID NO: 106166 - RNA, 23 nt, Artificial Sequence
  Synthetic
ugcgaggcgagggaguucuucuu

SEQ ID NO: 106167 - RNA, 24 nt, Artificial Sequence
  Synthetic
cugcgaggcgagggaguucuucuu

SEQ ID NO: 106168 - RNA, 18 nt, Artificial Sequence
  Synthetic
agaaaggccuuguaaguu

SEQ ID NO: 106169 - RNA, 19 nt, Artificial Sequence
  Synthetic
cagaaaggccuuguaaguu

SEQ ID NO: 106170 - RNA, 20 nt, Artificial Sequence
  Synthetic
acagaaaggccuuguaaguu

SEQ ID NO: 106171 - RNA, 21 nt, Artificial Sequence
  Synthetic
cacagaaaggccuuguaaguu

SEQ ID NO: 106172 - RNA, 22 nt, Artificial Sequence
  Synthetic
acacagaaaggccuuguaaguu

SEQ ID NO: 106173 - RNA, 23 nt, Artificial Sequence
  Synthetic
uacacagaaaggccuuguaaguu

SEQ ID NO: 106174 - RNA, 24 nt, Artificial Sequence
  Synthetic
uuacacagaaaggccuuguaaguu

SEQ ID NO: 106175 - RNA, 18 nt, Artificial Sequence
  Synthetic
cccgcgcaggauccaguu

SEQ ID NO: 106176 - RNA, 19 nt, Artificial Sequence
  Synthetic
ucccgcgcaggauccaguu

SEQ ID NO: 106177 - RNA, 20 nt, Artificial Sequence
  Synthetic
gucccgcgcaggauccaguu

SEQ ID NO: 106178 - RNA, 18 nt, Artificial Sequence
  Synthetic
  misc_feature (10)..(10): n is a, c, g, or u
  misc_feature (14)..(14): n is a, c, g, or u
gucuauuuanaggnaguu

SEQ ID NO: 106179 - RNA, 19 nt, Artificial Sequence
  Synthetic
  misc_feature (11)..(11): n is a, c, g, or u
  misc_feature (15)..(15): n is a, c, g, or u
ggucuauuuanaggnaguu

SEQ ID NO: 106180 - RNA, 20 nt, Artificial Sequence
  Synthetic
  misc_feature (12)..(12): n is a, c, g, or u
  misc_feature (16)..(16): n is a, c, g, or u
aggucuauuuanaggnaguu

SEQ ID NO: 106181 - RNA, 21 nt, Artificial Sequence
  Synthetic
  misc_feature (13)..(13): n is a, c, g, or u
  misc_feature (17)..(17): n is a, c, g, or u
uaggucuauuuanaggnaguu

SEQ ID NO: 106182 - RNA, 22 nt, Artificial Sequence
  Synthetic
  misc_feature (14)..(14): n is a, c, g, or u
  misc_feature (18)..(18): n is a, c, g, or u
auaggucuauuuanaggnaguu

SEQ ID NO: 106183 - RNA, 23 nt, Artificial Sequence
  Synthetic
  misc_feature (15)..(15): n is a, c, g, or u
  misc_feature (19)..(19): n is a, c, g, or u
aauaggucuauuuanaggnaguu

SEQ ID NO: 106184 - RNA, 24 nt, Artificial Sequence
  Synthetic
  misc_feature (16)..(16): n is a, c, g, or u
  misc_feature (20)..(20): n is a, c, g, or u
caauaggucuauuuanaggnaguu

SEQ ID NO: 106185 - RNA, 18 nt, Artificial Sequence
  Synthetic
uguaaauaaugccuaguu

SEQ ID NO: 106186 - RNA, 19 nt, Artificial Sequence
  Synthetic
auguaaauaaugccuaguu

SEQ ID NO: 106187 - RNA, 20 nt, Artificial Sequence
  Synthetic
uauguaaauaaugccuaguu

SEQ ID NO: 106188 - RNA, 21 nt, Artificial Sequence
  Synthetic
guauguaaauaaugccuaguu

SEQ ID NO: 106189 - RNA, 22 nt, Artificial Sequence
  Synthetic
aguauguaaauaaugccuaguu

SEQ ID NO: 106190 - RNA, 23 nt, Artificial Sequence
  Synthetic
gaguauguaaauaaugccuaguu

SEQ ID NO: 106191 - RNA, 24 nt, Artificial Sequence
  Synthetic
agaguauguaaauaaugccuaguu

SEQ ID NO: 106192 - RNA, 18 nt, Artificial Sequence
  Synthetic
cgucuaacaacaguaguu

SEQ ID NO: 106193 - RNA, 19 nt, Artificial Sequence
  Synthetic
ucgucuaacaacaguaguu

SEQ ID NO: 106194 - RNA, 20 nt, Artificial Sequence
  Synthetic
gucgucuaacaacaguaguu

SEQ ID NO: 106195 - RNA, 21 nt, Artificial Sequence
  Synthetic
cgucgucuaacaacaguaguu

SEQ ID NO: 106196 - RNA, 22 nt, Artificial Sequence
  Synthetic
ucgucgucuaacaacaguaguu

SEQ ID NO: 106197 - RNA, 23 nt, Artificial Sequence
  Synthetic
cucgucgucuaacaacaguaguu

SEQ ID NO: 106198 - RNA, 24 nt, Artificial Sequence
  Synthetic
ccucgucgucuaacaacaguaguu

SEQ ID NO: 106199 - RNA, 18 nt, Artificial Sequence
  Synthetic
  misc_feature (1)..(1): n is a, c, g, or u
nuuggaggacaagagguu

SEQ ID NO: 106200 - RNA, 19 nt, Artificial Sequence
  Synthetic
  misc_feature (2)..(2): n is a, c, g, or u
anuuggaggacaagagguu

SEQ ID NO: 106201 - RNA, 20 nt, Artificial Sequence
  Synthetic
  misc_feature (3)..(3): n is a, c, g, or u
aanuuggaggacaagagguu

SEQ ID NO: 106202 - RNA, 21 nt, Artificial Sequence
  Synthetic
  misc_feature (4)..(4): n is a, c, g, or u
caanuuggaggacaagagguu

SEQ ID NO: 106203 - RNA, 22 nt, Artificial Sequence
  Synthetic
  misc_feature (5)..(5): n is a, c, g, or u
acaanuuggaggacaagagguu

SEQ ID NO: 106204 - RNA, 23 nt, Artificial Sequence
  Synthetic
  misc_feature (6)..(6): n is a, c, g, or u
gacaanuuggaggacaagagguu

SEQ ID NO: 106205 - RNA, 24 nt, Artificial Sequence
  Synthetic
  misc_feature (7)..(7): n is a, c, g, or u
ggacaanuuggaggacaagagguu

SEQ ID NO: 106206 - RNA, 18 nt, Artificial Sequence
  Synthetic
ccaugccuugucgagguu

SEQ ID NO: 106207 - RNA, 19 nt, Artificial Sequence
  Synthetic
cccaugccuugucgagguu

SEQ ID NO: 106208 - RNA, 20 nt, Artificial Sequence
  Synthetic
ccccaugccuugucgagguu

SEQ ID NO: 106209 - RNA, 21 nt, Artificial Sequence
  Synthetic
uccccaugccuugucgagguu

SEQ ID NO: 106210 - RNA, 22 nt, Artificial Sequence
  Synthetic
guccccaugccuugucgagguu

SEQ ID NO: 106211 - RNA, 23 nt, Artificial Sequence
  Synthetic
  misc_feature (1)..(1): n is a, c, g, or u
nguccccaugccuugucgagguu

SEQ ID NO: 106212 - RNA, 24 nt, Artificial Sequence
  Synthetic
  misc_feature (2)..(2): n is a, c, g, or u
unguccccaugccuugucgagguu

SEQ ID NO: 106213 - RNA, 18 nt, Artificial Sequence
  Synthetic
ggugagugauuggagguu

SEQ ID NO: 106214 - RNA, 19 nt, Artificial Sequence
  Synthetic
uggugagugauuggagguu

SEQ ID NO: 106215 - RNA, 20 nt, Artificial Sequence
  Synthetic
uuggugagugauuggagguu

SEQ ID NO: 106216 - RNA, 21 nt, Artificial Sequence
  Synthetic
guuggugagugauuggagguu

SEQ ID NO: 106217 - RNA, 22 nt, Artificial Sequence
  Synthetic
gguuggugagugauuggagguu

SEQ ID NO: 106218 - RNA, 23 nt, Artificial Sequence
  Synthetic
agguuggugagugauuggagguu

SEQ ID NO: 106219 - RNA, 24 nt, Artificial Sequence
  Synthetic
gagguuggugagugauuggagguu

SEQ ID NO: 106220 - RNA, 18 nt, Artificial Sequence
  Synthetic
ggugaggugaacaauguu

SEQ ID NO: 106221 - RNA, 19 nt, Artificial Sequence
  Synthetic
uggugaggugaacaauguu

SEQ ID NO: 106222 - RNA, 20 nt, Artificial Sequence
  Synthetic
auggugaggugaacaauguu

SEQ ID NO: 106223 - RNA, 21 nt, Artificial Sequence
  Synthetic
uauggugaggugaacaauguu

SEQ ID NO: 106224 - RNA, 22 nt, Artificial Sequence
  Synthetic
guauggugaggugaacaauguu

SEQ ID NO: 106225 - RNA, 23 nt, Artificial Sequence
  Synthetic
uguauggugaggugaacaauguu

SEQ ID NO: 106226 - RNA, 24 nt, Artificial Sequence
  Synthetic
cuguauggugaggugaacaauguu

SEQ ID NO: 106227 - RNA, 18 nt, Artificial Sequence
  Synthetic
gugcugguaguugauguu

SEQ ID NO: 106228 - RNA, 19 nt, Artificial Sequence
  Synthetic
cgugcugguaguugauguu

SEQ ID NO: 106229 - RNA, 20 nt, Artificial Sequence
  Synthetic
ccgugcugguaguugauguu

SEQ ID NO: 106230 - RNA, 21 nt, Artificial Sequence
  Synthetic
cccgugcugguaguugauguu

SEQ ID NO: 106231 - RNA, 22 nt, Artificial Sequence
  Synthetic
ucccgugcugguaguugauguu

SEQ ID NO: 106232 - RNA, 23 nt, Artificial Sequence
  Synthetic
gucccgugcugguaguugauguu

SEQ ID NO: 106233 - RNA, 24 nt, Artificial Sequence
  Synthetic
ggucccgugcugguaguugauguu

SEQ ID NO: 106234 - RNA, 18 nt, Artificial Sequence
  Synthetic
ggaacaggguuuacuguu

SEQ ID NO: 106235 - RNA, 19 nt, Artificial Sequence
  Synthetic
cggaacaggguuuacuguu

SEQ ID NO: 106236 - RNA, 20 nt, Artificial Sequence
  Synthetic
ucggaacaggguuuacuguu

SEQ ID NO: 106237 - RNA, 21 nt, Artificial Sequence
  Synthetic
gucggaacaggguuuacuguu

SEQ ID NO: 106238 - RNA, 22 nt, Artificial Sequence
  Synthetic
agucggaacaggguuuacuguu

SEQ ID NO: 106239 - RNA, 23 nt, Artificial Sequence
  Synthetic
uagucggaacaggguuuacuguu

SEQ ID NO: 106240 - RNA, 24 nt, Artificial Sequence
  Synthetic
guagucggaacaggguuuacuguu

SEQ ID NO: 106241 - RNA, 18 nt, Artificial Sequence
  Synthetic
guaguuuccggaaguguu

SEQ ID NO: 106242 - RNA, 19 nt, Artificial Sequence
  Synthetic
aguaguuuccggaaguguu

SEQ ID NO: 106243 - RNA, 20 nt, Artificial Sequence
  Synthetic
caguaguuuccggaaguguu

SEQ ID NO: 106244 - RNA, 21 nt, Artificial Sequence
  Synthetic
acaguaguuuccggaaguguu

SEQ ID NO: 106245 - RNA, 22 nt, Artificial Sequence
  Synthetic
aacaguaguuuccggaaguguu

SEQ ID NO: 106246 - RNA, 23 nt, Artificial Sequence
  Synthetic
caacaguaguuuccggaaguguu

SEQ ID NO: 106247 - RNA, 24 nt, Artificial Sequence
  Synthetic
acaacaguaguuuccggaaguguu

SEQ ID NO: 106248 - RNA, 18 nt, Artificial Sequence
  Synthetic
caugcuguagcucuuguu

SEQ ID NO: 106249 - RNA, 19 nt, Artificial Sequence
  Synthetic
ccaugcuguagcucuuguu

SEQ ID NO: 106250 - RNA, 20 nt, Artificial Sequence
  Synthetic
cccaugcuguagcucuuguu

SEQ ID NO: 106251 - RNA, 21 nt, Artificial Sequence
  Synthetic
ucccaugcuguagcucuuguu

SEQ ID NO: 106252 - RNA, 22 nt, Artificial Sequence
  Synthetic
cucccaugcuguagcucuuguu

SEQ ID NO: 106253 - RNA, 23 nt, Artificial Sequence
  Synthetic
ccucccaugcuguagcucuuguu

SEQ ID NO: 106254 - RNA, 24 nt, Artificial Sequence
  Synthetic
accucccaugcuguagcucuuguu

SEQ ID NO: 106255 - RNA, 18 nt, Artificial Sequence
  Synthetic
  misc_feature (6)..(6): n is a, c, g, or u
  misc_feature (16)..(16): n is a, c, g, or u
cgauanccaggacaanuu

SEQ ID NO: 106256 - RNA, 19 nt, Artificial Sequence
  Synthetic
  misc_feature (7)..(7): n is a, c, g, or u
  misc_feature (17)..(17): n is a, c, g, or u
gcgauanccaggacaanuu

SEQ ID NO: 106257 - RNA, 20 nt, Artificial Sequence
  Synthetic
  misc_feature (8)..(8): n is a, c, g, or u
  misc_feature (18)..(18): n is a, c, g, or u
agcgauanccaggacaanuu

SEQ ID NO: 106258 - RNA, 21 nt, Artificial Sequence
  Synthetic
  misc_feature (9)..(9): n is a, c, g, or u
  misc_feature (19)..(19): n is a, c, g, or u
cagcgauanccaggacaanuu

SEQ ID NO: 106259 - RNA, 22 nt, Artificial Sequence
  Synthetic
  misc_feature (10)..(10): n is a, c, g, or u
  misc_feature (20)..(20): n is a, c, g, or u
ccagcgauanccaggacaanuu

SEQ ID NO: 106260 - RNA, 23 nt, Artificial Sequence
  Synthetic
  misc_feature (11)..(11): n is a, c, g, or u
  misc_feature (21)..(21): n is a, c, g, or u
uccagcgauanccaggacaanuu

SEQ ID NO: 106261 - RNA, 24 nt, Artificial Sequence
  Synthetic
  misc_feature (12)..(12): n is a, c, g, or u
  misc_feature (22)..(22): n is a, c, g, or u
auccagcgauanccaggacaanuu

SEQ ID NO: 106262 - RNA, 18 nt, Artificial Sequence
  Synthetic
  misc_feature (16)..(16): n is a, c, g, or u
uacauaucccaugaanuu

SEQ ID NO: 106263 - RNA, 19 nt, Artificial Sequence
  Synthetic
  misc_feature (17)..(17): n is a, c, g, or u
uuacauaucccaugaanuu

SEQ ID NO: 106264 - RNA, 20 nt, Artificial Sequence
  Synthetic
  misc_feature (18)..(18): n is a, c, g, or u
auuacauaucccaugaanuu

SEQ ID NO: 106265 - RNA, 21 nt, Artificial Sequence
  Synthetic
  misc_feature (19)..(19): n is a, c, g, or u
aauuacauaucccaugaanuu

SEQ ID NO: 106266 - RNA, 22 nt, Artificial Sequence
  Synthetic
  misc_feature (20)..(20): n is a, c, g, or u
caauuacauaucccaugaanuu

SEQ ID NO: 106267 - RNA, 23 nt, Artificial Sequence
  Synthetic
  misc_feature (21)..(21): n is a, c, g, or u
ccaauuacauaucccaugaanuu

SEQ ID NO: 106268 - RNA, 24 nt, Artificial Sequence
  Synthetic
  misc_feature (22)..(22): n is a, c, g, or u
uccaauuacauaucccaugaanuu

SEQ ID NO: 106269 - RNA, 18 nt, Artificial Sequence
  Synthetic
  misc_feature (4)..(4): n is a, c, g, or u
  misc_feature (16)..(16): n is a, c, g, or u
acanuaguugucuganuu

SEQ ID NO: 106270 - RNA, 19 nt, Artificial Sequence
  Synthetic
  misc_feature (5)..(5): n is a, c, g, or u
  misc_feature (17)..(17): n is a, c, g, or u
cacanuaguugucuganuu

SEQ ID NO: 106271 - RNA, 20 nt, Artificial Sequence
  Synthetic
  misc_feature (6)..(6): n is a, c, g, or u
  misc_feature (18)..(18): n is a, c, g, or u
ccacanuaguugucuganuu

SEQ ID NO: 106272 - RNA, 21 nt, Artificial Sequence
  Synthetic
  misc_feature (7)..(7): n is a, c, g, or u
  misc_feature (19)..(19): n is a, c, g, or u
accacanuaguugucuganuu

SEQ ID NO: 106273 - RNA, 22 nt, Artificial Sequence
  Synthetic
  misc_feature (8)..(8): n is a, c, g, or u
  misc_feature (20)..(20): n is a, c, g, or u
aaccacanuaguugucuganuu

SEQ ID NO: 106274 - RNA, 23 nt, Artificial Sequence
  Synthetic
  misc_feature (9)..(9): n is a, c, g, or u
  misc_feature (21)..(21): n is a, c, g, or u
aaaccacanuaguugucuganuu

SEQ ID NO: 106275 - RNA, 24 nt, Artificial Sequence
  Synthetic
  misc_feature (10)..(10): n is a, c, g, or u
  misc_feature (22)..(22): n is a, c, g, or u
gaaaccacanuaguugucuganuu

SEQ ID NO: 106276 - RNA, 18 nt, Artificial Sequence
  Synthetic
  misc_feature (1)..(1): n is a, c, g, or u
  misc_feature (4)..(4): n is a, c, g, or u
nucnaagggcaaauauuu

SEQ ID NO: 106277 - RNA, 19 nt, Artificial Sequence
  Synthetic
  misc_feature (2)..(2): n is a, c, g, or u
  misc_feature (5)..(5): n is a, c, g, or u
unucnaagggcaaauauuu

SEQ ID NO: 106278 - RNA, 20 nt, Artificial Sequence
  Synthetic
  misc_feature (3)..(3): n is a, c, g, or u
  misc_feature (6)..(6): n is a, c, g, or u
uunucnaagggcaaauauuu

SEQ ID NO: 106279 - RNA, 21 nt, Artificial Sequence
  Synthetic
  misc_feature (4)..(4): n is a, c, g, or u
  misc_feature (7)..(7): n is a, c, g, or u
uuunucnaagggcaaauauuu

SEQ ID NO: 106280 - RNA, 22 nt, Artificial Sequence
  Synthetic
  misc_feature (5)..(5): n is a, c, g, or u
  misc_feature (8)..(8): n is a, c, g, or u
cuuunucnaagggcaaauauuu

SEQ ID NO: 106281 - RNA, 23 nt, Artificial Sequence
  Synthetic
  misc_feature (6)..(6): n is a, c, g, or u
  misc_feature (9)..(9): n is a, c, g, or u
ccuuunucnaagggcaaauauuu

SEQ ID NO: 106282 - RNA, 24 nt, Artificial Sequence
  Synthetic
  misc_feature (7)..(7): n is a, c, g, or u
  misc_feature (10)..(10): n is a, c, g, or u
gccuuunucnaagggcaaauauuu

SEQ ID NO: 106283 - RNA, 18 nt, Artificial Sequence
  Synthetic
caaucaauaggucuauuu

SEQ ID NO: 106284 - RNA, 19 nt, Artificial Sequence
  Synthetic
ccaaucaauaggucuauuu

SEQ ID NO: 106285 - RNA, 20 nt, Artificial Sequence
  Synthetic
uccaaucaauaggucuauuu

SEQ ID NO: 106286 - RNA, 21 nt, Artificial Sequence
  Synthetic
uuccaaucaauaggucuauuu

SEQ ID NO: 106287 - RNA, 22 nt, Artificial Sequence
  Synthetic
uuuccaaucaauaggucuauuu

SEQ ID NO: 106288 - RNA, 23 nt, Artificial Sequence
  Synthetic
cuuuccaaucaauaggucuauuu

SEQ ID NO: 106289 - RNA, 24 nt, Artificial Sequence
  Synthetic
acuuuccaaucaauaggucuauuu

SEQ ID NO: 106290 - RNA, 18 nt, Artificial Sequence
  Synthetic
uggaaaggagguguauuu

SEQ ID NO: 106291 - RNA, 19 nt, Artificial Sequence
  Synthetic
auggaaaggagguguauuu

SEQ ID NO: 106292 - RNA, 20 nt, Artificial Sequence
  Synthetic
cauggaaaggagguguauuu

SEQ ID NO: 106293 - RNA, 21 nt, Artificial Sequence
  Synthetic
ccauggaaaggagguguauuu

SEQ ID NO: 106294 - RNA, 22 nt, Artificial Sequence
  Synthetic
gccauggaaaggagguguauuu

SEQ ID NO: 106295 - RNA, 23 nt, Artificial Sequence
  Synthetic
agccauggaaaggagguguauuu

SEQ ID NO: 106296 - RNA, 24 nt, Artificial Sequence
  Synthetic
cagccauggaaaggagguguauuu

SEQ ID NO: 106297 - RNA, 18 nt, Artificial Sequence
  Synthetic
  misc_feature (9)..(9): n is a, c, g, or u
  misc_feature (13)..(13): n is a, c, g, or u
ucuauuuanaggnaguuu

SEQ ID NO: 106298 - RNA, 19 nt, Artificial Sequence
  Synthetic
  misc_feature (10)..(10): n is a, c, g, or u
  misc_feature (14)..(14): n is a, c, g, or u
gucuauuuanaggnaguuu

SEQ ID NO: 106299 - RNA, 20 nt, Artificial Sequence
  Synthetic
  misc_feature (11)..(11): n is a, c, g, or u
  misc_feature (15)..(15): n is a, c, g, or u
ggucuauuuanaggnaguuu

SEQ ID NO: 106300 - RNA, 21 nt, Artificial Sequence
  Synthetic
  misc_feature (12)..(12): n is a, c, g, or u
  misc_feature (16)..(16): n is a, c, g, or u
aggucuauuuanaggnaguuu

SEQ ID NO: 106301 - RNA, 22 nt, Artificial Sequence
  Synthetic
  misc_feature (13)..(13): n is a, c, g, or u
  misc_feature (17)..(17): n is a, c, g, or u
uaggucuauuuanaggnaguuu

SEQ ID NO: 106302 - RNA, 23 nt, Artificial Sequence
  Synthetic
  misc_feature (14)..(14): n is a, c, g, or u
  misc_feature (18)..(18): n is a, c, g, or u
auaggucuauuuanaggnaguuu

SEQ ID NO: 106303 - RNA, 24 nt, Artificial Sequence
  Synthetic
  misc_feature (15)..(15): n is a, c, g, or u
  misc_feature (19)..(19): n is a, c, g, or u
aauaggucuauuuanaggnaguuu

SEQ ID NO: 106304 - RNA, 18 nt, Artificial Sequence
  Synthetic
gucuaacaacaguaguuu

SEQ ID NO: 106305 - RNA, 19 nt, Artificial Sequence
  Synthetic
cgucuaacaacaguaguuu

SEQ ID NO: 106306 - RNA, 20 nt, Artificial Sequence
  Synthetic
ucgucuaacaacaguaguuu

SEQ ID NO: 106307 - RNA, 21 nt, Artificial Sequence
  Synthetic
gucgucuaacaacaguaguuu

SEQ ID NO: 106308 - RNA, 22 nt, Artificial Sequence
  Synthetic
cgucgucuaacaacaguaguuu

SEQ ID NO: 106309 - RNA, 23 nt, Artificial Sequence
  Synthetic
ucgucgucuaacaacaguaguuu

SEQ ID NO: 106310 - RNA, 24 nt, Artificial Sequence
  Synthetic
cucgucgucuaacaacaguaguuu

SEQ ID NO: 106311 - RNA, 18 nt, Artificial Sequence
  Synthetic
caugccuugucgagguuu

SEQ ID NO: 106312 - RNA, 19 nt, Artificial Sequence
  Synthetic
ccaugccuugucgagguuu

SEQ ID NO: 106313 - RNA, 20 nt, Artificial Sequence
  Synthetic
cccaugccuugucgagguuu

SEQ ID NO: 106314 - RNA, 21 nt, Artificial Sequence
  Synthetic
ccccaugccuugucgagguuu

SEQ ID NO: 106315 - RNA, 22 nt, Artificial Sequence
  Synthetic
uccccaugccuugucgagguuu

SEQ ID NO: 106316 - RNA, 23 nt, Artificial Sequence
  Synthetic
guccccaugccuugucgagguuu

SEQ ID NO: 106317 - RNA, 24 nt, Artificial Sequence
  Synthetic
  misc_feature (1)..(1): n is a, c, g, or u
nguccccaugccuugucgagguuu

SEQ ID NO: 106318 - RNA, 18 nt, Artificial Sequence
  Synthetic
gccccaacguuugguuuu

SEQ ID NO: 106319 - RNA, 19 nt, Artificial Sequence
  Synthetic
agccccaacguuugguuuu

SEQ ID NO: 106320 - RNA, 20 nt, Artificial Sequence
  Synthetic
uagccccaacguuugguuuu

SEQ ID NO: 106321 - RNA, 21 nt, Artificial Sequence
  Synthetic
guagccccaacguuugguuuu

SEQ ID NO: 106322 - RNA, 22 nt, Artificial Sequence
  Synthetic
aguagccccaacguuugguuuu

SEQ ID NO: 106323 - RNA, 23 nt, Artificial Sequence
  Synthetic
gaguagccccaacguuugguuuu

SEQ ID NO: 106324 - RNA, 24 nt, Artificial Sequence
  Synthetic
ggaguagccccaacguuugguuuu

SEQ ID NO: 106325 - RNA, 18 nt, Artificial Sequence
  Synthetic
cuuacaguuaaugaaaaa

SEQ ID NO: 106326 - RNA, 19 nt, Artificial Sequence
  Synthetic
ucuuacaguuaaugaaaaa

SEQ ID NO: 106327 - RNA, 20 nt, Artificial Sequence
  Synthetic
cucuuacaguuaaugaaaaa

SEQ ID NO: 106328 - RNA, 21 nt, Artificial Sequence
  Synthetic
ccucuuacaguuaaugaaaaa

SEQ ID NO: 106329 - RNA, 22 nt, Artificial Sequence
  Synthetic
cccucuuacaguuaaugaaaaa

SEQ ID NO: 106330 - RNA, 23 nt, Artificial Sequence
  Synthetic
gcccucuuacaguuaaugaaaaa

SEQ ID NO: 106331 - RNA, 24 nt, Artificial Sequence
  Synthetic
ggcccucuuacaguuaaugaaaaa

SEQ ID NO: 106332 - RNA, 18 nt, Artificial Sequence
  Synthetic
ucuuacaguuaaugaaaa

SEQ ID NO: 106333 - RNA, 19 nt, Artificial Sequence
  Synthetic
cucuuacaguuaaugaaaa

SEQ ID NO: 106334 - RNA, 20 nt, Artificial Sequence
  Synthetic
ccucuuacaguuaaugaaaa

SEQ ID NO: 106335 - RNA, 21 nt, Artificial Sequence
  Synthetic
cccucuuacaguuaaugaaaa

SEQ ID NO: 106336 - RNA, 22 nt, Artificial Sequence
  Synthetic
gcccucuuacaguuaaugaaaa

SEQ ID NO: 106337 - RNA, 23 nt, Artificial Sequence
  Synthetic
ggcccucuuacaguuaaugaaaa

SEQ ID NO: 106338 - RNA, 24 nt, Artificial Sequence
  Synthetic
gggcccucuuacaguuaaugaaaa

SEQ ID NO: 106339 - RNA, 18 nt, Artificial Sequence
  Synthetic
  misc_feature (5)..(5): n is a, c, g, or u
auuunaacccuaauaaaa

SEQ ID NO: 106340 - RNA, 19 nt, Artificial Sequence
  Synthetic
  misc_feature (6)..(6): n is a, c, g, or u
cauuunaacccuaauaaaa

SEQ ID NO: 106341 - RNA, 20 nt, Artificial Sequence
  Synthetic
  misc_feature (7)..(7): n is a, c, g, or u
acauuunaacccuaauaaaa

SEQ ID NO: 106342 - RNA, 21 nt, Artificial Sequence
  Synthetic
  misc_feature (8)..(8): n is a, c, g, or u
uacauuunaacccuaauaaaa

SEQ ID NO: 106343 - RNA, 22 nt, Artificial Sequence
  Synthetic
  misc_feature (9)..(9): n is a, c, g, or u
auacauuunaacccuaauaaaa

SEQ ID NO: 106344 - RNA, 23 nt, Artificial Sequence
  Synthetic
  misc_feature (10)..(10): n is a, c, g, or u
uauacauuunaacccuaauaaaa

SEQ ID NO: 106345 - RNA, 24 nt, Artificial Sequence
  Synthetic
  misc_feature (11)..(11): n is a, c, g, or u
guauacauuunaacccuaauaaaa

SEQ ID NO: 106346 - RNA, 18 nt, Artificial Sequence
  Synthetic
guuaauaugggccuaaaa

SEQ ID NO: 106347 - RNA, 19 nt, Artificial Sequence
  Synthetic
uguuaauaugggccuaaaa

SEQ ID NO: 106348 - RNA, 20 nt, Artificial Sequence
  Synthetic
auguuaauaugggccuaaaa

SEQ ID NO: 106349 - RNA, 21 nt, Artificial Sequence
  Synthetic
aauguuaauaugggccuaaaa

SEQ ID NO: 106350 - RNA, 22 nt, Artificial Sequence
  Synthetic
caauguuaauaugggccuaaaa

SEQ ID NO: 106351 - RNA, 23 nt, Artificial Sequence
  Synthetic
ucaauguuaauaugggccuaaaa

SEQ ID NO: 106352 - RNA, 24 nt, Artificial Sequence
  Synthetic
gucaauguuaauaugggccuaaaa

SEQ ID NO: 106353 - RNA, 18 nt, Artificial Sequence
  Synthetic
cucuuacaguuaaugaaa

SEQ ID NO: 106354 - RNA, 19 nt, Artificial Sequence
  Synthetic
ccucuuacaguuaaugaaa

SEQ ID NO: 106355 - RNA, 20 nt, Artificial Sequence
  Synthetic
cccucuuacaguuaaugaaa

SEQ ID NO: 106356 - RNA, 21 nt, Artificial Sequence
  Synthetic
gcccucuuacaguuaaugaaa

SEQ ID NO: 106357 - RNA, 22 nt, Artificial Sequence
  Synthetic
ggcccucuuacaguuaaugaaa

SEQ ID NO: 106358 - RNA, 23 nt, Artificial Sequence
  Synthetic
gggcccucuuacaguuaaugaaa

SEQ ID NO: 106359 - RNA, 24 nt, Artificial Sequence
  Synthetic
ugggcccucuuacaguuaaugaaa

SEQ ID NO: 106360 - RNA, 18 nt, Artificial Sequence
  Synthetic
  misc_feature (15)..(15): n is a, c, g, or u
uuaaucauuacuucnaaa

SEQ ID NO: 106361 - RNA, 19 nt, Artificial Sequence
  Synthetic
  misc_feature (16)..(16): n is a, c, g, or u
guuaaucauuacuucnaaa

SEQ ID NO: 106362 - RNA, 20 nt, Artificial Sequence
  Synthetic
  misc_feature (17)..(17): n is a, c, g, or u
aguuaaucauuacuucnaaa

SEQ ID NO: 106363 - RNA, 21 nt, Artificial Sequence
  Synthetic
  misc_feature (18)..(18): n is a, c, g, or u
caguuaaucauuacuucnaaa

SEQ ID NO: 106364 - RNA, 22 nt, Artificial Sequence
  Synthetic
  misc_feature (1)..(1): n is a, c, g, or u
  misc_feature (19)..(19): n is a, c, g, or u
ncaguuaaucauuacuucnaaa

SEQ ID NO: 106365 - RNA, 23 nt, Artificial Sequence
  Synthetic
  misc_feature (2)..(2): n is a, c, g, or u
  misc_feature (20)..(20): n is a, c, g, or u
uncaguuaaucauuacuucnaaa

SEQ ID NO: 106366 - RNA, 24 nt, Artificial Sequence
  Synthetic
  misc_feature (3)..(3): n is a, c, g, or u
  misc_feature (21)..(21): n is a, c, g, or u
auncaguuaaucauuacuucnaaa

SEQ ID NO: 106367 - RNA, 18 nt, Artificial Sequence
  Synthetic
  misc_feature (14)..(15): n is a, c, g, or u
gaacauauuguacnnaaa

SEQ ID NO: 106368 - RNA, 19 nt, Artificial Sequence
  Synthetic
  misc_feature (1)..(1): n is a, c, g, or u
  misc_feature (15)..(16): n is a, c, g, or u
ngaacauauuguacnnaaa

SEQ ID NO: 106369 - RNA, 20 nt, Artificial Sequence
  Synthetic
  misc_feature (2)..(2): n is a, c, g, or u
  misc_feature (16)..(17): n is a, c, g, or u
angaacauauuguacnnaaa

SEQ ID NO: 106370 - RNA, 21 nt, Artificial Sequence
  Synthetic
  misc_feature (3)..(3): n is a, c, g, or u
  misc_feature (17)..(18): n is a, c, g, or u
cangaacauauuguacnnaaa

SEQ ID NO: 106371 - RNA, 22 nt, Artificial Sequence
  Synthetic
  misc_feature (1)..(1): n is a, c, g, or u
  misc_feature (4)..(4): n is a, c, g, or u
  misc_feature (18)..(19): n is a, c, g, or u
ncangaacauauuguacnnaaa

SEQ ID NO: 106372 - RNA, 23 nt, Artificial Sequence
  Synthetic
  misc_feature (2)..(2): n is a, c, g, or u
  misc_feature (5)..(5): n is a, c, g, or u
  misc_feature (19)..(20): n is a, c, g, or u
cncangaacauauuguacnnaaa

SEQ ID NO: 106373 - RNA, 24 nt, Artificial Sequence
  Synthetic
  misc_feature (3)..(3): n is a, c, g, or u
  misc_feature (6)..(6): n is a, c, g, or u
  misc_feature (20)..(21): n is a, c, g, or u
ccncangaacauauuguacnnaaa

SEQ ID NO: 106374 - RNA, 18 nt, Artificial Sequence
  Synthetic
  misc_feature (6)..(6): n is a, c, g, or u
cauuunaacccuaauaaa

SEQ ID NO: 106375 - RNA, 19 nt, Artificial Sequence
  Synthetic
  misc_feature (7)..(7): n is a, c, g, or u
acauuunaacccuaauaaa

SEQ ID NO: 106376 - RNA, 20 nt, Artificial Sequence
  Synthetic
  misc_feature (8)..(8): n is a, c, g, or u
uacauuunaacccuaauaaa

SEQ ID NO: 106377 - RNA, 21 nt, Artificial Sequence
  Synthetic
  misc_feature (9)..(9): n is a, c, g, or u
auacauuunaacccuaauaaa

SEQ ID NO: 106378 - RNA, 22 nt, Artificial Sequence
  Synthetic
  misc_feature (10)..(10): n is a, c, g, or u
uauacauuunaacccuaauaaa

SEQ ID NO: 106379 - RNA, 23 nt, Artificial Sequence
  Synthetic
  misc_feature (11)..(11): n is a, c, g, or u
guauacauuunaacccuaauaaa

SEQ ID NO: 106380 - RNA, 24 nt, Artificial Sequence
  Synthetic
  misc_feature (12)..(12): n is a, c, g, or u
gguauacauuunaacccuaauaaa

SEQ ID NO: 106381 - RNA, 18 nt, Artificial Sequence
  Synthetic
  misc_feature (10)..(10): n is a, c, g, or u
cggagccaanucaaacaa

SEQ ID NO: 106382 - RNA, 19 nt, Artificial Sequence
  Synthetic
  misc_feature (11)..(11): n is a, c, g, or u
ucggagccaanucaaacaa

SEQ ID NO: 106383 - RNA, 20 nt, Artificial Sequence
  Synthetic
  misc_feature (12)..(12): n is a, c, g, or u
uucggagccaanucaaacaa

SEQ ID NO: 106384 - RNA, 21 nt, Artificial Sequence
  Synthetic
  misc_feature (1)..(1): n is a, c, g, or u
  misc_feature (13)..(13): n is a, c, g, or u
nuucggagccaanucaaacaa

SEQ ID NO: 106385 - RNA, 22 nt, Artificial Sequence
  Synthetic
  misc_feature (2)..(2): n is a, c, g, or u
  misc_feature (14)..(14): n is a, c, g, or u
cnuucggagccaanucaaacaa

SEQ ID NO: 106386 - RNA, 23 nt, Artificial Sequence
  Synthetic
  misc_feature (3)..(3): n is a, c, g, or u
  misc_feature (15)..(15): n is a, c, g, or u
gcnuucggagccaanucaaacaa

SEQ ID NO: 106387 - RNA, 24 nt, Artificial Sequence
  Synthetic
  misc_feature (1)..(1): n is a, c, g, or u
  misc_feature (4)..(4): n is a, c, g, or u
  misc_feature (16)..(16): n is a, c, g, or u
ngcnuucggagccaanucaaacaa

SEQ ID NO: 106388 - RNA, 18 nt, Artificial Sequence
  Synthetic
  misc_feature (3)..(3): n is a, c, g, or u
gcngccccuuuuacacaa

SEQ ID NO: 106389 - RNA, 19 nt, Artificial Sequence
  Synthetic
  misc_feature (4)..(4): n is a, c, g, or u
ugcngccccuuuuacacaa

SEQ ID NO: 106390 - RNA, 20 nt, Artificial Sequence
  Synthetic
  misc_feature (5)..(5): n is a, c, g, or u
uugcngccccuuuuacacaa

SEQ ID NO: 106391 - RNA, 21 nt, Artificial Sequence
  Synthetic
  misc_feature (6)..(6): n is a, c, g, or u
uuugcngccccuuuuacacaa

SEQ ID NO: 106392 - RNA, 22 nt, Artificial Sequence
  Synthetic
  misc_feature (7)..(7): n is a, c, g, or u
cuuugcngccccuuuuacacaa

SEQ ID NO: 106393 - RNA, 23 nt, Artificial Sequence
  Synthetic
  misc_feature (8)..(8): n is a, c, g, or u
gcuuugcngccccuuuuacacaa

SEQ ID NO: 106394 - RNA, 24 nt, Artificial Sequence
  Synthetic
  misc_feature (9)..(9): n is a, c, g, or u
ggcuuugcngccccuuuuacacaa

SEQ ID NO: 106395 - RNA, 18 nt, Artificial Sequence
  Synthetic
  misc_feature (3)..(3): n is a, c, g, or u
uunuaugcauguauacaa

SEQ ID NO: 106396 - RNA, 19 nt, Artificial Sequence
  Synthetic
  misc_feature (4)..(4): n is a, c, g, or u
uuunuaugcauguauacaa

SEQ ID NO: 106397 - RNA, 20 nt, Artificial Sequence
  Synthetic
  misc_feature (5)..(5): n is a, c, g, or u
cuuunuaugcauguauacaa

SEQ ID NO: 106398 - RNA, 21 nt, Artificial Sequence
  Synthetic
  misc_feature (6)..(6): n is a, c, g, or u
ccuuunuaugcauguauacaa

SEQ ID NO: 106399 - RNA, 22 nt, Artificial Sequence
  Synthetic
  misc_feature (7)..(7): n is a, c, g, or u
gccuuunuaugcauguauacaa

SEQ ID NO: 106400 - RNA, 23 nt, Artificial Sequence
  Synthetic
  misc_feature (8)..(8): n is a, c, g, or u
ugccuuunuaugcauguauacaa

SEQ ID NO: 106401 - RNA, 24 nt, Artificial Sequence
  Synthetic
  misc_feature (9)..(9): n is a, c, g, or u
augccuuunuaugcauguauacaa

SEQ ID NO: 106402 - RNA, 18 nt, Artificial Sequence
  Synthetic
uugggacuucaaccccaa

SEQ ID NO: 106403 - RNA, 19 nt, Artificial Sequence
  Synthetic
auugggacuucaaccccaa

SEQ ID NO: 106404 - RNA, 20 nt, Artificial Sequence
  Synthetic
gauugggacuucaaccccaa

SEQ ID NO: 106405 - RNA, 21 nt, Artificial Sequence
  Synthetic
agauugggacuucaaccccaa

SEQ ID NO: 106406 - RNA, 22 nt, Artificial Sequence
  Synthetic
cagauugggacuucaaccccaa

SEQ ID NO: 106407 - RNA, 23 nt, Artificial Sequence
  Synthetic
ccagauugggacuucaaccccaa

SEQ ID NO: 106408 - RNA, 24 nt, Artificial Sequence
  Synthetic
uccagauugggacuucaaccccaa

SEQ ID NO: 106409 - RNA, 18 nt, Artificial Sequence
  Synthetic
  misc_feature (4)..(4): n is a, c, g, or u
  misc_feature (7)..(7): n is a, c, g, or u
cccngcnuucggagccaa

SEQ ID NO: 106410 - RNA, 19 nt, Artificial Sequence
  Synthetic
  misc_feature (5)..(5): n is a, c, g, or u
  misc_feature (8)..(8): n is a, c, g, or u
acccngcnuucggagccaa

SEQ ID NO: 106411 - RNA, 20 nt, Artificial Sequence
  Synthetic
  misc_feature (6)..(6): n is a, c, g, or u
  misc_feature (9)..(9): n is a, c, g, or u
gacccngcnuucggagccaa

SEQ ID NO: 106412 - RNA, 21 nt, Artificial Sequence
  Synthetic
  misc_feature (7)..(7): n is a, c, g, or u
  misc_feature (10)..(10): n is a, c, g, or u
ggacccngcnuucggagccaa

SEQ ID NO: 106413 - RNA, 22 nt, Artificial Sequence
  Synthetic
  misc_feature (8)..(8): n is a, c, g, or u
  misc_feature (11)..(11): n is a, c, g, or u
uggacccngcnuucggagccaa

SEQ ID NO: 106414 - RNA, 23 nt, Artificial Sequence
  Synthetic
  misc_feature (9)..(9): n is a, c, g, or u
  misc_feature (12)..(12): n is a, c, g, or u
uuggacccngcnuucggagccaa

SEQ ID NO: 106415 - RNA, 24 nt, Artificial Sequence
  Synthetic
  misc_feature (10)..(10): n is a, c, g, or u
  misc_feature (13)..(13): n is a, c, g, or u
guuggacccngcnuucggagccaa

SEQ ID NO: 106416 - RNA, 18 nt, Artificial Sequence
  Synthetic
  misc_feature (5)..(5): n is a, c, g, or u
  misc_feature (13)..(13): n is a, c, g, or u
aucanuggccagnggcaa

SEQ ID NO: 106417 - RNA, 19 nt, Artificial Sequence
  Synthetic
  misc_feature (6)..(6): n is a, c, g, or u
  misc_feature (14)..(14): n is a, c, g, or u
gaucanuggccagnggcaa

SEQ ID NO: 106418 - RNA, 20 nt, Artificial Sequence
  Synthetic
  misc_feature (7)..(7): n is a, c, g, or u
  misc_feature (15)..(15): n is a, c, g, or u
ggaucanuggccagnggcaa

SEQ ID NO: 106419 - RNA, 21 nt, Artificial Sequence
  Synthetic
  misc_feature (8)..(8): n is a, c, g, or u
  misc_feature (16)..(16): n is a, c, g, or u
aggaucanuggccagnggcaa

SEQ ID NO: 106420 - RNA, 22 nt, Artificial Sequence
  Synthetic
  misc_feature (9)..(9): n is a, c, g, or u
  misc_feature (17)..(17): n is a, c, g, or u
aaggaucanuggccagnggcaa

SEQ ID NO: 106421 - RNA, 23 nt, Artificial Sequence
  Synthetic
  misc_feature (10)..(10): n is a, c, g, or u
  misc_feature (18)..(18): n is a, c, g, or u
caaggaucanuggccagnggcaa

SEQ ID NO: 106422 - RNA, 24 nt, Artificial Sequence
  Synthetic
  misc_feature (11)..(11): n is a, c, g, or u
  misc_feature (19)..(19): n is a, c, g, or u
acaaggaucanuggccagnggcaa

SEQ ID NO: 106423 - RNA, 18 nt, Artificial Sequence
  Synthetic
  misc_feature (9)..(9): n is a, c, g, or u
auugacccnuauaaagaa

SEQ ID NO: 106424 - RNA, 19 nt, Artificial Sequence
  Synthetic
  misc_feature (10)..(10): n is a, c, g, or u
cauugacccnuauaaagaa

SEQ ID NO: 106425 - RNA, 20 nt, Artificial Sequence
  Synthetic
  misc_feature (11)..(11): n is a, c, g, or u
acauugacccnuauaaagaa

SEQ ID NO: 106426 - RNA, 21 nt, Artificial Sequence
  Synthetic
  misc_feature (12)..(12): n is a, c, g, or u
gacauugacccnuauaaagaa

SEQ ID NO: 106427 - RNA, 22 nt, Artificial Sequence
  Synthetic
  misc_feature (13)..(13): n is a, c, g, or u
ggacauugacccnuauaaagaa

SEQ ID NO: 106428 - RNA, 23 nt, Artificial Sequence
  Synthetic
  misc_feature (14)..(14): n is a, c, g, or u
uggacauugacccnuauaaagaa

SEQ ID NO: 106429 - RNA, 24 nt, Artificial Sequence
  Synthetic
  misc_feature (15)..(15): n is a, c, g, or u
auggacauugacccnuauaaagaa

SEQ ID NO: 106430 - RNA, 18 nt, Artificial Sequence
  Synthetic
gaggcagguccccuagaa

SEQ ID NO: 106431 - RNA, 19 nt, Artificial Sequence
  Synthetic
cgaggcagguccccuagaa

SEQ ID NO: 106432 - RNA, 20 nt, Artificial Sequence
  Synthetic
acgaggcagguccccuagaa

SEQ ID NO: 106433 - RNA, 21 nt, Artificial Sequence
  Synthetic
gacgaggcagguccccuagaa

SEQ ID NO: 106434 - RNA, 22 nt, Artificial Sequence
  Synthetic
cgacgaggcagguccccuagaa

SEQ ID NO: 106435 - RNA, 23 nt, Artificial Sequence
  Synthetic
acgacgaggcagguccccuagaa

SEQ ID NO: 106436 - RNA, 24 nt, Artificial Sequence
  Synthetic
gacgacgaggcagguccccuagaa

SEQ ID NO: 106437 - RNA, 18 nt, Artificial Sequence
  Synthetic
uggggacccugcaccgaa

SEQ ID NO: 106438 - RNA, 19 nt, Artificial Sequence
  Synthetic
cuggggacccugcaccgaa

SEQ ID NO: 106439 - RNA, 20 nt, Artificial Sequence
  Synthetic
acuggggacccugcaccgaa

SEQ ID NO: 106440 - RNA, 21 nt, Artificial Sequence
  Synthetic
gacuggggacccugcaccgaa

SEQ ID NO: 106441 - RNA, 22 nt, Artificial Sequence
  Synthetic
ggacuggggacccugcaccgaa

SEQ ID NO: 106442 - RNA, 23 nt, Artificial Sequence
  Synthetic
aggacuggggacccugcaccgaa

SEQ ID NO: 106443 - RNA, 24 nt, Artificial Sequence
  Synthetic
gaggacuggggacccugcaccgaa

SEQ ID NO: 106444 - RNA, 18 nt, Artificial Sequence
  Synthetic
ccaaucggcagucaggaa

SEQ ID NO: 106445 - RNA, 19 nt, Artificial Sequence
  Synthetic
accaaucggcagucaggaa

SEQ ID NO: 106446 - RNA, 20 nt, Artificial Sequence
  Synthetic
caccaaucggcagucaggaa

SEQ ID NO: 106447 - RNA, 21 nt, Artificial Sequence
  Synthetic
ccaccaaucggcagucaggaa

SEQ ID NO: 106448 - RNA, 22 nt, Artificial Sequence
  Synthetic
uccaccaaucggcagucaggaa

SEQ ID NO: 106449 - RNA, 23 nt, Artificial Sequence
  Synthetic
cuccaccaaucggcagucaggaa

SEQ ID NO: 106450 - RNA, 24 nt, Artificial Sequence
  Synthetic
ccuccaccaaucggcagucaggaa

SEQ ID NO: 106451 - RNA, 18 nt, Artificial Sequence
  Synthetic
ucaccauauucuugggaa

SEQ ID NO: 106452 - RNA, 19 nt, Artificial Sequence
  Synthetic
gucaccauauucuugggaa

SEQ ID NO: 106453 - RNA, 20 nt, Artificial Sequence
  Synthetic
ggucaccauauucuugggaa

SEQ ID NO: 106454 - RNA, 21 nt, Artificial Sequence
  Synthetic
gggucaccauauucuugggaa

SEQ ID NO: 106455 - RNA, 22 nt, Artificial Sequence
  Synthetic
ugggucaccauauucuugggaa

SEQ ID NO: 106456 - RNA, 23 nt, Artificial Sequence
  Synthetic
gugggucaccauauucuugggaa

SEQ ID NO: 106457 - RNA, 24 nt, Artificial Sequence
  Synthetic
ugugggucaccauauucuugggaa

SEQ ID NO: 106458 - RNA, 18 nt, Artificial Sequence
  Synthetic
ugggauauguaauuggaa

SEQ ID NO: 106459 - RNA, 19 nt, Artificial Sequence
  Synthetic
augggauauguaauuggaa

SEQ ID NO: 106460 - RNA, 20 nt, Artificial Sequence
  Synthetic
caugggauauguaauuggaa

SEQ ID NO: 106461 - RNA, 21 nt, Artificial Sequence
  Synthetic
ucaugggauauguaauuggaa

SEQ ID NO: 106462 - RNA, 22 nt, Artificial Sequence
  Synthetic
uucaugggauauguaauuggaa

SEQ ID NO: 106463 - RNA, 23 nt, Artificial Sequence
  Synthetic
  misc_feature (1)..(1): n is a, c, g, or u
nuucaugggauauguaauuggaa

SEQ ID NO: 106464 - RNA, 24 nt, Artificial Sequence
  Synthetic
  misc_feature (2)..(2): n is a, c, g, or u
anuucaugggauauguaauuggaa

SEQ ID NO: 106465 - RNA, 18 nt, Artificial Sequence
  Synthetic
ccugucuuacuuuuggaa

SEQ ID NO: 106466 - RNA, 19 nt, Artificial Sequence
  Synthetic
uccugucuuacuuuuggaa

SEQ ID NO: 106467 - RNA, 20 nt, Artificial Sequence
  Synthetic
uuccugucuuacuuuuggaa

SEQ ID NO: 106468 - RNA, 21 nt, Artificial Sequence
  Synthetic
uuuccugucuuacuuuuggaa

SEQ ID NO: 106469 - RNA, 22 nt, Artificial Sequence
  Synthetic
auuuccugucuuacuuuuggaa

SEQ ID NO: 106470 - RNA, 23 nt, Artificial Sequence
  Synthetic
cauuuccugucuuacuuuuggaa

SEQ ID NO: 106471 - RNA, 24 nt, Artificial Sequence
  Synthetic
acauuuccugucuuacuuuuggaa

SEQ ID NO: 106472 - RNA, 18 nt, Artificial Sequence
  Synthetic
ccucuuacaguuaaugaa

SEQ ID NO: 106473 - RNA, 19 nt, Artificial Sequence
  Synthetic
cccucuuacaguuaaugaa

SEQ ID NO: 106474 - RNA, 20 nt, Artificial Sequence
  Synthetic
gcccucuuacaguuaaugaa

SEQ ID NO: 106475 - RNA, 21 nt, Artificial Sequence
  Synthetic
ggcccucuuacaguuaaugaa

SEQ ID NO: 106476 - RNA, 22 nt, Artificial Sequence
  Synthetic
gggcccucuuacaguuaaugaa

SEQ ID NO: 106477 - RNA, 23 nt, Artificial Sequence
  Synthetic
ugggcccucuuacaguuaaugaa

SEQ ID NO: 106478 - RNA, 24 nt, Artificial Sequence
  Synthetic
gugggcccucuuacaguuaaugaa

SEQ ID NO: 106479 - RNA, 18 nt, Artificial Sequence
  Synthetic
uuggggugaguugaugaa

SEQ ID NO: 106480 - RNA, 19 nt, Artificial Sequence
  Synthetic
guuggggugaguugaugaa

SEQ ID NO: 106481 - RNA, 20 nt, Artificial Sequence
  Synthetic
uguuggggugaguugaugaa

SEQ ID NO: 106482 - RNA, 21 nt, Artificial Sequence
  Synthetic
guguuggggugaguugaugaa

SEQ ID NO: 106483 - RNA, 22 nt, Artificial Sequence
  Synthetic
uguguuggggugaguugaugaa

SEQ ID NO: 106484 - RNA, 23 nt, Artificial Sequence
  Synthetic
cuguguuggggugaguugaugaa

SEQ ID NO: 106485 - RNA, 24 nt, Artificial Sequence
  Synthetic
ucuguguuggggugaguugaugaa

SEQ ID NO: 106486 - RNA, 18 nt, Artificial Sequence
  Synthetic
  misc_feature (16)..(16): n is a, c, g, or u
guuaaucauuacuucnaa

SEQ ID NO: 106487 - RNA, 19 nt, Artificial Sequence
  Synthetic
  misc_feature (17)..(17): n is a, c, g, or u
aguuaaucauuacuucnaa

SEQ ID NO: 106488 - RNA, 20 nt, Artificial Sequence
  Synthetic
  misc_feature (18)..(18): n is a, c, g, or u
caguuaaucauuacuucnaa

SEQ ID NO: 106489 - RNA, 21 nt, Artificial Sequence
  Synthetic
  misc_feature (1)..(1): n is a, c, g, or u
  misc_feature (19)..(19): n is a, c, g, or u
ncaguuaaucauuacuucnaa

SEQ ID NO: 106490 - RNA, 22 nt, Artificial Sequence
  Synthetic
  misc_feature (2)..(2): n is a, c, g, or u
  misc_feature (20)..(20): n is a, c, g, or u
uncaguuaaucauuacuucnaa

SEQ ID NO: 106491 - RNA, 23 nt, Artificial Sequence
  Synthetic
  misc_feature (3)..(3): n is a, c, g, or u
  misc_feature (21)..(21): n is a, c, g, or u
auncaguuaaucauuacuucnaa

SEQ ID NO: 106492 - RNA, 24 nt, Artificial Sequence
  Synthetic
  misc_feature (4)..(4): n is a, c, g, or u
  misc_feature (22)..(22): n is a, c, g, or u
cauncaguuaaucauuacuucnaa

SEQ ID NO: 106493 - RNA, 18 nt, Artificial Sequence
  Synthetic
uaucccuuggacucauaa

SEQ ID NO: 106494 - RNA, 19 nt, Artificial Sequence
  Synthetic
guaucccuuggacucauaa

SEQ ID NO: 106495 - RNA, 20 nt, Artificial Sequence
  Synthetic
aguaucccuuggacucauaa

SEQ ID NO: 106496 - RNA, 21 nt, Artificial Sequence
  Synthetic
uaguaucccuuggacucauaa

SEQ ID NO: 106497 - RNA, 22 nt, Artificial Sequence
  Synthetic
uuaguaucccuuggacucauaa

SEQ ID NO: 106498 - RNA, 23 nt, Artificial Sequence
  Synthetic
guuaguaucccuuggacucauaa

SEQ ID NO: 106499 - RNA, 24 nt, Artificial Sequence
  Synthetic
uguuaguaucccuuggacucauaa

SEQ ID NO: 106500 - RNA, 18 nt, Artificial Sequence
  Synthetic
  misc_feature (14)..(14): n is a, c, g, or u
gcccaaggucuuanauaa

SEQ ID NO: 106501 - RNA, 19 nt, Artificial Sequence
  Synthetic
  misc_feature (15)..(15): n is a, c, g, or u
ugcccaaggucuuanauaa

SEQ ID NO: 106502 - RNA, 20 nt, Artificial Sequence
  Synthetic
  misc_feature (16)..(16): n is a, c, g, or u
uugcccaaggucuuanauaa

SEQ ID NO: 106503 - RNA, 21 nt, Artificial Sequence
  Synthetic
  misc_feature (17)..(17): n is a, c, g, or u
cuugcccaaggucuuanauaa

SEQ ID NO: 106504 - RNA, 22 nt, Artificial Sequence
  Synthetic
  misc_feature (18)..(18): n is a, c, g, or u
ucuugcccaaggucuuanauaa

SEQ ID NO: 106505 - RNA, 23 nt, Artificial Sequence
  Synthetic
  misc_feature (19)..(19): n is a, c, g, or u
gucuugcccaaggucuuanauaa

SEQ ID NO: 106506 - RNA, 24 nt, Artificial Sequence
  Synthetic
  misc_feature (20)..(20): n is a, c, g, or u
ggucuugcccaaggucuuanauaa

SEQ ID NO: 106507 - RNA, 18 nt, Artificial Sequence
  Synthetic
  misc_feature (7)..(7): n is a, c, g, or u
  misc_feature (11)..(11): n is a, c, g, or u
ggcuggnauunuauauaa

SEQ ID NO: 106508 - RNA, 19 nt, Artificial Sequence
  Synthetic
  misc_feature (8)..(8): n is a, c, g, or u
  misc_feature (12)..(12): n is a, c, g, or u
aggcuggnauunuauauaa

SEQ ID NO: 106509 - RNA, 20 nt, Artificial Sequence
  Synthetic
  misc_feature (9)..(9): n is a, c, g, or u
  misc_feature (13)..(13): n is a, c, g, or u
aaggcuggnauunuauauaa

SEQ ID NO: 106510 - RNA, 21 nt, Artificial Sequence
  Synthetic
  misc_feature (10)..(10): n is a, c, g, or u
  misc_feature (14)..(14): n is a, c, g, or u
gaaggcuggnauunuauauaa

SEQ ID NO: 106511 - RNA, 22 nt, Artificial Sequence
  Synthetic
  misc_feature (11)..(11): n is a, c, g, or u
  misc_feature (15)..(15): n is a, c, g, or u
ggaaggcuggnauunuauauaa

SEQ ID NO: 106512 - RNA, 23 nt, Artificial Sequence
  Synthetic
  misc_feature (12)..(12): n is a, c, g, or u
  misc_feature (16)..(16): n is a, c, g, or u
uggaaggcuggnauunuauauaa

SEQ ID NO: 106513 - RNA, 24 nt, Artificial Sequence
  Synthetic
  misc_feature (13)..(13): n is a, c, g, or u
  misc_feature (17)..(17): n is a, c, g, or u
guggaaggcuggnauunuauauaa

SEQ ID NO: 106514 - RNA, 18 nt, Artificial Sequence
  Synthetic
  misc_feature (10)..(10): n is a, c, g, or u
uauacauuunaacccuaa

SEQ ID NO: 106515 - RNA, 19 nt, Artificial Sequence
  Synthetic
  misc_feature (11)..(11): n is a, c, g, or u
guauacauuunaacccuaa

SEQ ID NO: 106516 - RNA, 20 nt, Artificial Sequence
  Synthetic
  misc_feature (12)..(12): n is a, c, g, or u
gguauacauuunaacccuaa

SEQ ID NO: 106517 - RNA, 21 nt, Artificial Sequence
  Synthetic
  misc_feature (13)..(13): n is a, c, g, or u
ggguauacauuunaacccuaa

SEQ ID NO: 106518 - RNA, 22 nt, Artificial Sequence
  Synthetic
  misc_feature (14)..(14): n is a, c, g, or u
uggguauacauuunaacccuaa

SEQ ID NO: 106519 - RNA, 23 nt, Artificial Sequence
  Synthetic
  misc_feature (15)..(15): n is a, c, g, or u
uuggguauacauuunaacccuaa

SEQ ID NO: 106520 - RNA, 24 nt, Artificial Sequence
  Synthetic
  misc_feature (16)..(16): n is a, c, g, or u
uuuggguauacauuunaacccuaa

SEQ ID NO: 106521 - RNA, 18 nt, Artificial Sequence
  Synthetic
  misc_feature (14)..(14): n is a, c, g, or u
ugcauguauacaancuaa

SEQ ID NO: 106522 - RNA, 19 nt, Artificial Sequence
  Synthetic
  misc_feature (15)..(15): n is a, c, g, or u
augcauguauacaancuaa

SEQ ID NO: 106523 - RNA, 20 nt, Artificial Sequence
  Synthetic
  misc_feature (16)..(16): n is a, c, g, or u
uaugcauguauacaancuaa

SEQ ID NO: 106524 - RNA, 21 nt, Artificial Sequence
  Synthetic
  misc_feature (1)..(1): n is a, c, g, or u
  misc_feature (17)..(17): n is a, c, g, or u
nuaugcauguauacaancuaa

SEQ ID NO: 106525 - RNA, 22 nt, Artificial Sequence
  Synthetic
  misc_feature (2)..(2): n is a, c, g, or u
  misc_feature (18)..(18): n is a, c, g, or u
unuaugcauguauacaancuaa

SEQ ID NO: 106526 - RNA, 23 nt, Artificial Sequence
  Synthetic
  misc_feature (3)..(3): n is a, c, g, or u
  misc_feature (19)..(19): n is a, c, g, or u
uunuaugcauguauacaancuaa

SEQ ID NO: 106527 - RNA, 24 nt, Artificial Sequence
  Synthetic
  misc_feature (4)..(4): n is a, c, g, or u
  misc_feature (20)..(20): n is a, c, g, or u
uuunuaugcauguauacaancuaa

SEQ ID NO: 106528 - RNA, 18 nt, Artificial Sequence
  Synthetic
caccugggugggaaguaa

SEQ ID NO: 106529 - RNA, 19 nt, Artificial Sequence
  Synthetic
ccaccugggugggaaguaa

SEQ ID NO: 106530 - RNA, 20 nt, Artificial Sequence
  Synthetic
gccaccugggugggaaguaa

SEQ ID NO: 106531 - RNA, 21 nt, Artificial Sequence
  Synthetic
ggccaccugggugggaaguaa

SEQ ID NO: 106532 - RNA, 22 nt, Artificial Sequence
  Synthetic
uggccaccugggugggaaguaa

SEQ ID NO: 106533 - RNA, 23 nt, Artificial Sequence
  Synthetic
cuggccaccugggugggaaguaa

SEQ ID NO: 106534 - RNA, 24 nt, Artificial Sequence
  Synthetic
ucuggccaccugggugggaaguaa

SEQ ID NO: 106535 - RNA, 18 nt, Artificial Sequence
  Synthetic
  misc_feature (2)..(2): n is a, c, g, or u
anuucaugggauauguaa

SEQ ID NO: 106536 - RNA, 19 nt, Artificial Sequence
  Synthetic
  misc_feature (3)..(3): n is a, c, g, or u
aanuucaugggauauguaa

SEQ ID NO: 106537 - RNA, 20 nt, Artificial Sequence
  Synthetic
  misc_feature (4)..(4): n is a, c, g, or u
uaanuucaugggauauguaa

SEQ ID NO: 106538 - RNA, 21 nt, Artificial Sequence
  Synthetic
  misc_feature (5)..(5): n is a, c, g, or u
uuaanuucaugggauauguaa

SEQ ID NO: 106539 - RNA, 22 nt, Artificial Sequence
  Synthetic
  misc_feature (6)..(6): n is a, c, g, or u
cuuaanuucaugggauauguaa

SEQ ID NO: 106540 - RNA, 23 nt, Artificial Sequence
  Synthetic
  misc_feature (7)..(7): n is a, c, g, or u
ccuuaanuucaugggauauguaa

SEQ ID NO: 106541 - RNA, 24 nt, Artificial Sequence
  Synthetic
  misc_feature (8)..(8): n is a, c, g, or u
cccuuaanuucaugggauauguaa

SEQ ID NO: 106542 - RNA, 18 nt, Artificial Sequence
  Synthetic
  misc_feature (5)..(5): n is a, c, g, or u
  misc_feature (11)..(11): n is a, c, g, or u
  misc_feature (15)..(15): n is a, c, g, or u
uucgnaaacunccunuaa

SEQ ID NO: 106543 - RNA, 19 nt, Artificial Sequence
  Synthetic
  misc_feature (6)..(6): n is a, c, g, or u
  misc_feature (12)..(12): n is a, c, g, or u
  misc_feature (16)..(16): n is a, c, g, or u
uuucgnaaacunccunuaa

SEQ ID NO: 106544 - RNA, 20 nt, Artificial Sequence
  Synthetic
  misc_feature (7)..(7): n is a, c, g, or u
  misc_feature (13)..(13): n is a, c, g, or u
  misc_feature (17)..(17): n is a, c, g, or u
uuuucgnaaacunccunuaa

SEQ ID NO: 106545 - RNA, 21 nt, Artificial Sequence
  Synthetic
  misc_feature (8)..(8): n is a, c, g, or u
  misc_feature (14)..(14): n is a, c, g, or u
  misc_feature (18)..(18): n is a, c, g, or u
guuuucgnaaacunccunuaa

SEQ ID NO: 106546 - RNA, 22 nt, Artificial Sequence
  Synthetic
  misc_feature (9)..(9): n is a, c, g, or u
  misc_feature (15)..(15): n is a, c, g, or u
  misc_feature (19)..(19): n is a, c, g, or u
uguuuucgnaaacunccunuaa

SEQ ID NO: 106547 - RNA, 23 nt, Artificial Sequence
  Synthetic
  misc_feature (10)..(10): n is a, c, g, or u
  misc_feature (16)..(16): n is a, c, g, or u
  misc_feature (20)..(20): n is a, c, g, or u
auguuuucgnaaacunccunuaa

SEQ ID NO: 106548 - RNA, 24 nt, Artificial Sequence
  Synthetic
  misc_feature (11)..(11): n is a, c, g, or u
  misc_feature (17)..(17): n is a, c, g, or u
  misc_feature (21)..(21): n is a, c, g, or u
aauguuuucgnaaacunccunuaa

SEQ ID NO: 106549 - RNA, 18 nt, Artificial Sequence
  Synthetic
gggcccucuuacaguuaa

SEQ ID NO: 106550 - RNA, 19 nt, Artificial Sequence
  Synthetic
ugggcccucuuacaguuaa

SEQ ID NO: 106551 - RNA, 20 nt, Artificial Sequence
  Synthetic
gugggcccucuuacaguuaa

SEQ ID NO: 106552 - RNA, 21 nt, Artificial Sequence
  Synthetic
ugugggcccucuuacaguuaa

SEQ ID NO: 106553 - RNA, 22 nt, Artificial Sequence
  Synthetic
augugggcccucuuacaguuaa

SEQ ID NO: 106554 - RNA, 23 nt, Artificial Sequence
  Synthetic
uaugugggcccucuuacaguuaa

SEQ ID NO: 106555 - RNA, 24 nt, Artificial Sequence
  Synthetic
auaugugggcccucuuacaguuaa

SEQ ID NO: 106556 - RNA, 18 nt, Artificial Sequence
  Synthetic
  misc_feature (1)..(1): n is a, c, g, or u
nagcuaugucaauguuaa

SEQ ID NO: 106557 - RNA, 19 nt, Artificial Sequence
  Synthetic
  misc_feature (2)..(2): n is a, c, g, or u
unagcuaugucaauguuaa

SEQ ID NO: 106558 - RNA, 20 nt, Artificial Sequence
  Synthetic
  misc_feature (3)..(3): n is a, c, g, or u
gunagcuaugucaauguuaa

SEQ ID NO: 106559 - RNA, 21 nt, Artificial Sequence
  Synthetic
  misc_feature (4)..(4): n is a, c, g, or u
agunagcuaugucaauguuaa

SEQ ID NO: 106560 - RNA, 22 nt, Artificial Sequence
  Synthetic
  misc_feature (5)..(5): n is a, c, g, or u
uagunagcuaugucaauguuaa

SEQ ID NO: 106561 - RNA, 23 nt, Artificial Sequence
  Synthetic
  misc_feature (6)..(6): n is a, c, g, or u
guagunagcuaugucaauguuaa

SEQ ID NO: 106562 - RNA, 24 nt, Artificial Sequence
  Synthetic
  misc_feature (7)..(7): n is a, c, g, or u
aguagunagcuaugucaauguuaa

SEQ ID NO: 106563 - RNA, 18 nt, Artificial Sequence
  Synthetic
ggcuccaguuccggaaca

SEQ ID NO: 106564 - RNA, 19 nt, Artificial Sequence
  Synthetic
uggcuccaguuccggaaca

SEQ ID NO: 106565 - RNA, 20 nt, Artificial Sequence
  Synthetic
guggcuccaguuccggaaca

SEQ ID NO: 106566 - RNA, 21 nt, Artificial Sequence
  Synthetic
gguggcuccaguuccggaaca

SEQ ID NO: 106567 - RNA, 22 nt, Artificial Sequence
  Synthetic
ugguggcuccaguuccggaaca

SEQ ID NO: 106568 - RNA, 23 nt, Artificial Sequence
  Synthetic
cugguggcuccaguuccggaaca

SEQ ID NO: 106569 - RNA, 24 nt, Artificial Sequence
  Synthetic
gcugguggcuccaguuccggaaca

SEQ ID NO: 106570 - RNA, 18 nt, Artificial Sequence
  Synthetic
  misc_feature (3)..(3): n is a, c, g, or u
  misc_feature (11)..(11): n is a, c, g, or u
  misc_feature (15)..(15): n is a, c, g, or u
aanauggagancacnaca

SEQ ID NO: 106571 - RNA, 19 nt, Artificial Sequence
  Synthetic
  misc_feature (4)..(4): n is a, c, g, or u
  misc_feature (12)..(12): n is a, c, g, or u
  misc_feature (16)..(16): n is a, c, g, or u
gaanauggagancacnaca

SEQ ID NO: 106572 - RNA, 20 nt, Artificial Sequence
  Synthetic
  misc_feature (5)..(5): n is a, c, g, or u
  misc_feature (13)..(13): n is a, c, g, or u
  misc_feature (17)..(17): n is a, c, g, or u
cgaanauggagancacnaca

SEQ ID NO: 106573 - RNA, 21 nt, Artificial Sequence
  Synthetic
  misc_feature (6)..(6): n is a, c, g, or u
  misc_feature (14)..(14): n is a, c, g, or u
  misc_feature (18)..(18): n is a, c, g, or u
ccgaanauggagancacnaca

SEQ ID NO: 106574 - RNA, 22 nt, Artificial Sequence
  Synthetic
  misc_feature (7)..(7): n is a, c, g, or u
  misc_feature (15)..(15): n is a, c, g, or u
  misc_feature (19)..(19): n is a, c, g, or u
accgaanauggagancacnaca

SEQ ID NO: 106575 - RNA, 23 nt, Artificial Sequence
  Synthetic
  misc_feature (8)..(8): n is a, c, g, or u
  misc_feature (16)..(16): n is a, c, g, or u
  misc_feature (20)..(20): n is a, c, g, or u
caccgaanauggagancacnaca

SEQ ID NO: 106576 - RNA, 24 nt, Artificial Sequence
  Synthetic
  misc_feature (9)..(9): n is a, c, g, or u
  misc_feature (17)..(17): n is a, c, g, or u
  misc_feature (21)..(21): n is a, c, g, or u
gcaccgaanauggagancacnaca

SEQ ID NO: 106577 - RNA, 18 nt, Artificial Sequence
  Synthetic
uauaagagagaaacuaca

SEQ ID NO: 106578 - RNA, 19 nt, Artificial Sequence
  Synthetic
auauaagagagaaacuaca

SEQ ID NO: 106579 - RNA, 20 nt, Artificial Sequence
  Synthetic
uauauaagagagaaacuaca

SEQ ID NO: 106580 - RNA, 21 nt, Artificial Sequence
  Synthetic
  misc_feature (1)..(1): n is a, c, g, or u
nuauauaagagagaaacuaca

SEQ ID NO: 106581 - RNA, 22 nt, Artificial Sequence
  Synthetic
  misc_feature (2)..(2): n is a, c, g, or u
unuauauaagagagaaacuaca

SEQ ID NO: 106582 - RNA, 23 nt, Artificial Sequence
  Synthetic
  misc_feature (3)..(3): n is a, c, g, or u
uunuauauaagagagaaacuaca

SEQ ID NO: 106583 - RNA, 24 nt, Artificial Sequence
  Synthetic
  misc_feature (4)..(4): n is a, c, g, or u
auunuauauaagagagaaacuaca

SEQ ID NO: 106584 - RNA, 18 nt, Artificial Sequence
  Synthetic
accccugcucguguuaca

SEQ ID NO: 106585 - RNA, 19 nt, Artificial Sequence
  Synthetic
gaccccugcucguguuaca

SEQ ID NO: 106586 - RNA, 20 nt, Artificial Sequence
  Synthetic
ggaccccugcucguguuaca

SEQ ID NO: 106587 - RNA, 21 nt, Artificial Sequence
  Synthetic
aggaccccugcucguguuaca

SEQ ID NO: 106588 - RNA, 22 nt, Artificial Sequence
  Synthetic
uaggaccccugcucguguuaca

SEQ ID NO: 106589 - RNA, 23 nt, Artificial Sequence
  Synthetic
cuaggaccccugcucguguuaca

SEQ ID NO: 106590 - RNA, 24 nt, Artificial Sequence
  Synthetic
ccuaggaccccugcucguguuaca

SEQ ID NO: 106591 - RNA, 18 nt, Artificial Sequence
  Synthetic
  misc_feature (12)..(12): n is a, c, g, or u
ccaggguucacnccacca

SEQ ID NO: 106592 - RNA, 19 nt, Artificial Sequence
  Synthetic
  misc_feature (13)..(13): n is a, c, g, or u
gccaggguucacnccacca

SEQ ID NO: 106593 - RNA, 20 nt, Artificial Sequence
  Synthetic
  misc_feature (14)..(14): n is a, c, g, or u
ggccaggguucacnccacca

SEQ ID NO: 106594 - RNA, 21 nt, Artificial Sequence
  Synthetic
  misc_feature (15)..(15): n is a, c, g, or u
gggccaggguucacnccacca

SEQ ID NO: 106595 - RNA, 22 nt, Artificial Sequence
  Synthetic
  misc_feature (16)..(16): n is a, c, g, or u
cgggccaggguucacnccacca

SEQ ID NO: 106596 - RNA, 23 nt, Artificial Sequence
  Synthetic
  misc_feature (17)..(17): n is a, c, g, or u
ucgggccaggguucacnccacca

SEQ ID NO: 106597 - RNA, 24 nt, Artificial Sequence
  Synthetic
  misc_feature (18)..(18): n is a, c, g, or u
uucgggccaggguucacnccacca

SEQ ID NO: 106598 - RNA, 18 nt, Artificial Sequence
  Synthetic
cuccuccugccuccacca

SEQ ID NO: 106599 - RNA, 19 nt, Artificial Sequence
  Synthetic
ccuccuccugccuccacca

SEQ ID NO: 106600 - RNA, 20 nt, Artificial Sequence
  Synthetic
  misc_feature (1)..(1): n is a, c, g, or u
nccuccuccugccuccacca

SEQ ID NO: 106601 - RNA, 21 nt, Artificial Sequence
  Synthetic
  misc_feature (2)..(2): n is a, c, g, or u
cnccuccuccugccuccacca

SEQ ID NO: 106602 - RNA, 22 nt, Artificial Sequence
  Synthetic
  misc_feature (3)..(3): n is a, c, g, or u
gcnccuccuccugccuccacca

SEQ ID NO: 106603 - RNA, 23 nt, Artificial Sequence
  Synthetic
  misc_feature (4)..(4): n is a, c, g, or u
agcnccuccuccugccuccacca

SEQ ID NO: 106604 - RNA, 24 nt, Artificial Sequence
  Synthetic
  misc_feature (1)..(1): n is a, c, g, or u
  misc_feature (5)..(5): n is a, c, g, or u
nagcnccuccuccugccuccacca

SEQ ID NO: 106605 - RNA, 18 nt, Artificial Sequence
  Synthetic
gucuguucaccagcacca

SEQ ID NO: 106606 - RNA, 19 nt, Artificial Sequence
  Synthetic
ggucuguucaccagcacca

SEQ ID NO: 106607 - RNA, 20 nt, Artificial Sequence
  Synthetic
uggucuguucaccagcacca

SEQ ID NO: 106608 - RNA, 21 nt, Artificial Sequence
  Synthetic
uuggucuguucaccagcacca

SEQ ID NO: 106609 - RNA, 22 nt, Artificial Sequence
  Synthetic
auuggucuguucaccagcacca

SEQ ID NO: 106610 - RNA, 23 nt, Artificial Sequence
  Synthetic
aauuggucuguucaccagcacca

SEQ ID NO: 106611 - RNA, 24 nt, Artificial Sequence
  Synthetic
aaauuggucuguucaccagcacca

SEQ ID NO: 106612 - RNA, 18 nt, Artificial Sequence
  Synthetic
auucuuucccgaucacca

SEQ ID NO: 106613 - RNA, 19 nt, Artificial Sequence
  Synthetic
gauucuuucccgaucacca

SEQ ID NO: 106614 - RNA, 20 nt, Artificial Sequence
  Synthetic
ggauucuuucccgaucacca

SEQ ID NO: 106615 - RNA, 21 nt, Artificial Sequence
  Synthetic
gggauucuuucccgaucacca

SEQ ID NO: 106616 - RNA, 22 nt, Artificial Sequence
  Synthetic
ugggauucuuucccgaucacca

SEQ ID NO: 106617 - RNA, 23 nt, Artificial Sequence
  Synthetic
cugggauucuuucccgaucacca

SEQ ID NO: 106618 - RNA, 24 nt, Artificial Sequence
  Synthetic
ucugggauucuuucccgaucacca

SEQ ID NO: 106619 - RNA, 18 nt, Artificial Sequence
  Synthetic
acauuguucaccucacca

SEQ ID NO: 106620 - RNA, 19 nt, Artificial Sequence
  Synthetic
aacauuguucaccucacca

SEQ ID NO: 106621 - RNA, 20 nt, Artificial Sequence
  Synthetic
gaacauuguucaccucacca

SEQ ID NO: 106622 - RNA, 21 nt, Artificial Sequence
  Synthetic
ggaacauuguucaccucacca

SEQ ID NO: 106623 - RNA, 22 nt, Artificial Sequence
  Synthetic
cggaacauuguucaccucacca

SEQ ID NO: 106624 - RNA, 23 nt, Artificial Sequence
  Synthetic
ccggaacauuguucaccucacca

SEQ ID NO: 106625 - RNA, 24 nt, Artificial Sequence
  Synthetic
uccggaacauuguucaccucacca

SEQ ID NO: 106626 - RNA, 18 nt, Artificial Sequence
  Synthetic
ugccguuccggccgacca

SEQ ID NO: 106627 - RNA, 19 nt, Artificial Sequence
  Synthetic
cugccguuccggccgacca

SEQ ID NO: 106628 - RNA, 20 nt, Artificial Sequence
  Synthetic
ucugccguuccggccgacca

SEQ ID NO: 106629 - RNA, 21 nt, Artificial Sequence
  Synthetic
  misc_feature (1)..(1): n is a, c, g, or u
nucugccguuccggccgacca

SEQ ID NO: 106630 - RNA, 22 nt, Artificial Sequence
  Synthetic
  misc_feature (2)..(2): n is a, c, g, or u
cnucugccguuccggccgacca

SEQ ID NO: 106631 - RNA, 23 nt, Artificial Sequence
  Synthetic
  misc_feature (1)..(1): n is a, c, g, or u
  misc_feature (3)..(3): n is a, c, g, or u
ncnucugccguuccggccgacca

SEQ ID NO: 106632 - RNA, 24 nt, Artificial Sequence
  Synthetic
  misc_feature (2)..(2): n is a, c, g, or u
  misc_feature (4)..(4): n is a, c, g, or u
uncnucugccguuccggccgacca

SEQ ID NO: 106633 - RNA, 18 nt, Artificial Sequence
  Synthetic
acuaccagcacgggacca

SEQ ID NO: 106634 - RNA, 19 nt, Artificial Sequence
  Synthetic
aacuaccagcacgggacca

SEQ ID NO: 106635 - RNA, 20 nt, Artificial Sequence
  Synthetic
caacuaccagcacgggacca

SEQ ID NO: 106636 - RNA, 21 nt, Artificial Sequence
  Synthetic
ucaacuaccagcacgggacca

SEQ ID NO: 106637 - RNA, 22 nt, Artificial Sequence
  Synthetic
aucaacuaccagcacgggacca

SEQ ID NO: 106638 - RNA, 23 nt, Artificial Sequence
  Synthetic
caucaacuaccagcacgggacca

SEQ ID NO: 106639 - RNA, 24 nt, Artificial Sequence
  Synthetic
acaucaacuaccagcacgggacca

SEQ ID NO: 106640 - RNA, 18 nt, Artificial Sequence
  Synthetic
auugggacuucaacccca

SEQ ID NO: 106641 - RNA, 19 nt, Artificial Sequence
  Synthetic
gauugggacuucaacccca

SEQ ID NO: 106642 - RNA, 20 nt, Artificial Sequence
  Synthetic
agauugggacuucaacccca

SEQ ID NO: 106643 - RNA, 21 nt, Artificial Sequence
  Synthetic
cagauugggacuucaacccca

SEQ ID NO: 106644 - RNA, 22 nt, Artificial Sequence
  Synthetic
ccagauugggacuucaacccca

SEQ ID NO: 106645 - RNA, 23 nt, Artificial Sequence
  Synthetic
uccagauugggacuucaacccca

SEQ ID NO: 106646 - RNA, 24 nt, Artificial Sequence
  Synthetic
auccagauugggacuucaacccca

SEQ ID NO: 106647 - RNA, 18 nt, Artificial Sequence
  Synthetic
aguugaugaaucuggcca

SEQ ID NO: 106648 - RNA, 19 nt, Artificial Sequence
  Synthetic
gaguugaugaaucuggcca

SEQ ID NO: 106649 - RNA, 20 nt, Artificial Sequence
  Synthetic
ugaguugaugaaucuggcca

SEQ ID NO: 106650 - RNA, 21 nt, Artificial Sequence
  Synthetic
gugaguugaugaaucuggcca

SEQ ID NO: 106651 - RNA, 22 nt, Artificial Sequence
  Synthetic
ggugaguugaugaaucuggcca

SEQ ID NO: 106652 - RNA, 23 nt, Artificial Sequence
  Synthetic
gggugaguugaugaaucuggcca

SEQ ID NO: 106653 - RNA, 24 nt, Artificial Sequence
  Synthetic
ggggugaguugaugaaucuggcca

SEQ ID NO: 106654 - RNA, 18 nt, Artificial Sequence
  Synthetic
  misc_feature (5)..(5): n is a, c, g, or u
  misc_feature (8)..(8): n is a, c, g, or u
ugcunggnugugcugcca

SEQ ID NO: 106655 - RNA, 19 nt, Artificial Sequence
  Synthetic
  misc_feature (6)..(6): n is a, c, g, or u
  misc_feature (9)..(9): n is a, c, g, or u
cugcunggnugugcugcca

SEQ ID NO: 106656 - RNA, 20 nt, Artificial Sequence
  Synthetic
  misc_feature (7)..(7): n is a, c, g, or u
  misc_feature (10)..(10): n is a, c, g, or u
gcugcunggnugugcugcca

SEQ ID NO: 106657 - RNA, 21 nt, Artificial Sequence
  Synthetic
  misc_feature (8)..(8): n is a, c, g, or u
  misc_feature (11)..(11): n is a, c, g, or u
ggcugcunggnugugcugcca

SEQ ID NO: 106658 - RNA, 22 nt, Artificial Sequence
  Synthetic
  misc_feature (9)..(9): n is a, c, g, or u
  misc_feature (12)..(12): n is a, c, g, or u
uggcugcunggnugugcugcca

SEQ ID NO: 106659 - RNA, 23 nt, Artificial Sequence
  Synthetic
  misc_feature (10)..(10): n is a, c, g, or u
  misc_feature (13)..(13): n is a, c, g, or u
auggcugcunggnugugcugcca

SEQ ID NO: 106660 - RNA, 24 nt, Artificial Sequence
  Synthetic
  misc_feature (11)..(11): n is a, c, g, or u
  misc_feature (14)..(14): n is a, c, g, or u
cauggcugcunggnugugcugcca

SEQ ID NO: 106661 - RNA, 18 nt, Artificial Sequence
  Synthetic
ucaccucaccauacagca

SEQ ID NO: 106662 - RNA, 19 nt, Artificial Sequence
  Synthetic
uucaccucaccauacagca

SEQ ID NO: 106663 - RNA, 20 nt, Artificial Sequence
  Synthetic
guucaccucaccauacagca

SEQ ID NO: 106664 - RNA, 21 nt, Artificial Sequence
  Synthetic
uguucaccucaccauacagca

SEQ ID NO: 106665 - RNA, 22 nt, Artificial Sequence
  Synthetic
uuguucaccucaccauacagca

SEQ ID NO: 106666 - RNA, 23 nt, Artificial Sequence
  Synthetic
auuguucaccucaccauacagca

SEQ ID NO: 106667 - RNA, 24 nt, Artificial Sequence
  Synthetic
cauuguucaccucaccauacagca

SEQ ID NO: 106668 - RNA, 18 nt, Artificial Sequence
  Synthetic
ggaacaagagcuacagca

SEQ ID NO: 106669 - RNA, 19 nt, Artificial Sequence
  Synthetic
gggaacaagagcuacagca

SEQ ID NO: 106670 - RNA, 20 nt, Artificial Sequence
  Synthetic
ugggaacaagagcuacagca

SEQ ID NO: 106671 - RNA, 21 nt, Artificial Sequence
  Synthetic
uugggaacaagagcuacagca

SEQ ID NO: 106672 - RNA, 22 nt, Artificial Sequence
  Synthetic
cuugggaacaagagcuacagca

SEQ ID NO: 106673 - RNA, 23 nt, Artificial Sequence
  Synthetic
ucuugggaacaagagcuacagca

SEQ ID NO: 106674 - RNA, 24 nt, Artificial Sequence
  Synthetic
uucuugggaacaagagcuacagca

SEQ ID NO: 106675 - RNA, 18 nt, Artificial Sequence
  Synthetic
gaacaucaacuaccagca

SEQ ID NO: 106676 - RNA, 19 nt, Artificial Sequence
  Synthetic
ggaacaucaacuaccagca

SEQ ID NO: 106677 - RNA, 20 nt, Artificial Sequence
  Synthetic
aggaacaucaacuaccagca

SEQ ID NO: 106678 - RNA, 21 nt, Artificial Sequence
  Synthetic
caggaacaucaacuaccagca

SEQ ID NO: 106679 - RNA, 22 nt, Artificial Sequence
  Synthetic
ccaggaacaucaacuaccagca

SEQ ID NO: 106680 - RNA, 23 nt, Artificial Sequence
  Synthetic
uccaggaacaucaacuaccagca

SEQ ID NO: 106681 - RNA, 24 nt, Artificial Sequence
  Synthetic
uuccaggaacaucaacuaccagca

SEQ ID NO: 106682 - RNA, 18 nt, Artificial Sequence
  Synthetic
  misc_feature (12)..(12): n is a, c, g, or u
aauuuggaaganccagca

SEQ ID NO: 106683 - RNA, 19 nt, Artificial Sequence
  Synthetic
  misc_feature (13)..(13): n is a, c, g, or u
uaauuuggaaganccagca

SEQ ID NO: 106684 - RNA, 20 nt, Artificial Sequence
  Synthetic
  misc_feature (14)..(14): n is a, c, g, or u
guaauuuggaaganccagca

SEQ ID NO: 106685 - RNA, 21 nt, Artificial Sequence
  Synthetic
  misc_feature (15)..(15): n is a, c, g, or u
aguaauuuggaaganccagca

SEQ ID NO: 106686 - RNA, 22 nt, Artificial Sequence
  Synthetic
  misc_feature (16)..(16): n is a, c, g, or u
aaguaauuuggaaganccagca

SEQ ID NO: 106687 - RNA, 23 nt, Artificial Sequence
  Synthetic
  misc_feature (17)..(17): n is a, c, g, or u
gaaguaauuuggaaganccagca

SEQ ID NO: 106688 - RNA, 24 nt, Artificial Sequence
  Synthetic
  misc_feature (18)..(18): n is a, c, g, or u
ggaaguaauuuggaaganccagca

SEQ ID NO: 106689 - RNA, 18 nt, Artificial Sequence
  Synthetic
gaacucccucgccucgca

SEQ ID NO: 106690 - RNA, 19 nt, Artificial Sequence
  Synthetic
agaacucccucgccucgca

SEQ ID NO: 106691 - RNA, 20 nt, Artificial Sequence
  Synthetic
aagaacucccucgccucgca

SEQ ID NO: 106692 - RNA, 21 nt, Artificial Sequence
  Synthetic
gaagaacucccucgccucgca

SEQ ID NO: 106693 - RNA, 22 nt, Artificial Sequence
  Synthetic
agaagaacucccucgccucgca

SEQ ID NO: 106694 - RNA, 23 nt, Artificial Sequence
  Synthetic
aagaagaacucccucgccucgca

SEQ ID NO: 106695 - RNA, 24 nt, Artificial Sequence
  Synthetic
gaagaagaacucccucgccucgca

SEQ ID NO: 106696 - RNA, 18 nt, Artificial Sequence
  Synthetic
  misc_feature (8)..(8): n is a, c, g, or u
  misc_feature (11)..(11): n is a, c, g, or u
ugcccuunganaaaggca

SEQ ID NO: 106697 - RNA, 19 nt, Artificial Sequence
  Synthetic
  misc_feature (9)..(9): n is a, c, g, or u
  misc_feature (12)..(12): n is a, c, g, or u
uugcccuunganaaaggca

SEQ ID NO: 106698 - RNA, 20 nt, Artificial Sequence
  Synthetic
  misc_feature (10)..(10): n is a, c, g, or u
  misc_feature (13)..(13): n is a, c, g, or u
uuugcccuunganaaaggca

SEQ ID NO: 106699 - RNA, 21 nt, Artificial Sequence
  Synthetic
  misc_feature (11)..(11): n is a, c, g, or u
  misc_feature (14)..(14): n is a, c, g, or u
auuugcccuunganaaaggca

SEQ ID NO: 106700 - RNA, 22 nt, Artificial Sequence
  Synthetic
  misc_feature (12)..(12): n is a, c, g, or u
  misc_feature (15)..(15): n is a, c, g, or u
uauuugcccuunganaaaggca

SEQ ID NO: 106701 - RNA, 23 nt, Artificial Sequence
  Synthetic
  misc_feature (13)..(13): n is a, c, g, or u
  misc_feature (16)..(16): n is a, c, g, or u
auauuugcccuunganaaaggca

SEQ ID NO: 106702 - RNA, 24 nt, Artificial Sequence
  Synthetic
  misc_feature (14)..(14): n is a, c, g, or u
  misc_feature (17)..(17): n is a, c, g, or u
aauauuugcccuunganaaaggca

SEQ ID NO: 106703 - RNA, 18 nt, Artificial Sequence
  Synthetic
ccaaaccucgacaaggca

SEQ ID NO: 106704 - RNA, 19 nt, Artificial Sequence
  Synthetic
uccaaaccucgacaaggca

SEQ ID NO: 106705 - RNA, 20 nt, Artificial Sequence
  Synthetic
uuccaaaccucgacaaggca

SEQ ID NO: 106706 - RNA, 21 nt, Artificial Sequence
  Synthetic
cuuccaaaccucgacaaggca

SEQ ID NO: 106707 - RNA, 22 nt, Artificial Sequence
  Synthetic
ucuuccaaaccucgacaaggca

SEQ ID NO: 106708 - RNA, 23 nt, Artificial Sequence
  Synthetic
gucuuccaaaccucgacaaggca

SEQ ID NO: 106709 - RNA, 24 nt, Artificial Sequence
  Synthetic
ggucuuccaaaccucgacaaggca

SEQ ID NO: 106710 - RNA, 18 nt, Artificial Sequence
  Synthetic
ugccuccaccaaucggca

SEQ ID NO: 106711 - RNA, 19 nt, Artificial Sequence
  Synthetic
cugccuccaccaaucggca

SEQ ID NO: 106712 - RNA, 20 nt, Artificial Sequence
  Synthetic
ccugccuccaccaaucggca

SEQ ID NO: 106713 - RNA, 21 nt, Artificial Sequence
  Synthetic
uccugccuccaccaaucggca

SEQ ID NO: 106714 - RNA, 22 nt, Artificial Sequence
  Synthetic
cuccugccuccaccaaucggca

SEQ ID NO: 106715 - RNA, 23 nt, Artificial Sequence
  Synthetic
ccuccugccuccaccaaucggca

SEQ ID NO: 106716 - RNA, 24 nt, Artificial Sequence
  Synthetic
uccuccugccuccaccaaucggca

SEQ ID NO: 106717 - RNA, 18 nt, Artificial Sequence
  Synthetic
ucauccucaggccaugca

SEQ ID NO: 106718 - RNA, 19 nt, Artificial Sequence
  Synthetic
gucauccucaggccaugca

SEQ ID NO: 106719 - RNA, 20 nt, Artificial Sequence
  Synthetic
agucauccucaggccaugca

SEQ ID NO: 106720 - RNA, 21 nt, Artificial Sequence
  Synthetic
cagucauccucaggccaugca

SEQ ID NO: 106721 - RNA, 22 nt, Artificial Sequence
  Synthetic
acagucauccucaggccaugca

SEQ ID NO: 106722 - RNA, 23 nt, Artificial Sequence
  Synthetic
gacagucauccucaggccaugca

SEQ ID NO: 106723 - RNA, 24 nt, Artificial Sequence
  Synthetic
agacagucauccucaggccaugca

SEQ ID NO: 106724 - RNA, 18 nt, Artificial Sequence
  Synthetic
aggacuggggacccugca

SEQ ID NO: 106725 - RNA, 19 nt, Artificial Sequence
  Synthetic
gaggacuggggacccugca

SEQ ID NO: 106726 - RNA, 20 nt, Artificial Sequence
  Synthetic
cgaggacuggggacccugca

SEQ ID NO: 106727 - RNA, 21 nt, Artificial Sequence
  Synthetic
ucgaggacuggggacccugca

SEQ ID NO: 106728 - RNA, 22 nt, Artificial Sequence
  Synthetic
cucgaggacuggggacccugca

SEQ ID NO: 106729 - RNA, 23 nt, Artificial Sequence
  Synthetic
ucucgaggacuggggacccugca

SEQ ID NO: 106730 - RNA, 24 nt, Artificial Sequence
  Synthetic
uucucgaggacuggggacccugca

SEQ ID NO: 106731 - RNA, 18 nt, Artificial Sequence
  Synthetic
  misc_feature (1)..(1): n is a, c, g, or u
  misc_feature (9)..(9): n is a, c, g, or u
  misc_feature (16)..(16): n is a, c, g, or u
nuggccagnggcaaanca

SEQ ID NO: 106732 - RNA, 19 nt, Artificial Sequence
  Synthetic
  misc_feature (2)..(2): n is a, c, g, or u
  misc_feature (10)..(10): n is a, c, g, or u
  misc_feature (17)..(17): n is a, c, g, or u
anuggccagnggcaaanca

SEQ ID NO: 106733 - RNA, 20 nt, Artificial Sequence
  Synthetic
  misc_feature (3)..(3): n is a, c, g, or u
  misc_feature (11)..(11): n is a, c, g, or u
  misc_feature (18)..(18): n is a, c, g, or u
canuggccagnggcaaanca

SEQ ID NO: 106734 - RNA, 21 nt, Artificial Sequence
  Synthetic
  misc_feature (4)..(4): n is a, c, g, or u
  misc_feature (12)..(12): n is a, c, g, or u
  misc_feature (19)..(19): n is a, c, g, or u
ucanuggccagnggcaaanca

SEQ ID NO: 106735 - RNA, 22 nt, Artificial Sequence
  Synthetic
  misc_feature (5)..(5): n is a, c, g, or u
  misc_feature (13)..(13): n is a, c, g, or u
  misc_feature (20)..(20): n is a, c, g, or u
aucanuggccagnggcaaanca

SEQ ID NO: 106736 - RNA, 23 nt, Artificial Sequence
  Synthetic
  misc_feature (6)..(6): n is a, c, g, or u
  misc_feature (14)..(14): n is a, c, g, or u
  misc_feature (21)..(21): n is a, c, g, or u
gaucanuggccagnggcaaanca

SEQ ID NO: 106737 - RNA, 24 nt, Artificial Sequence
  Synthetic
  misc_feature (7)..(7): n is a, c, g, or u
  misc_feature (15)..(15): n is a, c, g, or u
  misc_feature (22)..(22): n is a, c, g, or u
ggaucanuggccagnggcaaanca

SEQ ID NO: 106738 - RNA, 18 nt, Artificial Sequence
  Synthetic
  misc_feature (11)..(11): n is a, c, g, or u
  misc_feature (16)..(16): n is a, c, g, or u
cagguaggagnggganca

SEQ ID NO: 106739 - RNA, 19 nt, Artificial Sequence
  Synthetic
  misc_feature (1)..(1): n is a, c, g, or u
  misc_feature (12)..(12): n is a, c, g, or u
  misc_feature (17)..(17): n is a, c, g, or u
ncagguaggagnggganca

SEQ ID NO: 106740 - RNA, 20 nt, Artificial Sequence
  Synthetic
  misc_feature (2)..(2): n is a, c, g, or u
  misc_feature (13)..(13): n is a, c, g, or u
  misc_feature (18)..(18): n is a, c, g, or u
ancagguaggagnggganca

SEQ ID NO: 106741 - RNA, 21 nt, Artificial Sequence
  Synthetic
  misc_feature (3)..(3): n is a, c, g, or u
  misc_feature (14)..(14): n is a, c, g, or u
  misc_feature (19)..(19): n is a, c, g, or u
aancagguaggagnggganca

SEQ ID NO: 106742 - RNA, 22 nt, Artificial Sequence
  Synthetic
  misc_feature (4)..(4): n is a, c, g, or u
  misc_feature (15)..(15): n is a, c, g, or u
  misc_feature (20)..(20): n is a, c, g, or u
aaancagguaggagnggganca

SEQ ID NO: 106743 - RNA, 23 nt, Artificial Sequence
  Synthetic
  misc_feature (5)..(5): n is a, c, g, or u
  misc_feature (16)..(16): n is a, c, g, or u
  misc_feature (21)..(21): n is a, c, g, or u
caaancagguaggagnggganca

SEQ ID NO: 106744 - RNA, 24 nt, Artificial Sequence
  Synthetic
  misc_feature (6)..(6): n is a, c, g, or u
  misc_feature (17)..(17): n is a, c, g, or u
  misc_feature (22)..(22): n is a, c, g, or u
gcaaancagguaggagnggganca

SEQ ID NO: 106745 - RNA, 18 nt, Artificial Sequence
  Synthetic
  misc_feature (9)..(9): n is a, c, g, or u
cugcacganuccugcuca

SEQ ID NO: 106746 - RNA, 19 nt, Artificial Sequence
  Synthetic
  misc_feature (10)..(10): n is a, c, g, or u
ccugcacganuccugcuca

SEQ ID NO: 106747 - RNA, 20 nt, Artificial Sequence
  Synthetic
  misc_feature (11)..(11): n is a, c, g, or u
accugcacganuccugcuca

SEQ ID NO: 106748 - RNA, 21 nt, Artificial Sequence
  Synthetic
  misc_feature (12)..(12): n is a, c, g, or u
gaccugcacganuccugcuca

SEQ ID NO: 106749 - RNA, 22 nt, Artificial Sequence
  Synthetic
  misc_feature (13)..(13): n is a, c, g, or u
agaccugcacganuccugcuca

SEQ ID NO: 106750 - RNA, 23 nt, Artificial Sequence
  Synthetic
  misc_feature (14)..(14): n is a, c, g, or u
aagaccugcacganuccugcuca

SEQ ID NO: 106751 - RNA, 24 nt, Artificial Sequence
  Synthetic
  misc_feature (15)..(15): n is a, c, g, or u
caagaccugcacganuccugcuca

SEQ ID NO: 106752 - RNA, 18 nt, Artificial Sequence
  Synthetic
uccaccaaucggcaguca

SEQ ID NO: 106753 - RNA, 19 nt, Artificial Sequence
  Synthetic
cuccaccaaucggcaguca

SEQ ID NO: 106754 - RNA, 20 nt, Artificial Sequence
  Synthetic
ccuccaccaaucggcaguca

SEQ ID NO: 106755 - RNA, 21 nt, Artificial Sequence
  Synthetic
gccuccaccaaucggcaguca

SEQ ID NO: 106756 - RNA, 22 nt, Artificial Sequence
  Synthetic
ugccuccaccaaucggcaguca

SEQ ID NO: 106757 - RNA, 23 nt, Artificial Sequence
  Synthetic
cugccuccaccaaucggcaguca

SEQ ID NO: 106758 - RNA, 24 nt, Artificial Sequence
  Synthetic
ccugccuccaccaaucggcaguca

SEQ ID NO: 106759 - RNA, 18 nt, Artificial Sequence
  Synthetic
  misc_feature (15)..(15): n is a, c, g, or u
auaugggccuaaaanuca

SEQ ID NO: 106760 - RNA, 19 nt, Artificial Sequence
  Synthetic
  misc_feature (16)..(16): n is a, c, g, or u
aauaugggccuaaaanuca

SEQ ID NO: 106761 - RNA, 20 nt, Artificial Sequence
  Synthetic
  misc_feature (17)..(17): n is a, c, g, or u
uaauaugggccuaaaanuca

SEQ ID NO: 106762 - RNA, 21 nt, Artificial Sequence
  Synthetic
  misc_feature (18)..(18): n is a, c, g, or u
uuaauaugggccuaaaanuca

SEQ ID NO: 106763 - RNA, 22 nt, Artificial Sequence
  Synthetic
  misc_feature (19)..(19): n is a, c, g, or u
guuaauaugggccuaaaanuca

SEQ ID NO: 106764 - RNA, 23 nt, Artificial Sequence
  Synthetic
  misc_feature (20)..(20): n is a, c, g, or u
uguuaauaugggccuaaaanuca

SEQ ID NO: 106765 - RNA, 24 nt, Artificial Sequence
  Synthetic
  misc_feature (21)..(21): n is a, c, g, or u
auguuaauaugggccuaaaanuca

SEQ ID NO: 106766 - RNA, 18 nt, Artificial Sequence
  Synthetic
gggaaguaauuuggaaga

SEQ ID NO: 106767 - RNA, 19 nt, Artificial Sequence
  Synthetic
ugggaaguaauuuggaaga

SEQ ID NO: 106768 - RNA, 20 nt, Artificial Sequence
  Synthetic
gugggaaguaauuuggaaga

SEQ ID NO: 106769 - RNA, 21 nt, Artificial Sequence
  Synthetic
ggugggaaguaauuuggaaga

SEQ ID NO: 106770 - RNA, 22 nt, Artificial Sequence
  Synthetic
gggugggaaguaauuuggaaga

SEQ ID NO: 106771 - RNA, 23 nt, Artificial Sequence
  Synthetic
ugggugggaaguaauuuggaaga

SEQ ID NO: 106772 - RNA, 24 nt, Artificial Sequence
  Synthetic
cugggugggaaguaauuuggaaga

SEQ ID NO: 106773 - RNA, 18 nt, Artificial Sequence
  Synthetic
  misc_feature (5)..(5): n is a, c, g, or u
  misc_feature (9)..(9): n is a, c, g, or u
cuggnauunuauauaaga

SEQ ID NO: 106774 - RNA, 19 nt, Artificial Sequence
  Synthetic
  misc_feature (6)..(6): n is a, c, g, or u
  misc_feature (10)..(10): n is a, c, g, or u
gcuggnauunuauauaaga

SEQ ID NO: 106775 - RNA, 20 nt, Artificial Sequence
  Synthetic
  misc_feature (7)..(7): n is a, c, g, or u
  misc_feature (11)..(11): n is a, c, g, or u
ggcuggnauunuauauaaga

SEQ ID NO: 106776 - RNA, 21 nt, Artificial Sequence
  Synthetic
  misc_feature (8)..(8): n is a, c, g, or u
  misc_feature (12)..(12): n is a, c, g, or u
aggcuggnauunuauauaaga

SEQ ID NO: 106777 - RNA, 22 nt, Artificial Sequence
  Synthetic
  misc_feature (9)..(9): n is a, c, g, or u
  misc_feature (13)..(13): n is a, c, g, or u
aaggcuggnauunuauauaaga

SEQ ID NO: 106778 - RNA, 23 nt, Artificial Sequence
  Synthetic
  misc_feature (10)..(10): n is a, c, g, or u
  misc_feature (14)..(14): n is a, c, g, or u
gaaggcuggnauunuauauaaga

SEQ ID NO: 106779 - RNA, 24 nt, Artificial Sequence
  Synthetic
  misc_feature (11)..(11): n is a, c, g, or u
  misc_feature (15)..(15): n is a, c, g, or u
ggaaggcuggnauunuauauaaga

SEQ ID NO: 106780 - RNA, 18 nt, Artificial Sequence
  Synthetic
  misc_feature (12)..(12): n is a, c, g, or u
gcucugcuagancccaga

SEQ ID NO: 106781 - RNA, 19 nt, Artificial Sequence
  Synthetic
  misc_feature (13)..(13): n is a, c, g, or u
agcucugcuagancccaga

SEQ ID NO: 106782 - RNA, 20 nt, Artificial Sequence
  Synthetic
  misc_feature (14)..(14): n is a, c, g, or u
aagcucugcuagancccaga

SEQ ID NO: 106783 - RNA, 21 nt, Artificial Sequence
  Synthetic
  misc_feature (15)..(15): n is a, c, g, or u
caagcucugcuagancccaga

SEQ ID NO: 106784 - RNA, 22 nt, Artificial Sequence
  Synthetic
  misc_feature (16)..(16): n is a, c, g, or u
ccaagcucugcuagancccaga

SEQ ID NO: 106785 - RNA, 23 nt, Artificial Sequence
  Synthetic
  misc_feature (17)..(17): n is a, c, g, or u
accaagcucugcuagancccaga

SEQ ID NO: 106786 - RNA, 24 nt, Artificial Sequence
  Synthetic
  misc_feature (18)..(18): n is a, c, g, or u
caccaagcucugcuagancccaga

SEQ ID NO: 106787 - RNA, 18 nt, Artificial Sequence
  Synthetic
  misc_feature (4)..(4): n is a, c, g, or u
caanucaaacaauccaga

SEQ ID NO: 106788 - RNA, 19 nt, Artificial Sequence
  Synthetic
  misc_feature (5)..(5): n is a, c, g, or u
ccaanucaaacaauccaga

SEQ ID NO: 106789 - RNA, 20 nt, Artificial Sequence
  Synthetic
  misc_feature (6)..(6): n is a, c, g, or u
gccaanucaaacaauccaga

SEQ ID NO: 106790 - RNA, 21 nt, Artificial Sequence
  Synthetic
  misc_feature (7)..(7): n is a, c, g, or u
agccaanucaaacaauccaga

SEQ ID NO: 106791 - RNA, 22 nt, Artificial Sequence
  Synthetic
  misc_feature (8)..(8): n is a, c, g, or u
gagccaanucaaacaauccaga

SEQ ID NO: 106792 - RNA, 23 nt, Artificial Sequence
  Synthetic
  misc_feature (9)..(9): n is a, c, g, or u
ggagccaanucaaacaauccaga

SEQ ID NO: 106793 - RNA, 24 nt, Artificial Sequence
  Synthetic
  misc_feature (10)..(10): n is a, c, g, or u
cggagccaanucaaacaauccaga

SEQ ID NO: 106794 - RNA, 18 nt, Artificial Sequence
  Synthetic
acucccucgccucgcaga

SEQ ID NO: 106795 - RNA, 19 nt, Artificial Sequence
  Synthetic
aacucccucgccucgcaga

SEQ ID NO: 106796 - RNA, 20 nt, Artificial Sequence
  Synthetic
gaacucccucgccucgcaga

SEQ ID NO: 106797 - RNA, 21 nt, Artificial Sequence
  Synthetic
agaacucccucgccucgcaga

SEQ ID NO: 106798 - RNA, 22 nt, Artificial Sequence
  Synthetic
aagaacucccucgccucgcaga

SEQ ID NO: 106799 - RNA, 23 nt, Artificial Sequence
  Synthetic
gaagaacucccucgccucgcaga

SEQ ID NO: 106800 - RNA, 24 nt, Artificial Sequence
  Synthetic
agaagaacucccucgccucgcaga

SEQ ID NO: 106801 - RNA, 18 nt, Artificial Sequence
  Synthetic
guuaaugaaaaaaggaga

SEQ ID NO: 106802 - RNA, 19 nt, Artificial Sequence
  Synthetic
aguuaaugaaaaaaggaga

SEQ ID NO: 106803 - RNA, 20 nt, Artificial Sequence
  Synthetic
caguuaaugaaaaaaggaga

SEQ ID NO: 106804 - RNA, 21 nt, Artificial Sequence
  Synthetic
acaguuaaugaaaaaaggaga

SEQ ID NO: 106805 - RNA, 22 nt, Artificial Sequence
  Synthetic
uacaguuaaugaaaaaaggaga

SEQ ID NO: 106806 - RNA, 23 nt, Artificial Sequence
  Synthetic
uuacaguuaaugaaaaaaggaga

SEQ ID NO: 106807 - RNA, 24 nt, Artificial Sequence
  Synthetic
cuuacaguuaaugaaaaaaggaga

SEQ ID NO: 106808 - RNA, 18 nt, Artificial Sequence
  Synthetic
cgaggcagguccccuaga

SEQ ID NO: 106809 - RNA, 19 nt, Artificial Sequence
  Synthetic
acgaggcagguccccuaga

SEQ ID NO: 106810 - RNA, 20 nt, Artificial Sequence
  Synthetic
gacgaggcagguccccuaga

SEQ ID NO: 106811 - RNA, 21 nt, Artificial Sequence
  Synthetic
cgacgaggcagguccccuaga

SEQ ID NO: 106812 - RNA, 22 nt, Artificial Sequence
  Synthetic
acgacgaggcagguccccuaga

SEQ ID NO: 106813 - RNA, 23 nt, Artificial Sequence
  Synthetic
gacgacgaggcagguccccuaga

SEQ ID NO: 106814 - RNA, 24 nt, Artificial Sequence
  Synthetic
agacgacgaggcagguccccuaga

SEQ ID NO: 106815 - RNA, 18 nt, Artificial Sequence
  Synthetic
acuacuguuguuagacga

SEQ ID NO: 106816 - RNA, 19 nt, Artificial Sequence
  Synthetic
aacuacuguuguuagacga

SEQ ID NO: 106817 - RNA, 20 nt, Artificial Sequence
  Synthetic
aaacuacuguuguuagacga

SEQ ID NO: 106818 - RNA, 21 nt, Artificial Sequence
  Synthetic
gaaacuacuguuguuagacga

SEQ ID NO: 106819 - RNA, 22 nt, Artificial Sequence
  Synthetic
ggaaacuacuguuguuagacga

SEQ ID NO: 106820 - RNA, 23 nt, Artificial Sequence
  Synthetic
cggaaacuacuguuguuagacga

SEQ ID NO: 106821 - RNA, 24 nt, Artificial Sequence
  Synthetic
ccggaaacuacuguuguuagacga

SEQ ID NO: 106822 - RNA, 18 nt, Artificial Sequence
  Synthetic
acuguuguuagacgacga

SEQ ID NO: 106823 - RNA, 19 nt, Artificial Sequence
  Synthetic
uacuguuguuagacgacga

SEQ ID NO: 106824 - RNA, 20 nt, Artificial Sequence
  Synthetic
cuacuguuguuagacgacga

SEQ ID NO: 106825 - RNA, 21 nt, Artificial Sequence
  Synthetic
acuacuguuguuagacgacga

SEQ ID NO: 106826 - RNA, 22 nt, Artificial Sequence
  Synthetic
aacuacuguuguuagacgacga

SEQ ID NO: 106827 - RNA, 23 nt, Artificial Sequence
  Synthetic
aaacuacuguuguuagacgacga

SEQ ID NO: 106828 - RNA, 24 nt, Artificial Sequence
  Synthetic
gaaacuacuguuguuagacgacga

SEQ ID NO: 106829 - RNA, 18 nt, Artificial Sequence
  Synthetic
uggucuuccaaaccucga

SEQ ID NO: 106830 - RNA, 19 nt, Artificial Sequence
  Synthetic
uuggucuuccaaaccucga

SEQ ID NO: 106831 - RNA, 20 nt, Artificial Sequence
  Synthetic
guuggucuuccaaaccucga

SEQ ID NO: 106832 - RNA, 21 nt, Artificial Sequence
  Synthetic
gguuggucuuccaaaccucga

SEQ ID NO: 106833 - RNA, 22 nt, Artificial Sequence
  Synthetic
agguuggucuuccaaaccucga

SEQ ID NO: 106834 - RNA, 23 nt, Artificial Sequence
  Synthetic
gagguuggucuuccaaaccucga

SEQ ID NO: 106835 - RNA, 24 nt, Artificial Sequence
  Synthetic
ggagguuggucuuccaaaccucga

SEQ ID NO: 106836 - RNA, 18 nt, Artificial Sequence
  Synthetic
cgucaaucuucucgagga

SEQ ID NO: 106837 - RNA, 19 nt, Artificial Sequence
  Synthetic
ucgucaaucuucucgagga

SEQ ID NO: 106838 - RNA, 20 nt, Artificial Sequence
  Synthetic
aucgucaaucuucucgagga

SEQ ID NO: 106839 - RNA, 21 nt, Artificial Sequence
  Synthetic
uaucgucaaucuucucgagga

SEQ ID NO: 106840 - RNA, 22 nt, Artificial Sequence
  Synthetic
auaucgucaaucuucucgagga

SEQ ID NO: 106841 - RNA, 23 nt, Artificial Sequence
  Synthetic
cauaucgucaaucuucucgagga

SEQ ID NO: 106842 - RNA, 24 nt, Artificial Sequence
  Synthetic
ccauaucgucaaucuucucgagga

SEQ ID NO: 106843 - RNA, 18 nt, Artificial Sequence
  Synthetic
  misc_feature (1)..(1): n is a, c, g, or u
  misc_feature (7)..(7): n is a, c, g, or u
nuuuaangacugggagga

SEQ ID NO: 106844 - RNA, 19 nt, Artificial Sequence
  Synthetic
  misc_feature (2)..(2): n is a, c, g, or u
  misc_feature (8)..(8): n is a, c, g, or u
unuuuaangacugggagga

SEQ ID NO: 106845 - RNA, 20 nt, Artificial Sequence
  Synthetic
  misc_feature (1)..(1): n is a, c, g, or u
  misc_feature (3)..(3): n is a, c, g, or u
  misc_feature (9)..(9): n is a, c, g, or u
nunuuuaangacugggagga

SEQ ID NO: 106846 - RNA, 21 nt, Artificial Sequence
  Synthetic
  misc_feature (2)..(2): n is a, c, g, or u
  misc_feature (4)..(4): n is a, c, g, or u
  misc_feature (10)..(10): n is a, c, g, or u
ununuuuaangacugggagga

SEQ ID NO: 106847 - RNA, 22 nt, Artificial Sequence
  Synthetic
  misc_feature (3)..(3): n is a, c, g, or u
  misc_feature (5)..(5): n is a, c, g, or u
  misc_feature (11)..(11): n is a, c, g, or u
gununuuuaangacugggagga

SEQ ID NO: 106848 - RNA, 23 nt, Artificial Sequence
  Synthetic
  misc_feature (4)..(4): n is a, c, g, or u
  misc_feature (6)..(6): n is a, c, g, or u
  misc_feature (12)..(12): n is a, c, g, or u
ugununuuuaangacugggagga

SEQ ID NO: 106849 - RNA, 24 nt, Artificial Sequence
  Synthetic
  misc_feature (5)..(5): n is a, c, g, or u
  misc_feature (7)..(7): n is a, c, g, or u
  misc_feature (13)..(13): n is a, c, g, or u
cugununuuuaangacugggagga

SEQ ID NO: 106850 - RNA, 18 nt, Artificial Sequence
  Synthetic
  misc_feature (2)..(2): n is a, c, g, or u
  misc_feature (9)..(9): n is a, c, g, or u
gnggcaaancagguagga

SEQ ID NO: 106851 - RNA, 19 nt, Artificial Sequence
  Synthetic
  misc_feature (3)..(3): n is a, c, g, or u
  misc_feature (10)..(10): n is a, c, g, or u
agnggcaaancagguagga

SEQ ID NO: 106852 - RNA, 20 nt, Artificial Sequence
  Synthetic
  misc_feature (4)..(4): n is a, c, g, or u
  misc_feature (11)..(11): n is a, c, g, or u
cagnggcaaancagguagga

SEQ ID NO: 106853 - RNA, 21 nt, Artificial Sequence
  Synthetic
  misc_feature (5)..(5): n is a, c, g, or u
  misc_feature (12)..(12): n is a, c, g, or u
ccagnggcaaancagguagga

SEQ ID NO: 106854 - RNA, 22 nt, Artificial Sequence
  Synthetic
  misc_feature (6)..(6): n is a, c, g, or u
  misc_feature (13)..(13): n is a, c, g, or u
gccagnggcaaancagguagga

SEQ ID NO: 106855 - RNA, 23 nt, Artificial Sequence
  Synthetic
  misc_feature (7)..(7): n is a, c, g, or u
  misc_feature (14)..(14): n is a, c, g, or u
ggccagnggcaaancagguagga

SEQ ID NO: 106856 - RNA, 24 nt, Artificial Sequence
  Synthetic
  misc_feature (8)..(8): n is a, c, g, or u
  misc_feature (15)..(15): n is a, c, g, or u
uggccagnggcaaancagguagga

SEQ ID NO: 106857 - RNA, 18 nt, Artificial Sequence
  Synthetic
cuguacaaaaccuucgga

SEQ ID NO: 106858 - RNA, 19 nt, Artificial Sequence
  Synthetic
gcuguacaaaaccuucgga

SEQ ID NO: 106859 - RNA, 20 nt, Artificial Sequence
  Synthetic
ugcuguacaaaaccuucgga

SEQ ID NO: 106860 - RNA, 21 nt, Artificial Sequence
  Synthetic
uugcuguacaaaaccuucgga

SEQ ID NO: 106861 - RNA, 22 nt, Artificial Sequence
  Synthetic
guugcuguacaaaaccuucgga

SEQ ID NO: 106862 - RNA, 23 nt, Artificial Sequence
  Synthetic
uguugcuguacaaaaccuucgga

SEQ ID NO: 106863 - RNA, 24 nt, Artificial Sequence
  Synthetic
uuguugcuguacaaaaccuucgga

SEQ ID NO: 106864 - RNA, 18 nt, Artificial Sequence
  Synthetic
  misc_feature (9)..(9): n is a, c, g, or u
  misc_feature (12)..(12): n is a, c, g, or u
uuggacccngcnuucgga

SEQ ID NO: 106865 - RNA, 19 nt, Artificial Sequence
  Synthetic
  misc_feature (10)..(10): n is a, c, g, or u
  misc_feature (13)..(13): n is a, c, g, or u
guuggacccngcnuucgga

SEQ ID NO: 106866 - RNA, 20 nt, Artificial Sequence
  Synthetic
  misc_feature (11)..(11): n is a, c, g, or u
  misc_feature (14)..(14): n is a, c, g, or u
aguuggacccngcnuucgga

SEQ ID NO: 106867 - RNA, 21 nt, Artificial Sequence
  Synthetic
  misc_feature (12)..(12): n is a, c, g, or u
  misc_feature (15)..(15): n is a, c, g, or u
caguuggacccngcnuucgga

SEQ ID NO: 106868 - RNA, 22 nt, Artificial Sequence
  Synthetic
  misc_feature (13)..(13): n is a, c, g, or u
  misc_feature (16)..(16): n is a, c, g, or u
ccaguuggacccngcnuucgga

SEQ ID NO: 106869 - RNA, 23 nt, Artificial Sequence
  Synthetic
  misc_feature (14)..(14): n is a, c, g, or u
  misc_feature (17)..(17): n is a, c, g, or u
accaguuggacccngcnuucgga

SEQ ID NO: 106870 - RNA, 24 nt, Artificial Sequence
  Synthetic
  misc_feature (15)..(15): n is a, c, g, or u
  misc_feature (18)..(18): n is a, c, g, or u
caccaguuggacccngcnuucgga

SEQ ID NO: 106871 - RNA, 18 nt, Artificial Sequence
  Synthetic
cugggaggaguuggggga

SEQ ID NO: 106872 - RNA, 19 nt, Artificial Sequence
  Synthetic
acugggaggaguuggggga

SEQ ID NO: 106873 - RNA, 20 nt, Artificial Sequence
  Synthetic
gacugggaggaguuggggga

SEQ ID NO: 106874 - RNA, 21 nt, Artificial Sequence
  Synthetic
  misc_feature (1)..(1): n is a, c, g, or u
ngacugggaggaguuggggga

SEQ ID NO: 106875 - RNA, 22 nt, Artificial Sequence
  Synthetic
  misc_feature (2)..(2): n is a, c, g, or u
angacugggaggaguuggggga

SEQ ID NO: 106876 - RNA, 23 nt, Artificial Sequence
  Synthetic
  misc_feature (3)..(3): n is a, c, g, or u
aangacugggaggaguuggggga

SEQ ID NO: 106877 - RNA, 24 nt, Artificial Sequence
  Synthetic
  misc_feature (4)..(4): n is a, c, g, or u
uaangacugggaggaguuggggga

SEQ ID NO: 106878 - RNA, 18 nt, Artificial Sequence
  Synthetic
cgcaagauuccuauggga

SEQ ID NO: 106879 - RNA, 19 nt, Artificial Sequence
  Synthetic
ucgcaagauuccuauggga

SEQ ID NO: 106880 - RNA, 20 nt, Artificial Sequence
  Synthetic
uucgcaagauuccuauggga

SEQ ID NO: 106881 - RNA, 21 nt, Artificial Sequence
  Synthetic
uuucgcaagauuccuauggga

SEQ ID NO: 106882 - RNA, 22 nt, Artificial Sequence
  Synthetic
cuuucgcaagauuccuauggga

SEQ ID NO: 106883 - RNA, 23 nt, Artificial Sequence
  Synthetic
gcuuucgcaagauuccuauggga

SEQ ID NO: 106884 - RNA, 24 nt, Artificial Sequence
  Synthetic
ggcuuucgcaagauuccuauggga

SEQ ID NO: 106885 - RNA, 18 nt, Artificial Sequence
  Synthetic
gucaccauauucuuggga

SEQ ID NO: 106886 - RNA, 19 nt, Artificial Sequence
  Synthetic
ggucaccauauucuuggga

SEQ ID NO: 106887 - RNA, 20 nt, Artificial Sequence
  Synthetic
gggucaccauauucuuggga

SEQ ID NO: 106888 - RNA, 21 nt, Artificial Sequence
  Synthetic
ugggucaccauauucuuggga

SEQ ID NO: 106889 - RNA, 22 nt, Artificial Sequence
  Synthetic
gugggucaccauauucuuggga

SEQ ID NO: 106890 - RNA, 23 nt, Artificial Sequence
  Synthetic
ugugggucaccauauucuuggga

SEQ ID NO: 106891 - RNA, 24 nt, Artificial Sequence
  Synthetic
uugugggucaccauauucuuggga

SEQ ID NO: 106892 - RNA, 18 nt, Artificial Sequence
  Synthetic
gcucgcagccggucugga

SEQ ID NO: 106893 - RNA, 19 nt, Artificial Sequence
  Synthetic
ugcucgcagccggucugga

SEQ ID NO: 106894 - RNA, 20 nt, Artificial Sequence
  Synthetic
uugcucgcagccggucugga

SEQ ID NO: 106895 - RNA, 21 nt, Artificial Sequence
  Synthetic
uuugcucgcagccggucugga

SEQ ID NO: 106896 - RNA, 22 nt, Artificial Sequence
  Synthetic
uuuugcucgcagccggucugga

SEQ ID NO: 106897 - RNA, 23 nt, Artificial Sequence
  Synthetic
guuuugcucgcagccggucugga

SEQ ID NO: 106898 - RNA, 24 nt, Artificial Sequence
  Synthetic
uguuuugcucgcagccggucugga

SEQ ID NO: 106899 - RNA, 18 nt, Artificial Sequence
  Synthetic
uccugucuuacuuuugga

SEQ ID NO: 106900 - RNA, 19 nt, Artificial Sequence
  Synthetic
uuccugucuuacuuuugga

SEQ ID NO: 106901 - RNA, 20 nt, Artificial Sequence
  Synthetic
uuuccugucuuacuuuugga

SEQ ID NO: 106902 - RNA, 21 nt, Artificial Sequence
  Synthetic
auuuccugucuuacuuuugga

SEQ ID NO: 106903 - RNA, 22 nt, Artificial Sequence
  Synthetic
cauuuccugucuuacuuuugga

SEQ ID NO: 106904 - RNA, 23 nt, Artificial Sequence
  Synthetic
acauuuccugucuuacuuuugga

SEQ ID NO: 106905 - RNA, 24 nt, Artificial Sequence
  Synthetic
cacauuuccugucuuacuuuugga

SEQ ID NO: 106906 - RNA, 18 nt, Artificial Sequence
  Synthetic
  misc_feature (8)..(8): n is a, c, g, or u
  misc_feature (10)..(10): n is a, c, g, or u
  misc_feature (16)..(16): n is a, c, g, or u
agacugununuuuaanga

SEQ ID NO: 106907 - RNA, 19 nt, Artificial Sequence
  Synthetic
  misc_feature (9)..(9): n is a, c, g, or u
  misc_feature (11)..(11): n is a, c, g, or u
  misc_feature (17)..(17): n is a, c, g, or u
aagacugununuuuaanga

SEQ ID NO: 106908 - RNA, 20 nt, Artificial Sequence
  Synthetic
  misc_feature (10)..(10): n is a, c, g, or u
  misc_feature (12)..(12): n is a, c, g, or u
  misc_feature (18)..(18): n is a, c, g, or u
aaagacugununuuuaanga

SEQ ID NO: 106909 - RNA, 21 nt, Artificial Sequence
  Synthetic
  misc_feature (11)..(11): n is a, c, g, or u
  misc_feature (13)..(13): n is a, c, g, or u
  misc_feature (19)..(19): n is a, c, g, or u
caaagacugununuuuaanga

SEQ ID NO: 106910 - RNA, 22 nt, Artificial Sequence
  Synthetic
  misc_feature (12)..(12): n is a, c, g, or u
  misc_feature (14)..(14): n is a, c, g, or u
  misc_feature (20)..(20): n is a, c, g, or u
ucaaagacugununuuuaanga

SEQ ID NO: 106911 - RNA, 23 nt, Artificial Sequence
  Synthetic
  misc_feature (13)..(13): n is a, c, g, or u
  misc_feature (15)..(15): n is a, c, g, or u
  misc_feature (21)..(21): n is a, c, g, or u
uucaaagacugununuuuaanga

SEQ ID NO: 106912 - RNA, 24 nt, Artificial Sequence
  Synthetic
  misc_feature (14)..(14): n is a, c, g, or u
  misc_feature (16)..(16): n is a, c, g, or u
  misc_feature (22)..(22): n is a, c, g, or u
cuucaaagacugununuuuaanga

SEQ ID NO: 106913 - RNA, 18 nt, Artificial Sequence
  Synthetic
  misc_feature (16)..(16): n is a, c, g, or u
caaauauuugcccuunga

SEQ ID NO: 106914 - RNA, 19 nt, Artificial Sequence
  Synthetic
  misc_feature (17)..(17): n is a, c, g, or u
ccaaauauuugcccuunga

SEQ ID NO: 106915 - RNA, 20 nt, Artificial Sequence
  Synthetic
  misc_feature (18)..(18): n is a, c, g, or u
accaaauauuugcccuunga

SEQ ID NO: 106916 - RNA, 21 nt, Artificial Sequence
  Synthetic
  misc_feature (19)..(19): n is a, c, g, or u
uaccaaauauuugcccuunga

SEQ ID NO: 106917 - RNA, 22 nt, Artificial Sequence
  Synthetic
  misc_feature (20)..(20): n is a, c, g, or u
uuaccaaauauuugcccuunga

SEQ ID NO: 106918 - RNA, 23 nt, Artificial Sequence
  Synthetic
  misc_feature (21)..(21): n is a, c, g, or u
cuuaccaaauauuugcccuunga

SEQ ID NO: 106919 - RNA, 24 nt, Artificial Sequence
  Synthetic
  misc_feature (22)..(22): n is a, c, g, or u
ccuuaccaaauauuugcccuunga

SEQ ID NO: 106920 - RNA, 18 nt, Artificial Sequence
  Synthetic
cccucuuacaguuaauga

SEQ ID NO: 106921 - RNA, 19 nt, Artificial Sequence
  Synthetic
gcccucuuacaguuaauga

SEQ ID NO: 106922 - RNA, 20 nt, Artificial Sequence
  Synthetic
ggcccucuuacaguuaauga

SEQ ID NO: 106923 - RNA, 21 nt, Artificial Sequence
  Synthetic
gggcccucuuacaguuaauga

SEQ ID NO: 106924 - RNA, 22 nt, Artificial Sequence
  Synthetic
ugggcccucuuacaguuaauga

SEQ ID NO: 106925 - RNA, 23 nt, Artificial Sequence
  Synthetic
gugggcccucuuacaguuaauga

SEQ ID NO: 106926 - RNA, 24 nt, Artificial Sequence
  Synthetic
ugugggcccucuuacaguuaauga

SEQ ID NO: 106927 - RNA, 18 nt, Artificial Sequence
  Synthetic
  misc_feature (1)..(1): n is a, c, g, or u
nugccaaguguuugcuga

SEQ ID NO: 106928 - RNA, 19 nt, Artificial Sequence
  Synthetic
  misc_feature (2)..(2): n is a, c, g, or u
unugccaaguguuugcuga

SEQ ID NO: 106929 - RNA, 20 nt, Artificial Sequence
  Synthetic
  misc_feature (3)..(3): n is a, c, g, or u
cunugccaaguguuugcuga

SEQ ID NO: 106930 - RNA, 21 nt, Artificial Sequence
  Synthetic
  misc_feature (4)..(4): n is a, c, g, or u
ucunugccaaguguuugcuga

SEQ ID NO: 106931 - RNA, 22 nt, Artificial Sequence
  Synthetic
  misc_feature (5)..(5): n is a, c, g, or u
gucunugccaaguguuugcuga

SEQ ID NO: 106932 - RNA, 23 nt, Artificial Sequence
  Synthetic
  misc_feature (6)..(6): n is a, c, g, or u
ggucunugccaaguguuugcuga

SEQ ID NO: 106933 - RNA, 24 nt, Artificial Sequence
  Synthetic
  misc_feature (7)..(7): n is a, c, g, or u
aggucunugccaaguguuugcuga

SEQ ID NO: 106934 - RNA, 18 nt, Artificial Sequence
  Synthetic
  misc_feature (2)..(2): n is a, c, g, or u
unuaaauagaccuauuga

SEQ ID NO: 106935 - RNA, 19 nt, Artificial Sequence
  Synthetic
  misc_feature (3)..(3): n is a, c, g, or u
cunuaaauagaccuauuga

SEQ ID NO: 106936 - RNA, 20 nt, Artificial Sequence
  Synthetic
  misc_feature (4)..(4): n is a, c, g, or u
ccunuaaauagaccuauuga

SEQ ID NO: 106937 - RNA, 21 nt, Artificial Sequence
  Synthetic
  misc_feature (1)..(1): n is a, c, g, or u
  misc_feature (5)..(5): n is a, c, g, or u
nccunuaaauagaccuauuga

SEQ ID NO: 106938 - RNA, 22 nt, Artificial Sequence
  Synthetic
  misc_feature (2)..(2): n is a, c, g, or u
  misc_feature (6)..(6): n is a, c, g, or u
unccunuaaauagaccuauuga

SEQ ID NO: 106939 - RNA, 23 nt, Artificial Sequence
  Synthetic
  misc_feature (3)..(3): n is a, c, g, or u
  misc_feature (7)..(7): n is a, c, g, or u
cunccunuaaauagaccuauuga

SEQ ID NO: 106940 - RNA, 24 nt, Artificial Sequence
  Synthetic
  misc_feature (4)..(4): n is a, c, g, or u
  misc_feature (8)..(8): n is a, c, g, or u
acunccunuaaauagaccuauuga

SEQ ID NO: 106941 - RNA, 18 nt, Artificial Sequence
  Synthetic
cgggguuuuucuuguuga

SEQ ID NO: 106942 - RNA, 19 nt, Artificial Sequence
  Synthetic
gcgggguuuuucuuguuga

SEQ ID NO: 106943 - RNA, 20 nt, Artificial Sequence
  Synthetic
ggcgggguuuuucuuguuga

SEQ ID NO: 106944 - RNA, 21 nt, Artificial Sequence
  Synthetic
aggcgggguuuuucuuguuga

SEQ ID NO: 106945 - RNA, 22 nt, Artificial Sequence
  Synthetic
caggcgggguuuuucuuguuga

SEQ ID NO: 106946 - RNA, 23 nt, Artificial Sequence
  Synthetic
acaggcgggguuuuucuuguuga

SEQ ID NO: 106947 - RNA, 24 nt, Artificial Sequence
  Synthetic
uacaggcgggguuuuucuuguuga

SEQ ID NO: 106948 - RNA, 18 nt, Artificial Sequence
  Synthetic
  misc_feature (17)..(17): n is a, c, g, or u
gggacccugcaccgaana

SEQ ID NO: 106949 - RNA, 19 nt, Artificial Sequence
  Synthetic
  misc_feature (18)..(18): n is a, c, g, or u
ggggacccugcaccgaana

SEQ ID NO: 106950 - RNA, 20 nt, Artificial Sequence
  Synthetic
  misc_feature (19)..(19): n is a, c, g, or u
uggggacccugcaccgaana

SEQ ID NO: 106951 - RNA, 21 nt, Artificial Sequence
  Synthetic
  misc_feature (20)..(20): n is a, c, g, or u
cuggggacccugcaccgaana

SEQ ID NO: 106952 - RNA, 22 nt, Artificial Sequence
  Synthetic
  misc_feature (21)..(21): n is a, c, g, or u
acuggggacccugcaccgaana

SEQ ID NO: 106953 - RNA, 23 nt, Artificial Sequence
  Synthetic
  misc_feature (22)..(22): n is a, c, g, or u
gacuggggacccugcaccgaana

SEQ ID NO: 106954 - RNA, 24 nt, Artificial Sequence
  Synthetic
  misc_feature (23)..(23): n is a, c, g, or u
ggacuggggacccugcaccgaana

SEQ ID NO: 106955 - RNA, 18 nt, Artificial Sequence
  Synthetic
  misc_feature (17)..(17): n is a, c, g, or u
cuugcccaaggucuuana

SEQ ID NO: 106956 - RNA, 19 nt, Artificial Sequence
  Synthetic
  misc_feature (18)..(18): n is a, c, g, or u
ucuugcccaaggucuuana

SEQ ID NO: 106957 - RNA, 20 nt, Artificial Sequence
  Synthetic
  misc_feature (19)..(19): n is a, c, g, or u
gucuugcccaaggucuuana

SEQ ID NO: 106958 - RNA, 21 nt, Artificial Sequence
  Synthetic
  misc_feature (20)..(20): n is a, c, g, or u
ggucuugcccaaggucuuana

SEQ ID NO: 106959 - RNA, 22 nt, Artificial Sequence
  Synthetic
  misc_feature (21)..(21): n is a, c, g, or u
aggucuugcccaaggucuuana

SEQ ID NO: 106960 - RNA, 23 nt, Artificial Sequence
  Synthetic
  misc_feature (22)..(22): n is a, c, g, or u
caggucuugcccaaggucuuana

SEQ ID NO: 106961 - RNA, 24 nt, Artificial Sequence
  Synthetic
  misc_feature (23)..(23): n is a, c, g, or u
ccaggucuugcccaaggucuuana

SEQ ID NO: 106962 - RNA, 18 nt, Artificial Sequence
  Synthetic
  misc_feature (5)..(5): n is a, c, g, or u
  misc_feature (16)..(17): n is a, c, g, or u
uccunacauucauuunna

SEQ ID NO: 106963 - RNA, 19 nt, Artificial Sequence
  Synthetic
  misc_feature (6)..(6): n is a, c, g, or u
  misc_feature (17)..(18): n is a, c, g, or u
uuccunacauucauuunna

SEQ ID NO: 106964 - RNA, 20 nt, Artificial Sequence
  Synthetic
  misc_feature (7)..(7): n is a, c, g, or u
  misc_feature (18)..(19): n is a, c, g, or u
uuuccunacauucauuunna

SEQ ID NO: 106965 - RNA, 21 nt, Artificial Sequence
  Synthetic
  misc_feature (1)..(1): n is a, c, g, or u
  misc_feature (8)..(8): n is a, c, g, or u
  misc_feature (19)..(20): n is a, c, g, or u
nuuuccunacauucauuunna

SEQ ID NO: 106966 - RNA, 22 nt, Artificial Sequence
  Synthetic
  misc_feature (2)..(2): n is a, c, g, or u
  misc_feature (9)..(9): n is a, c, g, or u
  misc_feature (20)..(21): n is a, c, g, or u
cnuuuccunacauucauuunna

SEQ ID NO: 106967 - RNA, 23 nt, Artificial Sequence
  Synthetic
  misc_feature (3)..(3): n is a, c, g, or u
  misc_feature (10)..(10): n is a, c, g, or u
  misc_feature (21)..(22): n is a, c, g, or u
ucnuuuccunacauucauuunna

SEQ ID NO: 106968 - RNA, 24 nt, Artificial Sequence
  Synthetic
  misc_feature (4)..(4): n is a, c, g, or u
  misc_feature (11)..(11): n is a, c, g, or u
  misc_feature (22)..(23): n is a, c, g, or u
cucnuuuccunacauucauuunna

SEQ ID NO: 106969 - RNA, 18 nt, Artificial Sequence
  Synthetic
  misc_feature (17)..(17): n is a, c, g, or u
cucaccauacagcacuna

SEQ ID NO: 106970 - RNA, 19 nt, Artificial Sequence
  Synthetic
  misc_feature (18)..(18): n is a, c, g, or u
ccucaccauacagcacuna

SEQ ID NO: 106971 - RNA, 20 nt, Artificial Sequence
  Synthetic
  misc_feature (19)..(19): n is a, c, g, or u
accucaccauacagcacuna

SEQ ID NO: 106972 - RNA, 21 nt, Artificial Sequence
  Synthetic
  misc_feature (20)..(20): n is a, c, g, or u
caccucaccauacagcacuna

SEQ ID NO: 106973 - RNA, 22 nt, Artificial Sequence
  Synthetic
  misc_feature (21)..(21): n is a, c, g, or u
ucaccucaccauacagcacuna

SEQ ID NO: 106974 - RNA, 23 nt, Artificial Sequence
  Synthetic
  misc_feature (22)..(22): n is a, c, g, or u
uucaccucaccauacagcacuna

SEQ ID NO: 106975 - RNA, 24 nt, Artificial Sequence
  Synthetic
  misc_feature (23)..(23): n is a, c, g, or u
guucaccucaccauacagcacuna

SEQ ID NO: 106976 - RNA, 18 nt, Artificial Sequence
  Synthetic
cuuucuguguaaacaaua

SEQ ID NO: 106977 - RNA, 19 nt, Artificial Sequence
  Synthetic
ccuuucuguguaaacaaua

SEQ ID NO: 106978 - RNA, 20 nt, Artificial Sequence
  Synthetic
gccuuucuguguaaacaaua

SEQ ID NO: 106979 - RNA, 21 nt, Artificial Sequence
  Synthetic
ggccuuucuguguaaacaaua

SEQ ID NO: 106980 - RNA, 22 nt, Artificial Sequence
  Synthetic
aggccuuucuguguaaacaaua

SEQ ID NO: 106981 - RNA, 23 nt, Artificial Sequence
  Synthetic
aaggccuuucuguguaaacaaua

SEQ ID NO: 106982 - RNA, 24 nt, Artificial Sequence
  Synthetic
caaggccuuucuguguaaacaaua

SEQ ID NO: 106983 - RNA, 18 nt, Artificial Sequence
  Synthetic
  misc_feature (1)..(1): n is a, c, g, or u
naauagaugucaacaaua

SEQ ID NO: 106984 - RNA, 19 nt, Artificial Sequence
  Synthetic
  misc_feature (2)..(2): n is a, c, g, or u
unaauagaugucaacaaua

SEQ ID NO: 106985 - RNA, 20 nt, Artificial Sequence
  Synthetic
  misc_feature (3)..(3): n is a, c, g, or u
aunaauagaugucaacaaua

SEQ ID NO: 106986 - RNA, 21 nt, Artificial Sequence
  Synthetic
  misc_feature (4)..(4): n is a, c, g, or u
uaunaauagaugucaacaaua

SEQ ID NO: 106987 - RNA, 22 nt, Artificial Sequence
  Synthetic
  misc_feature (5)..(5): n is a, c, g, or u
uuaunaauagaugucaacaaua

SEQ ID NO: 106988 - RNA, 23 nt, Artificial Sequence
  Synthetic
  misc_feature (6)..(6): n is a, c, g, or u
auuaunaauagaugucaacaaua

SEQ ID NO: 106989 - RNA, 24 nt, Artificial Sequence
  Synthetic
  misc_feature (1)..(1): n is a, c, g, or u
  misc_feature (7)..(7): n is a, c, g, or u
nauuaunaauagaugucaacaaua

SEQ ID NO: 106990 - RNA, 18 nt, Artificial Sequence
  Synthetic
  misc_feature (15)..(15): n is a, c, g, or u
ugcccaaggucuuanaua

SEQ ID NO: 106991 - RNA, 19 nt, Artificial Sequence
  Synthetic
  misc_feature (16)..(16): n is a, c, g, or u
uugcccaaggucuuanaua

SEQ ID NO: 106992 - RNA, 20 nt, Artificial Sequence
  Synthetic
  misc_feature (17)..(17): n is a, c, g, or u
cuugcccaaggucuuanaua

SEQ ID NO: 106993 - RNA, 21 nt, Artificial Sequence
  Synthetic
  misc_feature (18)..(18): n is a, c, g, or u
ucuugcccaaggucuuanaua

SEQ ID NO: 106994 - RNA, 22 nt, Artificial Sequence
  Synthetic
  misc_feature (19)..(19): n is a, c, g, or u
gucuugcccaaggucuuanaua

SEQ ID NO: 106995 - RNA, 23 nt, Artificial Sequence
  Synthetic
  misc_feature (20)..(20): n is a, c, g, or u
ggucuugcccaaggucuuanaua

SEQ ID NO: 106996 - RNA, 24 nt, Artificial Sequence
  Synthetic
  misc_feature (21)..(21): n is a, c, g, or u
aggucuugcccaaggucuuanaua

SEQ ID NO: 106997 - RNA, 18 nt, Artificial Sequence
  Synthetic
  misc_feature (8)..(8): n is a, c, g, or u
  misc_feature (12)..(12): n is a, c, g, or u
aggcuggnauunuauaua

SEQ ID NO: 106998 - RNA, 19 nt, Artificial Sequence
  Synthetic
  misc_feature (9)..(9): n is a, c, g, or u
  misc_feature (13)..(13): n is a, c, g, or u
aaggcuggnauunuauaua

SEQ ID NO: 106999 - RNA, 20 nt, Artificial Sequence
  Synthetic
  misc_feature (10)..(10): n is a, c, g, or u
  misc_feature (14)..(14): n is a, c, g, or u
gaaggcuggnauunuauaua

SEQ ID NO: 107000 - RNA, 21 nt, Artificial Sequence
  Synthetic
  misc_feature (11)..(11): n is a, c, g, or u
  misc_feature (15)..(15): n is a, c, g, or u
ggaaggcuggnauunuauaua

SEQ ID NO: 107001 - RNA, 22 nt, Artificial Sequence
  Synthetic
  misc_feature (12)..(12): n is a, c, g, or u
  misc_feature (16)..(16): n is a, c, g, or u
uggaaggcuggnauunuauaua

SEQ ID NO: 107002 - RNA, 23 nt, Artificial Sequence
  Synthetic
  misc_feature (13)..(13): n is a, c, g, or u
  misc_feature (17)..(17): n is a, c, g, or u
guggaaggcuggnauunuauaua

SEQ ID NO: 107003 - RNA, 24 nt, Artificial Sequence
  Synthetic
  misc_feature (14)..(14): n is a, c, g, or u
  misc_feature (18)..(18): n is a, c, g, or u
uguggaaggcuggnauunuauaua

SEQ ID NO: 107004 - RNA, 18 nt, Artificial Sequence
  Synthetic
  misc_feature (10)..(10): n is a, c, g, or u
  misc_feature (14)..(14): n is a, c, g, or u
gaaggcuggnauunuaua

SEQ ID NO: 107005 - RNA, 19 nt, Artificial Sequence
  Synthetic
  misc_feature (11)..(11): n is a, c, g, or u
  misc_feature (15)..(15): n is a, c, g, or u
ggaaggcuggnauunuaua

SEQ ID NO: 107006 - RNA, 20 nt, Artificial Sequence
  Synthetic
  misc_feature (12)..(12): n is a, c, g, or u
  misc_feature (16)..(16): n is a, c, g, or u
uggaaggcuggnauunuaua

SEQ ID NO: 107007 - RNA, 21 nt, Artificial Sequence
  Synthetic
  misc_feature (13)..(13): n is a, c, g, or u
  misc_feature (17)..(17): n is a, c, g, or u
guggaaggcuggnauunuaua

SEQ ID NO: 107008 - RNA, 22 nt, Artificial Sequence
  Synthetic
  misc_feature (14)..(14): n is a, c, g, or u
  misc_feature (18)..(18): n is a, c, g, or u
uguggaaggcuggnauunuaua

SEQ ID NO: 107009 - RNA, 23 nt, Artificial Sequence
  Synthetic
  misc_feature (15)..(15): n is a, c, g, or u
  misc_feature (19)..(19): n is a, c, g, or u
cuguggaaggcuggnauunuaua

SEQ ID NO: 107010 - RNA, 24 nt, Artificial Sequence
  Synthetic
  misc_feature (16)..(16): n is a, c, g, or u
  misc_feature (20)..(20): n is a, c, g, or u
ucuguggaaggcuggnauunuaua

SEQ ID NO: 107011 - RNA, 18 nt, Artificial Sequence
  Synthetic
guugguucuucuggacua

SEQ ID NO: 107012 - RNA, 19 nt, Artificial Sequence
  Synthetic
uguugguucuucuggacua

SEQ ID NO: 107013 - RNA, 20 nt, Artificial Sequence
  Synthetic
uuguugguucuucuggacua

SEQ ID NO: 107014 - RNA, 21 nt, Artificial Sequence
  Synthetic
cuuguugguucuucuggacua

SEQ ID NO: 107015 - RNA, 22 nt, Artificial Sequence
  Synthetic
ucuuguugguucuucuggacua

SEQ ID NO: 107016 - RNA, 23 nt, Artificial Sequence
  Synthetic
uucuuguugguucuucuggacua

SEQ ID NO: 107017 - RNA, 24 nt, Artificial Sequence
  Synthetic
cuucuuguugguucuucuggacua

SEQ ID NO: 107018 - RNA, 18 nt, Artificial Sequence
  Synthetic
  misc_feature (11)..(11): n is a, c, g, or u
guauacauuunaacccua

SEQ ID NO: 107019 - RNA, 19 nt, Artificial Sequence
  Synthetic
  misc_feature (12)..(12): n is a, c, g, or u
gguauacauuunaacccua

SEQ ID NO: 107020 - RNA, 20 nt, Artificial Sequence
  Synthetic
  misc_feature (13)..(13): n is a, c, g, or u
ggguauacauuunaacccua

SEQ ID NO: 107021 - RNA, 21 nt, Artificial Sequence
  Synthetic
  misc_feature (14)..(14): n is a, c, g, or u
uggguauacauuunaacccua

SEQ ID NO: 107022 - RNA, 22 nt, Artificial Sequence
  Synthetic
  misc_feature (15)..(15): n is a, c, g, or u
uuggguauacauuunaacccua

SEQ ID NO: 107023 - RNA, 23 nt, Artificial Sequence
  Synthetic
  misc_feature (16)..(16): n is a, c, g, or u
uuuggguauacauuunaacccua

SEQ ID NO: 107024 - RNA, 24 nt, Artificial Sequence
  Synthetic
  misc_feature (17)..(17): n is a, c, g, or u
cuuuggguauacauuunaacccua

SEQ ID NO: 107025 - RNA, 18 nt, Artificial Sequence
  Synthetic
gacgaggcagguccccua

SEQ ID NO: 107026 - RNA, 19 nt, Artificial Sequence
  Synthetic
cgacgaggcagguccccua

SEQ ID NO: 107027 - RNA, 20 nt, Artificial Sequence
  Synthetic
acgacgaggcagguccccua

SEQ ID NO: 107028 - RNA, 18 nt, Artificial Sequence
  Synthetic
gcuuucgcaagauuccua

SEQ ID NO: 107029 - RNA, 19 nt, Artificial Sequence
  Synthetic
ggcuuucgcaagauuccua

SEQ ID NO: 107030 - RNA, 20 nt, Artificial Sequence
  Synthetic
gggcuuucgcaagauuccua

SEQ ID NO: 107031 - RNA, 21 nt, Artificial Sequence
  Synthetic
ugggcuuucgcaagauuccua

SEQ ID NO: 107032 - RNA, 22 nt, Artificial Sequence
  Synthetic
  misc_feature (1)..(1): n is a, c, g, or u
nugggcuuucgcaagauuccua

SEQ ID NO: 107033 - RNA, 23 nt, Artificial Sequence
  Synthetic
  misc_feature (2)..(2): n is a, c, g, or u
cnugggcuuucgcaagauuccua

SEQ ID NO: 107034 - RNA, 24 nt, Artificial Sequence
  Synthetic
  misc_feature (3)..(3): n is a, c, g, or u
ucnugggcuuucgcaagauuccua

SEQ ID NO: 107035 - RNA, 18 nt, Artificial Sequence
  Synthetic
  misc_feature (15)..(15): n is a, c, g, or u
augcauguauacaancua

SEQ ID NO: 107036 - RNA, 19 nt, Artificial Sequence
  Synthetic
  misc_feature (16)..(16): n is a, c, g, or u
uaugcauguauacaancua

SEQ ID NO: 107037 - RNA, 20 nt, Artificial Sequence
  Synthetic
  misc_feature (1)..(1): n is a, c, g, or u
  misc_feature (17)..(17): n is a, c, g, or u
nuaugcauguauacaancua

SEQ ID NO: 107038 - RNA, 21 nt, Artificial Sequence
  Synthetic
  misc_feature (2)..(2): n is a, c, g, or u
  misc_feature (18)..(18): n is a, c, g, or u
unuaugcauguauacaancua

SEQ ID NO: 107039 - RNA, 22 nt, Artificial Sequence
  Synthetic
  misc_feature (3)..(3): n is a, c, g, or u
  misc_feature (19)..(19): n is a, c, g, or u
uunuaugcauguauacaancua

SEQ ID NO: 107040 - RNA, 23 nt, Artificial Sequence
  Synthetic
  misc_feature (4)..(4): n is a, c, g, or u
  misc_feature (20)..(20): n is a, c, g, or u
uuunuaugcauguauacaancua

SEQ ID NO: 107041 - RNA, 24 nt, Artificial Sequence
  Synthetic
  misc_feature (5)..(5): n is a, c, g, or u
  misc_feature (21)..(21): n is a, c, g, or u
cuuunuaugcauguauacaancua

SEQ ID NO: 107042 - RNA, 18 nt, Artificial Sequence
  Synthetic
cccaucucuccaccucua

SEQ ID NO: 107043 - RNA, 19 nt, Artificial Sequence
  Synthetic
ucccaucucuccaccucua

SEQ ID NO: 107044 - RNA, 20 nt, Artificial Sequence
  Synthetic
cucccaucucuccaccucua

SEQ ID NO: 107045 - RNA, 21 nt, Artificial Sequence
  Synthetic
acucccaucucuccaccucua

SEQ ID NO: 107046 - RNA, 22 nt, Artificial Sequence
  Synthetic
uacucccaucucuccaccucua

SEQ ID NO: 107047 - RNA, 23 nt, Artificial Sequence
  Synthetic
cuacucccaucucuccaccucua

SEQ ID NO: 107048 - RNA, 24 nt, Artificial Sequence
  Synthetic
ccuacucccaucucuccaccucua

SEQ ID NO: 107049 - RNA, 18 nt, Artificial Sequence
  Synthetic
acuucucucaauuuucua

SEQ ID NO: 107050 - RNA, 19 nt, Artificial Sequence
  Synthetic
gacuucucucaauuuucua

SEQ ID NO: 107051 - RNA, 20 nt, Artificial Sequence
  Synthetic
ggacuucucucaauuuucua

SEQ ID NO: 107052 - RNA, 21 nt, Artificial Sequence
  Synthetic
uggacuucucucaauuuucua

SEQ ID NO: 107053 - RNA, 22 nt, Artificial Sequence
  Synthetic
guggacuucucucaauuuucua

SEQ ID NO: 107054 - RNA, 23 nt, Artificial Sequence
  Synthetic
gguggacuucucucaauuuucua

SEQ ID NO: 107055 - RNA, 24 nt, Artificial Sequence
  Synthetic
ugguggacuucucucaauuuucua

SEQ ID NO: 107056 - RNA, 18 nt, Artificial Sequence
  Synthetic
gcauccagggaauuagua

SEQ ID NO: 107057 - RNA, 19 nt, Artificial Sequence
  Synthetic
agcauccagggaauuagua

SEQ ID NO: 107058 - RNA, 20 nt, Artificial Sequence
  Synthetic
cagcauccagggaauuagua

SEQ ID NO: 107059 - RNA, 21 nt, Artificial Sequence
  Synthetic
ccagcauccagggaauuagua

SEQ ID NO: 107060 - RNA, 22 nt, Artificial Sequence
  Synthetic
  misc_feature (1)..(1): n is a, c, g, or u
nccagcauccagggaauuagua

SEQ ID NO: 107061 - RNA, 23 nt, Artificial Sequence
  Synthetic
  misc_feature (2)..(2): n is a, c, g, or u
anccagcauccagggaauuagua

SEQ ID NO: 107062 - RNA, 24 nt, Artificial Sequence
  Synthetic
  misc_feature (3)..(3): n is a, c, g, or u
ganccagcauccagggaauuagua

SEQ ID NO: 107063 - RNA, 18 nt, Artificial Sequence
  Synthetic
uauauggaugauguggua

SEQ ID NO: 107064 - RNA, 19 nt, Artificial Sequence
  Synthetic
uuauauggaugauguggua

SEQ ID NO: 107065 - RNA, 20 nt, Artificial Sequence
  Synthetic
guuauauggaugauguggua

SEQ ID NO: 107066 - RNA, 21 nt, Artificial Sequence
  Synthetic
aguuauauggaugauguggua

SEQ ID NO: 107067 - RNA, 22 nt, Artificial Sequence
  Synthetic
caguuauauggaugauguggua

SEQ ID NO: 107068 - RNA, 23 nt, Artificial Sequence
  Synthetic
ucaguuauauggaugauguggua

SEQ ID NO: 107069 - RNA, 24 nt, Artificial Sequence
  Synthetic
uucaguuauauggaugauguggua

SEQ ID NO: 107070 - RNA, 18 nt, Artificial Sequence
  Synthetic
  misc_feature (8)..(8): n is a, c, g, or u
ugccuuunuaugcaugua

SEQ ID NO: 107071 - RNA, 19 nt, Artificial Sequence
  Synthetic
  misc_feature (9)..(9): n is a, c, g, or u
augccuuunuaugcaugua

SEQ ID NO: 107072 - RNA, 20 nt, Artificial Sequence
  Synthetic
  misc_feature (1)..(1): n is a, c, g, or u
  misc_feature (10)..(10): n is a, c, g, or u
naugccuuunuaugcaugua

SEQ ID NO: 107073 - RNA, 21 nt, Artificial Sequence
  Synthetic
  misc_feature (2)..(2): n is a, c, g, or u
  misc_feature (11)..(11): n is a, c, g, or u
unaugccuuunuaugcaugua

SEQ ID NO: 107074 - RNA, 22 nt, Artificial Sequence
  Synthetic
  misc_feature (3)..(3): n is a, c, g, or u
  misc_feature (12)..(12): n is a, c, g, or u
uunaugccuuunuaugcaugua

SEQ ID NO: 107075 - RNA, 23 nt, Artificial Sequence
  Synthetic
  misc_feature (1)..(1): n is a, c, g, or u
  misc_feature (4)..(4): n is a, c, g, or u
  misc_feature (13)..(13): n is a, c, g, or u
nuunaugccuuunuaugcaugua

SEQ ID NO: 107076 - RNA, 24 nt, Artificial Sequence
  Synthetic
  misc_feature (2)..(2): n is a, c, g, or u
  misc_feature (5)..(5): n is a, c, g, or u
  misc_feature (14)..(14): n is a, c, g, or u
cnuunaugccuuunuaugcaugua

SEQ ID NO: 107077 - RNA, 18 nt, Artificial Sequence
  Synthetic
  misc_feature (3)..(3): n is a, c, g, or u
aanuucaugggauaugua

SEQ ID NO: 107078 - RNA, 19 nt, Artificial Sequence
  Synthetic
  misc_feature (4)..(4): n is a, c, g, or u
uaanuucaugggauaugua

SEQ ID NO: 107079 - RNA, 20 nt, Artificial Sequence
  Synthetic
  misc_feature (5)..(5): n is a, c, g, or u
uuaanuucaugggauaugua

SEQ ID NO: 107080 - RNA, 21 nt, Artificial Sequence
  Synthetic
  misc_feature (6)..(6): n is a, c, g, or u
cuuaanuucaugggauaugua

SEQ ID NO: 107081 - RNA, 22 nt, Artificial Sequence
  Synthetic
  misc_feature (7)..(7): n is a, c, g, or u
ccuuaanuucaugggauaugua

SEQ ID NO: 107082 - RNA, 23 nt, Artificial Sequence
  Synthetic
  misc_feature (8)..(8): n is a, c, g, or u
cccuuaanuucaugggauaugua

SEQ ID NO: 107083 - RNA, 24 nt, Artificial Sequence
  Synthetic
  misc_feature (9)..(9): n is a, c, g, or u
ucccuuaanuucaugggauaugua

SEQ ID NO: 107084 - RNA, 18 nt, Artificial Sequence
  Synthetic
uucccucuuguugcugua

SEQ ID NO: 107085 - RNA, 19 nt, Artificial Sequence
  Synthetic
uuucccucuuguugcugua

SEQ ID NO: 107086 - RNA, 20 nt, Artificial Sequence
  Synthetic
guuucccucuuguugcugua

SEQ ID NO: 107087 - RNA, 21 nt, Artificial Sequence
  Synthetic
uguuucccucuuguugcugua

SEQ ID NO: 107088 - RNA, 22 nt, Artificial Sequence
  Synthetic
auguuucccucuuguugcugua

SEQ ID NO: 107089 - RNA, 23 nt, Artificial Sequence
  Synthetic
uauguuucccucuuguugcugua

SEQ ID NO: 107090 - RNA, 24 nt, Artificial Sequence
  Synthetic
cuauguuucccucuuguugcugua

SEQ ID NO: 107091 - RNA, 18 nt, Artificial Sequence
  Synthetic
  misc_feature (10)..(10): n is a, c, g, or u
caccgccucngcucugua

SEQ ID NO: 107092 - RNA, 19 nt, Artificial Sequence
  Synthetic
  misc_feature (11)..(11): n is a, c, g, or u
acaccgccucngcucugua

SEQ ID NO: 107093 - RNA, 20 nt, Artificial Sequence
  Synthetic
  misc_feature (12)..(12): n is a, c, g, or u
gacaccgccucngcucugua

SEQ ID NO: 107094 - RNA, 21 nt, Artificial Sequence
  Synthetic
  misc_feature (13)..(13): n is a, c, g, or u
cgacaccgccucngcucugua

SEQ ID NO: 107095 - RNA, 22 nt, Artificial Sequence
  Synthetic
  misc_feature (14)..(14): n is a, c, g, or u
ucgacaccgccucngcucugua

SEQ ID NO: 107096 - RNA, 23 nt, Artificial Sequence
  Synthetic
  misc_feature (15)..(15): n is a, c, g, or u
cucgacaccgccucngcucugua

SEQ ID NO: 107097 - RNA, 24 nt, Artificial Sequence
  Synthetic
  misc_feature (16)..(16): n is a, c, g, or u
ccucgacaccgccucngcucugua

SEQ ID NO: 107098 - RNA, 18 nt, Artificial Sequence
  Synthetic
  misc_feature (3)..(3): n is a, c, g, or u
  misc_feature (6)..(6): n is a, c, g, or u
ccncangaacauauugua

SEQ ID NO: 107099 - RNA, 19 nt, Artificial Sequence
  Synthetic
  misc_feature (1)..(1): n is a, c, g, or u
  misc_feature (4)..(4): n is a, c, g, or u
  misc_feature (7)..(7): n is a, c, g, or u
nccncangaacauauugua

SEQ ID NO: 107100 - RNA, 20 nt, Artificial Sequence
  Synthetic
  misc_feature (2)..(2): n is a, c, g, or u
  misc_feature (5)..(5): n is a, c, g, or u
  misc_feature (8)..(8): n is a, c, g, or u
unccncangaacauauugua

SEQ ID NO: 107101 - RNA, 21 nt, Artificial Sequence
  Synthetic
  misc_feature (3)..(3): n is a, c, g, or u
  misc_feature (6)..(6): n is a, c, g, or u
  misc_feature (9)..(9): n is a, c, g, or u
uunccncangaacauauugua

SEQ ID NO: 107102 - RNA, 22 nt, Artificial Sequence
  Synthetic
  misc_feature (1)..(1): n is a, c, g, or u
  misc_feature (4)..(4): n is a, c, g, or u
  misc_feature (7)..(7): n is a, c, g, or u
  misc_feature (10)..(10): n is a, c, g, or u
nuunccncangaacauauugua

SEQ ID NO: 107103 - RNA, 23 nt, Artificial Sequence
  Synthetic
  misc_feature (2)..(2): n is a, c, g, or u
  misc_feature (5)..(5): n is a, c, g, or u
  misc_feature (8)..(8): n is a, c, g, or u
  misc_feature (11)..(11): n is a, c, g, or u
cnuunccncangaacauauugua

SEQ ID NO: 107104 - RNA, 24 nt, Artificial Sequence
  Synthetic
  misc_feature (3)..(3): n is a, c, g, or u
  misc_feature (6)..(6): n is a, c, g, or u
  misc_feature (9)..(9): n is a, c, g, or u
  misc_feature (12)..(12): n is a, c, g, or u
acnuunccncangaacauauugua

SEQ ID NO: 107105 - RNA, 18 nt, Artificial Sequence
  Synthetic
  misc_feature (8)..(8): n is a, c, g, or u
  misc_feature (10)..(10): n is a, c, g, or u
agguuaangnucuuugua

SEQ ID NO: 107106 - RNA, 19 nt, Artificial Sequence
  Synthetic
  misc_feature (9)..(9): n is a, c, g, or u
  misc_feature (11)..(11): n is a, c, g, or u
uagguuaangnucuuugua

SEQ ID NO: 107107 - RNA, 20 nt, Artificial Sequence
  Synthetic
  misc_feature (1)..(1): n is a, c, g, or u
  misc_feature (10)..(10): n is a, c, g, or u
  misc_feature (12)..(12): n is a, c, g, or u
nuagguuaangnucuuugua

SEQ ID NO: 107108 - RNA, 21 nt, Artificial Sequence
  Synthetic
  misc_feature (2)..(2): n is a, c, g, or u
  misc_feature (11)..(11): n is a, c, g, or u
  misc_feature (13)..(13): n is a, c, g, or u
anuagguuaangnucuuugua

SEQ ID NO: 107109 - RNA, 22 nt, Artificial Sequence
  Synthetic
  misc_feature (3)..(3): n is a, c, g, or u
  misc_feature (12)..(12): n is a, c, g, or u
  misc_feature (14)..(14): n is a, c, g, or u
ganuagguuaangnucuuugua

SEQ ID NO: 107110 - RNA, 23 nt, Artificial Sequence
  Synthetic
  misc_feature (4)..(4): n is a, c, g, or u
  misc_feature (13)..(13): n is a, c, g, or u
  misc_feature (15)..(15): n is a, c, g, or u
aganuagguuaangnucuuugua

SEQ ID NO: 107111 - RNA, 24 nt, Artificial Sequence
  Synthetic
  misc_feature (5)..(5): n is a, c, g, or u
  misc_feature (14)..(14): n is a, c, g, or u
  misc_feature (16)..(16): n is a, c, g, or u
gaganuagguuaangnucuuugua

SEQ ID NO: 107112 - RNA, 18 nt, Artificial Sequence
  Synthetic
  misc_feature (16)..(16): n is a, c, g, or u
cauggacauugacccnua

SEQ ID NO: 107113 - RNA, 19 nt, Artificial Sequence
  Synthetic
  misc_feature (17)..(17): n is a, c, g, or u
gcauggacauugacccnua

SEQ ID NO: 107114 - RNA, 20 nt, Artificial Sequence
  Synthetic
  misc_feature (18)..(18): n is a, c, g, or u
ggcauggacauugacccnua

SEQ ID NO: 107115 - RNA, 21 nt, Artificial Sequence
  Synthetic
  misc_feature (19)..(19): n is a, c, g, or u
gggcauggacauugacccnua

SEQ ID NO: 107116 - RNA, 22 nt, Artificial Sequence
  Synthetic
  misc_feature (1)..(1): n is a, c, g, or u
  misc_feature (20)..(20): n is a, c, g, or u
ngggcauggacauugacccnua

SEQ ID NO: 107117 - RNA, 23 nt, Artificial Sequence
  Synthetic
  misc_feature (2)..(2): n is a, c, g, or u
  misc_feature (21)..(21): n is a, c, g, or u
ungggcauggacauugacccnua

SEQ ID NO: 107118 - RNA, 24 nt, Artificial Sequence
  Synthetic
  misc_feature (3)..(3): n is a, c, g, or u
  misc_feature (22)..(22): n is a, c, g, or u
uungggcauggacauugacccnua

SEQ ID NO: 107119 - RNA, 18 nt, Artificial Sequence
  Synthetic
  misc_feature (6)..(6): n is a, c, g, or u
  misc_feature (12)..(12): n is a, c, g, or u
  misc_feature (16)..(16): n is a, c, g, or u
uuucgnaaacunccunua

SEQ ID NO: 107120 - RNA, 19 nt, Artificial Sequence
  Synthetic
  misc_feature (7)..(7): n is a, c, g, or u
  misc_feature (13)..(13): n is a, c, g, or u
  misc_feature (17)..(17): n is a, c, g, or u
uuuucgnaaacunccunua

SEQ ID NO: 107121 - RNA, 20 nt, Artificial Sequence
  Synthetic
  misc_feature (8)..(8): n is a, c, g, or u
  misc_feature (14)..(14): n is a, c, g, or u
  misc_feature (18)..(18): n is a, c, g, or u
guuuucgnaaacunccunua

SEQ ID NO: 107122 - RNA, 21 nt, Artificial Sequence
  Synthetic
  misc_feature (9)..(9): n is a, c, g, or u
  misc_feature (15)..(15): n is a, c, g, or u
  misc_feature (19)..(19): n is a, c, g, or u
uguuuucgnaaacunccunua

SEQ ID NO: 107123 - RNA, 22 nt, Artificial Sequence
  Synthetic
  misc_feature (10)..(10): n is a, c, g, or u
  misc_feature (16)..(16): n is a, c, g, or u
  misc_feature (20)..(20): n is a, c, g, or u
auguuuucgnaaacunccunua

SEQ ID NO: 107124 - RNA, 23 nt, Artificial Sequence
  Synthetic
  misc_feature (11)..(11): n is a, c, g, or u
  misc_feature (17)..(17): n is a, c, g, or u
  misc_feature (21)..(21): n is a, c, g, or u
aauguuuucgnaaacunccunua

SEQ ID NO: 107125 - RNA, 24 nt, Artificial Sequence
  Synthetic
  misc_feature (12)..(12): n is a, c, g, or u
  misc_feature (18)..(18): n is a, c, g, or u
  misc_feature (22)..(22): n is a, c, g, or u
caauguuuucgnaaacunccunua

SEQ ID NO: 107126 - RNA, 18 nt, Artificial Sequence
  Synthetic
  misc_feature (12)..(12): n is a, c, g, or u
  misc_feature (16)..(16): n is a, c, g, or u
uggaaggcuggnauunua

SEQ ID NO: 107127 - RNA, 19 nt, Artificial Sequence
  Synthetic
  misc_feature (13)..(13): n is a, c, g, or u
  misc_feature (17)..(17): n is a, c, g, or u
guggaaggcuggnauunua

SEQ ID NO: 107128 - RNA, 20 nt, Artificial Sequence
  Synthetic
  misc_feature (14)..(14): n is a, c, g, or u
  misc_feature (18)..(18): n is a, c, g, or u
uguggaaggcuggnauunua

SEQ ID NO: 107129 - RNA, 21 nt, Artificial Sequence
  Synthetic
  misc_feature (15)..(15): n is a, c, g, or u
  misc_feature (19)..(19): n is a, c, g, or u
cuguggaaggcuggnauunua

SEQ ID NO: 107130 - RNA, 22 nt, Artificial Sequence
  Synthetic
  misc_feature (16)..(16): n is a, c, g, or u
  misc_feature (20)..(20): n is a, c, g, or u
ucuguggaaggcuggnauunua

SEQ ID NO: 107131 - RNA, 23 nt, Artificial Sequence
  Synthetic
  misc_feature (17)..(17): n is a, c, g, or u
  misc_feature (21)..(21): n is a, c, g, or u
cucuguggaaggcuggnauunua

SEQ ID NO: 107132 - RNA, 24 nt, Artificial Sequence
  Synthetic
  misc_feature (18)..(18): n is a, c, g, or u
  misc_feature (22)..(22): n is a, c, g, or u
acucuguggaaggcuggnauunua

SEQ ID NO: 107133 - RNA, 18 nt, Artificial Sequence
  Synthetic
cacuuucucgccaacuua

SEQ ID NO: 107134 - RNA, 19 nt, Artificial Sequence
  Synthetic
ucacuuucucgccaacuua

SEQ ID NO: 107135 - RNA, 20 nt, Artificial Sequence
  Synthetic
uucacuuucucgccaacuua

SEQ ID NO: 107136 - RNA, 21 nt, Artificial Sequence
  Synthetic
uuucacuuucucgccaacuua

SEQ ID NO: 107137 - RNA, 22 nt, Artificial Sequence
  Synthetic
cuuucacuuucucgccaacuua

SEQ ID NO: 107138 - RNA, 23 nt, Artificial Sequence
  Synthetic
gcuuucacuuucucgccaacuua

SEQ ID NO: 107139 - RNA, 24 nt, Artificial Sequence
  Synthetic
ggcuuucacuuucucgccaacuua

SEQ ID NO: 107140 - RNA, 18 nt, Artificial Sequence
  Synthetic
gucuugcccaaggucuua

SEQ ID NO: 107141 - RNA, 19 nt, Artificial Sequence
  Synthetic
ggucuugcccaaggucuua

SEQ ID NO: 107142 - RNA, 20 nt, Artificial Sequence
  Synthetic
aggucuugcccaaggucuua

SEQ ID NO: 107143 - RNA, 21 nt, Artificial Sequence
  Synthetic
caggucuugcccaaggucuua

SEQ ID NO: 107144 - RNA, 22 nt, Artificial Sequence
  Synthetic
ccaggucuugcccaaggucuua

SEQ ID NO: 107145 - RNA, 23 nt, Artificial Sequence
  Synthetic
  misc_feature (1)..(1): n is a, c, g, or u
nccaggucuugcccaaggucuua

SEQ ID NO: 107146 - RNA, 24 nt, Artificial Sequence
  Synthetic
  misc_feature (2)..(2): n is a, c, g, or u
cnccaggucuugcccaaggucuua

SEQ ID NO: 107147 - RNA, 18 nt, Artificial Sequence
  Synthetic
ugggcccucuuacaguua

SEQ ID NO: 107148 - RNA, 19 nt, Artificial Sequence
  Synthetic
gugggcccucuuacaguua

SEQ ID NO: 107149 - RNA, 20 nt, Artificial Sequence
  Synthetic
ugugggcccucuuacaguua

SEQ ID NO: 107150 - RNA, 21 nt, Artificial Sequence
  Synthetic
augugggcccucuuacaguua

SEQ ID NO: 107151 - RNA, 22 nt, Artificial Sequence
  Synthetic
uaugugggcccucuuacaguua

SEQ ID NO: 107152 - RNA, 23 nt, Artificial Sequence
  Synthetic
auaugugggcccucuuacaguua

SEQ ID NO: 107153 - RNA, 24 nt, Artificial Sequence
  Synthetic
aauaugugggcccucuuacaguua

SEQ ID NO: 107154 - RNA, 18 nt, Artificial Sequence
  Synthetic
cuguuuggcuuucaguua

SEQ ID NO: 107155 - RNA, 19 nt, Artificial Sequence
  Synthetic
acuguuuggcuuucaguua

SEQ ID NO: 107156 - RNA, 20 nt, Artificial Sequence
  Synthetic
cacuguuuggcuuucaguua

SEQ ID NO: 107157 - RNA, 21 nt, Artificial Sequence
  Synthetic
ccacuguuuggcuuucaguua

SEQ ID NO: 107158 - RNA, 22 nt, Artificial Sequence
  Synthetic
cccacuguuuggcuuucaguua

SEQ ID NO: 107159 - RNA, 23 nt, Artificial Sequence
  Synthetic
ccccacuguuuggcuuucaguua

SEQ ID NO: 107160 - RNA, 24 nt, Artificial Sequence
  Synthetic
cccccacuguuuggcuuucaguua

SEQ ID NO: 107161 - RNA, 18 nt, Artificial Sequence
  Synthetic
cggaaacuacuguuguua

SEQ ID NO: 107162 - RNA, 19 nt, Artificial Sequence
  Synthetic
ccggaaacuacuguuguua

SEQ ID NO: 107163 - RNA, 20 nt, Artificial Sequence
  Synthetic
uccggaaacuacuguuguua

SEQ ID NO: 107164 - RNA, 21 nt, Artificial Sequence
  Synthetic
uuccggaaacuacuguuguua

SEQ ID NO: 107165 - RNA, 22 nt, Artificial Sequence
  Synthetic
cuuccggaaacuacuguuguua

SEQ ID NO: 107166 - RNA, 23 nt, Artificial Sequence
  Synthetic
acuuccggaaacuacuguuguua

SEQ ID NO: 107167 - RNA, 24 nt, Artificial Sequence
  Synthetic
cacuuccggaaacuacuguuguua

SEQ ID NO: 107168 - RNA, 18 nt, Artificial Sequence
  Synthetic
auaaggugggaaacuuua

SEQ ID NO: 107169 - RNA, 19 nt, Artificial Sequence
  Synthetic
cauaaggugggaaacuuua

SEQ ID NO: 107170 - RNA, 20 nt, Artificial Sequence
  Synthetic
ucauaaggugggaaacuuua

SEQ ID NO: 107171 - RNA, 21 nt, Artificial Sequence
  Synthetic
cucauaaggugggaaacuuua

SEQ ID NO: 107172 - RNA, 22 nt, Artificial Sequence
  Synthetic
acucauaaggugggaaacuuua

SEQ ID NO: 107173 - RNA, 23 nt, Artificial Sequence
  Synthetic
gacucauaaggugggaaacuuua

SEQ ID NO: 107174 - RNA, 24 nt, Artificial Sequence
  Synthetic
ggacucauaaggugggaaacuuua

SEQ ID NO: 107175 - RNA, 18 nt, Artificial Sequence
  Synthetic
acccuaauaaaaccaaac

SEQ ID NO: 107176 - RNA, 19 nt, Artificial Sequence
  Synthetic
aacccuaauaaaaccaaac

SEQ ID NO: 107177 - RNA, 20 nt, Artificial Sequence
  Synthetic
  misc_feature (1)..(1): n is a, c, g, or u
naacccuaauaaaaccaaac

SEQ ID NO: 107178 - RNA, 21 nt, Artificial Sequence
  Synthetic
  misc_feature (2)..(2): n is a, c, g, or u
unaacccuaauaaaaccaaac

SEQ ID NO: 107179 - RNA, 22 nt, Artificial Sequence
  Synthetic
  misc_feature (3)..(3): n is a, c, g, or u
uunaacccuaauaaaaccaaac

SEQ ID NO: 107180 - RNA, 23 nt, Artificial Sequence
  Synthetic
  misc_feature (4)..(4): n is a, c, g, or u
uuunaacccuaauaaaaccaaac

SEQ ID NO: 107181 - RNA, 24 nt, Artificial Sequence
  Synthetic
  misc_feature (5)..(5): n is a, c, g, or u
auuunaacccuaauaaaaccaaac

SEQ ID NO: 107182 - RNA, 18 nt, Artificial Sequence
  Synthetic
gagguuggucuuccaaac

SEQ ID NO: 107183 - RNA, 19 nt, Artificial Sequence
  Synthetic
ggagguuggucuuccaaac

SEQ ID NO: 107184 - RNA, 20 nt, Artificial Sequence
  Synthetic
gggagguuggucuuccaaac

SEQ ID NO: 107185 - RNA, 21 nt, Artificial Sequence
  Synthetic
ugggagguuggucuuccaaac

SEQ ID NO: 107186 - RNA, 22 nt, Artificial Sequence
  Synthetic
augggagguuggucuuccaaac

SEQ ID NO: 107187 - RNA, 23 nt, Artificial Sequence
  Synthetic
caugggagguuggucuuccaaac

SEQ ID NO: 107188 - RNA, 24 nt, Artificial Sequence
  Synthetic
gcaugggagguuggucuuccaaac

SEQ ID NO: 107189 - RNA, 18 nt, Artificial Sequence
  Synthetic
ccagauugggacuucaac

SEQ ID NO: 107190 - RNA, 19 nt, Artificial Sequence
  Synthetic
uccagauugggacuucaac

SEQ ID NO: 107191 - RNA, 20 nt, Artificial Sequence
  Synthetic
auccagauugggacuucaac

SEQ ID NO: 107192 - RNA, 21 nt, Artificial Sequence
  Synthetic
aauccagauugggacuucaac

SEQ ID NO: 107193 - RNA, 22 nt, Artificial Sequence
  Synthetic
caauccagauugggacuucaac

SEQ ID NO: 107194 - RNA, 23 nt, Artificial Sequence
  Synthetic
acaauccagauugggacuucaac

SEQ ID NO: 107195 - RNA, 24 nt, Artificial Sequence
  Synthetic
aacaauccagauugggacuucaac

SEQ ID NO: 107196 - RNA, 18 nt, Artificial Sequence
  Synthetic
uccucuacuuccaggaac

SEQ ID NO: 107197 - RNA, 19 nt, Artificial Sequence
  Synthetic
guccucuacuuccaggaac

SEQ ID NO: 107198 - RNA, 20 nt, Artificial Sequence
  Synthetic
uguccucuacuuccaggaac

SEQ ID NO: 107199 - RNA, 21 nt, Artificial Sequence
  Synthetic
uuguccucuacuuccaggaac

SEQ ID NO: 107200 - RNA, 22 nt, Artificial Sequence
  Synthetic
uuuguccucuacuuccaggaac

SEQ ID NO: 107201 - RNA, 23 nt, Artificial Sequence
  Synthetic
guuuguccucuacuuccaggaac

SEQ ID NO: 107202 - RNA, 24 nt, Artificial Sequence
  Synthetic
cguuuguccucuacuuccaggaac

SEQ ID NO: 107203 - RNA, 18 nt, Artificial Sequence
  Synthetic
uggcuccaguuccggaac

SEQ ID NO: 107204 - RNA, 19 nt, Artificial Sequence
  Synthetic
guggcuccaguuccggaac

SEQ ID NO: 107205 - RNA, 20 nt, Artificial Sequence
  Synthetic
gguggcuccaguuccggaac

SEQ ID NO: 107206 - RNA, 21 nt, Artificial Sequence
  Synthetic
ugguggcuccaguuccggaac

SEQ ID NO: 107207 - RNA, 22 nt, Artificial Sequence
  Synthetic
cugguggcuccaguuccggaac

SEQ ID NO: 107208 - RNA, 23 nt, Artificial Sequence
  Synthetic
gcugguggcuccaguuccggaac

SEQ ID NO: 107209 - RNA, 24 nt, Artificial Sequence
  Synthetic
ugcugguggcuccaguuccggaac

SEQ ID NO: 107210 - RNA, 18 nt, Artificial Sequence
  Synthetic
caccauauucuugggaac

SEQ ID NO: 107211 - RNA, 19 nt, Artificial Sequence
  Synthetic
ucaccauauucuugggaac

SEQ ID NO: 107212 - RNA, 20 nt, Artificial Sequence
  Synthetic
gucaccauauucuugggaac

SEQ ID NO: 107213 - RNA, 21 nt, Artificial Sequence
  Synthetic
ggucaccauauucuugggaac

SEQ ID NO: 107214 - RNA, 22 nt, Artificial Sequence
  Synthetic
gggucaccauauucuugggaac

SEQ ID NO: 107215 - RNA, 23 nt, Artificial Sequence
  Synthetic
ugggucaccauauucuugggaac

SEQ ID NO: 107216 - RNA, 24 nt, Artificial Sequence
  Synthetic
gugggucaccauauucuugggaac

SEQ ID NO: 107217 - RNA, 18 nt, Artificial Sequence
  Synthetic
  misc_feature (13)..(13): n is a, c, g, or u
acgucgcaugganaccac

SEQ ID NO: 107218 - RNA, 19 nt, Artificial Sequence
  Synthetic
  misc_feature (14)..(14): n is a, c, g, or u
cacgucgcaugganaccac

SEQ ID NO: 107219 - RNA, 20 nt, Artificial Sequence
  Synthetic
  misc_feature (15)..(15): n is a, c, g, or u
gcacgucgcaugganaccac

SEQ ID NO: 107220 - RNA, 21 nt, Artificial Sequence
  Synthetic
  misc_feature (16)..(16): n is a, c, g, or u
ugcacgucgcaugganaccac

SEQ ID NO: 107221 - RNA, 22 nt, Artificial Sequence
  Synthetic
  misc_feature (17)..(17): n is a, c, g, or u
cugcacgucgcaugganaccac

SEQ ID NO: 107222 - RNA, 23 nt, Artificial Sequence
  Synthetic
  misc_feature (18)..(18): n is a, c, g, or u
ucugcacgucgcaugganaccac

SEQ ID NO: 107223 - RNA, 24 nt, Artificial Sequence
  Synthetic
  misc_feature (19)..(19): n is a, c, g, or u
cucugcacgucgcaugganaccac

SEQ ID NO: 107224 - RNA, 18 nt, Artificial Sequence
  Synthetic
caccucaccauacagcac

SEQ ID NO: 107225 - RNA, 19 nt, Artificial Sequence
  Synthetic
ucaccucaccauacagcac

SEQ ID NO: 107226 - RNA, 20 nt, Artificial Sequence
  Synthetic
uucaccucaccauacagcac

SEQ ID NO: 107227 - RNA, 21 nt, Artificial Sequence
  Synthetic
guucaccucaccauacagcac

SEQ ID NO: 107228 - RNA, 22 nt, Artificial Sequence
  Synthetic
uguucaccucaccauacagcac

SEQ ID NO: 107229 - RNA, 23 nt, Artificial Sequence
  Synthetic
uuguucaccucaccauacagcac

SEQ ID NO: 107230 - RNA, 24 nt, Artificial Sequence
  Synthetic
auuguucaccucaccauacagcac

SEQ ID NO: 107231 - RNA, 18 nt, Artificial Sequence
  Synthetic
aaacuacuguuguuagac

SEQ ID NO: 107232 - RNA, 19 nt, Artificial Sequence
  Synthetic
gaaacuacuguuguuagac

SEQ ID NO: 107233 - RNA, 20 nt, Artificial Sequence
  Synthetic
ggaaacuacuguuguuagac

SEQ ID NO: 107234 - RNA, 21 nt, Artificial Sequence
  Synthetic
cggaaacuacuguuguuagac

SEQ ID NO: 107235 - RNA, 22 nt, Artificial Sequence
  Synthetic
ccggaaacuacuguuguuagac

SEQ ID NO: 107236 - RNA, 23 nt, Artificial Sequence
  Synthetic
uccggaaacuacuguuguuagac

SEQ ID NO: 107237 - RNA, 24 nt, Artificial Sequence
  Synthetic
uuccggaaacuacuguuguuagac

SEQ ID NO: 107238 - RNA, 18 nt, Artificial Sequence
  Synthetic
gcaaugucaacgaccgac

SEQ ID NO: 107239 - RNA, 19 nt, Artificial Sequence
  Synthetic
agcaaugucaacgaccgac

SEQ ID NO: 107240 - RNA, 20 nt, Artificial Sequence
  Synthetic
cagcaaugucaacgaccgac

SEQ ID NO: 107241 - RNA, 21 nt, Artificial Sequence
  Synthetic
  misc_feature (1)..(1): n is a, c, g, or u
ncagcaaugucaacgaccgac

SEQ ID NO: 107242 - RNA, 22 nt, Artificial Sequence
  Synthetic
  misc_feature (2)..(2): n is a, c, g, or u
cncagcaaugucaacgaccgac

SEQ ID NO: 107243 - RNA, 23 nt, Artificial Sequence
  Synthetic
  misc_feature (3)..(3): n is a, c, g, or u
ucncagcaaugucaacgaccgac

SEQ ID NO: 107244 - RNA, 24 nt, Artificial Sequence
  Synthetic
  misc_feature (4)..(4): n is a, c, g, or u
cucncagcaaugucaacgaccgac

SEQ ID NO: 107245 - RNA, 18 nt, Artificial Sequence
  Synthetic
ucugccguuccggccgac

SEQ ID NO: 107246 - RNA, 19 nt, Artificial Sequence
  Synthetic
  misc_feature (1)..(1): n is a, c, g, or u
nucugccguuccggccgac

SEQ ID NO: 107247 - RNA, 20 nt, Artificial Sequence
  Synthetic
  misc_feature (2)..(2): n is a, c, g, or u
cnucugccguuccggccgac

SEQ ID NO: 107248 - RNA, 21 nt, Artificial Sequence
  Synthetic
  misc_feature (1)..(1): n is a, c, g, or u
  misc_feature (3)..(3): n is a, c, g, or u
ncnucugccguuccggccgac

SEQ ID NO: 107249 - RNA, 22 nt, Artificial Sequence
  Synthetic
  misc_feature (2)..(2): n is a, c, g, or u
  misc_feature (4)..(4): n is a, c, g, or u
uncnucugccguuccggccgac

SEQ ID NO: 107250 - RNA, 23 nt, Artificial Sequence
  Synthetic
  misc_feature (3)..(3): n is a, c, g, or u
  misc_feature (5)..(5): n is a, c, g, or u
cuncnucugccguuccggccgac

SEQ ID NO: 107251 - RNA, 24 nt, Artificial Sequence
  Synthetic
  misc_feature (4)..(4): n is a, c, g, or u
  misc_feature (6)..(6): n is a, c, g, or u
ucuncnucugccguuccggccgac

SEQ ID NO: 107252 - RNA, 18 nt, Artificial Sequence
  Synthetic
gucaaucuucucgaggac

SEQ ID NO: 107253 - RNA, 19 nt, Artificial Sequence
  Synthetic
cgucaaucuucucgaggac

SEQ ID NO: 107254 - RNA, 20 nt, Artificial Sequence
  Synthetic
ucgucaaucuucucgaggac

SEQ ID NO: 107255 - RNA, 21 nt, Artificial Sequence
  Synthetic
aucgucaaucuucucgaggac

SEQ ID NO: 107256 - RNA, 22 nt, Artificial Sequence
  Synthetic
uaucgucaaucuucucgaggac

SEQ ID NO: 107257 - RNA, 23 nt, Artificial Sequence
  Synthetic
auaucgucaaucuucucgaggac

SEQ ID NO: 107258 - RNA, 24 nt, Artificial Sequence
  Synthetic
cauaucgucaaucuucucgaggac

SEQ ID NO: 107259 - RNA, 18 nt, Artificial Sequence
  Synthetic
uguacaaaaccuucggac

SEQ ID NO: 107260 - RNA, 19 nt, Artificial Sequence
  Synthetic
cuguacaaaaccuucggac

SEQ ID NO: 107261 - RNA, 20 nt, Artificial Sequence
  Synthetic
gcuguacaaaaccuucggac

SEQ ID NO: 107262 - RNA, 21 nt, Artificial Sequence
  Synthetic
ugcuguacaaaaccuucggac

SEQ ID NO: 107263 - RNA, 22 nt, Artificial Sequence
  Synthetic
uugcuguacaaaaccuucggac

SEQ ID NO: 107264 - RNA, 23 nt, Artificial Sequence
  Synthetic
guugcuguacaaaaccuucggac

SEQ ID NO: 107265 - RNA, 24 nt, Artificial Sequence
  Synthetic
uguugcuguacaaaaccuucggac

SEQ ID NO: 107266 - RNA, 18 nt, Artificial Sequence
  Synthetic
aacaauccagauugggac

SEQ ID NO: 107267 - RNA, 19 nt, Artificial Sequence
  Synthetic
aaacaauccagauugggac

SEQ ID NO: 107268 - RNA, 20 nt, Artificial Sequence
  Synthetic
caaacaauccagauugggac

SEQ ID NO: 107269 - RNA, 21 nt, Artificial Sequence
  Synthetic
ucaaacaauccagauugggac

SEQ ID NO: 107270 - RNA, 22 nt, Artificial Sequence
  Synthetic
  misc_feature (1)..(1): n is a, c, g, or u
nucaaacaauccagauugggac

SEQ ID NO: 107271 - RNA, 23 nt, Artificial Sequence
  Synthetic
  misc_feature (2)..(2): n is a, c, g, or u
anucaaacaauccagauugggac

SEQ ID NO: 107272 - RNA, 24 nt, Artificial Sequence
  Synthetic
  misc_feature (3)..(3): n is a, c, g, or u
aanucaaacaauccagauugggac

SEQ ID NO: 107273 - RNA, 18 nt, Artificial Sequence
  Synthetic
  misc_feature (8)..(8): n is a, c, g, or u
uggcuuungggcauggac

SEQ ID NO: 107274 - RNA, 19 nt, Artificial Sequence
  Synthetic
  misc_feature (9)..(9): n is a, c, g, or u
guggcuuungggcauggac

SEQ ID NO: 107275 - RNA, 20 nt, Artificial Sequence
  Synthetic
  misc_feature (10)..(10): n is a, c, g, or u
gguggcuuungggcauggac

SEQ ID NO: 107276 - RNA, 21 nt, Artificial Sequence
  Synthetic
  misc_feature (11)..(11): n is a, c, g, or u
ggguggcuuungggcauggac

SEQ ID NO: 107277 - RNA, 22 nt, Artificial Sequence
  Synthetic
  misc_feature (12)..(12): n is a, c, g, or u
uggguggcuuungggcauggac

SEQ ID NO: 107278 - RNA, 23 nt, Artificial Sequence
  Synthetic
  misc_feature (13)..(13): n is a, c, g, or u
uuggguggcuuungggcauggac

SEQ ID NO: 107279 - RNA, 24 nt, Artificial Sequence
  Synthetic
  misc_feature (14)..(14): n is a, c, g, or u
cuuggguggcuuungggcauggac

SEQ ID NO: 107280 - RNA, 18 nt, Artificial Sequence
  Synthetic
  misc_feature (7)..(7): n is a, c, g, or u
  misc_feature (9)..(9): n is a, c, g, or u
  misc_feature (15)..(15): n is a, c, g, or u
gacugununuuuaangac

SEQ ID NO: 107281 - RNA, 19 nt, Artificial Sequence
  Synthetic
  misc_feature (8)..(8): n is a, c, g, or u
  misc_feature (10)..(10): n is a, c, g, or u
  misc_feature (16)..(16): n is a, c, g, or u
agacugununuuuaangac

SEQ ID NO: 107282 - RNA, 20 nt, Artificial Sequence
  Synthetic
  misc_feature (9)..(9): n is a, c, g, or u
  misc_feature (11)..(11): n is a, c, g, or u
  misc_feature (17)..(17): n is a, c, g, or u
aagacugununuuuaangac

SEQ ID NO: 107283 - RNA, 21 nt, Artificial Sequence
  Synthetic
  misc_feature (10)..(10): n is a, c, g, or u
  misc_feature (12)..(12): n is a, c, g, or u
  misc_feature (18)..(18): n is a, c, g, or u
aaagacugununuuuaangac

SEQ ID NO: 107284 - RNA, 22 nt, Artificial Sequence
  Synthetic
  misc_feature (11)..(11): n is a, c, g, or u
  misc_feature (13)..(13): n is a, c, g, or u
  misc_feature (19)..(19): n is a, c, g, or u
caaagacugununuuuaangac

SEQ ID NO: 107285 - RNA, 23 nt, Artificial Sequence
  Synthetic
  misc_feature (12)..(12): n is a, c, g, or u
  misc_feature (14)..(14): n is a, c, g, or u
  misc_feature (20)..(20): n is a, c, g, or u
ucaaagacugununuuuaangac

SEQ ID NO: 107286 - RNA, 24 nt, Artificial Sequence
  Synthetic
  misc_feature (13)..(13): n is a, c, g, or u
  misc_feature (15)..(15): n is a, c, g, or u
  misc_feature (21)..(21): n is a, c, g, or u
uucaaagacugununuuuaangac

SEQ ID NO: 107287 - RNA, 18 nt, Artificial Sequence
  Synthetic
  misc_feature (4)..(4): n is a, c, g, or u
  misc_feature (12)..(12): n is a, c, g, or u
  misc_feature (16)..(16): n is a, c, g, or u
gaanauggagancacnac

SEQ ID NO: 107288 - RNA, 19 nt, Artificial Sequence
  Synthetic
  misc_feature (5)..(5): n is a, c, g, or u
  misc_feature (13)..(13): n is a, c, g, or u
  misc_feature (17)..(17): n is a, c, g, or u
cgaanauggagancacnac

SEQ ID NO: 107289 - RNA, 20 nt, Artificial Sequence
  Synthetic
  misc_feature (6)..(6): n is a, c, g, or u
  misc_feature (14)..(14): n is a, c, g, or u
  misc_feature (18)..(18): n is a, c, g, or u
ccgaanauggagancacnac

SEQ ID NO: 107290 - RNA, 21 nt, Artificial Sequence
  Synthetic
  misc_feature (7)..(7): n is a, c, g, or u
  misc_feature (15)..(15): n is a, c, g, or u
  misc_feature (19)..(19): n is a, c, g, or u
accgaanauggagancacnac

SEQ ID NO: 107291 - RNA, 22 nt, Artificial Sequence
  Synthetic
  misc_feature (8)..(8): n is a, c, g, or u
  misc_feature (16)..(16): n is a, c, g, or u
  misc_feature (20)..(20): n is a, c, g, or u
caccgaanauggagancacnac

SEQ ID NO: 107292 - RNA, 23 nt, Artificial Sequence
  Synthetic
  misc_feature (9)..(9): n is a, c, g, or u
  misc_feature (17)..(17): n is a, c, g, or u
  misc_feature (21)..(21): n is a, c, g, or u
gcaccgaanauggagancacnac

SEQ ID NO: 107293 - RNA, 24 nt, Artificial Sequence
  Synthetic
  misc_feature (10)..(10): n is a, c, g, or u
  misc_feature (18)..(18): n is a, c, g, or u
  misc_feature (22)..(22): n is a, c, g, or u
ugcaccgaanauggagancacnac

SEQ ID NO: 107294 - RNA, 18 nt, Artificial Sequence
  Synthetic
caagaauccucacaauac

SEQ ID NO: 107295 - RNA, 19 nt, Artificial Sequence
  Synthetic
acaagaauccucacaauac

SEQ ID NO: 107296 - RNA, 20 nt, Artificial Sequence
  Synthetic
gacaagaauccucacaauac

SEQ ID NO: 107297 - RNA, 21 nt, Artificial Sequence
  Synthetic
ugacaagaauccucacaauac

SEQ ID NO: 107298 - RNA, 22 nt, Artificial Sequence
  Synthetic
uugacaagaauccucacaauac

SEQ ID NO: 107299 - RNA, 23 nt, Artificial Sequence
  Synthetic
guugacaagaauccucacaauac

SEQ ID NO: 107300 - RNA, 24 nt, Artificial Sequence
  Synthetic
uguugacaagaauccucacaauac

SEQ ID NO: 107301 - RNA, 18 nt, Artificial Sequence
  Synthetic
uccucugccgauccauac

SEQ ID NO: 107302 - RNA, 19 nt, Artificial Sequence
  Synthetic
cuccucugccgauccauac

SEQ ID NO: 107303 - RNA, 20 nt, Artificial Sequence
  Synthetic
gcuccucugccgauccauac

SEQ ID NO: 107304 - RNA, 21 nt, Artificial Sequence
  Synthetic
ggcuccucugccgauccauac

SEQ ID NO: 107305 - RNA, 22 nt, Artificial Sequence
  Synthetic
uggcuccucugccgauccauac

SEQ ID NO: 107306 - RNA, 23 nt, Artificial Sequence
  Synthetic
guggcuccucugccgauccauac

SEQ ID NO: 107307 - RNA, 24 nt, Artificial Sequence
  Synthetic
uguggcuccucugccgauccauac

SEQ ID NO: 107308 - RNA, 18 nt, Artificial Sequence
  Synthetic
accgaccuugaggcauac

SEQ ID NO: 107309 - RNA, 19 nt, Artificial Sequence
  Synthetic
gaccgaccuugaggcauac

SEQ ID NO: 107310 - RNA, 20 nt, Artificial Sequence
  Synthetic
cgaccgaccuugaggcauac

SEQ ID NO: 107311 - RNA, 18 nt, Artificial Sequence
  Synthetic
  misc_feature (2)..(2): n is a, c, g, or u
  misc_feature (5)..(5): n is a, c, g, or u
cncangaacauauuguac

SEQ ID NO: 107312 - RNA, 19 nt, Artificial Sequence
  Synthetic
  misc_feature (3)..(3): n is a, c, g, or u
  misc_feature (6)..(6): n is a, c, g, or u
ccncangaacauauuguac

SEQ ID NO: 107313 - RNA, 20 nt, Artificial Sequence
  Synthetic
  misc_feature (1)..(1): n is a, c, g, or u
  misc_feature (4)..(4): n is a, c, g, or u
  misc_feature (7)..(7): n is a, c, g, or u
nccncangaacauauuguac

SEQ ID NO: 107314 - RNA, 21 nt, Artificial Sequence
  Synthetic
  misc_feature (2)..(2): n is a, c, g, or u
  misc_feature (5)..(5): n is a, c, g, or u
  misc_feature (8)..(8): n is a, c, g, or u
unccncangaacauauuguac

SEQ ID NO: 107315 - RNA, 22 nt, Artificial Sequence
  Synthetic
  misc_feature (3)..(3): n is a, c, g, or u
  misc_feature (6)..(6): n is a, c, g, or u
  misc_feature (9)..(9): n is a, c, g, or u
uunccncangaacauauuguac

SEQ ID NO: 107316 - RNA, 23 nt, Artificial Sequence
  Synthetic
  misc_feature (1)..(1): n is a, c, g, or u
  misc_feature (4)..(4): n is a, c, g, or u
  misc_feature (7)..(7): n is a, c, g, or u
  misc_feature (10)..(10): n is a, c, g, or u
nuunccncangaacauauuguac

SEQ ID NO: 107317 - RNA, 24 nt, Artificial Sequence
  Synthetic
  misc_feature (2)..(2): n is a, c, g, or u
  misc_feature (5)..(5): n is a, c, g, or u
  misc_feature (8)..(8): n is a, c, g, or u
  misc_feature (11)..(11): n is a, c, g, or u
cnuunccncangaacauauuguac

SEQ ID NO: 107318 - RNA, 18 nt, Artificial Sequence
  Synthetic
  misc_feature (7)..(7): n is a, c, g, or u
  misc_feature (9)..(9): n is a, c, g, or u
gguuaangnucuuuguac

SEQ ID NO: 107319 - RNA, 19 nt, Artificial Sequence
  Synthetic
  misc_feature (8)..(8): n is a, c, g, or u
  misc_feature (10)..(10): n is a, c, g, or u
agguuaangnucuuuguac

SEQ ID NO: 107320 - RNA, 20 nt, Artificial Sequence
  Synthetic
  misc_feature (9)..(9): n is a, c, g, or u
  misc_feature (11)..(11): n is a, c, g, or u
uagguuaangnucuuuguac

SEQ ID NO: 107321 - RNA, 21 nt, Artificial Sequence
  Synthetic
  misc_feature (1)..(1): n is a, c, g, or u
  misc_feature (10)..(10): n is a, c, g, or u
  misc_feature (12)..(12): n is a, c, g, or u
nuagguuaangnucuuuguac

SEQ ID NO: 107322 - RNA, 22 nt, Artificial Sequence
  Synthetic
  misc_feature (2)..(2): n is a, c, g, or u
  misc_feature (11)..(11): n is a, c, g, or u
  misc_feature (13)..(13): n is a, c, g, or u
anuagguuaangnucuuuguac

SEQ ID NO: 107323 - RNA, 23 nt, Artificial Sequence
  Synthetic
  misc_feature (3)..(3): n is a, c, g, or u
  misc_feature (12)..(12): n is a, c, g, or u
  misc_feature (14)..(14): n is a, c, g, or u
ganuagguuaangnucuuuguac

SEQ ID NO: 107324 - RNA, 24 nt, Artificial Sequence
  Synthetic
  misc_feature (4)..(4): n is a, c, g, or u
  misc_feature (13)..(13): n is a, c, g, or u
  misc_feature (15)..(15): n is a, c, g, or u
aganuagguuaangnucuuuguac

SEQ ID NO: 107325 - RNA, 18 nt, Artificial Sequence
  Synthetic
uuguugcuguacaaaacc

SEQ ID NO: 107326 - RNA, 19 nt, Artificial Sequence
  Synthetic
cuuguugcuguacaaaacc

SEQ ID NO: 107327 - RNA, 20 nt, Artificial Sequence
  Synthetic
ucuuguugcuguacaaaacc

SEQ ID NO: 107328 - RNA, 21 nt, Artificial Sequence
  Synthetic
cucuuguugcuguacaaaacc

SEQ ID NO: 107329 - RNA, 22 nt, Artificial Sequence
  Synthetic
ccucuuguugcuguacaaaacc

SEQ ID NO: 107330 - RNA, 23 nt, Artificial Sequence
  Synthetic
cccucuuguugcuguacaaaacc

SEQ ID NO: 107331 - RNA, 24 nt, Artificial Sequence
  Synthetic
ucccucuuguugcuguacaaaacc

SEQ ID NO: 107332 - RNA, 18 nt, Artificial Sequence
  Synthetic
  misc_feature (12)..(12): n is a, c, g, or u
cgucgcaugganaccacc

SEQ ID NO: 107333 - RNA, 19 nt, Artificial Sequence
  Synthetic
  misc_feature (13)..(13): n is a, c, g, or u
acgucgcaugganaccacc

SEQ ID NO: 107334 - RNA, 20 nt, Artificial Sequence
  Synthetic
  misc_feature (14)..(14): n is a, c, g, or u
cacgucgcaugganaccacc

SEQ ID NO: 107335 - RNA, 21 nt, Artificial Sequence
  Synthetic
  misc_feature (15)..(15): n is a, c, g, or u
gcacgucgcaugganaccacc

SEQ ID NO: 107336 - RNA, 22 nt, Artificial Sequence
  Synthetic
  misc_feature (16)..(16): n is a, c, g, or u
ugcacgucgcaugganaccacc

SEQ ID NO: 107337 - RNA, 23 nt, Artificial Sequence
  Synthetic
  misc_feature (17)..(17): n is a, c, g, or u
cugcacgucgcaugganaccacc

SEQ ID NO: 107338 - RNA, 24 nt, Artificial Sequence
  Synthetic
  misc_feature (18)..(18): n is a, c, g, or u
ucugcacgucgcaugganaccacc

SEQ ID NO: 107339 - RNA, 18 nt, Artificial Sequence
  Synthetic
uacucccaucucuccacc

SEQ ID NO: 107340 - RNA, 19 nt, Artificial Sequence
  Synthetic
cuacucccaucucuccacc

SEQ ID NO: 107341 - RNA, 20 nt, Artificial Sequence
  Synthetic
ccuacucccaucucuccacc

SEQ ID NO: 107342 - RNA, 21 nt, Artificial Sequence
  Synthetic
gccuacucccaucucuccacc

SEQ ID NO: 107343 - RNA, 22 nt, Artificial Sequence
  Synthetic
agccuacucccaucucuccacc

SEQ ID NO: 107344 - RNA, 23 nt, Artificial Sequence
  Synthetic
cagccuacucccaucucuccacc

SEQ ID NO: 107345 - RNA, 24 nt, Artificial Sequence
  Synthetic
acagccuacucccaucucuccacc

SEQ ID NO: 107346 - RNA, 18 nt, Artificial Sequence
  Synthetic
  misc_feature (5)..(5): n is a, c, g, or u
  misc_feature (7)..(7): n is a, c, g, or u
uccuncngcuuacagacc

SEQ ID NO: 107347 - RNA, 19 nt, Artificial Sequence
  Synthetic
  misc_feature (6)..(6): n is a, c, g, or u
  misc_feature (8)..(8): n is a, c, g, or u
cuccuncngcuuacagacc

SEQ ID NO: 107348 - RNA, 20 nt, Artificial Sequence
  Synthetic
  misc_feature (7)..(7): n is a, c, g, or u
  misc_feature (9)..(9): n is a, c, g, or u
acuccuncngcuuacagacc

SEQ ID NO: 107349 - RNA, 21 nt, Artificial Sequence
  Synthetic
  misc_feature (8)..(8): n is a, c, g, or u
  misc_feature (10)..(10): n is a, c, g, or u
cacuccuncngcuuacagacc

SEQ ID NO: 107350 - RNA, 22 nt, Artificial Sequence
  Synthetic
  misc_feature (9)..(9): n is a, c, g, or u
  misc_feature (11)..(11): n is a, c, g, or u
gcacuccuncngcuuacagacc

SEQ ID NO: 107351 - RNA, 23 nt, Artificial Sequence
  Synthetic
  misc_feature (10)..(10): n is a, c, g, or u
  misc_feature (12)..(12): n is a, c, g, or u
cgcacuccuncngcuuacagacc

SEQ ID NO: 107352 - RNA, 24 nt, Artificial Sequence
  Synthetic
  misc_feature (11)..(11): n is a, c, g, or u
  misc_feature (13)..(13): n is a, c, g, or u
ucgcacuccuncngcuuacagacc

SEQ ID NO: 107353 - RNA, 18 nt, Artificial Sequence
  Synthetic
caaugucaacgaccgacc

SEQ ID NO: 107354 - RNA, 19 nt, Artificial Sequence
  Synthetic
gcaaugucaacgaccgacc

SEQ ID NO: 107355 - RNA, 20 nt, Artificial Sequence
  Synthetic
agcaaugucaacgaccgacc

SEQ ID NO: 107356 - RNA, 21 nt, Artificial Sequence
  Synthetic
cagcaaugucaacgaccgacc

SEQ ID NO: 107357 - RNA, 22 nt, Artificial Sequence
  Synthetic
  misc_feature (1)..(1): n is a, c, g, or u
ncagcaaugucaacgaccgacc

SEQ ID NO: 107358 - RNA, 23 nt, Artificial Sequence
  Synthetic
  misc_feature (2)..(2): n is a, c, g, or u
cncagcaaugucaacgaccgacc

SEQ ID NO: 107359 - RNA, 24 nt, Artificial Sequence
  Synthetic
  misc_feature (3)..(3): n is a, c, g, or u
ucncagcaaugucaacgaccgacc

SEQ ID NO: 107360 - RNA, 18 nt, Artificial Sequence
  Synthetic
cugccguuccggccgacc

SEQ ID NO: 107361 - RNA, 19 nt, Artificial Sequence
  Synthetic
ucugccguuccggccgacc

SEQ ID NO: 107362 - RNA, 20 nt, Artificial Sequence
  Synthetic
  misc_feature (1)..(1): n is a, c, g, or u
nucugccguuccggccgacc

SEQ ID NO: 107363 - RNA, 21 nt, Artificial Sequence
  Synthetic
  misc_feature (2)..(2): n is a, c, g, or u
cnucugccguuccggccgacc

SEQ ID NO: 107364 - RNA, 22 nt, Artificial Sequence
  Synthetic
  misc_feature (1)..(1): n is a, c, g, or u
  misc_feature (3)..(3): n is a, c, g, or u
ncnucugccguuccggccgacc

SEQ ID NO: 107365 - RNA, 23 nt, Artificial Sequence
  Synthetic
  misc_feature (2)..(2): n is a, c, g, or u
  misc_feature (4)..(4): n is a, c, g, or u
uncnucugccguuccggccgacc

SEQ ID NO: 107366 - RNA, 24 nt, Artificial Sequence
  Synthetic
  misc_feature (3)..(3): n is a, c, g, or u
  misc_feature (5)..(5): n is a, c, g, or u
cuncnucugccguuccggccgacc

SEQ ID NO: 107367 - RNA, 18 nt, Artificial Sequence
  Synthetic
aagaauccucacaauacc

SEQ ID NO: 107368 - RNA, 19 nt, Artificial Sequence
  Synthetic
caagaauccucacaauacc

SEQ ID NO: 107369 - RNA, 20 nt, Artificial Sequence
  Synthetic
acaagaauccucacaauacc

SEQ ID NO: 107370 - RNA, 21 nt, Artificial Sequence
  Synthetic
gacaagaauccucacaauacc

SEQ ID NO: 107371 - RNA, 22 nt, Artificial Sequence
  Synthetic
ugacaagaauccucacaauacc

SEQ ID NO: 107372 - RNA, 23 nt, Artificial Sequence
  Synthetic
uugacaagaauccucacaauacc

SEQ ID NO: 107373 - RNA, 24 nt, Artificial Sequence
  Synthetic
guugacaagaauccucacaauacc

SEQ ID NO: 107374 - RNA, 18 nt, Artificial Sequence
  Synthetic
gauugggacuucaacccc

SEQ ID NO: 107375 - RNA, 19 nt, Artificial Sequence
  Synthetic
agauugggacuucaacccc

SEQ ID NO: 107376 - RNA, 20 nt, Artificial Sequence
  Synthetic
cagauugggacuucaacccc

SEQ ID NO: 107377 - RNA, 21 nt, Artificial Sequence
  Synthetic
ccagauugggacuucaacccc

SEQ ID NO: 107378 - RNA, 22 nt, Artificial Sequence
  Synthetic
uccagauugggacuucaacccc

SEQ ID NO: 107379 - RNA, 23 nt, Artificial Sequence
  Synthetic
auccagauugggacuucaacccc

SEQ ID NO: 107380 - RNA, 24 nt, Artificial Sequence
  Synthetic
aauccagauugggacuucaacccc

SEQ ID NO: 107381 - RNA, 18 nt, Artificial Sequence
  Synthetic
uuugcugacgcaaccccc

SEQ ID NO: 107382 - RNA, 19 nt, Artificial Sequence
  Synthetic
guuugcugacgcaaccccc

SEQ ID NO: 107383 - RNA, 20 nt, Artificial Sequence
  Synthetic
uguuugcugacgcaaccccc

SEQ ID NO: 107384 - RNA, 21 nt, Artificial Sequence
  Synthetic
guguuugcugacgcaaccccc

SEQ ID NO: 107385 - RNA, 22 nt, Artificial Sequence
  Synthetic
aguguuugcugacgcaaccccc

SEQ ID NO: 107386 - RNA, 23 nt, Artificial Sequence
  Synthetic
aaguguuugcugacgcaaccccc

SEQ ID NO: 107387 - RNA, 24 nt, Artificial Sequence
  Synthetic
caaguguuugcugacgcaaccccc

SEQ ID NO: 107388 - RNA, 18 nt, Artificial Sequence
  Synthetic
acgacgaggcaggucccc

SEQ ID NO: 107389 - RNA, 19 nt, Artificial Sequence
  Synthetic
gacgacgaggcaggucccc

SEQ ID NO: 107390 - RNA, 20 nt, Artificial Sequence
  Synthetic
agacgacgaggcaggucccc

SEQ ID NO: 107391 - RNA, 18 nt, Artificial Sequence
  Synthetic
ucuuuugggguggagccc

SEQ ID NO: 107392 - RNA, 19 nt, Artificial Sequence
  Synthetic
gucuuuugggguggagccc

SEQ ID NO: 107393 - RNA, 20 nt, Artificial Sequence
  Synthetic
  misc_feature (1)..(1): n is a, c, g, or u
ngucuuuugggguggagccc

SEQ ID NO: 107394 - RNA, 21 nt, Artificial Sequence
  Synthetic
  misc_feature (2)..(2): n is a, c, g, or u
cngucuuuugggguggagccc

SEQ ID NO: 107395 - RNA, 22 nt, Artificial Sequence
  Synthetic
  misc_feature (3)..(3): n is a, c, g, or u
gcngucuuuugggguggagccc

SEQ ID NO: 107396 - RNA, 23 nt, Artificial Sequence
  Synthetic
  misc_feature (4)..(4): n is a, c, g, or u
ggcngucuuuugggguggagccc

SEQ ID NO: 107397 - RNA, 24 nt, Artificial Sequence
  Synthetic
  misc_feature (5)..(5): n is a, c, g, or u
cggcngucuuuugggguggagccc

SEQ ID NO: 107398 - RNA, 18 nt, Artificial Sequence
  Synthetic
  misc_feature (2)..(2): n is a, c, g, or u
anaccaccgugaacgccc

SEQ ID NO: 107399 - RNA, 19 nt, Artificial Sequence
  Synthetic
  misc_feature (3)..(3): n is a, c, g, or u
ganaccaccgugaacgccc

SEQ ID NO: 107400 - RNA, 20 nt, Artificial Sequence
  Synthetic
  misc_feature (4)..(4): n is a, c, g, or u
gganaccaccgugaacgccc

SEQ ID NO: 107401 - RNA, 21 nt, Artificial Sequence
  Synthetic
  misc_feature (5)..(5): n is a, c, g, or u
ugganaccaccgugaacgccc

SEQ ID NO: 107402 - RNA, 22 nt, Artificial Sequence
  Synthetic
  misc_feature (6)..(6): n is a, c, g, or u
augganaccaccgugaacgccc

SEQ ID NO: 107403 - RNA, 23 nt, Artificial Sequence
  Synthetic
  misc_feature (7)..(7): n is a, c, g, or u
caugganaccaccgugaacgccc

SEQ ID NO: 107404 - RNA, 24 nt, Artificial Sequence
  Synthetic
  misc_feature (8)..(8): n is a, c, g, or u
gcaugganaccaccgugaacgccc

SEQ ID NO: 107405 - RNA, 18 nt, Artificial Sequence
  Synthetic
cuuaccaaauauuugccc

SEQ ID NO: 107406 - RNA, 19 nt, Artificial Sequence
  Synthetic
ccuuaccaaauauuugccc

SEQ ID NO: 107407 - RNA, 20 nt, Artificial Sequence
  Synthetic
accuuaccaaauauuugccc

SEQ ID NO: 107408 - RNA, 21 nt, Artificial Sequence
  Synthetic
aaccuuaccaaauauuugccc

SEQ ID NO: 107409 - RNA, 22 nt, Artificial Sequence
  Synthetic
uaaccuuaccaaauauuugccc

SEQ ID NO: 107410 - RNA, 23 nt, Artificial Sequence
  Synthetic
cuaaccuuaccaaauauuugccc

SEQ ID NO: 107411 - RNA, 24 nt, Artificial Sequence
  Synthetic
ccuaaccuuaccaaauauuugccc

SEQ ID NO: 107412 - RNA, 18 nt, Artificial Sequence
  Synthetic
ccgucggcgcugaauccc

SEQ ID NO: 107413 - RNA, 19 nt, Artificial Sequence
  Synthetic
cccgucggcgcugaauccc

SEQ ID NO: 107414 - RNA, 20 nt, Artificial Sequence
  Synthetic
ucccgucggcgcugaauccc

SEQ ID NO: 107415 - RNA, 18 nt, Artificial Sequence
  Synthetic
ucucaauguuaguauccc

SEQ ID NO: 107416 - RNA, 19 nt, Artificial Sequence
  Synthetic
aucucaauguuaguauccc

SEQ ID NO: 107417 - RNA, 20 nt, Artificial Sequence
  Synthetic
aaucucaauguuaguauccc

SEQ ID NO: 107418 - RNA, 21 nt, Artificial Sequence
  Synthetic
gaaucucaauguuaguauccc

SEQ ID NO: 107419 - RNA, 22 nt, Artificial Sequence
  Synthetic
ggaaucucaauguuaguauccc

SEQ ID NO: 107420 - RNA, 23 nt, Artificial Sequence
  Synthetic
gggaaucucaauguuaguauccc

SEQ ID NO: 107421 - RNA, 24 nt, Artificial Sequence
  Synthetic
cgggaaucucaauguuaguauccc

SEQ ID NO: 107422 - RNA, 18 nt, Artificial Sequence
  Synthetic
guccuuugucuacguccc

SEQ ID NO: 107423 - RNA, 19 nt, Artificial Sequence
  Synthetic
cguccuuugucuacguccc

SEQ ID NO: 107424 - RNA, 20 nt, Artificial Sequence
  Synthetic
acguccuuugucuacguccc

SEQ ID NO: 107425 - RNA, 18 nt, Artificial Sequence
  Synthetic
gacgacgaggcagguccc

SEQ ID NO: 107426 - RNA, 19 nt, Artificial Sequence
  Synthetic
agacgacgaggcagguccc

SEQ ID NO: 107427 - RNA, 20 nt, Artificial Sequence
  Synthetic
uagacgacgaggcagguccc

SEQ ID NO: 107428 - RNA, 18 nt, Artificial Sequence
  Synthetic
uguccuacuguucaagcc

SEQ ID NO: 107429 - RNA, 19 nt, Artificial Sequence
  Synthetic
auguccuacuguucaagcc

SEQ ID NO: 107430 - RNA, 20 nt, Artificial Sequence
  Synthetic
cauguccuacuguucaagcc

SEQ ID NO: 107431 - RNA, 21 nt, Artificial Sequence
  Synthetic
ucauguccuacuguucaagcc

SEQ ID NO: 107432 - RNA, 22 nt, Artificial Sequence
  Synthetic
uucauguccuacuguucaagcc

SEQ ID NO: 107433 - RNA, 23 nt, Artificial Sequence
  Synthetic
guucauguccuacuguucaagcc

SEQ ID NO: 107434 - RNA, 24 nt, Artificial Sequence
  Synthetic
uguucauguccuacuguucaagcc

SEQ ID NO: 107435 - RNA, 18 nt, Artificial Sequence
  Synthetic
gucuuuugggguggagcc

SEQ ID NO: 107436 - RNA, 19 nt, Artificial Sequence
  Synthetic
  misc_feature (1)..(1): n is a, c, g, or u
ngucuuuugggguggagcc

SEQ ID NO: 107437 - RNA, 20 nt, Artificial Sequence
  Synthetic
  misc_feature (2)..(2): n is a, c, g, or u
cngucuuuugggguggagcc

SEQ ID NO: 107438 - RNA, 21 nt, Artificial Sequence
  Synthetic
  misc_feature (3)..(3): n is a, c, g, or u
gcngucuuuugggguggagcc

SEQ ID NO: 107439 - RNA, 22 nt, Artificial Sequence
  Synthetic
  misc_feature (4)..(4): n is a, c, g, or u
ggcngucuuuugggguggagcc

SEQ ID NO: 107440 - RNA, 23 nt, Artificial Sequence
  Synthetic
  misc_feature (5)..(5): n is a, c, g, or u
cggcngucuuuugggguggagcc

SEQ ID NO: 107441 - RNA, 24 nt, Artificial Sequence
  Synthetic
  misc_feature (6)..(6): n is a, c, g, or u
acggcngucuuuugggguggagcc

SEQ ID NO: 107442 - RNA, 18 nt, Artificial Sequence
  Synthetic
gcucuguaucgggaggcc

SEQ ID NO: 107443 - RNA, 19 nt, Artificial Sequence
  Synthetic
  misc_feature (1)..(1): n is a, c, g, or u
ngcucuguaucgggaggcc

SEQ ID NO: 107444 - RNA, 20 nt, Artificial Sequence
  Synthetic
  misc_feature (2)..(2): n is a, c, g, or u
cngcucuguaucgggaggcc

SEQ ID NO: 107445 - RNA, 21 nt, Artificial Sequence
  Synthetic
  misc_feature (3)..(3): n is a, c, g, or u
ucngcucuguaucgggaggcc

SEQ ID NO: 107446 - RNA, 22 nt, Artificial Sequence
  Synthetic
  misc_feature (4)..(4): n is a, c, g, or u
cucngcucuguaucgggaggcc

SEQ ID NO: 107447 - RNA, 23 nt, Artificial Sequence
  Synthetic
  misc_feature (5)..(5): n is a, c, g, or u
ccucngcucuguaucgggaggcc

SEQ ID NO: 107448 - RNA, 24 nt, Artificial Sequence
  Synthetic
  misc_feature (6)..(6): n is a, c, g, or u
gccucngcucuguaucgggaggcc

SEQ ID NO: 107449 - RNA, 18 nt, Artificial Sequence
  Synthetic
ucaauguuaauaugggcc

SEQ ID NO: 107450 - RNA, 19 nt, Artificial Sequence
  Synthetic
gucaauguuaauaugggcc

SEQ ID NO: 107451 - RNA, 20 nt, Artificial Sequence
  Synthetic
ugucaauguuaauaugggcc

SEQ ID NO: 107452 - RNA, 21 nt, Artificial Sequence
  Synthetic
augucaauguuaauaugggcc

SEQ ID NO: 107453 - RNA, 22 nt, Artificial Sequence
  Synthetic
uaugucaauguuaauaugggcc

SEQ ID NO: 107454 - RNA, 23 nt, Artificial Sequence
  Synthetic
cuaugucaauguuaauaugggcc

SEQ ID NO: 107455 - RNA, 24 nt, Artificial Sequence
  Synthetic
gcuaugucaauguuaauaugggcc

SEQ ID NO: 107456 - RNA, 18 nt, Artificial Sequence
  Synthetic
  misc_feature (13)..(13): n is a, c, g, or u
caacaaggaucanuggcc

SEQ ID NO: 107457 - RNA, 19 nt, Artificial Sequence
  Synthetic
  misc_feature (14)..(14): n is a, c, g, or u
ccaacaaggaucanuggcc

SEQ ID NO: 107458 - RNA, 20 nt, Artificial Sequence
  Synthetic
  misc_feature (15)..(15): n is a, c, g, or u
cccaacaaggaucanuggcc

SEQ ID NO: 107459 - RNA, 21 nt, Artificial Sequence
  Synthetic
  misc_feature (16)..(16): n is a, c, g, or u
ccccaacaaggaucanuggcc

SEQ ID NO: 107460 - RNA, 22 nt, Artificial Sequence
  Synthetic
  misc_feature (17)..(17): n is a, c, g, or u
accccaacaaggaucanuggcc

SEQ ID NO: 107461 - RNA, 23 nt, Artificial Sequence
  Synthetic
  misc_feature (18)..(18): n is a, c, g, or u
aaccccaacaaggaucanuggcc

SEQ ID NO: 107462 - RNA, 24 nt, Artificial Sequence
  Synthetic
  misc_feature (19)..(19): n is a, c, g, or u
caaccccaacaaggaucanuggcc

SEQ ID NO: 107463 - RNA, 18 nt, Artificial Sequence
  Synthetic
cauauugacaacagugcc

SEQ ID NO: 107464 - RNA, 19 nt, Artificial Sequence
  Synthetic
gcauauugacaacagugcc

SEQ ID NO: 107465 - RNA, 20 nt, Artificial Sequence
  Synthetic
ggcauauugacaacagugcc

SEQ ID NO: 107466 - RNA, 21 nt, Artificial Sequence
  Synthetic
gggcauauugacaacagugcc

SEQ ID NO: 107467 - RNA, 22 nt, Artificial Sequence
  Synthetic
agggcauauugacaacagugcc

SEQ ID NO: 107468 - RNA, 23 nt, Artificial Sequence
  Synthetic
cagggcauauugacaacagugcc

SEQ ID NO: 107469 - RNA, 24 nt, Artificial Sequence
  Synthetic
ucagggcauauugacaacagugcc

SEQ ID NO: 107470 - RNA, 18 nt, Artificial Sequence
  Synthetic
  misc_feature (10)..(10): n is a, c, g, or u
  misc_feature (16)..(16): n is a, c, g, or u
auguuuucgnaaacuncc

SEQ ID NO: 107471 - RNA, 19 nt, Artificial Sequence
  Synthetic
  misc_feature (11)..(11): n is a, c, g, or u
  misc_feature (17)..(17): n is a, c, g, or u
aauguuuucgnaaacuncc

SEQ ID NO: 107472 - RNA, 20 nt, Artificial Sequence
  Synthetic
  misc_feature (12)..(12): n is a, c, g, or u
  misc_feature (18)..(18): n is a, c, g, or u
caauguuuucgnaaacuncc

SEQ ID NO: 107473 - RNA, 21 nt, Artificial Sequence
  Synthetic
  misc_feature (1)..(1): n is a, c, g, or u
  misc_feature (13)..(13): n is a, c, g, or u
  misc_feature (19)..(19): n is a, c, g, or u
ncaauguuuucgnaaacuncc

SEQ ID NO: 107474 - RNA, 22 nt, Artificial Sequence
  Synthetic
  misc_feature (2)..(2): n is a, c, g, or u
  misc_feature (14)..(14): n is a, c, g, or u
  misc_feature (20)..(20): n is a, c, g, or u
ancaauguuuucgnaaacuncc

SEQ ID NO: 107475 - RNA, 23 nt, Artificial Sequence
  Synthetic
  misc_feature (3)..(3): n is a, c, g, or u
  misc_feature (15)..(15): n is a, c, g, or u
  misc_feature (21)..(21): n is a, c, g, or u
aancaauguuuucgnaaacuncc

SEQ ID NO: 107476 - RNA, 24 nt, Artificial Sequence
  Synthetic
  misc_feature (1)..(1): n is a, c, g, or u
  misc_feature (4)..(4): n is a, c, g, or u
  misc_feature (16)..(16): n is a, c, g, or u
  misc_feature (22)..(22): n is a, c, g, or u
naancaauguuuucgnaaacuncc

SEQ ID NO: 107477 - RNA, 18 nt, Artificial Sequence
  Synthetic
ucuuucuguucccaaucc

SEQ ID NO: 107478 - RNA, 19 nt, Artificial Sequence
  Synthetic
aucuuucuguucccaaucc

SEQ ID NO: 107479 - RNA, 20 nt, Artificial Sequence
  Synthetic
aaucuuucuguucccaaucc

SEQ ID NO: 107480 - RNA, 21 nt, Artificial Sequence
  Synthetic
  misc_feature (1)..(1): n is a, c, g, or u
naaucuuucuguucccaaucc

SEQ ID NO: 107481 - RNA, 22 nt, Artificial Sequence
  Synthetic
  misc_feature (2)..(2): n is a, c, g, or u
cnaaucuuucuguucccaaucc

SEQ ID NO: 107482 - RNA, 23 nt, Artificial Sequence
  Synthetic
  misc_feature (3)..(3): n is a, c, g, or u
acnaaucuuucuguucccaaucc

SEQ ID NO: 107483 - RNA, 24 nt, Artificial Sequence
  Synthetic
  misc_feature (4)..(4): n is a, c, g, or u
gacnaaucuuucuguucccaaucc

SEQ ID NO: 107484 - RNA, 18 nt, Artificial Sequence
  Synthetic
cccgucggcgcugaaucc

SEQ ID NO: 107485 - RNA, 19 nt, Artificial Sequence
  Synthetic
ucccgucggcgcugaaucc

SEQ ID NO: 107486 - RNA, 20 nt, Artificial Sequence
  Synthetic
gucccgucggcgcugaaucc

SEQ ID NO: 107487 - RNA, 18 nt, Artificial Sequence
  Synthetic
  misc_feature (9)..(9): n is a, c, g, or u
uuggaaganccagcaucc

SEQ ID NO: 107488 - RNA, 19 nt, Artificial Sequence
  Synthetic
  misc_feature (10)..(10): n is a, c, g, or u
uuuggaaganccagcaucc

SEQ ID NO: 107489 - RNA, 20 nt, Artificial Sequence
  Synthetic
  misc_feature (11)..(11): n is a, c, g, or u
auuuggaaganccagcaucc

SEQ ID NO: 107490 - RNA, 21 nt, Artificial Sequence
  Synthetic
  misc_feature (12)..(12): n is a, c, g, or u
aauuuggaaganccagcaucc

SEQ ID NO: 107491 - RNA, 22 nt, Artificial Sequence
  Synthetic
  misc_feature (13)..(13): n is a, c, g, or u
uaauuuggaaganccagcaucc

SEQ ID NO: 107492 - RNA, 23 nt, Artificial Sequence
  Synthetic
  misc_feature (14)..(14): n is a, c, g, or u
guaauuuggaaganccagcaucc

SEQ ID NO: 107493 - RNA, 24 nt, Artificial Sequence
  Synthetic
  misc_feature (15)..(15): n is a, c, g, or u
aguaauuuggaaganccagcaucc

SEQ ID NO: 107494 - RNA, 18 nt, Artificial Sequence
  Synthetic
ucuaagagacagucaucc

SEQ ID NO: 107495 - RNA, 19 nt, Artificial Sequence
  Synthetic
cucuaagagacagucaucc

SEQ ID NO: 107496 - RNA, 20 nt, Artificial Sequence
  Synthetic
ccucuaagagacagucaucc

SEQ ID NO: 107497 - RNA, 21 nt, Artificial Sequence
  Synthetic
accucuaagagacagucaucc

SEQ ID NO: 107498 - RNA, 22 nt, Artificial Sequence
  Synthetic
caccucuaagagacagucaucc

SEQ ID NO: 107499 - RNA, 23 nt, Artificial Sequence
  Synthetic
ccaccucuaagagacagucaucc

SEQ ID NO: 107500 - RNA, 24 nt, Artificial Sequence
  Synthetic
uccaccucuaagagacagucaucc

SEQ ID NO: 107501 - RNA, 18 nt, Artificial Sequence
  Synthetic
aucucaauguuaguaucc

SEQ ID NO: 107502 - RNA, 19 nt, Artificial Sequence
  Synthetic
aaucucaauguuaguaucc

SEQ ID NO: 107503 - RNA, 20 nt, Artificial Sequence
  Synthetic
gaaucucaauguuaguaucc

SEQ ID NO: 107504 - RNA, 21 nt, Artificial Sequence
  Synthetic
ggaaucucaauguuaguaucc

SEQ ID NO: 107505 - RNA, 22 nt, Artificial Sequence
  Synthetic
gggaaucucaauguuaguaucc

SEQ ID NO: 107506 - RNA, 23 nt, Artificial Sequence
  Synthetic
cgggaaucucaauguuaguaucc

SEQ ID NO: 107507 - RNA, 24 nt, Artificial Sequence
  Synthetic
ucgggaaucucaauguuaguaucc

SEQ ID NO: 107508 - RNA, 18 nt, Artificial Sequence
  Synthetic
aaacguuggggcuacucc

SEQ ID NO: 107509 - RNA, 19 nt, Artificial Sequence
  Synthetic
caaacguuggggcuacucc

SEQ ID NO: 107510 - RNA, 20 nt, Artificial Sequence
  Synthetic
ccaaacguuggggcuacucc

SEQ ID NO: 107511 - RNA, 21 nt, Artificial Sequence
  Synthetic
accaaacguuggggcuacucc

SEQ ID NO: 107512 - RNA, 22 nt, Artificial Sequence
  Synthetic
aaccaaacguuggggcuacucc

SEQ ID NO: 107513 - RNA, 23 nt, Artificial Sequence
  Synthetic
aaaccaaacguuggggcuacucc

SEQ ID NO: 107514 - RNA, 24 nt, Artificial Sequence
  Synthetic
aaaaccaaacguuggggcuacucc

SEQ ID NO: 107515 - RNA, 18 nt, Artificial Sequence
  Synthetic
agacgacgaggcaggucc

SEQ ID NO: 107516 - RNA, 19 nt, Artificial Sequence
  Synthetic
uagacgacgaggcaggucc

SEQ ID NO: 107517 - RNA, 20 nt, Artificial Sequence
  Synthetic
uuagacgacgaggcaggucc

SEQ ID NO: 107518 - RNA, 21 nt, Artificial Sequence
  Synthetic
guuagacgacgaggcaggucc

SEQ ID NO: 107519 - RNA, 22 nt, Artificial Sequence
  Synthetic
uguuagacgacgaggcaggucc

SEQ ID NO: 107520 - RNA, 23 nt, Artificial Sequence
  Synthetic
uuguuagacgacgaggcaggucc

SEQ ID NO: 107521 - RNA, 24 nt, Artificial Sequence
  Synthetic
guuguuagacgacgaggcaggucc

SEQ ID NO: 107522 - RNA, 18 nt, Artificial Sequence
  Synthetic
cucaccaaccucuugucc

SEQ ID NO: 107523 - RNA, 19 nt, Artificial Sequence
  Synthetic
acucaccaaccucuugucc

SEQ ID NO: 107524 - RNA, 20 nt, Artificial Sequence
  Synthetic
cacucaccaaccucuugucc

SEQ ID NO: 107525 - RNA, 21 nt, Artificial Sequence
  Synthetic
ucacucaccaaccucuugucc

SEQ ID NO: 107526 - RNA, 22 nt, Artificial Sequence
  Synthetic
aucacucaccaaccucuugucc

SEQ ID NO: 107527 - RNA, 23 nt, Artificial Sequence
  Synthetic
aaucacucaccaaccucuugucc

SEQ ID NO: 107528 - RNA, 24 nt, Artificial Sequence
  Synthetic
caaucacucaccaaccucuugucc

SEQ ID NO: 107529 - RNA, 18 nt, Artificial Sequence
  Synthetic
gggcuuucgcaagauucc

SEQ ID NO: 107530 - RNA, 19 nt, Artificial Sequence
  Synthetic
ugggcuuucgcaagauucc

SEQ ID NO: 107531 - RNA, 20 nt, Artificial Sequence
  Synthetic
  misc_feature (1)..(1): n is a, c, g, or u
nugggcuuucgcaagauucc

SEQ ID NO: 107532 - RNA, 21 nt, Artificial Sequence
  Synthetic
  misc_feature (2)..(2): n is a, c, g, or u
cnugggcuuucgcaagauucc

SEQ ID NO: 107533 - RNA, 22 nt, Artificial Sequence
  Synthetic
  misc_feature (3)..(3): n is a, c, g, or u
ucnugggcuuucgcaagauucc

SEQ ID NO: 107534 - RNA, 23 nt, Artificial Sequence
  Synthetic
  misc_feature (4)..(4): n is a, c, g, or u
aucnugggcuuucgcaagauucc

SEQ ID NO: 107535 - RNA, 24 nt, Artificial Sequence
  Synthetic
  misc_feature (5)..(5): n is a, c, g, or u
caucnugggcuuucgcaagauucc

SEQ ID NO: 107536 - RNA, 18 nt, Artificial Sequence
  Synthetic
  misc_feature (1)..(1): n is a, c, g, or u
  misc_feature (5)..(5): n is a, c, g, or u
ncacnacaucaggauucc

SEQ ID NO: 107537 - RNA, 19 nt, Artificial Sequence
  Synthetic
  misc_feature (2)..(2): n is a, c, g, or u
  misc_feature (6)..(6): n is a, c, g, or u
ancacnacaucaggauucc

SEQ ID NO: 107538 - RNA, 20 nt, Artificial Sequence
  Synthetic
  misc_feature (3)..(3): n is a, c, g, or u
  misc_feature (7)..(7): n is a, c, g, or u
gancacnacaucaggauucc

SEQ ID NO: 107539 - RNA, 21 nt, Artificial Sequence
  Synthetic
  misc_feature (4)..(4): n is a, c, g, or u
  misc_feature (8)..(8): n is a, c, g, or u
agancacnacaucaggauucc

SEQ ID NO: 107540 - RNA, 22 nt, Artificial Sequence
  Synthetic
  misc_feature (5)..(5): n is a, c, g, or u
  misc_feature (9)..(9): n is a, c, g, or u
gagancacnacaucaggauucc

SEQ ID NO: 107541 - RNA, 23 nt, Artificial Sequence
  Synthetic
  misc_feature (6)..(6): n is a, c, g, or u
  misc_feature (10)..(10): n is a, c, g, or u
ggagancacnacaucaggauucc

SEQ ID NO: 107542 - RNA, 24 nt, Artificial Sequence
  Synthetic
  misc_feature (7)..(7): n is a, c, g, or u
  misc_feature (11)..(11): n is a, c, g, or u
uggagancacnacaucaggauucc

SEQ ID NO: 107543 - RNA, 18 nt, Artificial Sequence
  Synthetic
uaucuuaucaacacuucc

SEQ ID NO: 107544 - RNA, 19 nt, Artificial Sequence
  Synthetic
cuaucuuaucaacacuucc

SEQ ID NO: 107545 - RNA, 20 nt, Artificial Sequence
  Synthetic
ccuaucuuaucaacacuucc

SEQ ID NO: 107546 - RNA, 21 nt, Artificial Sequence
  Synthetic
cccuaucuuaucaacacuucc

SEQ ID NO: 107547 - RNA, 22 nt, Artificial Sequence
  Synthetic
ccccuaucuuaucaacacuucc

SEQ ID NO: 107548 - RNA, 23 nt, Artificial Sequence
  Synthetic
gccccuaucuuaucaacacuucc

SEQ ID NO: 107549 - RNA, 24 nt, Artificial Sequence
  Synthetic
ugccccuaucuuaucaacacuucc

SEQ ID NO: 107550 - RNA, 18 nt, Artificial Sequence
  Synthetic
cguuuguccucuacuucc

SEQ ID NO: 107551 - RNA, 19 nt, Artificial Sequence
  Synthetic
ccguuuguccucuacuucc

SEQ ID NO: 107552 - RNA, 20 nt, Artificial Sequence
  Synthetic
cccguuuguccucuacuucc

SEQ ID NO: 107553 - RNA, 21 nt, Artificial Sequence
  Synthetic
gcccguuuguccucuacuucc

SEQ ID NO: 107554 - RNA, 22 nt, Artificial Sequence
  Synthetic
ugcccguuuguccucuacuucc

SEQ ID NO: 107555 - RNA, 23 nt, Artificial Sequence
  Synthetic
uugcccguuuguccucuacuucc

SEQ ID NO: 107556 - RNA, 24 nt, Artificial Sequence
  Synthetic
guugcccguuuguccucuacuucc

SEQ ID NO: 107557 - RNA, 18 nt, Artificial Sequence
  Synthetic
gggaacaagagcuacagc

SEQ ID NO: 107558 - RNA, 19 nt, Artificial Sequence
  Synthetic
ugggaacaagagcuacagc

SEQ ID NO: 107559 - RNA, 20 nt, Artificial Sequence
  Synthetic
uugggaacaagagcuacagc

SEQ ID NO: 107560 - RNA, 21 nt, Artificial Sequence
  Synthetic
cuugggaacaagagcuacagc

SEQ ID NO: 107561 - RNA, 22 nt, Artificial Sequence
  Synthetic
ucuugggaacaagagcuacagc

SEQ ID NO: 107562 - RNA, 23 nt, Artificial Sequence
  Synthetic
uucuugggaacaagagcuacagc

SEQ ID NO: 107563 - RNA, 24 nt, Artificial Sequence
  Synthetic
auucuugggaacaagagcuacagc

SEQ ID NO: 107564 - RNA, 18 nt, Artificial Sequence
  Synthetic
ggaacaucaacuaccagc

SEQ ID NO: 107565 - RNA, 19 nt, Artificial Sequence
  Synthetic
aggaacaucaacuaccagc

SEQ ID NO: 107566 - RNA, 20 nt, Artificial Sequence
  Synthetic
caggaacaucaacuaccagc

SEQ ID NO: 107567 - RNA, 21 nt, Artificial Sequence
  Synthetic
ccaggaacaucaacuaccagc

SEQ ID NO: 107568 - RNA, 22 nt, Artificial Sequence
  Synthetic
uccaggaacaucaacuaccagc

SEQ ID NO: 107569 - RNA, 23 nt, Artificial Sequence
  Synthetic
uuccaggaacaucaacuaccagc

SEQ ID NO: 107570 - RNA, 24 nt, Artificial Sequence
  Synthetic
cuuccaggaacaucaacuaccagc

SEQ ID NO: 107571 - RNA, 18 nt, Artificial Sequence
  Synthetic
auucuugggaacaagagc

SEQ ID NO: 107572 - RNA, 19 nt, Artificial Sequence
  Synthetic
uauucuugggaacaagagc

SEQ ID NO: 107573 - RNA, 20 nt, Artificial Sequence
  Synthetic
auauucuugggaacaagagc

SEQ ID NO: 107574 - RNA, 21 nt, Artificial Sequence
  Synthetic
cauauucuugggaacaagagc

SEQ ID NO: 107575 - RNA, 22 nt, Artificial Sequence
  Synthetic
ccauauucuugggaacaagagc

SEQ ID NO: 107576 - RNA, 23 nt, Artificial Sequence
  Synthetic
accauauucuugggaacaagagc

SEQ ID NO: 107577 - RNA, 24 nt, Artificial Sequence
  Synthetic
caccauauucuugggaacaagagc

SEQ ID NO: 107578 - RNA, 18 nt, Artificial Sequence
  Synthetic
uucaccucugcacgucgc

SEQ ID NO: 107579 - RNA, 19 nt, Artificial Sequence
  Synthetic
cuucaccucugcacgucgc

SEQ ID NO: 107580 - RNA, 20 nt, Artificial Sequence
  Synthetic
gcuucaccucugcacgucgc

SEQ ID NO: 107581 - RNA, 21 nt, Artificial Sequence
  Synthetic
cgcuucaccucugcacgucgc

SEQ ID NO: 107582 - RNA, 22 nt, Artificial Sequence
  Synthetic
ucgcuucaccucugcacgucgc

SEQ ID NO: 107583 - RNA, 23 nt, Artificial Sequence
  Synthetic
uucgcuucaccucugcacgucgc

SEQ ID NO: 107584 - RNA, 24 nt, Artificial Sequence
  Synthetic
cuucgcuucaccucugcacgucgc

SEQ ID NO: 107585 - RNA, 18 nt, Artificial Sequence
  Synthetic
ucucaaucgccgcgucgc

SEQ ID NO: 107586 - RNA, 19 nt, Artificial Sequence
  Synthetic
gucucaaucgccgcgucgc

SEQ ID NO: 107587 - RNA, 20 nt, Artificial Sequence
  Synthetic
ggucucaaucgccgcgucgc

SEQ ID NO: 107588 - RNA, 18 nt, Artificial Sequence
  Synthetic
  misc_feature (9)..(9): n is a, c, g, or u
  misc_feature (12)..(12): n is a, c, g, or u
uugcccuunganaaaggc

SEQ ID NO: 107589 - RNA, 19 nt, Artificial Sequence
  Synthetic
  misc_feature (10)..(10): n is a, c, g, or u
  misc_feature (13)..(13): n is a, c, g, or u
uuugcccuunganaaaggc

SEQ ID NO: 107590 - RNA, 20 nt, Artificial Sequence
  Synthetic
  misc_feature (11)..(11): n is a, c, g, or u
  misc_feature (14)..(14): n is a, c, g, or u
auuugcccuunganaaaggc

SEQ ID NO: 107591 - RNA, 21 nt, Artificial Sequence
  Synthetic
  misc_feature (12)..(12): n is a, c, g, or u
  misc_feature (15)..(15): n is a, c, g, or u
uauuugcccuunganaaaggc

SEQ ID NO: 107592 - RNA, 22 nt, Artificial Sequence
  Synthetic
  misc_feature (13)..(13): n is a, c, g, or u
  misc_feature (16)..(16): n is a, c, g, or u
auauuugcccuunganaaaggc

SEQ ID NO: 107593 - RNA, 23 nt, Artificial Sequence
  Synthetic
  misc_feature (14)..(14): n is a, c, g, or u
  misc_feature (17)..(17): n is a, c, g, or u
aauauuugcccuunganaaaggc

SEQ ID NO: 107594 - RNA, 24 nt, Artificial Sequence
  Synthetic
  misc_feature (15)..(15): n is a, c, g, or u
  misc_feature (18)..(18): n is a, c, g, or u
aaauauuugcccuunganaaaggc

SEQ ID NO: 107595 - RNA, 18 nt, Artificial Sequence
  Synthetic
uccaaaccucgacaaggc

SEQ ID NO: 107596 - RNA, 19 nt, Artificial Sequence
  Synthetic
uuccaaaccucgacaaggc

SEQ ID NO: 107597 - RNA, 20 nt, Artificial Sequence
  Synthetic
cuuccaaaccucgacaaggc

SEQ ID NO: 107598 - RNA, 21 nt, Artificial Sequence
  Synthetic
ucuuccaaaccucgacaaggc

SEQ ID NO: 107599 - RNA, 22 nt, Artificial Sequence
  Synthetic
gucuuccaaaccucgacaaggc

SEQ ID NO: 107600 - RNA, 23 nt, Artificial Sequence
  Synthetic
ggucuuccaaaccucgacaaggc

SEQ ID NO: 107601 - RNA, 24 nt, Artificial Sequence
  Synthetic
uggucuuccaaaccucgacaaggc

SEQ ID NO: 107602 - RNA, 18 nt, Artificial Sequence
  Synthetic
gggguggagcccucaggc

SEQ ID NO: 107603 - RNA, 19 nt, Artificial Sequence
  Synthetic
ugggguggagcccucaggc

SEQ ID NO: 107604 - RNA, 20 nt, Artificial Sequence
  Synthetic
uugggguggagcccucaggc

SEQ ID NO: 107605 - RNA, 21 nt, Artificial Sequence
  Synthetic
uuugggguggagcccucaggc

SEQ ID NO: 107606 - RNA, 22 nt, Artificial Sequence
  Synthetic
uuuugggguggagcccucaggc

SEQ ID NO: 107607 - RNA, 23 nt, Artificial Sequence
  Synthetic
cuuuugggguggagcccucaggc

SEQ ID NO: 107608 - RNA, 24 nt, Artificial Sequence
  Synthetic
ucuuuugggguggagcccucaggc

SEQ ID NO: 107609 - RNA, 18 nt, Artificial Sequence
  Synthetic
  misc_feature (1)..(1): n is a, c, g, or u
ngcucuguaucgggaggc

SEQ ID NO: 107610 - RNA, 19 nt, Artificial Sequence
  Synthetic
  misc_feature (2)..(2): n is a, c, g, or u
cngcucuguaucgggaggc

SEQ ID NO: 107611 - RNA, 20 nt, Artificial Sequence
  Synthetic
  misc_feature (3)..(3): n is a, c, g, or u
ucngcucuguaucgggaggc

SEQ ID NO: 107612 - RNA, 21 nt, Artificial Sequence
  Synthetic
  misc_feature (4)..(4): n is a, c, g, or u
cucngcucuguaucgggaggc

SEQ ID NO: 107613 - RNA, 22 nt, Artificial Sequence
  Synthetic
  misc_feature (5)..(5): n is a, c, g, or u
ccucngcucuguaucgggaggc

SEQ ID NO: 107614 - RNA, 23 nt, Artificial Sequence
  Synthetic
  misc_feature (6)..(6): n is a, c, g, or u
gccucngcucuguaucgggaggc

SEQ ID NO: 107615 - RNA, 24 nt, Artificial Sequence
  Synthetic
  misc_feature (7)..(7): n is a, c, g, or u
cgccucngcucuguaucgggaggc

SEQ ID NO: 107616 - RNA, 18 nt, Artificial Sequence
  Synthetic
  misc_feature (1)..(1): n is a, c, g, or u
  misc_feature (12)..(12): n is a, c, g, or u
nucuuuguacunggaggc

SEQ ID NO: 107617 - RNA, 19 nt, Artificial Sequence
  Synthetic
  misc_feature (2)..(2): n is a, c, g, or u
  misc_feature (13)..(13): n is a, c, g, or u
gnucuuuguacunggaggc

SEQ ID NO: 107618 - RNA, 20 nt, Artificial Sequence
  Synthetic
  misc_feature (1)..(1): n is a, c, g, or u
  misc_feature (3)..(3): n is a, c, g, or u
  misc_feature (14)..(14): n is a, c, g, or u
ngnucuuuguacunggaggc

SEQ ID NO: 107619 - RNA, 21 nt, Artificial Sequence
  Synthetic
  misc_feature (2)..(2): n is a, c, g, or u
  misc_feature (4)..(4): n is a, c, g, or u
  misc_feature (15)..(15): n is a, c, g, or u
angnucuuuguacunggaggc

SEQ ID NO: 107620 - RNA, 22 nt, Artificial Sequence
  Synthetic
  misc_feature (3)..(3): n is a, c, g, or u
  misc_feature (5)..(5): n is a, c, g, or u
  misc_feature (16)..(16): n is a, c, g, or u
aangnucuuuguacunggaggc

SEQ ID NO: 107621 - RNA, 23 nt, Artificial Sequence
  Synthetic
  misc_feature (4)..(4): n is a, c, g, or u
  misc_feature (6)..(6): n is a, c, g, or u
  misc_feature (17)..(17): n is a, c, g, or u
uaangnucuuuguacunggaggc

SEQ ID NO: 107622 - RNA, 24 nt, Artificial Sequence
  Synthetic
  misc_feature (5)..(5): n is a, c, g, or u
  misc_feature (7)..(7): n is a, c, g, or u
  misc_feature (18)..(18): n is a, c, g, or u
uuaangnucuuuguacunggaggc

SEQ ID NO: 107623 - RNA, 18 nt, Artificial Sequence
  Synthetic
ugucuacgucccgucggc

SEQ ID NO: 107624 - RNA, 19 nt, Artificial Sequence
  Synthetic
uugucuacgucccgucggc

SEQ ID NO: 107625 - RNA, 20 nt, Artificial Sequence
  Synthetic
uuugucuacgucccgucggc

SEQ ID NO: 107626 - RNA, 21 nt, Artificial Sequence
  Synthetic
cuuugucuacgucccgucggc

SEQ ID NO: 107627 - RNA, 22 nt, Artificial Sequence
  Synthetic
ccuuugucuacgucccgucggc

SEQ ID NO: 107628 - RNA, 23 nt, Artificial Sequence
  Synthetic
uccuuugucuacgucccgucggc

SEQ ID NO: 107629 - RNA, 24 nt, Artificial Sequence
  Synthetic
guccuuugucuacgucccgucggc

SEQ ID NO: 107630 - RNA, 18 nt, Artificial Sequence
  Synthetic
  misc_feature (14)..(14): n is a, c, g, or u
cuuggguggcuuungggc

SEQ ID NO: 107631 - RNA, 19 nt, Artificial Sequence
  Synthetic
  misc_feature (15)..(15): n is a, c, g, or u
ccuuggguggcuuungggc

SEQ ID NO: 107632 - RNA, 20 nt, Artificial Sequence
  Synthetic
  misc_feature (16)..(16): n is a, c, g, or u
gccuuggguggcuuungggc

SEQ ID NO: 107633 - RNA, 21 nt, Artificial Sequence
  Synthetic
  misc_feature (17)..(17): n is a, c, g, or u
ugccuuggguggcuuungggc

SEQ ID NO: 107634 - RNA, 22 nt, Artificial Sequence
  Synthetic
  misc_feature (18)..(18): n is a, c, g, or u
gugccuuggguggcuuungggc

SEQ ID NO: 107635 - RNA, 23 nt, Artificial Sequence
  Synthetic
  misc_feature (19)..(19): n is a, c, g, or u
ugugccuuggguggcuuungggc

SEQ ID NO: 107636 - RNA, 24 nt, Artificial Sequence
  Synthetic
  misc_feature (20)..(20): n is a, c, g, or u
cugugccuuggguggcuuungggc

SEQ ID NO: 107637 - RNA, 18 nt, Artificial Sequence
  Synthetic
gucaauguuaauaugggc

SEQ ID NO: 107638 - RNA, 19 nt, Artificial Sequence
  Synthetic
ugucaauguuaauaugggc

SEQ ID NO: 107639 - RNA, 20 nt, Artificial Sequence
  Synthetic
augucaauguuaauaugggc

SEQ ID NO: 107640 - RNA, 21 nt, Artificial Sequence
  Synthetic
uaugucaauguuaauaugggc

SEQ ID NO: 107641 - RNA, 22 nt, Artificial Sequence
  Synthetic
cuaugucaauguuaauaugggc

SEQ ID NO: 107642 - RNA, 23 nt, Artificial Sequence
  Synthetic
gcuaugucaauguuaauaugggc

SEQ ID NO: 107643 - RNA, 24 nt, Artificial Sequence
  Synthetic
agcuaugucaauguuaauaugggc

SEQ ID NO: 107644 - RNA, 18 nt, Artificial Sequence
  Synthetic
gucauccucaggccaugc

SEQ ID NO: 107645 - RNA, 19 nt, Artificial Sequence
  Synthetic
agucauccucaggccaugc

SEQ ID NO: 107646 - RNA, 20 nt, Artificial Sequence
  Synthetic
cagucauccucaggccaugc

SEQ ID NO: 107647 - RNA, 21 nt, Artificial Sequence
  Synthetic
acagucauccucaggccaugc

SEQ ID NO: 107648 - RNA, 22 nt, Artificial Sequence
  Synthetic
gacagucauccucaggccaugc

SEQ ID NO: 107649 - RNA, 23 nt, Artificial Sequence
  Synthetic
agacagucauccucaggccaugc

SEQ ID NO: 107650 - RNA, 24 nt, Artificial Sequence
  Synthetic
gagacagucauccucaggccaugc

SEQ ID NO: 107651 - RNA, 18 nt, Artificial Sequence
  Synthetic
  misc_feature (2)..(2): n is a, c, g, or u
  misc_feature (10)..(11): n is a, c, g, or u
unggccaucnncgcaugc

SEQ ID NO: 107652 - RNA, 19 nt, Artificial Sequence
  Synthetic
  misc_feature (3)..(3): n is a, c, g, or u
  misc_feature (11)..(12): n is a, c, g, or u
aunggccaucnncgcaugc

SEQ ID NO: 107653 - RNA, 20 nt, Artificial Sequence
  Synthetic
  misc_feature (1)..(1): n is a, c, g, or u
  misc_feature (4)..(4): n is a, c, g, or u
  misc_feature (12)..(13): n is a, c, g, or u
naunggccaucnncgcaugc

SEQ ID NO: 107654 - RNA, 21 nt, Artificial Sequence
  Synthetic
  misc_feature (2)..(2): n is a, c, g, or u
  misc_feature (5)..(5): n is a, c, g, or u
  misc_feature (13)..(14): n is a, c, g, or u
cnaunggccaucnncgcaugc

SEQ ID NO: 107655 - RNA, 22 nt, Artificial Sequence
  Synthetic
  misc_feature (3)..(3): n is a, c, g, or u
  misc_feature (6)..(6): n is a, c, g, or u
  misc_feature (14)..(15): n is a, c, g, or u
gcnaunggccaucnncgcaugc

SEQ ID NO: 107656 - RNA, 23 nt, Artificial Sequence
  Synthetic
  misc_feature (4)..(4): n is a, c, g, or u
  misc_feature (7)..(7): n is a, c, g, or u
  misc_feature (15)..(16): n is a, c, g, or u
ggcnaunggccaucnncgcaugc

SEQ ID NO: 107657 - RNA, 24 nt, Artificial Sequence
  Synthetic
  misc_feature (5)..(5): n is a, c, g, or u
  misc_feature (8)..(8): n is a, c, g, or u
  misc_feature (16)..(17): n is a, c, g, or u
uggcnaunggccaucnncgcaugc

SEQ ID NO: 107658 - RNA, 18 nt, Artificial Sequence
  Synthetic
gaggacuggggacccugc

SEQ ID NO: 107659 - RNA, 19 nt, Artificial Sequence
  Synthetic
cgaggacuggggacccugc

SEQ ID NO: 107660 - RNA, 20 nt, Artificial Sequence
  Synthetic
ucgaggacuggggacccugc

SEQ ID NO: 107661 - RNA, 21 nt, Artificial Sequence
  Synthetic
cucgaggacuggggacccugc

SEQ ID NO: 107662 - RNA, 22 nt, Artificial Sequence
  Synthetic
ucucgaggacuggggacccugc

SEQ ID NO: 107663 - RNA, 23 nt, Artificial Sequence
  Synthetic
uucucgaggacuggggacccugc

SEQ ID NO: 107664 - RNA, 24 nt, Artificial Sequence
  Synthetic
cuucucgaggacuggggacccugc

SEQ ID NO: 107665 - RNA, 18 nt, Artificial Sequence
  Synthetic
cugccaacuggauccugc

SEQ ID NO: 107666 - RNA, 19 nt, Artificial Sequence
  Synthetic
gcugccaacuggauccugc

SEQ ID NO: 107667 - RNA, 20 nt, Artificial Sequence
  Synthetic
ugcugccaacuggauccugc

SEQ ID NO: 107668 - RNA, 21 nt, Artificial Sequence
  Synthetic
gugcugccaacuggauccugc

SEQ ID NO: 107669 - RNA, 22 nt, Artificial Sequence
  Synthetic
ugugcugccaacuggauccugc

SEQ ID NO: 107670 - RNA, 23 nt, Artificial Sequence
  Synthetic
  misc_feature (1)..(1): n is a, c, g, or u
nugugcugccaacuggauccugc

SEQ ID NO: 107671 - RNA, 24 nt, Artificial Sequence
  Synthetic
  misc_feature (2)..(2): n is a, c, g, or u
gnugugcugccaacuggauccugc

SEQ ID NO: 107672 - RNA, 18 nt, Artificial Sequence
  Synthetic
  misc_feature (12)..(12): n is a, c, g, or u
gaccugcacganuccugc

SEQ ID NO: 107673 - RNA, 19 nt, Artificial Sequence
  Synthetic
  misc_feature (13)..(13): n is a, c, g, or u
agaccugcacganuccugc

SEQ ID NO: 107674 - RNA, 20 nt, Artificial Sequence
  Synthetic
  misc_feature (14)..(14): n is a, c, g, or u
aagaccugcacganuccugc

SEQ ID NO: 107675 - RNA, 21 nt, Artificial Sequence
  Synthetic
  misc_feature (15)..(15): n is a, c, g, or u
caagaccugcacganuccugc

SEQ ID NO: 107676 - RNA, 22 nt, Artificial Sequence
  Synthetic
  misc_feature (16)..(16): n is a, c, g, or u
gcaagaccugcacganuccugc

SEQ ID NO: 107677 - RNA, 23 nt, Artificial Sequence
  Synthetic
  misc_feature (17)..(17): n is a, c, g, or u
ugcaagaccugcacganuccugc

SEQ ID NO: 107678 - RNA, 24 nt, Artificial Sequence
  Synthetic
  misc_feature (18)..(18): n is a, c, g, or u
augcaagaccugcacganuccugc

SEQ ID NO: 107679 - RNA, 18 nt, Artificial Sequence
  Synthetic
caagccuccaagcugugc

SEQ ID NO: 107680 - RNA, 19 nt, Artificial Sequence
  Synthetic
ucaagccuccaagcugugc

SEQ ID NO: 107681 - RNA, 20 nt, Artificial Sequence
  Synthetic
uucaagccuccaagcugugc

SEQ ID NO: 107682 - RNA, 21 nt, Artificial Sequence
  Synthetic
guucaagccuccaagcugugc

SEQ ID NO: 107683 - RNA, 22 nt, Artificial Sequence
  Synthetic
uguucaagccuccaagcugugc

SEQ ID NO: 107684 - RNA, 23 nt, Artificial Sequence
  Synthetic
cuguucaagccuccaagcugugc

SEQ ID NO: 107685 - RNA, 24 nt, Artificial Sequence
  Synthetic
acuguucaagccuccaagcugugc

SEQ ID NO: 107686 - RNA, 18 nt, Artificial Sequence
  Synthetic
  misc_feature (7)..(7): n is a, c, g, or u
acgcccnccaggucuugc

SEQ ID NO: 107687 - RNA, 19 nt, Artificial Sequence
  Synthetic
  misc_feature (8)..(8): n is a, c, g, or u
aacgcccnccaggucuugc

SEQ ID NO: 107688 - RNA, 20 nt, Artificial Sequence
  Synthetic
  misc_feature (9)..(9): n is a, c, g, or u
gaacgcccnccaggucuugc

SEQ ID NO: 107689 - RNA, 21 nt, Artificial Sequence
  Synthetic
  misc_feature (10)..(10): n is a, c, g, or u
ugaacgcccnccaggucuugc

SEQ ID NO: 107690 - RNA, 22 nt, Artificial Sequence
  Synthetic
  misc_feature (11)..(11): n is a, c, g, or u
gugaacgcccnccaggucuugc

SEQ ID NO: 107691 - RNA, 23 nt, Artificial Sequence
  Synthetic
  misc_feature (12)..(12): n is a, c, g, or u
cgugaacgcccnccaggucuugc

SEQ ID NO: 107692 - RNA, 24 nt, Artificial Sequence
  Synthetic
  misc_feature (13)..(13): n is a, c, g, or u
ccgugaacgcccnccaggucuugc

SEQ ID NO: 107693 - RNA, 18 nt, Artificial Sequence
  Synthetic
  misc_feature (17)..(17): n is a, c, g, or u
accaagcucugcuaganc

SEQ ID NO: 107694 - RNA, 19 nt, Artificial Sequence
  Synthetic
  misc_feature (18)..(18): n is a, c, g, or u
caccaagcucugcuaganc

SEQ ID NO: 107695 - RNA, 20 nt, Artificial Sequence
  Synthetic
  misc_feature (19)..(19): n is a, c, g, or u
ccaccaagcucugcuaganc

SEQ ID NO: 107696 - RNA, 21 nt, Artificial Sequence
  Synthetic
  misc_feature (20)..(20): n is a, c, g, or u
uccaccaagcucugcuaganc

SEQ ID NO: 107697 - RNA, 22 nt, Artificial Sequence
  Synthetic
  misc_feature (21)..(21): n is a, c, g, or u
uuccaccaagcucugcuaganc

SEQ ID NO: 107698 - RNA, 23 nt, Artificial Sequence
  Synthetic
  misc_feature (22)..(22): n is a, c, g, or u
auuccaccaagcucugcuaganc

SEQ ID NO: 107699 - RNA, 24 nt, Artificial Sequence
  Synthetic
  misc_feature (23)..(23): n is a, c, g, or u
cauuccaccaagcucugcuaganc

SEQ ID NO: 107700 - RNA, 18 nt, Artificial Sequence
  Synthetic
  misc_feature (11)..(11): n is a, c, g, or u
  misc_feature (14)..(14): n is a, c, g, or u
  misc_feature (17)..(17): n is a, c, g, or u
guugggguacnuunccnc

SEQ ID NO: 107701 - RNA, 19 nt, Artificial Sequence
  Synthetic
  misc_feature (12)..(12): n is a, c, g, or u
  misc_feature (15)..(15): n is a, c, g, or u
  misc_feature (18)..(18): n is a, c, g, or u
aguugggguacnuunccnc

SEQ ID NO: 107702 - RNA, 20 nt, Artificial Sequence
  Synthetic
  misc_feature (13)..(13): n is a, c, g, or u
  misc_feature (16)..(16): n is a, c, g, or u
  misc_feature (19)..(19): n is a, c, g, or u
aaguugggguacnuunccnc

SEQ ID NO: 107703 - RNA, 21 nt, Artificial Sequence
  Synthetic
  misc_feature (14)..(14): n is a, c, g, or u
  misc_feature (17)..(17): n is a, c, g, or u
  misc_feature (20)..(20): n is a, c, g, or u
gaaguugggguacnuunccnc

SEQ ID NO: 107704 - RNA, 22 nt, Artificial Sequence
  Synthetic
  misc_feature (15)..(15): n is a, c, g, or u
  misc_feature (18)..(18): n is a, c, g, or u
  misc_feature (21)..(21): n is a, c, g, or u
ggaaguugggguacnuunccnc

SEQ ID NO: 107705 - RNA, 23 nt, Artificial Sequence
  Synthetic
  misc_feature (16)..(16): n is a, c, g, or u
  misc_feature (19)..(19): n is a, c, g, or u
  misc_feature (22)..(22): n is a, c, g, or u
uggaaguugggguacnuunccnc

SEQ ID NO: 107706 - RNA, 24 nt, Artificial Sequence
  Synthetic
  misc_feature (17)..(17): n is a, c, g, or u
  misc_feature (20)..(20): n is a, c, g, or u
  misc_feature (23)..(23): n is a, c, g, or u
uuggaaguugggguacnuunccnc

SEQ ID NO: 107707 - RNA, 18 nt, Artificial Sequence
  Synthetic
  misc_feature (17)..(17): n is a, c, g, or u
accuuuaccccguugcnc

SEQ ID NO: 107708 - RNA, 19 nt, Artificial Sequence
  Synthetic
  misc_feature (18)..(18): n is a, c, g, or u
aaccuuuaccccguugcnc

SEQ ID NO: 107709 - RNA, 20 nt, Artificial Sequence
  Synthetic
  misc_feature (19)..(19): n is a, c, g, or u
gaaccuuuaccccguugcnc

SEQ ID NO: 107710 - RNA, 21 nt, Artificial Sequence
  Synthetic
  misc_feature (20)..(20): n is a, c, g, or u
ugaaccuuuaccccguugcnc

SEQ ID NO: 107711 - RNA, 22 nt, Artificial Sequence
  Synthetic
  misc_feature (21)..(21): n is a, c, g, or u
cugaaccuuuaccccguugcnc

SEQ ID NO: 107712 - RNA, 23 nt, Artificial Sequence
  Synthetic
  misc_feature (22)..(22): n is a, c, g, or u
ucugaaccuuuaccccguugcnc

SEQ ID NO: 107713 - RNA, 24 nt, Artificial Sequence
  Synthetic
  misc_feature (23)..(23): n is a, c, g, or u
aucugaaccuuuaccccguugcnc

SEQ ID NO: 107714 - RNA, 18 nt, Artificial Sequence
  Synthetic
ucgcagaagaucucaauc

SEQ ID NO: 107715 - RNA, 19 nt, Artificial Sequence
  Synthetic
gucgcagaagaucucaauc

SEQ ID NO: 107716 - RNA, 20 nt, Artificial Sequence
  Synthetic
cgucgcagaagaucucaauc

SEQ ID NO: 107717 - RNA, 18 nt, Artificial Sequence
  Synthetic
  misc_feature (10)..(10): n is a, c, g, or u
uuuggaaganccagcauc

SEQ ID NO: 107718 - RNA, 19 nt, Artificial Sequence
  Synthetic
  misc_feature (11)..(11): n is a, c, g, or u
auuuggaaganccagcauc

SEQ ID NO: 107719 - RNA, 20 nt, Artificial Sequence
  Synthetic
  misc_feature (12)..(12): n is a, c, g, or u
aauuuggaaganccagcauc

SEQ ID NO: 107720 - RNA, 21 nt, Artificial Sequence
  Synthetic
  misc_feature (13)..(13): n is a, c, g, or u
uaauuuggaaganccagcauc

SEQ ID NO: 107721 - RNA, 22 nt, Artificial Sequence
  Synthetic
  misc_feature (14)..(14): n is a, c, g, or u
guaauuuggaaganccagcauc

SEQ ID NO: 107722 - RNA, 23 nt, Artificial Sequence
  Synthetic
  misc_feature (15)..(15): n is a, c, g, or u
aguaauuuggaaganccagcauc

SEQ ID NO: 107723 - RNA, 24 nt, Artificial Sequence
  Synthetic
  misc_feature (16)..(16): n is a, c, g, or u
aaguaauuuggaaganccagcauc

SEQ ID NO: 107724 - RNA, 18 nt, Artificial Sequence
  Synthetic
uauucccaucccaucauc

SEQ ID NO: 107725 - RNA, 19 nt, Artificial Sequence
  Synthetic
guauucccaucccaucauc

SEQ ID NO: 107726 - RNA, 20 nt, Artificial Sequence
  Synthetic
uguauucccaucccaucauc

SEQ ID NO: 107727 - RNA, 21 nt, Artificial Sequence
  Synthetic
uuguauucccaucccaucauc

SEQ ID NO: 107728 - RNA, 22 nt, Artificial Sequence
  Synthetic
cuuguauucccaucccaucauc

SEQ ID NO: 107729 - RNA, 23 nt, Artificial Sequence
  Synthetic
acuuguauucccaucccaucauc

SEQ ID NO: 107730 - RNA, 24 nt, Artificial Sequence
  Synthetic
cacuuguauucccaucccaucauc

SEQ ID NO: 107731 - RNA, 18 nt, Artificial Sequence
  Synthetic
cucuaagagacagucauc

SEQ ID NO: 107732 - RNA, 19 nt, Artificial Sequence
  Synthetic
ccucuaagagacagucauc

SEQ ID NO: 107733 - RNA, 20 nt, Artificial Sequence
  Synthetic
accucuaagagacagucauc

SEQ ID NO: 107734 - RNA, 21 nt, Artificial Sequence
  Synthetic
caccucuaagagacagucauc

SEQ ID NO: 107735 - RNA, 22 nt, Artificial Sequence
  Synthetic
ccaccucuaagagacagucauc

SEQ ID NO: 107736 - RNA, 23 nt, Artificial Sequence
  Synthetic
uccaccucuaagagacagucauc

SEQ ID NO: 107737 - RNA, 24 nt, Artificial Sequence
  Synthetic
cuccaccucuaagagacagucauc

SEQ ID NO: 107738 - RNA, 18 nt, Artificial Sequence
  Synthetic
ucaaccccaacaaggauc

SEQ ID NO: 107739 - RNA, 19 nt, Artificial Sequence
  Synthetic
uucaaccccaacaaggauc

SEQ ID NO: 107740 - RNA, 20 nt, Artificial Sequence
  Synthetic
cuucaaccccaacaaggauc

SEQ ID NO: 107741 - RNA, 21 nt, Artificial Sequence
  Synthetic
acuucaaccccaacaaggauc

SEQ ID NO: 107742 - RNA, 22 nt, Artificial Sequence
  Synthetic
gacuucaaccccaacaaggauc

SEQ ID NO: 107743 - RNA, 23 nt, Artificial Sequence
  Synthetic
ggacuucaaccccaacaaggauc

SEQ ID NO: 107744 - RNA, 24 nt, Artificial Sequence
  Synthetic
gggacuucaaccccaacaaggauc

SEQ ID NO: 107745 - RNA, 18 nt, Artificial Sequence
  Synthetic
  misc_feature (8)..(8): n is a, c, g, or u
ccgccucngcucuguauc

SEQ ID NO: 107746 - RNA, 19 nt, Artificial Sequence
  Synthetic
  misc_feature (9)..(9): n is a, c, g, or u
accgccucngcucuguauc

SEQ ID NO: 107747 - RNA, 20 nt, Artificial Sequence
  Synthetic
  misc_feature (10)..(10): n is a, c, g, or u
caccgccucngcucuguauc

SEQ ID NO: 107748 - RNA, 21 nt, Artificial Sequence
  Synthetic
  misc_feature (11)..(11): n is a, c, g, or u
acaccgccucngcucuguauc

SEQ ID NO: 107749 - RNA, 22 nt, Artificial Sequence
  Synthetic
  misc_feature (12)..(12): n is a, c, g, or u
gacaccgccucngcucuguauc

SEQ ID NO: 107750 - RNA, 23 nt, Artificial Sequence
  Synthetic
  misc_feature (13)..(13): n is a, c, g, or u
cgacaccgccucngcucuguauc

SEQ ID NO: 107751 - RNA, 24 nt, Artificial Sequence
  Synthetic
  misc_feature (14)..(14): n is a, c, g, or u
ucgacaccgccucngcucuguauc

SEQ ID NO: 107752 - RNA, 18 nt, Artificial Sequence
  Synthetic
  misc_feature (4)..(4): n is a, c, g, or u
  misc_feature (14)..(14): n is a, c, g, or u
caanuuguccuggnuauc

SEQ ID NO: 107753 - RNA, 19 nt, Artificial Sequence
  Synthetic
  misc_feature (5)..(5): n is a, c, g, or u
  misc_feature (15)..(15): n is a, c, g, or u
ccaanuuguccuggnuauc

SEQ ID NO: 107754 - RNA, 20 nt, Artificial Sequence
  Synthetic
  misc_feature (6)..(6): n is a, c, g, or u
  misc_feature (16)..(16): n is a, c, g, or u
uccaanuuguccuggnuauc

SEQ ID NO: 107755 - RNA, 21 nt, Artificial Sequence
  Synthetic
  misc_feature (7)..(7): n is a, c, g, or u
  misc_feature (17)..(17): n is a, c, g, or u
cuccaanuuguccuggnuauc

SEQ ID NO: 107756 - RNA, 22 nt, Artificial Sequence
  Synthetic
  misc_feature (8)..(8): n is a, c, g, or u
  misc_feature (18)..(18): n is a, c, g, or u
ccuccaanuuguccuggnuauc

SEQ ID NO: 107757 - RNA, 23 nt, Artificial Sequence
  Synthetic
  misc_feature (9)..(9): n is a, c, g, or u
  misc_feature (19)..(19): n is a, c, g, or u
uccuccaanuuguccuggnuauc

SEQ ID NO: 107758 - RNA, 24 nt, Artificial Sequence
  Synthetic
  misc_feature (10)..(10): n is a, c, g, or u
  misc_feature (20)..(20): n is a, c, g, or u
guccuccaanuuguccuggnuauc

SEQ ID NO: 107759 - RNA, 18 nt, Artificial Sequence
  Synthetic
  misc_feature (11)..(11): n is a, c, g, or u
gcauuaaaccnuauuauc

SEQ ID NO: 107760 - RNA, 19 nt, Artificial Sequence
  Synthetic
  misc_feature (12)..(12): n is a, c, g, or u
ggcauuaaaccnuauuauc

SEQ ID NO: 107761 - RNA, 20 nt, Artificial Sequence
  Synthetic
  misc_feature (13)..(13): n is a, c, g, or u
aggcauuaaaccnuauuauc

SEQ ID NO: 107762 - RNA, 21 nt, Artificial Sequence
  Synthetic
  misc_feature (14)..(14): n is a, c, g, or u
aaggcauuaaaccnuauuauc

SEQ ID NO: 107763 - RNA, 22 nt, Artificial Sequence
  Synthetic
  misc_feature (15)..(15): n is a, c, g, or u
aaaggcauuaaaccnuauuauc

SEQ ID NO: 107764 - RNA, 23 nt, Artificial Sequence
  Synthetic
  misc_feature (1)..(1): n is a, c, g, or u
  misc_feature (16)..(16): n is a, c, g, or u
naaaggcauuaaaccnuauuauc

SEQ ID NO: 107765 - RNA, 24 nt, Artificial Sequence
  Synthetic
  misc_feature (2)..(2): n is a, c, g, or u
  misc_feature (17)..(17): n is a, c, g, or u
anaaaggcauuaaaccnuauuauc

SEQ ID NO: 107766 - RNA, 18 nt, Artificial Sequence
  Synthetic
cccaaccuccaaucacuc

SEQ ID NO: 107767 - RNA, 19 nt, Artificial Sequence
  Synthetic
ccccaaccuccaaucacuc

SEQ ID NO: 107768 - RNA, 20 nt, Artificial Sequence
  Synthetic
uccccaaccuccaaucacuc

SEQ ID NO: 107769 - RNA, 21 nt, Artificial Sequence
  Synthetic
guccccaaccuccaaucacuc

SEQ ID NO: 107770 - RNA, 22 nt, Artificial Sequence
  Synthetic
aguccccaaccuccaaucacuc

SEQ ID NO: 107771 - RNA, 23 nt, Artificial Sequence
  Synthetic
caguccccaaccuccaaucacuc

SEQ ID NO: 107772 - RNA, 24 nt, Artificial Sequence
  Synthetic
gcaguccccaaccuccaaucacuc

SEQ ID NO: 107773 - RNA, 18 nt, Artificial Sequence
  Synthetic
  misc_feature (6)..(6): n is a, c, g, or u
ucuuanauaagaggacuc

SEQ ID NO: 107774 - RNA, 19 nt, Artificial Sequence
  Synthetic
  misc_feature (7)..(7): n is a, c, g, or u
gucuuanauaagaggacuc

SEQ ID NO: 107775 - RNA, 20 nt, Artificial Sequence
  Synthetic
  misc_feature (8)..(8): n is a, c, g, or u
ggucuuanauaagaggacuc

SEQ ID NO: 107776 - RNA, 21 nt, Artificial Sequence
  Synthetic
  misc_feature (9)..(9): n is a, c, g, or u
aggucuuanauaagaggacuc

SEQ ID NO: 107777 - RNA, 22 nt, Artificial Sequence
  Synthetic
  misc_feature (10)..(10): n is a, c, g, or u
aaggucuuanauaagaggacuc

SEQ ID NO: 107778 - RNA, 23 nt, Artificial Sequence
  Synthetic
  misc_feature (11)..(11): n is a, c, g, or u
caaggucuuanauaagaggacuc

SEQ ID NO: 107779 - RNA, 24 nt, Artificial Sequence
  Synthetic
  misc_feature (12)..(12): n is a, c, g, or u
ccaaggucuuanauaagaggacuc

SEQ ID NO: 107780 - RNA, 18 nt, Artificial Sequence
  Synthetic
uuaguaucccuuggacuc

SEQ ID NO: 107781 - RNA, 19 nt, Artificial Sequence
  Synthetic
guuaguaucccuuggacuc

SEQ ID NO: 107782 - RNA, 20 nt, Artificial Sequence
  Synthetic
uguuaguaucccuuggacuc

SEQ ID NO: 107783 - RNA, 21 nt, Artificial Sequence
  Synthetic
auguuaguaucccuuggacuc

SEQ ID NO: 107784 - RNA, 22 nt, Artificial Sequence
  Synthetic
aauguuaguaucccuuggacuc

SEQ ID NO: 107785 - RNA, 23 nt, Artificial Sequence
  Synthetic
caauguuaguaucccuuggacuc

SEQ ID NO: 107786 - RNA, 24 nt, Artificial Sequence
  Synthetic
ucaauguuaguaucccuuggacuc

SEQ ID NO: 107787 - RNA, 18 nt, Artificial Sequence
  Synthetic
ggcauuauuuacauacuc

SEQ ID NO: 107788 - RNA, 19 nt, Artificial Sequence
  Synthetic
aggcauuauuuacauacuc

SEQ ID NO: 107789 - RNA, 20 nt, Artificial Sequence
  Synthetic
uaggcauuauuuacauacuc

SEQ ID NO: 107790 - RNA, 21 nt, Artificial Sequence
  Synthetic
cuaggcauuauuuacauacuc

SEQ ID NO: 107791 - RNA, 22 nt, Artificial Sequence
  Synthetic
acuaggcauuauuuacauacuc

SEQ ID NO: 107792 - RNA, 23 nt, Artificial Sequence
  Synthetic
aacuaggcauuauuuacauacuc

SEQ ID NO: 107793 - RNA, 24 nt, Artificial Sequence
  Synthetic
aaacuaggcauuauuuacauacuc

SEQ ID NO: 107794 - RNA, 18 nt, Artificial Sequence
  Synthetic
guuggucuuccaaaccuc

SEQ ID NO: 107795 - RNA, 19 nt, Artificial Sequence
  Synthetic
gguuggucuuccaaaccuc

SEQ ID NO: 107796 - RNA, 20 nt, Artificial Sequence
  Synthetic
agguuggucuuccaaaccuc

SEQ ID NO: 107797 - RNA, 21 nt, Artificial Sequence
  Synthetic
gagguuggucuuccaaaccuc

SEQ ID NO: 107798 - RNA, 22 nt, Artificial Sequence
  Synthetic
ggagguuggucuuccaaaccuc

SEQ ID NO: 107799 - RNA, 23 nt, Artificial Sequence
  Synthetic
gggagguuggucuuccaaaccuc

SEQ ID NO: 107800 - RNA, 24 nt, Artificial Sequence
  Synthetic
ugggagguuggucuuccaaaccuc

SEQ ID NO: 107801 - RNA, 18 nt, Artificial Sequence
  Synthetic
cucccaucucuccaccuc

SEQ ID NO: 107802 - RNA, 19 nt, Artificial Sequence
  Synthetic
acucccaucucuccaccuc

SEQ ID NO: 107803 - RNA, 20 nt, Artificial Sequence
  Synthetic
uacucccaucucuccaccuc

SEQ ID NO: 107804 - RNA, 21 nt, Artificial Sequence
  Synthetic
cuacucccaucucuccaccuc

SEQ ID NO: 107805 - RNA, 22 nt, Artificial Sequence
  Synthetic
ccuacucccaucucuccaccuc

SEQ ID NO: 107806 - RNA, 23 nt, Artificial Sequence
  Synthetic
gccuacucccaucucuccaccuc

SEQ ID NO: 107807 - RNA, 24 nt, Artificial Sequence
  Synthetic
agccuacucccaucucuccaccuc

SEQ ID NO: 107808 - RNA, 18 nt, Artificial Sequence
  Synthetic
gaagaacucccucgccuc

SEQ ID NO: 107809 - RNA, 19 nt, Artificial Sequence
  Synthetic
agaagaacucccucgccuc

SEQ ID NO: 107810 - RNA, 20 nt, Artificial Sequence
  Synthetic
aagaagaacucccucgccuc

SEQ ID NO: 107811 - RNA, 21 nt, Artificial Sequence
  Synthetic
gaagaagaacucccucgccuc

SEQ ID NO: 107812 - RNA, 22 nt, Artificial Sequence
  Synthetic
agaagaagaacucccucgccuc

SEQ ID NO: 107813 - RNA, 23 nt, Artificial Sequence
  Synthetic
uagaagaagaacucccucgccuc

SEQ ID NO: 107814 - RNA, 24 nt, Artificial Sequence
  Synthetic
cuagaagaagaacucccucgccuc

SEQ ID NO: 107815 - RNA, 18 nt, Artificial Sequence
  Synthetic
  misc_feature (10)..(10): n is a, c, g, or u
ccugcacganuccugcuc

SEQ ID NO: 107816 - RNA, 19 nt, Artificial Sequence
  Synthetic
  misc_feature (11)..(11): n is a, c, g, or u
accugcacganuccugcuc

SEQ ID NO: 107817 - RNA, 20 nt, Artificial Sequence
  Synthetic
  misc_feature (12)..(12): n is a, c, g, or u
gaccugcacganuccugcuc

SEQ ID NO: 107818 - RNA, 21 nt, Artificial Sequence
  Synthetic
  misc_feature (13)..(13): n is a, c, g, or u
agaccugcacganuccugcuc

SEQ ID NO: 107819 - RNA, 22 nt, Artificial Sequence
  Synthetic
  misc_feature (14)..(14): n is a, c, g, or u
aagaccugcacganuccugcuc

SEQ ID NO: 107820 - RNA, 23 nt, Artificial Sequence
  Synthetic
  misc_feature (15)..(15): n is a, c, g, or u
caagaccugcacganuccugcuc

SEQ ID NO: 107821 - RNA, 24 nt, Artificial Sequence
  Synthetic
  misc_feature (16)..(16): n is a, c, g, or u
gcaagaccugcacganuccugcuc

SEQ ID NO: 107822 - RNA, 18 nt, Artificial Sequence
  Synthetic
  misc_feature (12)..(12): n is a, c, g, or u
ccuucuauucgngaucuc

SEQ ID NO: 107823 - RNA, 19 nt, Artificial Sequence
  Synthetic
  misc_feature (13)..(13): n is a, c, g, or u
uccuucuauucgngaucuc

SEQ ID NO: 107824 - RNA, 20 nt, Artificial Sequence
  Synthetic
  misc_feature (14)..(14): n is a, c, g, or u
uuccuucuauucgngaucuc

SEQ ID NO: 107825 - RNA, 21 nt, Artificial Sequence
  Synthetic
  misc_feature (15)..(15): n is a, c, g, or u
uuuccuucuauucgngaucuc

SEQ ID NO: 107826 - RNA, 22 nt, Artificial Sequence
  Synthetic
  misc_feature (16)..(16): n is a, c, g, or u
cuuuccuucuauucgngaucuc

SEQ ID NO: 107827 - RNA, 23 nt, Artificial Sequence
  Synthetic
  misc_feature (17)..(17): n is a, c, g, or u
ucuuuccuucuauucgngaucuc

SEQ ID NO: 107828 - RNA, 24 nt, Artificial Sequence
  Synthetic
  misc_feature (18)..(18): n is a, c, g, or u
uucuuuccuucuauucgngaucuc

SEQ ID NO: 107829 - RNA, 18 nt, Artificial Sequence
  Synthetic
caacucuguuguccucuc

SEQ ID NO: 107830 - RNA, 19 nt, Artificial Sequence
  Synthetic
acaacucuguuguccucuc

SEQ ID NO: 107831 - RNA, 20 nt, Artificial Sequence
  Synthetic
gacaacucuguuguccucuc

SEQ ID NO: 107832 - RNA, 21 nt, Artificial Sequence
  Synthetic
  misc_feature (1)..(1): n is a, c, g, or u
ngacaacucuguuguccucuc

SEQ ID NO: 107833 - RNA, 22 nt, Artificial Sequence
  Synthetic
  misc_feature (2)..(2): n is a, c, g, or u
cngacaacucuguuguccucuc

SEQ ID NO: 107834 - RNA, 23 nt, Artificial Sequence
  Synthetic
  misc_feature (3)..(3): n is a, c, g, or u
acngacaacucuguuguccucuc

SEQ ID NO: 107835 - RNA, 24 nt, Artificial Sequence
  Synthetic
  misc_feature (1)..(1): n is a, c, g, or u
  misc_feature (4)..(4): n is a, c, g, or u
nacngacaacucuguuguccucuc

SEQ ID NO: 107836 - RNA, 18 nt, Artificial Sequence
  Synthetic
gggaggccuuagagucuc

SEQ ID NO: 107837 - RNA, 19 nt, Artificial Sequence
  Synthetic
cgggaggccuuagagucuc

SEQ ID NO: 107838 - RNA, 20 nt, Artificial Sequence
  Synthetic
ucgggaggccuuagagucuc

SEQ ID NO: 107839 - RNA, 21 nt, Artificial Sequence
  Synthetic
aucgggaggccuuagagucuc

SEQ ID NO: 107840 - RNA, 22 nt, Artificial Sequence
  Synthetic
uaucgggaggccuuagagucuc

SEQ ID NO: 107841 - RNA, 23 nt, Artificial Sequence
  Synthetic
guaucgggaggccuuagagucuc

SEQ ID NO: 107842 - RNA, 24 nt, Artificial Sequence
  Synthetic
uguaucgggaggccuuagagucuc

SEQ ID NO: 107843 - RNA, 18 nt, Artificial Sequence
  Synthetic
cauaucgucaaucuucuc

SEQ ID NO: 107844 - RNA, 19 nt, Artificial Sequence
  Synthetic
ccauaucgucaaucuucuc

SEQ ID NO: 107845 - RNA, 20 nt, Artificial Sequence
  Synthetic
cccauaucgucaaucuucuc

SEQ ID NO: 107846 - RNA, 21 nt, Artificial Sequence
  Synthetic
  misc_feature (1)..(1): n is a, c, g, or u
ncccauaucgucaaucuucuc

SEQ ID NO: 107847 - RNA, 22 nt, Artificial Sequence
  Synthetic
  misc_feature (2)..(2): n is a, c, g, or u
cncccauaucgucaaucuucuc

SEQ ID NO: 107848 - RNA, 23 nt, Artificial Sequence
  Synthetic
  misc_feature (3)..(3): n is a, c, g, or u
ucncccauaucgucaaucuucuc

SEQ ID NO: 107849 - RNA, 24 nt, Artificial Sequence
  Synthetic
  misc_feature (4)..(4): n is a, c, g, or u
cucncccauaucgucaaucuucuc

SEQ ID NO: 107850 - RNA, 18 nt, Artificial Sequence
  Synthetic
gcaggcuuucacuuucuc

SEQ ID NO: 107851 - RNA, 19 nt, Artificial Sequence
  Synthetic
agcaggcuuucacuuucuc

SEQ ID NO: 107852 - RNA, 20 nt, Artificial Sequence
  Synthetic
aagcaggcuuucacuuucuc

SEQ ID NO: 107853 - RNA, 21 nt, Artificial Sequence
  Synthetic
uaagcaggcuuucacuuucuc

SEQ ID NO: 107854 - RNA, 22 nt, Artificial Sequence
  Synthetic
cuaagcaggcuuucacuuucuc

SEQ ID NO: 107855 - RNA, 23 nt, Artificial Sequence
  Synthetic
  misc_feature (1)..(1): n is a, c, g, or u
ncuaagcaggcuuucacuuucuc

SEQ ID NO: 107856 - RNA, 24 nt, Artificial Sequence
  Synthetic
  misc_feature (2)..(2): n is a, c, g, or u
ancuaagcaggcuuucacuuucuc

SEQ ID NO: 107857 - RNA, 18 nt, Artificial Sequence
  Synthetic
cuccaccaaucggcaguc

SEQ ID NO: 107858 - RNA, 19 nt, Artificial Sequence
  Synthetic
ccuccaccaaucggcaguc

SEQ ID NO: 107859 - RNA, 20 nt, Artificial Sequence
  Synthetic
gccuccaccaaucggcaguc

SEQ ID NO: 107860 - RNA, 21 nt, Artificial Sequence
  Synthetic
ugccuccaccaaucggcaguc

SEQ ID NO: 107861 - RNA, 22 nt, Artificial Sequence
  Synthetic
cugccuccaccaaucggcaguc

SEQ ID NO: 107862 - RNA, 23 nt, Artificial Sequence
  Synthetic
ccugccuccaccaaucggcaguc

SEQ ID NO: 107863 - RNA, 24 nt, Artificial Sequence
  Synthetic
uccugccuccaccaaucggcaguc

SEQ ID NO: 107864 - RNA, 18 nt, Artificial Sequence
  Synthetic
  misc_feature (12)..(12): n is a, c, g, or u
uggccaaaauungcaguc

SEQ ID NO: 107865 - RNA, 19 nt, Artificial Sequence
  Synthetic
  misc_feature (13)..(13): n is a, c, g, or u
cuggccaaaauungcaguc

SEQ ID NO: 107866 - RNA, 20 nt, Artificial Sequence
  Synthetic
  misc_feature (14)..(14): n is a, c, g, or u
ccuggccaaaauungcaguc

SEQ ID NO: 107867 - RNA, 21 nt, Artificial Sequence
  Synthetic
  misc_feature (15)..(15): n is a, c, g, or u
uccuggccaaaauungcaguc

SEQ ID NO: 107868 - RNA, 22 nt, Artificial Sequence
  Synthetic
  misc_feature (16)..(16): n is a, c, g, or u
guccuggccaaaauungcaguc

SEQ ID NO: 107869 - RNA, 23 nt, Artificial Sequence
  Synthetic
  misc_feature (17)..(17): n is a, c, g, or u
uguccuggccaaaauungcaguc

SEQ ID NO: 107870 - RNA, 24 nt, Artificial Sequence
  Synthetic
  misc_feature (18)..(18): n is a, c, g, or u
guguccuggccaaaauungcaguc

SEQ ID NO: 107871 - RNA, 18 nt, Artificial Sequence
  Synthetic
ucgggaggccuuagaguc

SEQ ID NO: 107872 - RNA, 19 nt, Artificial Sequence
  Synthetic
aucgggaggccuuagaguc

SEQ ID NO: 107873 - RNA, 20 nt, Artificial Sequence
  Synthetic
uaucgggaggccuuagaguc

SEQ ID NO: 107874 - RNA, 21 nt, Artificial Sequence
  Synthetic
guaucgggaggccuuagaguc

SEQ ID NO: 107875 - RNA, 22 nt, Artificial Sequence
  Synthetic
uguaucgggaggccuuagaguc

SEQ ID NO: 107876 - RNA, 23 nt, Artificial Sequence
  Synthetic
cuguaucgggaggccuuagaguc

SEQ ID NO: 107877 - RNA, 24 nt, Artificial Sequence
  Synthetic
ucuguaucgggaggccuuagaguc

SEQ ID NO: 107878 - RNA, 18 nt, Artificial Sequence
  Synthetic
ucccgcggacgacccguc

SEQ ID NO: 107879 - RNA, 19 nt, Artificial Sequence
  Synthetic
aucccgcggacgacccguc

SEQ ID NO: 107880 - RNA, 20 nt, Artificial Sequence
  Synthetic
aaucccgcggacgacccguc

SEQ ID NO: 107881 - RNA, 18 nt, Artificial Sequence
  Synthetic
ggucucaaucgccgcguc

SEQ ID NO: 107882 - RNA, 19 nt, Artificial Sequence
  Synthetic
aggucucaaucgccgcguc

SEQ ID NO: 107883 - RNA, 20 nt, Artificial Sequence
  Synthetic
aaggucucaaucgccgcguc

SEQ ID NO: 107884 - RNA, 18 nt, Artificial Sequence
  Synthetic
uuuugcucgcagccgguc

SEQ ID NO: 107885 - RNA, 19 nt, Artificial Sequence
  Synthetic
guuuugcucgcagccgguc

SEQ ID NO: 107886 - RNA, 20 nt, Artificial Sequence
  Synthetic
uguuuugcucgcagccgguc

SEQ ID NO: 107887 - RNA, 21 nt, Artificial Sequence
  Synthetic
uuguuuugcucgcagccgguc

SEQ ID NO: 107888 - RNA, 22 nt, Artificial Sequence
  Synthetic
cuuguuuugcucgcagccgguc

SEQ ID NO: 107889 - RNA, 23 nt, Artificial Sequence
  Synthetic
gcuuguuuugcucgcagccgguc

SEQ ID NO: 107890 - RNA, 24 nt, Artificial Sequence
  Synthetic
agcuuguuuugcucgcagccgguc

SEQ ID NO: 107891 - RNA, 18 nt, Artificial Sequence
  Synthetic
  misc_feature (8)..(8): n is a, c, g, or u
uggacucncagcaauguc

SEQ ID NO: 107892 - RNA, 19 nt, Artificial Sequence
  Synthetic
  misc_feature (9)..(9): n is a, c, g, or u
uuggacucncagcaauguc

SEQ ID NO: 107893 - RNA, 20 nt, Artificial Sequence
  Synthetic
  misc_feature (10)..(10): n is a, c, g, or u
cuuggacucncagcaauguc

SEQ ID NO: 107894 - RNA, 21 nt, Artificial Sequence
  Synthetic
  misc_feature (11)..(11): n is a, c, g, or u
ucuuggacucncagcaauguc

SEQ ID NO: 107895 - RNA, 22 nt, Artificial Sequence
  Synthetic
  misc_feature (12)..(12): n is a, c, g, or u
cucuuggacucncagcaauguc

SEQ ID NO: 107896 - RNA, 23 nt, Artificial Sequence
  Synthetic
  misc_feature (13)..(13): n is a, c, g, or u
acucuuggacucncagcaauguc

SEQ ID NO: 107897 - RNA, 24 nt, Artificial Sequence
  Synthetic
  misc_feature (14)..(14): n is a, c, g, or u
gacucuuggacucncagcaauguc

SEQ ID NO: 107898 - RNA, 18 nt, Artificial Sequence
  Synthetic
uugauuggaaaguauguc

SEQ ID NO: 107899 - RNA, 19 nt, Artificial Sequence
  Synthetic
auugauuggaaaguauguc

SEQ ID NO: 107900 - RNA, 20 nt, Artificial Sequence
  Synthetic
uauugauuggaaaguauguc

SEQ ID NO: 107901 - RNA, 21 nt, Artificial Sequence
  Synthetic
cuauugauuggaaaguauguc

SEQ ID NO: 107902 - RNA, 22 nt, Artificial Sequence
  Synthetic
ccuauugauuggaaaguauguc

SEQ ID NO: 107903 - RNA, 23 nt, Artificial Sequence
  Synthetic
accuauugauuggaaaguauguc

SEQ ID NO: 107904 - RNA, 24 nt, Artificial Sequence
  Synthetic
gaccuauugauuggaaaguauguc

SEQ ID NO: 107905 - RNA, 18 nt, Artificial Sequence
  Synthetic
  misc_feature (2)..(2): n is a, c, g, or u
gnuaucgcuggauguguc

SEQ ID NO: 107906 - RNA, 19 nt, Artificial Sequence
  Synthetic
  misc_feature (3)..(3): n is a, c, g, or u
ggnuaucgcuggauguguc

SEQ ID NO: 107907 - RNA, 20 nt, Artificial Sequence
  Synthetic
  misc_feature (4)..(4): n is a, c, g, or u
uggnuaucgcuggauguguc

SEQ ID NO: 107908 - RNA, 21 nt, Artificial Sequence
  Synthetic
  misc_feature (5)..(5): n is a, c, g, or u
cuggnuaucgcuggauguguc

SEQ ID NO: 107909 - RNA, 22 nt, Artificial Sequence
  Synthetic
  misc_feature (6)..(6): n is a, c, g, or u
ccuggnuaucgcuggauguguc

SEQ ID NO: 107910 - RNA, 23 nt, Artificial Sequence
  Synthetic
  misc_feature (7)..(7): n is a, c, g, or u
uccuggnuaucgcuggauguguc

SEQ ID NO: 107911 - RNA, 24 nt, Artificial Sequence
  Synthetic
  misc_feature (8)..(8): n is a, c, g, or u
guccuggnuaucgcuggauguguc

SEQ ID NO: 107912 - RNA, 18 nt, Artificial Sequence
  Synthetic
uaccaauuuucuuuuguc

SEQ ID NO: 107913 - RNA, 19 nt, Artificial Sequence
  Synthetic
uuaccaauuuucuuuuguc

SEQ ID NO: 107914 - RNA, 20 nt, Artificial Sequence
  Synthetic
auuaccaauuuucuuuuguc

SEQ ID NO: 107915 - RNA, 21 nt, Artificial Sequence
  Synthetic
uauuaccaauuuucuuuuguc

SEQ ID NO: 107916 - RNA, 22 nt, Artificial Sequence
  Synthetic
cuauuaccaauuuucuuuuguc

SEQ ID NO: 107917 - RNA, 23 nt, Artificial Sequence
  Synthetic
  misc_feature (1)..(1): n is a, c, g, or u
ncuauuaccaauuuucuuuuguc

SEQ ID NO: 107918 - RNA, 24 nt, Artificial Sequence
  Synthetic
  misc_feature (2)..(2): n is a, c, g, or u
cncuauuaccaauuuucuuuuguc

SEQ ID NO: 107919 - RNA, 18 nt, Artificial Sequence
  Synthetic
  misc_feature (2)..(2): n is a, c, g, or u
  misc_feature (6)..(6): n is a, c, g, or u
ancacnacaucaggauuc

SEQ ID NO: 107920 - RNA, 19 nt, Artificial Sequence
  Synthetic
  misc_feature (3)..(3): n is a, c, g, or u
  misc_feature (7)..(7): n is a, c, g, or u
gancacnacaucaggauuc

SEQ ID NO: 107921 - RNA, 20 nt, Artificial Sequence
  Synthetic
  misc_feature (4)..(4): n is a, c, g, or u
  misc_feature (8)..(8): n is a, c, g, or u
agancacnacaucaggauuc

SEQ ID NO: 107922 - RNA, 21 nt, Artificial Sequence
  Synthetic
  misc_feature (5)..(5): n is a, c, g, or u
  misc_feature (9)..(9): n is a, c, g, or u
gagancacnacaucaggauuc

SEQ ID NO: 107923 - RNA, 22 nt, Artificial Sequence
  Synthetic
  misc_feature (6)..(6): n is a, c, g, or u
  misc_feature (10)..(10): n is a, c, g, or u
ggagancacnacaucaggauuc

SEQ ID NO: 107924 - RNA, 23 nt, Artificial Sequence
  Synthetic
  misc_feature (7)..(7): n is a, c, g, or u
  misc_feature (11)..(11): n is a, c, g, or u
uggagancacnacaucaggauuc

SEQ ID NO: 107925 - RNA, 24 nt, Artificial Sequence
  Synthetic
  misc_feature (8)..(8): n is a, c, g, or u
  misc_feature (12)..(12): n is a, c, g, or u
auggagancacnacaucaggauuc

SEQ ID NO: 107926 - RNA, 18 nt, Artificial Sequence
  Synthetic
uugugggucaccauauuc

SEQ ID NO: 107927 - RNA, 19 nt, Artificial Sequence
  Synthetic
uuugugggucaccauauuc

SEQ ID NO: 107928 - RNA, 20 nt, Artificial Sequence
  Synthetic
uuuugugggucaccauauuc

SEQ ID NO: 107929 - RNA, 21 nt, Artificial Sequence
  Synthetic
auuuugugggucaccauauuc

SEQ ID NO: 107930 - RNA, 22 nt, Artificial Sequence
  Synthetic
cauuuugugggucaccauauuc

SEQ ID NO: 107931 - RNA, 23 nt, Artificial Sequence
  Synthetic
ucauuuugugggucaccauauuc

SEQ ID NO: 107932 - RNA, 24 nt, Artificial Sequence
  Synthetic
cucauuuugugggucaccauauuc

SEQ ID NO: 107933 - RNA, 18 nt, Artificial Sequence
  Synthetic
cuaucuuaucaacacuuc

SEQ ID NO: 107934 - RNA, 19 nt, Artificial Sequence
  Synthetic
ccuaucuuaucaacacuuc

SEQ ID NO: 107935 - RNA, 20 nt, Artificial Sequence
  Synthetic
cccuaucuuaucaacacuuc

SEQ ID NO: 107936 - RNA, 21 nt, Artificial Sequence
  Synthetic
ccccuaucuuaucaacacuuc

SEQ ID NO: 107937 - RNA, 22 nt, Artificial Sequence
  Synthetic
gccccuaucuuaucaacacuuc

SEQ ID NO: 107938 - RNA, 23 nt, Artificial Sequence
  Synthetic
ugccccuaucuuaucaacacuuc

SEQ ID NO: 107939 - RNA, 24 nt, Artificial Sequence
  Synthetic
augccccuaucuuaucaacacuuc

SEQ ID NO: 107940 - RNA, 18 nt, Artificial Sequence
  Synthetic
gaccuugaggcauacuuc

SEQ ID NO: 107941 - RNA, 19 nt, Artificial Sequence
  Synthetic
cgaccuugaggcauacuuc

SEQ ID NO: 107942 - RNA, 20 nt, Artificial Sequence
  Synthetic
ccgaccuugaggcauacuuc

SEQ ID NO: 107943 - RNA, 18 nt, Artificial Sequence
  Synthetic
ccguuuguccucuacuuc

SEQ ID NO: 107944 - RNA, 19 nt, Artificial Sequence
  Synthetic
cccguuuguccucuacuuc

SEQ ID NO: 107945 - RNA, 20 nt, Artificial Sequence
  Synthetic
gcccguuuguccucuacuuc

SEQ ID NO: 107946 - RNA, 21 nt, Artificial Sequence
  Synthetic
ugcccguuuguccucuacuuc

SEQ ID NO: 107947 - RNA, 22 nt, Artificial Sequence
  Synthetic
uugcccguuuguccucuacuuc

SEQ ID NO: 107948 - RNA, 23 nt, Artificial Sequence
  Synthetic
guugcccguuuguccucuacuuc

SEQ ID NO: 107949 - RNA, 24 nt, Artificial Sequence
  Synthetic
uguugcccguuuguccucuacuuc

SEQ ID NO: 107950 - RNA, 18 nt, Artificial Sequence
  Synthetic
uaaagaauuuggagcuuc

SEQ ID NO: 107951 - RNA, 19 nt, Artificial Sequence
  Synthetic
auaaagaauuuggagcuuc

SEQ ID NO: 107952 - RNA, 20 nt, Artificial Sequence
  Synthetic
uauaaagaauuuggagcuuc

SEQ ID NO: 107953 - RNA, 21 nt, Artificial Sequence
  Synthetic
  misc_feature (1)..(1): n is a, c, g, or u
nuauaaagaauuuggagcuuc

SEQ ID NO: 107954 - RNA, 22 nt, Artificial Sequence
  Synthetic
  misc_feature (2)..(2): n is a, c, g, or u
cnuauaaagaauuuggagcuuc

SEQ ID NO: 107955 - RNA, 23 nt, Artificial Sequence
  Synthetic
  misc_feature (3)..(3): n is a, c, g, or u
ccnuauaaagaauuuggagcuuc

SEQ ID NO: 107956 - RNA, 24 nt, Artificial Sequence
  Synthetic
  misc_feature (4)..(4): n is a, c, g, or u
cccnuauaaagaauuuggagcuuc

SEQ ID NO: 107957 - RNA, 18 nt, Artificial Sequence
  Synthetic
cccauaucgucaaucuuc

SEQ ID NO: 107958 - RNA, 19 nt, Artificial Sequence
  Synthetic
  misc_feature (1)..(1): n is a, c, g, or u
ncccauaucgucaaucuuc

SEQ ID NO: 107959 - RNA, 20 nt, Artificial Sequence
  Synthetic
  misc_feature (2)..(2): n is a, c, g, or u
cncccauaucgucaaucuuc

SEQ ID NO: 107960 - RNA, 21 nt, Artificial Sequence
  Synthetic
  misc_feature (3)..(3): n is a, c, g, or u
ucncccauaucgucaaucuuc

SEQ ID NO: 107961 - RNA, 22 nt, Artificial Sequence
  Synthetic
  misc_feature (4)..(4): n is a, c, g, or u
cucncccauaucgucaaucuuc

SEQ ID NO: 107962 - RNA, 23 nt, Artificial Sequence
  Synthetic
  misc_feature (5)..(5): n is a, c, g, or u
ccucncccauaucgucaaucuuc

SEQ ID NO: 107963 - RNA, 24 nt, Artificial Sequence
  Synthetic
  misc_feature (6)..(6): n is a, c, g, or u
gccucncccauaucgucaaucuuc

SEQ ID NO: 107964 - RNA, 18 nt, Artificial Sequence
  Synthetic
ugcugguggcuccaguuc

SEQ ID NO: 107965 - RNA, 19 nt, Artificial Sequence
  Synthetic
cugcugguggcuccaguuc

SEQ ID NO: 107966 - RNA, 20 nt, Artificial Sequence
  Synthetic
ccugcugguggcuccaguuc

SEQ ID NO: 107967 - RNA, 21 nt, Artificial Sequence
  Synthetic
uccugcugguggcuccaguuc

SEQ ID NO: 107968 - RNA, 22 nt, Artificial Sequence
  Synthetic
uuccugcugguggcuccaguuc

SEQ ID NO: 107969 - RNA, 23 nt, Artificial Sequence
  Synthetic
uuuccugcugguggcuccaguuc

SEQ ID NO: 107970 - RNA, 24 nt, Artificial Sequence
  Synthetic
  misc_feature (1)..(1): n is a, c, g, or u
nuuuccugcugguggcuccaguuc

SEQ ID NO: 107971 - RNA, 18 nt, Artificial Sequence
  Synthetic
ccauuuguucagugguuc

SEQ ID NO: 107972 - RNA, 19 nt, Artificial Sequence
  Synthetic
gccauuuguucagugguuc

SEQ ID NO: 107973 - RNA, 20 nt, Artificial Sequence
  Synthetic
ugccauuuguucagugguuc

SEQ ID NO: 107974 - RNA, 21 nt, Artificial Sequence
  Synthetic
gugccauuuguucagugguuc

SEQ ID NO: 107975 - RNA, 22 nt, Artificial Sequence
  Synthetic
agugccauuuguucagugguuc

SEQ ID NO: 107976 - RNA, 23 nt, Artificial Sequence
  Synthetic
uagugccauuuguucagugguuc

SEQ ID NO: 107977 - RNA, 24 nt, Artificial Sequence
  Synthetic
cuagugccauuuguucagugguuc

SEQ ID NO: 107978 - RNA, 18 nt, Artificial Sequence
  Synthetic
gcauaaauuggucuguuc

SEQ ID NO: 107979 - RNA, 19 nt, Artificial Sequence
  Synthetic
ggcauaaauuggucuguuc

SEQ ID NO: 107980 - RNA, 20 nt, Artificial Sequence
  Synthetic
aggcauaaauuggucuguuc

SEQ ID NO: 107981 - RNA, 21 nt, Artificial Sequence
  Synthetic
uaggcauaaauuggucuguuc

SEQ ID NO: 107982 - RNA, 22 nt, Artificial Sequence
  Synthetic
guaggcauaaauuggucuguuc

SEQ ID NO: 107983 - RNA, 23 nt, Artificial Sequence
  Synthetic
uguaggcauaaauuggucuguuc

SEQ ID NO: 107984 - RNA, 24 nt, Artificial Sequence
  Synthetic
cuguaggcauaaauuggucuguuc

SEQ ID NO: 107985 - RNA, 18 nt, Artificial Sequence
  Synthetic
  misc_feature (15)..(15): n is a, c, g, or u
ggcuacucccuuaanuuc

SEQ ID NO: 107986 - RNA, 19 nt, Artificial Sequence
  Synthetic
  misc_feature (16)..(16): n is a, c, g, or u
gggcuacucccuuaanuuc

SEQ ID NO: 107987 - RNA, 20 nt, Artificial Sequence
  Synthetic
  misc_feature (17)..(17): n is a, c, g, or u
ggggcuacucccuuaanuuc

SEQ ID NO: 107988 - RNA, 21 nt, Artificial Sequence
  Synthetic
  misc_feature (18)..(18): n is a, c, g, or u
uggggcuacucccuuaanuuc

SEQ ID NO: 107989 - RNA, 22 nt, Artificial Sequence
  Synthetic
  misc_feature (19)..(19): n is a, c, g, or u
uuggggcuacucccuuaanuuc

SEQ ID NO: 107990 - RNA, 23 nt, Artificial Sequence
  Synthetic
  misc_feature (20)..(20): n is a, c, g, or u
guuggggcuacucccuuaanuuc

SEQ ID NO: 107991 - RNA, 24 nt, Artificial Sequence
  Synthetic
  misc_feature (21)..(21): n is a, c, g, or u
cguuggggcuacucccuuaanuuc

SEQ ID NO: 107992 - RNA, 18 nt, Artificial Sequence
  Synthetic
ggaaauacaccuccuuuc

SEQ ID NO: 107993 - RNA, 19 nt, Artificial Sequence
  Synthetic
cggaaauacaccuccuuuc

SEQ ID NO: 107994 - RNA, 20 nt, Artificial Sequence
  Synthetic
ucggaaauacaccuccuuuc

SEQ ID NO: 107995 - RNA, 21 nt, Artificial Sequence
  Synthetic
cucggaaauacaccuccuuuc

SEQ ID NO: 107996 - RNA, 22 nt, Artificial Sequence
  Synthetic
ucucggaaauacaccuccuuuc

SEQ ID NO: 107997 - RNA, 23 nt, Artificial Sequence
  Synthetic
cucucggaaauacaccuccuuuc

SEQ ID NO: 107998 - RNA, 24 nt, Artificial Sequence
  Synthetic
ucucucggaaauacaccuccuuuc

SEQ ID NO: 107999 - RNA, 18 nt, Artificial Sequence
  Synthetic
  misc_feature (9)..(9): n is a, c, g, or u
ccaucaucnugggcuuuc

SEQ ID NO: 108000 - RNA, 19 nt, Artificial Sequence
  Synthetic
  misc_feature (10)..(10): n is a, c, g, or u
cccaucaucnugggcuuuc

SEQ ID NO: 108001 - RNA, 20 nt, Artificial Sequence
  Synthetic
  misc_feature (11)..(11): n is a, c, g, or u
ucccaucaucnugggcuuuc

SEQ ID NO: 108002 - RNA, 21 nt, Artificial Sequence
  Synthetic
  misc_feature (12)..(12): n is a, c, g, or u
aucccaucaucnugggcuuuc

SEQ ID NO: 108003 - RNA, 22 nt, Artificial Sequence
  Synthetic
  misc_feature (13)..(13): n is a, c, g, or u
caucccaucaucnugggcuuuc

SEQ ID NO: 108004 - RNA, 23 nt, Artificial Sequence
  Synthetic
  misc_feature (14)..(14): n is a, c, g, or u
ccaucccaucaucnugggcuuuc

SEQ ID NO: 108005 - RNA, 24 nt, Artificial Sequence
  Synthetic
  misc_feature (15)..(15): n is a, c, g, or u
cccaucccaucaucnugggcuuuc

SEQ ID NO: 108006 - RNA, 18 nt, Artificial Sequence
  Synthetic
ggacuucucucaauuuuc

SEQ ID NO: 108007 - RNA, 19 nt, Artificial Sequence
  Synthetic
uggacuucucucaauuuuc

SEQ ID NO: 108008 - RNA, 20 nt, Artificial Sequence
  Synthetic
guggacuucucucaauuuuc

SEQ ID NO: 108009 - RNA, 21 nt, Artificial Sequence
  Synthetic
gguggacuucucucaauuuuc

SEQ ID NO: 108010 - RNA, 22 nt, Artificial Sequence
  Synthetic
ugguggacuucucucaauuuuc

SEQ ID NO: 108011 - RNA, 23 nt, Artificial Sequence
  Synthetic
gugguggacuucucucaauuuuc

SEQ ID NO: 108012 - RNA, 24 nt, Artificial Sequence
  Synthetic
cgugguggacuucucucaauuuuc

SEQ ID NO: 108013 - RNA, 18 nt, Artificial Sequence
  Synthetic
  misc_feature (3)..(3): n is a, c, g, or u
  misc_feature (5)..(5): n is a, c, g, or u
  misc_feature (8)..(8): n is a, c, g, or u
aanunaancaauguuuuc

SEQ ID NO: 108014 - RNA, 19 nt, Artificial Sequence
  Synthetic
  misc_feature (4)..(4): n is a, c, g, or u
  misc_feature (6)..(6): n is a, c, g, or u
  misc_feature (9)..(9): n is a, c, g, or u
aaanunaancaauguuuuc

SEQ ID NO: 108015 - RNA, 20 nt, Artificial Sequence
  Synthetic
  misc_feature (1)..(1): n is a, c, g, or u
  misc_feature (5)..(5): n is a, c, g, or u
  misc_feature (7)..(7): n is a, c, g, or u
  misc_feature (10)..(10): n is a, c, g, or u
naaanunaancaauguuuuc

SEQ ID NO: 108016 - RNA, 21 nt, Artificial Sequence
  Synthetic
  misc_feature (1)..(2): n is a, c, g, or u
  misc_feature (6)..(6): n is a, c, g, or u
  misc_feature (8)..(8): n is a, c, g, or u
  misc_feature (11)..(11): n is a, c, g, or u
nnaaanunaancaauguuuuc

SEQ ID NO: 108017 - RNA, 22 nt, Artificial Sequence
  Synthetic
  misc_feature (2)..(3): n is a, c, g, or u
  misc_feature (7)..(7): n is a, c, g, or u
  misc_feature (9)..(9): n is a, c, g, or u
  misc_feature (12)..(12): n is a, c, g, or u
cnnaaanunaancaauguuuuc

SEQ ID NO: 108018 - RNA, 23 nt, Artificial Sequence
  Synthetic
  misc_feature (3)..(4): n is a, c, g, or u
  misc_feature (8)..(8): n is a, c, g, or u
  misc_feature (10)..(10): n is a, c, g, or u
  misc_feature (13)..(13): n is a, c, g, or u
acnnaaanunaancaauguuuuc

SEQ ID NO: 108019 - RNA, 24 nt, Artificial Sequence
  Synthetic
  misc_feature (4)..(5): n is a, c, g, or u
  misc_feature (9)..(9): n is a, c, g, or u
  misc_feature (11)..(11): n is a, c, g, or u
  misc_feature (14)..(14): n is a, c, g, or u
uacnnaaanunaancaauguuuuc

SEQ ID NO: 108020 - RNA, 18 nt, Artificial Sequence
  Synthetic
aggcagguccccuagaag

SEQ ID NO: 108021 - RNA, 19 nt, Artificial Sequence
  Synthetic
gaggcagguccccuagaag

SEQ ID NO: 108022 - RNA, 20 nt, Artificial Sequence
  Synthetic
cgaggcagguccccuagaag

SEQ ID NO: 108023 - RNA, 18 nt, Artificial Sequence
  Synthetic
uuacauacucuguggaag

SEQ ID NO: 108024 - RNA, 19 nt, Artificial Sequence
  Synthetic
uuuacauacucuguggaag

SEQ ID NO: 108025 - RNA, 20 nt, Artificial Sequence
  Synthetic
auuuacauacucuguggaag

SEQ ID NO: 108026 - RNA, 21 nt, Artificial Sequence
  Synthetic
uauuuacauacucuguggaag

SEQ ID NO: 108027 - RNA, 22 nt, Artificial Sequence
  Synthetic
uuauuuacauacucuguggaag

SEQ ID NO: 108028 - RNA, 23 nt, Artificial Sequence
  Synthetic
auuauuuacauacucuguggaag

SEQ ID NO: 108029 - RNA, 24 nt, Artificial Sequence
  Synthetic
cauuauuuacauacucuguggaag

SEQ ID NO: 108030 - RNA, 18 nt, Artificial Sequence
  Synthetic
gggauauguaauuggaag

SEQ ID NO: 108031 - RNA, 19 nt, Artificial Sequence
  Synthetic
ugggauauguaauuggaag

SEQ ID NO: 108032 - RNA, 20 nt, Artificial Sequence
  Synthetic
augggauauguaauuggaag

SEQ ID NO: 108033 - RNA, 21 nt, Artificial Sequence
  Synthetic
caugggauauguaauuggaag

SEQ ID NO: 108034 - RNA, 22 nt, Artificial Sequence
  Synthetic
ucaugggauauguaauuggaag

SEQ ID NO: 108035 - RNA, 23 nt, Artificial Sequence
  Synthetic
uucaugggauauguaauuggaag

SEQ ID NO: 108036 - RNA, 24 nt, Artificial Sequence
  Synthetic
  misc_feature (1)..(1): n is a, c, g, or u
nuucaugggauauguaauuggaag

SEQ ID NO: 108037 - RNA, 18 nt, Artificial Sequence
  Synthetic
cugucuuacuuuuggaag

SEQ ID NO: 108038 - RNA, 19 nt, Artificial Sequence
  Synthetic
ccugucuuacuuuuggaag

SEQ ID NO: 108039 - RNA, 20 nt, Artificial Sequence
  Synthetic
uccugucuuacuuuuggaag

SEQ ID NO: 108040 - RNA, 21 nt, Artificial Sequence
  Synthetic
uuccugucuuacuuuuggaag

SEQ ID NO: 108041 - RNA, 22 nt, Artificial Sequence
  Synthetic
uuuccugucuuacuuuuggaag

SEQ ID NO: 108042 - RNA, 23 nt, Artificial Sequence
  Synthetic
auuuccugucuuacuuuuggaag

SEQ ID NO: 108043 - RNA, 24 nt, Artificial Sequence
  Synthetic
cauuuccugucuuacuuuuggaag

SEQ ID NO: 108044 - RNA, 18 nt, Artificial Sequence
  Synthetic
aucccuuggacucauaag

SEQ ID NO: 108045 - RNA, 19 nt, Artificial Sequence
  Synthetic
uaucccuuggacucauaag

SEQ ID NO: 108046 - RNA, 20 nt, Artificial Sequence
  Synthetic
guaucccuuggacucauaag

SEQ ID NO: 108047 - RNA, 21 nt, Artificial Sequence
  Synthetic
aguaucccuuggacucauaag

SEQ ID NO: 108048 - RNA, 22 nt, Artificial Sequence
  Synthetic
uaguaucccuuggacucauaag

SEQ ID NO: 108049 - RNA, 23 nt, Artificial Sequence
  Synthetic
uuaguaucccuuggacucauaag

SEQ ID NO: 108050 - RNA, 24 nt, Artificial Sequence
  Synthetic
guuaguaucccuuggacucauaag

SEQ ID NO: 108051 - RNA, 18 nt, Artificial Sequence
  Synthetic
  misc_feature (6)..(6): n is a, c, g, or u
  misc_feature (10)..(10): n is a, c, g, or u
gcuggnauunuauauaag

SEQ ID NO: 108052 - RNA, 19 nt, Artificial Sequence
  Synthetic
  misc_feature (7)..(7): n is a, c, g, or u
  misc_feature (11)..(11): n is a, c, g, or u
ggcuggnauunuauauaag

SEQ ID NO: 108053 - RNA, 20 nt, Artificial Sequence
  Synthetic
  misc_feature (8)..(8): n is a, c, g, or u
  misc_feature (12)..(12): n is a, c, g, or u
aggcuggnauunuauauaag

SEQ ID NO: 108054 - RNA, 21 nt, Artificial Sequence
  Synthetic
  misc_feature (9)..(9): n is a, c, g, or u
  misc_feature (13)..(13): n is a, c, g, or u
aaggcuggnauunuauauaag

SEQ ID NO: 108055 - RNA, 22 nt, Artificial Sequence
  Synthetic
  misc_feature (10)..(10): n is a, c, g, or u
  misc_feature (14)..(14): n is a, c, g, or u
gaaggcuggnauunuauauaag

SEQ ID NO: 108056 - RNA, 23 nt, Artificial Sequence
  Synthetic
  misc_feature (11)..(11): n is a, c, g, or u
  misc_feature (15)..(15): n is a, c, g, or u
ggaaggcuggnauunuauauaag

SEQ ID NO: 108057 - RNA, 24 nt, Artificial Sequence
  Synthetic
  misc_feature (12)..(12): n is a, c, g, or u
  misc_feature (16)..(16): n is a, c, g, or u
uggaaggcuggnauunuauauaag

SEQ ID NO: 108058 - RNA, 18 nt, Artificial Sequence
  Synthetic
ugggaacaagagcuacag

SEQ ID NO: 108059 - RNA, 19 nt, Artificial Sequence
  Synthetic
uugggaacaagagcuacag

SEQ ID NO: 108060 - RNA, 20 nt, Artificial Sequence
  Synthetic
cuugggaacaagagcuacag

SEQ ID NO: 108061 - RNA, 21 nt, Artificial Sequence
  Synthetic
ucuugggaacaagagcuacag

SEQ ID NO: 108062 - RNA, 22 nt, Artificial Sequence
  Synthetic
uucuugggaacaagagcuacag

SEQ ID NO: 108063 - RNA, 23 nt, Artificial Sequence
  Synthetic
auucuugggaacaagagcuacag

SEQ ID NO: 108064 - RNA, 24 nt, Artificial Sequence
  Synthetic
uauucuugggaacaagagcuacag

SEQ ID NO: 108065 - RNA, 18 nt, Artificial Sequence
  Synthetic
ccccugcucguguuacag

SEQ ID NO: 108066 - RNA, 19 nt, Artificial Sequence
  Synthetic
accccugcucguguuacag

SEQ ID NO: 108067 - RNA, 20 nt, Artificial Sequence
  Synthetic
gaccccugcucguguuacag

SEQ ID NO: 108068 - RNA, 21 nt, Artificial Sequence
  Synthetic
ggaccccugcucguguuacag

SEQ ID NO: 108069 - RNA, 22 nt, Artificial Sequence
  Synthetic
aggaccccugcucguguuacag

SEQ ID NO: 108070 - RNA, 23 nt, Artificial Sequence
  Synthetic
uaggaccccugcucguguuacag

SEQ ID NO: 108071 - RNA, 24 nt, Artificial Sequence
  Synthetic
cuaggaccccugcucguguuacag

SEQ ID NO: 108072 - RNA, 18 nt, Artificial Sequence
  Synthetic
uucuuucccgaucaccag

SEQ ID NO: 108073 - RNA, 19 nt, Artificial Sequence
  Synthetic
auucuuucccgaucaccag

SEQ ID NO: 108074 - RNA, 20 nt, Artificial Sequence
  Synthetic
gauucuuucccgaucaccag

SEQ ID NO: 108075 - RNA, 21 nt, Artificial Sequence
  Synthetic
ggauucuuucccgaucaccag

SEQ ID NO: 108076 - RNA, 22 nt, Artificial Sequence
  Synthetic
gggauucuuucccgaucaccag

SEQ ID NO: 108077 - RNA, 23 nt, Artificial Sequence
  Synthetic
ugggauucuuucccgaucaccag

SEQ ID NO: 108078 - RNA, 24 nt, Artificial Sequence
  Synthetic
cugggauucuuucccgaucaccag

SEQ ID NO: 108079 - RNA, 18 nt, Artificial Sequence
  Synthetic
aggaacaucaacuaccag

SEQ ID NO: 108080 - RNA, 19 nt, Artificial Sequence
  Synthetic
caggaacaucaacuaccag

SEQ ID NO: 108081 - RNA, 20 nt, Artificial Sequence
  Synthetic
ccaggaacaucaacuaccag

SEQ ID NO: 108082 - RNA, 21 nt, Artificial Sequence
  Synthetic
uccaggaacaucaacuaccag

SEQ ID NO: 108083 - RNA, 22 nt, Artificial Sequence
  Synthetic
uuccaggaacaucaacuaccag

SEQ ID NO: 108084 - RNA, 23 nt, Artificial Sequence
  Synthetic
cuuccaggaacaucaacuaccag

SEQ ID NO: 108085 - RNA, 24 nt, Artificial Sequence
  Synthetic
acuuccaggaacaucaacuaccag

SEQ ID NO: 108086 - RNA, 18 nt, Artificial Sequence
  Synthetic
  misc_feature (13)..(13): n is a, c, g, or u
agcucugcuagancccag

SEQ ID NO: 108087 - RNA, 19 nt, Artificial Sequence
  Synthetic
  misc_feature (14)..(14): n is a, c, g, or u
aagcucugcuagancccag

SEQ ID NO: 108088 - RNA, 20 nt, Artificial Sequence
  Synthetic
  misc_feature (15)..(15): n is a, c, g, or u
caagcucugcuagancccag

SEQ ID NO: 108089 - RNA, 21 nt, Artificial Sequence
  Synthetic
  misc_feature (16)..(16): n is a, c, g, or u
ccaagcucugcuagancccag

SEQ ID NO: 108090 - RNA, 22 nt, Artificial Sequence
  Synthetic
  misc_feature (17)..(17): n is a, c, g, or u
accaagcucugcuagancccag

SEQ ID NO: 108091 - RNA, 23 nt, Artificial Sequence
  Synthetic
  misc_feature (18)..(18): n is a, c, g, or u
caccaagcucugcuagancccag

SEQ ID NO: 108092 - RNA, 24 nt, Artificial Sequence
  Synthetic
  misc_feature (19)..(19): n is a, c, g, or u
ccaccaagcucugcuagancccag

SEQ ID NO: 108093 - RNA, 18 nt, Artificial Sequence
  Synthetic
  misc_feature (5)..(5): n is a, c, g, or u
ccaanucaaacaauccag

SEQ ID NO: 108094 - RNA, 19 nt, Artificial Sequence
  Synthetic
  misc_feature (6)..(6): n is a, c, g, or u
gccaanucaaacaauccag

SEQ ID NO: 108095 - RNA, 20 nt, Artificial Sequence
  Synthetic
  misc_feature (7)..(7): n is a, c, g, or u
agccaanucaaacaauccag

SEQ ID NO: 108096 - RNA, 21 nt, Artificial Sequence
  Synthetic
  misc_feature (8)..(8): n is a, c, g, or u
gagccaanucaaacaauccag

SEQ ID NO: 108097 - RNA, 22 nt, Artificial Sequence
  Synthetic
  misc_feature (9)..(9): n is a, c, g, or u
ggagccaanucaaacaauccag

SEQ ID NO: 108098 - RNA, 23 nt, Artificial Sequence
  Synthetic
  misc_feature (10)..(10): n is a, c, g, or u
cggagccaanucaaacaauccag

SEQ ID NO: 108099 - RNA, 24 nt, Artificial Sequence
  Synthetic
  misc_feature (11)..(11): n is a, c, g, or u
ucggagccaanucaaacaauccag

SEQ ID NO: 108100 - RNA, 18 nt, Artificial Sequence
  Synthetic
aacucccucgccucgcag

SEQ ID NO: 108101 - RNA, 19 nt, Artificial Sequence
  Synthetic
gaacucccucgccucgcag

SEQ ID NO: 108102 - RNA, 20 nt, Artificial Sequence
  Synthetic
agaacucccucgccucgcag

SEQ ID NO: 108103 - RNA, 21 nt, Artificial Sequence
  Synthetic
aagaacucccucgccucgcag

SEQ ID NO: 108104 - RNA, 22 nt, Artificial Sequence
  Synthetic
gaagaacucccucgccucgcag

SEQ ID NO: 108105 - RNA, 23 nt, Artificial Sequence
  Synthetic
agaagaacucccucgccucgcag

SEQ ID NO: 108106 - RNA, 24 nt, Artificial Sequence
  Synthetic
aagaagaacucccucgccucgcag

SEQ ID NO: 108107 - RNA, 18 nt, Artificial Sequence
  Synthetic
gccuccaccaaucggcag

SEQ ID NO: 108108 - RNA, 19 nt, Artificial Sequence
  Synthetic
ugccuccaccaaucggcag

SEQ ID NO: 108109 - RNA, 20 nt, Artificial Sequence
  Synthetic
cugccuccaccaaucggcag

SEQ ID NO: 108110 - RNA, 21 nt, Artificial Sequence
  Synthetic
ccugccuccaccaaucggcag

SEQ ID NO: 108111 - RNA, 22 nt, Artificial Sequence
  Synthetic
uccugccuccaccaaucggcag

SEQ ID NO: 108112 - RNA, 23 nt, Artificial Sequence
  Synthetic
cuccugccuccaccaaucggcag

SEQ ID NO: 108113 - RNA, 24 nt, Artificial Sequence
  Synthetic
ccuccugccuccaccaaucggcag

SEQ ID NO: 108114 - RNA, 18 nt, Artificial Sequence
  Synthetic
cauccucaggccaugcag

SEQ ID NO: 108115 - RNA, 19 nt, Artificial Sequence
  Synthetic
ucauccucaggccaugcag

SEQ ID NO: 108116 - RNA, 20 nt, Artificial Sequence
  Synthetic
gucauccucaggccaugcag

SEQ ID NO: 108117 - RNA, 21 nt, Artificial Sequence
  Synthetic
agucauccucaggccaugcag

SEQ ID NO: 108118 - RNA, 22 nt, Artificial Sequence
  Synthetic
cagucauccucaggccaugcag

SEQ ID NO: 108119 - RNA, 23 nt, Artificial Sequence
  Synthetic
acagucauccucaggccaugcag

SEQ ID NO: 108120 - RNA, 24 nt, Artificial Sequence
  Synthetic
gacagucauccucaggccaugcag

SEQ ID NO: 108121 - RNA, 18 nt, Artificial Sequence
  Synthetic
  misc_feature (8)..(8): n is a, c, g, or u
  misc_feature (15)..(15): n is a, c, g, or u
uggccagnggcaaancag

SEQ ID NO: 108122 - RNA, 19 nt, Artificial Sequence
  Synthetic
  misc_feature (1)..(1): n is a, c, g, or u
  misc_feature (9)..(9): n is a, c, g, or u
  misc_feature (16)..(16): n is a, c, g, or u
nuggccagnggcaaancag

SEQ ID NO: 108123 - RNA, 20 nt, Artificial Sequence
  Synthetic
  misc_feature (2)..(2): n is a, c, g, or u
  misc_feature (10)..(10): n is a, c, g, or u
  misc_feature (17)..(17): n is a, c, g, or u
anuggccagnggcaaancag

SEQ ID NO: 108124 - RNA, 21 nt, Artificial Sequence
  Synthetic
  misc_feature (3)..(3): n is a, c, g, or u
  misc_feature (11)..(11): n is a, c, g, or u
  misc_feature (18)..(18): n is a, c, g, or u
canuggccagnggcaaancag

SEQ ID NO: 108125 - RNA, 22 nt, Artificial Sequence
  Synthetic
  misc_feature (4)..(4): n is a, c, g, or u
  misc_feature (12)..(12): n is a, c, g, or u
  misc_feature (19)..(19): n is a, c, g, or u
ucanuggccagnggcaaancag

SEQ ID NO: 108126 - RNA, 23 nt, Artificial Sequence
  Synthetic
  misc_feature (5)..(5): n is a, c, g, or u
  misc_feature (13)..(13): n is a, c, g, or u
  misc_feature (20)..(20): n is a, c, g, or u
aucanuggccagnggcaaancag

SEQ ID NO: 108127 - RNA, 24 nt, Artificial Sequence
  Synthetic
  misc_feature (6)..(6): n is a, c, g, or u
  misc_feature (14)..(14): n is a, c, g, or u
  misc_feature (21)..(21): n is a, c, g, or u
gaucanuggccagnggcaaancag

SEQ ID NO: 108128 - RNA, 18 nt, Artificial Sequence
  Synthetic
ccaccaaucggcagucag

SEQ ID NO: 108129 - RNA, 19 nt, Artificial Sequence
  Synthetic
uccaccaaucggcagucag

SEQ ID NO: 108130 - RNA, 20 nt, Artificial Sequence
  Synthetic
cuccaccaaucggcagucag

SEQ ID NO: 108131 - RNA, 21 nt, Artificial Sequence
  Synthetic
ccuccaccaaucggcagucag

SEQ ID NO: 108132 - RNA, 22 nt, Artificial Sequence
  Synthetic
gccuccaccaaucggcagucag

SEQ ID NO: 108133 - RNA, 23 nt, Artificial Sequence
  Synthetic
ugccuccaccaaucggcagucag

SEQ ID NO: 108134 - RNA, 24 nt, Artificial Sequence
  Synthetic
cugccuccaccaaucggcagucag

SEQ ID NO: 108135 - RNA, 18 nt, Artificial Sequence
  Synthetic
  misc_feature (4)..(4): n is a, c, g, or u
  misc_feature (8)..(8): n is a, c, g, or u
uggnauunuauauaagag

SEQ ID NO: 108136 - RNA, 19 nt, Artificial Sequence
  Synthetic
  misc_feature (5)..(5): n is a, c, g, or u
  misc_feature (9)..(9): n is a, c, g, or u
cuggnauunuauauaagag

SEQ ID NO: 108137 - RNA, 20 nt, Artificial Sequence
  Synthetic
  misc_feature (6)..(6): n is a, c, g, or u
  misc_feature (10)..(10): n is a, c, g, or u
gcuggnauunuauauaagag

SEQ ID NO: 108138 - RNA, 21 nt, Artificial Sequence
  Synthetic
  misc_feature (7)..(7): n is a, c, g, or u
  misc_feature (11)..(11): n is a, c, g, or u
ggcuggnauunuauauaagag

SEQ ID NO: 108139 - RNA, 22 nt, Artificial Sequence
  Synthetic
  misc_feature (8)..(8): n is a, c, g, or u
  misc_feature (12)..(12): n is a, c, g, or u
aggcuggnauunuauauaagag

SEQ ID NO: 108140 - RNA, 23 nt, Artificial Sequence
  Synthetic
  misc_feature (9)..(9): n is a, c, g, or u
  misc_feature (13)..(13): n is a, c, g, or u
aaggcuggnauunuauauaagag

SEQ ID NO: 108141 - RNA, 24 nt, Artificial Sequence
  Synthetic
  misc_feature (10)..(10): n is a, c, g, or u
  misc_feature (14)..(14): n is a, c, g, or u
gaaggcuggnauunuauauaagag

SEQ ID NO: 108142 - RNA, 18 nt, Artificial Sequence
  Synthetic
ccucacaauaccacagag

SEQ ID NO: 108143 - RNA, 19 nt, Artificial Sequence
  Synthetic
uccucacaauaccacagag

SEQ ID NO: 108144 - RNA, 20 nt, Artificial Sequence
  Synthetic
auccucacaauaccacagag

SEQ ID NO: 108145 - RNA, 21 nt, Artificial Sequence
  Synthetic
aauccucacaauaccacagag

SEQ ID NO: 108146 - RNA, 22 nt, Artificial Sequence
  Synthetic
gaauccucacaauaccacagag

SEQ ID NO: 108147 - RNA, 23 nt, Artificial Sequence
  Synthetic
agaauccucacaauaccacagag

SEQ ID NO: 108148 - RNA, 24 nt, Artificial Sequence
  Synthetic
aagaauccucacaauaccacagag

SEQ ID NO: 108149 - RNA, 18 nt, Artificial Sequence
  Synthetic
  misc_feature (11)..(11): n is a, c, g, or u
cucugcuagancccagag

SEQ ID NO: 108150 - RNA, 19 nt, Artificial Sequence
  Synthetic
  misc_feature (12)..(12): n is a, c, g, or u
gcucugcuagancccagag

SEQ ID NO: 108151 - RNA, 20 nt, Artificial Sequence
  Synthetic
  misc_feature (13)..(13): n is a, c, g, or u
agcucugcuagancccagag

SEQ ID NO: 108152 - RNA, 21 nt, Artificial Sequence
  Synthetic
  misc_feature (14)..(14): n is a, c, g, or u
aagcucugcuagancccagag

SEQ ID NO: 108153 - RNA, 22 nt, Artificial Sequence
  Synthetic
  misc_feature (15)..(15): n is a, c, g, or u
caagcucugcuagancccagag

SEQ ID NO: 108154 - RNA, 23 nt, Artificial Sequence
  Synthetic
  misc_feature (16)..(16): n is a, c, g, or u
ccaagcucugcuagancccagag

SEQ ID NO: 108155 - RNA, 24 nt, Artificial Sequence
  Synthetic
  misc_feature (17)..(17): n is a, c, g, or u
accaagcucugcuagancccagag

SEQ ID NO: 108156 - RNA, 18 nt, Artificial Sequence
  Synthetic
aguuaaugaaaaaaggag

SEQ ID NO: 108157 - RNA, 19 nt, Artificial Sequence
  Synthetic
caguuaaugaaaaaaggag

SEQ ID NO: 108158 - RNA, 20 nt, Artificial Sequence
  Synthetic
acaguuaaugaaaaaaggag

SEQ ID NO: 108159 - RNA, 21 nt, Artificial Sequence
  Synthetic
uacaguuaaugaaaaaaggag

SEQ ID NO: 108160 - RNA, 22 nt, Artificial Sequence
  Synthetic
uuacaguuaaugaaaaaaggag

SEQ ID NO: 108161 - RNA, 23 nt, Artificial Sequence
  Synthetic
cuuacaguuaaugaaaaaaggag

SEQ ID NO: 108162 - RNA, 24 nt, Artificial Sequence
  Synthetic
ucuuacaguuaaugaaaaaaggag

SEQ ID NO: 108163 - RNA, 18 nt, Artificial Sequence
  Synthetic
gaggaguugggggaggag

SEQ ID NO: 108164 - RNA, 19 nt, Artificial Sequence
  Synthetic
ggaggaguugggggaggag

SEQ ID NO: 108165 - RNA, 20 nt, Artificial Sequence
  Synthetic
gggaggaguugggggaggag

SEQ ID NO: 108166 - RNA, 21 nt, Artificial Sequence
  Synthetic
ugggaggaguugggggaggag

SEQ ID NO: 108167 - RNA, 22 nt, Artificial Sequence
  Synthetic
cugggaggaguugggggaggag

SEQ ID NO: 108168 - RNA, 23 nt, Artificial Sequence
  Synthetic
acugggaggaguugggggaggag

SEQ ID NO: 108169 - RNA, 24 nt, Artificial Sequence
  Synthetic
gacugggaggaguugggggaggag

SEQ ID NO: 108170 - RNA, 18 nt, Artificial Sequence
  Synthetic
  misc_feature (6)..(6): n is a, c, g, or u
uuuaangacugggaggag

SEQ ID NO: 108171 - RNA, 19 nt, Artificial Sequence
  Synthetic
  misc_feature (1)..(1): n is a, c, g, or u
  misc_feature (7)..(7): n is a, c, g, or u
nuuuaangacugggaggag

SEQ ID NO: 108172 - RNA, 20 nt, Artificial Sequence
  Synthetic
  misc_feature (2)..(2): n is a, c, g, or u
  misc_feature (8)..(8): n is a, c, g, or u
unuuuaangacugggaggag

SEQ ID NO: 108173 - RNA, 21 nt, Artificial Sequence
  Synthetic
  misc_feature (1)..(1): n is a, c, g, or u
  misc_feature (3)..(3): n is a, c, g, or u
  misc_feature (9)..(9): n is a, c, g, or u
nunuuuaangacugggaggag

SEQ ID NO: 108174 - RNA, 22 nt, Artificial Sequence
  Synthetic
  misc_feature (2)..(2): n is a, c, g, or u
  misc_feature (4)..(4): n is a, c, g, or u
  misc_feature (10)..(10): n is a, c, g, or u
ununuuuaangacugggaggag

SEQ ID NO: 108175 - RNA, 23 nt, Artificial Sequence
  Synthetic
  misc_feature (3)..(3): n is a, c, g, or u
  misc_feature (5)..(5): n is a, c, g, or u
  misc_feature (11)..(11): n is a, c, g, or u
gununuuuaangacugggaggag

SEQ ID NO: 108176 - RNA, 24 nt, Artificial Sequence
  Synthetic
  misc_feature (4)..(4): n is a, c, g, or u
  misc_feature (6)..(6): n is a, c, g, or u
  misc_feature (12)..(12): n is a, c, g, or u
ugununuuuaangacugggaggag

SEQ ID NO: 108177 - RNA, 18 nt, Artificial Sequence
  Synthetic
  misc_feature (1)..(1): n is a, c, g, or u
  misc_feature (8)..(8): n is a, c, g, or u
nggcaaancagguaggag

SEQ ID NO: 108178 - RNA, 19 nt, Artificial Sequence
  Synthetic
  misc_feature (2)..(2): n is a, c, g, or u
  misc_feature (9)..(9): n is a, c, g, or u
gnggcaaancagguaggag

SEQ ID NO: 108179 - RNA, 20 nt, Artificial Sequence
  Synthetic
  misc_feature (3)..(3): n is a, c, g, or u
  misc_feature (10)..(10): n is a, c, g, or u
agnggcaaancagguaggag

SEQ ID NO: 108180 - RNA, 21 nt, Artificial Sequence
  Synthetic
  misc_feature (4)..(4): n is a, c, g, or u
  misc_feature (11)..(11): n is a, c, g, or u
cagnggcaaancagguaggag

SEQ ID NO: 108181 - RNA, 22 nt, Artificial Sequence
  Synthetic
  misc_feature (5)..(5): n is a, c, g, or u
  misc_feature (12)..(12): n is a, c, g, or u
ccagnggcaaancagguaggag

SEQ ID NO: 108182 - RNA, 23 nt, Artificial Sequence
  Synthetic
  misc_feature (6)..(6): n is a, c, g, or u
  misc_feature (13)..(13): n is a, c, g, or u
gccagnggcaaancagguaggag

SEQ ID NO: 108183 - RNA, 24 nt, Artificial Sequence
  Synthetic
  misc_feature (7)..(7): n is a, c, g, or u
  misc_feature (14)..(14): n is a, c, g, or u
ggccagnggcaaancagguaggag

SEQ ID NO: 108184 - RNA, 18 nt, Artificial Sequence
  Synthetic
cucgcagccggucuggag

SEQ ID NO: 108185 - RNA, 19 nt, Artificial Sequence
  Synthetic
gcucgcagccggucuggag

SEQ ID NO: 108186 - RNA, 20 nt, Artificial Sequence
  Synthetic
ugcucgcagccggucuggag

SEQ ID NO: 108187 - RNA, 21 nt, Artificial Sequence
  Synthetic
uugcucgcagccggucuggag

SEQ ID NO: 108188 - RNA, 22 nt, Artificial Sequence
  Synthetic
uuugcucgcagccggucuggag

SEQ ID NO: 108189 - RNA, 23 nt, Artificial Sequence
  Synthetic
uuuugcucgcagccggucuggag

SEQ ID NO: 108190 - RNA, 24 nt, Artificial Sequence
  Synthetic
guuuugcucgcagccggucuggag

SEQ ID NO: 108191 - RNA, 18 nt, Artificial Sequence
  Synthetic
auuuggugucuuuuggag

SEQ ID NO: 108192 - RNA, 19 nt, Artificial Sequence
  Synthetic
uauuuggugucuuuuggag

SEQ ID NO: 108193 - RNA, 20 nt, Artificial Sequence
  Synthetic
guauuuggugucuuuuggag

SEQ ID NO: 108194 - RNA, 21 nt, Artificial Sequence
  Synthetic
aguauuuggugucuuuuggag

SEQ ID NO: 108195 - RNA, 22 nt, Artificial Sequence
  Synthetic
gaguauuuggugucuuuuggag

SEQ ID NO: 108196 - RNA, 23 nt, Artificial Sequence
  Synthetic
ugaguauuuggugucuuuuggag

SEQ ID NO: 108197 - RNA, 24 nt, Artificial Sequence
  Synthetic
uugaguauuuggugucuuuuggag

SEQ ID NO: 108198 - RNA, 18 nt, Artificial Sequence
  Synthetic
  misc_feature (16)..(16): n is a, c, g, or u
ucaccauacagcacunag

SEQ ID NO: 108199 - RNA, 19 nt, Artificial Sequence
  Synthetic
  misc_feature (17)..(17): n is a, c, g, or u
cucaccauacagcacunag

SEQ ID NO: 108200 - RNA, 20 nt, Artificial Sequence
  Synthetic
  misc_feature (18)..(18): n is a, c, g, or u
ccucaccauacagcacunag

SEQ ID NO: 108201 - RNA, 21 nt, Artificial Sequence
  Synthetic
  misc_feature (19)..(19): n is a, c, g, or u
accucaccauacagcacunag

SEQ ID NO: 108202 - RNA, 22 nt, Artificial Sequence
  Synthetic
  misc_feature (20)..(20): n is a, c, g, or u
caccucaccauacagcacunag

SEQ ID NO: 108203 - RNA, 23 nt, Artificial Sequence
  Synthetic
  misc_feature (21)..(21): n is a, c, g, or u
ucaccucaccauacagcacunag

SEQ ID NO: 108204 - RNA, 24 nt, Artificial Sequence
  Synthetic
  misc_feature (22)..(22): n is a, c, g, or u
uucaccucaccauacagcacunag

SEQ ID NO: 108205 - RNA, 18 nt, Artificial Sequence
  Synthetic
acgaggcagguccccuag

SEQ ID NO: 108206 - RNA, 19 nt, Artificial Sequence
  Synthetic
gacgaggcagguccccuag

SEQ ID NO: 108207 - RNA, 20 nt, Artificial Sequence
  Synthetic
cgacgaggcagguccccuag

SEQ ID NO: 108208 - RNA, 21 nt, Artificial Sequence
  Synthetic
acgacgaggcagguccccuag

SEQ ID NO: 108209 - RNA, 22 nt, Artificial Sequence
  Synthetic
gacgacgaggcagguccccuag

SEQ ID NO: 108210 - RNA, 23 nt, Artificial Sequence
  Synthetic
agacgacgaggcagguccccuag

SEQ ID NO: 108211 - RNA, 24 nt, Artificial Sequence
  Synthetic
uagacgacgaggcagguccccuag

SEQ ID NO: 108212 - RNA, 18 nt, Artificial Sequence
  Synthetic
cuucucucaauuuucuag

SEQ ID NO: 108213 - RNA, 19 nt, Artificial Sequence
  Synthetic
acuucucucaauuuucuag

SEQ ID NO: 108214 - RNA, 20 nt, Artificial Sequence
  Synthetic
gacuucucucaauuuucuag

SEQ ID NO: 108215 - RNA, 21 nt, Artificial Sequence
  Synthetic
ggacuucucucaauuuucuag

SEQ ID NO: 108216 - RNA, 22 nt, Artificial Sequence
  Synthetic
uggacuucucucaauuuucuag

SEQ ID NO: 108217 - RNA, 23 nt, Artificial Sequence
  Synthetic
guggacuucucucaauuuucuag

SEQ ID NO: 108218 - RNA, 24 nt, Artificial Sequence
  Synthetic
gguggacuucucucaauuuucuag

SEQ ID NO: 108219 - RNA, 18 nt, Artificial Sequence
  Synthetic
  misc_feature (15)..(15): n is a, c, g, or u
guugggggaggaganuag

SEQ ID NO: 108220 - RNA, 19 nt, Artificial Sequence
  Synthetic
  misc_feature (16)..(16): n is a, c, g, or u
aguugggggaggaganuag

SEQ ID NO: 108221 - RNA, 20 nt, Artificial Sequence
  Synthetic
  misc_feature (17)..(17): n is a, c, g, or u
gaguugggggaggaganuag

SEQ ID NO: 108222 - RNA, 21 nt, Artificial Sequence
  Synthetic
  misc_feature (18)..(18): n is a, c, g, or u
ggaguugggggaggaganuag

SEQ ID NO: 108223 - RNA, 22 nt, Artificial Sequence
  Synthetic
  misc_feature (19)..(19): n is a, c, g, or u
aggaguugggggaggaganuag

SEQ ID NO: 108224 - RNA, 23 nt, Artificial Sequence
  Synthetic
  misc_feature (20)..(20): n is a, c, g, or u
gaggaguugggggaggaganuag

SEQ ID NO: 108225 - RNA, 24 nt, Artificial Sequence
  Synthetic
  misc_feature (21)..(21): n is a, c, g, or u
ggaggaguugggggaggaganuag

SEQ ID NO: 108226 - RNA, 18 nt, Artificial Sequence
  Synthetic
cccuaauaaaaccaaacg

SEQ ID NO: 108227 - RNA, 19 nt, Artificial Sequence
  Synthetic
acccuaauaaaaccaaacg

SEQ ID NO: 108228 - RNA, 20 nt, Artificial Sequence
  Synthetic
aacccuaauaaaaccaaacg

SEQ ID NO: 108229 - RNA, 21 nt, Artificial Sequence
  Synthetic
  misc_feature (1)..(1): n is a, c, g, or u
naacccuaauaaaaccaaacg

SEQ ID NO: 108230 - RNA, 22 nt, Artificial Sequence
  Synthetic
  misc_feature (2)..(2): n is a, c, g, or u
unaacccuaauaaaaccaaacg

SEQ ID NO: 108231 - RNA, 23 nt, Artificial Sequence
  Synthetic
  misc_feature (3)..(3): n is a, c, g, or u
uunaacccuaauaaaaccaaacg

SEQ ID NO: 108232 - RNA, 24 nt, Artificial Sequence
  Synthetic
  misc_feature (4)..(4): n is a, c, g, or u
uuunaacccuaauaaaaccaaacg

SEQ ID NO: 108233 - RNA, 18 nt, Artificial Sequence
  Synthetic
  misc_feature (10)..(10): n is a, c, g, or u
ccccguugcncggcaacg

SEQ ID NO: 108234 - RNA, 19 nt, Artificial Sequence
  Synthetic
  misc_feature (11)..(11): n is a, c, g, or u
accccguugcncggcaacg

SEQ ID NO: 108235 - RNA, 20 nt, Artificial Sequence
  Synthetic
  misc_feature (12)..(12): n is a, c, g, or u
uaccccguugcncggcaacg

SEQ ID NO: 108236 - RNA, 18 nt, Artificial Sequence
  Synthetic
  misc_feature (4)..(4): n is a, c, g, or u
cucncagcaaugucaacg

SEQ ID NO: 108237 - RNA, 19 nt, Artificial Sequence
  Synthetic
  misc_feature (5)..(5): n is a, c, g, or u
acucncagcaaugucaacg

SEQ ID NO: 108238 - RNA, 20 nt, Artificial Sequence
  Synthetic
  misc_feature (6)..(6): n is a, c, g, or u
gacucncagcaaugucaacg

SEQ ID NO: 108239 - RNA, 21 nt, Artificial Sequence
  Synthetic
  misc_feature (7)..(7): n is a, c, g, or u
ggacucncagcaaugucaacg

SEQ ID NO: 108240 - RNA, 22 nt, Artificial Sequence
  Synthetic
  misc_feature (8)..(8): n is a, c, g, or u
uggacucncagcaaugucaacg

SEQ ID NO: 108241 - RNA, 23 nt, Artificial Sequence
  Synthetic
  misc_feature (9)..(9): n is a, c, g, or u
uuggacucncagcaaugucaacg

SEQ ID NO: 108242 - RNA, 24 nt, Artificial Sequence
  Synthetic
  misc_feature (10)..(10): n is a, c, g, or u
cuuggacucncagcaaugucaacg

SEQ ID NO: 108243 - RNA, 18 nt, Artificial Sequence
  Synthetic
aacuacuguuguuagacg

SEQ ID NO: 108244 - RNA, 19 nt, Artificial Sequence
  Synthetic
aaacuacuguuguuagacg

SEQ ID NO: 108245 - RNA, 20 nt, Artificial Sequence
  Synthetic
gaaacuacuguuguuagacg

SEQ ID NO: 108246 - RNA, 21 nt, Artificial Sequence
  Synthetic
ggaaacuacuguuguuagacg

SEQ ID NO: 108247 - RNA, 22 nt, Artificial Sequence
  Synthetic
cggaaacuacuguuguuagacg

SEQ ID NO: 108248 - RNA, 23 nt, Artificial Sequence
  Synthetic
ccggaaacuacuguuguuagacg

SEQ ID NO: 108249 - RNA, 24 nt, Artificial Sequence
  Synthetic
uccggaaacuacuguuguuagacg

SEQ ID NO: 108250 - RNA, 18 nt, Artificial Sequence
  Synthetic
cgacccgucucggggccg

SEQ ID NO: 108251 - RNA, 19 nt, Artificial Sequence
  Synthetic
acgacccgucucggggccg

SEQ ID NO: 108252 - RNA, 20 nt, Artificial Sequence
  Synthetic
gacgacccgucucggggccg

SEQ ID NO: 108253 - RNA, 18 nt, Artificial Sequence
  Synthetic
  misc_feature (4)..(4): n is a, c, g, or u
  misc_feature (6)..(6): n is a, c, g, or u
ucuncnucugccguuccg

SEQ ID NO: 108254 - RNA, 19 nt, Artificial Sequence
  Synthetic
  misc_feature (5)..(5): n is a, c, g, or u
  misc_feature (7)..(7): n is a, c, g, or u
uucuncnucugccguuccg

SEQ ID NO: 108255 - RNA, 20 nt, Artificial Sequence
  Synthetic
  misc_feature (6)..(6): n is a, c, g, or u
  misc_feature (8)..(8): n is a, c, g, or u
cuucuncnucugccguuccg

SEQ ID NO: 108256 - RNA, 21 nt, Artificial Sequence
  Synthetic
  misc_feature (7)..(7): n is a, c, g, or u
  misc_feature (9)..(9): n is a, c, g, or u
ccuucuncnucugccguuccg

SEQ ID NO: 108257 - RNA, 22 nt, Artificial Sequence
  Synthetic
  misc_feature (8)..(8): n is a, c, g, or u
  misc_feature (10)..(10): n is a, c, g, or u
cccuucuncnucugccguuccg

SEQ ID NO: 108258 - RNA, 23 nt, Artificial Sequence
  Synthetic
  misc_feature (9)..(9): n is a, c, g, or u
  misc_feature (11)..(11): n is a, c, g, or u
ccccuucuncnucugccguuccg

SEQ ID NO: 108259 - RNA, 24 nt, Artificial Sequence
  Synthetic
  misc_feature (10)..(10): n is a, c, g, or u
  misc_feature (12)..(12): n is a, c, g, or u
uccccuucuncnucugccguuccg

SEQ ID NO: 108260 - RNA, 18 nt, Artificial Sequence
  Synthetic
ucggcgcugaaucccgcg

SEQ ID NO: 108261 - RNA, 19 nt, Artificial Sequence
  Synthetic
gucggcgcugaaucccgcg

SEQ ID NO: 108262 - RNA, 20 nt, Artificial Sequence
  Synthetic
cgucggcgcugaaucccgcg

SEQ ID NO: 108263 - RNA, 18 nt, Artificial Sequence
  Synthetic
  misc_feature (1)..(1): n is a, c, g, or u
  misc_feature (9)..(10): n is a, c, g, or u
nggccaucnncgcaugcg

SEQ ID NO: 108264 - RNA, 19 nt, Artificial Sequence
  Synthetic
  misc_feature (2)..(2): n is a, c, g, or u
  misc_feature (10)..(11): n is a, c, g, or u
unggccaucnncgcaugcg

SEQ ID NO: 108265 - RNA, 20 nt, Artificial Sequence
  Synthetic
  misc_feature (3)..(3): n is a, c, g, or u
  misc_feature (11)..(12): n is a, c, g, or u
aunggccaucnncgcaugcg

SEQ ID NO: 108266 - RNA, 21 nt, Artificial Sequence
  Synthetic
  misc_feature (1)..(1): n is a, c, g, or u
  misc_feature (4)..(4): n is a, c, g, or u
  misc_feature (12)..(13): n is a, c, g, or u
naunggccaucnncgcaugcg

SEQ ID NO: 108267 - RNA, 22 nt, Artificial Sequence
  Synthetic
  misc_feature (2)..(2): n is a, c, g, or u
  misc_feature (5)..(5): n is a, c, g, or u
  misc_feature (13)..(14): n is a, c, g, or u
cnaunggccaucnncgcaugcg

SEQ ID NO: 108268 - RNA, 23 nt, Artificial Sequence
  Synthetic
  misc_feature (3)..(3): n is a, c, g, or u
  misc_feature (6)..(6): n is a, c, g, or u
  misc_feature (14)..(15): n is a, c, g, or u
gcnaunggccaucnncgcaugcg

SEQ ID NO: 108269 - RNA, 24 nt, Artificial Sequence
  Synthetic
  misc_feature (4)..(4): n is a, c, g, or u
  misc_feature (7)..(7): n is a, c, g, or u
  misc_feature (15)..(16): n is a, c, g, or u
ggcnaunggccaucnncgcaugcg

SEQ ID NO: 108270 - RNA, 18 nt, Artificial Sequence
  Synthetic
ugccaacuggauccugcg

SEQ ID NO: 108271 - RNA, 19 nt, Artificial Sequence
  Synthetic
cugccaacuggauccugcg

SEQ ID NO: 108272 - RNA, 20 nt, Artificial Sequence
  Synthetic
gcugccaacuggauccugcg

SEQ ID NO: 108273 - RNA, 21 nt, Artificial Sequence
  Synthetic
ugcugccaacuggauccugcg

SEQ ID NO: 108274 - RNA, 22 nt, Artificial Sequence
  Synthetic
gugcugccaacuggauccugcg

SEQ ID NO: 108275 - RNA, 23 nt, Artificial Sequence
  Synthetic
ugugcugccaacuggauccugcg

SEQ ID NO: 108276 - RNA, 24 nt, Artificial Sequence
  Synthetic
  misc_feature (1)..(1): n is a, c, g, or u
nugugcugccaacuggauccugcg

SEQ ID NO: 108277 - RNA, 18 nt, Artificial Sequence
  Synthetic
  misc_feature (7)..(7): n is a, c, g, or u
cgccucngcucuguaucg

SEQ ID NO: 108278 - RNA, 19 nt, Artificial Sequence
  Synthetic
  misc_feature (8)..(8): n is a, c, g, or u
ccgccucngcucuguaucg

SEQ ID NO: 108279 - RNA, 20 nt, Artificial Sequence
  Synthetic
  misc_feature (9)..(9): n is a, c, g, or u
accgccucngcucuguaucg

SEQ ID NO: 108280 - RNA, 21 nt, Artificial Sequence
  Synthetic
  misc_feature (10)..(10): n is a, c, g, or u
caccgccucngcucuguaucg

SEQ ID NO: 108281 - RNA, 22 nt, Artificial Sequence
  Synthetic
  misc_feature (11)..(11): n is a, c, g, or u
acaccgccucngcucuguaucg

SEQ ID NO: 108282 - RNA, 23 nt, Artificial Sequence
  Synthetic
  misc_feature (12)..(12): n is a, c, g, or u
gacaccgccucngcucuguaucg

SEQ ID NO: 108283 - RNA, 24 nt, Artificial Sequence
  Synthetic
  misc_feature (13)..(13): n is a, c, g, or u
cgacaccgccucngcucuguaucg

SEQ ID NO: 108284 - RNA, 18 nt, Artificial Sequence
  Synthetic
uuggucuuccaaaccucg

SEQ ID NO: 108285 - RNA, 19 nt, Artificial Sequence
  Synthetic
guuggucuuccaaaccucg

SEQ ID NO: 108286 - RNA, 20 nt, Artificial Sequence
  Synthetic
gguuggucuuccaaaccucg

SEQ ID NO: 108287 - RNA, 21 nt, Artificial Sequence
  Synthetic
agguuggucuuccaaaccucg

SEQ ID NO: 108288 - RNA, 22 nt, Artificial Sequence
  Synthetic
gagguuggucuuccaaaccucg

SEQ ID NO: 108289 - RNA, 23 nt, Artificial Sequence
  Synthetic
ggagguuggucuuccaaaccucg

SEQ ID NO: 108290 - RNA, 24 nt, Artificial Sequence
  Synthetic
gggagguuggucuuccaaaccucg

SEQ ID NO: 108291 - RNA, 18 nt, Artificial Sequence
  Synthetic
cuucaccucugcacgucg

SEQ ID NO: 108292 - RNA, 19 nt, Artificial Sequence
  Synthetic
gcuucaccucugcacgucg

SEQ ID NO: 108293 - RNA, 20 nt, Artificial Sequence
  Synthetic
cgcuucaccucugcacgucg

SEQ ID NO: 108294 - RNA, 21 nt, Artificial Sequence
  Synthetic
ucgcuucaccucugcacgucg

SEQ ID NO: 108295 - RNA, 22 nt, Artificial Sequence
  Synthetic
uucgcuucaccucugcacgucg

SEQ ID NO: 108296 - RNA, 23 nt, Artificial Sequence
  Synthetic
cuucgcuucaccucugcacgucg

SEQ ID NO: 108297 - RNA, 24 nt, Artificial Sequence
  Synthetic
acuucgcuucaccucugcacgucg

SEQ ID NO: 108298 - RNA, 18 nt, Artificial Sequence
  Synthetic
gucucaaucgccgcgucg

SEQ ID NO: 108299 - RNA, 19 nt, Artificial Sequence
  Synthetic
ggucucaaucgccgcgucg

SEQ ID NO: 108300 - RNA, 20 nt, Artificial Sequence
  Synthetic
aggucucaaucgccgcgucg

SEQ ID NO: 108301 - RNA, 21 nt, Artificial Sequence
  Synthetic
aaggucucaaucgccgcgucg

SEQ ID NO: 108302 - RNA, 22 nt, Artificial Sequence
  Synthetic
gaaggucucaaucgccgcgucg

SEQ ID NO: 108303 - RNA, 23 nt, Artificial Sequence
  Synthetic
cgaaggucucaaucgccgcgucg

SEQ ID NO: 108304 - RNA, 24 nt, Artificial Sequence
  Synthetic
acgaaggucucaaucgccgcgucg

SEQ ID NO: 108305 - RNA, 18 nt, Artificial Sequence
  Synthetic
ugcuguacaaaaccuucg

SEQ ID NO: 108306 - RNA, 19 nt, Artificial Sequence
  Synthetic
uugcuguacaaaaccuucg

SEQ ID NO: 108307 - RNA, 20 nt, Artificial Sequence
  Synthetic
guugcuguacaaaaccuucg

SEQ ID NO: 108308 - RNA, 21 nt, Artificial Sequence
  Synthetic
uguugcuguacaaaaccuucg

SEQ ID NO: 108309 - RNA, 22 nt, Artificial Sequence
  Synthetic
uuguugcuguacaaaaccuucg

SEQ ID NO: 108310 - RNA, 23 nt, Artificial Sequence
  Synthetic
cuuguugcuguacaaaaccuucg

SEQ ID NO: 108311 - RNA, 24 nt, Artificial Sequence
  Synthetic
ucuuguugcuguacaaaaccuucg

SEQ ID NO: 108312 - RNA, 18 nt, Artificial Sequence
  Synthetic
cauuuguucagugguucg

SEQ ID NO: 108313 - RNA, 19 nt, Artificial Sequence
  Synthetic
ccauuuguucagugguucg

SEQ ID NO: 108314 - RNA, 20 nt, Artificial Sequence
  Synthetic
gccauuuguucagugguucg

SEQ ID NO: 108315 - RNA, 21 nt, Artificial Sequence
  Synthetic
ugccauuuguucagugguucg

SEQ ID NO: 108316 - RNA, 22 nt, Artificial Sequence
  Synthetic
gugccauuuguucagugguucg

SEQ ID NO: 108317 - RNA, 23 nt, Artificial Sequence
  Synthetic
agugccauuuguucagugguucg

SEQ ID NO: 108318 - RNA, 24 nt, Artificial Sequence
  Synthetic
uagugccauuuguucagugguucg

SEQ ID NO: 108319 - RNA, 18 nt, Artificial Sequence
  Synthetic
uuccaaaccucgacaagg

SEQ ID NO: 108320 - RNA, 19 nt, Artificial Sequence
  Synthetic
cuuccaaaccucgacaagg

SEQ ID NO: 108321 - RNA, 20 nt, Artificial Sequence
  Synthetic
ucuuccaaaccucgacaagg

SEQ ID NO: 108322 - RNA, 21 nt, Artificial Sequence
  Synthetic
gucuuccaaaccucgacaagg

SEQ ID NO: 108323 - RNA, 22 nt, Artificial Sequence
  Synthetic
ggucuuccaaaccucgacaagg

SEQ ID NO: 108324 - RNA, 23 nt, Artificial Sequence
  Synthetic
uggucuuccaaaccucgacaagg

SEQ ID NO: 108325 - RNA, 24 nt, Artificial Sequence
  Synthetic
uuggucuuccaaaccucgacaagg

SEQ ID NO: 108326 - RNA, 18 nt, Artificial Sequence
  Synthetic
ucccuuggacucauaagg

SEQ ID NO: 108327 - RNA, 19 nt, Artificial Sequence
  Synthetic
aucccuuggacucauaagg

SEQ ID NO: 108328 - RNA, 20 nt, Artificial Sequence
  Synthetic
uaucccuuggacucauaagg

SEQ ID NO: 108329 - RNA, 21 nt, Artificial Sequence
  Synthetic
guaucccuuggacucauaagg

SEQ ID NO: 108330 - RNA, 22 nt, Artificial Sequence
  Synthetic
aguaucccuuggacucauaagg

SEQ ID NO: 108331 - RNA, 23 nt, Artificial Sequence
  Synthetic
uaguaucccuuggacucauaagg

SEQ ID NO: 108332 - RNA, 24 nt, Artificial Sequence
  Synthetic
uuaguaucccuuggacucauaagg

SEQ ID NO: 108333 - RNA, 18 nt, Artificial Sequence
  Synthetic
  misc_feature (7)..(7): n is a, c, g, or u
  misc_feature (14)..(14): n is a, c, g, or u
ggccagnggcaaancagg

SEQ ID NO: 108334 - RNA, 19 nt, Artificial Sequence
  Synthetic
  misc_feature (8)..(8): n is a, c, g, or u
  misc_feature (15)..(15): n is a, c, g, or u
uggccagnggcaaancagg

SEQ ID NO: 108335 - RNA, 20 nt, Artificial Sequence
  Synthetic
  misc_feature (1)..(1): n is a, c, g, or u
  misc_feature (9)..(9): n is a, c, g, or u
  misc_feature (16)..(16): n is a, c, g, or u
nuggccagnggcaaancagg

SEQ ID NO: 108336 - RNA, 21 nt, Artificial Sequence
  Synthetic
  misc_feature (2)..(2): n is a, c, g, or u
  misc_feature (10)..(10): n is a, c, g, or u
  misc_feature (17)..(17): n is a, c, g, or u
anuggccagnggcaaancagg

SEQ ID NO: 108337 - RNA, 22 nt, Artificial Sequence
  Synthetic
  misc_feature (3)..(3): n is a, c, g, or u
  misc_feature (11)..(11): n is a, c, g, or u
  misc_feature (18)..(18): n is a, c, g, or u
canuggccagnggcaaancagg

SEQ ID NO: 108338 - RNA, 23 nt, Artificial Sequence
  Synthetic
  misc_feature (4)..(4): n is a, c, g, or u
  misc_feature (12)..(12): n is a, c, g, or u
  misc_feature (19)..(19): n is a, c, g, or u
ucanuggccagnggcaaancagg

SEQ ID NO: 108339 - RNA, 24 nt, Artificial Sequence
  Synthetic
  misc_feature (5)..(5): n is a, c, g, or u
  misc_feature (13)..(13): n is a, c, g, or u
  misc_feature (20)..(20): n is a, c, g, or u
aucanuggccagnggcaaancagg

SEQ ID NO: 108340 - RNA, 18 nt, Artificial Sequence
  Synthetic
ugggguggagcccucagg

SEQ ID NO: 108341 - RNA, 19 nt, Artificial Sequence
  Synthetic
uugggguggagcccucagg

SEQ ID NO: 108342 - RNA, 20 nt, Artificial Sequence
  Synthetic
uuugggguggagcccucagg

SEQ ID NO: 108343 - RNA, 21 nt, Artificial Sequence
  Synthetic
uuuugggguggagcccucagg

SEQ ID NO: 108344 - RNA, 22 nt, Artificial Sequence
  Synthetic
cuuuugggguggagcccucagg

SEQ ID NO: 108345 - RNA, 23 nt, Artificial Sequence
  Synthetic
ucuuuugggguggagcccucagg

SEQ ID NO: 108346 - RNA, 24 nt, Artificial Sequence
  Synthetic
gucuuuugggguggagcccucagg

SEQ ID NO: 108347 - RNA, 18 nt, Artificial Sequence
  Synthetic
ucgucaaucuucucgagg

SEQ ID NO: 108348 - RNA, 19 nt, Artificial Sequence
  Synthetic
aucgucaaucuucucgagg

SEQ ID NO: 108349 - RNA, 20 nt, Artificial Sequence
  Synthetic
uaucgucaaucuucucgagg

SEQ ID NO: 108350 - RNA, 21 nt, Artificial Sequence
  Synthetic
auaucgucaaucuucucgagg

SEQ ID NO: 108351 - RNA, 22 nt, Artificial Sequence
  Synthetic
cauaucgucaaucuucucgagg

SEQ ID NO: 108352 - RNA, 23 nt, Artificial Sequence
  Synthetic
ccauaucgucaaucuucucgagg

SEQ ID NO: 108353 - RNA, 24 nt, Artificial Sequence
  Synthetic
cccauaucgucaaucuucucgagg

SEQ ID NO: 108354 - RNA, 18 nt, Artificial Sequence
  Synthetic
uucucucaauuuucuagg

SEQ ID NO: 108355 - RNA, 19 nt, Artificial Sequence
  Synthetic
cuucucucaauuuucuagg

SEQ ID NO: 108356 - RNA, 20 nt, Artificial Sequence
  Synthetic
acuucucucaauuuucuagg

SEQ ID NO: 108357 - RNA, 21 nt, Artificial Sequence
  Synthetic
gacuucucucaauuuucuagg

SEQ ID NO: 108358 - RNA, 22 nt, Artificial Sequence
  Synthetic
ggacuucucucaauuuucuagg

SEQ ID NO: 108359 - RNA, 23 nt, Artificial Sequence
  Synthetic
uggacuucucucaauuuucuagg

SEQ ID NO: 108360 - RNA, 24 nt, Artificial Sequence
  Synthetic
guggacuucucucaauuuucuagg

SEQ ID NO: 108361 - RNA, 18 nt, Artificial Sequence
  Synthetic
  misc_feature (3)..(3): n is a, c, g, or u
  misc_feature (10)..(10): n is a, c, g, or u
agnggcaaancagguagg

SEQ ID NO: 108362 - RNA, 19 nt, Artificial Sequence
  Synthetic
  misc_feature (4)..(4): n is a, c, g, or u
  misc_feature (11)..(11): n is a, c, g, or u
cagnggcaaancagguagg

SEQ ID NO: 108363 - RNA, 20 nt, Artificial Sequence
  Synthetic
  misc_feature (5)..(5): n is a, c, g, or u
  misc_feature (12)..(12): n is a, c, g, or u
ccagnggcaaancagguagg

SEQ ID NO: 108364 - RNA, 21 nt, Artificial Sequence
  Synthetic
  misc_feature (6)..(6): n is a, c, g, or u
  misc_feature (13)..(13): n is a, c, g, or u
gccagnggcaaancagguagg

SEQ ID NO: 108365 - RNA, 22 nt, Artificial Sequence
  Synthetic
  misc_feature (7)..(7): n is a, c, g, or u
  misc_feature (14)..(14): n is a, c, g, or u
ggccagnggcaaancagguagg

SEQ ID NO: 108366 - RNA, 23 nt, Artificial Sequence
  Synthetic
  misc_feature (8)..(8): n is a, c, g, or u
  misc_feature (15)..(15): n is a, c, g, or u
uggccagnggcaaancagguagg

SEQ ID NO: 108367 - RNA, 24 nt, Artificial Sequence
  Synthetic
  misc_feature (1)..(1): n is a, c, g, or u
  misc_feature (9)..(9): n is a, c, g, or u
  misc_feature (16)..(16): n is a, c, g, or u
nuggccagnggcaaancagguagg

SEQ ID NO: 108368 - RNA, 18 nt, Artificial Sequence
  Synthetic
  misc_feature (6)..(6): n is a, c, g, or u
guacunggaggcuguagg

SEQ ID NO: 108369 - RNA, 19 nt, Artificial Sequence
  Synthetic
  misc_feature (7)..(7): n is a, c, g, or u
uguacunggaggcuguagg

SEQ ID NO: 108370 - RNA, 20 nt, Artificial Sequence
  Synthetic
  misc_feature (8)..(8): n is a, c, g, or u
uuguacunggaggcuguagg

SEQ ID NO: 108371 - RNA, 21 nt, Artificial Sequence
  Synthetic
  misc_feature (9)..(9): n is a, c, g, or u
uuuguacunggaggcuguagg

SEQ ID NO: 108372 - RNA, 22 nt, Artificial Sequence
  Synthetic
  misc_feature (10)..(10): n is a, c, g, or u
cuuuguacunggaggcuguagg

SEQ ID NO: 108373 - RNA, 23 nt, Artificial Sequence
  Synthetic
  misc_feature (11)..(11): n is a, c, g, or u
ucuuuguacunggaggcuguagg

SEQ ID NO: 108374 - RNA, 24 nt, Artificial Sequence
  Synthetic
  misc_feature (1)..(1): n is a, c, g, or u
  misc_feature (12)..(12): n is a, c, g, or u
nucuuuguacunggaggcuguagg

SEQ ID NO: 108375 - RNA, 18 nt, Artificial Sequence
  Synthetic
uguuuugcucgcagccgg

SEQ ID NO: 108376 - RNA, 19 nt, Artificial Sequence
  Synthetic
uuguuuugcucgcagccgg

SEQ ID NO: 108377 - RNA, 20 nt, Artificial Sequence
  Synthetic
cuuguuuugcucgcagccgg

SEQ ID NO: 108378 - RNA, 21 nt, Artificial Sequence
  Synthetic
gcuuguuuugcucgcagccgg

SEQ ID NO: 108379 - RNA, 22 nt, Artificial Sequence
  Synthetic
agcuuguuuugcucgcagccgg

SEQ ID NO: 108380 - RNA, 23 nt, Artificial Sequence
  Synthetic
cagcuuguuuugcucgcagccgg

SEQ ID NO: 108381 - RNA, 24 nt, Artificial Sequence
  Synthetic
gcagcuuguuuugcucgcagccgg

SEQ ID NO: 108382 - RNA, 18 nt, Artificial Sequence
  Synthetic
  misc_feature (6)..(6): n is a, c, g, or u
  misc_feature (11)..(11): n is a, c, g, or u
aggagngggancauucgg

SEQ ID NO: 108383 - RNA, 19 nt, Artificial Sequence
  Synthetic
  misc_feature (7)..(7): n is a, c, g, or u
  misc_feature (12)..(12): n is a, c, g, or u
uaggagngggancauucgg

SEQ ID NO: 108384 - RNA, 20 nt, Artificial Sequence
  Synthetic
  misc_feature (8)..(8): n is a, c, g, or u
  misc_feature (13)..(13): n is a, c, g, or u
guaggagngggancauucgg

SEQ ID NO: 108385 - RNA, 21 nt, Artificial Sequence
  Synthetic
  misc_feature (9)..(9): n is a, c, g, or u
  misc_feature (14)..(14): n is a, c, g, or u
gguaggagngggancauucgg

SEQ ID NO: 108386 - RNA, 22 nt, Artificial Sequence
  Synthetic
  misc_feature (10)..(10): n is a, c, g, or u
  misc_feature (15)..(15): n is a, c, g, or u
agguaggagngggancauucgg

SEQ ID NO: 108387 - RNA, 23 nt, Artificial Sequence
  Synthetic
  misc_feature (11)..(11): n is a, c, g, or u
  misc_feature (16)..(16): n is a, c, g, or u
cagguaggagngggancauucgg

SEQ ID NO: 108388 - RNA, 24 nt, Artificial Sequence
  Synthetic
  misc_feature (1)..(1): n is a, c, g, or u
  misc_feature (12)..(12): n is a, c, g, or u
  misc_feature (17)..(17): n is a, c, g, or u
ncagguaggagngggancauucgg

SEQ ID NO: 108389 - RNA, 18 nt, Artificial Sequence
  Synthetic
gcuguacaaaaccuucgg

SEQ ID NO: 108390 - RNA, 19 nt, Artificial Sequence
  Synthetic
ugcuguacaaaaccuucgg

SEQ ID NO: 108391 - RNA, 20 nt, Artificial Sequence
  Synthetic
uugcuguacaaaaccuucgg

SEQ ID NO: 108392 - RNA, 21 nt, Artificial Sequence
  Synthetic
guugcuguacaaaaccuucgg

SEQ ID NO: 108393 - RNA, 22 nt, Artificial Sequence
  Synthetic
uguugcuguacaaaaccuucgg

SEQ ID NO: 108394 - RNA, 23 nt, Artificial Sequence
  Synthetic
uuguugcuguacaaaaccuucgg

SEQ ID NO: 108395 - RNA, 24 nt, Artificial Sequence
  Synthetic
cuuguugcuguacaaaaccuucgg

SEQ ID NO: 108396 - RNA, 18 nt, Artificial Sequence
  Synthetic
  misc_feature (5)..(5): n is a, c, g, or u
  misc_feature (10)..(10): n is a, c, g, or u
ggagngggancauucggg

SEQ ID NO: 108397 - RNA, 19 nt, Artificial Sequence
  Synthetic
  misc_feature (6)..(6): n is a, c, g, or u
  misc_feature (11)..(11): n is a, c, g, or u
aggagngggancauucggg

SEQ ID NO: 108398 - RNA, 20 nt, Artificial Sequence
  Synthetic
  misc_feature (7)..(7): n is a, c, g, or u
  misc_feature (12)..(12): n is a, c, g, or u
uaggagngggancauucggg

SEQ ID NO: 108399 - RNA, 21 nt, Artificial Sequence
  Synthetic
  misc_feature (8)..(8): n is a, c, g, or u
  misc_feature (13)..(13): n is a, c, g, or u
guaggagngggancauucggg

SEQ ID NO: 108400 - RNA, 22 nt, Artificial Sequence
  Synthetic
  misc_feature (9)..(9): n is a, c, g, or u
  misc_feature (14)..(14): n is a, c, g, or u
gguaggagngggancauucggg

SEQ ID NO: 108401 - RNA, 23 nt, Artificial Sequence
  Synthetic
  misc_feature (10)..(10): n is a, c, g, or u
  misc_feature (15)..(15): n is a, c, g, or u
agguaggagngggancauucggg

SEQ ID NO: 108402 - RNA, 24 nt, Artificial Sequence
  Synthetic
  misc_feature (11)..(11): n is a, c, g, or u
  misc_feature (16)..(16): n is a, c, g, or u
cagguaggagngggancauucggg

SEQ ID NO: 108403 - RNA, 18 nt, Artificial Sequence
  Synthetic
acugggaggaguuggggg

SEQ ID NO: 108404 - RNA, 19 nt, Artificial Sequence
  Synthetic
gacugggaggaguuggggg

SEQ ID NO: 108405 - RNA, 20 nt, Artificial Sequence
  Synthetic
  misc_feature (1)..(1): n is a, c, g, or u
ngacugggaggaguuggggg

SEQ ID NO: 108406 - RNA, 21 nt, Artificial Sequence
  Synthetic
  misc_feature (2)..(2): n is a, c, g, or u
angacugggaggaguuggggg

SEQ ID NO: 108407 - RNA, 22 nt, Artificial Sequence
  Synthetic
  misc_feature (3)..(3): n is a, c, g, or u
aangacugggaggaguuggggg

SEQ ID NO: 108408 - RNA, 23 nt, Artificial Sequence
  Synthetic
  misc_feature (4)..(4): n is a, c, g, or u
uaangacugggaggaguuggggg

SEQ ID NO: 108409 - RNA, 24 nt, Artificial Sequence
  Synthetic
  misc_feature (5)..(5): n is a, c, g, or u
uuaangacugggaggaguuggggg

SEQ ID NO: 108410 - RNA, 18 nt, Artificial Sequence
  Synthetic
  misc_feature (13)..(13): n is a, c, g, or u
aacccccacuggnugggg

SEQ ID NO: 108411 - RNA, 19 nt, Artificial Sequence
  Synthetic
  misc_feature (14)..(14): n is a, c, g, or u
caacccccacuggnugggg

SEQ ID NO: 108412 - RNA, 20 nt, Artificial Sequence
  Synthetic
  misc_feature (15)..(15): n is a, c, g, or u
gcaacccccacuggnugggg

SEQ ID NO: 108413 - RNA, 21 nt, Artificial Sequence
  Synthetic
  misc_feature (16)..(16): n is a, c, g, or u
cgcaacccccacuggnugggg

SEQ ID NO: 108414 - RNA, 22 nt, Artificial Sequence
  Synthetic
  misc_feature (17)..(17): n is a, c, g, or u
acgcaacccccacuggnugggg

SEQ ID NO: 108415 - RNA, 23 nt, Artificial Sequence
  Synthetic
  misc_feature (18)..(18): n is a, c, g, or u
gacgcaacccccacuggnugggg

SEQ ID NO: 108416 - RNA, 24 nt, Artificial Sequence
  Synthetic
  misc_feature (19)..(19): n is a, c, g, or u
ugacgcaacccccacuggnugggg

SEQ ID NO: 108417 - RNA, 18 nt, Artificial Sequence
  Synthetic
gaugaugugguauugggg

SEQ ID NO: 108418 - RNA, 19 nt, Artificial Sequence
  Synthetic
ggaugaugugguauugggg

SEQ ID NO: 108419 - RNA, 20 nt, Artificial Sequence
  Synthetic
uggaugaugugguauugggg

SEQ ID NO: 108420 - RNA, 21 nt, Artificial Sequence
  Synthetic
auggaugaugugguauugggg

SEQ ID NO: 108421 - RNA, 22 nt, Artificial Sequence
  Synthetic
uauggaugaugugguauugggg

SEQ ID NO: 108422 - RNA, 23 nt, Artificial Sequence
  Synthetic
auauggaugaugugguauugggg

SEQ ID NO: 108423 - RNA, 24 nt, Artificial Sequence
  Synthetic
uauauggaugaugugguauugggg

SEQ ID NO: 108424 - RNA, 18 nt, Artificial Sequence
  Synthetic
gacugggaggaguugggg

SEQ ID NO: 108425 - RNA, 19 nt, Artificial Sequence
  Synthetic
  misc_feature (1)..(1): n is a, c, g, or u
ngacugggaggaguugggg

SEQ ID NO: 108426 - RNA, 20 nt, Artificial Sequence
  Synthetic
  misc_feature (2)..(2): n is a, c, g, or u
angacugggaggaguugggg

SEQ ID NO: 108427 - RNA, 21 nt, Artificial Sequence
  Synthetic
  misc_feature (3)..(3): n is a, c, g, or u
aangacugggaggaguugggg

SEQ ID NO: 108428 - RNA, 22 nt, Artificial Sequence
  Synthetic
  misc_feature (4)..(4): n is a, c, g, or u
uaangacugggaggaguugggg

SEQ ID NO: 108429 - RNA, 23 nt, Artificial Sequence
  Synthetic
  misc_feature (5)..(5): n is a, c, g, or u
uuaangacugggaggaguugggg

SEQ ID NO: 108430 - RNA, 24 nt, Artificial Sequence
  Synthetic
  misc_feature (6)..(6): n is a, c, g, or u
uuuaangacugggaggaguugggg

SEQ ID NO: 108431 - RNA, 18 nt, Artificial Sequence
  Synthetic
  misc_feature (7)..(7): n is a, c, g, or u
cacggcngucuuuugggg

SEQ ID NO: 108432 - RNA, 19 nt, Artificial Sequence
  Synthetic
  misc_feature (8)..(8): n is a, c, g, or u
acacggcngucuuuugggg

SEQ ID NO: 108433 - RNA, 20 nt, Artificial Sequence
  Synthetic
  misc_feature (9)..(9): n is a, c, g, or u
cacacggcngucuuuugggg

SEQ ID NO: 108434 - RNA, 21 nt, Artificial Sequence
  Synthetic
  misc_feature (10)..(10): n is a, c, g, or u
ccacacggcngucuuuugggg

SEQ ID NO: 108435 - RNA, 22 nt, Artificial Sequence
  Synthetic
  misc_feature (11)..(11): n is a, c, g, or u
accacacggcngucuuuugggg

SEQ ID NO: 108436 - RNA, 23 nt, Artificial Sequence
  Synthetic
  misc_feature (12)..(12): n is a, c, g, or u
caccacacggcngucuuuugggg

SEQ ID NO: 108437 - RNA, 24 nt, Artificial Sequence
  Synthetic
  misc_feature (13)..(13): n is a, c, g, or u
ccaccacacggcngucuuuugggg

SEQ ID NO: 108438 - RNA, 18 nt, Artificial Sequence
  Synthetic
  misc_feature (15)..(15): n is a, c, g, or u
ccuuggguggcuuunggg

SEQ ID NO: 108439 - RNA, 19 nt, Artificial Sequence
  Synthetic
  misc_feature (16)..(16): n is a, c, g, or u
gccuuggguggcuuunggg

SEQ ID NO: 108440 - RNA, 20 nt, Artificial Sequence
  Synthetic
  misc_feature (17)..(17): n is a, c, g, or u
ugccuuggguggcuuunggg

SEQ ID NO: 108441 - RNA, 21 nt, Artificial Sequence
  Synthetic
  misc_feature (18)..(18): n is a, c, g, or u
gugccuuggguggcuuunggg

SEQ ID NO: 108442 - RNA, 22 nt, Artificial Sequence
  Synthetic
  misc_feature (19)..(19): n is a, c, g, or u
ugugccuuggguggcuuunggg

SEQ ID NO: 108443 - RNA, 23 nt, Artificial Sequence
  Synthetic
  misc_feature (20)..(20): n is a, c, g, or u
cugugccuuggguggcuuunggg

SEQ ID NO: 108444 - RNA, 24 nt, Artificial Sequence
  Synthetic
  misc_feature (21)..(21): n is a, c, g, or u
gcugugccuuggguggcuuunggg

SEQ ID NO: 108445 - RNA, 18 nt, Artificial Sequence
  Synthetic
ugucaauguuaauauggg

SEQ ID NO: 108446 - RNA, 19 nt, Artificial Sequence
  Synthetic
augucaauguuaauauggg

SEQ ID NO: 108447 - RNA, 20 nt, Artificial Sequence
  Synthetic
uaugucaauguuaauauggg

SEQ ID NO: 108448 - RNA, 21 nt, Artificial Sequence
  Synthetic
cuaugucaauguuaauauggg

SEQ ID NO: 108449 - RNA, 22 nt, Artificial Sequence
  Synthetic
gcuaugucaauguuaauauggg

SEQ ID NO: 108450 - RNA, 23 nt, Artificial Sequence
  Synthetic
agcuaugucaauguuaauauggg

SEQ ID NO: 108451 - RNA, 24 nt, Artificial Sequence
  Synthetic
  misc_feature (1)..(1): n is a, c, g, or u
nagcuaugucaauguuaauauggg

SEQ ID NO: 108452 - RNA, 18 nt, Artificial Sequence
  Synthetic
ucgcaagauuccuauggg

SEQ ID NO: 108453 - RNA, 19 nt, Artificial Sequence
  Synthetic
uucgcaagauuccuauggg

SEQ ID NO: 108454 - RNA, 20 nt, Artificial Sequence
  Synthetic
uuucgcaagauuccuauggg

SEQ ID NO: 108455 - RNA, 21 nt, Artificial Sequence
  Synthetic
cuuucgcaagauuccuauggg

SEQ ID NO: 108456 - RNA, 22 nt, Artificial Sequence
  Synthetic
gcuuucgcaagauuccuauggg

SEQ ID NO: 108457 - RNA, 23 nt, Artificial Sequence
  Synthetic
ggcuuucgcaagauuccuauggg

SEQ ID NO: 108458 - RNA, 24 nt, Artificial Sequence
  Synthetic
gggcuuucgcaagauuccuauggg

SEQ ID NO: 108459 - RNA, 18 nt, Artificial Sequence
  Synthetic
ugaaucuggccaccuggg

SEQ ID NO: 108460 - RNA, 19 nt, Artificial Sequence
  Synthetic
augaaucuggccaccuggg

SEQ ID NO: 108461 - RNA, 20 nt, Artificial Sequence
  Synthetic
gaugaaucuggccaccuggg

SEQ ID NO: 108462 - RNA, 21 nt, Artificial Sequence
  Synthetic
ugaugaaucuggccaccuggg

SEQ ID NO: 108463 - RNA, 22 nt, Artificial Sequence
  Synthetic
uugaugaaucuggccaccuggg

SEQ ID NO: 108464 - RNA, 23 nt, Artificial Sequence
  Synthetic
guugaugaaucuggccaccuggg

SEQ ID NO: 108465 - RNA, 24 nt, Artificial Sequence
  Synthetic
aguugaugaaucuggccaccuggg

SEQ ID NO: 108466 - RNA, 18 nt, Artificial Sequence
  Synthetic
ggucaccauauucuuggg

SEQ ID NO: 108467 - RNA, 19 nt, Artificial Sequence
  Synthetic
gggucaccauauucuuggg

SEQ ID NO: 108468 - RNA, 20 nt, Artificial Sequence
  Synthetic
ugggucaccauauucuuggg

SEQ ID NO: 108469 - RNA, 21 nt, Artificial Sequence
  Synthetic
gugggucaccauauucuuggg

SEQ ID NO: 108470 - RNA, 22 nt, Artificial Sequence
  Synthetic
ugugggucaccauauucuuggg

SEQ ID NO: 108471 - RNA, 23 nt, Artificial Sequence
  Synthetic
uugugggucaccauauucuuggg

SEQ ID NO: 108472 - RNA, 24 nt, Artificial Sequence
  Synthetic
uuugugggucaccauauucuuggg

SEQ ID NO: 108473 - RNA, 18 nt, Artificial Sequence
  Synthetic
  misc_feature (1)..(1): n is a, c, g, or u
ngacugggaggaguuggg

SEQ ID NO: 108474 - RNA, 19 nt, Artificial Sequence
  Synthetic
  misc_feature (2)..(2): n is a, c, g, or u
angacugggaggaguuggg

SEQ ID NO: 108475 - RNA, 20 nt, Artificial Sequence
  Synthetic
  misc_feature (3)..(3): n is a, c, g, or u
aangacugggaggaguuggg

SEQ ID NO: 108476 - RNA, 21 nt, Artificial Sequence
  Synthetic
  misc_feature (4)..(4): n is a, c, g, or u
uaangacugggaggaguuggg

SEQ ID NO: 108477 - RNA, 22 nt, Artificial Sequence
  Synthetic
  misc_feature (5)..(5): n is a, c, g, or u
uuaangacugggaggaguuggg

SEQ ID NO: 108478 - RNA, 23 nt, Artificial Sequence
  Synthetic
  misc_feature (6)..(6): n is a, c, g, or u
uuuaangacugggaggaguuggg

SEQ ID NO: 108479 - RNA, 24 nt, Artificial Sequence
  Synthetic
  misc_feature (1)..(1): n is a, c, g, or u
  misc_feature (7)..(7): n is a, c, g, or u
nuuuaangacugggaggaguuggg

SEQ ID NO: 108480 - RNA, 18 nt, Artificial Sequence
  Synthetic
  misc_feature (8)..(8): n is a, c, g, or u
acacggcngucuuuuggg

SEQ ID NO: 108481 - RNA, 19 nt, Artificial Sequence
  Synthetic
  misc_feature (9)..(9): n is a, c, g, or u
cacacggcngucuuuuggg

SEQ ID NO: 108482 - RNA, 20 nt, Artificial Sequence
  Synthetic
  misc_feature (10)..(10): n is a, c, g, or u
ccacacggcngucuuuuggg

SEQ ID NO: 108483 - RNA, 21 nt, Artificial Sequence
  Synthetic
  misc_feature (11)..(11): n is a, c, g, or u
accacacggcngucuuuuggg

SEQ ID NO: 108484 - RNA, 22 nt, Artificial Sequence
  Synthetic
  misc_feature (12)..(12): n is a, c, g, or u
caccacacggcngucuuuuggg

SEQ ID NO: 108485 - RNA, 23 nt, Artificial Sequence
  Synthetic
  misc_feature (13)..(13): n is a, c, g, or u
ccaccacacggcngucuuuuggg

SEQ ID NO: 108486 - RNA, 24 nt, Artificial Sequence
  Synthetic
  misc_feature (1)..(1): n is a, c, g, or u
  misc_feature (14)..(14): n is a, c, g, or u
nccaccacacggcngucuuuuggg

SEQ ID NO: 108487 - RNA, 18 nt, Artificial Sequence
  Synthetic
ugacgcaacccccacugg

SEQ ID NO: 108488 - RNA, 19 nt, Artificial Sequence
  Synthetic
cugacgcaacccccacugg

SEQ ID NO: 108489 - RNA, 20 nt, Artificial Sequence
  Synthetic
gcugacgcaacccccacugg

SEQ ID NO: 108490 - RNA, 21 nt, Artificial Sequence
  Synthetic
ugcugacgcaacccccacugg

SEQ ID NO: 108491 - RNA, 22 nt, Artificial Sequence
  Synthetic
uugcugacgcaacccccacugg

SEQ ID NO: 108492 - RNA, 23 nt, Artificial Sequence
  Synthetic
uuugcugacgcaacccccacugg

SEQ ID NO: 108493 - RNA, 24 nt, Artificial Sequence
  Synthetic
guuugcugacgcaacccccacugg

SEQ ID NO: 108494 - RNA, 18 nt, Artificial Sequence
  Synthetic
  misc_feature (4)..(4): n is a, c, g, or u
  misc_feature (6)..(6): n is a, c, g, or u
  misc_feature (12)..(12): n is a, c, g, or u
ugununuuuaangacugg

SEQ ID NO: 108495 - RNA, 19 nt, Artificial Sequence
  Synthetic
  misc_feature (5)..(5): n is a, c, g, or u
  misc_feature (7)..(7): n is a, c, g, or u
  misc_feature (13)..(13): n is a, c, g, or u
cugununuuuaangacugg

SEQ ID NO: 108496 - RNA, 20 nt, Artificial Sequence
  Synthetic
  misc_feature (6)..(6): n is a, c, g, or u
  misc_feature (8)..(8): n is a, c, g, or u
  misc_feature (14)..(14): n is a, c, g, or u
acugununuuuaangacugg

SEQ ID NO: 108497 - RNA, 21 nt, Artificial Sequence
  Synthetic
  misc_feature (7)..(7): n is a, c, g, or u
  misc_feature (9)..(9): n is a, c, g, or u
  misc_feature (15)..(15): n is a, c, g, or u
gacugununuuuaangacugg

SEQ ID NO: 108498 - RNA, 22 nt, Artificial Sequence
  Synthetic
  misc_feature (8)..(8): n is a, c, g, or u
  misc_feature (10)..(10): n is a, c, g, or u
  misc_feature (16)..(16): n is a, c, g, or u
agacugununuuuaangacugg

SEQ ID NO: 108499 - RNA, 23 nt, Artificial Sequence
  Synthetic
  misc_feature (9)..(9): n is a, c, g, or u
  misc_feature (11)..(11): n is a, c, g, or u
  misc_feature (17)..(17): n is a, c, g, or u
aagacugununuuuaangacugg

SEQ ID NO: 108500 - RNA, 24 nt, Artificial Sequence
  Synthetic
  misc_feature (10)..(10): n is a, c, g, or u
  misc_feature (12)..(12): n is a, c, g, or u
  misc_feature (18)..(18): n is a, c, g, or u
aaagacugununuuuaangacugg

SEQ ID NO: 108501 - RNA, 18 nt, Artificial Sequence
  Synthetic
augaaucuggccaccugg

SEQ ID NO: 108502 - RNA, 19 nt, Artificial Sequence
  Synthetic
gaugaaucuggccaccugg

SEQ ID NO: 108503 - RNA, 20 nt, Artificial Sequence
  Synthetic
ugaugaaucuggccaccugg

SEQ ID NO: 108504 - RNA, 21 nt, Artificial Sequence
  Synthetic
uugaugaaucuggccaccugg

SEQ ID NO: 108505 - RNA, 22 nt, Artificial Sequence
  Synthetic
guugaugaaucuggccaccugg

SEQ ID NO: 108506 - RNA, 23 nt, Artificial Sequence
  Synthetic
aguugaugaaucuggccaccugg

SEQ ID NO: 108507 - RNA, 24 nt, Artificial Sequence
  Synthetic
gaguugaugaaucuggccaccugg

SEQ ID NO: 108508 - RNA, 18 nt, Artificial Sequence
  Synthetic
agcacccacguguccugg

SEQ ID NO: 108509 - RNA, 19 nt, Artificial Sequence
  Synthetic
gagcacccacguguccugg

SEQ ID NO: 108510 - RNA, 20 nt, Artificial Sequence
  Synthetic
ggagcacccacguguccugg

SEQ ID NO: 108511 - RNA, 21 nt, Artificial Sequence
  Synthetic
gggagcacccacguguccugg

SEQ ID NO: 108512 - RNA, 22 nt, Artificial Sequence
  Synthetic
ggggagcacccacguguccugg

SEQ ID NO: 108513 - RNA, 23 nt, Artificial Sequence
  Synthetic
gggggagcacccacguguccugg

SEQ ID NO: 108514 - RNA, 24 nt, Artificial Sequence
  Synthetic
agggggagcacccacguguccugg

SEQ ID NO: 108515 - RNA, 18 nt, Artificial Sequence
  Synthetic
  misc_feature (2)..(2): n is a, c, g, or u
angacugggaggaguugg

SEQ ID NO: 108516 - RNA, 19 nt, Artificial Sequence
  Synthetic
  misc_feature (3)..(3): n is a, c, g, or u
aangacugggaggaguugg

SEQ ID NO: 108517 - RNA, 20 nt, Artificial Sequence
  Synthetic
  misc_feature (4)..(4): n is a, c, g, or u
uaangacugggaggaguugg

SEQ ID NO: 108518 - RNA, 21 nt, Artificial Sequence
  Synthetic
  misc_feature (5)..(5): n is a, c, g, or u
uuaangacugggaggaguugg

SEQ ID NO: 108519 - RNA, 22 nt, Artificial Sequence
  Synthetic
  misc_feature (6)..(6): n is a, c, g, or u
uuuaangacugggaggaguugg

SEQ ID NO: 108520 - RNA, 23 nt, Artificial Sequence
  Synthetic
  misc_feature (1)..(1): n is a, c, g, or u
  misc_feature (7)..(7): n is a, c, g, or u
nuuuaangacugggaggaguugg

SEQ ID NO: 108521 - RNA, 24 nt, Artificial Sequence
  Synthetic
  misc_feature (2)..(2): n is a, c, g, or u
  misc_feature (8)..(8): n is a, c, g, or u
unuuuaangacugggaggaguugg

SEQ ID NO: 108522 - RNA, 18 nt, Artificial Sequence
  Synthetic
caagcuauucuguguugg

SEQ ID NO: 108523 - RNA, 19 nt, Artificial Sequence
  Synthetic
gcaagcuauucuguguugg

SEQ ID NO: 108524 - RNA, 20 nt, Artificial Sequence
  Synthetic
ggcaagcuauucuguguugg

SEQ ID NO: 108525 - RNA, 21 nt, Artificial Sequence
  Synthetic
aggcaagcuauucuguguugg

SEQ ID NO: 108526 - RNA, 22 nt, Artificial Sequence
  Synthetic
  misc_feature (1)..(1): n is a, c, g, or u
naggcaagcuauucuguguugg

SEQ ID NO: 108527 - RNA, 23 nt, Artificial Sequence
  Synthetic
  misc_feature (2)..(2): n is a, c, g, or u
unaggcaagcuauucuguguugg

SEQ ID NO: 108528 - RNA, 24 nt, Artificial Sequence
  Synthetic
  misc_feature (3)..(3): n is a, c, g, or u
cunaggcaagcuauucuguguugg

SEQ ID NO: 108529 - RNA, 18 nt, Artificial Sequence
  Synthetic
uuccugucuuacuuuugg

SEQ ID NO: 108530 - RNA, 19 nt, Artificial Sequence
  Synthetic
uuuccugucuuacuuuugg

SEQ ID NO: 108531 - RNA, 20 nt, Artificial Sequence
  Synthetic
auuuccugucuuacuuuugg

SEQ ID NO: 108532 - RNA, 21 nt, Artificial Sequence
  Synthetic
cauuuccugucuuacuuuugg

SEQ ID NO: 108533 - RNA, 22 nt, Artificial Sequence
  Synthetic
acauuuccugucuuacuuuugg

SEQ ID NO: 108534 - RNA, 23 nt, Artificial Sequence
  Synthetic
cacauuuccugucuuacuuuugg

SEQ ID NO: 108535 - RNA, 24 nt, Artificial Sequence
  Synthetic
ucacauuuccugucuuacuuuugg

SEQ ID NO: 108536 - RNA, 18 nt, Artificial Sequence
  Synthetic
  misc_feature (9)..(9): n is a, c, g, or u
cacacggcngucuuuugg

SEQ ID NO: 108537 - RNA, 19 nt, Artificial Sequence
  Synthetic
  misc_feature (10)..(10): n is a, c, g, or u
ccacacggcngucuuuugg

SEQ ID NO: 108538 - RNA, 20 nt, Artificial Sequence
  Synthetic
  misc_feature (11)..(11): n is a, c, g, or u
accacacggcngucuuuugg

SEQ ID NO: 108539 - RNA, 21 nt, Artificial Sequence
  Synthetic
  misc_feature (12)..(12): n is a, c, g, or u
caccacacggcngucuuuugg

SEQ ID NO: 108540 - RNA, 22 nt, Artificial Sequence
  Synthetic
  misc_feature (13)..(13): n is a, c, g, or u
ccaccacacggcngucuuuugg

SEQ ID NO: 108541 - RNA, 23 nt, Artificial Sequence
  Synthetic
  misc_feature (1)..(1): n is a, c, g, or u
  misc_feature (14)..(14): n is a, c, g, or u
nccaccacacggcngucuuuugg

SEQ ID NO: 108542 - RNA, 24 nt, Artificial Sequence
  Synthetic
  misc_feature (2)..(2): n is a, c, g, or u
  misc_feature (15)..(15): n is a, c, g, or u
cnccaccacacggcngucuuuugg

SEQ ID NO: 108543 - RNA, 18 nt, Artificial Sequence
  Synthetic
  misc_feature (9)..(9): n is a, c, g, or u
  misc_feature (11)..(11): n is a, c, g, or u
  misc_feature (17)..(17): n is a, c, g, or u
aagacugununuuuaang

SEQ ID NO: 108544 - RNA, 19 nt, Artificial Sequence
  Synthetic
  misc_feature (10)..(10): n is a, c, g, or u
  misc_feature (12)..(12): n is a, c, g, or u
  misc_feature (18)..(18): n is a, c, g, or u
aaagacugununuuuaang

SEQ ID NO: 108545 - RNA, 20 nt, Artificial Sequence
  Synthetic
  misc_feature (11)..(11): n is a, c, g, or u
  misc_feature (13)..(13): n is a, c, g, or u
  misc_feature (19)..(19): n is a, c, g, or u
caaagacugununuuuaang

SEQ ID NO: 108546 - RNA, 21 nt, Artificial Sequence
  Synthetic
  misc_feature (12)..(12): n is a, c, g, or u
  misc_feature (14)..(14): n is a, c, g, or u
  misc_feature (20)..(20): n is a, c, g, or u
ucaaagacugununuuuaang

SEQ ID NO: 108547 - RNA, 22 nt, Artificial Sequence
  Synthetic
  misc_feature (13)..(13): n is a, c, g, or u
  misc_feature (15)..(15): n is a, c, g, or u
  misc_feature (21)..(21): n is a, c, g, or u
uucaaagacugununuuuaang

SEQ ID NO: 108548 - RNA, 23 nt, Artificial Sequence
  Synthetic
  misc_feature (14)..(14): n is a, c, g, or u
  misc_feature (16)..(16): n is a, c, g, or u
  misc_feature (22)..(22): n is a, c, g, or u
cuucaaagacugununuuuaang

SEQ ID NO: 108549 - RNA, 24 nt, Artificial Sequence
  Synthetic
  misc_feature (15)..(15): n is a, c, g, or u
  misc_feature (17)..(17): n is a, c, g, or u
  misc_feature (23)..(23): n is a, c, g, or u
acuucaaagacugununuuuaang

SEQ ID NO: 108550 - RNA, 18 nt, Artificial Sequence
  Synthetic
  misc_feature (9)..(9): n is a, c, g, or u
  misc_feature (17)..(17): n is a, c, g, or u
aaggaucanuggccagng

SEQ ID NO: 108551 - RNA, 19 nt, Artificial Sequence
  Synthetic
  misc_feature (10)..(10): n is a, c, g, or u
  misc_feature (18)..(18): n is a, c, g, or u
caaggaucanuggccagng

SEQ ID NO: 108552 - RNA, 20 nt, Artificial Sequence
  Synthetic
  misc_feature (11)..(11): n is a, c, g, or u
  misc_feature (19)..(19): n is a, c, g, or u
acaaggaucanuggccagng

SEQ ID NO: 108553 - RNA, 21 nt, Artificial Sequence
  Synthetic
  misc_feature (12)..(12): n is a, c, g, or u
  misc_feature (20)..(20): n is a, c, g, or u
aacaaggaucanuggccagng

SEQ ID NO: 108554 - RNA, 22 nt, Artificial Sequence
  Synthetic
  misc_feature (13)..(13): n is a, c, g, or u
  misc_feature (21)..(21): n is a, c, g, or u
caacaaggaucanuggccagng

SEQ ID NO: 108555 - RNA, 23 nt, Artificial Sequence
  Synthetic
  misc_feature (14)..(14): n is a, c, g, or u
  misc_feature (22)..(22): n is a, c, g, or u
ccaacaaggaucanuggccagng

SEQ ID NO: 108556 - RNA, 24 nt, Artificial Sequence
  Synthetic
  misc_feature (15)..(15): n is a, c, g, or u
  misc_feature (23)..(23): n is a, c, g, or u
cccaacaaggaucanuggccagng

SEQ ID NO: 108557 - RNA, 18 nt, Artificial Sequence
  Synthetic
  misc_feature (17)..(17): n is a, c, g, or u
ccaaauauuugcccuung

SEQ ID NO: 108558 - RNA, 19 nt, Artificial Sequence
  Synthetic
  misc_feature (18)..(18): n is a, c, g, or u
accaaauauuugcccuung

SEQ ID NO: 108559 - RNA, 20 nt, Artificial Sequence
  Synthetic
  misc_feature (19)..(19): n is a, c, g, or u
uaccaaauauuugcccuung

SEQ ID NO: 108560 - RNA, 21 nt, Artificial Sequence
  Synthetic
  misc_feature (20)..(20): n is a, c, g, or u
uuaccaaauauuugcccuung

SEQ ID NO: 108561 - RNA, 22 nt, Artificial Sequence
  Synthetic
  misc_feature (21)..(21): n is a, c, g, or u
cuuaccaaauauuugcccuung

SEQ ID NO: 108562 - RNA, 23 nt, Artificial Sequence
  Synthetic
  misc_feature (22)..(22): n is a, c, g, or u
ccuuaccaaauauuugcccuung

SEQ ID NO: 108563 - RNA, 24 nt, Artificial Sequence
  Synthetic
  misc_feature (23)..(23): n is a, c, g, or u
accuuaccaaauauuugcccuung

SEQ ID NO: 108564 - RNA, 18 nt, Artificial Sequence
  Synthetic
gcccucuuacaguuaaug

SEQ ID NO: 108565 - RNA, 19 nt, Artificial Sequence
  Synthetic
ggcccucuuacaguuaaug

SEQ ID NO: 108566 - RNA, 20 nt, Artificial Sequence
  Synthetic
gggcccucuuacaguuaaug

SEQ ID NO: 108567 - RNA, 21 nt, Artificial Sequence
  Synthetic
ugggcccucuuacaguuaaug

SEQ ID NO: 108568 - RNA, 22 nt, Artificial Sequence
  Synthetic
gugggcccucuuacaguuaaug

SEQ ID NO: 108569 - RNA, 23 nt, Artificial Sequence
  Synthetic
ugugggcccucuuacaguuaaug

SEQ ID NO: 108570 - RNA, 24 nt, Artificial Sequence
  Synthetic
augugggcccucuuacaguuaaug

SEQ ID NO: 108571 - RNA, 18 nt, Artificial Sequence
  Synthetic
uaccagcacgggaccaug

SEQ ID NO: 108572 - RNA, 19 nt, Artificial Sequence
  Synthetic
cuaccagcacgggaccaug

SEQ ID NO: 108573 - RNA, 20 nt, Artificial Sequence
  Synthetic
acuaccagcacgggaccaug

SEQ ID NO: 108574 - RNA, 21 nt, Artificial Sequence
  Synthetic
aacuaccagcacgggaccaug

SEQ ID NO: 108575 - RNA, 22 nt, Artificial Sequence
  Synthetic
caacuaccagcacgggaccaug

SEQ ID NO: 108576 - RNA, 23 nt, Artificial Sequence
  Synthetic
ucaacuaccagcacgggaccaug

SEQ ID NO: 108577 - RNA, 24 nt, Artificial Sequence
  Synthetic
aucaacuaccagcacgggaccaug

SEQ ID NO: 108578 - RNA, 18 nt, Artificial Sequence
  Synthetic
  misc_feature (3)..(3): n is a, c, g, or u
  misc_feature (11)..(12): n is a, c, g, or u
aunggccaucnncgcaug

SEQ ID NO: 108579 - RNA, 19 nt, Artificial Sequence
  Synthetic
  misc_feature (1)..(1): n is a, c, g, or u
  misc_feature (4)..(4): n is a, c, g, or u
  misc_feature (12)..(13): n is a, c, g, or u
naunggccaucnncgcaug

SEQ ID NO: 108580 - RNA, 20 nt, Artificial Sequence
  Synthetic
  misc_feature (2)..(2): n is a, c, g, or u
  misc_feature (5)..(5): n is a, c, g, or u
  misc_feature (13)..(14): n is a, c, g, or u
cnaunggccaucnncgcaug

SEQ ID NO: 108581 - RNA, 21 nt, Artificial Sequence
  Synthetic
  misc_feature (3)..(3): n is a, c, g, or u
  misc_feature (6)..(6): n is a, c, g, or u
  misc_feature (14)..(15): n is a, c, g, or u
gcnaunggccaucnncgcaug

SEQ ID NO: 108582 - RNA, 22 nt, Artificial Sequence
  Synthetic
  misc_feature (4)..(4): n is a, c, g, or u
  misc_feature (7)..(7): n is a, c, g, or u
  misc_feature (15)..(16): n is a, c, g, or u
ggcnaunggccaucnncgcaug

SEQ ID NO: 108583 - RNA, 23 nt, Artificial Sequence
  Synthetic
  misc_feature (5)..(5): n is a, c, g, or u
  misc_feature (8)..(8): n is a, c, g, or u
  misc_feature (16)..(17): n is a, c, g, or u
uggcnaunggccaucnncgcaug

SEQ ID NO: 108584 - RNA, 24 nt, Artificial Sequence
  Synthetic
  misc_feature (6)..(6): n is a, c, g, or u
  misc_feature (9)..(9): n is a, c, g, or u
  misc_feature (17)..(18): n is a, c, g, or u
uuggcnaunggccaucnncgcaug

SEQ ID NO: 108585 - RNA, 18 nt, Artificial Sequence
  Synthetic
cugacgcaacccccacug

SEQ ID NO: 108586 - RNA, 19 nt, Artificial Sequence
  Synthetic
gcugacgcaacccccacug

SEQ ID NO: 108587 - RNA, 20 nt, Artificial Sequence
  Synthetic
ugcugacgcaacccccacug

SEQ ID NO: 108588 - RNA, 18 nt, Artificial Sequence
  Synthetic
uagggcuuucccccacug

SEQ ID NO: 108589 - RNA, 19 nt, Artificial Sequence
  Synthetic
guagggcuuucccccacug

SEQ ID NO: 108590 - RNA, 20 nt, Artificial Sequence
  Synthetic
cguagggcuuucccccacug

SEQ ID NO: 108591 - RNA, 21 nt, Artificial Sequence
  Synthetic
ucguagggcuuucccccacug

SEQ ID NO: 108592 - RNA, 22 nt, Artificial Sequence
  Synthetic
uucguagggcuuucccccacug

SEQ ID NO: 108593 - RNA, 23 nt, Artificial Sequence
  Synthetic
guucguagggcuuucccccacug

SEQ ID NO: 108594 - RNA, 24 nt, Artificial Sequence
  Synthetic
gguucguagggcuuucccccacug

SEQ ID NO: 108595 - RNA, 18 nt, Artificial Sequence
  Synthetic
  misc_feature (5)..(5): n is a, c, g, or u
  misc_feature (7)..(7): n is a, c, g, or u
  misc_feature (13)..(13): n is a, c, g, or u
cugununuuuaangacug

SEQ ID NO: 108596 - RNA, 19 nt, Artificial Sequence
  Synthetic
  misc_feature (6)..(6): n is a, c, g, or u
  misc_feature (8)..(8): n is a, c, g, or u
  misc_feature (14)..(14): n is a, c, g, or u
acugununuuuaangacug

SEQ ID NO: 108597 - RNA, 20 nt, Artificial Sequence
  Synthetic
  misc_feature (7)..(7): n is a, c, g, or u
  misc_feature (9)..(9): n is a, c, g, or u
  misc_feature (15)..(15): n is a, c, g, or u
gacugununuuuaangacug

SEQ ID NO: 108598 - RNA, 21 nt, Artificial Sequence
  Synthetic
  misc_feature (8)..(8): n is a, c, g, or u
  misc_feature (10)..(10): n is a, c, g, or u
  misc_feature (16)..(16): n is a, c, g, or u
agacugununuuuaangacug

SEQ ID NO: 108599 - RNA, 22 nt, Artificial Sequence
  Synthetic
  misc_feature (9)..(9): n is a, c, g, or u
  misc_feature (11)..(11): n is a, c, g, or u
  misc_feature (17)..(17): n is a, c, g, or u
aagacugununuuuaangacug

SEQ ID NO: 108600 - RNA, 23 nt, Artificial Sequence
  Synthetic
  misc_feature (10)..(10): n is a, c, g, or u
  misc_feature (12)..(12): n is a, c, g, or u
  misc_feature (18)..(18): n is a, c, g, or u
aaagacugununuuuaangacug

SEQ ID NO: 108601 - RNA, 24 nt, Artificial Sequence
  Synthetic
  misc_feature (11)..(11): n is a, c, g, or u
  misc_feature (13)..(13): n is a, c, g, or u
  misc_feature (19)..(19): n is a, c, g, or u
caaagacugununuuuaangacug

SEQ ID NO: 108602 - RNA, 18 nt, Artificial Sequence
  Synthetic
cucugccgauccauacug

SEQ ID NO: 108603 - RNA, 19 nt, Artificial Sequence
  Synthetic
ccucugccgauccauacug

SEQ ID NO: 108604 - RNA, 20 nt, Artificial Sequence
  Synthetic
uccucugccgauccauacug

SEQ ID NO: 108605 - RNA, 21 nt, Artificial Sequence
  Synthetic
cuccucugccgauccauacug

SEQ ID NO: 108606 - RNA, 22 nt, Artificial Sequence
  Synthetic
gcuccucugccgauccauacug

SEQ ID NO: 108607 - RNA, 23 nt, Artificial Sequence
  Synthetic
ggcuccucugccgauccauacug

SEQ ID NO: 108608 - RNA, 24 nt, Artificial Sequence
  Synthetic
uggcuccucugccgauccauacug

SEQ ID NO: 108609 - RNA, 18 nt, Artificial Sequence
  Synthetic
cauguucauguccuacug

SEQ ID NO: 108610 - RNA, 19 nt, Artificial Sequence
  Synthetic
ucauguucauguccuacug

SEQ ID NO: 108611 - RNA, 20 nt, Artificial Sequence
  Synthetic
cucauguucauguccuacug

SEQ ID NO: 108612 - RNA, 21 nt, Artificial Sequence
  Synthetic
ucucauguucauguccuacug

SEQ ID NO: 108613 - RNA, 22 nt, Artificial Sequence
  Synthetic
aucucauguucauguccuacug

SEQ ID NO: 108614 - RNA, 23 nt, Artificial Sequence
  Synthetic
caucucauguucauguccuacug

SEQ ID NO: 108615 - RNA, 24 nt, Artificial Sequence
  Synthetic
ucaucucauguucauguccuacug

SEQ ID NO: 108616 - RNA, 18 nt, Artificial Sequence
  Synthetic
gaugaaucuggccaccug

SEQ ID NO: 108617 - RNA, 19 nt, Artificial Sequence
  Synthetic
ugaugaaucuggccaccug

SEQ ID NO: 108618 - RNA, 20 nt, Artificial Sequence
  Synthetic
uugaugaaucuggccaccug

SEQ ID NO: 108619 - RNA, 21 nt, Artificial Sequence
  Synthetic
guugaugaaucuggccaccug

SEQ ID NO: 108620 - RNA, 22 nt, Artificial Sequence
  Synthetic
aguugaugaaucuggccaccug

SEQ ID NO: 108621 - RNA, 23 nt, Artificial Sequence
  Synthetic
gaguugaugaaucuggccaccug

SEQ ID NO: 108622 - RNA, 24 nt, Artificial Sequence
  Synthetic
ugaguugaugaaucuggccaccug

SEQ ID NO: 108623 - RNA, 18 nt, Artificial Sequence
  Synthetic
gggaccaugcaagaccug

SEQ ID NO: 108624 - RNA, 19 nt, Artificial Sequence
  Synthetic
cgggaccaugcaagaccug

SEQ ID NO: 108625 - RNA, 20 nt, Artificial Sequence
  Synthetic
acgggaccaugcaagaccug

SEQ ID NO: 108626 - RNA, 21 nt, Artificial Sequence
  Synthetic
cacgggaccaugcaagaccug

SEQ ID NO: 108627 - RNA, 22 nt, Artificial Sequence
  Synthetic
gcacgggaccaugcaagaccug

SEQ ID NO: 108628 - RNA, 23 nt, Artificial Sequence
  Synthetic
agcacgggaccaugcaagaccug

SEQ ID NO: 108629 - RNA, 24 nt, Artificial Sequence
  Synthetic
cagcacgggaccaugcaagaccug

SEQ ID NO: 108630 - RNA, 18 nt, Artificial Sequence
  Synthetic
uaccugucuuuaauccug

SEQ ID NO: 108631 - RNA, 19 nt, Artificial Sequence
  Synthetic
guaccugucuuuaauccug

SEQ ID NO: 108632 - RNA, 20 nt, Artificial Sequence
  Synthetic
uguaccugucuuuaauccug

SEQ ID NO: 108633 - RNA, 21 nt, Artificial Sequence
  Synthetic
cuguaccugucuuuaauccug

SEQ ID NO: 108634 - RNA, 22 nt, Artificial Sequence
  Synthetic
acuguaccugucuuuaauccug

SEQ ID NO: 108635 - RNA, 23 nt, Artificial Sequence
  Synthetic
uacuguaccugucuuuaauccug

SEQ ID NO: 108636 - RNA, 24 nt, Artificial Sequence
  Synthetic
cuacuguaccugucuuuaauccug

SEQ ID NO: 108637 - RNA, 18 nt, Artificial Sequence
  Synthetic
gcugccaacuggauccug

SEQ ID NO: 108638 - RNA, 19 nt, Artificial Sequence
  Synthetic
ugcugccaacuggauccug

SEQ ID NO: 108639 - RNA, 20 nt, Artificial Sequence
  Synthetic
gugcugccaacuggauccug

SEQ ID NO: 108640 - RNA, 21 nt, Artificial Sequence
  Synthetic
ugugcugccaacuggauccug

SEQ ID NO: 108641 - RNA, 22 nt, Artificial Sequence
  Synthetic
  misc_feature (1)..(1): n is a, c, g, or u
nugugcugccaacuggauccug

SEQ ID NO: 108642 - RNA, 23 nt, Artificial Sequence
  Synthetic
  misc_feature (2)..(2): n is a, c, g, or u
gnugugcugccaacuggauccug

SEQ ID NO: 108643 - RNA, 24 nt, Artificial Sequence
  Synthetic
  misc_feature (3)..(3): n is a, c, g, or u
ggnugugcugccaacuggauccug

SEQ ID NO: 108644 - RNA, 18 nt, Artificial Sequence
  Synthetic
gagcacccacguguccug

SEQ ID NO: 108645 - RNA, 19 nt, Artificial Sequence
  Synthetic
ggagcacccacguguccug

SEQ ID NO: 108646 - RNA, 20 nt, Artificial Sequence
  Synthetic
gggagcacccacguguccug

SEQ ID NO: 108647 - RNA, 21 nt, Artificial Sequence
  Synthetic
ggggagcacccacguguccug

SEQ ID NO: 108648 - RNA, 22 nt, Artificial Sequence
  Synthetic
gggggagcacccacguguccug

SEQ ID NO: 108649 - RNA, 23 nt, Artificial Sequence
  Synthetic
agggggagcacccacguguccug

SEQ ID NO: 108650 - RNA, 24 nt, Artificial Sequence
  Synthetic
uagggggagcacccacguguccug

SEQ ID NO: 108651 - RNA, 18 nt, Artificial Sequence
  Synthetic
  misc_feature (13)..(13): n is a, c, g, or u
agaccugcacganuccug

SEQ ID NO: 108652 - RNA, 19 nt, Artificial Sequence
  Synthetic
  misc_feature (14)..(14): n is a, c, g, or u
aagaccugcacganuccug

SEQ ID NO: 108653 - RNA, 20 nt, Artificial Sequence
  Synthetic
  misc_feature (15)..(15): n is a, c, g, or u
caagaccugcacganuccug

SEQ ID NO: 108654 - RNA, 21 nt, Artificial Sequence
  Synthetic
  misc_feature (16)..(16): n is a, c, g, or u
gcaagaccugcacganuccug

SEQ ID NO: 108655 - RNA, 22 nt, Artificial Sequence
  Synthetic
  misc_feature (17)..(17): n is a, c, g, or u
ugcaagaccugcacganuccug

SEQ ID NO: 108656 - RNA, 23 nt, Artificial Sequence
  Synthetic
  misc_feature (18)..(18): n is a, c, g, or u
augcaagaccugcacganuccug

SEQ ID NO: 108657 - RNA, 24 nt, Artificial Sequence
  Synthetic
  misc_feature (19)..(19): n is a, c, g, or u
caugcaagaccugcacganuccug

SEQ ID NO: 108658 - RNA, 18 nt, Artificial Sequence
  Synthetic
accuccuuuccauggcug

SEQ ID NO: 108659 - RNA, 19 nt, Artificial Sequence
  Synthetic
caccuccuuuccauggcug

SEQ ID NO: 108660 - RNA, 20 nt, Artificial Sequence
  Synthetic
acaccuccuuuccauggcug

SEQ ID NO: 108661 - RNA, 21 nt, Artificial Sequence
  Synthetic
uacaccuccuuuccauggcug

SEQ ID NO: 108662 - RNA, 22 nt, Artificial Sequence
  Synthetic
auacaccuccuuuccauggcug

SEQ ID NO: 108663 - RNA, 23 nt, Artificial Sequence
  Synthetic
aauacaccuccuuuccauggcug

SEQ ID NO: 108664 - RNA, 24 nt, Artificial Sequence
  Synthetic
aaauacaccuccuuuccauggcug

SEQ ID NO: 108665 - RNA, 18 nt, Artificial Sequence
  Synthetic
guuucccucuuguugcug

SEQ ID NO: 108666 - RNA, 19 nt, Artificial Sequence
  Synthetic
uguuucccucuuguugcug

SEQ ID NO: 108667 - RNA, 20 nt, Artificial Sequence
  Synthetic
auguuucccucuuguugcug

SEQ ID NO: 108668 - RNA, 21 nt, Artificial Sequence
  Synthetic
uauguuucccucuuguugcug

SEQ ID NO: 108669 - RNA, 22 nt, Artificial Sequence
  Synthetic
cuauguuucccucuuguugcug

SEQ ID NO: 108670 - RNA, 23 nt, Artificial Sequence
  Synthetic
ucuauguuucccucuuguugcug

SEQ ID NO: 108671 - RNA, 24 nt, Artificial Sequence
  Synthetic
cucuauguuucccucuuguugcug

SEQ ID NO: 108672 - RNA, 18 nt, Artificial Sequence
  Synthetic
cauuauuuacauacucug

SEQ ID NO: 108673 - RNA, 19 nt, Artificial Sequence
  Synthetic
gcauuauuuacauacucug

SEQ ID NO: 108674 - RNA, 20 nt, Artificial Sequence
  Synthetic
ggcauuauuuacauacucug

SEQ ID NO: 108675 - RNA, 21 nt, Artificial Sequence
  Synthetic
aggcauuauuuacauacucug

SEQ ID NO: 108676 - RNA, 22 nt, Artificial Sequence
  Synthetic
uaggcauuauuuacauacucug

SEQ ID NO: 108677 - RNA, 23 nt, Artificial Sequence
  Synthetic
cuaggcauuauuuacauacucug

SEQ ID NO: 108678 - RNA, 24 nt, Artificial Sequence
  Synthetic
acuaggcauuauuuacauacucug

SEQ ID NO: 108679 - RNA, 18 nt, Artificial Sequence
  Synthetic
acauuccaccaagcucug

SEQ ID NO: 108680 - RNA, 19 nt, Artificial Sequence
  Synthetic
  misc_feature (1)..(1): n is a, c, g, or u
nacauuccaccaagcucug

SEQ ID NO: 108681 - RNA, 20 nt, Artificial Sequence
  Synthetic
  misc_feature (1)..(2): n is a, c, g, or u
nnacauuccaccaagcucug

SEQ ID NO: 108682 - RNA, 21 nt, Artificial Sequence
  Synthetic
  misc_feature (2)..(3): n is a, c, g, or u
annacauuccaccaagcucug

SEQ ID NO: 108683 - RNA, 22 nt, Artificial Sequence
  Synthetic
  misc_feature (3)..(4): n is a, c, g, or u
cannacauuccaccaagcucug

SEQ ID NO: 108684 - RNA, 23 nt, Artificial Sequence
  Synthetic
  misc_feature (4)..(5): n is a, c, g, or u
ccannacauuccaccaagcucug

SEQ ID NO: 108685 - RNA, 24 nt, Artificial Sequence
  Synthetic
  misc_feature (5)..(6): n is a, c, g, or u
uccannacauuccaccaagcucug

SEQ ID NO: 108686 - RNA, 18 nt, Artificial Sequence
  Synthetic
uauugggggccaagucug

SEQ ID NO: 108687 - RNA, 19 nt, Artificial Sequence
  Synthetic
guauugggggccaagucug

SEQ ID NO: 108688 - RNA, 20 nt, Artificial Sequence
  Synthetic
gguauugggggccaagucug

SEQ ID NO: 108689 - RNA, 21 nt, Artificial Sequence
  Synthetic
ugguauugggggccaagucug

SEQ ID NO: 108690 - RNA, 22 nt, Artificial Sequence
  Synthetic
gugguauugggggccaagucug

SEQ ID NO: 108691 - RNA, 23 nt, Artificial Sequence
  Synthetic
ugugguauugggggccaagucug

SEQ ID NO: 108692 - RNA, 24 nt, Artificial Sequence
  Synthetic
augugguauugggggccaagucug

SEQ ID NO: 108693 - RNA, 18 nt, Artificial Sequence
  Synthetic
acuuacaaggccuuucug

SEQ ID NO: 108694 - RNA, 19 nt, Artificial Sequence
  Synthetic
aacuuacaaggccuuucug

SEQ ID NO: 108695 - RNA, 20 nt, Artificial Sequence
  Synthetic
caacuuacaaggccuuucug

SEQ ID NO: 108696 - RNA, 21 nt, Artificial Sequence
  Synthetic
ccaacuuacaaggccuuucug

SEQ ID NO: 108697 - RNA, 22 nt, Artificial Sequence
  Synthetic
gccaacuuacaaggccuuucug

SEQ ID NO: 108698 - RNA, 23 nt, Artificial Sequence
  Synthetic
cgccaacuuacaaggccuuucug

SEQ ID NO: 108699 - RNA, 24 nt, Artificial Sequence
  Synthetic
ucgccaacuuacaaggccuuucug

SEQ ID NO: 108700 - RNA, 18 nt, Artificial Sequence
  Synthetic
uccucaggccaugcagug

SEQ ID NO: 108701 - RNA, 19 nt, Artificial Sequence
  Synthetic
auccucaggccaugcagug

SEQ ID NO: 108702 - RNA, 20 nt, Artificial Sequence
  Synthetic
cauccucaggccaugcagug

SEQ ID NO: 108703 - RNA, 21 nt, Artificial Sequence
  Synthetic
ucauccucaggccaugcagug

SEQ ID NO: 108704 - RNA, 22 nt, Artificial Sequence
  Synthetic
gucauccucaggccaugcagug

SEQ ID NO: 108705 - RNA, 23 nt, Artificial Sequence
  Synthetic
agucauccucaggccaugcagug

SEQ ID NO: 108706 - RNA, 24 nt, Artificial Sequence
  Synthetic
cagucauccucaggccaugcagug

SEQ ID NO: 108707 - RNA, 18 nt, Artificial Sequence
  Synthetic
  misc_feature (9)..(9): n is a, c, g, or u
cugcuagancccagagug

SEQ ID NO: 108708 - RNA, 19 nt, Artificial Sequence
  Synthetic
  misc_feature (10)..(10): n is a, c, g, or u
ucugcuagancccagagug

SEQ ID NO: 108709 - RNA, 20 nt, Artificial Sequence
  Synthetic
  misc_feature (11)..(11): n is a, c, g, or u
cucugcuagancccagagug

SEQ ID NO: 108710 - RNA, 21 nt, Artificial Sequence
  Synthetic
  misc_feature (12)..(12): n is a, c, g, or u
gcucugcuagancccagagug

SEQ ID NO: 108711 - RNA, 22 nt, Artificial Sequence
  Synthetic
  misc_feature (13)..(13): n is a, c, g, or u
agcucugcuagancccagagug

SEQ ID NO: 108712 - RNA, 23 nt, Artificial Sequence
  Synthetic
  misc_feature (14)..(14): n is a, c, g, or u
aagcucugcuagancccagagug

SEQ ID NO: 108713 - RNA, 24 nt, Artificial Sequence
  Synthetic
  misc_feature (15)..(15): n is a, c, g, or u
caagcucugcuagancccagagug

SEQ ID NO: 108714 - RNA, 18 nt, Artificial Sequence
  Synthetic
acagagucuagacucgug

SEQ ID NO: 108715 - RNA, 19 nt, Artificial Sequence
  Synthetic
cacagagucuagacucgug

SEQ ID NO: 108716 - RNA, 20 nt, Artificial Sequence
  Synthetic
ccacagagucuagacucgug

SEQ ID NO: 108717 - RNA, 21 nt, Artificial Sequence
  Synthetic
accacagagucuagacucgug

SEQ ID NO: 108718 - RNA, 22 nt, Artificial Sequence
  Synthetic
uaccacagagucuagacucgug

SEQ ID NO: 108719 - RNA, 23 nt, Artificial Sequence
  Synthetic
auaccacagagucuagacucgug

SEQ ID NO: 108720 - RNA, 24 nt, Artificial Sequence
  Synthetic
aauaccacagagucuagacucgug

SEQ ID NO: 108721 - RNA, 18 nt, Artificial Sequence
  Synthetic
ccuuggacucauaaggug

SEQ ID NO: 108722 - RNA, 19 nt, Artificial Sequence
  Synthetic
cccuuggacucauaaggug

SEQ ID NO: 108723 - RNA, 20 nt, Artificial Sequence
  Synthetic
ucccuuggacucauaaggug

SEQ ID NO: 108724 - RNA, 21 nt, Artificial Sequence
  Synthetic
aucccuuggacucauaaggug

SEQ ID NO: 108725 - RNA, 22 nt, Artificial Sequence
  Synthetic
uaucccuuggacucauaaggug

SEQ ID NO: 108726 - RNA, 23 nt, Artificial Sequence
  Synthetic
guaucccuuggacucauaaggug

SEQ ID NO: 108727 - RNA, 24 nt, Artificial Sequence
  Synthetic
aguaucccuuggacucauaaggug

SEQ ID NO: 108728 - RNA, 18 nt, Artificial Sequence
  Synthetic
uuauuuacauacucugug

SEQ ID NO: 108729 - RNA, 19 nt, Artificial Sequence
  Synthetic
auuauuuacauacucugug

SEQ ID NO: 108730 - RNA, 20 nt, Artificial Sequence
  Synthetic
cauuauuuacauacucugug

SEQ ID NO: 108731 - RNA, 21 nt, Artificial Sequence
  Synthetic
gcauuauuuacauacucugug

SEQ ID NO: 108732 - RNA, 22 nt, Artificial Sequence
  Synthetic
ggcauuauuuacauacucugug

SEQ ID NO: 108733 - RNA, 23 nt, Artificial Sequence
  Synthetic
aggcauuauuuacauacucugug

SEQ ID NO: 108734 - RNA, 24 nt, Artificial Sequence
  Synthetic
uaggcauuauuuacauacucugug

SEQ ID NO: 108735 - RNA, 18 nt, Artificial Sequence
  Synthetic
  misc_feature (1)..(1): n is a, c, g, or u
naggcaagcuauucugug

SEQ ID NO: 108736 - RNA, 19 nt, Artificial Sequence
  Synthetic
  misc_feature (2)..(2): n is a, c, g, or u
unaggcaagcuauucugug

SEQ ID NO: 108737 - RNA, 20 nt, Artificial Sequence
  Synthetic
  misc_feature (3)..(3): n is a, c, g, or u
cunaggcaagcuauucugug

SEQ ID NO: 108738 - RNA, 21 nt, Artificial Sequence
  Synthetic
  misc_feature (4)..(4): n is a, c, g, or u
acunaggcaagcuauucugug

SEQ ID NO: 108739 - RNA, 22 nt, Artificial Sequence
  Synthetic
  misc_feature (5)..(5): n is a, c, g, or u
cacunaggcaagcuauucugug

SEQ ID NO: 108740 - RNA, 23 nt, Artificial Sequence
  Synthetic
  misc_feature (6)..(6): n is a, c, g, or u
gcacunaggcaagcuauucugug

SEQ ID NO: 108741 - RNA, 24 nt, Artificial Sequence
  Synthetic
  misc_feature (7)..(7): n is a, c, g, or u
agcacunaggcaagcuauucugug

SEQ ID NO: 108742 - RNA, 18 nt, Artificial Sequence
  Synthetic
  misc_feature (16)..(16): n is a, c, g, or u
ccccaacaaggaucanug

SEQ ID NO: 108743 - RNA, 19 nt, Artificial Sequence
  Synthetic
  misc_feature (17)..(17): n is a, c, g, or u
accccaacaaggaucanug

SEQ ID NO: 108744 - RNA, 20 nt, Artificial Sequence
  Synthetic
  misc_feature (18)..(18): n is a, c, g, or u
aaccccaacaaggaucanug

SEQ ID NO: 108745 - RNA, 21 nt, Artificial Sequence
  Synthetic
  misc_feature (19)..(19): n is a, c, g, or u
caaccccaacaaggaucanug

SEQ ID NO: 108746 - RNA, 22 nt, Artificial Sequence
  Synthetic
  misc_feature (20)..(20): n is a, c, g, or u
ucaaccccaacaaggaucanug

SEQ ID NO: 108747 - RNA, 23 nt, Artificial Sequence
  Synthetic
  misc_feature (21)..(21): n is a, c, g, or u
uucaaccccaacaaggaucanug

SEQ ID NO: 108748 - RNA, 24 nt, Artificial Sequence
  Synthetic
  misc_feature (22)..(22): n is a, c, g, or u
cuucaaccccaacaaggaucanug

SEQ ID NO: 108749 - RNA, 18 nt, Artificial Sequence
  Synthetic
  misc_feature (16)..(16): n is a, c, g, or u
ugucuuuaauccuganug

SEQ ID NO: 108750 - RNA, 19 nt, Artificial Sequence
  Synthetic
  misc_feature (17)..(17): n is a, c, g, or u
cugucuuuaauccuganug

SEQ ID NO: 108751 - RNA, 20 nt, Artificial Sequence
  Synthetic
  misc_feature (18)..(18): n is a, c, g, or u
ccugucuuuaauccuganug

SEQ ID NO: 108752 - RNA, 21 nt, Artificial Sequence
  Synthetic
  misc_feature (19)..(19): n is a, c, g, or u
accugucuuuaauccuganug

SEQ ID NO: 108753 - RNA, 22 nt, Artificial Sequence
  Synthetic
  misc_feature (20)..(20): n is a, c, g, or u
uaccugucuuuaauccuganug

SEQ ID NO: 108754 - RNA, 23 nt, Artificial Sequence
  Synthetic
  misc_feature (21)..(21): n is a, c, g, or u
guaccugucuuuaauccuganug

SEQ ID NO: 108755 - RNA, 24 nt, Artificial Sequence
  Synthetic
  misc_feature (22)..(22): n is a, c, g, or u
uguaccugucuuuaauccuganug

SEQ ID NO: 108756 - RNA, 18 nt, Artificial Sequence
  Synthetic
  misc_feature (3)..(3): n is a, c, g, or u
cunuaaauagaccuauug

SEQ ID NO: 108757 - RNA, 19 nt, Artificial Sequence
  Synthetic
  misc_feature (4)..(4): n is a, c, g, or u
ccunuaaauagaccuauug

SEQ ID NO: 108758 - RNA, 20 nt, Artificial Sequence
  Synthetic
  misc_feature (1)..(1): n is a, c, g, or u
  misc_feature (5)..(5): n is a, c, g, or u
nccunuaaauagaccuauug

SEQ ID NO: 108759 - RNA, 21 nt, Artificial Sequence
  Synthetic
  misc_feature (2)..(2): n is a, c, g, or u
  misc_feature (6)..(6): n is a, c, g, or u
unccunuaaauagaccuauug

SEQ ID NO: 108760 - RNA, 22 nt, Artificial Sequence
  Synthetic
  misc_feature (3)..(3): n is a, c, g, or u
  misc_feature (7)..(7): n is a, c, g, or u
cunccunuaaauagaccuauug

SEQ ID NO: 108761 - RNA, 23 nt, Artificial Sequence
  Synthetic
  misc_feature (4)..(4): n is a, c, g, or u
  misc_feature (8)..(8): n is a, c, g, or u
acunccunuaaauagaccuauug

SEQ ID NO: 108762 - RNA, 24 nt, Artificial Sequence
  Synthetic
  misc_feature (5)..(5): n is a, c, g, or u
  misc_feature (9)..(9): n is a, c, g, or u
aacunccunuaaauagaccuauug

SEQ ID NO: 108763 - RNA, 18 nt, Artificial Sequence
  Synthetic
ccuccaagcugugccuug

SEQ ID NO: 108764 - RNA, 19 nt, Artificial Sequence
  Synthetic
gccuccaagcugugccuug

SEQ ID NO: 108765 - RNA, 20 nt, Artificial Sequence
  Synthetic
agccuccaagcugugccuug

SEQ ID NO: 108766 - RNA, 21 nt, Artificial Sequence
  Synthetic
aagccuccaagcugugccuug

SEQ ID NO: 108767 - RNA, 22 nt, Artificial Sequence
  Synthetic
caagccuccaagcugugccuug

SEQ ID NO: 108768 - RNA, 23 nt, Artificial Sequence
  Synthetic
ucaagccuccaagcugugccuug

SEQ ID NO: 108769 - RNA, 24 nt, Artificial Sequence
  Synthetic
uucaagccuccaagcugugccuug

SEQ ID NO: 108770 - RNA, 18 nt, Artificial Sequence
  Synthetic
  misc_feature (8)..(8): n is a, c, g, or u
aacgcccnccaggucuug

SEQ ID NO: 108771 - RNA, 19 nt, Artificial Sequence
  Synthetic
  misc_feature (9)..(9): n is a, c, g, or u
gaacgcccnccaggucuug

SEQ ID NO: 108772 - RNA, 20 nt, Artificial Sequence
  Synthetic
  misc_feature (10)..(10): n is a, c, g, or u
ugaacgcccnccaggucuug

SEQ ID NO: 108773 - RNA, 21 nt, Artificial Sequence
  Synthetic
  misc_feature (11)..(11): n is a, c, g, or u
gugaacgcccnccaggucuug

SEQ ID NO: 108774 - RNA, 22 nt, Artificial Sequence
  Synthetic
  misc_feature (12)..(12): n is a, c, g, or u
cgugaacgcccnccaggucuug

SEQ ID NO: 108775 - RNA, 23 nt, Artificial Sequence
  Synthetic
  misc_feature (13)..(13): n is a, c, g, or u
ccgugaacgcccnccaggucuug

SEQ ID NO: 108776 - RNA, 24 nt, Artificial Sequence
  Synthetic
  misc_feature (14)..(14): n is a, c, g, or u
accgugaacgcccnccaggucuug

SEQ ID NO: 108777 - RNA, 18 nt, Artificial Sequence
  Synthetic
  misc_feature (3)..(3): n is a, c, g, or u
aangacugggaggaguug

SEQ ID NO: 108778 - RNA, 19 nt, Artificial Sequence
  Synthetic
  misc_feature (4)..(4): n is a, c, g, or u
uaangacugggaggaguug

SEQ ID NO: 108779 - RNA, 20 nt, Artificial Sequence
  Synthetic
  misc_feature (5)..(5): n is a, c, g, or u
uuaangacugggaggaguug

SEQ ID NO: 108780 - RNA, 21 nt, Artificial Sequence
  Synthetic
  misc_feature (6)..(6): n is a, c, g, or u
uuuaangacugggaggaguug

SEQ ID NO: 108781 - RNA, 22 nt, Artificial Sequence
  Synthetic
  misc_feature (1)..(1): n is a, c, g, or u
  misc_feature (7)..(7): n is a, c, g, or u
nuuuaangacugggaggaguug

SEQ ID NO: 108782 - RNA, 23 nt, Artificial Sequence
  Synthetic
  misc_feature (2)..(2): n is a, c, g, or u
  misc_feature (8)..(8): n is a, c, g, or u
unuuuaangacugggaggaguug

SEQ ID NO: 108783 - RNA, 24 nt, Artificial Sequence
  Synthetic
  misc_feature (1)..(1): n is a, c, g, or u
  misc_feature (3)..(3): n is a, c, g, or u
  misc_feature (9)..(9): n is a, c, g, or u
nunuuuaangacugggaggaguug

SEQ ID NO: 108784 - RNA, 18 nt, Artificial Sequence
  Synthetic
ugaaccuuuaccccguug

SEQ ID NO: 108785 - RNA, 19 nt, Artificial Sequence
  Synthetic
cugaaccuuuaccccguug

SEQ ID NO: 108786 - RNA, 20 nt, Artificial Sequence
  Synthetic
ucugaaccuuuaccccguug

SEQ ID NO: 108787 - RNA, 21 nt, Artificial Sequence
  Synthetic
aucugaaccuuuaccccguug

SEQ ID NO: 108788 - RNA, 22 nt, Artificial Sequence
  Synthetic
uaucugaaccuuuaccccguug

SEQ ID NO: 108789 - RNA, 23 nt, Artificial Sequence
  Synthetic
auaucugaaccuuuaccccguug

SEQ ID NO: 108790 - RNA, 24 nt, Artificial Sequence
  Synthetic
aauaucugaaccuuuaccccguug

SEQ ID NO: 108791 - RNA, 18 nt, Artificial Sequence
  Synthetic
uuccggaaacuacuguug

SEQ ID NO: 108792 - RNA, 19 nt, Artificial Sequence
  Synthetic
cuuccggaaacuacuguug

SEQ ID NO: 108793 - RNA, 20 nt, Artificial Sequence
  Synthetic
acuuccggaaacuacuguug

SEQ ID NO: 108794 - RNA, 21 nt, Artificial Sequence
  Synthetic
cacuuccggaaacuacuguug

SEQ ID NO: 108795 - RNA, 22 nt, Artificial Sequence
  Synthetic
acacuuccggaaacuacuguug

SEQ ID NO: 108796 - RNA, 23 nt, Artificial Sequence
  Synthetic
aacacuuccggaaacuacuguug

SEQ ID NO: 108797 - RNA, 24 nt, Artificial Sequence
  Synthetic
caacacuuccggaaacuacuguug

SEQ ID NO: 108798 - RNA, 18 nt, Artificial Sequence
  Synthetic
gcgggguuuuucuuguug

SEQ ID NO: 108799 - RNA, 19 nt, Artificial Sequence
  Synthetic
ggcgggguuuuucuuguug

SEQ ID NO: 108800 - RNA, 20 nt, Artificial Sequence
  Synthetic
aggcgggguuuuucuuguug

SEQ ID NO: 108801 - RNA, 21 nt, Artificial Sequence
  Synthetic
caggcgggguuuuucuuguug

SEQ ID NO: 108802 - RNA, 22 nt, Artificial Sequence
  Synthetic
acaggcgggguuuuucuuguug

SEQ ID NO: 108803 - RNA, 23 nt, Artificial Sequence
  Synthetic
uacaggcgggguuuuucuuguug

SEQ ID NO: 108804 - RNA, 24 nt, Artificial Sequence
  Synthetic
uuacaggcgggguuuuucuuguug

SEQ ID NO: 108805 - RNA, 18 nt, Artificial Sequence
  Synthetic
ugggugggaaguaauuug

SEQ ID NO: 108806 - RNA, 19 nt, Artificial Sequence
  Synthetic
cugggugggaaguaauuug

SEQ ID NO: 108807 - RNA, 20 nt, Artificial Sequence
  Synthetic
ccugggugggaaguaauuug

SEQ ID NO: 108808 - RNA, 21 nt, Artificial Sequence
  Synthetic
accugggugggaaguaauuug

SEQ ID NO: 108809 - RNA, 22 nt, Artificial Sequence
  Synthetic
caccugggugggaaguaauuug

SEQ ID NO: 108810 - RNA, 23 nt, Artificial Sequence
  Synthetic
ccaccugggugggaaguaauuug

SEQ ID NO: 108811 - RNA, 24 nt, Artificial Sequence
  Synthetic
gccaccugggugggaaguaauuug

SEQ ID NO: 108812 - RNA, 18 nt, Artificial Sequence
  Synthetic
uuuccugucuuacuuuug

SEQ ID NO: 108813 - RNA, 19 nt, Artificial Sequence
  Synthetic
auuuccugucuuacuuuug

SEQ ID NO: 108814 - RNA, 20 nt, Artificial Sequence
  Synthetic
cauuuccugucuuacuuuug

SEQ ID NO: 108815 - RNA, 21 nt, Artificial Sequence
  Synthetic
acauuuccugucuuacuuuug

SEQ ID NO: 108816 - RNA, 22 nt, Artificial Sequence
  Synthetic
cacauuuccugucuuacuuuug

SEQ ID NO: 108817 - RNA, 23 nt, Artificial Sequence
  Synthetic
ucacauuuccugucuuacuuuug

SEQ ID NO: 108818 - RNA, 24 nt, Artificial Sequence
  Synthetic
uucacauuuccugucuuacuuuug

SEQ ID NO: 108819 - RNA, 18 nt, Artificial Sequence
  Synthetic
  misc_feature (18)..(18): n is a, c, g, or u
uuaauaugggccuaaaan

SEQ ID NO: 108820 - RNA, 19 nt, Artificial Sequence
  Synthetic
  misc_feature (19)..(19): n is a, c, g, or u
guuaauaugggccuaaaan

SEQ ID NO: 108821 - RNA, 20 nt, Artificial Sequence
  Synthetic
  misc_feature (20)..(20): n is a, c, g, or u
uguuaauaugggccuaaaan

SEQ ID NO: 108822 - RNA, 21 nt, Artificial Sequence
  Synthetic
  misc_feature (21)..(21): n is a, c, g, or u
auguuaauaugggccuaaaan

SEQ ID NO: 108823 - RNA, 22 nt, Artificial Sequence
  Synthetic
  misc_feature (22)..(22): n is a, c, g, or u
aauguuaauaugggccuaaaan

SEQ ID NO: 108824 - RNA, 23 nt, Artificial Sequence
  Synthetic
  misc_feature (23)..(23): n is a, c, g, or u
caauguuaauaugggccuaaaan

SEQ ID NO: 108825 - RNA, 24 nt, Artificial Sequence
  Synthetic
  misc_feature (24)..(24): n is a, c, g, or u
ucaauguuaauaugggccuaaaan

SEQ ID NO: 108826 - RNA, 18 nt, Artificial Sequence
  Synthetic
  misc_feature (2)..(2): n is a, c, g, or u
  misc_feature (18)..(18): n is a, c, g, or u
unuaugcauguauacaan

SEQ ID NO: 108827 - RNA, 19 nt, Artificial Sequence
  Synthetic
  misc_feature (3)..(3): n is a, c, g, or u
  misc_feature (19)..(19): n is a, c, g, or u
uunuaugcauguauacaan

SEQ ID NO: 108828 - RNA, 20 nt, Artificial Sequence
  Synthetic
  misc_feature (4)..(4): n is a, c, g, or u
  misc_feature (20)..(20): n is a, c, g, or u
uuunuaugcauguauacaan

SEQ ID NO: 108829 - RNA, 21 nt, Artificial Sequence
  Synthetic
  misc_feature (5)..(5): n is a, c, g, or u
  misc_feature (21)..(21): n is a, c, g, or u
cuuunuaugcauguauacaan

SEQ ID NO: 108830 - RNA, 22 nt, Artificial Sequence
  Synthetic
  misc_feature (6)..(6): n is a, c, g, or u
  misc_feature (22)..(22): n is a, c, g, or u
ccuuunuaugcauguauacaan

SEQ ID NO: 108831 - RNA, 23 nt, Artificial Sequence
  Synthetic
  misc_feature (7)..(7): n is a, c, g, or u
  misc_feature (23)..(23): n is a, c, g, or u
gccuuunuaugcauguauacaan

SEQ ID NO: 108832 - RNA, 24 nt, Artificial Sequence
  Synthetic
  misc_feature (8)..(8): n is a, c, g, or u
  misc_feature (24)..(24): n is a, c, g, or u
ugccuuunuaugcauguauacaan

SEQ ID NO: 108833 - RNA, 18 nt, Artificial Sequence
  Synthetic
  misc_feature (3)..(3): n is a, c, g, or u
  misc_feature (6)..(6): n is a, c, g, or u
  misc_feature (18)..(18): n is a, c, g, or u
ccngcnuucggagccaan

SEQ ID NO: 108834 - RNA, 19 nt, Artificial Sequence
  Synthetic
  misc_feature (4)..(4): n is a, c, g, or u
  misc_feature (7)..(7): n is a, c, g, or u
  misc_feature (19)..(19): n is a, c, g, or u
cccngcnuucggagccaan

SEQ ID NO: 108835 - RNA, 20 nt, Artificial Sequence
  Synthetic
  misc_feature (5)..(5): n is a, c, g, or u
  misc_feature (8)..(8): n is a, c, g, or u
  misc_feature (20)..(20): n is a, c, g, or u
acccngcnuucggagccaan

SEQ ID NO: 108836 - RNA, 21 nt, Artificial Sequence
  Synthetic
  misc_feature (6)..(6): n is a, c, g, or u
  misc_feature (9)..(9): n is a, c, g, or u
  misc_feature (21)..(21): n is a, c, g, or u
gacccngcnuucggagccaan

SEQ ID NO: 108837 - RNA, 22 nt, Artificial Sequence
  Synthetic
  misc_feature (7)..(7): n is a, c, g, or u
  misc_feature (10)..(10): n is a, c, g, or u
  misc_feature (22)..(22): n is a, c, g, or u
ggacccngcnuucggagccaan

SEQ ID NO: 108838 - RNA, 23 nt, Artificial Sequence
  Synthetic
  misc_feature (8)..(8): n is a, c, g, or u
  misc_feature (11)..(11): n is a, c, g, or u
  misc_feature (23)..(23): n is a, c, g, or u
uggacccngcnuucggagccaan

SEQ ID NO: 108839 - RNA, 24 nt, Artificial Sequence
  Synthetic
  misc_feature (9)..(9): n is a, c, g, or u
  misc_feature (12)..(12): n is a, c, g, or u
  misc_feature (24)..(24): n is a, c, g, or u
uuggacccngcnuucggagccaan

SEQ ID NO: 108840 - RNA, 18 nt, Artificial Sequence
  Synthetic
  misc_feature (18)..(18): n is a, c, g, or u
ggggacccugcaccgaan

SEQ ID NO: 108841 - RNA, 19 nt, Artificial Sequence
  Synthetic
  misc_feature (19)..(19): n is a, c, g, or u
uggggacccugcaccgaan

SEQ ID NO: 108842 - RNA, 20 nt, Artificial Sequence
  Synthetic
  misc_feature (20)..(20): n is a, c, g, or u
cuggggacccugcaccgaan

SEQ ID NO: 108843 - RNA, 21 nt, Artificial Sequence
  Synthetic
  misc_feature (21)..(21): n is a, c, g, or u
acuggggacccugcaccgaan

SEQ ID NO: 108844 - RNA, 22 nt, Artificial Sequence
  Synthetic
  misc_feature (22)..(22): n is a, c, g, or u
gacuggggacccugcaccgaan

SEQ ID NO: 108845 - RNA, 23 nt, Artificial Sequence
  Synthetic
  misc_feature (23)..(23): n is a, c, g, or u
ggacuggggacccugcaccgaan

SEQ ID NO: 108846 - RNA, 24 nt, Artificial Sequence
  Synthetic
  misc_feature (24)..(24): n is a, c, g, or u
aggacuggggacccugcaccgaan

SEQ ID NO: 108847 - RNA, 18 nt, Artificial Sequence
  Synthetic
  misc_feature (18)..(18): n is a, c, g, or u
caccaagcucugcuagan

SEQ ID NO: 108848 - RNA, 19 nt, Artificial Sequence
  Synthetic
  misc_feature (19)..(19): n is a, c, g, or u
ccaccaagcucugcuagan

SEQ ID NO: 108849 - RNA, 20 nt, Artificial Sequence
  Synthetic
  misc_feature (20)..(20): n is a, c, g, or u
uccaccaagcucugcuagan

SEQ ID NO: 108850 - RNA, 21 nt, Artificial Sequence
  Synthetic
  misc_feature (21)..(21): n is a, c, g, or u
uuccaccaagcucugcuagan

SEQ ID NO: 108851 - RNA, 22 nt, Artificial Sequence
  Synthetic
  misc_feature (22)..(22): n is a, c, g, or u
auuccaccaagcucugcuagan

SEQ ID NO: 108852 - RNA, 23 nt, Artificial Sequence
  Synthetic
  misc_feature (23)..(23): n is a, c, g, or u
cauuccaccaagcucugcuagan

SEQ ID NO: 108853 - RNA, 24 nt, Artificial Sequence
  Synthetic
  misc_feature (24)..(24): n is a, c, g, or u
acauuccaccaagcucugcuagan

SEQ ID NO: 108854 - RNA, 18 nt, Artificial Sequence
  Synthetic
  misc_feature (15)..(15): n is a, c, g, or u
  misc_feature (18)..(18): n is a, c, g, or u
aaauauuugcccuungan

SEQ ID NO: 108855 - RNA, 19 nt, Artificial Sequence
  Synthetic
  misc_feature (16)..(16): n is a, c, g, or u
  misc_feature (19)..(19): n is a, c, g, or u
caaauauuugcccuungan

SEQ ID NO: 108856 - RNA, 20 nt, Artificial Sequence
  Synthetic
  misc_feature (17)..(17): n is a, c, g, or u
  misc_feature (20)..(20): n is a, c, g, or u
ccaaauauuugcccuungan

SEQ ID NO: 108857 - RNA, 21 nt, Artificial Sequence
  Synthetic
  misc_feature (18)..(18): n is a, c, g, or u
  misc_feature (21)..(21): n is a, c, g, or u
accaaauauuugcccuungan

SEQ ID NO: 108858 - RNA, 22 nt, Artificial Sequence
  Synthetic
  misc_feature (19)..(19): n is a, c, g, or u
  misc_feature (22)..(22): n is a, c, g, or u
uaccaaauauuugcccuungan

SEQ ID NO: 108859 - RNA, 23 nt, Artificial Sequence
  Synthetic
  misc_feature (20)..(20): n is a, c, g, or u
  misc_feature (23)..(23): n is a, c, g, or u
uuaccaaauauuugcccuungan

SEQ ID NO: 108860 - RNA, 24 nt, Artificial Sequence
  Synthetic
  misc_feature (21)..(21): n is a, c, g, or u
  misc_feature (24)..(24): n is a, c, g, or u
cuuaccaaauauuugcccuungan

SEQ ID NO: 108861 - RNA, 18 nt, Artificial Sequence
  Synthetic
  misc_feature (4)..(4): n is a, c, g, or u
  misc_feature (15)..(16): n is a, c, g, or u
  misc_feature (18)..(18): n is a, c, g, or u
ccunacauucauuunnan

SEQ ID NO: 108862 - RNA, 19 nt, Artificial Sequence
  Synthetic
  misc_feature (5)..(5): n is a, c, g, or u
  misc_feature (16)..(17): n is a, c, g, or u
  misc_feature (19)..(19): n is a, c, g, or u
uccunacauucauuunnan

SEQ ID NO: 108863 - RNA, 20 nt, Artificial Sequence
  Synthetic
  misc_feature (6)..(6): n is a, c, g, or u
  misc_feature (17)..(18): n is a, c, g, or u
  misc_feature (20)..(20): n is a, c, g, or u
uuccunacauucauuunnan

SEQ ID NO: 108864 - RNA, 21 nt, Artificial Sequence
  Synthetic
  misc_feature (7)..(7): n is a, c, g, or u
  misc_feature (18)..(19): n is a, c, g, or u
  misc_feature (21)..(21): n is a, c, g, or u
uuuccunacauucauuunnan

SEQ ID NO: 108865 - RNA, 22 nt, Artificial Sequence
  Synthetic
  misc_feature (1)..(1): n is a, c, g, or u
  misc_feature (8)..(8): n is a, c, g, or u
  misc_feature (19)..(20): n is a, c, g, or u
  misc_feature (22)..(22): n is a, c, g, or u
nuuuccunacauucauuunnan

SEQ ID NO: 108866 - RNA, 23 nt, Artificial Sequence
  Synthetic
  misc_feature (2)..(2): n is a, c, g, or u
  misc_feature (9)..(9): n is a, c, g, or u
  misc_feature (20)..(21): n is a, c, g, or u
  misc_feature (23)..(23): n is a, c, g, or u
cnuuuccunacauucauuunnan

SEQ ID NO: 108867 - RNA, 24 nt, Artificial Sequence
  Synthetic
  misc_feature (3)..(3): n is a, c, g, or u
  misc_feature (10)..(10): n is a, c, g, or u
  misc_feature (21)..(22): n is a, c, g, or u
  misc_feature (24)..(24): n is a, c, g, or u
ucnuuuccunacauucauuunnan

SEQ ID NO: 108868 - RNA, 18 nt, Artificial Sequence
  Synthetic
  misc_feature (18)..(18): n is a, c, g, or u
ucuugcccaaggucuuan

SEQ ID NO: 108869 - RNA, 19 nt, Artificial Sequence
  Synthetic
  misc_feature (19)..(19): n is a, c, g, or u
gucuugcccaaggucuuan

SEQ ID NO: 108870 - RNA, 20 nt, Artificial Sequence
  Synthetic
  misc_feature (20)..(20): n is a, c, g, or u
ggucuugcccaaggucuuan

SEQ ID NO: 108871 - RNA, 21 nt, Artificial Sequence
  Synthetic
  misc_feature (21)..(21): n is a, c, g, or u
aggucuugcccaaggucuuan

SEQ ID NO: 108872 - RNA, 22 nt, Artificial Sequence
  Synthetic
  misc_feature (22)..(22): n is a, c, g, or u
caggucuugcccaaggucuuan

SEQ ID NO: 108873 - RNA, 23 nt, Artificial Sequence
  Synthetic
  misc_feature (23)..(23): n is a, c, g, or u
ccaggucuugcccaaggucuuan

SEQ ID NO: 108874 - RNA, 24 nt, Artificial Sequence
  Synthetic
  misc_feature (1)..(1): n is a, c, g, or u
  misc_feature (24)..(24): n is a, c, g, or u
nccaggucuugcccaaggucuuan

SEQ ID NO: 108875 - RNA, 18 nt, Artificial Sequence
  Synthetic
  misc_feature (3)..(3): n is a, c, g, or u
  misc_feature (9)..(9): n is a, c, g, or u
  misc_feature (15)..(15): n is a, c, g, or u
  misc_feature (18)..(18): n is a, c, g, or u
gcnaaacunaucggnacn

SEQ ID NO: 108876 - RNA, 19 nt, Artificial Sequence
  Synthetic
  misc_feature (4)..(4): n is a, c, g, or u
  misc_feature (10)..(10): n is a, c, g, or u
  misc_feature (16)..(16): n is a, c, g, or u
  misc_feature (19)..(19): n is a, c, g, or u
agcnaaacunaucggnacn

SEQ ID NO: 108877 - RNA, 20 nt, Artificial Sequence
  Synthetic
  misc_feature (5)..(5): n is a, c, g, or u
  misc_feature (11)..(11): n is a, c, g, or u
  misc_feature (17)..(17): n is a, c, g, or u
  misc_feature (20)..(20): n is a, c, g, or u
gagcnaaacunaucggnacn

SEQ ID NO: 108878 - RNA, 21 nt, Artificial Sequence
  Synthetic
  misc_feature (6)..(6): n is a, c, g, or u
  misc_feature (12)..(12): n is a, c, g, or u
  misc_feature (18)..(18): n is a, c, g, or u
  misc_feature (21)..(21): n is a, c, g, or u
ggagcnaaacunaucggnacn

SEQ ID NO: 108879 - RNA, 22 nt, Artificial Sequence
  Synthetic
  misc_feature (7)..(7): n is a, c, g, or u
  misc_feature (13)..(13): n is a, c, g, or u
  misc_feature (19)..(19): n is a, c, g, or u
  misc_feature (22)..(22): n is a, c, g, or u
uggagcnaaacunaucggnacn

SEQ ID NO: 108880 - RNA, 23 nt, Artificial Sequence
  Synthetic
  misc_feature (8)..(8): n is a, c, g, or u
  misc_feature (14)..(14): n is a, c, g, or u
  misc_feature (20)..(20): n is a, c, g, or u
  misc_feature (23)..(23): n is a, c, g, or u
cuggagcnaaacunaucggnacn

SEQ ID NO: 108881 - RNA, 24 nt, Artificial Sequence
  Synthetic
  misc_feature (9)..(9): n is a, c, g, or u
  misc_feature (15)..(15): n is a, c, g, or u
  misc_feature (21)..(21): n is a, c, g, or u
  misc_feature (24)..(24): n is a, c, g, or u
ucuggagcnaaacunaucggnacn

SEQ ID NO: 108882 - RNA, 18 nt, Artificial Sequence
  Synthetic
  misc_feature (18)..(18): n is a, c, g, or u
ggcauggacauugacccn

SEQ ID NO: 108883 - RNA, 19 nt, Artificial Sequence
  Synthetic
  misc_feature (19)..(19): n is a, c, g, or u
gggcauggacauugacccn

SEQ ID NO: 108884 - RNA, 20 nt, Artificial Sequence
  Synthetic
  misc_feature (1)..(1): n is a, c, g, or u
  misc_feature (20)..(20): n is a, c, g, or u
ngggcauggacauugacccn

SEQ ID NO: 108885 - RNA, 21 nt, Artificial Sequence
  Synthetic
  misc_feature (2)..(2): n is a, c, g, or u
  misc_feature (21)..(21): n is a, c, g, or u
ungggcauggacauugacccn

SEQ ID NO: 108886 - RNA, 22 nt, Artificial Sequence
  Synthetic
  misc_feature (3)..(3): n is a, c, g, or u
  misc_feature (22)..(22): n is a, c, g, or u
uungggcauggacauugacccn

SEQ ID NO: 108887 - RNA, 23 nt, Artificial Sequence
  Synthetic
  misc_feature (4)..(4): n is a, c, g, or u
  misc_feature (23)..(23): n is a, c, g, or u
uuungggcauggacauugacccn

SEQ ID NO: 108888 - RNA, 24 nt, Artificial Sequence
  Synthetic
  misc_feature (5)..(5): n is a, c, g, or u
  misc_feature (24)..(24): n is a, c, g, or u
cuuungggcauggacauugacccn

SEQ ID NO: 108889 - RNA, 18 nt, Artificial Sequence
  Synthetic
  misc_feature (12)..(12): n is a, c, g, or u
  misc_feature (15)..(15): n is a, c, g, or u
  misc_feature (18)..(18): n is a, c, g, or u
aguugggguacnuunccn

SEQ ID NO: 108890 - RNA, 19 nt, Artificial Sequence
  Synthetic
  misc_feature (13)..(13): n is a, c, g, or u
  misc_feature (16)..(16): n is a, c, g, or u
  misc_feature (19)..(19): n is a, c, g, or u
aaguugggguacnuunccn

SEQ ID NO: 108891 - RNA, 20 nt, Artificial Sequence
  Synthetic
  misc_feature (14)..(14): n is a, c, g, or u
  misc_feature (17)..(17): n is a, c, g, or u
  misc_feature (20)..(20): n is a, c, g, or u
gaaguugggguacnuunccn

SEQ ID NO: 108892 - RNA, 21 nt, Artificial Sequence
  Synthetic
  misc_feature (15)..(15): n is a, c, g, or u
  misc_feature (18)..(18): n is a, c, g, or u
  misc_feature (21)..(21): n is a, c, g, or u
ggaaguugggguacnuunccn

SEQ ID NO: 108893 - RNA, 22 nt, Artificial Sequence
  Synthetic
  misc_feature (16)..(16): n is a, c, g, or u
  misc_feature (19)..(19): n is a, c, g, or u
  misc_feature (22)..(22): n is a, c, g, or u
uggaaguugggguacnuunccn

SEQ ID NO: 108894 - RNA, 23 nt, Artificial Sequence
  Synthetic
  misc_feature (17)..(17): n is a, c, g, or u
  misc_feature (20)..(20): n is a, c, g, or u
  misc_feature (23)..(23): n is a, c, g, or u
uuggaaguugggguacnuunccn

SEQ ID NO: 108895 - RNA, 24 nt, Artificial Sequence
  Synthetic
  misc_feature (18)..(18): n is a, c, g, or u
  misc_feature (21)..(21): n is a, c, g, or u
  misc_feature (24)..(24): n is a, c, g, or u
auuggaaguugggguacnuunccn

SEQ ID NO: 108896 - RNA, 18 nt, Artificial Sequence
  Synthetic
  misc_feature (6)..(6): n is a, c, g, or u
  misc_feature (18)..(18): n is a, c, g, or u
acuggnuggggcuuggcn

SEQ ID NO: 108897 - RNA, 19 nt, Artificial Sequence
  Synthetic
  misc_feature (7)..(7): n is a, c, g, or u
  misc_feature (19)..(19): n is a, c, g, or u
cacuggnuggggcuuggcn

SEQ ID NO: 108898 - RNA, 20 nt, Artificial Sequence
  Synthetic
  misc_feature (8)..(8): n is a, c, g, or u
  misc_feature (20)..(20): n is a, c, g, or u
ccacuggnuggggcuuggcn

SEQ ID NO: 108899 - RNA, 21 nt, Artificial Sequence
  Synthetic
  misc_feature (9)..(9): n is a, c, g, or u
  misc_feature (21)..(21): n is a, c, g, or u
cccacuggnuggggcuuggcn

SEQ ID NO: 108900 - RNA, 22 nt, Artificial Sequence
  Synthetic
  misc_feature (10)..(10): n is a, c, g, or u
  misc_feature (22)..(22): n is a, c, g, or u
ccccacuggnuggggcuuggcn

SEQ ID NO: 108901 - RNA, 23 nt, Artificial Sequence
  Synthetic
  misc_feature (11)..(11): n is a, c, g, or u
  misc_feature (23)..(23): n is a, c, g, or u
cccccacuggnuggggcuuggcn

SEQ ID NO: 108902 - RNA, 24 nt, Artificial Sequence
  Synthetic
  misc_feature (12)..(12): n is a, c, g, or u
  misc_feature (24)..(24): n is a, c, g, or u
acccccacuggnuggggcuuggcn

SEQ ID NO: 108903 - RNA, 18 nt, Artificial Sequence
  Synthetic
  misc_feature (15)..(15): n is a, c, g, or u
  misc_feature (18)..(18): n is a, c, g, or u
caccaguuggacccngcn

SEQ ID NO: 108904 - RNA, 19 nt, Artificial Sequence
  Synthetic
  misc_feature (16)..(16): n is a, c, g, or u
  misc_feature (19)..(19): n is a, c, g, or u
ucaccaguuggacccngcn

SEQ ID NO: 108905 - RNA, 20 nt, Artificial Sequence
  Synthetic
  misc_feature (17)..(17): n is a, c, g, or u
  misc_feature (20)..(20): n is a, c, g, or u
aucaccaguuggacccngcn

SEQ ID NO: 108906 - RNA, 21 nt, Artificial Sequence
  Synthetic
  misc_feature (18)..(18): n is a, c, g, or u
  misc_feature (21)..(21): n is a, c, g, or u
gaucaccaguuggacccngcn

SEQ ID NO: 108907 - RNA, 22 nt, Artificial Sequence
  Synthetic
  misc_feature (19)..(19): n is a, c, g, or u
  misc_feature (22)..(22): n is a, c, g, or u
cgaucaccaguuggacccngcn

SEQ ID NO: 108908 - RNA, 23 nt, Artificial Sequence
  Synthetic
  misc_feature (20)..(20): n is a, c, g, or u
  misc_feature (23)..(23): n is a, c, g, or u
ccgaucaccaguuggacccngcn

SEQ ID NO: 108909 - RNA, 24 nt, Artificial Sequence
  Synthetic
  misc_feature (21)..(21): n is a, c, g, or u
  misc_feature (24)..(24): n is a, c, g, or u
cccgaucaccaguuggacccngcn

SEQ ID NO: 108910 - RNA, 18 nt, Artificial Sequence
  Synthetic
  misc_feature (10)..(10): n is a, c, g, or u
  misc_feature (18)..(18): n is a, c, g, or u
caaggaucanuggccagn

SEQ ID NO: 108911 - RNA, 19 nt, Artificial Sequence
  Synthetic
  misc_feature (11)..(11): n is a, c, g, or u
  misc_feature (19)..(19): n is a, c, g, or u
acaaggaucanuggccagn

SEQ ID NO: 108912 - RNA, 20 nt, Artificial Sequence
  Synthetic
  misc_feature (12)..(12): n is a, c, g, or u
  misc_feature (20)..(20): n is a, c, g, or u
aacaaggaucanuggccagn

SEQ ID NO: 108913 - RNA, 21 nt, Artificial Sequence
  Synthetic
  misc_feature (13)..(13): n is a, c, g, or u
  misc_feature (21)..(21): n is a, c, g, or u
caacaaggaucanuggccagn

SEQ ID NO: 108914 - RNA, 22 nt, Artificial Sequence
  Synthetic
  misc_feature (14)..(14): n is a, c, g, or u
  misc_feature (22)..(22): n is a, c, g, or u
ccaacaaggaucanuggccagn

SEQ ID NO: 108915 - RNA, 23 nt, Artificial Sequence
  Synthetic
  misc_feature (15)..(15): n is a, c, g, or u
  misc_feature (23)..(23): n is a, c, g, or u
cccaacaaggaucanuggccagn

SEQ ID NO: 108916 - RNA, 24 nt, Artificial Sequence
  Synthetic
  misc_feature (16)..(16): n is a, c, g, or u
  misc_feature (24)..(24): n is a, c, g, or u
ccccaacaaggaucanuggccagn

SEQ ID NO: 108917 - RNA, 18 nt, Artificial Sequence
  Synthetic
  misc_feature (6)..(6): n is a, c, g, or u
  misc_feature (12)..(12): n is a, c, g, or u
  misc_feature (18)..(18): n is a, c, g, or u
ggagcnaaacunaucggn

SEQ ID NO: 108918 - RNA, 19 nt, Artificial Sequence
  Synthetic
  misc_feature (7)..(7): n is a, c, g, or u
  misc_feature (13)..(13): n is a, c, g, or u
  misc_feature (19)..(19): n is a, c, g, or u
uggagcnaaacunaucggn

SEQ ID NO: 108919 - RNA, 20 nt, Artificial Sequence
  Synthetic
  misc_feature (8)..(8): n is a, c, g, or u
  misc_feature (14)..(14): n is a, c, g, or u
  misc_feature (20)..(20): n is a, c, g, or u
cuggagcnaaacunaucggn

SEQ ID NO: 108920 - RNA, 21 nt, Artificial Sequence
  Synthetic
  misc_feature (9)..(9): n is a, c, g, or u
  misc_feature (15)..(15): n is a, c, g, or u
  misc_feature (21)..(21): n is a, c, g, or u
ucuggagcnaaacunaucggn

SEQ ID NO: 108921 - RNA, 22 nt, Artificial Sequence
  Synthetic
  misc_feature (10)..(10): n is a, c, g, or u
  misc_feature (16)..(16): n is a, c, g, or u
  misc_feature (22)..(22): n is a, c, g, or u
gucuggagcnaaacunaucggn

SEQ ID NO: 108922 - RNA, 23 nt, Artificial Sequence
  Synthetic
  misc_feature (11)..(11): n is a, c, g, or u
  misc_feature (17)..(17): n is a, c, g, or u
  misc_feature (23)..(23): n is a, c, g, or u
ggucuggagcnaaacunaucggn

SEQ ID NO: 108923 - RNA, 24 nt, Artificial Sequence
  Synthetic
  misc_feature (12)..(12): n is a, c, g, or u
  misc_feature (18)..(18): n is a, c, g, or u
  misc_feature (24)..(24): n is a, c, g, or u
cggucuggagcnaaacunaucggn

SEQ ID NO: 108924 - RNA, 18 nt, Artificial Sequence
  Synthetic
  misc_feature (18)..(18): n is a, c, g, or u
gacgcaacccccacuggn

SEQ ID NO: 108925 - RNA, 19 nt, Artificial Sequence
  Synthetic
  misc_feature (19)..(19): n is a, c, g, or u
ugacgcaacccccacuggn

SEQ ID NO: 108926 - RNA, 20 nt, Artificial Sequence
  Synthetic
  misc_feature (20)..(20): n is a, c, g, or u
cugacgcaacccccacuggn

SEQ ID NO: 108927 - RNA, 21 nt, Artificial Sequence
  Synthetic
  misc_feature (21)..(21): n is a, c, g, or u
gcugacgcaacccccacuggn

SEQ ID NO: 108928 - RNA, 22 nt, Artificial Sequence
  Synthetic
  misc_feature (22)..(22): n is a, c, g, or u
ugcugacgcaacccccacuggn

SEQ ID NO: 108929 - RNA, 23 nt, Artificial Sequence
  Synthetic
  misc_feature (23)..(23): n is a, c, g, or u
uugcugacgcaacccccacuggn

SEQ ID NO: 108930 - RNA, 24 nt, Artificial Sequence
  Synthetic
  misc_feature (24)..(24): n is a, c, g, or u
uuugcugacgcaacccccacuggn

SEQ ID NO: 108931 - RNA, 18 nt, Artificial Sequence
  Synthetic
  misc_feature (6)..(6): n is a, c, g, or u
  misc_feature (17)..(18): n is a, c, g, or u
uuccunacauucauuunn

SEQ ID NO: 108932 - RNA, 19 nt, Artificial Sequence
  Synthetic
  misc_feature (7)..(7): n is a, c, g, or u
  misc_feature (18)..(19): n is a, c, g, or u
uuuccunacauucauuunn

SEQ ID NO: 108933 - RNA, 20 nt, Artificial Sequence
  Synthetic
  misc_feature (1)..(1): n is a, c, g, or u
  misc_feature (8)..(8): n is a, c, g, or u
  misc_feature (19)..(20): n is a, c, g, or u
nuuuccunacauucauuunn

SEQ ID NO: 108934 - RNA, 21 nt, Artificial Sequence
  Synthetic
  misc_feature (2)..(2): n is a, c, g, or u
  misc_feature (9)..(9): n is a, c, g, or u
  misc_feature (20)..(21): n is a, c, g, or u
cnuuuccunacauucauuunn

SEQ ID NO: 108935 - RNA, 22 nt, Artificial Sequence
  Synthetic
  misc_feature (3)..(3): n is a, c, g, or u
  misc_feature (10)..(10): n is a, c, g, or u
  misc_feature (21)..(22): n is a, c, g, or u
ucnuuuccunacauucauuunn

SEQ ID NO: 108936 - RNA, 23 nt, Artificial Sequence
  Synthetic
  misc_feature (4)..(4): n is a, c, g, or u
  misc_feature (11)..(11): n is a, c, g, or u
  misc_feature (22)..(23): n is a, c, g, or u
cucnuuuccunacauucauuunn

SEQ ID NO: 108937 - RNA, 24 nt, Artificial Sequence
  Synthetic
  misc_feature (5)..(5): n is a, c, g, or u
  misc_feature (12)..(12): n is a, c, g, or u
  misc_feature (23)..(24): n is a, c, g, or u
ccucnuuuccunacauucauuunn

SEQ ID NO: 108938 - RNA, 18 nt, Artificial Sequence
  Synthetic
  misc_feature (3)..(4): n is a, c, g, or u
  misc_feature (6)..(6): n is a, c, g, or u
  misc_feature (12)..(12): n is a, c, g, or u
  misc_feature (18)..(18): n is a, c, g, or u
uunnangagganauuaun

SEQ ID NO: 108939 - RNA, 19 nt, Artificial Sequence
  Synthetic
  misc_feature (4)..(5): n is a, c, g, or u
  misc_feature (7)..(7): n is a, c, g, or u
  misc_feature (13)..(13): n is a, c, g, or u
  misc_feature (19)..(19): n is a, c, g, or u
uuunnangagganauuaun

SEQ ID NO: 108940 - RNA, 20 nt, Artificial Sequence
  Synthetic
  misc_feature (5)..(6): n is a, c, g, or u
  misc_feature (8)..(8): n is a, c, g, or u
  misc_feature (14)..(14): n is a, c, g, or u
  misc_feature (20)..(20): n is a, c, g, or u
auuunnangagganauuaun

SEQ ID NO: 108941 - RNA, 21 nt, Artificial Sequence
  Synthetic
  misc_feature (6)..(7): n is a, c, g, or u
  misc_feature (9)..(9): n is a, c, g, or u
  misc_feature (15)..(15): n is a, c, g, or u
  misc_feature (21)..(21): n is a, c, g, or u
cauuunnangagganauuaun

SEQ ID NO: 108942 - RNA, 22 nt, Artificial Sequence
  Synthetic
  misc_feature (7)..(8): n is a, c, g, or u
  misc_feature (10)..(10): n is a, c, g, or u
  misc_feature (16)..(16): n is a, c, g, or u
  misc_feature (22)..(22): n is a, c, g, or u
ucauuunnangagganauuaun

SEQ ID NO: 108943 - RNA, 23 nt, Artificial Sequence
  Synthetic
  misc_feature (8)..(9): n is a, c, g, or u
  misc_feature (11)..(11): n is a, c, g, or u
  misc_feature (17)..(17): n is a, c, g, or u
  misc_feature (23)..(23): n is a, c, g, or u
uucauuunnangagganauuaun

SEQ ID NO: 108944 - RNA, 24 nt, Artificial Sequence
  Synthetic
  misc_feature (9)..(10): n is a, c, g, or u
  misc_feature (12)..(12): n is a, c, g, or u
  misc_feature (18)..(18): n is a, c, g, or u
  misc_feature (24)..(24): n is a, c, g, or u
auucauuunnangagganauuaun

SEQ ID NO: 108945 - RNA, 18 nt, Artificial Sequence
  Synthetic
  misc_feature (12)..(12): n is a, c, g, or u
  misc_feature (18)..(18): n is a, c, g, or u
cggucuggagcnaaacun

SEQ ID NO: 108946 - RNA, 19 nt, Artificial Sequence
  Synthetic
  misc_feature (13)..(13): n is a, c, g, or u
  misc_feature (19)..(19): n is a, c, g, or u
ccggucuggagcnaaacun

SEQ ID NO: 108947 - RNA, 20 nt, Artificial Sequence
  Synthetic
  misc_feature (14)..(14): n is a, c, g, or u
  misc_feature (20)..(20): n is a, c, g, or u
gccggucuggagcnaaacun

SEQ ID NO: 108948 - RNA, 21 nt, Artificial Sequence
  Synthetic
  misc_feature (15)..(15): n is a, c, g, or u
  misc_feature (21)..(21): n is a, c, g, or u
agccggucuggagcnaaacun

SEQ ID NO: 108949 - RNA, 22 nt, Artificial Sequence
  Synthetic
  misc_feature (16)..(16): n is a, c, g, or u
  misc_feature (22)..(22): n is a, c, g, or u
cagccggucuggagcnaaacun

SEQ ID NO: 108950 - RNA, 23 nt, Artificial Sequence
  Synthetic
  misc_feature (17)..(17): n is a, c, g, or u
  misc_feature (23)..(23): n is a, c, g, or u
gcagccggucuggagcnaaacun

SEQ ID NO: 108951 - RNA, 24 nt, Artificial Sequence
  Synthetic
  misc_feature (18)..(18): n is a, c, g, or u
  misc_feature (24)..(24): n is a, c, g, or u
cgcagccggucuggagcnaaacun

SEQ ID NO: 108952 - RNA, 18 nt, Artificial Sequence
  Synthetic
  misc_feature (5)..(5): n is a, c, g, or u
  misc_feature (7)..(7): n is a, c, g, or u
  misc_feature (18)..(18): n is a, c, g, or u
uuaangnucuuuguacun

SEQ ID NO: 108953 - RNA, 19 nt, Artificial Sequence
  Synthetic
  misc_feature (6)..(6): n is a, c, g, or u
  misc_feature (8)..(8): n is a, c, g, or u
  misc_feature (19)..(19): n is a, c, g, or u
guuaangnucuuuguacun

SEQ ID NO: 108954 - RNA, 20 nt, Artificial Sequence
  Synthetic
  misc_feature (7)..(7): n is a, c, g, or u
  misc_feature (9)..(9): n is a, c, g, or u
  misc_feature (20)..(20): n is a, c, g, or u
gguuaangnucuuuguacun

SEQ ID NO: 108955 - RNA, 21 nt, Artificial Sequence
  Synthetic
  misc_feature (8)..(8): n is a, c, g, or u
  misc_feature (10)..(10): n is a, c, g, or u
  misc_feature (21)..(21): n is a, c, g, or u
agguuaangnucuuuguacun

SEQ ID NO: 108956 - RNA, 22 nt, Artificial Sequence
  Synthetic
  misc_feature (9)..(9): n is a, c, g, or u
  misc_feature (11)..(11): n is a, c, g, or u
  misc_feature (22)..(22): n is a, c, g, or u
uagguuaangnucuuuguacun

SEQ ID NO: 108957 - RNA, 23 nt, Artificial Sequence
  Synthetic
  misc_feature (1)..(1): n is a, c, g, or u
  misc_feature (10)..(10): n is a, c, g, or u
  misc_feature (12)..(12): n is a, c, g, or u
  misc_feature (23)..(23): n is a, c, g, or u
nuagguuaangnucuuuguacun

SEQ ID NO: 108958 - RNA, 24 nt, Artificial Sequence
  Synthetic
  misc_feature (2)..(2): n is a, c, g, or u
  misc_feature (11)..(11): n is a, c, g, or u
  misc_feature (13)..(13): n is a, c, g, or u
  misc_feature (24)..(24): n is a, c, g, or u
anuagguuaangnucuuuguacun

SEQ ID NO: 108959 - RNA, 18 nt, Artificial Sequence
  Synthetic
  misc_feature (16)..(16): n is a, c, g, or u
  misc_feature (18)..(18): n is a, c, g, or u
uacuucaaagacugunun

SEQ ID NO: 108960 - RNA, 19 nt, Artificial Sequence
  Synthetic
  misc_feature (17)..(17): n is a, c, g, or u
  misc_feature (19)..(19): n is a, c, g, or u
auacuucaaagacugunun

SEQ ID NO: 108961 - RNA, 20 nt, Artificial Sequence
  Synthetic
  misc_feature (18)..(18): n is a, c, g, or u
  misc_feature (20)..(20): n is a, c, g, or u
cauacuucaaagacugunun

SEQ ID NO: 108962 - RNA, 21 nt, Artificial Sequence
  Synthetic
  misc_feature (19)..(19): n is a, c, g, or u
  misc_feature (21)..(21): n is a, c, g, or u
gcauacuucaaagacugunun

SEQ ID NO: 108963 - RNA, 22 nt, Artificial Sequence
  Synthetic
  misc_feature (20)..(20): n is a, c, g, or u
  misc_feature (22)..(22): n is a, c, g, or u
ggcauacuucaaagacugunun

SEQ ID NO: 108964 - RNA, 23 nt, Artificial Sequence
  Synthetic
  misc_feature (21)..(21): n is a, c, g, or u
  misc_feature (23)..(23): n is a, c, g, or u
aggcauacuucaaagacugunun

SEQ ID NO: 108965 - RNA, 24 nt, Artificial Sequence
  Synthetic
  misc_feature (22)..(22): n is a, c, g, or u
  misc_feature (24)..(24): n is a, c, g, or u
gaggcauacuucaaagacugunun

SEQ ID NO: 108966 - RNA, 18 nt, Artificial Sequence
  Synthetic
  misc_feature (18)..(18): n is a, c, g, or u
accaaauauuugcccuun

SEQ ID NO: 108967 - RNA, 19 nt, Artificial Sequence
  Synthetic
  misc_feature (19)..(19): n is a, c, g, or u
uaccaaauauuugcccuun

SEQ ID NO: 108968 - RNA, 20 nt, Artificial Sequence
  Synthetic
  misc_feature (20)..(20): n is a, c, g, or u
uuaccaaauauuugcccuun

SEQ ID NO: 108969 - RNA, 21 nt, Artificial Sequence
  Synthetic
  misc_feature (21)..(21): n is a, c, g, or u
cuuaccaaauauuugcccuun

SEQ ID NO: 108970 - RNA, 22 nt, Artificial Sequence
  Synthetic
  misc_feature (22)..(22): n is a, c, g, or u
ccuuaccaaauauuugcccuun

SEQ ID NO: 108971 - RNA, 23 nt, Artificial Sequence
  Synthetic
  misc_feature (23)..(23): n is a, c, g, or u
accuuaccaaauauuugcccuun

SEQ ID NO: 108972 - RNA, 24 nt, Artificial Sequence
  Synthetic
  misc_feature (24)..(24): n is a, c, g, or u
aaccuuaccaaauauuugcccuun

SEQ ID NO: 108973 - RNA, 18 nt, Artificial Sequence
  Synthetic
  misc_feature (7)..(7): n is a, c, g, or u
  misc_feature (18)..(18): n is a, c, g, or u
uuuccunacauucauuun

SEQ ID NO: 108974 - RNA, 19 nt, Artificial Sequence
  Synthetic
  misc_feature (1)..(1): n is a, c, g, or u
  misc_feature (8)..(8): n is a, c, g, or u
  misc_feature (19)..(19): n is a, c, g, or u
nuuuccunacauucauuun

SEQ ID NO: 108975 - RNA, 20 nt, Artificial Sequence
  Synthetic
  misc_feature (2)..(2): n is a, c, g, or u
  misc_feature (9)..(9): n is a, c, g, or u
  misc_feature (20)..(20): n is a, c, g, or u
cnuuuccunacauucauuun

SEQ ID NO: 108976 - RNA, 21 nt, Artificial Sequence
  Synthetic
  misc_feature (3)..(3): n is a, c, g, or u
  misc_feature (10)..(10): n is a, c, g, or u
  misc_feature (21)..(21): n is a, c, g, or u
ucnuuuccunacauucauuun

SEQ ID NO: 108977 - RNA, 22 nt, Artificial Sequence
  Synthetic
  misc_feature (4)..(4): n is a, c, g, or u
  misc_feature (11)..(11): n is a, c, g, or u
  misc_feature (22)..(22): n is a, c, g, or u
cucnuuuccunacauucauuun

SEQ ID NO: 108978 - RNA, 23 nt, Artificial Sequence
  Synthetic
  misc_feature (5)..(5): n is a, c, g, or u
  misc_feature (12)..(12): n is a, c, g, or u
  misc_feature (23)..(23): n is a, c, g, or u
ccucnuuuccunacauucauuun

SEQ ID NO: 108979 - RNA, 24 nt, Artificial Sequence
  Synthetic
  misc_feature (6)..(6): n is a, c, g, or u
  misc_feature (13)..(13): n is a, c, g, or u
  misc_feature (24)..(24): n is a, c, g, or u
cccucnuuuccunacauucauuun

SEQ ID NO: 108980 - RNA, 18 nt, Artificial Sequence
  Synthetic
  misc_feature (11)..(11): n is a, c, g, or u
ucuuggacucncagcaau

SEQ ID NO: 108981 - RNA, 19 nt, Artificial Sequence
  Synthetic
  misc_feature (12)..(12): n is a, c, g, or u
cucuuggacucncagcaau

SEQ ID NO: 108982 - RNA, 20 nt, Artificial Sequence
  Synthetic
  misc_feature (13)..(13): n is a, c, g, or u
acucuuggacucncagcaau

SEQ ID NO: 108983 - RNA, 21 nt, Artificial Sequence
  Synthetic
  misc_feature (14)..(14): n is a, c, g, or u
gacucuuggacucncagcaau

SEQ ID NO: 108984 - RNA, 22 nt, Artificial Sequence
  Synthetic
  misc_feature (15)..(15): n is a, c, g, or u
ggacucuuggacucncagcaau

SEQ ID NO: 108985 - RNA, 23 nt, Artificial Sequence
  Synthetic
  misc_feature (16)..(16): n is a, c, g, or u
aggacucuuggacucncagcaau

SEQ ID NO: 108986 - RNA, 24 nt, Artificial Sequence
  Synthetic
  misc_feature (17)..(17): n is a, c, g, or u
gaggacucuuggacucncagcaau

SEQ ID NO: 108987 - RNA, 18 nt, Artificial Sequence
  Synthetic
gucgcagaagaucucaau

SEQ ID NO: 108988 - RNA, 19 nt, Artificial Sequence
  Synthetic
cgucgcagaagaucucaau

SEQ ID NO: 108989 - RNA, 20 nt, Artificial Sequence
  Synthetic
gcgucgcagaagaucucaau

SEQ ID NO: 108990 - RNA, 18 nt, Artificial Sequence
  Synthetic
  misc_feature (8)..(8): n is a, c, g, or u
uugacccnuauaaagaau

SEQ ID NO: 108991 - RNA, 19 nt, Artificial Sequence
  Synthetic
  misc_feature (9)..(9): n is a, c, g, or u
auugacccnuauaaagaau

SEQ ID NO: 108992 - RNA, 20 nt, Artificial Sequence
  Synthetic
  misc_feature (10)..(10): n is a, c, g, or u
cauugacccnuauaaagaau

SEQ ID NO: 108993 - RNA, 21 nt, Artificial Sequence
  Synthetic
  misc_feature (11)..(11): n is a, c, g, or u
acauugacccnuauaaagaau

SEQ ID NO: 108994 - RNA, 22 nt, Artificial Sequence
  Synthetic
  misc_feature (12)..(12): n is a, c, g, or u
gacauugacccnuauaaagaau

SEQ ID NO: 108995 - RNA, 23 nt, Artificial Sequence
  Synthetic
  misc_feature (13)..(13): n is a, c, g, or u
ggacauugacccnuauaaagaau

SEQ ID NO: 108996 - RNA, 24 nt, Artificial Sequence
  Synthetic
  misc_feature (14)..(14): n is a, c, g, or u
uggacauugacccnuauaaagaau

SEQ ID NO: 108997 - RNA, 18 nt, Artificial Sequence
  Synthetic
  misc_feature (13)..(13): n is a, c, g, or u
gaaaguaugucanagaau

SEQ ID NO: 108998 - RNA, 19 nt, Artificial Sequence
  Synthetic
  misc_feature (14)..(14): n is a, c, g, or u
ggaaaguaugucanagaau

SEQ ID NO: 108999 - RNA, 20 nt, Artificial Sequence
  Synthetic
  misc_feature (15)..(15): n is a, c, g, or u
uggaaaguaugucanagaau

SEQ ID NO: 109000 - RNA, 21 nt, Artificial Sequence
  Synthetic
  misc_feature (16)..(16): n is a, c, g, or u
uuggaaaguaugucanagaau

SEQ ID NO: 109001 - RNA, 22 nt, Artificial Sequence
  Synthetic
  misc_feature (17)..(17): n is a, c, g, or u
auuggaaaguaugucanagaau

SEQ ID NO: 109002 - RNA, 23 nt, Artificial Sequence
  Synthetic
  misc_feature (18)..(18): n is a, c, g, or u
gauuggaaaguaugucanagaau

SEQ ID NO: 109003 - RNA, 24 nt, Artificial Sequence
  Synthetic
  misc_feature (19)..(19): n is a, c, g, or u
ugauuggaaaguaugucanagaau

SEQ ID NO: 109004 - RNA, 18 nt, Artificial Sequence
  Synthetic
accugggugggaaguaau

SEQ ID NO: 109005 - RNA, 19 nt, Artificial Sequence
  Synthetic
caccugggugggaaguaau

SEQ ID NO: 109006 - RNA, 20 nt, Artificial Sequence
  Synthetic
ccaccugggugggaaguaau

SEQ ID NO: 109007 - RNA, 21 nt, Artificial Sequence
  Synthetic
gccaccugggugggaaguaau

SEQ ID NO: 109008 - RNA, 22 nt, Artificial Sequence
  Synthetic
ggccaccugggugggaaguaau

SEQ ID NO: 109009 - RNA, 23 nt, Artificial Sequence
  Synthetic
uggccaccugggugggaaguaau

SEQ ID NO: 109010 - RNA, 24 nt, Artificial Sequence
  Synthetic
cuggccaccugggugggaaguaau

SEQ ID NO: 109011 - RNA, 18 nt, Artificial Sequence
  Synthetic
  misc_feature (1)..(1): n is a, c, g, or u
nuucaugggauauguaau

SEQ ID NO: 109012 - RNA, 19 nt, Artificial Sequence
  Synthetic
  misc_feature (2)..(2): n is a, c, g, or u
anuucaugggauauguaau

SEQ ID NO: 109013 - RNA, 20 nt, Artificial Sequence
  Synthetic
  misc_feature (3)..(3): n is a, c, g, or u
aanuucaugggauauguaau

SEQ ID NO: 109014 - RNA, 21 nt, Artificial Sequence
  Synthetic
  misc_feature (4)..(4): n is a, c, g, or u
uaanuucaugggauauguaau

SEQ ID NO: 109015 - RNA, 22 nt, Artificial Sequence
  Synthetic
  misc_feature (5)..(5): n is a, c, g, or u
uuaanuucaugggauauguaau

SEQ ID NO: 109016 - RNA, 23 nt, Artificial Sequence
  Synthetic
  misc_feature (6)..(6): n is a, c, g, or u
cuuaanuucaugggauauguaau

SEQ ID NO: 109017 - RNA, 24 nt, Artificial Sequence
  Synthetic
  misc_feature (7)..(7): n is a, c, g, or u
ccuuaanuucaugggauauguaau

SEQ ID NO: 109018 - RNA, 18 nt, Artificial Sequence
  Synthetic
ggcccucuuacaguuaau

SEQ ID NO: 109019 - RNA, 19 nt, Artificial Sequence
  Synthetic
gggcccucuuacaguuaau

SEQ ID NO: 109020 - RNA, 20 nt, Artificial Sequence
  Synthetic
ugggcccucuuacaguuaau

SEQ ID NO: 109021 - RNA, 21 nt, Artificial Sequence
  Synthetic
gugggcccucuuacaguuaau

SEQ ID NO: 109022 - RNA, 22 nt, Artificial Sequence
  Synthetic
ugugggcccucuuacaguuaau

SEQ ID NO: 109023 - RNA, 23 nt, Artificial Sequence
  Synthetic
augugggcccucuuacaguuaau

SEQ ID NO: 109024 - RNA, 24 nt, Artificial Sequence
  Synthetic
uaugugggcccucuuacaguuaau

SEQ ID NO: 109025 - RNA, 18 nt, Artificial Sequence
  Synthetic
agcuaugucaauguuaau

SEQ ID NO: 109026 - RNA, 19 nt, Artificial Sequence
  Synthetic
  misc_feature (1)..(1): n is a, c, g, or u
nagcuaugucaauguuaau

SEQ ID NO: 109027 - RNA, 20 nt, Artificial Sequence
  Synthetic
  misc_feature (2)..(2): n is a, c, g, or u
unagcuaugucaauguuaau

SEQ ID NO: 109028 - RNA, 21 nt, Artificial Sequence
  Synthetic
  misc_feature (3)..(3): n is a, c, g, or u
gunagcuaugucaauguuaau

SEQ ID NO: 109029 - RNA, 22 nt, Artificial Sequence
  Synthetic
  misc_feature (4)..(4): n is a, c, g, or u
agunagcuaugucaauguuaau

SEQ ID NO: 109030 - RNA, 23 nt, Artificial Sequence
  Synthetic
  misc_feature (5)..(5): n is a, c, g, or u
uagunagcuaugucaauguuaau

SEQ ID NO: 109031 - RNA, 24 nt, Artificial Sequence
  Synthetic
  misc_feature (6)..(6): n is a, c, g, or u
guagunagcuaugucaauguuaau

SEQ ID NO: 109032 - RNA, 18 nt, Artificial Sequence
  Synthetic
acuguaccugucuuuaau

SEQ ID NO: 109033 - RNA, 19 nt, Artificial Sequence
  Synthetic
uacuguaccugucuuuaau

SEQ ID NO: 109034 - RNA, 20 nt, Artificial Sequence
  Synthetic
cuacuguaccugucuuuaau

SEQ ID NO: 109035 - RNA, 21 nt, Artificial Sequence
  Synthetic
ucuacuguaccugucuuuaau

SEQ ID NO: 109036 - RNA, 22 nt, Artificial Sequence
  Synthetic
uucuacuguaccugucuuuaau

SEQ ID NO: 109037 - RNA, 23 nt, Artificial Sequence
  Synthetic
cuucuacuguaccugucuuuaau

SEQ ID NO: 109038 - RNA, 24 nt, Artificial Sequence
  Synthetic
ucuucuacuguaccugucuuuaau

SEQ ID NO: 109039 - RNA, 18 nt, Artificial Sequence
  Synthetic
gccaagucuguacaacau

SEQ ID NO: 109040 - RNA, 19 nt, Artificial Sequence
  Synthetic
ggccaagucuguacaacau

SEQ ID NO: 109041 - RNA, 20 nt, Artificial Sequence
  Synthetic
gggccaagucuguacaacau

SEQ ID NO: 109042 - RNA, 21 nt, Artificial Sequence
  Synthetic
ggggccaagucuguacaacau

SEQ ID NO: 109043 - RNA, 22 nt, Artificial Sequence
  Synthetic
gggggccaagucuguacaacau

SEQ ID NO: 109044 - RNA, 23 nt, Artificial Sequence
  Synthetic
ugggggccaagucuguacaacau

SEQ ID NO: 109045 - RNA, 24 nt, Artificial Sequence
  Synthetic
uugggggccaagucuguacaacau

SEQ ID NO: 109046 - RNA, 18 nt, Artificial Sequence
  Synthetic
uugucuuuggguauacau

SEQ ID NO: 109047 - RNA, 19 nt, Artificial Sequence
  Synthetic
uuugucuuuggguauacau

SEQ ID NO: 109048 - RNA, 20 nt, Artificial Sequence
  Synthetic
uuuugucuuuggguauacau

SEQ ID NO: 109049 - RNA, 21 nt, Artificial Sequence
  Synthetic
cuuuugucuuuggguauacau

SEQ ID NO: 109050 - RNA, 22 nt, Artificial Sequence
  Synthetic
ucuuuugucuuuggguauacau

SEQ ID NO: 109051 - RNA, 23 nt, Artificial Sequence
  Synthetic
uucuuuugucuuuggguauacau

SEQ ID NO: 109052 - RNA, 24 nt, Artificial Sequence
  Synthetic
uuucuuuugucuuuggguauacau

SEQ ID NO: 109053 - RNA, 18 nt, Artificial Sequence
  Synthetic
cuaccagcacgggaccau

SEQ ID NO: 109054 - RNA, 19 nt, Artificial Sequence
  Synthetic
acuaccagcacgggaccau

SEQ ID NO: 109055 - RNA, 20 nt, Artificial Sequence
  Synthetic
aacuaccagcacgggaccau

SEQ ID NO: 109056 - RNA, 21 nt, Artificial Sequence
  Synthetic
caacuaccagcacgggaccau

SEQ ID NO: 109057 - RNA, 22 nt, Artificial Sequence
  Synthetic
ucaacuaccagcacgggaccau

SEQ ID NO: 109058 - RNA, 23 nt, Artificial Sequence
  Synthetic
aucaacuaccagcacgggaccau

SEQ ID NO: 109059 - RNA, 24 nt, Artificial Sequence
  Synthetic
caucaacuaccagcacgggaccau

SEQ ID NO: 109060 - RNA, 18 nt, Artificial Sequence
  Synthetic
gaacaagagcuacagcau

SEQ ID NO: 109061 - RNA, 19 nt, Artificial Sequence
  Synthetic
ggaacaagagcuacagcau

SEQ ID NO: 109062 - RNA, 20 nt, Artificial Sequence
  Synthetic
gggaacaagagcuacagcau

SEQ ID NO: 109063 - RNA, 21 nt, Artificial Sequence
  Synthetic
ugggaacaagagcuacagcau

SEQ ID NO: 109064 - RNA, 22 nt, Artificial Sequence
  Synthetic
uugggaacaagagcuacagcau

SEQ ID NO: 109065 - RNA, 23 nt, Artificial Sequence
  Synthetic
cuugggaacaagagcuacagcau

SEQ ID NO: 109066 - RNA, 24 nt, Artificial Sequence
  Synthetic
ucuugggaacaagagcuacagcau

SEQ ID NO: 109067 - RNA, 18 nt, Artificial Sequence
  Synthetic
  misc_feature (11)..(11): n is a, c, g, or u
auuuggaaganccagcau

SEQ ID NO: 109068 - RNA, 19 nt, Artificial Sequence
  Synthetic
  misc_feature (12)..(12): n is a, c, g, or u
aauuuggaaganccagcau

SEQ ID NO: 109069 - RNA, 20 nt, Artificial Sequence
  Synthetic
  misc_feature (13)..(13): n is a, c, g, or u
uaauuuggaaganccagcau

SEQ ID NO: 109070 - RNA, 21 nt, Artificial Sequence
  Synthetic
  misc_feature (14)..(14): n is a, c, g, or u
guaauuuggaaganccagcau

SEQ ID NO: 109071 - RNA, 22 nt, Artificial Sequence
  Synthetic
  misc_feature (15)..(15): n is a, c, g, or u
aguaauuuggaaganccagcau

SEQ ID NO: 109072 - RNA, 23 nt, Artificial Sequence
  Synthetic
  misc_feature (16)..(16): n is a, c, g, or u
aaguaauuuggaaganccagcau

SEQ ID NO: 109073 - RNA, 24 nt, Artificial Sequence
  Synthetic
  misc_feature (17)..(17): n is a, c, g, or u
gaaguaauuuggaaganccagcau

SEQ ID NO: 109074 - RNA, 18 nt, Artificial Sequence
  Synthetic
caaaccucgacaaggcau

SEQ ID NO: 109075 - RNA, 19 nt, Artificial Sequence
  Synthetic
ccaaaccucgacaaggcau

SEQ ID NO: 109076 - RNA, 20 nt, Artificial Sequence
  Synthetic
uccaaaccucgacaaggcau

SEQ ID NO: 109077 - RNA, 21 nt, Artificial Sequence
  Synthetic
uuccaaaccucgacaaggcau

SEQ ID NO: 109078 - RNA, 22 nt, Artificial Sequence
  Synthetic
cuuccaaaccucgacaaggcau

SEQ ID NO: 109079 - RNA, 23 nt, Artificial Sequence
  Synthetic
ucuuccaaaccucgacaaggcau

SEQ ID NO: 109080 - RNA, 24 nt, Artificial Sequence
  Synthetic
gucuuccaaaccucgacaaggcau

SEQ ID NO: 109081 - RNA, 18 nt, Artificial Sequence
  Synthetic
cccucaggcucagggcau

SEQ ID NO: 109082 - RNA, 19 nt, Artificial Sequence
  Synthetic
gcccucaggcucagggcau

SEQ ID NO: 109083 - RNA, 20 nt, Artificial Sequence
  Synthetic
agcccucaggcucagggcau

SEQ ID NO: 109084 - RNA, 21 nt, Artificial Sequence
  Synthetic
gagcccucaggcucagggcau

SEQ ID NO: 109085 - RNA, 22 nt, Artificial Sequence
  Synthetic
ggagcccucaggcucagggcau

SEQ ID NO: 109086 - RNA, 23 nt, Artificial Sequence
  Synthetic
uggagcccucaggcucagggcau

SEQ ID NO: 109087 - RNA, 24 nt, Artificial Sequence
  Synthetic
guggagcccucaggcucagggcau

SEQ ID NO: 109088 - RNA, 18 nt, Artificial Sequence
  Synthetic
  misc_feature (10)..(10): n is a, c, g, or u
  misc_feature (15)..(15): n is a, c, g, or u
agguaggagngggancau

SEQ ID NO: 109089 - RNA, 19 nt, Artificial Sequence
  Synthetic
  misc_feature (11)..(11): n is a, c, g, or u
  misc_feature (16)..(16): n is a, c, g, or u
cagguaggagngggancau

SEQ ID NO: 109090 - RNA, 20 nt, Artificial Sequence
  Synthetic
  misc_feature (1)..(1): n is a, c, g, or u
  misc_feature (12)..(12): n is a, c, g, or u
  misc_feature (17)..(17): n is a, c, g, or u
ncagguaggagngggancau

SEQ ID NO: 109091 - RNA, 21 nt, Artificial Sequence
  Synthetic
  misc_feature (2)..(2): n is a, c, g, or u
  misc_feature (13)..(13): n is a, c, g, or u
  misc_feature (18)..(18): n is a, c, g, or u
ancagguaggagngggancau

SEQ ID NO: 109092 - RNA, 22 nt, Artificial Sequence
  Synthetic
  misc_feature (3)..(3): n is a, c, g, or u
  misc_feature (14)..(14): n is a, c, g, or u
  misc_feature (19)..(19): n is a, c, g, or u
aancagguaggagngggancau

SEQ ID NO: 109093 - RNA, 23 nt, Artificial Sequence
  Synthetic
  misc_feature (4)..(4): n is a, c, g, or u
  misc_feature (15)..(15): n is a, c, g, or u
  misc_feature (20)..(20): n is a, c, g, or u
aaancagguaggagngggancau

SEQ ID NO: 109094 - RNA, 24 nt, Artificial Sequence
  Synthetic
  misc_feature (5)..(5): n is a, c, g, or u
  misc_feature (16)..(16): n is a, c, g, or u
  misc_feature (21)..(21): n is a, c, g, or u
caaancagguaggagngggancau

SEQ ID NO: 109095 - RNA, 18 nt, Artificial Sequence
  Synthetic
guauucccaucccaucau

SEQ ID NO: 109096 - RNA, 19 nt, Artificial Sequence
  Synthetic
uguauucccaucccaucau

SEQ ID NO: 109097 - RNA, 20 nt, Artificial Sequence
  Synthetic
uuguauucccaucccaucau

SEQ ID NO: 109098 - RNA, 21 nt, Artificial Sequence
  Synthetic
cuuguauucccaucccaucau

SEQ ID NO: 109099 - RNA, 22 nt, Artificial Sequence
  Synthetic
acuuguauucccaucccaucau

SEQ ID NO: 109100 - RNA, 23 nt, Artificial Sequence
  Synthetic
cacuuguauucccaucccaucau

SEQ ID NO: 109101 - RNA, 24 nt, Artificial Sequence
  Synthetic
gcacuuguauucccaucccaucau

SEQ ID NO: 109102 - RNA, 18 nt, Artificial Sequence
  Synthetic
  misc_feature (3)..(3): n is a, c, g, or u
aanucaaacaauccagau

SEQ ID NO: 109103 - RNA, 19 nt, Artificial Sequence
  Synthetic
  misc_feature (4)..(4): n is a, c, g, or u
caanucaaacaauccagau

SEQ ID NO: 109104 - RNA, 20 nt, Artificial Sequence
  Synthetic
  misc_feature (5)..(5): n is a, c, g, or u
ccaanucaaacaauccagau

SEQ ID NO: 109105 - RNA, 21 nt, Artificial Sequence
  Synthetic
  misc_feature (6)..(6): n is a, c, g, or u
gccaanucaaacaauccagau

SEQ ID NO: 109106 - RNA, 22 nt, Artificial Sequence
  Synthetic
  misc_feature (7)..(7): n is a, c, g, or u
agccaanucaaacaauccagau

SEQ ID NO: 109107 - RNA, 23 nt, Artificial Sequence
  Synthetic
  misc_feature (8)..(8): n is a, c, g, or u
gagccaanucaaacaauccagau

SEQ ID NO: 109108 - RNA, 24 nt, Artificial Sequence
  Synthetic
  misc_feature (9)..(9): n is a, c, g, or u
ggagccaanucaaacaauccagau

SEQ ID NO: 109109 - RNA, 18 nt, Artificial Sequence
  Synthetic
  misc_feature (5)..(5): n is a, c, g, or u
  misc_feature (11)..(11): n is a, c, g, or u
agganauuaunaauagau

SEQ ID NO: 109110 - RNA, 19 nt, Artificial Sequence
  Synthetic
  misc_feature (6)..(6): n is a, c, g, or u
  misc_feature (12)..(12): n is a, c, g, or u
gagganauuaunaauagau

SEQ ID NO: 109111 - RNA, 20 nt, Artificial Sequence
  Synthetic
  misc_feature (1)..(1): n is a, c, g, or u
  misc_feature (7)..(7): n is a, c, g, or u
  misc_feature (13)..(13): n is a, c, g, or u
ngagganauuaunaauagau

SEQ ID NO: 109112 - RNA, 21 nt, Artificial Sequence
  Synthetic
  misc_feature (2)..(2): n is a, c, g, or u
  misc_feature (8)..(8): n is a, c, g, or u
  misc_feature (14)..(14): n is a, c, g, or u
angagganauuaunaauagau

SEQ ID NO: 109113 - RNA, 22 nt, Artificial Sequence
  Synthetic
  misc_feature (1)..(1): n is a, c, g, or u
  misc_feature (3)..(3): n is a, c, g, or u
  misc_feature (9)..(9): n is a, c, g, or u
  misc_feature (15)..(15): n is a, c, g, or u
nangagganauuaunaauagau

SEQ ID NO: 109114 - RNA, 23 nt, Artificial Sequence
  Synthetic
  misc_feature (1)..(2): n is a, c, g, or u
  misc_feature (4)..(4): n is a, c, g, or u
  misc_feature (10)..(10): n is a, c, g, or u
  misc_feature (16)..(16): n is a, c, g, or u
nnangagganauuaunaauagau

SEQ ID NO: 109115 - RNA, 24 nt, Artificial Sequence
  Synthetic
  misc_feature (2)..(3): n is a, c, g, or u
  misc_feature (5)..(5): n is a, c, g, or u
  misc_feature (11)..(11): n is a, c, g, or u
  misc_feature (17)..(17): n is a, c, g, or u
unnangagganauuaunaauagau

SEQ ID NO: 109116 - RNA, 18 nt, Artificial Sequence
  Synthetic
  misc_feature (1)..(1): n is a, c, g, or u
nuaaauagaccuauugau

SEQ ID NO: 109117 - RNA, 19 nt, Artificial Sequence
  Synthetic
  misc_feature (2)..(2): n is a, c, g, or u
unuaaauagaccuauugau

SEQ ID NO: 109118 - RNA, 20 nt, Artificial Sequence
  Synthetic
  misc_feature (3)..(3): n is a, c, g, or u
cunuaaauagaccuauugau

SEQ ID NO: 109119 - RNA, 21 nt, Artificial Sequence
  Synthetic
  misc_feature (4)..(4): n is a, c, g, or u
ccunuaaauagaccuauugau

SEQ ID NO: 109120 - RNA, 22 nt, Artificial Sequence
  Synthetic
  misc_feature (1)..(1): n is a, c, g, or u
  misc_feature (5)..(5): n is a, c, g, or u
nccunuaaauagaccuauugau

SEQ ID NO: 109121 - RNA, 23 nt, Artificial Sequence
  Synthetic
  misc_feature (2)..(2): n is a, c, g, or u
  misc_feature (6)..(6): n is a, c, g, or u
unccunuaaauagaccuauugau

SEQ ID NO: 109122 - RNA, 24 nt, Artificial Sequence
  Synthetic
  misc_feature (3)..(3): n is a, c, g, or u
  misc_feature (7)..(7): n is a, c, g, or u
cunccunuaaauagaccuauugau

SEQ ID NO: 109123 - RNA, 18 nt, Artificial Sequence
  Synthetic
  misc_feature (16)..(16): n is a, c, g, or u
ggacccugcaccgaanau

SEQ ID NO: 109124 - RNA, 19 nt, Artificial Sequence
  Synthetic
  misc_feature (17)..(17): n is a, c, g, or u
gggacccugcaccgaanau

SEQ ID NO: 109125 - RNA, 20 nt, Artificial Sequence
  Synthetic
  misc_feature (18)..(18): n is a, c, g, or u
ggggacccugcaccgaanau

SEQ ID NO: 109126 - RNA, 21 nt, Artificial Sequence
  Synthetic
  misc_feature (19)..(19): n is a, c, g, or u
uggggacccugcaccgaanau

SEQ ID NO: 109127 - RNA, 22 nt, Artificial Sequence
  Synthetic
  misc_feature (20)..(20): n is a, c, g, or u
cuggggacccugcaccgaanau

SEQ ID NO: 109128 - RNA, 23 nt, Artificial Sequence
  Synthetic
  misc_feature (21)..(21): n is a, c, g, or u
acuggggacccugcaccgaanau

SEQ ID NO: 109129 - RNA, 24 nt, Artificial Sequence
  Synthetic
  misc_feature (22)..(22): n is a, c, g, or u
gacuggggacccugcaccgaanau

SEQ ID NO: 109130 - RNA, 18 nt, Artificial Sequence
  Synthetic
  misc_feature (16)..(16): n is a, c, g, or u
uugcccaaggucuuanau

SEQ ID NO: 109131 - RNA, 19 nt, Artificial Sequence
  Synthetic
  misc_feature (17)..(17): n is a, c, g, or u
cuugcccaaggucuuanau

SEQ ID NO: 109132 - RNA, 20 nt, Artificial Sequence
  Synthetic
  misc_feature (18)..(18): n is a, c, g, or u
ucuugcccaaggucuuanau

SEQ ID NO: 109133 - RNA, 21 nt, Artificial Sequence
  Synthetic
  misc_feature (19)..(19): n is a, c, g, or u
gucuugcccaaggucuuanau

SEQ ID NO: 109134 - RNA, 22 nt, Artificial Sequence
  Synthetic
  misc_feature (20)..(20): n is a, c, g, or u
ggucuugcccaaggucuuanau

SEQ ID NO: 109135 - RNA, 23 nt, Artificial Sequence
  Synthetic
  misc_feature (21)..(21): n is a, c, g, or u
aggucuugcccaaggucuuanau

SEQ ID NO: 109136 - RNA, 24 nt, Artificial Sequence
  Synthetic
  misc_feature (22)..(22): n is a, c, g, or u
caggucuugcccaaggucuuanau

SEQ ID NO: 109137 - RNA, 18 nt, Artificial Sequence
  Synthetic
uuucuguguaaacaauau

SEQ ID NO: 109138 - RNA, 19 nt, Artificial Sequence
  Synthetic
cuuucuguguaaacaauau

SEQ ID NO: 109139 - RNA, 20 nt, Artificial Sequence
  Synthetic
ccuuucuguguaaacaauau

SEQ ID NO: 109140 - RNA, 21 nt, Artificial Sequence
  Synthetic
gccuuucuguguaaacaauau

SEQ ID NO: 109141 - RNA, 22 nt, Artificial Sequence
  Synthetic
ggccuuucuguguaaacaauau

SEQ ID NO: 109142 - RNA, 23 nt, Artificial Sequence
  Synthetic
aggccuuucuguguaaacaauau

SEQ ID NO: 109143 - RNA, 24 nt, Artificial Sequence
  Synthetic
aaggccuuucuguguaaacaauau

SEQ ID NO: 109144 - RNA, 18 nt, Artificial Sequence
  Synthetic
aauagaugucaacaauau

SEQ ID NO: 109145 - RNA, 19 nt, Artificial Sequence
  Synthetic
  misc_feature (1)..(1): n is a, c, g, or u
naauagaugucaacaauau

SEQ ID NO: 109146 - RNA, 20 nt, Artificial Sequence
  Synthetic
  misc_feature (2)..(2): n is a, c, g, or u
unaauagaugucaacaauau

SEQ ID NO: 109147 - RNA, 21 nt, Artificial Sequence
  Synthetic
  misc_feature (3)..(3): n is a, c, g, or u
aunaauagaugucaacaauau

SEQ ID NO: 109148 - RNA, 22 nt, Artificial Sequence
  Synthetic
  misc_feature (4)..(4): n is a, c, g, or u
uaunaauagaugucaacaauau

SEQ ID NO: 109149 - RNA, 23 nt, Artificial Sequence
  Synthetic
  misc_feature (5)..(5): n is a, c, g, or u
uuaunaauagaugucaacaauau

SEQ ID NO: 109150 - RNA, 24 nt, Artificial Sequence
  Synthetic
  misc_feature (6)..(6): n is a, c, g, or u
auuaunaauagaugucaacaauau

SEQ ID NO: 109151 - RNA, 18 nt, Artificial Sequence
  Synthetic
  misc_feature (9)..(9): n is a, c, g, or u
  misc_feature (13)..(13): n is a, c, g, or u
aaggcuggnauunuauau

SEQ ID NO: 109152 - RNA, 19 nt, Artificial Sequence
  Synthetic
  misc_feature (10)..(10): n is a, c, g, or u
  misc_feature (14)..(14): n is a, c, g, or u
gaaggcuggnauunuauau

SEQ ID NO: 109153 - RNA, 20 nt, Artificial Sequence
  Synthetic
  misc_feature (11)..(11): n is a, c, g, or u
  misc_feature (15)..(15): n is a, c, g, or u
ggaaggcuggnauunuauau

SEQ ID NO: 109154 - RNA, 21 nt, Artificial Sequence
  Synthetic
  misc_feature (12)..(12): n is a, c, g, or u
  misc_feature (16)..(16): n is a, c, g, or u
uggaaggcuggnauunuauau

SEQ ID NO: 109155 - RNA, 22 nt, Artificial Sequence
  Synthetic
  misc_feature (13)..(13): n is a, c, g, or u
  misc_feature (17)..(17): n is a, c, g, or u
guggaaggcuggnauunuauau

SEQ ID NO: 109156 - RNA, 23 nt, Artificial Sequence
  Synthetic
  misc_feature (14)..(14): n is a, c, g, or u
  misc_feature (18)..(18): n is a, c, g, or u
uguggaaggcuggnauunuauau

SEQ ID NO: 109157 - RNA, 24 nt, Artificial Sequence
  Synthetic
  misc_feature (15)..(15): n is a, c, g, or u
  misc_feature (19)..(19): n is a, c, g, or u
cuguggaaggcuggnauunuauau

SEQ ID NO: 109158 - RNA, 18 nt, Artificial Sequence
  Synthetic
augccugcuagguucuau

SEQ ID NO: 109159 - RNA, 19 nt, Artificial Sequence
  Synthetic
uaugccugcuagguucuau

SEQ ID NO: 109160 - RNA, 20 nt, Artificial Sequence
  Synthetic
uuaugccugcuagguucuau

SEQ ID NO: 109161 - RNA, 21 nt, Artificial Sequence
  Synthetic
auuaugccugcuagguucuau

SEQ ID NO: 109162 - RNA, 22 nt, Artificial Sequence
  Synthetic
  misc_feature (1)..(1): n is a, c, g, or u
nauuaugccugcuagguucuau

SEQ ID NO: 109163 - RNA, 23 nt, Artificial Sequence
  Synthetic
  misc_feature (2)..(2): n is a, c, g, or u
unauuaugccugcuagguucuau

SEQ ID NO: 109164 - RNA, 24 nt, Artificial Sequence
  Synthetic
  misc_feature (3)..(3): n is a, c, g, or u
uunauuaugccugcuagguucuau

SEQ ID NO: 109165 - RNA, 18 nt, Artificial Sequence
  Synthetic
auauggaugaugugguau

SEQ ID NO: 109166 - RNA, 19 nt, Artificial Sequence
  Synthetic
uauauggaugaugugguau

SEQ ID NO: 109167 - RNA, 20 nt, Artificial Sequence
  Synthetic
uuauauggaugaugugguau

SEQ ID NO: 109168 - RNA, 21 nt, Artificial Sequence
  Synthetic
guuauauggaugaugugguau

SEQ ID NO: 109169 - RNA, 22 nt, Artificial Sequence
  Synthetic
aguuauauggaugaugugguau

SEQ ID NO: 109170 - RNA, 23 nt, Artificial Sequence
  Synthetic
caguuauauggaugaugugguau

SEQ ID NO: 109171 - RNA, 24 nt, Artificial Sequence
  Synthetic
ucaguuauauggaugaugugguau

SEQ ID NO: 109172 - RNA, 18 nt, Artificial Sequence
  Synthetic
  misc_feature (9)..(9): n is a, c, g, or u
accgccucngcucuguau

SEQ ID NO: 109173 - RNA, 19 nt, Artificial Sequence
  Synthetic
  misc_feature (10)..(10): n is a, c, g, or u
caccgccucngcucuguau

SEQ ID NO: 109174 - RNA, 20 nt, Artificial Sequence
  Synthetic
  misc_feature (11)..(11): n is a, c, g, or u
acaccgccucngcucuguau

SEQ ID NO: 109175 - RNA, 21 nt, Artificial Sequence
  Synthetic
  misc_feature (12)..(12): n is a, c, g, or u
gacaccgccucngcucuguau

SEQ ID NO: 109176 - RNA, 22 nt, Artificial Sequence
  Synthetic
  misc_feature (13)..(13): n is a, c, g, or u
cgacaccgccucngcucuguau

SEQ ID NO: 109177 - RNA, 23 nt, Artificial Sequence
  Synthetic
  misc_feature (14)..(14): n is a, c, g, or u
ucgacaccgccucngcucuguau

SEQ ID NO: 109178 - RNA, 24 nt, Artificial Sequence
  Synthetic
  misc_feature (15)..(15): n is a, c, g, or u
cucgacaccgccucngcucuguau

SEQ ID NO: 109179 - RNA, 18 nt, Artificial Sequence
  Synthetic
  misc_feature (15)..(15): n is a, c, g, or u
auggacauugacccnuau

SEQ ID NO: 109180 - RNA, 19 nt, Artificial Sequence
  Synthetic
  misc_feature (16)..(16): n is a, c, g, or u
cauggacauugacccnuau

SEQ ID NO: 109181 - RNA, 20 nt, Artificial Sequence
  Synthetic
  misc_feature (17)..(17): n is a, c, g, or u
gcauggacauugacccnuau

SEQ ID NO: 109182 - RNA, 21 nt, Artificial Sequence
  Synthetic
  misc_feature (18)..(18): n is a, c, g, or u
ggcauggacauugacccnuau

SEQ ID NO: 109183 - RNA, 22 nt, Artificial Sequence
  Synthetic
  misc_feature (19)..(19): n is a, c, g, or u
gggcauggacauugacccnuau

SEQ ID NO: 109184 - RNA, 23 nt, Artificial Sequence
  Synthetic
  misc_feature (1)..(1): n is a, c, g, or u
  misc_feature (20)..(20): n is a, c, g, or u
ngggcauggacauugacccnuau

SEQ ID NO: 109185 - RNA, 24 nt, Artificial Sequence
  Synthetic
  misc_feature (2)..(2): n is a, c, g, or u
  misc_feature (21)..(21): n is a, c, g, or u
ungggcauggacauugacccnuau

SEQ ID NO: 109186 - RNA, 18 nt, Artificial Sequence
  Synthetic
  misc_feature (11)..(11): n is a, c, g, or u
  misc_feature (15)..(15): n is a, c, g, or u
ggaaggcuggnauunuau

SEQ ID NO: 109187 - RNA, 19 nt, Artificial Sequence
  Synthetic
  misc_feature (12)..(12): n is a, c, g, or u
  misc_feature (16)..(16): n is a, c, g, or u
uggaaggcuggnauunuau

SEQ ID NO: 109188 - RNA, 20 nt, Artificial Sequence
  Synthetic
  misc_feature (13)..(13): n is a, c, g, or u
  misc_feature (17)..(17): n is a, c, g, or u
guggaaggcuggnauunuau

SEQ ID NO: 109189 - RNA, 21 nt, Artificial Sequence
  Synthetic
  misc_feature (14)..(14): n is a, c, g, or u
  misc_feature (18)..(18): n is a, c, g, or u
uguggaaggcuggnauunuau

SEQ ID NO: 109190 - RNA, 22 nt, Artificial Sequence
  Synthetic
  misc_feature (15)..(15): n is a, c, g, or u
  misc_feature (19)..(19): n is a, c, g, or u
cuguggaaggcuggnauunuau

SEQ ID NO: 109191 - RNA, 23 nt, Artificial Sequence
  Synthetic
  misc_feature (16)..(16): n is a, c, g, or u
  misc_feature (20)..(20): n is a, c, g, or u
ucuguggaaggcuggnauunuau

SEQ ID NO: 109192 - RNA, 24 nt, Artificial Sequence
  Synthetic
  misc_feature (17)..(17): n is a, c, g, or u
  misc_feature (21)..(21): n is a, c, g, or u
cucuguggaaggcuggnauunuau

SEQ ID NO: 109193 - RNA, 18 nt, Artificial Sequence
  Synthetic
  misc_feature (12)..(12): n is a, c, g, or u
ggcauuaaaccnuauuau

SEQ ID NO: 109194 - RNA, 19 nt, Artificial Sequence
  Synthetic
  misc_feature (13)..(13): n is a, c, g, or u
aggcauuaaaccnuauuau

SEQ ID NO: 109195 - RNA, 20 nt, Artificial Sequence
  Synthetic
  misc_feature (14)..(14): n is a, c, g, or u
aaggcauuaaaccnuauuau

SEQ ID NO: 109196 - RNA, 21 nt, Artificial Sequence
  Synthetic
  misc_feature (15)..(15): n is a, c, g, or u
aaaggcauuaaaccnuauuau

SEQ ID NO: 109197 - RNA, 22 nt, Artificial Sequence
  Synthetic
  misc_feature (1)..(1): n is a, c, g, or u
  misc_feature (16)..(16): n is a, c, g, or u
naaaggcauuaaaccnuauuau

SEQ ID NO: 109198 - RNA, 23 nt, Artificial Sequence
  Synthetic
  misc_feature (2)..(2): n is a, c, g, or u
  misc_feature (17)..(17): n is a, c, g, or u
anaaaggcauuaaaccnuauuau

SEQ ID NO: 109199 - RNA, 24 nt, Artificial Sequence
  Synthetic
  misc_feature (3)..(3): n is a, c, g, or u
  misc_feature (18)..(18): n is a, c, g, or u
ganaaaggcauuaaaccnuauuau

SEQ ID NO: 109200 - RNA, 18 nt, Artificial Sequence
  Synthetic
uucacuuucucgccaacu

SEQ ID NO: 109201 - RNA, 19 nt, Artificial Sequence
  Synthetic
uuucacuuucucgccaacu

SEQ ID NO: 109202 - RNA, 20 nt, Artificial Sequence
  Synthetic
cuuucacuuucucgccaacu

SEQ ID NO: 109203 - RNA, 21 nt, Artificial Sequence
  Synthetic
gcuuucacuuucucgccaacu

SEQ ID NO: 109204 - RNA, 22 nt, Artificial Sequence
  Synthetic
ggcuuucacuuucucgccaacu

SEQ ID NO: 109205 - RNA, 23 nt, Artificial Sequence
  Synthetic
aggcuuucacuuucucgccaacu

SEQ ID NO: 109206 - RNA, 24 nt, Artificial Sequence
  Synthetic
caggcuuucacuuucucgccaacu

SEQ ID NO: 109207 - RNA, 18 nt, Artificial Sequence
  Synthetic
cuuccaggaacaucaacu

SEQ ID NO: 109208 - RNA, 19 nt, Artificial Sequence
  Synthetic
acuuccaggaacaucaacu

SEQ ID NO: 109209 - RNA, 20 nt, Artificial Sequence
  Synthetic
uacuuccaggaacaucaacu

SEQ ID NO: 109210 - RNA, 21 nt, Artificial Sequence
  Synthetic
cuacuuccaggaacaucaacu

SEQ ID NO: 109211 - RNA, 22 nt, Artificial Sequence
  Synthetic
ucuacuuccaggaacaucaacu

SEQ ID NO: 109212 - RNA, 23 nt, Artificial Sequence
  Synthetic
cucuacuuccaggaacaucaacu

SEQ ID NO: 109213 - RNA, 24 nt, Artificial Sequence
  Synthetic
ccucuacuuccaggaacaucaacu

SEQ ID NO: 109214 - RNA, 18 nt, Artificial Sequence
  Synthetic
gauccauacugcggaacu

SEQ ID NO: 109215 - RNA, 19 nt, Artificial Sequence
  Synthetic
cgauccauacugcggaacu

SEQ ID NO: 109216 - RNA, 20 nt, Artificial Sequence
  Synthetic
ccgauccauacugcggaacu

SEQ ID NO: 109217 - RNA, 18 nt, Artificial Sequence
  Synthetic
cccuaucuuaucaacacu

SEQ ID NO: 109218 - RNA, 19 nt, Artificial Sequence
  Synthetic
ccccuaucuuaucaacacu

SEQ ID NO: 109219 - RNA, 20 nt, Artificial Sequence
  Synthetic
gccccuaucuuaucaacacu

SEQ ID NO: 109220 - RNA, 21 nt, Artificial Sequence
  Synthetic
ugccccuaucuuaucaacacu

SEQ ID NO: 109221 - RNA, 22 nt, Artificial Sequence
  Synthetic
augccccuaucuuaucaacacu

SEQ ID NO: 109222 - RNA, 23 nt, Artificial Sequence
  Synthetic
aaugccccuaucuuaucaacacu

SEQ ID NO: 109223 - RNA, 24 nt, Artificial Sequence
  Synthetic
aaaugccccuaucuuaucaacacu

SEQ ID NO: 109224 - RNA, 18 nt, Artificial Sequence
  Synthetic
  misc_feature (7)..(7): n is a, c, g, or u
gucuuanauaagaggacu

SEQ ID NO: 109225 - RNA, 19 nt, Artificial Sequence
  Synthetic
  misc_feature (8)..(8): n is a, c, g, or u
ggucuuanauaagaggacu

SEQ ID NO: 109226 - RNA, 20 nt, Artificial Sequence
  Synthetic
  misc_feature (9)..(9): n is a, c, g, or u
aggucuuanauaagaggacu

SEQ ID NO: 109227 - RNA, 21 nt, Artificial Sequence
  Synthetic
  misc_feature (10)..(10): n is a, c, g, or u
aaggucuuanauaagaggacu

SEQ ID NO: 109228 - RNA, 22 nt, Artificial Sequence
  Synthetic
  misc_feature (11)..(11): n is a, c, g, or u
caaggucuuanauaagaggacu

SEQ ID NO: 109229 - RNA, 23 nt, Artificial Sequence
  Synthetic
  misc_feature (12)..(12): n is a, c, g, or u
ccaaggucuuanauaagaggacu

SEQ ID NO: 109230 - RNA, 24 nt, Artificial Sequence
  Synthetic
  misc_feature (13)..(13): n is a, c, g, or u
cccaaggucuuanauaagaggacu

SEQ ID NO: 109231 - RNA, 18 nt, Artificial Sequence
  Synthetic
ucaaucuucucgaggacu

SEQ ID NO: 109232 - RNA, 19 nt, Artificial Sequence
  Synthetic
gucaaucuucucgaggacu

SEQ ID NO: 109233 - RNA, 20 nt, Artificial Sequence
  Synthetic
cgucaaucuucucgaggacu

SEQ ID NO: 109234 - RNA, 21 nt, Artificial Sequence
  Synthetic
ucgucaaucuucucgaggacu

SEQ ID NO: 109235 - RNA, 22 nt, Artificial Sequence
  Synthetic
aucgucaaucuucucgaggacu

SEQ ID NO: 109236 - RNA, 23 nt, Artificial Sequence
  Synthetic
uaucgucaaucuucucgaggacu

SEQ ID NO: 109237 - RNA, 24 nt, Artificial Sequence
  Synthetic
auaucgucaaucuucucgaggacu

SEQ ID NO: 109238 - RNA, 18 nt, Artificial Sequence
  Synthetic
uguugguucuucuggacu

SEQ ID NO: 109239 - RNA, 19 nt, Artificial Sequence
  Synthetic
uuguugguucuucuggacu

SEQ ID NO: 109240 - RNA, 20 nt, Artificial Sequence
  Synthetic
cuuguugguucuucuggacu

SEQ ID NO: 109241 - RNA, 21 nt, Artificial Sequence
  Synthetic
ucuuguugguucuucuggacu

SEQ ID NO: 109242 - RNA, 22 nt, Artificial Sequence
  Synthetic
uucuuguugguucuucuggacu

SEQ ID NO: 109243 - RNA, 23 nt, Artificial Sequence
  Synthetic
cuucuuguugguucuucuggacu

SEQ ID NO: 109244 - RNA, 24 nt, Artificial Sequence
  Synthetic
ucuucuuguugguucuucuggacu

SEQ ID NO: 109245 - RNA, 18 nt, Artificial Sequence
  Synthetic
guuaguaucccuuggacu

SEQ ID NO: 109246 - RNA, 19 nt, Artificial Sequence
  Synthetic
uguuaguaucccuuggacu

SEQ ID NO: 109247 - RNA, 20 nt, Artificial Sequence
  Synthetic
auguuaguaucccuuggacu

SEQ ID NO: 109248 - RNA, 21 nt, Artificial Sequence
  Synthetic
aauguuaguaucccuuggacu

SEQ ID NO: 109249 - RNA, 22 nt, Artificial Sequence
  Synthetic
caauguuaguaucccuuggacu

SEQ ID NO: 109250 - RNA, 23 nt, Artificial Sequence
  Synthetic
ucaauguuaguaucccuuggacu

SEQ ID NO: 109251 - RNA, 24 nt, Artificial Sequence
  Synthetic
cucaauguuaguaucccuuggacu

SEQ ID NO: 109252 - RNA, 18 nt, Artificial Sequence
  Synthetic
uaagaggacucuuggacu

SEQ ID NO: 109253 - RNA, 19 nt, Artificial Sequence
  Synthetic
auaagaggacucuuggacu

SEQ ID NO: 109254 - RNA, 20 nt, Artificial Sequence
  Synthetic
  misc_feature (1)..(1): n is a, c, g, or u
nauaagaggacucuuggacu

SEQ ID NO: 109255 - RNA, 21 nt, Artificial Sequence
  Synthetic
  misc_feature (2)..(2): n is a, c, g, or u
anauaagaggacucuuggacu

SEQ ID NO: 109256 - RNA, 22 nt, Artificial Sequence
  Synthetic
  misc_feature (3)..(3): n is a, c, g, or u
uanauaagaggacucuuggacu

SEQ ID NO: 109257 - RNA, 23 nt, Artificial Sequence
  Synthetic
  misc_feature (4)..(4): n is a, c, g, or u
uuanauaagaggacucuuggacu

SEQ ID NO: 109258 - RNA, 24 nt, Artificial Sequence
  Synthetic
  misc_feature (5)..(5): n is a, c, g, or u
cuuanauaagaggacucuuggacu

SEQ ID NO: 109259 - RNA, 18 nt, Artificial Sequence
  Synthetic
  misc_feature (6)..(6): n is a, c, g, or u
  misc_feature (8)..(8): n is a, c, g, or u
  misc_feature (14)..(14): n is a, c, g, or u
acugununuuuaangacu

SEQ ID NO: 109260 - RNA, 19 nt, Artificial Sequence
  Synthetic
  misc_feature (7)..(7): n is a, c, g, or u
  misc_feature (9)..(9): n is a, c, g, or u
  misc_feature (15)..(15): n is a, c, g, or u
gacugununuuuaangacu

SEQ ID NO: 109261 - RNA, 20 nt, Artificial Sequence
  Synthetic
  misc_feature (8)..(8): n is a, c, g, or u
  misc_feature (10)..(10): n is a, c, g, or u
  misc_feature (16)..(16): n is a, c, g, or u
agacugununuuuaangacu

SEQ ID NO: 109262 - RNA, 21 nt, Artificial Sequence
  Synthetic
  misc_feature (9)..(9): n is a, c, g, or u
  misc_feature (11)..(11): n is a, c, g, or u
  misc_feature (17)..(17): n is a, c, g, or u
aagacugununuuuaangacu

SEQ ID NO: 109263 - RNA, 22 nt, Artificial Sequence
  Synthetic
  misc_feature (10)..(10): n is a, c, g, or u
  misc_feature (12)..(12): n is a, c, g, or u
  misc_feature (18)..(18): n is a, c, g, or u
aaagacugununuuuaangacu

SEQ ID NO: 109264 - RNA, 23 nt, Artificial Sequence
  Synthetic
  misc_feature (11)..(11): n is a, c, g, or u
  misc_feature (13)..(13): n is a, c, g, or u
  misc_feature (19)..(19): n is a, c, g, or u
caaagacugununuuuaangacu

SEQ ID NO: 109265 - RNA, 24 nt, Artificial Sequence
  Synthetic
  misc_feature (12)..(12): n is a, c, g, or u
  misc_feature (14)..(14): n is a, c, g, or u
  misc_feature (20)..(20): n is a, c, g, or u
ucaaagacugununuuuaangacu

SEQ ID NO: 109266 - RNA, 18 nt, Artificial Sequence
  Synthetic
ccucugccgauccauacu

SEQ ID NO: 109267 - RNA, 19 nt, Artificial Sequence
  Synthetic
uccucugccgauccauacu

SEQ ID NO: 109268 - RNA, 20 nt, Artificial Sequence
  Synthetic
cuccucugccgauccauacu

SEQ ID NO: 109269 - RNA, 21 nt, Artificial Sequence
  Synthetic
gcuccucugccgauccauacu

SEQ ID NO: 109270 - RNA, 22 nt, Artificial Sequence
  Synthetic
ggcuccucugccgauccauacu

SEQ ID NO: 109271 - RNA, 23 nt, Artificial Sequence
  Synthetic
uggcuccucugccgauccauacu

SEQ ID NO: 109272 - RNA, 24 nt, Artificial Sequence
  Synthetic
guggcuccucugccgauccauacu

SEQ ID NO: 109273 - RNA, 18 nt, Artificial Sequence
  Synthetic
ccgaccuugaggcauacu

SEQ ID NO: 109274 - RNA, 19 nt, Artificial Sequence
  Synthetic
accgaccuugaggcauacu

SEQ ID NO: 109275 - RNA, 20 nt, Artificial Sequence
  Synthetic
gaccgaccuugaggcauacu

SEQ ID NO: 109276 - RNA, 18 nt, Artificial Sequence
  Synthetic
gcccguuuguccucuacu

SEQ ID NO: 109277 - RNA, 19 nt, Artificial Sequence
  Synthetic
ugcccguuuguccucuacu

SEQ ID NO: 109278 - RNA, 20 nt, Artificial Sequence
  Synthetic
uugcccguuuguccucuacu

SEQ ID NO: 109279 - RNA, 21 nt, Artificial Sequence
  Synthetic
guugcccguuuguccucuacu

SEQ ID NO: 109280 - RNA, 22 nt, Artificial Sequence
  Synthetic
uguugcccguuuguccucuacu

SEQ ID NO: 109281 - RNA, 23 nt, Artificial Sequence
  Synthetic
auguugcccguuuguccucuacu

SEQ ID NO: 109282 - RNA, 24 nt, Artificial Sequence
  Synthetic
uauguugcccguuuguccucuacu

SEQ ID NO: 109283 - RNA, 18 nt, Artificial Sequence
  Synthetic
  misc_feature (6)..(6): n is a, c, g, or u
  misc_feature (8)..(8): n is a, c, g, or u
guuaangnucuuuguacu

SEQ ID NO: 109284 - RNA, 19 nt, Artificial Sequence
  Synthetic
  misc_feature (7)..(7): n is a, c, g, or u
  misc_feature (9)..(9): n is a, c, g, or u
gguuaangnucuuuguacu

SEQ ID NO: 109285 - RNA, 20 nt, Artificial Sequence
  Synthetic
  misc_feature (8)..(8): n is a, c, g, or u
  misc_feature (10)..(10): n is a, c, g, or u
agguuaangnucuuuguacu

SEQ ID NO: 109286 - RNA, 21 nt, Artificial Sequence
  Synthetic
  misc_feature (9)..(9): n is a, c, g, or u
  misc_feature (11)..(11): n is a, c, g, or u
uagguuaangnucuuuguacu

SEQ ID NO: 109287 - RNA, 22 nt, Artificial Sequence
  Synthetic
  misc_feature (1)..(1): n is a, c, g, or u
  misc_feature (10)..(10): n is a, c, g, or u
  misc_feature (12)..(12): n is a, c, g, or u
nuagguuaangnucuuuguacu

SEQ ID NO: 109288 - RNA, 23 nt, Artificial Sequence
  Synthetic
  misc_feature (2)..(2): n is a, c, g, or u
  misc_feature (11)..(11): n is a, c, g, or u
  misc_feature (13)..(13): n is a, c, g, or u
anuagguuaangnucuuuguacu

SEQ ID NO: 109289 - RNA, 24 nt, Artificial Sequence
  Synthetic
  misc_feature (3)..(3): n is a, c, g, or u
  misc_feature (12)..(12): n is a, c, g, or u
  misc_feature (14)..(14): n is a, c, g, or u
ganuagguuaangnucuuuguacu

SEQ ID NO: 109290 - RNA, 18 nt, Artificial Sequence
  Synthetic
  misc_feature (3)..(3): n is a, c, g, or u
auncaguuaaucauuacu

SEQ ID NO: 109291 - RNA, 19 nt, Artificial Sequence
  Synthetic
  misc_feature (4)..(4): n is a, c, g, or u
cauncaguuaaucauuacu

SEQ ID NO: 109292 - RNA, 20 nt, Artificial Sequence
  Synthetic
  misc_feature (5)..(5): n is a, c, g, or u
acauncaguuaaucauuacu

SEQ ID NO: 109293 - RNA, 21 nt, Artificial Sequence
  Synthetic
  misc_feature (6)..(6): n is a, c, g, or u
aacauncaguuaaucauuacu

SEQ ID NO: 109294 - RNA, 22 nt, Artificial Sequence
  Synthetic
  misc_feature (7)..(7): n is a, c, g, or u
gaacauncaguuaaucauuacu

SEQ ID NO: 109295 - RNA, 23 nt, Artificial Sequence
  Synthetic
  misc_feature (8)..(8): n is a, c, g, or u
ugaacauncaguuaaucauuacu

SEQ ID NO: 109296 - RNA, 24 nt, Artificial Sequence
  Synthetic
  misc_feature (9)..(9): n is a, c, g, or u
cugaacauncaguuaaucauuacu

SEQ ID NO: 109297 - RNA, 18 nt, Artificial Sequence
  Synthetic
cacauuuccugucuuacu

SEQ ID NO: 109298 - RNA, 19 nt, Artificial Sequence
  Synthetic
ucacauuuccugucuuacu

SEQ ID NO: 109299 - RNA, 20 nt, Artificial Sequence
  Synthetic
uucacauuuccugucuuacu

SEQ ID NO: 109300 - RNA, 21 nt, Artificial Sequence
  Synthetic
uuucacauuuccugucuuacu

SEQ ID NO: 109301 - RNA, 22 nt, Artificial Sequence
  Synthetic
guuucacauuuccugucuuacu

SEQ ID NO: 109302 - RNA, 23 nt, Artificial Sequence
  Synthetic
gguuucacauuuccugucuuacu

SEQ ID NO: 109303 - RNA, 24 nt, Artificial Sequence
  Synthetic
ugguuucacauuuccugucuuacu

SEQ ID NO: 109304 - RNA, 18 nt, Artificial Sequence
  Synthetic
uguugcuguacaaaaccu

SEQ ID NO: 109305 - RNA, 19 nt, Artificial Sequence
  Synthetic
uuguugcuguacaaaaccu

SEQ ID NO: 109306 - RNA, 20 nt, Artificial Sequence
  Synthetic
cuuguugcuguacaaaaccu

SEQ ID NO: 109307 - RNA, 21 nt, Artificial Sequence
  Synthetic
ucuuguugcuguacaaaaccu

SEQ ID NO: 109308 - RNA, 22 nt, Artificial Sequence
  Synthetic
cucuuguugcuguacaaaaccu

SEQ ID NO: 109309 - RNA, 23 nt, Artificial Sequence
  Synthetic
ccucuuguugcuguacaaaaccu

SEQ ID NO: 109310 - RNA, 24 nt, Artificial Sequence
  Synthetic
cccucuuguugcuguacaaaaccu

SEQ ID NO: 109311 - RNA, 18 nt, Artificial Sequence
  Synthetic
acucccaucucuccaccu

SEQ ID NO: 109312 - RNA, 19 nt, Artificial Sequence
  Synthetic
uacucccaucucuccaccu

SEQ ID NO: 109313 - RNA, 20 nt, Artificial Sequence
  Synthetic
cuacucccaucucuccaccu

SEQ ID NO: 109314 - RNA, 21 nt, Artificial Sequence
  Synthetic
ccuacucccaucucuccaccu

SEQ ID NO: 109315 - RNA, 22 nt, Artificial Sequence
  Synthetic
gccuacucccaucucuccaccu

SEQ ID NO: 109316 - RNA, 23 nt, Artificial Sequence
  Synthetic
agccuacucccaucucuccaccu

SEQ ID NO: 109317 - RNA, 24 nt, Artificial Sequence
  Synthetic
cagccuacucccaucucuccaccu

SEQ ID NO: 109318 - RNA, 18 nt, Artificial Sequence
  Synthetic
aaugucaacgaccgaccu

SEQ ID NO: 109319 - RNA, 19 nt, Artificial Sequence
  Synthetic
caaugucaacgaccgaccu

SEQ ID NO: 109320 - RNA, 20 nt, Artificial Sequence
  Synthetic
gcaaugucaacgaccgaccu

SEQ ID NO: 109321 - RNA, 21 nt, Artificial Sequence
  Synthetic
agcaaugucaacgaccgaccu

SEQ ID NO: 109322 - RNA, 22 nt, Artificial Sequence
  Synthetic
cagcaaugucaacgaccgaccu

SEQ ID NO: 109323 - RNA, 23 nt, Artificial Sequence
  Synthetic
  misc_feature (1)..(1): n is a, c, g, or u
ncagcaaugucaacgaccgaccu

SEQ ID NO: 109324 - RNA, 24 nt, Artificial Sequence
  Synthetic
  misc_feature (2)..(2): n is a, c, g, or u
cncagcaaugucaacgaccgaccu

SEQ ID NO: 109325 - RNA, 18 nt, Artificial Sequence
  Synthetic
  misc_feature (12)..(12): n is a, c, g, or u
gguauacauuunaacccu

SEQ ID NO: 109326 - RNA, 19 nt, Artificial Sequence
  Synthetic
  misc_feature (13)..(13): n is a, c, g, or u
ggguauacauuunaacccu

SEQ ID NO: 109327 - RNA, 20 nt, Artificial Sequence
  Synthetic
  misc_feature (14)..(14): n is a, c, g, or u
uggguauacauuunaacccu

SEQ ID NO: 109328 - RNA, 21 nt, Artificial Sequence
  Synthetic
  misc_feature (15)..(15): n is a, c, g, or u
uuggguauacauuunaacccu

SEQ ID NO: 109329 - RNA, 22 nt, Artificial Sequence
  Synthetic
  misc_feature (16)..(16): n is a, c, g, or u
uuuggguauacauuunaacccu

SEQ ID NO: 109330 - RNA, 23 nt, Artificial Sequence
  Synthetic
  misc_feature (17)..(17): n is a, c, g, or u
cuuuggguauacauuunaacccu

SEQ ID NO: 109331 - RNA, 24 nt, Artificial Sequence
  Synthetic
  misc_feature (18)..(18): n is a, c, g, or u
ucuuuggguauacauuunaacccu

SEQ ID NO: 109332 - RNA, 18 nt, Artificial Sequence
  Synthetic
cgacgaggcagguccccu

SEQ ID NO: 109333 - RNA, 19 nt, Artificial Sequence
  Synthetic
acgacgaggcagguccccu

SEQ ID NO: 109334 - RNA, 20 nt, Artificial Sequence
  Synthetic
gacgacgaggcagguccccu

SEQ ID NO: 109335 - RNA, 18 nt, Artificial Sequence
  Synthetic
guccuacuguucaagccu

SEQ ID NO: 109336 - RNA, 19 nt, Artificial Sequence
  Synthetic
uguccuacuguucaagccu

SEQ ID NO: 109337 - RNA, 20 nt, Artificial Sequence
  Synthetic
auguccuacuguucaagccu

SEQ ID NO: 109338 - RNA, 21 nt, Artificial Sequence
  Synthetic
cauguccuacuguucaagccu

SEQ ID NO: 109339 - RNA, 22 nt, Artificial Sequence
  Synthetic
ucauguccuacuguucaagccu

SEQ ID NO: 109340 - RNA, 23 nt, Artificial Sequence
  Synthetic
uucauguccuacuguucaagccu

SEQ ID NO: 109341 - RNA, 24 nt, Artificial Sequence
  Synthetic
guucauguccuacuguucaagccu

SEQ ID NO: 109342 - RNA, 18 nt, Artificial Sequence
  Synthetic
agaagaacucccucgccu

SEQ ID NO: 109343 - RNA, 19 nt, Artificial Sequence
  Synthetic
aagaagaacucccucgccu

SEQ ID NO: 109344 - RNA, 20 nt, Artificial Sequence
  Synthetic
gaagaagaacucccucgccu

SEQ ID NO: 109345 - RNA, 21 nt, Artificial Sequence
  Synthetic
agaagaagaacucccucgccu

SEQ ID NO: 109346 - RNA, 22 nt, Artificial Sequence
  Synthetic
uagaagaagaacucccucgccu

SEQ ID NO: 109347 - RNA, 23 nt, Artificial Sequence
  Synthetic
cuagaagaagaacucccucgccu

SEQ ID NO: 109348 - RNA, 24 nt, Artificial Sequence
  Synthetic
ccuagaagaagaacucccucgccu

SEQ ID NO: 109349 - RNA, 18 nt, Artificial Sequence
  Synthetic
  misc_feature (9)..(9): n is a, c, g, or u
uuaaaauunauuaugccu

SEQ ID NO: 109350 - RNA, 19 nt, Artificial Sequence
  Synthetic
  misc_feature (10)..(10): n is a, c, g, or u
auuaaaauunauuaugccu

SEQ ID NO: 109351 - RNA, 20 nt, Artificial Sequence
  Synthetic
  misc_feature (11)..(11): n is a, c, g, or u
gauuaaaauunauuaugccu

SEQ ID NO: 109352 - RNA, 21 nt, Artificial Sequence
  Synthetic
  misc_feature (12)..(12): n is a, c, g, or u
agauuaaaauunauuaugccu

SEQ ID NO: 109353 - RNA, 22 nt, Artificial Sequence
  Synthetic
  misc_feature (13)..(13): n is a, c, g, or u
gagauuaaaauunauuaugccu

SEQ ID NO: 109354 - RNA, 23 nt, Artificial Sequence
  Synthetic
  misc_feature (14)..(14): n is a, c, g, or u
ggagauuaaaauunauuaugccu

SEQ ID NO: 109355 - RNA, 24 nt, Artificial Sequence
  Synthetic
  misc_feature (15)..(15): n is a, c, g, or u
aggagauuaaaauunauuaugccu

SEQ ID NO: 109356 - RNA, 18 nt, Artificial Sequence
  Synthetic
uuacucucuuuuuugccu

SEQ ID NO: 109357 - RNA, 19 nt, Artificial Sequence
  Synthetic
guuacucucuuuuuugccu

SEQ ID NO: 109358 - RNA, 20 nt, Artificial Sequence
  Synthetic
aguuacucucuuuuuugccu

SEQ ID NO: 109359 - RNA, 21 nt, Artificial Sequence
  Synthetic
gaguuacucucuuuuuugccu

SEQ ID NO: 109360 - RNA, 22 nt, Artificial Sequence
  Synthetic
ggaguuacucucuuuuuugccu

SEQ ID NO: 109361 - RNA, 23 nt, Artificial Sequence
  Synthetic
uggaguuacucucuuuuuugccu

SEQ ID NO: 109362 - RNA, 24 nt, Artificial Sequence
  Synthetic
guggaguuacucucuuuuuugccu

SEQ ID NO: 109363 - RNA, 18 nt, Artificial Sequence
  Synthetic
cuuucuguucccaauccu

SEQ ID NO: 109364 - RNA, 19 nt, Artificial Sequence
  Synthetic
ucuuucuguucccaauccu

SEQ ID NO: 109365 - RNA, 20 nt, Artificial Sequence
  Synthetic
aucuuucuguucccaauccu

SEQ ID NO: 109366 - RNA, 21 nt, Artificial Sequence
  Synthetic
aaucuuucuguucccaauccu

SEQ ID NO: 109367 - RNA, 22 nt, Artificial Sequence
  Synthetic
  misc_feature (1)..(1): n is a, c, g, or u
naaucuuucuguucccaauccu

SEQ ID NO: 109368 - RNA, 23 nt, Artificial Sequence
  Synthetic
  misc_feature (2)..(2): n is a, c, g, or u
cnaaucuuucuguucccaauccu

SEQ ID NO: 109369 - RNA, 24 nt, Artificial Sequence
  Synthetic
  misc_feature (3)..(3): n is a, c, g, or u
acnaaucuuucuguucccaauccu

SEQ ID NO: 109370 - RNA, 18 nt, Artificial Sequence
  Synthetic
ccauacugcggaacuccu

SEQ ID NO: 109371 - RNA, 19 nt, Artificial Sequence
  Synthetic
uccauacugcggaacuccu

SEQ ID NO: 109372 - RNA, 20 nt, Artificial Sequence
  Synthetic
auccauacugcggaacuccu

SEQ ID NO: 109373 - RNA, 21 nt, Artificial Sequence
  Synthetic
gauccauacugcggaacuccu

SEQ ID NO: 109374 - RNA, 22 nt, Artificial Sequence
  Synthetic
cgauccauacugcggaacuccu

SEQ ID NO: 109375 - RNA, 23 nt, Artificial Sequence
  Synthetic
ccgauccauacugcggaacuccu

SEQ ID NO: 109376 - RNA, 24 nt, Artificial Sequence
  Synthetic
gccgauccauacugcggaacuccu

SEQ ID NO: 109377 - RNA, 18 nt, Artificial Sequence
  Synthetic
ggcuuucgcaagauuccu

SEQ ID NO: 109378 - RNA, 19 nt, Artificial Sequence
  Synthetic
gggcuuucgcaagauuccu

SEQ ID NO: 109379 - RNA, 20 nt, Artificial Sequence
  Synthetic
ugggcuuucgcaagauuccu

SEQ ID NO: 109380 - RNA, 21 nt, Artificial Sequence
  Synthetic
  misc_feature (1)..(1): n is a, c, g, or u
nugggcuuucgcaagauuccu

SEQ ID NO: 109381 - RNA, 22 nt, Artificial Sequence
  Synthetic
  misc_feature (2)..(2): n is a, c, g, or u
cnugggcuuucgcaagauuccu

SEQ ID NO: 109382 - RNA, 23 nt, Artificial Sequence
  Synthetic
  misc_feature (3)..(3): n is a, c, g, or u
ucnugggcuuucgcaagauuccu

SEQ ID NO: 109383 - RNA, 24 nt, Artificial Sequence
  Synthetic
  misc_feature (4)..(4): n is a, c, g, or u
aucnugggcuuucgcaagauuccu

SEQ ID NO: 109384 - RNA, 18 nt, Artificial Sequence
  Synthetic
ggguggagcccucaggcu

SEQ ID NO: 109385 - RNA, 19 nt, Artificial Sequence
  Synthetic
gggguggagcccucaggcu

SEQ ID NO: 109386 - RNA, 20 nt, Artificial Sequence
  Synthetic
ugggguggagcccucaggcu

SEQ ID NO: 109387 - RNA, 21 nt, Artificial Sequence
  Synthetic
uugggguggagcccucaggcu

SEQ ID NO: 109388 - RNA, 22 nt, Artificial Sequence
  Synthetic
uuugggguggagcccucaggcu

SEQ ID NO: 109389 - RNA, 23 nt, Artificial Sequence
  Synthetic
uuuugggguggagcccucaggcu

SEQ ID NO: 109390 - RNA, 24 nt, Artificial Sequence
  Synthetic
cuuuugggguggagcccucaggcu

SEQ ID NO: 109391 - RNA, 18 nt, Artificial Sequence
  Synthetic
  misc_feature (11)..(11): n is a, c, g, or u
ucuuuguacunggaggcu

SEQ ID NO: 109392 - RNA, 19 nt, Artificial Sequence
  Synthetic
  misc_feature (1)..(1): n is a, c, g, or u
  misc_feature (12)..(12): n is a, c, g, or u
nucuuuguacunggaggcu

SEQ ID NO: 109393 - RNA, 20 nt, Artificial Sequence
  Synthetic
  misc_feature (2)..(2): n is a, c, g, or u
  misc_feature (13)..(13): n is a, c, g, or u
gnucuuuguacunggaggcu

SEQ ID NO: 109394 - RNA, 21 nt, Artificial Sequence
  Synthetic
  misc_feature (1)..(1): n is a, c, g, or u
  misc_feature (3)..(3): n is a, c, g, or u
  misc_feature (14)..(14): n is a, c, g, or u
ngnucuuuguacunggaggcu

SEQ ID NO: 109395 - RNA, 22 nt, Artificial Sequence
  Synthetic
  misc_feature (2)..(2): n is a, c, g, or u
  misc_feature (4)..(4): n is a, c, g, or u
  misc_feature (15)..(15): n is a, c, g, or u
angnucuuuguacunggaggcu

SEQ ID NO: 109396 - RNA, 23 nt, Artificial Sequence
  Synthetic
  misc_feature (3)..(3): n is a, c, g, or u
  misc_feature (5)..(5): n is a, c, g, or u
  misc_feature (16)..(16): n is a, c, g, or u
aangnucuuuguacunggaggcu

SEQ ID NO: 109397 - RNA, 24 nt, Artificial Sequence
  Synthetic
  misc_feature (4)..(4): n is a, c, g, or u
  misc_feature (6)..(6): n is a, c, g, or u
  misc_feature (17)..(17): n is a, c, g, or u
uaangnucuuuguacunggaggcu

SEQ ID NO: 109398 - RNA, 18 nt, Artificial Sequence
  Synthetic
gcugugccuuggguggcu

SEQ ID NO: 109399 - RNA, 19 nt, Artificial Sequence
  Synthetic
agcugugccuuggguggcu

SEQ ID NO: 109400 - RNA, 20 nt, Artificial Sequence
  Synthetic
aagcugugccuuggguggcu

SEQ ID NO: 109401 - RNA, 21 nt, Artificial Sequence
  Synthetic
caagcugugccuuggguggcu

SEQ ID NO: 109402 - RNA, 22 nt, Artificial Sequence
  Synthetic
ccaagcugugccuuggguggcu

SEQ ID NO: 109403 - RNA, 23 nt, Artificial Sequence
  Synthetic
uccaagcugugccuuggguggcu

SEQ ID NO: 109404 - RNA, 24 nt, Artificial Sequence
  Synthetic
cuccaagcugugccuuggguggcu

SEQ ID NO: 109405 - RNA, 18 nt, Artificial Sequence
  Synthetic
  misc_feature (13)..(13): n is a, c, g, or u
  misc_feature (15)..(15): n is a, c, g, or u
auucgcacuccuncngcu

SEQ ID NO: 109406 - RNA, 19 nt, Artificial Sequence
  Synthetic
  misc_feature (14)..(14): n is a, c, g, or u
  misc_feature (16)..(16): n is a, c, g, or u
gauucgcacuccuncngcu

SEQ ID NO: 109407 - RNA, 20 nt, Artificial Sequence
  Synthetic
  misc_feature (15)..(15): n is a, c, g, or u
  misc_feature (17)..(17): n is a, c, g, or u
ggauucgcacuccuncngcu

SEQ ID NO: 109408 - RNA, 21 nt, Artificial Sequence
  Synthetic
  misc_feature (16)..(16): n is a, c, g, or u
  misc_feature (18)..(18): n is a, c, g, or u
uggauucgcacuccuncngcu

SEQ ID NO: 109409 - RNA, 22 nt, Artificial Sequence
  Synthetic
  misc_feature (17)..(17): n is a, c, g, or u
  misc_feature (19)..(19): n is a, c, g, or u
guggauucgcacuccuncngcu

SEQ ID NO: 109410 - RNA, 23 nt, Artificial Sequence
  Synthetic
  misc_feature (18)..(18): n is a, c, g, or u
  misc_feature (20)..(20): n is a, c, g, or u
uguggauucgcacuccuncngcu

SEQ ID NO: 109411 - RNA, 24 nt, Artificial Sequence
  Synthetic
  misc_feature (19)..(19): n is a, c, g, or u
  misc_feature (21)..(21): n is a, c, g, or u
guguggauucgcacuccuncngcu

SEQ ID NO: 109412 - RNA, 18 nt, Artificial Sequence
  Synthetic
  misc_feature (11)..(11): n is a, c, g, or u
accugcacganuccugcu

SEQ ID NO: 109413 - RNA, 19 nt, Artificial Sequence
  Synthetic
  misc_feature (12)..(12): n is a, c, g, or u
gaccugcacganuccugcu

SEQ ID NO: 109414 - RNA, 20 nt, Artificial Sequence
  Synthetic
  misc_feature (13)..(13): n is a, c, g, or u
agaccugcacganuccugcu

SEQ ID NO: 109415 - RNA, 21 nt, Artificial Sequence
  Synthetic
  misc_feature (14)..(14): n is a, c, g, or u
aagaccugcacganuccugcu

SEQ ID NO: 109416 - RNA, 22 nt, Artificial Sequence
  Synthetic
  misc_feature (15)..(15): n is a, c, g, or u
caagaccugcacganuccugcu

SEQ ID NO: 109417 - RNA, 23 nt, Artificial Sequence
  Synthetic
  misc_feature (16)..(16): n is a, c, g, or u
gcaagaccugcacganuccugcu

SEQ ID NO: 109418 - RNA, 24 nt, Artificial Sequence
  Synthetic
  misc_feature (17)..(17): n is a, c, g, or u
ugcaagaccugcacganuccugcu

SEQ ID NO: 109419 - RNA, 18 nt, Artificial Sequence
  Synthetic
  misc_feature (9)..(9): n is a, c, g, or u
ggccuauanuuuccugcu

SEQ ID NO: 109420 - RNA, 19 nt, Artificial Sequence
  Synthetic
  misc_feature (10)..(10): n is a, c, g, or u
gggccuauanuuuccugcu

SEQ ID NO: 109421 - RNA, 20 nt, Artificial Sequence
  Synthetic
  misc_feature (11)..(11): n is a, c, g, or u
ggggccuauanuuuccugcu

SEQ ID NO: 109422 - RNA, 21 nt, Artificial Sequence
  Synthetic
  misc_feature (12)..(12): n is a, c, g, or u
aggggccuauanuuuccugcu

SEQ ID NO: 109423 - RNA, 22 nt, Artificial Sequence
  Synthetic
  misc_feature (13)..(13): n is a, c, g, or u
gaggggccuauanuuuccugcu

SEQ ID NO: 109424 - RNA, 23 nt, Artificial Sequence
  Synthetic
  misc_feature (14)..(14): n is a, c, g, or u
ugaggggccuauanuuuccugcu

SEQ ID NO: 109425 - RNA, 24 nt, Artificial Sequence
  Synthetic
  misc_feature (15)..(15): n is a, c, g, or u
gugaggggccuauanuuuccugcu

SEQ ID NO: 109426 - RNA, 18 nt, Artificial Sequence
  Synthetic
  misc_feature (9)..(9): n is a, c, g, or u
  misc_feature (12)..(12): n is a, c, g, or u
uggcugcunggnugugcu

SEQ ID NO: 109427 - RNA, 19 nt, Artificial Sequence
  Synthetic
  misc_feature (10)..(10): n is a, c, g, or u
  misc_feature (13)..(13): n is a, c, g, or u
auggcugcunggnugugcu

SEQ ID NO: 109428 - RNA, 20 nt, Artificial Sequence
  Synthetic
  misc_feature (11)..(11): n is a, c, g, or u
  misc_feature (14)..(14): n is a, c, g, or u
cauggcugcunggnugugcu

SEQ ID NO: 109429 - RNA, 21 nt, Artificial Sequence
  Synthetic
  misc_feature (12)..(12): n is a, c, g, or u
  misc_feature (15)..(15): n is a, c, g, or u
ccauggcugcunggnugugcu

SEQ ID NO: 109430 - RNA, 22 nt, Artificial Sequence
  Synthetic
  misc_feature (13)..(13): n is a, c, g, or u
  misc_feature (16)..(16): n is a, c, g, or u
uccauggcugcunggnugugcu

SEQ ID NO: 109431 - RNA, 23 nt, Artificial Sequence
  Synthetic
  misc_feature (14)..(14): n is a, c, g, or u
  misc_feature (17)..(17): n is a, c, g, or u
uuccauggcugcunggnugugcu

SEQ ID NO: 109432 - RNA, 24 nt, Artificial Sequence
  Synthetic
  misc_feature (15)..(15): n is a, c, g, or u
  misc_feature (18)..(18): n is a, c, g, or u
uuuccauggcugcunggnugugcu

SEQ ID NO: 109433 - RNA, 18 nt, Artificial Sequence
  Synthetic
cuagcagcuuguuuugcu

SEQ ID NO: 109434 - RNA, 19 nt, Artificial Sequence
  Synthetic
ccuagcagcuuguuuugcu

SEQ ID NO: 109435 - RNA, 20 nt, Artificial Sequence
  Synthetic
uccuagcagcuuguuuugcu

SEQ ID NO: 109436 - RNA, 21 nt, Artificial Sequence
  Synthetic
cuccuagcagcuuguuuugcu

SEQ ID NO: 109437 - RNA, 22 nt, Artificial Sequence
  Synthetic
acuccuagcagcuuguuuugcu

SEQ ID NO: 109438 - RNA, 23 nt, Artificial Sequence
  Synthetic
aacuccuagcagcuuguuuugcu

SEQ ID NO: 109439 - RNA, 24 nt, Artificial Sequence
  Synthetic
gaacuccuagcagcuuguuuugcu

SEQ ID NO: 109440 - RNA, 18 nt, Artificial Sequence
  Synthetic
cgcagaagaucucaaucu

SEQ ID NO: 109441 - RNA, 19 nt, Artificial Sequence
  Synthetic
ucgcagaagaucucaaucu

SEQ ID NO: 109442 - RNA, 20 nt, Artificial Sequence
  Synthetic
gucgcagaagaucucaaucu

SEQ ID NO: 109443 - RNA, 18 nt, Artificial Sequence
  Synthetic
gucugugccuucucaucu

SEQ ID NO: 109444 - RNA, 19 nt, Artificial Sequence
  Synthetic
cgucugugccuucucaucu

SEQ ID NO: 109445 - RNA, 20 nt, Artificial Sequence
  Synthetic
ccgucugugccuucucaucu

SEQ ID NO: 109446 - RNA, 21 nt, Artificial Sequence
  Synthetic
cccgucugugccuucucaucu

SEQ ID NO: 109447 - RNA, 22 nt, Artificial Sequence
  Synthetic
ccccgucugugccuucucaucu

SEQ ID NO: 109448 - RNA, 23 nt, Artificial Sequence
  Synthetic
uccccgucugugccuucucaucu

SEQ ID NO: 109449 - RNA, 24 nt, Artificial Sequence
  Synthetic
cuccccgucugugccuucucaucu

SEQ ID NO: 109450 - RNA, 18 nt, Artificial Sequence
  Synthetic
gcauuauuuacauacucu

SEQ ID NO: 109451 - RNA, 19 nt, Artificial Sequence
  Synthetic
ggcauuauuuacauacucu

SEQ ID NO: 109452 - RNA, 20 nt, Artificial Sequence
  Synthetic
aggcauuauuuacauacucu

SEQ ID NO: 109453 - RNA, 21 nt, Artificial Sequence
  Synthetic
uaggcauuauuuacauacucu

SEQ ID NO: 109454 - RNA, 22 nt, Artificial Sequence
  Synthetic
cuaggcauuauuuacauacucu

SEQ ID NO: 109455 - RNA, 23 nt, Artificial Sequence
  Synthetic
acuaggcauuauuuacauacucu

SEQ ID NO: 109456 - RNA, 24 nt, Artificial Sequence
  Synthetic
aacuaggcauuauuuacauacucu

SEQ ID NO: 109457 - RNA, 18 nt, Artificial Sequence
  Synthetic
ucccaucucuccaccucu

SEQ ID NO: 109458 - RNA, 19 nt, Artificial Sequence
  Synthetic
cucccaucucuccaccucu

SEQ ID NO: 109459 - RNA, 20 nt, Artificial Sequence
  Synthetic
acucccaucucuccaccucu

SEQ ID NO: 109460 - RNA, 21 nt, Artificial Sequence
  Synthetic
uacucccaucucuccaccucu

SEQ ID NO: 109461 - RNA, 22 nt, Artificial Sequence
  Synthetic
cuacucccaucucuccaccucu

SEQ ID NO: 109462 - RNA, 23 nt, Artificial Sequence
  Synthetic
ccuacucccaucucuccaccucu

SEQ ID NO: 109463 - RNA, 24 nt, Artificial Sequence
  Synthetic
gccuacucccaucucuccaccucu

SEQ ID NO: 109464 - RNA, 18 nt, Artificial Sequence
  Synthetic
acaacucuguuguccucu

SEQ ID NO: 109465 - RNA, 19 nt, Artificial Sequence
  Synthetic
gacaacucuguuguccucu

SEQ ID NO: 109466 - RNA, 20 nt, Artificial Sequence
  Synthetic
  misc_feature (1)..(1): n is a, c, g, or u
ngacaacucuguuguccucu

SEQ ID NO: 109467 - RNA, 21 nt, Artificial Sequence
  Synthetic
  misc_feature (2)..(2): n is a, c, g, or u
cngacaacucuguuguccucu

SEQ ID NO: 109468 - RNA, 22 nt, Artificial Sequence
  Synthetic
  misc_feature (3)..(3): n is a, c, g, or u
acngacaacucuguuguccucu

SEQ ID NO: 109469 - RNA, 23 nt, Artificial Sequence
  Synthetic
  misc_feature (1)..(1): n is a, c, g, or u
  misc_feature (4)..(4): n is a, c, g, or u
nacngacaacucuguuguccucu

SEQ ID NO: 109470 - RNA, 24 nt, Artificial Sequence
  Synthetic
  misc_feature (2)..(2): n is a, c, g, or u
  misc_feature (5)..(5): n is a, c, g, or u
gnacngacaacucuguuguccucu

SEQ ID NO: 109471 - RNA, 18 nt, Artificial Sequence
  Synthetic
  misc_feature (1)..(1): n is a, c, g, or u
nacauuccaccaagcucu

SEQ ID NO: 109472 - RNA, 19 nt, Artificial Sequence
  Synthetic
  misc_feature (1)..(2): n is a, c, g, or u
nnacauuccaccaagcucu

SEQ ID NO: 109473 - RNA, 20 nt, Artificial Sequence
  Synthetic
  misc_feature (2)..(3): n is a, c, g, or u
annacauuccaccaagcucu

SEQ ID NO: 109474 - RNA, 21 nt, Artificial Sequence
  Synthetic
  misc_feature (3)..(4): n is a, c, g, or u
cannacauuccaccaagcucu

SEQ ID NO: 109475 - RNA, 22 nt, Artificial Sequence
  Synthetic
  misc_feature (4)..(5): n is a, c, g, or u
ccannacauuccaccaagcucu

SEQ ID NO: 109476 - RNA, 23 nt, Artificial Sequence
  Synthetic
  misc_feature (5)..(6): n is a, c, g, or u
uccannacauuccaccaagcucu

SEQ ID NO: 109477 - RNA, 24 nt, Artificial Sequence
  Synthetic
  misc_feature (6)..(7): n is a, c, g, or u
cuccannacauuccaccaagcucu

SEQ ID NO: 109478 - RNA, 18 nt, Artificial Sequence
  Synthetic
aacucuguuguccucucu

SEQ ID NO: 109479 - RNA, 19 nt, Artificial Sequence
  Synthetic
caacucuguuguccucucu

SEQ ID NO: 109480 - RNA, 20 nt, Artificial Sequence
  Synthetic
acaacucuguuguccucucu

SEQ ID NO: 109481 - RNA, 21 nt, Artificial Sequence
  Synthetic
gacaacucuguuguccucucu

SEQ ID NO: 109482 - RNA, 22 nt, Artificial Sequence
  Synthetic
  misc_feature (1)..(1): n is a, c, g, or u
ngacaacucuguuguccucucu

SEQ ID NO: 109483 - RNA, 23 nt, Artificial Sequence
  Synthetic
  misc_feature (2)..(2): n is a, c, g, or u
cngacaacucuguuguccucucu

SEQ ID NO: 109484 - RNA, 24 nt, Artificial Sequence
  Synthetic
  misc_feature (3)..(3): n is a, c, g, or u
acngacaacucuguuguccucucu

SEQ ID NO: 109485 - RNA, 18 nt, Artificial Sequence
  Synthetic
cgggaggccuuagagucu

SEQ ID NO: 109486 - RNA, 19 nt, Artificial Sequence
  Synthetic
ucgggaggccuuagagucu

SEQ ID NO: 109487 - RNA, 20 nt, Artificial Sequence
  Synthetic
aucgggaggccuuagagucu

SEQ ID NO: 109488 - RNA, 21 nt, Artificial Sequence
  Synthetic
uaucgggaggccuuagagucu

SEQ ID NO: 109489 - RNA, 22 nt, Artificial Sequence
  Synthetic
guaucgggaggccuuagagucu

SEQ ID NO: 109490 - RNA, 23 nt, Artificial Sequence
  Synthetic
uguaucgggaggccuuagagucu

SEQ ID NO: 109491 - RNA, 24 nt, Artificial Sequence
  Synthetic
cuguaucgggaggccuuagagucu

SEQ ID NO: 109492 - RNA, 18 nt, Artificial Sequence
  Synthetic
cccgcggacgacccgucu

SEQ ID NO: 109493 - RNA, 19 nt, Artificial Sequence
  Synthetic
ucccgcggacgacccgucu

SEQ ID NO: 109494 - RNA, 20 nt, Artificial Sequence
  Synthetic
aucccgcggacgacccgucu

SEQ ID NO: 109495 - RNA, 18 nt, Artificial Sequence
  Synthetic
  misc_feature (4)..(4): n is a, c, g, or u
ucanagaauugugggucu

SEQ ID NO: 109496 - RNA, 19 nt, Artificial Sequence
  Synthetic
  misc_feature (5)..(5): n is a, c, g, or u
gucanagaauugugggucu

SEQ ID NO: 109497 - RNA, 20 nt, Artificial Sequence
  Synthetic
  misc_feature (6)..(6): n is a, c, g, or u
ugucanagaauugugggucu

SEQ ID NO: 109498 - RNA, 21 nt, Artificial Sequence
  Synthetic
  misc_feature (7)..(7): n is a, c, g, or u
augucanagaauugugggucu

SEQ ID NO: 109499 - RNA, 22 nt, Artificial Sequence
  Synthetic
  misc_feature (8)..(8): n is a, c, g, or u
uaugucanagaauugugggucu

SEQ ID NO: 109500 - RNA, 23 nt, Artificial Sequence
  Synthetic
  misc_feature (9)..(9): n is a, c, g, or u
guaugucanagaauugugggucu

SEQ ID NO: 109501 - RNA, 24 nt, Artificial Sequence
  Synthetic
  misc_feature (10)..(10): n is a, c, g, or u
aguaugucanagaauugugggucu

SEQ ID NO: 109502 - RNA, 18 nt, Artificial Sequence
  Synthetic
agcaugggagguuggucu

SEQ ID NO: 109503 - RNA, 19 nt, Artificial Sequence
  Synthetic
cagcaugggagguuggucu

SEQ ID NO: 109504 - RNA, 20 nt, Artificial Sequence
  Synthetic
acagcaugggagguuggucu

SEQ ID NO: 109505 - RNA, 21 nt, Artificial Sequence
  Synthetic
uacagcaugggagguuggucu

SEQ ID NO: 109506 - RNA, 22 nt, Artificial Sequence
  Synthetic
cuacagcaugggagguuggucu

SEQ ID NO: 109507 - RNA, 23 nt, Artificial Sequence
  Synthetic
gcuacagcaugggagguuggucu

SEQ ID NO: 109508 - RNA, 24 nt, Artificial Sequence
  Synthetic
agcuacagcaugggagguuggucu

SEQ ID NO: 109509 - RNA, 18 nt, Artificial Sequence
  Synthetic
  misc_feature (1)..(1): n is a, c, g, or u
  misc_feature (14)..(14): n is a, c, g, or u
nccaccacacggcngucu

SEQ ID NO: 109510 - RNA, 19 nt, Artificial Sequence
  Synthetic
  misc_feature (2)..(2): n is a, c, g, or u
  misc_feature (15)..(15): n is a, c, g, or u
cnccaccacacggcngucu

SEQ ID NO: 109511 - RNA, 20 nt, Artificial Sequence
  Synthetic
  misc_feature (3)..(3): n is a, c, g, or u
  misc_feature (16)..(16): n is a, c, g, or u
acnccaccacacggcngucu

SEQ ID NO: 109512 - RNA, 21 nt, Artificial Sequence
  Synthetic
  misc_feature (4)..(4): n is a, c, g, or u
  misc_feature (17)..(17): n is a, c, g, or u
cacnccaccacacggcngucu

SEQ ID NO: 109513 - RNA, 22 nt, Artificial Sequence
  Synthetic
  misc_feature (5)..(5): n is a, c, g, or u
  misc_feature (18)..(18): n is a, c, g, or u
ucacnccaccacacggcngucu

SEQ ID NO: 109514 - RNA, 23 nt, Artificial Sequence
  Synthetic
  misc_feature (6)..(6): n is a, c, g, or u
  misc_feature (19)..(19): n is a, c, g, or u
uucacnccaccacacggcngucu

SEQ ID NO: 109515 - RNA, 24 nt, Artificial Sequence
  Synthetic
  misc_feature (7)..(7): n is a, c, g, or u
  misc_feature (20)..(20): n is a, c, g, or u
guucacnccaccacacggcngucu

SEQ ID NO: 109516 - RNA, 18 nt, Artificial Sequence
  Synthetic
cuugaguauuuggugucu

SEQ ID NO: 109517 - RNA, 19 nt, Artificial Sequence
  Synthetic
ucuugaguauuuggugucu

SEQ ID NO: 109518 - RNA, 20 nt, Artificial Sequence
  Synthetic
uucuugaguauuuggugucu

SEQ ID NO: 109519 - RNA, 21 nt, Artificial Sequence
  Synthetic
guucuugaguauuuggugucu

SEQ ID NO: 109520 - RNA, 22 nt, Artificial Sequence
  Synthetic
uguucuugaguauuuggugucu

SEQ ID NO: 109521 - RNA, 23 nt, Artificial Sequence
  Synthetic
cuguucuugaguauuuggugucu

SEQ ID NO: 109522 - RNA, 24 nt, Artificial Sequence
  Synthetic
acuguucuugaguauuuggugucu

SEQ ID NO: 109523 - RNA, 18 nt, Artificial Sequence
  Synthetic
ugugggucaccauauucu

SEQ ID NO: 109524 - RNA, 19 nt, Artificial Sequence
  Synthetic
uugugggucaccauauucu

SEQ ID NO: 109525 - RNA, 20 nt, Artificial Sequence
  Synthetic
uuugugggucaccauauucu

SEQ ID NO: 109526 - RNA, 21 nt, Artificial Sequence
  Synthetic
uuuugugggucaccauauucu

SEQ ID NO: 109527 - RNA, 22 nt, Artificial Sequence
  Synthetic
auuuugugggucaccauauucu

SEQ ID NO: 109528 - RNA, 23 nt, Artificial Sequence
  Synthetic
cauuuugugggucaccauauucu

SEQ ID NO: 109529 - RNA, 24 nt, Artificial Sequence
  Synthetic
ucauuuugugggucaccauauucu

SEQ ID NO: 109530 - RNA, 18 nt, Artificial Sequence
  Synthetic
aaagaauuuggagcuucu

SEQ ID NO: 109531 - RNA, 19 nt, Artificial Sequence
  Synthetic
uaaagaauuuggagcuucu

SEQ ID NO: 109532 - RNA, 20 nt, Artificial Sequence
  Synthetic
auaaagaauuuggagcuucu

SEQ ID NO: 109533 - RNA, 21 nt, Artificial Sequence
  Synthetic
uauaaagaauuuggagcuucu

SEQ ID NO: 109534 - RNA, 22 nt, Artificial Sequence
  Synthetic
  misc_feature (1)..(1): n is a, c, g, or u
nuauaaagaauuuggagcuucu

SEQ ID NO: 109535 - RNA, 23 nt, Artificial Sequence
  Synthetic
  misc_feature (2)..(2): n is a, c, g, or u
cnuauaaagaauuuggagcuucu

SEQ ID NO: 109536 - RNA, 24 nt, Artificial Sequence
  Synthetic
  misc_feature (3)..(3): n is a, c, g, or u
ccnuauaaagaauuuggagcuucu

SEQ ID NO: 109537 - RNA, 18 nt, Artificial Sequence
  Synthetic
ccauaucgucaaucuucu

SEQ ID NO: 109538 - RNA, 19 nt, Artificial Sequence
  Synthetic
cccauaucgucaaucuucu

SEQ ID NO: 109539 - RNA, 20 nt, Artificial Sequence
  Synthetic
  misc_feature (1)..(1): n is a, c, g, or u
ncccauaucgucaaucuucu

SEQ ID NO: 109540 - RNA, 21 nt, Artificial Sequence
  Synthetic
  misc_feature (2)..(2): n is a, c, g, or u
cncccauaucgucaaucuucu

SEQ ID NO: 109541 - RNA, 22 nt, Artificial Sequence
  Synthetic
  misc_feature (3)..(3): n is a, c, g, or u
ucncccauaucgucaaucuucu

SEQ ID NO: 109542 - RNA, 23 nt, Artificial Sequence
  Synthetic
  misc_feature (4)..(4): n is a, c, g, or u
cucncccauaucgucaaucuucu

SEQ ID NO: 109543 - RNA, 24 nt, Artificial Sequence
  Synthetic
  misc_feature (5)..(5): n is a, c, g, or u
ccucncccauaucgucaaucuucu

SEQ ID NO: 109544 - RNA, 18 nt, Artificial Sequence
  Synthetic
caucuucuuguugguucu

SEQ ID NO: 109545 - RNA, 19 nt, Artificial Sequence
  Synthetic
ucaucuucuuguugguucu

SEQ ID NO: 109546 - RNA, 20 nt, Artificial Sequence
  Synthetic
cucaucuucuuguugguucu

SEQ ID NO: 109547 - RNA, 21 nt, Artificial Sequence
  Synthetic
ccucaucuucuuguugguucu

SEQ ID NO: 109548 - RNA, 22 nt, Artificial Sequence
  Synthetic
gccucaucuucuuguugguucu

SEQ ID NO: 109549 - RNA, 23 nt, Artificial Sequence
  Synthetic
ugccucaucuucuuguugguucu

SEQ ID NO: 109550 - RNA, 24 nt, Artificial Sequence
  Synthetic
augccucaucuucuuguugguucu

SEQ ID NO: 109551 - RNA, 18 nt, Artificial Sequence
  Synthetic
gggccucaguccguuucu

SEQ ID NO: 109552 - RNA, 19 nt, Artificial Sequence
  Synthetic
ugggccucaguccguuucu

SEQ ID NO: 109553 - RNA, 20 nt, Artificial Sequence
  Synthetic
gugggccucaguccguuucu

SEQ ID NO: 109554 - RNA, 21 nt, Artificial Sequence
  Synthetic
agugggccucaguccguuucu

SEQ ID NO: 109555 - RNA, 22 nt, Artificial Sequence
  Synthetic
gagugggccucaguccguuucu

SEQ ID NO: 109556 - RNA, 23 nt, Artificial Sequence
  Synthetic
ggagugggccucaguccguuucu

SEQ ID NO: 109557 - RNA, 24 nt, Artificial Sequence
  Synthetic
gggagugggccucaguccguuucu

SEQ ID NO: 109558 - RNA, 18 nt, Artificial Sequence
  Synthetic
gacuucucucaauuuucu

SEQ ID NO: 109559 - RNA, 19 nt, Artificial Sequence
  Synthetic
ggacuucucucaauuuucu

SEQ ID NO: 109560 - RNA, 20 nt, Artificial Sequence
  Synthetic
uggacuucucucaauuuucu

SEQ ID NO: 109561 - RNA, 21 nt, Artificial Sequence
  Synthetic
guggacuucucucaauuuucu

SEQ ID NO: 109562 - RNA, 22 nt, Artificial Sequence
  Synthetic
gguggacuucucucaauuuucu

SEQ ID NO: 109563 - RNA, 23 nt, Artificial Sequence
  Synthetic
ugguggacuucucucaauuuucu

SEQ ID NO: 109564 - RNA, 24 nt, Artificial Sequence
  Synthetic
gugguggacuucucucaauuuucu

SEQ ID NO: 109565 - RNA, 18 nt, Artificial Sequence
  Synthetic
gggcauauugacaacagu

SEQ ID NO: 109566 - RNA, 19 nt, Artificial Sequence
  Synthetic
agggcauauugacaacagu

SEQ ID NO: 109567 - RNA, 20 nt, Artificial Sequence
  Synthetic
cagggcauauugacaacagu

SEQ ID NO: 109568 - RNA, 21 nt, Artificial Sequence
  Synthetic
ucagggcauauugacaacagu

SEQ ID NO: 109569 - RNA, 22 nt, Artificial Sequence
  Synthetic
cucagggcauauugacaacagu

SEQ ID NO: 109570 - RNA, 23 nt, Artificial Sequence
  Synthetic
gcucagggcauauugacaacagu

SEQ ID NO: 109571 - RNA, 24 nt, Artificial Sequence
  Synthetic
ggcucagggcauauugacaacagu

SEQ ID NO: 109572 - RNA, 18 nt, Artificial Sequence
  Synthetic
ccugcugguggcuccagu

SEQ ID NO: 109573 - RNA, 19 nt, Artificial Sequence
  Synthetic
uccugcugguggcuccagu

SEQ ID NO: 109574 - RNA, 20 nt, Artificial Sequence
  Synthetic
uuccugcugguggcuccagu

SEQ ID NO: 109575 - RNA, 21 nt, Artificial Sequence
  Synthetic
uuuccugcugguggcuccagu

SEQ ID NO: 109576 - RNA, 22 nt, Artificial Sequence
  Synthetic
  misc_feature (1)..(1): n is a, c, g, or u
nuuuccugcugguggcuccagu

SEQ ID NO: 109577 - RNA, 23 nt, Artificial Sequence
  Synthetic
  misc_feature (2)..(2): n is a, c, g, or u
anuuuccugcugguggcuccagu

SEQ ID NO: 109578 - RNA, 24 nt, Artificial Sequence
  Synthetic
  misc_feature (3)..(3): n is a, c, g, or u
uanuuuccugcugguggcuccagu

SEQ ID NO: 109579 - RNA, 18 nt, Artificial Sequence
  Synthetic
ccuccaccaaucggcagu

SEQ ID NO: 109580 - RNA, 19 nt, Artificial Sequence
  Synthetic
gccuccaccaaucggcagu

SEQ ID NO: 109581 - RNA, 20 nt, Artificial Sequence
  Synthetic
ugccuccaccaaucggcagu

SEQ ID NO: 109582 - RNA, 21 nt, Artificial Sequence
  Synthetic
cugccuccaccaaucggcagu

SEQ ID NO: 109583 - RNA, 22 nt, Artificial Sequence
  Synthetic
ccugccuccaccaaucggcagu

SEQ ID NO: 109584 - RNA, 23 nt, Artificial Sequence
  Synthetic
uccugccuccaccaaucggcagu

SEQ ID NO: 109585 - RNA, 24 nt, Artificial Sequence
  Synthetic
cuccugccuccaccaaucggcagu

SEQ ID NO: 109586 - RNA, 18 nt, Artificial Sequence
  Synthetic
auccucaggccaugcagu

SEQ ID NO: 109587 - RNA, 19 nt, Artificial Sequence
  Synthetic
cauccucaggccaugcagu

SEQ ID NO: 109588 - RNA, 20 nt, Artificial Sequence
  Synthetic
ucauccucaggccaugcagu

SEQ ID NO: 109589 - RNA, 21 nt, Artificial Sequence
  Synthetic
gucauccucaggccaugcagu

SEQ ID NO: 109590 - RNA, 22 nt, Artificial Sequence
  Synthetic
agucauccucaggccaugcagu

SEQ ID NO: 109591 - RNA, 23 nt, Artificial Sequence
  Synthetic
cagucauccucaggccaugcagu

SEQ ID NO: 109592 - RNA, 24 nt, Artificial Sequence
  Synthetic
acagucauccucaggccaugcagu

SEQ ID NO: 109593 - RNA, 18 nt, Artificial Sequence
  Synthetic
cucacaauaccacagagu

SEQ ID NO: 109594 - RNA, 19 nt, Artificial Sequence
  Synthetic
ccucacaauaccacagagu

SEQ ID NO: 109595 - RNA, 20 nt, Artificial Sequence
  Synthetic
uccucacaauaccacagagu

SEQ ID NO: 109596 - RNA, 21 nt, Artificial Sequence
  Synthetic
auccucacaauaccacagagu

SEQ ID NO: 109597 - RNA, 22 nt, Artificial Sequence
  Synthetic
aauccucacaauaccacagagu

SEQ ID NO: 109598 - RNA, 23 nt, Artificial Sequence
  Synthetic
gaauccucacaauaccacagagu

SEQ ID NO: 109599 - RNA, 24 nt, Artificial Sequence
  Synthetic
agaauccucacaauaccacagagu

SEQ ID NO: 109600 - RNA, 18 nt, Artificial Sequence
  Synthetic
  misc_feature (10)..(10): n is a, c, g, or u
ucugcuagancccagagu

SEQ ID NO: 109601 - RNA, 19 nt, Artificial Sequence
  Synthetic
  misc_feature (11)..(11): n is a, c, g, or u
cucugcuagancccagagu

SEQ ID NO: 109602 - RNA, 20 nt, Artificial Sequence
  Synthetic
  misc_feature (12)..(12): n is a, c, g, or u
gcucugcuagancccagagu

SEQ ID NO: 109603 - RNA, 21 nt, Artificial Sequence
  Synthetic
  misc_feature (13)..(13): n is a, c, g, or u
agcucugcuagancccagagu

SEQ ID NO: 109604 - RNA, 22 nt, Artificial Sequence
  Synthetic
  misc_feature (14)..(14): n is a, c, g, or u
aagcucugcuagancccagagu

SEQ ID NO: 109605 - RNA, 23 nt, Artificial Sequence
  Synthetic
  misc_feature (15)..(15): n is a, c, g, or u
caagcucugcuagancccagagu

SEQ ID NO: 109606 - RNA, 24 nt, Artificial Sequence
  Synthetic
  misc_feature (16)..(16): n is a, c, g, or u
ccaagcucugcuagancccagagu

SEQ ID NO: 109607 - RNA, 18 nt, Artificial Sequence
  Synthetic
  misc_feature (5)..(5): n is a, c, g, or u
uuaangacugggaggagu

SEQ ID NO: 109608 - RNA, 19 nt, Artificial Sequence
  Synthetic
  misc_feature (6)..(6): n is a, c, g, or u
uuuaangacugggaggagu

SEQ ID NO: 109609 - RNA, 20 nt, Artificial Sequence
  Synthetic
  misc_feature (1)..(1): n is a, c, g, or u
  misc_feature (7)..(7): n is a, c, g, or u
nuuuaangacugggaggagu

SEQ ID NO: 109610 - RNA, 21 nt, Artificial Sequence
  Synthetic
  misc_feature (2)..(2): n is a, c, g, or u
  misc_feature (8)..(8): n is a, c, g, or u
unuuuaangacugggaggagu

SEQ ID NO: 109611 - RNA, 22 nt, Artificial Sequence
  Synthetic
  misc_feature (1)..(1): n is a, c, g, or u
  misc_feature (3)..(3): n is a, c, g, or u
  misc_feature (9)..(9): n is a, c, g, or u
nunuuuaangacugggaggagu

SEQ ID NO: 109612 - RNA, 23 nt, Artificial Sequence
  Synthetic
  misc_feature (2)..(2): n is a, c, g, or u
  misc_feature (4)..(4): n is a, c, g, or u
  misc_feature (10)..(10): n is a, c, g, or u
ununuuuaangacugggaggagu

SEQ ID NO: 109613 - RNA, 24 nt, Artificial Sequence
  Synthetic
  misc_feature (3)..(3): n is a, c, g, or u
  misc_feature (5)..(5): n is a, c, g, or u
  misc_feature (11)..(11): n is a, c, g, or u
gununuuuaangacugggaggagu

SEQ ID NO: 109614 - RNA, 18 nt, Artificial Sequence
  Synthetic
ccuaauaaaaccaaacgu

SEQ ID NO: 109615 - RNA, 19 nt, Artificial Sequence
  Synthetic
cccuaauaaaaccaaacgu

SEQ ID NO: 109616 - RNA, 20 nt, Artificial Sequence
  Synthetic
acccuaauaaaaccaaacgu

SEQ ID NO: 109617 - RNA, 21 nt, Artificial Sequence
  Synthetic
aacccuaauaaaaccaaacgu

SEQ ID NO: 109618 - RNA, 22 nt, Artificial Sequence
  Synthetic
  misc_feature (1)..(1): n is a, c, g, or u
naacccuaauaaaaccaaacgu

SEQ ID NO: 109619 - RNA, 23 nt, Artificial Sequence
  Synthetic
  misc_feature (2)..(2): n is a, c, g, or u
unaacccuaauaaaaccaaacgu

SEQ ID NO: 109620 - RNA, 24 nt, Artificial Sequence
  Synthetic
  misc_feature (3)..(3): n is a, c, g, or u
uunaacccuaauaaaaccaaacgu

SEQ ID NO: 109621 - RNA, 18 nt, Artificial Sequence
  Synthetic
aucccgcggacgacccgu

SEQ ID NO: 109622 - RNA, 19 nt, Artificial Sequence
  Synthetic
aaucccgcggacgacccgu

SEQ ID NO: 109623 - RNA, 20 nt, Artificial Sequence
  Synthetic
gaaucccgcggacgacccgu

SEQ ID NO: 109624 - RNA, 18 nt, Artificial Sequence
  Synthetic
gacccgucucggggccgu

SEQ ID NO: 109625 - RNA, 19 nt, Artificial Sequence
  Synthetic
cgacccgucucggggccgu

SEQ ID NO: 109626 - RNA, 20 nt, Artificial Sequence
  Synthetic
acgacccgucucggggccgu

SEQ ID NO: 109627 - RNA, 18 nt, Artificial Sequence
  Synthetic
  misc_feature (8)..(8): n is a, c, g, or u
  misc_feature (10)..(10): n is a, c, g, or u
cccuucuncnucugccgu

SEQ ID NO: 109628 - RNA, 19 nt, Artificial Sequence
  Synthetic
  misc_feature (9)..(9): n is a, c, g, or u
  misc_feature (11)..(11): n is a, c, g, or u
ccccuucuncnucugccgu

SEQ ID NO: 109629 - RNA, 20 nt, Artificial Sequence
  Synthetic
  misc_feature (10)..(10): n is a, c, g, or u
  misc_feature (12)..(12): n is a, c, g, or u
uccccuucuncnucugccgu

SEQ ID NO: 109630 - RNA, 21 nt, Artificial Sequence
  Synthetic
  misc_feature (11)..(11): n is a, c, g, or u
  misc_feature (13)..(13): n is a, c, g, or u
guccccuucuncnucugccgu

SEQ ID NO: 109631 - RNA, 22 nt, Artificial Sequence
  Synthetic
  misc_feature (12)..(12): n is a, c, g, or u
  misc_feature (14)..(14): n is a, c, g, or u
cguccccuucuncnucugccgu

SEQ ID NO: 109632 - RNA, 23 nt, Artificial Sequence
  Synthetic
  misc_feature (13)..(13): n is a, c, g, or u
  misc_feature (15)..(15): n is a, c, g, or u
ccguccccuucuncnucugccgu

SEQ ID NO: 109633 - RNA, 24 nt, Artificial Sequence
  Synthetic
  misc_feature (14)..(14): n is a, c, g, or u
  misc_feature (16)..(16): n is a, c, g, or u
accguccccuucuncnucugccgu

SEQ ID NO: 109634 - RNA, 18 nt, Artificial Sequence
  Synthetic
aggucucaaucgccgcgu

SEQ ID NO: 109635 - RNA, 19 nt, Artificial Sequence
  Synthetic
aaggucucaaucgccgcgu

SEQ ID NO: 109636 - RNA, 20 nt, Artificial Sequence
  Synthetic
gaaggucucaaucgccgcgu

SEQ ID NO: 109637 - RNA, 18 nt, Artificial Sequence
  Synthetic
cacagagucuagacucgu

SEQ ID NO: 109638 - RNA, 19 nt, Artificial Sequence
  Synthetic
ccacagagucuagacucgu

SEQ ID NO: 109639 - RNA, 20 nt, Artificial Sequence
  Synthetic
accacagagucuagacucgu

SEQ ID NO: 109640 - RNA, 21 nt, Artificial Sequence
  Synthetic
uaccacagagucuagacucgu

SEQ ID NO: 109641 - RNA, 22 nt, Artificial Sequence
  Synthetic
auaccacagagucuagacucgu

SEQ ID NO: 109642 - RNA, 23 nt, Artificial Sequence
  Synthetic
aauaccacagagucuagacucgu

SEQ ID NO: 109643 - RNA, 24 nt, Artificial Sequence
  Synthetic
caauaccacagagucuagacucgu

SEQ ID NO: 109644 - RNA, 18 nt, Artificial Sequence
  Synthetic
cccuuggacucauaaggu

SEQ ID NO: 109645 - RNA, 19 nt, Artificial Sequence
  Synthetic
ucccuuggacucauaaggu

SEQ ID NO: 109646 - RNA, 20 nt, Artificial Sequence
  Synthetic
aucccuuggacucauaaggu

SEQ ID NO: 109647 - RNA, 21 nt, Artificial Sequence
  Synthetic
uaucccuuggacucauaaggu

SEQ ID NO: 109648 - RNA, 22 nt, Artificial Sequence
  Synthetic
guaucccuuggacucauaaggu

SEQ ID NO: 109649 - RNA, 23 nt, Artificial Sequence
  Synthetic
aguaucccuuggacucauaaggu

SEQ ID NO: 109650 - RNA, 24 nt, Artificial Sequence
  Synthetic
uaguaucccuuggacucauaaggu

SEQ ID NO: 109651 - RNA, 18 nt, Artificial Sequence
  Synthetic
  misc_feature (6)..(6): n is a, c, g, or u
  misc_feature (13)..(13): n is a, c, g, or u
gccagnggcaaancaggu

SEQ ID NO: 109652 - RNA, 19 nt, Artificial Sequence
  Synthetic
  misc_feature (7)..(7): n is a, c, g, or u
  misc_feature (14)..(14): n is a, c, g, or u
ggccagnggcaaancaggu

SEQ ID NO: 109653 - RNA, 20 nt, Artificial Sequence
  Synthetic
  misc_feature (8)..(8): n is a, c, g, or u
  misc_feature (15)..(15): n is a, c, g, or u
uggccagnggcaaancaggu

SEQ ID NO: 109654 - RNA, 21 nt, Artificial Sequence
  Synthetic
  misc_feature (1)..(1): n is a, c, g, or u
  misc_feature (9)..(9): n is a, c, g, or u
  misc_feature (16)..(16): n is a, c, g, or u
nuggccagnggcaaancaggu

SEQ ID NO: 109655 - RNA, 22 nt, Artificial Sequence
  Synthetic
  misc_feature (2)..(2): n is a, c, g, or u
  misc_feature (10)..(10): n is a, c, g, or u
  misc_feature (17)..(17): n is a, c, g, or u
anuggccagnggcaaancaggu

SEQ ID NO: 109656 - RNA, 23 nt, Artificial Sequence
  Synthetic
  misc_feature (3)..(3): n is a, c, g, or u
  misc_feature (11)..(11): n is a, c, g, or u
  misc_feature (18)..(18): n is a, c, g, or u
canuggccagnggcaaancaggu

SEQ ID NO: 109657 - RNA, 24 nt, Artificial Sequence
  Synthetic
  misc_feature (4)..(4): n is a, c, g, or u
  misc_feature (12)..(12): n is a, c, g, or u
  misc_feature (19)..(19): n is a, c, g, or u
ucanuggccagnggcaaancaggu

SEQ ID NO: 109658 - RNA, 18 nt, Artificial Sequence
  Synthetic
guuuugcucgcagccggu

SEQ ID NO: 109659 - RNA, 19 nt, Artificial Sequence
  Synthetic
uguuuugcucgcagccggu

SEQ ID NO: 109660 - RNA, 20 nt, Artificial Sequence
  Synthetic
uuguuuugcucgcagccggu

SEQ ID NO: 109661 - RNA, 21 nt, Artificial Sequence
  Synthetic
cuuguuuugcucgcagccggu

SEQ ID NO: 109662 - RNA, 22 nt, Artificial Sequence
  Synthetic
gcuuguuuugcucgcagccggu

SEQ ID NO: 109663 - RNA, 23 nt, Artificial Sequence
  Synthetic
agcuuguuuugcucgcagccggu

SEQ ID NO: 109664 - RNA, 24 nt, Artificial Sequence
  Synthetic
cagcuuguuuugcucgcagccggu

SEQ ID NO: 109665 - RNA, 18 nt, Artificial Sequence
  Synthetic
gaaucuggccaccugggu

SEQ ID NO: 109666 - RNA, 19 nt, Artificial Sequence
  Synthetic
ugaaucuggccaccugggu

SEQ ID NO: 109667 - RNA, 20 nt, Artificial Sequence
  Synthetic
augaaucuggccaccugggu

SEQ ID NO: 109668 - RNA, 21 nt, Artificial Sequence
  Synthetic
gaugaaucuggccaccugggu

SEQ ID NO: 109669 - RNA, 22 nt, Artificial Sequence
  Synthetic
ugaugaaucuggccaccugggu

SEQ ID NO: 109670 - RNA, 23 nt, Artificial Sequence
  Synthetic
uugaugaaucuggccaccugggu

SEQ ID NO: 109671 - RNA, 24 nt, Artificial Sequence
  Synthetic
guugaugaaucuggccaccugggu

SEQ ID NO: 109672 - RNA, 18 nt, Artificial Sequence
  Synthetic
uuauauggaugauguggu

SEQ ID NO: 109673 - RNA, 19 nt, Artificial Sequence
  Synthetic
guuauauggaugauguggu

SEQ ID NO: 109674 - RNA, 20 nt, Artificial Sequence
  Synthetic
aguuauauggaugauguggu

SEQ ID NO: 109675 - RNA, 21 nt, Artificial Sequence
  Synthetic
caguuauauggaugauguggu

SEQ ID NO: 109676 - RNA, 22 nt, Artificial Sequence
  Synthetic
ucaguuauauggaugauguggu

SEQ ID NO: 109677 - RNA, 23 nt, Artificial Sequence
  Synthetic
uucaguuauauggaugauguggu

SEQ ID NO: 109678 - RNA, 24 nt, Artificial Sequence
  Synthetic
uuucaguuauauggaugauguggu

SEQ ID NO: 109679 - RNA, 18 nt, Artificial Sequence
  Synthetic
auugauuggaaaguaugu

SEQ ID NO: 109680 - RNA, 19 nt, Artificial Sequence
  Synthetic
uauugauuggaaaguaugu

SEQ ID NO: 109681 - RNA, 20 nt, Artificial Sequence
  Synthetic
cuauugauuggaaaguaugu

SEQ ID NO: 109682 - RNA, 21 nt, Artificial Sequence
  Synthetic
ccuauugauuggaaaguaugu

SEQ ID NO: 109683 - RNA, 22 nt, Artificial Sequence
  Synthetic
accuauugauuggaaaguaugu

SEQ ID NO: 109684 - RNA, 23 nt, Artificial Sequence
  Synthetic
gaccuauugauuggaaaguaugu

SEQ ID NO: 109685 - RNA, 24 nt, Artificial Sequence
  Synthetic
agaccuauugauuggaaaguaugu

SEQ ID NO: 109686 - RNA, 18 nt, Artificial Sequence
  Synthetic
auguucauguccuacugu

SEQ ID NO: 109687 - RNA, 19 nt, Artificial Sequence
  Synthetic
cauguucauguccuacugu

SEQ ID NO: 109688 - RNA, 20 nt, Artificial Sequence
  Synthetic
ucauguucauguccuacugu

SEQ ID NO: 109689 - RNA, 21 nt, Artificial Sequence
  Synthetic
cucauguucauguccuacugu

SEQ ID NO: 109690 - RNA, 22 nt, Artificial Sequence
  Synthetic
ucucauguucauguccuacugu

SEQ ID NO: 109691 - RNA, 23 nt, Artificial Sequence
  Synthetic
aucucauguucauguccuacugu

SEQ ID NO: 109692 - RNA, 24 nt, Artificial Sequence
  Synthetic
caucucauguucauguccuacugu

SEQ ID NO: 109693 - RNA, 18 nt, Artificial Sequence
  Synthetic
cggaacaguaaacccugu

SEQ ID NO: 109694 - RNA, 19 nt, Artificial Sequence
  Synthetic
ccggaacaguaaacccugu

SEQ ID NO: 109695 - RNA, 20 nt, Artificial Sequence
  Synthetic
uccggaacaguaaacccugu

SEQ ID NO: 109696 - RNA, 21 nt, Artificial Sequence
  Synthetic
uuccggaacaguaaacccugu

SEQ ID NO: 109697 - RNA, 22 nt, Artificial Sequence
  Synthetic
guuccggaacaguaaacccugu

SEQ ID NO: 109698 - RNA, 23 nt, Artificial Sequence
  Synthetic
aguuccggaacaguaaacccugu

SEQ ID NO: 109699 - RNA, 24 nt, Artificial Sequence
  Synthetic
caguuccggaacaguaaacccugu

SEQ ID NO: 109700 - RNA, 18 nt, Artificial Sequence
  Synthetic
uuucccucuuguugcugu

SEQ ID NO: 109701 - RNA, 19 nt, Artificial Sequence
  Synthetic
guuucccucuuguugcugu

SEQ ID NO: 109702 - RNA, 20 nt, Artificial Sequence
  Synthetic
uguuucccucuuguugcugu

SEQ ID NO: 109703 - RNA, 21 nt, Artificial Sequence
  Synthetic
auguuucccucuuguugcugu

SEQ ID NO: 109704 - RNA, 22 nt, Artificial Sequence
  Synthetic
uauguuucccucuuguugcugu

SEQ ID NO: 109705 - RNA, 23 nt, Artificial Sequence
  Synthetic
cuauguuucccucuuguugcugu

SEQ ID NO: 109706 - RNA, 24 nt, Artificial Sequence
  Synthetic
ucuauguuucccucuuguugcugu

SEQ ID NO: 109707 - RNA, 18 nt, Artificial Sequence
  Synthetic
auuauuuacauacucugu

SEQ ID NO: 109708 - RNA, 19 nt, Artificial Sequence
  Synthetic
cauuauuuacauacucugu

SEQ ID NO: 109709 - RNA, 20 nt, Artificial Sequence
  Synthetic
gcauuauuuacauacucugu

SEQ ID NO: 109710 - RNA, 21 nt, Artificial Sequence
  Synthetic
ggcauuauuuacauacucugu

SEQ ID NO: 109711 - RNA, 22 nt, Artificial Sequence
  Synthetic
aggcauuauuuacauacucugu

SEQ ID NO: 109712 - RNA, 23 nt, Artificial Sequence
  Synthetic
uaggcauuauuuacauacucugu

SEQ ID NO: 109713 - RNA, 24 nt, Artificial Sequence
  Synthetic
cuaggcauuauuuacauacucugu

SEQ ID NO: 109714 - RNA, 18 nt, Artificial Sequence
  Synthetic
  misc_feature (11)..(11): n is a, c, g, or u
acaccgccucngcucugu

SEQ ID NO: 109715 - RNA, 19 nt, Artificial Sequence
  Synthetic
  misc_feature (12)..(12): n is a, c, g, or u
gacaccgccucngcucugu

SEQ ID NO: 109716 - RNA, 20 nt, Artificial Sequence
  Synthetic
  misc_feature (13)..(13): n is a, c, g, or u
cgacaccgccucngcucugu

SEQ ID NO: 109717 - RNA, 21 nt, Artificial Sequence
  Synthetic
  misc_feature (14)..(14): n is a, c, g, or u
ucgacaccgccucngcucugu

SEQ ID NO: 109718 - RNA, 22 nt, Artificial Sequence
  Synthetic
  misc_feature (15)..(15): n is a, c, g, or u
cucgacaccgccucngcucugu

SEQ ID NO: 109719 - RNA, 23 nt, Artificial Sequence
  Synthetic
  misc_feature (16)..(16): n is a, c, g, or u
ccucgacaccgccucngcucugu

SEQ ID NO: 109720 - RNA, 24 nt, Artificial Sequence
  Synthetic
  misc_feature (17)..(17): n is a, c, g, or u
uccucgacaccgccucngcucugu

SEQ ID NO: 109721 - RNA, 18 nt, Artificial Sequence
  Synthetic
  misc_feature (2)..(2): n is a, c, g, or u
unaggcaagcuauucugu

SEQ ID NO: 109722 - RNA, 19 nt, Artificial Sequence
  Synthetic
  misc_feature (3)..(3): n is a, c, g, or u
cunaggcaagcuauucugu

SEQ ID NO: 109723 - RNA, 20 nt, Artificial Sequence
  Synthetic
  misc_feature (4)..(4): n is a, c, g, or u
acunaggcaagcuauucugu

SEQ ID NO: 109724 - RNA, 21 nt, Artificial Sequence
  Synthetic
  misc_feature (5)..(5): n is a, c, g, or u
cacunaggcaagcuauucugu

SEQ ID NO: 109725 - RNA, 22 nt, Artificial Sequence
  Synthetic
  misc_feature (6)..(6): n is a, c, g, or u
gcacunaggcaagcuauucugu

SEQ ID NO: 109726 - RNA, 23 nt, Artificial Sequence
  Synthetic
  misc_feature (7)..(7): n is a, c, g, or u
agcacunaggcaagcuauucugu

SEQ ID NO: 109727 - RNA, 24 nt, Artificial Sequence
  Synthetic
  misc_feature (8)..(8): n is a, c, g, or u
cagcacunaggcaagcuauucugu

SEQ ID NO: 109728 - RNA, 18 nt, Artificial Sequence
  Synthetic
cuuacaaggccuuucugu

SEQ ID NO: 109729 - RNA, 19 nt, Artificial Sequence
  Synthetic
acuuacaaggccuuucugu

SEQ ID NO: 109730 - RNA, 20 nt, Artificial Sequence
  Synthetic
aacuuacaaggccuuucugu

SEQ ID NO: 109731 - RNA, 21 nt, Artificial Sequence
  Synthetic
caacuuacaaggccuuucugu

SEQ ID NO: 109732 - RNA, 22 nt, Artificial Sequence
  Synthetic
ccaacuuacaaggccuuucugu

SEQ ID NO: 109733 - RNA, 23 nt, Artificial Sequence
  Synthetic
gccaacuuacaaggccuuucugu

SEQ ID NO: 109734 - RNA, 24 nt, Artificial Sequence
  Synthetic
cgccaacuuacaaggccuuucugu

SEQ ID NO: 109735 - RNA, 18 nt, Artificial Sequence
  Synthetic
gggggagcacccacgugu

SEQ ID NO: 109736 - RNA, 19 nt, Artificial Sequence
  Synthetic
agggggagcacccacgugu

SEQ ID NO: 109737 - RNA, 20 nt, Artificial Sequence
  Synthetic
uagggggagcacccacgugu

SEQ ID NO: 109738 - RNA, 21 nt, Artificial Sequence
  Synthetic
cuagggggagcacccacgugu

SEQ ID NO: 109739 - RNA, 22 nt, Artificial Sequence
  Synthetic
ucuagggggagcacccacgugu

SEQ ID NO: 109740 - RNA, 23 nt, Artificial Sequence
  Synthetic
uucuagggggagcacccacgugu

SEQ ID NO: 109741 - RNA, 24 nt, Artificial Sequence
  Synthetic
uuucuagggggagcacccacgugu

SEQ ID NO: 109742 - RNA, 18 nt, Artificial Sequence
  Synthetic
uaggaccccugcucgugu

SEQ ID NO: 109743 - RNA, 19 nt, Artificial Sequence
  Synthetic
cuaggaccccugcucgugu

SEQ ID NO: 109744 - RNA, 20 nt, Artificial Sequence
  Synthetic
ccuaggaccccugcucgugu

SEQ ID NO: 109745 - RNA, 21 nt, Artificial Sequence
  Synthetic
uccuaggaccccugcucgugu

SEQ ID NO: 109746 - RNA, 22 nt, Artificial Sequence
  Synthetic
uuccuaggaccccugcucgugu

SEQ ID NO: 109747 - RNA, 23 nt, Artificial Sequence
  Synthetic
auuccuaggaccccugcucgugu

SEQ ID NO: 109748 - RNA, 24 nt, Artificial Sequence
  Synthetic
gauuccuaggaccccugcucgugu

SEQ ID NO: 109749 - RNA, 18 nt, Artificial Sequence
  Synthetic
  misc_feature (14)..(14): n is a, c, g, or u
ucuuguccuccaanuugu

SEQ ID NO: 109750 - RNA, 19 nt, Artificial Sequence
  Synthetic
  misc_feature (15)..(15): n is a, c, g, or u
cucuuguccuccaanuugu

SEQ ID NO: 109751 - RNA, 20 nt, Artificial Sequence
  Synthetic
  misc_feature (16)..(16): n is a, c, g, or u
ccucuuguccuccaanuugu

SEQ ID NO: 109752 - RNA, 21 nt, Artificial Sequence
  Synthetic
  misc_feature (17)..(17): n is a, c, g, or u
accucuuguccuccaanuugu

SEQ ID NO: 109753 - RNA, 22 nt, Artificial Sequence
  Synthetic
  misc_feature (18)..(18): n is a, c, g, or u
aaccucuuguccuccaanuugu

SEQ ID NO: 109754 - RNA, 23 nt, Artificial Sequence
  Synthetic
  misc_feature (19)..(19): n is a, c, g, or u
caaccucuuguccuccaanuugu

SEQ ID NO: 109755 - RNA, 24 nt, Artificial Sequence
  Synthetic
  misc_feature (20)..(20): n is a, c, g, or u
ccaaccucuuguccuccaanuugu

SEQ ID NO: 109756 - RNA, 18 nt, Artificial Sequence
  Synthetic
  misc_feature (17)..(17): n is a, c, g, or u
cugucuuuaauccuganu

SEQ ID NO: 109757 - RNA, 19 nt, Artificial Sequence
  Synthetic
  misc_feature (18)..(18): n is a, c, g, or u
ccugucuuuaauccuganu

SEQ ID NO: 109758 - RNA, 20 nt, Artificial Sequence
  Synthetic
  misc_feature (19)..(19): n is a, c, g, or u
accugucuuuaauccuganu

SEQ ID NO: 109759 - RNA, 21 nt, Artificial Sequence
  Synthetic
  misc_feature (20)..(20): n is a, c, g, or u
uaccugucuuuaauccuganu

SEQ ID NO: 109760 - RNA, 22 nt, Artificial Sequence
  Synthetic
  misc_feature (21)..(21): n is a, c, g, or u
guaccugucuuuaauccuganu

SEQ ID NO: 109761 - RNA, 23 nt, Artificial Sequence
  Synthetic
  misc_feature (22)..(22): n is a, c, g, or u
uguaccugucuuuaauccuganu

SEQ ID NO: 109762 - RNA, 24 nt, Artificial Sequence
  Synthetic
  misc_feature (23)..(23): n is a, c, g, or u
cuguaccugucuuuaauccuganu

SEQ ID NO: 109763 - RNA, 18 nt, Artificial Sequence
  Synthetic
  misc_feature (17)..(17): n is a, c, g, or u
gcauggacauugacccnu

SEQ ID NO: 109764 - RNA, 19 nt, Artificial Sequence
  Synthetic
  misc_feature (18)..(18): n is a, c, g, or u
ggcauggacauugacccnu

SEQ ID NO: 109765 - RNA, 20 nt, Artificial Sequence
  Synthetic
  misc_feature (19)..(19): n is a, c, g, or u
gggcauggacauugacccnu

SEQ ID NO: 109766 - RNA, 21 nt, Artificial Sequence
  Synthetic
  misc_feature (1)..(1): n is a, c, g, or u
  misc_feature (20)..(20): n is a, c, g, or u
ngggcauggacauugacccnu

SEQ ID NO: 109767 - RNA, 22 nt, Artificial Sequence
  Synthetic
  misc_feature (2)..(2): n is a, c, g, or u
  misc_feature (21)..(21): n is a, c, g, or u
ungggcauggacauugacccnu

SEQ ID NO: 109768 - RNA, 23 nt, Artificial Sequence
  Synthetic
  misc_feature (3)..(3): n is a, c, g, or u
  misc_feature (22)..(22): n is a, c, g, or u
uungggcauggacauugacccnu

SEQ ID NO: 109769 - RNA, 24 nt, Artificial Sequence
  Synthetic
  misc_feature (4)..(4): n is a, c, g, or u
  misc_feature (23)..(23): n is a, c, g, or u
uuungggcauggacauugacccnu

SEQ ID NO: 109770 - RNA, 18 nt, Artificial Sequence
  Synthetic
  misc_feature (14)..(14): n is a, c, g, or u
  misc_feature (17)..(17): n is a, c, g, or u
accaguuggacccngcnu

SEQ ID NO: 109771 - RNA, 19 nt, Artificial Sequence
  Synthetic
  misc_feature (15)..(15): n is a, c, g, or u
  misc_feature (18)..(18): n is a, c, g, or u
caccaguuggacccngcnu

SEQ ID NO: 109772 - RNA, 20 nt, Artificial Sequence
  Synthetic
  misc_feature (16)..(16): n is a, c, g, or u
  misc_feature (19)..(19): n is a, c, g, or u
ucaccaguuggacccngcnu

SEQ ID NO: 109773 - RNA, 21 nt, Artificial Sequence
  Synthetic
  misc_feature (17)..(17): n is a, c, g, or u
  misc_feature (20)..(20): n is a, c, g, or u
aucaccaguuggacccngcnu

SEQ ID NO: 109774 - RNA, 22 nt, Artificial Sequence
  Synthetic
  misc_feature (18)..(18): n is a, c, g, or u
  misc_feature (21)..(21): n is a, c, g, or u
gaucaccaguuggacccngcnu

SEQ ID NO: 109775 - RNA, 23 nt, Artificial Sequence
  Synthetic
  misc_feature (19)..(19): n is a, c, g, or u
  misc_feature (22)..(22): n is a, c, g, or u
cgaucaccaguuggacccngcnu

SEQ ID NO: 109776 - RNA, 24 nt, Artificial Sequence
  Synthetic
  misc_feature (20)..(20): n is a, c, g, or u
  misc_feature (23)..(23): n is a, c, g, or u
ccgaucaccaguuggacccngcnu

SEQ ID NO: 109777 - RNA, 18 nt, Artificial Sequence
  Synthetic
  misc_feature (17)..(17): n is a, c, g, or u
ggcaacggucaggucunu

SEQ ID NO: 109778 - RNA, 19 nt, Artificial Sequence
  Synthetic
  misc_feature (18)..(18): n is a, c, g, or u
cggcaacggucaggucunu

SEQ ID NO: 109779 - RNA, 20 nt, Artificial Sequence
  Synthetic
  misc_feature (1)..(1): n is a, c, g, or u
  misc_feature (19)..(19): n is a, c, g, or u
ncggcaacggucaggucunu

SEQ ID NO: 109780 - RNA, 21 nt, Artificial Sequence
  Synthetic
  misc_feature (2)..(2): n is a, c, g, or u
  misc_feature (20)..(20): n is a, c, g, or u
cncggcaacggucaggucunu

SEQ ID NO: 109781 - RNA, 22 nt, Artificial Sequence
  Synthetic
  misc_feature (3)..(3): n is a, c, g, or u
  misc_feature (21)..(21): n is a, c, g, or u
gcncggcaacggucaggucunu

SEQ ID NO: 109782 - RNA, 23 nt, Artificial Sequence
  Synthetic
  misc_feature (4)..(4): n is a, c, g, or u
  misc_feature (22)..(22): n is a, c, g, or u
ugcncggcaacggucaggucunu

SEQ ID NO: 109783 - RNA, 24 nt, Artificial Sequence
  Synthetic
  misc_feature (5)..(5): n is a, c, g, or u
  misc_feature (23)..(23): n is a, c, g, or u
uugcncggcaacggucaggucunu

SEQ ID NO: 109784 - RNA, 18 nt, Artificial Sequence
  Synthetic
  misc_feature (7)..(7): n is a, c, g, or u
ugacccnuauaaagaauu

SEQ ID NO: 109785 - RNA, 19 nt, Artificial Sequence
  Synthetic
  misc_feature (8)..(8): n is a, c, g, or u
uugacccnuauaaagaauu

SEQ ID NO: 109786 - RNA, 20 nt, Artificial Sequence
  Synthetic
  misc_feature (9)..(9): n is a, c, g, or u
auugacccnuauaaagaauu

SEQ ID NO: 109787 - RNA, 21 nt, Artificial Sequence
  Synthetic
  misc_feature (10)..(10): n is a, c, g, or u
cauugacccnuauaaagaauu

SEQ ID NO: 109788 - RNA, 22 nt, Artificial Sequence
  Synthetic
  misc_feature (11)..(11): n is a, c, g, or u
acauugacccnuauaaagaauu

SEQ ID NO: 109789 - RNA, 23 nt, Artificial Sequence
  Synthetic
  misc_feature (12)..(12): n is a, c, g, or u
gacauugacccnuauaaagaauu

SEQ ID NO: 109790 - RNA, 24 nt, Artificial Sequence
  Synthetic
  misc_feature (13)..(13): n is a, c, g, or u
ggacauugacccnuauaaagaauu

SEQ ID NO: 109791 - RNA, 18 nt, Artificial Sequence
  Synthetic
ccugggugggaaguaauu

SEQ ID NO: 109792 - RNA, 19 nt, Artificial Sequence
  Synthetic
accugggugggaaguaauu

SEQ ID NO: 109793 - RNA, 20 nt, Artificial Sequence
  Synthetic
caccugggugggaaguaauu

SEQ ID NO: 109794 - RNA, 21 nt, Artificial Sequence
  Synthetic
ccaccugggugggaaguaauu

SEQ ID NO: 109795 - RNA, 22 nt, Artificial Sequence
  Synthetic
gccaccugggugggaaguaauu

SEQ ID NO: 109796 - RNA, 23 nt, Artificial Sequence
  Synthetic
ggccaccugggugggaaguaauu

SEQ ID NO: 109797 - RNA, 24 nt, Artificial Sequence
  Synthetic
uggccaccugggugggaaguaauu

SEQ ID NO: 109798 - RNA, 18 nt, Artificial Sequence
  Synthetic
  misc_feature (3)..(3): n is a, c, g, or u
  misc_feature (7)..(7): n is a, c, g, or u
gancacnacaucaggauu

SEQ ID NO: 109799 - RNA, 19 nt, Artificial Sequence
  Synthetic
  misc_feature (4)..(4): n is a, c, g, or u
  misc_feature (8)..(8): n is a, c, g, or u
agancacnacaucaggauu

SEQ ID NO: 109800 - RNA, 20 nt, Artificial Sequence
  Synthetic
  misc_feature (5)..(5): n is a, c, g, or u
  misc_feature (9)..(9): n is a, c, g, or u
gagancacnacaucaggauu

SEQ ID NO: 109801 - RNA, 21 nt, Artificial Sequence
  Synthetic
  misc_feature (6)..(6): n is a, c, g, or u
  misc_feature (10)..(10): n is a, c, g, or u
ggagancacnacaucaggauu

SEQ ID NO: 109802 - RNA, 22 nt, Artificial Sequence
  Synthetic
  misc_feature (7)..(7): n is a, c, g, or u
  misc_feature (11)..(11): n is a, c, g, or u
uggagancacnacaucaggauu

SEQ ID NO: 109803 - RNA, 23 nt, Artificial Sequence
  Synthetic
  misc_feature (8)..(8): n is a, c, g, or u
  misc_feature (12)..(12): n is a, c, g, or u
auggagancacnacaucaggauu

SEQ ID NO: 109804 - RNA, 24 nt, Artificial Sequence
  Synthetic
  misc_feature (1)..(1): n is a, c, g, or u
  misc_feature (9)..(9): n is a, c, g, or u
  misc_feature (13)..(13): n is a, c, g, or u
nauggagancacnacaucaggauu

SEQ ID NO: 109805 - RNA, 18 nt, Artificial Sequence
  Synthetic
uaaauagaccuauugauu

SEQ ID NO: 109806 - RNA, 19 nt, Artificial Sequence
  Synthetic
  misc_feature (1)..(1): n is a, c, g, or u
nuaaauagaccuauugauu

SEQ ID NO: 109807 - RNA, 20 nt, Artificial Sequence
  Synthetic
  misc_feature (2)..(2): n is a, c, g, or u
unuaaauagaccuauugauu

SEQ ID NO: 109808 - RNA, 21 nt, Artificial Sequence
  Synthetic
  misc_feature (3)..(3): n is a, c, g, or u
cunuaaauagaccuauugauu

SEQ ID NO: 109809 - RNA, 22 nt, Artificial Sequence
  Synthetic
  misc_feature (4)..(4): n is a, c, g, or u
ccunuaaauagaccuauugauu

SEQ ID NO: 109810 - RNA, 23 nt, Artificial Sequence
  Synthetic
  misc_feature (1)..(1): n is a, c, g, or u
  misc_feature (5)..(5): n is a, c, g, or u
nccunuaaauagaccuauugauu

SEQ ID NO: 109811 - RNA, 24 nt, Artificial Sequence
  Synthetic
  misc_feature (2)..(2): n is a, c, g, or u
  misc_feature (6)..(6): n is a, c, g, or u
unccunuaaauagaccuauugauu

SEQ ID NO: 109812 - RNA, 18 nt, Artificial Sequence
  Synthetic
uuugugggucaccauauu

SEQ ID NO: 109813 - RNA, 19 nt, Artificial Sequence
  Synthetic
uuuugugggucaccauauu

SEQ ID NO: 109814 - RNA, 20 nt, Artificial Sequence
  Synthetic
auuuugugggucaccauauu

SEQ ID NO: 109815 - RNA, 21 nt, Artificial Sequence
  Synthetic
cauuuugugggucaccauauu

SEQ ID NO: 109816 - RNA, 22 nt, Artificial Sequence
  Synthetic
ucauuuugugggucaccauauu

SEQ ID NO: 109817 - RNA, 23 nt, Artificial Sequence
  Synthetic
cucauuuugugggucaccauauu

SEQ ID NO: 109818 - RNA, 24 nt, Artificial Sequence
  Synthetic
ccucauuuugugggucaccauauu

SEQ ID NO: 109819 - RNA, 18 nt, Artificial Sequence
  Synthetic
ucaggcucagggcauauu

SEQ ID NO: 109820 - RNA, 19 nt, Artificial Sequence
  Synthetic
cucaggcucagggcauauu

SEQ ID NO: 109821 - RNA, 20 nt, Artificial Sequence
  Synthetic
ccucaggcucagggcauauu

SEQ ID NO: 109822 - RNA, 21 nt, Artificial Sequence
  Synthetic
cccucaggcucagggcauauu

SEQ ID NO: 109823 - RNA, 22 nt, Artificial Sequence
  Synthetic
gcccucaggcucagggcauauu

SEQ ID NO: 109824 - RNA, 23 nt, Artificial Sequence
  Synthetic
agcccucaggcucagggcauauu

SEQ ID NO: 109825 - RNA, 24 nt, Artificial Sequence
  Synthetic
gagcccucaggcucagggcauauu

SEQ ID NO: 109826 - RNA, 18 nt, Artificial Sequence
  Synthetic
uauggaugaugugguauu

SEQ ID NO: 109827 - RNA, 19 nt, Artificial Sequence
  Synthetic
auauggaugaugugguauu

SEQ ID NO: 109828 - RNA, 20 nt, Artificial Sequence
  Synthetic
uauauggaugaugugguauu

SEQ ID NO: 109829 - RNA, 21 nt, Artificial Sequence
  Synthetic
uuauauggaugaugugguauu

SEQ ID NO: 109830 - RNA, 22 nt, Artificial Sequence
  Synthetic
guuauauggaugaugugguauu

SEQ ID NO: 109831 - RNA, 23 nt, Artificial Sequence
  Synthetic
aguuauauggaugaugugguauu

SEQ ID NO: 109832 - RNA, 24 nt, Artificial Sequence
  Synthetic
caguuauauggaugaugugguauu

SEQ ID NO: 109833 - RNA, 18 nt, Artificial Sequence
  Synthetic
ucacuuucucgccaacuu

SEQ ID NO: 109834 - RNA, 19 nt, Artificial Sequence
  Synthetic
uucacuuucucgccaacuu

SEQ ID NO: 109835 - RNA, 20 nt, Artificial Sequence
  Synthetic
uuucacuuucucgccaacuu

SEQ ID NO: 109836 - RNA, 21 nt, Artificial Sequence
  Synthetic
cuuucacuuucucgccaacuu

SEQ ID NO: 109837 - RNA, 22 nt, Artificial Sequence
  Synthetic
gcuuucacuuucucgccaacuu

SEQ ID NO: 109838 - RNA, 23 nt, Artificial Sequence
  Synthetic
ggcuuucacuuucucgccaacuu

SEQ ID NO: 109839 - RNA, 24 nt, Artificial Sequence
  Synthetic
aggcuuucacuuucucgccaacuu

SEQ ID NO: 109840 - RNA, 18 nt, Artificial Sequence
  Synthetic
ccuaucuuaucaacacuu

SEQ ID NO: 109841 - RNA, 19 nt, Artificial Sequence
  Synthetic
cccuaucuuaucaacacuu

SEQ ID NO: 109842 - RNA, 20 nt, Artificial Sequence
  Synthetic
ccccuaucuuaucaacacuu

SEQ ID NO: 109843 - RNA, 21 nt, Artificial Sequence
  Synthetic
gccccuaucuuaucaacacuu

SEQ ID NO: 109844 - RNA, 22 nt, Artificial Sequence
  Synthetic
ugccccuaucuuaucaacacuu

SEQ ID NO: 109845 - RNA, 23 nt, Artificial Sequence
  Synthetic
augccccuaucuuaucaacacuu

SEQ ID NO: 109846 - RNA, 24 nt, Artificial Sequence
  Synthetic
aaugccccuaucuuaucaacacuu

SEQ ID NO: 109847 - RNA, 18 nt, Artificial Sequence
  Synthetic
cgaccuugaggcauacuu

SEQ ID NO: 109848 - RNA, 19 nt, Artificial Sequence
  Synthetic
ccgaccuugaggcauacuu

SEQ ID NO: 109849 - RNA, 20 nt, Artificial Sequence
  Synthetic
accgaccuugaggcauacuu

SEQ ID NO: 109850 - RNA, 21 nt, Artificial Sequence
  Synthetic
gaccgaccuugaggcauacuu

SEQ ID NO: 109851 - RNA, 22 nt, Artificial Sequence
  Synthetic
cgaccgaccuugaggcauacuu

SEQ ID NO: 109852 - RNA, 23 nt, Artificial Sequence
  Synthetic
acgaccgaccuugaggcauacuu

SEQ ID NO: 109853 - RNA, 24 nt, Artificial Sequence
  Synthetic
aacgaccgaccuugaggcauacuu

SEQ ID NO: 109854 - RNA, 18 nt, Artificial Sequence
  Synthetic
cccguuuguccucuacuu

SEQ ID NO: 109855 - RNA, 19 nt, Artificial Sequence
  Synthetic
gcccguuuguccucuacuu

SEQ ID NO: 109856 - RNA, 20 nt, Artificial Sequence
  Synthetic
ugcccguuuguccucuacuu

SEQ ID NO: 109857 - RNA, 21 nt, Artificial Sequence
  Synthetic
uugcccguuuguccucuacuu

SEQ ID NO: 109858 - RNA, 22 nt, Artificial Sequence
  Synthetic
guugcccguuuguccucuacuu

SEQ ID NO: 109859 - RNA, 23 nt, Artificial Sequence
  Synthetic
uguugcccguuuguccucuacuu

SEQ ID NO: 109860 - RNA, 24 nt, Artificial Sequence
  Synthetic
auguugcccguuuguccucuacuu

SEQ ID NO: 109861 - RNA, 18 nt, Artificial Sequence
  Synthetic
  misc_feature (2)..(2): n is a, c, g, or u
uncaguuaaucauuacuu

SEQ ID NO: 109862 - RNA, 19 nt, Artificial Sequence
  Synthetic
  misc_feature (3)..(3): n is a, c, g, or u
auncaguuaaucauuacuu

SEQ ID NO: 109863 - RNA, 20 nt, Artificial Sequence
  Synthetic
  misc_feature (4)..(4): n is a, c, g, or u
cauncaguuaaucauuacuu

SEQ ID NO: 109864 - RNA, 21 nt, Artificial Sequence
  Synthetic
  misc_feature (5)..(5): n is a, c, g, or u
acauncaguuaaucauuacuu

SEQ ID NO: 109865 - RNA, 22 nt, Artificial Sequence
  Synthetic
  misc_feature (6)..(6): n is a, c, g, or u
aacauncaguuaaucauuacuu

SEQ ID NO: 109866 - RNA, 23 nt, Artificial Sequence
  Synthetic
  misc_feature (7)..(7): n is a, c, g, or u
gaacauncaguuaaucauuacuu

SEQ ID NO: 109867 - RNA, 24 nt, Artificial Sequence
  Synthetic
  misc_feature (8)..(8): n is a, c, g, or u
ugaacauncaguuaaucauuacuu

SEQ ID NO: 109868 - RNA, 18 nt, Artificial Sequence
  Synthetic
acauuuccugucuuacuu

SEQ ID NO: 109869 - RNA, 19 nt, Artificial Sequence
  Synthetic
cacauuuccugucuuacuu

SEQ ID NO: 109870 - RNA, 20 nt, Artificial Sequence
  Synthetic
ucacauuuccugucuuacuu

SEQ ID NO: 109871 - RNA, 21 nt, Artificial Sequence
  Synthetic
uucacauuuccugucuuacuu

SEQ ID NO: 109872 - RNA, 22 nt, Artificial Sequence
  Synthetic
uuucacauuuccugucuuacuu

SEQ ID NO: 109873 - RNA, 23 nt, Artificial Sequence
  Synthetic
guuucacauuuccugucuuacuu

SEQ ID NO: 109874 - RNA, 24 nt, Artificial Sequence
  Synthetic
gguuucacauuuccugucuuacuu

SEQ ID NO: 109875 - RNA, 18 nt, Artificial Sequence
  Synthetic
  misc_feature (1)..(1): n is a, c, g, or u
ncgcaugcguggaaccuu

SEQ ID NO: 109876 - RNA, 19 nt, Artificial Sequence
  Synthetic
  misc_feature (1)..(2): n is a, c, g, or u
nncgcaugcguggaaccuu

SEQ ID NO: 109877 - RNA, 20 nt, Artificial Sequence
  Synthetic
  misc_feature (2)..(3): n is a, c, g, or u
cnncgcaugcguggaaccuu

SEQ ID NO: 109878 - RNA, 21 nt, Artificial Sequence
  Synthetic
  misc_feature (3)..(4): n is a, c, g, or u
ucnncgcaugcguggaaccuu

SEQ ID NO: 109879 - RNA, 22 nt, Artificial Sequence
  Synthetic
  misc_feature (4)..(5): n is a, c, g, or u
aucnncgcaugcguggaaccuu

SEQ ID NO: 109880 - RNA, 23 nt, Artificial Sequence
  Synthetic
  misc_feature (5)..(6): n is a, c, g, or u
caucnncgcaugcguggaaccuu

SEQ ID NO: 109881 - RNA, 24 nt, Artificial Sequence
  Synthetic
  misc_feature (6)..(7): n is a, c, g, or u
ccaucnncgcaugcguggaaccuu

SEQ ID NO: 109882 - RNA, 18 nt, Artificial Sequence
  Synthetic
agguucuauccuaaccuu

SEQ ID NO: 109883 - RNA, 19 nt, Artificial Sequence
  Synthetic
uagguucuauccuaaccuu

SEQ ID NO: 109884 - RNA, 20 nt, Artificial Sequence
  Synthetic
cuagguucuauccuaaccuu

SEQ ID NO: 109885 - RNA, 21 nt, Artificial Sequence
  Synthetic
gcuagguucuauccuaaccuu

SEQ ID NO: 109886 - RNA, 22 nt, Artificial Sequence
  Synthetic
ugcuagguucuauccuaaccuu

SEQ ID NO: 109887 - RNA, 23 nt, Artificial Sequence
  Synthetic
cugcuagguucuauccuaaccuu

SEQ ID NO: 109888 - RNA, 24 nt, Artificial Sequence
  Synthetic
ccugcuagguucuauccuaaccuu

SEQ ID NO: 109889 - RNA, 18 nt, Artificial Sequence
  Synthetic
cugugccuuggguggcuu

SEQ ID NO: 109890 - RNA, 19 nt, Artificial Sequence
  Synthetic
gcugugccuuggguggcuu

SEQ ID NO: 109891 - RNA, 20 nt, Artificial Sequence
  Synthetic
agcugugccuuggguggcuu

SEQ ID NO: 109892 - RNA, 21 nt, Artificial Sequence
  Synthetic
aagcugugccuuggguggcuu

SEQ ID NO: 109893 - RNA, 22 nt, Artificial Sequence
  Synthetic
caagcugugccuuggguggcuu

SEQ ID NO: 109894 - RNA, 23 nt, Artificial Sequence
  Synthetic
ccaagcugugccuuggguggcuu

SEQ ID NO: 109895 - RNA, 24 nt, Artificial Sequence
  Synthetic
uccaagcugugccuuggguggcuu

SEQ ID NO: 109896 - RNA, 18 nt, Artificial Sequence
  Synthetic
  misc_feature (12)..(12): n is a, c, g, or u
  misc_feature (14)..(14): n is a, c, g, or u
uucgcacuccuncngcuu

SEQ ID NO: 109897 - RNA, 19 nt, Artificial Sequence
  Synthetic
  misc_feature (13)..(13): n is a, c, g, or u
  misc_feature (15)..(15): n is a, c, g, or u
auucgcacuccuncngcuu

SEQ ID NO: 109898 - RNA, 20 nt, Artificial Sequence
  Synthetic
  misc_feature (14)..(14): n is a, c, g, or u
  misc_feature (16)..(16): n is a, c, g, or u
gauucgcacuccuncngcuu

SEQ ID NO: 109899 - RNA, 21 nt, Artificial Sequence
  Synthetic
  misc_feature (15)..(15): n is a, c, g, or u
  misc_feature (17)..(17): n is a, c, g, or u
ggauucgcacuccuncngcuu

SEQ ID NO: 109900 - RNA, 22 nt, Artificial Sequence
  Synthetic
  misc_feature (16)..(16): n is a, c, g, or u
  misc_feature (18)..(18): n is a, c, g, or u
uggauucgcacuccuncngcuu

SEQ ID NO: 109901 - RNA, 23 nt, Artificial Sequence
  Synthetic
  misc_feature (17)..(17): n is a, c, g, or u
  misc_feature (19)..(19): n is a, c, g, or u
guggauucgcacuccuncngcuu

SEQ ID NO: 109902 - RNA, 24 nt, Artificial Sequence
  Synthetic
  misc_feature (18)..(18): n is a, c, g, or u
  misc_feature (20)..(20): n is a, c, g, or u
uguggauucgcacuccuncngcuu

SEQ ID NO: 109903 - RNA, 18 nt, Artificial Sequence
  Synthetic
  misc_feature (1)..(1): n is a, c, g, or u
ncccauaucgucaaucuu

SEQ ID NO: 109904 - RNA, 19 nt, Artificial Sequence
  Synthetic
  misc_feature (2)..(2): n is a, c, g, or u
cncccauaucgucaaucuu

SEQ ID NO: 109905 - RNA, 20 nt, Artificial Sequence
  Synthetic
  misc_feature (3)..(3): n is a, c, g, or u
ucncccauaucgucaaucuu

SEQ ID NO: 109906 - RNA, 21 nt, Artificial Sequence
  Synthetic
  misc_feature (4)..(4): n is a, c, g, or u
cucncccauaucgucaaucuu

SEQ ID NO: 109907 - RNA, 22 nt, Artificial Sequence
  Synthetic
  misc_feature (5)..(5): n is a, c, g, or u
ccucncccauaucgucaaucuu

SEQ ID NO: 109908 - RNA, 23 nt, Artificial Sequence
  Synthetic
  misc_feature (6)..(6): n is a, c, g, or u
gccucncccauaucgucaaucuu

SEQ ID NO: 109909 - RNA, 24 nt, Artificial Sequence
  Synthetic
  misc_feature (7)..(7): n is a, c, g, or u
ugccucncccauaucgucaaucuu

SEQ ID NO: 109910 - RNA, 18 nt, Artificial Sequence
  Synthetic
accaaaugccccuaucuu

SEQ ID NO: 109911 - RNA, 19 nt, Artificial Sequence
  Synthetic
caccaaaugccccuaucuu

SEQ ID NO: 109912 - RNA, 20 nt, Artificial Sequence
  Synthetic
ccaccaaaugccccuaucuu

SEQ ID NO: 109913 - RNA, 21 nt, Artificial Sequence
  Synthetic
accaccaaaugccccuaucuu

SEQ ID NO: 109914 - RNA, 22 nt, Artificial Sequence
  Synthetic
gaccaccaaaugccccuaucuu

SEQ ID NO: 109915 - RNA, 23 nt, Artificial Sequence
  Synthetic
agaccaccaaaugccccuaucuu

SEQ ID NO: 109916 - RNA, 24 nt, Artificial Sequence
  Synthetic
cagaccaccaaaugccccuaucuu

SEQ ID NO: 109917 - RNA, 18 nt, Artificial Sequence
  Synthetic
  misc_feature (3)..(3): n is a, c, g, or u
canagaauugugggucuu

SEQ ID NO: 109918 - RNA, 19 nt, Artificial Sequence
  Synthetic
  misc_feature (4)..(4): n is a, c, g, or u
ucanagaauugugggucuu

SEQ ID NO: 109919 - RNA, 20 nt, Artificial Sequence
  Synthetic
  misc_feature (5)..(5): n is a, c, g, or u
gucanagaauugugggucuu

SEQ ID NO: 109920 - RNA, 21 nt, Artificial Sequence
  Synthetic
  misc_feature (6)..(6): n is a, c, g, or u
ugucanagaauugugggucuu

SEQ ID NO: 109921 - RNA, 22 nt, Artificial Sequence
  Synthetic
  misc_feature (7)..(7): n is a, c, g, or u
augucanagaauugugggucuu

SEQ ID NO: 109922 - RNA, 23 nt, Artificial Sequence
  Synthetic
  misc_feature (8)..(8): n is a, c, g, or u
uaugucanagaauugugggucuu

SEQ ID NO: 109923 - RNA, 24 nt, Artificial Sequence
  Synthetic
  misc_feature (9)..(9): n is a, c, g, or u
guaugucanagaauugugggucuu

SEQ ID NO: 109924 - RNA, 18 nt, Artificial Sequence
  Synthetic
gcaugggagguuggucuu

SEQ ID NO: 109925 - RNA, 19 nt, Artificial Sequence
  Synthetic
agcaugggagguuggucuu

SEQ ID NO: 109926 - RNA, 20 nt, Artificial Sequence
  Synthetic
cagcaugggagguuggucuu

SEQ ID NO: 109927 - RNA, 21 nt, Artificial Sequence
  Synthetic
acagcaugggagguuggucuu

SEQ ID NO: 109928 - RNA, 22 nt, Artificial Sequence
  Synthetic
uacagcaugggagguuggucuu

SEQ ID NO: 109929 - RNA, 23 nt, Artificial Sequence
  Synthetic
cuacagcaugggagguuggucuu

SEQ ID NO: 109930 - RNA, 24 nt, Artificial Sequence
  Synthetic
gcuacagcaugggagguuggucuu

SEQ ID NO: 109931 - RNA, 18 nt, Artificial Sequence
  Synthetic
  misc_feature (13)..(13): n is a, c, g, or u
ccaccacacggcngucuu

SEQ ID NO: 109932 - RNA, 19 nt, Artificial Sequence
  Synthetic
  misc_feature (1)..(1): n is a, c, g, or u
  misc_feature (14)..(14): n is a, c, g, or u
nccaccacacggcngucuu

SEQ ID NO: 109933 - RNA, 20 nt, Artificial Sequence
  Synthetic
  misc_feature (2)..(2): n is a, c, g, or u
  misc_feature (15)..(15): n is a, c, g, or u
cnccaccacacggcngucuu

SEQ ID NO: 109934 - RNA, 21 nt, Artificial Sequence
  Synthetic
  misc_feature (3)..(3): n is a, c, g, or u
  misc_feature (16)..(16): n is a, c, g, or u
acnccaccacacggcngucuu

SEQ ID NO: 109935 - RNA, 22 nt, Artificial Sequence
  Synthetic
  misc_feature (4)..(4): n is a, c, g, or u
  misc_feature (17)..(17): n is a, c, g, or u
cacnccaccacacggcngucuu

SEQ ID NO: 109936 - RNA, 23 nt, Artificial Sequence
  Synthetic
  misc_feature (5)..(5): n is a, c, g, or u
  misc_feature (18)..(18): n is a, c, g, or u
ucacnccaccacacggcngucuu

SEQ ID NO: 109937 - RNA, 24 nt, Artificial Sequence
  Synthetic
  misc_feature (6)..(6): n is a, c, g, or u
  misc_feature (19)..(19): n is a, c, g, or u
uucacnccaccacacggcngucuu

SEQ ID NO: 109938 - RNA, 18 nt, Artificial Sequence
  Synthetic
uugaguauuuggugucuu

SEQ ID NO: 109939 - RNA, 19 nt, Artificial Sequence
  Synthetic
cuugaguauuuggugucuu

SEQ ID NO: 109940 - RNA, 20 nt, Artificial Sequence
  Synthetic
ucuugaguauuuggugucuu

SEQ ID NO: 109941 - RNA, 21 nt, Artificial Sequence
  Synthetic
uucuugaguauuuggugucuu

SEQ ID NO: 109942 - RNA, 22 nt, Artificial Sequence
  Synthetic
guucuugaguauuuggugucuu

SEQ ID NO: 109943 - RNA, 23 nt, Artificial Sequence
  Synthetic
uguucuugaguauuuggugucuu

SEQ ID NO: 109944 - RNA, 24 nt, Artificial Sequence
  Synthetic
cuguucuugaguauuuggugucuu

SEQ ID NO: 109945 - RNA, 18 nt, Artificial Sequence
  Synthetic
gugggucaccauauucuu

SEQ ID NO: 109946 - RNA, 19 nt, Artificial Sequence
  Synthetic
ugugggucaccauauucuu

SEQ ID NO: 109947 - RNA, 20 nt, Artificial Sequence
  Synthetic
uugugggucaccauauucuu

SEQ ID NO: 109948 - RNA, 21 nt, Artificial Sequence
  Synthetic
uuugugggucaccauauucuu

SEQ ID NO: 109949 - RNA, 22 nt, Artificial Sequence
  Synthetic
uuuugugggucaccauauucuu

SEQ ID NO: 109950 - RNA, 23 nt, Artificial Sequence
  Synthetic
auuuugugggucaccauauucuu

SEQ ID NO: 109951 - RNA, 24 nt, Artificial Sequence
  Synthetic
cauuuugugggucaccauauucuu

SEQ ID NO: 109952 - RNA, 18 nt, Artificial Sequence
  Synthetic
aucuucuuguugguucuu

SEQ ID NO: 109953 - RNA, 19 nt, Artificial Sequence
  Synthetic
caucuucuuguugguucuu

SEQ ID NO: 109954 - RNA, 20 nt, Artificial Sequence
  Synthetic
ucaucuucuuguugguucuu

SEQ ID NO: 109955 - RNA, 21 nt, Artificial Sequence
  Synthetic
cucaucuucuuguugguucuu

SEQ ID NO: 109956 - RNA, 22 nt, Artificial Sequence
  Synthetic
ccucaucuucuuguugguucuu

SEQ ID NO: 109957 - RNA, 23 nt, Artificial Sequence
  Synthetic
gccucaucuucuuguugguucuu

SEQ ID NO: 109958 - RNA, 24 nt, Artificial Sequence
  Synthetic
ugccucaucuucuuguugguucuu

SEQ ID NO: 109959 - RNA, 18 nt, Artificial Sequence
  Synthetic
acaggcgggguuuuucuu

SEQ ID NO: 109960 - RNA, 19 nt, Artificial Sequence
  Synthetic
uacaggcgggguuuuucuu

SEQ ID NO: 109961 - RNA, 20 nt, Artificial Sequence
  Synthetic
uuacaggcgggguuuuucuu

SEQ ID NO: 109962 - RNA, 21 nt, Artificial Sequence
  Synthetic
guuacaggcgggguuuuucuu

SEQ ID NO: 109963 - RNA, 22 nt, Artificial Sequence
  Synthetic
uguuacaggcgggguuuuucuu

SEQ ID NO: 109964 - RNA, 23 nt, Artificial Sequence
  Synthetic
guguuacaggcgggguuuuucuu

SEQ ID NO: 109965 - RNA, 24 nt, Artificial Sequence
  Synthetic
cguguuacaggcgggguuuuucuu

SEQ ID NO: 109966 - RNA, 18 nt, Artificial Sequence
  Synthetic
gugggcccucuuacaguu

SEQ ID NO: 109967 - RNA, 19 nt, Artificial Sequence
  Synthetic
ugugggcccucuuacaguu

SEQ ID NO: 109968 - RNA, 20 nt, Artificial Sequence
  Synthetic
augugggcccucuuacaguu

SEQ ID NO: 109969 - RNA, 21 nt, Artificial Sequence
  Synthetic
uaugugggcccucuuacaguu

SEQ ID NO: 109970 - RNA, 22 nt, Artificial Sequence
  Synthetic
auaugugggcccucuuacaguu

SEQ ID NO: 109971 - RNA, 23 nt, Artificial Sequence
  Synthetic
aauaugugggcccucuuacaguu

SEQ ID NO: 109972 - RNA, 24 nt, Artificial Sequence
  Synthetic
caauaugugggcccucuuacaguu

SEQ ID NO: 109973 - RNA, 18 nt, Artificial Sequence
  Synthetic
cugcugguggcuccaguu

SEQ ID NO: 109974 - RNA, 19 nt, Artificial Sequence
  Synthetic
ccugcugguggcuccaguu

SEQ ID NO: 109975 - RNA, 20 nt, Artificial Sequence
  Synthetic
uccugcugguggcuccaguu

SEQ ID NO: 109976 - RNA, 21 nt, Artificial Sequence
  Synthetic
uuccugcugguggcuccaguu

SEQ ID NO: 109977 - RNA, 22 nt, Artificial Sequence
  Synthetic
uuuccugcugguggcuccaguu

SEQ ID NO: 109978 - RNA, 23 nt, Artificial Sequence
  Synthetic
  misc_feature (1)..(1): n is a, c, g, or u
nuuuccugcugguggcuccaguu

SEQ ID NO: 109979 - RNA, 24 nt, Artificial Sequence
  Synthetic
  misc_feature (2)..(2): n is a, c, g, or u
anuuuccugcugguggcuccaguu

SEQ ID NO: 109980 - RNA, 18 nt, Artificial Sequence
  Synthetic
  misc_feature (4)..(4): n is a, c, g, or u
uaangacugggaggaguu

SEQ ID NO: 109981 - RNA, 19 nt, Artificial Sequence
  Synthetic
  misc_feature (5)..(5): n is a, c, g, or u
uuaangacugggaggaguu

SEQ ID NO: 109982 - RNA, 20 nt, Artificial Sequence
  Synthetic
  misc_feature (6)..(6): n is a, c, g, or u
uuuaangacugggaggaguu

SEQ ID NO: 109983 - RNA, 21 nt, Artificial Sequence
  Synthetic
  misc_feature (1)..(1): n is a, c, g, or u
  misc_feature (7)..(7): n is a, c, g, or u
nuuuaangacugggaggaguu

SEQ ID NO: 109984 - RNA, 22 nt, Artificial Sequence
  Synthetic
  misc_feature (2)..(2): n is a, c, g, or u
  misc_feature (8)..(8): n is a, c, g, or u
unuuuaangacugggaggaguu

SEQ ID NO: 109985 - RNA, 23 nt, Artificial Sequence
  Synthetic
  misc_feature (1)..(1): n is a, c, g, or u
  misc_feature (3)..(3): n is a, c, g, or u
  misc_feature (9)..(9): n is a, c, g, or u
nunuuuaangacugggaggaguu

SEQ ID NO: 109986 - RNA, 24 nt, Artificial Sequence
  Synthetic
  misc_feature (2)..(2): n is a, c, g, or u
  misc_feature (4)..(4): n is a, c, g, or u
  misc_feature (10)..(10): n is a, c, g, or u
ununuuuaangacugggaggaguu

SEQ ID NO: 109987 - RNA, 18 nt, Artificial Sequence
  Synthetic
ucuguguuggggugaguu

SEQ ID NO: 109988 - RNA, 19 nt, Artificial Sequence
  Synthetic
uucuguguuggggugaguu

SEQ ID NO: 109989 - RNA, 20 nt, Artificial Sequence
  Synthetic
auucuguguuggggugaguu

SEQ ID NO: 109990 - RNA, 21 nt, Artificial Sequence
  Synthetic
uauucuguguuggggugaguu

SEQ ID NO: 109991 - RNA, 22 nt, Artificial Sequence
  Synthetic
cuauucuguguuggggugaguu

SEQ ID NO: 109992 - RNA, 23 nt, Artificial Sequence
  Synthetic
gcuauucuguguuggggugaguu

SEQ ID NO: 109993 - RNA, 24 nt, Artificial Sequence
  Synthetic
agcuauucuguguuggggugaguu

SEQ ID NO: 109994 - RNA, 18 nt, Artificial Sequence
  Synthetic
gccauuuguucagugguu

SEQ ID NO: 109995 - RNA, 19 nt, Artificial Sequence
  Synthetic
ugccauuuguucagugguu

SEQ ID NO: 109996 - RNA, 20 nt, Artificial Sequence
  Synthetic
gugccauuuguucagugguu

SEQ ID NO: 109997 - RNA, 21 nt, Artificial Sequence
  Synthetic
agugccauuuguucagugguu

SEQ ID NO: 109998 - RNA, 22 nt, Artificial Sequence
  Synthetic
uagugccauuuguucagugguu

SEQ ID NO: 109999 - RNA, 23 nt, Artificial Sequence
  Synthetic
cuagugccauuuguucagugguu

SEQ ID NO: 110000 - RNA, 24 nt, Artificial Sequence
  Synthetic
acuagugccauuuguucagugguu

SEQ ID NO: 110001 - RNA, 18 nt, Artificial Sequence
  Synthetic
uuuggaagagaaacuguu

SEQ ID NO: 110002 - RNA, 19 nt, Artificial Sequence
  Synthetic
uuuuggaagagaaacuguu

SEQ ID NO: 110003 - RNA, 20 nt, Artificial Sequence
  Synthetic
cuuuuggaagagaaacuguu

SEQ ID NO: 110004 - RNA, 21 nt, Artificial Sequence
  Synthetic
acuuuuggaagagaaacuguu

SEQ ID NO: 110005 - RNA, 22 nt, Artificial Sequence
  Synthetic
uacuuuuggaagagaaacuguu

SEQ ID NO: 110006 - RNA, 23 nt, Artificial Sequence
  Synthetic
uuacuuuuggaagagaaacuguu

SEQ ID NO: 110007 - RNA, 24 nt, Artificial Sequence
  Synthetic
cuuacuuuuggaagagaaacuguu

SEQ ID NO: 110008 - RNA, 18 nt, Artificial Sequence
  Synthetic
cuuccggaaacuacuguu

SEQ ID NO: 110009 - RNA, 19 nt, Artificial Sequence
  Synthetic
acuuccggaaacuacuguu

SEQ ID NO: 110010 - RNA, 20 nt, Artificial Sequence
  Synthetic
cacuuccggaaacuacuguu

SEQ ID NO: 110011 - RNA, 21 nt, Artificial Sequence
  Synthetic
acacuuccggaaacuacuguu

SEQ ID NO: 110012 - RNA, 22 nt, Artificial Sequence
  Synthetic
aacacuuccggaaacuacuguu

SEQ ID NO: 110013 - RNA, 23 nt, Artificial Sequence
  Synthetic
caacacuuccggaaacuacuguu

SEQ ID NO: 110014 - RNA, 24 nt, Artificial Sequence
  Synthetic
ucaacacuuccggaaacuacuguu

SEQ ID NO: 110015 - RNA, 18 nt, Artificial Sequence
  Synthetic
aggaccccugcucguguu

SEQ ID NO: 110016 - RNA, 19 nt, Artificial Sequence
  Synthetic
uaggaccccugcucguguu

SEQ ID NO: 110017 - RNA, 20 nt, Artificial Sequence
  Synthetic
cuaggaccccugcucguguu

SEQ ID NO: 110018 - RNA, 21 nt, Artificial Sequence
  Synthetic
ccuaggaccccugcucguguu

SEQ ID NO: 110019 - RNA, 22 nt, Artificial Sequence
  Synthetic
uccuaggaccccugcucguguu

SEQ ID NO: 110020 - RNA, 23 nt, Artificial Sequence
  Synthetic
uuccuaggaccccugcucguguu

SEQ ID NO: 110021 - RNA, 24 nt, Artificial Sequence
  Synthetic
auuccuaggaccccugcucguguu

SEQ ID NO: 110022 - RNA, 18 nt, Artificial Sequence
  Synthetic
ggcgggguuuuucuuguu

SEQ ID NO: 110023 - RNA, 19 nt, Artificial Sequence
  Synthetic
aggcgggguuuuucuuguu

SEQ ID NO: 110024 - RNA, 20 nt, Artificial Sequence
  Synthetic
caggcgggguuuuucuuguu

SEQ ID NO: 110025 - RNA, 21 nt, Artificial Sequence
  Synthetic
acaggcgggguuuuucuuguu

SEQ ID NO: 110026 - RNA, 22 nt, Artificial Sequence
  Synthetic
uacaggcgggguuuuucuuguu

SEQ ID NO: 110027 - RNA, 23 nt, Artificial Sequence
  Synthetic
uuacaggcgggguuuuucuuguu

SEQ ID NO: 110028 - RNA, 24 nt, Artificial Sequence
  Synthetic
guuacaggcgggguuuuucuuguu

SEQ ID NO: 110029 - RNA, 18 nt, Artificial Sequence
  Synthetic
  misc_feature (16)..(16): n is a, c, g, or u
gggcuacucccuuaanuu

SEQ ID NO: 110030 - RNA, 19 nt, Artificial Sequence
  Synthetic
  misc_feature (17)..(17): n is a, c, g, or u
ggggcuacucccuuaanuu

SEQ ID NO: 110031 - RNA, 20 nt, Artificial Sequence
  Synthetic
  misc_feature (18)..(18): n is a, c, g, or u
uggggcuacucccuuaanuu

SEQ ID NO: 110032 - RNA, 21 nt, Artificial Sequence
  Synthetic
  misc_feature (19)..(19): n is a, c, g, or u
uuggggcuacucccuuaanuu

SEQ ID NO: 110033 - RNA, 22 nt, Artificial Sequence
  Synthetic
  misc_feature (20)..(20): n is a, c, g, or u
guuggggcuacucccuuaanuu

SEQ ID NO: 110034 - RNA, 23 nt, Artificial Sequence
  Synthetic
  misc_feature (21)..(21): n is a, c, g, or u
cguuggggcuacucccuuaanuu

SEQ ID NO: 110035 - RNA, 24 nt, Artificial Sequence
  Synthetic
  misc_feature (22)..(22): n is a, c, g, or u
acguuggggcuacucccuuaanuu

SEQ ID NO: 110036 - RNA, 18 nt, Artificial Sequence
  Synthetic
  misc_feature (13)..(13): n is a, c, g, or u
  misc_feature (16)..(16): n is a, c, g, or u
ccaguuggacccngcnuu

SEQ ID NO: 110037 - RNA, 19 nt, Artificial Sequence
  Synthetic
  misc_feature (14)..(14): n is a, c, g, or u
  misc_feature (17)..(17): n is a, c, g, or u
accaguuggacccngcnuu

SEQ ID NO: 110038 - RNA, 20 nt, Artificial Sequence
  Synthetic
  misc_feature (15)..(15): n is a, c, g, or u
  misc_feature (18)..(18): n is a, c, g, or u
caccaguuggacccngcnuu

SEQ ID NO: 110039 - RNA, 21 nt, Artificial Sequence
  Synthetic
  misc_feature (16)..(16): n is a, c, g, or u
  misc_feature (19)..(19): n is a, c, g, or u
ucaccaguuggacccngcnuu

SEQ ID NO: 110040 - RNA, 22 nt, Artificial Sequence
  Synthetic
  misc_feature (17)..(17): n is a, c, g, or u
  misc_feature (20)..(20): n is a, c, g, or u
aucaccaguuggacccngcnuu

SEQ ID NO: 110041 - RNA, 23 nt, Artificial Sequence
  Synthetic
  misc_feature (18)..(18): n is a, c, g, or u
  misc_feature (21)..(21): n is a, c, g, or u
gaucaccaguuggacccngcnuu

SEQ ID NO: 110042 - RNA, 24 nt, Artificial Sequence
  Synthetic
  misc_feature (19)..(19): n is a, c, g, or u
  misc_feature (22)..(22): n is a, c, g, or u
cgaucaccaguuggacccngcnuu

SEQ ID NO: 110043 - RNA, 18 nt, Artificial Sequence
  Synthetic
guggacuucucucaauuu

SEQ ID NO: 110044 - RNA, 19 nt, Artificial Sequence
  Synthetic
gguggacuucucucaauuu

SEQ ID NO: 110045 - RNA, 20 nt, Artificial Sequence
  Synthetic
ugguggacuucucucaauuu

SEQ ID NO: 110046 - RNA, 21 nt, Artificial Sequence
  Synthetic
gugguggacuucucucaauuu

SEQ ID NO: 110047 - RNA, 22 nt, Artificial Sequence
  Synthetic
cgugguggacuucucucaauuu

SEQ ID NO: 110048 - RNA, 23 nt, Artificial Sequence
  Synthetic
ucgugguggacuucucucaauuu

SEQ ID NO: 110049 - RNA, 24 nt, Artificial Sequence
  Synthetic
cucgugguggacuucucucaauuu

SEQ ID NO: 110050 - RNA, 18 nt, Artificial Sequence
  Synthetic
cugggugggaaguaauuu

SEQ ID NO: 110051 - RNA, 19 nt, Artificial Sequence
  Synthetic
ccugggugggaaguaauuu

SEQ ID NO: 110052 - RNA, 20 nt, Artificial Sequence
  Synthetic
accugggugggaaguaauuu

SEQ ID NO: 110053 - RNA, 21 nt, Artificial Sequence
  Synthetic
caccugggugggaaguaauuu

SEQ ID NO: 110054 - RNA, 22 nt, Artificial Sequence
  Synthetic
ccaccugggugggaaguaauuu

SEQ ID NO: 110055 - RNA, 23 nt, Artificial Sequence
  Synthetic
gccaccugggugggaaguaauuu

SEQ ID NO: 110056 - RNA, 24 nt, Artificial Sequence
  Synthetic
ggccaccugggugggaaguaauuu

SEQ ID NO: 110057 - RNA, 18 nt, Artificial Sequence
  Synthetic
acacgcagcgccucauuu

SEQ ID NO: 110058 - RNA, 19 nt, Artificial Sequence
  Synthetic
uacacgcagcgccucauuu

SEQ ID NO: 110059 - RNA, 20 nt, Artificial Sequence
  Synthetic
cuacacgcagcgccucauuu

SEQ ID NO: 110060 - RNA, 21 nt, Artificial Sequence
  Synthetic
acuacacgcagcgccucauuu

SEQ ID NO: 110061 - RNA, 22 nt, Artificial Sequence
  Synthetic
aacuacacgcagcgccucauuu

SEQ ID NO: 110062 - RNA, 23 nt, Artificial Sequence
  Synthetic
aaacuacacgcagcgccucauuu

SEQ ID NO: 110063 - RNA, 24 nt, Artificial Sequence
  Synthetic
gaaacuacacgcagcgccucauuu

SEQ ID NO: 110064 - RNA, 18 nt, Artificial Sequence
  Synthetic
cauaaggugggaaacuuu

SEQ ID NO: 110065 - RNA, 19 nt, Artificial Sequence
  Synthetic
ucauaaggugggaaacuuu

SEQ ID NO: 110066 - RNA, 20 nt, Artificial Sequence
  Synthetic
cucauaaggugggaaacuuu

SEQ ID NO: 110067 - RNA, 21 nt, Artificial Sequence
  Synthetic
acucauaaggugggaaacuuu

SEQ ID NO: 110068 - RNA, 22 nt, Artificial Sequence
  Synthetic
gacucauaaggugggaaacuuu

SEQ ID NO: 110069 - RNA, 23 nt, Artificial Sequence
  Synthetic
ggacucauaaggugggaaacuuu

SEQ ID NO: 110070 - RNA, 24 nt, Artificial Sequence
  Synthetic
uggacucauaaggugggaaacuuu

SEQ ID NO: 110071 - RNA, 18 nt, Artificial Sequence
  Synthetic
cauuuccugucuuacuuu

SEQ ID NO: 110072 - RNA, 19 nt, Artificial Sequence
  Synthetic
acauuuccugucuuacuuu

SEQ ID NO: 110073 - RNA, 20 nt, Artificial Sequence
  Synthetic
cacauuuccugucuuacuuu

SEQ ID NO: 110074 - RNA, 21 nt, Artificial Sequence
  Synthetic
ucacauuuccugucuuacuuu

SEQ ID NO: 110075 - RNA, 22 nt, Artificial Sequence
  Synthetic
uucacauuuccugucuuacuuu

SEQ ID NO: 110076 - RNA, 23 nt, Artificial Sequence
  Synthetic
uuucacauuuccugucuuacuuu

SEQ ID NO: 110077 - RNA, 24 nt, Artificial Sequence
  Synthetic
guuucacauuuccugucuuacuuu

SEQ ID NO: 110078 - RNA, 18 nt, Artificial Sequence
  Synthetic
  misc_feature (10)..(10): n is a, c, g, or u
cccaucaucnugggcuuu

SEQ ID NO: 110079 - RNA, 19 nt, Artificial Sequence
  Synthetic
  misc_feature (11)..(11): n is a, c, g, or u
ucccaucaucnugggcuuu

SEQ ID NO: 110080 - RNA, 20 nt, Artificial Sequence
  Synthetic
  misc_feature (12)..(12): n is a, c, g, or u
aucccaucaucnugggcuuu

SEQ ID NO: 110081 - RNA, 21 nt, Artificial Sequence
  Synthetic
  misc_feature (13)..(13): n is a, c, g, or u
caucccaucaucnugggcuuu

SEQ ID NO: 110082 - RNA, 22 nt, Artificial Sequence
  Synthetic
  misc_feature (14)..(14): n is a, c, g, or u
ccaucccaucaucnugggcuuu

SEQ ID NO: 110083 - RNA, 23 nt, Artificial Sequence
  Synthetic
  misc_feature (15)..(15): n is a, c, g, or u
cccaucccaucaucnugggcuuu

SEQ ID NO: 110084 - RNA, 24 nt, Artificial Sequence
  Synthetic
  misc_feature (16)..(16): n is a, c, g, or u
ucccaucccaucaucnugggcuuu

SEQ ID NO: 110085 - RNA, 18 nt, Artificial Sequence
  Synthetic
  misc_feature (6)..(6): n is a, c, g, or u
ggucunugccaaguguuu

SEQ ID NO: 110086 - RNA, 19 nt, Artificial Sequence
  Synthetic
  misc_feature (7)..(7): n is a, c, g, or u
aggucunugccaaguguuu

SEQ ID NO: 110087 - RNA, 20 nt, Artificial Sequence
  Synthetic
  misc_feature (8)..(8): n is a, c, g, or u
caggucunugccaaguguuu

SEQ ID NO: 110088 - RNA, 21 nt, Artificial Sequence
  Synthetic
  misc_feature (9)..(9): n is a, c, g, or u
ucaggucunugccaaguguuu

SEQ ID NO: 110089 - RNA, 22 nt, Artificial Sequence
  Synthetic
  misc_feature (10)..(10): n is a, c, g, or u
gucaggucunugccaaguguuu

SEQ ID NO: 110090 - RNA, 23 nt, Artificial Sequence
  Synthetic
  misc_feature (11)..(11): n is a, c, g, or u
ggucaggucunugccaaguguuu

SEQ ID NO: 110091 - RNA, 24 nt, Artificial Sequence
  Synthetic
  misc_feature (12)..(12): n is a, c, g, or u
cggucaggucunugccaaguguuu

SEQ ID NO: 110092 - RNA, 18 nt, Artificial Sequence
  Synthetic
  misc_feature (13)..(13): n is a, c, g, or u
  misc_feature (15)..(15): n is a, c, g, or u
uucaaagacugununuuu

SEQ ID NO: 110093 - RNA, 19 nt, Artificial Sequence
  Synthetic
  misc_feature (14)..(14): n is a, c, g, or u
  misc_feature (16)..(16): n is a, c, g, or u
cuucaaagacugununuuu

SEQ ID NO: 110094 - RNA, 20 nt, Artificial Sequence
  Synthetic
  misc_feature (15)..(15): n is a, c, g, or u
  misc_feature (17)..(17): n is a, c, g, or u
acuucaaagacugununuuu

SEQ ID NO: 110095 - RNA, 21 nt, Artificial Sequence
  Synthetic
  misc_feature (16)..(16): n is a, c, g, or u
  misc_feature (18)..(18): n is a, c, g, or u
uacuucaaagacugununuuu

SEQ ID NO: 110096 - RNA, 22 nt, Artificial Sequence
  Synthetic
  misc_feature (17)..(17): n is a, c, g, or u
  misc_feature (19)..(19): n is a, c, g, or u
auacuucaaagacugununuuu

SEQ ID NO: 110097 - RNA, 23 nt, Artificial Sequence
  Synthetic
  misc_feature (18)..(18): n is a, c, g, or u
  misc_feature (20)..(20): n is a, c, g, or u
cauacuucaaagacugununuuu

SEQ ID NO: 110098 - RNA, 24 nt, Artificial Sequence
  Synthetic
  misc_feature (19)..(19): n is a, c, g, or u
  misc_feature (21)..(21): n is a, c, g, or u
gcauacuucaaagacugununuuu

SEQ ID NO: 110099 - RNA, 18 nt, Artificial Sequence
  Synthetic
uggacuucucucaauuuu

SEQ ID NO: 110100 - RNA, 19 nt, Artificial Sequence
  Synthetic
guggacuucucucaauuuu

SEQ ID NO: 110101 - RNA, 20 nt, Artificial Sequence
  Synthetic
gguggacuucucucaauuuu

SEQ ID NO: 110102 - RNA, 21 nt, Artificial Sequence
  Synthetic
ugguggacuucucucaauuuu

SEQ ID NO: 110103 - RNA, 22 nt, Artificial Sequence
  Synthetic
gugguggacuucucucaauuuu

SEQ ID NO: 110104 - RNA, 23 nt, Artificial Sequence
  Synthetic
cgugguggacuucucucaauuuu

SEQ ID NO: 110105 - RNA, 24 nt, Artificial Sequence
  Synthetic
ucgugguggacuucucucaauuuu

SEQ ID NO: 110106 - RNA, 18 nt, Artificial Sequence
  Synthetic
auuuccugucuuacuuuu

SEQ ID NO: 110107 - RNA, 19 nt, Artificial Sequence
  Synthetic
cauuuccugucuuacuuuu

SEQ ID NO: 110108 - RNA, 20 nt, Artificial Sequence
  Synthetic
acauuuccugucuuacuuuu

SEQ ID NO: 110109 - RNA, 21 nt, Artificial Sequence
  Synthetic
cacauuuccugucuuacuuuu

SEQ ID NO: 110110 - RNA, 22 nt, Artificial Sequence
  Synthetic
ucacauuuccugucuuacuuuu

SEQ ID NO: 110111 - RNA, 23 nt, Artificial Sequence
  Synthetic
uucacauuuccugucuuacuuuu

SEQ ID NO: 110112 - RNA, 24 nt, Artificial Sequence
  Synthetic
uuucacauuuccugucuuacuuuu

SEQ ID NO: 110113 - RNA, 18 nt, Artificial Sequence
  Synthetic
  misc_feature (4)..(4): n is a, c, g, or u
  misc_feature (6)..(6): n is a, c, g, or u
  misc_feature (9)..(9): n is a, c, g, or u
aaanunaancaauguuuu

SEQ ID NO: 110114 - RNA, 19 nt, Artificial Sequence
  Synthetic
  misc_feature (1)..(1): n is a, c, g, or u
  misc_feature (5)..(5): n is a, c, g, or u
  misc_feature (7)..(7): n is a, c, g, or u
  misc_feature (10)..(10): n is a, c, g, or u
naaanunaancaauguuuu

SEQ ID NO: 110115 - RNA, 20 nt, Artificial Sequence
  Synthetic
  misc_feature (1)..(2): n is a, c, g, or u
  misc_feature (6)..(6): n is a, c, g, or u
  misc_feature (8)..(8): n is a, c, g, or u
  misc_feature (11)..(11): n is a, c, g, or u
nnaaanunaancaauguuuu

SEQ ID NO: 110116 - RNA, 21 nt, Artificial Sequence
  Synthetic
  misc_feature (2)..(3): n is a, c, g, or u
  misc_feature (7)..(7): n is a, c, g, or u
  misc_feature (9)..(9): n is a, c, g, or u
  misc_feature (12)..(12): n is a, c, g, or u
cnnaaanunaancaauguuuu

SEQ ID NO: 110117 - RNA, 22 nt, Artificial Sequence
  Synthetic
  misc_feature (3)..(4): n is a, c, g, or u
  misc_feature (8)..(8): n is a, c, g, or u
  misc_feature (10)..(10): n is a, c, g, or u
  misc_feature (13)..(13): n is a, c, g, or u
acnnaaanunaancaauguuuu

SEQ ID NO: 110118 - RNA, 23 nt, Artificial Sequence
  Synthetic
  misc_feature (4)..(5): n is a, c, g, or u
  misc_feature (9)..(9): n is a, c, g, or u
  misc_feature (11)..(11): n is a, c, g, or u
  misc_feature (14)..(14): n is a, c, g, or u
uacnnaaanunaancaauguuuu

SEQ ID NO: 110119 - RNA, 24 nt, Artificial Sequence
  Synthetic
  misc_feature (5)..(6): n is a, c, g, or u
  misc_feature (10)..(10): n is a, c, g, or u
  misc_feature (12)..(12): n is a, c, g, or u
  misc_feature (15)..(15): n is a, c, g, or u
guacnnaaanunaancaauguuuu

SEQ ID NO: 110120 - RNA, 17 nt, Artificial Sequence
  Synthetic
gcgggauucagcgccga

SEQ ID NO: 110121 - RNA, 17 nt, Artificial Sequence
  Synthetic
  misc_feature (2)..(2): n is a, c, g, or u
gnccguugccgagcaac

SEQ ID NO: 110122 - RNA, 17 nt, Artificial Sequence
  Synthetic
gcugacgcaacccccac

SEQ ID NO: 110123 - RNA, 17 nt, Artificial Sequence
  Synthetic
gcugacuacuaauuccc

SEQ ID NO: 110124 - RNA, 17 nt, Artificial Sequence
  Synthetic
gugggagcauucgggcc

SEQ ID NO: 110125 - RNA, 17 nt, Artificial Sequence
  Synthetic
guagcgccucauuuugc

SEQ ID NO: 110126 - RNA, 17 nt, Artificial Sequence
  Synthetic
gcgaagugcacacgguc

SEQ ID NO: 110127 - RNA, 17 nt, Artificial Sequence
  Synthetic
gcaguauggaucggcag

SEQ ID NO: 110128 - RNA, 17 nt, Artificial Sequence
  Synthetic
ggaguccgcguaaagag

SEQ ID NO: 110129 - RNA, 17 nt, Artificial Sequence
  Synthetic
gcgcaccucucuuuacg

SEQ ID NO: 110130 - RNA, 17 nt, Artificial Sequence
  Synthetic
gucggcgcugaaucccg

SEQ ID NO: 110131 - RNA, 17 nt, Artificial Sequence
  Synthetic
gcggacgaccccucccg

SEQ ID NO: 110132 - RNA, 17 nt, Artificial Sequence
  Synthetic
ggccaucagcgcaugcg

SEQ ID NO: 110133 - RNA, 17 nt, Artificial Sequence
  Synthetic
gccaacuggauccugcg

SEQ ID NO: 110134 - RNA, 17 nt, Artificial Sequence
  Synthetic
gucaacgaccgaccuug

SEQ ID NO: 110135 - RNA, 17 nt, Artificial Sequence
  Synthetic
gcaacccccacugguug

SEQ ID NO: 110136 - RNA, 17 nt, Artificial Sequence
  Synthetic
gcgggucaccauauucu

SEQ ID NO: 110137 - RNA, 17 nt, Artificial Sequence
  Synthetic
gccaagccccaaccagu

SEQ ID NO: 110138 - RNA, 17 nt, Artificial Sequence
  Synthetic
gugcaguuuccguccgu

SEQ ID NO: 110139 - RNA, 20 nt, Artificial Sequence
  Synthetic
gcuuguauacaugcauauaa

SEQ ID NO: 110140 - RNA, 20 nt, Artificial Sequence
  Synthetic
guugccgagcaacgggguaa

SEQ ID NO: 110141 - RNA, 20 nt, Artificial Sequence
  Synthetic
gagugggagcauucgggcca

SEQ ID NO: 110142 - RNA, 20 nt, Artificial Sequence
  Synthetic
gggauauucccuuaacuuca

SEQ ID NO: 110143 - RNA, 20 nt, Artificial Sequence
  Synthetic
gaccuucgucugcgaggcga

SEQ ID NO: 110144 - RNA, 20 nt, Artificial Sequence
  Synthetic
gggcuuucgcaaaauaccua

SEQ ID NO: 110145 - RNA, 20 nt, Artificial Sequence
  Synthetic
gcgagggaguucuucuucua

SEQ ID NO: 110146 - RNA, 20 nt, Artificial Sequence
  Synthetic
ggacuucucucaauuuucua

SEQ ID NO: 110147 - RNA, 20 nt, Artificial Sequence
  Synthetic
guagagccccaagcggcccc

SEQ ID NO: 110148 - RNA, 20 nt, Artificial Sequence
  Synthetic
gguagagccccaagcggccc

SEQ ID NO: 110149 - RNA, 20 nt, Artificial Sequence
  Synthetic
gcaggguccaacugaugauc

SEQ ID NO: 110150 - RNA, 20 nt, Artificial Sequence
  Synthetic
gaagcgaagugcacacgguc

SEQ ID NO: 110151 - RNA, 20 nt, Artificial Sequence
  Synthetic
gcgggcgguagagccccaag

SEQ ID NO: 110152 - RNA, 20 nt, Artificial Sequence
  Synthetic
ggucuccaugcgacgugcag

SEQ ID NO: 110153 - RNA, 20 nt, Artificial Sequence
  Synthetic
gauugagaucuucugcgacg

SEQ ID NO: 110154 - RNA, 20 nt, Artificial Sequence
  Synthetic
ggggcgcaccucucuuuacg

SEQ ID NO: 110155 - RNA, 20 nt, Artificial Sequence
  Synthetic
guaaagagaggugcgccccg

SEQ ID NO: 110156 - RNA, 20 nt, Artificial Sequence
  Synthetic
gauugagaccuucgucugcg

SEQ ID NO: 110157 - RNA, 20 nt, Artificial Sequence
  Synthetic
  misc_feature (6)..(6): n is a, c, g, or u
guuccngugggcguucacgg

SEQ ID NO: 110158 - RNA, 20 nt, Artificial Sequence
  Synthetic
guuaucgcuggaugugucug

SEQ ID NO: 110159 - RNA, 20 nt, Artificial Sequence
  Synthetic
gacgcaacccccacugguug

SEQ ID NO: 110160 - RNA, 20 nt, Artificial Sequence
  Synthetic
ggcuuucgcaaaauaccuau

SEQ ID NO: 110161 - RNA, 20 nt, Artificial Sequence
  Synthetic
ggguugcgucagcaaacacu

SEQ ID NO: 110162 - RNA, 20 nt, Artificial Sequence
  Synthetic
guaacacgagcagggguccu

SEQ ID NO: 110163 - RNA, 20 nt, Artificial Sequence
  Synthetic
gucgcagaagaucucaaucu

SEQ ID NO: 110164 - RNA, 20 nt, Artificial Sequence
  Synthetic
guauucccaucccaucaucu

SEQ ID NO: 110165 - RNA, 20 nt, Artificial Sequence
  Synthetic
gacgccaacaaggugggagu

SEQ ID NO: 110166 - RNA, 20 nt, Artificial Sequence
  Synthetic
guccuuuguuuacgucccgu

SEQ ID NO: 110167 - RNA, 20 nt, Artificial Sequence
  Synthetic
gaccccucccggggccgcuu

SEQ ID NO: 110168 - RNA, 20 nt, Artificial Sequence
  Synthetic
gaugcgauguucuccauguu

SEQ ID NO: 110169 - RNA, 17 nt, Artificial Sequence
  Synthetic
cgacgggacguaaacaa

SEQ ID NO: 110170 - RNA, 17 nt, Artificial Sequence
  Synthetic
  misc_feature (3)..(3): n is a, c, g, or u
agnccguugccgagcaa

SEQ ID NO: 110171 - RNA, 17 nt, Artificial Sequence
  Synthetic
accccguugcucggcaa

SEQ ID NO: 110172 - RNA, 17 nt, Artificial Sequence
  Synthetic
cuggccggacgccaaca

SEQ ID NO: 110173 - RNA, 17 nt, Artificial Sequence
  Synthetic
ucuccauguucgguaca

SEQ ID NO: 110174 - RNA, 17 nt, Artificial Sequence
  Synthetic
ugggagcauucgggcca

SEQ ID NO: 110175 - RNA, 17 nt, Artificial Sequence
  Synthetic
cgccuguaacacgagca

SEQ ID NO: 110176 - RNA, 17 nt, Artificial Sequence
  Synthetic
caccucugcacgucgca

SEQ ID NO: 110177 - RNA, 17 nt, Artificial Sequence
  Synthetic
cuucgucugcgaggcga

SEQ ID NO: 110178 - RNA, 17 nt, Artificial Sequence
  Synthetic
uguacaaaaccuacgga

SEQ ID NO: 110179 - RNA, 17 nt, Artificial Sequence
  Synthetic
uuguucaccucaccaua

SEQ ID NO: 110180 - RNA, 17 nt, Artificial Sequence
  Synthetic
cgauaagauugacgaua

SEQ ID NO: 110181 - RNA, 17 nt, Artificial Sequence
  Synthetic
cuuucgcaaaauaccua

SEQ ID NO: 110182 - RNA, 17 nt, Artificial Sequence
  Synthetic
auguuccggagacucua

SEQ ID NO: 110183 - RNA, 17 nt, Artificial Sequence
  Synthetic
cuaggaguuccgcagua

SEQ ID NO: 110184 - RNA, 17 nt, Artificial Sequence
  Synthetic
cuugccugagugccgua

SEQ ID NO: 110185 - RNA, 17 nt, Artificial Sequence
  Synthetic
uuguucagugguucgua

SEQ ID NO: 110186 - RNA, 17 nt, Artificial Sequence
  Synthetic
ccaccgugaacgcccac

SEQ ID NO: 110187 - RNA, 17 nt, Artificial Sequence
  Synthetic
cgggauucagcgccgac

SEQ ID NO: 110188 - RNA, 17 nt, Artificial Sequence
  Synthetic
uucuccauguucgguac

SEQ ID NO: 110189 - RNA, 17 nt, Artificial Sequence
  Synthetic
accccugcucguguuac

SEQ ID NO: 110190 - RNA, 17 nt, Artificial Sequence
  Synthetic
cgcggacgaccccuccc

SEQ ID NO: 110191 - RNA, 17 nt, Artificial Sequence
  Synthetic
cgggaggggucguccgc

SEQ ID NO: 110192 - RNA, 17 nt, Artificial Sequence
  Synthetic
caaaggacgucccgcgc

SEQ ID NO: 110193 - RNA, 17 nt, Artificial Sequence
  Synthetic
uuugcaugguccggugc

SEQ ID NO: 110194 - RNA, 17 nt, Artificial Sequence
  Synthetic
auggagaacaucgcauc

SEQ ID NO: 110195 - RNA, 17 nt, Artificial Sequence
  Synthetic
cucaccauacggcacuc

SEQ ID NO: 110196 - RNA, 17 nt, Artificial Sequence
  Synthetic
uccaccaaucggcaguc

SEQ ID NO: 110197 - RNA, 17 nt, Artificial Sequence
  Synthetic
cccaccuuguuggcguc

SEQ ID NO: 110198 - RNA, 17 nt, Artificial Sequence
  Synthetic
cuccaugcgacgugcag

SEQ ID NO: 110199 - RNA, 17 nt, Artificial Sequence
  Synthetic
  misc_feature (1)..(1): n is a, c, g, or u
nguaccgaccgaccacg

SEQ ID NO: 110200 - RNA, 17 nt, Artificial Sequence
  Synthetic
ugagaucuucugcgacg

SEQ ID NO: 110201 - RNA, 17 nt, Artificial Sequence
  Synthetic
aagagaggugcgccccg

SEQ ID NO: 110202 - RNA, 17 nt, Artificial Sequence
  Synthetic
ccgggaggggucguccg

SEQ ID NO: 110203 - RNA, 17 nt, Artificial Sequence
  Synthetic
ugagaccuucgucugcg

SEQ ID NO: 110204 - RNA, 17 nt, Artificial Sequence
  Synthetic
agagucuagacucgugg

SEQ ID NO: 110205 - RNA, 17 nt, Artificial Sequence
  Synthetic
ugacugccgauuggugg

SEQ ID NO: 110206 - RNA, 17 nt, Artificial Sequence
  Synthetic
aaucuuaucgaagacug

SEQ ID NO: 110207 - RNA, 17 nt, Artificial Sequence
  Synthetic
ucugccgauccauacug

SEQ ID NO: 110208 - RNA, 17 nt, Artificial Sequence
  Synthetic
cacgagucuagacucug

SEQ ID NO: 110209 - RNA, 17 nt, Artificial Sequence
  Synthetic
cguagcgccucauuuug

SEQ ID NO: 110210 - RNA, 17 nt, Artificial Sequence
  Synthetic
cgauaaccaggacaaau

SEQ ID NO: 110211 - RNA, 17 nt, Artificial Sequence
  Synthetic
aaaccucgaaaaggcau

SEQ ID NO: 110212 - RNA, 17 nt, Artificial Sequence
  Synthetic
aguuccgcaguauggau

SEQ ID NO: 110213 - RNA, 17 nt, Artificial Sequence
  Synthetic
cgaaagcccaagaugau

SEQ ID NO: 110214 - RNA, 17 nt, Artificial Sequence
  Synthetic
aggguccaacugaugau

SEQ ID NO: 110215 - RNA, 17 nt, Artificial Sequence
  Synthetic
ccgccucugcucuguau

SEQ ID NO: 110216 - RNA, 17 nt, Artificial Sequence
  Synthetic
uugcgucagcaaacacu

SEQ ID NO: 110217 - RNA, 17 nt, Artificial Sequence
  Synthetic
caaucuuaucgaagacu

SEQ ID NO: 110218 - RNA, 17 nt, Artificial Sequence
  Synthetic
aucgcaucaggacuccu

SEQ ID NO: 110219 - RNA, 17 nt, Artificial Sequence
  Synthetic
cccgcgcaggauccagu

SEQ ID NO: 110220 - RNA, 17 nt, Artificial Sequence
  Synthetic
cuuuguuuacgucccgu

SEQ ID NO: 110221 - RNA, 17 nt, Artificial Sequence
  Synthetic
ccggacgccaacaaggu

SEQ ID NO: 110222 - RNA, 17 nt, Artificial Sequence
  Synthetic
ugcgccccguggucggu

SEQ ID NO: 110223 - RNA, 17 nt, Artificial Sequence
  Synthetic
acgcaacccccacuggu

SEQ ID NO: 110224 - RNA, 17 nt, Artificial Sequence
  Synthetic
cgggucaccauauucuu

SEQ ID NO: 110225 - RNA, 17 nt, Artificial Sequence
  Synthetic
caugccuuuucgagguu

SEQ ID NO: 110226 - RNA, 17 nt, Artificial Sequence
  Synthetic
cgcaacccccacugguu

SEQ ID NO: 110227 - RNA, 17 nt, Artificial Sequence
  Synthetic
acgaauugugggucuuu

SEQ ID NO: 110228 - RNA, 20 nt, Artificial Sequence
  Synthetic
ccuacgaaccacugaacaaa

SEQ ID NO: 110229 - RNA, 20 nt, Artificial Sequence
  Synthetic
cgccgacgggacguaaacaa

SEQ ID NO: 110230 - RNA, 20 nt, Artificial Sequence
  Synthetic
  misc_feature (6)..(6): n is a, c, g, or u
accagnccguugccgagcaa

SEQ ID NO: 110231 - RNA, 20 nt, Artificial Sequence
  Synthetic
uuuaccccguugcucggcaa

SEQ ID NO: 110232 - RNA, 20 nt, Artificial Sequence
  Synthetic
  misc_feature (16)..(16): n is a, c, g, or u
aauugguaacagcggnauaa

SEQ ID NO: 110233 - RNA, 20 nt, Artificial Sequence
  Synthetic
caacuggccggacgccaaca

SEQ ID NO: 110234 - RNA, 20 nt, Artificial Sequence
  Synthetic
  misc_feature (16)..(16): n is a, c, g, or u
uugggaccucaacccncaca

SEQ ID NO: 110235 - RNA, 20 nt, Artificial Sequence
  Synthetic
ccccgccuguaacacgagca

SEQ ID NO: 110236 - RNA, 20 nt, Artificial Sequence
  Synthetic
  misc_feature (9)..(9): n is a, c, g, or u
cagguuccngugggcguuca

SEQ ID NO: 110237 - RNA, 20 nt, Artificial Sequence
  Synthetic
cucccucgccucgcagacga

SEQ ID NO: 110238 - RNA, 20 nt, Artificial Sequence
  Synthetic
uccgcgggauucagcgccga

SEQ ID NO: 110239 - RNA, 20 nt, Artificial Sequence
  Synthetic
ugcuguacaaaaccuacgga

SEQ ID NO: 110240 - RNA, 20 nt, Artificial Sequence
  Synthetic
uuugcgaaagcccaagauga

SEQ ID NO: 110241 - RNA, 20 nt, Artificial Sequence
  Synthetic
agguuccacgcaugcgcuga

SEQ ID NO: 110242 - RNA, 20 nt, Artificial Sequence
  Synthetic
ccggaaguguugauaagaua

SEQ ID NO: 110243 - RNA, 20 nt, Artificial Sequence
  Synthetic
cuucgauaagauugacgaua

SEQ ID NO: 110244 - RNA, 20 nt, Artificial Sequence
  Synthetic
auguugcuguacaaaaccua

SEQ ID NO: 110245 - RNA, 20 nt, Artificial Sequence
  Synthetic
acaauguuccggagacucua

SEQ ID NO: 110246 - RNA, 20 nt, Artificial Sequence
  Synthetic
cggcuaggaguuccgcagua

SEQ ID NO: 110247 - RNA, 20 nt, Artificial Sequence
  Synthetic
uagcuugccugagugccgua

SEQ ID NO: 110248 - RNA, 20 nt, Artificial Sequence
  Synthetic
cauuuguucagugguucgua

SEQ ID NO: 110249 - RNA, 20 nt, Artificial Sequence
  Synthetic
agggcucacuguuccugaac

SEQ ID NO: 110250 - RNA, 20 nt, Artificial Sequence
  Synthetic
uuugcugacgcaacccccac

SEQ ID NO: 110251 - RNA, 20 nt, Artificial Sequence
  Synthetic
agaccaccgugaacgcccac

SEQ ID NO: 110252 - RNA, 20 nt, Artificial Sequence
  Synthetic
ccgcgggauucagcgccgac

SEQ ID NO: 110253 - RNA, 20 nt, Artificial Sequence
  Synthetic
auguucuccauguucgguac

SEQ ID NO: 110254 - RNA, 20 nt, Artificial Sequence
  Synthetic
aggaccccugcucguguuac

SEQ ID NO: 110255 - RNA, 20 nt, Artificial Sequence
  Synthetic
ucccgcggacgaccccuccc

SEQ ID NO: 110256 - RNA, 20 nt, Artificial Sequence
  Synthetic
accccgccuguaacacgagc

SEQ ID NO: 110257 - RNA, 20 nt, Artificial Sequence
  Synthetic
aaacaaaggacgucccgcgc

SEQ ID NO: 110258 - RNA, 20 nt, Artificial Sequence
  Synthetic
caauuuguccugguuaucgc

SEQ ID NO: 110259 - RNA, 20 nt, Artificial Sequence
  Synthetic
  misc_feature (15)..(15): n is a, c, g, or u
cuguuguuagacgangaggc

SEQ ID NO: 110260 - RNA, 20 nt, Artificial Sequence
  Synthetic
ucuuaugcaagaccuugggc

SEQ ID NO: 110261 - RNA, 20 nt, Artificial Sequence
  Synthetic
acuacuaauucccuggaugc

SEQ ID NO: 110262 - RNA, 20 nt, Artificial Sequence
  Synthetic
cacguagcgccucauuuugc

SEQ ID NO: 110263 - RNA, 20 nt, Artificial Sequence
  Synthetic
  misc_feature (19)..(19): n is a, c, g, or u
cccguugcucggcaacggnc

SEQ ID NO: 110264 - RNA, 20 nt, Artificial Sequence
  Synthetic
aacauggagaacaucgcauc

SEQ ID NO: 110265 - RNA, 20 nt, Artificial Sequence
  Synthetic
caccgccucugcucuguauc

SEQ ID NO: 110266 - RNA, 20 nt, Artificial Sequence
  Synthetic
ucgcagaagaucucaaucuc

SEQ ID NO: 110267 - RNA, 20 nt, Artificial Sequence
  Synthetic
ucgggaggccuuagagucuc

SEQ ID NO: 110268 - RNA, 20 nt, Artificial Sequence
  Synthetic
uccgcaguauggaucggcag

SEQ ID NO: 110269 - RNA, 20 nt, Artificial Sequence
  Synthetic
cggggaguccgcguaaagag

SEQ ID NO: 110270 - RNA, 20 nt, Artificial Sequence
  Synthetic
ucgcaaaauaccuaugggag

SEQ ID NO: 110271 - RNA, 20 nt, Artificial Sequence
  Synthetic
cggaaguguugauaagauag

SEQ ID NO: 110272 - RNA, 20 nt, Artificial Sequence
  Synthetic
  misc_feature (4)..(4): n is a, c, g, or u
cagnccguugccgagcaacg

SEQ ID NO: 110273 - RNA, 20 nt, Artificial Sequence
  Synthetic
  misc_feature (3)..(4): n is a, c, g, or u
ugnnguaccgaccgaccacg

SEQ ID NO: 110274 - RNA, 20 nt, Artificial Sequence
  Synthetic
auaaggugggaaacuuuacg

SEQ ID NO: 110275 - RNA, 20 nt, Artificial Sequence
  Synthetic
cccgucggcgcugaaucccg

SEQ ID NO: 110276 - RNA, 20 nt, Artificial Sequence
  Synthetic
cccgcggacgaccccucccg

SEQ ID NO: 110277 - RNA, 20 nt, Artificial Sequence
  Synthetic
uaccacagagucuagacucg

SEQ ID NO: 110278 - RNA, 20 nt, Artificial Sequence
  Synthetic
accccugcucguguuacagg

SEQ ID NO: 110279 - RNA, 20 nt, Artificial Sequence
  Synthetic
cgccucugcucuguaucggg

SEQ ID NO: 110280 - RNA, 20 nt, Artificial Sequence
  Synthetic
cacagagucuagacucgugg

SEQ ID NO: 110281 - RNA, 20 nt, Artificial Sequence
  Synthetic
uccugacugccgauuggugg

SEQ ID NO: 110282 - RNA, 20 nt, Artificial Sequence
  Synthetic
cgauaaccaggacaaauugg

SEQ ID NO: 110283 - RNA, 20 nt, Artificial Sequence
  Synthetic
  misc_feature (19)..(19): n is a, c, g, or u
acuacuguuguuagacgang

SEQ ID NO: 110284 - RNA, 20 nt, Artificial Sequence
  Synthetic
ccaaaccucgaaaaggcaug

SEQ ID NO: 110285 - RNA, 20 nt, Artificial Sequence
  Synthetic
uccucugccgauccauacug

SEQ ID NO: 110286 - RNA, 20 nt, Artificial Sequence
  Synthetic
caccacgagucuagacucug

SEQ ID NO: 110287 - RNA, 20 nt, Artificial Sequence
  Synthetic
ugccugagugccguauggug

SEQ ID NO: 110288 - RNA, 20 nt, Artificial Sequence
  Synthetic
uccggccaguuguccuugug

SEQ ID NO: 110289 - RNA, 20 nt, Artificial Sequence
  Synthetic
aaugucaacgaccgaccuug

SEQ ID NO: 110290 - RNA, 20 nt, Artificial Sequence
  Synthetic
accccucccggggccgcuug

SEQ ID NO: 110291 - RNA, 20 nt, Artificial Sequence
  Synthetic
acacguagcgccucauuuug

SEQ ID NO: 110292 - RNA, 20 nt, Artificial Sequence
  Synthetic
cagcgauaaccaggacaaau

SEQ ID NO: 110293 - RNA, 20 nt, Artificial Sequence
  Synthetic
aggaggcuguaggcauaaau

SEQ ID NO: 110294 - RNA, 20 nt, Artificial Sequence
  Synthetic
aggaguuccgcaguauggau

SEQ ID NO: 110295 - RNA, 20 nt, Artificial Sequence
  Synthetic
uugcgaaagcccaagaugau

SEQ ID NO: 110296 - RNA, 20 nt, Artificial Sequence
  Synthetic
ugcaggguccaacugaugau

SEQ ID NO: 110297 - RNA, 20 nt, Artificial Sequence
  Synthetic
acaccgccucugcucuguau

SEQ ID NO: 110298 - RNA, 20 nt, Artificial Sequence
  Synthetic
cgucaaucuuaucgaagacu

SEQ ID NO: 110299 - RNA, 20 nt, Artificial Sequence
  Synthetic
aacaucgcaucaggacuccu

SEQ ID NO: 110300 - RNA, 20 nt, Artificial Sequence
  Synthetic
ugcgagcaaaacaagcggcu

SEQ ID NO: 110301 - RNA, 20 nt, Artificial Sequence
  Synthetic
aacccccacugguuggggcu

SEQ ID NO: 110302 - RNA, 20 nt, Artificial Sequence
  Synthetic
ugaaccuuuaccccguugcu

SEQ ID NO: 110303 - RNA, 20 nt, Artificial Sequence
  Synthetic
uuugcgggucaccauauucu

SEQ ID NO: 110304 - RNA, 20 nt, Artificial Sequence
  Synthetic
cgucccgcgcaggauccagu

SEQ ID NO: 110305 - RNA, 20 nt, Artificial Sequence
  Synthetic
caggugcaguuuccguccgu

SEQ ID NO: 110306 - RNA, 20 nt, Artificial Sequence
  Synthetic
ccauuuguucagugguucgu

SEQ ID NO: 110307 - RNA, 20 nt, Artificial Sequence
  Synthetic
uggccggacgccaacaaggu

SEQ ID NO: 110308 - RNA, 20 nt, Artificial Sequence
  Synthetic
aggugcgccccguggucggu

SEQ ID NO: 110309 - RNA, 20 nt, Artificial Sequence
  Synthetic
cugacgcaacccccacuggu

SEQ ID NO: 110310 - RNA, 20 nt, Artificial Sequence
  Synthetic
uugcgggucaccauauucuu

SEQ ID NO: 110311 - RNA, 20 nt, Artificial Sequence
  Synthetic
ugacgcaacccccacugguu

SEQ ID NO: 110312 - RNA, 20 nt, Artificial Sequence
  Synthetic
ccuccccaugggggacuguu

SEQ ID NO: 110313 - RNA, 20 nt, Artificial Sequence
  Synthetic
agauuugggacugcgaauuu

SEQ ID NO: 110314 - RNA, 20 nt, Artificial Sequence
  Synthetic
ucaacgaauugugggucuuu

SEQ ID NO: 110315 - RNA, 17 nt, Artificial Sequence
  Synthetic
  misc_feature (12)..(12): n is a, c, g, or u
gguaacagcggnauaaa

SEQ ID NO: 110316 - RNA, 17 nt, Artificial Sequence
  Synthetic
gccgagcaacgggguaa

SEQ ID NO: 110317 - RNA, 17 nt, Artificial Sequence
  Synthetic
ggacccuguaccgaaca

SEQ ID NO: 110318 - RNA, 17 nt, Artificial Sequence
  Synthetic
gugaagcgaagugcaca

SEQ ID NO: 110319 - RNA, 17 nt, Artificial Sequence
  Synthetic
  misc_feature (13)..(13): n is a, c, g, or u
ggaccucaacccncaca

SEQ ID NO: 110320 - RNA, 17 nt, Artificial Sequence
  Synthetic
  misc_feature (2)..(3): n is a, c, g, or u
gnnguaccgaccgacca

SEQ ID NO: 110321 - RNA, 17 nt, Artificial Sequence
  Synthetic
  misc_feature (8)..(9): n is a, c, g, or u
ggguucannccucccca

SEQ ID NO: 110322 - RNA, 17 nt, Artificial Sequence
  Synthetic
gcacagccuagcagcca

SEQ ID NO: 110323 - RNA, 17 nt, Artificial Sequence
  Synthetic
ggaagauccagcaucca

SEQ ID NO: 110324 - RNA, 17 nt, Artificial Sequence
  Synthetic
  misc_feature (9)..(9): n is a, c, g, or u
gaacaagancuacagca

SEQ ID NO: 110325 - RNA, 17 nt, Artificial Sequence
  Synthetic
gaggugaaaaaguugca

SEQ ID NO: 110326 - RNA, 17 nt, Artificial Sequence
  Synthetic
  misc_feature (3)..(3): n is a, c, g, or u
gungugcagguuuugca

SEQ ID NO: 110327 - RNA, 17 nt, Artificial Sequence
  Synthetic
guucuucuggacuauca

SEQ ID NO: 110328 - RNA, 17 nt, Artificial Sequence
  Synthetic
  misc_feature (6)..(6): n is a, c, g, or u
guuccngugggcguuca

SEQ ID NO: 110329 - RNA, 17 nt, Artificial Sequence
  Synthetic
gaaggaaagaagucaga

SEQ ID NO: 110330 - RNA, 17 nt, Artificial Sequence
  Synthetic
gcgaaagcccaagauga

SEQ ID NO: 110331 - RNA, 17 nt, Artificial Sequence
  Synthetic
  misc_feature (4)..(4): n is a, c, g, or u
guangcccugagccuga

SEQ ID NO: 110332 - RNA, 17 nt, Artificial Sequence
  Synthetic
  misc_feature (16)..(16): n is a, c, g, or u
guuuucauuuacuguna

SEQ ID NO: 110333 - RNA, 17 nt, Artificial Sequence
  Synthetic
gaaguguugauaagaua

SEQ ID NO: 110334 - RNA, 17 nt, Artificial Sequence
  Synthetic
gcuccaaauucuuuaua

SEQ ID NO: 110335 - RNA, 17 nt, Artificial Sequence
  Synthetic
ggggcuuuauucuucua

SEQ ID NO: 110336 - RNA, 17 nt, Artificial Sequence
  Synthetic
ggaauuagaggacaaac

SEQ ID NO: 110337 - RNA, 17 nt, Artificial Sequence
  Synthetic
gcucacuguuccugaac

SEQ ID NO: 110338 - RNA, 17 nt, Artificial Sequence
  Synthetic
gaugagaaggcacagac

SEQ ID NO: 110339 - RNA, 17 nt, Artificial Sequence
  Synthetic
gagccccaagcggcccc

SEQ ID NO: 110340 - RNA, 17 nt, Artificial Sequence
  Synthetic
guuuguccucuaauucc

SEQ ID NO: 110341 - RNA, 17 nt, Artificial Sequence
  Synthetic
gaacuggagccaccagc

SEQ ID NO: 110342 - RNA, 17 nt, Artificial Sequence
  Synthetic
  misc_feature (4)..(4): n is a, c, g, or u
gagncaguauucugagc

SEQ ID NO: 110343 - RNA, 17 nt, Artificial Sequence
  Synthetic
gaguuggcuuugaaugc

SEQ ID NO: 110344 - RNA, 17 nt, Artificial Sequence
  Synthetic
  misc_feature (3)..(3): n is a, c, g, or u
gcncuguacuuuccugc

SEQ ID NO: 110345 - RNA, 17 nt, Artificial Sequence
  Synthetic
gcaggaggaggagcugc

SEQ ID NO: 110346 - RNA, 17 nt, Artificial Sequence
  Synthetic
  misc_feature (16)..(16): n is a, c, g, or u
guugcucggcaacggnc

SEQ ID NO: 110347 - RNA, 17 nt, Artificial Sequence
  Synthetic
ggguugaggucccaauc

SEQ ID NO: 110348 - RNA, 17 nt, Artificial Sequence
  Synthetic
ggguccaacugaugauc

SEQ ID NO: 110349 - RNA, 17 nt, Artificial Sequence
  Synthetic
  misc_feature (7)..(7): n is a, c, g, or u
guacagngcccugacuc

SEQ ID NO: 110350 - RNA, 17 nt, Artificial Sequence
  Synthetic
guugggguggagcccuc

SEQ ID NO: 110351 - RNA, 17 nt, Artificial Sequence
  Synthetic
guggagcccucaggcuc

SEQ ID NO: 110352 - RNA, 17 nt, Artificial Sequence
  Synthetic
ggaggccuuagagucuc

SEQ ID NO: 110353 - RNA, 17 nt, Artificial Sequence
  Synthetic
gcagguuuugcaugguc

SEQ ID NO: 110354 - RNA, 17 nt, Artificial Sequence
  Synthetic
  misc_feature (13)..(14): n is a, c, g, or u
guaaauaaugucnnguc

SEQ ID NO: 110355 - RNA, 17 nt, Artificial Sequence
  Synthetic
ggcuuucccccacuguc

SEQ ID NO: 110356 - RNA, 17 nt, Artificial Sequence
  Synthetic
gcugguggcuccaguuc

SEQ ID NO: 110357 - RNA, 17 nt, Artificial Sequence
  Synthetic
gcugcgagcaaaacaag

SEQ ID NO: 110358 - RNA, 17 nt, Artificial Sequence
  Synthetic
ggcgguagagccccaag

SEQ ID NO: 110359 - RNA, 17 nt, Artificial Sequence
  Synthetic
ggccaagccccaaccag

SEQ ID NO: 110360 - RNA, 17 nt, Artificial Sequence
  Synthetic
gccuguaacacgagcag

SEQ ID NO: 110361 - RNA, 17 nt, Artificial Sequence
  Synthetic
gggaguucuucuucuag

SEQ ID NO: 110362 - RNA, 17 nt, Artificial Sequence
  Synthetic
gaugauccuggaauuag

SEQ ID NO: 110363 - RNA, 17 nt, Artificial Sequence
  Synthetic
  misc_feature (12)..(12): n is a, c, g, or u
ggaugagugucncuuag

SEQ ID NO: 110364 - RNA, 17 nt, Artificial Sequence
  Synthetic
guccccaugccuuuucg

SEQ ID NO: 110365 - RNA, 17 nt, Artificial Sequence
  Synthetic
gccggacgccaacaagg

SEQ ID NO: 110366 - RNA, 17 nt, Artificial Sequence
  Synthetic
gguggucuauaugcagg

SEQ ID NO: 110367 - RNA, 17 nt, Artificial Sequence
  Synthetic
gugggaggaguuggggg

SEQ ID NO: 110368 - RNA, 17 nt, Artificial Sequence
  Synthetic
gaaucuagccaccuggg

SEQ ID NO: 110369 - RNA, 17 nt, Artificial Sequence
  Synthetic
  misc_feature (13)..(13): n is a, c, g, or u
ggaugauguggunuugg

SEQ ID NO: 110370 - RNA, 17 nt, Artificial Sequence
  Synthetic
gaucuugaagaguuugg

SEQ ID NO: 110371 - RNA, 17 nt, Artificial Sequence
  Synthetic
  misc_feature (9)..(9): n is a, c, g, or u
  misc_feature (12)..(12): n is a, c, g, or u
gccccuuunacncaaug

SEQ ID NO: 110372 - RNA, 17 nt, Artificial Sequence
  Synthetic
  misc_feature (6)..(7): n is a, c, g, or u
guucannccuccccaug

SEQ ID NO: 110373 - RNA, 17 nt, Artificial Sequence
  Synthetic
gaaccaacaagaagaug

SEQ ID NO: 110374 - RNA, 17 nt, Artificial Sequence
  Synthetic
gacucugugguauugug

SEQ ID NO: 110375 - RNA, 17 nt, Artificial Sequence
  Synthetic
ggccaguuguccuugug

SEQ ID NO: 110376 - RNA, 17 nt, Artificial Sequence
  Synthetic
  misc_feature (5)..(5): n is a, c, g, or u
  misc_feature (14)..(14): n is a, c, g, or u
gaaangauguauanuug

SEQ ID NO: 110377 - RNA, 17 nt, Artificial Sequence
  Synthetic
gaauugugggucuuuug

SEQ ID NO: 110378 - RNA, 17 nt, Artificial Sequence
  Synthetic
  misc_feature (17)..(17): n is a, c, g, or u
gccaguuguccuugugn

SEQ ID NO: 110379 - RNA, 17 nt, Artificial Sequence
  Synthetic
  misc_feature (15)..(15): n is a, c, g, or u
  misc_feature (17)..(17): n is a, c, g, or u
gaaggaguuugccanun

SEQ ID NO: 110380 - RNA, 17 nt, Artificial Sequence
  Synthetic
  misc_feature (7)..(8): n is a, c, g, or u
gguucannccuccccau

SEQ ID NO: 110381 - RNA, 17 nt, Artificial Sequence
  Synthetic
gguuggggcuuggccau

SEQ ID NO: 110382 - RNA, 17 nt, Artificial Sequence
  Synthetic
ggaaguguugauaagau

SEQ ID NO: 110383 - RNA, 17 nt, Artificial Sequence
  Synthetic
gcccaagaugaugggau

SEQ ID NO: 110384 - RNA, 17 nt, Artificial Sequence
  Synthetic
gccuccaagcugugccu

SEQ ID NO: 110385 - RNA, 17 nt, Artificial Sequence
  Synthetic
gagcaaaacaagcggcu

SEQ ID NO: 110386 - RNA, 17 nt, Artificial Sequence
  Synthetic
gcagaagaucucaaucu

SEQ ID NO: 110387 - RNA, 17 nt, Artificial Sequence
  Synthetic
  misc_feature (2)..(2): n is a, c, g, or u
gnaacacccgugugucu

SEQ ID NO: 110388 - RNA, 17 nt, Artificial Sequence
  Synthetic
gagggaguucuucuucu

SEQ ID NO: 110389 - RNA, 17 nt, Artificial Sequence
  Synthetic
  misc_feature (9)..(9): n is a, c, g, or u
  misc_feature (11)..(11): n is a, c, g, or u
gguggaganangggagu

SEQ ID NO: 110390 - RNA, 17 nt, Artificial Sequence
  Synthetic
gccaacaaggugggagu

SEQ ID NO: 110391 - RNA, 17 nt, Artificial Sequence
  Synthetic
gaaguaugccucaaggu

SEQ ID NO: 110392 - RNA, 17 nt, Artificial Sequence
  Synthetic
gaggugcgccccguggu

SEQ ID NO: 110393 - RNA, 17 nt, Artificial Sequence
  Synthetic
  misc_feature (14)..(15): n is a, c, g, or u
gauauguaauuggnngu

SEQ ID NO: 110394 - RNA, 17 nt, Artificial Sequence
  Synthetic
ggcaagcuauucugugu

SEQ ID NO: 110395 - RNA, 17 nt, Artificial Sequence
  Synthetic
  misc_feature (3)..(3): n is a, c, g, or u
gunugucaacgaauugu

SEQ ID NO: 110396 - RNA, 17 nt, Artificial Sequence
  Synthetic
  misc_feature (6)..(6): n is a, c, g, or u
gacccnuauaaagaauu

SEQ ID NO: 110397 - RNA, 17 nt, Artificial Sequence
  Synthetic
gugggagugggagcauu

SEQ ID NO: 110398 - RNA, 17 nt, Artificial Sequence
  Synthetic
gauaagauaggggcauu

SEQ ID NO: 110399 - RNA, 17 nt, Artificial Sequence
  Synthetic
gugagugacuggagauu

SEQ ID NO: 110400 - RNA, 17 nt, Artificial Sequence
  Synthetic
gcgauguucuccauguu

SEQ ID NO: 110401 - RNA, 17 nt, Artificial Sequence
  Synthetic
gcaagcuauucuguguu

SEQ ID NO: 110402 - RNA, 17 nt, Artificial Sequence
  Synthetic
gugccuuggguggcuuu

SEQ ID NO: 110403 - RNA, 17 nt, Artificial Sequence
  Synthetic
  misc_feature (12)..(12): n is a, c, g, or u
gaauauuuggunucuuu

SEQ ID NO: 110404 - RNA, 20 nt, Artificial Sequence
  Synthetic
guaaacugagccaagagaaa

SEQ ID NO: 110405 - RNA, 20 nt, Artificial Sequence
  Synthetic
  misc_feature (5)..(5): n is a, c, g, or u
  misc_feature (14)..(14): n is a, c, g, or u
  misc_feature (17)..(17): n is a, c, g, or u
gauanccacauugngunaaa

SEQ ID NO: 110406 - RNA, 20 nt, Artificial Sequence
  Synthetic
gaucggcagaggagacacaa

SEQ ID NO: 110407 - RNA, 20 nt, Artificial Sequence
  Synthetic
  misc_feature (6)..(6): n is a, c, g, or u
  misc_feature (15)..(15): n is a, c, g, or u
  misc_feature (18)..(18): n is a, c, g, or u
ggauanccacauugngunaa

SEQ ID NO: 110408 - RNA, 20 nt, Artificial Sequence
  Synthetic
  misc_feature (9)..(9): n is a, c, g, or u
gguuugaunccuuuaucuaa

SEQ ID NO: 110409 - RNA, 20 nt, Artificial Sequence
  Synthetic
gaggugaagcgaagugcaca

SEQ ID NO: 110410 - RNA, 20 nt, Artificial Sequence
  Synthetic
gcagcacagccuagcagcca

SEQ ID NO: 110411 - RNA, 20 nt, Artificial Sequence
  Synthetic
  misc_feature (5)..(5): n is a, c, g, or u
  misc_feature (14)..(14): n is a, c, g, or u
gcaanuauacaucnuuucca

SEQ ID NO: 110412 - RNA, 20 nt, Artificial Sequence
  Synthetic
gcagaggugaaaaaguugca

SEQ ID NO: 110413 - RNA, 20 nt, Artificial Sequence
  Synthetic
  misc_feature (6)..(6): n is a, c, g, or u
ggagungugcagguuuugca

SEQ ID NO: 110414 - RNA, 20 nt, Artificial Sequence
  Synthetic
ggguggagcccucaggcuca

SEQ ID NO: 110415 - RNA, 20 nt, Artificial Sequence
  Synthetic
  misc_feature (3)..(3): n is a, c, g, or u
ggnagaugagaaggcacaga

SEQ ID NO: 110416 - RNA, 20 nt, Artificial Sequence
  Synthetic
gaaagcccaagaugauggga

SEQ ID NO: 110417 - RNA, 20 nt, Artificial Sequence
  Synthetic
gguuuuguacagcaacauga

SEQ ID NO: 110418 - RNA, 20 nt, Artificial Sequence
  Synthetic
  misc_feature (4)..(4): n is a, c, g, or u
  misc_feature (19)..(19): n is a, c, g, or u
gucncuuagagguggagana

SEQ ID NO: 110419 - RNA, 20 nt, Artificial Sequence
  Synthetic
gaagcuccaaauucuuuaua

SEQ ID NO: 110420 - RNA, 20 nt, Artificial Sequence
  Synthetic
gaauuuuggccaagacacac

SEQ ID NO: 110421 - RNA, 20 nt, Artificial Sequence
  Synthetic
  misc_feature (12)..(12): n is a, c, g, or u
ggaucaucaacnaccagcac

SEQ ID NO: 110422 - RNA, 20 nt, Artificial Sequence
  Synthetic
  misc_feature (2)..(2): n is a, c, g, or u
gnagaugagaaggcacagac

SEQ ID NO: 110423 - RNA, 20 nt, Artificial Sequence
  Synthetic
ggagugggagcauucgggcc

SEQ ID NO: 110424 - RNA, 20 nt, Artificial Sequence
  Synthetic
  misc_feature (9)..(9): n is a, c, g, or u
gugcuggunguugaugaucc

SEQ ID NO: 110425 - RNA, 20 nt, Artificial Sequence
  Synthetic
gcauauaaaggcauuaaagc

SEQ ID NO: 110426 - RNA, 20 nt, Artificial Sequence
  Synthetic
  misc_feature (6)..(7): n is a, c, g, or u
  misc_feature (11)..(11): n is a, c, g, or u
gguacnncagncggagaagc

SEQ ID NO: 110427 - RNA, 20 nt, Artificial Sequence
  Synthetic
  misc_feature (2)..(2): n is a, c, g, or u
  misc_feature (7)..(7): n is a, c, g, or u
gnagagncaguauucugagc

SEQ ID NO: 110428 - RNA, 20 nt, Artificial Sequence
  Synthetic
gacugccgauugguggaggc

SEQ ID NO: 110429 - RNA, 20 nt, Artificial Sequence
  Synthetic
gcauuugguggucuauaugc

SEQ ID NO: 110430 - RNA, 20 nt, Artificial Sequence
  Synthetic
gaggcaggaggaggagcugc

SEQ ID NO: 110431 - RNA, 20 nt, Artificial Sequence
  Synthetic
gguuuugcaugguccggugc

SEQ ID NO: 110432 - RNA, 20 nt, Artificial Sequence
  Synthetic
gugaaaaaguugcauggugc

SEQ ID NO: 110433 - RNA, 20 nt, Artificial Sequence
  Synthetic
  misc_feature (19)..(19): n is a, c, g, or u
gucugugccuucucaucunc

SEQ ID NO: 110434 - RNA, 20 nt, Artificial Sequence
  Synthetic
  misc_feature (8)..(8): n is a, c, g, or u
  misc_feature (11)..(11): n is a, c, g, or u
ggucuggngcnaaacucauc

SEQ ID NO: 110435 - RNA, 20 nt, Artificial Sequence
  Synthetic
gggguggagcccucaggcuc

SEQ ID NO: 110436 - RNA, 20 nt, Artificial Sequence
  Synthetic
gccuccaccaaucggcaguc

SEQ ID NO: 110437 - RNA, 20 nt, Artificial Sequence
  Synthetic
ggccucccgauacagagcag

SEQ ID NO: 110438 - RNA, 20 nt, Artificial Sequence
  Synthetic
ggcauagcagcaggaugcag

SEQ ID NO: 110439 - RNA, 20 nt, Artificial Sequence
  Synthetic
gccccaagcggccccgggag

SEQ ID NO: 110440 - RNA, 20 nt, Artificial Sequence
  Synthetic
ggacgccaacaaggugggag

SEQ ID NO: 110441 - RNA, 20 nt, Artificial Sequence
  Synthetic
gcaacaugagggaaacauag

SEQ ID NO: 110442 - RNA, 20 nt, Artificial Sequence
  Synthetic
gacuucucucaauuuucuag

SEQ ID NO: 110443 - RNA, 20 nt, Artificial Sequence
  Synthetic
guugaugauccuggaauuag

SEQ ID NO: 110444 - RNA, 20 nt, Artificial Sequence
  Synthetic
gccccgggaggggucguccg

SEQ ID NO: 110445 - RNA, 20 nt, Artificial Sequence
  Synthetic
gcugccaacuggauccugcg

SEQ ID NO: 110446 - RNA, 20 nt, Artificial Sequence
  Synthetic
  misc_feature (12)..(12): n is a, c, g, or u
ggaugagugucncuuagagg

SEQ ID NO: 110447 - RNA, 20 nt, Artificial Sequence
  Synthetic
gagccccaagcggccccggg

SEQ ID NO: 110448 - RNA, 20 nt, Artificial Sequence
  Synthetic
  misc_feature (8)..(9): n is a, c, g, or u
ggguucannccuccccaugg

SEQ ID NO: 110449 - RNA, 20 nt, Artificial Sequence
  Synthetic
  misc_feature (3)..(3): n is a, c, g, or u
gcncuguacuuuccugcugg

SEQ ID NO: 110450 - RNA, 20 nt, Artificial Sequence
  Synthetic
ggccaagccccaaccagugg

SEQ ID NO: 110451 - RNA, 20 nt, Artificial Sequence
  Synthetic
gauaagauaggggcauuugg

SEQ ID NO: 110452 - RNA, 20 nt, Artificial Sequence
  Synthetic
  misc_feature (3)..(3): n is a, c, g, or u
  misc_feature (12)..(12): n is a, c, g, or u
  misc_feature (15)..(15): n is a, c, g, or u
gcngccccuuunacncaaug

SEQ ID NO: 110453 - RNA, 20 nt, Artificial Sequence
  Synthetic
gaagaaccaacaagaagaug

SEQ ID NO: 110454 - RNA, 20 nt, Artificial Sequence
  Synthetic
gucaaucuuaucgaagacug

SEQ ID NO: 110455 - RNA, 20 nt, Artificial Sequence
  Synthetic
gagccaagagaaacggacug

SEQ ID NO: 110456 - RNA, 20 nt, Artificial Sequence
  Synthetic
  misc_feature (8)..(8): n is a, c, g, or u
gugaguangcccugagccug

SEQ ID NO: 110457 - RNA, 20 nt, Artificial Sequence
  Synthetic
  misc_feature (7)..(7): n is a, c, g, or u
gaaagunugucaacgaauug

SEQ ID NO: 110458 - RNA, 20 nt, Artificial Sequence
  Synthetic
  misc_feature (2)..(2): n is a, c, g, or u
  misc_feature (14)..(14): n is a, c, g, or u
gnaagaaucccagnggauug

SEQ ID NO: 110459 - RNA, 20 nt, Artificial Sequence
  Synthetic
  misc_feature (15)..(16): n is a, c, g, or u
ggauauguaauuggnnguug

SEQ ID NO: 110460 - RNA, 20 nt, Artificial Sequence
  Synthetic
ggacugaggcccacucccau

SEQ ID NO: 110461 - RNA, 20 nt, Artificial Sequence
  Synthetic
  misc_feature (11)..(11): n is a, c, g, or u
gggaacaagancuacagcau

SEQ ID NO: 110462 - RNA, 20 nt, Artificial Sequence
  Synthetic
ggauauucccuuaacuucau

SEQ ID NO: 110463 - RNA, 20 nt, Artificial Sequence
  Synthetic
  misc_feature (4)..(4): n is a, c, g, or u
  misc_feature (16)..(16): n is a, c, g, or u
gggnaagaaucccagnggau

SEQ ID NO: 110464 - RNA, 20 nt, Artificial Sequence
  Synthetic
  misc_feature (4)..(4): n is a, c, g, or u
guunaugaaucuagccaccu

SEQ ID NO: 110465 - RNA, 20 nt, Artificial Sequence
  Synthetic
gucuugcauaagaggacucu

SEQ ID NO: 110466 - RNA, 20 nt, Artificial Sequence
  Synthetic
gggccucaguccguuucucu

SEQ ID NO: 110467 - RNA, 20 nt, Artificial Sequence
  Synthetic
  misc_feature (5)..(5): n is a, c, g, or u
ggggnaacacccgugugucu

SEQ ID NO: 110468 - RNA, 20 nt, Artificial Sequence
  Synthetic
ggcgagggaguucuucuucu

SEQ ID NO: 110469 - RNA, 20 nt, Artificial Sequence
  Synthetic
  misc_feature (6)..(6): n is a, c, g, or u
guuuanugagugggaggagu

SEQ ID NO: 110470 - RNA, 20 nt, Artificial Sequence
  Synthetic
  misc_feature (18)..(18): n is a, c, g, or u
gaccuugggcagguuccngu

SEQ ID NO: 110471 - RNA, 20 nt, Artificial Sequence
  Synthetic
gcuaugccucaucuucuugu

SEQ ID NO: 110472 - RNA, 20 nt, Artificial Sequence
  Synthetic
  misc_feature (6)..(6): n is a, c, g, or u
  misc_feature (12)..(12): n is a, c, g, or u
gauagnuguaancaauuugu

SEQ ID NO: 110473 - RNA, 20 nt, Artificial Sequence
  Synthetic
ggcaaauauuuaguaacauu

SEQ ID NO: 110474 - RNA, 20 nt, Artificial Sequence
  Synthetic
guugauaagauaggggcauu

SEQ ID NO: 110475 - RNA, 20 nt, Artificial Sequence
  Synthetic
  misc_feature (3)..(3): n is a, c, g, or u
  misc_feature (15)..(15): n is a, c, g, or u
ggnaagaaucccagnggauu

SEQ ID NO: 110476 - RNA, 20 nt, Artificial Sequence
  Synthetic
  misc_feature (11)..(11): n is a, c, g, or u
gacaugaacangagaugauu

SEQ ID NO: 110477 - RNA, 20 nt, Artificial Sequence
  Synthetic
guccucuuaugcaagaccuu

SEQ ID NO: 110478 - RNA, 20 nt, Artificial Sequence
  Synthetic
  misc_feature (14)..(14): n is a, c, g, or u
gacauuauuuacanacucuu

SEQ ID NO: 110479 - RNA, 20 nt, Artificial Sequence
  Synthetic
  misc_feature (16)..(17): n is a, c, g, or u
gggauauguaauuggnnguu

SEQ ID NO: 110480 - RNA, 20 nt, Artificial Sequence
  Synthetic
gcugugccuuggguggcuuu

SEQ ID NO: 110481 - RNA, 17 nt, Artificial Sequence
  Synthetic
acgaaccacugaacaaa

SEQ ID NO: 110482 - RNA, 17 nt, Artificial Sequence
  Synthetic
uggaauuagaggacaaa

SEQ ID NO: 110483 - RNA, 17 nt, Artificial Sequence
  Synthetic
aacugagccaagagaaa

SEQ ID NO: 110484 - RNA, 17 nt, Artificial Sequence
  Synthetic
ucuuccaaaccucgaaa

SEQ ID NO: 110485 - RNA, 17 nt, Artificial Sequence
  Synthetic
  misc_feature (2)..(2): n is a, c, g, or u
  misc_feature (11)..(11): n is a, c, g, or u
  misc_feature (14)..(14): n is a, c, g, or u
anccacauugngunaaa

SEQ ID NO: 110486 - RNA, 17 nt, Artificial Sequence
  Synthetic
cggcagaggagacacaa

SEQ ID NO: 110487 - RNA, 17 nt, Artificial Sequence
  Synthetic
  misc_feature (4)..(4): n is a, c, g, or u
  misc_feature (10)..(10): n is a, c, g, or u
auanuguuuncuuagaa

SEQ ID NO: 110488 - RNA, 17 nt, Artificial Sequence
  Synthetic
  misc_feature (3)..(3): n is a, c, g, or u
  misc_feature (12)..(12): n is a, c, g, or u
  misc_feature (15)..(15): n is a, c, g, or u
uanccacauugngunaa

SEQ ID NO: 110489 - RNA, 17 nt, Artificial Sequence
  Synthetic
uauuugcccuuagauaa

SEQ ID NO: 110490 - RNA, 17 nt, Artificial Sequence
  Synthetic
  misc_feature (13)..(13): n is a, c, g, or u
ugguaacagcggnauaa

SEQ ID NO: 110491 - RNA, 17 nt, Artificial Sequence
  Synthetic
uguauacaugcauauaa

SEQ ID NO: 110492 - RNA, 17 nt, Artificial Sequence
  Synthetic
  misc_feature (6)..(6): n is a, c, g, or u
uugaunccuuuaucuaa

SEQ ID NO: 110493 - RNA, 17 nt, Artificial Sequence
  Synthetic
auaucccaugaaguuaa

SEQ ID NO: 110494 - RNA, 17 nt, Artificial Sequence
  Synthetic
auuuuggccaagacaca

SEQ ID NO: 110495 - RNA, 17 nt, Artificial Sequence
  Synthetic
uuucucgccaacuuaca

SEQ ID NO: 110496 - RNA, 17 nt, Artificial Sequence
  Synthetic
  misc_feature (6)..(6): n is a, c, g, or u
ugcccnaaagccaccca

SEQ ID NO: 110497 - RNA, 17 nt, Artificial Sequence
  Synthetic
accccaacaguccccca

SEQ ID NO: 110498 - RNA, 17 nt, Artificial Sequence
  Synthetic
  misc_feature (5)..(5): n is a, c, g, or u
ccacnggaaccugccca

SEQ ID NO: 110499 - RNA, 17 nt, Artificial Sequence
  Synthetic
  misc_feature (12)..(12): n is a, c, g, or u
cccaccuuaugngucca

SEQ ID NO: 110500 - RNA, 17 nt, Artificial Sequence
  Synthetic
  misc_feature (2)..(2): n is a, c, g, or u
  misc_feature (11)..(11): n is a, c, g, or u
anuauacaucnuuucca

SEQ ID NO: 110501 - RNA, 17 nt, Artificial Sequence
  Synthetic
  misc_feature (3)..(3): n is a, c, g, or u
agncaguauucugagca

SEQ ID NO: 110502 - RNA, 17 nt, Artificial Sequence
  Synthetic
caaaccucgaaaaggca

SEQ ID NO: 110503 - RNA, 17 nt, Artificial Sequence
  Synthetic
  misc_feature (12)..(12): n is a, c, g, or u
uggguggcuuungggca

SEQ ID NO: 110504 - RNA, 17 nt, Artificial Sequence
  Synthetic
aguuggcuuugaaugca

SEQ ID NO: 110505 - RNA, 17 nt, Artificial Sequence
  Synthetic
cuuugaaguaugccuca

SEQ ID NO: 110506 - RNA, 17 nt, Artificial Sequence
  Synthetic
uggagcccucaggcuca

SEQ ID NO: 110507 - RNA, 17 nt, Artificial Sequence
  Synthetic
  misc_feature (6)..(6): n is a, c, g, or u
ugcacnacuccugcuca

SEQ ID NO: 110508 - RNA, 17 nt, Artificial Sequence
  Synthetic
ucaagaucccagaguca

SEQ ID NO: 110509 - RNA, 17 nt, Artificial Sequence
  Synthetic
auauucccuuaacuuca

SEQ ID NO: 110510 - RNA, 17 nt, Artificial Sequence
  Synthetic
  misc_feature (5)..(5): n is a, c, g, or u
cucanaaaacaaaaaga

SEQ ID NO: 110511 - RNA, 17 nt, Artificial Sequence
  Synthetic
ugaaugucaggaaaaga

SEQ ID NO: 110512 - RNA, 17 nt, Artificial Sequence
  Synthetic
agaugagaaggcacaga

SEQ ID NO: 110513 - RNA, 17 nt, Artificial Sequence
  Synthetic
  misc_feature (9)..(9): n is a, c, g, or u
cgguccggnagaugaga

SEQ ID NO: 110514 - RNA, 17 nt, Artificial Sequence
  Synthetic
  misc_feature (3)..(3): n is a, c, g, or u
  misc_feature (14)..(14): n is a, c, g, or u
agnagaucucgaanaga

SEQ ID NO: 110515 - RNA, 17 nt, Artificial Sequence
  Synthetic
ccucgccucgcagacga

SEQ ID NO: 110516 - RNA, 17 nt, Artificial Sequence
  Synthetic
ccaaucggcagucagga

SEQ ID NO: 110517 - RNA, 17 nt, Artificial Sequence
  Synthetic
cccaagcggccccggga

SEQ ID NO: 110518 - RNA, 17 nt, Artificial Sequence
  Synthetic
agcccaagaugauggga

SEQ ID NO: 110519 - RNA, 17 nt, Artificial Sequence
  Synthetic
  misc_feature (7)..(7): n is a, c, g, or u
uuuacanacucuuugga

SEQ ID NO: 110520 - RNA, 17 nt, Artificial Sequence
  Synthetic
uuuguacagcaacauga

SEQ ID NO: 110521 - RNA, 17 nt, Artificial Sequence
  Synthetic
uuccacgcaugcgcuga

SEQ ID NO: 110522 - RNA, 17 nt, Artificial Sequence
  Synthetic
  misc_feature (14)..(14): n is a, c, g, or u
aucuuuuuguuuunuga

SEQ ID NO: 110523 - RNA, 17 nt, Artificial Sequence
  Synthetic
  misc_feature (1)..(1): n is a, c, g, or u
  misc_feature (16)..(16): n is a, c, g, or u
ncuuagagguggagana

SEQ ID NO: 110524 - RNA, 17 nt, Artificial Sequence
  Synthetic
  misc_feature (16)..(16): n is a, c, g, or u
caugcgcugauggccna

SEQ ID NO: 110525 - RNA, 17 nt, Artificial Sequence
  Synthetic
ucuuguucccaagaaua

SEQ ID NO: 110526 - RNA, 17 nt, Artificial Sequence
  Synthetic
  misc_feature (5)..(5): n is a, c, g, or u
acauncucuggauaaua

SEQ ID NO: 110527 - RNA, 17 nt, Artificial Sequence
  Synthetic
  misc_feature (10)..(10): n is a, c, g, or u
cuaugucaanguuaaua

SEQ ID NO: 110528 - RNA, 17 nt, Artificial Sequence
  Synthetic
  misc_feature (13)..(13): n is a, c, g, or u
uauuccuuggacncaua

SEQ ID NO: 110529 - RNA, 17 nt, Artificial Sequence
  Synthetic
ucuggcuuucaguuaua

SEQ ID NO: 110530 - RNA, 17 nt, Artificial Sequence
  Synthetic
uugcuguacaaaaccua

SEQ ID NO: 110531 - RNA, 17 nt, Artificial Sequence
  Synthetic
  misc_feature (7)..(7): n is a, c, g, or u
uuugaunccuuuaucua

SEQ ID NO: 110532 - RNA, 17 nt, Artificial Sequence
  Synthetic
agggaguucuucuucua

SEQ ID NO: 110533 - RNA, 17 nt, Artificial Sequence
  Synthetic
cuucucucaauuuucua

SEQ ID NO: 110534 - RNA, 17 nt, Artificial Sequence
  Synthetic
cauaucccaugaaguua

SEQ ID NO: 110535 - RNA, 17 nt, Artificial Sequence
  Synthetic
uaaggugggaaacuuua

SEQ ID NO: 110536 - RNA, 17 nt, Artificial Sequence
  Synthetic
  misc_feature (2)..(2): n is a, c, g, or u
unacaguaaaugaaaac

SEQ ID NO: 110537 - RNA, 17 nt, Artificial Sequence
  Synthetic
  misc_feature (13)..(13): n is a, c, g, or u
auguauacaagcnaaac

SEQ ID NO: 110538 - RNA, 17 nt, Artificial Sequence
  Synthetic
  misc_feature (5)..(5): n is a, c, g, or u
acccncacaaggacaac

SEQ ID NO: 110539 - RNA, 17 nt, Artificial Sequence
  Synthetic
uaggcugugcugccaac

SEQ ID NO: 110540 - RNA, 17 nt, Artificial Sequence
  Synthetic
uuuuggccaagacacac

SEQ ID NO: 110541 - RNA, 17 nt, Artificial Sequence
  Synthetic
  misc_feature (1)..(2): n is a, c, g, or u
nnguaccgaccgaccac

SEQ ID NO: 110542 - RNA, 17 nt, Artificial Sequence
  Synthetic
  misc_feature (9)..(9): n is a, c, g, or u
ucaucaacnaccagcac

SEQ ID NO: 110543 - RNA, 17 nt, Artificial Sequence
  Synthetic
ucaaucuuaucgaagac

SEQ ID NO: 110544 - RNA, 17 nt, Artificial Sequence
  Synthetic
  misc_feature (4)..(4): n is a, c, g, or u
ucunccaaaaguaagac

SEQ ID NO: 110545 - RNA, 17 nt, Artificial Sequence
  Synthetic
  misc_feature (4)..(4): n is a, c, g, or u
acanguuggugagugac

SEQ ID NO: 110546 - RNA, 17 nt, Artificial Sequence
  Synthetic
ugaugggaugggaauac

SEQ ID NO: 110547 - RNA, 17 nt, Artificial Sequence
  Synthetic
aaggugggaaacuuuac

SEQ ID NO: 110548 - RNA, 17 nt, Artificial Sequence
  Synthetic
  misc_feature (9)..(9): n is a, c, g, or u
ucaauaggncuguuuac

SEQ ID NO: 110549 - RNA, 17 nt, Artificial Sequence
  Synthetic
cacauccagcgauaacc

SEQ ID NO: 110550 - RNA, 17 nt, Artificial Sequence
  Synthetic
  misc_feature (2)..(2): n is a, c, g, or u
unaugaaucuagccacc

SEQ ID NO: 110551 - RNA, 17 nt, Artificial Sequence
  Synthetic
  misc_feature (9)..(10): n is a, c, g, or u
uggggaggnnugaaccc

SEQ ID NO: 110552 - RNA, 17 nt, Artificial Sequence
  Synthetic
caaauuacuucccaccc

SEQ ID NO: 110553 - RNA, 17 nt, Artificial Sequence
  Synthetic
agagccccaagcggccc

SEQ ID NO: 110554 - RNA, 17 nt, Artificial Sequence
  Synthetic
uggaagauccagcaucc

SEQ ID NO: 110555 - RNA, 17 nt, Artificial Sequence
  Synthetic
  misc_feature (6)..(6): n is a, c, g, or u
cuggunguugaugaucc

SEQ ID NO: 110556 - RNA, 17 nt, Artificial Sequence
  Synthetic
ccgcggacgaccccucc

SEQ ID NO: 110557 - RNA, 17 nt, Artificial Sequence
  Synthetic
uguccuccaauuugucc

SEQ ID NO: 110558 - RNA, 17 nt, Artificial Sequence
  Synthetic
uauaaaggcauuaaagc

SEQ ID NO: 110559 - RNA, 17 nt, Artificial Sequence
  Synthetic
  misc_feature (3)..(4): n is a, c, g, or u
  misc_feature (8)..(8): n is a, c, g, or u
acnncagncggagaagc

SEQ ID NO: 110560 - RNA, 17 nt, Artificial Sequence
  Synthetic
agaugaggcauagcagc

SEQ ID NO: 110561 - RNA, 17 nt, Artificial Sequence
  Synthetic
cuuguuuugcucgcagc

SEQ ID NO: 110562 - RNA, 17 nt, Artificial Sequence
  Synthetic
ccgccuguaacacgagc

SEQ ID NO: 110563 - RNA, 17 nt, Artificial Sequence
  Synthetic
auagagguuccuugagc

SEQ ID NO: 110564 - RNA, 17 nt, Artificial Sequence
  Synthetic
  misc_feature (3)..(3): n is a, c, g, or u
uunggauaaaaccuagc

SEQ ID NO: 110565 - RNA, 17 nt, Artificial Sequence
  Synthetic
ccaacuggauccugcgc

SEQ ID NO: 110566 - RNA, 17 nt, Artificial Sequence
  Synthetic
uuuguccugguuaucgc

SEQ ID NO: 110567 - RNA, 17 nt, Artificial Sequence
  Synthetic
  misc_feature (3)..(3): n is a, c, g, or u
canacucuuuggaaggc

SEQ ID NO: 110568 - RNA, 17 nt, Artificial Sequence
  Synthetic
cugcucguguuacaggc

SEQ ID NO: 110569 - RNA, 17 nt, Artificial Sequence
  Synthetic
ugccgauugguggaggc

SEQ ID NO: 110570 - RNA, 17 nt, Artificial Sequence
  Synthetic
  misc_feature (12)..(12): n is a, c, g, or u
uuguuagacgangaggc

SEQ ID NO: 110571 - RNA, 17 nt, Artificial Sequence
  Synthetic
uaugcaagaccuugggc

SEQ ID NO: 110572 - RNA, 17 nt, Artificial Sequence
  Synthetic
  misc_feature (1)..(1): n is a, c, g, or u
ncacaaggacaacuggc

SEQ ID NO: 110573 - RNA, 17 nt, Artificial Sequence
  Synthetic
acuaauucccuggaugc

SEQ ID NO: 110574 - RNA, 17 nt, Artificial Sequence
  Synthetic
uuugguggucuauaugc

SEQ ID NO: 110575 - RNA, 17 nt, Artificial Sequence
  Synthetic
aaaaaguugcauggugc

SEQ ID NO: 110576 - RNA, 17 nt, Artificial Sequence
  Synthetic
  misc_feature (13)..(13): n is a, c, g, or u
uugagcaggagungugc

SEQ ID NO: 110577 - RNA, 17 nt, Artificial Sequence
  Synthetic
  misc_feature (4)..(4): n is a, c, g, or u
  misc_feature (13)..(13): n is a, c, g, or u
aaangauguauanuugc

SEQ ID NO: 110578 - RNA, 17 nt, Artificial Sequence
  Synthetic
uccugacauucauuugc

SEQ ID NO: 110579 - RNA, 17 nt, Artificial Sequence
  Synthetic
  misc_feature (16)..(16): n is a, c, g, or u
uucuguccccaauccnc

SEQ ID NO: 110580 - RNA, 17 nt, Artificial Sequence
  Synthetic
  misc_feature (16)..(16): n is a, c, g, or u
ugugccuucucaucunc

SEQ ID NO: 110581 - RNA, 17 nt, Artificial Sequence
  Synthetic
  misc_feature (5)..(5): n is a, c, g, or u
  misc_feature (8)..(8): n is a, c, g, or u
cuggngcnaaacucauc

SEQ ID NO: 110582 - RNA, 17 nt, Artificial Sequence
  Synthetic
cgccucugcucuguauc

SEQ ID NO: 110583 - RNA, 17 nt, Artificial Sequence
  Synthetic
  misc_feature (4)..(4): n is a, c, g, or u
aagngacacucauccuc

SEQ ID NO: 110584 - RNA, 17 nt, Artificial Sequence
  Synthetic
  misc_feature (14)..(14): n is a, c, g, or u
ugauuaacuacauncuc

SEQ ID NO: 110585 - RNA, 17 nt, Artificial Sequence
  Synthetic
cagaagaucucaaucuc

SEQ ID NO: 110586 - RNA, 17 nt, Artificial Sequence
  Synthetic
uucaagaucccagaguc

SEQ ID NO: 110587 - RNA, 17 nt, Artificial Sequence
  Synthetic
  misc_feature (13)..(13): n is a, c, g, or u
uuugcucgcagcngguc

SEQ ID NO: 110588 - RNA, 17 nt, Artificial Sequence
  Synthetic
uccugcaaaugaauguc

SEQ ID NO: 110589 - RNA, 17 nt, Artificial Sequence
  Synthetic
ugggagugggagcauuc

SEQ ID NO: 110590 - RNA, 17 nt, Artificial Sequence
  Synthetic
uaucuuaucaacacuuc

SEQ ID NO: 110591 - RNA, 17 nt, Artificial Sequence
  Synthetic
cuucuuguugguucuuc

SEQ ID NO: 110592 - RNA, 17 nt, Artificial Sequence
  Synthetic
ugaggugaacaauguuc

SEQ ID NO: 110593 - RNA, 17 nt, Artificial Sequence
  Synthetic
cuaacaacaguaguuuc

SEQ ID NO: 110594 - RNA, 17 nt, Artificial Sequence
  Synthetic
  misc_feature (1)..(1): n is a, c, g, or u
  misc_feature (10)..(10): n is a, c, g, or u
  misc_feature (13)..(13): n is a, c, g, or u
nccacauugngunaaag

SEQ ID NO: 110595 - RNA, 17 nt, Artificial Sequence
  Synthetic
  misc_feature (4)..(5): n is a, c, g, or u
  misc_feature (9)..(9): n is a, c, g, or u
uacnncagncggagaag

SEQ ID NO: 110596 - RNA, 17 nt, Artificial Sequence
  Synthetic
ccaaggucuugcauaag

SEQ ID NO: 110597 - RNA, 17 nt, Artificial Sequence
  Synthetic
aagaaaauugguaacag

SEQ ID NO: 110598 - RNA, 17 nt, Artificial Sequence
  Synthetic
aacugaaagccagacag

SEQ ID NO: 110599 - RNA, 17 nt, Artificial Sequence
  Synthetic
  misc_feature (6)..(6): n is a, c, g, or u
ucgggnaagaaucccag

SEQ ID NO: 110600 - RNA, 17 nt, Artificial Sequence
  Synthetic
cucccgauacagagcag

SEQ ID NO: 110601 - RNA, 17 nt, Artificial Sequence
  Synthetic
  misc_feature (2)..(2): n is a, c, g, or u
angagaugauuaggcag

SEQ ID NO: 110602 - RNA, 17 nt, Artificial Sequence
  Synthetic
auccucaggccaugcag

SEQ ID NO: 110603 - RNA, 17 nt, Artificial Sequence
  Synthetic
auagcagcaggaugcag

SEQ ID NO: 110604 - RNA, 17 nt, Artificial Sequence
  Synthetic
uagugccauuuguucag

SEQ ID NO: 110605 - RNA, 17 nt, Artificial Sequence
  Synthetic
ccaagcggccccgggag

SEQ ID NO: 110606 - RNA, 17 nt, Artificial Sequence
  Synthetic
caaaauaccuaugggag

SEQ ID NO: 110607 - RNA, 17 nt, Artificial Sequence
  Synthetic
cgccaacaaggugggag

SEQ ID NO: 110608 - RNA, 17 nt, Artificial Sequence
  Synthetic
  misc_feature (13)..(13): n is a, c, g, or u
acuguguguuuanugag

SEQ ID NO: 110609 - RNA, 17 nt, Artificial Sequence
  Synthetic
  misc_feature (15)..(15): n is a, c, g, or u
uuuucauuuacugunag

SEQ ID NO: 110610 - RNA, 17 nt, Artificial Sequence
  Synthetic
acaugagggaaacauag

SEQ ID NO: 110611 - RNA, 17 nt, Artificial Sequence
  Synthetic
aaguguugauaagauag

SEQ ID NO: 110612 - RNA, 17 nt, Artificial Sequence
  Synthetic
uucucucaauuuucuag

SEQ ID NO: 110613 - RNA, 17 nt, Artificial Sequence
  Synthetic
  misc_feature (1)..(1): n is a, c, g, or u
nccguugccgagcaacg

SEQ ID NO: 110614 - RNA, 17 nt, Artificial Sequence
  Synthetic
augagaaggcacagacg

SEQ ID NO: 110615 - RNA, 17 nt, Artificial Sequence
  Synthetic
aggugggaaacuuuacg

SEQ ID NO: 110616 - RNA, 17 nt, Artificial Sequence
  Synthetic
ugcucguguuacaggcg

SEQ ID NO: 110617 - RNA, 17 nt, Artificial Sequence
  Synthetic
ccuucgucugcgaggcg

SEQ ID NO: 110618 - RNA, 17 nt, Artificial Sequence
  Synthetic
cacagagucuagacucg

SEQ ID NO: 110619 - RNA, 17 nt, Artificial Sequence
  Synthetic
  misc_feature (4)..(4): n is a, c, g, or u
acanacucuuuggaagg

SEQ ID NO: 110620 - RNA, 17 nt, Artificial Sequence
  Synthetic
  misc_feature (10)..(10): n is a, c, g, or u
uccuuggacncauaagg

SEQ ID NO: 110621 - RNA, 17 nt, Artificial Sequence
  Synthetic
ccugcucguguuacagg

SEQ ID NO: 110622 - RNA, 17 nt, Artificial Sequence
  Synthetic
auuacuucccacccagg

SEQ ID NO: 110623 - RNA, 17 nt, Artificial Sequence
  Synthetic
cgauugguggaggcagg

SEQ ID NO: 110624 - RNA, 17 nt, Artificial Sequence
  Synthetic
ugacauucauuugcagg

SEQ ID NO: 110625 - RNA, 17 nt, Artificial Sequence
  Synthetic
ccgauacagagcagagg

SEQ ID NO: 110626 - RNA, 17 nt, Artificial Sequence
  Synthetic
  misc_feature (9)..(9): n is a, c, g, or u
ugagugucncuuagagg

SEQ ID NO: 110627 - RNA, 17 nt, Artificial Sequence
  Synthetic
uugguggaggcaggagg

SEQ ID NO: 110628 - RNA, 17 nt, Artificial Sequence
  Synthetic
  misc_feature (2)..(2): n is a, c, g, or u
  misc_feature (4)..(4): n is a, c, g, or u
angnucuuuguacuagg

SEQ ID NO: 110629 - RNA, 17 nt, Artificial Sequence
  Synthetic
  misc_feature (3)..(3): n is a, c, g, or u
ccngugggcguucacgg

SEQ ID NO: 110630 - RNA, 17 nt, Artificial Sequence
  Synthetic
ccccaagcggccccggg

SEQ ID NO: 110631 - RNA, 17 nt, Artificial Sequence
  Synthetic
  misc_feature (1)..(1): n is a, c, g, or u
  misc_feature (5)..(5): n is a, c, g, or u
ncagncggagaagcggg

SEQ ID NO: 110632 - RNA, 17 nt, Artificial Sequence
  Synthetic
cucugcucuguaucggg

SEQ ID NO: 110633 - RNA, 17 nt, Artificial Sequence
  Synthetic
aacagucccccaugggg

SEQ ID NO: 110634 - RNA, 17 nt, Artificial Sequence
  Synthetic
augggggacuguugggg

SEQ ID NO: 110635 - RNA, 17 nt, Artificial Sequence
  Synthetic
  misc_feature (5)..(5): n is a, c, g, or u
aagancuacagcauggg

SEQ ID NO: 110636 - RNA, 17 nt, Artificial Sequence
  Synthetic
  misc_feature (9)..(9): n is a, c, g, or u
uguguuuanugaguggg

SEQ ID NO: 110637 - RNA, 17 nt, Artificial Sequence
  Synthetic
ccaagcugugccuuggg

SEQ ID NO: 110638 - RNA, 17 nt, Artificial Sequence
  Synthetic
  misc_feature (5)..(6): n is a, c, g, or u
uucannccuccccaugg

SEQ ID NO: 110639 - RNA, 17 nt, Artificial Sequence
  Synthetic
cuguacuuuccugcugg

SEQ ID NO: 110640 - RNA, 17 nt, Artificial Sequence
  Synthetic
ugaaagccagacagugg

SEQ ID NO: 110641 - RNA, 17 nt, Artificial Sequence
  Synthetic
caagccccaaccagugg

SEQ ID NO: 110642 - RNA, 17 nt, Artificial Sequence
  Synthetic
  misc_feature (13)..(13): n is a, c, g, or u
aguuugguggaangugg

SEQ ID NO: 110643 - RNA, 17 nt, Artificial Sequence
  Synthetic
uaaccaggacaaauugg

SEQ ID NO: 110644 - RNA, 17 nt, Artificial Sequence
  Synthetic
uccugacugccgauugg

SEQ ID NO: 110645 - RNA, 17 nt, Artificial Sequence
  Synthetic
cccaaggcacagcuugg

SEQ ID NO: 110646 - RNA, 17 nt, Artificial Sequence
  Synthetic
ugagugggaggaguugg

SEQ ID NO: 110647 - RNA, 17 nt, Artificial Sequence
  Synthetic
aagauaggggcauuugg

SEQ ID NO: 110648 - RNA, 17 nt, Artificial Sequence
  Synthetic
  misc_feature (16)..(16): n is a, c, g, or u
aagaguuugguggaang

SEQ ID NO: 110649 - RNA, 17 nt, Artificial Sequence
  Synthetic
  misc_feature (16)..(16): n is a, c, g, or u
acuguuguuagacgang

SEQ ID NO: 110650 - RNA, 17 nt, Artificial Sequence
  Synthetic
  misc_feature (16)..(16): n is a, c, g, or u
ccuugggcagguuccng

SEQ ID NO: 110651 - RNA, 17 nt, Artificial Sequence
  Synthetic
uggugacccgcaaaaug

SEQ ID NO: 110652 - RNA, 17 nt, Artificial Sequence
  Synthetic
uuuuguacagcaacaug

SEQ ID NO: 110653 - RNA, 17 nt, Artificial Sequence
  Synthetic
cccaacagucccccaug

SEQ ID NO: 110654 - RNA, 17 nt, Artificial Sequence
  Synthetic
aaccucgaaaaggcaug

SEQ ID NO: 110655 - RNA, 17 nt, Artificial Sequence
  Synthetic
  misc_feature (3)..(3): n is a, c, g, or u
canaaaacaaaaagaug

SEQ ID NO: 110656 - RNA, 17 nt, Artificial Sequence
  Synthetic
caguuauauggaugaug

SEQ ID NO: 110657 - RNA, 17 nt, Artificial Sequence
  Synthetic
ccaagagaaacggacug

SEQ ID NO: 110658 - RNA, 17 nt, Artificial Sequence
  Synthetic
  misc_feature (5)..(5): n is a, c, g, or u
aguangcccugagccug

SEQ ID NO: 110659 - RNA, 17 nt, Artificial Sequence
  Synthetic
uuccacugcauggccug

SEQ ID NO: 110660 - RNA, 17 nt, Artificial Sequence
  Synthetic
aucgcuggaugugucug

SEQ ID NO: 110661 - RNA, 17 nt, Artificial Sequence
  Synthetic
agaauuuggagcuucug

SEQ ID NO: 110662 - RNA, 17 nt, Artificial Sequence
  Synthetic
cugaaagccagacagug

SEQ ID NO: 110663 - RNA, 17 nt, Artificial Sequence
  Synthetic
ccaagccccaaccagug

SEQ ID NO: 110664 - RNA, 17 nt, Artificial Sequence
  Synthetic
  misc_feature (5)..(5): n is a, c, g, or u
uggunucuuuuggagug

SEQ ID NO: 110665 - RNA, 17 nt, Artificial Sequence
  Synthetic
cugagugccguauggug

SEQ ID NO: 110666 - RNA, 17 nt, Artificial Sequence
  Synthetic
  misc_feature (3)..(3): n is a, c, g, or u
  misc_feature (15)..(15): n is a, c, g, or u
ugnacaauauguucnug

SEQ ID NO: 110667 - RNA, 17 nt, Artificial Sequence
  Synthetic
  misc_feature (15)..(15): n is a, c, g, or u
caucuuuuuguuuunug

SEQ ID NO: 110668 - RNA, 17 nt, Artificial Sequence
  Synthetic
  misc_feature (4)..(4): n is a, c, g, or u
agunugucaacgaauug

SEQ ID NO: 110669 - RNA, 17 nt, Artificial Sequence
  Synthetic
  misc_feature (11)..(11): n is a, c, g, or u
agaaucccagnggauug

SEQ ID NO: 110670 - RNA, 17 nt, Artificial Sequence
  Synthetic
  misc_feature (12)..(12): n is a, c, g, or u
aaaucagacaanuauug

SEQ ID NO: 110671 - RNA, 17 nt, Artificial Sequence
  Synthetic
ccucccggggccgcuug

SEQ ID NO: 110672 - RNA, 17 nt, Artificial Sequence
  Synthetic
  misc_feature (1)..(1): n is a, c, g, or u
nugagugggaggaguug

SEQ ID NO: 110673 - RNA, 17 nt, Artificial Sequence
  Synthetic
  misc_feature (11)..(11): n is a, c, g, or u
uguccuugugnggguug

SEQ ID NO: 110674 - RNA, 17 nt, Artificial Sequence
  Synthetic
  misc_feature (12)..(13): n is a, c, g, or u
uauguaauuggnnguug

SEQ ID NO: 110675 - RNA, 17 nt, Artificial Sequence
  Synthetic
cccaugggggacuguug

SEQ ID NO: 110676 - RNA, 17 nt, Artificial Sequence
  Synthetic
caagcuauucuguguug

SEQ ID NO: 110677 - RNA, 17 nt, Artificial Sequence
  Synthetic
  misc_feature (14)..(14): n is a, c, g, or u
uggaugauguggunuug

SEQ ID NO: 110678 - RNA, 17 nt, Artificial Sequence
  Synthetic
  misc_feature (4)..(4): n is a, c, g, or u
  misc_feature (10)..(10): n is a, c, g, or u
uagnuguaancaauuug

SEQ ID NO: 110679 - RNA, 17 nt, Artificial Sequence
  Synthetic
  misc_feature (15)..(15): n is a, c, g, or u
  misc_feature (17)..(17): n is a, c, g, or u
cuuagagguggaganan

SEQ ID NO: 110680 - RNA, 17 nt, Artificial Sequence
  Synthetic
  misc_feature (3)..(4): n is a, c, g, or u
  misc_feature (15)..(15): n is a, c, g, or u
  misc_feature (17)..(17): n is a, c, g, or u
cunncuuuaauccunan

SEQ ID NO: 110681 - RNA, 17 nt, Artificial Sequence
  Synthetic
  misc_feature (17)..(17): n is a, c, g, or u
cuccaaauucuuuauan

SEQ ID NO: 110682 - RNA, 17 nt, Artificial Sequence
  Synthetic
  misc_feature (12)..(13): n is a, c, g, or u
  misc_feature (17)..(17): n is a, c, g, or u
ucggucgguacnncagn

SEQ ID NO: 110683 - RNA, 17 nt, Artificial Sequence
  Synthetic
  misc_feature (3)..(3): n is a, c, g, or u
  misc_feature (5)..(5): n is a, c, g, or u
  misc_feature (16)..(17): n is a, c, g, or u
canunaggauuaaagnn

SEQ ID NO: 110684 - RNA, 17 nt, Artificial Sequence
  Synthetic
  misc_feature (17)..(17): n is a, c, g, or u
uguuuucauuuacugun

SEQ ID NO: 110685 - RNA, 17 nt, Artificial Sequence
  Synthetic
  misc_feature (17)..(17): n is a, c, g, or u
ugccuuggguggcuuun

SEQ ID NO: 110686 - RNA, 17 nt, Artificial Sequence
  Synthetic
caaagacaaaagaaaau

SEQ ID NO: 110687 - RNA, 17 nt, Artificial Sequence
  Synthetic
aggcuguaggcauaaau

SEQ ID NO: 110688 - RNA, 17 nt, Artificial Sequence
  Synthetic
cuccugccuccaccaau

SEQ ID NO: 110689 - RNA, 17 nt, Artificial Sequence
  Synthetic
  misc_feature (3)..(3): n is a, c, g, or u
canacuuuccaaucaau

SEQ ID NO: 110690 - RNA, 17 nt, Artificial Sequence
  Synthetic
uucaugggauauguaau

SEQ ID NO: 110691 - RNA, 17 nt, Artificial Sequence
  Synthetic
ccccaacagucccccau

SEQ ID NO: 110692 - RNA, 17 nt, Artificial Sequence
  Synthetic
cugaggcccacucccau

SEQ ID NO: 110693 - RNA, 17 nt, Artificial Sequence
  Synthetic
  misc_feature (8)..(8): n is a, c, g, or u
aacaagancuacagcau

SEQ ID NO: 110694 - RNA, 17 nt, Artificial Sequence
  Synthetic
  misc_feature (6)..(6): n is a, c, g, or u
  misc_feature (9)..(9): n is a, c, g, or u
ucuggngcnaaacucau

SEQ ID NO: 110695 - RNA, 17 nt, Artificial Sequence
  Synthetic
uauucccuuaacuucau

SEQ ID NO: 110696 - RNA, 17 nt, Artificial Sequence
  Synthetic
  misc_feature (4)..(4): n is a, c, g, or u
ucanaaaacaaaaagau

SEQ ID NO: 110697 - RNA, 17 nt, Artificial Sequence
  Synthetic
acucagaaaauccagau

SEQ ID NO: 110698 - RNA, 17 nt, Artificial Sequence
  Synthetic
ccuuccugacugccgau

SEQ ID NO: 110699 - RNA, 17 nt, Artificial Sequence
  Synthetic
  misc_feature (1)..(1): n is a, c, g, or u
  misc_feature (13)..(13): n is a, c, g, or u
naagaaucccagnggau

SEQ ID NO: 110700 - RNA, 17 nt, Artificial Sequence
  Synthetic
  misc_feature (8)..(8): n is a, c, g, or u
uaaacagnccuauugau

SEQ ID NO: 110701 - RNA, 17 nt, Artificial Sequence
  Synthetic
  misc_feature (9)..(9): n is a, c, g, or u
uaugucaanguuaauau

SEQ ID NO: 110702 - RNA, 17 nt, Artificial Sequence
  Synthetic
uuucgcaaaauaccuau

SEQ ID NO: 110703 - RNA, 17 nt, Artificial Sequence
  Synthetic
aagauguuguacagacu

SEQ ID NO: 110704 - RNA, 17 nt, Artificial Sequence
  Synthetic
  misc_feature (5)..(5): n is a, c, g, or u
  misc_feature (7)..(7): n is a, c, g, or u
uuaangnucuuuguacu

SEQ ID NO: 110705 - RNA, 17 nt, Artificial Sequence
  Synthetic
  misc_feature (1)..(1): n is a, c, g, or u
naugaaucuagccaccu

SEQ ID NO: 110706 - RNA, 17 nt, Artificial Sequence
  Synthetic
ccucuuaugcaagaccu

SEQ ID NO: 110707 - RNA, 17 nt, Artificial Sequence
  Synthetic
acacgagcagggguccu

SEQ ID NO: 110708 - RNA, 17 nt, Artificial Sequence
  Synthetic
ucaauguuaguauuccu

SEQ ID NO: 110709 - RNA, 17 nt, Artificial Sequence
  Synthetic
ccacccaaggcacagcu

SEQ ID NO: 110710 - RNA, 17 nt, Artificial Sequence
  Synthetic
ccccucccggggccgcu

SEQ ID NO: 110711 - RNA, 17 nt, Artificial Sequence
  Synthetic
ccccacugguuggggcu

SEQ ID NO: 110712 - RNA, 17 nt, Artificial Sequence
  Synthetic
aauuaauuaugccugcu

SEQ ID NO: 110713 - RNA, 17 nt, Artificial Sequence
  Synthetic
  misc_feature (3)..(3): n is a, c, g, or u
ucnuuuccauggcugcu

SEQ ID NO: 110714 - RNA, 17 nt, Artificial Sequence
  Synthetic
accuuuaccccguugcu

SEQ ID NO: 110715 - RNA, 17 nt, Artificial Sequence
  Synthetic
  misc_feature (15)..(15): n is a, c, g, or u
ucuguccccaauccncu

SEQ ID NO: 110716 - RNA, 17 nt, Artificial Sequence
  Synthetic
uucccaucccaucaucu

SEQ ID NO: 110717 - RNA, 17 nt, Artificial Sequence
  Synthetic
uugcauaagaggacucu

SEQ ID NO: 110718 - RNA, 17 nt, Artificial Sequence
  Synthetic
  misc_feature (6)..(6): n is a, c, g, or u
uacagngcccugacucu

SEQ ID NO: 110719 - RNA, 17 nt, Artificial Sequence
  Synthetic
ccucaguccguuucucu

SEQ ID NO: 110720 - RNA, 17 nt, Artificial Sequence
  Synthetic
acuucucucaauuuucu

SEQ ID NO: 110721 - RNA, 17 nt, Artificial Sequence
  Synthetic
agaaaggccuuguaagu

SEQ ID NO: 110722 - RNA, 17 nt, Artificial Sequence
  Synthetic
uuggaggcuugaacagu

SEQ ID NO: 110723 - RNA, 17 nt, Artificial Sequence
  Synthetic
acugaaagccagacagu

SEQ ID NO: 110724 - RNA, 17 nt, Artificial Sequence
  Synthetic
  misc_feature (4)..(4): n is a, c, g, or u
cuuncccgaucaucagu

SEQ ID NO: 110725 - RNA, 17 nt, Artificial Sequence
  Synthetic
  misc_feature (3)..(3): n is a, c, g, or u
uanugagugggaggagu

SEQ ID NO: 110726 - RNA, 17 nt, Artificial Sequence
  Synthetic
aaaauaccuaugggagu

SEQ ID NO: 110727 - RNA, 17 nt, Artificial Sequence
  Synthetic
aucuggauuuucugagu

SEQ ID NO: 110728 - RNA, 17 nt, Artificial Sequence
  Synthetic
  misc_feature (12)..(12): n is a, c, g, or u
cuguguguuuanugagu

SEQ ID NO: 110729 - RNA, 17 nt, Artificial Sequence
  Synthetic
uuuguucagugguucgu

SEQ ID NO: 110730 - RNA, 17 nt, Artificial Sequence
  Synthetic
  misc_feature (9)..(9): n is a, c, g, or u
ccuuggacncauaaggu

SEQ ID NO: 110731 - RNA, 17 nt, Artificial Sequence
  Synthetic
  misc_feature (1)..(1): n is a, c, g, or u
ncuacagcaugggaggu

SEQ ID NO: 110732 - RNA, 17 nt, Artificial Sequence
  Synthetic
aaucuagccaccugggu

SEQ ID NO: 110733 - RNA, 17 nt, Artificial Sequence
  Synthetic
  misc_feature (15)..(15): n is a, c, g, or u
auuggaggacaacangu

SEQ ID NO: 110734 - RNA, 17 nt, Artificial Sequence
  Synthetic
  misc_feature (15)..(15): n is a, c, g, or u
cuugggcagguuccngu

SEQ ID NO: 110735 - RNA, 17 nt, Artificial Sequence
  Synthetic
uccccaugggggacugu

SEQ ID NO: 110736 - RNA, 17 nt, Artificial Sequence
  Synthetic
uuguacuaggaggcugu

SEQ ID NO: 110737 - RNA, 17 nt, Artificial Sequence
  Synthetic
ucccacucccaccuugu

SEQ ID NO: 110738 - RNA, 17 nt, Artificial Sequence
  Synthetic
augccucaucuucuugu

SEQ ID NO: 110739 - RNA, 17 nt, Artificial Sequence
  Synthetic
  misc_feature (3)..(3): n is a, c, g, or u
  misc_feature (9)..(9): n is a, c, g, or u
agnuguaancaauuugu

SEQ ID NO: 110740 - RNA, 17 nt, Artificial Sequence
  Synthetic
  misc_feature (16)..(16): n is a, c, g, or u
uauggaugauguggunu

SEQ ID NO: 110741 - RNA, 17 nt, Artificial Sequence
  Synthetic
cugggugggaaguaauu

SEQ ID NO: 110742 - RNA, 17 nt, Artificial Sequence
  Synthetic
aaauauuuaguaacauu

SEQ ID NO: 110743 - RNA, 17 nt, Artificial Sequence
  Synthetic
cucagaaaauccagauu

SEQ ID NO: 110744 - RNA, 17 nt, Artificial Sequence
  Synthetic
  misc_feature (12)..(12): n is a, c, g, or u
aagaaucccagnggauu

SEQ ID NO: 110745 - RNA, 17 nt, Artificial Sequence
  Synthetic
  misc_feature (8)..(8): n is a, c, g, or u
augaacangagaugauu

SEQ ID NO: 110746 - RNA, 17 nt, Artificial Sequence
  Synthetic
aacuguucuugaauauu

SEQ ID NO: 110747 - RNA, 17 nt, Artificial Sequence
  Synthetic
cucuuaugcaagaccuu

SEQ ID NO: 110748 - RNA, 17 nt, Artificial Sequence
  Synthetic
ccuccaagcugugccuu

SEQ ID NO: 110749 - RNA, 17 nt, Artificial Sequence
  Synthetic
cccucccggggccgcuu

SEQ ID NO: 110750 - RNA, 17 nt, Artificial Sequence
  Synthetic
ucccaucccaucaucuu

SEQ ID NO: 110751 - RNA, 17 nt, Artificial Sequence
  Synthetic
  misc_feature (11)..(11): n is a, c, g, or u
auuauuuacanacucuu

SEQ ID NO: 110752 - RNA, 17 nt, Artificial Sequence
  Synthetic
caauuuucuuuugucuu

SEQ ID NO: 110753 - RNA, 17 nt, Artificial Sequence
  Synthetic
ugggaucuugaagaguu

SEQ ID NO: 110754 - RNA, 17 nt, Artificial Sequence
  Synthetic
  misc_feature (2)..(2): n is a, c, g, or u
anugagugggaggaguu

SEQ ID NO: 110755 - RNA, 17 nt, Artificial Sequence
  Synthetic
  misc_feature (13)..(14): n is a, c, g, or u
auauguaauuggnnguu

SEQ ID NO: 110756 - RNA, 17 nt, Artificial Sequence
  Synthetic
ccccaugggggacuguu

SEQ ID NO: 110757 - RNA, 17 nt, Artificial Sequence
  Synthetic
  misc_feature (15)..(15): n is a, c, g, or u
aguugggggaggagnuu

SEQ ID NO: 110758 - RNA, 17 nt, Artificial Sequence
  Synthetic
  misc_feature (15)..(15): n is a, c, g, or u
auggaugauguggunuu

SEQ ID NO: 110759 - RNA, 17 nt, Artificial Sequence
  Synthetic
uuugggacugcgaauuu

SEQ ID NO: 110760 - RNA, 17 nt, Artificial Sequence
  Synthetic
ugagugacuggagauuu

SEQ ID NO: 110761 - RNA, 17 nt, Artificial Sequence
  Synthetic
auuuccugucuuacuuu

SEQ ID NO: 110762 - RNA, 17 nt, Artificial Sequence
  Synthetic
aauuuucuuuugucuuu

SEQ ID NO: 110763 - RNA, 17 nt, Artificial Sequence
  Synthetic
cgaauugugggucuuuu

SEQ ID NO: 110764 - RNA, 17 nt, Artificial Sequence
  Synthetic
  misc_feature (9)..(11): n is a, c, g, or u
aaaucaaannnuguuuu

SEQ ID NO: 110765 - RNA, 17 nt, Artificial Sequence
  Synthetic
  misc_feature (4)..(4): n is a, c, g, or u
auanuugucugauuuuu

SEQ ID NO: 110766 - RNA, 20 nt, Artificial Sequence
  Synthetic
uccuggaauuagaggacaaa

SEQ ID NO: 110767 - RNA, 20 nt, Artificial Sequence
  Synthetic
uggucuuccaaaccucgaaa

SEQ ID NO: 110768 - RNA, 20 nt, Artificial Sequence
  Synthetic
  misc_feature (15)..(15): n is a, c, g, or u
auugguaacagcggnauaaa

SEQ ID NO: 110769 - RNA, 20 nt, Artificial Sequence
  Synthetic
  misc_feature (7)..(7): n is a, c, g, or u
  misc_feature (13)..(13): n is a, c, g, or u
cagauanuguuuncuuagaa

SEQ ID NO: 110770 - RNA, 20 nt, Artificial Sequence
  Synthetic
aaauauuugcccuuagauaa

SEQ ID NO: 110771 - RNA, 20 nt, Artificial Sequence
  Synthetic
uacauaucccaugaaguuaa

SEQ ID NO: 110772 - RNA, 20 nt, Artificial Sequence
  Synthetic
uggggacccuguaccgaaca

SEQ ID NO: 110773 - RNA, 20 nt, Artificial Sequence
  Synthetic
cgaauuuuggccaagacaca

SEQ ID NO: 110774 - RNA, 20 nt, Artificial Sequence
  Synthetic
uguucuccauguucgguaca

SEQ ID NO: 110775 - RNA, 20 nt, Artificial Sequence
  Synthetic
uacuuucucgccaacuuaca

SEQ ID NO: 110776 - RNA, 20 nt, Artificial Sequence
  Synthetic
  misc_feature (1)..(1): n is a, c, g, or u
  misc_feature (5)..(6): n is a, c, g, or u
ncugnnguaccgaccgacca

SEQ ID NO: 110777 - RNA, 20 nt, Artificial Sequence
  Synthetic
  misc_feature (9)..(9): n is a, c, g, or u
ccaugcccnaaagccaccca

SEQ ID NO: 110778 - RNA, 20 nt, Artificial Sequence
  Synthetic
uccaccccaacaguccccca

SEQ ID NO: 110779 - RNA, 20 nt, Artificial Sequence
  Synthetic
  misc_feature (11)..(12): n is a, c, g, or u
ccaggguucannccucccca

SEQ ID NO: 110780 - RNA, 20 nt, Artificial Sequence
  Synthetic
  misc_feature (8)..(8): n is a, c, g, or u
cgcccacnggaaccugccca

SEQ ID NO: 110781 - RNA, 20 nt, Artificial Sequence
  Synthetic
uuuggaagauccagcaucca

SEQ ID NO: 110782 - RNA, 20 nt, Artificial Sequence
  Synthetic
  misc_feature (15)..(15): n is a, c, g, or u
uuucccaccuuaugngucca

SEQ ID NO: 110783 - RNA, 20 nt, Artificial Sequence
  Synthetic
  misc_feature (12)..(12): n is a, c, g, or u
ugggaacaagancuacagca

SEQ ID NO: 110784 - RNA, 20 nt, Artificial Sequence
  Synthetic
  misc_feature (1)..(1): n is a, c, g, or u
  misc_feature (6)..(6): n is a, c, g, or u
nagagncaguauucugagca

SEQ ID NO: 110785 - RNA, 20 nt, Artificial Sequence
  Synthetic
cuucaccucugcacgucgca

SEQ ID NO: 110786 - RNA, 20 nt, Artificial Sequence
  Synthetic
uuccaaaccucgaaaaggca

SEQ ID NO: 110787 - RNA, 20 nt, Artificial Sequence
  Synthetic
  misc_feature (15)..(15): n is a, c, g, or u
ccuuggguggcuuungggca

SEQ ID NO: 110788 - RNA, 20 nt, Artificial Sequence
  Synthetic
cugaguuggcuuugaaugca

SEQ ID NO: 110789 - RNA, 20 nt, Artificial Sequence
  Synthetic
uugguucuucuggacuauca

SEQ ID NO: 110790 - RNA, 20 nt, Artificial Sequence
  Synthetic
agucuuugaaguaugccuca

SEQ ID NO: 110791 - RNA, 20 nt, Artificial Sequence
  Synthetic
  misc_feature (9)..(9): n is a, c, g, or u
accugcacnacuccugcuca

SEQ ID NO: 110792 - RNA, 20 nt, Artificial Sequence
  Synthetic
ucuucaagaucccagaguca

SEQ ID NO: 110793 - RNA, 20 nt, Artificial Sequence
  Synthetic
  misc_feature (8)..(8): n is a, c, g, or u
acccucanaaaacaaaaaga

SEQ ID NO: 110794 - RNA, 20 nt, Artificial Sequence
  Synthetic
aaaugaaugucaggaaaaga

SEQ ID NO: 110795 - RNA, 20 nt, Artificial Sequence
  Synthetic
  misc_feature (2)..(2): n is a, c, g, or u
anagaaggaaagaagucaga

SEQ ID NO: 110796 - RNA, 20 nt, Artificial Sequence
  Synthetic
  misc_feature (12)..(12): n is a, c, g, or u
acacgguccggnagaugaga

SEQ ID NO: 110797 - RNA, 20 nt, Artificial Sequence
  Synthetic
  misc_feature (6)..(6): n is a, c, g, or u
  misc_feature (17)..(17): n is a, c, g, or u
ucgagnagaucucgaanaga

SEQ ID NO: 110798 - RNA, 20 nt, Artificial Sequence
  Synthetic
ccaccaaucggcagucagga

SEQ ID NO: 110799 - RNA, 20 nt, Artificial Sequence
  Synthetic
agccccaagcggccccggga

SEQ ID NO: 110800 - RNA, 20 nt, Artificial Sequence
  Synthetic
  misc_feature (10)..(10): n is a, c, g, or u
uuauuuacanacucuuugga

SEQ ID NO: 110801 - RNA, 20 nt, Artificial Sequence
  Synthetic
  misc_feature (7)..(7): n is a, c, g, or u
ugaguangcccugagccuga

SEQ ID NO: 110802 - RNA, 20 nt, Artificial Sequence
  Synthetic
  misc_feature (17)..(17): n is a, c, g, or u
cccaucuuuuuguuuunuga

SEQ ID NO: 110803 - RNA, 20 nt, Artificial Sequence
  Synthetic
  misc_feature (19)..(19): n is a, c, g, or u
acgcaugcgcugauggccna

SEQ ID NO: 110804 - RNA, 20 nt, Artificial Sequence
  Synthetic
  misc_feature (19)..(19): n is a, c, g, or u
ccuguuuucauuuacuguna

SEQ ID NO: 110805 - RNA, 20 nt, Artificial Sequence
  Synthetic
  misc_feature (3)..(3): n is a, c, g, or u
agnucuuguucccaagaaua

SEQ ID NO: 110806 - RNA, 20 nt, Artificial Sequence
  Synthetic
  misc_feature (8)..(8): n is a, c, g, or u
acuacauncucuggauaaua

SEQ ID NO: 110807 - RNA, 20 nt, Artificial Sequence
  Synthetic
  misc_feature (13)..(13): n is a, c, g, or u
cagcuaugucaanguuaaua

SEQ ID NO: 110808 - RNA, 20 nt, Artificial Sequence
  Synthetic
acauuguucaccucaccaua

SEQ ID NO: 110809 - RNA, 20 nt, Artificial Sequence
  Synthetic
  misc_feature (16)..(16): n is a, c, g, or u
uaguauuccuuggacncaua

SEQ ID NO: 110810 - RNA, 20 nt, Artificial Sequence
  Synthetic
cugucuggcuuucaguuaua

SEQ ID NO: 110811 - RNA, 20 nt, Artificial Sequence
  Synthetic
  misc_feature (1)..(1): n is a, c, g, or u
  misc_feature (10)..(10): n is a, c, g, or u
ngguuugaunccuuuaucua

SEQ ID NO: 110812 - RNA, 20 nt, Artificial Sequence
  Synthetic
uacggggcuuuauucuucua

SEQ ID NO: 110813 - RNA, 20 nt, Artificial Sequence
  Synthetic
uuacauaucccaugaaguua

SEQ ID NO: 110814 - RNA, 20 nt, Artificial Sequence
  Synthetic
  misc_feature (1)..(1): n is a, c, g, or u
ncauaaggugggaaacuuua

SEQ ID NO: 110815 - RNA, 20 nt, Artificial Sequence
  Synthetic
  misc_feature (5)..(5): n is a, c, g, or u
cccunacaguaaaugaaaac

SEQ ID NO: 110816 - RNA, 20 nt, Artificial Sequence
  Synthetic
ccuggaauuagaggacaaac

SEQ ID NO: 110817 - RNA, 20 nt, Artificial Sequence
  Synthetic
  misc_feature (16)..(16): n is a, c, g, or u
ugcauguauacaagcnaaac

SEQ ID NO: 110818 - RNA, 20 nt, Artificial Sequence
  Synthetic
  misc_feature (8)..(8): n is a, c, g, or u
ucaacccncacaaggacaac

SEQ ID NO: 110819 - RNA, 20 nt, Artificial Sequence
  Synthetic
ugcuaggcugugcugccaac

SEQ ID NO: 110820 - RNA, 20 nt, Artificial Sequence
  Synthetic
  misc_feature (5)..(5): n is a, c, g, or u
ccagnccguugccgagcaac

SEQ ID NO: 110821 - RNA, 20 nt, Artificial Sequence
  Synthetic
  misc_feature (4)..(5): n is a, c, g, or u
cugnnguaccgaccgaccac

SEQ ID NO: 110822 - RNA, 20 nt, Artificial Sequence
  Synthetic
ucgucaaucuuaucgaagac

SEQ ID NO: 110823 - RNA, 20 nt, Artificial Sequence
  Synthetic
  misc_feature (7)..(7): n is a, c, g, or u
uucucunccaaaaguaagac

SEQ ID NO: 110824 - RNA, 20 nt, Artificial Sequence
  Synthetic
  misc_feature (7)..(7): n is a, c, g, or u
acaacanguuggugagugac

SEQ ID NO: 110825 - RNA, 20 nt, Artificial Sequence
  Synthetic
agaugaugggaugggaauac

SEQ ID NO: 110826 - RNA, 20 nt, Artificial Sequence
  Synthetic
cauaaggugggaaacuuuac

SEQ ID NO: 110827 - RNA, 20 nt, Artificial Sequence
  Synthetic
  misc_feature (12)..(12): n is a, c, g, or u
caaucaauaggncuguuuac

SEQ ID NO: 110828 - RNA, 20 nt, Artificial Sequence
  Synthetic
agacacauccagcgauaacc

SEQ ID NO: 110829 - RNA, 20 nt, Artificial Sequence
  Synthetic
  misc_feature (5)..(5): n is a, c, g, or u
aguunaugaaucuagccacc

SEQ ID NO: 110830 - RNA, 20 nt, Artificial Sequence
  Synthetic
  misc_feature (12)..(13): n is a, c, g, or u
ccauggggaggnnugaaccc

SEQ ID NO: 110831 - RNA, 20 nt, Artificial Sequence
  Synthetic
uuccaaauuacuucccaccc

SEQ ID NO: 110832 - RNA, 20 nt, Artificial Sequence
  Synthetic
auagcugacuacuaauuccc

SEQ ID NO: 110833 - RNA, 20 nt, Artificial Sequence
  Synthetic
auuuggaagauccagcaucc

SEQ ID NO: 110834 - RNA, 20 nt, Artificial Sequence
  Synthetic
aucccgcggacgaccccucc

SEQ ID NO: 110835 - RNA, 20 nt, Artificial Sequence
  Synthetic
uguuguccuccaauuugucc

SEQ ID NO: 110836 - RNA, 20 nt, Artificial Sequence
  Synthetic
cccguuuguccucuaauucc

SEQ ID NO: 110837 - RNA, 20 nt, Artificial Sequence
  Synthetic
ccugaacuggagccaccagc

SEQ ID NO: 110838 - RNA, 20 nt, Artificial Sequence
  Synthetic
agaagaugaggcauagcagc

SEQ ID NO: 110839 - RNA, 20 nt, Artificial Sequence
  Synthetic
ccgcuuguuuugcucgcagc

SEQ ID NO: 110840 - RNA, 20 nt, Artificial Sequence
  Synthetic
aacauagagguuccuugagc

SEQ ID NO: 110841 - RNA, 20 nt, Artificial Sequence
  Synthetic
  misc_feature (6)..(6): n is a, c, g, or u
acauunggauaaaaccuagc

SEQ ID NO: 110842 - RNA, 20 nt, Artificial Sequence
  Synthetic
ccccgggaggggucguccgc

SEQ ID NO: 110843 - RNA, 20 nt, Artificial Sequence
  Synthetic
cugccaacuggauccugcgc

SEQ ID NO: 110844 - RNA, 20 nt, Artificial Sequence
  Synthetic
  misc_feature (6)..(6): n is a, c, g, or u
uuacanacucuuuggaaggc

SEQ ID NO: 110845 - RNA, 20 nt, Artificial Sequence
  Synthetic
ccccugcucguguuacaggc

SEQ ID NO: 110846 - RNA, 20 nt, Artificial Sequence
  Synthetic
  misc_feature (4)..(4): n is a, c, g, or u
cccncacaaggacaacuggc

SEQ ID NO: 110847 - RNA, 20 nt, Artificial Sequence
  Synthetic
ucugaguuggcuuugaaugc

SEQ ID NO: 110848 - RNA, 20 nt, Artificial Sequence
  Synthetic
  misc_feature (6)..(6): n is a, c, g, or u
agggcncuguacuuuccugc

SEQ ID NO: 110849 - RNA, 20 nt, Artificial Sequence
  Synthetic
  misc_feature (16)..(16): n is a, c, g, or u
uccuugagcaggagungugc

SEQ ID NO: 110850 - RNA, 20 nt, Artificial Sequence
  Synthetic
  misc_feature (7)..(7): n is a, c, g, or u
  misc_feature (16)..(16): n is a, c, g, or u
uggaaangauguauanuugc

SEQ ID NO: 110851 - RNA, 20 nt, Artificial Sequence
  Synthetic
uuuuccugacauucauuugc

SEQ ID NO: 110852 - RNA, 20 nt, Artificial Sequence
  Synthetic
  misc_feature (19)..(19): n is a, c, g, or u
ucuuucuguccccaauccnc

SEQ ID NO: 110853 - RNA, 20 nt, Artificial Sequence
  Synthetic
  misc_feature (3)..(3): n is a, c, g, or u
ugnggguugaggucccaauc

SEQ ID NO: 110854 - RNA, 20 nt, Artificial Sequence
  Synthetic
caccucaccauacggcacuc

SEQ ID NO: 110855 - RNA, 20 nt, Artificial Sequence
  Synthetic
  misc_feature (10)..(10): n is a, c, g, or u
aaaguacagngcccugacuc

SEQ ID NO: 110856 - RNA, 20 nt, Artificial Sequence
  Synthetic
acuguugggguggagcccuc

SEQ ID NO: 110857 - RNA, 20 nt, Artificial Sequence
  Synthetic
  misc_feature (7)..(7): n is a, c, g, or u
ucuaagngacacucauccuc

SEQ ID NO: 110858 - RNA, 20 nt, Artificial Sequence
  Synthetic
  misc_feature (17)..(17): n is a, c, g, or u
uaaugauuaacuacauncuc

SEQ ID NO: 110859 - RNA, 20 nt, Artificial Sequence
  Synthetic
cucuucaagaucccagaguc

SEQ ID NO: 110860 - RNA, 20 nt, Artificial Sequence
  Synthetic
acucccaccuuguuggcguc

SEQ ID NO: 110861 - RNA, 20 nt, Artificial Sequence
  Synthetic
  misc_feature (16)..(16): n is a, c, g, or u
uguuuugcucgcagcngguc

SEQ ID NO: 110862 - RNA, 20 nt, Artificial Sequence
  Synthetic
  misc_feature (1)..(1): n is a, c, g, or u
ngugcagguuuugcaugguc

SEQ ID NO: 110863 - RNA, 20 nt, Artificial Sequence
  Synthetic
  misc_feature (2)..(2): n is a, c, g, or u
  misc_feature (16)..(17): n is a, c, g, or u
unuguaaauaaugucnnguc

SEQ ID NO: 110864 - RNA, 20 nt, Artificial Sequence
  Synthetic
uccuccugcaaaugaauguc

SEQ ID NO: 110865 - RNA, 20 nt, Artificial Sequence
  Synthetic
uagggcuuucccccacuguc

SEQ ID NO: 110866 - RNA, 20 nt, Artificial Sequence
  Synthetic
aggugggagugggagcauuc

SEQ ID NO: 110867 - RNA, 20 nt, Artificial Sequence
  Synthetic
cccuaucuuaucaacacuuc

SEQ ID NO: 110868 - RNA, 20 nt, Artificial Sequence
  Synthetic
caucuucuuguugguucuuc

SEQ ID NO: 110869 - RNA, 20 nt, Artificial Sequence
  Synthetic
ccugcugguggcuccaguuc

SEQ ID NO: 110870 - RNA, 20 nt, Artificial Sequence
  Synthetic
uggugaggugaacaauguuc

SEQ ID NO: 110871 - RNA, 20 nt, Artificial Sequence
  Synthetic
cgucuaacaacaguaguuuc

SEQ ID NO: 110872 - RNA, 20 nt, Artificial Sequence
  Synthetic
  misc_feature (4)..(4): n is a, c, g, or u
  misc_feature (13)..(13): n is a, c, g, or u
  misc_feature (16)..(16): n is a, c, g, or u
auanccacauugngunaaag

SEQ ID NO: 110873 - RNA, 20 nt, Artificial Sequence
  Synthetic
  misc_feature (3)..(3): n is a, c, g, or u
ccngcugcgagcaaaacaag

SEQ ID NO: 110874 - RNA, 20 nt, Artificial Sequence
  Synthetic
  misc_feature (7)..(8): n is a, c, g, or u
  misc_feature (12)..(12): n is a, c, g, or u
cgguacnncagncggagaag

SEQ ID NO: 110875 - RNA, 20 nt, Artificial Sequence
  Synthetic
ugcccaaggucuugcauaag

SEQ ID NO: 110876 - RNA, 20 nt, Artificial Sequence
  Synthetic
caaaagaaaauugguaacag

SEQ ID NO: 110877 - RNA, 20 nt, Artificial Sequence
  Synthetic
uauaacugaaagccagacag

SEQ ID NO: 110878 - RNA, 20 nt, Artificial Sequence
  Synthetic
  misc_feature (1)..(1): n is a, c, g, or u
nauggccaagccccaaccag

SEQ ID NO: 110879 - RNA, 20 nt, Artificial Sequence
  Synthetic
  misc_feature (9)..(9): n is a, c, g, or u
ugaucgggnaagaaucccag

SEQ ID NO: 110880 - RNA, 20 nt, Artificial Sequence
  Synthetic
cccgccuguaacacgagcag

SEQ ID NO: 110881 - RNA, 20 nt, Artificial Sequence
  Synthetic
  misc_feature (5)..(5): n is a, c, g, or u
aacangagaugauuaggcag

SEQ ID NO: 110882 - RNA, 20 nt, Artificial Sequence
  Synthetic
cucauccucaggccaugcag

SEQ ID NO: 110883 - RNA, 20 nt, Artificial Sequence
  Synthetic
uacuagugccauuuguucag

SEQ ID NO: 110884 - RNA, 20 nt, Artificial Sequence
  Synthetic
  misc_feature (16)..(16): n is a, c, g, or u
aagacuguguguuuanugag

SEQ ID NO: 110885 - RNA, 20 nt, Artificial Sequence
  Synthetic
  misc_feature (18)..(18): n is a, c, g, or u
cuguuuucauuuacugunag

SEQ ID NO: 110886 - RNA, 20 nt, Artificial Sequence
  Synthetic
cgagggaguucuucuucuag

SEQ ID NO: 110887 - RNA, 20 nt, Artificial Sequence
  Synthetic
  misc_feature (15)..(15): n is a, c, g, or u
ugaggaugagugucncuuag

SEQ ID NO: 110888 - RNA, 20 nt, Artificial Sequence
  Synthetic
  misc_feature (1)..(1): n is a, c, g, or u
nagaugagaaggcacagacg

SEQ ID NO: 110889 - RNA, 20 nt, Artificial Sequence
  Synthetic
cccugcucguguuacaggcg

SEQ ID NO: 110890 - RNA, 20 nt, Artificial Sequence
  Synthetic
agaccuucgucugcgaggcg

SEQ ID NO: 110891 - RNA, 20 nt, Artificial Sequence
  Synthetic
  misc_feature (3)..(3): n is a, c, g, or u
aunggccaucagcgcaugcg

SEQ ID NO: 110892 - RNA, 20 nt, Artificial Sequence
  Synthetic
uuuguccccaugccuuuucg

SEQ ID NO: 110893 - RNA, 20 nt, Artificial Sequence
  Synthetic
cuggccggacgccaacaagg

SEQ ID NO: 110894 - RNA, 20 nt, Artificial Sequence
  Synthetic
  misc_feature (7)..(7): n is a, c, g, or u
uuuacanacucuuuggaagg

SEQ ID NO: 110895 - RNA, 20 nt, Artificial Sequence
  Synthetic
  misc_feature (13)..(13): n is a, c, g, or u
uauuccuuggacncauaagg

SEQ ID NO: 110896 - RNA, 20 nt, Artificial Sequence
  Synthetic
caaauuacuucccacccagg

SEQ ID NO: 110897 - RNA, 20 nt, Artificial Sequence
  Synthetic
ugccgauugguggaggcagg

SEQ ID NO: 110898 - RNA, 20 nt, Artificial Sequence
  Synthetic
uuugguggucuauaugcagg

SEQ ID NO: 110899 - RNA, 20 nt, Artificial Sequence
  Synthetic
uccugacauucauuugcagg

SEQ ID NO: 110900 - RNA, 20 nt, Artificial Sequence
  Synthetic
cucccgauacagagcagagg

SEQ ID NO: 110901 - RNA, 20 nt, Artificial Sequence
  Synthetic
cgauugguggaggcaggagg

SEQ ID NO: 110902 - RNA, 20 nt, Artificial Sequence
  Synthetic
  misc_feature (5)..(5): n is a, c, g, or u
  misc_feature (7)..(7): n is a, c, g, or u
uuaangnucuuuguacuagg

SEQ ID NO: 110903 - RNA, 20 nt, Artificial Sequence
  Synthetic
  misc_feature (3)..(4): n is a, c, g, or u
  misc_feature (8)..(8): n is a, c, g, or u
acnncagncggagaagcggg

SEQ ID NO: 110904 - RNA, 20 nt, Artificial Sequence
  Synthetic
ugagugggaggaguuggggg

SEQ ID NO: 110905 - RNA, 20 nt, Artificial Sequence
  Synthetic
cccaacagucccccaugggg

SEQ ID NO: 110906 - RNA, 20 nt, Artificial Sequence
  Synthetic
cccaugggggacuguugggg

SEQ ID NO: 110907 - RNA, 20 nt, Artificial Sequence
  Synthetic
  misc_feature (8)..(8): n is a, c, g, or u
aacaagancuacagcauggg

SEQ ID NO: 110908 - RNA, 20 nt, Artificial Sequence
  Synthetic
  misc_feature (1)..(1): n is a, c, g, or u
naugaaucuagccaccuggg

SEQ ID NO: 110909 - RNA, 20 nt, Artificial Sequence
  Synthetic
  misc_feature (12)..(12): n is a, c, g, or u
cuguguguuuanugaguggg

SEQ ID NO: 110910 - RNA, 20 nt, Artificial Sequence
  Synthetic
ccuccaagcugugccuuggg

SEQ ID NO: 110911 - RNA, 20 nt, Artificial Sequence
  Synthetic
aacugaaagccagacagugg

SEQ ID NO: 110912 - RNA, 20 nt, Artificial Sequence
  Synthetic
  misc_feature (16)..(16): n is a, c, g, or u
aagaguuugguggaangugg

SEQ ID NO: 110913 - RNA, 20 nt, Artificial Sequence
  Synthetic
ccuuccugacugccgauugg

SEQ ID NO: 110914 - RNA, 20 nt, Artificial Sequence
  Synthetic
ccacccaaggcacagcuugg

SEQ ID NO: 110915 - RNA, 20 nt, Artificial Sequence
  Synthetic
  misc_feature (3)..(3): n is a, c, g, or u
uanugagugggaggaguugg

SEQ ID NO: 110916 - RNA, 20 nt, Artificial Sequence
  Synthetic
  misc_feature (16)..(16): n is a, c, g, or u
uauggaugauguggunuugg

SEQ ID NO: 110917 - RNA, 20 nt, Artificial Sequence
  Synthetic
ugggaucuugaagaguuugg

SEQ ID NO: 110918 - RNA, 20 nt, Artificial Sequence
  Synthetic
  misc_feature (19)..(19): n is a, c, g, or u
uugaagaguuugguggaang

SEQ ID NO: 110919 - RNA, 20 nt, Artificial Sequence
  Synthetic
  misc_feature (19)..(19): n is a, c, g, or u
agaccuugggcagguuccng

SEQ ID NO: 110920 - RNA, 20 nt, Artificial Sequence
  Synthetic
auauggugacccgcaaaaug

SEQ ID NO: 110921 - RNA, 20 nt, Artificial Sequence
  Synthetic
agguuuuguacagcaacaug

SEQ ID NO: 110922 - RNA, 20 nt, Artificial Sequence
  Synthetic
caccccaacagucccccaug

SEQ ID NO: 110923 - RNA, 20 nt, Artificial Sequence
  Synthetic
  misc_feature (9)..(10): n is a, c, g, or u
aggguucannccuccccaug

SEQ ID NO: 110924 - RNA, 20 nt, Artificial Sequence
  Synthetic
  misc_feature (6)..(6): n is a, c, g, or u
ccucanaaaacaaaaagaug

SEQ ID NO: 110925 - RNA, 20 nt, Artificial Sequence
  Synthetic
uuucaguuauauggaugaug

SEQ ID NO: 110926 - RNA, 20 nt, Artificial Sequence
  Synthetic
uaaagaauuuggagcuucug

SEQ ID NO: 110927 - RNA, 20 nt, Artificial Sequence
  Synthetic
uaacugaaagccagacagug

SEQ ID NO: 110928 - RNA, 20 nt, Artificial Sequence
  Synthetic
uggccaagccccaaccagug

SEQ ID NO: 110929 - RNA, 20 nt, Artificial Sequence
  Synthetic
  misc_feature (8)..(8): n is a, c, g, or u
auuuggunucuuuuggagug

SEQ ID NO: 110930 - RNA, 20 nt, Artificial Sequence
  Synthetic
cuagacucugugguauugug

SEQ ID NO: 110931 - RNA, 20 nt, Artificial Sequence
  Synthetic
  misc_feature (6)..(6): n is a, c, g, or u
  misc_feature (18)..(18): n is a, c, g, or u
uuuugnacaauauguucnug

SEQ ID NO: 110932 - RNA, 20 nt, Artificial Sequence
  Synthetic
  misc_feature (18)..(18): n is a, c, g, or u
ccccaucuuuuuguuuunug

SEQ ID NO: 110933 - RNA, 20 nt, Artificial Sequence
  Synthetic
  misc_feature (15)..(15): n is a, c, g, or u
uaaaaaucagacaanuauug

SEQ ID NO: 110934 - RNA, 20 nt, Artificial Sequence
  Synthetic
  misc_feature (4)..(4): n is a, c, g, or u
uuanugagugggaggaguug

SEQ ID NO: 110935 - RNA, 20 nt, Artificial Sequence
  Synthetic
  misc_feature (14)..(14): n is a, c, g, or u
aguuguccuugugnggguug

SEQ ID NO: 110936 - RNA, 20 nt, Artificial Sequence
  Synthetic
cuccccaugggggacuguug

SEQ ID NO: 110937 - RNA, 20 nt, Artificial Sequence
  Synthetic
aggcaagcuauucuguguug

SEQ ID NO: 110938 - RNA, 20 nt, Artificial Sequence
  Synthetic
  misc_feature (8)..(8): n is a, c, g, or u
  misc_feature (17)..(17): n is a, c, g, or u
auggaaangauguauanuug

SEQ ID NO: 110939 - RNA, 20 nt, Artificial Sequence
  Synthetic
  misc_feature (17)..(17): n is a, c, g, or u
auauggaugauguggunuug

SEQ ID NO: 110940 - RNA, 20 nt, Artificial Sequence
  Synthetic
  misc_feature (7)..(7): n is a, c, g, or u
  misc_feature (13)..(13): n is a, c, g, or u
ugauagnuguaancaauuug

SEQ ID NO: 110941 - RNA, 20 nt, Artificial Sequence
  Synthetic
aacgaauugugggucuuuug

SEQ ID NO: 110942 - RNA, 20 nt, Artificial Sequence
  Synthetic
  misc_feature (3)..(3): n is a, c, g, or u
  misc_feature (18)..(18): n is a, c, g, or u
  misc_feature (20)..(20): n is a, c, g, or u
ucncuuagagguggaganan

SEQ ID NO: 110943 - RNA, 20 nt, Artificial Sequence
  Synthetic
  misc_feature (6)..(7): n is a, c, g, or u
  misc_feature (18)..(18): n is a, c, g, or u
  misc_feature (20)..(20): n is a, c, g, or u
uaccunncuuuaauccunan

SEQ ID NO: 110944 - RNA, 20 nt, Artificial Sequence
  Synthetic
  misc_feature (20)..(20): n is a, c, g, or u
aagcuccaaauucuuuauan

SEQ ID NO: 110945 - RNA, 20 nt, Artificial Sequence
  Synthetic
  misc_feature (15)..(16): n is a, c, g, or u
  misc_feature (20)..(20): n is a, c, g, or u
uggucggucgguacnncagn

SEQ ID NO: 110946 - RNA, 20 nt, Artificial Sequence
  Synthetic
  misc_feature (20)..(20): n is a, c, g, or u
ccggccaguuguccuugugn

SEQ ID NO: 110947 - RNA, 20 nt, Artificial Sequence
  Synthetic
  misc_feature (6)..(6): n is a, c, g, or u
  misc_feature (8)..(8): n is a, c, g, or u
  misc_feature (19)..(20): n is a, c, g, or u
ugccanunaggauuaaagnn

SEQ ID NO: 110948 - RNA, 20 nt, Artificial Sequence
  Synthetic
  misc_feature (20)..(20): n is a, c, g, or u
uccuguuuucauuuacugun

SEQ ID NO: 110949 - RNA, 20 nt, Artificial Sequence
  Synthetic
  misc_feature (18)..(18): n is a, c, g, or u
  misc_feature (20)..(20): n is a, c, g, or u
aaagaaggaguuugccanun

SEQ ID NO: 110950 - RNA, 20 nt, Artificial Sequence
  Synthetic
  misc_feature (20)..(20): n is a, c, g, or u
cugugccuuggguggcuuun

SEQ ID NO: 110951 - RNA, 20 nt, Artificial Sequence
  Synthetic
acccaaagacaaaagaaaau

SEQ ID NO: 110952 - RNA, 20 nt, Artificial Sequence
  Synthetic
cuccuccugccuccaccaau

SEQ ID NO: 110953 - RNA, 20 nt, Artificial Sequence
  Synthetic
  misc_feature (6)..(6): n is a, c, g, or u
ugacanacuuuccaaucaau

SEQ ID NO: 110954 - RNA, 20 nt, Artificial Sequence
  Synthetic
aacuucaugggauauguaau

SEQ ID NO: 110955 - RNA, 20 nt, Artificial Sequence
  Synthetic
ccaccccaacagucccccau

SEQ ID NO: 110956 - RNA, 20 nt, Artificial Sequence
  Synthetic
  misc_feature (10)..(11): n is a, c, g, or u
caggguucannccuccccau

SEQ ID NO: 110957 - RNA, 20 nt, Artificial Sequence
  Synthetic
acugguuggggcuuggccau

SEQ ID NO: 110958 - RNA, 20 nt, Artificial Sequence
  Synthetic
uccaaaccucgaaaaggcau

SEQ ID NO: 110959 - RNA, 20 nt, Artificial Sequence
  Synthetic
  misc_feature (1)..(1): n is a, c, g, or u
  misc_feature (9)..(9): n is a, c, g, or u
  misc_feature (12)..(12): n is a, c, g, or u
nggucuggngcnaaacucau

SEQ ID NO: 110960 - RNA, 20 nt, Artificial Sequence
  Synthetic
  misc_feature (7)..(7): n is a, c, g, or u
cccucanaaaacaaaaagau

SEQ ID NO: 110961 - RNA, 20 nt, Artificial Sequence
  Synthetic
uccggaaguguugauaagau

SEQ ID NO: 110962 - RNA, 20 nt, Artificial Sequence
  Synthetic
ccaacucagaaaauccagau

SEQ ID NO: 110963 - RNA, 20 nt, Artificial Sequence
  Synthetic
cugccuuccugacugccgau

SEQ ID NO: 110964 - RNA, 20 nt, Artificial Sequence
  Synthetic
aaagcccaagaugaugggau

SEQ ID NO: 110965 - RNA, 20 nt, Artificial Sequence
  Synthetic
  misc_feature (11)..(11): n is a, c, g, or u
cuguaaacagnccuauugau

SEQ ID NO: 110966 - RNA, 20 nt, Artificial Sequence
  Synthetic
  misc_feature (12)..(12): n is a, c, g, or u
agcuaugucaanguuaauau

SEQ ID NO: 110967 - RNA, 20 nt, Artificial Sequence
  Synthetic
cucaagauguuguacagacu

SEQ ID NO: 110968 - RNA, 20 nt, Artificial Sequence
  Synthetic
  misc_feature (8)..(8): n is a, c, g, or u
  misc_feature (10)..(10): n is a, c, g, or u
agguuaangnucuuuguacu

SEQ ID NO: 110969 - RNA, 20 nt, Artificial Sequence
  Synthetic
aguccucuuaugcaagaccu

SEQ ID NO: 110970 - RNA, 20 nt, Artificial Sequence
  Synthetic
caagccuccaagcugugccu

SEQ ID NO: 110971 - RNA, 20 nt, Artificial Sequence
  Synthetic
aucucaauguuaguauuccu

SEQ ID NO: 110972 - RNA, 20 nt, Artificial Sequence
  Synthetic
aagccacccaaggcacagcu

SEQ ID NO: 110973 - RNA, 20 nt, Artificial Sequence
  Synthetic
cgaccccucccggggccgcu

SEQ ID NO: 110974 - RNA, 20 nt, Artificial Sequence
  Synthetic
uaaaauuaauuaugccugcu

SEQ ID NO: 110975 - RNA, 20 nt, Artificial Sequence
  Synthetic
  misc_feature (6)..(6): n is a, c, g, or u
acaucnuuuccauggcugcu

SEQ ID NO: 110976 - RNA, 20 nt, Artificial Sequence
  Synthetic
  misc_feature (18)..(18): n is a, c, g, or u
cuuucuguccccaauccncu

SEQ ID NO: 110977 - RNA, 20 nt, Artificial Sequence
  Synthetic
  misc_feature (9)..(9): n is a, c, g, or u
aaguacagngcccugacucu

SEQ ID NO: 110978 - RNA, 20 nt, Artificial Sequence
  Synthetic
uggacuucucucaauuuucu

SEQ ID NO: 110979 - RNA, 20 nt, Artificial Sequence
  Synthetic
cuuagaaaggccuuguaagu

SEQ ID NO: 110980 - RNA, 20 nt, Artificial Sequence
  Synthetic
agcuuggaggcuugaacagu

SEQ ID NO: 110981 - RNA, 20 nt, Artificial Sequence
  Synthetic
auaacugaaagccagacagu

SEQ ID NO: 110982 - RNA, 20 nt, Artificial Sequence
  Synthetic
auggccaagccccaaccagu

SEQ ID NO: 110983 - RNA, 20 nt, Artificial Sequence
  Synthetic
  misc_feature (7)..(7): n is a, c, g, or u
auucuuncccgaucaucagu

SEQ ID NO: 110984 - RNA, 20 nt, Artificial Sequence
  Synthetic
  misc_feature (12)..(12): n is a, c, g, or u
  misc_feature (14)..(14): n is a, c, g, or u
agagguggaganangggagu

SEQ ID NO: 110985 - RNA, 20 nt, Artificial Sequence
  Synthetic
cgcaaaauaccuaugggagu

SEQ ID NO: 110986 - RNA, 20 nt, Artificial Sequence
  Synthetic
ccaaucuggauuuucugagu

SEQ ID NO: 110987 - RNA, 20 nt, Artificial Sequence
  Synthetic
  misc_feature (15)..(15): n is a, c, g, or u
agacuguguguuuanugagu

SEQ ID NO: 110988 - RNA, 20 nt, Artificial Sequence
  Synthetic
uuugaaguaugccucaaggu

SEQ ID NO: 110989 - RNA, 20 nt, Artificial Sequence
  Synthetic
  misc_feature (12)..(12): n is a, c, g, or u
auuccuuggacncauaaggu

SEQ ID NO: 110990 - RNA, 20 nt, Artificial Sequence
  Synthetic
  misc_feature (4)..(4): n is a, c, g, or u
agancuacagcaugggaggu

SEQ ID NO: 110991 - RNA, 20 nt, Artificial Sequence
  Synthetic
augaaucuagccaccugggu

SEQ ID NO: 110992 - RNA, 20 nt, Artificial Sequence
  Synthetic
agagaggugcgccccguggu

SEQ ID NO: 110993 - RNA, 20 nt, Artificial Sequence
  Synthetic
  misc_feature (18)..(18): n is a, c, g, or u
caaauuggaggacaacangu

SEQ ID NO: 110994 - RNA, 20 nt, Artificial Sequence
  Synthetic
  misc_feature (17)..(18): n is a, c, g, or u
ugggauauguaauuggnngu

SEQ ID NO: 110995 - RNA, 20 nt, Artificial Sequence
  Synthetic
  misc_feature (1)..(1): n is a, c, g, or u
nccuccccaugggggacugu

SEQ ID NO: 110996 - RNA, 20 nt, Artificial Sequence
  Synthetic
ucuuuguacuaggaggcugu

SEQ ID NO: 110997 - RNA, 20 nt, Artificial Sequence
  Synthetic
ucaggcaagcuauucugugu

SEQ ID NO: 110998 - RNA, 20 nt, Artificial Sequence
  Synthetic
  misc_feature (6)..(6): n is a, c, g, or u
aaagunugucaacgaauugu

SEQ ID NO: 110999 - RNA, 20 nt, Artificial Sequence
  Synthetic
ugcucccacucccaccuugu

SEQ ID NO: 111000 - RNA, 20 nt, Artificial Sequence
  Synthetic
  misc_feature (19)..(19): n is a, c, g, or u
uuauauggaugauguggunu

SEQ ID NO: 111001 - RNA, 20 nt, Artificial Sequence
  Synthetic
  misc_feature (9)..(9): n is a, c, g, or u
auugacccnuauaaagaauu

SEQ ID NO: 111002 - RNA, 20 nt, Artificial Sequence
  Synthetic
caccugggugggaaguaauu

SEQ ID NO: 111003 - RNA, 20 nt, Artificial Sequence
  Synthetic
aaggugggagugggagcauu

SEQ ID NO: 111004 - RNA, 20 nt, Artificial Sequence
  Synthetic
caacucagaaaauccagauu

SEQ ID NO: 111005 - RNA, 20 nt, Artificial Sequence
  Synthetic
uuggugagugacuggagauu

SEQ ID NO: 111006 - RNA, 20 nt, Artificial Sequence
  Synthetic
agaaacuguucuugaauauu

SEQ ID NO: 111007 - RNA, 20 nt, Artificial Sequence
  Synthetic
aagccuccaagcugugccuu

SEQ ID NO: 111008 - RNA, 20 nt, Artificial Sequence
  Synthetic
uauucccaucccaucaucuu

SEQ ID NO: 111009 - RNA, 20 nt, Artificial Sequence
  Synthetic
uaccaauuuucuuuugucuu

SEQ ID NO: 111010 - RNA, 20 nt, Artificial Sequence
  Synthetic
cucugggaucuugaagaguu

SEQ ID NO: 111011 - RNA, 20 nt, Artificial Sequence
  Synthetic
  misc_feature (5)..(5): n is a, c, g, or u
uuuanugagugggaggaguu

SEQ ID NO: 111012 - RNA, 20 nt, Artificial Sequence
  Synthetic
ccccaugccuuuucgagguu

SEQ ID NO: 111013 - RNA, 20 nt, Artificial Sequence
  Synthetic
caggcaagcuauucuguguu

SEQ ID NO: 111014 - RNA, 20 nt, Artificial Sequence
  Synthetic
  misc_feature (18)..(18): n is a, c, g, or u
aggaguugggggaggagnuu

SEQ ID NO: 111015 - RNA, 20 nt, Artificial Sequence
  Synthetic
  misc_feature (18)..(18): n is a, c, g, or u
uauauggaugauguggunuu

SEQ ID NO: 111016 - RNA, 20 nt, Artificial Sequence
  Synthetic
uggugagugacuggagauuu

SEQ ID NO: 111017 - RNA, 20 nt, Artificial Sequence
  Synthetic
cacauuuccugucuuacuuu

SEQ ID NO: 111018 - RNA, 20 nt, Artificial Sequence
  Synthetic
accaauuuucuuuugucuuu

SEQ ID NO: 111019 - RNA, 20 nt, Artificial Sequence
  Synthetic
  misc_feature (15)..(15): n is a, c, g, or u
cuugaauauuuggunucuuu

SEQ ID NO: 111020 - RNA, 20 nt, Artificial Sequence
  Synthetic
caacgaauugugggucuuuu

SEQ ID NO: 111021 - RNA, 20 nt, Artificial Sequence
  Synthetic
  misc_feature (12)..(14): n is a, c, g, or u
aaaaaaucaaannnuguuuu

SEQ ID NO: 111022 - RNA, 20 nt, Artificial Sequence
  Synthetic
  misc_feature (7)..(7): n is a, c, g, or u
acaauanuugucugauuuuu

SEQ ID NO: 111023 - RNA, 23 nt, Artificial Sequence
  Synthetic
gaaagaagucagaaggcaaaaaa

SEQ ID NO: 111024 - RNA, 24 nt, Artificial Sequence
  Synthetic
ggaaagaagucagaaggcaaaaaa

SEQ ID NO: 111025 - RNA, 21 nt, Artificial Sequence
  Synthetic
  misc_feature (7)..(7): n is a, c, g, or u
gaccagnccguugccgagcaa

SEQ ID NO: 111026 - RNA, 22 nt, Artificial Sequence
  Synthetic
  misc_feature (8)..(8): n is a, c, g, or u
gauucaunaacucaccccaaca

SEQ ID NO: 111027 - RNA, 21 nt, Artificial Sequence
  Synthetic
  misc_feature (11)..(11): n is a, c, g, or u
gaugaucgggnaagaauccca

SEQ ID NO: 111028 - RNA, 21 nt, Artificial Sequence
  Synthetic
  misc_feature (16)..(16): n is a, c, g, or u
guuucccaccuuaugngucca

SEQ ID NO: 111029 - RNA, 22 nt, Artificial Sequence
  Synthetic
gcaaaugaaugucaggaaaaga

SEQ ID NO: 111030 - RNA, 22 nt, Artificial Sequence
  Synthetic
  misc_feature (6)..(6): n is a, c, g, or u
  misc_feature (15)..(15): n is a, c, g, or u
  misc_feature (18)..(18): n is a, c, g, or u
guauanuugcggganagnacga

SEQ ID NO: 111031 - RNA, 20 nt, Artificial Sequence
  Synthetic
gaccuucgucugcgaggcga

SEQ ID NO: 111032 - RNA, 22 nt, Artificial Sequence
  Synthetic
gagaccuucgucugcgaggcga

SEQ ID NO: 111033 - RNA, 24 nt, Artificial Sequence
  Synthetic
guauuuugcgaaagcccaagauga

SEQ ID NO: 111034 - RNA, 20 nt, Artificial Sequence
  Synthetic
gauguucuccauguucggua

SEQ ID NO: 111035 - RNA, 22 nt, Artificial Sequence
  Synthetic
gcgauguucuccauguucggua

SEQ ID NO: 111036 - RNA, 18 nt, Artificial Sequence
  Synthetic
gaauuuuggccaagacac

SEQ ID NO: 111037 - RNA, 20 nt, Artificial Sequence
  Synthetic
gcgaauuuuggccaagacac

SEQ ID NO: 111038 - RNA, 24 nt, Artificial Sequence
  Synthetic
gacugcgaauuuuggccaagacac

SEQ ID NO: 111039 - RNA, 21 nt, Artificial Sequence
  Synthetic
gaaaauugagagaaguccacc

SEQ ID NO: 111040 - RNA, 21 nt, Artificial Sequence
  Synthetic
  misc_feature (10)..(10): n is a, c, g, or u
ggugcuggunguugaugaucc

SEQ ID NO: 111041 - RNA, 23 nt, Artificial Sequence
  Synthetic
gucguugacauugcugaaagucc

SEQ ID NO: 111042 - RNA, 24 nt, Artificial Sequence
  Synthetic
ggucguugacauugcugaaagucc

SEQ ID NO: 111043 - RNA, 22 nt, Artificial Sequence
  Synthetic
gacauagcugacuacuaauucc

SEQ ID NO: 111044 - RNA, 22 nt, Artificial Sequence
  Synthetic
gaaacauagagguuccuugagc

SEQ ID NO: 111045 - RNA, 23 nt, Artificial Sequence
  Synthetic
ggaaacauagagguuccuugagc

SEQ ID NO: 111046 - RNA, 24 nt, Artificial Sequence
  Synthetic
gggaaacauagagguuccuugagc

SEQ ID NO: 111047 - RNA, 21 nt, Artificial Sequence
  Synthetic
  misc_feature (11)..(11): n is a, c, g, or u
gaaaguacagngcccugacuc

SEQ ID NO: 111048 - RNA, 22 nt, Artificial Sequence
  Synthetic
  misc_feature (12)..(12): n is a, c, g, or u
ggaaaguacagngcccugacuc

SEQ ID NO: 111049 - RNA, 19 nt, Artificial Sequence
  Synthetic
gcauauaaaggcauuaaag

SEQ ID NO: 111050 - RNA, 21 nt, Artificial Sequence
  Synthetic
  misc_feature (9)..(10): n is a, c, g, or u
gauuaaagnnagguaccguag

SEQ ID NO: 111051 - RNA, 22 nt, Artificial Sequence
  Synthetic
  misc_feature (10)..(11): n is a, c, g, or u
ggauuaaagnnagguaccguag

SEQ ID NO: 111052 - RNA, 21 nt, Artificial Sequence
  Synthetic
  misc_feature (2)..(2): n is a, c, g, or u
gnagaugagaaggcacagacg

SEQ ID NO: 111053 - RNA, 22 nt, Artificial Sequence
  Synthetic
  misc_feature (3)..(3): n is a, c, g, or u
ggnagaugagaaggcacagacg

SEQ ID NO: 111054 - RNA, 19 nt, Artificial Sequence
  Synthetic
gacagaauugucagucccg

SEQ ID NO: 111055 - RNA, 23 nt, Artificial Sequence
  Synthetic
  misc_feature (2)..(2): n is a, c, g, or u
gnacgacagaauugucagucccg

SEQ ID NO: 111056 - RNA, 21 nt, Artificial Sequence
  Synthetic
ggccccgggaggggucguccg

SEQ ID NO: 111057 - RNA, 23 nt, Artificial Sequence
  Synthetic
gcggccccgggaggggucguccg

SEQ ID NO: 111058 - RNA, 21 nt, Artificial Sequence
  Synthetic
guaaacaaaggacgucccgcg

SEQ ID NO: 111059 - RNA, 24 nt, Artificial Sequence
  Synthetic
gacguaaacaaaggacgucccgcg

SEQ ID NO: 111060 - RNA, 23 nt, Artificial Sequence
  Synthetic
gcauuugguggucuauaugcagg

SEQ ID NO: 111061 - RNA, 24 nt, Artificial Sequence
  Synthetic
ggcauuugguggucuauaugcagg

SEQ ID NO: 111062 - RNA, 18 nt, Artificial Sequence
  Synthetic
gccccaagcggccccggg

SEQ ID NO: 111063 - RNA, 20 nt, Artificial Sequence
  Synthetic
gagccccaagcggccccggg

SEQ ID NO: 111064 - RNA, 23 nt, Artificial Sequence
  Synthetic
guagagccccaagcggccccggg

SEQ ID NO: 111065 - RNA, 24 nt, Artificial Sequence
  Synthetic
gguagagccccaagcggccccggg

SEQ ID NO: 111066 - RNA, 24 nt, Artificial Sequence
  Synthetic
gauuuucugaguuggcuuugaaug

SEQ ID NO: 111067 - RNA, 20 nt, Artificial Sequence
  Synthetic
gacuacuaauucccuggaug

SEQ ID NO: 111068 - RNA, 23 nt, Artificial Sequence
  Synthetic
gcugacuacuaauucccuggaug

SEQ ID NO: 111069 - RNA, 20 nt, Artificial Sequence
  Synthetic
gcccugacucugggaucuug

SEQ ID NO: 111070 - RNA, 22 nt, Artificial Sequence
  Synthetic
  misc_feature (2)..(2): n is a, c, g, or u
gngcccugacucugggaucuug

SEQ ID NO: 111071 - RNA, 24 nt, Artificial Sequence
  Synthetic
  misc_feature (20)..(20): n is a, c, g, or u
gacaaauuggaggacaacanguug

SEQ ID NO: 111072 - RNA, 21 nt, Artificial Sequence
  Synthetic
  misc_feature (4)..(4): n is a, c, g, or u
  misc_feature (19)..(19): n is a, c, g, or u
  misc_feature (21)..(21): n is a, c, g, or u
gucncuuagagguggaganan

SEQ ID NO: 111073 - RNA, 23 nt, Artificial Sequence
  Synthetic
  misc_feature (6)..(6): n is a, c, g, or u
  misc_feature (21)..(21): n is a, c, g, or u
  misc_feature (23)..(23): n is a, c, g, or u
gugucncuuagagguggaganan

SEQ ID NO: 111074 - RNA, 19 nt, Artificial Sequence
  Synthetic
  misc_feature (19)..(19): n is a, c, g, or u
guccaacugaugaucgggn

SEQ ID NO: 111075 - RNA, 20 nt, Artificial Sequence
  Synthetic
  misc_feature (20)..(20): n is a, c, g, or u
gguccaacugaugaucgggn

SEQ ID NO: 111076 - RNA, 21 nt, Artificial Sequence
  Synthetic
  misc_feature (21)..(21): n is a, c, g, or u
ggguccaacugaugaucgggn

SEQ ID NO: 111077 - RNA, 24 nt, Artificial Sequence
  Synthetic
  misc_feature (24)..(24): n is a, c, g, or u
gcaggguccaacugaugaucgggn

SEQ ID NO: 111078 - RNA, 21 nt, Artificial Sequence
  Synthetic
gaaagcccaagaugaugggau

SEQ ID NO: 111079 - RNA, 23 nt, Artificial Sequence
  Synthetic
gcgaaagcccaagaugaugggau

SEQ ID NO: 111080 - RNA, 22 nt, Artificial Sequence
  Synthetic
gagugacuggagauuugggacu

SEQ ID NO: 111081 - RNA, 24 nt, Artificial Sequence
  Synthetic
gugagugacuggagauuugggacu

SEQ ID NO: 111082 - RNA, 20 nt, Artificial Sequence
  Synthetic
guaacacgagcagggguccu

SEQ ID NO: 111083 - RNA, 24 nt, Artificial Sequence
  Synthetic
gccuguaacacgagcagggguccu

SEQ ID NO: 111084 - RNA, 19 nt, Artificial Sequence
  Synthetic
gcgagcaaaacaagcggcu

SEQ ID NO: 111085 - RNA, 22 nt, Artificial Sequence
  Synthetic
gcugcgagcaaaacaagcggcu

SEQ ID NO: 111086 - RNA, 23 nt, Artificial Sequence
  Synthetic
  misc_feature (21)..(21): n is a, c, g, or u
gaaguaaugauuaacuacauncu

SEQ ID NO: 111087 - RNA, 24 nt, Artificial Sequence
  Synthetic
  misc_feature (22)..(22): n is a, c, g, or u
ggaaguaaugauuaacuacauncu

SEQ ID NO: 111088 - RNA, 24 nt, Artificial Sequence
  Synthetic
  misc_feature (4)..(4): n is a, c, g, or u
gccnauggccaagccccaaccagu

SEQ ID NO: 111089 - RNA, 19 nt, Artificial Sequence
  Synthetic
gucuauaugcaggaggagu

SEQ ID NO: 111090 - RNA, 20 nt, Artificial Sequence
  Synthetic
ggucuauaugcaggaggagu

SEQ ID NO: 111091 - RNA, 22 nt, Artificial Sequence
  Synthetic
guggucuauaugcaggaggagu

SEQ ID NO: 111092 - RNA, 23 nt, Artificial Sequence
  Synthetic
gguggucuauaugcaggaggagu

SEQ ID NO: 111093 - RNA, 21 nt, Artificial Sequence
  Synthetic
gucuagacucugugguauugu

SEQ ID NO: 111094 - RNA, 23 nt, Artificial Sequence
  Synthetic
gagucuagacucugugguauugu

SEQ ID NO: 111095 - RNA, 20 nt, Artificial Sequence
  Synthetic
guccggccaguuguccuugu

SEQ ID NO: 111096 - RNA, 22 nt, Artificial Sequence
  Synthetic
gcguccggccaguuguccuugu

SEQ ID NO: 111097 - RNA, 23 nt, Artificial Sequence
  Synthetic
ggcguccggccaguuguccuugu

SEQ ID NO: 111098 - RNA, 21 nt, Artificial Sequence
  Synthetic
  misc_feature (20)..(20): n is a, c, g, or u
gaaaagaaggaguuugccanu

SEQ ID NO: 111099 - RNA, 22 nt, Artificial Sequence
  Synthetic
  misc_feature (21)..(21): n is a, c, g, or u
ggaaaagaaggaguuugccanu

SEQ ID NO: 111100 - RNA, 21 nt, Artificial Sequence
  Synthetic
ggaggagcugcuggcacaguu

SEQ ID NO: 111101 - RNA, 23 nt, Artificial Sequence
  Synthetic
gaggaggagcugcuggcacaguu

SEQ ID NO: 111102 - RNA, 24 nt, Artificial Sequence
  Synthetic
ggaggaggagcugcuggcacaguu

SEQ ID NO: 111103 - RNA, 18 nt, Artificial Sequence
  Synthetic
ggucccaaucuggauuuu

SEQ ID NO: 111104 - RNA, 20 nt, Artificial Sequence
  Synthetic
gaggucccaaucuggauuuu

SEQ ID NO: 111105 - RNA, 23 nt, Artificial Sequence
  Synthetic
guugaggucccaaucuggauuuu

SEQ ID NO: 111106 - RNA, 24 nt, Artificial Sequence
  Synthetic
gguugaggucccaaucuggauuuu

SEQ ID NO: 111107 - RNA, 21 nt, Artificial Sequence
  Synthetic
gcugcuaggcugugcugccaa

SEQ ID NO: 111108 - RNA, 22 nt, Artificial Sequence
  Synthetic
ggcugcuaggcugugcugccaa

SEQ ID NO: 111109 - RNA, 22 nt, Artificial Sequence
  Synthetic
gacaaaaauccucacaauacca

SEQ ID NO: 111110 - RNA, 24 nt, Artificial Sequence
  Synthetic
guaauuuggaagauccagcaucca

SEQ ID NO: 111111 - RNA, 21 nt, Artificial Sequence
  Synthetic
ggggauauucccuuaacuuca

SEQ ID NO: 111112 - RNA, 24 nt, Artificial Sequence
  Synthetic
gauggggauauucccuuaacuuca

SEQ ID NO: 111113 - RNA, 21 nt, Artificial Sequence
  Synthetic
  misc_feature (17)..(17): n is a, c, g, or u
gcauggacauugacccnuaua

SEQ ID NO: 111114 - RNA, 22 nt, Artificial Sequence
  Synthetic
  misc_feature (18)..(18): n is a, c, g, or u
ggcauggacauugacccnuaua

SEQ ID NO: 111115 - RNA, 23 nt, Artificial Sequence
  Synthetic
  misc_feature (19)..(19): n is a, c, g, or u
gggcauggacauugacccnuaua

SEQ ID NO: 111116 - RNA, 18 nt, Artificial Sequence
  Synthetic
  misc_feature (4)..(4): n is a, c, g, or u
guunaugaaucuagccac

SEQ ID NO: 111117 - RNA, 20 nt, Artificial Sequence
  Synthetic
  misc_feature (6)..(6): n is a, c, g, or u
gaguunaugaaucuagccac

SEQ ID NO: 111118 - RNA, 22 nt, Artificial Sequence
  Synthetic
  misc_feature (8)..(8): n is a, c, g, or u
gugaguunaugaaucuagccac

SEQ ID NO: 111119 - RNA, 23 nt, Artificial Sequence
  Synthetic
  misc_feature (9)..(9): n is a, c, g, or u
ggugaguunaugaaucuagccac

SEQ ID NO: 111120 - RNA, 24 nt, Artificial Sequence
  Synthetic
  misc_feature (10)..(10): n is a, c, g, or u
gggugaguunaugaaucuagccac

SEQ ID NO: 111121 - RNA, 22 nt, Artificial Sequence
  Synthetic
guucaagccuccaagcugugcc

SEQ ID NO: 111122 - RNA, 22 nt, Artificial Sequence
  Synthetic
gugggagugggagcauucgggc

SEQ ID NO: 111123 - RNA, 23 nt, Artificial Sequence
  Synthetic
ggugggagugggagcauucgggc

SEQ ID NO: 111124 - RNA, 21 nt, Artificial Sequence
  Synthetic
gggccaagucuguacaacauc

SEQ ID NO: 111125 - RNA, 22 nt, Artificial Sequence
  Synthetic
ggggccaagucuguacaacauc

SEQ ID NO: 111126 - RNA, 23 nt, Artificial Sequence
  Synthetic
gggggccaagucuguacaacauc

SEQ ID NO: 111127 - RNA, 18 nt, Artificial Sequence
  Synthetic
gcagaagaucucaaucuc

SEQ ID NO: 111128 - RNA, 21 nt, Artificial Sequence
  Synthetic
gucgcagaagaucucaaucuc

SEQ ID NO: 111129 - RNA, 23 nt, Artificial Sequence
  Synthetic
gcgucgcagaagaucucaaucuc

SEQ ID NO: 111130 - RNA, 20 nt, Artificial Sequence
  Synthetic
gcccguuuguccucuaauuc

SEQ ID NO: 111131 - RNA, 23 nt, Artificial Sequence
  Synthetic
guugcccguuuguccucuaauuc

SEQ ID NO: 111132 - RNA, 18 nt, Artificial Sequence
  Synthetic
guuuacgucccgucggcg

SEQ ID NO: 111133 - RNA, 21 nt, Artificial Sequence
  Synthetic
gaccccugcucguguuacagg

SEQ ID NO: 111134 - RNA, 22 nt, Artificial Sequence
  Synthetic
ggaccccugcucguguuacagg

SEQ ID NO: 111135 - RNA, 22 nt, Artificial Sequence
  Synthetic
  misc_feature (14)..(14): n is a, c, g, or u
gacuguguguuuanugaguggg

SEQ ID NO: 111136 - RNA, 20 nt, Artificial Sequence
  Synthetic
gcaagcuauucuguguuggg

SEQ ID NO: 111137 - RNA, 21 nt, Artificial Sequence
  Synthetic
ggcaagcuauucuguguuggg

SEQ ID NO: 111138 - RNA, 24 nt, Artificial Sequence
  Synthetic
  misc_feature (24)..(24): n is a, c, g, or u
gcuauucuguguuggggugaguun

SEQ ID NO: 111139 - RNA, 19 nt, Artificial Sequence
  Synthetic
gcuuucgcaaaauaccuau

SEQ ID NO: 111140 - RNA, 20 nt, Artificial Sequence
  Synthetic
ggcuuucgcaaaauaccuau

SEQ ID NO: 111141 - RNA, 21 nt, Artificial Sequence
  Synthetic
gggcuuucgcaaaauaccuau

SEQ ID NO: 111142 - RNA, 19 nt, Artificial Sequence
  Synthetic
gcucuguaucgggaggccu

SEQ ID NO: 111143 - RNA, 23 nt, Artificial Sequence
  Synthetic
guucaggaacagugagcccugcu

SEQ ID NO: 111144 - RNA, 21 nt, Artificial Sequence
  Synthetic
guuaccaauuuucuuuugucu

SEQ ID NO: 111145 - RNA, 24 nt, Artificial Sequence
  Synthetic
gcuguuaccaauuuucuuuugucu

SEQ ID NO: 111146 - RNA, 23 nt, Artificial Sequence
  Synthetic
  misc_feature (12)..(12): n is a, c, g, or u
gaauauuuggunucuuuuggagu

SEQ ID NO: 111147 - RNA, 18 nt, Artificial Sequence
  Synthetic
gccggacgccaacaaggu

SEQ ID NO: 111148 - RNA, 19 nt, Artificial Sequence
  Synthetic
ggccggacgccaacaaggu

SEQ ID NO: 111149 - RNA, 24 nt, Artificial Sequence
  Synthetic
gcacucaggcaagcuauucugugu

SEQ ID NO: 111150 - RNA, 24 nt, Artificial Sequence
  Synthetic
  misc_feature (12)..(12): n is a, c, g, or u
gauuggaaagunugucaacgaauu

SEQ ID NO: 111151 - RNA, 21 nt, Artificial Sequence
  Synthetic
gucaacgaauugugggucuuu

SEQ ID NO: 111152 - RNA, 23 nt, Artificial Sequence
  Synthetic
  misc_feature (18)..(18): n is a, c, g, or u
guucuugaauauuuggunucuuu

SEQ ID NO: 111153 - RNA, 23 nt, Artificial Sequence
  Synthetic
  misc_feature (2)..(2): n is a, c, g, or u
  misc_feature (4)..(4): n is a, c, g, or u
gncnacacguagcgccucauuuu

SEQ ID NO: 111154 - RNA, 21 nt, Artificial Sequence
  Synthetic
aagaagucagaaggcaaaaaa

SEQ ID NO: 111155 - RNA, 22 nt, Artificial Sequence
  Synthetic
aaagaagucagaaggcaaaaaa

SEQ ID NO: 111156 - RNA, 18 nt, Artificial Sequence
  Synthetic
  misc_feature (4)..(4): n is a, c, g, or u
cagnccguugccgagcaa

SEQ ID NO: 111157 - RNA, 19 nt, Artificial Sequence
  Synthetic
  misc_feature (5)..(5): n is a, c, g, or u
ccagnccguugccgagcaa

SEQ ID NO: 111158 - RNA, 20 nt, Artificial Sequence
  Synthetic
  misc_feature (6)..(6): n is a, c, g, or u
accagnccguugccgagcaa

SEQ ID NO: 111159 - RNA, 22 nt, Artificial Sequence
  Synthetic
  misc_feature (8)..(8): n is a, c, g, or u
agaccagnccguugccgagcaa

SEQ ID NO: 111160 - RNA, 23 nt, Artificial Sequence
  Synthetic
  misc_feature (9)..(9): n is a, c, g, or u
cagaccagnccguugccgagcaa

SEQ ID NO: 111161 - RNA, 24 nt, Artificial Sequence
  Synthetic
  misc_feature (10)..(10): n is a, c, g, or u
acagaccagnccguugccgagcaa

SEQ ID NO: 111162 - RNA, 21 nt, Artificial Sequence
  Synthetic
aucaacaauguccuccugcaa

SEQ ID NO: 111163 - RNA, 22 nt, Artificial Sequence
  Synthetic
uaucaacaauguccuccugcaa

SEQ ID NO: 111164 - RNA, 23 nt, Artificial Sequence
  Synthetic
cuaucaacaauguccuccugcaa

SEQ ID NO: 111165 - RNA, 24 nt, Artificial Sequence
  Synthetic
  misc_feature (1)..(1): n is a, c, g, or u
ncuaucaacaauguccuccugcaa

SEQ ID NO: 111166 - RNA, 21 nt, Artificial Sequence
  Synthetic
uuacauaucccaugaaguuaa

SEQ ID NO: 111167 - RNA, 22 nt, Artificial Sequence
  Synthetic
auuacauaucccaugaaguuaa

SEQ ID NO: 111168 - RNA, 23 nt, Artificial Sequence
  Synthetic
aauuacauaucccaugaaguuaa

SEQ ID NO: 111169 - RNA, 24 nt, Artificial Sequence
  Synthetic
caauuacauaucccaugaaguuaa

SEQ ID NO: 111170 - RNA, 21 nt, Artificial Sequence
  Synthetic
  misc_feature (7)..(7): n is a, c, g, or u
auucaunaacucaccccaaca

SEQ ID NO: 111171 - RNA, 23 nt, Artificial Sequence
  Synthetic
  misc_feature (9)..(9): n is a, c, g, or u
agauucaunaacucaccccaaca

SEQ ID NO: 111172 - RNA, 24 nt, Artificial Sequence
  Synthetic
  misc_feature (10)..(10): n is a, c, g, or u
uagauucaunaacucaccccaaca

SEQ ID NO: 111173 - RNA, 22 nt, Artificial Sequence
  Synthetic
  misc_feature (12)..(12): n is a, c, g, or u
ugaugaucgggnaagaauccca

SEQ ID NO: 111174 - RNA, 23 nt, Artificial Sequence
  Synthetic
  misc_feature (13)..(13): n is a, c, g, or u
cugaugaucgggnaagaauccca

SEQ ID NO: 111175 - RNA, 24 nt, Artificial Sequence
  Synthetic
  misc_feature (14)..(14): n is a, c, g, or u
acugaugaucgggnaagaauccca

SEQ ID NO: 111176 - RNA, 22 nt, Artificial Sequence
  Synthetic
  misc_feature (17)..(17): n is a, c, g, or u
aguuucccaccuuaugngucca

SEQ ID NO: 111177 - RNA, 23 nt, Artificial Sequence
  Synthetic
  misc_feature (18)..(18): n is a, c, g, or u
aaguuucccaccuuaugngucca

SEQ ID NO: 111178 - RNA, 24 nt, Artificial Sequence
  Synthetic
  misc_feature (19)..(19): n is a, c, g, or u
aaaguuucccaccuuaugngucca

SEQ ID NO: 111179 - RNA, 21 nt, Artificial Sequence
  Synthetic
  misc_feature (10)..(10): n is a, c, g, or u
auauaagauncccgccuucca

SEQ ID NO: 111180 - RNA, 22 nt, Artificial Sequence
  Synthetic
  misc_feature (11)..(11): n is a, c, g, or u
uauauaagauncccgccuucca

SEQ ID NO: 111181 - RNA, 23 nt, Artificial Sequence
  Synthetic
  misc_feature (12)..(12): n is a, c, g, or u
uuauauaagauncccgccuucca

SEQ ID NO: 111182 - RNA, 24 nt, Artificial Sequence
  Synthetic
  misc_feature (13)..(13): n is a, c, g, or u
uuuauauaagauncccgccuucca

SEQ ID NO: 111183 - RNA, 21 nt, Artificial Sequence
  Synthetic
caaaugaaugucaggaaaaga

SEQ ID NO: 111184 - RNA, 23 nt, Artificial Sequence
  Synthetic
ugcaaaugaaugucaggaaaaga

SEQ ID NO: 111185 - RNA, 24 nt, Artificial Sequence
  Synthetic
cugcaaaugaaugucaggaaaaga

SEQ ID NO: 111186 - RNA, 21 nt, Artificial Sequence
  Synthetic
  misc_feature (5)..(5): n is a, c, g, or u
  misc_feature (14)..(14): n is a, c, g, or u
  misc_feature (17)..(17): n is a, c, g, or u
uauanuugcggganagnacga

SEQ ID NO: 111187 - RNA, 23 nt, Artificial Sequence
  Synthetic
  misc_feature (7)..(7): n is a, c, g, or u
  misc_feature (16)..(16): n is a, c, g, or u
  misc_feature (19)..(19): n is a, c, g, or u
uguauanuugcggganagnacga

SEQ ID NO: 111188 - RNA, 24 nt, Artificial Sequence
  Synthetic
  misc_feature (8)..(8): n is a, c, g, or u
  misc_feature (17)..(17): n is a, c, g, or u
  misc_feature (20)..(20): n is a, c, g, or u
auguauanuugcggganagnacga

SEQ ID NO: 111189 - RNA, 18 nt, Artificial Sequence
  Synthetic
ccuucgucugcgaggcga

SEQ ID NO: 111190 - RNA, 19 nt, Artificial Sequence
  Synthetic
accuucgucugcgaggcga

SEQ ID NO: 111191 - RNA, 21 nt, Artificial Sequence
  Synthetic
agaccuucgucugcgaggcga

SEQ ID NO: 111192 - RNA, 23 nt, Artificial Sequence
  Synthetic
ugagaccuucgucugcgaggcga

SEQ ID NO: 111193 - RNA, 24 nt, Artificial Sequence
  Synthetic
uugagaccuucgucugcgaggcga

SEQ ID NO: 111194 - RNA, 18 nt, Artificial Sequence
  Synthetic
ugcgaaagcccaagauga

SEQ ID NO: 111195 - RNA, 19 nt, Artificial Sequence
  Synthetic
uugcgaaagcccaagauga

SEQ ID NO: 111196 - RNA, 20 nt, Artificial Sequence
  Synthetic
uuugcgaaagcccaagauga

SEQ ID NO: 111197 - RNA, 21 nt, Artificial Sequence
  Synthetic
uuuugcgaaagcccaagauga

SEQ ID NO: 111198 - RNA, 22 nt, Artificial Sequence
  Synthetic
auuuugcgaaagcccaagauga

SEQ ID NO: 111199 - RNA, 23 nt, Artificial Sequence
  Synthetic
uauuuugcgaaagcccaagauga

SEQ ID NO: 111200 - RNA, 18 nt, Artificial Sequence
  Synthetic
uguucuccauguucggua

SEQ ID NO: 111201 - RNA, 19 nt, Artificial Sequence
  Synthetic
auguucuccauguucggua

SEQ ID NO: 111202 - RNA, 21 nt, Artificial Sequence
  Synthetic
cgauguucuccauguucggua

SEQ ID NO: 111203 - RNA, 23 nt, Artificial Sequence
  Synthetic
ugcgauguucuccauguucggua

SEQ ID NO: 111204 - RNA, 24 nt, Artificial Sequence
  Synthetic
augcgauguucuccauguucggua

SEQ ID NO: 111205 - RNA, 19 nt, Artificial Sequence
  Synthetic
cgaauuuuggccaagacac

SEQ ID NO: 111206 - RNA, 21 nt, Artificial Sequence
  Synthetic
ugcgaauuuuggccaagacac

SEQ ID NO: 111207 - RNA, 22 nt, Artificial Sequence
  Synthetic
cugcgaauuuuggccaagacac

SEQ ID NO: 111208 - RNA, 23 nt, Artificial Sequence
  Synthetic
acugcgaauuuuggccaagacac

SEQ ID NO: 111209 - RNA, 22 nt, Artificial Sequence
  Synthetic
agaaaauugagagaaguccacc

SEQ ID NO: 111210 - RNA, 23 nt, Artificial Sequence
  Synthetic
uagaaaauugagagaaguccacc

SEQ ID NO: 111211 - RNA, 24 nt, Artificial Sequence
  Synthetic
cuagaaaauugagagaaguccacc

SEQ ID NO: 111212 - RNA, 21 nt, Artificial Sequence
  Synthetic
  misc_feature (11)..(11): n is a, c, g, or u
caugcuguagnucuuguuccc

SEQ ID NO: 111213 - RNA, 22 nt, Artificial Sequence
  Synthetic
  misc_feature (12)..(12): n is a, c, g, or u
ccaugcuguagnucuuguuccc

SEQ ID NO: 111214 - RNA, 23 nt, Artificial Sequence
  Synthetic
  misc_feature (13)..(13): n is a, c, g, or u
cccaugcuguagnucuuguuccc

SEQ ID NO: 111215 - RNA, 24 nt, Artificial Sequence
  Synthetic
  misc_feature (14)..(14): n is a, c, g, or u
ucccaugcuguagnucuuguuccc

SEQ ID NO: 111216 - RNA, 22 nt, Artificial Sequence
  Synthetic
  misc_feature (11)..(11): n is a, c, g, or u
cggugcuggunguugaugaucc

SEQ ID NO: 111217 - RNA, 23 nt, Artificial Sequence
  Synthetic
  misc_feature (12)..(12): n is a, c, g, or u
ccggugcuggunguugaugaucc

SEQ ID NO: 111218 - RNA, 24 nt, Artificial Sequence
  Synthetic
  misc_feature (13)..(13): n is a, c, g, or u
uccggugcuggunguugaugaucc

SEQ ID NO: 111219 - RNA, 21 nt, Artificial Sequence
  Synthetic
cguugacauugcugaaagucc

SEQ ID NO: 111220 - RNA, 22 nt, Artificial Sequence
  Synthetic
ucguugacauugcugaaagucc

SEQ ID NO: 111221 - RNA, 18 nt, Artificial Sequence
  Synthetic
uagcugacuacuaauucc

SEQ ID NO: 111222 - RNA, 19 nt, Artificial Sequence
  Synthetic
auagcugacuacuaauucc

SEQ ID NO: 111223 - RNA, 20 nt, Artificial Sequence
  Synthetic
cauagcugacuacuaauucc

SEQ ID NO: 111224 - RNA, 21 nt, Artificial Sequence
  Synthetic
acauagcugacuacuaauucc

SEQ ID NO: 111225 - RNA, 23 nt, Artificial Sequence
  Synthetic
ugacauagcugacuacuaauucc

SEQ ID NO: 111226 - RNA, 24 nt, Artificial Sequence
  Synthetic
uugacauagcugacuacuaauucc

SEQ ID NO: 111227 - RNA, 18 nt, Artificial Sequence
  Synthetic
cccgccuguaacacgagc

SEQ ID NO: 111228 - RNA, 19 nt, Artificial Sequence
  Synthetic
ccccgccuguaacacgagc

SEQ ID NO: 111229 - RNA, 20 nt, Artificial Sequence
  Synthetic
accccgccuguaacacgagc

SEQ ID NO: 111230 - RNA, 21 nt, Artificial Sequence
  Synthetic
aaccccgccuguaacacgagc

SEQ ID NO: 111231 - RNA, 22 nt, Artificial Sequence
  Synthetic
aaaccccgccuguaacacgagc

SEQ ID NO: 111232 - RNA, 23 nt, Artificial Sequence
  Synthetic
aaaaccccgccuguaacacgagc

SEQ ID NO: 111233 - RNA, 24 nt, Artificial Sequence
  Synthetic
aaaaaccccgccuguaacacgagc

SEQ ID NO: 111234 - RNA, 18 nt, Artificial Sequence
  Synthetic
cauagagguuccuugagc

SEQ ID NO: 111235 - RNA, 19 nt, Artificial Sequence
  Synthetic
acauagagguuccuugagc

SEQ ID NO: 111236 - RNA, 20 nt, Artificial Sequence
  Synthetic
aacauagagguuccuugagc

SEQ ID NO: 111237 - RNA, 21 nt, Artificial Sequence
  Synthetic
aaacauagagguuccuugagc

SEQ ID NO: 111238 - RNA, 21 nt, Artificial Sequence
  Synthetic
  misc_feature (9)..(10): n is a, c, g, or u
uggggaggnnugaacccuggc

SEQ ID NO: 111239 - RNA, 22 nt, Artificial Sequence
  Synthetic
  misc_feature (10)..(11): n is a, c, g, or u
auggggaggnnugaacccuggc

SEQ ID NO: 111240 - RNA, 23 nt, Artificial Sequence
  Synthetic
  misc_feature (11)..(12): n is a, c, g, or u
cauggggaggnnugaacccuggc

SEQ ID NO: 111241 - RNA, 24 nt, Artificial Sequence
  Synthetic
  misc_feature (12)..(13): n is a, c, g, or u
ccauggggaggnnugaacccuggc

SEQ ID NO: 111242 - RNA, 18 nt, Artificial Sequence
  Synthetic
caacacagaauagcuugc

SEQ ID NO: 111243 - RNA, 19 nt, Artificial Sequence
  Synthetic
ccaacacagaauagcuugc

SEQ ID NO: 111244 - RNA, 20 nt, Artificial Sequence
  Synthetic
cccaacacagaauagcuugc

SEQ ID NO: 111245 - RNA, 21 nt, Artificial Sequence
  Synthetic
ccccaacacagaauagcuugc

SEQ ID NO: 111246 - RNA, 22 nt, Artificial Sequence
  Synthetic
accccaacacagaauagcuugc

SEQ ID NO: 111247 - RNA, 23 nt, Artificial Sequence
  Synthetic
caccccaacacagaauagcuugc

SEQ ID NO: 111248 - RNA, 24 nt, Artificial Sequence
  Synthetic
ucaccccaacacagaauagcuugc

SEQ ID NO: 111249 - RNA, 23 nt, Artificial Sequence
  Synthetic
  misc_feature (13)..(13): n is a, c, g, or u
aggaaaguacagngcccugacuc

SEQ ID NO: 111250 - RNA, 24 nt, Artificial Sequence
  Synthetic
  misc_feature (14)..(14): n is a, c, g, or u
caggaaaguacagngcccugacuc

SEQ ID NO: 111251 - RNA, 18 nt, Artificial Sequence
  Synthetic
cauauaaaggcauuaaag

SEQ ID NO: 111252 - RNA, 20 nt, Artificial Sequence
  Synthetic
ugcauauaaaggcauuaaag

SEQ ID NO: 111253 - RNA, 21 nt, Artificial Sequence
  Synthetic
augcauauaaaggcauuaaag

SEQ ID NO: 111254 - RNA, 22 nt, Artificial Sequence
  Synthetic
caugcauauaaaggcauuaaag

SEQ ID NO: 111255 - RNA, 23 nt, Artificial Sequence
  Synthetic
acaugcauauaaaggcauuaaag

SEQ ID NO: 111256 - RNA, 24 nt, Artificial Sequence
  Synthetic
uacaugcauauaaaggcauuaaag

SEQ ID NO: 111257 - RNA, 21 nt, Artificial Sequence
  Synthetic
caagaagaugaggcauagcag

SEQ ID NO: 111258 - RNA, 22 nt, Artificial Sequence
  Synthetic
acaagaagaugaggcauagcag

SEQ ID NO: 111259 - RNA, 23 nt, Artificial Sequence
  Synthetic
aacaagaagaugaggcauagcag

SEQ ID NO: 111260 - RNA, 24 nt, Artificial Sequence
  Synthetic
caacaagaagaugaggcauagcag

SEQ ID NO: 111261 - RNA, 23 nt, Artificial Sequence
  Synthetic
  misc_feature (11)..(12): n is a, c, g, or u
aggauuaaagnnagguaccguag

SEQ ID NO: 111262 - RNA, 24 nt, Artificial Sequence
  Synthetic
  misc_feature (1)..(1): n is a, c, g, or u
  misc_feature (12)..(13): n is a, c, g, or u
naggauuaaagnnagguaccguag

SEQ ID NO: 111263 - RNA, 23 nt, Artificial Sequence
  Synthetic
  misc_feature (4)..(4): n is a, c, g, or u
cggnagaugagaaggcacagacg

SEQ ID NO: 111264 - RNA, 24 nt, Artificial Sequence
  Synthetic
  misc_feature (5)..(5): n is a, c, g, or u
ccggnagaugagaaggcacagacg

SEQ ID NO: 111265 - RNA, 18 nt, Artificial Sequence
  Synthetic
acagaauugucagucccg

SEQ ID NO: 111266 - RNA, 20 nt, Artificial Sequence
  Synthetic
cgacagaauugucagucccg

SEQ ID NO: 111267 - RNA, 21 nt, Artificial Sequence
  Synthetic
acgacagaauugucagucccg

SEQ ID NO: 111268 - RNA, 22 nt, Artificial Sequence
  Synthetic
  misc_feature (1)..(1): n is a, c, g, or u
nacgacagaauugucagucccg

SEQ ID NO: 111269 - RNA, 24 nt, Artificial Sequence
  Synthetic
  misc_feature (3)..(3): n is a, c, g, or u
agnacgacagaauugucagucccg

SEQ ID NO: 111270 - RNA, 22 nt, Artificial Sequence
  Synthetic
cggccccgggaggggucguccg

SEQ ID NO: 111271 - RNA, 24 nt, Artificial Sequence
  Synthetic
agcggccccgggaggggucguccg

SEQ ID NO: 111272 - RNA, 18 nt, Artificial Sequence
  Synthetic
aacaaaggacgucccgcg

SEQ ID NO: 111273 - RNA, 19 nt, Artificial Sequence
  Synthetic
aaacaaaggacgucccgcg

SEQ ID NO: 111274 - RNA, 20 nt, Artificial Sequence
  Synthetic
uaaacaaaggacgucccgcg

SEQ ID NO: 111275 - RNA, 22 nt, Artificial Sequence
  Synthetic
cguaaacaaaggacgucccgcg

SEQ ID NO: 111276 - RNA, 23 nt, Artificial Sequence
  Synthetic
acguaaacaaaggacgucccgcg

SEQ ID NO: 111277 - RNA, 18 nt, Artificial Sequence
  Synthetic
ugguggucuauaugcagg

SEQ ID NO: 111278 - RNA, 19 nt, Artificial Sequence
  Synthetic
uugguggucuauaugcagg

SEQ ID NO: 111279 - RNA, 20 nt, Artificial Sequence
  Synthetic
uuugguggucuauaugcagg

SEQ ID NO: 111280 - RNA, 21 nt, Artificial Sequence
  Synthetic
auuugguggucuauaugcagg

SEQ ID NO: 111281 - RNA, 22 nt, Artificial Sequence
  Synthetic
cauuugguggucuauaugcagg

SEQ ID NO: 111282 - RNA, 19 nt, Artificial Sequence
  Synthetic
agccccaagcggccccggg

SEQ ID NO: 111283 - RNA, 21 nt, Artificial Sequence
  Synthetic
agagccccaagcggccccggg

SEQ ID NO: 111284 - RNA, 22 nt, Artificial Sequence
  Synthetic
uagagccccaagcggccccggg

SEQ ID NO: 111285 - RNA, 21 nt, Artificial Sequence
  Synthetic
uuucugaguuggcuuugaaug

SEQ ID NO: 111286 - RNA, 22 nt, Artificial Sequence
  Synthetic
uuuucugaguuggcuuugaaug

SEQ ID NO: 111287 - RNA, 23 nt, Artificial Sequence
  Synthetic
auuuucugaguuggcuuugaaug

SEQ ID NO: 111288 - RNA, 18 nt, Artificial Sequence
  Synthetic
cuacuaauucccuggaug

SEQ ID NO: 111289 - RNA, 19 nt, Artificial Sequence
  Synthetic
acuacuaauucccuggaug

SEQ ID NO: 111290 - RNA, 21 nt, Artificial Sequence
  Synthetic
ugacuacuaauucccuggaug

SEQ ID NO: 111291 - RNA, 22 nt, Artificial Sequence
  Synthetic
cugacuacuaauucccuggaug

SEQ ID NO: 111292 - RNA, 24 nt, Artificial Sequence
  Synthetic
agcugacuacuaauucccuggaug

SEQ ID NO: 111293 - RNA, 18 nt, Artificial Sequence
  Synthetic
ccugacucugggaucuug

SEQ ID NO: 111294 - RNA, 19 nt, Artificial Sequence
  Synthetic
cccugacucugggaucuug

SEQ ID NO: 111295 - RNA, 21 nt, Artificial Sequence
  Synthetic
  misc_feature (1)..(1): n is a, c, g, or u
ngcccugacucugggaucuug

SEQ ID NO: 111296 - RNA, 23 nt, Artificial Sequence
  Synthetic
  misc_feature (3)..(3): n is a, c, g, or u
agngcccugacucugggaucuug

SEQ ID NO: 111297 - RNA, 24 nt, Artificial Sequence
  Synthetic
  misc_feature (4)..(4): n is a, c, g, or u
cagngcccugacucugggaucuug

SEQ ID NO: 111298 - RNA, 21 nt, Artificial Sequence
  Synthetic
  misc_feature (17)..(17): n is a, c, g, or u
aaauuggaggacaacanguug

SEQ ID NO: 111299 - RNA, 22 nt, Artificial Sequence
  Synthetic
  misc_feature (18)..(18): n is a, c, g, or u
caaauuggaggacaacanguug

SEQ ID NO: 111300 - RNA, 23 nt, Artificial Sequence
  Synthetic
  misc_feature (19)..(19): n is a, c, g, or u
acaaauuggaggacaacanguug

SEQ ID NO: 111301 - RNA, 22 nt, Artificial Sequence
  Synthetic
  misc_feature (5)..(5): n is a, c, g, or u
  misc_feature (20)..(20): n is a, c, g, or u
  misc_feature (22)..(22): n is a, c, g, or u
ugucncuuagagguggaganan

SEQ ID NO: 111302 - RNA, 24 nt, Artificial Sequence
  Synthetic
  misc_feature (7)..(7): n is a, c, g, or u
  misc_feature (22)..(22): n is a, c, g, or u
  misc_feature (24)..(24): n is a, c, g, or u
agugucncuuagagguggaganan

SEQ ID NO: 111303 - RNA, 18 nt, Artificial Sequence
  Synthetic
  misc_feature (18)..(18): n is a, c, g, or u
uccaacugaugaucgggn

SEQ ID NO: 111304 - RNA, 22 nt, Artificial Sequence
  Synthetic
  misc_feature (22)..(22): n is a, c, g, or u
aggguccaacugaugaucgggn

SEQ ID NO: 111305 - RNA, 23 nt, Artificial Sequence
  Synthetic
  misc_feature (23)..(23): n is a, c, g, or u
caggguccaacugaugaucgggn

SEQ ID NO: 111306 - RNA, 21 nt, Artificial Sequence
  Synthetic
  misc_feature (5)..(5): n is a, c, g, or u
ugugnggguugaggucccaau

SEQ ID NO: 111307 - RNA, 22 nt, Artificial Sequence
  Synthetic
  misc_feature (6)..(6): n is a, c, g, or u
uugugnggguugaggucccaau

SEQ ID NO: 111308 - RNA, 23 nt, Artificial Sequence
  Synthetic
  misc_feature (7)..(7): n is a, c, g, or u
cuugugnggguugaggucccaau

SEQ ID NO: 111309 - RNA, 24 nt, Artificial Sequence
  Synthetic
  misc_feature (8)..(8): n is a, c, g, or u
ccuugugnggguugaggucccaau

SEQ ID NO: 111310 - RNA, 21 nt, Artificial Sequence
  Synthetic
agggcaaauauuuaguaacau

SEQ ID NO: 111311 - RNA, 22 nt, Artificial Sequence
  Synthetic
aagggcaaauauuuaguaacau

SEQ ID NO: 111312 - RNA, 23 nt, Artificial Sequence
  Synthetic
uaagggcaaauauuuaguaacau

SEQ ID NO: 111313 - RNA, 24 nt, Artificial Sequence
  Synthetic
cuaagggcaaauauuuaguaacau

SEQ ID NO: 111314 - RNA, 22 nt, Artificial Sequence
  Synthetic
cgaaagcccaagaugaugggau

SEQ ID NO: 111315 - RNA, 24 nt, Artificial Sequence
  Synthetic
ugcgaaagcccaagaugaugggau

SEQ ID NO: 111316 - RNA, 21 nt, Artificial Sequence
  Synthetic
cagaagcuccaaauucuuuau

SEQ ID NO: 111317 - RNA, 22 nt, Artificial Sequence
  Synthetic
acagaagcuccaaauucuuuau

SEQ ID NO: 111318 - RNA, 23 nt, Artificial Sequence
  Synthetic
cacagaagcuccaaauucuuuau

SEQ ID NO: 111319 - RNA, 24 nt, Artificial Sequence
  Synthetic
ccacagaagcuccaaauucuuuau

SEQ ID NO: 111320 - RNA, 21 nt, Artificial Sequence
  Synthetic
agugacuggagauuugggacu

SEQ ID NO: 111321 - RNA, 23 nt, Artificial Sequence
  Synthetic
ugagugacuggagauuugggacu

SEQ ID NO: 111322 - RNA, 18 nt, Artificial Sequence
  Synthetic
aacacgagcagggguccu

SEQ ID NO: 111323 - RNA, 19 nt, Artificial Sequence
  Synthetic
uaacacgagcagggguccu

SEQ ID NO: 111324 - RNA, 21 nt, Artificial Sequence
  Synthetic
uguaacacgagcagggguccu

SEQ ID NO: 111325 - RNA, 22 nt, Artificial Sequence
  Synthetic
cuguaacacgagcagggguccu

SEQ ID NO: 111326 - RNA, 23 nt, Artificial Sequence
  Synthetic
ccuguaacacgagcagggguccu

SEQ ID NO: 111327 - RNA, 18 nt, Artificial Sequence
  Synthetic
cgagcaaaacaagcggcu

SEQ ID NO: 111328 - RNA, 20 nt, Artificial Sequence
  Synthetic
ugcgagcaaaacaagcggcu

SEQ ID NO: 111329 - RNA, 21 nt, Artificial Sequence
  Synthetic
cugcgagcaaaacaagcggcu

SEQ ID NO: 111330 - RNA, 23 nt, Artificial Sequence
  Synthetic
  misc_feature (1)..(1): n is a, c, g, or u
ngcugcgagcaaaacaagcggcu

SEQ ID NO: 111331 - RNA, 24 nt, Artificial Sequence
  Synthetic
  misc_feature (2)..(2): n is a, c, g, or u
cngcugcgagcaaaacaagcggcu

SEQ ID NO: 111332 - RNA, 21 nt, Artificial Sequence
  Synthetic
ucuggauuuucugaguuggcu

SEQ ID NO: 111333 - RNA, 22 nt, Artificial Sequence
  Synthetic
aucuggauuuucugaguuggcu

SEQ ID NO: 111334 - RNA, 23 nt, Artificial Sequence
  Synthetic
aaucuggauuuucugaguuggcu

SEQ ID NO: 111335 - RNA, 24 nt, Artificial Sequence
  Synthetic
caaucuggauuuucugaguuggcu

SEQ ID NO: 111336 - RNA, 21 nt, Artificial Sequence
  Synthetic
  misc_feature (19)..(19): n is a, c, g, or u
aguaaugauuaacuacauncu

SEQ ID NO: 111337 - RNA, 22 nt, Artificial Sequence
  Synthetic
  misc_feature (20)..(20): n is a, c, g, or u
aaguaaugauuaacuacauncu

SEQ ID NO: 111338 - RNA, 21 nt, Artificial Sequence
  Synthetic
  misc_feature (1)..(1): n is a, c, g, or u
nauggccaagccccaaccagu

SEQ ID NO: 111339 - RNA, 22 nt, Artificial Sequence
  Synthetic
  misc_feature (2)..(2): n is a, c, g, or u
cnauggccaagccccaaccagu

SEQ ID NO: 111340 - RNA, 23 nt, Artificial Sequence
  Synthetic
  misc_feature (3)..(3): n is a, c, g, or u
ccnauggccaagccccaaccagu

SEQ ID NO: 111341 - RNA, 21 nt, Artificial Sequence
  Synthetic
agcggcuaggaguuccgcagu

SEQ ID NO: 111342 - RNA, 22 nt, Artificial Sequence
  Synthetic
aagcggcuaggaguuccgcagu

SEQ ID NO: 111343 - RNA, 23 nt, Artificial Sequence
  Synthetic
caagcggcuaggaguuccgcagu

SEQ ID NO: 111344 - RNA, 24 nt, Artificial Sequence
  Synthetic
acaagcggcuaggaguuccgcagu

SEQ ID NO: 111345 - RNA, 18 nt, Artificial Sequence
  Synthetic
ucuauaugcaggaggagu

SEQ ID NO: 111346 - RNA, 21 nt, Artificial Sequence
  Synthetic
uggucuauaugcaggaggagu

SEQ ID NO: 111347 - RNA, 24 nt, Artificial Sequence
  Synthetic
ugguggucuauaugcaggaggagu

SEQ ID NO: 111348 - RNA, 22 nt, Artificial Sequence
  Synthetic
agucuagacucugugguauugu

SEQ ID NO: 111349 - RNA, 24 nt, Artificial Sequence
  Synthetic
cgagucuagacucugugguauugu

SEQ ID NO: 111350 - RNA, 18 nt, Artificial Sequence
  Synthetic
ccggccaguuguccuugu

SEQ ID NO: 111351 - RNA, 19 nt, Artificial Sequence
  Synthetic
uccggccaguuguccuugu

SEQ ID NO: 111352 - RNA, 21 nt, Artificial Sequence
  Synthetic
cguccggccaguuguccuugu

SEQ ID NO: 111353 - RNA, 24 nt, Artificial Sequence
  Synthetic
uggcguccggccaguuguccuugu

SEQ ID NO: 111354 - RNA, 23 nt, Artificial Sequence
  Synthetic
  misc_feature (22)..(22): n is a, c, g, or u
aggaaaagaaggaguuugccanu

SEQ ID NO: 111355 - RNA, 24 nt, Artificial Sequence
  Synthetic
  misc_feature (23)..(23): n is a, c, g, or u
caggaaaagaaggaguuugccanu

SEQ ID NO: 111356 - RNA, 21 nt, Artificial Sequence
  Synthetic
  misc_feature (20)..(20): n is a, c, g, or u
auccccaucuuuuuguuuunu

SEQ ID NO: 111357 - RNA, 22 nt, Artificial Sequence
  Synthetic
  misc_feature (21)..(21): n is a, c, g, or u
uauccccaucuuuuuguuuunu

SEQ ID NO: 111358 - RNA, 23 nt, Artificial Sequence
  Synthetic
  misc_feature (22)..(22): n is a, c, g, or u
auauccccaucuuuuuguuuunu

SEQ ID NO: 111359 - RNA, 24 nt, Artificial Sequence
  Synthetic
  misc_feature (23)..(23): n is a, c, g, or u
aauauccccaucuuuuuguuuunu

SEQ ID NO: 111360 - RNA, 22 nt, Artificial Sequence
  Synthetic
aggaggagcugcuggcacaguu

SEQ ID NO: 111361 - RNA, 19 nt, Artificial Sequence
  Synthetic
aggucccaaucuggauuuu

SEQ ID NO: 111362 - RNA, 21 nt, Artificial Sequence
  Synthetic
ugaggucccaaucuggauuuu

SEQ ID NO: 111363 - RNA, 22 nt, Artificial Sequence
  Synthetic
uugaggucccaaucuggauuuu

SEQ ID NO: 111364 - RNA, 23 nt, Artificial Sequence
  Synthetic
uggcugcuaggcugugcugccaa

SEQ ID NO: 111365 - RNA, 24 nt, Artificial Sequence
  Synthetic
auggcugcuaggcugugcugccaa

SEQ ID NO: 111366 - RNA, 21 nt, Artificial Sequence
  Synthetic
acaaaaauccucacaauacca

SEQ ID NO: 111367 - RNA, 23 nt, Artificial Sequence
  Synthetic
ugacaaaaauccucacaauacca

SEQ ID NO: 111368 - RNA, 24 nt, Artificial Sequence
  Synthetic
uugacaaaaauccucacaauacca

SEQ ID NO: 111369 - RNA, 18 nt, Artificial Sequence
  Synthetic
uggaagauccagcaucca

SEQ ID NO: 111370 - RNA, 19 nt, Artificial Sequence
  Synthetic
uuggaagauccagcaucca

SEQ ID NO: 111371 - RNA, 20 nt, Artificial Sequence
  Synthetic
uuuggaagauccagcaucca

SEQ ID NO: 111372 - RNA, 21 nt, Artificial Sequence
  Synthetic
auuuggaagauccagcaucca

SEQ ID NO: 111373 - RNA, 22 nt, Artificial Sequence
  Synthetic
aauuuggaagauccagcaucca

SEQ ID NO: 111374 - RNA, 23 nt, Artificial Sequence
  Synthetic
uaauuuggaagauccagcaucca

SEQ ID NO: 111375 - RNA, 21 nt, Artificial Sequence
  Synthetic
  misc_feature (16)..(16): n is a, c, g, or u
uauugauuggaaagunuguca

SEQ ID NO: 111376 - RNA, 22 nt, Artificial Sequence
  Synthetic
  misc_feature (17)..(17): n is a, c, g, or u
cuauugauuggaaagunuguca

SEQ ID NO: 111377 - RNA, 23 nt, Artificial Sequence
  Synthetic
  misc_feature (18)..(18): n is a, c, g, or u
ccuauugauuggaaagunuguca

SEQ ID NO: 111378 - RNA, 24 nt, Artificial Sequence
  Synthetic
  misc_feature (1)..(1): n is a, c, g, or u
  misc_feature (19)..(19): n is a, c, g, or u
nccuauugauuggaaagunuguca

SEQ ID NO: 111379 - RNA, 22 nt, Artificial Sequence
  Synthetic
uggggauauucccuuaacuuca

SEQ ID NO: 111380 - RNA, 23 nt, Artificial Sequence
  Synthetic
auggggauauucccuuaacuuca

SEQ ID NO: 111381 - RNA, 24 nt, Artificial Sequence
  Synthetic
  misc_feature (1)..(1): n is a, c, g, or u
  misc_feature (20)..(20): n is a, c, g, or u
ngggcauggacauugacccnuaua

SEQ ID NO: 111382 - RNA, 21 nt, Artificial Sequence
  Synthetic
acuucaaagacuguguguuua

SEQ ID NO: 111383 - RNA, 22 nt, Artificial Sequence
  Synthetic
uacuucaaagacuguguguuua

SEQ ID NO: 111384 - RNA, 23 nt, Artificial Sequence
  Synthetic
auacuucaaagacuguguguuua

SEQ ID NO: 111385 - RNA, 24 nt, Artificial Sequence
  Synthetic
cauacuucaaagacuguguguuua

SEQ ID NO: 111386 - RNA, 19 nt, Artificial Sequence
  Synthetic
  misc_feature (5)..(5): n is a, c, g, or u
aguunaugaaucuagccac

SEQ ID NO: 111387 - RNA, 21 nt, Artificial Sequence
  Synthetic
  misc_feature (7)..(7): n is a, c, g, or u
ugaguunaugaaucuagccac

SEQ ID NO: 111388 - RNA, 18 nt, Artificial Sequence
  Synthetic
aagccuccaagcugugcc

SEQ ID NO: 111389 - RNA, 19 nt, Artificial Sequence
  Synthetic
caagccuccaagcugugcc

SEQ ID NO: 111390 - RNA, 20 nt, Artificial Sequence
  Synthetic
ucaagccuccaagcugugcc

SEQ ID NO: 111391 - RNA, 21 nt, Artificial Sequence
  Synthetic
uucaagccuccaagcugugcc

SEQ ID NO: 111392 - RNA, 23 nt, Artificial Sequence
  Synthetic
uguucaagccuccaagcugugcc

SEQ ID NO: 111393 - RNA, 24 nt, Artificial Sequence
  Synthetic
cuguucaagccuccaagcugugcc

SEQ ID NO: 111394 - RNA, 18 nt, Artificial Sequence
  Synthetic
ccaaacucuucaagaucc

SEQ ID NO: 111395 - RNA, 19 nt, Artificial Sequence
  Synthetic
accaaacucuucaagaucc

SEQ ID NO: 111396 - RNA, 20 nt, Artificial Sequence
  Synthetic
caccaaacucuucaagaucc

SEQ ID NO: 111397 - RNA, 21 nt, Artificial Sequence
  Synthetic
ccaccaaacucuucaagaucc

SEQ ID NO: 111398 - RNA, 22 nt, Artificial Sequence
  Synthetic
uccaccaaacucuucaagaucc

SEQ ID NO: 111399 - RNA, 23 nt, Artificial Sequence
  Synthetic
uuccaccaaacucuucaagaucc

SEQ ID NO: 111400 - RNA, 24 nt, Artificial Sequence
  Synthetic
  misc_feature (1)..(1): n is a, c, g, or u
nuuccaccaaacucuucaagaucc

SEQ ID NO: 111401 - RNA, 21 nt, Artificial Sequence
  Synthetic
ugggagugggagcauucgggc

SEQ ID NO: 111402 - RNA, 24 nt, Artificial Sequence
  Synthetic
aggugggagugggagcauucgggc

SEQ ID NO: 111403 - RNA, 21 nt, Artificial Sequence
  Synthetic
  misc_feature (20)..(20): n is a, c, g, or u
aucuuucuguccccaauccnc

SEQ ID NO: 111404 - RNA, 22 nt, Artificial Sequence
  Synthetic
  misc_feature (21)..(21): n is a, c, g, or u
aaucuuucuguccccaauccnc

SEQ ID NO: 111405 - RNA, 23 nt, Artificial Sequence
  Synthetic
  misc_feature (22)..(22): n is a, c, g, or u
aaaucuuucuguccccaauccnc

SEQ ID NO: 111406 - RNA, 24 nt, Artificial Sequence
  Synthetic
  misc_feature (23)..(23): n is a, c, g, or u
caaaucuuucuguccccaauccnc

SEQ ID NO: 111407 - RNA, 24 nt, Artificial Sequence
  Synthetic
ugggggccaagucuguacaacauc

SEQ ID NO: 111408 - RNA, 19 nt, Artificial Sequence
  Synthetic
cgcagaagaucucaaucuc

SEQ ID NO: 111409 - RNA, 20 nt, Artificial Sequence
  Synthetic
ucgcagaagaucucaaucuc

SEQ ID NO: 111410 - RNA, 22 nt, Artificial Sequence
  Synthetic
cgucgcagaagaucucaaucuc

SEQ ID NO: 111411 - RNA, 24 nt, Artificial Sequence
  Synthetic
cgcgucgcagaagaucucaaucuc

SEQ ID NO: 111412 - RNA, 18 nt, Artificial Sequence
  Synthetic
ccguuuguccucuaauuc

SEQ ID NO: 111413 - RNA, 19 nt, Artificial Sequence
  Synthetic
cccguuuguccucuaauuc

SEQ ID NO: 111414 - RNA, 21 nt, Artificial Sequence
  Synthetic
ugcccguuuguccucuaauuc

SEQ ID NO: 111415 - RNA, 22 nt, Artificial Sequence
  Synthetic
uugcccguuuguccucuaauuc

SEQ ID NO: 111416 - RNA, 24 nt, Artificial Sequence
  Synthetic
uguugcccguuuguccucuaauuc

SEQ ID NO: 111417 - RNA, 21 nt, Artificial Sequence
  Synthetic
  misc_feature (8)..(8): n is a, c, g, or u
cuuuuggnagagaaacuguuc

SEQ ID NO: 111418 - RNA, 22 nt, Artificial Sequence
  Synthetic
  misc_feature (9)..(9): n is a, c, g, or u
acuuuuggnagagaaacuguuc

SEQ ID NO: 111419 - RNA, 23 nt, Artificial Sequence
  Synthetic
  misc_feature (10)..(10): n is a, c, g, or u
uacuuuuggnagagaaacuguuc

SEQ ID NO: 111420 - RNA, 24 nt, Artificial Sequence
  Synthetic
  misc_feature (11)..(11): n is a, c, g, or u
uuacuuuuggnagagaaacuguuc

SEQ ID NO: 111421 - RNA, 19 nt, Artificial Sequence
  Synthetic
uguuuacgucccgucggcg

SEQ ID NO: 111422 - RNA, 20 nt, Artificial Sequence
  Synthetic
uuguuuacgucccgucggcg

SEQ ID NO: 111423 - RNA, 21 nt, Artificial Sequence
  Synthetic
uuuguuuacgucccgucggcg

SEQ ID NO: 111424 - RNA, 22 nt, Artificial Sequence
  Synthetic
cuuuguuuacgucccgucggcg

SEQ ID NO: 111425 - RNA, 23 nt, Artificial Sequence
  Synthetic
ccuuuguuuacgucccgucggcg

SEQ ID NO: 111426 - RNA, 24 nt, Artificial Sequence
  Synthetic
uccuuuguuuacgucccgucggcg

SEQ ID NO: 111427 - RNA, 21 nt, Artificial Sequence
  Synthetic
uccaauuuguccugguuaucg

SEQ ID NO: 111428 - RNA, 22 nt, Artificial Sequence
  Synthetic
cuccaauuuguccugguuaucg

SEQ ID NO: 111429 - RNA, 23 nt, Artificial Sequence
  Synthetic
ccuccaauuuguccugguuaucg

SEQ ID NO: 111430 - RNA, 24 nt, Artificial Sequence
  Synthetic
uccuccaauuuguccugguuaucg

SEQ ID NO: 111431 - RNA, 18 nt, Artificial Sequence
  Synthetic
cccugcucguguuacagg

SEQ ID NO: 111432 - RNA, 19 nt, Artificial Sequence
  Synthetic
ccccugcucguguuacagg

SEQ ID NO: 111433 - RNA, 20 nt, Artificial Sequence
  Synthetic
accccugcucguguuacagg

SEQ ID NO: 111434 - RNA, 23 nt, Artificial Sequence
  Synthetic
aggaccccugcucguguuacagg

SEQ ID NO: 111435 - RNA, 24 nt, Artificial Sequence
  Synthetic
uaggaccccugcucguguuacagg

SEQ ID NO: 111436 - RNA, 21 nt, Artificial Sequence
  Synthetic
  misc_feature (13)..(13): n is a, c, g, or u
acuguguguuuanugaguggg

SEQ ID NO: 111437 - RNA, 23 nt, Artificial Sequence
  Synthetic
  misc_feature (15)..(15): n is a, c, g, or u
agacuguguguuuanugaguggg

SEQ ID NO: 111438 - RNA, 24 nt, Artificial Sequence
  Synthetic
  misc_feature (16)..(16): n is a, c, g, or u
aagacuguguguuuanugaguggg

SEQ ID NO: 111439 - RNA, 18 nt, Artificial Sequence
  Synthetic
aagcuauucuguguuggg

SEQ ID NO: 111440 - RNA, 19 nt, Artificial Sequence
  Synthetic
caagcuauucuguguuggg

SEQ ID NO: 111441 - RNA, 22 nt, Artificial Sequence
  Synthetic
aggcaagcuauucuguguuggg

SEQ ID NO: 111442 - RNA, 23 nt, Artificial Sequence
  Synthetic
caggcaagcuauucuguguuggg

SEQ ID NO: 111443 - RNA, 24 nt, Artificial Sequence
  Synthetic
ucaggcaagcuauucuguguuggg

SEQ ID NO: 111444 - RNA, 18 nt, Artificial Sequence
  Synthetic
aagaauuuggagcuucug

SEQ ID NO: 111445 - RNA, 19 nt, Artificial Sequence
  Synthetic
aaagaauuuggagcuucug

SEQ ID NO: 111446 - RNA, 20 nt, Artificial Sequence
  Synthetic
uaaagaauuuggagcuucug

SEQ ID NO: 111447 - RNA, 21 nt, Artificial Sequence
  Synthetic
auaaagaauuuggagcuucug

SEQ ID NO: 111448 - RNA, 22 nt, Artificial Sequence
  Synthetic
uauaaagaauuuggagcuucug

SEQ ID NO: 111449 - RNA, 23 nt, Artificial Sequence
  Synthetic
  misc_feature (1)..(1): n is a, c, g, or u
nuauaaagaauuuggagcuucug

SEQ ID NO: 111450 - RNA, 24 nt, Artificial Sequence
  Synthetic
  misc_feature (2)..(2): n is a, c, g, or u
cnuauaaagaauuuggagcuucug

SEQ ID NO: 111451 - RNA, 21 nt, Artificial Sequence
  Synthetic
  misc_feature (21)..(21): n is a, c, g, or u
auucuguguuggggugaguun

SEQ ID NO: 111452 - RNA, 22 nt, Artificial Sequence
  Synthetic
  misc_feature (22)..(22): n is a, c, g, or u
uauucuguguuggggugaguun

SEQ ID NO: 111453 - RNA, 23 nt, Artificial Sequence
  Synthetic
  misc_feature (23)..(23): n is a, c, g, or u
cuauucuguguuggggugaguun

SEQ ID NO: 111454 - RNA, 21 nt, Artificial Sequence
  Synthetic
  misc_feature (8)..(8): n is a, c, g, or u
acccucanaaaacaaaaagau

SEQ ID NO: 111455 - RNA, 22 nt, Artificial Sequence
  Synthetic
  misc_feature (9)..(9): n is a, c, g, or u
aacccucanaaaacaaaaagau

SEQ ID NO: 111456 - RNA, 23 nt, Artificial Sequence
  Synthetic
  misc_feature (10)..(10): n is a, c, g, or u
aaacccucanaaaacaaaaagau

SEQ ID NO: 111457 - RNA, 24 nt, Artificial Sequence
  Synthetic
  misc_feature (11)..(11): n is a, c, g, or u
uaaacccucanaaaacaaaaagau

SEQ ID NO: 111458 - RNA, 18 nt, Artificial Sequence
  Synthetic
cuuucgcaaaauaccuau

SEQ ID NO: 111459 - RNA, 22 nt, Artificial Sequence
  Synthetic
ugggcuuucgcaaaauaccuau

SEQ ID NO: 111460 - RNA, 23 nt, Artificial Sequence
  Synthetic
uugggcuuucgcaaaauaccuau

SEQ ID NO: 111461 - RNA, 24 nt, Artificial Sequence
  Synthetic
cuugggcuuucgcaaaauaccuau

SEQ ID NO: 111462 - RNA, 18 nt, Artificial Sequence
  Synthetic
ugucuggcuuucaguuau

SEQ ID NO: 111463 - RNA, 19 nt, Artificial Sequence
  Synthetic
cugucuggcuuucaguuau

SEQ ID NO: 111464 - RNA, 20 nt, Artificial Sequence
  Synthetic
acugucuggcuuucaguuau

SEQ ID NO: 111465 - RNA, 21 nt, Artificial Sequence
  Synthetic
cacugucuggcuuucaguuau

SEQ ID NO: 111466 - RNA, 22 nt, Artificial Sequence
  Synthetic
ccacugucuggcuuucaguuau

SEQ ID NO: 111467 - RNA, 23 nt, Artificial Sequence
  Synthetic
cccacugucuggcuuucaguuau

SEQ ID NO: 111468 - RNA, 24 nt, Artificial Sequence
  Synthetic
ccccacugucuggcuuucaguuau

SEQ ID NO: 111469 - RNA, 18 nt, Artificial Sequence
  Synthetic
cucuguaucgggaggccu

SEQ ID NO: 111470 - RNA, 20 nt, Artificial Sequence
  Synthetic
ugcucuguaucgggaggccu

SEQ ID NO: 111471 - RNA, 21 nt, Artificial Sequence
  Synthetic
cugcucuguaucgggaggccu

SEQ ID NO: 111472 - RNA, 22 nt, Artificial Sequence
  Synthetic
ucugcucuguaucgggaggccu

SEQ ID NO: 111473 - RNA, 23 nt, Artificial Sequence
  Synthetic
cucugcucuguaucgggaggccu

SEQ ID NO: 111474 - RNA, 24 nt, Artificial Sequence
  Synthetic
ccucugcucuguaucgggaggccu

SEQ ID NO: 111475 - RNA, 21 nt, Artificial Sequence
  Synthetic
ucaggaacagugagcccugcu

SEQ ID NO: 111476 - RNA, 22 nt, Artificial Sequence
  Synthetic
uucaggaacagugagcccugcu

SEQ ID NO: 111477 - RNA, 24 nt, Artificial Sequence
  Synthetic
aguucaggaacagugagcccugcu

SEQ ID NO: 111478 - RNA, 22 nt, Artificial Sequence
  Synthetic
uguuaccaauuuucuuuugucu

SEQ ID NO: 111479 - RNA, 23 nt, Artificial Sequence
  Synthetic
cuguuaccaauuuucuuuugucu

SEQ ID NO: 111480 - RNA, 21 nt, Artificial Sequence
  Synthetic
  misc_feature (10)..(10): n is a, c, g, or u
auauuuggunucuuuuggagu

SEQ ID NO: 111481 - RNA, 22 nt, Artificial Sequence
  Synthetic
  misc_feature (11)..(11): n is a, c, g, or u
aauauuuggunucuuuuggagu

SEQ ID NO: 111482 - RNA, 24 nt, Artificial Sequence
  Synthetic
  misc_feature (13)..(13): n is a, c, g, or u
ugaauauuuggunucuuuuggagu

SEQ ID NO: 111483 - RNA, 20 nt, Artificial Sequence
  Synthetic
uggccggacgccaacaaggu

SEQ ID NO: 111484 - RNA, 21 nt, Artificial Sequence
  Synthetic
cuggccggacgccaacaaggu

SEQ ID NO: 111485 - RNA, 22 nt, Artificial Sequence
  Synthetic
acuggccggacgccaacaaggu

SEQ ID NO: 111486 - RNA, 23 nt, Artificial Sequence
  Synthetic
aacuggccggacgccaacaaggu

SEQ ID NO: 111487 - RNA, 24 nt, Artificial Sequence
  Synthetic
caacuggccggacgccaacaaggu

SEQ ID NO: 111488 - RNA, 21 nt, Artificial Sequence
  Synthetic
  misc_feature (1)..(2): n is a, c, g, or u
nnccuccccaugggggacugu

SEQ ID NO: 111489 - RNA, 22 nt, Artificial Sequence
  Synthetic
  misc_feature (2)..(3): n is a, c, g, or u
annccuccccaugggggacugu

SEQ ID NO: 111490 - RNA, 23 nt, Artificial Sequence
  Synthetic
  misc_feature (3)..(4): n is a, c, g, or u
cannccuccccaugggggacugu

SEQ ID NO: 111491 - RNA, 24 nt, Artificial Sequence
  Synthetic
  misc_feature (4)..(5): n is a, c, g, or u
ucannccuccccaugggggacugu

SEQ ID NO: 111492 - RNA, 21 nt, Artificial Sequence
  Synthetic
cucaggcaagcuauucugugu

SEQ ID NO: 111493 - RNA, 22 nt, Artificial Sequence
  Synthetic
acucaggcaagcuauucugugu

SEQ ID NO: 111494 - RNA, 23 nt, Artificial Sequence
  Synthetic
cacucaggcaagcuauucugugu

SEQ ID NO: 111495 - RNA, 21 nt, Artificial Sequence
  Synthetic
  misc_feature (9)..(9): n is a, c, g, or u
uggaaagunugucaacgaauu

SEQ ID NO: 111496 - RNA, 22 nt, Artificial Sequence
  Synthetic
  misc_feature (10)..(10): n is a, c, g, or u
uuggaaagunugucaacgaauu

SEQ ID NO: 111497 - RNA, 23 nt, Artificial Sequence
  Synthetic
  misc_feature (11)..(11): n is a, c, g, or u
auuggaaagunugucaacgaauu

SEQ ID NO: 111498 - RNA, 18 nt, Artificial Sequence
  Synthetic
aacgaauugugggucuuu

SEQ ID NO: 111499 - RNA, 19 nt, Artificial Sequence
  Synthetic
caacgaauugugggucuuu

SEQ ID NO: 111500 - RNA, 20 nt, Artificial Sequence
  Synthetic
ucaacgaauugugggucuuu

SEQ ID NO: 111501 - RNA, 22 nt, Artificial Sequence
  Synthetic
ugucaacgaauugugggucuuu

SEQ ID NO: 111502 - RNA, 23 nt, Artificial Sequence
  Synthetic
  misc_feature (1)..(1): n is a, c, g, or u
nugucaacgaauugugggucuuu

SEQ ID NO: 111503 - RNA, 24 nt, Artificial Sequence
  Synthetic
  misc_feature (2)..(2): n is a, c, g, or u
unugucaacgaauugugggucuuu

SEQ ID NO: 111504 - RNA, 21 nt, Artificial Sequence
  Synthetic
  misc_feature (16)..(16): n is a, c, g, or u
ucuugaauauuuggunucuuu

SEQ ID NO: 111505 - RNA, 22 nt, Artificial Sequence
  Synthetic
  misc_feature (17)..(17): n is a, c, g, or u
uucuugaauauuuggunucuuu

SEQ ID NO: 111506 - RNA, 24 nt, Artificial Sequence
  Synthetic
  misc_feature (19)..(19): n is a, c, g, or u
uguucuugaauauuuggunucuuu

SEQ ID NO: 111507 - RNA, 18 nt, Artificial Sequence
  Synthetic
cacguagcgccucauuuu

SEQ ID NO: 111508 - RNA, 19 nt, Artificial Sequence
  Synthetic
acacguagcgccucauuuu

SEQ ID NO: 111509 - RNA, 20 nt, Artificial Sequence
  Synthetic
  misc_feature (1)..(1): n is a, c, g, or u
nacacguagcgccucauuuu

SEQ ID NO: 111510 - RNA, 21 nt, Artificial Sequence
  Synthetic
  misc_feature (2)..(2): n is a, c, g, or u
cnacacguagcgccucauuuu

SEQ ID NO: 111511 - RNA, 22 nt, Artificial Sequence
  Synthetic
  misc_feature (1)..(1): n is a, c, g, or u
  misc_feature (3)..(3): n is a, c, g, or u
ncnacacguagcgccucauuuu

SEQ ID NO: 111512 - RNA, 24 nt, Artificial Sequence
  Synthetic
  misc_feature (3)..(3): n is a, c, g, or u
  misc_feature (5)..(5): n is a, c, g, or u
agncnacacguagcgccucauuuu

SEQ ID NO: 111513 - RNA, 18 nt, Artificial Sequence
  Synthetic
aagucagaaggcaaaaaa

SEQ ID NO: 111514 - RNA, 19 nt, Artificial Sequence
  Synthetic
gaagucagaaggcaaaaaa

SEQ ID NO: 111515 - RNA, 20 nt, Artificial Sequence
  Synthetic
agaagucagaaggcaaaaaa

SEQ ID NO: 111516 - RNA, 18 nt, Artificial Sequence
  Synthetic
aacaauguccuccugcaa

SEQ ID NO: 111517 - RNA, 19 nt, Artificial Sequence
  Synthetic
caacaauguccuccugcaa

SEQ ID NO: 111518 - RNA, 20 nt, Artificial Sequence
  Synthetic
ucaacaauguccuccugcaa

SEQ ID NO: 111519 - RNA, 18 nt, Artificial Sequence
  Synthetic
cauaucccaugaaguuaa

SEQ ID NO: 111520 - RNA, 19 nt, Artificial Sequence
  Synthetic
acauaucccaugaaguuaa

SEQ ID NO: 111521 - RNA, 20 nt, Artificial Sequence
  Synthetic
uacauaucccaugaaguuaa

SEQ ID NO: 111522 - RNA, 18 nt, Artificial Sequence
  Synthetic
  misc_feature (4)..(4): n is a, c, g, or u
caunaacucaccccaaca

SEQ ID NO: 111523 - RNA, 19 nt, Artificial Sequence
  Synthetic
  misc_feature (5)..(5): n is a, c, g, or u
ucaunaacucaccccaaca

SEQ ID NO: 111524 - RNA, 20 nt, Artificial Sequence
  Synthetic
  misc_feature (6)..(6): n is a, c, g, or u
uucaunaacucaccccaaca

SEQ ID NO: 111525 - RNA, 18 nt, Artificial Sequence
  Synthetic
  misc_feature (8)..(8): n is a, c, g, or u
gaucgggnaagaauccca

SEQ ID NO: 111526 - RNA, 19 nt, Artificial Sequence
  Synthetic
  misc_feature (9)..(9): n is a, c, g, or u
ugaucgggnaagaauccca

SEQ ID NO: 111527 - RNA, 20 nt, Artificial Sequence
  Synthetic
  misc_feature (10)..(10): n is a, c, g, or u
augaucgggnaagaauccca

SEQ ID NO: 111528 - RNA, 18 nt, Artificial Sequence
  Synthetic
  misc_feature (13)..(13): n is a, c, g, or u
ucccaccuuaugngucca

SEQ ID NO: 111529 - RNA, 19 nt, Artificial Sequence
  Synthetic
  misc_feature (14)..(14): n is a, c, g, or u
uucccaccuuaugngucca

SEQ ID NO: 111530 - RNA, 20 nt, Artificial Sequence
  Synthetic
  misc_feature (15)..(15): n is a, c, g, or u
uuucccaccuuaugngucca

SEQ ID NO: 111531 - RNA, 18 nt, Artificial Sequence
  Synthetic
  misc_feature (7)..(7): n is a, c, g, or u
uaagauncccgccuucca

SEQ ID NO: 111532 - RNA, 19 nt, Artificial Sequence
  Synthetic
  misc_feature (8)..(8): n is a, c, g, or u
auaagauncccgccuucca

SEQ ID NO: 111533 - RNA, 20 nt, Artificial Sequence
  Synthetic
  misc_feature (9)..(9): n is a, c, g, or u
uauaagauncccgccuucca

SEQ ID NO: 111534 - RNA, 18 nt, Artificial Sequence
  Synthetic
augaaugucaggaaaaga

SEQ ID NO: 111535 - RNA, 19 nt, Artificial Sequence
  Synthetic
aaugaaugucaggaaaaga

SEQ ID NO: 111536 - RNA, 20 nt, Artificial Sequence
  Synthetic
aaaugaaugucaggaaaaga

SEQ ID NO: 111537 - RNA, 18 nt, Artificial Sequence
  Synthetic
  misc_feature (2)..(2): n is a, c, g, or u
  misc_feature (11)..(11): n is a, c, g, or u
  misc_feature (14)..(14): n is a, c, g, or u
anuugcggganagnacga

SEQ ID NO: 111538 - RNA, 19 nt, Artificial Sequence
  Synthetic
  misc_feature (3)..(3): n is a, c, g, or u
  misc_feature (12)..(12): n is a, c, g, or u
  misc_feature (15)..(15): n is a, c, g, or u
uanuugcggganagnacga

SEQ ID NO: 111539 - RNA, 20 nt, Artificial Sequence
  Synthetic
  misc_feature (4)..(4): n is a, c, g, or u
  misc_feature (13)..(13): n is a, c, g, or u
  misc_feature (16)..(16): n is a, c, g, or u
auanuugcggganagnacga

SEQ ID NO: 111540 - RNA, 18 nt, Artificial Sequence
  Synthetic
aauugagagaaguccacc

SEQ ID NO: 111541 - RNA, 19 nt, Artificial Sequence
  Synthetic
aaauugagagaaguccacc

SEQ ID NO: 111542 - RNA, 20 nt, Artificial Sequence
  Synthetic
aaaauugagagaaguccacc

SEQ ID NO: 111543 - RNA, 18 nt, Artificial Sequence
  Synthetic
  misc_feature (8)..(8): n is a, c, g, or u
gcuguagnucuuguuccc

SEQ ID NO: 111544 - RNA, 19 nt, Artificial Sequence
  Synthetic
  misc_feature (9)..(9): n is a, c, g, or u
ugcuguagnucuuguuccc

SEQ ID NO: 111545 - RNA, 20 nt, Artificial Sequence
  Synthetic
  misc_feature (10)..(10): n is a, c, g, or u
augcuguagnucuuguuccc

SEQ ID NO: 111546 - RNA, 18 nt, Artificial Sequence
  Synthetic
  misc_feature (7)..(7): n is a, c, g, or u
gcuggunguugaugaucc

SEQ ID NO: 111547 - RNA, 19 nt, Artificial Sequence
  Synthetic
  misc_feature (8)..(8): n is a, c, g, or u
ugcuggunguugaugaucc

SEQ ID NO: 111548 - RNA, 20 nt, Artificial Sequence
  Synthetic
  misc_feature (9)..(9): n is a, c, g, or u
gugcuggunguugaugaucc

SEQ ID NO: 111549 - RNA, 18 nt, Artificial Sequence
  Synthetic
ugacauugcugaaagucc

SEQ ID NO: 111550 - RNA, 19 nt, Artificial Sequence
  Synthetic
uugacauugcugaaagucc

SEQ ID NO: 111551 - RNA, 20 nt, Artificial Sequence
  Synthetic
guugacauugcugaaagucc

SEQ ID NO: 111552 - RNA, 18 nt, Artificial Sequence
  Synthetic
  misc_feature (6)..(7): n is a, c, g, or u
ggaggnnugaacccuggc

SEQ ID NO: 111553 - RNA, 19 nt, Artificial Sequence
  Synthetic
  misc_feature (7)..(8): n is a, c, g, or u
gggaggnnugaacccuggc

SEQ ID NO: 111554 - RNA, 20 nt, Artificial Sequence
  Synthetic
  misc_feature (8)..(9): n is a, c, g, or u
ggggaggnnugaacccuggc

SEQ ID NO: 111555 - RNA, 18 nt, Artificial Sequence
  Synthetic
  misc_feature (8)..(8): n is a, c, g, or u
aguacagngcccugacuc

SEQ ID NO: 111556 - RNA, 19 nt, Artificial Sequence
  Synthetic
  misc_feature (9)..(9): n is a, c, g, or u
aaguacagngcccugacuc

SEQ ID NO: 111557 - RNA, 20 nt, Artificial Sequence
  Synthetic
  misc_feature (10)..(10): n is a, c, g, or u
aaaguacagngcccugacuc

SEQ ID NO: 111558 - RNA, 18 nt, Artificial Sequence
  Synthetic
gaagaugaggcauagcag

SEQ ID NO: 111559 - RNA, 19 nt, Artificial Sequence
  Synthetic
agaagaugaggcauagcag

SEQ ID NO: 111560 - RNA, 20 nt, Artificial Sequence
  Synthetic
aagaagaugaggcauagcag

SEQ ID NO: 111561 - RNA, 18 nt, Artificial Sequence
  Synthetic
  misc_feature (6)..(7): n is a, c, g, or u
uaaagnnagguaccguag

SEQ ID NO: 111562 - RNA, 19 nt, Artificial Sequence
  Synthetic
  misc_feature (7)..(8): n is a, c, g, or u
uuaaagnnagguaccguag

SEQ ID NO: 111563 - RNA, 20 nt, Artificial Sequence
  Synthetic
  misc_feature (8)..(9): n is a, c, g, or u
auuaaagnnagguaccguag

SEQ ID NO: 111564 - RNA, 18 nt, Artificial Sequence
  Synthetic
gaugagaaggcacagacg

SEQ ID NO: 111565 - RNA, 19 nt, Artificial Sequence
  Synthetic
agaugagaaggcacagacg

SEQ ID NO: 111566 - RNA, 20 nt, Artificial Sequence
  Synthetic
  misc_feature (1)..(1): n is a, c, g, or u
nagaugagaaggcacagacg

SEQ ID NO: 111567 - RNA, 18 nt, Artificial Sequence
  Synthetic
cccgggaggggucguccg

SEQ ID NO: 111568 - RNA, 19 nt, Artificial Sequence
  Synthetic
ccccgggaggggucguccg

SEQ ID NO: 111569 - RNA, 20 nt, Artificial Sequence
  Synthetic
gccccgggaggggucguccg

SEQ ID NO: 111570 - RNA, 18 nt, Artificial Sequence
  Synthetic
ccacugcauggccugagg

SEQ ID NO: 111571 - RNA, 19 nt, Artificial Sequence
  Synthetic
uccacugcauggccugagg

SEQ ID NO: 111572 - RNA, 20 nt, Artificial Sequence
  Synthetic
uuccacugcauggccugagg

SEQ ID NO: 111573 - RNA, 18 nt, Artificial Sequence
  Synthetic
cugaguuggcuuugaaug

SEQ ID NO: 111574 - RNA, 19 nt, Artificial Sequence
  Synthetic
ucugaguuggcuuugaaug

SEQ ID NO: 111575 - RNA, 20 nt, Artificial Sequence
  Synthetic
uucugaguuggcuuugaaug

SEQ ID NO: 111576 - RNA, 18 nt, Artificial Sequence
  Synthetic
  misc_feature (14)..(14): n is a, c, g, or u
uuggaggacaacanguug

SEQ ID NO: 111577 - RNA, 19 nt, Artificial Sequence
  Synthetic
  misc_feature (15)..(15): n is a, c, g, or u
auuggaggacaacanguug

SEQ ID NO: 111578 - RNA, 20 nt, Artificial Sequence
  Synthetic
  misc_feature (16)..(16): n is a, c, g, or u
aauuggaggacaacanguug

SEQ ID NO: 111579 - RNA, 18 nt, Artificial Sequence
  Synthetic
  misc_feature (1)..(1): n is a, c, g, or u
  misc_feature (16)..(16): n is a, c, g, or u
  misc_feature (18)..(18): n is a, c, g, or u
ncuuagagguggaganan

SEQ ID NO: 111580 - RNA, 19 nt, Artificial Sequence
  Synthetic
  misc_feature (2)..(2): n is a, c, g, or u
  misc_feature (17)..(17): n is a, c, g, or u
  misc_feature (19)..(19): n is a, c, g, or u
cncuuagagguggaganan

SEQ ID NO: 111581 - RNA, 20 nt, Artificial Sequence
  Synthetic
  misc_feature (3)..(3): n is a, c, g, or u
  misc_feature (18)..(18): n is a, c, g, or u
  misc_feature (20)..(20): n is a, c, g, or u
ucncuuagagguggaganan

SEQ ID NO: 111582 - RNA, 18 nt, Artificial Sequence
  Synthetic
  misc_feature (2)..(2): n is a, c, g, or u
gnggguugaggucccaau

SEQ ID NO: 111583 - RNA, 19 nt, Artificial Sequence
  Synthetic
  misc_feature (3)..(3): n is a, c, g, or u
ugnggguugaggucccaau

SEQ ID NO: 111584 - RNA, 20 nt, Artificial Sequence
  Synthetic
  misc_feature (4)..(4): n is a, c, g, or u
gugnggguugaggucccaau

SEQ ID NO: 111585 - RNA, 18 nt, Artificial Sequence
  Synthetic
gcaaauauuuaguaacau

SEQ ID NO: 111586 - RNA, 19 nt, Artificial Sequence
  Synthetic
ggcaaauauuuaguaacau

SEQ ID NO: 111587 - RNA, 20 nt, Artificial Sequence
  Synthetic
gggcaaauauuuaguaacau

SEQ ID NO: 111588 - RNA, 18 nt, Artificial Sequence
  Synthetic
agcccaagaugaugggau

SEQ ID NO: 111589 - RNA, 19 nt, Artificial Sequence
  Synthetic
aagcccaagaugaugggau

SEQ ID NO: 111590 - RNA, 20 nt, Artificial Sequence
  Synthetic
aaagcccaagaugaugggau

SEQ ID NO: 111591 - RNA, 18 nt, Artificial Sequence
  Synthetic
aagcuccaaauucuuuau

SEQ ID NO: 111592 - RNA, 19 nt, Artificial Sequence
  Synthetic
gaagcuccaaauucuuuau

SEQ ID NO: 111593 - RNA, 20 nt, Artificial Sequence
  Synthetic
agaagcuccaaauucuuuau

SEQ ID NO: 111594 - RNA, 18 nt, Artificial Sequence
  Synthetic
gacuggagauuugggacu

SEQ ID NO: 111595 - RNA, 19 nt, Artificial Sequence
  Synthetic
ugacuggagauuugggacu

SEQ ID NO: 111596 - RNA, 20 nt, Artificial Sequence
  Synthetic
gugacuggagauuugggacu

SEQ ID NO: 111597 - RNA, 18 nt, Artificial Sequence
  Synthetic
ggauuuucugaguuggcu

SEQ ID NO: 111598 - RNA, 19 nt, Artificial Sequence
  Synthetic
uggauuuucugaguuggcu

SEQ ID NO: 111599 - RNA, 20 nt, Artificial Sequence
  Synthetic
cuggauuuucugaguuggcu

SEQ ID NO: 111600 - RNA, 18 nt, Artificial Sequence
  Synthetic
  misc_feature (16)..(16): n is a, c, g, or u
aaugauuaacuacauncu

SEQ ID NO: 111601 - RNA, 19 nt, Artificial Sequence
  Synthetic
  misc_feature (17)..(17): n is a, c, g, or u
uaaugauuaacuacauncu

SEQ ID NO: 111602 - RNA, 20 nt, Artificial Sequence
  Synthetic
  misc_feature (18)..(18): n is a, c, g, or u
guaaugauuaacuacauncu

SEQ ID NO: 111603 - RNA, 18 nt, Artificial Sequence
  Synthetic
ggccaagccccaaccagu

SEQ ID NO: 111604 - RNA, 19 nt, Artificial Sequence
  Synthetic
uggccaagccccaaccagu

SEQ ID NO: 111605 - RNA, 20 nt, Artificial Sequence
  Synthetic
auggccaagccccaaccagu

SEQ ID NO: 111606 - RNA, 18 nt, Artificial Sequence
  Synthetic
ggcuaggaguuccgcagu

SEQ ID NO: 111607 - RNA, 19 nt, Artificial Sequence
  Synthetic
cggcuaggaguuccgcagu

SEQ ID NO: 111608 - RNA, 20 nt, Artificial Sequence
  Synthetic
gcggcuaggaguuccgcagu

SEQ ID NO: 111609 - RNA, 18 nt, Artificial Sequence
  Synthetic
uagacucugugguauugu

SEQ ID NO: 111610 - RNA, 19 nt, Artificial Sequence
  Synthetic
cuagacucugugguauugu

SEQ ID NO: 111611 - RNA, 20 nt, Artificial Sequence
  Synthetic
ucuagacucugugguauugu

SEQ ID NO: 111612 - RNA, 18 nt, Artificial Sequence
  Synthetic
  misc_feature (17)..(17): n is a, c, g, or u
aagaaggaguuugccanu

SEQ ID NO: 111613 - RNA, 19 nt, Artificial Sequence
  Synthetic
  misc_feature (18)..(18): n is a, c, g, or u
aaagaaggaguuugccanu

SEQ ID NO: 111614 - RNA, 20 nt, Artificial Sequence
  Synthetic
  misc_feature (19)..(19): n is a, c, g, or u
aaaagaaggaguuugccanu

SEQ ID NO: 111615 - RNA, 18 nt, Artificial Sequence
  Synthetic
  misc_feature (17)..(17): n is a, c, g, or u
cccaucuuuuuguuuunu

SEQ ID NO: 111616 - RNA, 19 nt, Artificial Sequence
  Synthetic
  misc_feature (18)..(18): n is a, c, g, or u
ccccaucuuuuuguuuunu

SEQ ID NO: 111617 - RNA, 20 nt, Artificial Sequence
  Synthetic
  misc_feature (19)..(19): n is a, c, g, or u
uccccaucuuuuuguuuunu

SEQ ID NO: 111618 - RNA, 18 nt, Artificial Sequence
  Synthetic
ggagcugcuggcacaguu

SEQ ID NO: 111619 - RNA, 19 nt, Artificial Sequence
  Synthetic
aggagcugcuggcacaguu

SEQ ID NO: 111620 - RNA, 20 nt, Artificial Sequence
  Synthetic
gaggagcugcuggcacaguu

SEQ ID NO: 111621 - RNA, 18 nt, Artificial Sequence
  Synthetic
gcuaggcugugcugccaa

SEQ ID NO: 111622 - RNA, 19 nt, Artificial Sequence
  Synthetic
ugcuaggcugugcugccaa

SEQ ID NO: 111623 - RNA, 20 nt, Artificial Sequence
  Synthetic
cugcuaggcugugcugccaa

SEQ ID NO: 111624 - RNA, 18 nt, Artificial Sequence
  Synthetic
aaaauccucacaauacca

SEQ ID NO: 111625 - RNA, 19 nt, Artificial Sequence
  Synthetic
aaaaauccucacaauacca

SEQ ID NO: 111626 - RNA, 20 nt, Artificial Sequence
  Synthetic
caaaaauccucacaauacca

SEQ ID NO: 111627 - RNA, 18 nt, Artificial Sequence
  Synthetic
  misc_feature (13)..(13): n is a, c, g, or u
ugauuggaaagunuguca

SEQ ID NO: 111628 - RNA, 19 nt, Artificial Sequence
  Synthetic
  misc_feature (14)..(14): n is a, c, g, or u
uugauuggaaagunuguca

SEQ ID NO: 111629 - RNA, 20 nt, Artificial Sequence
  Synthetic
  misc_feature (15)..(15): n is a, c, g, or u
auugauuggaaagunuguca

SEQ ID NO: 111630 - RNA, 18 nt, Artificial Sequence
  Synthetic
gauauucccuuaacuuca

SEQ ID NO: 111631 - RNA, 19 nt, Artificial Sequence
  Synthetic
ggauauucccuuaacuuca

SEQ ID NO: 111632 - RNA, 20 nt, Artificial Sequence
  Synthetic
gggauauucccuuaacuuca

SEQ ID NO: 111633 - RNA, 18 nt, Artificial Sequence
  Synthetic
  misc_feature (14)..(14): n is a, c, g, or u
uggacauugacccnuaua

SEQ ID NO: 111634 - RNA, 19 nt, Artificial Sequence
  Synthetic
  misc_feature (15)..(15): n is a, c, g, or u
auggacauugacccnuaua

SEQ ID NO: 111635 - RNA, 20 nt, Artificial Sequence
  Synthetic
  misc_feature (16)..(16): n is a, c, g, or u
cauggacauugacccnuaua

SEQ ID NO: 111636 - RNA, 18 nt, Artificial Sequence
  Synthetic
ucaaagacuguguguuua

SEQ ID NO: 111637 - RNA, 19 nt, Artificial Sequence
  Synthetic
uucaaagacuguguguuua

SEQ ID NO: 111638 - RNA, 20 nt, Artificial Sequence
  Synthetic
cuucaaagacuguguguuua

SEQ ID NO: 111639 - RNA, 18 nt, Artificial Sequence
  Synthetic
gagugggagcauucgggc

SEQ ID NO: 111640 - RNA, 19 nt, Artificial Sequence
  Synthetic
ggagugggagcauucgggc

SEQ ID NO: 111641 - RNA, 20 nt, Artificial Sequence
  Synthetic
gggagugggagcauucgggc

SEQ ID NO: 111642 - RNA, 18 nt, Artificial Sequence
  Synthetic
  misc_feature (17)..(17): n is a, c, g, or u
uuucuguccccaauccnc

SEQ ID NO: 111643 - RNA, 19 nt, Artificial Sequence
  Synthetic
  misc_feature (18)..(18): n is a, c, g, or u
cuuucuguccccaauccnc

SEQ ID NO: 111644 - RNA, 20 nt, Artificial Sequence
  Synthetic
  misc_feature (19)..(19): n is a, c, g, or u
ucuuucuguccccaauccnc

SEQ ID NO: 111645 - RNA, 18 nt, Artificial Sequence
  Synthetic
ccaagucuguacaacauc

SEQ ID NO: 111646 - RNA, 19 nt, Artificial Sequence
  Synthetic
gccaagucuguacaacauc

SEQ ID NO: 111647 - RNA, 20 nt, Artificial Sequence
  Synthetic
ggccaagucuguacaacauc

SEQ ID NO: 111648 - RNA, 18 nt, Artificial Sequence
  Synthetic
  misc_feature (5)..(5): n is a, c, g, or u
uuggnagagaaacuguuc

SEQ ID NO: 111649 - RNA, 19 nt, Artificial Sequence
  Synthetic
  misc_feature (6)..(6): n is a, c, g, or u
uuuggnagagaaacuguuc

SEQ ID NO: 111650 - RNA, 20 nt, Artificial Sequence
  Synthetic
  misc_feature (7)..(7): n is a, c, g, or u
uuuuggnagagaaacuguuc

SEQ ID NO: 111651 - RNA, 18 nt, Artificial Sequence
  Synthetic
aauuuguccugguuaucg

SEQ ID NO: 111652 - RNA, 19 nt, Artificial Sequence
  Synthetic
caauuuguccugguuaucg

SEQ ID NO: 111653 - RNA, 20 nt, Artificial Sequence
  Synthetic
ccaauuuguccugguuaucg

SEQ ID NO: 111654 - RNA, 18 nt, Artificial Sequence
  Synthetic
  misc_feature (10)..(10): n is a, c, g, or u
guguguuuanugaguggg

SEQ ID NO: 111655 - RNA, 19 nt, Artificial Sequence
  Synthetic
  misc_feature (11)..(11): n is a, c, g, or u
uguguguuuanugaguggg

SEQ ID NO: 111656 - RNA, 20 nt, Artificial Sequence
  Synthetic
  misc_feature (12)..(12): n is a, c, g, or u
cuguguguuuanugaguggg

SEQ ID NO: 111657 - RNA, 18 nt, Artificial Sequence
  Synthetic
  misc_feature (18)..(18): n is a, c, g, or u
cuguguuggggugaguun

SEQ ID NO: 111658 - RNA, 19 nt, Artificial Sequence
  Synthetic
  misc_feature (19)..(19): n is a, c, g, or u
ucuguguuggggugaguun

SEQ ID NO: 111659 - RNA, 20 nt, Artificial Sequence
  Synthetic
  misc_feature (20)..(20): n is a, c, g, or u
uucuguguuggggugaguun

SEQ ID NO: 111660 - RNA, 18 nt, Artificial Sequence
  Synthetic
  misc_feature (5)..(5): n is a, c, g, or u
cucanaaaacaaaaagau

SEQ ID NO: 111661 - RNA, 19 nt, Artificial Sequence
  Synthetic
  misc_feature (6)..(6): n is a, c, g, or u
ccucanaaaacaaaaagau

SEQ ID NO: 111662 - RNA, 20 nt, Artificial Sequence
  Synthetic
  misc_feature (7)..(7): n is a, c, g, or u
cccucanaaaacaaaaagau

SEQ ID NO: 111663 - RNA, 18 nt, Artificial Sequence
  Synthetic
ggaacagugagcccugcu

SEQ ID NO: 111664 - RNA, 19 nt, Artificial Sequence
  Synthetic
aggaacagugagcccugcu

SEQ ID NO: 111665 - RNA, 20 nt, Artificial Sequence
  Synthetic
caggaacagugagcccugcu

SEQ ID NO: 111666 - RNA, 18 nt, Artificial Sequence
  Synthetic
accaauuuucuuuugucu

SEQ ID NO: 111667 - RNA, 19 nt, Artificial Sequence
  Synthetic
uaccaauuuucuuuugucu

SEQ ID NO: 111668 - RNA, 20 nt, Artificial Sequence
  Synthetic
uuaccaauuuucuuuugucu

SEQ ID NO: 111669 - RNA, 18 nt, Artificial Sequence
  Synthetic
  misc_feature (7)..(7): n is a, c, g, or u
uuuggunucuuuuggagu

SEQ ID NO: 111670 - RNA, 19 nt, Artificial Sequence
  Synthetic
  misc_feature (8)..(8): n is a, c, g, or u
auuuggunucuuuuggagu

SEQ ID NO: 111671 - RNA, 20 nt, Artificial Sequence
  Synthetic
  misc_feature (9)..(9): n is a, c, g, or u
uauuuggunucuuuuggagu

SEQ ID NO: 111672 - RNA, 18 nt, Artificial Sequence
  Synthetic
cuccccaugggggacugu

SEQ ID NO: 111673 - RNA, 19 nt, Artificial Sequence
  Synthetic
ccuccccaugggggacugu

SEQ ID NO: 111674 - RNA, 20 nt, Artificial Sequence
  Synthetic
  misc_feature (1)..(1): n is a, c, g, or u
nccuccccaugggggacugu

SEQ ID NO: 111675 - RNA, 18 nt, Artificial Sequence
  Synthetic
aggcaagcuauucugugu

SEQ ID NO: 111676 - RNA, 19 nt, Artificial Sequence
  Synthetic
caggcaagcuauucugugu

SEQ ID NO: 111677 - RNA, 20 nt, Artificial Sequence
  Synthetic
ucaggcaagcuauucugugu

SEQ ID NO: 111678 - RNA, 18 nt, Artificial Sequence
  Synthetic
  misc_feature (6)..(6): n is a, c, g, or u
aaagunugucaacgaauu

SEQ ID NO: 111679 - RNA, 19 nt, Artificial Sequence
  Synthetic
  misc_feature (7)..(7): n is a, c, g, or u
gaaagunugucaacgaauu

SEQ ID NO: 111680 - RNA, 20 nt, Artificial Sequence
  Synthetic
  misc_feature (8)..(8): n is a, c, g, or u
ggaaagunugucaacgaauu

SEQ ID NO: 111681 - RNA, 18 nt, Artificial Sequence
  Synthetic
  misc_feature (13)..(13): n is a, c, g, or u
ugaauauuuggunucuuu

SEQ ID NO: 111682 - RNA, 19 nt, Artificial Sequence
  Synthetic
  misc_feature (14)..(14): n is a, c, g, or u
uugaauauuuggunucuuu

SEQ ID NO: 111683 - RNA, 20 nt, Artificial Sequence
  Synthetic
  misc_feature (15)..(15): n is a, c, g, or u
cuugaauauuuggunucuuu

SEQ ID NO: 111684 - RNA, 18 nt, Artificial Sequence
  Synthetic
agaagucagaaggcaaaa

SEQ ID NO: 111685 - RNA, 19 nt, Artificial Sequence
  Synthetic
aagaagucagaaggcaaaa

SEQ ID NO: 111686 - RNA, 20 nt, Artificial Sequence
  Synthetic
aaagaagucagaaggcaaaa

SEQ ID NO: 111687 - RNA, 21 nt, Artificial Sequence
  Synthetic
gaaagaagucagaaggcaaaa

SEQ ID NO: 111688 - RNA, 22 nt, Artificial Sequence
  Synthetic
ggaaagaagucagaaggcaaaa

SEQ ID NO: 111689 - RNA, 23 nt, Artificial Sequence
  Synthetic
aggaaagaagucagaaggcaaaa

SEQ ID NO: 111690 - RNA, 24 nt, Artificial Sequence
  Synthetic
aaggaaagaagucagaaggcaaaa

SEQ ID NO: 111691 - RNA, 18 nt, Artificial Sequence
  Synthetic
  misc_feature (7)..(7): n is a, c, g, or u
gguguunccccuagaaaa

SEQ ID NO: 111692 - RNA, 19 nt, Artificial Sequence
  Synthetic
  misc_feature (8)..(8): n is a, c, g, or u
ggguguunccccuagaaaa

SEQ ID NO: 111693 - RNA, 20 nt, Artificial Sequence
  Synthetic
  misc_feature (9)..(9): n is a, c, g, or u
cggguguunccccuagaaaa

SEQ ID NO: 111694 - RNA, 21 nt, Artificial Sequence
  Synthetic
  misc_feature (10)..(10): n is a, c, g, or u
acggguguunccccuagaaaa

SEQ ID NO: 111695 - RNA, 22 nt, Artificial Sequence
  Synthetic
  misc_feature (11)..(11): n is a, c, g, or u
cacggguguunccccuagaaaa

SEQ ID NO: 111696 - RNA, 23 nt, Artificial Sequence
  Synthetic
  misc_feature (12)..(12): n is a, c, g, or u
acacggguguunccccuagaaaa

SEQ ID NO: 111697 - RNA, 24 nt, Artificial Sequence
  Synthetic
  misc_feature (13)..(13): n is a, c, g, or u
cacacggguguunccccuagaaaa

SEQ ID NO: 111698 - RNA, 18 nt, Artificial Sequence
  Synthetic
agcgauaaccaggacaaa

SEQ ID NO: 111699 - RNA, 19 nt, Artificial Sequence
  Synthetic
cagcgauaaccaggacaaa

SEQ ID NO: 111700 - RNA, 20 nt, Artificial Sequence
  Synthetic
ccagcgauaaccaggacaaa

SEQ ID NO: 111701 - RNA, 21 nt, Artificial Sequence
  Synthetic
uccagcgauaaccaggacaaa

SEQ ID NO: 111702 - RNA, 22 nt, Artificial Sequence
  Synthetic
auccagcgauaaccaggacaaa

SEQ ID NO: 111703 - RNA, 23 nt, Artificial Sequence
  Synthetic
cauccagcgauaaccaggacaaa

SEQ ID NO: 111704 - RNA, 24 nt, Artificial Sequence
  Synthetic
acauccagcgauaaccaggacaaa

SEQ ID NO: 111705 - RNA, 18 nt, Artificial Sequence
  Synthetic
aauauggugacccgcaaa

SEQ ID NO: 111706 - RNA, 19 nt, Artificial Sequence
  Synthetic
gaauauggugacccgcaaa

SEQ ID NO: 111707 - RNA, 20 nt, Artificial Sequence
  Synthetic
agaauauggugacccgcaaa

SEQ ID NO: 111708 - RNA, 21 nt, Artificial Sequence
  Synthetic
aagaauauggugacccgcaaa

SEQ ID NO: 111709 - RNA, 22 nt, Artificial Sequence
  Synthetic
caagaauauggugacccgcaaa

SEQ ID NO: 111710 - RNA, 23 nt, Artificial Sequence
  Synthetic
ccaagaauauggugacccgcaaa

SEQ ID NO: 111711 - RNA, 24 nt, Artificial Sequence
  Synthetic
cccaagaauauggugacccgcaaa

SEQ ID NO: 111712 - RNA, 18 nt, Artificial Sequence
  Synthetic
acaaauggcacuaguaaa

SEQ ID NO: 111713 - RNA, 19 nt, Artificial Sequence
  Synthetic
aacaaauggcacuaguaaa

SEQ ID NO: 111714 - RNA, 20 nt, Artificial Sequence
  Synthetic
gaacaaauggcacuaguaaa

SEQ ID NO: 111715 - RNA, 21 nt, Artificial Sequence
  Synthetic
ugaacaaauggcacuaguaaa

SEQ ID NO: 111716 - RNA, 22 nt, Artificial Sequence
  Synthetic
cugaacaaauggcacuaguaaa

SEQ ID NO: 111717 - RNA, 23 nt, Artificial Sequence
  Synthetic
acugaacaaauggcacuaguaaa

SEQ ID NO: 111718 - RNA, 24 nt, Artificial Sequence
  Synthetic
cacugaacaaauggcacuaguaaa

SEQ ID NO: 111719 - RNA, 18 nt, Artificial Sequence
  Synthetic
acggggaguccgcguaaa

SEQ ID NO: 111720 - RNA, 19 nt, Artificial Sequence
  Synthetic
gacggggaguccgcguaaa

SEQ ID NO: 111721 - RNA, 20 nt, Artificial Sequence
  Synthetic
agacggggaguccgcguaaa

SEQ ID NO: 111722 - RNA, 21 nt, Artificial Sequence
  Synthetic
cagacggggaguccgcguaaa

SEQ ID NO: 111723 - RNA, 22 nt, Artificial Sequence
  Synthetic
acagacggggaguccgcguaaa

SEQ ID NO: 111724 - RNA, 23 nt, Artificial Sequence
  Synthetic
cacagacggggaguccgcguaaa

SEQ ID NO: 111725 - RNA, 24 nt, Artificial Sequence
  Synthetic
gcacagacggggaguccgcguaaa

SEQ ID NO: 111726 - RNA, 18 nt, Artificial Sequence
  Synthetic
auguauacccaaagacaa

SEQ ID NO: 111727 - RNA, 19 nt, Artificial Sequence
  Synthetic
aauguauacccaaagacaa

SEQ ID NO: 111728 - RNA, 20 nt, Artificial Sequence
  Synthetic
aaauguauacccaaagacaa

SEQ ID NO: 111729 - RNA, 21 nt, Artificial Sequence
  Synthetic
uaaauguauacccaaagacaa

SEQ ID NO: 111730 - RNA, 22 nt, Artificial Sequence
  Synthetic
uuaaauguauacccaaagacaa

SEQ ID NO: 111731 - RNA, 23 nt, Artificial Sequence
  Synthetic
uuuaaauguauacccaaagacaa

SEQ ID NO: 111732 - RNA, 24 nt, Artificial Sequence
  Synthetic
guuuaaauguauacccaaagacaa

SEQ ID NO: 111733 - RNA, 18 nt, Artificial Sequence
  Synthetic
ccuggaauuagaggacaa

SEQ ID NO: 111734 - RNA, 19 nt, Artificial Sequence
  Synthetic
uccuggaauuagaggacaa

SEQ ID NO: 111735 - RNA, 20 nt, Artificial Sequence
  Synthetic
auccuggaauuagaggacaa

SEQ ID NO: 111736 - RNA, 21 nt, Artificial Sequence
  Synthetic
gauccuggaauuagaggacaa

SEQ ID NO: 111737 - RNA, 22 nt, Artificial Sequence
  Synthetic
ugauccuggaauuagaggacaa

SEQ ID NO: 111738 - RNA, 23 nt, Artificial Sequence
  Synthetic
augauccuggaauuagaggacaa

SEQ ID NO: 111739 - RNA, 24 nt, Artificial Sequence
  Synthetic
gaugauccuggaauuagaggacaa

SEQ ID NO: 111740 - RNA, 18 nt, Artificial Sequence
  Synthetic
acuaguaaacugagccaa

SEQ ID NO: 111741 - RNA, 19 nt, Artificial Sequence
  Synthetic
cacuaguaaacugagccaa

SEQ ID NO: 111742 - RNA, 20 nt, Artificial Sequence
  Synthetic
gcacuaguaaacugagccaa

SEQ ID NO: 111743 - RNA, 21 nt, Artificial Sequence
  Synthetic
ggcacuaguaaacugagccaa

SEQ ID NO: 111744 - RNA, 22 nt, Artificial Sequence
  Synthetic
uggcacuaguaaacugagccaa

SEQ ID NO: 111745 - RNA, 23 nt, Artificial Sequence
  Synthetic
auggcacuaguaaacugagccaa

SEQ ID NO: 111746 - RNA, 24 nt, Artificial Sequence
  Synthetic
aauggcacuaguaaacugagccaa

SEQ ID NO: 111747 - RNA, 18 nt, Artificial Sequence
  Synthetic
uaaacugagccaagagaa

SEQ ID NO: 111748 - RNA, 19 nt, Artificial Sequence
  Synthetic
guaaacugagccaagagaa

SEQ ID NO: 111749 - RNA, 20 nt, Artificial Sequence
  Synthetic
aguaaacugagccaagagaa

SEQ ID NO: 111750 - RNA, 21 nt, Artificial Sequence
  Synthetic
uaguaaacugagccaagagaa

SEQ ID NO: 111751 - RNA, 22 nt, Artificial Sequence
  Synthetic
cuaguaaacugagccaagagaa

SEQ ID NO: 111752 - RNA, 23 nt, Artificial Sequence
  Synthetic
acuaguaaacugagccaagagaa

SEQ ID NO: 111753 - RNA, 24 nt, Artificial Sequence
  Synthetic
cacuaguaaacugagccaagagaa

SEQ ID NO: 111754 - RNA, 18 nt, Artificial Sequence
  Synthetic
  misc_feature (6)..(7): n is a, c, g, or u
  misc_feature (11)..(11): n is a, c, g, or u
gguacnncagncggagaa

SEQ ID NO: 111755 - RNA, 19 nt, Artificial Sequence
  Synthetic
  misc_feature (7)..(8): n is a, c, g, or u
  misc_feature (12)..(12): n is a, c, g, or u
cgguacnncagncggagaa

SEQ ID NO: 111756 - RNA, 20 nt, Artificial Sequence
  Synthetic
  misc_feature (8)..(9): n is a, c, g, or u
  misc_feature (13)..(13): n is a, c, g, or u
ucgguacnncagncggagaa

SEQ ID NO: 111757 - RNA, 21 nt, Artificial Sequence
  Synthetic
  misc_feature (9)..(10): n is a, c, g, or u
  misc_feature (14)..(14): n is a, c, g, or u
gucgguacnncagncggagaa

SEQ ID NO: 111758 - RNA, 22 nt, Artificial Sequence
  Synthetic
  misc_feature (10)..(11): n is a, c, g, or u
  misc_feature (15)..(15): n is a, c, g, or u
ggucgguacnncagncggagaa

SEQ ID NO: 111759 - RNA, 23 nt, Artificial Sequence
  Synthetic
  misc_feature (11)..(12): n is a, c, g, or u
  misc_feature (16)..(16): n is a, c, g, or u
cggucgguacnncagncggagaa

SEQ ID NO: 111760 - RNA, 24 nt, Artificial Sequence
  Synthetic
  misc_feature (12)..(13): n is a, c, g, or u
  misc_feature (17)..(17): n is a, c, g, or u
ucggucgguacnncagncggagaa

SEQ ID NO: 111761 - RNA, 18 nt, Artificial Sequence
  Synthetic
  misc_feature (8)..(8): n is a, c, g, or u
ugucgagnagaucucgaa

SEQ ID NO: 111762 - RNA, 19 nt, Artificial Sequence
  Synthetic
  misc_feature (9)..(9): n is a, c, g, or u
gugucgagnagaucucgaa

SEQ ID NO: 111763 - RNA, 20 nt, Artificial Sequence
  Synthetic
  misc_feature (10)..(10): n is a, c, g, or u
ggugucgagnagaucucgaa

SEQ ID NO: 111764 - RNA, 21 nt, Artificial Sequence
  Synthetic
  misc_feature (11)..(11): n is a, c, g, or u
cggugucgagnagaucucgaa

SEQ ID NO: 111765 - RNA, 22 nt, Artificial Sequence
  Synthetic
  misc_feature (12)..(12): n is a, c, g, or u
gcggugucgagnagaucucgaa

SEQ ID NO: 111766 - RNA, 23 nt, Artificial Sequence
  Synthetic
  misc_feature (13)..(13): n is a, c, g, or u
ggcggugucgagnagaucucgaa

SEQ ID NO: 111767 - RNA, 24 nt, Artificial Sequence
  Synthetic
  misc_feature (14)..(14): n is a, c, g, or u
aggcggugucgagnagaucucgaa

SEQ ID NO: 111768 - RNA, 18 nt, Artificial Sequence
  Synthetic
gcaaaugaaugucaggaa

SEQ ID NO: 111769 - RNA, 19 nt, Artificial Sequence
  Synthetic
ugcaaaugaaugucaggaa

SEQ ID NO: 111770 - RNA, 20 nt, Artificial Sequence
  Synthetic
cugcaaaugaaugucaggaa

SEQ ID NO: 111771 - RNA, 21 nt, Artificial Sequence
  Synthetic
ccugcaaaugaaugucaggaa

SEQ ID NO: 111772 - RNA, 22 nt, Artificial Sequence
  Synthetic
uccugcaaaugaaugucaggaa

SEQ ID NO: 111773 - RNA, 23 nt, Artificial Sequence
  Synthetic
cuccugcaaaugaaugucaggaa

SEQ ID NO: 111774 - RNA, 24 nt, Artificial Sequence
  Synthetic
ccuccugcaaaugaaugucaggaa

SEQ ID NO: 111775 - RNA, 18 nt, Artificial Sequence
  Synthetic
gggcucacuguuccugaa

SEQ ID NO: 111776 - RNA, 19 nt, Artificial Sequence
  Synthetic
agggcucacuguuccugaa

SEQ ID NO: 111777 - RNA, 20 nt, Artificial Sequence
  Synthetic
cagggcucacuguuccugaa

SEQ ID NO: 111778 - RNA, 21 nt, Artificial Sequence
  Synthetic
gcagggcucacuguuccugaa

SEQ ID NO: 111779 - RNA, 22 nt, Artificial Sequence
  Synthetic
agcagggcucacuguuccugaa

SEQ ID NO: 111780 - RNA, 23 nt, Artificial Sequence
  Synthetic
gagcagggcucacuguuccugaa

SEQ ID NO: 111781 - RNA, 24 nt, Artificial Sequence
  Synthetic
ugagcagggcucacuguuccugaa

SEQ ID NO: 111782 - RNA, 18 nt, Artificial Sequence
  Synthetic
gcgacgugcagaggugaa

SEQ ID NO: 111783 - RNA, 19 nt, Artificial Sequence
  Synthetic
ugcgacgugcagaggugaa

SEQ ID NO: 111784 - RNA, 20 nt, Artificial Sequence
  Synthetic
augcgacgugcagaggugaa

SEQ ID NO: 111785 - RNA, 21 nt, Artificial Sequence
  Synthetic
caugcgacgugcagaggugaa

SEQ ID NO: 111786 - RNA, 22 nt, Artificial Sequence
  Synthetic
ccaugcgacgugcagaggugaa

SEQ ID NO: 111787 - RNA, 23 nt, Artificial Sequence
  Synthetic
uccaugcgacgugcagaggugaa

SEQ ID NO: 111788 - RNA, 24 nt, Artificial Sequence
  Synthetic
cuccaugcgacgugcagaggugaa

SEQ ID NO: 111789 - RNA, 18 nt, Artificial Sequence
  Synthetic
  misc_feature (4)..(4): n is a, c, g, or u
  misc_feature (13)..(13): n is a, c, g, or u
  misc_feature (16)..(16): n is a, c, g, or u
auanccacauugngunaa

SEQ ID NO: 111790 - RNA, 19 nt, Artificial Sequence
  Synthetic
  misc_feature (5)..(5): n is a, c, g, or u
  misc_feature (14)..(14): n is a, c, g, or u
  misc_feature (17)..(17): n is a, c, g, or u
gauanccacauugngunaa

SEQ ID NO: 111791 - RNA, 20 nt, Artificial Sequence
  Synthetic
  misc_feature (6)..(6): n is a, c, g, or u
  misc_feature (15)..(15): n is a, c, g, or u
  misc_feature (18)..(18): n is a, c, g, or u
ggauanccacauugngunaa

SEQ ID NO: 111792 - RNA, 21 nt, Artificial Sequence
  Synthetic
  misc_feature (7)..(7): n is a, c, g, or u
  misc_feature (16)..(16): n is a, c, g, or u
  misc_feature (19)..(19): n is a, c, g, or u
aggauanccacauugngunaa

SEQ ID NO: 111793 - RNA, 22 nt, Artificial Sequence
  Synthetic
  misc_feature (8)..(8): n is a, c, g, or u
  misc_feature (17)..(17): n is a, c, g, or u
  misc_feature (20)..(20): n is a, c, g, or u
caggauanccacauugngunaa

SEQ ID NO: 111794 - RNA, 23 nt, Artificial Sequence
  Synthetic
  misc_feature (9)..(9): n is a, c, g, or u
  misc_feature (18)..(18): n is a, c, g, or u
  misc_feature (21)..(21): n is a, c, g, or u
gcaggauanccacauugngunaa

SEQ ID NO: 111795 - RNA, 24 nt, Artificial Sequence
  Synthetic
  misc_feature (10)..(10): n is a, c, g, or u
  misc_feature (19)..(19): n is a, c, g, or u
  misc_feature (22)..(22): n is a, c, g, or u
agcaggauanccacauugngunaa

SEQ ID NO: 111796 - RNA, 18 nt, Artificial Sequence
  Synthetic
  misc_feature (14)..(14): n is a, c, g, or u
uugguaacagcggnauaa

SEQ ID NO: 111797 - RNA, 19 nt, Artificial Sequence
  Synthetic
  misc_feature (15)..(15): n is a, c, g, or u
auugguaacagcggnauaa

SEQ ID NO: 111798 - RNA, 20 nt, Artificial Sequence
  Synthetic
  misc_feature (16)..(16): n is a, c, g, or u
aauugguaacagcggnauaa

SEQ ID NO: 111799 - RNA, 21 nt, Artificial Sequence
  Synthetic
  misc_feature (17)..(17): n is a, c, g, or u
aaauugguaacagcggnauaa

SEQ ID NO: 111800 - RNA, 22 nt, Artificial Sequence
  Synthetic
  misc_feature (18)..(18): n is a, c, g, or u
aaaauugguaacagcggnauaa

SEQ ID NO: 111801 - RNA, 23 nt, Artificial Sequence
  Synthetic
  misc_feature (19)..(19): n is a, c, g, or u
gaaaauugguaacagcggnauaa

SEQ ID NO: 111802 - RNA, 24 nt, Artificial Sequence
  Synthetic
  misc_feature (20)..(20): n is a, c, g, or u
agaaaauugguaacagcggnauaa

SEQ ID NO: 111803 - RNA, 18 nt, Artificial Sequence
  Synthetic
accacaucauccauauaa

SEQ ID NO: 111804 - RNA, 19 nt, Artificial Sequence
  Synthetic
  misc_feature (1)..(1): n is a, c, g, or u
naccacaucauccauauaa

SEQ ID NO: 111805 - RNA, 20 nt, Artificial Sequence
  Synthetic
  misc_feature (2)..(2): n is a, c, g, or u
anaccacaucauccauauaa

SEQ ID NO: 111806 - RNA, 21 nt, Artificial Sequence
  Synthetic
  misc_feature (3)..(3): n is a, c, g, or u
aanaccacaucauccauauaa

SEQ ID NO: 111807 - RNA, 22 nt, Artificial Sequence
  Synthetic
  misc_feature (4)..(4): n is a, c, g, or u
caanaccacaucauccauauaa

SEQ ID NO: 111808 - RNA, 23 nt, Artificial Sequence
  Synthetic
  misc_feature (5)..(5): n is a, c, g, or u
ccaanaccacaucauccauauaa

SEQ ID NO: 111809 - RNA, 24 nt, Artificial Sequence
  Synthetic
  misc_feature (6)..(6): n is a, c, g, or u
cccaanaccacaucauccauauaa

SEQ ID NO: 111810 - RNA, 18 nt, Artificial Sequence
  Synthetic
agcaacaugagggaaaca

SEQ ID NO: 111811 - RNA, 19 nt, Artificial Sequence
  Synthetic
cagcaacaugagggaaaca

SEQ ID NO: 111812 - RNA, 20 nt, Artificial Sequence
  Synthetic
acagcaacaugagggaaaca

SEQ ID NO: 111813 - RNA, 21 nt, Artificial Sequence
  Synthetic
uacagcaacaugagggaaaca

SEQ ID NO: 111814 - RNA, 22 nt, Artificial Sequence
  Synthetic
guacagcaacaugagggaaaca

SEQ ID NO: 111815 - RNA, 23 nt, Artificial Sequence
  Synthetic
uguacagcaacaugagggaaaca

SEQ ID NO: 111816 - RNA, 24 nt, Artificial Sequence
  Synthetic
uuguacagcaacaugagggaaaca

SEQ ID NO: 111817 - RNA, 18 nt, Artificial Sequence
  Synthetic
gccgacgggacguaaaca

SEQ ID NO: 111818 - RNA, 19 nt, Artificial Sequence
  Synthetic
cgccgacgggacguaaaca

SEQ ID NO: 111819 - RNA, 20 nt, Artificial Sequence
  Synthetic
gcgccgacgggacguaaaca

SEQ ID NO: 111820 - RNA, 21 nt, Artificial Sequence
  Synthetic
agcgccgacgggacguaaaca

SEQ ID NO: 111821 - RNA, 22 nt, Artificial Sequence
  Synthetic
cagcgccgacgggacguaaaca

SEQ ID NO: 111822 - RNA, 23 nt, Artificial Sequence
  Synthetic
ucagcgccgacgggacguaaaca

SEQ ID NO: 111823 - RNA, 24 nt, Artificial Sequence
  Synthetic
uucagcgccgacgggacguaaaca

SEQ ID NO: 111824 - RNA, 18 nt, Artificial Sequence
  Synthetic
guccaaggaauacuaaca

SEQ ID NO: 111825 - RNA, 19 nt, Artificial Sequence
  Synthetic
  misc_feature (1)..(1): n is a, c, g, or u
nguccaaggaauacuaaca

SEQ ID NO: 111826 - RNA, 20 nt, Artificial Sequence
  Synthetic
  misc_feature (2)..(2): n is a, c, g, or u
gnguccaaggaauacuaaca

SEQ ID NO: 111827 - RNA, 21 nt, Artificial Sequence
  Synthetic
  misc_feature (3)..(3): n is a, c, g, or u
ugnguccaaggaauacuaaca

SEQ ID NO: 111828 - RNA, 22 nt, Artificial Sequence
  Synthetic
  misc_feature (4)..(4): n is a, c, g, or u
augnguccaaggaauacuaaca

SEQ ID NO: 111829 - RNA, 23 nt, Artificial Sequence
  Synthetic
  misc_feature (5)..(5): n is a, c, g, or u
uaugnguccaaggaauacuaaca

SEQ ID NO: 111830 - RNA, 24 nt, Artificial Sequence
  Synthetic
  misc_feature (6)..(6): n is a, c, g, or u
uuaugnguccaaggaauacuaaca

SEQ ID NO: 111831 - RNA, 18 nt, Artificial Sequence
  Synthetic
auaacugaaagccagaca

SEQ ID NO: 111832 - RNA, 19 nt, Artificial Sequence
  Synthetic
uauaacugaaagccagaca

SEQ ID NO: 111833 - RNA, 20 nt, Artificial Sequence
  Synthetic
auauaacugaaagccagaca

SEQ ID NO: 111834 - RNA, 21 nt, Artificial Sequence
  Synthetic
cauauaacugaaagccagaca

SEQ ID NO: 111835 - RNA, 22 nt, Artificial Sequence
  Synthetic
ccauauaacugaaagccagaca

SEQ ID NO: 111836 - RNA, 23 nt, Artificial Sequence
  Synthetic
uccauauaacugaaagccagaca

SEQ ID NO: 111837 - RNA, 24 nt, Artificial Sequence
  Synthetic
auccauauaacugaaagccagaca

SEQ ID NO: 111838 - RNA, 18 nt, Artificial Sequence
  Synthetic
auggccaagccccaacca

SEQ ID NO: 111839 - RNA, 19 nt, Artificial Sequence
  Synthetic
  misc_feature (1)..(1): n is a, c, g, or u
nauggccaagccccaacca

SEQ ID NO: 111840 - RNA, 20 nt, Artificial Sequence
  Synthetic
  misc_feature (2)..(2): n is a, c, g, or u
cnauggccaagccccaacca

SEQ ID NO: 111841 - RNA, 21 nt, Artificial Sequence
  Synthetic
  misc_feature (3)..(3): n is a, c, g, or u
ccnauggccaagccccaacca

SEQ ID NO: 111842 - RNA, 22 nt, Artificial Sequence
  Synthetic
  misc_feature (4)..(4): n is a, c, g, or u
gccnauggccaagccccaacca

SEQ ID NO: 111843 - RNA, 23 nt, Artificial Sequence
  Synthetic
  misc_feature (5)..(5): n is a, c, g, or u
ggccnauggccaagccccaacca

SEQ ID NO: 111844 - RNA, 24 nt, Artificial Sequence
  Synthetic
  misc_feature (6)..(6): n is a, c, g, or u
uggccnauggccaagccccaacca

SEQ ID NO: 111845 - RNA, 18 nt, Artificial Sequence
  Synthetic
ggaaagcccuacgaacca

SEQ ID NO: 111846 - RNA, 19 nt, Artificial Sequence
  Synthetic
gggaaagcccuacgaacca

SEQ ID NO: 111847 - RNA, 20 nt, Artificial Sequence
  Synthetic
ggggaaagcccuacgaacca

SEQ ID NO: 111848 - RNA, 21 nt, Artificial Sequence
  Synthetic
gggggaaagcccuacgaacca

SEQ ID NO: 111849 - RNA, 22 nt, Artificial Sequence
  Synthetic
ugggggaaagcccuacgaacca

SEQ ID NO: 111850 - RNA, 23 nt, Artificial Sequence
  Synthetic
gugggggaaagcccuacgaacca

SEQ ID NO: 111851 - RNA, 24 nt, Artificial Sequence
  Synthetic
agugggggaaagcccuacgaacca

SEQ ID NO: 111852 - RNA, 18 nt, Artificial Sequence
  Synthetic
caccccaacaguccccca

SEQ ID NO: 111853 - RNA, 19 nt, Artificial Sequence
  Synthetic
ccaccccaacaguccccca

SEQ ID NO: 111854 - RNA, 20 nt, Artificial Sequence
  Synthetic
uccaccccaacaguccccca

SEQ ID NO: 111855 - RNA, 21 nt, Artificial Sequence
  Synthetic
cuccaccccaacaguccccca

SEQ ID NO: 111856 - RNA, 22 nt, Artificial Sequence
  Synthetic
gcuccaccccaacaguccccca

SEQ ID NO: 111857 - RNA, 23 nt, Artificial Sequence
  Synthetic
ggcuccaccccaacaguccccca

SEQ ID NO: 111858 - RNA, 24 nt, Artificial Sequence
  Synthetic
gggcuccaccccaacaguccccca

SEQ ID NO: 111859 - RNA, 18 nt, Artificial Sequence
  Synthetic
agcacagccuagcagcca

SEQ ID NO: 111860 - RNA, 19 nt, Artificial Sequence
  Synthetic
cagcacagccuagcagcca

SEQ ID NO: 111861 - RNA, 20 nt, Artificial Sequence
  Synthetic
gcagcacagccuagcagcca

SEQ ID NO: 111862 - RNA, 21 nt, Artificial Sequence
  Synthetic
ggcagcacagccuagcagcca

SEQ ID NO: 111863 - RNA, 22 nt, Artificial Sequence
  Synthetic
uggcagcacagccuagcagcca

SEQ ID NO: 111864 - RNA, 23 nt, Artificial Sequence
  Synthetic
uuggcagcacagccuagcagcca

SEQ ID NO: 111865 - RNA, 24 nt, Artificial Sequence
  Synthetic
guuggcagcacagccuagcagcca

SEQ ID NO: 111866 - RNA, 18 nt, Artificial Sequence
  Synthetic
aaaaagagaguaacucca

SEQ ID NO: 111867 - RNA, 19 nt, Artificial Sequence
  Synthetic
aaaaaagagaguaacucca

SEQ ID NO: 111868 - RNA, 20 nt, Artificial Sequence
  Synthetic
caaaaaagagaguaacucca

SEQ ID NO: 111869 - RNA, 21 nt, Artificial Sequence
  Synthetic
gcaaaaaagagaguaacucca

SEQ ID NO: 111870 - RNA, 22 nt, Artificial Sequence
  Synthetic
ggcaaaaaagagaguaacucca

SEQ ID NO: 111871 - RNA, 23 nt, Artificial Sequence
  Synthetic
aggcaaaaaagagaguaacucca

SEQ ID NO: 111872 - RNA, 24 nt, Artificial Sequence
  Synthetic
aaggcaaaaaagagaguaacucca

SEQ ID NO: 111873 - RNA, 18 nt, Artificial Sequence
  Synthetic
  misc_feature (5)..(5): n is a, c, g, or u
ccagnccguugccgagca

SEQ ID NO: 111874 - RNA, 19 nt, Artificial Sequence
  Synthetic
  misc_feature (6)..(6): n is a, c, g, or u
accagnccguugccgagca

SEQ ID NO: 111875 - RNA, 20 nt, Artificial Sequence
  Synthetic
  misc_feature (7)..(7): n is a, c, g, or u
gaccagnccguugccgagca

SEQ ID NO: 111876 - RNA, 21 nt, Artificial Sequence
  Synthetic
  misc_feature (8)..(8): n is a, c, g, or u
agaccagnccguugccgagca

SEQ ID NO: 111877 - RNA, 22 nt, Artificial Sequence
  Synthetic
  misc_feature (9)..(9): n is a, c, g, or u
cagaccagnccguugccgagca

SEQ ID NO: 111878 - RNA, 23 nt, Artificial Sequence
  Synthetic
  misc_feature (10)..(10): n is a, c, g, or u
acagaccagnccguugccgagca

SEQ ID NO: 111879 - RNA, 24 nt, Artificial Sequence
  Synthetic
  misc_feature (11)..(11): n is a, c, g, or u
cacagaccagnccguugccgagca

SEQ ID NO: 111880 - RNA, 18 nt, Artificial Sequence
  Synthetic
ccgcaguauggaucggca

SEQ ID NO: 111881 - RNA, 19 nt, Artificial Sequence
  Synthetic
uccgcaguauggaucggca

SEQ ID NO: 111882 - RNA, 20 nt, Artificial Sequence
  Synthetic
uuccgcaguauggaucggca

SEQ ID NO: 111883 - RNA, 21 nt, Artificial Sequence
  Synthetic
guuccgcaguauggaucggca

SEQ ID NO: 111884 - RNA, 22 nt, Artificial Sequence
  Synthetic
aguuccgcaguauggaucggca

SEQ ID NO: 111885 - RNA, 23 nt, Artificial Sequence
  Synthetic
gaguuccgcaguauggaucggca

SEQ ID NO: 111886 - RNA, 24 nt, Artificial Sequence
  Synthetic
ggaguuccgcaguauggaucggca

SEQ ID NO: 111887 - RNA, 18 nt, Artificial Sequence
  Synthetic
gcauagcagcaggaugca

SEQ ID NO: 111888 - RNA, 19 nt, Artificial Sequence
  Synthetic
ggcauagcagcaggaugca

SEQ ID NO: 111889 - RNA, 20 nt, Artificial Sequence
  Synthetic
aggcauagcagcaggaugca

SEQ ID NO: 111890 - RNA, 21 nt, Artificial Sequence
  Synthetic
gaggcauagcagcaggaugca

SEQ ID NO: 111891 - RNA, 22 nt, Artificial Sequence
  Synthetic
ugaggcauagcagcaggaugca

SEQ ID NO: 111892 - RNA, 23 nt, Artificial Sequence
  Synthetic
augaggcauagcagcaggaugca

SEQ ID NO: 111893 - RNA, 24 nt, Artificial Sequence
  Synthetic
gaugaggcauagcagcaggaugca

SEQ ID NO: 111894 - RNA, 18 nt, Artificial Sequence
  Synthetic
ccggaaguguugauaaga

SEQ ID NO: 111895 - RNA, 19 nt, Artificial Sequence
  Synthetic
uccggaaguguugauaaga

SEQ ID NO: 111896 - RNA, 20 nt, Artificial Sequence
  Synthetic
uuccggaaguguugauaaga

SEQ ID NO: 111897 - RNA, 21 nt, Artificial Sequence
  Synthetic
uuuccggaaguguugauaaga

SEQ ID NO: 111898 - RNA, 22 nt, Artificial Sequence
  Synthetic
guuuccggaaguguugauaaga

SEQ ID NO: 111899 - RNA, 23 nt, Artificial Sequence
  Synthetic
aguuuccggaaguguugauaaga

SEQ ID NO: 111900 - RNA, 24 nt, Artificial Sequence
  Synthetic
uaguuuccggaaguguugauaaga

SEQ ID NO: 111901 - RNA, 18 nt, Artificial Sequence
  Synthetic
  misc_feature (6)..(6): n is a, c, g, or u
ucucunccaaaaguaaga

SEQ ID NO: 111902 - RNA, 19 nt, Artificial Sequence
  Synthetic
  misc_feature (7)..(7): n is a, c, g, or u
uucucunccaaaaguaaga

SEQ ID NO: 111903 - RNA, 20 nt, Artificial Sequence
  Synthetic
  misc_feature (8)..(8): n is a, c, g, or u
uuucucunccaaaaguaaga

SEQ ID NO: 111904 - RNA, 21 nt, Artificial Sequence
  Synthetic
  misc_feature (9)..(9): n is a, c, g, or u
guuucucunccaaaaguaaga

SEQ ID NO: 111905 - RNA, 22 nt, Artificial Sequence
  Synthetic
  misc_feature (10)..(10): n is a, c, g, or u
aguuucucunccaaaaguaaga

SEQ ID NO: 111906 - RNA, 23 nt, Artificial Sequence
  Synthetic
  misc_feature (11)..(11): n is a, c, g, or u
caguuucucunccaaaaguaaga

SEQ ID NO: 111907 - RNA, 24 nt, Artificial Sequence
  Synthetic
  misc_feature (12)..(12): n is a, c, g, or u
acaguuucucunccaaaaguaaga

SEQ ID NO: 111908 - RNA, 18 nt, Artificial Sequence
  Synthetic
  misc_feature (1)..(1): n is a, c, g, or u
nagaugagaaggcacaga

SEQ ID NO: 111909 - RNA, 19 nt, Artificial Sequence
  Synthetic
  misc_feature (2)..(2): n is a, c, g, or u
gnagaugagaaggcacaga

SEQ ID NO: 111910 - RNA, 20 nt, Artificial Sequence
  Synthetic
  misc_feature (3)..(3): n is a, c, g, or u
ggnagaugagaaggcacaga

SEQ ID NO: 111911 - RNA, 21 nt, Artificial Sequence
  Synthetic
  misc_feature (4)..(4): n is a, c, g, or u
cggnagaugagaaggcacaga

SEQ ID NO: 111912 - RNA, 22 nt, Artificial Sequence
  Synthetic
  misc_feature (5)..(5): n is a, c, g, or u
ccggnagaugagaaggcacaga

SEQ ID NO: 111913 - RNA, 23 nt, Artificial Sequence
  Synthetic
  misc_feature (6)..(6): n is a, c, g, or u
uccggnagaugagaaggcacaga

SEQ ID NO: 111914 - RNA, 24 nt, Artificial Sequence
  Synthetic
  misc_feature (7)..(7): n is a, c, g, or u
guccggnagaugagaaggcacaga

SEQ ID NO: 111915 - RNA, 18 nt, Artificial Sequence
  Synthetic
acauugagauucccgaga

SEQ ID NO: 111916 - RNA, 19 nt, Artificial Sequence
  Synthetic
aacauugagauucccgaga

SEQ ID NO: 111917 - RNA, 20 nt, Artificial Sequence
  Synthetic
uaacauugagauucccgaga

SEQ ID NO: 111918 - RNA, 21 nt, Artificial Sequence
  Synthetic
cuaacauugagauucccgaga

SEQ ID NO: 111919 - RNA, 22 nt, Artificial Sequence
  Synthetic
acuaacauugagauucccgaga

SEQ ID NO: 111920 - RNA, 23 nt, Artificial Sequence
  Synthetic
uacuaacauugagauucccgaga

SEQ ID NO: 111921 - RNA, 24 nt, Artificial Sequence
  Synthetic
auacuaacauugagauucccgaga

SEQ ID NO: 111922 - RNA, 18 nt, Artificial Sequence
  Synthetic
  misc_feature (4)..(4): n is a, c, g, or u
  misc_feature (15)..(15): n is a, c, g, or u
gagnagaucucgaanaga

SEQ ID NO: 111923 - RNA, 19 nt, Artificial Sequence
  Synthetic
  misc_feature (5)..(5): n is a, c, g, or u
  misc_feature (16)..(16): n is a, c, g, or u
cgagnagaucucgaanaga

SEQ ID NO: 111924 - RNA, 20 nt, Artificial Sequence
  Synthetic
  misc_feature (6)..(6): n is a, c, g, or u
  misc_feature (17)..(17): n is a, c, g, or u
ucgagnagaucucgaanaga

SEQ ID NO: 111925 - RNA, 21 nt, Artificial Sequence
  Synthetic
  misc_feature (7)..(7): n is a, c, g, or u
  misc_feature (18)..(18): n is a, c, g, or u
gucgagnagaucucgaanaga

SEQ ID NO: 111926 - RNA, 22 nt, Artificial Sequence
  Synthetic
  misc_feature (8)..(8): n is a, c, g, or u
  misc_feature (19)..(19): n is a, c, g, or u
ugucgagnagaucucgaanaga

SEQ ID NO: 111927 - RNA, 23 nt, Artificial Sequence
  Synthetic
  misc_feature (9)..(9): n is a, c, g, or u
  misc_feature (20)..(20): n is a, c, g, or u
gugucgagnagaucucgaanaga

SEQ ID NO: 111928 - RNA, 24 nt, Artificial Sequence
  Synthetic
  misc_feature (10)..(10): n is a, c, g, or u
  misc_feature (21)..(21): n is a, c, g, or u
ggugucgagnagaucucgaanaga

SEQ ID NO: 111929 - RNA, 18 nt, Artificial Sequence
  Synthetic
cgcgggauucagcgccga

SEQ ID NO: 111930 - RNA, 19 nt, Artificial Sequence
  Synthetic
ccgcgggauucagcgccga

SEQ ID NO: 111931 - RNA, 20 nt, Artificial Sequence
  Synthetic
uccgcgggauucagcgccga

SEQ ID NO: 111932 - RNA, 21 nt, Artificial Sequence
  Synthetic
guccgcgggauucagcgccga

SEQ ID NO: 111933 - RNA, 22 nt, Artificial Sequence
  Synthetic
cguccgcgggauucagcgccga

SEQ ID NO: 111934 - RNA, 23 nt, Artificial Sequence
  Synthetic
ucguccgcgggauucagcgccga

SEQ ID NO: 111935 - RNA, 24 nt, Artificial Sequence
  Synthetic
gucguccgcgggauucagcgccga

SEQ ID NO: 111936 - RNA, 18 nt, Artificial Sequence
  Synthetic
ucuucugcgacgcggcga

SEQ ID NO: 111937 - RNA, 19 nt, Artificial Sequence
  Synthetic
aucuucugcgacgcggcga

SEQ ID NO: 111938 - RNA, 20 nt, Artificial Sequence
  Synthetic
gaucuucugcgacgcggcga

SEQ ID NO: 111939 - RNA, 21 nt, Artificial Sequence
  Synthetic
agaucuucugcgacgcggcga

SEQ ID NO: 111940 - RNA, 22 nt, Artificial Sequence
  Synthetic
gagaucuucugcgacgcggcga

SEQ ID NO: 111941 - RNA, 23 nt, Artificial Sequence
  Synthetic
ugagaucuucugcgacgcggcga

SEQ ID NO: 111942 - RNA, 24 nt, Artificial Sequence
  Synthetic
uugagaucuucugcgacgcggcga

SEQ ID NO: 111943 - RNA, 18 nt, Artificial Sequence
  Synthetic
  misc_feature (11)..(11): n is a, c, g, or u
agaucucgaanagaagga

SEQ ID NO: 111944 - RNA, 19 nt, Artificial Sequence
  Synthetic
  misc_feature (1)..(1): n is a, c, g, or u
  misc_feature (12)..(12): n is a, c, g, or u
nagaucucgaanagaagga

SEQ ID NO: 111945 - RNA, 20 nt, Artificial Sequence
  Synthetic
  misc_feature (2)..(2): n is a, c, g, or u
  misc_feature (13)..(13): n is a, c, g, or u
gnagaucucgaanagaagga

SEQ ID NO: 111946 - RNA, 21 nt, Artificial Sequence
  Synthetic
  misc_feature (3)..(3): n is a, c, g, or u
  misc_feature (14)..(14): n is a, c, g, or u
agnagaucucgaanagaagga

SEQ ID NO: 111947 - RNA, 22 nt, Artificial Sequence
  Synthetic
  misc_feature (4)..(4): n is a, c, g, or u
  misc_feature (15)..(15): n is a, c, g, or u
gagnagaucucgaanagaagga

SEQ ID NO: 111948 - RNA, 23 nt, Artificial Sequence
  Synthetic
  misc_feature (5)..(5): n is a, c, g, or u
  misc_feature (16)..(16): n is a, c, g, or u
cgagnagaucucgaanagaagga

SEQ ID NO: 111949 - RNA, 24 nt, Artificial Sequence
  Synthetic
  misc_feature (6)..(6): n is a, c, g, or u
  misc_feature (17)..(17): n is a, c, g, or u
ucgagnagaucucgaanagaagga

SEQ ID NO: 111950 - RNA, 18 nt, Artificial Sequence
  Synthetic
ugagccaagagaaacgga

SEQ ID NO: 111951 - RNA, 19 nt, Artificial Sequence
  Synthetic
cugagccaagagaaacgga

SEQ ID NO: 111952 - RNA, 20 nt, Artificial Sequence
  Synthetic
acugagccaagagaaacgga

SEQ ID NO: 111953 - RNA, 21 nt, Artificial Sequence
  Synthetic
aacugagccaagagaaacgga

SEQ ID NO: 111954 - RNA, 22 nt, Artificial Sequence
  Synthetic
aaacugagccaagagaaacgga

SEQ ID NO: 111955 - RNA, 23 nt, Artificial Sequence
  Synthetic
uaaacugagccaagagaaacgga

SEQ ID NO: 111956 - RNA, 24 nt, Artificial Sequence
  Synthetic
guaaacugagccaagagaaacgga

SEQ ID NO: 111957 - RNA, 18 nt, Artificial Sequence
  Synthetic
  misc_feature (8)..(8): n is a, c, g, or u
aucccagnggauugggga

SEQ ID NO: 111958 - RNA, 19 nt, Artificial Sequence
  Synthetic
  misc_feature (9)..(9): n is a, c, g, or u
aaucccagnggauugggga

SEQ ID NO: 111959 - RNA, 20 nt, Artificial Sequence
  Synthetic
  misc_feature (10)..(10): n is a, c, g, or u
gaaucccagnggauugggga

SEQ ID NO: 111960 - RNA, 21 nt, Artificial Sequence
  Synthetic
  misc_feature (11)..(11): n is a, c, g, or u
agaaucccagnggauugggga

SEQ ID NO: 111961 - RNA, 22 nt, Artificial Sequence
  Synthetic
  misc_feature (12)..(12): n is a, c, g, or u
aagaaucccagnggauugggga

SEQ ID NO: 111962 - RNA, 23 nt, Artificial Sequence
  Synthetic
  misc_feature (1)..(1): n is a, c, g, or u
  misc_feature (13)..(13): n is a, c, g, or u
naagaaucccagnggauugggga

SEQ ID NO: 111963 - RNA, 24 nt, Artificial Sequence
  Synthetic
  misc_feature (2)..(2): n is a, c, g, or u
  misc_feature (14)..(14): n is a, c, g, or u
gnaagaaucccagnggauugggga

SEQ ID NO: 111964 - RNA, 18 nt, Artificial Sequence
  Synthetic
aagcccaagaugauggga

SEQ ID NO: 111965 - RNA, 19 nt, Artificial Sequence
  Synthetic
aaagcccaagaugauggga

SEQ ID NO: 111966 - RNA, 20 nt, Artificial Sequence
  Synthetic
gaaagcccaagaugauggga

SEQ ID NO: 111967 - RNA, 21 nt, Artificial Sequence
  Synthetic
cgaaagcccaagaugauggga

SEQ ID NO: 111968 - RNA, 22 nt, Artificial Sequence
  Synthetic
gcgaaagcccaagaugauggga

SEQ ID NO: 111969 - RNA, 23 nt, Artificial Sequence
  Synthetic
ugcgaaagcccaagaugauggga

SEQ ID NO: 111970 - RNA, 24 nt, Artificial Sequence
  Synthetic
uugcgaaagcccaagaugauggga

SEQ ID NO: 111971 - RNA, 18 nt, Artificial Sequence
  Synthetic
  misc_feature (3)..(3): n is a, c, g, or u
  misc_feature (15)..(15): n is a, c, g, or u
ggnaagaaucccagngga

SEQ ID NO: 111972 - RNA, 19 nt, Artificial Sequence
  Synthetic
  misc_feature (4)..(4): n is a, c, g, or u
  misc_feature (16)..(16): n is a, c, g, or u
gggnaagaaucccagngga

SEQ ID NO: 111973 - RNA, 20 nt, Artificial Sequence
  Synthetic
  misc_feature (5)..(5): n is a, c, g, or u
  misc_feature (17)..(17): n is a, c, g, or u
cgggnaagaaucccagngga

SEQ ID NO: 111974 - RNA, 21 nt, Artificial Sequence
  Synthetic
  misc_feature (6)..(6): n is a, c, g, or u
  misc_feature (18)..(18): n is a, c, g, or u
ucgggnaagaaucccagngga

SEQ ID NO: 111975 - RNA, 22 nt, Artificial Sequence
  Synthetic
  misc_feature (7)..(7): n is a, c, g, or u
  misc_feature (19)..(19): n is a, c, g, or u
aucgggnaagaaucccagngga

SEQ ID NO: 111976 - RNA, 23 nt, Artificial Sequence
  Synthetic
  misc_feature (8)..(8): n is a, c, g, or u
  misc_feature (20)..(20): n is a, c, g, or u
gaucgggnaagaaucccagngga

SEQ ID NO: 111977 - RNA, 24 nt, Artificial Sequence
  Synthetic
  misc_feature (9)..(9): n is a, c, g, or u
  misc_feature (21)..(21): n is a, c, g, or u
ugaucgggnaagaaucccagngga

SEQ ID NO: 111978 - RNA, 18 nt, Artificial Sequence
  Synthetic
uuuuguacagcaacauga

SEQ ID NO: 111979 - RNA, 19 nt, Artificial Sequence
  Synthetic
guuuuguacagcaacauga

SEQ ID NO: 111980 - RNA, 20 nt, Artificial Sequence
  Synthetic
gguuuuguacagcaacauga

SEQ ID NO: 111981 - RNA, 21 nt, Artificial Sequence
  Synthetic
agguuuuguacagcaacauga

SEQ ID NO: 111982 - RNA, 22 nt, Artificial Sequence
  Synthetic
uagguuuuguacagcaacauga

SEQ ID NO: 111983 - RNA, 23 nt, Artificial Sequence
  Synthetic
guagguuuuguacagcaacauga

SEQ ID NO: 111984 - RNA, 24 nt, Artificial Sequence
  Synthetic
cguagguuuuguacagcaacauga

SEQ ID NO: 111985 - RNA, 18 nt, Artificial Sequence
  Synthetic
gcaggguccaacugauga

SEQ ID NO: 111986 - RNA, 19 nt, Artificial Sequence
  Synthetic
ugcaggguccaacugauga

SEQ ID NO: 111987 - RNA, 20 nt, Artificial Sequence
  Synthetic
augcaggguccaacugauga

SEQ ID NO: 111988 - RNA, 21 nt, Artificial Sequence
  Synthetic
aaugcaggguccaacugauga

SEQ ID NO: 111989 - RNA, 22 nt, Artificial Sequence
  Synthetic
gaaugcaggguccaacugauga

SEQ ID NO: 111990 - RNA, 23 nt, Artificial Sequence
  Synthetic
ugaaugcaggguccaacugauga

SEQ ID NO: 111991 - RNA, 24 nt, Artificial Sequence
  Synthetic
uugaaugcaggguccaacugauga

SEQ ID NO: 111992 - RNA, 18 nt, Artificial Sequence
  Synthetic
  misc_feature (6)..(6): n is a, c, g, or u
caacanguuggugaguga

SEQ ID NO: 111993 - RNA, 19 nt, Artificial Sequence
  Synthetic
  misc_feature (7)..(7): n is a, c, g, or u
acaacanguuggugaguga

SEQ ID NO: 111994 - RNA, 20 nt, Artificial Sequence
  Synthetic
  misc_feature (8)..(8): n is a, c, g, or u
gacaacanguuggugaguga

SEQ ID NO: 111995 - RNA, 21 nt, Artificial Sequence
  Synthetic
  misc_feature (9)..(9): n is a, c, g, or u
ggacaacanguuggugaguga

SEQ ID NO: 111996 - RNA, 22 nt, Artificial Sequence
  Synthetic
  misc_feature (10)..(10): n is a, c, g, or u
aggacaacanguuggugaguga

SEQ ID NO: 111997 - RNA, 23 nt, Artificial Sequence
  Synthetic
  misc_feature (11)..(11): n is a, c, g, or u
gaggacaacanguuggugaguga

SEQ ID NO: 111998 - RNA, 24 nt, Artificial Sequence
  Synthetic
  misc_feature (12)..(12): n is a, c, g, or u
ggaggacaacanguuggugaguga

SEQ ID NO: 111999 - RNA, 18 nt, Artificial Sequence
  Synthetic
  misc_feature (3)..(3): n is a, c, g, or u
uunccccuagaaaauuga

SEQ ID NO: 112000 - RNA, 19 nt, Artificial Sequence
  Synthetic
  misc_feature (4)..(4): n is a, c, g, or u
guunccccuagaaaauuga

SEQ ID NO: 112001 - RNA, 20 nt, Artificial Sequence
  Synthetic
  misc_feature (5)..(5): n is a, c, g, or u
uguunccccuagaaaauuga

SEQ ID NO: 112002 - RNA, 21 nt, Artificial Sequence
  Synthetic
  misc_feature (6)..(6): n is a, c, g, or u
guguunccccuagaaaauuga

SEQ ID NO: 112003 - RNA, 22 nt, Artificial Sequence
  Synthetic
  misc_feature (7)..(7): n is a, c, g, or u
gguguunccccuagaaaauuga

SEQ ID NO: 112004 - RNA, 23 nt, Artificial Sequence
  Synthetic
  misc_feature (8)..(8): n is a, c, g, or u
ggguguunccccuagaaaauuga

SEQ ID NO: 112005 - RNA, 24 nt, Artificial Sequence
  Synthetic
  misc_feature (9)..(9): n is a, c, g, or u
cggguguunccccuagaaaauuga

SEQ ID NO: 112006 - RNA, 18 nt, Artificial Sequence
  Synthetic
  misc_feature (2)..(2): n is a, c, g, or u
  misc_feature (17)..(17): n is a, c, g, or u
cncuuagagguggagana

SEQ ID NO: 112007 - RNA, 19 nt, Artificial Sequence
  Synthetic
  misc_feature (3)..(3): n is a, c, g, or u
  misc_feature (18)..(18): n is a, c, g, or u
ucncuuagagguggagana

SEQ ID NO: 112008 - RNA, 20 nt, Artificial Sequence
  Synthetic
  misc_feature (4)..(4): n is a, c, g, or u
  misc_feature (19)..(19): n is a, c, g, or u
gucncuuagagguggagana

SEQ ID NO: 112009 - RNA, 21 nt, Artificial Sequence
  Synthetic
  misc_feature (5)..(5): n is a, c, g, or u
  misc_feature (20)..(20): n is a, c, g, or u
ugucncuuagagguggagana

SEQ ID NO: 112010 - RNA, 22 nt, Artificial Sequence
  Synthetic
  misc_feature (6)..(6): n is a, c, g, or u
  misc_feature (21)..(21): n is a, c, g, or u
gugucncuuagagguggagana

SEQ ID NO: 112011 - RNA, 23 nt, Artificial Sequence
  Synthetic
  misc_feature (7)..(7): n is a, c, g, or u
  misc_feature (22)..(22): n is a, c, g, or u
agugucncuuagagguggagana

SEQ ID NO: 112012 - RNA, 24 nt, Artificial Sequence
  Synthetic
  misc_feature (8)..(8): n is a, c, g, or u
  misc_feature (23)..(23): n is a, c, g, or u
gagugucncuuagagguggagana

SEQ ID NO: 112013 - RNA, 18 nt, Artificial Sequence
  Synthetic
  misc_feature (5)..(5): n is a, c, g, or u
  misc_feature (14)..(14): n is a, c, g, or u
  misc_feature (17)..(17): n is a, c, g, or u
gauanccacauugnguna

SEQ ID NO: 112014 - RNA, 19 nt, Artificial Sequence
  Synthetic
  misc_feature (6)..(6): n is a, c, g, or u
  misc_feature (15)..(15): n is a, c, g, or u
  misc_feature (18)..(18): n is a, c, g, or u
ggauanccacauugnguna

SEQ ID NO: 112015 - RNA, 20 nt, Artificial Sequence
  Synthetic
  misc_feature (7)..(7): n is a, c, g, or u
  misc_feature (16)..(16): n is a, c, g, or u
  misc_feature (19)..(19): n is a, c, g, or u
aggauanccacauugnguna

SEQ ID NO: 112016 - RNA, 21 nt, Artificial Sequence
  Synthetic
  misc_feature (8)..(8): n is a, c, g, or u
  misc_feature (17)..(17): n is a, c, g, or u
  misc_feature (20)..(20): n is a, c, g, or u
caggauanccacauugnguna

SEQ ID NO: 112017 - RNA, 22 nt, Artificial Sequence
  Synthetic
  misc_feature (9)..(9): n is a, c, g, or u
  misc_feature (18)..(18): n is a, c, g, or u
  misc_feature (21)..(21): n is a, c, g, or u
gcaggauanccacauugnguna

SEQ ID NO: 112018 - RNA, 23 nt, Artificial Sequence
  Synthetic
  misc_feature (10)..(10): n is a, c, g, or u
  misc_feature (19)..(19): n is a, c, g, or u
  misc_feature (22)..(22): n is a, c, g, or u
agcaggauanccacauugnguna

SEQ ID NO: 112019 - RNA, 24 nt, Artificial Sequence
  Synthetic
  misc_feature (11)..(11): n is a, c, g, or u
  misc_feature (20)..(20): n is a, c, g, or u
  misc_feature (23)..(23): n is a, c, g, or u
aagcaggauanccacauugnguna

SEQ ID NO: 112020 - RNA, 18 nt, Artificial Sequence
  Synthetic
cucuaaggccucccgaua

SEQ ID NO: 112021 - RNA, 19 nt, Artificial Sequence
  Synthetic
acucuaaggccucccgaua

SEQ ID NO: 112022 - RNA, 20 nt, Artificial Sequence
  Synthetic
gacucuaaggccucccgaua

SEQ ID NO: 112023 - RNA, 21 nt, Artificial Sequence
  Synthetic
agacucuaaggccucccgaua

SEQ ID NO: 112024 - RNA, 22 nt, Artificial Sequence
  Synthetic
gagacucuaaggccucccgaua

SEQ ID NO: 112025 - RNA, 23 nt, Artificial Sequence
  Synthetic
ggagacucuaaggccucccgaua

SEQ ID NO: 112026 - RNA, 24 nt, Artificial Sequence
  Synthetic
cggagacucuaaggccucccgaua

SEQ ID NO: 112027 - RNA, 18 nt, Artificial Sequence
  Synthetic
  misc_feature (15)..(15): n is a, c, g, or u
auugguaacagcggnaua

SEQ ID NO: 112028 - RNA, 19 nt, Artificial Sequence
  Synthetic
  misc_feature (16)..(16): n is a, c, g, or u
aauugguaacagcggnaua

SEQ ID NO: 112029 - RNA, 20 nt, Artificial Sequence
  Synthetic
  misc_feature (17)..(17): n is a, c, g, or u
aaauugguaacagcggnaua

SEQ ID NO: 112030 - RNA, 21 nt, Artificial Sequence
  Synthetic
  misc_feature (18)..(18): n is a, c, g, or u
aaaauugguaacagcggnaua

SEQ ID NO: 112031 - RNA, 22 nt, Artificial Sequence
  Synthetic
  misc_feature (19)..(19): n is a, c, g, or u
gaaaauugguaacagcggnaua

SEQ ID NO: 112032 - RNA, 23 nt, Artificial Sequence
  Synthetic
  misc_feature (20)..(20): n is a, c, g, or u
agaaaauugguaacagcggnaua

SEQ ID NO: 112033 - RNA, 24 nt, Artificial Sequence
  Synthetic
  misc_feature (21)..(21): n is a, c, g, or u
aagaaaauugguaacagcggnaua

SEQ ID NO: 112034 - RNA, 18 nt, Artificial Sequence
  Synthetic
gagggaguucuucuucua

SEQ ID NO: 112035 - RNA, 19 nt, Artificial Sequence
  Synthetic
cgagggaguucuucuucua

SEQ ID NO: 112036 - RNA, 20 nt, Artificial Sequence
  Synthetic
gcgagggaguucuucuucua

SEQ ID NO: 112037 - RNA, 21 nt, Artificial Sequence
  Synthetic
ggcgagggaguucuucuucua

SEQ ID NO: 112038 - RNA, 22 nt, Artificial Sequence
  Synthetic
aggcgagggaguucuucuucua

SEQ ID NO: 112039 - RNA, 23 nt, Artificial Sequence
  Synthetic
gaggcgagggaguucuucuucua

SEQ ID NO: 112040 - RNA, 24 nt, Artificial Sequence
  Synthetic
cgaggcgagggaguucuucuucua

SEQ ID NO: 112041 - RNA, 18 nt, Artificial Sequence
  Synthetic
agacggggaguccgcgua

SEQ ID NO: 112042 - RNA, 19 nt, Artificial Sequence
  Synthetic
cagacggggaguccgcgua

SEQ ID NO: 112043 - RNA, 20 nt, Artificial Sequence
  Synthetic
acagacggggaguccgcgua

SEQ ID NO: 112044 - RNA, 21 nt, Artificial Sequence
  Synthetic
cacagacggggaguccgcgua

SEQ ID NO: 112045 - RNA, 22 nt, Artificial Sequence
  Synthetic
gcacagacggggaguccgcgua

SEQ ID NO: 112046 - RNA, 23 nt, Artificial Sequence
  Synthetic
ggcacagacggggaguccgcgua

SEQ ID NO: 112047 - RNA, 24 nt, Artificial Sequence
  Synthetic
aggcacagacggggaguccgcgua

SEQ ID NO: 112048 - RNA, 18 nt, Artificial Sequence
  Synthetic
uugaugauccuggaauua

SEQ ID NO: 112049 - RNA, 19 nt, Artificial Sequence
  Synthetic
guugaugauccuggaauua

SEQ ID NO: 112050 - RNA, 20 nt, Artificial Sequence
  Synthetic
  misc_feature (1)..(1): n is a, c, g, or u
nguugaugauccuggaauua

SEQ ID NO: 112051 - RNA, 21 nt, Artificial Sequence
  Synthetic
  misc_feature (2)..(2): n is a, c, g, or u
unguugaugauccuggaauua

SEQ ID NO: 112052 - RNA, 22 nt, Artificial Sequence
  Synthetic
  misc_feature (3)..(3): n is a, c, g, or u
gunguugaugauccuggaauua

SEQ ID NO: 112053 - RNA, 23 nt, Artificial Sequence
  Synthetic
  misc_feature (4)..(4): n is a, c, g, or u
ggunguugaugauccuggaauua

SEQ ID NO: 112054 - RNA, 24 nt, Artificial Sequence
  Synthetic
  misc_feature (5)..(5): n is a, c, g, or u
uggunguugaugauccuggaauua

SEQ ID NO: 112055 - RNA, 18 nt, Artificial Sequence
  Synthetic
acauaucccaugaaguua

SEQ ID NO: 112056 - RNA, 19 nt, Artificial Sequence
  Synthetic
uacauaucccaugaaguua

SEQ ID NO: 112057 - RNA, 20 nt, Artificial Sequence
  Synthetic
uuacauaucccaugaaguua

SEQ ID NO: 112058 - RNA, 21 nt, Artificial Sequence
  Synthetic
auuacauaucccaugaaguua

SEQ ID NO: 112059 - RNA, 22 nt, Artificial Sequence
  Synthetic
aauuacauaucccaugaaguua

SEQ ID NO: 112060 - RNA, 23 nt, Artificial Sequence
  Synthetic
caauuacauaucccaugaaguua

SEQ ID NO: 112061 - RNA, 24 nt, Artificial Sequence
  Synthetic
ccaauuacauaucccaugaaguua

SEQ ID NO: 112062 - RNA, 18 nt, Artificial Sequence
  Synthetic
  misc_feature (11)..(11): n is a, c, g, or u
aaucaauaggncuguuua

SEQ ID NO: 112063 - RNA, 19 nt, Artificial Sequence
  Synthetic
  misc_feature (12)..(12): n is a, c, g, or u
caaucaauaggncuguuua

SEQ ID NO: 112064 - RNA, 20 nt, Artificial Sequence
  Synthetic
  misc_feature (13)..(13): n is a, c, g, or u
ccaaucaauaggncuguuua

SEQ ID NO: 112065 - RNA, 21 nt, Artificial Sequence
  Synthetic
  misc_feature (14)..(14): n is a, c, g, or u
uccaaucaauaggncuguuua

SEQ ID NO: 112066 - RNA, 22 nt, Artificial Sequence
  Synthetic
  misc_feature (15)..(15): n is a, c, g, or u
uuccaaucaauaggncuguuua

SEQ ID NO: 112067 - RNA, 23 nt, Artificial Sequence
  Synthetic
  misc_feature (16)..(16): n is a, c, g, or u
uuuccaaucaauaggncuguuua

SEQ ID NO: 112068 - RNA, 24 nt, Artificial Sequence
  Synthetic
  misc_feature (17)..(17): n is a, c, g, or u
cuuuccaaucaauaggncuguuua

SEQ ID NO: 112069 - RNA, 18 nt, Artificial Sequence
  Synthetic
uaguccagaagaaccaac

SEQ ID NO: 112070 - RNA, 19 nt, Artificial Sequence
  Synthetic
auaguccagaagaaccaac

SEQ ID NO: 112071 - RNA, 20 nt, Artificial Sequence
  Synthetic
gauaguccagaagaaccaac

SEQ ID NO: 112072 - RNA, 21 nt, Artificial Sequence
  Synthetic
ugauaguccagaagaaccaac

SEQ ID NO: 112073 - RNA, 22 nt, Artificial Sequence
  Synthetic
uugauaguccagaagaaccaac

SEQ ID NO: 112074 - RNA, 23 nt, Artificial Sequence
  Synthetic
cuugauaguccagaagaaccaac

SEQ ID NO: 112075 - RNA, 24 nt, Artificial Sequence
  Synthetic
ccuugauaguccagaagaaccaac

SEQ ID NO: 112076 - RNA, 18 nt, Artificial Sequence
  Synthetic
uagguuuuguacagcaac

SEQ ID NO: 112077 - RNA, 19 nt, Artificial Sequence
  Synthetic
guagguuuuguacagcaac

SEQ ID NO: 112078 - RNA, 20 nt, Artificial Sequence
  Synthetic
cguagguuuuguacagcaac

SEQ ID NO: 112079 - RNA, 21 nt, Artificial Sequence
  Synthetic
ccguagguuuuguacagcaac

SEQ ID NO: 112080 - RNA, 22 nt, Artificial Sequence
  Synthetic
uccguagguuuuguacagcaac

SEQ ID NO: 112081 - RNA, 23 nt, Artificial Sequence
  Synthetic
guccguagguuuuguacagcaac

SEQ ID NO: 112082 - RNA, 24 nt, Artificial Sequence
  Synthetic
cguccguagguuuuguacagcaac

SEQ ID NO: 112083 - RNA, 18 nt, Artificial Sequence
  Synthetic
gugaggauuuuugucaac

SEQ ID NO: 112084 - RNA, 19 nt, Artificial Sequence
  Synthetic
ugugaggauuuuugucaac

SEQ ID NO: 112085 - RNA, 20 nt, Artificial Sequence
  Synthetic
uugugaggauuuuugucaac

SEQ ID NO: 112086 - RNA, 21 nt, Artificial Sequence
  Synthetic
auugugaggauuuuugucaac

SEQ ID NO: 112087 - RNA, 22 nt, Artificial Sequence
  Synthetic
uauugugaggauuuuugucaac

SEQ ID NO: 112088 - RNA, 23 nt, Artificial Sequence
  Synthetic
guauugugaggauuuuugucaac

SEQ ID NO: 112089 - RNA, 24 nt, Artificial Sequence
  Synthetic
gguauugugaggauuuuugucaac

SEQ ID NO: 112090 - RNA, 18 nt, Artificial Sequence
  Synthetic
gaacaguaggacaugaac

SEQ ID NO: 112091 - RNA, 19 nt, Artificial Sequence
  Synthetic
ugaacaguaggacaugaac

SEQ ID NO: 112092 - RNA, 20 nt, Artificial Sequence
  Synthetic
uugaacaguaggacaugaac

SEQ ID NO: 112093 - RNA, 21 nt, Artificial Sequence
  Synthetic
cuugaacaguaggacaugaac

SEQ ID NO: 112094 - RNA, 22 nt, Artificial Sequence
  Synthetic
gcuugaacaguaggacaugaac

SEQ ID NO: 112095 - RNA, 23 nt, Artificial Sequence
  Synthetic
ggcuugaacaguaggacaugaac

SEQ ID NO: 112096 - RNA, 24 nt, Artificial Sequence
  Synthetic
aggcuugaacaguaggacaugaac

SEQ ID NO: 112097 - RNA, 18 nt, Artificial Sequence
  Synthetic
ggcucacuguuccugaac

SEQ ID NO: 112098 - RNA, 19 nt, Artificial Sequence
  Synthetic
gggcucacuguuccugaac

SEQ ID NO: 112099 - RNA, 20 nt, Artificial Sequence
  Synthetic
agggcucacuguuccugaac

SEQ ID NO: 112100 - RNA, 21 nt, Artificial Sequence
  Synthetic
cagggcucacuguuccugaac

SEQ ID NO: 112101 - RNA, 22 nt, Artificial Sequence
  Synthetic
gcagggcucacuguuccugaac

SEQ ID NO: 112102 - RNA, 23 nt, Artificial Sequence
  Synthetic
agcagggcucacuguuccugaac

SEQ ID NO: 112103 - RNA, 24 nt, Artificial Sequence
  Synthetic
gagcagggcucacuguuccugaac

SEQ ID NO: 112104 - RNA, 18 nt, Artificial Sequence
  Synthetic
gacacauccagcgauaac

SEQ ID NO: 112105 - RNA, 19 nt, Artificial Sequence
  Synthetic
agacacauccagcgauaac

SEQ ID NO: 112106 - RNA, 20 nt, Artificial Sequence
  Synthetic
cagacacauccagcgauaac

SEQ ID NO: 112107 - RNA, 21 nt, Artificial Sequence
  Synthetic
gcagacacauccagcgauaac

SEQ ID NO: 112108 - RNA, 22 nt, Artificial Sequence
  Synthetic
cgcagacacauccagcgauaac

SEQ ID NO: 112109 - RNA, 23 nt, Artificial Sequence
  Synthetic
ccgcagacacauccagcgauaac

SEQ ID NO: 112110 - RNA, 24 nt, Artificial Sequence
  Synthetic
gccgcagacacauccagcgauaac

SEQ ID NO: 112111 - RNA, 18 nt, Artificial Sequence
  Synthetic
aaaaaccccgccuguaac

SEQ ID NO: 112112 - RNA, 19 nt, Artificial Sequence
  Synthetic
gaaaaaccccgccuguaac

SEQ ID NO: 112113 - RNA, 20 nt, Artificial Sequence
  Synthetic
agaaaaaccccgccuguaac

SEQ ID NO: 112114 - RNA, 21 nt, Artificial Sequence
  Synthetic
aagaaaaaccccgccuguaac

SEQ ID NO: 112115 - RNA, 22 nt, Artificial Sequence
  Synthetic
caagaaaaaccccgccuguaac

SEQ ID NO: 112116 - RNA, 23 nt, Artificial Sequence
  Synthetic
acaagaaaaaccccgccuguaac

SEQ ID NO: 112117 - RNA, 24 nt, Artificial Sequence
  Synthetic
aacaagaaaaaccccgccuguaac

SEQ ID NO: 112118 - RNA, 18 nt, Artificial Sequence
  Synthetic
  misc_feature (5)..(5): n is a, c, g, or u
cucunccaaaaguaagac

SEQ ID NO: 112119 - RNA, 19 nt, Artificial Sequence
  Synthetic
  misc_feature (6)..(6): n is a, c, g, or u
ucucunccaaaaguaagac

SEQ ID NO: 112120 - RNA, 20 nt, Artificial Sequence
  Synthetic
  misc_feature (7)..(7): n is a, c, g, or u
uucucunccaaaaguaagac

SEQ ID NO: 112121 - RNA, 21 nt, Artificial Sequence
  Synthetic
  misc_feature (8)..(8): n is a, c, g, or u
uuucucunccaaaaguaagac

SEQ ID NO: 112122 - RNA, 22 nt, Artificial Sequence
  Synthetic
  misc_feature (9)..(9): n is a, c, g, or u
guuucucunccaaaaguaagac

SEQ ID NO: 112123 - RNA, 23 nt, Artificial Sequence
  Synthetic
  misc_feature (10)..(10): n is a, c, g, or u
aguuucucunccaaaaguaagac

SEQ ID NO: 112124 - RNA, 24 nt, Artificial Sequence
  Synthetic
  misc_feature (11)..(11): n is a, c, g, or u
caguuucucunccaaaaguaagac

SEQ ID NO: 112125 - RNA, 18 nt, Artificial Sequence
  Synthetic
agaugagaaggcacagac

SEQ ID NO: 112126 - RNA, 19 nt, Artificial Sequence
  Synthetic
  misc_feature (1)..(1): n is a, c, g, or u
nagaugagaaggcacagac

SEQ ID NO: 112127 - RNA, 20 nt, Artificial Sequence
  Synthetic
  misc_feature (2)..(2): n is a, c, g, or u
gnagaugagaaggcacagac

SEQ ID NO: 112128 - RNA, 21 nt, Artificial Sequence
  Synthetic
  misc_feature (3)..(3): n is a, c, g, or u
ggnagaugagaaggcacagac

SEQ ID NO: 112129 - RNA, 22 nt, Artificial Sequence
  Synthetic
  misc_feature (4)..(4): n is a, c, g, or u
cggnagaugagaaggcacagac

SEQ ID NO: 112130 - RNA, 23 nt, Artificial Sequence
  Synthetic
  misc_feature (5)..(5): n is a, c, g, or u
ccggnagaugagaaggcacagac

SEQ ID NO: 112131 - RNA, 24 nt, Artificial Sequence
  Synthetic
  misc_feature (6)..(6): n is a, c, g, or u
uccggnagaugagaaggcacagac

SEQ ID NO: 112132 - RNA, 18 nt, Artificial Sequence
  Synthetic
aggcuugaacaguaggac

SEQ ID NO: 112133 - RNA, 19 nt, Artificial Sequence
  Synthetic
gaggcuugaacaguaggac

SEQ ID NO: 112134 - RNA, 20 nt, Artificial Sequence
  Synthetic
ggaggcuugaacaguaggac

SEQ ID NO: 112135 - RNA, 21 nt, Artificial Sequence
  Synthetic
uggaggcuugaacaguaggac

SEQ ID NO: 112136 - RNA, 22 nt, Artificial Sequence
  Synthetic
uuggaggcuugaacaguaggac

SEQ ID NO: 112137 - RNA, 23 nt, Artificial Sequence
  Synthetic
cuuggaggcuugaacaguaggac

SEQ ID NO: 112138 - RNA, 24 nt, Artificial Sequence
  Synthetic
gcuuggaggcuugaacaguaggac

SEQ ID NO: 112139 - RNA, 18 nt, Artificial Sequence
  Synthetic
  misc_feature (5)..(5): n is a, c, g, or u
aacanguuggugagugac

SEQ ID NO: 112140 - RNA, 19 nt, Artificial Sequence
  Synthetic
  misc_feature (6)..(6): n is a, c, g, or u
caacanguuggugagugac

SEQ ID NO: 112141 - RNA, 20 nt, Artificial Sequence
  Synthetic
  misc_feature (7)..(7): n is a, c, g, or u
acaacanguuggugagugac

SEQ ID NO: 112142 - RNA, 21 nt, Artificial Sequence
  Synthetic
  misc_feature (8)..(8): n is a, c, g, or u
gacaacanguuggugagugac

SEQ ID NO: 112143 - RNA, 22 nt, Artificial Sequence
  Synthetic
  misc_feature (9)..(9): n is a, c, g, or u
ggacaacanguuggugagugac

SEQ ID NO: 112144 - RNA, 23 nt, Artificial Sequence
  Synthetic
  misc_feature (10)..(10): n is a, c, g, or u
aggacaacanguuggugagugac

SEQ ID NO: 112145 - RNA, 24 nt, Artificial Sequence
  Synthetic
  misc_feature (11)..(11): n is a, c, g, or u
gaggacaacanguuggugagugac

SEQ ID NO: 112146 - RNA, 18 nt, Artificial Sequence
  Synthetic
  misc_feature (10)..(10): n is a, c, g, or u
aucaauaggncuguuuac

SEQ ID NO: 112147 - RNA, 19 nt, Artificial Sequence
  Synthetic
  misc_feature (11)..(11): n is a, c, g, or u
aaucaauaggncuguuuac

SEQ ID NO: 112148 - RNA, 20 nt, Artificial Sequence
  Synthetic
  misc_feature (12)..(12): n is a, c, g, or u
caaucaauaggncuguuuac

SEQ ID NO: 112149 - RNA, 21 nt, Artificial Sequence
  Synthetic
  misc_feature (13)..(13): n is a, c, g, or u
ccaaucaauaggncuguuuac

SEQ ID NO: 112150 - RNA, 22 nt, Artificial Sequence
  Synthetic
  misc_feature (14)..(14): n is a, c, g, or u
uccaaucaauaggncuguuuac

SEQ ID NO: 112151 - RNA, 23 nt, Artificial Sequence
  Synthetic
  misc_feature (15)..(15): n is a, c, g, or u
uuccaaucaauaggncuguuuac

SEQ ID NO: 112152 - RNA, 24 nt, Artificial Sequence
  Synthetic
  misc_feature (16)..(16): n is a, c, g, or u
uuuccaaucaauaggncuguuuac

SEQ ID NO: 112153 - RNA, 18 nt, Artificial Sequence
  Synthetic
guccucuuaugcaagacc

SEQ ID NO: 112154 - RNA, 19 nt, Artificial Sequence
  Synthetic
aguccucuuaugcaagacc

SEQ ID NO: 112155 - RNA, 20 nt, Artificial Sequence
  Synthetic
gaguccucuuaugcaagacc

SEQ ID NO: 112156 - RNA, 21 nt, Artificial Sequence
  Synthetic
agaguccucuuaugcaagacc

SEQ ID NO: 112157 - RNA, 22 nt, Artificial Sequence
  Synthetic
aagaguccucuuaugcaagacc

SEQ ID NO: 112158 - RNA, 23 nt, Artificial Sequence
  Synthetic
caagaguccucuuaugcaagacc

SEQ ID NO: 112159 - RNA, 24 nt, Artificial Sequence
  Synthetic
ccaagaguccucuuaugcaagacc

SEQ ID NO: 112160 - RNA, 18 nt, Artificial Sequence
  Synthetic
ccaccccaacaguccccc

SEQ ID NO: 112161 - RNA, 19 nt, Artificial Sequence
  Synthetic
uccaccccaacaguccccc

SEQ ID NO: 112162 - RNA, 20 nt, Artificial Sequence
  Synthetic
cuccaccccaacaguccccc

SEQ ID NO: 112163 - RNA, 21 nt, Artificial Sequence
  Synthetic
gcuccaccccaacaguccccc

SEQ ID NO: 112164 - RNA, 22 nt, Artificial Sequence
  Synthetic
ggcuccaccccaacaguccccc

SEQ ID NO: 112165 - RNA, 23 nt, Artificial Sequence
  Synthetic
gggcuccaccccaacaguccccc

SEQ ID NO: 112166 - RNA, 24 nt, Artificial Sequence
  Synthetic
agggcuccaccccaacaguccccc

SEQ ID NO: 112167 - RNA, 18 nt, Artificial Sequence
  Synthetic
agagccccaagcggcccc

SEQ ID NO: 112168 - RNA, 19 nt, Artificial Sequence
  Synthetic
uagagccccaagcggcccc

SEQ ID NO: 112169 - RNA, 20 nt, Artificial Sequence
  Synthetic
guagagccccaagcggcccc

SEQ ID NO: 112170 - RNA, 21 nt, Artificial Sequence
  Synthetic
gguagagccccaagcggcccc

SEQ ID NO: 112171 - RNA, 22 nt, Artificial Sequence
  Synthetic
cgguagagccccaagcggcccc

SEQ ID NO: 112172 - RNA, 23 nt, Artificial Sequence
  Synthetic
gcgguagagccccaagcggcccc

SEQ ID NO: 112173 - RNA, 24 nt, Artificial Sequence
  Synthetic
ggcgguagagccccaagcggcccc

SEQ ID NO: 112174 - RNA, 18 nt, Artificial Sequence
  Synthetic
  misc_feature (14)..(14): n is a, c, g, or u
acacacggguguuncccc

SEQ ID NO: 112175 - RNA, 19 nt, Artificial Sequence
  Synthetic
  misc_feature (15)..(15): n is a, c, g, or u
gacacacggguguuncccc

SEQ ID NO: 112176 - RNA, 20 nt, Artificial Sequence
  Synthetic
  misc_feature (16)..(16): n is a, c, g, or u
agacacacggguguuncccc

SEQ ID NO: 112177 - RNA, 21 nt, Artificial Sequence
  Synthetic
  misc_feature (17)..(17): n is a, c, g, or u
aagacacacggguguuncccc

SEQ ID NO: 112178 - RNA, 22 nt, Artificial Sequence
  Synthetic
  misc_feature (18)..(18): n is a, c, g, or u
caagacacacggguguuncccc

SEQ ID NO: 112179 - RNA, 23 nt, Artificial Sequence
  Synthetic
  misc_feature (19)..(19): n is a, c, g, or u
ccaagacacacggguguuncccc

SEQ ID NO: 112180 - RNA, 24 nt, Artificial Sequence
  Synthetic
  misc_feature (20)..(20): n is a, c, g, or u
gccaagacacacggguguuncccc

SEQ ID NO: 112181 - RNA, 18 nt, Artificial Sequence
  Synthetic
uagagccccaagcggccc

SEQ ID NO: 112182 - RNA, 19 nt, Artificial Sequence
  Synthetic
guagagccccaagcggccc

SEQ ID NO: 112183 - RNA, 20 nt, Artificial Sequence
  Synthetic
gguagagccccaagcggccc

SEQ ID NO: 112184 - RNA, 21 nt, Artificial Sequence
  Synthetic
cgguagagccccaagcggccc

SEQ ID NO: 112185 - RNA, 22 nt, Artificial Sequence
  Synthetic
gcgguagagccccaagcggccc

SEQ ID NO: 112186 - RNA, 23 nt, Artificial Sequence
  Synthetic
ggcgguagagccccaagcggccc

SEQ ID NO: 112187 - RNA, 24 nt, Artificial Sequence
  Synthetic
gggcgguagagccccaagcggccc

SEQ ID NO: 112188 - RNA, 18 nt, Artificial Sequence
  Synthetic
  misc_feature (2)..(3): n is a, c, g, or u
cnnccaauuacauauccc

SEQ ID NO: 112189 - RNA, 19 nt, Artificial Sequence
  Synthetic
  misc_feature (3)..(4): n is a, c, g, or u
acnnccaauuacauauccc

SEQ ID NO: 112190 - RNA, 20 nt, Artificial Sequence
  Synthetic
  misc_feature (4)..(5): n is a, c, g, or u
aacnnccaauuacauauccc

SEQ ID NO: 112191 - RNA, 21 nt, Artificial Sequence
  Synthetic
  misc_feature (5)..(6): n is a, c, g, or u
caacnnccaauuacauauccc

SEQ ID NO: 112192 - RNA, 22 nt, Artificial Sequence
  Synthetic
  misc_feature (6)..(7): n is a, c, g, or u
ccaacnnccaauuacauauccc

SEQ ID NO: 112193 - RNA, 23 nt, Artificial Sequence
  Synthetic
  misc_feature (7)..(8): n is a, c, g, or u
cccaacnnccaauuacauauccc

SEQ ID NO: 112194 - RNA, 24 nt, Artificial Sequence
  Synthetic
  misc_feature (8)..(9): n is a, c, g, or u
ccccaacnnccaauuacauauccc

SEQ ID NO: 112195 - RNA, 18 nt, Artificial Sequence
  Synthetic
cagcacagccuagcagcc

SEQ ID NO: 112196 - RNA, 19 nt, Artificial Sequence
  Synthetic
gcagcacagccuagcagcc

SEQ ID NO: 112197 - RNA, 20 nt, Artificial Sequence
  Synthetic
ggcagcacagccuagcagcc

SEQ ID NO: 112198 - RNA, 21 nt, Artificial Sequence
  Synthetic
uggcagcacagccuagcagcc

SEQ ID NO: 112199 - RNA, 22 nt, Artificial Sequence
  Synthetic
uuggcagcacagccuagcagcc

SEQ ID NO: 112200 - RNA, 23 nt, Artificial Sequence
  Synthetic
guuggcagcacagccuagcagcc

SEQ ID NO: 112201 - RNA, 24 nt, Artificial Sequence
  Synthetic
aguuggcagcacagccuagcagcc

SEQ ID NO: 112202 - RNA, 18 nt, Artificial Sequence
  Synthetic
gcacuaguaaacugagcc

SEQ ID NO: 112203 - RNA, 19 nt, Artificial Sequence
  Synthetic
ggcacuaguaaacugagcc

SEQ ID NO: 112204 - RNA, 20 nt, Artificial Sequence
  Synthetic
uggcacuaguaaacugagcc

SEQ ID NO: 112205 - RNA, 21 nt, Artificial Sequence
  Synthetic
auggcacuaguaaacugagcc

SEQ ID NO: 112206 - RNA, 22 nt, Artificial Sequence
  Synthetic
aauggcacuaguaaacugagcc

SEQ ID NO: 112207 - RNA, 23 nt, Artificial Sequence
  Synthetic
aaauggcacuaguaaacugagcc

SEQ ID NO: 112208 - RNA, 24 nt, Artificial Sequence
  Synthetic
caaauggcacuaguaaacugagcc

SEQ ID NO: 112209 - RNA, 18 nt, Artificial Sequence
  Synthetic
guagagccccaagcggcc

SEQ ID NO: 112210 - RNA, 19 nt, Artificial Sequence
  Synthetic
gguagagccccaagcggcc

SEQ ID NO: 112211 - RNA, 20 nt, Artificial Sequence
  Synthetic
cgguagagccccaagcggcc

SEQ ID NO: 112212 - RNA, 21 nt, Artificial Sequence
  Synthetic
gcgguagagccccaagcggcc

SEQ ID NO: 112213 - RNA, 22 nt, Artificial Sequence
  Synthetic
ggcgguagagccccaagcggcc

SEQ ID NO: 112214 - RNA, 23 nt, Artificial Sequence
  Synthetic
gggcgguagagccccaagcggcc

SEQ ID NO: 112215 - RNA, 24 nt, Artificial Sequence
  Synthetic
cgggcgguagagccccaagcggcc

SEQ ID NO: 112216 - RNA, 18 nt, Artificial Sequence
  Synthetic
  misc_feature (15)..(15): n is a, c, g, or u
cacaguugugaguangcc

SEQ ID NO: 112217 - RNA, 19 nt, Artificial Sequence
  Synthetic
  misc_feature (16)..(16): n is a, c, g, or u
gcacaguugugaguangcc

SEQ ID NO: 112218 - RNA, 20 nt, Artificial Sequence
  Synthetic
  misc_feature (17)..(17): n is a, c, g, or u
ggcacaguugugaguangcc

SEQ ID NO: 112219 - RNA, 21 nt, Artificial Sequence
  Synthetic
  misc_feature (18)..(18): n is a, c, g, or u
uggcacaguugugaguangcc

SEQ ID NO: 112220 - RNA, 22 nt, Artificial Sequence
  Synthetic
  misc_feature (19)..(19): n is a, c, g, or u
cuggcacaguugugaguangcc

SEQ ID NO: 112221 - RNA, 23 nt, Artificial Sequence
  Synthetic
  misc_feature (20)..(20): n is a, c, g, or u
gcuggcacaguugugaguangcc

SEQ ID NO: 112222 - RNA, 24 nt, Artificial Sequence
  Synthetic
  misc_feature (21)..(21): n is a, c, g, or u
ugcuggcacaguugugaguangcc

SEQ ID NO: 112223 - RNA, 18 nt, Artificial Sequence
  Synthetic
ccccgggaggggucgucc

SEQ ID NO: 112224 - RNA, 19 nt, Artificial Sequence
  Synthetic
gccccgggaggggucgucc

SEQ ID NO: 112225 - RNA, 20 nt, Artificial Sequence
  Synthetic
ggccccgggaggggucgucc

SEQ ID NO: 112226 - RNA, 21 nt, Artificial Sequence
  Synthetic
cggccccgggaggggucgucc

SEQ ID NO: 112227 - RNA, 22 nt, Artificial Sequence
  Synthetic
gcggccccgggaggggucgucc

SEQ ID NO: 112228 - RNA, 23 nt, Artificial Sequence
  Synthetic
agcggccccgggaggggucgucc

SEQ ID NO: 112229 - RNA, 24 nt, Artificial Sequence
  Synthetic
aagcggccccgggaggggucgucc

SEQ ID NO: 112230 - RNA, 18 nt, Artificial Sequence
  Synthetic
uaacacgagcaggggucc

SEQ ID NO: 112231 - RNA, 19 nt, Artificial Sequence
  Synthetic
guaacacgagcaggggucc

SEQ ID NO: 112232 - RNA, 20 nt, Artificial Sequence
  Synthetic
uguaacacgagcaggggucc

SEQ ID NO: 112233 - RNA, 21 nt, Artificial Sequence
  Synthetic
cuguaacacgagcaggggucc

SEQ ID NO: 112234 - RNA, 22 nt, Artificial Sequence
  Synthetic
ccuguaacacgagcaggggucc

SEQ ID NO: 112235 - RNA, 23 nt, Artificial Sequence
  Synthetic
gccuguaacacgagcaggggucc

SEQ ID NO: 112236 - RNA, 24 nt, Artificial Sequence
  Synthetic
cgccuguaacacgagcaggggucc

SEQ ID NO: 112237 - RNA, 18 nt, Artificial Sequence
  Synthetic
  misc_feature (14)..(14): n is a, c, g, or u
uucccaccuuaugngucc

SEQ ID NO: 112238 - RNA, 19 nt, Artificial Sequence
  Synthetic
  misc_feature (15)..(15): n is a, c, g, or u
uuucccaccuuaugngucc

SEQ ID NO: 112239 - RNA, 20 nt, Artificial Sequence
  Synthetic
  misc_feature (16)..(16): n is a, c, g, or u
guuucccaccuuaugngucc

SEQ ID NO: 112240 - RNA, 21 nt, Artificial Sequence
  Synthetic
  misc_feature (17)..(17): n is a, c, g, or u
aguuucccaccuuaugngucc

SEQ ID NO: 112241 - RNA, 22 nt, Artificial Sequence
  Synthetic
  misc_feature (18)..(18): n is a, c, g, or u
aaguuucccaccuuaugngucc

SEQ ID NO: 112242 - RNA, 23 nt, Artificial Sequence
  Synthetic
  misc_feature (19)..(19): n is a, c, g, or u
aaaguuucccaccuuaugngucc

SEQ ID NO: 112243 - RNA, 24 nt, Artificial Sequence
  Synthetic
  misc_feature (20)..(20): n is a, c, g, or u
uaaaguuucccaccuuaugngucc

SEQ ID NO: 112244 - RNA, 18 nt, Artificial Sequence
  Synthetic
gggaaacauagagguucc

SEQ ID NO: 112245 - RNA, 19 nt, Artificial Sequence
  Synthetic
agggaaacauagagguucc

SEQ ID NO: 112246 - RNA, 20 nt, Artificial Sequence
  Synthetic
gagggaaacauagagguucc

SEQ ID NO: 112247 - RNA, 21 nt, Artificial Sequence
  Synthetic
ugagggaaacauagagguucc

SEQ ID NO: 112248 - RNA, 22 nt, Artificial Sequence
  Synthetic
augagggaaacauagagguucc

SEQ ID NO: 112249 - RNA, 23 nt, Artificial Sequence
  Synthetic
caugagggaaacauagagguucc

SEQ ID NO: 112250 - RNA, 24 nt, Artificial Sequence
  Synthetic
acaugagggaaacauagagguucc

SEQ ID NO: 112251 - RNA, 18 nt, Artificial Sequence
  Synthetic
agccacccaaggcacagc

SEQ ID NO: 112252 - RNA, 19 nt, Artificial Sequence
  Synthetic
aagccacccaaggcacagc

SEQ ID NO: 112253 - RNA, 20 nt, Artificial Sequence
  Synthetic
aaagccacccaaggcacagc

SEQ ID NO: 112254 - RNA, 21 nt, Artificial Sequence
  Synthetic
  misc_feature (1)..(1): n is a, c, g, or u
naaagccacccaaggcacagc

SEQ ID NO: 112255 - RNA, 22 nt, Artificial Sequence
  Synthetic
  misc_feature (2)..(2): n is a, c, g, or u
cnaaagccacccaaggcacagc

SEQ ID NO: 112256 - RNA, 23 nt, Artificial Sequence
  Synthetic
  misc_feature (3)..(3): n is a, c, g, or u
ccnaaagccacccaaggcacagc

SEQ ID NO: 112257 - RNA, 24 nt, Artificial Sequence
  Synthetic
  misc_feature (4)..(4): n is a, c, g, or u
cccnaaagccacccaaggcacagc

SEQ ID NO: 112258 - RNA, 18 nt, Artificial Sequence
  Synthetic
ugaacuggagccaccagc

SEQ ID NO: 112259 - RNA, 19 nt, Artificial Sequence
  Synthetic
cugaacuggagccaccagc

SEQ ID NO: 112260 - RNA, 20 nt, Artificial Sequence
  Synthetic
ccugaacuggagccaccagc

SEQ ID NO: 112261 - RNA, 21 nt, Artificial Sequence
  Synthetic
uccugaacuggagccaccagc

SEQ ID NO: 112262 - RNA, 22 nt, Artificial Sequence
  Synthetic
uuccugaacuggagccaccagc

SEQ ID NO: 112263 - RNA, 23 nt, Artificial Sequence
  Synthetic
guuccugaacuggagccaccagc

SEQ ID NO: 112264 - RNA, 24 nt, Artificial Sequence
  Synthetic
uguuccugaacuggagccaccagc

SEQ ID NO: 112265 - RNA, 18 nt, Artificial Sequence
  Synthetic
  misc_feature (9)..(9): n is a, c, g, or u
ugugaguangcccugagc

SEQ ID NO: 112266 - RNA, 19 nt, Artificial Sequence
  Synthetic
  misc_feature (10)..(10): n is a, c, g, or u
uugugaguangcccugagc

SEQ ID NO: 112267 - RNA, 20 nt, Artificial Sequence
  Synthetic
  misc_feature (11)..(11): n is a, c, g, or u
guugugaguangcccugagc

SEQ ID NO: 112268 - RNA, 21 nt, Artificial Sequence
  Synthetic
  misc_feature (12)..(12): n is a, c, g, or u
aguugugaguangcccugagc

SEQ ID NO: 112269 - RNA, 22 nt, Artificial Sequence
  Synthetic
  misc_feature (13)..(13): n is a, c, g, or u
caguugugaguangcccugagc

SEQ ID NO: 112270 - RNA, 23 nt, Artificial Sequence
  Synthetic
  misc_feature (14)..(14): n is a, c, g, or u
acaguugugaguangcccugagc

SEQ ID NO: 112271 - RNA, 24 nt, Artificial Sequence
  Synthetic
  misc_feature (15)..(15): n is a, c, g, or u
cacaguugugaguangcccugagc

SEQ ID NO: 112272 - RNA, 18 nt, Artificial Sequence
  Synthetic
gaccuucgucugcgaggc

SEQ ID NO: 112273 - RNA, 19 nt, Artificial Sequence
  Synthetic
agaccuucgucugcgaggc

SEQ ID NO: 112274 - RNA, 20 nt, Artificial Sequence
  Synthetic
gagaccuucgucugcgaggc

SEQ ID NO: 112275 - RNA, 21 nt, Artificial Sequence
  Synthetic
ugagaccuucgucugcgaggc

SEQ ID NO: 112276 - RNA, 22 nt, Artificial Sequence
  Synthetic
uugagaccuucgucugcgaggc

SEQ ID NO: 112277 - RNA, 23 nt, Artificial Sequence
  Synthetic
auugagaccuucgucugcgaggc

SEQ ID NO: 112278 - RNA, 24 nt, Artificial Sequence
  Synthetic
gauugagaccuucgucugcgaggc

SEQ ID NO: 112279 - RNA, 18 nt, Artificial Sequence
  Synthetic
cugccgauugguggaggc

SEQ ID NO: 112280 - RNA, 19 nt, Artificial Sequence
  Synthetic
acugccgauugguggaggc

SEQ ID NO: 112281 - RNA, 20 nt, Artificial Sequence
  Synthetic
gacugccgauugguggaggc

SEQ ID NO: 112282 - RNA, 21 nt, Artificial Sequence
  Synthetic
ugacugccgauugguggaggc

SEQ ID NO: 112283 - RNA, 22 nt, Artificial Sequence
  Synthetic
cugacugccgauugguggaggc

SEQ ID NO: 112284 - RNA, 23 nt, Artificial Sequence
  Synthetic
ccugacugccgauugguggaggc

SEQ ID NO: 112285 - RNA, 24 nt, Artificial Sequence
  Synthetic
uccugacugccgauugguggaggc

SEQ ID NO: 112286 - RNA, 18 nt, Artificial Sequence
  Synthetic
aaggcacagcuuggaggc

SEQ ID NO: 112287 - RNA, 19 nt, Artificial Sequence
  Synthetic
caaggcacagcuuggaggc

SEQ ID NO: 112288 - RNA, 20 nt, Artificial Sequence
  Synthetic
ccaaggcacagcuuggaggc

SEQ ID NO: 112289 - RNA, 21 nt, Artificial Sequence
  Synthetic
cccaaggcacagcuuggaggc

SEQ ID NO: 112290 - RNA, 22 nt, Artificial Sequence
  Synthetic
acccaaggcacagcuuggaggc

SEQ ID NO: 112291 - RNA, 23 nt, Artificial Sequence
  Synthetic
cacccaaggcacagcuuggaggc

SEQ ID NO: 112292 - RNA, 24 nt, Artificial Sequence
  Synthetic
ccacccaaggcacagcuuggaggc

SEQ ID NO: 112293 - RNA, 18 nt, Artificial Sequence
  Synthetic
gcgagcaaaacaagcggc

SEQ ID NO: 112294 - RNA, 19 nt, Artificial Sequence
  Synthetic
ugcgagcaaaacaagcggc

SEQ ID NO: 112295 - RNA, 20 nt, Artificial Sequence
  Synthetic
cugcgagcaaaacaagcggc

SEQ ID NO: 112296 - RNA, 21 nt, Artificial Sequence
  Synthetic
gcugcgagcaaaacaagcggc

SEQ ID NO: 112297 - RNA, 22 nt, Artificial Sequence
  Synthetic
  misc_feature (1)..(1): n is a, c, g, or u
ngcugcgagcaaaacaagcggc

SEQ ID NO: 112298 - RNA, 23 nt, Artificial Sequence
  Synthetic
  misc_feature (2)..(2): n is a, c, g, or u
cngcugcgagcaaaacaagcggc

SEQ ID NO: 112299 - RNA, 24 nt, Artificial Sequence
  Synthetic
  misc_feature (3)..(3): n is a, c, g, or u
ccngcugcgagcaaaacaagcggc

SEQ ID NO: 112300 - RNA, 18 nt, Artificial Sequence
  Synthetic
aaggccuuguaaguuggc

SEQ ID NO: 112301 - RNA, 19 nt, Artificial Sequence
  Synthetic
aaaggccuuguaaguuggc

SEQ ID NO: 112302 - RNA, 20 nt, Artificial Sequence
  Synthetic
gaaaggccuuguaaguuggc

SEQ ID NO: 112303 - RNA, 21 nt, Artificial Sequence
  Synthetic
agaaaggccuuguaaguuggc

SEQ ID NO: 112304 - RNA, 22 nt, Artificial Sequence
  Synthetic
uagaaaggccuuguaaguuggc

SEQ ID NO: 112305 - RNA, 23 nt, Artificial Sequence
  Synthetic
uuagaaaggccuuguaaguuggc

SEQ ID NO: 112306 - RNA, 24 nt, Artificial Sequence
  Synthetic
cuuagaaaggccuuguaaguuggc

SEQ ID NO: 112307 - RNA, 18 nt, Artificial Sequence
  Synthetic
auuugguggucuauaugc

SEQ ID NO: 112308 - RNA, 19 nt, Artificial Sequence
  Synthetic
cauuugguggucuauaugc

SEQ ID NO: 112309 - RNA, 20 nt, Artificial Sequence
  Synthetic
gcauuugguggucuauaugc

SEQ ID NO: 112310 - RNA, 21 nt, Artificial Sequence
  Synthetic
ggcauuugguggucuauaugc

SEQ ID NO: 112311 - RNA, 22 nt, Artificial Sequence
  Synthetic
gggcauuugguggucuauaugc

SEQ ID NO: 112312 - RNA, 23 nt, Artificial Sequence
  Synthetic
ggggcauuugguggucuauaugc

SEQ ID NO: 112313 - RNA, 24 nt, Artificial Sequence
  Synthetic
aggggcauuugguggucuauaugc

SEQ ID NO: 112314 - RNA, 18 nt, Artificial Sequence
  Synthetic
  misc_feature (13)..(13): n is a, c, g, or u
ggcggugucgagnagauc

SEQ ID NO: 112315 - RNA, 19 nt, Artificial Sequence
  Synthetic
  misc_feature (14)..(14): n is a, c, g, or u
aggcggugucgagnagauc

SEQ ID NO: 112316 - RNA, 20 nt, Artificial Sequence
  Synthetic
  misc_feature (15)..(15): n is a, c, g, or u
gaggcggugucgagnagauc

SEQ ID NO: 112317 - RNA, 21 nt, Artificial Sequence
  Synthetic
  misc_feature (16)..(16): n is a, c, g, or u
agaggcggugucgagnagauc

SEQ ID NO: 112318 - RNA, 22 nt, Artificial Sequence
  Synthetic
  misc_feature (17)..(17): n is a, c, g, or u
cagaggcggugucgagnagauc

SEQ ID NO: 112319 - RNA, 23 nt, Artificial Sequence
  Synthetic
  misc_feature (18)..(18): n is a, c, g, or u
gcagaggcggugucgagnagauc

SEQ ID NO: 112320 - RNA, 24 nt, Artificial Sequence
  Synthetic
  misc_feature (19)..(19): n is a, c, g, or u
agcagaggcggugucgagnagauc

SEQ ID NO: 112321 - RNA, 18 nt, Artificial Sequence
  Synthetic
  misc_feature (1)..(1): n is a, c, g, or u
ngcccugacucugggauc

SEQ ID NO: 112322 - RNA, 19 nt, Artificial Sequence
  Synthetic
  misc_feature (2)..(2): n is a, c, g, or u
gngcccugacucugggauc

SEQ ID NO: 112323 - RNA, 20 nt, Artificial Sequence
  Synthetic
  misc_feature (3)..(3): n is a, c, g, or u
agngcccugacucugggauc

SEQ ID NO: 112324 - RNA, 21 nt, Artificial Sequence
  Synthetic
  misc_feature (4)..(4): n is a, c, g, or u
cagngcccugacucugggauc

SEQ ID NO: 112325 - RNA, 22 nt, Artificial Sequence
  Synthetic
  misc_feature (5)..(5): n is a, c, g, or u
acagngcccugacucugggauc

SEQ ID NO: 112326 - RNA, 23 nt, Artificial Sequence
  Synthetic
  misc_feature (6)..(6): n is a, c, g, or u
uacagngcccugacucugggauc

SEQ ID NO: 112327 - RNA, 24 nt, Artificial Sequence
  Synthetic
  misc_feature (7)..(7): n is a, c, g, or u
guacagngcccugacucugggauc

SEQ ID NO: 112328 - RNA, 18 nt, Artificial Sequence
  Synthetic
  misc_feature (8)..(8): n is a, c, g, or u
ugcuggunguugaugauc

SEQ ID NO: 112329 - RNA, 19 nt, Artificial Sequence
  Synthetic
  misc_feature (9)..(9): n is a, c, g, or u
gugcuggunguugaugauc

SEQ ID NO: 112330 - RNA, 20 nt, Artificial Sequence
  Synthetic
  misc_feature (10)..(10): n is a, c, g, or u
ggugcuggunguugaugauc

SEQ ID NO: 112331 - RNA, 21 nt, Artificial Sequence
  Synthetic
  misc_feature (11)..(11): n is a, c, g, or u
cggugcuggunguugaugauc

SEQ ID NO: 112332 - RNA, 22 nt, Artificial Sequence
  Synthetic
  misc_feature (12)..(12): n is a, c, g, or u
ccggugcuggunguugaugauc

SEQ ID NO: 112333 - RNA, 23 nt, Artificial Sequence
  Synthetic
  misc_feature (13)..(13): n is a, c, g, or u
uccggugcuggunguugaugauc

SEQ ID NO: 112334 - RNA, 24 nt, Artificial Sequence
  Synthetic
  misc_feature (14)..(14): n is a, c, g, or u
guccggugcuggunguugaugauc

SEQ ID NO: 112335 - RNA, 18 nt, Artificial Sequence
  Synthetic
caacauaccuugauaguc

SEQ ID NO: 112336 - RNA, 19 nt, Artificial Sequence
  Synthetic
gcaacauaccuugauaguc

SEQ ID NO: 112337 - RNA, 20 nt, Artificial Sequence
  Synthetic
ggcaacauaccuugauaguc

SEQ ID NO: 112338 - RNA, 21 nt, Artificial Sequence
  Synthetic
gggcaacauaccuugauaguc

SEQ ID NO: 112339 - RNA, 22 nt, Artificial Sequence
  Synthetic
cgggcaacauaccuugauaguc

SEQ ID NO: 112340 - RNA, 23 nt, Artificial Sequence
  Synthetic
acgggcaacauaccuugauaguc

SEQ ID NO: 112341 - RNA, 24 nt, Artificial Sequence
  Synthetic
aacgggcaacauaccuugauaguc

SEQ ID NO: 112342 - RNA, 18 nt, Artificial Sequence
  Synthetic
  misc_feature (14)..(15): n is a, c, g, or u
uguaaauaaugucnnguc

SEQ ID NO: 112343 - RNA, 19 nt, Artificial Sequence
  Synthetic
  misc_feature (1)..(1): n is a, c, g, or u
  misc_feature (15)..(16): n is a, c, g, or u
nuguaaauaaugucnnguc

SEQ ID NO: 112344 - RNA, 20 nt, Artificial Sequence
  Synthetic
  misc_feature (2)..(2): n is a, c, g, or u
  misc_feature (16)..(17): n is a, c, g, or u
unuguaaauaaugucnnguc

SEQ ID NO: 112345 - RNA, 21 nt, Artificial Sequence
  Synthetic
  misc_feature (3)..(3): n is a, c, g, or u
  misc_feature (17)..(18): n is a, c, g, or u
gunuguaaauaaugucnnguc

SEQ ID NO: 112346 - RNA, 22 nt, Artificial Sequence
  Synthetic
  misc_feature (4)..(4): n is a, c, g, or u
  misc_feature (18)..(19): n is a, c, g, or u
agunuguaaauaaugucnnguc

SEQ ID NO: 112347 - RNA, 23 nt, Artificial Sequence
  Synthetic
  misc_feature (5)..(5): n is a, c, g, or u
  misc_feature (19)..(20): n is a, c, g, or u
gagunuguaaauaaugucnnguc

SEQ ID NO: 112348 - RNA, 24 nt, Artificial Sequence
  Synthetic
  misc_feature (6)..(6): n is a, c, g, or u
  misc_feature (20)..(21): n is a, c, g, or u
agagunuguaaauaaugucnnguc

SEQ ID NO: 112349 - RNA, 18 nt, Artificial Sequence
  Synthetic
cuccugcaaaugaauguc

SEQ ID NO: 112350 - RNA, 19 nt, Artificial Sequence
  Synthetic
ccuccugcaaaugaauguc

SEQ ID NO: 112351 - RNA, 20 nt, Artificial Sequence
  Synthetic
uccuccugcaaaugaauguc

SEQ ID NO: 112352 - RNA, 21 nt, Artificial Sequence
  Synthetic
guccuccugcaaaugaauguc

SEQ ID NO: 112353 - RNA, 22 nt, Artificial Sequence
  Synthetic
uguccuccugcaaaugaauguc

SEQ ID NO: 112354 - RNA, 23 nt, Artificial Sequence
  Synthetic
auguccuccugcaaaugaauguc

SEQ ID NO: 112355 - RNA, 24 nt, Artificial Sequence
  Synthetic
aauguccuccugcaaaugaauguc

SEQ ID NO: 112356 - RNA, 18 nt, Artificial Sequence
  Synthetic
auacuaacauugagauuc

SEQ ID NO: 112357 - RNA, 19 nt, Artificial Sequence
  Synthetic
aauacuaacauugagauuc

SEQ ID NO: 112358 - RNA, 20 nt, Artificial Sequence
  Synthetic
gaauacuaacauugagauuc

SEQ ID NO: 112359 - RNA, 21 nt, Artificial Sequence
  Synthetic
ggaauacuaacauugagauuc

SEQ ID NO: 112360 - RNA, 22 nt, Artificial Sequence
  Synthetic
aggaauacuaacauugagauuc

SEQ ID NO: 112361 - RNA, 23 nt, Artificial Sequence
  Synthetic
aaggaauacuaacauugagauuc

SEQ ID NO: 112362 - RNA, 24 nt, Artificial Sequence
  Synthetic
caaggaauacuaacauugagauuc

SEQ ID NO: 112363 - RNA, 18 nt, Artificial Sequence
  Synthetic
  misc_feature (7)..(7): n is a, c, g, or u
aaaaganaccaaauauuc

SEQ ID NO: 112364 - RNA, 19 nt, Artificial Sequence
  Synthetic
  misc_feature (8)..(8): n is a, c, g, or u
caaaaganaccaaauauuc

SEQ ID NO: 112365 - RNA, 20 nt, Artificial Sequence
  Synthetic
  misc_feature (9)..(9): n is a, c, g, or u
ccaaaaganaccaaauauuc

SEQ ID NO: 112366 - RNA, 21 nt, Artificial Sequence
  Synthetic
  misc_feature (10)..(10): n is a, c, g, or u
uccaaaaganaccaaauauuc

SEQ ID NO: 112367 - RNA, 22 nt, Artificial Sequence
  Synthetic
  misc_feature (11)..(11): n is a, c, g, or u
cuccaaaaganaccaaauauuc

SEQ ID NO: 112368 - RNA, 23 nt, Artificial Sequence
  Synthetic
  misc_feature (12)..(12): n is a, c, g, or u
acuccaaaaganaccaaauauuc

SEQ ID NO: 112369 - RNA, 24 nt, Artificial Sequence
  Synthetic
  misc_feature (13)..(13): n is a, c, g, or u
cacuccaaaaganaccaaauauuc

SEQ ID NO: 112370 - RNA, 18 nt, Artificial Sequence
  Synthetic
gcgagggaguucuucuuc

SEQ ID NO: 112371 - RNA, 19 nt, Artificial Sequence
  Synthetic
ggcgagggaguucuucuuc

SEQ ID NO: 112372 - RNA, 20 nt, Artificial Sequence
  Synthetic
aggcgagggaguucuucuuc

SEQ ID NO: 112373 - RNA, 21 nt, Artificial Sequence
  Synthetic
gaggcgagggaguucuucuuc

SEQ ID NO: 112374 - RNA, 22 nt, Artificial Sequence
  Synthetic
cgaggcgagggaguucuucuuc

SEQ ID NO: 112375 - RNA, 23 nt, Artificial Sequence
  Synthetic
gcgaggcgagggaguucuucuuc

SEQ ID NO: 112376 - RNA, 24 nt, Artificial Sequence
  Synthetic
ugcgaggcgagggaguucuucuuc

SEQ ID NO: 112377 - RNA, 18 nt, Artificial Sequence
  Synthetic
gugaggugaacaauguuc

SEQ ID NO: 112378 - RNA, 19 nt, Artificial Sequence
  Synthetic
ggugaggugaacaauguuc

SEQ ID NO: 112379 - RNA, 20 nt, Artificial Sequence
  Synthetic
uggugaggugaacaauguuc

SEQ ID NO: 112380 - RNA, 21 nt, Artificial Sequence
  Synthetic
auggugaggugaacaauguuc

SEQ ID NO: 112381 - RNA, 22 nt, Artificial Sequence
  Synthetic
uauggugaggugaacaauguuc

SEQ ID NO: 112382 - RNA, 23 nt, Artificial Sequence
  Synthetic
guauggugaggugaacaauguuc

SEQ ID NO: 112383 - RNA, 24 nt, Artificial Sequence
  Synthetic
cguauggugaggugaacaauguuc

SEQ ID NO: 112384 - RNA, 18 nt, Artificial Sequence
  Synthetic
gagcagggcucacuguuc

SEQ ID NO: 112385 - RNA, 19 nt, Artificial Sequence
  Synthetic
ugagcagggcucacuguuc

SEQ ID NO: 112386 - RNA, 20 nt, Artificial Sequence
  Synthetic
cugagcagggcucacuguuc

SEQ ID NO: 112387 - RNA, 21 nt, Artificial Sequence
  Synthetic
ucugagcagggcucacuguuc

SEQ ID NO: 112388 - RNA, 22 nt, Artificial Sequence
  Synthetic
uucugagcagggcucacuguuc

SEQ ID NO: 112389 - RNA, 23 nt, Artificial Sequence
  Synthetic
auucugagcagggcucacuguuc

SEQ ID NO: 112390 - RNA, 24 nt, Artificial Sequence
  Synthetic
uauucugagcagggcucacuguuc

SEQ ID NO: 112391 - RNA, 18 nt, Artificial Sequence
  Synthetic
ucuaacaacaguaguuuc

SEQ ID NO: 112392 - RNA, 19 nt, Artificial Sequence
  Synthetic
gucuaacaacaguaguuuc

SEQ ID NO: 112393 - RNA, 20 nt, Artificial Sequence
  Synthetic
cgucuaacaacaguaguuuc

SEQ ID NO: 112394 - RNA, 21 nt, Artificial Sequence
  Synthetic
ucgucuaacaacaguaguuuc

SEQ ID NO: 112395 - RNA, 22 nt, Artificial Sequence
  Synthetic
  misc_feature (1)..(1): n is a, c, g, or u
nucgucuaacaacaguaguuuc

SEQ ID NO: 112396 - RNA, 23 nt, Artificial Sequence
  Synthetic
  misc_feature (2)..(2): n is a, c, g, or u
cnucgucuaacaacaguaguuuc

SEQ ID NO: 112397 - RNA, 24 nt, Artificial Sequence
  Synthetic
  misc_feature (3)..(3): n is a, c, g, or u
ucnucgucuaacaacaguaguuuc

SEQ ID NO: 112398 - RNA, 18 nt, Artificial Sequence
  Synthetic
aaugaaugucaggaaaag

SEQ ID NO: 112399 - RNA, 19 nt, Artificial Sequence
  Synthetic
aaaugaaugucaggaaaag

SEQ ID NO: 112400 - RNA, 20 nt, Artificial Sequence
  Synthetic
caaaugaaugucaggaaaag

SEQ ID NO: 112401 - RNA, 21 nt, Artificial Sequence
  Synthetic
gcaaaugaaugucaggaaaag

SEQ ID NO: 112402 - RNA, 22 nt, Artificial Sequence
  Synthetic
ugcaaaugaaugucaggaaaag

SEQ ID NO: 112403 - RNA, 23 nt, Artificial Sequence
  Synthetic
cugcaaaugaaugucaggaaaag

SEQ ID NO: 112404 - RNA, 24 nt, Artificial Sequence
  Synthetic
ccugcaaaugaaugucaggaaaag

SEQ ID NO: 112405 - RNA, 18 nt, Artificial Sequence
  Synthetic
agaagaaccaacaagaag

SEQ ID NO: 112406 - RNA, 19 nt, Artificial Sequence
  Synthetic
cagaagaaccaacaagaag

SEQ ID NO: 112407 - RNA, 20 nt, Artificial Sequence
  Synthetic
ccagaagaaccaacaagaag

SEQ ID NO: 112408 - RNA, 21 nt, Artificial Sequence
  Synthetic
uccagaagaaccaacaagaag

SEQ ID NO: 112409 - RNA, 22 nt, Artificial Sequence
  Synthetic
guccagaagaaccaacaagaag

SEQ ID NO: 112410 - RNA, 23 nt, Artificial Sequence
  Synthetic
aguccagaagaaccaacaagaag

SEQ ID NO: 112411 - RNA, 24 nt, Artificial Sequence
  Synthetic
uaguccagaagaaccaacaagaag

SEQ ID NO: 112412 - RNA, 18 nt, Artificial Sequence
  Synthetic
gcuuggaggcuugaacag

SEQ ID NO: 112413 - RNA, 19 nt, Artificial Sequence
  Synthetic
agcuuggaggcuugaacag

SEQ ID NO: 112414 - RNA, 20 nt, Artificial Sequence
  Synthetic
cagcuuggaggcuugaacag

SEQ ID NO: 112415 - RNA, 21 nt, Artificial Sequence
  Synthetic
acagcuuggaggcuugaacag

SEQ ID NO: 112416 - RNA, 22 nt, Artificial Sequence
  Synthetic
cacagcuuggaggcuugaacag

SEQ ID NO: 112417 - RNA, 23 nt, Artificial Sequence
  Synthetic
gcacagcuuggaggcuugaacag

SEQ ID NO: 112418 - RNA, 24 nt, Artificial Sequence
  Synthetic
ggcacagcuuggaggcuugaacag

SEQ ID NO: 112419 - RNA, 18 nt, Artificial Sequence
  Synthetic
  misc_feature (2)..(2): n is a, c, g, or u
gnagaugagaaggcacag

SEQ ID NO: 112420 - RNA, 19 nt, Artificial Sequence
  Synthetic
  misc_feature (3)..(3): n is a, c, g, or u
ggnagaugagaaggcacag

SEQ ID NO: 112421 - RNA, 20 nt, Artificial Sequence
  Synthetic
  misc_feature (4)..(4): n is a, c, g, or u
cggnagaugagaaggcacag

SEQ ID NO: 112422 - RNA, 21 nt, Artificial Sequence
  Synthetic
  misc_feature (5)..(5): n is a, c, g, or u
ccggnagaugagaaggcacag

SEQ ID NO: 112423 - RNA, 22 nt, Artificial Sequence
  Synthetic
  misc_feature (6)..(6): n is a, c, g, or u
uccggnagaugagaaggcacag

SEQ ID NO: 112424 - RNA, 23 nt, Artificial Sequence
  Synthetic
  misc_feature (7)..(7): n is a, c, g, or u
guccggnagaugagaaggcacag

SEQ ID NO: 112425 - RNA, 24 nt, Artificial Sequence
  Synthetic
  misc_feature (8)..(8): n is a, c, g, or u
gguccggnagaugagaaggcacag

SEQ ID NO: 112426 - RNA, 18 nt, Artificial Sequence
  Synthetic
uaacugaaagccagacag

SEQ ID NO: 112427 - RNA, 19 nt, Artificial Sequence
  Synthetic
auaacugaaagccagacag

SEQ ID NO: 112428 - RNA, 20 nt, Artificial Sequence
  Synthetic
uauaacugaaagccagacag

SEQ ID NO: 112429 - RNA, 21 nt, Artificial Sequence
  Synthetic
auauaacugaaagccagacag

SEQ ID NO: 112430 - RNA, 22 nt, Artificial Sequence
  Synthetic
cauauaacugaaagccagacag

SEQ ID NO: 112431 - RNA, 23 nt, Artificial Sequence
  Synthetic
ccauauaacugaaagccagacag

SEQ ID NO: 112432 - RNA, 24 nt, Artificial Sequence
  Synthetic
uccauauaacugaaagccagacag

SEQ ID NO: 112433 - RNA, 18 nt, Artificial Sequence
  Synthetic
uggccaagccccaaccag

SEQ ID NO: 112434 - RNA, 19 nt, Artificial Sequence
  Synthetic
auggccaagccccaaccag

SEQ ID NO: 112435 - RNA, 20 nt, Artificial Sequence
  Synthetic
  misc_feature (1)..(1): n is a, c, g, or u
nauggccaagccccaaccag

SEQ ID NO: 112436 - RNA, 21 nt, Artificial Sequence
  Synthetic
  misc_feature (2)..(2): n is a, c, g, or u
cnauggccaagccccaaccag

SEQ ID NO: 112437 - RNA, 22 nt, Artificial Sequence
  Synthetic
  misc_feature (3)..(3): n is a, c, g, or u
ccnauggccaagccccaaccag

SEQ ID NO: 112438 - RNA, 23 nt, Artificial Sequence
  Synthetic
  misc_feature (4)..(4): n is a, c, g, or u
gccnauggccaagccccaaccag

SEQ ID NO: 112439 - RNA, 24 nt, Artificial Sequence
  Synthetic
  misc_feature (5)..(5): n is a, c, g, or u
ggccnauggccaagccccaaccag

SEQ ID NO: 112440 - RNA, 18 nt, Artificial Sequence
  Synthetic
cugaacuggagccaccag

SEQ ID NO: 112441 - RNA, 19 nt, Artificial Sequence
  Synthetic
ccugaacuggagccaccag

SEQ ID NO: 112442 - RNA, 20 nt, Artificial Sequence
  Synthetic
uccugaacuggagccaccag

SEQ ID NO: 112443 - RNA, 21 nt, Artificial Sequence
  Synthetic
uuccugaacuggagccaccag

SEQ ID NO: 112444 - RNA, 22 nt, Artificial Sequence
  Synthetic
guuccugaacuggagccaccag

SEQ ID NO: 112445 - RNA, 23 nt, Artificial Sequence
  Synthetic
uguuccugaacuggagccaccag

SEQ ID NO: 112446 - RNA, 24 nt, Artificial Sequence
  Synthetic
cuguuccugaacuggagccaccag

SEQ ID NO: 112447 - RNA, 18 nt, Artificial Sequence
  Synthetic
cauaccuugauaguccag

SEQ ID NO: 112448 - RNA, 19 nt, Artificial Sequence
  Synthetic
acauaccuugauaguccag

SEQ ID NO: 112449 - RNA, 20 nt, Artificial Sequence
  Synthetic
aacauaccuugauaguccag

SEQ ID NO: 112450 - RNA, 21 nt, Artificial Sequence
  Synthetic
caacauaccuugauaguccag

SEQ ID NO: 112451 - RNA, 22 nt, Artificial Sequence
  Synthetic
gcaacauaccuugauaguccag

SEQ ID NO: 112452 - RNA, 23 nt, Artificial Sequence
  Synthetic
ggcaacauaccuugauaguccag

SEQ ID NO: 112453 - RNA, 24 nt, Artificial Sequence
  Synthetic
gggcaacauaccuugauaguccag

SEQ ID NO: 112454 - RNA, 18 nt, Artificial Sequence
  Synthetic
gccgauugguggaggcag

SEQ ID NO: 112455 - RNA, 19 nt, Artificial Sequence
  Synthetic
ugccgauugguggaggcag

SEQ ID NO: 112456 - RNA, 20 nt, Artificial Sequence
  Synthetic
cugccgauugguggaggcag

SEQ ID NO: 112457 - RNA, 21 nt, Artificial Sequence
  Synthetic
acugccgauugguggaggcag

SEQ ID NO: 112458 - RNA, 22 nt, Artificial Sequence
  Synthetic
gacugccgauugguggaggcag

SEQ ID NO: 112459 - RNA, 23 nt, Artificial Sequence
  Synthetic
ugacugccgauugguggaggcag

SEQ ID NO: 112460 - RNA, 24 nt, Artificial Sequence
  Synthetic
cugacugccgauugguggaggcag

SEQ ID NO: 112461 - RNA, 18 nt, Artificial Sequence
  Synthetic
cgcaguauggaucggcag

SEQ ID NO: 112462 - RNA, 19 nt, Artificial Sequence
  Synthetic
ccgcaguauggaucggcag

SEQ ID NO: 112463 - RNA, 20 nt, Artificial Sequence
  Synthetic
uccgcaguauggaucggcag

SEQ ID NO: 112464 - RNA, 21 nt, Artificial Sequence
  Synthetic
uuccgcaguauggaucggcag

SEQ ID NO: 112465 - RNA, 22 nt, Artificial Sequence
  Synthetic
guuccgcaguauggaucggcag

SEQ ID NO: 112466 - RNA, 23 nt, Artificial Sequence
  Synthetic
aguuccgcaguauggaucggcag

SEQ ID NO: 112467 - RNA, 24 nt, Artificial Sequence
  Synthetic
gaguuccgcaguauggaucggcag

SEQ ID NO: 112468 - RNA, 18 nt, Artificial Sequence
  Synthetic
cauagcagcaggaugcag

SEQ ID NO: 112469 - RNA, 19 nt, Artificial Sequence
  Synthetic
gcauagcagcaggaugcag

SEQ ID NO: 112470 - RNA, 20 nt, Artificial Sequence
  Synthetic
ggcauagcagcaggaugcag

SEQ ID NO: 112471 - RNA, 21 nt, Artificial Sequence
  Synthetic
aggcauagcagcaggaugcag

SEQ ID NO: 112472 - RNA, 22 nt, Artificial Sequence
  Synthetic
gaggcauagcagcaggaugcag

SEQ ID NO: 112473 - RNA, 23 nt, Artificial Sequence
  Synthetic
ugaggcauagcagcaggaugcag

SEQ ID NO: 112474 - RNA, 24 nt, Artificial Sequence
  Synthetic
augaggcauagcagcaggaugcag

SEQ ID NO: 112475 - RNA, 18 nt, Artificial Sequence
  Synthetic
uugguggucuauaugcag

SEQ ID NO: 112476 - RNA, 19 nt, Artificial Sequence
  Synthetic
uuugguggucuauaugcag

SEQ ID NO: 112477 - RNA, 20 nt, Artificial Sequence
  Synthetic
auuugguggucuauaugcag

SEQ ID NO: 112478 - RNA, 21 nt, Artificial Sequence
  Synthetic
cauuugguggucuauaugcag

SEQ ID NO: 112479 - RNA, 22 nt, Artificial Sequence
  Synthetic
gcauuugguggucuauaugcag

SEQ ID NO: 112480 - RNA, 23 nt, Artificial Sequence
  Synthetic
ggcauuugguggucuauaugcag

SEQ ID NO: 112481 - RNA, 24 nt, Artificial Sequence
  Synthetic
gggcauuugguggucuauaugcag

SEQ ID NO: 112482 - RNA, 18 nt, Artificial Sequence
  Synthetic
  misc_feature (14)..(15): n is a, c, g, or u
ggucggucgguacnncag

SEQ ID NO: 112483 - RNA, 19 nt, Artificial Sequence
  Synthetic
  misc_feature (15)..(16): n is a, c, g, or u
uggucggucgguacnncag

SEQ ID NO: 112484 - RNA, 20 nt, Artificial Sequence
  Synthetic
  misc_feature (16)..(17): n is a, c, g, or u
guggucggucgguacnncag

SEQ ID NO: 112485 - RNA, 21 nt, Artificial Sequence
  Synthetic
  misc_feature (17)..(18): n is a, c, g, or u
cguggucggucgguacnncag

SEQ ID NO: 112486 - RNA, 22 nt, Artificial Sequence
  Synthetic
  misc_feature (18)..(19): n is a, c, g, or u
ccguggucggucgguacnncag

SEQ ID NO: 112487 - RNA, 23 nt, Artificial Sequence
  Synthetic
  misc_feature (19)..(20): n is a, c, g, or u
cccguggucggucgguacnncag

SEQ ID NO: 112488 - RNA, 24 nt, Artificial Sequence
  Synthetic
  misc_feature (20)..(21): n is a, c, g, or u
ccccguggucggucgguacnncag

SEQ ID NO: 112489 - RNA, 18 nt, Artificial Sequence
  Synthetic
aggccucccgauacagag

SEQ ID NO: 112490 - RNA, 19 nt, Artificial Sequence
  Synthetic
aaggccucccgauacagag

SEQ ID NO: 112491 - RNA, 20 nt, Artificial Sequence
  Synthetic
uaaggccucccgauacagag

SEQ ID NO: 112492 - RNA, 21 nt, Artificial Sequence
  Synthetic
cuaaggccucccgauacagag

SEQ ID NO: 112493 - RNA, 22 nt, Artificial Sequence
  Synthetic
ucuaaggccucccgauacagag

SEQ ID NO: 112494 - RNA, 23 nt, Artificial Sequence
  Synthetic
cucuaaggccucccgauacagag

SEQ ID NO: 112495 - RNA, 24 nt, Artificial Sequence
  Synthetic
acucuaaggccucccgauacagag

SEQ ID NO: 112496 - RNA, 18 nt, Artificial Sequence
  Synthetic
  misc_feature (1)..(1): n is a, c, g, or u
ngagaugauuaggcagag

SEQ ID NO: 112497 - RNA, 19 nt, Artificial Sequence
  Synthetic
  misc_feature (2)..(2): n is a, c, g, or u
angagaugauuaggcagag

SEQ ID NO: 112498 - RNA, 20 nt, Artificial Sequence
  Synthetic
  misc_feature (3)..(3): n is a, c, g, or u
cangagaugauuaggcagag

SEQ ID NO: 112499 - RNA, 21 nt, Artificial Sequence
  Synthetic
  misc_feature (4)..(4): n is a, c, g, or u
acangagaugauuaggcagag

SEQ ID NO: 112500 - RNA, 22 nt, Artificial Sequence
  Synthetic
  misc_feature (5)..(5): n is a, c, g, or u
aacangagaugauuaggcagag

SEQ ID NO: 112501 - RNA, 23 nt, Artificial Sequence
  Synthetic
  misc_feature (6)..(6): n is a, c, g, or u
gaacangagaugauuaggcagag

SEQ ID NO: 112502 - RNA, 24 nt, Artificial Sequence
  Synthetic
  misc_feature (7)..(7): n is a, c, g, or u
ugaacangagaugauuaggcagag

SEQ ID NO: 112503 - RNA, 18 nt, Artificial Sequence
  Synthetic
uccaugcgacgugcagag

SEQ ID NO: 112504 - RNA, 19 nt, Artificial Sequence
  Synthetic
cuccaugcgacgugcagag

SEQ ID NO: 112505 - RNA, 20 nt, Artificial Sequence
  Synthetic
ucuccaugcgacgugcagag

SEQ ID NO: 112506 - RNA, 21 nt, Artificial Sequence
  Synthetic
gucuccaugcgacgugcagag

SEQ ID NO: 112507 - RNA, 22 nt, Artificial Sequence
  Synthetic
ggucuccaugcgacgugcagag

SEQ ID NO: 112508 - RNA, 23 nt, Artificial Sequence
  Synthetic
uggucuccaugcgacgugcagag

SEQ ID NO: 112509 - RNA, 24 nt, Artificial Sequence
  Synthetic
guggucuccaugcgacgugcagag

SEQ ID NO: 112510 - RNA, 18 nt, Artificial Sequence
  Synthetic
  misc_feature (11)..(11): n is a, c, g, or u
gaugagugucncuuagag

SEQ ID NO: 112511 - RNA, 19 nt, Artificial Sequence
  Synthetic
  misc_feature (12)..(12): n is a, c, g, or u
ggaugagugucncuuagag

SEQ ID NO: 112512 - RNA, 20 nt, Artificial Sequence
  Synthetic
  misc_feature (13)..(13): n is a, c, g, or u
aggaugagugucncuuagag

SEQ ID NO: 112513 - RNA, 21 nt, Artificial Sequence
  Synthetic
  misc_feature (14)..(14): n is a, c, g, or u
gaggaugagugucncuuagag

SEQ ID NO: 112514 - RNA, 22 nt, Artificial Sequence
  Synthetic
  misc_feature (15)..(15): n is a, c, g, or u
ugaggaugagugucncuuagag

SEQ ID NO: 112515 - RNA, 23 nt, Artificial Sequence
  Synthetic
  misc_feature (16)..(16): n is a, c, g, or u
cugaggaugagugucncuuagag

SEQ ID NO: 112516 - RNA, 24 nt, Artificial Sequence
  Synthetic
  misc_feature (17)..(17): n is a, c, g, or u
ccugaggaugagugucncuuagag

SEQ ID NO: 112517 - RNA, 18 nt, Artificial Sequence
  Synthetic
ccccgccuguaacacgag

SEQ ID NO: 112518 - RNA, 19 nt, Artificial Sequence
  Synthetic
accccgccuguaacacgag

SEQ ID NO: 112519 - RNA, 20 nt, Artificial Sequence
  Synthetic
aaccccgccuguaacacgag

SEQ ID NO: 112520 - RNA, 21 nt, Artificial Sequence
  Synthetic
aaaccccgccuguaacacgag

SEQ ID NO: 112521 - RNA, 22 nt, Artificial Sequence
  Synthetic
aaaaccccgccuguaacacgag

SEQ ID NO: 112522 - RNA, 23 nt, Artificial Sequence
  Synthetic
aaaaaccccgccuguaacacgag

SEQ ID NO: 112523 - RNA, 24 nt, Artificial Sequence
  Synthetic
gaaaaaccccgccuguaacacgag

SEQ ID NO: 112524 - RNA, 18 nt, Artificial Sequence
  Synthetic
gagaccuucgucugcgag

SEQ ID NO: 112525 - RNA, 19 nt, Artificial Sequence
  Synthetic
ugagaccuucgucugcgag

SEQ ID NO: 112526 - RNA, 20 nt, Artificial Sequence
  Synthetic
uugagaccuucgucugcgag

SEQ ID NO: 112527 - RNA, 21 nt, Artificial Sequence
  Synthetic
auugagaccuucgucugcgag

SEQ ID NO: 112528 - RNA, 22 nt, Artificial Sequence
  Synthetic
gauugagaccuucgucugcgag

SEQ ID NO: 112529 - RNA, 23 nt, Artificial Sequence
  Synthetic
cgauugagaccuucgucugcgag

SEQ ID NO: 112530 - RNA, 24 nt, Artificial Sequence
  Synthetic
gcgauugagaccuucgucugcgag

SEQ ID NO: 112531 - RNA, 18 nt, Artificial Sequence
  Synthetic
gauugguggaggcaggag

SEQ ID NO: 112532 - RNA, 19 nt, Artificial Sequence
  Synthetic
cgauugguggaggcaggag

SEQ ID NO: 112533 - RNA, 20 nt, Artificial Sequence
  Synthetic
ccgauugguggaggcaggag

SEQ ID NO: 112534 - RNA, 21 nt, Artificial Sequence
  Synthetic
gccgauugguggaggcaggag

SEQ ID NO: 112535 - RNA, 22 nt, Artificial Sequence
  Synthetic
ugccgauugguggaggcaggag

SEQ ID NO: 112536 - RNA, 23 nt, Artificial Sequence
  Synthetic
cugccgauugguggaggcaggag

SEQ ID NO: 112537 - RNA, 24 nt, Artificial Sequence
  Synthetic
acugccgauugguggaggcaggag

SEQ ID NO: 112538 - RNA, 18 nt, Artificial Sequence
  Synthetic
  misc_feature (1)..(1): n is a, c, g, or u
  misc_feature (6)..(6): n is a, c, g, or u
nagagncaguauucugag

SEQ ID NO: 112539 - RNA, 19 nt, Artificial Sequence
  Synthetic
  misc_feature (2)..(2): n is a, c, g, or u
  misc_feature (7)..(7): n is a, c, g, or u
gnagagncaguauucugag

SEQ ID NO: 112540 - RNA, 20 nt, Artificial Sequence
  Synthetic
  misc_feature (3)..(3): n is a, c, g, or u
  misc_feature (8)..(8): n is a, c, g, or u
ggnagagncaguauucugag

SEQ ID NO: 112541 - RNA, 21 nt, Artificial Sequence
  Synthetic
  misc_feature (4)..(4): n is a, c, g, or u
  misc_feature (9)..(9): n is a, c, g, or u
uggnagagncaguauucugag

SEQ ID NO: 112542 - RNA, 22 nt, Artificial Sequence
  Synthetic
  misc_feature (5)..(5): n is a, c, g, or u
  misc_feature (10)..(10): n is a, c, g, or u
auggnagagncaguauucugag

SEQ ID NO: 112543 - RNA, 23 nt, Artificial Sequence
  Synthetic
  misc_feature (6)..(6): n is a, c, g, or u
  misc_feature (11)..(11): n is a, c, g, or u
uauggnagagncaguauucugag

SEQ ID NO: 112544 - RNA, 24 nt, Artificial Sequence
  Synthetic
  misc_feature (7)..(7): n is a, c, g, or u
  misc_feature (12)..(12): n is a, c, g, or u
auauggnagagncaguauucugag

SEQ ID NO: 112545 - RNA, 18 nt, Artificial Sequence
  Synthetic
ugagugccguauggugag

SEQ ID NO: 112546 - RNA, 19 nt, Artificial Sequence
  Synthetic
cugagugccguauggugag

SEQ ID NO: 112547 - RNA, 20 nt, Artificial Sequence
  Synthetic
ccugagugccguauggugag

SEQ ID NO: 112548 - RNA, 21 nt, Artificial Sequence
  Synthetic
gccugagugccguauggugag

SEQ ID NO: 112549 - RNA, 22 nt, Artificial Sequence
  Synthetic
ugccugagugccguauggugag

SEQ ID NO: 112550 - RNA, 23 nt, Artificial Sequence
  Synthetic
uugccugagugccguauggugag

SEQ ID NO: 112551 - RNA, 24 nt, Artificial Sequence
  Synthetic
cuugccugagugccguauggugag

SEQ ID NO: 112552 - RNA, 18 nt, Artificial Sequence
  Synthetic
acauagagguuccuugag

SEQ ID NO: 112553 - RNA, 19 nt, Artificial Sequence
  Synthetic
aacauagagguuccuugag

SEQ ID NO: 112554 - RNA, 20 nt, Artificial Sequence
  Synthetic
aaacauagagguuccuugag

SEQ ID NO: 112555 - RNA, 21 nt, Artificial Sequence
  Synthetic
gaaacauagagguuccuugag

SEQ ID NO: 112556 - RNA, 22 nt, Artificial Sequence
  Synthetic
ggaaacauagagguuccuugag

SEQ ID NO: 112557 - RNA, 23 nt, Artificial Sequence
  Synthetic
gggaaacauagagguuccuugag

SEQ ID NO: 112558 - RNA, 24 nt, Artificial Sequence
  Synthetic
agggaaacauagagguuccuugag

SEQ ID NO: 112559 - RNA, 18 nt, Artificial Sequence
  Synthetic
  misc_feature (5)..(5): n is a, c, g, or u
  misc_feature (16)..(16): n is a, c, g, or u
cgagnagaucucgaanag

SEQ ID NO: 112560 - RNA, 19 nt, Artificial Sequence
  Synthetic
  misc_feature (6)..(6): n is a, c, g, or u
  misc_feature (17)..(17): n is a, c, g, or u
ucgagnagaucucgaanag

SEQ ID NO: 112561 - RNA, 20 nt, Artificial Sequence
  Synthetic
  misc_feature (7)..(7): n is a, c, g, or u
  misc_feature (18)..(18): n is a, c, g, or u
gucgagnagaucucgaanag

SEQ ID NO: 112562 - RNA, 21 nt, Artificial Sequence
  Synthetic
  misc_feature (8)..(8): n is a, c, g, or u
  misc_feature (19)..(19): n is a, c, g, or u
ugucgagnagaucucgaanag

SEQ ID NO: 112563 - RNA, 22 nt, Artificial Sequence
  Synthetic
  misc_feature (9)..(9): n is a, c, g, or u
  misc_feature (20)..(20): n is a, c, g, or u
gugucgagnagaucucgaanag

SEQ ID NO: 112564 - RNA, 23 nt, Artificial Sequence
  Synthetic
  misc_feature (10)..(10): n is a, c, g, or u
  misc_feature (21)..(21): n is a, c, g, or u
ggugucgagnagaucucgaanag

SEQ ID NO: 112565 - RNA, 24 nt, Artificial Sequence
  Synthetic
  misc_feature (11)..(11): n is a, c, g, or u
  misc_feature (22)..(22): n is a, c, g, or u
cggugucgagnagaucucgaanag

SEQ ID NO: 112566 - RNA, 18 nt, Artificial Sequence
  Synthetic
  misc_feature (16)..(16): n is a, c, g, or u
gugcacacgguccggnag

SEQ ID NO: 112567 - RNA, 19 nt, Artificial Sequence
  Synthetic
  misc_feature (17)..(17): n is a, c, g, or u
agugcacacgguccggnag

SEQ ID NO: 112568 - RNA, 20 nt, Artificial Sequence
  Synthetic
  misc_feature (18)..(18): n is a, c, g, or u
aagugcacacgguccggnag

SEQ ID NO: 112569 - RNA, 21 nt, Artificial Sequence
  Synthetic
  misc_feature (19)..(19): n is a, c, g, or u
gaagugcacacgguccggnag

SEQ ID NO: 112570 - RNA, 22 nt, Artificial Sequence
  Synthetic
  misc_feature (20)..(20): n is a, c, g, or u
cgaagugcacacgguccggnag

SEQ ID NO: 112571 - RNA, 23 nt, Artificial Sequence
  Synthetic
  misc_feature (21)..(21): n is a, c, g, or u
gcgaagugcacacgguccggnag

SEQ ID NO: 112572 - RNA, 24 nt, Artificial Sequence
  Synthetic
  misc_feature (22)..(22): n is a, c, g, or u
agcgaagugcacacgguccggnag

SEQ ID NO: 112573 - RNA, 18 nt, Artificial Sequence
  Synthetic
  misc_feature (9)..(10): n is a, c, g, or u
gauuaaagnnagguaccg

SEQ ID NO: 112574 - RNA, 19 nt, Artificial Sequence
  Synthetic
  misc_feature (10)..(11): n is a, c, g, or u
ggauuaaagnnagguaccg

SEQ ID NO: 112575 - RNA, 20 nt, Artificial Sequence
  Synthetic
  misc_feature (11)..(12): n is a, c, g, or u
aggauuaaagnnagguaccg

SEQ ID NO: 112576 - RNA, 21 nt, Artificial Sequence
  Synthetic
  misc_feature (1)..(1): n is a, c, g, or u
  misc_feature (12)..(13): n is a, c, g, or u
naggauuaaagnnagguaccg

SEQ ID NO: 112577 - RNA, 22 nt, Artificial Sequence
  Synthetic
  misc_feature (2)..(2): n is a, c, g, or u
  misc_feature (13)..(14): n is a, c, g, or u
unaggauuaaagnnagguaccg

SEQ ID NO: 112578 - RNA, 23 nt, Artificial Sequence
  Synthetic
  misc_feature (1)..(1): n is a, c, g, or u
  misc_feature (3)..(3): n is a, c, g, or u
  misc_feature (14)..(15): n is a, c, g, or u
nunaggauuaaagnnagguaccg

SEQ ID NO: 112579 - RNA, 24 nt, Artificial Sequence
  Synthetic
  misc_feature (2)..(2): n is a, c, g, or u
  misc_feature (4)..(4): n is a, c, g, or u
  misc_feature (15)..(16): n is a, c, g, or u
anunaggauuaaagnnagguaccg

SEQ ID NO: 112580 - RNA, 18 nt, Artificial Sequence
  Synthetic
ccgcgggauucagcgccg

SEQ ID NO: 112581 - RNA, 19 nt, Artificial Sequence
  Synthetic
uccgcgggauucagcgccg

SEQ ID NO: 112582 - RNA, 20 nt, Artificial Sequence
  Synthetic
guccgcgggauucagcgccg

SEQ ID NO: 112583 - RNA, 21 nt, Artificial Sequence
  Synthetic
cguccgcgggauucagcgccg

SEQ ID NO: 112584 - RNA, 22 nt, Artificial Sequence
  Synthetic
ucguccgcgggauucagcgccg

SEQ ID NO: 112585 - RNA, 23 nt, Artificial Sequence
  Synthetic
gucguccgcgggauucagcgccg

SEQ ID NO: 112586 - RNA, 24 nt, Artificial Sequence
  Synthetic
ggucguccgcgggauucagcgccg

SEQ ID NO: 112587 - RNA, 18 nt, Artificial Sequence
  Synthetic
accuucgucugcgaggcg

SEQ ID NO: 112588 - RNA, 19 nt, Artificial Sequence
  Synthetic
gaccuucgucugcgaggcg

SEQ ID NO: 112589 - RNA, 20 nt, Artificial Sequence
  Synthetic
agaccuucgucugcgaggcg

SEQ ID NO: 112590 - RNA, 21 nt, Artificial Sequence
  Synthetic
gagaccuucgucugcgaggcg

SEQ ID NO: 112591 - RNA, 22 nt, Artificial Sequence
  Synthetic
ugagaccuucgucugcgaggcg

SEQ ID NO: 112592 - RNA, 23 nt, Artificial Sequence
  Synthetic
uugagaccuucgucugcgaggcg

SEQ ID NO: 112593 - RNA, 24 nt, Artificial Sequence
  Synthetic
auugagaccuucgucugcgaggcg

SEQ ID NO: 112594 - RNA, 18 nt, Artificial Sequence
  Synthetic
  misc_feature (11)..(12): n is a, c, g, or u
  misc_feature (16)..(16): n is a, c, g, or u
cggucgguacnncagncg

SEQ ID NO: 112595 - RNA, 19 nt, Artificial Sequence
  Synthetic
  misc_feature (12)..(13): n is a, c, g, or u
  misc_feature (17)..(17): n is a, c, g, or u
ucggucgguacnncagncg

SEQ ID NO: 112596 - RNA, 20 nt, Artificial Sequence
  Synthetic
  misc_feature (13)..(14): n is a, c, g, or u
  misc_feature (18)..(18): n is a, c, g, or u
gucggucgguacnncagncg

SEQ ID NO: 112597 - RNA, 21 nt, Artificial Sequence
  Synthetic
  misc_feature (14)..(15): n is a, c, g, or u
  misc_feature (19)..(19): n is a, c, g, or u
ggucggucgguacnncagncg

SEQ ID NO: 112598 - RNA, 22 nt, Artificial Sequence
  Synthetic
  misc_feature (15)..(16): n is a, c, g, or u
  misc_feature (20)..(20): n is a, c, g, or u
uggucggucgguacnncagncg

SEQ ID NO: 112599 - RNA, 23 nt, Artificial Sequence
  Synthetic
  misc_feature (16)..(17): n is a, c, g, or u
  misc_feature (21)..(21): n is a, c, g, or u
guggucggucgguacnncagncg

SEQ ID NO: 112600 - RNA, 24 nt, Artificial Sequence
  Synthetic
  misc_feature (17)..(18): n is a, c, g, or u
  misc_feature (22)..(22): n is a, c, g, or u
cguggucggucgguacnncagncg

SEQ ID NO: 112601 - RNA, 18 nt, Artificial Sequence
  Synthetic
ccgauugguggaggcagg

SEQ ID NO: 112602 - RNA, 19 nt, Artificial Sequence
  Synthetic
gccgauugguggaggcagg

SEQ ID NO: 112603 - RNA, 20 nt, Artificial Sequence
  Synthetic
ugccgauugguggaggcagg

SEQ ID NO: 112604 - RNA, 21 nt, Artificial Sequence
  Synthetic
cugccgauugguggaggcagg

SEQ ID NO: 112605 - RNA, 22 nt, Artificial Sequence
  Synthetic
acugccgauugguggaggcagg

SEQ ID NO: 112606 - RNA, 23 nt, Artificial Sequence
  Synthetic
gacugccgauugguggaggcagg

SEQ ID NO: 112607 - RNA, 24 nt, Artificial Sequence
  Synthetic
ugacugccgauugguggaggcagg

SEQ ID NO: 112608 - RNA, 18 nt, Artificial Sequence
  Synthetic
  misc_feature (10)..(10): n is a, c, g, or u
augagugucncuuagagg

SEQ ID NO: 112609 - RNA, 19 nt, Artificial Sequence
  Synthetic
  misc_feature (11)..(11): n is a, c, g, or u
gaugagugucncuuagagg

SEQ ID NO: 112610 - RNA, 20 nt, Artificial Sequence
  Synthetic
  misc_feature (12)..(12): n is a, c, g, or u
ggaugagugucncuuagagg

SEQ ID NO: 112611 - RNA, 21 nt, Artificial Sequence
  Synthetic
  misc_feature (13)..(13): n is a, c, g, or u
aggaugagugucncuuagagg

SEQ ID NO: 112612 - RNA, 22 nt, Artificial Sequence
  Synthetic
  misc_feature (14)..(14): n is a, c, g, or u
gaggaugagugucncuuagagg

SEQ ID NO: 112613 - RNA, 23 nt, Artificial Sequence
  Synthetic
  misc_feature (15)..(15): n is a, c, g, or u
ugaggaugagugucncuuagagg

SEQ ID NO: 112614 - RNA, 24 nt, Artificial Sequence
  Synthetic
  misc_feature (16)..(16): n is a, c, g, or u
cugaggaugagugucncuuagagg

SEQ ID NO: 112615 - RNA, 18 nt, Artificial Sequence
  Synthetic
auugguggaggcaggagg

SEQ ID NO: 112616 - RNA, 19 nt, Artificial Sequence
  Synthetic
gauugguggaggcaggagg

SEQ ID NO: 112617 - RNA, 20 nt, Artificial Sequence
  Synthetic
cgauugguggaggcaggagg

SEQ ID NO: 112618 - RNA, 21 nt, Artificial Sequence
  Synthetic
ccgauugguggaggcaggagg

SEQ ID NO: 112619 - RNA, 22 nt, Artificial Sequence
  Synthetic
gccgauugguggaggcaggagg

SEQ ID NO: 112620 - RNA, 23 nt, Artificial Sequence
  Synthetic
ugccgauugguggaggcaggagg

SEQ ID NO: 112621 - RNA, 24 nt, Artificial Sequence
  Synthetic
cugccgauugguggaggcaggagg

SEQ ID NO: 112622 - RNA, 18 nt, Artificial Sequence
  Synthetic
acugccgauugguggagg

SEQ ID NO: 112623 - RNA, 19 nt, Artificial Sequence
  Synthetic
gacugccgauugguggagg

SEQ ID NO: 112624 - RNA, 20 nt, Artificial Sequence
  Synthetic
ugacugccgauugguggagg

SEQ ID NO: 112625 - RNA, 21 nt, Artificial Sequence
  Synthetic
cugacugccgauugguggagg

SEQ ID NO: 112626 - RNA, 22 nt, Artificial Sequence
  Synthetic
ccugacugccgauugguggagg

SEQ ID NO: 112627 - RNA, 23 nt, Artificial Sequence
  Synthetic
uccugacugccgauugguggagg

SEQ ID NO: 112628 - RNA, 24 nt, Artificial Sequence
  Synthetic
uuccugacugccgauugguggagg

SEQ ID NO: 112629 - RNA, 18 nt, Artificial Sequence
  Synthetic
  misc_feature (6)..(6): n is a, c, g, or u
gaacangagaugauuagg

SEQ ID NO: 112630 - RNA, 19 nt, Artificial Sequence
  Synthetic
  misc_feature (7)..(7): n is a, c, g, or u
ugaacangagaugauuagg

SEQ ID NO: 112631 - RNA, 20 nt, Artificial Sequence
  Synthetic
  misc_feature (8)..(8): n is a, c, g, or u
augaacangagaugauuagg

SEQ ID NO: 112632 - RNA, 21 nt, Artificial Sequence
  Synthetic
  misc_feature (9)..(9): n is a, c, g, or u
caugaacangagaugauuagg

SEQ ID NO: 112633 - RNA, 22 nt, Artificial Sequence
  Synthetic
  misc_feature (10)..(10): n is a, c, g, or u
acaugaacangagaugauuagg

SEQ ID NO: 112634 - RNA, 23 nt, Artificial Sequence
  Synthetic
  misc_feature (11)..(11): n is a, c, g, or u
gacaugaacangagaugauuagg

SEQ ID NO: 112635 - RNA, 24 nt, Artificial Sequence
  Synthetic
  misc_feature (12)..(12): n is a, c, g, or u
ggacaugaacangagaugauuagg

SEQ ID NO: 112636 - RNA, 18 nt, Artificial Sequence
  Synthetic
agccccaagcggccccgg

SEQ ID NO: 112637 - RNA, 19 nt, Artificial Sequence
  Synthetic
gagccccaagcggccccgg

SEQ ID NO: 112638 - RNA, 20 nt, Artificial Sequence
  Synthetic
agagccccaagcggccccgg

SEQ ID NO: 112639 - RNA, 21 nt, Artificial Sequence
  Synthetic
uagagccccaagcggccccgg

SEQ ID NO: 112640 - RNA, 22 nt, Artificial Sequence
  Synthetic
guagagccccaagcggccccgg

SEQ ID NO: 112641 - RNA, 23 nt, Artificial Sequence
  Synthetic
gguagagccccaagcggccccgg

SEQ ID NO: 112642 - RNA, 24 nt, Artificial Sequence
  Synthetic
cgguagagccccaagcggccccgg

SEQ ID NO: 112643 - RNA, 18 nt, Artificial Sequence
  Synthetic
  misc_feature (3)..(3): n is a, c, g, or u
agncggagaagcgggcgg

SEQ ID NO: 112644 - RNA, 19 nt, Artificial Sequence
  Synthetic
  misc_feature (4)..(4): n is a, c, g, or u
cagncggagaagcgggcgg

SEQ ID NO: 112645 - RNA, 20 nt, Artificial Sequence
  Synthetic
  misc_feature (1)..(1): n is a, c, g, or u
  misc_feature (5)..(5): n is a, c, g, or u
ncagncggagaagcgggcgg

SEQ ID NO: 112646 - RNA, 21 nt, Artificial Sequence
  Synthetic
  misc_feature (1)..(2): n is a, c, g, or u
  misc_feature (6)..(6): n is a, c, g, or u
nncagncggagaagcgggcgg

SEQ ID NO: 112647 - RNA, 22 nt, Artificial Sequence
  Synthetic
  misc_feature (2)..(3): n is a, c, g, or u
  misc_feature (7)..(7): n is a, c, g, or u
cnncagncggagaagcgggcgg

SEQ ID NO: 112648 - RNA, 23 nt, Artificial Sequence
  Synthetic
  misc_feature (3)..(4): n is a, c, g, or u
  misc_feature (8)..(8): n is a, c, g, or u
acnncagncggagaagcgggcgg

SEQ ID NO: 112649 - RNA, 24 nt, Artificial Sequence
  Synthetic
  misc_feature (4)..(5): n is a, c, g, or u
  misc_feature (9)..(9): n is a, c, g, or u
uacnncagncggagaagcgggcgg

SEQ ID NO: 112650 - RNA, 18 nt, Artificial Sequence
  Synthetic
uuccgcaguauggaucgg

SEQ ID NO: 112651 - RNA, 19 nt, Artificial Sequence
  Synthetic
guuccgcaguauggaucgg

SEQ ID NO: 112652 - RNA, 20 nt, Artificial Sequence
  Synthetic
aguuccgcaguauggaucgg

SEQ ID NO: 112653 - RNA, 21 nt, Artificial Sequence
  Synthetic
gaguuccgcaguauggaucgg

SEQ ID NO: 112654 - RNA, 22 nt, Artificial Sequence
  Synthetic
ggaguuccgcaguauggaucgg

SEQ ID NO: 112655 - RNA, 23 nt, Artificial Sequence
  Synthetic
aggaguuccgcaguauggaucgg

SEQ ID NO: 112656 - RNA, 24 nt, Artificial Sequence
  Synthetic
uaggaguuccgcaguauggaucgg

SEQ ID NO: 112657 - RNA, 18 nt, Artificial Sequence
  Synthetic
  misc_feature (15)..(15): n is a, c, g, or u
caguuguccuugugnggg

SEQ ID NO: 112658 - RNA, 19 nt, Artificial Sequence
  Synthetic
  misc_feature (16)..(16): n is a, c, g, or u
ccaguuguccuugugnggg

SEQ ID NO: 112659 - RNA, 20 nt, Artificial Sequence
  Synthetic
  misc_feature (17)..(17): n is a, c, g, or u
gccaguuguccuugugnggg

SEQ ID NO: 112660 - RNA, 21 nt, Artificial Sequence
  Synthetic
  misc_feature (18)..(18): n is a, c, g, or u
ggccaguuguccuugugnggg

SEQ ID NO: 112661 - RNA, 22 nt, Artificial Sequence
  Synthetic
  misc_feature (19)..(19): n is a, c, g, or u
cggccaguuguccuugugnggg

SEQ ID NO: 112662 - RNA, 23 nt, Artificial Sequence
  Synthetic
  misc_feature (20)..(20): n is a, c, g, or u
ccggccaguuguccuugugnggg

SEQ ID NO: 112663 - RNA, 24 nt, Artificial Sequence
  Synthetic
  misc_feature (21)..(21): n is a, c, g, or u
uccggccaguuguccuugugnggg

SEQ ID NO: 112664 - RNA, 18 nt, Artificial Sequence
  Synthetic
aaagcccaagaugauggg

SEQ ID NO: 112665 - RNA, 19 nt, Artificial Sequence
  Synthetic
gaaagcccaagaugauggg

SEQ ID NO: 112666 - RNA, 20 nt, Artificial Sequence
  Synthetic
cgaaagcccaagaugauggg

SEQ ID NO: 112667 - RNA, 21 nt, Artificial Sequence
  Synthetic
gcgaaagcccaagaugauggg

SEQ ID NO: 112668 - RNA, 22 nt, Artificial Sequence
  Synthetic
ugcgaaagcccaagaugauggg

SEQ ID NO: 112669 - RNA, 23 nt, Artificial Sequence
  Synthetic
uugcgaaagcccaagaugauggg

SEQ ID NO: 112670 - RNA, 24 nt, Artificial Sequence
  Synthetic
uuugcgaaagcccaagaugauggg

SEQ ID NO: 112671 - RNA, 18 nt, Artificial Sequence
  Synthetic
auaagauugacgauaugg

SEQ ID NO: 112672 - RNA, 19 nt, Artificial Sequence
  Synthetic
gauaagauugacgauaugg

SEQ ID NO: 112673 - RNA, 20 nt, Artificial Sequence
  Synthetic
cgauaagauugacgauaugg

SEQ ID NO: 112674 - RNA, 21 nt, Artificial Sequence
  Synthetic
ucgauaagauugacgauaugg

SEQ ID NO: 112675 - RNA, 22 nt, Artificial Sequence
  Synthetic
uucgauaagauugacgauaugg

SEQ ID NO: 112676 - RNA, 23 nt, Artificial Sequence
  Synthetic
cuucgauaagauugacgauaugg

SEQ ID NO: 112677 - RNA, 24 nt, Artificial Sequence
  Synthetic
ucuucgauaagauugacgauaugg

SEQ ID NO: 112678 - RNA, 18 nt, Artificial Sequence
  Synthetic
cugaaagccagacagugg

SEQ ID NO: 112679 - RNA, 19 nt, Artificial Sequence
  Synthetic
acugaaagccagacagugg

SEQ ID NO: 112680 - RNA, 20 nt, Artificial Sequence
  Synthetic
aacugaaagccagacagugg

SEQ ID NO: 112681 - RNA, 21 nt, Artificial Sequence
  Synthetic
uaacugaaagccagacagugg

SEQ ID NO: 112682 - RNA, 22 nt, Artificial Sequence
  Synthetic
auaacugaaagccagacagugg

SEQ ID NO: 112683 - RNA, 23 nt, Artificial Sequence
  Synthetic
uauaacugaaagccagacagugg

SEQ ID NO: 112684 - RNA, 24 nt, Artificial Sequence
  Synthetic
auauaacugaaagccagacagugg

SEQ ID NO: 112685 - RNA, 18 nt, Artificial Sequence
  Synthetic
  misc_feature (14)..(14): n is a, c, g, or u
gaguuugguggaangugg

SEQ ID NO: 112686 - RNA, 19 nt, Artificial Sequence
  Synthetic
  misc_feature (15)..(15): n is a, c, g, or u
agaguuugguggaangugg

SEQ ID NO: 112687 - RNA, 20 nt, Artificial Sequence
  Synthetic
  misc_feature (16)..(16): n is a, c, g, or u
aagaguuugguggaangugg

SEQ ID NO: 112688 - RNA, 21 nt, Artificial Sequence
  Synthetic
  misc_feature (17)..(17): n is a, c, g, or u
gaagaguuugguggaangugg

SEQ ID NO: 112689 - RNA, 22 nt, Artificial Sequence
  Synthetic
  misc_feature (18)..(18): n is a, c, g, or u
ugaagaguuugguggaangugg

SEQ ID NO: 112690 - RNA, 23 nt, Artificial Sequence
  Synthetic
  misc_feature (19)..(19): n is a, c, g, or u
uugaagaguuugguggaangugg

SEQ ID NO: 112691 - RNA, 24 nt, Artificial Sequence
  Synthetic
  misc_feature (20)..(20): n is a, c, g, or u
cuugaagaguuugguggaangugg

SEQ ID NO: 112692 - RNA, 18 nt, Artificial Sequence
  Synthetic
uuccugacugccgauugg

SEQ ID NO: 112693 - RNA, 19 nt, Artificial Sequence
  Synthetic
cuuccugacugccgauugg

SEQ ID NO: 112694 - RNA, 20 nt, Artificial Sequence
  Synthetic
ccuuccugacugccgauugg

SEQ ID NO: 112695 - RNA, 21 nt, Artificial Sequence
  Synthetic
gccuuccugacugccgauugg

SEQ ID NO: 112696 - RNA, 22 nt, Artificial Sequence
  Synthetic
ugccuuccugacugccgauugg

SEQ ID NO: 112697 - RNA, 23 nt, Artificial Sequence
  Synthetic
cugccuuccugacugccgauugg

SEQ ID NO: 112698 - RNA, 24 nt, Artificial Sequence
  Synthetic
gcugccuuccugacugccgauugg

SEQ ID NO: 112699 - RNA, 18 nt, Artificial Sequence
  Synthetic
ggaucuugaagaguuugg

SEQ ID NO: 112700 - RNA, 19 nt, Artificial Sequence
  Synthetic
gggaucuugaagaguuugg

SEQ ID NO: 112701 - RNA, 20 nt, Artificial Sequence
  Synthetic
ugggaucuugaagaguuugg

SEQ ID NO: 112702 - RNA, 21 nt, Artificial Sequence
  Synthetic
cugggaucuugaagaguuugg

SEQ ID NO: 112703 - RNA, 22 nt, Artificial Sequence
  Synthetic
ucugggaucuugaagaguuugg

SEQ ID NO: 112704 - RNA, 23 nt, Artificial Sequence
  Synthetic
cucugggaucuugaagaguuugg

SEQ ID NO: 112705 - RNA, 24 nt, Artificial Sequence
  Synthetic
acucugggaucuugaagaguuugg

SEQ ID NO: 112706 - RNA, 18 nt, Artificial Sequence
  Synthetic
guuuuguacagcaacaug

SEQ ID NO: 112707 - RNA, 19 nt, Artificial Sequence
  Synthetic
gguuuuguacagcaacaug

SEQ ID NO: 112708 - RNA, 20 nt, Artificial Sequence
  Synthetic
agguuuuguacagcaacaug

SEQ ID NO: 112709 - RNA, 21 nt, Artificial Sequence
  Synthetic
uagguuuuguacagcaacaug

SEQ ID NO: 112710 - RNA, 22 nt, Artificial Sequence
  Synthetic
guagguuuuguacagcaacaug

SEQ ID NO: 112711 - RNA, 23 nt, Artificial Sequence
  Synthetic
cguagguuuuguacagcaacaug

SEQ ID NO: 112712 - RNA, 24 nt, Artificial Sequence
  Synthetic
ccguagguuuuguacagcaacaug

SEQ ID NO: 112713 - RNA, 18 nt, Artificial Sequence
  Synthetic
ccccaacagucccccaug

SEQ ID NO: 112714 - RNA, 19 nt, Artificial Sequence
  Synthetic
accccaacagucccccaug

SEQ ID NO: 112715 - RNA, 20 nt, Artificial Sequence
  Synthetic
caccccaacagucccccaug

SEQ ID NO: 112716 - RNA, 21 nt, Artificial Sequence
  Synthetic
ccaccccaacagucccccaug

SEQ ID NO: 112717 - RNA, 22 nt, Artificial Sequence
  Synthetic
uccaccccaacagucccccaug

SEQ ID NO: 112718 - RNA, 23 nt, Artificial Sequence
  Synthetic
cuccaccccaacagucccccaug

SEQ ID NO: 112719 - RNA, 24 nt, Artificial Sequence
  Synthetic
gcuccaccccaacagucccccaug

SEQ ID NO: 112720 - RNA, 18 nt, Artificial Sequence
  Synthetic
uugcgaaagcccaagaug

SEQ ID NO: 112721 - RNA, 19 nt, Artificial Sequence
  Synthetic
uuugcgaaagcccaagaug

SEQ ID NO: 112722 - RNA, 20 nt, Artificial Sequence
  Synthetic
uuuugcgaaagcccaagaug

SEQ ID NO: 112723 - RNA, 21 nt, Artificial Sequence
  Synthetic
auuuugcgaaagcccaagaug

SEQ ID NO: 112724 - RNA, 22 nt, Artificial Sequence
  Synthetic
uauuuugcgaaagcccaagaug

SEQ ID NO: 112725 - RNA, 23 nt, Artificial Sequence
  Synthetic
guauuuugcgaaagcccaagaug

SEQ ID NO: 112726 - RNA, 24 nt, Artificial Sequence
  Synthetic
gguauuuugcgaaagcccaagaug

SEQ ID NO: 112727 - RNA, 18 nt, Artificial Sequence
  Synthetic
aggcauagcagcaggaug

SEQ ID NO: 112728 - RNA, 19 nt, Artificial Sequence
  Synthetic
gaggcauagcagcaggaug

SEQ ID NO: 112729 - RNA, 20 nt, Artificial Sequence
  Synthetic
ugaggcauagcagcaggaug

SEQ ID NO: 112730 - RNA, 21 nt, Artificial Sequence
  Synthetic
augaggcauagcagcaggaug

SEQ ID NO: 112731 - RNA, 22 nt, Artificial Sequence
  Synthetic
gaugaggcauagcagcaggaug

SEQ ID NO: 112732 - RNA, 23 nt, Artificial Sequence
  Synthetic
agaugaggcauagcagcaggaug

SEQ ID NO: 112733 - RNA, 24 nt, Artificial Sequence
  Synthetic
aagaugaggcauagcagcaggaug

SEQ ID NO: 112734 - RNA, 18 nt, Artificial Sequence
  Synthetic
cauuugguggucuauaug

SEQ ID NO: 112735 - RNA, 19 nt, Artificial Sequence
  Synthetic
gcauuugguggucuauaug

SEQ ID NO: 112736 - RNA, 20 nt, Artificial Sequence
  Synthetic
ggcauuugguggucuauaug

SEQ ID NO: 112737 - RNA, 21 nt, Artificial Sequence
  Synthetic
gggcauuugguggucuauaug

SEQ ID NO: 112738 - RNA, 22 nt, Artificial Sequence
  Synthetic
ggggcauuugguggucuauaug

SEQ ID NO: 112739 - RNA, 23 nt, Artificial Sequence
  Synthetic
aggggcauuugguggucuauaug

SEQ ID NO: 112740 - RNA, 24 nt, Artificial Sequence
  Synthetic
uaggggcauuugguggucuauaug

SEQ ID NO: 112741 - RNA, 18 nt, Artificial Sequence
  Synthetic
uugccugagugccguaug

SEQ ID NO: 112742 - RNA, 19 nt, Artificial Sequence
  Synthetic
cuugccugagugccguaug

SEQ ID NO: 112743 - RNA, 20 nt, Artificial Sequence
  Synthetic
gcuugccugagugccguaug

SEQ ID NO: 112744 - RNA, 21 nt, Artificial Sequence
  Synthetic
agcuugccugagugccguaug

SEQ ID NO: 112745 - RNA, 22 nt, Artificial Sequence
  Synthetic
uagcuugccugagugccguaug

SEQ ID NO: 112746 - RNA, 23 nt, Artificial Sequence
  Synthetic
auagcuugccugagugccguaug

SEQ ID NO: 112747 - RNA, 24 nt, Artificial Sequence
  Synthetic
aauagcuugccugagugccguaug

SEQ ID NO: 112748 - RNA, 18 nt, Artificial Sequence
  Synthetic
aaaaguugcauggugcug

SEQ ID NO: 112749 - RNA, 19 nt, Artificial Sequence
  Synthetic
aaaaaguugcauggugcug

SEQ ID NO: 112750 - RNA, 20 nt, Artificial Sequence
  Synthetic
gaaaaaguugcauggugcug

SEQ ID NO: 112751 - RNA, 21 nt, Artificial Sequence
  Synthetic
ugaaaaaguugcauggugcug

SEQ ID NO: 112752 - RNA, 22 nt, Artificial Sequence
  Synthetic
gugaaaaaguugcauggugcug

SEQ ID NO: 112753 - RNA, 23 nt, Artificial Sequence
  Synthetic
ggugaaaaaguugcauggugcug

SEQ ID NO: 112754 - RNA, 24 nt, Artificial Sequence
  Synthetic
aggugaaaaaguugcauggugcug

SEQ ID NO: 112755 - RNA, 18 nt, Artificial Sequence
  Synthetic
acugaaagccagacagug

SEQ ID NO: 112756 - RNA, 19 nt, Artificial Sequence
  Synthetic
aacugaaagccagacagug

SEQ ID NO: 112757 - RNA, 20 nt, Artificial Sequence
  Synthetic
uaacugaaagccagacagug

SEQ ID NO: 112758 - RNA, 21 nt, Artificial Sequence
  Synthetic
auaacugaaagccagacagug

SEQ ID NO: 112759 - RNA, 22 nt, Artificial Sequence
  Synthetic
uauaacugaaagccagacagug

SEQ ID NO: 112760 - RNA, 23 nt, Artificial Sequence
  Synthetic
auauaacugaaagccagacagug

SEQ ID NO: 112761 - RNA, 24 nt, Artificial Sequence
  Synthetic
cauauaacugaaagccagacagug

SEQ ID NO: 112762 - RNA, 18 nt, Artificial Sequence
  Synthetic
uggucuccaugcgacgug

SEQ ID NO: 112763 - RNA, 19 nt, Artificial Sequence
  Synthetic
guggucuccaugcgacgug

SEQ ID NO: 112764 - RNA, 20 nt, Artificial Sequence
  Synthetic
gguggucuccaugcgacgug

SEQ ID NO: 112765 - RNA, 21 nt, Artificial Sequence
  Synthetic
cgguggucuccaugcgacgug

SEQ ID NO: 112766 - RNA, 22 nt, Artificial Sequence
  Synthetic
acgguggucuccaugcgacgug

SEQ ID NO: 112767 - RNA, 23 nt, Artificial Sequence
  Synthetic
cacgguggucuccaugcgacgug

SEQ ID NO: 112768 - RNA, 24 nt, Artificial Sequence
  Synthetic
ucacgguggucuccaugcgacgug

SEQ ID NO: 112769 - RNA, 18 nt, Artificial Sequence
  Synthetic
uacagagcagaggcggug

SEQ ID NO: 112770 - RNA, 19 nt, Artificial Sequence
  Synthetic
auacagagcagaggcggug

SEQ ID NO: 112771 - RNA, 20 nt, Artificial Sequence
  Synthetic
gauacagagcagaggcggug

SEQ ID NO: 112772 - RNA, 21 nt, Artificial Sequence
  Synthetic
cgauacagagcagaggcggug

SEQ ID NO: 112773 - RNA, 22 nt, Artificial Sequence
  Synthetic
ccgauacagagcagaggcggug

SEQ ID NO: 112774 - RNA, 23 nt, Artificial Sequence
  Synthetic
cccgauacagagcagaggcggug

SEQ ID NO: 112775 - RNA, 24 nt, Artificial Sequence
  Synthetic
ucccgauacagagcagaggcggug

SEQ ID NO: 112776 - RNA, 18 nt, Artificial Sequence
  Synthetic
  misc_feature (15)..(15): n is a, c, g, or u
agaguuugguggaangug

SEQ ID NO: 112777 - RNA, 19 nt, Artificial Sequence
  Synthetic
  misc_feature (16)..(16): n is a, c, g, or u
aagaguuugguggaangug

SEQ ID NO: 112778 - RNA, 20 nt, Artificial Sequence
  Synthetic
  misc_feature (17)..(17): n is a, c, g, or u
gaagaguuugguggaangug

SEQ ID NO: 112779 - RNA, 21 nt, Artificial Sequence
  Synthetic
  misc_feature (18)..(18): n is a, c, g, or u
ugaagaguuugguggaangug

SEQ ID NO: 112780 - RNA, 22 nt, Artificial Sequence
  Synthetic
  misc_feature (19)..(19): n is a, c, g, or u
uugaagaguuugguggaangug

SEQ ID NO: 112781 - RNA, 23 nt, Artificial Sequence
  Synthetic
  misc_feature (20)..(20): n is a, c, g, or u
cuugaagaguuugguggaangug

SEQ ID NO: 112782 - RNA, 24 nt, Artificial Sequence
  Synthetic
  misc_feature (21)..(21): n is a, c, g, or u
ucuugaagaguuugguggaangug

SEQ ID NO: 112783 - RNA, 18 nt, Artificial Sequence
  Synthetic
gauaaccaggacaaauug

SEQ ID NO: 112784 - RNA, 19 nt, Artificial Sequence
  Synthetic
cgauaaccaggacaaauug

SEQ ID NO: 112785 - RNA, 20 nt, Artificial Sequence
  Synthetic
gcgauaaccaggacaaauug

SEQ ID NO: 112786 - RNA, 21 nt, Artificial Sequence
  Synthetic
agcgauaaccaggacaaauug

SEQ ID NO: 112787 - RNA, 22 nt, Artificial Sequence
  Synthetic
cagcgauaaccaggacaaauug

SEQ ID NO: 112788 - RNA, 23 nt, Artificial Sequence
  Synthetic
ccagcgauaaccaggacaaauug

SEQ ID NO: 112789 - RNA, 24 nt, Artificial Sequence
  Synthetic
uccagcgauaaccaggacaaauug

SEQ ID NO: 112790 - RNA, 18 nt, Artificial Sequence
  Synthetic
ggucggucguugacauug

SEQ ID NO: 112791 - RNA, 19 nt, Artificial Sequence
  Synthetic
aggucggucguugacauug

SEQ ID NO: 112792 - RNA, 20 nt, Artificial Sequence
  Synthetic
aaggucggucguugacauug

SEQ ID NO: 112793 - RNA, 21 nt, Artificial Sequence
  Synthetic
caaggucggucguugacauug

SEQ ID NO: 112794 - RNA, 22 nt, Artificial Sequence
  Synthetic
ucaaggucggucguugacauug

SEQ ID NO: 112795 - RNA, 23 nt, Artificial Sequence
  Synthetic
cucaaggucggucguugacauug

SEQ ID NO: 112796 - RNA, 24 nt, Artificial Sequence
  Synthetic
ccucaaggucggucguugacauug

SEQ ID NO: 112797 - RNA, 18 nt, Artificial Sequence
  Synthetic
cuuccugacugccgauug

SEQ ID NO: 112798 - RNA, 19 nt, Artificial Sequence
  Synthetic
ccuuccugacugccgauug

SEQ ID NO: 112799 - RNA, 20 nt, Artificial Sequence
  Synthetic
gccuuccugacugccgauug

SEQ ID NO: 112800 - RNA, 21 nt, Artificial Sequence
  Synthetic
ugccuuccugacugccgauug

SEQ ID NO: 112801 - RNA, 22 nt, Artificial Sequence
  Synthetic
cugccuuccugacugccgauug

SEQ ID NO: 112802 - RNA, 23 nt, Artificial Sequence
  Synthetic
gcugccuuccugacugccgauug

SEQ ID NO: 112803 - RNA, 24 nt, Artificial Sequence
  Synthetic
ggcugccuuccugacugccgauug

SEQ ID NO: 112804 - RNA, 18 nt, Artificial Sequence
  Synthetic
gaaaggccuuguaaguug

SEQ ID NO: 112805 - RNA, 19 nt, Artificial Sequence
  Synthetic
agaaaggccuuguaaguug

SEQ ID NO: 112806 - RNA, 20 nt, Artificial Sequence
  Synthetic
uagaaaggccuuguaaguug

SEQ ID NO: 112807 - RNA, 21 nt, Artificial Sequence
  Synthetic
uuagaaaggccuuguaaguug

SEQ ID NO: 112808 - RNA, 22 nt, Artificial Sequence
  Synthetic
cuuagaaaggccuuguaaguug

SEQ ID NO: 112809 - RNA, 23 nt, Artificial Sequence
  Synthetic
  misc_feature (1)..(1): n is a, c, g, or u
ncuuagaaaggccuuguaaguug

SEQ ID NO: 112810 - RNA, 24 nt, Artificial Sequence
  Synthetic
  misc_feature (2)..(2): n is a, c, g, or u
uncuuagaaaggccuuguaaguug

SEQ ID NO: 112811 - RNA, 18 nt, Artificial Sequence
  Synthetic
  misc_feature (12)..(12): n is a, c, g, or u
gcacagaccagnccguug

SEQ ID NO: 112812 - RNA, 19 nt, Artificial Sequence
  Synthetic
  misc_feature (13)..(13): n is a, c, g, or u
ggcacagaccagnccguug

SEQ ID NO: 112813 - RNA, 20 nt, Artificial Sequence
  Synthetic
  misc_feature (14)..(14): n is a, c, g, or u
uggcacagaccagnccguug

SEQ ID NO: 112814 - RNA, 21 nt, Artificial Sequence
  Synthetic
  misc_feature (15)..(15): n is a, c, g, or u
uuggcacagaccagnccguug

SEQ ID NO: 112815 - RNA, 22 nt, Artificial Sequence
  Synthetic
  misc_feature (16)..(16): n is a, c, g, or u
cuuggcacagaccagnccguug

SEQ ID NO: 112816 - RNA, 23 nt, Artificial Sequence
  Synthetic
  misc_feature (17)..(17): n is a, c, g, or u
acuuggcacagaccagnccguug

SEQ ID NO: 112817 - RNA, 24 nt, Artificial Sequence
  Synthetic
  misc_feature (18)..(18): n is a, c, g, or u
cacuuggcacagaccagnccguug

SEQ ID NO: 112818 - RNA, 18 nt, Artificial Sequence
  Synthetic
  misc_feature (6)..(6): n is a, c, g, or u
  misc_feature (15)..(15): n is a, c, g, or u
ggaaangauguauanuug

SEQ ID NO: 112819 - RNA, 19 nt, Artificial Sequence
  Synthetic
  misc_feature (7)..(7): n is a, c, g, or u
  misc_feature (16)..(16): n is a, c, g, or u
uggaaangauguauanuug

SEQ ID NO: 112820 - RNA, 20 nt, Artificial Sequence
  Synthetic
  misc_feature (8)..(8): n is a, c, g, or u
  misc_feature (17)..(17): n is a, c, g, or u
auggaaangauguauanuug

SEQ ID NO: 112821 - RNA, 21 nt, Artificial Sequence
  Synthetic
  misc_feature (9)..(9): n is a, c, g, or u
  misc_feature (18)..(18): n is a, c, g, or u
cauggaaangauguauanuug

SEQ ID NO: 112822 - RNA, 22 nt, Artificial Sequence
  Synthetic
  misc_feature (10)..(10): n is a, c, g, or u
  misc_feature (19)..(19): n is a, c, g, or u
ccauggaaangauguauanuug

SEQ ID NO: 112823 - RNA, 23 nt, Artificial Sequence
  Synthetic
  misc_feature (11)..(11): n is a, c, g, or u
  misc_feature (20)..(20): n is a, c, g, or u
gccauggaaangauguauanuug

SEQ ID NO: 112824 - RNA, 24 nt, Artificial Sequence
  Synthetic
  misc_feature (12)..(12): n is a, c, g, or u
  misc_feature (21)..(21): n is a, c, g, or u
agccauggaaangauguauanuug

SEQ ID NO: 112825 - RNA, 18 nt, Artificial Sequence
  Synthetic
gggaucuugaagaguuug

SEQ ID NO: 112826 - RNA, 19 nt, Artificial Sequence
  Synthetic
ugggaucuugaagaguuug

SEQ ID NO: 112827 - RNA, 20 nt, Artificial Sequence
  Synthetic
cugggaucuugaagaguuug

SEQ ID NO: 112828 - RNA, 21 nt, Artificial Sequence
  Synthetic
ucugggaucuugaagaguuug

SEQ ID NO: 112829 - RNA, 22 nt, Artificial Sequence
  Synthetic
cucugggaucuugaagaguuug

SEQ ID NO: 112830 - RNA, 23 nt, Artificial Sequence
  Synthetic
acucugggaucuugaagaguuug

SEQ ID NO: 112831 - RNA, 24 nt, Artificial Sequence
  Synthetic
gacucugggaucuugaagaguuug

SEQ ID NO: 112832 - RNA, 18 nt, Artificial Sequence
  Synthetic
  misc_feature (3)..(3): n is a, c, g, or u
  misc_feature (18)..(18): n is a, c, g, or u
ucncuuagagguggagan

SEQ ID NO: 112833 - RNA, 19 nt, Artificial Sequence
  Synthetic
  misc_feature (4)..(4): n is a, c, g, or u
  misc_feature (19)..(19): n is a, c, g, or u
gucncuuagagguggagan

SEQ ID NO: 112834 - RNA, 20 nt, Artificial Sequence
  Synthetic
  misc_feature (5)..(5): n is a, c, g, or u
  misc_feature (20)..(20): n is a, c, g, or u
ugucncuuagagguggagan

SEQ ID NO: 112835 - RNA, 21 nt, Artificial Sequence
  Synthetic
  misc_feature (6)..(6): n is a, c, g, or u
  misc_feature (21)..(21): n is a, c, g, or u
gugucncuuagagguggagan

SEQ ID NO: 112836 - RNA, 22 nt, Artificial Sequence
  Synthetic
  misc_feature (7)..(7): n is a, c, g, or u
  misc_feature (22)..(22): n is a, c, g, or u
agugucncuuagagguggagan

SEQ ID NO: 112837 - RNA, 23 nt, Artificial Sequence
  Synthetic
  misc_feature (8)..(8): n is a, c, g, or u
  misc_feature (23)..(23): n is a, c, g, or u
gagugucncuuagagguggagan

SEQ ID NO: 112838 - RNA, 24 nt, Artificial Sequence
  Synthetic
  misc_feature (9)..(9): n is a, c, g, or u
  misc_feature (24)..(24): n is a, c, g, or u
ugagugucncuuagagguggagan

SEQ ID NO: 112839 - RNA, 18 nt, Artificial Sequence
  Synthetic
  misc_feature (18)..(18): n is a, c, g, or u
gaccuugggcagguuccn

SEQ ID NO: 112840 - RNA, 19 nt, Artificial Sequence
  Synthetic
  misc_feature (19)..(19): n is a, c, g, or u
agaccuugggcagguuccn

SEQ ID NO: 112841 - RNA, 20 nt, Artificial Sequence
  Synthetic
  misc_feature (20)..(20): n is a, c, g, or u
aagaccuugggcagguuccn

SEQ ID NO: 112842 - RNA, 21 nt, Artificial Sequence
  Synthetic
  misc_feature (21)..(21): n is a, c, g, or u
caagaccuugggcagguuccn

SEQ ID NO: 112843 - RNA, 22 nt, Artificial Sequence
  Synthetic
  misc_feature (22)..(22): n is a, c, g, or u
gcaagaccuugggcagguuccn

SEQ ID NO: 112844 - RNA, 23 nt, Artificial Sequence
  Synthetic
  misc_feature (23)..(23): n is a, c, g, or u
ugcaagaccuugggcagguuccn

SEQ ID NO: 112845 - RNA, 24 nt, Artificial Sequence
  Synthetic
  misc_feature (24)..(24): n is a, c, g, or u
augcaagaccuugggcagguuccn

SEQ ID NO: 112846 - RNA, 18 nt, Artificial Sequence
  Synthetic
  misc_feature (13)..(14): n is a, c, g, or u
  misc_feature (18)..(18): n is a, c, g, or u
gucggucgguacnncagn

SEQ ID NO: 112847 - RNA, 19 nt, Artificial Sequence
  Synthetic
  misc_feature (14)..(15): n is a, c, g, or u
  misc_feature (19)..(19): n is a, c, g, or u
ggucggucgguacnncagn

SEQ ID NO: 112848 - RNA, 20 nt, Artificial Sequence
  Synthetic
  misc_feature (15)..(16): n is a, c, g, or u
  misc_feature (20)..(20): n is a, c, g, or u
uggucggucgguacnncagn

SEQ ID NO: 112849 - RNA, 21 nt, Artificial Sequence
  Synthetic
  misc_feature (16)..(17): n is a, c, g, or u
  misc_feature (21)..(21): n is a, c, g, or u
guggucggucgguacnncagn

SEQ ID NO: 112850 - RNA, 22 nt, Artificial Sequence
  Synthetic
  misc_feature (17)..(18): n is a, c, g, or u
  misc_feature (22)..(22): n is a, c, g, or u
cguggucggucgguacnncagn

SEQ ID NO: 112851 - RNA, 23 nt, Artificial Sequence
  Synthetic
  misc_feature (18)..(19): n is a, c, g, or u
  misc_feature (23)..(23): n is a, c, g, or u
ccguggucggucgguacnncagn

SEQ ID NO: 112852 - RNA, 24 nt, Artificial Sequence
  Synthetic
  misc_feature (19)..(20): n is a, c, g, or u
  misc_feature (24)..(24): n is a, c, g, or u
cccguggucggucgguacnncagn

SEQ ID NO: 112853 - RNA, 18 nt, Artificial Sequence
  Synthetic
  misc_feature (18)..(18): n is a, c, g, or u
agucccccauggggaggn

SEQ ID NO: 112854 - RNA, 19 nt, Artificial Sequence
  Synthetic
  misc_feature (19)..(19): n is a, c, g, or u
cagucccccauggggaggn

SEQ ID NO: 112855 - RNA, 20 nt, Artificial Sequence
  Synthetic
  misc_feature (20)..(20): n is a, c, g, or u
acagucccccauggggaggn

SEQ ID NO: 112856 - RNA, 21 nt, Artificial Sequence
  Synthetic
  misc_feature (21)..(21): n is a, c, g, or u
aacagucccccauggggaggn

SEQ ID NO: 112857 - RNA, 22 nt, Artificial Sequence
  Synthetic
  misc_feature (22)..(22): n is a, c, g, or u
caacagucccccauggggaggn

SEQ ID NO: 112858 - RNA, 23 nt, Artificial Sequence
  Synthetic
  misc_feature (23)..(23): n is a, c, g, or u
ccaacagucccccauggggaggn

SEQ ID NO: 112859 - RNA, 24 nt, Artificial Sequence
  Synthetic
  misc_feature (24)..(24): n is a, c, g, or u
cccaacagucccccauggggaggn

SEQ ID NO: 112860 - RNA, 18 nt, Artificial Sequence
  Synthetic
  misc_feature (18)..(18): n is a, c, g, or u
cuguuuucauuuacugun

SEQ ID NO: 112861 - RNA, 19 nt, Artificial Sequence
  Synthetic
  misc_feature (19)..(19): n is a, c, g, or u
ccuguuuucauuuacugun

SEQ ID NO: 112862 - RNA, 20 nt, Artificial Sequence
  Synthetic
  misc_feature (20)..(20): n is a, c, g, or u
uccuguuuucauuuacugun

SEQ ID NO: 112863 - RNA, 21 nt, Artificial Sequence
  Synthetic
  misc_feature (21)..(21): n is a, c, g, or u
cuccuguuuucauuuacugun

SEQ ID NO: 112864 - RNA, 22 nt, Artificial Sequence
  Synthetic
  misc_feature (22)..(22): n is a, c, g, or u
ucuccuguuuucauuuacugun

SEQ ID NO: 112865 - RNA, 23 nt, Artificial Sequence
  Synthetic
  misc_feature (23)..(23): n is a, c, g, or u
gucuccuguuuucauuuacugun

SEQ ID NO: 112866 - RNA, 24 nt, Artificial Sequence
  Synthetic
  misc_feature (24)..(24): n is a, c, g, or u
agucuccuguuuucauuuacugun

SEQ ID NO: 112867 - RNA, 18 nt, Artificial Sequence
  Synthetic
gcgauaaccaggacaaau

SEQ ID NO: 112868 - RNA, 19 nt, Artificial Sequence
  Synthetic
agcgauaaccaggacaaau

SEQ ID NO: 112869 - RNA, 20 nt, Artificial Sequence
  Synthetic
cagcgauaaccaggacaaau

SEQ ID NO: 112870 - RNA, 21 nt, Artificial Sequence
  Synthetic
ccagcgauaaccaggacaaau

SEQ ID NO: 112871 - RNA, 22 nt, Artificial Sequence
  Synthetic
uccagcgauaaccaggacaaau

SEQ ID NO: 112872 - RNA, 23 nt, Artificial Sequence
  Synthetic
auccagcgauaaccaggacaaau

SEQ ID NO: 112873 - RNA, 24 nt, Artificial Sequence
  Synthetic
cauccagcgauaaccaggacaaau

SEQ ID NO: 112874 - RNA, 18 nt, Artificial Sequence
  Synthetic
aaaaguaagacaggaaau

SEQ ID NO: 112875 - RNA, 19 nt, Artificial Sequence
  Synthetic
caaaaguaagacaggaaau

SEQ ID NO: 112876 - RNA, 20 nt, Artificial Sequence
  Synthetic
ccaaaaguaagacaggaaau

SEQ ID NO: 112877 - RNA, 21 nt, Artificial Sequence
  Synthetic
  misc_feature (1)..(1): n is a, c, g, or u
nccaaaaguaagacaggaaau

SEQ ID NO: 112878 - RNA, 22 nt, Artificial Sequence
  Synthetic
  misc_feature (2)..(2): n is a, c, g, or u
unccaaaaguaagacaggaaau

SEQ ID NO: 112879 - RNA, 23 nt, Artificial Sequence
  Synthetic
  misc_feature (3)..(3): n is a, c, g, or u
cunccaaaaguaagacaggaaau

SEQ ID NO: 112880 - RNA, 24 nt, Artificial Sequence
  Synthetic
  misc_feature (4)..(4): n is a, c, g, or u
ucunccaaaaguaagacaggaaau

SEQ ID NO: 112881 - RNA, 18 nt, Artificial Sequence
  Synthetic
  misc_feature (1)..(1): n is a, c, g, or u
nguugaugauccuggaau

SEQ ID NO: 112882 - RNA, 19 nt, Artificial Sequence
  Synthetic
  misc_feature (2)..(2): n is a, c, g, or u
unguugaugauccuggaau

SEQ ID NO: 112883 - RNA, 20 nt, Artificial Sequence
  Synthetic
  misc_feature (3)..(3): n is a, c, g, or u
gunguugaugauccuggaau

SEQ ID NO: 112884 - RNA, 21 nt, Artificial Sequence
  Synthetic
  misc_feature (4)..(4): n is a, c, g, or u
ggunguugaugauccuggaau

SEQ ID NO: 112885 - RNA, 22 nt, Artificial Sequence
  Synthetic
  misc_feature (5)..(5): n is a, c, g, or u
uggunguugaugauccuggaau

SEQ ID NO: 112886 - RNA, 23 nt, Artificial Sequence
  Synthetic
  misc_feature (6)..(6): n is a, c, g, or u
cuggunguugaugauccuggaau

SEQ ID NO: 112887 - RNA, 24 nt, Artificial Sequence
  Synthetic
  misc_feature (7)..(7): n is a, c, g, or u
gcuggunguugaugauccuggaau

SEQ ID NO: 112888 - RNA, 18 nt, Artificial Sequence
  Synthetic
gguuuuguacagcaacau

SEQ ID NO: 112889 - RNA, 19 nt, Artificial Sequence
  Synthetic
agguuuuguacagcaacau

SEQ ID NO: 112890 - RNA, 20 nt, Artificial Sequence
  Synthetic
uagguuuuguacagcaacau

SEQ ID NO: 112891 - RNA, 21 nt, Artificial Sequence
  Synthetic
guagguuuuguacagcaacau

SEQ ID NO: 112892 - RNA, 22 nt, Artificial Sequence
  Synthetic
cguagguuuuguacagcaacau

SEQ ID NO: 112893 - RNA, 23 nt, Artificial Sequence
  Synthetic
ccguagguuuuguacagcaacau

SEQ ID NO: 112894 - RNA, 24 nt, Artificial Sequence
  Synthetic
uccguagguuuuguacagcaacau

SEQ ID NO: 112895 - RNA, 18 nt, Artificial Sequence
  Synthetic
accccaacagucccccau

SEQ ID NO: 112896 - RNA, 19 nt, Artificial Sequence
  Synthetic
caccccaacagucccccau

SEQ ID NO: 112897 - RNA, 20 nt, Artificial Sequence
  Synthetic
ccaccccaacagucccccau

SEQ ID NO: 112898 - RNA, 21 nt, Artificial Sequence
  Synthetic
uccaccccaacagucccccau

SEQ ID NO: 112899 - RNA, 22 nt, Artificial Sequence
  Synthetic
cuccaccccaacagucccccau

SEQ ID NO: 112900 - RNA, 23 nt, Artificial Sequence
  Synthetic
gcuccaccccaacagucccccau

SEQ ID NO: 112901 - RNA, 24 nt, Artificial Sequence
  Synthetic
ggcuccaccccaacagucccccau

SEQ ID NO: 112902 - RNA, 18 nt, Artificial Sequence
  Synthetic
cggaaguguugauaagau

SEQ ID NO: 112903 - RNA, 19 nt, Artificial Sequence
  Synthetic
ccggaaguguugauaagau

SEQ ID NO: 112904 - RNA, 20 nt, Artificial Sequence
  Synthetic
uccggaaguguugauaagau

SEQ ID NO: 112905 - RNA, 21 nt, Artificial Sequence
  Synthetic
uuccggaaguguugauaagau

SEQ ID NO: 112906 - RNA, 22 nt, Artificial Sequence
  Synthetic
uuuccggaaguguugauaagau

SEQ ID NO: 112907 - RNA, 23 nt, Artificial Sequence
  Synthetic
guuuccggaaguguugauaagau

SEQ ID NO: 112908 - RNA, 24 nt, Artificial Sequence
  Synthetic
aguuuccggaaguguugauaagau

SEQ ID NO: 112909 - RNA, 18 nt, Artificial Sequence
  Synthetic
uggugagugacuggagau

SEQ ID NO: 112910 - RNA, 19 nt, Artificial Sequence
  Synthetic
uuggugagugacuggagau

SEQ ID NO: 112911 - RNA, 20 nt, Artificial Sequence
  Synthetic
guuggugagugacuggagau

SEQ ID NO: 112912 - RNA, 21 nt, Artificial Sequence
  Synthetic
  misc_feature (1)..(1): n is a, c, g, or u
nguuggugagugacuggagau

SEQ ID NO: 112913 - RNA, 22 nt, Artificial Sequence
  Synthetic
  misc_feature (2)..(2): n is a, c, g, or u
anguuggugagugacuggagau

SEQ ID NO: 112914 - RNA, 23 nt, Artificial Sequence
  Synthetic
  misc_feature (3)..(3): n is a, c, g, or u
canguuggugagugacuggagau

SEQ ID NO: 112915 - RNA, 24 nt, Artificial Sequence
  Synthetic
  misc_feature (4)..(4): n is a, c, g, or u
acanguuggugagugacuggagau

SEQ ID NO: 112916 - RNA, 18 nt, Artificial Sequence
  Synthetic
  misc_feature (14)..(14): n is a, c, g, or u
gcacacgguccggnagau

SEQ ID NO: 112917 - RNA, 19 nt, Artificial Sequence
  Synthetic
  misc_feature (15)..(15): n is a, c, g, or u
ugcacacgguccggnagau

SEQ ID NO: 112918 - RNA, 20 nt, Artificial Sequence
  Synthetic
  misc_feature (16)..(16): n is a, c, g, or u
gugcacacgguccggnagau

SEQ ID NO: 112919 - RNA, 21 nt, Artificial Sequence
  Synthetic
  misc_feature (17)..(17): n is a, c, g, or u
agugcacacgguccggnagau

SEQ ID NO: 112920 - RNA, 22 nt, Artificial Sequence
  Synthetic
  misc_feature (18)..(18): n is a, c, g, or u
aagugcacacgguccggnagau

SEQ ID NO: 112921 - RNA, 23 nt, Artificial Sequence
  Synthetic
  misc_feature (19)..(19): n is a, c, g, or u
gaagugcacacgguccggnagau

SEQ ID NO: 112922 - RNA, 24 nt, Artificial Sequence
  Synthetic
  misc_feature (20)..(20): n is a, c, g, or u
cgaagugcacacgguccggnagau

SEQ ID NO: 112923 - RNA, 18 nt, Artificial Sequence
  Synthetic
  misc_feature (2)..(2): n is a, c, g, or u
  misc_feature (14)..(14): n is a, c, g, or u
gnaagaaucccagnggau

SEQ ID NO: 112924 - RNA, 19 nt, Artificial Sequence
  Synthetic
  misc_feature (3)..(3): n is a, c, g, or u
  misc_feature (15)..(15): n is a, c, g, or u
ggnaagaaucccagnggau

SEQ ID NO: 112925 - RNA, 20 nt, Artificial Sequence
  Synthetic
  misc_feature (4)..(4): n is a, c, g, or u
  misc_feature (16)..(16): n is a, c, g, or u
gggnaagaaucccagnggau

SEQ ID NO: 112926 - RNA, 21 nt, Artificial Sequence
  Synthetic
  misc_feature (5)..(5): n is a, c, g, or u
  misc_feature (17)..(17): n is a, c, g, or u
cgggnaagaaucccagnggau

SEQ ID NO: 112927 - RNA, 22 nt, Artificial Sequence
  Synthetic
  misc_feature (6)..(6): n is a, c, g, or u
  misc_feature (18)..(18): n is a, c, g, or u
ucgggnaagaaucccagnggau

SEQ ID NO: 112928 - RNA, 23 nt, Artificial Sequence
  Synthetic
  misc_feature (7)..(7): n is a, c, g, or u
  misc_feature (19)..(19): n is a, c, g, or u
aucgggnaagaaucccagnggau

SEQ ID NO: 112929 - RNA, 24 nt, Artificial Sequence
  Synthetic
  misc_feature (8)..(8): n is a, c, g, or u
  misc_feature (20)..(20): n is a, c, g, or u
gaucgggnaagaaucccagnggau

SEQ ID NO: 112930 - RNA, 18 nt, Artificial Sequence
  Synthetic
  misc_feature (9)..(9): n is a, c, g, or u
aaguacagngcccugacu

SEQ ID NO: 112931 - RNA, 19 nt, Artificial Sequence
  Synthetic
  misc_feature (10)..(10): n is a, c, g, or u
aaaguacagngcccugacu

SEQ ID NO: 112932 - RNA, 20 nt, Artificial Sequence
  Synthetic
  misc_feature (11)..(11): n is a, c, g, or u
gaaaguacagngcccugacu

SEQ ID NO: 112933 - RNA, 21 nt, Artificial Sequence
  Synthetic
  misc_feature (12)..(12): n is a, c, g, or u
ggaaaguacagngcccugacu

SEQ ID NO: 112934 - RNA, 22 nt, Artificial Sequence
  Synthetic
  misc_feature (13)..(13): n is a, c, g, or u
aggaaaguacagngcccugacu

SEQ ID NO: 112935 - RNA, 23 nt, Artificial Sequence
  Synthetic
  misc_feature (14)..(14): n is a, c, g, or u
caggaaaguacagngcccugacu

SEQ ID NO: 112936 - RNA, 24 nt, Artificial Sequence
  Synthetic
  misc_feature (15)..(15): n is a, c, g, or u
gcaggaaaguacagngcccugacu

SEQ ID NO: 112937 - RNA, 18 nt, Artificial Sequence
  Synthetic
acagugggggaaagcccu

SEQ ID NO: 112938 - RNA, 19 nt, Artificial Sequence
  Synthetic
gacagugggggaaagcccu

SEQ ID NO: 112939 - RNA, 20 nt, Artificial Sequence
  Synthetic
agacagugggggaaagcccu

SEQ ID NO: 112940 - RNA, 21 nt, Artificial Sequence
  Synthetic
cagacagugggggaaagcccu

SEQ ID NO: 112941 - RNA, 22 nt, Artificial Sequence
  Synthetic
ccagacagugggggaaagcccu

SEQ ID NO: 112942 - RNA, 23 nt, Artificial Sequence
  Synthetic
gccagacagugggggaaagcccu

SEQ ID NO: 112943 - RNA, 24 nt, Artificial Sequence
  Synthetic
agccagacagugggggaaagcccu

SEQ ID NO: 112944 - RNA, 18 nt, Artificial Sequence
  Synthetic
  misc_feature (7)..(7): n is a, c, g, or u
ugaguangcccugagccu

SEQ ID NO: 112945 - RNA, 19 nt, Artificial Sequence
  Synthetic
  misc_feature (8)..(8): n is a, c, g, or u
gugaguangcccugagccu

SEQ ID NO: 112946 - RNA, 20 nt, Artificial Sequence
  Synthetic
  misc_feature (9)..(9): n is a, c, g, or u
ugugaguangcccugagccu

SEQ ID NO: 112947 - RNA, 21 nt, Artificial Sequence
  Synthetic
  misc_feature (10)..(10): n is a, c, g, or u
uugugaguangcccugagccu

SEQ ID NO: 112948 - RNA, 22 nt, Artificial Sequence
  Synthetic
  misc_feature (11)..(11): n is a, c, g, or u
guugugaguangcccugagccu

SEQ ID NO: 112949 - RNA, 23 nt, Artificial Sequence
  Synthetic
  misc_feature (12)..(12): n is a, c, g, or u
aguugugaguangcccugagccu

SEQ ID NO: 112950 - RNA, 24 nt, Artificial Sequence
  Synthetic
  misc_feature (13)..(13): n is a, c, g, or u
caguugugaguangcccugagccu

SEQ ID NO: 112951 - RNA, 18 nt, Artificial Sequence
  Synthetic
gccacccaaggcacagcu

SEQ ID NO: 112952 - RNA, 19 nt, Artificial Sequence
  Synthetic
agccacccaaggcacagcu

SEQ ID NO: 112953 - RNA, 20 nt, Artificial Sequence
  Synthetic
aagccacccaaggcacagcu

SEQ ID NO: 112954 - RNA, 21 nt, Artificial Sequence
  Synthetic
aaagccacccaaggcacagcu

SEQ ID NO: 112955 - RNA, 22 nt, Artificial Sequence
  Synthetic
  misc_feature (1)..(1): n is a, c, g, or u
naaagccacccaaggcacagcu

SEQ ID NO: 112956 - RNA, 23 nt, Artificial Sequence
  Synthetic
  misc_feature (2)..(2): n is a, c, g, or u
cnaaagccacccaaggcacagcu

SEQ ID NO: 112957 - RNA, 24 nt, Artificial Sequence
  Synthetic
  misc_feature (3)..(3): n is a, c, g, or u
ccnaaagccacccaaggcacagcu

SEQ ID NO: 112958 - RNA, 18 nt, Artificial Sequence
  Synthetic
  misc_feature (4)..(4): n is a, c, g, or u
  misc_feature (7)..(7): n is a, c, g, or u
  misc_feature (15)..(15): n is a, c, g, or u
uuungcnccagaccngcu

SEQ ID NO: 112959 - RNA, 19 nt, Artificial Sequence
  Synthetic
  misc_feature (5)..(5): n is a, c, g, or u
  misc_feature (8)..(8): n is a, c, g, or u
  misc_feature (16)..(16): n is a, c, g, or u
guuungcnccagaccngcu

SEQ ID NO: 112960 - RNA, 20 nt, Artificial Sequence
  Synthetic
  misc_feature (6)..(6): n is a, c, g, or u
  misc_feature (9)..(9): n is a, c, g, or u
  misc_feature (17)..(17): n is a, c, g, or u
aguuungcnccagaccngcu

SEQ ID NO: 112961 - RNA, 21 nt, Artificial Sequence
  Synthetic
  misc_feature (7)..(7): n is a, c, g, or u
  misc_feature (10)..(10): n is a, c, g, or u
  misc_feature (18)..(18): n is a, c, g, or u
gaguuungcnccagaccngcu

SEQ ID NO: 112962 - RNA, 22 nt, Artificial Sequence
  Synthetic
  misc_feature (8)..(8): n is a, c, g, or u
  misc_feature (11)..(11): n is a, c, g, or u
  misc_feature (19)..(19): n is a, c, g, or u
ugaguuungcnccagaccngcu

SEQ ID NO: 112963 - RNA, 23 nt, Artificial Sequence
  Synthetic
  misc_feature (9)..(9): n is a, c, g, or u
  misc_feature (12)..(12): n is a, c, g, or u
  misc_feature (20)..(20): n is a, c, g, or u
augaguuungcnccagaccngcu

SEQ ID NO: 112964 - RNA, 24 nt, Artificial Sequence
  Synthetic
  misc_feature (10)..(10): n is a, c, g, or u
  misc_feature (13)..(13): n is a, c, g, or u
  misc_feature (21)..(21): n is a, c, g, or u
gaugaguuungcnccagaccngcu

SEQ ID NO: 112965 - RNA, 18 nt, Artificial Sequence
  Synthetic
  misc_feature (16)..(16): n is a, c, g, or u
cugaggaugagugucncu

SEQ ID NO: 112966 - RNA, 19 nt, Artificial Sequence
  Synthetic
  misc_feature (17)..(17): n is a, c, g, or u
ccugaggaugagugucncu

SEQ ID NO: 112967 - RNA, 20 nt, Artificial Sequence
  Synthetic
  misc_feature (18)..(18): n is a, c, g, or u
gccugaggaugagugucncu

SEQ ID NO: 112968 - RNA, 21 nt, Artificial Sequence
  Synthetic
  misc_feature (19)..(19): n is a, c, g, or u
ggccugaggaugagugucncu

SEQ ID NO: 112969 - RNA, 22 nt, Artificial Sequence
  Synthetic
  misc_feature (20)..(20): n is a, c, g, or u
uggccugaggaugagugucncu

SEQ ID NO: 112970 - RNA, 23 nt, Artificial Sequence
  Synthetic
  misc_feature (21)..(21): n is a, c, g, or u
auggccugaggaugagugucncu

SEQ ID NO: 112971 - RNA, 24 nt, Artificial Sequence
  Synthetic
  misc_feature (22)..(22): n is a, c, g, or u
cauggccugaggaugagugucncu

SEQ ID NO: 112972 - RNA, 18 nt, Artificial Sequence
  Synthetic
  misc_feature (10)..(10): n is a, c, g, or u
  misc_feature (16)..(16): n is a, c, g, or u
guucagauanuguuuncu

SEQ ID NO: 112973 - RNA, 19 nt, Artificial Sequence
  Synthetic
  misc_feature (11)..(11): n is a, c, g, or u
  misc_feature (17)..(17): n is a, c, g, or u
gguucagauanuguuuncu

SEQ ID NO: 112974 - RNA, 20 nt, Artificial Sequence
  Synthetic
  misc_feature (12)..(12): n is a, c, g, or u
  misc_feature (18)..(18): n is a, c, g, or u
agguucagauanuguuuncu

SEQ ID NO: 112975 - RNA, 21 nt, Artificial Sequence
  Synthetic
  misc_feature (13)..(13): n is a, c, g, or u
  misc_feature (19)..(19): n is a, c, g, or u
aagguucagauanuguuuncu

SEQ ID NO: 112976 - RNA, 22 nt, Artificial Sequence
  Synthetic
  misc_feature (14)..(14): n is a, c, g, or u
  misc_feature (20)..(20): n is a, c, g, or u
aaagguucagauanuguuuncu

SEQ ID NO: 112977 - RNA, 23 nt, Artificial Sequence
  Synthetic
  misc_feature (15)..(15): n is a, c, g, or u
  misc_feature (21)..(21): n is a, c, g, or u
uaaagguucagauanuguuuncu

SEQ ID NO: 112978 - RNA, 24 nt, Artificial Sequence
  Synthetic
  misc_feature (16)..(16): n is a, c, g, or u
  misc_feature (22)..(22): n is a, c, g, or u
guaaagguucagauanuguuuncu

SEQ ID NO: 112979 - RNA, 18 nt, Artificial Sequence
  Synthetic
  misc_feature (9)..(9): n is a, c, g, or u
gguuugaunccuuuaucu

SEQ ID NO: 112980 - RNA, 19 nt, Artificial Sequence
  Synthetic
  misc_feature (1)..(1): n is a, c, g, or u
  misc_feature (10)..(10): n is a, c, g, or u
ngguuugaunccuuuaucu

SEQ ID NO: 112981 - RNA, 20 nt, Artificial Sequence
  Synthetic
  misc_feature (2)..(2): n is a, c, g, or u
  misc_feature (11)..(11): n is a, c, g, or u
angguuugaunccuuuaucu

SEQ ID NO: 112982 - RNA, 21 nt, Artificial Sequence
  Synthetic
  misc_feature (3)..(3): n is a, c, g, or u
  misc_feature (12)..(12): n is a, c, g, or u
uangguuugaunccuuuaucu

SEQ ID NO: 112983 - RNA, 22 nt, Artificial Sequence
  Synthetic
  misc_feature (4)..(4): n is a, c, g, or u
  misc_feature (13)..(13): n is a, c, g, or u
auangguuugaunccuuuaucu

SEQ ID NO: 112984 - RNA, 23 nt, Artificial Sequence
  Synthetic
  misc_feature (5)..(5): n is a, c, g, or u
  misc_feature (14)..(14): n is a, c, g, or u
aauangguuugaunccuuuaucu

SEQ ID NO: 112985 - RNA, 24 nt, Artificial Sequence
  Synthetic
  misc_feature (6)..(6): n is a, c, g, or u
  misc_feature (15)..(15): n is a, c, g, or u
uaauangguuugaunccuuuaucu

SEQ ID NO: 112986 - RNA, 18 nt, Artificial Sequence
  Synthetic
  misc_feature (4)..(4): n is a, c, g, or u
ucanuaaacacacagucu

SEQ ID NO: 112987 - RNA, 19 nt, Artificial Sequence
  Synthetic
  misc_feature (5)..(5): n is a, c, g, or u
cucanuaaacacacagucu

SEQ ID NO: 112988 - RNA, 20 nt, Artificial Sequence
  Synthetic
  misc_feature (6)..(6): n is a, c, g, or u
acucanuaaacacacagucu

SEQ ID NO: 112989 - RNA, 21 nt, Artificial Sequence
  Synthetic
  misc_feature (7)..(7): n is a, c, g, or u
cacucanuaaacacacagucu

SEQ ID NO: 112990 - RNA, 22 nt, Artificial Sequence
  Synthetic
  misc_feature (8)..(8): n is a, c, g, or u
ccacucanuaaacacacagucu

SEQ ID NO: 112991 - RNA, 23 nt, Artificial Sequence
  Synthetic
  misc_feature (9)..(9): n is a, c, g, or u
cccacucanuaaacacacagucu

SEQ ID NO: 112992 - RNA, 24 nt, Artificial Sequence
  Synthetic
  misc_feature (10)..(10): n is a, c, g, or u
ucccacucanuaaacacacagucu

SEQ ID NO: 112993 - RNA, 18 nt, Artificial Sequence
  Synthetic
cgauugagaccuucgucu

SEQ ID NO: 112994 - RNA, 19 nt, Artificial Sequence
  Synthetic
gcgauugagaccuucgucu

SEQ ID NO: 112995 - RNA, 20 nt, Artificial Sequence
  Synthetic
ggcgauugagaccuucgucu

SEQ ID NO: 112996 - RNA, 21 nt, Artificial Sequence
  Synthetic
cggcgauugagaccuucgucu

SEQ ID NO: 112997 - RNA, 22 nt, Artificial Sequence
  Synthetic
gcggcgauugagaccuucgucu

SEQ ID NO: 112998 - RNA, 23 nt, Artificial Sequence
  Synthetic
cgcggcgauugagaccuucgucu

SEQ ID NO: 112999 - RNA, 24 nt, Artificial Sequence
  Synthetic
acgcggcgauugagaccuucgucu

SEQ ID NO: 113000 - RNA, 18 nt, Artificial Sequence
  Synthetic
cgagggaguucuucuucu

SEQ ID NO: 113001 - RNA, 19 nt, Artificial Sequence
  Synthetic
gcgagggaguucuucuucu

SEQ ID NO: 113002 - RNA, 20 nt, Artificial Sequence
  Synthetic
ggcgagggaguucuucuucu

SEQ ID NO: 113003 - RNA, 21 nt, Artificial Sequence
  Synthetic
aggcgagggaguucuucuucu

SEQ ID NO: 113004 - RNA, 22 nt, Artificial Sequence
  Synthetic
gaggcgagggaguucuucuucu

SEQ ID NO: 113005 - RNA, 23 nt, Artificial Sequence
  Synthetic
cgaggcgagggaguucuucuucu

SEQ ID NO: 113006 - RNA, 24 nt, Artificial Sequence
  Synthetic
gcgaggcgagggaguucuucuucu

SEQ ID NO: 113007 - RNA, 18 nt, Artificial Sequence
  Synthetic
  misc_feature (4)..(4): n is a, c, g, or u
gaanagaaggaaagaagu

SEQ ID NO: 113008 - RNA, 19 nt, Artificial Sequence
  Synthetic
  misc_feature (5)..(5): n is a, c, g, or u
cgaanagaaggaaagaagu

SEQ ID NO: 113009 - RNA, 20 nt, Artificial Sequence
  Synthetic
  misc_feature (6)..(6): n is a, c, g, or u
ucgaanagaaggaaagaagu

SEQ ID NO: 113010 - RNA, 21 nt, Artificial Sequence
  Synthetic
  misc_feature (7)..(7): n is a, c, g, or u
cucgaanagaaggaaagaagu

SEQ ID NO: 113011 - RNA, 22 nt, Artificial Sequence
  Synthetic
  misc_feature (8)..(8): n is a, c, g, or u
ucucgaanagaaggaaagaagu

SEQ ID NO: 113012 - RNA, 23 nt, Artificial Sequence
  Synthetic
  misc_feature (9)..(9): n is a, c, g, or u
aucucgaanagaaggaaagaagu

SEQ ID NO: 113013 - RNA, 24 nt, Artificial Sequence
  Synthetic
  misc_feature (10)..(10): n is a, c, g, or u
gaucucgaanagaaggaaagaagu

SEQ ID NO: 113014 - RNA, 18 nt, Artificial Sequence
  Synthetic
aacugaaagccagacagu

SEQ ID NO: 113015 - RNA, 19 nt, Artificial Sequence
  Synthetic
uaacugaaagccagacagu

SEQ ID NO: 113016 - RNA, 20 nt, Artificial Sequence
  Synthetic
auaacugaaagccagacagu

SEQ ID NO: 113017 - RNA, 21 nt, Artificial Sequence
  Synthetic
uauaacugaaagccagacagu

SEQ ID NO: 113018 - RNA, 22 nt, Artificial Sequence
  Synthetic
auauaacugaaagccagacagu

SEQ ID NO: 113019 - RNA, 23 nt, Artificial Sequence
  Synthetic
cauauaacugaaagccagacagu

SEQ ID NO: 113020 - RNA, 24 nt, Artificial Sequence
  Synthetic
ccauauaacugaaagccagacagu

SEQ ID NO: 113021 - RNA, 18 nt, Artificial Sequence
  Synthetic
cccaugccuuuucgaggu

SEQ ID NO: 113022 - RNA, 19 nt, Artificial Sequence
  Synthetic
ccccaugccuuuucgaggu

SEQ ID NO: 113023 - RNA, 20 nt, Artificial Sequence
  Synthetic
uccccaugccuuuucgaggu

SEQ ID NO: 113024 - RNA, 21 nt, Artificial Sequence
  Synthetic
guccccaugccuuuucgaggu

SEQ ID NO: 113025 - RNA, 22 nt, Artificial Sequence
  Synthetic
uguccccaugccuuuucgaggu

SEQ ID NO: 113026 - RNA, 23 nt, Artificial Sequence
  Synthetic
uuguccccaugccuuuucgaggu

SEQ ID NO: 113027 - RNA, 24 nt, Artificial Sequence
  Synthetic
uuuguccccaugccuuuucgaggu

SEQ ID NO: 113028 - RNA, 18 nt, Artificial Sequence
  Synthetic
  misc_feature (1)..(1): n is a, c, g, or u
  misc_feature (15)..(16): n is a, c, g, or u
nuguaaauaaugucnngu

SEQ ID NO: 113029 - RNA, 19 nt, Artificial Sequence
  Synthetic
  misc_feature (2)..(2): n is a, c, g, or u
  misc_feature (16)..(17): n is a, c, g, or u
unuguaaauaaugucnngu

SEQ ID NO: 113030 - RNA, 20 nt, Artificial Sequence
  Synthetic
  misc_feature (3)..(3): n is a, c, g, or u
  misc_feature (17)..(18): n is a, c, g, or u
gunuguaaauaaugucnngu

SEQ ID NO: 113031 - RNA, 21 nt, Artificial Sequence
  Synthetic
  misc_feature (4)..(4): n is a, c, g, or u
  misc_feature (18)..(19): n is a, c, g, or u
agunuguaaauaaugucnngu

SEQ ID NO: 113032 - RNA, 22 nt, Artificial Sequence
  Synthetic
  misc_feature (5)..(5): n is a, c, g, or u
  misc_feature (19)..(20): n is a, c, g, or u
gagunuguaaauaaugucnngu

SEQ ID NO: 113033 - RNA, 23 nt, Artificial Sequence
  Synthetic
  misc_feature (6)..(6): n is a, c, g, or u
  misc_feature (20)..(21): n is a, c, g, or u
agagunuguaaauaaugucnngu

SEQ ID NO: 113034 - RNA, 24 nt, Artificial Sequence
  Synthetic
  misc_feature (7)..(7): n is a, c, g, or u
  misc_feature (21)..(22): n is a, c, g, or u
aagagunuguaaauaaugucnngu

SEQ ID NO: 113035 - RNA, 18 nt, Artificial Sequence
  Synthetic
ccuccugcaaaugaaugu

SEQ ID NO: 113036 - RNA, 19 nt, Artificial Sequence
  Synthetic
uccuccugcaaaugaaugu

SEQ ID NO: 113037 - RNA, 20 nt, Artificial Sequence
  Synthetic
guccuccugcaaaugaaugu

SEQ ID NO: 113038 - RNA, 21 nt, Artificial Sequence
  Synthetic
uguccuccugcaaaugaaugu

SEQ ID NO: 113039 - RNA, 22 nt, Artificial Sequence
  Synthetic
auguccuccugcaaaugaaugu

SEQ ID NO: 113040 - RNA, 23 nt, Artificial Sequence
  Synthetic
aauguccuccugcaaaugaaugu

SEQ ID NO: 113041 - RNA, 24 nt, Artificial Sequence
  Synthetic
caauguccuccugcaaaugaaugu

SEQ ID NO: 113042 - RNA, 18 nt, Artificial Sequence
  Synthetic
ccuguuuucauuuacugu

SEQ ID NO: 113043 - RNA, 19 nt, Artificial Sequence
  Synthetic
uccuguuuucauuuacugu

SEQ ID NO: 113044 - RNA, 20 nt, Artificial Sequence
  Synthetic
cuccuguuuucauuuacugu

SEQ ID NO: 113045 - RNA, 21 nt, Artificial Sequence
  Synthetic
ucuccuguuuucauuuacugu

SEQ ID NO: 113046 - RNA, 22 nt, Artificial Sequence
  Synthetic
gucuccuguuuucauuuacugu

SEQ ID NO: 113047 - RNA, 23 nt, Artificial Sequence
  Synthetic
agucuccuguuuucauuuacugu

SEQ ID NO: 113048 - RNA, 24 nt, Artificial Sequence
  Synthetic
uagucuccuguuuucauuuacugu

SEQ ID NO: 113049 - RNA, 18 nt, Artificial Sequence
  Synthetic
  misc_feature (5)..(5): n is a, c, g, or u
uguunccccuagaaaauu

SEQ ID NO: 113050 - RNA, 19 nt, Artificial Sequence
  Synthetic
  misc_feature (6)..(6): n is a, c, g, or u
guguunccccuagaaaauu

SEQ ID NO: 113051 - RNA, 20 nt, Artificial Sequence
  Synthetic
  misc_feature (7)..(7): n is a, c, g, or u
gguguunccccuagaaaauu

SEQ ID NO: 113052 - RNA, 21 nt, Artificial Sequence
  Synthetic
  misc_feature (8)..(8): n is a, c, g, or u
ggguguunccccuagaaaauu

SEQ ID NO: 113053 - RNA, 22 nt, Artificial Sequence
  Synthetic
  misc_feature (9)..(9): n is a, c, g, or u
cggguguunccccuagaaaauu

SEQ ID NO: 113054 - RNA, 23 nt, Artificial Sequence
  Synthetic
  misc_feature (10)..(10): n is a, c, g, or u
acggguguunccccuagaaaauu

SEQ ID NO: 113055 - RNA, 24 nt, Artificial Sequence
  Synthetic
  misc_feature (11)..(11): n is a, c, g, or u
cacggguguunccccuagaaaauu

SEQ ID NO: 113056 - RNA, 18 nt, Artificial Sequence
  Synthetic
ggugagugacuggagauu

SEQ ID NO: 113057 - RNA, 19 nt, Artificial Sequence
  Synthetic
uggugagugacuggagauu

SEQ ID NO: 113058 - RNA, 20 nt, Artificial Sequence
  Synthetic
uuggugagugacuggagauu

SEQ ID NO: 113059 - RNA, 21 nt, Artificial Sequence
  Synthetic
guuggugagugacuggagauu

SEQ ID NO: 113060 - RNA, 22 nt, Artificial Sequence
  Synthetic
  misc_feature (1)..(1): n is a, c, g, or u
nguuggugagugacuggagauu

SEQ ID NO: 113061 - RNA, 23 nt, Artificial Sequence
  Synthetic
  misc_feature (2)..(2): n is a, c, g, or u
anguuggugagugacuggagauu

SEQ ID NO: 113062 - RNA, 24 nt, Artificial Sequence
  Synthetic
  misc_feature (3)..(3): n is a, c, g, or u
canguuggugagugacuggagauu

SEQ ID NO: 113063 - RNA, 18 nt, Artificial Sequence
  Synthetic
  misc_feature (1)..(1): n is a, c, g, or u
  misc_feature (13)..(13): n is a, c, g, or u
naagaaucccagnggauu

SEQ ID NO: 113064 - RNA, 19 nt, Artificial Sequence
  Synthetic
  misc_feature (2)..(2): n is a, c, g, or u
  misc_feature (14)..(14): n is a, c, g, or u
gnaagaaucccagnggauu

SEQ ID NO: 113065 - RNA, 20 nt, Artificial Sequence
  Synthetic
  misc_feature (3)..(3): n is a, c, g, or u
  misc_feature (15)..(15): n is a, c, g, or u
ggnaagaaucccagnggauu

SEQ ID NO: 113066 - RNA, 21 nt, Artificial Sequence
  Synthetic
  misc_feature (4)..(4): n is a, c, g, or u
  misc_feature (16)..(16): n is a, c, g, or u
gggnaagaaucccagnggauu

SEQ ID NO: 113067 - RNA, 22 nt, Artificial Sequence
  Synthetic
  misc_feature (5)..(5): n is a, c, g, or u
  misc_feature (17)..(17): n is a, c, g, or u
cgggnaagaaucccagnggauu

SEQ ID NO: 113068 - RNA, 23 nt, Artificial Sequence
  Synthetic
  misc_feature (6)..(6): n is a, c, g, or u
  misc_feature (18)..(18): n is a, c, g, or u
ucgggnaagaaucccagnggauu

SEQ ID NO: 113069 - RNA, 24 nt, Artificial Sequence
  Synthetic
  misc_feature (7)..(7): n is a, c, g, or u
  misc_feature (19)..(19): n is a, c, g, or u
aucgggnaagaaucccagnggauu

SEQ ID NO: 113070 - RNA, 18 nt, Artificial Sequence
  Synthetic
  misc_feature (6)..(6): n is a, c, g, or u
  misc_feature (11)..(11): n is a, c, g, or u
uauggnagagncaguauu

SEQ ID NO: 113071 - RNA, 19 nt, Artificial Sequence
  Synthetic
  misc_feature (7)..(7): n is a, c, g, or u
  misc_feature (12)..(12): n is a, c, g, or u
auauggnagagncaguauu

SEQ ID NO: 113072 - RNA, 20 nt, Artificial Sequence
  Synthetic
  misc_feature (8)..(8): n is a, c, g, or u
  misc_feature (13)..(13): n is a, c, g, or u
gauauggnagagncaguauu

SEQ ID NO: 113073 - RNA, 21 nt, Artificial Sequence
  Synthetic
  misc_feature (9)..(9): n is a, c, g, or u
  misc_feature (14)..(14): n is a, c, g, or u
cgauauggnagagncaguauu

SEQ ID NO: 113074 - RNA, 22 nt, Artificial Sequence
  Synthetic
  misc_feature (10)..(10): n is a, c, g, or u
  misc_feature (15)..(15): n is a, c, g, or u
acgauauggnagagncaguauu

SEQ ID NO: 113075 - RNA, 23 nt, Artificial Sequence
  Synthetic
  misc_feature (11)..(11): n is a, c, g, or u
  misc_feature (16)..(16): n is a, c, g, or u
gacgauauggnagagncaguauu

SEQ ID NO: 113076 - RNA, 24 nt, Artificial Sequence
  Synthetic
  misc_feature (12)..(12): n is a, c, g, or u
  misc_feature (17)..(17): n is a, c, g, or u
ugacgauauggnagagncaguauu

SEQ ID NO: 113077 - RNA, 18 nt, Artificial Sequence
  Synthetic
ucuagacucugugguauu

SEQ ID NO: 113078 - RNA, 19 nt, Artificial Sequence
  Synthetic
gucuagacucugugguauu

SEQ ID NO: 113079 - RNA, 20 nt, Artificial Sequence
  Synthetic
agucuagacucugugguauu

SEQ ID NO: 113080 - RNA, 21 nt, Artificial Sequence
  Synthetic
gagucuagacucugugguauu

SEQ ID NO: 113081 - RNA, 22 nt, Artificial Sequence
  Synthetic
cgagucuagacucugugguauu

SEQ ID NO: 113082 - RNA, 23 nt, Artificial Sequence
  Synthetic
acgagucuagacucugugguauu

SEQ ID NO: 113083 - RNA, 24 nt, Artificial Sequence
  Synthetic
cacgagucuagacucugugguauu

SEQ ID NO: 113084 - RNA, 18 nt, Artificial Sequence
  Synthetic
uacauaucccaugaaguu

SEQ ID NO: 113085 - RNA, 19 nt, Artificial Sequence
  Synthetic
uuacauaucccaugaaguu

SEQ ID NO: 113086 - RNA, 20 nt, Artificial Sequence
  Synthetic
auuacauaucccaugaaguu

SEQ ID NO: 113087 - RNA, 21 nt, Artificial Sequence
  Synthetic
aauuacauaucccaugaaguu

SEQ ID NO: 113088 - RNA, 22 nt, Artificial Sequence
  Synthetic
caauuacauaucccaugaaguu

SEQ ID NO: 113089 - RNA, 23 nt, Artificial Sequence
  Synthetic
ccaauuacauaucccaugaaguu

SEQ ID NO: 113090 - RNA, 24 nt, Artificial Sequence
  Synthetic
  misc_feature (1)..(1): n is a, c, g, or u
nccaauuacauaucccaugaaguu

SEQ ID NO: 113091 - RNA, 18 nt, Artificial Sequence
  Synthetic
ccaugccuuuucgagguu

SEQ ID NO: 113092 - RNA, 19 nt, Artificial Sequence
  Synthetic
cccaugccuuuucgagguu

SEQ ID NO: 113093 - RNA, 20 nt, Artificial Sequence
  Synthetic
ccccaugccuuuucgagguu

SEQ ID NO: 113094 - RNA, 21 nt, Artificial Sequence
  Synthetic
uccccaugccuuuucgagguu

SEQ ID NO: 113095 - RNA, 22 nt, Artificial Sequence
  Synthetic
guccccaugccuuuucgagguu

SEQ ID NO: 113096 - RNA, 23 nt, Artificial Sequence
  Synthetic
uguccccaugccuuuucgagguu

SEQ ID NO: 113097 - RNA, 24 nt, Artificial Sequence
  Synthetic
uuguccccaugccuuuucgagguu

SEQ ID NO: 113098 - RNA, 18 nt, Artificial Sequence
  Synthetic
ggugaggugaacaauguu

SEQ ID NO: 113099 - RNA, 19 nt, Artificial Sequence
  Synthetic
uggugaggugaacaauguu

SEQ ID NO: 113100 - RNA, 20 nt, Artificial Sequence
  Synthetic
auggugaggugaacaauguu

SEQ ID NO: 113101 - RNA, 21 nt, Artificial Sequence
  Synthetic
uauggugaggugaacaauguu

SEQ ID NO: 113102 - RNA, 22 nt, Artificial Sequence
  Synthetic
guauggugaggugaacaauguu

SEQ ID NO: 113103 - RNA, 23 nt, Artificial Sequence
  Synthetic
cguauggugaggugaacaauguu

SEQ ID NO: 113104 - RNA, 24 nt, Artificial Sequence
  Synthetic
ccguauggugaggugaacaauguu

SEQ ID NO: 113105 - RNA, 18 nt, Artificial Sequence
  Synthetic
  misc_feature (7)..(7): n is a, c, g, or u
  misc_feature (16)..(16): n is a, c, g, or u
uggaaangauguauanuu

SEQ ID NO: 113106 - RNA, 19 nt, Artificial Sequence
  Synthetic
  misc_feature (8)..(8): n is a, c, g, or u
  misc_feature (17)..(17): n is a, c, g, or u
auggaaangauguauanuu

SEQ ID NO: 113107 - RNA, 20 nt, Artificial Sequence
  Synthetic
  misc_feature (9)..(9): n is a, c, g, or u
  misc_feature (18)..(18): n is a, c, g, or u
cauggaaangauguauanuu

SEQ ID NO: 113108 - RNA, 21 nt, Artificial Sequence
  Synthetic
  misc_feature (10)..(10): n is a, c, g, or u
  misc_feature (19)..(19): n is a, c, g, or u
ccauggaaangauguauanuu

SEQ ID NO: 113109 - RNA, 22 nt, Artificial Sequence
  Synthetic
  misc_feature (11)..(11): n is a, c, g, or u
  misc_feature (20)..(20): n is a, c, g, or u
gccauggaaangauguauanuu

SEQ ID NO: 113110 - RNA, 23 nt, Artificial Sequence
  Synthetic
  misc_feature (12)..(12): n is a, c, g, or u
  misc_feature (21)..(21): n is a, c, g, or u
agccauggaaangauguauanuu

SEQ ID NO: 113111 - RNA, 24 nt, Artificial Sequence
  Synthetic
  misc_feature (13)..(13): n is a, c, g, or u
  misc_feature (22)..(22): n is a, c, g, or u
cagccauggaaangauguauanuu

SEQ ID NO: 113112 - RNA, 18 nt, Artificial Sequence
  Synthetic
auuuguccccaugccuuu

SEQ ID NO: 113113 - RNA, 19 nt, Artificial Sequence
  Synthetic
gauuuguccccaugccuuu

SEQ ID NO: 113114 - RNA, 20 nt, Artificial Sequence
  Synthetic
agauuuguccccaugccuuu

SEQ ID NO: 113115 - RNA, 21 nt, Artificial Sequence
  Synthetic
aagauuuguccccaugccuuu

SEQ ID NO: 113116 - RNA, 22 nt, Artificial Sequence
  Synthetic
aaagauuuguccccaugccuuu

SEQ ID NO: 113117 - RNA, 23 nt, Artificial Sequence
  Synthetic
gaaagauuuguccccaugccuuu

SEQ ID NO: 113118 - RNA, 24 nt, Artificial Sequence
  Synthetic
agaaagauuuguccccaugccuuu

SEQ ID NO: 113119 - RNA, 18 nt, Artificial Sequence
  Synthetic
gucuaacaacaguaguuu

SEQ ID NO: 113120 - RNA, 19 nt, Artificial Sequence
  Synthetic
cgucuaacaacaguaguuu

SEQ ID NO: 113121 - RNA, 20 nt, Artificial Sequence
  Synthetic
ucgucuaacaacaguaguuu

SEQ ID NO: 113122 - RNA, 21 nt, Artificial Sequence
  Synthetic
  misc_feature (1)..(1): n is a, c, g, or u
nucgucuaacaacaguaguuu

SEQ ID NO: 113123 - RNA, 22 nt, Artificial Sequence
  Synthetic
  misc_feature (2)..(2): n is a, c, g, or u
cnucgucuaacaacaguaguuu

SEQ ID NO: 113124 - RNA, 23 nt, Artificial Sequence
  Synthetic
  misc_feature (3)..(3): n is a, c, g, or u
ucnucgucuaacaacaguaguuu

SEQ ID NO: 113125 - RNA, 24 nt, Artificial Sequence
  Synthetic
  misc_feature (4)..(4): n is a, c, g, or u
cucnucgucuaacaacaguaguuu

SEQ ID NO: 113126 - RNA, 18 nt, Artificial Sequence
  Synthetic
cacucccauagguauuuu

SEQ ID NO: 113127 - RNA, 19 nt, Artificial Sequence
  Synthetic
ccacucccauagguauuuu

SEQ ID NO: 113128 - RNA, 20 nt, Artificial Sequence
  Synthetic
cccacucccauagguauuuu

SEQ ID NO: 113129 - RNA, 21 nt, Artificial Sequence
  Synthetic
gcccacucccauagguauuuu

SEQ ID NO: 113130 - RNA, 22 nt, Artificial Sequence
  Synthetic
ggcccacucccauagguauuuu

SEQ ID NO: 113131 - RNA, 23 nt, Artificial Sequence
  Synthetic
aggcccacucccauagguauuuu

SEQ ID NO: 113132 - RNA, 24 nt, Artificial Sequence
  Synthetic
gaggcccacucccauagguauuuu

SEQ ID NO: 113133 - RNA, 18 nt, Artificial Sequence
  Synthetic
uccccaucuuuuuguuuu

SEQ ID NO: 113134 - RNA, 19 nt, Artificial Sequence
  Synthetic
auccccaucuuuuuguuuu

SEQ ID NO: 113135 - RNA, 20 nt, Artificial Sequence
  Synthetic
uauccccaucuuuuuguuuu

SEQ ID NO: 113136 - RNA, 21 nt, Artificial Sequence
  Synthetic
auauccccaucuuuuuguuuu

SEQ ID NO: 113137 - RNA, 22 nt, Artificial Sequence
  Synthetic
aauauccccaucuuuuuguuuu

SEQ ID NO: 113138 - RNA, 23 nt, Artificial Sequence
  Synthetic
gaauauccccaucuuuuuguuuu

SEQ ID NO: 113139 - RNA, 24 nt, Artificial Sequence
  Synthetic
ggaauauccccaucuuuuuguuuu

SEQ ID NO: 113140 - RNA, 18 nt, Artificial Sequence
  Synthetic
  misc_feature (4)..(4): n is a, c, g, or u
ccunacaguaaaugaaaa

SEQ ID NO: 113141 - RNA, 19 nt, Artificial Sequence
  Synthetic
  misc_feature (5)..(5): n is a, c, g, or u
cccunacaguaaaugaaaa

SEQ ID NO: 113142 - RNA, 20 nt, Artificial Sequence
  Synthetic
  misc_feature (6)..(6): n is a, c, g, or u
ccccunacaguaaaugaaaa

SEQ ID NO: 113143 - RNA, 21 nt, Artificial Sequence
  Synthetic
  misc_feature (1)..(1): n is a, c, g, or u
  misc_feature (7)..(7): n is a, c, g, or u
nccccunacaguaaaugaaaa

SEQ ID NO: 113144 - RNA, 22 nt, Artificial Sequence
  Synthetic
  misc_feature (2)..(2): n is a, c, g, or u
  misc_feature (8)..(8): n is a, c, g, or u
gnccccunacaguaaaugaaaa

SEQ ID NO: 113145 - RNA, 23 nt, Artificial Sequence
  Synthetic
  misc_feature (3)..(3): n is a, c, g, or u
  misc_feature (9)..(9): n is a, c, g, or u
ggnccccunacaguaaaugaaaa

SEQ ID NO: 113146 - RNA, 24 nt, Artificial Sequence
  Synthetic
  misc_feature (4)..(4): n is a, c, g, or u
  misc_feature (10)..(10): n is a, c, g, or u
gggnccccunacaguaaaugaaaa

SEQ ID NO: 113147 - RNA, 18 nt, Artificial Sequence
  Synthetic
  misc_feature (5)..(5): n is a, c, g, or u
cgggnaucuuauauaaaa

SEQ ID NO: 113148 - RNA, 19 nt, Artificial Sequence
  Synthetic
  misc_feature (6)..(6): n is a, c, g, or u
gcgggnaucuuauauaaaa

SEQ ID NO: 113149 - RNA, 20 nt, Artificial Sequence
  Synthetic
  misc_feature (7)..(7): n is a, c, g, or u
ggcgggnaucuuauauaaaa

SEQ ID NO: 113150 - RNA, 21 nt, Artificial Sequence
  Synthetic
  misc_feature (8)..(8): n is a, c, g, or u
aggcgggnaucuuauauaaaa

SEQ ID NO: 113151 - RNA, 22 nt, Artificial Sequence
  Synthetic
  misc_feature (9)..(9): n is a, c, g, or u
aaggcgggnaucuuauauaaaa

SEQ ID NO: 113152 - RNA, 23 nt, Artificial Sequence
  Synthetic
  misc_feature (10)..(10): n is a, c, g, or u
gaaggcgggnaucuuauauaaaa

SEQ ID NO: 113153 - RNA, 24 nt, Artificial Sequence
  Synthetic
  misc_feature (11)..(11): n is a, c, g, or u
ggaaggcgggnaucuuauauaaaa

SEQ ID NO: 113154 - RNA, 18 nt, Artificial Sequence
  Synthetic
gcccaaggucuugcauaa

SEQ ID NO: 113155 - RNA, 19 nt, Artificial Sequence
  Synthetic
ugcccaaggucuugcauaa

SEQ ID NO: 113156 - RNA, 20 nt, Artificial Sequence
  Synthetic
cugcccaaggucuugcauaa

SEQ ID NO: 113157 - RNA, 21 nt, Artificial Sequence
  Synthetic
ccugcccaaggucuugcauaa

SEQ ID NO: 113158 - RNA, 22 nt, Artificial Sequence
  Synthetic
accugcccaaggucuugcauaa

SEQ ID NO: 113159 - RNA, 23 nt, Artificial Sequence
  Synthetic
aaccugcccaaggucuugcauaa

SEQ ID NO: 113160 - RNA, 24 nt, Artificial Sequence
  Synthetic
gaaccugcccaaggucuugcauaa

SEQ ID NO: 113161 - RNA, 18 nt, Artificial Sequence
  Synthetic
  misc_feature (7)..(7): n is a, c, g, or u
ggcgggnaucuuauauaa

SEQ ID NO: 113162 - RNA, 19 nt, Artificial Sequence
  Synthetic
  misc_feature (8)..(8): n is a, c, g, or u
aggcgggnaucuuauauaa

SEQ ID NO: 113163 - RNA, 20 nt, Artificial Sequence
  Synthetic
  misc_feature (9)..(9): n is a, c, g, or u
aaggcgggnaucuuauauaa

SEQ ID NO: 113164 - RNA, 21 nt, Artificial Sequence
  Synthetic
  misc_feature (10)..(10): n is a, c, g, or u
gaaggcgggnaucuuauauaa

SEQ ID NO: 113165 - RNA, 22 nt, Artificial Sequence
  Synthetic
  misc_feature (11)..(11): n is a, c, g, or u
ggaaggcgggnaucuuauauaa

SEQ ID NO: 113166 - RNA, 23 nt, Artificial Sequence
  Synthetic
  misc_feature (12)..(12): n is a, c, g, or u
uggaaggcgggnaucuuauauaa

SEQ ID NO: 113167 - RNA, 24 nt, Artificial Sequence
  Synthetic
  misc_feature (13)..(13): n is a, c, g, or u
uuggaaggcgggnaucuuauauaa

SEQ ID NO: 113168 - RNA, 18 nt, Artificial Sequence
  Synthetic
  misc_feature (5)..(5): n is a, c, g, or u
  misc_feature (11)..(11): n is a, c, g, or u
ugggnccccunacaguaa

SEQ ID NO: 113169 - RNA, 19 nt, Artificial Sequence
  Synthetic
  misc_feature (6)..(6): n is a, c, g, or u
  misc_feature (12)..(12): n is a, c, g, or u
gugggnccccunacaguaa

SEQ ID NO: 113170 - RNA, 20 nt, Artificial Sequence
  Synthetic
  misc_feature (7)..(7): n is a, c, g, or u
  misc_feature (13)..(13): n is a, c, g, or u
ugugggnccccunacaguaa

SEQ ID NO: 113171 - RNA, 21 nt, Artificial Sequence
  Synthetic
  misc_feature (8)..(8): n is a, c, g, or u
  misc_feature (14)..(14): n is a, c, g, or u
uugugggnccccunacaguaa

SEQ ID NO: 113172 - RNA, 22 nt, Artificial Sequence
  Synthetic
  misc_feature (9)..(9): n is a, c, g, or u
  misc_feature (15)..(15): n is a, c, g, or u
uuugugggnccccunacaguaa

SEQ ID NO: 113173 - RNA, 23 nt, Artificial Sequence
  Synthetic
  misc_feature (10)..(10): n is a, c, g, or u
  misc_feature (16)..(16): n is a, c, g, or u
auuugugggnccccunacaguaa

SEQ ID NO: 113174 - RNA, 24 nt, Artificial Sequence
  Synthetic
  misc_feature (11)..(11): n is a, c, g, or u
  misc_feature (17)..(17): n is a, c, g, or u
aauuugugggnccccunacaguaa

SEQ ID NO: 113175 - RNA, 18 nt, Artificial Sequence
  Synthetic
gggacccuguaccgaaca

SEQ ID NO: 113176 - RNA, 19 nt, Artificial Sequence
  Synthetic
ggggacccuguaccgaaca

SEQ ID NO: 113177 - RNA, 20 nt, Artificial Sequence
  Synthetic
uggggacccuguaccgaaca

SEQ ID NO: 113178 - RNA, 21 nt, Artificial Sequence
  Synthetic
cuggggacccuguaccgaaca

SEQ ID NO: 113179 - RNA, 22 nt, Artificial Sequence
  Synthetic
acuggggacccuguaccgaaca

SEQ ID NO: 113180 - RNA, 23 nt, Artificial Sequence
  Synthetic
gacuggggacccuguaccgaaca

SEQ ID NO: 113181 - RNA, 24 nt, Artificial Sequence
  Synthetic
agacuggggacccuguaccgaaca

SEQ ID NO: 113182 - RNA, 18 nt, Artificial Sequence
  Synthetic
ggcuccaguucaggaaca

SEQ ID NO: 113183 - RNA, 19 nt, Artificial Sequence
  Synthetic
uggcuccaguucaggaaca

SEQ ID NO: 113184 - RNA, 20 nt, Artificial Sequence
  Synthetic
guggcuccaguucaggaaca

SEQ ID NO: 113185 - RNA, 21 nt, Artificial Sequence
  Synthetic
gguggcuccaguucaggaaca

SEQ ID NO: 113186 - RNA, 22 nt, Artificial Sequence
  Synthetic
ugguggcuccaguucaggaaca

SEQ ID NO: 113187 - RNA, 23 nt, Artificial Sequence
  Synthetic
cugguggcuccaguucaggaaca

SEQ ID NO: 113188 - RNA, 24 nt, Artificial Sequence
  Synthetic
gcugguggcuccaguucaggaaca

SEQ ID NO: 113189 - RNA, 18 nt, Artificial Sequence
  Synthetic
  misc_feature (3)..(4): n is a, c, g, or u
ugnnguaccgaccgacca

SEQ ID NO: 113190 - RNA, 19 nt, Artificial Sequence
  Synthetic
  misc_feature (4)..(5): n is a, c, g, or u
cugnnguaccgaccgacca

SEQ ID NO: 113191 - RNA, 20 nt, Artificial Sequence
  Synthetic
  misc_feature (1)..(1): n is a, c, g, or u
  misc_feature (5)..(6): n is a, c, g, or u
ncugnnguaccgaccgacca

SEQ ID NO: 113192 - RNA, 21 nt, Artificial Sequence
  Synthetic
  misc_feature (2)..(2): n is a, c, g, or u
  misc_feature (6)..(7): n is a, c, g, or u
gncugnnguaccgaccgacca

SEQ ID NO: 113193 - RNA, 22 nt, Artificial Sequence
  Synthetic
  misc_feature (3)..(3): n is a, c, g, or u
  misc_feature (7)..(8): n is a, c, g, or u
cgncugnnguaccgaccgacca

SEQ ID NO: 113194 - RNA, 23 nt, Artificial Sequence
  Synthetic
  misc_feature (4)..(4): n is a, c, g, or u
  misc_feature (8)..(9): n is a, c, g, or u
ccgncugnnguaccgaccgacca

SEQ ID NO: 113195 - RNA, 24 nt, Artificial Sequence
  Synthetic
  misc_feature (5)..(5): n is a, c, g, or u
  misc_feature (9)..(10): n is a, c, g, or u
uccgncugnnguaccgaccgacca

SEQ ID NO: 113196 - RNA, 18 nt, Artificial Sequence
  Synthetic
  misc_feature (9)..(10): n is a, c, g, or u
aggguucannccucccca

SEQ ID NO: 113197 - RNA, 19 nt, Artificial Sequence
  Synthetic
  misc_feature (10)..(11): n is a, c, g, or u
caggguucannccucccca

SEQ ID NO: 113198 - RNA, 20 nt, Artificial Sequence
  Synthetic
  misc_feature (11)..(12): n is a, c, g, or u
ccaggguucannccucccca

SEQ ID NO: 113199 - RNA, 21 nt, Artificial Sequence
  Synthetic
  misc_feature (12)..(13): n is a, c, g, or u
gccaggguucannccucccca

SEQ ID NO: 113200 - RNA, 22 nt, Artificial Sequence
  Synthetic
  misc_feature (13)..(14): n is a, c, g, or u
ggccaggguucannccucccca

SEQ ID NO: 113201 - RNA, 23 nt, Artificial Sequence
  Synthetic
  misc_feature (14)..(15): n is a, c, g, or u
gggccaggguucannccucccca

SEQ ID NO: 113202 - RNA, 24 nt, Artificial Sequence
  Synthetic
  misc_feature (15)..(16): n is a, c, g, or u
cgggccaggguucannccucccca

SEQ ID NO: 113203 - RNA, 18 nt, Artificial Sequence
  Synthetic
gaccaccgugaacgccca

SEQ ID NO: 113204 - RNA, 19 nt, Artificial Sequence
  Synthetic
agaccaccgugaacgccca

SEQ ID NO: 113205 - RNA, 20 nt, Artificial Sequence
  Synthetic
gagaccaccgugaacgccca

SEQ ID NO: 113206 - RNA, 21 nt, Artificial Sequence
  Synthetic
ggagaccaccgugaacgccca

SEQ ID NO: 113207 - RNA, 22 nt, Artificial Sequence
  Synthetic
uggagaccaccgugaacgccca

SEQ ID NO: 113208 - RNA, 23 nt, Artificial Sequence
  Synthetic
auggagaccaccgugaacgccca

SEQ ID NO: 113209 - RNA, 24 nt, Artificial Sequence
  Synthetic
cauggagaccaccgugaacgccca

SEQ ID NO: 113210 - RNA, 18 nt, Artificial Sequence
  Synthetic
  misc_feature (10)..(10): n is a, c, g, or u
ggaacaagancuacagca

SEQ ID NO: 113211 - RNA, 19 nt, Artificial Sequence
  Synthetic
  misc_feature (11)..(11): n is a, c, g, or u
gggaacaagancuacagca

SEQ ID NO: 113212 - RNA, 20 nt, Artificial Sequence
  Synthetic
  misc_feature (12)..(12): n is a, c, g, or u
ugggaacaagancuacagca

SEQ ID NO: 113213 - RNA, 21 nt, Artificial Sequence
  Synthetic
  misc_feature (13)..(13): n is a, c, g, or u
uugggaacaagancuacagca

SEQ ID NO: 113214 - RNA, 22 nt, Artificial Sequence
  Synthetic
  misc_feature (14)..(14): n is a, c, g, or u
cuugggaacaagancuacagca

SEQ ID NO: 113215 - RNA, 23 nt, Artificial Sequence
  Synthetic
  misc_feature (15)..(15): n is a, c, g, or u
ucuugggaacaagancuacagca

SEQ ID NO: 113216 - RNA, 24 nt, Artificial Sequence
  Synthetic
  misc_feature (16)..(16): n is a, c, g, or u
uucuugggaacaagancuacagca

SEQ ID NO: 113217 - RNA, 18 nt, Artificial Sequence
  Synthetic
  misc_feature (11)..(11): n is a, c, g, or u
gaucaucaacnaccagca

SEQ ID NO: 113218 - RNA, 19 nt, Artificial Sequence
  Synthetic
  misc_feature (12)..(12): n is a, c, g, or u
ggaucaucaacnaccagca

SEQ ID NO: 113219 - RNA, 20 nt, Artificial Sequence
  Synthetic
  misc_feature (13)..(13): n is a, c, g, or u
aggaucaucaacnaccagca

SEQ ID NO: 113220 - RNA, 21 nt, Artificial Sequence
  Synthetic
  misc_feature (14)..(14): n is a, c, g, or u
caggaucaucaacnaccagca

SEQ ID NO: 113221 - RNA, 22 nt, Artificial Sequence
  Synthetic
  misc_feature (15)..(15): n is a, c, g, or u
ccaggaucaucaacnaccagca

SEQ ID NO: 113222 - RNA, 23 nt, Artificial Sequence
  Synthetic
  misc_feature (16)..(16): n is a, c, g, or u
uccaggaucaucaacnaccagca

SEQ ID NO: 113223 - RNA, 24 nt, Artificial Sequence
  Synthetic
  misc_feature (17)..(17): n is a, c, g, or u
uuccaggaucaucaacnaccagca

SEQ ID NO: 113224 - RNA, 18 nt, Artificial Sequence
  Synthetic
ucaccucugcacgucgca

SEQ ID NO: 113225 - RNA, 19 nt, Artificial Sequence
  Synthetic
uucaccucugcacgucgca

SEQ ID NO: 113226 - RNA, 20 nt, Artificial Sequence
  Synthetic
cuucaccucugcacgucgca

SEQ ID NO: 113227 - RNA, 21 nt, Artificial Sequence
  Synthetic
gcuucaccucugcacgucgca

SEQ ID NO: 113228 - RNA, 22 nt, Artificial Sequence
  Synthetic
cgcuucaccucugcacgucgca

SEQ ID NO: 113229 - RNA, 23 nt, Artificial Sequence
  Synthetic
ucgcuucaccucugcacgucgca

SEQ ID NO: 113230 - RNA, 24 nt, Artificial Sequence
  Synthetic
uucgcuucaccucugcacgucgca

SEQ ID NO: 113231 - RNA, 18 nt, Artificial Sequence
  Synthetic
ccaaaccucgaaaaggca

SEQ ID NO: 113232 - RNA, 19 nt, Artificial Sequence
  Synthetic
uccaaaccucgaaaaggca

SEQ ID NO: 113233 - RNA, 20 nt, Artificial Sequence
  Synthetic
uuccaaaccucgaaaaggca

SEQ ID NO: 113234 - RNA, 21 nt, Artificial Sequence
  Synthetic
cuuccaaaccucgaaaaggca

SEQ ID NO: 113235 - RNA, 22 nt, Artificial Sequence
  Synthetic
ucuuccaaaccucgaaaaggca

SEQ ID NO: 113236 - RNA, 23 nt, Artificial Sequence
  Synthetic
gucuuccaaaccucgaaaaggca

SEQ ID NO: 113237 - RNA, 24 nt, Artificial Sequence
  Synthetic
ggucuuccaaaccucgaaaaggca

SEQ ID NO: 113238 - RNA, 18 nt, Artificial Sequence
  Synthetic
ucauccucaggccaugca

SEQ ID NO: 113239 - RNA, 19 nt, Artificial Sequence
  Synthetic
cucauccucaggccaugca

SEQ ID NO: 113240 - RNA, 20 nt, Artificial Sequence
  Synthetic
acucauccucaggccaugca

SEQ ID NO: 113241 - RNA, 21 nt, Artificial Sequence
  Synthetic
cacucauccucaggccaugca

SEQ ID NO: 113242 - RNA, 22 nt, Artificial Sequence
  Synthetic
acacucauccucaggccaugca

SEQ ID NO: 113243 - RNA, 23 nt, Artificial Sequence
  Synthetic
gacacucauccucaggccaugca

SEQ ID NO: 113244 - RNA, 24 nt, Artificial Sequence
  Synthetic
  misc_feature (1)..(1): n is a, c, g, or u
ngacacucauccucaggccaugca

SEQ ID NO: 113245 - RNA, 18 nt, Artificial Sequence
  Synthetic
  misc_feature (8)..(8): n is a, c, g, or u
  misc_feature (11)..(11): n is a, c, g, or u
ggucuggngcnaaacuca

SEQ ID NO: 113246 - RNA, 19 nt, Artificial Sequence
  Synthetic
  misc_feature (1)..(1): n is a, c, g, or u
  misc_feature (9)..(9): n is a, c, g, or u
  misc_feature (12)..(12): n is a, c, g, or u
nggucuggngcnaaacuca

SEQ ID NO: 113247 - RNA, 20 nt, Artificial Sequence
  Synthetic
  misc_feature (2)..(2): n is a, c, g, or u
  misc_feature (10)..(10): n is a, c, g, or u
  misc_feature (13)..(13): n is a, c, g, or u
cnggucuggngcnaaacuca

SEQ ID NO: 113248 - RNA, 21 nt, Artificial Sequence
  Synthetic
  misc_feature (3)..(3): n is a, c, g, or u
  misc_feature (11)..(11): n is a, c, g, or u
  misc_feature (14)..(14): n is a, c, g, or u
gcnggucuggngcnaaacuca

SEQ ID NO: 113249 - RNA, 22 nt, Artificial Sequence
  Synthetic
  misc_feature (4)..(4): n is a, c, g, or u
  misc_feature (12)..(12): n is a, c, g, or u
  misc_feature (15)..(15): n is a, c, g, or u
agcnggucuggngcnaaacuca

SEQ ID NO: 113250 - RNA, 23 nt, Artificial Sequence
  Synthetic
  misc_feature (5)..(5): n is a, c, g, or u
  misc_feature (13)..(13): n is a, c, g, or u
  misc_feature (16)..(16): n is a, c, g, or u
cagcnggucuggngcnaaacuca

SEQ ID NO: 113251 - RNA, 24 nt, Artificial Sequence
  Synthetic
  misc_feature (6)..(6): n is a, c, g, or u
  misc_feature (14)..(14): n is a, c, g, or u
  misc_feature (17)..(17): n is a, c, g, or u
gcagcnggucuggngcnaaacuca

SEQ ID NO: 113252 - RNA, 18 nt, Artificial Sequence
  Synthetic
  misc_feature (7)..(7): n is a, c, g, or u
cugcacnacuccugcuca

SEQ ID NO: 113253 - RNA, 19 nt, Artificial Sequence
  Synthetic
  misc_feature (8)..(8): n is a, c, g, or u
ccugcacnacuccugcuca

SEQ ID NO: 113254 - RNA, 20 nt, Artificial Sequence
  Synthetic
  misc_feature (9)..(9): n is a, c, g, or u
accugcacnacuccugcuca

SEQ ID NO: 113255 - RNA, 21 nt, Artificial Sequence
  Synthetic
  misc_feature (10)..(10): n is a, c, g, or u
aaccugcacnacuccugcuca

SEQ ID NO: 113256 - RNA, 22 nt, Artificial Sequence
  Synthetic
  misc_feature (11)..(11): n is a, c, g, or u
aaaccugcacnacuccugcuca

SEQ ID NO: 113257 - RNA, 23 nt, Artificial Sequence
  Synthetic
  misc_feature (12)..(12): n is a, c, g, or u
aaaaccugcacnacuccugcuca

SEQ ID NO: 113258 - RNA, 24 nt, Artificial Sequence
  Synthetic
  misc_feature (13)..(13): n is a, c, g, or u
caaaaccugcacnacuccugcuca

SEQ ID NO: 113259 - RNA, 18 nt, Artificial Sequence
  Synthetic
  misc_feature (6)..(6): n is a, c, g, or u
ccucanaaaacaaaaaga

SEQ ID NO: 113260 - RNA, 19 nt, Artificial Sequence
  Synthetic
  misc_feature (7)..(7): n is a, c, g, or u
cccucanaaaacaaaaaga

SEQ ID NO: 113261 - RNA, 20 nt, Artificial Sequence
  Synthetic
  misc_feature (8)..(8): n is a, c, g, or u
acccucanaaaacaaaaaga

SEQ ID NO: 113262 - RNA, 21 nt, Artificial Sequence
  Synthetic
  misc_feature (9)..(9): n is a, c, g, or u
aacccucanaaaacaaaaaga

SEQ ID NO: 113263 - RNA, 22 nt, Artificial Sequence
  Synthetic
  misc_feature (10)..(10): n is a, c, g, or u
aaacccucanaaaacaaaaaga

SEQ ID NO: 113264 - RNA, 23 nt, Artificial Sequence
  Synthetic
  misc_feature (11)..(11): n is a, c, g, or u
uaaacccucanaaaacaaaaaga

SEQ ID NO: 113265 - RNA, 24 nt, Artificial Sequence
  Synthetic
  misc_feature (12)..(12): n is a, c, g, or u
uuaaacccucanaaaacaaaaaga

SEQ ID NO: 113266 - RNA, 18 nt, Artificial Sequence
  Synthetic
cgucaaucuuaucgaaga

SEQ ID NO: 113267 - RNA, 19 nt, Artificial Sequence
  Synthetic
ucgucaaucuuaucgaaga

SEQ ID NO: 113268 - RNA, 20 nt, Artificial Sequence
  Synthetic
aucgucaaucuuaucgaaga

SEQ ID NO: 113269 - RNA, 21 nt, Artificial Sequence
  Synthetic
uaucgucaaucuuaucgaaga

SEQ ID NO: 113270 - RNA, 22 nt, Artificial Sequence
  Synthetic
auaucgucaaucuuaucgaaga

SEQ ID NO: 113271 - RNA, 23 nt, Artificial Sequence
  Synthetic
cauaucgucaaucuuaucgaaga

SEQ ID NO: 113272 - RNA, 24 nt, Artificial Sequence
  Synthetic
ccauaucgucaaucuuaucgaaga

SEQ ID NO: 113273 - RNA, 18 nt, Artificial Sequence
  Synthetic
caacucagaaaauccaga

SEQ ID NO: 113274 - RNA, 19 nt, Artificial Sequence
  Synthetic
ccaacucagaaaauccaga

SEQ ID NO: 113275 - RNA, 20 nt, Artificial Sequence
  Synthetic
gccaacucagaaaauccaga

SEQ ID NO: 113276 - RNA, 21 nt, Artificial Sequence
  Synthetic
agccaacucagaaaauccaga

SEQ ID NO: 113277 - RNA, 22 nt, Artificial Sequence
  Synthetic
aagccaacucagaaaauccaga

SEQ ID NO: 113278 - RNA, 23 nt, Artificial Sequence
  Synthetic
aaagccaacucagaaaauccaga

SEQ ID NO: 113279 - RNA, 24 nt, Artificial Sequence
  Synthetic
caaagccaacucagaaaauccaga

SEQ ID NO: 113280 - RNA, 18 nt, Artificial Sequence
  Synthetic
cuguacaaaaccuacgga

SEQ ID NO: 113281 - RNA, 19 nt, Artificial Sequence
  Synthetic
gcuguacaaaaccuacgga

SEQ ID NO: 113282 - RNA, 20 nt, Artificial Sequence
  Synthetic
ugcuguacaaaaccuacgga

SEQ ID NO: 113283 - RNA, 21 nt, Artificial Sequence
  Synthetic
uugcuguacaaaaccuacgga

SEQ ID NO: 113284 - RNA, 22 nt, Artificial Sequence
  Synthetic
guugcuguacaaaaccuacgga

SEQ ID NO: 113285 - RNA, 23 nt, Artificial Sequence
  Synthetic
uguugcuguacaaaaccuacgga

SEQ ID NO: 113286 - RNA, 24 nt, Artificial Sequence
  Synthetic
auguugcuguacaaaaccuacgga

SEQ ID NO: 113287 - RNA, 18 nt, Artificial Sequence
  Synthetic
cgcaaaauaccuauggga

SEQ ID NO: 113288 - RNA, 19 nt, Artificial Sequence
  Synthetic
ucgcaaaauaccuauggga

SEQ ID NO: 113289 - RNA, 20 nt, Artificial Sequence
  Synthetic
uucgcaaaauaccuauggga

SEQ ID NO: 113290 - RNA, 21 nt, Artificial Sequence
  Synthetic
uuucgcaaaauaccuauggga

SEQ ID NO: 113291 - RNA, 22 nt, Artificial Sequence
  Synthetic
cuuucgcaaaauaccuauggga

SEQ ID NO: 113292 - RNA, 23 nt, Artificial Sequence
  Synthetic
gcuuucgcaaaauaccuauggga

SEQ ID NO: 113293 - RNA, 24 nt, Artificial Sequence
  Synthetic
ggcuuucgcaaaauaccuauggga

SEQ ID NO: 113294 - RNA, 18 nt, Artificial Sequence
  Synthetic
gacgccaacaagguggga

SEQ ID NO: 113295 - RNA, 19 nt, Artificial Sequence
  Synthetic
ggacgccaacaagguggga

SEQ ID NO: 113296 - RNA, 20 nt, Artificial Sequence
  Synthetic
cggacgccaacaagguggga

SEQ ID NO: 113297 - RNA, 21 nt, Artificial Sequence
  Synthetic
ccggacgccaacaagguggga

SEQ ID NO: 113298 - RNA, 22 nt, Artificial Sequence
  Synthetic
gccggacgccaacaagguggga

SEQ ID NO: 113299 - RNA, 23 nt, Artificial Sequence
  Synthetic
ggccggacgccaacaagguggga

SEQ ID NO: 113300 - RNA, 24 nt, Artificial Sequence
  Synthetic
uggccggacgccaacaagguggga

SEQ ID NO: 113301 - RNA, 18 nt, Artificial Sequence
  Synthetic
  misc_feature (15)..(15): n is a, c, g, or u
agacuguguguuuanuga

SEQ ID NO: 113302 - RNA, 19 nt, Artificial Sequence
  Synthetic
  misc_feature (16)..(16): n is a, c, g, or u
aagacuguguguuuanuga

SEQ ID NO: 113303 - RNA, 20 nt, Artificial Sequence
  Synthetic
  misc_feature (17)..(17): n is a, c, g, or u
aaagacuguguguuuanuga

SEQ ID NO: 113304 - RNA, 21 nt, Artificial Sequence
  Synthetic
  misc_feature (18)..(18): n is a, c, g, or u
caaagacuguguguuuanuga

SEQ ID NO: 113305 - RNA, 22 nt, Artificial Sequence
  Synthetic
  misc_feature (19)..(19): n is a, c, g, or u
ucaaagacuguguguuuanuga

SEQ ID NO: 113306 - RNA, 23 nt, Artificial Sequence
  Synthetic
  misc_feature (20)..(20): n is a, c, g, or u
uucaaagacuguguguuuanuga

SEQ ID NO: 113307 - RNA, 24 nt, Artificial Sequence
  Synthetic
  misc_feature (21)..(21): n is a, c, g, or u
cuucaaagacuguguguuuanuga

SEQ ID NO: 113308 - RNA, 18 nt, Artificial Sequence
  Synthetic
  misc_feature (10)..(10): n is a, c, g, or u
uguaaacagnccuauuga

SEQ ID NO: 113309 - RNA, 19 nt, Artificial Sequence
  Synthetic
  misc_feature (11)..(11): n is a, c, g, or u
cuguaaacagnccuauuga

SEQ ID NO: 113310 - RNA, 20 nt, Artificial Sequence
  Synthetic
  misc_feature (12)..(12): n is a, c, g, or u
ccuguaaacagnccuauuga

SEQ ID NO: 113311 - RNA, 21 nt, Artificial Sequence
  Synthetic
  misc_feature (13)..(13): n is a, c, g, or u
uccuguaaacagnccuauuga

SEQ ID NO: 113312 - RNA, 22 nt, Artificial Sequence
  Synthetic
  misc_feature (14)..(14): n is a, c, g, or u
uuccuguaaacagnccuauuga

SEQ ID NO: 113313 - RNA, 23 nt, Artificial Sequence
  Synthetic
  misc_feature (15)..(15): n is a, c, g, or u
cuuccuguaaacagnccuauuga

SEQ ID NO: 113314 - RNA, 24 nt, Artificial Sequence
  Synthetic
  misc_feature (16)..(16): n is a, c, g, or u
acuuccuguaaacagnccuauuga

SEQ ID NO: 113315 - RNA, 18 nt, Artificial Sequence
  Synthetic
  misc_feature (17)..(17): n is a, c, g, or u
ccugucuuacuuuuggna

SEQ ID NO: 113316 - RNA, 19 nt, Artificial Sequence
  Synthetic
  misc_feature (18)..(18): n is a, c, g, or u
uccugucuuacuuuuggna

SEQ ID NO: 113317 - RNA, 20 nt, Artificial Sequence
  Synthetic
  misc_feature (19)..(19): n is a, c, g, or u
uuccugucuuacuuuuggna

SEQ ID NO: 113318 - RNA, 21 nt, Artificial Sequence
  Synthetic
  misc_feature (20)..(20): n is a, c, g, or u
uuuccugucuuacuuuuggna

SEQ ID NO: 113319 - RNA, 22 nt, Artificial Sequence
  Synthetic
  misc_feature (21)..(21): n is a, c, g, or u
auuuccugucuuacuuuuggna

SEQ ID NO: 113320 - RNA, 23 nt, Artificial Sequence
  Synthetic
  misc_feature (22)..(22): n is a, c, g, or u
cauuuccugucuuacuuuuggna

SEQ ID NO: 113321 - RNA, 24 nt, Artificial Sequence
  Synthetic
  misc_feature (23)..(23): n is a, c, g, or u
acauuuccugucuuacuuuuggna

SEQ ID NO: 113322 - RNA, 18 nt, Artificial Sequence
  Synthetic
gcuuucgcaaaauaccua

SEQ ID NO: 113323 - RNA, 19 nt, Artificial Sequence
  Synthetic
ggcuuucgcaaaauaccua

SEQ ID NO: 113324 - RNA, 20 nt, Artificial Sequence
  Synthetic
gggcuuucgcaaaauaccua

SEQ ID NO: 113325 - RNA, 21 nt, Artificial Sequence
  Synthetic
ugggcuuucgcaaaauaccua

SEQ ID NO: 113326 - RNA, 22 nt, Artificial Sequence
  Synthetic
uugggcuuucgcaaaauaccua

SEQ ID NO: 113327 - RNA, 23 nt, Artificial Sequence
  Synthetic
cuugggcuuucgcaaaauaccua

SEQ ID NO: 113328 - RNA, 24 nt, Artificial Sequence
  Synthetic
ucuugggcuuucgcaaaauaccua

SEQ ID NO: 113329 - RNA, 18 nt, Artificial Sequence
  Synthetic
aagacuggggacccugua

SEQ ID NO: 113330 - RNA, 19 nt, Artificial Sequence
  Synthetic
gaagacuggggacccugua

SEQ ID NO: 113331 - RNA, 20 nt, Artificial Sequence
  Synthetic
cgaagacuggggacccugua

SEQ ID NO: 113332 - RNA, 21 nt, Artificial Sequence
  Synthetic
ucgaagacuggggacccugua

SEQ ID NO: 113333 - RNA, 22 nt, Artificial Sequence
  Synthetic
aucgaagacuggggacccugua

SEQ ID NO: 113334 - RNA, 23 nt, Artificial Sequence
  Synthetic
uaucgaagacuggggacccugua

SEQ ID NO: 113335 - RNA, 24 nt, Artificial Sequence
  Synthetic
uuaucgaagacuggggacccugua

SEQ ID NO: 113336 - RNA, 18 nt, Artificial Sequence
  Synthetic
caccgccucugcucugua

SEQ ID NO: 113337 - RNA, 19 nt, Artificial Sequence
  Synthetic
acaccgccucugcucugua

SEQ ID NO: 113338 - RNA, 20 nt, Artificial Sequence
  Synthetic
gacaccgccucugcucugua

SEQ ID NO: 113339 - RNA, 21 nt, Artificial Sequence
  Synthetic
cgacaccgccucugcucugua

SEQ ID NO: 113340 - RNA, 22 nt, Artificial Sequence
  Synthetic
ucgacaccgccucugcucugua

SEQ ID NO: 113341 - RNA, 23 nt, Artificial Sequence
  Synthetic
cucgacaccgccucugcucugua

SEQ ID NO: 113342 - RNA, 24 nt, Artificial Sequence
  Synthetic
  misc_feature (1)..(1): n is a, c, g, or u
ncucgacaccgccucugcucugua

SEQ ID NO: 113343 - RNA, 18 nt, Artificial Sequence
  Synthetic
  misc_feature (1)..(1): n is a, c, g, or u
nccauaucgucaaucuua

SEQ ID NO: 113344 - RNA, 19 nt, Artificial Sequence
  Synthetic
  misc_feature (2)..(2): n is a, c, g, or u
unccauaucgucaaucuua

SEQ ID NO: 113345 - RNA, 20 nt, Artificial Sequence
  Synthetic
  misc_feature (3)..(3): n is a, c, g, or u
cunccauaucgucaaucuua

SEQ ID NO: 113346 - RNA, 21 nt, Artificial Sequence
  Synthetic
  misc_feature (4)..(4): n is a, c, g, or u
ucunccauaucgucaaucuua

SEQ ID NO: 113347 - RNA, 22 nt, Artificial Sequence
  Synthetic
  misc_feature (5)..(5): n is a, c, g, or u
cucunccauaucgucaaucuua

SEQ ID NO: 113348 - RNA, 23 nt, Artificial Sequence
  Synthetic
  misc_feature (1)..(1): n is a, c, g, or u
  misc_feature (6)..(6): n is a, c, g, or u
ncucunccauaucgucaaucuua

SEQ ID NO: 113349 - RNA, 24 nt, Artificial Sequence
  Synthetic
  misc_feature (2)..(2): n is a, c, g, or u
  misc_feature (7)..(7): n is a, c, g, or u
gncucunccauaucgucaaucuua

SEQ ID NO: 113350 - RNA, 18 nt, Artificial Sequence
  Synthetic
auaaggugggaaacuuua

SEQ ID NO: 113351 - RNA, 19 nt, Artificial Sequence
  Synthetic
cauaaggugggaaacuuua

SEQ ID NO: 113352 - RNA, 20 nt, Artificial Sequence
  Synthetic
  misc_feature (1)..(1): n is a, c, g, or u
ncauaaggugggaaacuuua

SEQ ID NO: 113353 - RNA, 21 nt, Artificial Sequence
  Synthetic
  misc_feature (2)..(2): n is a, c, g, or u
cncauaaggugggaaacuuua

SEQ ID NO: 113354 - RNA, 22 nt, Artificial Sequence
  Synthetic
  misc_feature (3)..(3): n is a, c, g, or u
acncauaaggugggaaacuuua

SEQ ID NO: 113355 - RNA, 23 nt, Artificial Sequence
  Synthetic
  misc_feature (4)..(4): n is a, c, g, or u
gacncauaaggugggaaacuuua

SEQ ID NO: 113356 - RNA, 24 nt, Artificial Sequence
  Synthetic
  misc_feature (5)..(5): n is a, c, g, or u
ggacncauaaggugggaaacuuua

SEQ ID NO: 113357 - RNA, 18 nt, Artificial Sequence
  Synthetic
  misc_feature (3)..(3): n is a, c, g, or u
cunacaguaaaugaaaac

SEQ ID NO: 113358 - RNA, 19 nt, Artificial Sequence
  Synthetic
  misc_feature (4)..(4): n is a, c, g, or u
ccunacaguaaaugaaaac

SEQ ID NO: 113359 - RNA, 20 nt, Artificial Sequence
  Synthetic
  misc_feature (5)..(5): n is a, c, g, or u
cccunacaguaaaugaaaac

SEQ ID NO: 113360 - RNA, 21 nt, Artificial Sequence
  Synthetic
  misc_feature (6)..(6): n is a, c, g, or u
ccccunacaguaaaugaaaac

SEQ ID NO: 113361 - RNA, 22 nt, Artificial Sequence
  Synthetic
  misc_feature (1)..(1): n is a, c, g, or u
  misc_feature (7)..(7): n is a, c, g, or u
nccccunacaguaaaugaaaac

SEQ ID NO: 113362 - RNA, 23 nt, Artificial Sequence
  Synthetic
  misc_feature (2)..(2): n is a, c, g, or u
  misc_feature (8)..(8): n is a, c, g, or u
gnccccunacaguaaaugaaaac

SEQ ID NO: 113363 - RNA, 24 nt, Artificial Sequence
  Synthetic
  misc_feature (3)..(3): n is a, c, g, or u
  misc_feature (9)..(9): n is a, c, g, or u
ggnccccunacaguaaaugaaaac

SEQ ID NO: 113364 - RNA, 18 nt, Artificial Sequence
  Synthetic
ggggacccuguaccgaac

SEQ ID NO: 113365 - RNA, 19 nt, Artificial Sequence
  Synthetic
uggggacccuguaccgaac

SEQ ID NO: 113366 - RNA, 20 nt, Artificial Sequence
  Synthetic
cuggggacccuguaccgaac

SEQ ID NO: 113367 - RNA, 21 nt, Artificial Sequence
  Synthetic
acuggggacccuguaccgaac

SEQ ID NO: 113368 - RNA, 22 nt, Artificial Sequence
  Synthetic
gacuggggacccuguaccgaac

SEQ ID NO: 113369 - RNA, 23 nt, Artificial Sequence
  Synthetic
agacuggggacccuguaccgaac

SEQ ID NO: 113370 - RNA, 24 nt, Artificial Sequence
  Synthetic
aagacuggggacccuguaccgaac

SEQ ID NO: 113371 - RNA, 18 nt, Artificial Sequence
  Synthetic
accaccgugaacgcccac

SEQ ID NO: 113372 - RNA, 19 nt, Artificial Sequence
  Synthetic
gaccaccgugaacgcccac

SEQ ID NO: 113373 - RNA, 20 nt, Artificial Sequence
  Synthetic
agaccaccgugaacgcccac

SEQ ID NO: 113374 - RNA, 21 nt, Artificial Sequence
  Synthetic
gagaccaccgugaacgcccac

SEQ ID NO: 113375 - RNA, 22 nt, Artificial Sequence
  Synthetic
ggagaccaccgugaacgcccac

SEQ ID NO: 113376 - RNA, 23 nt, Artificial Sequence
  Synthetic
uggagaccaccgugaacgcccac

SEQ ID NO: 113377 - RNA, 24 nt, Artificial Sequence
  Synthetic
auggagaccaccgugaacgcccac

SEQ ID NO: 113378 - RNA, 18 nt, Artificial Sequence
  Synthetic
  misc_feature (15)..(15): n is a, c, g, or u
ugggaccucaacccncac

SEQ ID NO: 113379 - RNA, 19 nt, Artificial Sequence
  Synthetic
  misc_feature (16)..(16): n is a, c, g, or u
uugggaccucaacccncac

SEQ ID NO: 113380 - RNA, 20 nt, Artificial Sequence
  Synthetic
  misc_feature (17)..(17): n is a, c, g, or u
auugggaccucaacccncac

SEQ ID NO: 113381 - RNA, 21 nt, Artificial Sequence
  Synthetic
  misc_feature (18)..(18): n is a, c, g, or u
gauugggaccucaacccncac

SEQ ID NO: 113382 - RNA, 22 nt, Artificial Sequence
  Synthetic
  misc_feature (19)..(19): n is a, c, g, or u
agauugggaccucaacccncac

SEQ ID NO: 113383 - RNA, 23 nt, Artificial Sequence
  Synthetic
  misc_feature (20)..(20): n is a, c, g, or u
cagauugggaccucaacccncac

SEQ ID NO: 113384 - RNA, 24 nt, Artificial Sequence
  Synthetic
  misc_feature (21)..(21): n is a, c, g, or u
ccagauugggaccucaacccncac

SEQ ID NO: 113385 - RNA, 18 nt, Artificial Sequence
  Synthetic
gucaaucuuaucgaagac

SEQ ID NO: 113386 - RNA, 19 nt, Artificial Sequence
  Synthetic
cgucaaucuuaucgaagac

SEQ ID NO: 113387 - RNA, 20 nt, Artificial Sequence
  Synthetic
ucgucaaucuuaucgaagac

SEQ ID NO: 113388 - RNA, 21 nt, Artificial Sequence
  Synthetic
aucgucaaucuuaucgaagac

SEQ ID NO: 113389 - RNA, 22 nt, Artificial Sequence
  Synthetic
uaucgucaaucuuaucgaagac

SEQ ID NO: 113390 - RNA, 23 nt, Artificial Sequence
  Synthetic
auaucgucaaucuuaucgaagac

SEQ ID NO: 113391 - RNA, 24 nt, Artificial Sequence
  Synthetic
cauaucgucaaucuuaucgaagac

SEQ ID NO: 113392 - RNA, 18 nt, Artificial Sequence
  Synthetic
  misc_feature (7)..(7): n is a, c, g, or u
  misc_feature (9)..(9): n is a, c, g, or u
gguuaangnucuuuguac

SEQ ID NO: 113393 - RNA, 19 nt, Artificial Sequence
  Synthetic
  misc_feature (8)..(8): n is a, c, g, or u
  misc_feature (10)..(10): n is a, c, g, or u
agguuaangnucuuuguac

SEQ ID NO: 113394 - RNA, 20 nt, Artificial Sequence
  Synthetic
  misc_feature (9)..(9): n is a, c, g, or u
  misc_feature (11)..(11): n is a, c, g, or u
uagguuaangnucuuuguac

SEQ ID NO: 113395 - RNA, 21 nt, Artificial Sequence
  Synthetic
  misc_feature (10)..(10): n is a, c, g, or u
  misc_feature (12)..(12): n is a, c, g, or u
uuagguuaangnucuuuguac

SEQ ID NO: 113396 - RNA, 22 nt, Artificial Sequence
  Synthetic
  misc_feature (1)..(1): n is a, c, g, or u
  misc_feature (11)..(11): n is a, c, g, or u
  misc_feature (13)..(13): n is a, c, g, or u
nuuagguuaangnucuuuguac

SEQ ID NO: 113397 - RNA, 23 nt, Artificial Sequence
  Synthetic
  misc_feature (2)..(2): n is a, c, g, or u
  misc_feature (12)..(12): n is a, c, g, or u
  misc_feature (14)..(14): n is a, c, g, or u
gnuuagguuaangnucuuuguac

SEQ ID NO: 113398 - RNA, 24 nt, Artificial Sequence
  Synthetic
  misc_feature (3)..(3): n is a, c, g, or u
  misc_feature (13)..(13): n is a, c, g, or u
  misc_feature (15)..(15): n is a, c, g, or u
agnuuagguuaangnucuuuguac

SEQ ID NO: 113399 - RNA, 18 nt, Artificial Sequence
  Synthetic
gggcgcaccucucuuuac

SEQ ID NO: 113400 - RNA, 19 nt, Artificial Sequence
  Synthetic
ggggcgcaccucucuuuac

SEQ ID NO: 113401 - RNA, 20 nt, Artificial Sequence
  Synthetic
cggggcgcaccucucuuuac

SEQ ID NO: 113402 - RNA, 21 nt, Artificial Sequence
  Synthetic
acggggcgcaccucucuuuac

SEQ ID NO: 113403 - RNA, 22 nt, Artificial Sequence
  Synthetic
cacggggcgcaccucucuuuac

SEQ ID NO: 113404 - RNA, 23 nt, Artificial Sequence
  Synthetic
ccacggggcgcaccucucuuuac

SEQ ID NO: 113405 - RNA, 24 nt, Artificial Sequence
  Synthetic
accacggggcgcaccucucuuuac

SEQ ID NO: 113406 - RNA, 18 nt, Artificial Sequence
  Synthetic
agguuggucuuccaaacc

SEQ ID NO: 113407 - RNA, 19 nt, Artificial Sequence
  Synthetic
gagguuggucuuccaaacc

SEQ ID NO: 113408 - RNA, 20 nt, Artificial Sequence
  Synthetic
ggagguuggucuuccaaacc

SEQ ID NO: 113409 - RNA, 21 nt, Artificial Sequence
  Synthetic
gggagguuggucuuccaaacc

SEQ ID NO: 113410 - RNA, 22 nt, Artificial Sequence
  Synthetic
ugggagguuggucuuccaaacc

SEQ ID NO: 113411 - RNA, 23 nt, Artificial Sequence
  Synthetic
augggagguuggucuuccaaacc

SEQ ID NO: 113412 - RNA, 24 nt, Artificial Sequence
  Synthetic
caugggagguuggucuuccaaacc

SEQ ID NO: 113413 - RNA, 18 nt, Artificial Sequence
  Synthetic
cgucgcauggagaccacc

SEQ ID NO: 113414 - RNA, 19 nt, Artificial Sequence
  Synthetic
acgucgcauggagaccacc

SEQ ID NO: 113415 - RNA, 20 nt, Artificial Sequence
  Synthetic
cacgucgcauggagaccacc

SEQ ID NO: 113416 - RNA, 21 nt, Artificial Sequence
  Synthetic
gcacgucgcauggagaccacc

SEQ ID NO: 113417 - RNA, 22 nt, Artificial Sequence
  Synthetic
ugcacgucgcauggagaccacc

SEQ ID NO: 113418 - RNA, 23 nt, Artificial Sequence
  Synthetic
cugcacgucgcauggagaccacc

SEQ ID NO: 113419 - RNA, 24 nt, Artificial Sequence
  Synthetic
ucugcacgucgcauggagaccacc

SEQ ID NO: 113420 - RNA, 18 nt, Artificial Sequence
  Synthetic
caaugucaacgaccgacc

SEQ ID NO: 113421 - RNA, 19 nt, Artificial Sequence
  Synthetic
gcaaugucaacgaccgacc

SEQ ID NO: 113422 - RNA, 20 nt, Artificial Sequence
  Synthetic
agcaaugucaacgaccgacc

SEQ ID NO: 113423 - RNA, 21 nt, Artificial Sequence
  Synthetic
cagcaaugucaacgaccgacc

SEQ ID NO: 113424 - RNA, 22 nt, Artificial Sequence
  Synthetic
ucagcaaugucaacgaccgacc

SEQ ID NO: 113425 - RNA, 23 nt, Artificial Sequence
  Synthetic
uucagcaaugucaacgaccgacc

SEQ ID NO: 113426 - RNA, 24 nt, Artificial Sequence
  Synthetic
uuucagcaaugucaacgaccgacc

SEQ ID NO: 113427 - RNA, 18 nt, Artificial Sequence
  Synthetic
  misc_feature (4)..(5): n is a, c, g, or u
cugnnguaccgaccgacc

SEQ ID NO: 113428 - RNA, 19 nt, Artificial Sequence
  Synthetic
  misc_feature (1)..(1): n is a, c, g, or u
  misc_feature (5)..(6): n is a, c, g, or u
ncugnnguaccgaccgacc

SEQ ID NO: 113429 - RNA, 20 nt, Artificial Sequence
  Synthetic
  misc_feature (2)..(2): n is a, c, g, or u
  misc_feature (6)..(7): n is a, c, g, or u
gncugnnguaccgaccgacc

SEQ ID NO: 113430 - RNA, 21 nt, Artificial Sequence
  Synthetic
  misc_feature (3)..(3): n is a, c, g, or u
  misc_feature (7)..(8): n is a, c, g, or u
cgncugnnguaccgaccgacc

SEQ ID NO: 113431 - RNA, 22 nt, Artificial Sequence
  Synthetic
  misc_feature (4)..(4): n is a, c, g, or u
  misc_feature (8)..(9): n is a, c, g, or u
ccgncugnnguaccgaccgacc

SEQ ID NO: 113432 - RNA, 23 nt, Artificial Sequence
  Synthetic
  misc_feature (5)..(5): n is a, c, g, or u
  misc_feature (9)..(10): n is a, c, g, or u
uccgncugnnguaccgaccgacc

SEQ ID NO: 113433 - RNA, 24 nt, Artificial Sequence
  Synthetic
  misc_feature (6)..(6): n is a, c, g, or u
  misc_feature (10)..(11): n is a, c, g, or u
cuccgncugnnguaccgaccgacc

SEQ ID NO: 113434 - RNA, 18 nt, Artificial Sequence
  Synthetic
  misc_feature (10)..(11): n is a, c, g, or u
caggguucannccucccc

SEQ ID NO: 113435 - RNA, 19 nt, Artificial Sequence
  Synthetic
  misc_feature (11)..(12): n is a, c, g, or u
ccaggguucannccucccc

SEQ ID NO: 113436 - RNA, 20 nt, Artificial Sequence
  Synthetic
  misc_feature (12)..(13): n is a, c, g, or u
gccaggguucannccucccc

SEQ ID NO: 113437 - RNA, 21 nt, Artificial Sequence
  Synthetic
  misc_feature (13)..(14): n is a, c, g, or u
ggccaggguucannccucccc

SEQ ID NO: 113438 - RNA, 22 nt, Artificial Sequence
  Synthetic
  misc_feature (14)..(15): n is a, c, g, or u
gggccaggguucannccucccc

SEQ ID NO: 113439 - RNA, 23 nt, Artificial Sequence
  Synthetic
  misc_feature (15)..(16): n is a, c, g, or u
cgggccaggguucannccucccc

SEQ ID NO: 113440 - RNA, 24 nt, Artificial Sequence
  Synthetic
  misc_feature (16)..(17): n is a, c, g, or u
ucgggccaggguucannccucccc

SEQ ID NO: 113441 - RNA, 18 nt, Artificial Sequence
  Synthetic
  misc_feature (5)..(5): n is a, c, g, or u
acgangaggcaggucccc

SEQ ID NO: 113442 - RNA, 19 nt, Artificial Sequence
  Synthetic
  misc_feature (6)..(6): n is a, c, g, or u
gacgangaggcaggucccc

SEQ ID NO: 113443 - RNA, 20 nt, Artificial Sequence
  Synthetic
  misc_feature (7)..(7): n is a, c, g, or u
agacgangaggcaggucccc

SEQ ID NO: 113444 - RNA, 21 nt, Artificial Sequence
  Synthetic
  misc_feature (8)..(8): n is a, c, g, or u
uagacgangaggcaggucccc

SEQ ID NO: 113445 - RNA, 22 nt, Artificial Sequence
  Synthetic
  misc_feature (9)..(9): n is a, c, g, or u
uuagacgangaggcaggucccc

SEQ ID NO: 113446 - RNA, 23 nt, Artificial Sequence
  Synthetic
  misc_feature (10)..(10): n is a, c, g, or u
guuagacgangaggcaggucccc

SEQ ID NO: 113447 - RNA, 24 nt, Artificial Sequence
  Synthetic
  misc_feature (11)..(11): n is a, c, g, or u
uguuagacgangaggcaggucccc

SEQ ID NO: 113448 - RNA, 18 nt, Artificial Sequence
  Synthetic
ccgucggcgcugaauccc

SEQ ID NO: 113449 - RNA, 19 nt, Artificial Sequence
  Synthetic
cccgucggcgcugaauccc

SEQ ID NO: 113450 - RNA, 20 nt, Artificial Sequence
  Synthetic
ucccgucggcgcugaauccc

SEQ ID NO: 113451 - RNA, 21 nt, Artificial Sequence
  Synthetic
gucccgucggcgcugaauccc

SEQ ID NO: 113452 - RNA, 22 nt, Artificial Sequence
  Synthetic
cgucccgucggcgcugaauccc

SEQ ID NO: 113453 - RNA, 23 nt, Artificial Sequence
  Synthetic
acgucccgucggcgcugaauccc

SEQ ID NO: 113454 - RNA, 24 nt, Artificial Sequence
  Synthetic
uacgucccgucggcgcugaauccc

SEQ ID NO: 113455 - RNA, 18 nt, Artificial Sequence
  Synthetic
uuggaagauccagcaucc

SEQ ID NO: 113456 - RNA, 19 nt, Artificial Sequence
  Synthetic
uuuggaagauccagcaucc

SEQ ID NO: 113457 - RNA, 20 nt, Artificial Sequence
  Synthetic
auuuggaagauccagcaucc

SEQ ID NO: 113458 - RNA, 21 nt, Artificial Sequence
  Synthetic
aauuuggaagauccagcaucc

SEQ ID NO: 113459 - RNA, 22 nt, Artificial Sequence
  Synthetic
uaauuuggaagauccagcaucc

SEQ ID NO: 113460 - RNA, 23 nt, Artificial Sequence
  Synthetic
guaauuuggaagauccagcaucc

SEQ ID NO: 113461 - RNA, 24 nt, Artificial Sequence
  Synthetic
aguaauuuggaagauccagcaucc

SEQ ID NO: 113462 - RNA, 18 nt, Artificial Sequence
  Synthetic
acaucgcaucaggacucc

SEQ ID NO: 113463 - RNA, 19 nt, Artificial Sequence
  Synthetic
aacaucgcaucaggacucc

SEQ ID NO: 113464 - RNA, 20 nt, Artificial Sequence
  Synthetic
gaacaucgcaucaggacucc

SEQ ID NO: 113465 - RNA, 21 nt, Artificial Sequence
  Synthetic
agaacaucgcaucaggacucc

SEQ ID NO: 113466 - RNA, 22 nt, Artificial Sequence
  Synthetic
gagaacaucgcaucaggacucc

SEQ ID NO: 113467 - RNA, 23 nt, Artificial Sequence
  Synthetic
ggagaacaucgcaucaggacucc

SEQ ID NO: 113468 - RNA, 24 nt, Artificial Sequence
  Synthetic
uggagaacaucgcaucaggacucc

SEQ ID NO: 113469 - RNA, 18 nt, Artificial Sequence
  Synthetic
cccgcggacgaccccucc

SEQ ID NO: 113470 - RNA, 19 nt, Artificial Sequence
  Synthetic
ucccgcggacgaccccucc

SEQ ID NO: 113471 - RNA, 20 nt, Artificial Sequence
  Synthetic
aucccgcggacgaccccucc

SEQ ID NO: 113472 - RNA, 21 nt, Artificial Sequence
  Synthetic
aaucccgcggacgaccccucc

SEQ ID NO: 113473 - RNA, 22 nt, Artificial Sequence
  Synthetic
gaaucccgcggacgaccccucc

SEQ ID NO: 113474 - RNA, 23 nt, Artificial Sequence
  Synthetic
ugaaucccgcggacgaccccucc

SEQ ID NO: 113475 - RNA, 24 nt, Artificial Sequence
  Synthetic
cugaaucccgcggacgaccccucc

SEQ ID NO: 113476 - RNA, 18 nt, Artificial Sequence
  Synthetic
ucucaauguuaguauucc

SEQ ID NO: 113477 - RNA, 19 nt, Artificial Sequence
  Synthetic
aucucaauguuaguauucc

SEQ ID NO: 113478 - RNA, 20 nt, Artificial Sequence
  Synthetic
aaucucaauguuaguauucc

SEQ ID NO: 113479 - RNA, 21 nt, Artificial Sequence
  Synthetic
gaaucucaauguuaguauucc

SEQ ID NO: 113480 - RNA, 22 nt, Artificial Sequence
  Synthetic
ggaaucucaauguuaguauucc

SEQ ID NO: 113481 - RNA, 23 nt, Artificial Sequence
  Synthetic
gggaaucucaauguuaguauucc

SEQ ID NO: 113482 - RNA, 24 nt, Artificial Sequence
  Synthetic
cgggaaucucaauguuaguauucc

SEQ ID NO: 113483 - RNA, 18 nt, Artificial Sequence
  Synthetic
  misc_feature (11)..(11): n is a, c, g, or u
gggaacaagancuacagc

SEQ ID NO: 113484 - RNA, 19 nt, Artificial Sequence
  Synthetic
  misc_feature (12)..(12): n is a, c, g, or u
ugggaacaagancuacagc

SEQ ID NO: 113485 - RNA, 20 nt, Artificial Sequence
  Synthetic
  misc_feature (13)..(13): n is a, c, g, or u
uugggaacaagancuacagc

SEQ ID NO: 113486 - RNA, 21 nt, Artificial Sequence
  Synthetic
  misc_feature (14)..(14): n is a, c, g, or u
cuugggaacaagancuacagc

SEQ ID NO: 113487 - RNA, 22 nt, Artificial Sequence
  Synthetic
  misc_feature (15)..(15): n is a, c, g, or u
ucuugggaacaagancuacagc

SEQ ID NO: 113488 - RNA, 23 nt, Artificial Sequence
  Synthetic
  misc_feature (16)..(16): n is a, c, g, or u
uucuugggaacaagancuacagc

SEQ ID NO: 113489 - RNA, 24 nt, Artificial Sequence
  Synthetic
  misc_feature (17)..(17): n is a, c, g, or u
auucuugggaacaagancuacagc

SEQ ID NO: 113490 - RNA, 18 nt, Artificial Sequence
  Synthetic
gaccccucccggggccgc

SEQ ID NO: 113491 - RNA, 19 nt, Artificial Sequence
  Synthetic
cgaccccucccggggccgc

SEQ ID NO: 113492 - RNA, 20 nt, Artificial Sequence
  Synthetic
acgaccccucccggggccgc

SEQ ID NO: 113493 - RNA, 21 nt, Artificial Sequence
  Synthetic
gacgaccccucccggggccgc

SEQ ID NO: 113494 - RNA, 22 nt, Artificial Sequence
  Synthetic
ggacgaccccucccggggccgc

SEQ ID NO: 113495 - RNA, 23 nt, Artificial Sequence
  Synthetic
cggacgaccccucccggggccgc

SEQ ID NO: 113496 - RNA, 24 nt, Artificial Sequence
  Synthetic
gcggacgaccccucccggggccgc

SEQ ID NO: 113497 - RNA, 18 nt, Artificial Sequence
  Synthetic
uucaccucugcacgucgc

SEQ ID NO: 113498 - RNA, 19 nt, Artificial Sequence
  Synthetic
cuucaccucugcacgucgc

SEQ ID NO: 113499 - RNA, 20 nt, Artificial Sequence
  Synthetic
gcuucaccucugcacgucgc

SEQ ID NO: 113500 - RNA, 21 nt, Artificial Sequence
  Synthetic
cgcuucaccucugcacgucgc

SEQ ID NO: 113501 - RNA, 22 nt, Artificial Sequence
  Synthetic
ucgcuucaccucugcacgucgc

SEQ ID NO: 113502 - RNA, 23 nt, Artificial Sequence
  Synthetic
uucgcuucaccucugcacgucgc

SEQ ID NO: 113503 - RNA, 24 nt, Artificial Sequence
  Synthetic
cuucgcuucaccucugcacgucgc

SEQ ID NO: 113504 - RNA, 18 nt, Artificial Sequence
  Synthetic
uccaaaccucgaaaaggc

SEQ ID NO: 113505 - RNA, 19 nt, Artificial Sequence
  Synthetic
uuccaaaccucgaaaaggc

SEQ ID NO: 113506 - RNA, 20 nt, Artificial Sequence
  Synthetic
cuuccaaaccucgaaaaggc

SEQ ID NO: 113507 - RNA, 21 nt, Artificial Sequence
  Synthetic
ucuuccaaaccucgaaaaggc

SEQ ID NO: 113508 - RNA, 22 nt, Artificial Sequence
  Synthetic
gucuuccaaaccucgaaaaggc

SEQ ID NO: 113509 - RNA, 23 nt, Artificial Sequence
  Synthetic
ggucuuccaaaccucgaaaaggc

SEQ ID NO: 113510 - RNA, 24 nt, Artificial Sequence
  Synthetic
uggucuuccaaaccucgaaaaggc

SEQ ID NO: 113511 - RNA, 18 nt, Artificial Sequence
  Synthetic
  misc_feature (14)..(14): n is a, c, g, or u
cuuggguggcuuungggc

SEQ ID NO: 113512 - RNA, 19 nt, Artificial Sequence
  Synthetic
  misc_feature (15)..(15): n is a, c, g, or u
ccuuggguggcuuungggc

SEQ ID NO: 113513 - RNA, 20 nt, Artificial Sequence
  Synthetic
  misc_feature (16)..(16): n is a, c, g, or u
gccuuggguggcuuungggc

SEQ ID NO: 113514 - RNA, 21 nt, Artificial Sequence
  Synthetic
  misc_feature (17)..(17): n is a, c, g, or u
ugccuuggguggcuuungggc

SEQ ID NO: 113515 - RNA, 22 nt, Artificial Sequence
  Synthetic
  misc_feature (18)..(18): n is a, c, g, or u
gugccuuggguggcuuungggc

SEQ ID NO: 113516 - RNA, 23 nt, Artificial Sequence
  Synthetic
  misc_feature (19)..(19): n is a, c, g, or u
ugugccuuggguggcuuungggc

SEQ ID NO: 113517 - RNA, 24 nt, Artificial Sequence
  Synthetic
  misc_feature (20)..(20): n is a, c, g, or u
cugugccuuggguggcuuungggc

SEQ ID NO: 113518 - RNA, 18 nt, Artificial Sequence
  Synthetic
  misc_feature (2)..(2): n is a, c, g, or u
unggccaucagcgcaugc

SEQ ID NO: 113519 - RNA, 19 nt, Artificial Sequence
  Synthetic
  misc_feature (3)..(3): n is a, c, g, or u
aunggccaucagcgcaugc

SEQ ID NO: 113520 - RNA, 20 nt, Artificial Sequence
  Synthetic
  misc_feature (4)..(4): n is a, c, g, or u
caunggccaucagcgcaugc

SEQ ID NO: 113521 - RNA, 21 nt, Artificial Sequence
  Synthetic
  misc_feature (5)..(5): n is a, c, g, or u
ccaunggccaucagcgcaugc

SEQ ID NO: 113522 - RNA, 22 nt, Artificial Sequence
  Synthetic
  misc_feature (6)..(6): n is a, c, g, or u
gccaunggccaucagcgcaugc

SEQ ID NO: 113523 - RNA, 23 nt, Artificial Sequence
  Synthetic
  misc_feature (7)..(7): n is a, c, g, or u
ggccaunggccaucagcgcaugc

SEQ ID NO: 113524 - RNA, 24 nt, Artificial Sequence
  Synthetic
  misc_feature (8)..(8): n is a, c, g, or u
uggccaunggccaucagcgcaugc

SEQ ID NO: 113525 - RNA, 18 nt, Artificial Sequence
  Synthetic
cugccaacuggauccugc

SEQ ID NO: 113526 - RNA, 19 nt, Artificial Sequence
  Synthetic
gcugccaacuggauccugc

SEQ ID NO: 113527 - RNA, 20 nt, Artificial Sequence
  Synthetic
ugcugccaacuggauccugc

SEQ ID NO: 113528 - RNA, 21 nt, Artificial Sequence
  Synthetic
gugcugccaacuggauccugc

SEQ ID NO: 113529 - RNA, 22 nt, Artificial Sequence
  Synthetic
ugugcugccaacuggauccugc

SEQ ID NO: 113530 - RNA, 23 nt, Artificial Sequence
  Synthetic
cugugcugccaacuggauccugc

SEQ ID NO: 113531 - RNA, 24 nt, Artificial Sequence
  Synthetic
gcugugcugccaacuggauccugc

SEQ ID NO: 113532 - RNA, 18 nt, Artificial Sequence
  Synthetic
uuccugacauucauuugc

SEQ ID NO: 113533 - RNA, 19 nt, Artificial Sequence
  Synthetic
uuuccugacauucauuugc

SEQ ID NO: 113534 - RNA, 20 nt, Artificial Sequence
  Synthetic
uuuuccugacauucauuugc

SEQ ID NO: 113535 - RNA, 21 nt, Artificial Sequence
  Synthetic
cuuuuccugacauucauuugc

SEQ ID NO: 113536 - RNA, 22 nt, Artificial Sequence
  Synthetic
ucuuuuccugacauucauuugc

SEQ ID NO: 113537 - RNA, 23 nt, Artificial Sequence
  Synthetic
uucuuuuccugacauucauuugc

SEQ ID NO: 113538 - RNA, 24 nt, Artificial Sequence
  Synthetic
cuucuuuuccugacauucauuugc

SEQ ID NO: 113539 - RNA, 18 nt, Artificial Sequence
  Synthetic
  misc_feature (11)..(11): n is a, c, g, or u
  misc_feature (17)..(17): n is a, c, g, or u
guuggggcacnuugccnc

SEQ ID NO: 113540 - RNA, 19 nt, Artificial Sequence
  Synthetic
  misc_feature (1)..(1): n is a, c, g, or u
  misc_feature (12)..(12): n is a, c, g, or u
  misc_feature (18)..(18): n is a, c, g, or u
nguuggggcacnuugccnc

SEQ ID NO: 113541 - RNA, 20 nt, Artificial Sequence
  Synthetic
  misc_feature (1)..(2): n is a, c, g, or u
  misc_feature (13)..(13): n is a, c, g, or u
  misc_feature (19)..(19): n is a, c, g, or u
nnguuggggcacnuugccnc

SEQ ID NO: 113542 - RNA, 21 nt, Artificial Sequence
  Synthetic
  misc_feature (2)..(3): n is a, c, g, or u
  misc_feature (14)..(14): n is a, c, g, or u
  misc_feature (20)..(20): n is a, c, g, or u
gnnguuggggcacnuugccnc

SEQ ID NO: 113543 - RNA, 22 nt, Artificial Sequence
  Synthetic
  misc_feature (3)..(4): n is a, c, g, or u
  misc_feature (15)..(15): n is a, c, g, or u
  misc_feature (21)..(21): n is a, c, g, or u
ggnnguuggggcacnuugccnc

SEQ ID NO: 113544 - RNA, 23 nt, Artificial Sequence
  Synthetic
  misc_feature (4)..(5): n is a, c, g, or u
  misc_feature (16)..(16): n is a, c, g, or u
  misc_feature (22)..(22): n is a, c, g, or u
uggnnguuggggcacnuugccnc

SEQ ID NO: 113545 - RNA, 24 nt, Artificial Sequence
  Synthetic
  misc_feature (5)..(6): n is a, c, g, or u
  misc_feature (17)..(17): n is a, c, g, or u
  misc_feature (23)..(23): n is a, c, g, or u
uuggnnguuggggcacnuugccnc

SEQ ID NO: 113546 - RNA, 18 nt, Artificial Sequence
  Synthetic
ucgcagaagaucucaauc

SEQ ID NO: 113547 - RNA, 19 nt, Artificial Sequence
  Synthetic
gucgcagaagaucucaauc

SEQ ID NO: 113548 - RNA, 20 nt, Artificial Sequence
  Synthetic
cgucgcagaagaucucaauc

SEQ ID NO: 113549 - RNA, 21 nt, Artificial Sequence
  Synthetic
gcgucgcagaagaucucaauc

SEQ ID NO: 113550 - RNA, 22 nt, Artificial Sequence
  Synthetic
cgcgucgcagaagaucucaauc

SEQ ID NO: 113551 - RNA, 23 nt, Artificial Sequence
  Synthetic
ccgcgucgcagaagaucucaauc

SEQ ID NO: 113552 - RNA, 24 nt, Artificial Sequence
  Synthetic
gccgcgucgcagaagaucucaauc

SEQ ID NO: 113553 - RNA, 18 nt, Artificial Sequence
  Synthetic
uuuggaagauccagcauc

SEQ ID NO: 113554 - RNA, 19 nt, Artificial Sequence
  Synthetic
auuuggaagauccagcauc

SEQ ID NO: 113555 - RNA, 20 nt, Artificial Sequence
  Synthetic
aauuuggaagauccagcauc

SEQ ID NO: 113556 - RNA, 21 nt, Artificial Sequence
  Synthetic
uaauuuggaagauccagcauc

SEQ ID NO: 113557 - RNA, 22 nt, Artificial Sequence
  Synthetic
guaauuuggaagauccagcauc

SEQ ID NO: 113558 - RNA, 23 nt, Artificial Sequence
  Synthetic
aguaauuuggaagauccagcauc

SEQ ID NO: 113559 - RNA, 24 nt, Artificial Sequence
  Synthetic
aaguaauuuggaagauccagcauc

SEQ ID NO: 113560 - RNA, 18 nt, Artificial Sequence
  Synthetic
uauucccaucccaucauc

SEQ ID NO: 113561 - RNA, 19 nt, Artificial Sequence
  Synthetic
guauucccaucccaucauc

SEQ ID NO: 113562 - RNA, 20 nt, Artificial Sequence
  Synthetic
uguauucccaucccaucauc

SEQ ID NO: 113563 - RNA, 21 nt, Artificial Sequence
  Synthetic
cuguauucccaucccaucauc

SEQ ID NO: 113564 - RNA, 22 nt, Artificial Sequence
  Synthetic
ccuguauucccaucccaucauc

SEQ ID NO: 113565 - RNA, 23 nt, Artificial Sequence
  Synthetic
accuguauucccaucccaucauc

SEQ ID NO: 113566 - RNA, 24 nt, Artificial Sequence
  Synthetic
caccuguauucccaucccaucauc

SEQ ID NO: 113567 - RNA, 18 nt, Artificial Sequence
  Synthetic
ccgccucugcucuguauc

SEQ ID NO: 113568 - RNA, 19 nt, Artificial Sequence
  Synthetic
accgccucugcucuguauc

SEQ ID NO: 113569 - RNA, 20 nt, Artificial Sequence
  Synthetic
caccgccucugcucuguauc

SEQ ID NO: 113570 - RNA, 21 nt, Artificial Sequence
  Synthetic
acaccgccucugcucuguauc

SEQ ID NO: 113571 - RNA, 22 nt, Artificial Sequence
  Synthetic
gacaccgccucugcucuguauc

SEQ ID NO: 113572 - RNA, 23 nt, Artificial Sequence
  Synthetic
cgacaccgccucugcucuguauc

SEQ ID NO: 113573 - RNA, 24 nt, Artificial Sequence
  Synthetic
ucgacaccgccucugcucuguauc

SEQ ID NO: 113574 - RNA, 18 nt, Artificial Sequence
  Synthetic
  misc_feature (2)..(2): n is a, c, g, or u
  misc_feature (11)..(11): n is a, c, g, or u
gnaucaaaccnuauuauc

SEQ ID NO: 113575 - RNA, 19 nt, Artificial Sequence
  Synthetic
  misc_feature (3)..(3): n is a, c, g, or u
  misc_feature (12)..(12): n is a, c, g, or u
ggnaucaaaccnuauuauc

SEQ ID NO: 113576 - RNA, 20 nt, Artificial Sequence
  Synthetic
  misc_feature (4)..(4): n is a, c, g, or u
  misc_feature (13)..(13): n is a, c, g, or u
aggnaucaaaccnuauuauc

SEQ ID NO: 113577 - RNA, 21 nt, Artificial Sequence
  Synthetic
  misc_feature (5)..(5): n is a, c, g, or u
  misc_feature (14)..(14): n is a, c, g, or u
aaggnaucaaaccnuauuauc

SEQ ID NO: 113578 - RNA, 22 nt, Artificial Sequence
  Synthetic
  misc_feature (6)..(6): n is a, c, g, or u
  misc_feature (15)..(15): n is a, c, g, or u
aaaggnaucaaaccnuauuauc

SEQ ID NO: 113579 - RNA, 23 nt, Artificial Sequence
  Synthetic
  misc_feature (7)..(7): n is a, c, g, or u
  misc_feature (16)..(16): n is a, c, g, or u
uaaaggnaucaaaccnuauuauc

SEQ ID NO: 113580 - RNA, 24 nt, Artificial Sequence
  Synthetic
  misc_feature (8)..(8): n is a, c, g, or u
  misc_feature (17)..(17): n is a, c, g, or u
auaaaggnaucaaaccnuauuauc

SEQ ID NO: 113581 - RNA, 18 nt, Artificial Sequence
  Synthetic
ucuugcauaagaggacuc

SEQ ID NO: 113582 - RNA, 19 nt, Artificial Sequence
  Synthetic
gucuugcauaagaggacuc

SEQ ID NO: 113583 - RNA, 20 nt, Artificial Sequence
  Synthetic
ggucuugcauaagaggacuc

SEQ ID NO: 113584 - RNA, 21 nt, Artificial Sequence
  Synthetic
aggucuugcauaagaggacuc

SEQ ID NO: 113585 - RNA, 22 nt, Artificial Sequence
  Synthetic
aaggucuugcauaagaggacuc

SEQ ID NO: 113586 - RNA, 23 nt, Artificial Sequence
  Synthetic
caaggucuugcauaagaggacuc

SEQ ID NO: 113587 - RNA, 24 nt, Artificial Sequence
  Synthetic
ccaaggucuugcauaagaggacuc

SEQ ID NO: 113588 - RNA, 18 nt, Artificial Sequence
  Synthetic
ucccgcggacgaccccuc

SEQ ID NO: 113589 - RNA, 19 nt, Artificial Sequence
  Synthetic
aucccgcggacgaccccuc

SEQ ID NO: 113590 - RNA, 20 nt, Artificial Sequence
  Synthetic
aaucccgcggacgaccccuc

SEQ ID NO: 113591 - RNA, 21 nt, Artificial Sequence
  Synthetic
gaaucccgcggacgaccccuc

SEQ ID NO: 113592 - RNA, 22 nt, Artificial Sequence
  Synthetic
ugaaucccgcggacgaccccuc

SEQ ID NO: 113593 - RNA, 23 nt, Artificial Sequence
  Synthetic
cugaaucccgcggacgaccccuc

SEQ ID NO: 113594 - RNA, 24 nt, Artificial Sequence
  Synthetic
gcugaaucccgcggacgaccccuc

SEQ ID NO: 113595 - RNA, 18 nt, Artificial Sequence
  Synthetic
  misc_feature (8)..(8): n is a, c, g, or u
ccugcacnacuccugcuc

SEQ ID NO: 113596 - RNA, 19 nt, Artificial Sequence
  Synthetic
  misc_feature (9)..(9): n is a, c, g, or u
accugcacnacuccugcuc

SEQ ID NO: 113597 - RNA, 20 nt, Artificial Sequence
  Synthetic
  misc_feature (10)..(10): n is a, c, g, or u
aaccugcacnacuccugcuc

SEQ ID NO: 113598 - RNA, 21 nt, Artificial Sequence
  Synthetic
  misc_feature (11)..(11): n is a, c, g, or u
aaaccugcacnacuccugcuc

SEQ ID NO: 113599 - RNA, 22 nt, Artificial Sequence
  Synthetic
  misc_feature (12)..(12): n is a, c, g, or u
aaaaccugcacnacuccugcuc

SEQ ID NO: 113600 - RNA, 23 nt, Artificial Sequence
  Synthetic
  misc_feature (13)..(13): n is a, c, g, or u
caaaaccugcacnacuccugcuc

SEQ ID NO: 113601 - RNA, 24 nt, Artificial Sequence
  Synthetic
  misc_feature (14)..(14): n is a, c, g, or u
gcaaaaccugcacnacuccugcuc

SEQ ID NO: 113602 - RNA, 18 nt, Artificial Sequence
  Synthetic
gggaggccuuagagucuc

SEQ ID NO: 113603 - RNA, 19 nt, Artificial Sequence
  Synthetic
cgggaggccuuagagucuc

SEQ ID NO: 113604 - RNA, 20 nt, Artificial Sequence
  Synthetic
ucgggaggccuuagagucuc

SEQ ID NO: 113605 - RNA, 21 nt, Artificial Sequence
  Synthetic
aucgggaggccuuagagucuc

SEQ ID NO: 113606 - RNA, 22 nt, Artificial Sequence
  Synthetic
uaucgggaggccuuagagucuc

SEQ ID NO: 113607 - RNA, 23 nt, Artificial Sequence
  Synthetic
guaucgggaggccuuagagucuc

SEQ ID NO: 113608 - RNA, 24 nt, Artificial Sequence
  Synthetic
uguaucgggaggccuuagagucuc

SEQ ID NO: 113609 - RNA, 18 nt, Artificial Sequence
  Synthetic
cuccaccaaucggcaguc

SEQ ID NO: 113610 - RNA, 19 nt, Artificial Sequence
  Synthetic
ccuccaccaaucggcaguc

SEQ ID NO: 113611 - RNA, 20 nt, Artificial Sequence
  Synthetic
gccuccaccaaucggcaguc

SEQ ID NO: 113612 - RNA, 21 nt, Artificial Sequence
  Synthetic
ugccuccaccaaucggcaguc

SEQ ID NO: 113613 - RNA, 22 nt, Artificial Sequence
  Synthetic
cugccuccaccaaucggcaguc

SEQ ID NO: 113614 - RNA, 23 nt, Artificial Sequence
  Synthetic
ccugccuccaccaaucggcaguc

SEQ ID NO: 113615 - RNA, 24 nt, Artificial Sequence
  Synthetic
uccugccuccaccaaucggcaguc

SEQ ID NO: 113616 - RNA, 18 nt, Artificial Sequence
  Synthetic
uugcgggucaccauauuc

SEQ ID NO: 113617 - RNA, 19 nt, Artificial Sequence
  Synthetic
uuugcgggucaccauauuc

SEQ ID NO: 113618 - RNA, 20 nt, Artificial Sequence
  Synthetic
uuuugcgggucaccauauuc

SEQ ID NO: 113619 - RNA, 21 nt, Artificial Sequence
  Synthetic
auuuugcgggucaccauauuc

SEQ ID NO: 113620 - RNA, 22 nt, Artificial Sequence
  Synthetic
cauuuugcgggucaccauauuc

SEQ ID NO: 113621 - RNA, 23 nt, Artificial Sequence
  Synthetic
ucauuuugcgggucaccauauuc

SEQ ID NO: 113622 - RNA, 24 nt, Artificial Sequence
  Synthetic
cucauuuugcgggucaccauauuc

SEQ ID NO: 113623 - RNA, 18 nt, Artificial Sequence
  Synthetic
ggauauucccuuaacuuc

SEQ ID NO: 113624 - RNA, 19 nt, Artificial Sequence
  Synthetic
gggauauucccuuaacuuc

SEQ ID NO: 113625 - RNA, 20 nt, Artificial Sequence
  Synthetic
ggggauauucccuuaacuuc

SEQ ID NO: 113626 - RNA, 21 nt, Artificial Sequence
  Synthetic
uggggauauucccuuaacuuc

SEQ ID NO: 113627 - RNA, 22 nt, Artificial Sequence
  Synthetic
auggggauauucccuuaacuuc

SEQ ID NO: 113628 - RNA, 23 nt, Artificial Sequence
  Synthetic
gauggggauauucccuuaacuuc

SEQ ID NO: 113629 - RNA, 24 nt, Artificial Sequence
  Synthetic
agauggggauauucccuuaacuuc

SEQ ID NO: 113630 - RNA, 18 nt, Artificial Sequence
  Synthetic
cuaucuuaucaacacuuc

SEQ ID NO: 113631 - RNA, 19 nt, Artificial Sequence
  Synthetic
ccuaucuuaucaacacuuc

SEQ ID NO: 113632 - RNA, 20 nt, Artificial Sequence
  Synthetic
cccuaucuuaucaacacuuc

SEQ ID NO: 113633 - RNA, 21 nt, Artificial Sequence
  Synthetic
ccccuaucuuaucaacacuuc

SEQ ID NO: 113634 - RNA, 22 nt, Artificial Sequence
  Synthetic
gccccuaucuuaucaacacuuc

SEQ ID NO: 113635 - RNA, 23 nt, Artificial Sequence
  Synthetic
ugccccuaucuuaucaacacuuc

SEQ ID NO: 113636 - RNA, 24 nt, Artificial Sequence
  Synthetic
augccccuaucuuaucaacacuuc

SEQ ID NO: 113637 - RNA, 18 nt, Artificial Sequence
  Synthetic
ugcugguggcuccaguuc

SEQ ID NO: 113638 - RNA, 19 nt, Artificial Sequence
  Synthetic
cugcugguggcuccaguuc

SEQ ID NO: 113639 - RNA, 20 nt, Artificial Sequence
  Synthetic
ccugcugguggcuccaguuc

SEQ ID NO: 113640 - RNA, 21 nt, Artificial Sequence
  Synthetic
uccugcugguggcuccaguuc

SEQ ID NO: 113641 - RNA, 22 nt, Artificial Sequence
  Synthetic
uuccugcugguggcuccaguuc

SEQ ID NO: 113642 - RNA, 23 nt, Artificial Sequence
  Synthetic
uuuccugcugguggcuccaguuc

SEQ ID NO: 113643 - RNA, 24 nt, Artificial Sequence
  Synthetic
cuuuccugcugguggcuccaguuc

SEQ ID NO: 113644 - RNA, 18 nt, Artificial Sequence
  Synthetic
ggacuucucucaauuuuc

SEQ ID NO: 113645 - RNA, 19 nt, Artificial Sequence
  Synthetic
uggacuucucucaauuuuc

SEQ ID NO: 113646 - RNA, 20 nt, Artificial Sequence
  Synthetic
guggacuucucucaauuuuc

SEQ ID NO: 113647 - RNA, 21 nt, Artificial Sequence
  Synthetic
gguggacuucucucaauuuuc

SEQ ID NO: 113648 - RNA, 22 nt, Artificial Sequence
  Synthetic
ugguggacuucucucaauuuuc

SEQ ID NO: 113649 - RNA, 23 nt, Artificial Sequence
  Synthetic
gugguggacuucucucaauuuuc

SEQ ID NO: 113650 - RNA, 24 nt, Artificial Sequence
  Synthetic
cgugguggacuucucucaauuuuc

SEQ ID NO: 113651 - RNA, 18 nt, Artificial Sequence
  Synthetic
  misc_feature (7)..(7): n is a, c, g, or u
cccucanaaaacaaaaag

SEQ ID NO: 113652 - RNA, 19 nt, Artificial Sequence
  Synthetic
  misc_feature (8)..(8): n is a, c, g, or u
acccucanaaaacaaaaag

SEQ ID NO: 113653 - RNA, 20 nt, Artificial Sequence
  Synthetic
  misc_feature (9)..(9): n is a, c, g, or u
aacccucanaaaacaaaaag

SEQ ID NO: 113654 - RNA, 21 nt, Artificial Sequence
  Synthetic
  misc_feature (10)..(10): n is a, c, g, or u
aaacccucanaaaacaaaaag

SEQ ID NO: 113655 - RNA, 22 nt, Artificial Sequence
  Synthetic
  misc_feature (11)..(11): n is a, c, g, or u
uaaacccucanaaaacaaaaag

SEQ ID NO: 113656 - RNA, 23 nt, Artificial Sequence
  Synthetic
  misc_feature (12)..(12): n is a, c, g, or u
uuaaacccucanaaaacaaaaag

SEQ ID NO: 113657 - RNA, 24 nt, Artificial Sequence
  Synthetic
  misc_feature (13)..(13): n is a, c, g, or u
uuuaaacccucanaaaacaaaaag

SEQ ID NO: 113658 - RNA, 18 nt, Artificial Sequence
  Synthetic
uggccggacgccaacaag

SEQ ID NO: 113659 - RNA, 19 nt, Artificial Sequence
  Synthetic
cuggccggacgccaacaag

SEQ ID NO: 113660 - RNA, 20 nt, Artificial Sequence
  Synthetic
acuggccggacgccaacaag

SEQ ID NO: 113661 - RNA, 21 nt, Artificial Sequence
  Synthetic
aacuggccggacgccaacaag

SEQ ID NO: 113662 - RNA, 22 nt, Artificial Sequence
  Synthetic
caacuggccggacgccaacaag

SEQ ID NO: 113663 - RNA, 23 nt, Artificial Sequence
  Synthetic
acaacuggccggacgccaacaag

SEQ ID NO: 113664 - RNA, 24 nt, Artificial Sequence
  Synthetic
gacaacuggccggacgccaacaag

SEQ ID NO: 113665 - RNA, 18 nt, Artificial Sequence
  Synthetic
aggcagguccccuagaag

SEQ ID NO: 113666 - RNA, 19 nt, Artificial Sequence
  Synthetic
gaggcagguccccuagaag

SEQ ID NO: 113667 - RNA, 20 nt, Artificial Sequence
  Synthetic
  misc_feature (1)..(1): n is a, c, g, or u
ngaggcagguccccuagaag

SEQ ID NO: 113668 - RNA, 21 nt, Artificial Sequence
  Synthetic
  misc_feature (2)..(2): n is a, c, g, or u
angaggcagguccccuagaag

SEQ ID NO: 113669 - RNA, 22 nt, Artificial Sequence
  Synthetic
  misc_feature (3)..(3): n is a, c, g, or u
gangaggcagguccccuagaag

SEQ ID NO: 113670 - RNA, 23 nt, Artificial Sequence
  Synthetic
  misc_feature (4)..(4): n is a, c, g, or u
cgangaggcagguccccuagaag

SEQ ID NO: 113671 - RNA, 24 nt, Artificial Sequence
  Synthetic
  misc_feature (5)..(5): n is a, c, g, or u
acgangaggcagguccccuagaag

SEQ ID NO: 113672 - RNA, 18 nt, Artificial Sequence
  Synthetic
  misc_feature (6)..(6): n is a, c, g, or u
uuacanacucuuuggaag

SEQ ID NO: 113673 - RNA, 19 nt, Artificial Sequence
  Synthetic
  misc_feature (7)..(7): n is a, c, g, or u
uuuacanacucuuuggaag

SEQ ID NO: 113674 - RNA, 20 nt, Artificial Sequence
  Synthetic
  misc_feature (8)..(8): n is a, c, g, or u
auuuacanacucuuuggaag

SEQ ID NO: 113675 - RNA, 21 nt, Artificial Sequence
  Synthetic
  misc_feature (9)..(9): n is a, c, g, or u
uauuuacanacucuuuggaag

SEQ ID NO: 113676 - RNA, 22 nt, Artificial Sequence
  Synthetic
  misc_feature (10)..(10): n is a, c, g, or u
uuauuuacanacucuuuggaag

SEQ ID NO: 113677 - RNA, 23 nt, Artificial Sequence
  Synthetic
  misc_feature (11)..(11): n is a, c, g, or u
auuauuuacanacucuuuggaag

SEQ ID NO: 113678 - RNA, 24 nt, Artificial Sequence
  Synthetic
  misc_feature (12)..(12): n is a, c, g, or u
cauuauuuacanacucuuuggaag

SEQ ID NO: 113679 - RNA, 18 nt, Artificial Sequence
  Synthetic
  misc_feature (12)..(12): n is a, c, g, or u
auuccuuggacncauaag

SEQ ID NO: 113680 - RNA, 19 nt, Artificial Sequence
  Synthetic
  misc_feature (13)..(13): n is a, c, g, or u
uauuccuuggacncauaag

SEQ ID NO: 113681 - RNA, 20 nt, Artificial Sequence
  Synthetic
  misc_feature (14)..(14): n is a, c, g, or u
guauuccuuggacncauaag

SEQ ID NO: 113682 - RNA, 21 nt, Artificial Sequence
  Synthetic
  misc_feature (15)..(15): n is a, c, g, or u
aguauuccuuggacncauaag

SEQ ID NO: 113683 - RNA, 22 nt, Artificial Sequence
  Synthetic
  misc_feature (16)..(16): n is a, c, g, or u
uaguauuccuuggacncauaag

SEQ ID NO: 113684 - RNA, 23 nt, Artificial Sequence
  Synthetic
  misc_feature (17)..(17): n is a, c, g, or u
uuaguauuccuuggacncauaag

SEQ ID NO: 113685 - RNA, 24 nt, Artificial Sequence
  Synthetic
  misc_feature (18)..(18): n is a, c, g, or u
guuaguauuccuuggacncauaag

SEQ ID NO: 113686 - RNA, 18 nt, Artificial Sequence
  Synthetic
ccccugcucguguuacag

SEQ ID NO: 113687 - RNA, 19 nt, Artificial Sequence
  Synthetic
accccugcucguguuacag

SEQ ID NO: 113688 - RNA, 20 nt, Artificial Sequence
  Synthetic
gaccccugcucguguuacag

SEQ ID NO: 113689 - RNA, 21 nt, Artificial Sequence
  Synthetic
ggaccccugcucguguuacag

SEQ ID NO: 113690 - RNA, 22 nt, Artificial Sequence
  Synthetic
aggaccccugcucguguuacag

SEQ ID NO: 113691 - RNA, 23 nt, Artificial Sequence
  Synthetic
uaggaccccugcucguguuacag

SEQ ID NO: 113692 - RNA, 24 nt, Artificial Sequence
  Synthetic
cuaggaccccugcucguguuacag

SEQ ID NO: 113693 - RNA, 18 nt, Artificial Sequence
  Synthetic
aacucccucgccucgcag

SEQ ID NO: 113694 - RNA, 19 nt, Artificial Sequence
  Synthetic
gaacucccucgccucgcag

SEQ ID NO: 113695 - RNA, 20 nt, Artificial Sequence
  Synthetic
agaacucccucgccucgcag

SEQ ID NO: 113696 - RNA, 21 nt, Artificial Sequence
  Synthetic
aagaacucccucgccucgcag

SEQ ID NO: 113697 - RNA, 22 nt, Artificial Sequence
  Synthetic
gaagaacucccucgccucgcag

SEQ ID NO: 113698 - RNA, 23 nt, Artificial Sequence
  Synthetic
agaagaacucccucgccucgcag

SEQ ID NO: 113699 - RNA, 24 nt, Artificial Sequence
  Synthetic
aagaagaacucccucgccucgcag

SEQ ID NO: 113700 - RNA, 18 nt, Artificial Sequence
  Synthetic
cauccucaggccaugcag

SEQ ID NO: 113701 - RNA, 19 nt, Artificial Sequence
  Synthetic
ucauccucaggccaugcag

SEQ ID NO: 113702 - RNA, 20 nt, Artificial Sequence
  Synthetic
cucauccucaggccaugcag

SEQ ID NO: 113703 - RNA, 21 nt, Artificial Sequence
  Synthetic
acucauccucaggccaugcag

SEQ ID NO: 113704 - RNA, 22 nt, Artificial Sequence
  Synthetic
cacucauccucaggccaugcag

SEQ ID NO: 113705 - RNA, 23 nt, Artificial Sequence
  Synthetic
acacucauccucaggccaugcag

SEQ ID NO: 113706 - RNA, 24 nt, Artificial Sequence
  Synthetic
gacacucauccucaggccaugcag

SEQ ID NO: 113707 - RNA, 18 nt, Artificial Sequence
  Synthetic
ccugacauucauuugcag

SEQ ID NO: 113708 - RNA, 19 nt, Artificial Sequence
  Synthetic
uccugacauucauuugcag

SEQ ID NO: 113709 - RNA, 20 nt, Artificial Sequence
  Synthetic
uuccugacauucauuugcag

SEQ ID NO: 113710 - RNA, 21 nt, Artificial Sequence
  Synthetic
uuuccugacauucauuugcag

SEQ ID NO: 113711 - RNA, 22 nt, Artificial Sequence
  Synthetic
uuuuccugacauucauuugcag

SEQ ID NO: 113712 - RNA, 23 nt, Artificial Sequence
  Synthetic
cuuuuccugacauucauuugcag

SEQ ID NO: 113713 - RNA, 24 nt, Artificial Sequence
  Synthetic
ucuuuuccugacauucauuugcag

SEQ ID NO: 113714 - RNA, 18 nt, Artificial Sequence
  Synthetic
  misc_feature (6)..(6): n is a, c, g, or u
uucuuncccgaucaucag

SEQ ID NO: 113715 - RNA, 19 nt, Artificial Sequence
  Synthetic
  misc_feature (7)..(7): n is a, c, g, or u
auucuuncccgaucaucag

SEQ ID NO: 113716 - RNA, 20 nt, Artificial Sequence
  Synthetic
  misc_feature (8)..(8): n is a, c, g, or u
gauucuuncccgaucaucag

SEQ ID NO: 113717 - RNA, 21 nt, Artificial Sequence
  Synthetic
  misc_feature (9)..(9): n is a, c, g, or u
ggauucuuncccgaucaucag

SEQ ID NO: 113718 - RNA, 22 nt, Artificial Sequence
  Synthetic
  misc_feature (10)..(10): n is a, c, g, or u
gggauucuuncccgaucaucag

SEQ ID NO: 113719 - RNA, 23 nt, Artificial Sequence
  Synthetic
  misc_feature (11)..(11): n is a, c, g, or u
ugggauucuuncccgaucaucag

SEQ ID NO: 113720 - RNA, 24 nt, Artificial Sequence
  Synthetic
  misc_feature (12)..(12): n is a, c, g, or u
cugggauucuuncccgaucaucag

SEQ ID NO: 113721 - RNA, 18 nt, Artificial Sequence
  Synthetic
  misc_feature (5)..(5): n is a, c, g, or u
uuuanugagugggaggag

SEQ ID NO: 113722 - RNA, 19 nt, Artificial Sequence
  Synthetic
  misc_feature (6)..(6): n is a, c, g, or u
guuuanugagugggaggag

SEQ ID NO: 113723 - RNA, 20 nt, Artificial Sequence
  Synthetic
  misc_feature (7)..(7): n is a, c, g, or u
uguuuanugagugggaggag

SEQ ID NO: 113724 - RNA, 21 nt, Artificial Sequence
  Synthetic
  misc_feature (8)..(8): n is a, c, g, or u
guguuuanugagugggaggag

SEQ ID NO: 113725 - RNA, 22 nt, Artificial Sequence
  Synthetic
  misc_feature (9)..(9): n is a, c, g, or u
uguguuuanugagugggaggag

SEQ ID NO: 113726 - RNA, 23 nt, Artificial Sequence
  Synthetic
  misc_feature (10)..(10): n is a, c, g, or u
guguguuuanugagugggaggag

SEQ ID NO: 113727 - RNA, 24 nt, Artificial Sequence
  Synthetic
  misc_feature (11)..(11): n is a, c, g, or u
uguguguuuanugagugggaggag

SEQ ID NO: 113728 - RNA, 18 nt, Artificial Sequence
  Synthetic
acgccaacaaggugggag

SEQ ID NO: 113729 - RNA, 19 nt, Artificial Sequence
  Synthetic
gacgccaacaaggugggag

SEQ ID NO: 113730 - RNA, 20 nt, Artificial Sequence
  Synthetic
ggacgccaacaaggugggag

SEQ ID NO: 113731 - RNA, 21 nt, Artificial Sequence
  Synthetic
cggacgccaacaaggugggag

SEQ ID NO: 113732 - RNA, 22 nt, Artificial Sequence
  Synthetic
ccggacgccaacaaggugggag

SEQ ID NO: 113733 - RNA, 23 nt, Artificial Sequence
  Synthetic
gccggacgccaacaaggugggag

SEQ ID NO: 113734 - RNA, 24 nt, Artificial Sequence
  Synthetic
ggccggacgccaacaaggugggag

SEQ ID NO: 113735 - RNA, 18 nt, Artificial Sequence
  Synthetic
  misc_feature (14)..(14): n is a, c, g, or u
gacuguguguuuanugag

SEQ ID NO: 113736 - RNA, 19 nt, Artificial Sequence
  Synthetic
  misc_feature (15)..(15): n is a, c, g, or u
agacuguguguuuanugag

SEQ ID NO: 113737 - RNA, 20 nt, Artificial Sequence
  Synthetic
  misc_feature (16)..(16): n is a, c, g, or u
aagacuguguguuuanugag

SEQ ID NO: 113738 - RNA, 21 nt, Artificial Sequence
  Synthetic
  misc_feature (17)..(17): n is a, c, g, or u
aaagacuguguguuuanugag

SEQ ID NO: 113739 - RNA, 22 nt, Artificial Sequence
  Synthetic
  misc_feature (18)..(18): n is a, c, g, or u
caaagacuguguguuuanugag

SEQ ID NO: 113740 - RNA, 23 nt, Artificial Sequence
  Synthetic
  misc_feature (19)..(19): n is a, c, g, or u
ucaaagacuguguguuuanugag

SEQ ID NO: 113741 - RNA, 24 nt, Artificial Sequence
  Synthetic
  misc_feature (20)..(20): n is a, c, g, or u
uucaaagacuguguguuuanugag

SEQ ID NO: 113742 - RNA, 18 nt, Artificial Sequence
  Synthetic
  misc_feature (2)..(2): n is a, c, g, or u
angaggcagguccccuag

SEQ ID NO: 113743 - RNA, 19 nt, Artificial Sequence
  Synthetic
  misc_feature (3)..(3): n is a, c, g, or u
gangaggcagguccccuag

SEQ ID NO: 113744 - RNA, 20 nt, Artificial Sequence
  Synthetic
  misc_feature (4)..(4): n is a, c, g, or u
cgangaggcagguccccuag

SEQ ID NO: 113745 - RNA, 21 nt, Artificial Sequence
  Synthetic
  misc_feature (5)..(5): n is a, c, g, or u
acgangaggcagguccccuag

SEQ ID NO: 113746 - RNA, 22 nt, Artificial Sequence
  Synthetic
  misc_feature (6)..(6): n is a, c, g, or u
gacgangaggcagguccccuag

SEQ ID NO: 113747 - RNA, 23 nt, Artificial Sequence
  Synthetic
  misc_feature (7)..(7): n is a, c, g, or u
agacgangaggcagguccccuag

SEQ ID NO: 113748 - RNA, 24 nt, Artificial Sequence
  Synthetic
  misc_feature (8)..(8): n is a, c, g, or u
uagacgangaggcagguccccuag

SEQ ID NO: 113749 - RNA, 18 nt, Artificial Sequence
  Synthetic
aacuacuguuguuagacg

SEQ ID NO: 113750 - RNA, 19 nt, Artificial Sequence
  Synthetic
aaacuacuguuguuagacg

SEQ ID NO: 113751 - RNA, 20 nt, Artificial Sequence
  Synthetic
gaaacuacuguuguuagacg

SEQ ID NO: 113752 - RNA, 21 nt, Artificial Sequence
  Synthetic
ggaaacuacuguuguuagacg

SEQ ID NO: 113753 - RNA, 22 nt, Artificial Sequence
  Synthetic
cggaaacuacuguuguuagacg

SEQ ID NO: 113754 - RNA, 23 nt, Artificial Sequence
  Synthetic
ccggaaacuacuguuguuagacg

SEQ ID NO: 113755 - RNA, 24 nt, Artificial Sequence
  Synthetic
uccggaaacuacuguuguuagacg

SEQ ID NO: 113756 - RNA, 18 nt, Artificial Sequence
  Synthetic
  misc_feature (1)..(1): n is a, c, g, or u
nggccaucagcgcaugcg

SEQ ID NO: 113757 - RNA, 19 nt, Artificial Sequence
  Synthetic
  misc_feature (2)..(2): n is a, c, g, or u
unggccaucagcgcaugcg

SEQ ID NO: 113758 - RNA, 20 nt, Artificial Sequence
  Synthetic
  misc_feature (3)..(3): n is a, c, g, or u
aunggccaucagcgcaugcg

SEQ ID NO: 113759 - RNA, 21 nt, Artificial Sequence
  Synthetic
  misc_feature (4)..(4): n is a, c, g, or u
caunggccaucagcgcaugcg

SEQ ID NO: 113760 - RNA, 22 nt, Artificial Sequence
  Synthetic
  misc_feature (5)..(5): n is a, c, g, or u
ccaunggccaucagcgcaugcg

SEQ ID NO: 113761 - RNA, 23 nt, Artificial Sequence
  Synthetic
  misc_feature (6)..(6): n is a, c, g, or u
gccaunggccaucagcgcaugcg

SEQ ID NO: 113762 - RNA, 24 nt, Artificial Sequence
  Synthetic
  misc_feature (7)..(7): n is a, c, g, or u
ggccaunggccaucagcgcaugcg

SEQ ID NO: 113763 - RNA, 18 nt, Artificial Sequence
  Synthetic
ugccaacuggauccugcg

SEQ ID NO: 113764 - RNA, 19 nt, Artificial Sequence
  Synthetic
cugccaacuggauccugcg

SEQ ID NO: 113765 - RNA, 20 nt, Artificial Sequence
  Synthetic
gcugccaacuggauccugcg

SEQ ID NO: 113766 - RNA, 21 nt, Artificial Sequence
  Synthetic
ugcugccaacuggauccugcg

SEQ ID NO: 113767 - RNA, 22 nt, Artificial Sequence
  Synthetic
gugcugccaacuggauccugcg

SEQ ID NO: 113768 - RNA, 23 nt, Artificial Sequence
  Synthetic
ugugcugccaacuggauccugcg

SEQ ID NO: 113769 - RNA, 24 nt, Artificial Sequence
  Synthetic
cugugcugccaacuggauccugcg

SEQ ID NO: 113770 - RNA, 18 nt, Artificial Sequence
  Synthetic
gucucaaucgccgcgucg

SEQ ID NO: 113771 - RNA, 19 nt, Artificial Sequence
  Synthetic
ggucucaaucgccgcgucg

SEQ ID NO: 113772 - RNA, 20 nt, Artificial Sequence
  Synthetic
aggucucaaucgccgcgucg

SEQ ID NO: 113773 - RNA, 21 nt, Artificial Sequence
  Synthetic
aaggucucaaucgccgcgucg

SEQ ID NO: 113774 - RNA, 22 nt, Artificial Sequence
  Synthetic
gaaggucucaaucgccgcgucg

SEQ ID NO: 113775 - RNA, 23 nt, Artificial Sequence
  Synthetic
cgaaggucucaaucgccgcgucg
